United States Patent Application Publication US 2005/0244851 A1 - sequence listing, part 53

SEQ ID NO: 2056326 - DNA, 25 bp, Homo sapien
tatgacgaggtttgatgaatggctc

SEQ ID NO: 2056327 - DNA, 25 bp, Homo sapien
agcaggaaaccttgtaaatgatgtt

SEQ ID NO: 2056328 - DNA, 25 bp, Homo sapien
tgtttgcatgcactaaactgtgata

SEQ ID NO: 2056329 - DNA, 25 bp, Homo sapien
tgaatccgtgaacttccaactgaga

SEQ ID NO: 2056330 - DNA, 25 bp, Homo sapien
gctctggctgatccaagggcccaga

SEQ ID NO: 2056331 - DNA, 25 bp, Homo sapien
tgctctggctgatccaagggcccag

SEQ ID NO: 2056332 - DNA, 25 bp, Homo sapien
ctctggctgatccaagggcccagat

SEQ ID NO: 2056333 - DNA, 25 bp, Homo sapien
tgatgtggctccttcacactagaag

SEQ ID NO: 2056334 - DNA, 25 bp, Homo sapien
gctggtgcctctgtagaggtttgaa

SEQ ID NO: 2056335 - DNA, 25 bp, Homo sapien
gggtaaagggaacagctggtgcctc

SEQ ID NO: 2056336 - DNA, 25 bp, Homo sapien
gctccttcacactagaaggggtaaa

SEQ ID NO: 2056337 - DNA, 25 bp, Homo sapien
cagctggcctaatgacctctaacaa

SEQ ID NO: 2056338 - DNA, 25 bp, Homo sapien
tctaacaattcttctactttgagca

SEQ ID NO: 2056339 - DNA, 25 bp, Homo sapien
ttaagaacagctggcctaatgacct

SEQ ID NO: 2056340 - DNA, 25 bp, Homo sapien
ctgccacaacattgtggttaagaac

SEQ ID NO: 2056341 - DNA, 25 bp, Homo sapien
tgagcaatccacgtgttgttctgca

SEQ ID NO: 2056342 - DNA, 25 bp, Homo sapien
agagatgactcgttgggcagggagg

SEQ ID NO: 2056343 - DNA, 25 bp, Homo sapien
ccataattcttcagtgaacaggagg

SEQ ID NO: 2056344 - DNA, 25 bp, Homo sapien
tgtgatgaacaagttgtactgagca

SEQ ID NO: 2056345 - DNA, 25 bp, Homo sapien
ggtgttaacagtccatatctccatg

SEQ ID NO: 2056346 - DNA, 25 bp, Homo sapien
gcagtattctgcaccacgtgggtcc

SEQ ID NO: 2056347 - DNA, 25 bp, Homo sapien
cgtgggtcctgttcacctattatca

SEQ ID NO: 2056348 - DNA, 25 bp, Homo sapien
aattattccgcagtgtgtatcgcag

SEQ ID NO: 2056349 - DNA, 25 bp, Homo sapien
tcaaaggcatcaaacttccccaaga

SEQ ID NO: 2056350 - DNA, 25 bp, Homo sapien
ctagtcaaaggcatcaaacttcccc

SEQ ID NO: 2056351 - DNA, 25 bp, Homo sapien
gactgaagtttcacaccgaaaatta

SEQ ID NO: 2056352 - DNA, 25 bp, Homo sapien
acaccgaaaattaagacgataatgc

SEQ ID NO: 2056353 - DNA, 25 bp, Homo sapien
attagagcagaccttttcttgctgc

SEQ ID NO: 2056354 - DNA, 25 bp, Homo sapien
tctggattagagcagaccttttctt

SEQ ID NO: 2056355 - DNA, 25 bp, Homo sapien
ggatctggattagagcagacctttt

SEQ ID NO: 2056356 - DNA, 25 bp, Homo sapien
tggattagagcagaccttttcttgc

SEQ ID NO: 2056357 - DNA, 25 bp, Homo sapien
ttcttggcttcttgtgctagttccc

SEQ ID NO: 2056358 - DNA, 25 bp, Homo sapien
cttcttggcttcttgtgctagttcc

SEQ ID NO: 2056359 - DNA, 25 bp, Homo sapien
tccttcctgaagtaattgagaacag

SEQ ID NO: 2056360 - DNA, 25 bp, Homo sapien
ctgaagtaattgagaacaggaatct

SEQ ID NO: 2056361 - DNA, 25 bp, Homo sapien
tactgtatgctctgttccaatgcag

SEQ ID NO: 2056362 - DNA, 25 bp, Homo sapien
gccttcttatggtgggagcacacaa

SEQ ID NO: 2056363 - DNA, 25 bp, Homo sapien
tgcacagctcttagggatgccgttt

SEQ ID NO: 2056364 - DNA, 25 bp, Homo sapien
tgtgccacaggtgactcgatcctca

SEQ ID NO: 2056365 - DNA, 25 bp, Homo sapien
gctttctcatttacaatagggtggg

SEQ ID NO: 2056366 - DNA, 25 bp, Homo sapien
tggatgaatggtgatttggctgtca

SEQ ID NO: 2056367 - DNA, 25 bp, Homo sapien
caatagggtgggcaactttttgaca

SEQ ID NO: 2056368 - DNA, 25 bp, Homo sapien
cttgcctgttgcggccttcctggct

SEQ ID NO: 2056369 - DNA, 25 bp, Homo sapien
tgggttgaagatttggctcagtcaa

SEQ ID NO: 2056370 - DNA, 25 bp, Homo sapien
tagccacagcctgtcagcgtttcac

SEQ ID NO: 2056371 - DNA, 25 bp, Homo sapien
cactccccagaacatctagaggagg

SEQ ID NO: 2056372 - DNA, 25 bp, Homo sapien
tagaggaggtaaatcagaagtgagc

SEQ ID NO: 2056373 - DNA, 25 bp, Homo sapien
ctagagtaagttttgctatctttcc

SEQ ID NO: 2056374 - DNA, 25 bp, Homo sapien
ttttgcaaggcccattctctgtgaa

SEQ ID NO: 2056375 - DNA, 25 bp, Homo sapien
atggaaatgcaccacaaatcaacac

SEQ ID NO: 2056376 - DNA, 25 bp, Homo sapien
cacaaatcaacactgctggcctcat

SEQ ID NO: 2056377 - DNA, 25 bp, Homo sapien
tgtttgttccccagaatttcatgga

SEQ ID NO: 2056378 - DNA, 25 bp, Homo sapien
tacccatgggtctgaagttggcaaa

SEQ ID NO: 2056379 - DNA, 25 bp, Homo sapien
gccaggctacctgctagtcttagga

SEQ ID NO: 2056380 - DNA, 25 bp, Homo sapien
cctcattattttagcctgagtaggg

SEQ ID NO: 2056381 - DNA, 25 bp, Homo sapien
tctatcataaagttcagttactgct

SEQ ID NO: 2056382 - DNA, 25 bp, Homo sapien
cataactccaggaaatcagaagtgg

SEQ ID NO: 2056383 - DNA, 25 bp, Homo sapien
tgctattgctactttgccttccaaa

SEQ ID NO: 2056384 - DNA, 25 bp, Homo sapien
catgccatgcgtgtactatcagtga

SEQ ID NO: 2056385 - DNA, 25 bp, Homo sapien
ccaggcactcccattgaaagtggga

SEQ ID NO: 2056386 - DNA, 25 bp, Homo sapien
cactcccattgaaagtgggaatttt

SEQ ID NO: 2056387 - DNA, 25 bp, Homo sapien
ggcactcccattgaaagtgggaatt

SEQ ID NO: 2056388 - DNA, 25 bp, Homo sapien
tgaaagtgggaatttttcttggcca

SEQ ID NO: 2056389 - DNA, 25 bp, Homo sapien
ctgagaaacactgaaaaagagagac

SEQ ID NO: 2056390 - DNA, 25 bp, Homo sapien
cctgagaaacactgaaaaagagaga

SEQ ID NO: 2056391 - DNA, 25 bp, Homo sapien
tgagaaacactgaaaaagagagaca

SEQ ID NO: 2056392 - DNA, 25 bp, Homo sapien
ccagtaatcttctaagacgggtaga

SEQ ID NO: 2056393 - DNA, 25 bp, Homo sapien
gaaacagtgccagggtgaggtgagt

SEQ ID NO: 2056394 - DNA, 25 bp, Homo sapien
tcctgcatccacttttccagtaatc

SEQ ID NO: 2056395 - DNA, 25 bp, Homo sapien
gacgggtagagaagatgccaacaga

SEQ ID NO: 2056396 - DNA, 25 bp, Homo sapien
tgaaacaaggtaggcttcgcccttc

SEQ ID NO: 2056397 - DNA, 25 bp, Homo sapien
ggtctcattcagaacttcccaattc

SEQ ID NO: 2056398 - DNA, 25 bp, Homo sapien
ctgctttagctgtggccgtagagaa

SEQ ID NO: 2056399 - DNA, 25 bp, Homo sapien
caattcctggtacaaggattcttca

SEQ ID NO: 2056400 - DNA, 25 bp, Homo sapien
agctgtggccgtagagaaaatgttc

SEQ ID NO: 2056401 - DNA, 25 bp, Homo sapien
ctgaacactggcctggatgcactga

SEQ ID NO: 2056402 - DNA, 25 bp, Homo sapien
tgaacactggcctggatgcactgaa

SEQ ID NO: 2056403 - DNA, 25 bp, Homo sapien
gcactgaatagatgtatctttagat

SEQ ID NO: 2056404 - DNA, 25 bp, Homo sapien
gaatagatgtatctttagatttgtc

SEQ ID NO: 2056405 - DNA, 25 bp, Homo sapien
ttaccatggagtaaattatttgatg

SEQ ID NO: 2056406 - DNA, 25 bp, Homo sapien
ttatttgatgtcttgggtctatttc

SEQ ID NO: 2056407 - DNA, 25 bp, Homo sapien
gtcttgggtctatttctactcctga

SEQ ID NO: 2056408 - DNA, 25 bp, Homo sapien
tgggtctatttctactcctgaattt

SEQ ID NO: 2056409 - DNA, 25 bp, Homo sapien
gcttccatcctctgagctcaatggg

SEQ ID NO: 2056410 - DNA, 25 bp, Homo sapien
agctcgaaaaggcttccatcctctg

SEQ ID NO: 2056411 - DNA, 25 bp, Homo sapien
cagctcgaaaaggcttccatcctct

SEQ ID NO: 2056412 - DNA, 25 bp, Homo sapien
ggctggagtaccaagtgggcagtct

SEQ ID NO: 2056413 - DNA, 25 bp, Homo sapien
taccaagtgggcagtctgtaacatc

SEQ ID NO: 2056414 - DNA, 25 bp, Homo sapien
ttaataaatgtcaacaaagtaggct

SEQ ID NO: 2056415 - DNA, 25 bp, Homo sapien
catggactctgcattgccacattgc

SEQ ID NO: 2056416 - DNA, 25 bp, Homo sapien
cttctaacggccgaaagagtgtcat

SEQ ID NO: 2056417 - DNA, 25 bp, Homo sapien
aaatatggctcaggtgagtgggaat

SEQ ID NO: 2056418 - DNA, 25 bp, Homo sapien
catatctcacggttatgatgtcttc

SEQ ID NO: 2056419 - DNA, 25 bp, Homo sapien
tatggataatctattgaaggaggaa

SEQ ID NO: 2056420 - DNA, 25 bp, Homo sapien
gaattcagcttgaagctggctgaaa

SEQ ID NO: 2056421 - DNA, 25 bp, Homo sapien
gacatggttgaccaaaccactgcca

SEQ ID NO: 2056422 - DNA, 25 bp, Homo sapien
tggcttgtgctacttgaattcagct

SEQ ID NO: 2056423 - DNA, 25 bp, Homo sapien
gggtatcctgacttaattgatcatt

SEQ ID NO: 2056424 - DNA, 25 bp, Homo sapien
ctgtaaggcttgatgcaatggaaat

SEQ ID NO: 2056425 - DNA, 25 bp, Homo sapien
ggcttgatgcaatggaaatagccat

SEQ ID NO: 2056426 - DNA, 25 bp, Homo sapien
tgggtgatctgtatgttttagctgt

SEQ ID NO: 2056427 - DNA, 25 bp, Homo sapien
ctgtatgttttagctgtgagatgcc

SEQ ID NO: 2056428 - DNA, 25 bp, Homo sapien
gatttagcatttcccagtttcaccc

SEQ ID NO: 2056429 - DNA, 25 bp, Homo sapien
aatgatgaggccagatactctgaat

SEQ ID NO: 2056430 - DNA, 25 bp, Homo sapien
tagcatttcccagtttcaccccttc

SEQ ID NO: 2056431 - DNA, 25 bp, Homo sapien
tcaatctcctgtttgggaaccatca

SEQ ID NO: 2056432 - DNA, 25 bp, Homo sapien
tgtttgggaaccatcatactcctca

SEQ ID NO: 2056433 - DNA, 25 bp, Homo sapien
tcctgtttgggaaccatcatactcc

SEQ ID NO: 2056434 - DNA, 25 bp, Homo sapien
aatctcctgtttgggaaccatcata

SEQ ID NO: 2056435 - DNA, 25 bp, Homo sapien
tgctgtttcagacgcttgctccatg

SEQ ID NO: 2056436 - DNA, 25 bp, Homo sapien
catgtgggttttctgaatcagcaaa

SEQ ID NO: 2056437 - DNA, 25 bp, Homo sapien
tttcagacgcttgctccatgtgggt

SEQ ID NO: 2056438 - DNA, 25 bp, Homo sapien
tccatgtgggttttctgaatcagca

SEQ ID NO: 2056439 - DNA, 25 bp, Homo sapien
gctgtaatctctattatgaccatca

SEQ ID NO: 2056440 - DNA, 25 bp, Homo sapien
ggtctgatttgccttgtatccgcat

SEQ ID NO: 2056441 - DNA, 25 bp, Homo sapien
tggattcgtagaactccccatttgc

SEQ ID NO: 2056442 - DNA, 25 bp, Homo sapien
catcccctctgtggattcgtagaac

SEQ ID NO: 2056443 - DNA, 25 bp, Homo sapien
cctgtagtcctgctgaagaagtgct

SEQ ID NO: 2056444 - DNA, 25 bp, Homo sapien
gccatgggtaccaggaatgtgcctt

SEQ ID NO: 2056445 - DNA, 25 bp, Homo sapien
tcttcattctaaatcgacctggagg

SEQ ID NO: 2056446 - DNA, 25 bp, Homo sapien
taacataaccttggccacataggtg

SEQ ID NO: 2056447 - DNA, 25 bp, Homo sapien
tgatataggctactgcacactcagg

SEQ ID NO: 2056448 - DNA, 25 bp, Homo sapien
ctttgagcggaaccatttgcagacc

SEQ ID NO: 2056449 - DNA, 25 bp, Homo sapien
catgaagaacgtgataggagtcctc

SEQ ID NO: 2056450 - DNA, 25 bp, Homo sapien
tatcgaaaattgctccacgggaggt

SEQ ID NO: 2056451 - DNA, 25 bp, Homo sapien
tctgggccctccgggcgagcagctt

SEQ ID NO: 2056452 - DNA, 25 bp, Homo sapien
tttcactaggagtccgggattcgga

SEQ ID NO: 2056453 - DNA, 25 bp, Homo sapien
gatcccaggccacgaactgttttcc

SEQ ID NO: 2056454 - DNA, 25 bp, Homo sapien
agagaggtcgctcagggctcgctac

SEQ ID NO: 2056455 - DNA, 25 bp, Homo sapien
gggcgcggccatggagcagcagcgg

SEQ ID NO: 2056456 - DNA, 25 bp, Homo sapien
gggcgggcgcggccatggagcagca

SEQ ID NO: 2056457 - DNA, 25 bp, Homo sapien
gcgcggccatggagcagcagcggcg

SEQ ID NO: 2056458 - DNA, 25 bp, Homo sapien
cgcgggcgggcggcgacgggacgcg

SEQ ID NO: 2056459 - DNA, 25 bp, Homo sapien
gggtaatcatatagaccaggcacag

SEQ ID NO: 2056460 - DNA, 25 bp, Homo sapien
taaaagctggcgtgttgggtcccag

SEQ ID NO: 2056461 - DNA, 25 bp, Homo sapien
tgttgaatatactaagggccctatc

SEQ ID NO: 2056462 - DNA, 25 bp, Homo sapien
cctgattcagtaagtagagctcgag

SEQ ID NO: 2056463 - DNA, 25 bp, Homo sapien
cttttagcccgaaatgtcaaaagat

SEQ ID NO: 2056464 - DNA, 25 bp, Homo sapien
actgttccgtcatcaaattgtttcc

SEQ ID NO: 2056465 - DNA, 25 bp, Homo sapien
tttgacctctgtttggacccactgt

SEQ ID NO: 2056466 - DNA, 25 bp, Homo sapien
taagaacgctcattactataaacag

SEQ ID NO: 2056467 - DNA, 25 bp, Homo sapien
gcagagtaaccagcaaaaactgtgt

SEQ ID NO: 2056468 - DNA, 25 bp, Homo sapien
cactctggaagtggattagaactca

SEQ ID NO: 2056469 - DNA, 25 bp, Homo sapien
tccgttggacacttaggacagccct

SEQ ID NO: 2056470 - DNA, 25 bp, Homo sapien
aattctagatgaggagtacagggtc

SEQ ID NO: 2056471 - DNA, 25 bp, Homo sapien
tccataataccccagtggatctcgc

SEQ ID NO: 2056472 - DNA, 25 bp, Homo sapien
tggatctcgccctatgaaggcaagg

SEQ ID NO: 2056473 - DNA, 25 bp, Homo sapien
tccctgtatatcttgagtctgcatt

SEQ ID NO: 2056474 - DNA, 25 bp, Homo sapien
gctgactacacaacctctagggcac

SEQ ID NO: 2056475 - DNA, 25 bp, Homo sapien
gacccacagcgcctttcttgactgc

SEQ ID NO: 2056476 - DNA, 25 bp, Homo sapien
ccctggctgtgggtaaactccagca

SEQ ID NO: 2056477 - DNA, 25 bp, Homo sapien
ttcttgactgcccatagccgtatcc

SEQ ID NO: 2056478 - DNA, 25 bp, Homo sapien
gctgtgggtaaactccagcactgca

SEQ ID NO: 2056479 - DNA, 25 bp, Homo sapien
agagcccagggtcaccaaaagctgc

SEQ ID NO: 2056480 - DNA, 25 bp, Homo sapien
tcagagcccagggtcaccaaaagct

SEQ ID NO: 2056481 - DNA, 25 bp, Homo sapien
tcaccaaaagctgcagatcccagag

SEQ ID NO: 2056482 - DNA, 25 bp, Homo sapien
gggtcaccaaaagctgcagatccca

SEQ ID NO: 2056483 - DNA, 25 bp, Homo sapien
ctctactgagtctgagaaagatgtc

SEQ ID NO: 2056484 - DNA, 25 bp, Homo sapien
aacagtgggctctactgagtctgag

SEQ ID NO: 2056485 - DNA, 25 bp, Homo sapien
gtgggctctactgagtctgagaaag

SEQ ID NO: 2056486 - DNA, 25 bp, Homo sapien
cagaacagtgggctctactgagtct

SEQ ID NO: 2056487 - DNA, 25 bp, Homo sapien
tgtattcgggcaaatcaggttcaga

SEQ ID NO: 2056488 - DNA, 25 bp, Homo sapien
ggcccagtgtattcgggcaaatcag

SEQ ID NO: 2056489 - DNA, 25 bp, Homo sapien
tgaaaggcccagtgtattcgggcaa

SEQ ID NO: 2056490 - DNA, 25 bp, Homo sapien
gaagtggaggccacgcgagagctga

SEQ ID NO: 2056491 - DNA, 25 bp, Homo sapien
gaaggtaaaaactgcatccgagaga

SEQ ID NO: 2056492 - DNA, 25 bp, Homo sapien
agttcagatgaccttttccgagaag

SEQ ID NO: 2056493 - DNA, 25 bp, Homo sapien
ccactggtgtcagaactgctgcaga

SEQ ID NO: 2056494 - DNA, 25 bp, Homo sapien
tatgggcggcaccaggatttcaagg

SEQ ID NO: 2056495 - DNA, 25 bp, Homo sapien
ccaattttagacttgcagcagattc

SEQ ID NO: 2056496 - DNA, 25 bp, Homo sapien
tcccaattttagacttgcagcagat

SEQ ID NO: 2056497 - DNA, 25 bp, Homo sapien
tttgctcccaattttagacttgcag

SEQ ID NO: 2056498 - DNA, 25 bp, Homo sapien
gctcccaattttagacttgcagcag

SEQ ID NO: 2056499 - DNA, 25 bp, Homo sapien
tgcagagcagcagtattcgggtgct

SEQ ID NO: 2056500 - DNA, 25 bp, Homo sapien
gatgaacaaaattcgggagtacgct

SEQ ID NO: 2056501 - DNA, 25 bp, Homo sapien
cacgtgctctgtggatgggatgaac

SEQ ID NO: 2056502 - DNA, 25 bp, Homo sapien
tcttccagtggtgagcatcacgtgc

SEQ ID NO: 2056503 - DNA, 25 bp, Homo sapien
ccccaagaattgtggcgtctgcgaa

SEQ ID NO: 2056504 - DNA, 25 bp, Homo sapien
ccatgagccgtgagcactgtcttcc

SEQ ID NO: 2056505 - DNA, 25 bp, Homo sapien
caggaggtatgttttcaatcagcag

SEQ ID NO: 2056506 - DNA, 25 bp, Homo sapien
gcctctcgattttacccatagtggt

SEQ ID NO: 2056507 - DNA, 25 bp, Homo sapien
agggtcaacataggccaccaccatc

SEQ ID NO: 2056508 - DNA, 25 bp, Homo sapien
ttaaatgtgatatgcgttattagct

SEQ ID NO: 2056509 - DNA, 25 bp, Homo sapien
gattagggtcaacataggccaccac

SEQ ID NO: 2056510 - DNA, 25 bp, Homo sapien
tgtgatatgcgttattagcttcatg

SEQ ID NO: 2056511 - DNA, 25 bp, Homo sapien
catgtgaggttcatcatggccatca

SEQ ID NO: 2056512 - DNA, 25 bp, Homo sapien
cactctagactattgatttcacctt

SEQ ID NO: 2056513 - DNA, 25 bp, Homo sapien
cagtggcctgctgcatattgagctg

SEQ ID NO: 2056514 - DNA, 25 bp, Homo sapien
gcaatatagagaactgtgtggccct

SEQ ID NO: 2056515 - DNA, 25 bp, Homo sapien
gcttttccaaaggttgactctcctg

SEQ ID NO: 2056516 - DNA, 25 bp, Homo sapien
cttttccaaaggttgactctcctgg

SEQ ID NO: 2056517 - DNA, 25 bp, Homo sapien
cattttgaatgtcacagttatgcat

SEQ ID NO: 2056518 - DNA, 25 bp, Homo sapien
aatgtcacagttatgcatgctcctg

SEQ ID NO: 2056519 - DNA, 25 bp, Homo sapien
ttttgaatgtcacagttatgcatgc

SEQ ID NO: 2056520 - DNA, 25 bp, Homo sapien
tgaatgtcacagttatgcatgctcc

SEQ ID NO: 2056521 - DNA, 25 bp, Homo sapien
ccctcatctggtggatagagttgca

SEQ ID NO: 2056522 - DNA, 25 bp, Homo sapien
tttccccaggcttctatgcaggcaa

SEQ ID NO: 2056523 - DNA, 25 bp, Homo sapien
tgactggttcctggcccggcaccat

SEQ ID NO: 2056524 - DNA, 25 bp, Homo sapien
tggcccggcaccattccgcgtatgt

SEQ ID NO: 2056525 - DNA, 25 bp, Homo sapien
gaccattgttccatctccttgctga

SEQ ID NO: 2056526 - DNA, 25 bp, Homo sapien
tttccagtccctagacttgtcagcc

SEQ ID NO: 2056527 - DNA, 25 bp, Homo sapien
tggatacaaatgtctgagtgctggt

SEQ ID NO: 2056528 - DNA, 25 bp, Homo sapien
tccccttcgttatctcttgattgag

SEQ ID NO: 2056529 - DNA, 25 bp, Homo sapien
ggagtacaggactaggagatcccca

SEQ ID NO: 2056530 - DNA, 25 bp, Homo sapien
tcatgacctcctactcaactgtggg

SEQ ID NO: 2056531 - DNA, 25 bp, Homo sapien
tggctgtgcagtttcgggctcatca

SEQ ID NO: 2056532 - DNA, 25 bp, Homo sapien
gaggcttggcctgcacggaaatatg

SEQ ID NO: 2056533 - DNA, 25 bp, Homo sapien
tcactcattgctacttggcacatcg

SEQ ID NO: 2056534 - DNA, 25 bp, Homo sapien
ggcacatcgaacaccaagtcttctt

SEQ ID NO: 2056535 - DNA, 25 bp, Homo sapien
gcctgagtctccttcggtagctata

SEQ ID NO: 2056536 - DNA, 25 bp, Homo sapien
tgctacttggcacatcgaacaccaa

SEQ ID NO: 2056537 - DNA, 25 bp, Homo sapien
ggaagataacccaggttgtcataga

SEQ ID NO: 2056538 - DNA, 25 bp, Homo sapien
tctctttagcagtccacctctctga

SEQ ID NO: 2056539 - DNA, 25 bp, Homo sapien
tctgatctcatctcaaatccagagc

SEQ ID NO: 2056540 - DNA, 25 bp, Homo sapien
gagccatcctgttccggaagataac

SEQ ID NO: 2056541 - DNA, 25 bp, Homo sapien
ccaaaaggagcacttcctacgttgt

SEQ ID NO: 2056542 - DNA, 25 bp, Homo sapien
gaatgttcttctcagcccttcagtc

SEQ ID NO: 2056543 - DNA, 25 bp, Homo sapien
ccaagcagacatgcctataaagtca

SEQ ID NO: 2056544 - DNA, 25 bp, Homo sapien
tgatttagtttacccagaatccaaa

SEQ ID NO: 2056545 - DNA, 25 bp, Homo sapien
tcataccttatttaattcctggact

SEQ ID NO: 2056546 - DNA, 25 bp, Homo sapien
caacctcggccttttaaatagctgg

SEQ ID NO: 2056547 - DNA, 25 bp, Homo sapien
tgccattgcatctggcttggtaatg

SEQ ID NO: 2056548 - DNA, 25 bp, Homo sapien
taatggtgctttaacatagtgtcct

SEQ ID NO: 2056549 - DNA, 25 bp, Homo sapien
catagaaattagctgtaggaggccc

SEQ ID NO: 2056550 - DNA, 25 bp, Homo sapien
catacccagggcttgtagaattagg

SEQ ID NO: 2056551 - DNA, 25 bp, Homo sapien
tcatgctttaaagacctgtgtggca

SEQ ID NO: 2056552 - DNA, 25 bp, Homo sapien
aagcatctgactgggtggcctgagc

SEQ ID NO: 2056553 - DNA, 25 bp, Homo sapien
ggagttgtaggagagtgctggaggc

SEQ ID NO: 2056554 - DNA, 25 bp, Homo sapien
tgtctgccaggttgaatctgcaggt

SEQ ID NO: 2056555 - DNA, 25 bp, Homo sapien
cgtgatagagtccaagtcctatagg

SEQ ID NO: 2056556 - DNA, 25 bp, Homo sapien
tggttctgttccgtgatagagtcca

SEQ ID NO: 2056557 - DNA, 25 bp, Homo sapien
cagctgcctgctgaaataaatgctg

SEQ ID NO: 2056558 - DNA, 25 bp, Homo sapien
catcagcaaaagaaggggcgtagcc

SEQ ID NO: 2056559 - DNA, 25 bp, Homo sapien
tagcctttccgtgaatgagtcctca

SEQ ID NO: 2056560 - DNA, 25 bp, Homo sapien
gctgaaataaatgctgcttttacaa

SEQ ID NO: 2056561 - DNA, 25 bp, Homo sapien
tgcggggactacgaacattcttcaa

SEQ ID NO: 2056562 - DNA, 25 bp, Homo sapien
aagtcttcttggttgaggaggaacg

SEQ ID NO: 2056563 - DNA, 25 bp, Homo sapien
tctgttgaacgatgaggtgcaccat

SEQ ID NO: 2056564 - DNA, 25 bp, Homo sapien
aggaacgtgggtctctgttgaacga

SEQ ID NO: 2056565 - DNA, 25 bp, Homo sapien
ttagcggttaaccagtgcccttcca

SEQ ID NO: 2056566 - DNA, 25 bp, Homo sapien
catcataacacgattatatttagcg

SEQ ID NO: 2056567 - DNA, 25 bp, Homo sapien
cacgattatatttagcggttaacca

SEQ ID NO: 2056568 - DNA, 25 bp, Homo sapien
tatatttagcggttaaccagtgccc

SEQ ID NO: 2056569 - DNA, 25 bp, Homo sapien
gcatatgcatctgtgttatgtgtct

SEQ ID NO: 2056570 - DNA, 25 bp, Homo sapien
cataaatcttaaggctgcagctctc

SEQ ID NO: 2056571 - DNA, 25 bp, Homo sapien
tatgcatctgtgttatgtgtctgtg

SEQ ID NO: 2056572 - DNA, 25 bp, Homo sapien
gcataaatcttaaggctgcagctct

SEQ ID NO: 2056573 - DNA, 25 bp, Homo sapien
tgaggggaggtaacagaagtcctgt

SEQ ID NO: 2056574 - DNA, 25 bp, Homo sapien
cattgaagagtattaaggatgaggg

SEQ ID NO: 2056575 - DNA, 25 bp, Homo sapien
ggatgaggggaggtaacagaagtcc

SEQ ID NO: 2056576 - DNA, 25 bp, Homo sapien
gccattgaagagtattaaggatgag

SEQ ID NO: 2056577 - DNA, 25 bp, Homo sapien
agtttggttttgctgtgatctgttc

SEQ ID NO: 2056578 - DNA, 25 bp, Homo sapien
aggtgtttgtccttggttcttccag

SEQ ID NO: 2056579 - DNA, 25 bp, Homo sapien
cgaggactggggcagtatgggacag

SEQ ID NO: 2056580 - DNA, 25 bp, Homo sapien
gggcagtatgggacaggtgtttgtc

SEQ ID NO: 2056581 - DNA, 25 bp, Homo sapien
acacatctcctctagtcacactaga

SEQ ID NO: 2056582 - DNA, 25 bp, Homo sapien
agtcgtgggtgtatacagagacata

SEQ ID NO: 2056583 - DNA, 25 bp, Homo sapien
tcacactagaggaattcagctgaat

SEQ ID NO: 2056584 - DNA, 25 bp, Homo sapien
gtcgtgggtgtatacagagacatat

SEQ ID NO: 2056585 - DNA, 25 bp, Homo sapien
ttctcttgaactgactgggtgggcc

SEQ ID NO: 2056586 - DNA, 25 bp, Homo sapien
tctcttgaactgactgggtgggcca

SEQ ID NO: 2056587 - DNA, 25 bp, Homo sapien
ctcttgaactgactgggtgggccat

SEQ ID NO: 2056588 - DNA, 25 bp, Homo sapien
cattctcttgaactgactgggtggg

SEQ ID NO: 2056589 - DNA, 25 bp, Homo sapien
agggctcgttcccactgtggcttgt

SEQ ID NO: 2056590 - DNA, 25 bp, Homo sapien
ttctcttgctgacccatgcttggtg

SEQ ID NO: 2056591 - DNA, 25 bp, Homo sapien
gtttccacaattctcagggctcgtt

SEQ ID NO: 2056592 - DNA, 25 bp, Homo sapien
gacccatgcttggtggagtctccct

SEQ ID NO: 2056593 - DNA, 25 bp, Homo sapien
tgaagatgatcccaggcttaaggat

SEQ ID NO: 2056594 - DNA, 25 bp, Homo sapien
caggcttaaggattcttctaagtcc

SEQ ID NO: 2056595 - DNA, 25 bp, Homo sapien
ctgtaatgaagatgatcccaggctt

SEQ ID NO: 2056596 - DNA, 25 bp, Homo sapien
gatcccaggcttaaggattcttcta

SEQ ID NO: 2056597 - DNA, 25 bp, Homo sapien
tgtgtacagtaagcacaggataaac

SEQ ID NO: 2056598 - DNA, 25 bp, Homo sapien
tagatggacagataaaggaggactc

SEQ ID NO: 2056599 - DNA, 25 bp, Homo sapien
tagtacagagggatgtgattgcacc

SEQ ID NO: 2056600 - DNA, 25 bp, Homo sapien
ggaggactcagacttgatatttgct

SEQ ID NO: 2056601 - DNA, 25 bp, Homo sapien
tccatgagggttctcggtgactgaa

SEQ ID NO: 2056602 - DNA, 25 bp, Homo sapien
caaggcggcatgtgctaagtgcctc

SEQ ID NO: 2056603 - DNA, 25 bp, Homo sapien
aattaggtggacagctcagcaaggc

SEQ ID NO: 2056604 - DNA, 25 bp, Homo sapien
cagggaggcttttcaaggcacacac

SEQ ID NO: 2056605 - DNA, 25 bp, Homo sapien
acttgtctagaacttttccacatgg

SEQ ID NO: 2056606 - DNA, 25 bp, Homo sapien
ggagtgcatgaaaggtgctgtcctt

SEQ ID NO: 2056607 - DNA, 25 bp, Homo sapien
gcaaagaaacgtaactgaaatggcc

SEQ ID NO: 2056608 - DNA, 25 bp, Homo sapien
agactagggcctcctgaatgcacca

SEQ ID NO: 2056609 - DNA, 25 bp, Homo sapien
catgcctgtctgcctagtgccttac

SEQ ID NO: 2056610 - DNA, 25 bp, Homo sapien
tcatgcctgtctgcctagtgcctta

SEQ ID NO: 2056611 - DNA, 25 bp, Homo sapien
tattacattagcatctccatccttt

SEQ ID NO: 2056612 - DNA, 25 bp, Homo sapien
tccagggtcagctcttggtcagtac

SEQ ID NO: 2056613 - DNA, 25 bp, Homo sapien
ggaatccagggtcagctcttggtca

SEQ ID NO: 2056614 - DNA, 25 bp, Homo sapien
atctccatcctttcctccgtgcctt

SEQ ID NO: 2056615 - DNA, 25 bp, Homo sapien
cctctttctgagtgccaacagctgc

SEQ ID NO: 2056616 - DNA, 25 bp, Homo sapien
ctgagtgccaacagctgcctgcccc

SEQ ID NO: 2056617 - DNA, 25 bp, Homo sapien
ttctgagtgccaacagctgcctgcc

SEQ ID NO: 2056618 - DNA, 25 bp, Homo sapien
ctttctgagtgccaacagctgcctg

SEQ ID NO: 2056619 - DNA, 25 bp, Homo sapien
tggctactggaataaacaggctgta

SEQ ID NO: 2056620 - DNA, 25 bp, Homo sapien
caggctgtagcgtgtgcctacgggc

SEQ ID NO: 2056621 - DNA, 25 bp, Homo sapien
cagaggctggctactggaataaaca

SEQ ID NO: 2056622 - DNA, 25 bp, Homo sapien
tcaaaggatcagaggctggctactg

SEQ ID NO: 2056623 - DNA, 25 bp, Homo sapien
tggctggcagtggtaccaatgtccc

SEQ ID NO: 2056624 - DNA, 25 bp, Homo sapien
tggcagtggtaccaatgtccctggg

SEQ ID NO: 2056625 - DNA, 25 bp, Homo sapien
atggctggcagtggtaccaatgtcc

SEQ ID NO: 2056626 - DNA, 25 bp, Homo sapien
gctggcagtggtaccaatgtccctg

SEQ ID NO: 2056627 - DNA, 25 bp, Homo sapien
gttcattgagttctgcctggcttta

SEQ ID NO: 2056628 - DNA, 25 bp, Homo sapien
ggctttatccctttcggatgcccac

SEQ ID NO: 2056629 - DNA, 25 bp, Homo sapien
tgcctggctttatccctttcggatg

SEQ ID NO: 2056630 - DNA, 25 bp, Homo sapien
tcattgagttctgcctggctttatc

SEQ ID NO: 2056631 - DNA, 25 bp, Homo sapien
agagcttttgacttcggtgctcaga

SEQ ID NO: 2056632 - DNA, 25 bp, Homo sapien
tgccaaattggctccactaagctga

SEQ ID NO: 2056633 - DNA, 25 bp, Homo sapien
agatactctctgaaacaagcacctt

SEQ ID NO: 2056634 - DNA, 25 bp, Homo sapien
tgtaatcatgattaattgctccaga

SEQ ID NO: 2056635 - DNA, 25 bp, Homo sapien
tggtcccaatggatttgtggtctcc

SEQ ID NO: 2056636 - DNA, 25 bp, Homo sapien
tctgtggtcccaatggatttgtggt

SEQ ID NO: 2056637 - DNA, 25 bp, Homo sapien
cttctgtggtcccaatggatttgtg

SEQ ID NO: 2056638 - DNA, 25 bp, Homo sapien
cccaatggatttgtggtctccttca

SEQ ID NO: 2056639 - DNA, 25 bp, Homo sapien
tttggaggcttggttaagactgcag

SEQ ID NO: 2056640 - DNA, 25 bp, Homo sapien
cagcctctactgcattttttggata

SEQ ID NO: 2056641 - DNA, 25 bp, Homo sapien
ctgcaggcagcctctactgcatttt

SEQ ID NO: 2056642 - DNA, 25 bp, Homo sapien
gggccctcatagtggaacagcttgc

SEQ ID NO: 2056643 - DNA, 25 bp, Homo sapien
aattccccatcagctgtaataacgc

SEQ ID NO: 2056644 - DNA, 25 bp, Homo sapien
attaaatggctgagtattatttcaa

SEQ ID NO: 2056645 - DNA, 25 bp, Homo sapien
gcagcatcagaaattccccatcagc

SEQ ID NO: 2056646 - DNA, 25 bp, Homo sapien
catcagctgtaataacgccaattac

SEQ ID NO: 2056647 - DNA, 25 bp, Homo sapien
aatcaggcatcggactcttgcaggg

SEQ ID NO: 2056648 - DNA, 25 bp, Homo sapien
gaatgtccttcgctagatccagatt

SEQ ID NO: 2056649 - DNA, 25 bp, Homo sapien
tccatcgtgatgtgtttagtgcaat

SEQ ID NO: 2056650 - DNA, 25 bp, Homo sapien
tcttttgcacctaaaggcttagagc

SEQ ID NO: 2056651 - DNA, 25 bp, Homo sapien
cttataatggggctttgcaccagcc

SEQ ID NO: 2056652 - DNA, 25 bp, Homo sapien
ttataatggggctttgcaccagcca

SEQ ID NO: 2056653 - DNA, 25 bp, Homo sapien
taagattgcatttgcgctccagagt

SEQ ID NO: 2056654 - DNA, 25 bp, Homo sapien
gtggccacataactcacttgggctg

SEQ ID NO: 2056655 - DNA, 25 bp, Homo sapien
gccttgttgcagaaaagcacgatag

SEQ ID NO: 2056656 - DNA, 25 bp, Homo sapien
catgtgagtcgaacatatggaggct

SEQ ID NO: 2056657 - DNA, 25 bp, Homo sapien
tgctaatgggggaagacaatctgag

SEQ ID NO: 2056658 - DNA, 25 bp, Homo sapien
tctagtgctaatgggggaagacaat

SEQ ID NO: 2056659 - DNA, 25 bp, Homo sapien
ggaagacagctctagtgctaatggg

SEQ ID NO: 2056660 - DNA, 25 bp, Homo sapien
gggaagacaatctgagctttgggct

SEQ ID NO: 2056661 - DNA, 25 bp, Homo sapien
ctttccatagagagatgcctgtttc

SEQ ID NO: 2056662 - DNA, 25 bp, Homo sapien
tctggatcccacagcagtgacccat

SEQ ID NO: 2056663 - DNA, 25 bp, Homo sapien
ttctggatcccacagcagtgaccca

SEQ ID NO: 2056664 - DNA, 25 bp, Homo sapien
gagatgcctgtttcattgttcctcc

SEQ ID NO: 2056665 - DNA, 25 bp, Homo sapien
cccgccgtctgggttactggcatca

SEQ ID NO: 2056666 - DNA, 25 bp, Homo sapien
gtaaccatcatacacattgctgctg

SEQ ID NO: 2056667 - DNA, 25 bp, Homo sapien
ttgacaatgccgagacatgcctctt

SEQ ID NO: 2056668 - DNA, 25 bp, Homo sapien
gaggttctcactaaaaacatgccga

SEQ ID NO: 2056669 - DNA, 25 bp, Homo sapien
tgatgagtcatcttggtctaatatg

SEQ ID NO: 2056670 - DNA, 25 bp, Homo sapien
gtatctgtgatgagtcatcttggtc

SEQ ID NO: 2056671 - DNA, 25 bp, Homo sapien
tctgtgatgagtcatcttggtctaa

SEQ ID NO: 2056672 - DNA, 25 bp, Homo sapien
tgtgatgagtcatcttggtctaata

SEQ ID NO: 2056673 - DNA, 25 bp, Homo sapien
gatttccgattttcaggctggctgg

SEQ ID NO: 2056674 - DNA, 25 bp, Homo sapien
ttgatgctactcttagtccaaacaa

SEQ ID NO: 2056675 - DNA, 25 bp, Homo sapien
tggagtttgtgggaccaggaatgct

SEQ ID NO: 2056676 - DNA, 25 bp, Homo sapien
tccaaatcatccttcttattgatgc

SEQ ID NO: 2056677 - DNA, 25 bp, Homo sapien
gattttgccaaataagccgcttccc

SEQ ID NO: 2056678 - DNA, 25 bp, Homo sapien
gacctcatcagtgcatggctgctgt

SEQ ID NO: 2056679 - DNA, 25 bp, Homo sapien
cagcctgccaattcattgacttcac

SEQ ID NO: 2056680 - DNA, 25 bp, Homo sapien
tgtccagcctgccaattcattgact

SEQ ID NO: 2056681 - DNA, 25 bp, Homo sapien
ttggcttcagcactcaaagcccgtg

SEQ ID NO: 2056682 - DNA, 25 bp, Homo sapien
tggcagggctctgggatactgggct

SEQ ID NO: 2056683 - DNA, 25 bp, Homo sapien
gcttgtcctcaagcctgccagtgtc

SEQ ID NO: 2056684 - DNA, 25 bp, Homo sapien
tcaaggggatgactctactactcac

SEQ ID NO: 2056685 - DNA, 25 bp, Homo sapien
cacaagatagcagatgcccatgaga

SEQ ID NO: 2056686 - DNA, 25 bp, Homo sapien
tcaaaatgtggcagtaaccagagcc

SEQ ID NO: 2056687 - DNA, 25 bp, Homo sapien
caaaatgtggcagtaaccagagcca

SEQ ID NO: 2056688 - DNA, 25 bp, Homo sapien
gacacatgccacactatcttcagca

SEQ ID NO: 2056689 - DNA, 25 bp, Homo sapien
gacagtccacaagtgacacatgcca

SEQ ID NO: 2056690 - DNA, 25 bp, Homo sapien
taaagacggaagacagtccacaagt

SEQ ID NO: 2056691 - DNA, 25 bp, Homo sapien
tcctctcagaataaagacggaagac

SEQ ID NO: 2056692 - DNA, 25 bp, Homo sapien
aacacagaaagggatgcctgtctcc

SEQ ID NO: 2056693 - DNA, 25 bp, Homo sapien
cttgccagagccatccaaggacacg

SEQ ID NO: 2056694 - DNA, 25 bp, Homo sapien
ccaaggacacgcagatagactccat

SEQ ID NO: 2056695 - DNA, 25 bp, Homo sapien
ttgccagagccatccaaggacacgc

SEQ ID NO: 2056696 - DNA, 25 bp, Homo sapien
aaatgcaagttgatactggtatctg

SEQ ID NO: 2056697 - DNA, 25 bp, Homo sapien
tgaaataagctgcatgttgtaaatg

SEQ ID NO: 2056698 - DNA, 25 bp, Homo sapien
tgttgtaaatgcaagttgatactgg

SEQ ID NO: 2056699 - DNA, 25 bp, Homo sapien
tcagtgaaataagctgcatgttgta

SEQ ID NO: 2056700 - DNA, 25 bp, Homo sapien
tgaggtcaacagagtagagcaggca

SEQ ID NO: 2056701 - DNA, 25 bp, Homo sapien
gtcaacagagtagagcaggcaagtc

SEQ ID NO: 2056702 - DNA, 25 bp, Homo sapien
gagtagagcaggcaagtcccaagag

SEQ ID NO: 2056703 - DNA, 25 bp, Homo sapien
gtagagcaggcaagtcccaagagct

SEQ ID NO: 2056704 - DNA, 25 bp, Homo sapien
gttgggcagtgagtcaataagaaga

SEQ ID NO: 2056705 - DNA, 25 bp, Homo sapien
aagttgggcagtgagtcaataagaa

SEQ ID NO: 2056706 - DNA, 25 bp, Homo sapien
tgggcagtgagtcaataagaagatg

SEQ ID NO: 2056707 - DNA, 25 bp, Homo sapien
ttgggcagtgagtcaataagaagat

SEQ ID NO: 2056708 - DNA, 25 bp, Homo sapien
catcccatacatctgaacagggtgt

SEQ ID NO: 2056709 - DNA, 25 bp, Homo sapien
tgaggctacatcacagtcatcccat

SEQ ID NO: 2056710 - DNA, 25 bp, Homo sapien
gaggctacatcacagtcatcccata

SEQ ID NO: 2056711 - DNA, 25 bp, Homo sapien
atgcttttcaaagcgtacttcctta

SEQ ID NO: 2056712 - DNA, 25 bp, Homo sapien
tcaaaacccaacgtgaccaagccat

SEQ ID NO: 2056713 - DNA, 25 bp, Homo sapien
gttgcttttccactcgacagccaag

SEQ ID NO: 2056714 - DNA, 25 bp, Homo sapien
ttttccactcgacagccaaggaaat

SEQ ID NO: 2056715 - DNA, 25 bp, Homo sapien
atcaaaacccaacgtgaccaagcca

SEQ ID NO: 2056716 - DNA, 25 bp, Homo sapien
aagagaacttgaatggagcgtgaat

SEQ ID NO: 2056717 - DNA, 25 bp, Homo sapien
agaacttgaatggagcgtgaatgtc

SEQ ID NO: 2056718 - DNA, 25 bp, Homo sapien
gaaagagaacttgaatggagcgtga

SEQ ID NO: 2056719 - DNA, 25 bp, Homo sapien
gagaacttgaatggagcgtgaatgt

SEQ ID NO: 2056720 - DNA, 25 bp, Homo sapien
ttttaatgttcgcacttctctggcc

SEQ ID NO: 2056721 - DNA, 25 bp, Homo sapien
agagaggccctcttccgttttaatg

SEQ ID NO: 2056722 - DNA, 25 bp, Homo sapien
tgattaagaacctgtgaatagggta

SEQ ID NO: 2056723 - DNA, 25 bp, Homo sapien
aattttcggatccaagaagagaggc

SEQ ID NO: 2056724 - DNA, 25 bp, Homo sapien
tagagatggaatttaggcttcaatt

SEQ ID NO: 2056725 - DNA, 25 bp, Homo sapien
tgtggggaacattcattgaccattg

SEQ ID NO: 2056726 - DNA, 25 bp, Homo sapien
tctacagtcttgtcaattaattgcc

SEQ ID NO: 2056727 - DNA, 25 bp, Homo sapien
gaccattgaccattcactacttaca

SEQ ID NO: 2056728 - DNA, 25 bp, Homo sapien
gggacagcttgatatcctaaaacta

SEQ ID NO: 2056729 - DNA, 25 bp, Homo sapien
tatccagcaccccaagaagcattgt

SEQ ID NO: 2056730 - DNA, 25 bp, Homo sapien
accccaagaagcattgttaggtgtt

SEQ ID NO: 2056731 - DNA, 25 bp, Homo sapien
ctgggacagcttgatatcctaaaac

SEQ ID NO: 2056732 - DNA, 25 bp, Homo sapien
tacagtccgtattaaccctgggctg

SEQ ID NO: 2056733 - DNA, 25 bp, Homo sapien
ctcgcatttgagatatgaagctctg

SEQ ID NO: 2056734 - DNA, 25 bp, Homo sapien
gaagctctgacattcaagaagctcc

SEQ ID NO: 2056735 - DNA, 25 bp, Homo sapien
taagtccccttttgcacaaggccca

SEQ ID NO: 2056736 - DNA, 25 bp, Homo sapien
tactcaccagatgtgttctttctga

SEQ ID NO: 2056737 - DNA, 25 bp, Homo sapien
ccccatggcattgaaaaggtttcct

SEQ ID NO: 2056738 - DNA, 25 bp, Homo sapien
ccagccctgaaatggtccttaacct

SEQ ID NO: 2056739 - DNA, 25 bp, Homo sapien
tctttctgatcccagatagagctca

SEQ ID NO: 2056740 - DNA, 25 bp, Homo sapien
gccaatgtggccgataaacatgggt

SEQ ID NO: 2056741 - DNA, 25 bp, Homo sapien
ccaatgtggccgataaacatgggtg

SEQ ID NO: 2056742 - DNA, 25 bp, Homo sapien
cagaggccaatgtggccgataaaca

SEQ ID NO: 2056743 - DNA, 25 bp, Homo sapien
aggccaatgtggccgataaacatgg

SEQ ID NO: 2056744 - DNA, 25 bp, Homo sapien
tcagaaccactcagtgaatctacat

SEQ ID NO: 2056745 - DNA, 25 bp, Homo sapien
catgtgcccccttttggttgcttct

SEQ ID NO: 2056746 - DNA, 25 bp, Homo sapien
attttaaagcatgtgcccccttttg

SEQ ID NO: 2056747 - DNA, 25 bp, Homo sapien
tctacatcggcatagagaagaataa

SEQ ID NO: 2056748 - DNA, 25 bp, Homo sapien
tggcttcctggagcagtcgcctcag

SEQ ID NO: 2056749 - DNA, 25 bp, Homo sapien
cttggcttcctggagcagtcgcctc

SEQ ID NO: 2056750 - DNA, 25 bp, Homo sapien
gcttcctggagcagtcgcctcaggg

SEQ ID NO: 2056751 - DNA, 25 bp, Homo sapien
tcagggggccagagccagagctcca

SEQ ID NO: 2056752 - DNA, 25 bp, Homo sapien
ccggggccagattgtcaatacagca

SEQ ID NO: 2056753 - DNA, 25 bp, Homo sapien
cagattgtcaatacagcaaggctct

SEQ ID NO: 2056754 - DNA, 25 bp, Homo sapien
ttgtcaatacagcaaggctctccat

SEQ ID NO: 2056755 - DNA, 25 bp, Homo sapien
gggccagattgtcaatacagcaagg

SEQ ID NO: 2056756 - DNA, 25 bp, Homo sapien
ctacaaggtacttaggagaagagga

SEQ ID NO: 2056757 - DNA, 25 bp, Homo sapien
gaacttgtggggtggagttcaggca

SEQ ID NO: 2056758 - DNA, 25 bp, Homo sapien
agaggaacttgtggggtggagttca

SEQ ID NO: 2056759 - DNA, 25 bp, Homo sapien
gagaagaggaacttgtggggtggag

SEQ ID NO: 2056760 - DNA, 25 bp, Homo sapien
tgtccacgtgtaggcctgacagtga

SEQ ID NO: 2056761 - DNA, 25 bp, Homo sapien
gtcaggcactgaaaaactacccatg

SEQ ID NO: 2056762 - DNA, 25 bp, Homo sapien
tgtggagtcacctctaggagtgctt

SEQ ID NO: 2056763 - DNA, 25 bp, Homo sapien
gatgaaactgctaaactgactctca

SEQ ID NO: 2056764 - DNA, 25 bp, Homo sapien
aactaattatgaggtttcccctgct

SEQ ID NO: 2056765 - DNA, 25 bp, Homo sapien
tcatgttcaaatcccacgaagctca

SEQ ID NO: 2056766 - DNA, 25 bp, Homo sapien
gcgtaggaacttcttgtaattgaaa

SEQ ID NO: 2056767 - DNA, 25 bp, Homo sapien
tcaaatagtcttaatgcgtaggaac

SEQ ID NO: 2056768 - DNA, 25 bp, Homo sapien
tgtccaagtttatgtaaacttcact

SEQ ID NO: 2056769 - DNA, 25 bp, Homo sapien
ttcactttctattgtgtaaccagct

SEQ ID NO: 2056770 - DNA, 25 bp, Homo sapien
tcacatgcactgtgtagaagaaaca

SEQ ID NO: 2056771 - DNA, 25 bp, Homo sapien
gaaacagcatctctactgtccaagt

SEQ ID NO: 2056772 - DNA, 25 bp, Homo sapien
acgccattctgctgctgcagcctct

SEQ ID NO: 2056773 - DNA, 25 bp, Homo sapien
ctgcccacctcagcctcccaaagtg

SEQ ID NO: 2056774 - DNA, 25 bp, Homo sapien
tctgctgctgcagcctctcaagtaa

SEQ ID NO: 2056775 - DNA, 25 bp, Homo sapien
tgcccacctcagcctcccaaagtgc

SEQ ID NO: 2056776 - DNA, 25 bp, Homo sapien
cctgtattagatgggtgttttttca

SEQ ID NO: 2056777 - DNA, 25 bp, Homo sapien
gtcacatcctgtattagatgggtgt

SEQ ID NO: 2056778 - DNA, 25 bp, Homo sapien
cacatcctgtattagatgggtgttt

SEQ ID NO: 2056779 - DNA, 25 bp, Homo sapien
gcagtcacatcctgtattagatggg

SEQ ID NO: 2056780 - DNA, 25 bp, Homo sapien
acagatgaacgaacaggagactggg

SEQ ID NO: 2056781 - DNA, 25 bp, Homo sapien
tcgtgttctcacatgggaggatgca

SEQ ID NO: 2056782 - DNA, 25 bp, Homo sapien
gaggcaattgccaccgtgtgctgtg

SEQ ID NO: 2056783 - DNA, 25 bp, Homo sapien
tgagggctcctcagaagtcgtgttc

SEQ ID NO: 2056784 - DNA, 25 bp, Homo sapien
gccctgcagccaacctcacaaaatg

SEQ ID NO: 2056785 - DNA, 25 bp, Homo sapien
ttttggagtttgccaacagggaagc

SEQ ID NO: 2056786 - DNA, 25 bp, Homo sapien
ttggagtttgccaacagggaagctt

SEQ ID NO: 2056787 - DNA, 25 bp, Homo sapien
tttggagtttgccaacagggaagct

SEQ ID NO: 2056788 - DNA, 25 bp, Homo sapien
tattgctgtggttgtcgatgatgtt

SEQ ID NO: 2056789 - DNA, 25 bp, Homo sapien
cttattgctgtggttgtcgatgatg

SEQ ID NO: 2056790 - DNA, 25 bp, Homo sapien
agctcttattgctgtggttgtcgat

SEQ ID NO: 2056791 - DNA, 25 bp, Homo sapien
ctcttattgctgtggttgtcgatga

SEQ ID NO: 2056792 - DNA, 25 bp, Homo sapien
gaatgcatgcttcaaacagccagtg

SEQ ID NO: 2056793 - DNA, 25 bp, Homo sapien
cacagtgtgtgagataaagagtttc

SEQ ID NO: 2056794 - DNA, 25 bp, Homo sapien
tgaagtcttggctatacctattacc

SEQ ID NO: 2056795 - DNA, 25 bp, Homo sapien
gggattcctgatcagtggcgagcat

SEQ ID NO: 2056796 - DNA, 25 bp, Homo sapien
gggaggatgttcttggagctagatc

SEQ ID NO: 2056797 - DNA, 25 bp, Homo sapien
ggaggatgttcttggagctagatca

SEQ ID NO: 2056798 - DNA, 25 bp, Homo sapien
tggggaggatgttcttggagctaga

SEQ ID NO: 2056799 - DNA, 25 bp, Homo sapien
ggggaggatgttcttggagctagat

SEQ ID NO: 2056800 - DNA, 25 bp, Homo sapien
ccaaggcacagtgagtagaaaggaa

SEQ ID NO: 2056801 - DNA, 25 bp, Homo sapien
gcacagtgagtagaaaggaatgacc

SEQ ID NO: 2056802 - DNA, 25 bp, Homo sapien
aaggcacagtgagtagaaaggaatg

SEQ ID NO: 2056803 - DNA, 25 bp, Homo sapien
ggcacagtgagtagaaaggaatgac

SEQ ID NO: 2056804 - DNA, 25 bp, Homo sapien
ttcaatatagttgctcagcagacat

SEQ ID NO: 2056805 - DNA, 25 bp, Homo sapien
aatgacattgttactaaggtctggc

SEQ ID NO: 2056806 - DNA, 25 bp, Homo sapien
gtctttagttagaatgataatcatc

SEQ ID NO: 2056807 - DNA, 25 bp, Homo sapien
taaggtctggcagacatccttcttc

SEQ ID NO: 2056808 - DNA, 25 bp, Homo sapien
tgctgaataatagtgtgaggctgct

SEQ ID NO: 2056809 - DNA, 25 bp, Homo sapien
aataatagtgtgaggctgcttttcc

SEQ ID NO: 2056810 - DNA, 25 bp, Homo sapien
gatgctgaataatagtgtgaggctg

SEQ ID NO: 2056811 - DNA, 25 bp, Homo sapien
ctgaataatagtgtgaggctgcttt

SEQ ID NO: 2056812 - DNA, 25 bp, Homo sapien
ggcacggagacatacccatagcatt

SEQ ID NO: 2056813 - DNA, 25 bp, Homo sapien
gcggaagatgtgcaactacaccaag

SEQ ID NO: 2056814 - DNA, 25 bp, Homo sapien
gaataatgcatcttgggcacggaga

SEQ ID NO: 2056815 - DNA, 25 bp, Homo sapien
gaagccatccagtgcgaagtgcgga

SEQ ID NO: 2056816 - DNA, 25 bp, Homo sapien
agcccccacagcagtcgcccccgca

SEQ ID NO: 2056817 - DNA, 25 bp, Homo sapien
cgctcagcccccacagcagtcgccc

SEQ ID NO: 2056818 - DNA, 25 bp, Homo sapien
gcaggcccccgctcagcccccacag

SEQ ID NO: 2056819 - DNA, 25 bp, Homo sapien
ccccacagcagtcgcccccgcagca

SEQ ID NO: 2056820 - DNA, 25 bp, Homo sapien
taatttggctgctgtccggactagg

SEQ ID NO: 2056821 - DNA, 25 bp, Homo sapien
cagatgcagacccacttgtaaggag

SEQ ID NO: 2056822 - DNA, 25 bp, Homo sapien
gaaaggagctgccaactggtcaacg

SEQ ID NO: 2056823 - DNA, 25 bp, Homo sapien
tagaagcacatatcaaccaaggaag

SEQ ID NO: 2056824 - DNA, 25 bp, Homo sapien
tgtcttacaagtcgtgctggctaat

SEQ ID NO: 2056825 - DNA, 25 bp, Homo sapien
gacttgctgttatttgaggcgtaga

SEQ ID NO: 2056826 - DNA, 25 bp, Homo sapien
tcaggttagcacagtatagagcact

SEQ ID NO: 2056827 - DNA, 25 bp, Homo sapien
cagtcttttccgctaccagatcagg

SEQ ID NO: 2056828 - DNA, 25 bp, Homo sapien
tcagtttaaaagctcatctttggtt

SEQ ID NO: 2056829 - DNA, 25 bp, Homo sapien
agtttttgcctgtccctatctgtat

SEQ ID NO: 2056830 - DNA, 25 bp, Homo sapien
agaatacagtttttgcctgtcccta

SEQ ID NO: 2056831 - DNA, 25 bp, Homo sapien
gcctgtccctatctgtatttcaaga

SEQ ID NO: 2056832 - DNA, 25 bp, Homo sapien
tacagtttttgcctgtccctatctg

SEQ ID NO: 2056833 - DNA, 25 bp, Homo sapien
tcaatttattcaagcagagacctct

SEQ ID NO: 2056834 - DNA, 25 bp, Homo sapien
gagacctcttaatataccatgctgt

SEQ ID NO: 2056835 - DNA, 25 bp, Homo sapien
tgagtggttgtcttgtgccttctag

SEQ ID NO: 2056836 - DNA, 25 bp, Homo sapien
tttccagttgaaagacaagatggct

SEQ ID NO: 2056837 - DNA, 25 bp, Homo sapien
caagataagtcacattagtagtcaa

SEQ ID NO: 2056838 - DNA, 25 bp, Homo sapien
cggacactaatttggtggaattgga

SEQ ID NO: 2056839 - DNA, 25 bp, Homo sapien
tgttgttgaagttaatgacccagca

SEQ ID NO: 2056840 - DNA, 25 bp, Homo sapien
gaattggatagtgacagcacattga

SEQ ID NO: 2056841 - DNA, 25 bp, Homo sapien
tgttgcacacttcctgggatcttta

SEQ ID NO: 2056842 - DNA, 25 bp, Homo sapien
ggatctttatctgatttagccttca

SEQ ID NO: 2056843 - DNA, 25 bp, Homo sapien
gccttcatatatggctgagggaagt

SEQ ID NO: 2056844 - DNA, 25 bp, Homo sapien
ggaagtgtttaagcagcaacctttg

SEQ ID NO: 2056845 - DNA, 25 bp, Homo sapien
tgctgcagaaatagcaatgccaaca

SEQ ID NO: 2056846 - DNA, 25 bp, Homo sapien
agtcccatatgtgccatagttgctg

SEQ ID NO: 2056847 - DNA, 25 bp, Homo sapien
gctgcagaaatagcaatgccaacat

SEQ ID NO: 2056848 - DNA, 25 bp, Homo sapien
tcacgtaagtcccatatgtgccata

SEQ ID NO: 2056849 - DNA, 25 bp, Homo sapien
ctgagctggtttggcaagaggccca

SEQ ID NO: 2056850 - DNA, 25 bp, Homo sapien
tggtcaggcctcataactctcttga

SEQ ID NO: 2056851 - DNA, 25 bp, Homo sapien
taggctactgtcaggaaccaggagc

SEQ ID NO: 2056852 - DNA, 25 bp, Homo sapien
gactctgtgaggttcagtggctctc

SEQ ID NO: 2056853 - DNA, 25 bp, Homo sapien
ctggaacatgatgctcacatctcat

SEQ ID NO: 2056854 - DNA, 25 bp, Homo sapien
gaatttacgtacatgagcctttata

SEQ ID NO: 2056855 - DNA, 25 bp, Homo sapien
actatattgtgatctaagtgcttag

SEQ ID NO: 2056856 - DNA, 25 bp, Homo sapien
gaagcactcaaatcagggcattgtt

SEQ ID NO: 2056857 - DNA, 25 bp, Homo sapien
ggttgttgactctaaatacactcct

SEQ ID NO: 2056858 - DNA, 25 bp, Homo sapien
gttgcttccactggtgttacctcca

SEQ ID NO: 2056859 - DNA, 25 bp, Homo sapien
tcctgccaactcattcctcttctaa

SEQ ID NO: 2056860 - DNA, 25 bp, Homo sapien
cttgcctcctgccaactcattcctc

SEQ ID NO: 2056861 - DNA, 25 bp, Homo sapien
tccactggtgttacctccagagatt

SEQ ID NO: 2056862 - DNA, 25 bp, Homo sapien
ctgccttcccccagtgatgacagag

SEQ ID NO: 2056863 - DNA, 25 bp, Homo sapien
ccagtgatgacagagtcctggccat

SEQ ID NO: 2056864 - DNA, 25 bp, Homo sapien
cttcccccagtgatgacagagtcct

SEQ ID NO: 2056865 - DNA, 25 bp, Homo sapien
gatgacagagtcctggccatttttc

SEQ ID NO: 2056866 - DNA, 25 bp, Homo sapien
aattcctcctcgacaatttccctca

SEQ ID NO: 2056867 - DNA, 25 bp, Homo sapien
ttcctcctcgacaatttccctcaaa

SEQ ID NO: 2056868 - DNA, 25 bp, Homo sapien
tgtaagggtaattcctcctcgacaa

SEQ ID NO: 2056869 - DNA, 25 bp, Homo sapien
cagatggttgtaagggtaattcctc

SEQ ID NO: 2056870 - DNA, 25 bp, Homo sapien
cctaactactatcttgagaataatt

SEQ ID NO: 2056871 - DNA, 25 bp, Homo sapien
tttcctaactactatcttgagaata

SEQ ID NO: 2056872 - DNA, 25 bp, Homo sapien
taactactatcttgagaataattgt

SEQ ID NO: 2056873 - DNA, 25 bp, Homo sapien
tcctaactactatcttgagaataat

SEQ ID NO: 2056874 - DNA, 25 bp, Homo sapien
tgtatcatagcacaccaaacaatct

SEQ ID NO: 2056875 - DNA, 25 bp, Homo sapien
ccccaagtctgttgcctgagacaaa

SEQ ID NO: 2056876 - DNA, 25 bp, Homo sapien
tttgcatggtagactcaggcccttc

SEQ ID NO: 2056877 - DNA, 25 bp, Homo sapien
tatggatcctgtatcatagcacacc

SEQ ID NO: 2056878 - DNA, 25 bp, Homo sapien
aggccagcctggacatcctagtgag

SEQ ID NO: 2056879 - DNA, 25 bp, Homo sapien
gttcgaggccagcctggacatccta

SEQ ID NO: 2056880 - DNA, 25 bp, Homo sapien
tcgaggccagcctggacatcctagt

SEQ ID NO: 2056881 - DNA, 25 bp, Homo sapien
gaggccagcctggacatcctagtga

SEQ ID NO: 2056882 - DNA, 25 bp, Homo sapien
cactcttgggtcatctagggtgaga

SEQ ID NO: 2056883 - DNA, 25 bp, Homo sapien
tgtattattcagagacactcttggg

SEQ ID NO: 2056884 - DNA, 25 bp, Homo sapien
aaatgggaagcaatgtattattcag

SEQ ID NO: 2056885 - DNA, 25 bp, Homo sapien
cagagacactcttgggtcatctagg

SEQ ID NO: 2056886 - DNA, 25 bp, Homo sapien
ggtagctccccaaccataggacttg

SEQ ID NO: 2056887 - DNA, 25 bp, Homo sapien
agcctcaggtagctccccaaccata

SEQ ID NO: 2056888 - DNA, 25 bp, Homo sapien
tagctccccaaccataggacttgtt

SEQ ID NO: 2056889 - DNA, 25 bp, Homo sapien
caggtagctccccaaccataggact

SEQ ID NO: 2056890 - DNA, 25 bp, Homo sapien
atcactgtgtccacgtcactgttta

SEQ ID NO: 2056891 - DNA, 25 bp, Homo sapien
catcactgtgtccacgtcactgttt

SEQ ID NO: 2056892 - DNA, 25 bp, Homo sapien
tcactgtgtccacgtcactgtttaa

SEQ ID NO: 2056893 - DNA, 25 bp, Homo sapien
ccatcactgtgtccacgtcactgtt

SEQ ID NO: 2056894 - DNA, 25 bp, Homo sapien
acaggacttgcacacgaagtctgta

SEQ ID NO: 2056895 - DNA, 25 bp, Homo sapien
gagttgcccactcaacactctatgg

SEQ ID NO: 2056896 - DNA, 25 bp, Homo sapien
caaaaggactctcttcgtcttgctt

SEQ ID NO: 2056897 - DNA, 25 bp, Homo sapien
cactctatggggtaacctgctgaga

SEQ ID NO: 2056898 - DNA, 25 bp, Homo sapien
ggtgagggaataattgagttgccca

SEQ ID NO: 2056899 - DNA, 25 bp, Homo sapien
atggccaaaaacagagactggtata

SEQ ID NO: 2056900 - DNA, 25 bp, Homo sapien
tttggaaatgtagttcctgggtcca

SEQ ID NO: 2056901 - DNA, 25 bp, Homo sapien
acagattggtgactagaacagtata

SEQ ID NO: 2056902 - DNA, 25 bp, Homo sapien
cgtattggtgctagacttgacagat

SEQ ID NO: 2056903 - DNA, 25 bp, Homo sapien
gaagcgagccgtataatgaggacca

SEQ ID NO: 2056904 - DNA, 25 bp, Homo sapien
ggatagaaggagcagacaaagctgg

SEQ ID NO: 2056905 - DNA, 25 bp, Homo sapien
tagagtcgactctaaattatctggg

SEQ ID NO: 2056906 - DNA, 25 bp, Homo sapien
tgacttcatgctgtaagttgcaaaa

SEQ ID NO: 2056907 - DNA, 25 bp, Homo sapien
aggcttttatgccaagatctagggt

SEQ ID NO: 2056908 - DNA, 25 bp, Homo sapien
taggcttttatgccaagatctaggg

SEQ ID NO: 2056909 - DNA, 25 bp, Homo sapien
ctaggcttttatgccaagatctagg

SEQ ID NO: 2056910 - DNA, 25 bp, Homo sapien
tgttgtgccatggttaacagtaccc

SEQ ID NO: 2056911 - DNA, 25 bp, Homo sapien
ggacctggcctatacagaattgtga

SEQ ID NO: 2056912 - DNA, 25 bp, Homo sapien
tgtgaaaactgatccgatccctctg

SEQ ID NO: 2056913 - DNA, 25 bp, Homo sapien
tccgttggtactgtattaggacctg

SEQ ID NO: 2056914 - DNA, 25 bp, Homo sapien
tcagaatctcggtctctgggttggg

SEQ ID NO: 2056915 - DNA, 25 bp, Homo sapien
caagtgacgtgcattctgtgtatct

SEQ ID NO: 2056916 - DNA, 25 bp, Homo sapien
taggaaaagggtatgcaagagtgac

SEQ ID NO: 2056917 - DNA, 25 bp, Homo sapien
gaaatggccgagctttctgcctaag

SEQ ID NO: 2056918 - DNA, 25 bp, Homo sapien
tagtgcaacagcttgcctcagaggc

SEQ ID NO: 2056919 - DNA, 25 bp, Homo sapien
ttctgcaatagaaagcccttggtct

SEQ ID NO: 2056920 - DNA, 25 bp, Homo sapien
gaatctgagacgcattagcttgtag

SEQ ID NO: 2056921 - DNA, 25 bp, Homo sapien
gagaatcctaccaagggtgtgctga

SEQ ID NO: 2056922 - DNA, 25 bp, Homo sapien
cccgaacacactgtgctaccctttc

SEQ ID NO: 2056923 - DNA, 25 bp, Homo sapien
attccccccgaacacactgtgctac

SEQ ID NO: 2056924 - DNA, 25 bp, Homo sapien
ccccgaacacactgtgctacccttt

SEQ ID NO: 2056925 - DNA, 25 bp, Homo sapien
cccattccccccgaacacactgtgc

SEQ ID NO: 2056926 - DNA, 25 bp, Homo sapien
ctccaacctcatagaggaggttccc

SEQ ID NO: 2056927 - DNA, 25 bp, Homo sapien
aaatatcagtatattggagatttcc

SEQ ID NO: 2056928 - DNA, 25 bp, Homo sapien
caacctcatagaggaggttccccaa

SEQ ID NO: 2056929 - DNA, 25 bp, Homo sapien
aatatcagtatattggagatttcct

SEQ ID NO: 2056930 - DNA, 25 bp, Homo sapien
caggcctgtcctgtagagtcacgtt

SEQ ID NO: 2056931 - DNA, 25 bp, Homo sapien
gagagcctgactttgctccccaagt

SEQ ID NO: 2056932 - DNA, 25 bp, Homo sapien
ttctgacaacacatccggacacagg

SEQ ID NO: 2056933 - DNA, 25 bp, Homo sapien
tccactgtgctgtcaacccttttag

SEQ ID NO: 2056934 - DNA, 25 bp, Homo sapien
cttcctaatgttgttgaggtctgcc

SEQ ID NO: 2056935 - DNA, 25 bp, Homo sapien
ttgttgaggtctgccccaacttctt

SEQ ID NO: 2056936 - DNA, 25 bp, Homo sapien
cctaatgttgttgaggtctgcccca

SEQ ID NO: 2056937 - DNA, 25 bp, Homo sapien
taatgttgttgaggtctgccccaac

SEQ ID NO: 2056938 - DNA, 25 bp, Homo sapien
cttcctcttttccatacactgctcc

SEQ ID NO: 2056939 - DNA, 25 bp, Homo sapien
ttcctcttttccatacactgctcct

SEQ ID NO: 2056940 - DNA, 25 bp, Homo sapien
ccgtgtctgtcaaaatactgacagc

SEQ ID NO: 2056941 - DNA, 25 bp, Homo sapien
tcattccgtgtctgtcaaaatactg

SEQ ID NO: 2056942 - DNA, 25 bp, Homo sapien
tgtcaaaatactgacagcgcttctc

SEQ ID NO: 2056943 - DNA, 25 bp, Homo sapien
caaaatactgacagcgcttctccct

SEQ ID NO: 2056944 - DNA, 25 bp, Homo sapien
tgctgagtcttggtgtagctcactt

SEQ ID NO: 2056945 - DNA, 25 bp, Homo sapien
atgctgagtcttggtgtagctcact

SEQ ID NO: 2056946 - DNA, 25 bp, Homo sapien
aatgctgagtcttggtgtagctcac

SEQ ID NO: 2056947 - DNA, 25 bp, Homo sapien
gctgagtcttggtgtagctcacttc

SEQ ID NO: 2056948 - DNA, 25 bp, Homo sapien
gaagggtttgagaactggtgacacc

SEQ ID NO: 2056949 - DNA, 25 bp, Homo sapien
gaactggtgacaccttcagaagaga

SEQ ID NO: 2056950 - DNA, 25 bp, Homo sapien
aatgacatgctgagccattgcaccc

SEQ ID NO: 2056951 - DNA, 25 bp, Homo sapien
catcaggcccttcttagtccaggct

SEQ ID NO: 2056952 - DNA, 25 bp, Homo sapien
cccagacactgacttaatacccgct

SEQ ID NO: 2056953 - DNA, 25 bp, Homo sapien
cagacactgacttaatacccgctct

SEQ ID NO: 2056954 - DNA, 25 bp, Homo sapien
gacactgacttaatacccgctctaa

SEQ ID NO: 2056955 - DNA, 25 bp, Homo sapien
actgacttaatacccgctctaagga

SEQ ID NO: 2056956 - DNA, 25 bp, Homo sapien
cccagacactgacttaatacccgct

SEQ ID NO: 2056957 - DNA, 25 bp, Homo sapien
cagacactgacttaatacccgctct

SEQ ID NO: 2056958 - DNA, 25 bp, Homo sapien
gacactgacttaatacccgctctaa

SEQ ID NO: 2056959 - DNA, 25 bp, Homo sapien
actgacttaatacccgctctaagga

SEQ ID NO: 2056960 - DNA, 25 bp, Homo sapien
gctgtggatgaaacgtggtcttccc

SEQ ID NO: 2056961 - DNA, 25 bp, Homo sapien
gcttctcgagccattcgggcagcat

SEQ ID NO: 2056962 - DNA, 25 bp, Homo sapien
tgacgttctttcagataccaccgag

SEQ ID NO: 2056963 - DNA, 25 bp, Homo sapien
cctctgctgataccagcggctgtgg

SEQ ID NO: 2056964 - DNA, 25 bp, Homo sapien
tggttgaacaccactcgttggcatg

SEQ ID NO: 2056965 - DNA, 25 bp, Homo sapien
cgttggcatgttagggatcttcccg

SEQ ID NO: 2056966 - DNA, 25 bp, Homo sapien
gagtcacggtgacgaatcaatcgaa

SEQ ID NO: 2056967 - DNA, 25 bp, Homo sapien
tttcaagcctacataggagtcacgg

SEQ ID NO: 2056968 - DNA, 25 bp, Homo sapien
gcagttgcagttgtgactgtgacca

SEQ ID NO: 2056969 - DNA, 25 bp, Homo sapien
cctggaccctccacttgcagttgca

SEQ ID NO: 2056970 - DNA, 25 bp, Homo sapien
ggaccctccacttgcagttgcagtt

SEQ ID NO: 2056971 - DNA, 25 bp, Homo sapien
cagtcctctaagtccctggaccctc

SEQ ID NO: 2056972 - DNA, 25 bp, Homo sapien
cattaagtagctgtccattctcttc

SEQ ID NO: 2056973 - DNA, 25 bp, Homo sapien
gctgcccaaggtcatcattaagtag

SEQ ID NO: 2056974 - DNA, 25 bp, Homo sapien
tatggctgcccaaggtcatcattaa

SEQ ID NO: 2056975 - DNA, 25 bp, Homo sapien
aaggtcatcattaagtagctgtcca

SEQ ID NO: 2056976 - DNA, 25 bp, Homo sapien
gagcccattacaaacattttcctag

SEQ ID NO: 2056977 - DNA, 25 bp, Homo sapien
ggagaactagtaaagagcccattac

SEQ ID NO: 2056978 - DNA, 25 bp, Homo sapien
aagagcccattacaaacattttcct

SEQ ID NO: 2056979 - DNA, 25 bp, Homo sapien
gagaactagtaaagagcccattaca

SEQ ID NO: 2056980 - DNA, 25 bp, Homo sapien
caatcacattggctatgggaactat

SEQ ID NO: 2056981 - DNA, 25 bp, Homo sapien
gcaccaccaatcacattggctatgg

SEQ ID NO: 2056982 - DNA, 25 bp, Homo sapien
tttctgcaccaccaatcacattggc

SEQ ID NO: 2056983 - DNA, 25 bp, Homo sapien
ctgatttctgcaccaccaatcacat

SEQ ID NO: 2056984 - DNA, 25 bp, Homo sapien
ttgtcgtgtcttggcctgttctctg

SEQ ID NO: 2056985 - DNA, 25 bp, Homo sapien
tctctgagactgtccccattggtgc

SEQ ID NO: 2056986 - DNA, 25 bp, Homo sapien
aaagtttctagtacttgtcgtgtct

SEQ ID NO: 2056987 - DNA, 25 bp, Homo sapien
tccccattggtgctgatgcttgtgg

SEQ ID NO: 2056988 - DNA, 25 bp, Homo sapien
tcaagcaggcatcacatagtagttc

SEQ ID NO: 2056989 - DNA, 25 bp, Homo sapien
gaagttcatttgtagctggttttcc

SEQ ID NO: 2056990 - DNA, 25 bp, Homo sapien
caggcatcacatagtagttctctcc

SEQ ID NO: 2056991 - DNA, 25 bp, Homo sapien
tccttcaaggttctcctgaagttca

SEQ ID NO: 2056992 - DNA, 25 bp, Homo sapien
tggcttaatctgtgttttggcctcc

SEQ ID NO: 2056993 - DNA, 25 bp, Homo sapien
aggagcctctccctgattcattgga

SEQ ID NO: 2056994 - DNA, 25 bp, Homo sapien
gtgctaaattcttgctggttccctg

SEQ ID NO: 2056995 - DNA, 25 bp, Homo sapien
ggccagaacaggtagatgaagcgct

SEQ ID NO: 2056996 - DNA, 25 bp, Homo sapien
ctggttggaatgagagaggctgtaa

SEQ ID NO: 2056997 - DNA, 25 bp, Homo sapien
tgtaacaataactgcctatgatggc

SEQ ID NO: 2056998 - DNA, 25 bp, Homo sapien
tcatagatccctgagtcacatctgg

SEQ ID NO: 2056999 - DNA, 25 bp, Homo sapien
cacatctggaggatatgtattggcc

SEQ ID NO: 2057000 - DNA, 25 bp, Homo sapien
cagagcaggaagagtacattcatag

SEQ ID NO: 2057001 - DNA, 25 bp, Homo sapien
ctcgtgtgaaaacgtgcactgaagc

SEQ ID NO: 2057002 - DNA, 25 bp, Homo sapien
tccctctgtcctcgtgtgaaaacgt

SEQ ID NO: 2057003 - DNA, 25 bp, Homo sapien
gcactgaagcagatgcagcaatatt

SEQ ID NO: 2057004 - DNA, 25 bp, Homo sapien
cagcaatattcttgtggcacagttc

SEQ ID NO: 2057005 - DNA, 25 bp, Homo sapien
tcttaggtcttagcccatggtccgg

SEQ ID NO: 2057006 - DNA, 25 bp, Homo sapien
cacttatctccacaagaatgggcca

SEQ ID NO: 2057007 - DNA, 25 bp, Homo sapien
gcccagagcgggtagtacgacttca

SEQ ID NO: 2057008 - DNA, 25 bp, Homo sapien
gaacaggccactcagaatgattgca

SEQ ID NO: 2057009 - DNA, 25 bp, Homo sapien
cattttctgcattaaacctaatgca

SEQ ID NO: 2057010 - DNA, 25 bp, Homo sapien
ttttctgcattaaacctaatgcatc

SEQ ID NO: 2057011 - DNA, 25 bp, Homo sapien
tcagtgacctagtaatttgtcagtc

SEQ ID NO: 2057012 - DNA, 25 bp, Homo sapien
agtgacctagtaatttgtcagtcat

SEQ ID NO: 2057013 - DNA, 25 bp, Homo sapien
tctgtagaaggtgcacattcatgag

SEQ ID NO: 2057014 - DNA, 25 bp, Homo sapien
acattcatgaggtcttcagtcacca

SEQ ID NO: 2057015 - DNA, 25 bp, Homo sapien
ttttaggaatctgtagaaggtgcac

SEQ ID NO: 2057016 - DNA, 25 bp, Homo sapien
ggtgcacattcatgaggtcttcagt

SEQ ID NO: 2057017 - DNA, 25 bp, Homo sapien
gagtcctgtgtaaattttcagagag

SEQ ID NO: 2057018 - DNA, 25 bp, Homo sapien
aaggcaaacactgagttgagtcctg

SEQ ID NO: 2057019 - DNA, 25 bp, Homo sapien
agttgagtcctgtgtaaattttcag

SEQ ID NO: 2057020 - DNA, 25 bp, Homo sapien
ggcaaacactgagttgagtcctgtg

SEQ ID NO: 2057021 - DNA, 25 bp, Homo sapien
ggatcaccagtccaacttgttagca

SEQ ID NO: 2057022 - DNA, 25 bp, Homo sapien
gaagtcgctgattcaagcttatcta

SEQ ID NO: 2057023 - DNA, 25 bp, Homo sapien
ttaccagatcaataagcctcaaggg

SEQ ID NO: 2057024 - DNA, 25 bp, Homo sapien
tatctaagctattgatgttcccggg

SEQ ID NO: 2057025 - DNA, 25 bp, Homo sapien
tggtgtgtgctggatggagctgctc

SEQ ID NO: 2057026 - DNA, 25 bp, Homo sapien
tctggtgtgtgctggatggagctgc

SEQ ID NO: 2057027 - DNA, 25 bp, Homo sapien
tctctggtgtgtgctggatggagct

SEQ ID NO: 2057028 - DNA, 25 bp, Homo sapien
ctgtctctggtgtgtgctggatgga

SEQ ID NO: 2057029 - DNA, 25 bp, Homo sapien
tgaatagtccctttttatcgcttcc

SEQ ID NO: 2057030 - DNA, 25 bp, Homo sapien
gctgctcctctgaaaccatccaaat

SEQ ID NO: 2057031 - DNA, 25 bp, Homo sapien
cttgaatagtccctttttatcgctt

SEQ ID NO: 2057032 - DNA, 25 bp, Homo sapien
aatagtccctttttatcgcttccat

SEQ ID NO: 2057033 - DNA, 25 bp, Homo sapien
aggccttctttcaatatgggcacaa

SEQ ID NO: 2057034 - DNA, 25 bp, Homo sapien
cttctttcaatatgggcacaaaacc

SEQ ID NO: 2057035 - DNA, 25 bp, Homo sapien
cttagcatacccattcaggccttct

SEQ ID NO: 2057036 - DNA, 25 bp, Homo sapien
gtccttagcatacccattcaggcct

SEQ ID NO: 2057037 - DNA, 25 bp, Homo sapien
accagtctgggaatccatgaacaaa

SEQ ID NO: 2057038 - DNA, 25 bp, Homo sapien
tggaaagcaccctccctggaccagt

SEQ ID NO: 2057039 - DNA, 25 bp, Homo sapien
cttcaaagtgaatagcagcatggca

SEQ ID NO: 2057040 - DNA, 25 bp, Homo sapien
tggcattgtggaaagcaccctccct

SEQ ID NO: 2057041 - DNA, 25 bp, Homo sapien
tctctgttctccactatggctacct

SEQ ID NO: 2057042 - DNA, 25 bp, Homo sapien
cctggctgggtaccatcccgaaaag

SEQ ID NO: 2057043 - DNA, 25 bp, Homo sapien
tcccgaaaagatttgcttcctgccc

SEQ ID NO: 2057044 - DNA, 25 bp, Homo sapien
tggctacctggctgggtaccatccc

SEQ ID NO: 2057045 - DNA, 25 bp, Homo sapien
catcaaagctctgtaatcgagccat

SEQ ID NO: 2057046 - DNA, 25 bp, Homo sapien
acataatgaatttccccatcaaagc

SEQ ID NO: 2057047 - DNA, 25 bp, Homo sapien
cataatgaatttccccatcaaagct

SEQ ID NO: 2057048 - DNA, 25 bp, Homo sapien
ccccatcaaagctctgtaatcgagc

SEQ ID NO: 2057049 - DNA, 25 bp, Homo sapien
tatttcatcattgtctgcttgacct

SEQ ID NO: 2057050 - DNA, 25 bp, Homo sapien
accacctgacattgggtctgtgggg

SEQ ID NO: 2057051 - DNA, 25 bp, Homo sapien
ttgacctttggcctgttagacttac

SEQ ID NO: 2057052 - DNA, 25 bp, Homo sapien
tgggggatatttcatcattgtctgc

SEQ ID NO: 2057053 - DNA, 25 bp, Homo sapien
ctgaaaaagccatttgttccccatc

SEQ ID NO: 2057054 - DNA, 25 bp, Homo sapien
aagccatttgttccccatcgatgta

SEQ ID NO: 2057055 - DNA, 25 bp, Homo sapien
tttctgggaagcagcgactgaaaaa

SEQ ID NO: 2057056 - DNA, 25 bp, Homo sapien
atttctgggaagcagcgactgaaaa

SEQ ID NO: 2057057 - DNA, 25 bp, Homo sapien
ccaaataaccttgtcatgtgagcgt

SEQ ID NO: 2057058 - DNA, 25 bp, Homo sapien
gaacatcaaggactggattgcactg

SEQ ID NO: 2057059 - DNA, 25 bp, Homo sapien
gcattgtgaacaggttgccatagca

SEQ ID NO: 2057060 - DNA, 25 bp, Homo sapien
gagcgtttatcacaggaacatcaag

SEQ ID NO: 2057061 - DNA, 25 bp, Homo sapien
cgtcacgtaacagcatcacttctgg

SEQ ID NO: 2057062 - DNA, 25 bp, Homo sapien
ccagtgctggtgcttgagtgctgca

SEQ ID NO: 2057063 - DNA, 25 bp, Homo sapien
caagatttattgagtccatgtggag

SEQ ID NO: 2057064 - DNA, 25 bp, Homo sapien
tatttgagatatgctaaccaatgcc

SEQ ID NO: 2057065 - DNA, 25 bp, Homo sapien
atcctttttgtcattaaaagagagc

SEQ ID NO: 2057066 - DNA, 25 bp, Homo sapien
tttttgtcattaaaagagagcaagt

SEQ ID NO: 2057067 - DNA, 25 bp, Homo sapien
cctttttgtcattaaaagagagcaa

SEQ ID NO: 2057068 - DNA, 25 bp, Homo sapien
ttttgtcattaaaagagagcaagtc

SEQ ID NO: 2057069 - DNA, 25 bp, Homo sapien
tgcttggttgagaagatggagtact

SEQ ID NO: 2057070 - DNA, 25 bp, Homo sapien
gaggaccatactccctgaacaagaa

SEQ ID NO: 2057071 - DNA, 25 bp, Homo sapien
cctaaatgcatgaaacctcatcacc

SEQ ID NO: 2057072 - DNA, 25 bp, Homo sapien
agagaagacattgacgccagagttc

SEQ ID NO: 2057073 - DNA, 25 bp, Homo sapien
gctttgatcaaactcacagatggaa

SEQ ID NO: 2057074 - DNA, 25 bp, Homo sapien
ccacatgctgccaagtggagatgaa

SEQ ID NO: 2057075 - DNA, 25 bp, Homo sapien
ttcaaaatttcgcagataaagttgc

SEQ ID NO: 2057076 - DNA, 25 bp, Homo sapien
cacagatggaaacatgctagcagga

SEQ ID NO: 2057077 - DNA, 25 bp, Homo sapien
ctatttttgttccatcacagtgaca

SEQ ID NO: 2057078 - DNA, 25 bp, Homo sapien
tctatttttgttccatcacagtgac

SEQ ID NO: 2057079 - DNA, 25 bp, Homo sapien
tctctgcatgactggttgaggcagg

SEQ ID NO: 2057080 - DNA, 25 bp, Homo sapien
attcctattgcaaccacaagctggc

SEQ ID NO: 2057081 - DNA, 25 bp, Homo sapien
tctattcctattgcaaccacaagct

SEQ ID NO: 2057082 - DNA, 25 bp, Homo sapien
taattaaacctccacaaatcattcc

SEQ ID NO: 2057083 - DNA, 25 bp, Homo sapien
cagcttgttggaaatcagaacgtgt

SEQ ID NO: 2057084 - DNA, 25 bp, Homo sapien
gctgttccagcttgttggaaatcag

SEQ ID NO: 2057085 - DNA, 25 bp, Homo sapien
accatagagatgagaagttgggtag

SEQ ID NO: 2057086 - DNA, 25 bp, Homo sapien
catagagatgagaagttgggtagtc

SEQ ID NO: 2057087 - DNA, 25 bp, Homo sapien
gcttctttgccccaagctagcatca

SEQ ID NO: 2057088 - DNA, 25 bp, Homo sapien
agctagcatcaaggacaccactctg

SEQ ID NO: 2057089 - DNA, 25 bp, Homo sapien
tctgtgtggagacagtgacctccgg

SEQ ID NO: 2057090 - DNA, 25 bp, Homo sapien
cggataaccaggtattccgctttca

SEQ ID NO: 2057091 - DNA, 25 bp, Homo sapien
gacataagcagaggaaggtgcagcc

SEQ ID NO: 2057092 - DNA, 25 bp, Homo sapien
tccaaagtgaagatgtgaagccaga

SEQ ID NO: 2057093 - DNA, 25 bp, Homo sapien
tatcagtcgaccatctgtaggcacc

SEQ ID NO: 2057094 - DNA, 25 bp, Homo sapien
tctatctgtattgccaaggaggccg

SEQ ID NO: 2057095 - DNA, 25 bp, Homo sapien
tgtacactgtctagcagggcccata

SEQ ID NO: 2057096 - DNA, 25 bp, Homo sapien
gccagagacttgcattccgagcagg

SEQ ID NO: 2057097 - DNA, 25 bp, Homo sapien
ccaggcaggaggcatatattgtcca

SEQ ID NO: 2057098 - DNA, 25 bp, Homo sapien
tttccatggagagtccacgggccag

SEQ ID NO: 2057099 - DNA, 25 bp, Homo sapien
acacatggcagacccttggcaaaag

SEQ ID NO: 2057100 - DNA, 25 bp, Homo sapien
aataagcccgtgacacatggcagac

SEQ ID NO: 2057101 - DNA, 25 bp, Homo sapien
tgccatgtaataagcccgtgacaca

SEQ ID NO: 2057102 - DNA, 25 bp, Homo sapien
cccttggcaaaaggctcgttgaaca

SEQ ID NO: 2057103 - DNA, 25 bp, Homo sapien
caggatcaagaaccttggtcaggag

SEQ ID NO: 2057104 - DNA, 25 bp, Homo sapien
ggagtagtgccttccgctggaggat

SEQ ID NO: 2057105 - DNA, 25 bp, Homo sapien
gaaccttggtcaggagtagtgcctt

SEQ ID NO: 2057106 - DNA, 25 bp, Homo sapien
ctcccagcaggatcaagaaccttgg

SEQ ID NO: 2057107 - DNA, 25 bp, Homo sapien
gcttagaacaacaaatttattatct

SEQ ID NO: 2057108 - DNA, 25 bp, Homo sapien
agcttagaacaacaaatttattatc

SEQ ID NO: 2057109 - DNA, 25 bp, Homo sapien
tagcttagaacaacaaatttattat

SEQ ID NO: 2057110 - DNA, 25 bp, Homo sapien
tggcttaactccatcctctgactca

SEQ ID NO: 2057111 - DNA, 25 bp, Homo sapien
ggcttggcttaactccatcctctga

SEQ ID NO: 2057112 - DNA, 25 bp, Homo sapien
caatgaaggtatttgatggagctac

SEQ ID NO: 2057113 - DNA, 25 bp, Homo sapien
acaatgaaggtatttgatggagcta

SEQ ID NO: 2057114 - DNA, 25 bp, Homo sapien
cactcaagtgattgttggcaggatt

SEQ ID NO: 2057115 - DNA, 25 bp, Homo sapien
ggcttaacatggagaggattcactc

SEQ ID NO: 2057116 - DNA, 25 bp, Homo sapien
cactctcaagttcactcaagtgatt

SEQ ID NO: 2057117 - DNA, 25 bp, Homo sapien
ccttagctccttgacacacgggcat

SEQ ID NO: 2057118 - DNA, 25 bp, Homo sapien
tggttgcttccagacaagtggtaac

SEQ ID NO: 2057119 - DNA, 25 bp, Homo sapien
taagacctttatagaaccactgaca

SEQ ID NO: 2057120 - DNA, 25 bp, Homo sapien
gaccaaggaaactgtgagtatgttc

SEQ ID NO: 2057121 - DNA, 25 bp, Homo sapien
ggtgattacaaccacacgggagctg

SEQ ID NO: 2057122 - DNA, 25 bp, Homo sapien
tccatcttctagggactctgagttg

SEQ ID NO: 2057123 - DNA, 25 bp, Homo sapien
tgtatgttaggtcctctgtatctag

SEQ ID NO: 2057124 - DNA, 25 bp, Homo sapien
ctgagttgtatgttaggtcctctgt

SEQ ID NO: 2057125 - DNA, 25 bp, Homo sapien
tctccatcttctagggactctgagt

SEQ ID NO: 2057126 - DNA, 25 bp, Homo sapien
tagtagttacttccccacaattcca

SEQ ID NO: 2057127 - DNA, 25 bp, Homo sapien
tgaaaactaatcatatgggcctctc

SEQ ID NO: 2057128 - DNA, 25 bp, Homo sapien
tcactggtgaaaactaatcatatgg

SEQ ID NO: 2057129 - DNA, 25 bp, Homo sapien
cacaattccaccatgcagaagggta

SEQ ID NO: 2057130 - DNA, 25 bp, Homo sapien
tccaaagtgaccttaagatctgagg

SEQ ID NO: 2057131 - DNA, 25 bp, Homo sapien
gaaagagcactgctgagcaaggtca

SEQ ID NO: 2057132 - DNA, 25 bp, Homo sapien
cacaccaagatagttctgcacatga

SEQ ID NO: 2057133 - DNA, 25 bp, Homo sapien
taaaggaagtccagaagtacgcagt

SEQ ID NO: 2057134 - DNA, 25 bp, Homo sapien
tcatcccactgtccattgtcaagag

SEQ ID NO: 2057135 - DNA, 25 bp, Homo sapien
ctggtatatggccacctcctctgag

SEQ ID NO: 2057136 - DNA, 25 bp, Homo sapien
caccatctggcctaatgatttgcaa

SEQ ID NO: 2057137 - DNA, 25 bp, Homo sapien
tgcaacttgtttttcagagcccttt

SEQ ID NO: 2057138 - DNA, 25 bp, Homo sapien
gaccatttgcaaagcccaatttttc

SEQ ID NO: 2057139 - DNA, 25 bp, Homo sapien
tataggaagggtgatctggagacca

SEQ ID NO: 2057140 - DNA, 25 bp, Homo sapien
ccaggaaggcaagaattgggtgacc

SEQ ID NO: 2057141 - DNA, 25 bp, Homo sapien
tttctccagagtggcggtataggaa

SEQ ID NO: 2057142 - DNA, 25 bp, Homo sapien
acctttctatctggacagttgaatt

SEQ ID NO: 2057143 - DNA, 25 bp, Homo sapien
cacctttctatctggacagttgaat

SEQ ID NO: 2057144 - DNA, 25 bp, Homo sapien
cagcctggtagattcagagtaatta

SEQ ID NO: 2057145 - DNA, 25 bp, Homo sapien
ttaatcagcctggtagattcagagt

SEQ ID NO: 2057146 - DNA, 25 bp, Homo sapien
tgctgatctgctgtggcttaatcag

SEQ ID NO: 2057147 - DNA, 25 bp, Homo sapien
ggtagattcagagtaattatccctg

SEQ ID NO: 2057148 - DNA, 25 bp, Homo sapien
ggtctaatggtcataagtccttatt

SEQ ID NO: 2057149 - DNA, 25 bp, Homo sapien
tctcctggtctaatggtcataagtc

SEQ ID NO: 2057150 - DNA, 25 bp, Homo sapien
cctggtctaatggtcataagtcctt

SEQ ID NO: 2057151 - DNA, 25 bp, Homo sapien
cctgtctcctggtctaatggtcata

SEQ ID NO: 2057152 - DNA, 25 bp, Homo sapien
gaattgccagtgaaccatttgccag

SEQ ID NO: 2057153 - DNA, 25 bp, Homo sapien
cagccatatggtaagggatgggacc

SEQ ID NO: 2057154 - DNA, 25 bp, Homo sapien
tggtacatagtagccatactgtggg

SEQ ID NO: 2057155 - DNA, 25 bp, Homo sapien
cataaacggtttgctcctgagttcc

SEQ ID NO: 2057156 - DNA, 25 bp, Homo sapien
agctatataccctggaggaggtcac

SEQ ID NO: 2057157 - DNA, 25 bp, Homo sapien
cagctatataccctggaggaggtca

SEQ ID NO: 2057158 - DNA, 25 bp, Homo sapien
gctatataccctggaggaggtcact

SEQ ID NO: 2057159 - DNA, 25 bp, Homo sapien
catggtgtcggcaatctgccactca

SEQ ID NO: 2057160 - DNA, 25 bp, Homo sapien
gagttctgtaggtcacggactggac

SEQ ID NO: 2057161 - DNA, 25 bp, Homo sapien
tgtagagatgtctgacccagggccc

SEQ ID NO: 2057162 - DNA, 25 bp, Homo sapien
tgccactcaagtggtcgccactctg

SEQ ID NO: 2057163 - DNA, 25 bp, Homo sapien
acacatgcacaccaaatgctgttat

SEQ ID NO: 2057164 - DNA, 25 bp, Homo sapien
catgcacaccaaatgctgttatttt

SEQ ID NO: 2057165 - DNA, 25 bp, Homo sapien
cctctcctgaaaatccaagagagtc

SEQ ID NO: 2057166 - DNA, 25 bp, Homo sapien
cctcctctcctgaaaatccaagaga

SEQ ID NO: 2057167 - DNA, 25 bp, Homo sapien
tgatttctgccacgtgaaagacatt

SEQ ID NO: 2057168 - DNA, 25 bp, Homo sapien
gttgatctgggcagcactttcccac

SEQ ID NO: 2057169 - DNA, 25 bp, Homo sapien
ggtttctcctgttcattgatttctg

SEQ ID NO: 2057170 - DNA, 25 bp, Homo sapien
ctagttgatctgggcagcactttcc

SEQ ID NO: 2057171 - DNA, 25 bp, Homo sapien
gagaagtacaagcattggctccaag

SEQ ID NO: 2057172 - DNA, 25 bp, Homo sapien
agaagtacaagcattggctccaagg

SEQ ID NO: 2057173 - DNA, 25 bp, Homo sapien
ggagaagtacaagcattggctccaa

SEQ ID NO: 2057174 - DNA, 25 bp, Homo sapien
taagtaaagatgggagaagtacaag

SEQ ID NO: 2057175 - DNA, 25 bp, Homo sapien
tcagggcccacctccatcttgtggg

SEQ ID NO: 2057176 - DNA, 25 bp, Homo sapien
gggcccacctccatcttgtgggctt

SEQ ID NO: 2057177 - DNA, 25 bp, Homo sapien
cgaaggacacagagggctcagggcc

SEQ ID NO: 2057178 - DNA, 25 bp, Homo sapien
gctcagggcccacctccatcttgtg

SEQ ID NO: 2057179 - DNA, 25 bp, Homo sapien
tggtgtgcttagatctctttgggcc

SEQ ID NO: 2057180 - DNA, 25 bp, Homo sapien
tgaagtacgtagagggtggaaacca

SEQ ID NO: 2057181 - DNA, 25 bp, Homo sapien
ggcatgtcttgtacgtaccatttgg

SEQ ID NO: 2057182 - DNA, 25 bp, Homo sapien
tctttgggccaatgggcatgtcttg

SEQ ID NO: 2057183 - DNA, 25 bp, Homo sapien
tgagagcttagttgaggctttaacc

SEQ ID NO: 2057184 - DNA, 25 bp, Homo sapien
ggactcaatgccagtttgatgatgg

SEQ ID NO: 2057185 - DNA, 25 bp, Homo sapien
cttgattatccttactgatggagag

SEQ ID NO: 2057186 - DNA, 25 bp, Homo sapien
tacatcatcttgattatccttactg

SEQ ID NO: 2057187 - DNA, 25 bp, Homo sapien
ggactaaagaccttcgaacatccat

SEQ ID NO: 2057188 - DNA, 25 bp, Homo sapien
gatggaagtgaaatagttcttgtcc

SEQ ID NO: 2057189 - DNA, 25 bp, Homo sapien
caggctgagggtccgttgctattta

SEQ ID NO: 2057190 - DNA, 25 bp, Homo sapien
tttcttttgctacagtcaagatgga

SEQ ID NO: 2057191 - DNA, 25 bp, Homo sapien
gctatttatcatgctcttgggctga

SEQ ID NO: 2057192 - DNA, 25 bp, Homo sapien
cagggactaatctatggtccccgga

SEQ ID NO: 2057193 - DNA, 25 bp, Homo sapien
cctttctgattagggcatgggctaa

SEQ ID NO: 2057194 - DNA, 25 bp, Homo sapien
tcattccgtcctatgggctggctac

SEQ ID NO: 2057195 - DNA, 25 bp, Homo sapien
tgccactgttggaaggcataggaaa

SEQ ID NO: 2057196 - DNA, 25 bp, Homo sapien
gaccccttgatggtaatctagatgc

SEQ ID NO: 2057197 - DNA, 25 bp, Homo sapien
gatggcatgttggagcatctgcagc

SEQ ID NO: 2057198 - DNA, 25 bp, Homo sapien
tgatgtcacttaacctgtagctgga

SEQ ID NO: 2057199 - DNA, 25 bp, Homo sapien
tctagatgcagccaagtgtaggact

SEQ ID NO: 2057200 - DNA, 25 bp, Homo sapien
cccagagagtagaccaagagaggca

SEQ ID NO: 2057201 - DNA, 25 bp, Homo sapien
agggaccccagagagtagaccaaga

SEQ ID NO: 2057202 - DNA, 25 bp, Homo sapien
ggaccccagagagtagaccaagaga

SEQ ID NO: 2057203 - DNA, 25 bp, Homo sapien
gaccccagagagtagaccaagagag

SEQ ID NO: 2057204 - DNA, 25 bp, Homo sapien
attgccgaaggctagcgcctcctcc

SEQ ID NO: 2057205 - DNA, 25 bp, Homo sapien
tattgccgaaggctagcgcctcctc

SEQ ID NO: 2057206 - DNA, 25 bp, Homo sapien
tgccgaaggctagcgcctcctccat

SEQ ID NO: 2057207 - DNA, 25 bp, Homo sapien
aatattgccgaaggctagcgcctcc

SEQ ID NO: 2057208 - DNA, 25 bp, Homo sapien
aaggactggcaatgtgaccacaagg

SEQ ID NO: 2057209 - DNA, 25 bp, Homo sapien
ctgctcgaatagaagtaaaatggac

SEQ ID NO: 2057210 - DNA, 25 bp, Homo sapien
tggacaaaggactggcaatgtgacc

SEQ ID NO: 2057211 - DNA, 25 bp, Homo sapien
tcttcacagtcagatatggatatgc

SEQ ID NO: 2057212 - DNA, 25 bp, Homo sapien
agttcatgaagtaggaatttggctt

SEQ ID NO: 2057213 - DNA, 25 bp, Homo sapien
tggcttttggtccatcaatgctctg

SEQ ID NO: 2057214 - DNA, 25 bp, Homo sapien
ttttggtccatcaatgctctgcctt

SEQ ID NO: 2057215 - DNA, 25 bp, Homo sapien
tgaagtaggaatttggcttttggtc

SEQ ID NO: 2057216 - DNA, 25 bp, Homo sapien
agactgcctgcccaattccacatcg

SEQ ID NO: 2057217 - DNA, 25 bp, Homo sapien
tgcctgcccaattccacatcgttgg

SEQ ID NO: 2057218 - DNA, 25 bp, Homo sapien
ttggagtgtgcagggtccagctcat

SEQ ID NO: 2057219 - DNA, 25 bp, Homo sapien
ctgcctgcccaattccacatcgttg

SEQ ID NO: 2057220 - DNA, 25 bp, Homo sapien
tactctgaaaattcccttacatggg

SEQ ID NO: 2057221 - DNA, 25 bp, Homo sapien
caatggcccttttctacatatcaac

SEQ ID NO: 2057222 - DNA, 25 bp, Homo sapien
gaatggaagccagaccacccatact

SEQ ID NO: 2057223 - DNA, 25 bp, Homo sapien
cattcttactaagacttcaggccaa

SEQ ID NO: 2057224 - DNA, 25 bp, Homo sapien
tttaagcaattctcctccctcggtc

SEQ ID NO: 2057225 - DNA, 25 bp, Homo sapien
taagcaattctcctccctcggtctc

SEQ ID NO: 2057226 - DNA, 25 bp, Homo sapien
caattctcctccctcggtctcctga

SEQ ID NO: 2057227 - DNA, 25 bp, Homo sapien
ttaagcaattctcctccctcggtct

SEQ ID NO: 2057228 - DNA, 25 bp, Homo sapien
tattgcagaccataaaccacacatt

SEQ ID NO: 2057229 - DNA, 25 bp, Homo sapien
ccactgtctcaaggccaagcctaag

SEQ ID NO: 2057230 - DNA, 25 bp, Homo sapien
tgtcgaactgcgttgatccagggcc

SEQ ID NO: 2057231 - DNA, 25 bp, Homo sapien
taagcatacagtagctactccatgt

SEQ ID NO: 2057232 - DNA, 25 bp, Homo sapien
ctgtcattcccacactgatgtcact

SEQ ID NO: 2057233 - DNA, 25 bp, Homo sapien
cattcccacactgatgtcactgatg

SEQ ID NO: 2057234 - DNA, 25 bp, Homo sapien
tcccacactgatgtcactgatgggc

SEQ ID NO: 2057235 - DNA, 25 bp, Homo sapien
gtcattcccacactgatgtcactga

SEQ ID NO: 2057236 - DNA, 25 bp, Homo sapien
tactgtcgtttcagactaactttcc

SEQ ID NO: 2057237 - DNA, 25 bp, Homo sapien
aactgtccatgaagagagaatttgg

SEQ ID NO: 2057238 - DNA, 25 bp, Homo sapien
gcactttgtaaaatcatgaaaaccc

SEQ ID NO: 2057239 - DNA, 25 bp, Homo sapien
agttgaaaaacccagatgcagggct

SEQ ID NO: 2057240 - DNA, 25 bp, Homo sapien
tcacaccctgcagttggcagcatct

SEQ ID NO: 2057241 - DNA, 25 bp, Homo sapien
aggaatgtcacaccctgcagttggc

SEQ ID NO: 2057242 - DNA, 25 bp, Homo sapien
cctgcagttggcagcatctctgacc

SEQ ID NO: 2057243 - DNA, 25 bp, Homo sapien
cagttggcagcatctctgacccagc

SEQ ID NO: 2057244 - DNA, 25 bp, Homo sapien
ctaggagaactagggcccatcagct

SEQ ID NO: 2057245 - DNA, 25 bp, Homo sapien
tgagattcaacaccagcccattaag

SEQ ID NO: 2057246 - DNA, 25 bp, Homo sapien
ggtttactgcctgcgatgaccctaa

SEQ ID NO: 2057247 - DNA, 25 bp, Homo sapien
ccatcagctggtgcttaagaagacc

SEQ ID NO: 2057248 - DNA, 25 bp, Homo sapien
ccacaacactggtagagcctgtgtc

SEQ ID NO: 2057249 - DNA, 25 bp, Homo sapien
cacaacactggtagagcctgtgtct

SEQ ID NO: 2057250 - DNA, 25 bp, Homo sapien
acaacactggtagagcctgtgtctt

SEQ ID NO: 2057251 - DNA, 25 bp, Homo sapien
caacactggtagagcctgtgtcttc

SEQ ID NO: 2057252 - DNA, 25 bp, Homo sapien
ctccaaatgaccacacaagttcccc

SEQ ID NO: 2057253 - DNA, 25 bp, Homo sapien
aatgaccacacaagttccccagcaa

SEQ ID NO: 2057254 - DNA, 25 bp, Homo sapien
ccaaatgaccacacaagttccccag

SEQ ID NO: 2057255 - DNA, 25 bp, Homo sapien
aaatgaccacacaagttccccagca

SEQ ID NO: 2057256 - DNA, 25 bp, Homo sapien
cattgctggctggaaattgaacctg

SEQ ID NO: 2057257 - DNA, 25 bp, Homo sapien
gacaagcctgggaatcgctgagtta

SEQ ID NO: 2057258 - DNA, 25 bp, Homo sapien
gaaatggcaaccttgtcagaactag

SEQ ID NO: 2057259 - DNA, 25 bp, Homo sapien
gctgagaatccaagccaacactgga

SEQ ID NO: 2057260 - DNA, 25 bp, Homo sapien
ggcattacgtgctaaccagaactaa

SEQ ID NO: 2057261 - DNA, 25 bp, Homo sapien
gacagtgcaaaggtcagctcagctc

SEQ ID NO: 2057262 - DNA, 25 bp, Homo sapien
cagggaatcagttacagtctcttgc

SEQ ID NO: 2057263 - DNA, 25 bp, Homo sapien
agctacaagtatttccctggagagg

SEQ ID NO: 2057264 - DNA, 25 bp, Homo sapien
cacgaggagctcaagtcaccttctc

SEQ ID NO: 2057265 - DNA, 25 bp, Homo sapien
atgaaacgcccttttgtcttctttg

SEQ ID NO: 2057266 - DNA, 25 bp, Homo sapien
tgagtgatcaaaacacacgaggagc

SEQ ID NO: 2057267 - DNA, 25 bp, Homo sapien
gctctcccactgtcaggttatgaaa

SEQ ID NO: 2057268 - DNA, 25 bp, Homo sapien
gtgagtgtgtctcacggtgagctcc

SEQ ID NO: 2057269 - DNA, 25 bp, Homo sapien
cagacatgaagacgagatggtgagt

SEQ ID NO: 2057270 - DNA, 25 bp, Homo sapien
aagacgagatggtgagtgtgtctca

SEQ ID NO: 2057271 - DNA, 25 bp, Homo sapien
tcacggtgagctccggtggcccaag

SEQ ID NO: 2057272 - DNA, 25 bp, Homo sapien
gattctgccaataggatgaaataca

SEQ ID NO: 2057273 - DNA, 25 bp, Homo sapien
cagcccaacccactgttttcctttg

SEQ ID NO: 2057274 - DNA, 25 bp, Homo sapien
tgcctgttggattctgccaatagga

SEQ ID NO: 2057275 - DNA, 25 bp, Homo sapien
gttggattctgccaataggatgaaa

SEQ ID NO: 2057276 - DNA, 25 bp, Homo sapien
agagctatctgtgatgagatgtctc

SEQ ID NO: 2057277 - DNA, 25 bp, Homo sapien
gaaccaagcagaccacttggacatc

SEQ ID NO: 2057278 - DNA, 25 bp, Homo sapien
tcagacgcaggcatggaaccaagca

SEQ ID NO: 2057279 - DNA, 25 bp, Homo sapien
gacatcatggccaaggcaaacctag

SEQ ID NO: 2057280 - DNA, 25 bp, Homo sapien
tccatgaagtcctgtaggatcacag

SEQ ID NO: 2057281 - DNA, 25 bp, Homo sapien
tgaagtcctgtaggatcacagtcat

SEQ ID NO: 2057282 - DNA, 25 bp, Homo sapien
cttccatgaagtcctgtaggatcac

SEQ ID NO: 2057283 - DNA, 25 bp, Homo sapien
catgaagtcctgtaggatcacagtc

SEQ ID NO: 2057284 - DNA, 25 bp, Homo sapien
caaagaaagttcagactccagcact

SEQ ID NO: 2057285 - DNA, 25 bp, Homo sapien
ccagcactccagttagggcaagcct

SEQ ID NO: 2057286 - DNA, 25 bp, Homo sapien
ggtgccagctcttgacgaatttgca

SEQ ID NO: 2057287 - DNA, 25 bp, Homo sapien
ggctgcatctgagatcaaacgatgt

SEQ ID NO: 2057288 - DNA, 25 bp, Homo sapien
tgggtcccctagcaaaccatttctg

SEQ ID NO: 2057289 - DNA, 25 bp, Homo sapien
ctgggtcccctagcaaaccatttct

SEQ ID NO: 2057290 - DNA, 25 bp, Homo sapien
gaggaagcaatgaggaaagacttgt

SEQ ID NO: 2057291 - DNA, 25 bp, Homo sapien
ggtcccctagcaaaccatttctgcc

SEQ ID NO: 2057292 - DNA, 25 bp, Homo sapien
caccaccgtgtgtgcaccagaggct

SEQ ID NO: 2057293 - DNA, 25 bp, Homo sapien
agcagacgcctgtgccaacgcaggc

SEQ ID NO: 2057294 - DNA, 25 bp, Homo sapien
tggctcagccagaagacatccaggc

SEQ ID NO: 2057295 - DNA, 25 bp, Homo sapien
tcttctgggagcctctcctcatggc

SEQ ID NO: 2057296 - DNA, 25 bp, Homo sapien
taggaagctagagatgccagggaac

SEQ ID NO: 2057297 - DNA, 25 bp, Homo sapien
taggcagatatcacaaccacaacca

SEQ ID NO: 2057298 - DNA, 25 bp, Homo sapien
catgtcctccccttcatgcaggaga

SEQ ID NO: 2057299 - DNA, 25 bp, Homo sapien
gccaggcctgtgacaaacagttcat

SEQ ID NO: 2057300 - DNA, 25 bp, Homo sapien
cagaatgcctcttgcggcagtgaac

SEQ ID NO: 2057301 - DNA, 25 bp, Homo sapien
cactcgcctgctgccgtgttgtgat

SEQ ID NO: 2057302 - DNA, 25 bp, Homo sapien
tcatggatgagactactgacgccag

SEQ ID NO: 2057303 - DNA, 25 bp, Homo sapien
tgacgccagagagctatggcaactt

SEQ ID NO: 2057304 - DNA, 25 bp, Homo sapien
gcgacgtccatgaccgctacgagag

SEQ ID NO: 2057305 - DNA, 25 bp, Homo sapien
gccgctacttctgccgcgtcgagtt

SEQ ID NO: 2057306 - DNA, 25 bp, Homo sapien
tatgcgggcccgcaggtgttccgct

SEQ ID NO: 2057307 - DNA, 25 bp, Homo sapien
agcgagctctgccagacggcgctga

SEQ ID NO: 2057308 - DNA, 25 bp, Homo sapien
gggcctcgacggtcgccctcctgct

SEQ ID NO: 2057309 - DNA, 25 bp, Homo sapien
gttccgcttccatggcgccagcggg

SEQ ID NO: 2057310 - DNA, 25 bp, Homo sapien
ctgttccgcttccatggcgccagcg

SEQ ID NO: 2057311 - DNA, 25 bp, Homo sapien
ctgctcggcgctctcggcttcaagg

SEQ ID NO: 2057312 - DNA, 25 bp, Homo sapien
ccctgaatctgaaagccgaccgttg

SEQ ID NO: 2057313 - DNA, 25 bp, Homo sapien
tcaattcatagaccctgtacaggct

SEQ ID NO: 2057314 - DNA, 25 bp, Homo sapien
gaaagccgaccgttgttcagtcatt

SEQ ID NO: 2057315 - DNA, 25 bp, Homo sapien
gaggagcctaggcactcccataact

SEQ ID NO: 2057316 - DNA, 25 bp, Homo sapien
gagcctgtctgagctgttaagaggt

SEQ ID NO: 2057317 - DNA, 25 bp, Homo sapien
ggagcaggcttgtgtacctccttgt

SEQ ID NO: 2057318 - DNA, 25 bp, Homo sapien
gagctgttaagaggtcacaggagca

SEQ ID NO: 2057319 - DNA, 25 bp, Homo sapien
ctttggggcacctctatggaaagtc

SEQ ID NO: 2057320 - DNA, 25 bp, Homo sapien
ttatttgcagaattttacttaacca

SEQ ID NO: 2057321 - DNA, 25 bp, Homo sapien
ccctttgtacaagtatgaaaaatgt

SEQ ID NO: 2057322 - DNA, 25 bp, Homo sapien
accctttgtacaagtatgaaaaatg

SEQ ID NO: 2057323 - DNA, 25 bp, Homo sapien
aaattcgaatctagtttatttgcag

SEQ ID NO: 2057324 - DNA, 25 bp, Homo sapien
tatagcacgttcctagcccagagtt

SEQ ID NO: 2057325 - DNA, 25 bp, Homo sapien
tatctaaaggtctgcctcaaggagg

SEQ ID NO: 2057326 - DNA, 25 bp, Homo sapien
aacttaaatgtatgccccaggtgcc

SEQ ID NO: 2057327 - DNA, 25 bp, Homo sapien
tcaaagaagtgagagacgcaggcac

SEQ ID NO: 2057328 - DNA, 25 bp, Homo sapien
agaagtcaaactgctcattcccagg

SEQ ID NO: 2057329 - DNA, 25 bp, Homo sapien
tgagacagatccctctgagacggac

SEQ ID NO: 2057330 - DNA, 25 bp, Homo sapien
caagtgtttcagcaggtccattggc

SEQ ID NO: 2057331 - DNA, 25 bp, Homo sapien
caaaaatcgctgttgccagatcaga

SEQ ID NO: 2057332 - DNA, 25 bp, Homo sapien
tgagtggctctgcacccaagtggaa

SEQ ID NO: 2057333 - DNA, 25 bp, Homo sapien
caaagggtgcaaacttaggtgtcga

SEQ ID NO: 2057334 - DNA, 25 bp, Homo sapien
tacacggctggatggaaattgactt

SEQ ID NO: 2057335 - DNA, 25 bp, Homo sapien
gatgactgggacattcggcaactgt

SEQ ID NO: 2057336 - DNA, 25 bp, Homo sapien
tacagacagttaacgagaagagcca

SEQ ID NO: 2057337 - DNA, 25 bp, Homo sapien
caggatgccttataaattgggtggc

SEQ ID NO: 2057338 - DNA, 25 bp, Homo sapien
taatgcacttctggatacagacagt

SEQ ID NO: 2057339 - DNA, 25 bp, Homo sapien
ttcccatcttgaaggcaatggccag

SEQ ID NO: 2057340 - DNA, 25 bp, Homo sapien
atgccatggattcaagagcattcag

SEQ ID NO: 2057341 - DNA, 25 bp, Homo sapien
tgccatggattcaagagcattcaga

SEQ ID NO: 2057342 - DNA, 25 bp, Homo sapien
gccatggattcaagagcattcagag

SEQ ID NO: 2057343 - DNA, 25 bp, Homo sapien
tgccacaccgatttctaaagcctgc

SEQ ID NO: 2057344 - DNA, 25 bp, Homo sapien
ctgccacaccgatttctaaagcctg

SEQ ID NO: 2057345 - DNA, 25 bp, Homo sapien
caccagattgtccactccttccgtt

SEQ ID NO: 2057346 - DNA, 25 bp, Homo sapien
aaagggaacactgtgctaccaccac

SEQ ID NO: 2057347 - DNA, 25 bp, Homo sapien
catcatgtcatgacgcgcacaggct

SEQ ID NO: 2057348 - DNA, 25 bp, Homo sapien
ccctgccttctagggaagatgtgca

SEQ ID NO: 2057349 - DNA, 25 bp, Homo sapien
gatgtgcaggcaaacttctaaccct

SEQ ID NO: 2057350 - DNA, 25 bp, Homo sapien
gatctgatcttccataggaacctga

SEQ ID NO: 2057351 - DNA, 25 bp, Homo sapien
ccataggaacctgaactgaaaggaa

SEQ ID NO: 2057352 - DNA, 25 bp, Homo sapien
aggcagccatgcttcgggcaaccac

SEQ ID NO: 2057353 - DNA, 25 bp, Homo sapien
agagccaggcctcaaacggatctga

SEQ ID NO: 2057354 - DNA, 25 bp, Homo sapien
cctactgaagtatatcacaacctgt

SEQ ID NO: 2057355 - DNA, 25 bp, Homo sapien
tgaggcctatttagaacaacagtgt

SEQ ID NO: 2057356 - DNA, 25 bp, Homo sapien
caacctgtaagtaggtacagatgtc

SEQ ID NO: 2057357 - DNA, 25 bp, Homo sapien
tctggagaacctagatcctaagtcg

SEQ ID NO: 2057358 - DNA, 25 bp, Homo sapien
gattctgtcaggacggagtcattct

SEQ ID NO: 2057359 - DNA, 25 bp, Homo sapien
tgagtctctcctcagccacgaggtt

SEQ ID NO: 2057360 - DNA, 25 bp, Homo sapien
gaaggacttggtgccaccacaaaaa

SEQ ID NO: 2057361 - DNA, 25 bp, Homo sapien
tagacaaaggcgacttccggccaaa

SEQ ID NO: 2057362 - DNA, 25 bp, Homo sapien
cactgaagcaagtagacgtaaagag

SEQ ID NO: 2057363 - DNA, 25 bp, Homo sapien
gagtcaagtaactgcccaaggtgag

SEQ ID NO: 2057364 - DNA, 25 bp, Homo sapien
gagctcgggaacctgaagggatacc

SEQ ID NO: 2057365 - DNA, 25 bp, Homo sapien
gaactcttccatggtgagctcggga

SEQ ID NO: 2057366 - DNA, 25 bp, Homo sapien
tagtctcagccatgtggcggacgga

SEQ ID NO: 2057367 - DNA, 25 bp, Homo sapien
atactgccccgaaggaactctgctg

SEQ ID NO: 2057368 - DNA, 25 bp, Homo sapien
ctttgaagtaggcagtgatgcaggc

SEQ ID NO: 2057369 - DNA, 25 bp, Homo sapien
cattttttggccaatccaggtccgg

SEQ ID NO: 2057370 - DNA, 25 bp, Homo sapien
gagtaaaagcttggcattttggaac

SEQ ID NO: 2057371 - DNA, 25 bp, Homo sapien
tgctgaggaattgaaccatctgatg

SEQ ID NO: 2057372 - DNA, 25 bp, Homo sapien
cgggcgggttaaagacaatgatatc

SEQ ID NO: 2057373 - DNA, 25 bp, Homo sapien
tcctgttctaggactgctaaggtga

SEQ ID NO: 2057374 - DNA, 25 bp, Homo sapien
cagtaggaatagaaaggcccgcaga

SEQ ID NO: 2057375 - DNA, 25 bp, Homo sapien
cttttaggagcttcatgattaattc

SEQ ID NO: 2057376 - DNA, 25 bp, Homo sapien
taattcagcataagattcttttgcc

SEQ ID NO: 2057377 - DNA, 25 bp, Homo sapien
agatgcttctggctgtcagtaggaa

SEQ ID NO: 2057378 - DNA, 25 bp, Homo sapien
ctggtacgacacaatatccacaaga

SEQ ID NO: 2057379 - DNA, 25 bp, Homo sapien
ggtacgacacaatatccacaagatg

SEQ ID NO: 2057380 - DNA, 25 bp, Homo sapien
gacacaatatccacaagatgccatg

SEQ ID NO: 2057381 - DNA, 25 bp, Homo sapien
tacgacacaatatccacaagatgcc

SEQ ID NO: 2057382 - DNA, 25 bp, Homo sapien
tccaaggagactaagtaaaggtgaa

SEQ ID NO: 2057383 - DNA, 25 bp, Homo sapien
tgtccaaggagactaagtaaaggtg

SEQ ID NO: 2057384 - DNA, 25 bp, Homo sapien
ctgtccaaggagactaagtaaaggt

SEQ ID NO: 2057385 - DNA, 25 bp, Homo sapien
caaggagactaagtaaaggtgaatc

SEQ ID NO: 2057386 - DNA, 25 bp, Homo sapien
tccctgttctggtgggacatgccaa

SEQ ID NO: 2057387 - DNA, 25 bp, Homo sapien
ggcatctggttaaaggtacatctca

SEQ ID NO: 2057388 - DNA, 25 bp, Homo sapien
caaagatctaagcagccttgccgaa

SEQ ID NO: 2057389 - DNA, 25 bp, Homo sapien
gatgtattgagtatctggaacccag

SEQ ID NO: 2057390 - DNA, 25 bp, Homo sapien
tggtctaccagttgaacttcctttg

SEQ ID NO: 2057391 - DNA, 25 bp, Homo sapien
tgtttggtctaccagttgaacttcc

SEQ ID NO: 2057392 - DNA, 25 bp, Homo sapien
ccagttgaacttcctttgccaataa

SEQ ID NO: 2057393 - DNA, 25 bp, Homo sapien
tcctttgccaataaaatcatcatga

SEQ ID NO: 2057394 - DNA, 25 bp, Homo sapien
gagagcacactaacccagttgactt

SEQ ID NO: 2057395 - DNA, 25 bp, Homo sapien
tcacagagtacagaccccaaaaata

SEQ ID NO: 2057396 - DNA, 25 bp, Homo sapien
gacttcacagagtacagaccccaaa

SEQ ID NO: 2057397 - DNA, 25 bp, Homo sapien
agttgacttcacagagtacagaccc

SEQ ID NO: 2057398 - DNA, 25 bp, Homo sapien
cttccatggcagtttccggtacgtg

SEQ ID NO: 2057399 - DNA, 25 bp, Homo sapien
tgcatcaggtgcaaccaaagggctc

SEQ ID NO: 2057400 - DNA, 25 bp, Homo sapien
gaaagcgtacagaatgaactctggc

SEQ ID NO: 2057401 - DNA, 25 bp, Homo sapien
cattttgggtgctgtacatgcttca

SEQ ID NO: 2057402 - DNA, 25 bp, Homo sapien
taaaactctcatgcagtgagtcaat

SEQ ID NO: 2057403 - DNA, 25 bp, Homo sapien
tgcagtgagtcaatacagtcagtga

SEQ ID NO: 2057404 - DNA, 25 bp, Homo sapien
ccacagtatcactctctagccaggg

SEQ ID NO: 2057405 - DNA, 25 bp, Homo sapien
tacagtcagtgaacagctgcacaat

SEQ ID NO: 2057406 - DNA, 25 bp, Homo sapien
aactggggttgcaggcaccgaccac

SEQ ID NO: 2057407 - DNA, 25 bp, Homo sapien
cacgcctggcccagagaaattcttt

SEQ ID NO: 2057408 - DNA, 25 bp, Homo sapien
agcaactggggttgcaggcaccgac

SEQ ID NO: 2057409 - DNA, 25 bp, Homo sapien
ccgagcaactggggttgcaggcacc

SEQ ID NO: 2057410 - DNA, 25 bp, Homo sapien
cgttgtcctctaaaaccaggatcca

SEQ ID NO: 2057411 - DNA, 25 bp, Homo sapien
tccatggcttaaagagctgaatgat

SEQ ID NO: 2057412 - DNA, 25 bp, Homo sapien
ttcgttgtcctctaaaaccaggatc

SEQ ID NO: 2057413 - DNA, 25 bp, Homo sapien
taaaaccaggatccatggcttaaag

SEQ ID NO: 2057414 - DNA, 25 bp, Homo sapien
catcttggataaccgaagcttataa

SEQ ID NO: 2057415 - DNA, 25 bp, Homo sapien
aagtctgaaagccactgtatagtct

SEQ ID NO: 2057416 - DNA, 25 bp, Homo sapien
tgtcttcacatcagccatataagga

SEQ ID NO: 2057417 - DNA, 25 bp, Homo sapien
tttcacaaggtagcccaagaatgtc

SEQ ID NO: 2057418 - DNA, 25 bp, Homo sapien
tgacaagagagcatcagaagagctg

SEQ ID NO: 2057419 - DNA, 25 bp, Homo sapien
cagagtggccttccaacactcgggg

SEQ ID NO: 2057420 - DNA, 25 bp, Homo sapien
acggcgccctcggtggacgctgccc

SEQ ID NO: 2057421 - DNA, 25 bp, Homo sapien
agctgggaagcacggcgccctcggt

SEQ ID NO: 2057422 - DNA, 25 bp, Homo sapien
taaagtactttccacccagagcgaa

SEQ ID NO: 2057423 - DNA, 25 bp, Homo sapien
gccagttacaatatgtccagtgtga

SEQ ID NO: 2057424 - DNA, 25 bp, Homo sapien
gagaacgatggtgaggccagttaca

SEQ ID NO: 2057425 - DNA, 25 bp, Homo sapien
taaaataacaggttcatggagcagg

SEQ ID NO: 2057426 - DNA, 25 bp, Homo sapien
ggtctggatcttaggacagcgcccc

SEQ ID NO: 2057427 - DNA, 25 bp, Homo sapien
aaattaagctatcactggaaatcac

SEQ ID NO: 2057428 - DNA, 25 bp, Homo sapien
gacagtgccagtctgtgtccaatgg

SEQ ID NO: 2057429 - DNA, 25 bp, Homo sapien
ccaatggccactggggtctggatct

SEQ ID NO: 2057430 - DNA, 25 bp, Homo sapien
gaacaaatttctagctaaattccag

SEQ ID NO: 2057431 - DNA, 25 bp, Homo sapien
gctgaagctcatgacatctgagagg

SEQ ID NO: 2057432 - DNA, 25 bp, Homo sapien
caagggaacatcaacatggtagcca

SEQ ID NO: 2057433 - DNA, 25 bp, Homo sapien
aattccagtcaatagtggtctaata

SEQ ID NO: 2057434 - DNA, 25 bp, Homo sapien
taagtgccaagtgaatggactccag

SEQ ID NO: 2057435 - DNA, 25 bp, Homo sapien
cactgtactggtcaggaaactggta

SEQ ID NO: 2057436 - DNA, 25 bp, Homo sapien
cagaagcctggtacgatcagacaga

SEQ ID NO: 2057437 - DNA, 25 bp, Homo sapien
cagaggaggtttagtggcgcttaac

SEQ ID NO: 2057438 - DNA, 25 bp, Homo sapien
ctgcaggtgcagcattgggagtgaa

SEQ ID NO: 2057439 - DNA, 25 bp, Homo sapien
caccacttgctcatacagctgtatg

SEQ ID NO: 2057440 - DNA, 25 bp, Homo sapien
ttttctgcactctgatttaatgcca

SEQ ID NO: 2057441 - DNA, 25 bp, Homo sapien
aaacttcaccacttgctcatacagc

SEQ ID NO: 2057442 - DNA, 25 bp, Homo sapien
tttctgaatcccaggtgtaggctgc

SEQ ID NO: 2057443 - DNA, 25 bp, Homo sapien
gctgacgtaatccacaatagtaaag

SEQ ID NO: 2057444 - DNA, 25 bp, Homo sapien
gaaaaggctaatgccaactttctga

SEQ ID NO: 2057445 - DNA, 25 bp, Homo sapien
caacttgtaggcattcactaaggcc

SEQ ID NO: 2057446 - DNA, 25 bp, Homo sapien
agcagcttccacaatattaagtgat

SEQ ID NO: 2057447 - DNA, 25 bp, Homo sapien
tattaagtgatggtggtttagcagc

SEQ ID NO: 2057448 - DNA, 25 bp, Homo sapien
cttccttccgtaaaacatgaagctg

SEQ ID NO: 2057449 - DNA, 25 bp, Homo sapien
gcttcacttccttccgtaaaacatg

SEQ ID NO: 2057450 - DNA, 25 bp, Homo sapien
catgccaaggaaagagcaattggct

SEQ ID NO: 2057451 - DNA, 25 bp, Homo sapien
actcaggctgcgtacacatgtgtgc

SEQ ID NO: 2057452 - DNA, 25 bp, Homo sapien
cagccgtagcccttctgtgtgctct

SEQ ID NO: 2057453 - DNA, 25 bp, Homo sapien
cagatgctgctcacaaatgtcgttt

SEQ ID NO: 2057454 - DNA, 25 bp, Homo sapien
acatctaagccatgttcacatcagt

SEQ ID NO: 2057455 - DNA, 25 bp, Homo sapien
cctccctccaatcaaaattacctag

SEQ ID NO: 2057456 - DNA, 25 bp, Homo sapien
tggacctcctgcggttaagtgatcc

SEQ ID NO: 2057457 - DNA, 25 bp, Homo sapien
ggtatgtttgtaaaaacatctaagc

SEQ ID NO: 2057458 - DNA, 25 bp, Homo sapien
taatcaattgagaccggacgcggtg

SEQ ID NO: 2057459 - DNA, 25 bp, Homo sapien
caaaacacttggaacgggctgacct

SEQ ID NO: 2057460 - DNA, 25 bp, Homo sapien
cacttacgggctgtggcacttcagg

SEQ ID NO: 2057461 - DNA, 25 bp, Homo sapien
tatggcacactagcttcagcgaagc

SEQ ID NO: 2057462 - DNA, 25 bp, Homo sapien
gcctctgcactccaaatgtagtgtg

SEQ ID NO: 2057463 - DNA, 25 bp, Homo sapien
gaaccgtgacaactgcggctccttg

SEQ ID NO: 2057464 - DNA, 25 bp, Homo sapien
gctgagattcccgaagagctgcggt

SEQ ID NO: 2057465 - DNA, 25 bp, Homo sapien
ttgtgtctaacagctcaccatccag

SEQ ID NO: 2057466 - DNA, 25 bp, Homo sapien
tctgggccaggttggtcaaactatc

SEQ ID NO: 2057467 - DNA, 25 bp, Homo sapien
gaaattgattcatggcctggcgtgg

SEQ ID NO: 2057468 - DNA, 25 bp, Homo sapien
tgctgacaaggaagccactccaggt

SEQ ID NO: 2057469 - DNA, 25 bp, Homo sapien
taaccaagtgaaccgtctgggccag

SEQ ID NO: 2057470 - DNA, 25 bp, Homo sapien
caccagctgggtggcgtccttctga

SEQ ID NO: 2057471 - DNA, 25 bp, Homo sapien
catgcttccgcaagttacttaaaac

SEQ ID NO: 2057472 - DNA, 25 bp, Homo sapien
ggcttcgtcgggtgcagagcaaggg

SEQ ID NO: 2057473 - DNA, 25 bp, Homo sapien
ggcacaggaggcttcgtcgggtgca

SEQ ID NO: 2057474 - DNA, 25 bp, Homo sapien
catttcaaataggtcaagtacagca

SEQ ID NO: 2057475 - DNA, 25 bp, Homo sapien
caatcaggtgaattagcaggagaac

SEQ ID NO: 2057476 - DNA, 25 bp, Homo sapien
gaaattgctatcacaagggtgctag

SEQ ID NO: 2057477 - DNA, 25 bp, Homo sapien
ctttcaagcaacataagaggccatg

SEQ ID NO: 2057478 - DNA, 25 bp, Homo sapien
cactcattcgaaggggcaggtgctc

SEQ ID NO: 2057479 - DNA, 25 bp, Homo sapien
ataaagtatgtcagcctcaaccctc

SEQ ID NO: 2057480 - DNA, 25 bp, Homo sapien
cattcactcattcgaaggggcaggt

SEQ ID NO: 2057481 - DNA, 25 bp, Homo sapien
gggaataaagtatgtcagcctcaac

SEQ ID NO: 2057482 - DNA, 25 bp, Homo sapien
aatgggactcaagcttggcctgtgt

SEQ ID NO: 2057483 - DNA, 25 bp, Homo sapien
tccagctgcacggacaaactgcagg

SEQ ID NO: 2057484 - DNA, 25 bp, Homo sapien
ccagcaaaggatcagtgaagtccag

SEQ ID NO: 2057485 - DNA, 25 bp, Homo sapien
gatagatgcgctccatgttcaaata

SEQ ID NO: 2057486 - DNA, 25 bp, Homo sapien
tattatgaatatgaccagttcaaat

SEQ ID NO: 2057487 - DNA, 25 bp, Homo sapien
tatgaatatgaccagttcaaattac

SEQ ID NO: 2057488 - DNA, 25 bp, Homo sapien
aaattacattcagatatgctaaaaa

SEQ ID NO: 2057489 - DNA, 25 bp, Homo sapien
aatatgaccagttcaaattacattc

SEQ ID NO: 2057490 - DNA, 25 bp, Homo sapien
agagaagggatataggtatctcctt

SEQ ID NO: 2057491 - DNA, 25 bp, Homo sapien
catcttctagccataatatatatac

SEQ ID NO: 2057492 - DNA, 25 bp, Homo sapien
gatataggtatctcctttttgaaaa

SEQ ID NO: 2057493 - DNA, 25 bp, Homo sapien
tcatcttctagccataatatatata

SEQ ID NO: 2057494 - DNA, 25 bp, Homo sapien
cagttctggtgaagtcaggtaacca

SEQ ID NO: 2057495 - DNA, 25 bp, Homo sapien
ccttgcttgcagcatggtggaagtc

SEQ ID NO: 2057496 - DNA, 25 bp, Homo sapien
agtcagccacctcggtcaaacgtct

SEQ ID NO: 2057497 - DNA, 25 bp, Homo sapien
cctctgctggaacacggagggcctt

SEQ ID NO: 2057498 - DNA, 25 bp, Homo sapien
cttccaatacaaccatctatgggta

SEQ ID NO: 2057499 - DNA, 25 bp, Homo sapien
tgagcaggactttgaaaaaaccttc

SEQ ID NO: 2057500 - DNA, 25 bp, Homo sapien
ctttcaacaaattgatatgagcagg

SEQ ID NO: 2057501 - DNA, 25 bp, Homo sapien
ccttcttccaatacaaccatctatg

SEQ ID NO: 2057502 - DNA, 25 bp, Homo sapien
ccatactgtggtcccggacggtgaa

SEQ ID NO: 2057503 - DNA, 25 bp, Homo sapien
ccggacggtgaagatacagaaggaa

SEQ ID NO: 2057504 - DNA, 25 bp, Homo sapien
gggcccagcgataaatcagcagcct

SEQ ID NO: 2057505 - DNA, 25 bp, Homo sapien
gcctggtgggcccagcgataaatca

SEQ ID NO: 2057506 - DNA, 25 bp, Homo sapien
tcaaatgcagaactgctatttgtac

SEQ ID NO: 2057507 - DNA, 25 bp, Homo sapien
cttctaccactcaaatgcagaactg

SEQ ID NO: 2057508 - DNA, 25 bp, Homo sapien
cactcaaatgcagaactgctatttg

SEQ ID NO: 2057509 - DNA, 25 bp, Homo sapien
ccactcaaatgcagaactgctattt

SEQ ID NO: 2057510 - DNA, 25 bp, Homo sapien
aagcagagtttatcaccaattcccc

SEQ ID NO: 2057511 - DNA, 25 bp, Homo sapien
gatggattccatgttgagcactgtc

SEQ ID NO: 2057512 - DNA, 25 bp, Homo sapien
tccggagctgggagtcctcttcaaa

SEQ ID NO: 2057513 - DNA, 25 bp, Homo sapien
attccccttcaataactctccggag

SEQ ID NO: 2057514 - DNA, 25 bp, Homo sapien
tgccacaatccagcttaccaaagat

SEQ ID NO: 2057515 - DNA, 25 bp, Homo sapien
ggaaggagtgatgttgcctgccaca

SEQ ID NO: 2057516 - DNA, 25 bp, Homo sapien
ggtcacagtggtaacccaaggcatt

SEQ ID NO: 2057517 - DNA, 25 bp, Homo sapien
taccaaagatgagagcagactccgg

SEQ ID NO: 2057518 - DNA, 25 bp, Homo sapien
ggtagagtaatttctgtatgcagtc

SEQ ID NO: 2057519 - DNA, 25 bp, Homo sapien
tctgtatgcagtcttcctgcatcag

SEQ ID NO: 2057520 - DNA, 25 bp, Homo sapien
ttctgtatgcagtcttcctgcatca

SEQ ID NO: 2057521 - DNA, 25 bp, Homo sapien
tgttgttggtagagtaatttctgta

SEQ ID NO: 2057522 - DNA, 25 bp, Homo sapien
ggcccacttcattgggctgagtgct

SEQ ID NO: 2057523 - DNA, 25 bp, Homo sapien
gctggcttatgagagcctgaaccca

SEQ ID NO: 2057524 - DNA, 25 bp, Homo sapien
tgttctcggtaccagagatgctggc

SEQ ID NO: 2057525 - DNA, 25 bp, Homo sapien
gaagaggataggttgttctcggtac

SEQ ID NO: 2057526 - DNA, 25 bp, Homo sapien
ggtgacctgttgtgtgacaccctga

SEQ ID NO: 2057527 - DNA, 25 bp, Homo sapien
gagaagcttcacgttgtccccatgg

SEQ ID NO: 2057528 - DNA, 25 bp, Homo sapien
tgagggacaccgctgtccaagtgta

SEQ ID NO: 2057529 - DNA, 25 bp, Homo sapien
gctggctcctgtcaggtgctgtgcc

SEQ ID NO: 2057530 - DNA, 25 bp, Homo sapien
caagcacacaggaggacgcacttta

SEQ ID NO: 2057531 - DNA, 25 bp, Homo sapien
cagaaaattcctaaattggtcccat

SEQ ID NO: 2057532 - DNA, 25 bp, Homo sapien
gtcccatttttcgaccaaagcacta

SEQ ID NO: 2057533 - DNA, 25 bp, Homo sapien
catgggttaaaaggaattctatcta

SEQ ID NO: 2057534 - DNA, 25 bp, Homo sapien
gaattcccaatagtgggatgccttc

SEQ ID NO: 2057535 - DNA, 25 bp, Homo sapien
taaaggcagaatcttatccaggaca

SEQ ID NO: 2057536 - DNA, 25 bp, Homo sapien
aggacatgaaccactgttctcaaat

SEQ ID NO: 2057537 - DNA, 25 bp, Homo sapien
caaatgtcttgactggaccagaatt

SEQ ID NO: 2057538 - DNA, 25 bp, Homo sapien
gccaatgggcatgcccgctttcaca

SEQ ID NO: 2057539 - DNA, 25 bp, Homo sapien
tgtggcccacagctgtcatagataa

SEQ ID NO: 2057540 - DNA, 25 bp, Homo sapien
gctgtcatagataaggctagataac

SEQ ID NO: 2057541 - DNA, 25 bp, Homo sapien
ggctagataacagccaatgggcatg

SEQ ID NO: 2057542 - DNA, 25 bp, Homo sapien
taaatgaggtctcgggtgtctctcc

SEQ ID NO: 2057543 - DNA, 25 bp, Homo sapien
ttccaggcccattggttaaatgagg

SEQ ID NO: 2057544 - DNA, 25 bp, Homo sapien
aggatgaaacgtgggtgactctgtc

SEQ ID NO: 2057545 - DNA, 25 bp, Homo sapien
aagggaacagctggacaattcggct

SEQ ID NO: 2057546 - DNA, 25 bp, Homo sapien
gcttctgtgcaaggtacttctgata

SEQ ID NO: 2057547 - DNA, 25 bp, Homo sapien
cattaaagccacttcagcatggact

SEQ ID NO: 2057548 - DNA, 25 bp, Homo sapien
ctgcttgatccagatgaagggtagc

SEQ ID NO: 2057549 - DNA, 25 bp, Homo sapien
gataagcttcaagaaccattaaagc

SEQ ID NO: 2057550 - DNA, 25 bp, Homo sapien
tgtttagcaaatccccaattcagtc

SEQ ID NO: 2057551 - DNA, 25 bp, Homo sapien
cgaatcaccgctatctcagatgcag

SEQ ID NO: 2057552 - DNA, 25 bp, Homo sapien
tcaccactgtcaggttgtaattcaa

SEQ ID NO: 2057553 - DNA, 25 bp, Homo sapien
cacaggccagtttattcttcaccac

SEQ ID NO: 2057554 - DNA, 25 bp, Homo sapien
tgtgatagtccctaaaagctctcga

SEQ ID NO: 2057555 - DNA, 25 bp, Homo sapien
tctctctggtagacaaggtgacata

SEQ ID NO: 2057556 - DNA, 25 bp, Homo sapien
caacctggtcaatggtctcttgaac

SEQ ID NO: 2057557 - DNA, 25 bp, Homo sapien
tgaactctatccagaaggacggaaa

SEQ ID NO: 2057558 - DNA, 25 bp, Homo sapien
ttttatgaagtcttcgtccacattg

SEQ ID NO: 2057559 - DNA, 25 bp, Homo sapien
tcatatatctccagaacaataattt

SEQ ID NO: 2057560 - DNA, 25 bp, Homo sapien
caaaggtagtcagaaggcaaatctc

SEQ ID NO: 2057561 - DNA, 25 bp, Homo sapien
gtcttcgtccacattggttcttctg

SEQ ID NO: 2057562 - DNA, 25 bp, Homo sapien
tattcatagaagaaagacacttctc

SEQ ID NO: 2057563 - DNA, 25 bp, Homo sapien
gaagaaagacacttctcaaagttgg

SEQ ID NO: 2057564 - DNA, 25 bp, Homo sapien
ctcaaagttggtaaaatgttctggg

SEQ ID NO: 2057565 - DNA, 25 bp, Homo sapien
gacacttctcaaagttggtaaaatg

SEQ ID NO: 2057566 - DNA, 25 bp, Homo sapien
gagcttccacagcatttgcacagac

SEQ ID NO: 2057567 - DNA, 25 bp, Homo sapien
ggcatctcggacataaacagccaaa

SEQ ID NO: 2057568 - DNA, 25 bp, Homo sapien
agtcccaaagggcatctcggacata

SEQ ID NO: 2057569 - DNA, 25 bp, Homo sapien
tccacctggtgcatgaggtagaaga

SEQ ID NO: 2057570 - DNA, 25 bp, Homo sapien
tcagcacatgtaggacagccctcaa

SEQ ID NO: 2057571 - DNA, 25 bp, Homo sapien
tgtagtttctccatagagtagggct

SEQ ID NO: 2057572 - DNA, 25 bp, Homo sapien
tggttatggctcacatactgtgccc

SEQ ID NO: 2057573 - DNA, 25 bp, Homo sapien
tgttgggccaatcctgagccttggt

SEQ ID NO: 2057574 - DNA, 25 bp, Homo sapien
cagccagaagttccactagtgagtt

SEQ ID NO: 2057575 - DNA, 25 bp, Homo sapien
gatcatataaccaattcgcttcaca

SEQ ID NO: 2057576 - DNA, 25 bp, Homo sapien
cacaaactgcctatagcgtgctcta

SEQ ID NO: 2057577 - DNA, 25 bp, Homo sapien
gcgtgctctattaaaggtttctaac

SEQ ID NO: 2057578 - DNA, 25 bp, Homo sapien
gtcttgttgtttcaggtaaataatc

SEQ ID NO: 2057579 - DNA, 25 bp, Homo sapien
gaggtcttgttgtttcaggtaaata

SEQ ID NO: 2057580 - DNA, 25 bp, Homo sapien
cttgaggtcttgttgtttcaggtaa

SEQ ID NO: 2057581 - DNA, 25 bp, Homo sapien
cttgttgtttcaggtaaataatcac

SEQ ID NO: 2057582 - DNA, 25 bp, Homo sapien
gatgctgaaagagttcatgaaaggg

SEQ ID NO: 2057583 - DNA, 25 bp, Homo sapien
gaagatgctgaaagagttcatgaaa

SEQ ID NO: 2057584 - DNA, 25 bp, Homo sapien
agaagatgctgaaagagttcatgaa

SEQ ID NO: 2057585 - DNA, 25 bp, Homo sapien
aaaatggtaaccaaatcatcttcat

SEQ ID NO: 2057586 - DNA, 25 bp, Homo sapien
cttctcctccttcgtctactagcgt

SEQ ID NO: 2057587 - DNA, 25 bp, Homo sapien
cgtctactagcgtccaagtcccaga

SEQ ID NO: 2057588 - DNA, 25 bp, Homo sapien
tcctccttcgtctactagcgtccaa

SEQ ID NO: 2057589 - DNA, 25 bp, Homo sapien
tccttcgtctactagcgtccaagtc

SEQ ID NO: 2057590 - DNA, 25 bp, Homo sapien
ttgcataaaatgaaagacccctgat

SEQ ID NO: 2057591 - DNA, 25 bp, Homo sapien
cctgatgggttatgcaacactttga

SEQ ID NO: 2057592 - DNA, 25 bp, Homo sapien
cataaaatgaaagacccctgatggg

SEQ ID NO: 2057593 - DNA, 25 bp, Homo sapien
gacccctgatgggttatgcaacact

SEQ ID NO: 2057594 - DNA, 25 bp, Homo sapien
gactacaagcagacttagtacagtc

SEQ ID NO: 2057595 - DNA, 25 bp, Homo sapien
gacttagtacagtctgtactatcaa

SEQ ID NO: 2057596 - DNA, 25 bp, Homo sapien
actgaaactacccagccagactaca

SEQ ID NO: 2057597 - DNA, 25 bp, Homo sapien
ccagccagactacaagcagacttag

SEQ ID NO: 2057598 - DNA, 25 bp, Homo sapien
gataaaaggaacagcccatttacta

SEQ ID NO: 2057599 - DNA, 25 bp, Homo sapien
gcggggcatcgaagaatatggttta

SEQ ID NO: 2057600 - DNA, 25 bp, Homo sapien
caccagcggggcatcgaagaatatg

SEQ ID NO: 2057601 - DNA, 25 bp, Homo sapien
cagcccatttactaacaccagcggg

SEQ ID NO: 2057602 - DNA, 25 bp, Homo sapien
tgaacatgaataagacactaatgca

SEQ ID NO: 2057603 - DNA, 25 bp, Homo sapien
tgaataagacactaatgcattcctt

SEQ ID NO: 2057604 - DNA, 25 bp, Homo sapien
attaactctcctggtgaacatgaat

SEQ ID NO: 2057605 - DNA, 25 bp, Homo sapien
gcagccagagaagaatatcatcatg

SEQ ID NO: 2057606 - DNA, 25 bp, Homo sapien
gaacagctgaactactgagcaatgc

SEQ ID NO: 2057607 - DNA, 25 bp, Homo sapien
ggaggtgctcagatttggcatcgaa

SEQ ID NO: 2057608 - DNA, 25 bp, Homo sapien
tactctttggtagcgatgatagctg

SEQ ID NO: 2057609 - DNA, 25 bp, Homo sapien
gcaatgcatagatgtaagactccac

SEQ ID NO: 2057610 - DNA, 25 bp, Homo sapien
gagaagggaagagtaactctagtag

SEQ ID NO: 2057611 - DNA, 25 bp, Homo sapien
taccagcaaatatatgatcaggtgc

SEQ ID NO: 2057612 - DNA, 25 bp, Homo sapien
aatacatcgcaaattcagagaaggg

SEQ ID NO: 2057613 - DNA, 25 bp, Homo sapien
gagtaactctagtagtcagcagtgg

SEQ ID NO: 2057614 - DNA, 25 bp, Homo sapien
cagcagttgcttcctacatcgtgag

SEQ ID NO: 2057615 - DNA, 25 bp, Homo sapien
actgcgaagcaagggtttcactgcc

SEQ ID NO: 2057616 - DNA, 25 bp, Homo sapien
ttctgggtagagtcgctcactgcga

SEQ ID NO: 2057617 - DNA, 25 bp, Homo sapien
cagatgtcagagtaagcagctcagc

SEQ ID NO: 2057618 - DNA, 25 bp, Homo sapien
ggaatcagttaccaccttcagatgg

SEQ ID NO: 2057619 - DNA, 25 bp, Homo sapien
tctgtggcacctctgaagaacaaac

SEQ ID NO: 2057620 - DNA, 25 bp, Homo sapien
ccattgctggctgagtataagaaaa

SEQ ID NO: 2057621 - DNA, 25 bp, Homo sapien
tgtgttacacgtcagggactcttca

SEQ ID NO: 2057622 - DNA, 25 bp, Homo sapien
ggtgagtggtacatcaaacatttca

SEQ ID NO: 2057623 - DNA, 25 bp, Homo sapien
tgaccttctgggacacatctttctg

SEQ ID NO: 2057624 - DNA, 25 bp, Homo sapien
cttttaggaggcacgaaagaagcta

SEQ ID NO: 2057625 - DNA, 25 bp, Homo sapien
gaatgttaagctccactaaggccag

SEQ ID NO: 2057626 - DNA, 25 bp, Homo sapien
caatcatttaggcatggcacaaggg

SEQ ID NO: 2057627 - DNA, 25 bp, Homo sapien
tggcccggcgctggggcttcaccgc

SEQ ID NO: 2057628 - DNA, 25 bp, Homo sapien
gctggggcttcaccgcctcggccat

SEQ ID NO: 2057629 - DNA, 25 bp, Homo sapien
ctttgttttagtccggctggccttg

SEQ ID NO: 2057630 - DNA, 25 bp, Homo sapien
tgttttagtccggctggccttggcc

SEQ ID NO: 2057631 - DNA, 25 bp, Homo sapien
agacccttccgcggcgccgtcaccg

SEQ ID NO: 2057632 - DNA, 25 bp, Homo sapien
ccttccgcggcgccgtcaccgtttg

SEQ ID NO: 2057633 - DNA, 25 bp, Homo sapien
cttccgcggcgccgtcaccgtttgt

SEQ ID NO: 2057634 - DNA, 25 bp, Homo sapien
ggcacgtgacctgactgattggcaa

SEQ ID NO: 2057635 - DNA, 25 bp, Homo sapien
cattaacagagtagccatggtggca

SEQ ID NO: 2057636 - DNA, 25 bp, Homo sapien
tatacatagattcctgggctgtggc

SEQ ID NO: 2057637 - DNA, 25 bp, Homo sapien
tgctgtgaagggagacatagcccac

SEQ ID NO: 2057638 - DNA, 25 bp, Homo sapien
cattatcactcccttaatatccttt

SEQ ID NO: 2057639 - DNA, 25 bp, Homo sapien
tagttcagcatacacagggatccac

SEQ ID NO: 2057640 - DNA, 25 bp, Homo sapien
caaaggagccactactgcagttggt

SEQ ID NO: 2057641 - DNA, 25 bp, Homo sapien
gggtgccctttccatatcacagaag

SEQ ID NO: 2057642 - DNA, 25 bp, Homo sapien
cataacgtggctataggtcctgctg

SEQ ID NO: 2057643 - DNA, 25 bp, Homo sapien
ttactgatagagcaaactgtagtca

SEQ ID NO: 2057644 - DNA, 25 bp, Homo sapien
ctgatagagcaaactgtagtcatca

SEQ ID NO: 2057645 - DNA, 25 bp, Homo sapien
gatagagcaaactgtagtcatcaac

SEQ ID NO: 2057646 - DNA, 25 bp, Homo sapien
tactgatagagcaaactgtagtcat

SEQ ID NO: 2057647 - DNA, 25 bp, Homo sapien
tgcaccgaatcaaccctagcaatca

SEQ ID NO: 2057648 - DNA, 25 bp, Homo sapien
gccggatgcaccgaatcaaccctag

SEQ ID NO: 2057649 - DNA, 25 bp, Homo sapien
cggatgcaccgaatcaaccctagca

SEQ ID NO: 2057650 - DNA, 25 bp, Homo sapien
cccgcttagccagccggatgcaccg

SEQ ID NO: 2057651 - DNA, 25 bp, Homo sapien
ctggtgagcttttaggaattgggag

SEQ ID NO: 2057652 - DNA, 25 bp, Homo sapien
tggtgagcttttaggaattgggagg

SEQ ID NO: 2057653 - DNA, 25 bp, Homo sapien
catagtgattaggagcacagagcct

SEQ ID NO: 2057654 - DNA, 25 bp, Homo sapien
tctggtttctgcactggagggtcaa

SEQ ID NO: 2057655 - DNA, 25 bp, Homo sapien
cagacgtcgtactatggcaagaggc

SEQ ID NO: 2057656 - DNA, 25 bp, Homo sapien
cacaacccggactggcaggattaaa

SEQ ID NO: 2057657 - DNA, 25 bp, Homo sapien
cttgccaagttaggccctgtagcct

SEQ ID NO: 2057658 - DNA, 25 bp, Homo sapien
gcattcttctgggaggagtagaaat

SEQ ID NO: 2057659 - DNA, 25 bp, Homo sapien
agttaggccctgtagcctttcctgc

SEQ ID NO: 2057660 - DNA, 25 bp, Homo sapien
attcttctgggaggagtagaaattc

SEQ ID NO: 2057661 - DNA, 25 bp, Homo sapien
tccagttttgcgttgattcacaaag

SEQ ID NO: 2057662 - DNA, 25 bp, Homo sapien
aactctttcggacttgttcgtacat

SEQ ID NO: 2057663 - DNA, 25 bp, Homo sapien
aagtattcaatgtccctctgaatgc

SEQ ID NO: 2057664 - DNA, 25 bp, Homo sapien
ggtggaatctgtccagttttgcgtt

SEQ ID NO: 2057665 - DNA, 25 bp, Homo sapien
tcatcactggtgacacattgttgtg

SEQ ID NO: 2057666 - DNA, 25 bp, Homo sapien
taaccacaatgcattccggaagaag

SEQ ID NO: 2057667 - DNA, 25 bp, Homo sapien
tcgttcacattcttgagcctcaaat

SEQ ID NO: 2057668 - DNA, 25 bp, Homo sapien
gtgacacattgttgtgacagctgat

SEQ ID NO: 2057669 - DNA, 25 bp, Homo sapien
cagaaaaatagctacgtgtacatag

SEQ ID NO: 2057670 - DNA, 25 bp, Homo sapien
gaccattcattttggctagctgtga

SEQ ID NO: 2057671 - DNA, 25 bp, Homo sapien
catagatatgcaaggaaaaggacca

SEQ ID NO: 2057672 - DNA, 25 bp, Homo sapien
cacaaacaggcttggaaatagttct

SEQ ID NO: 2057673 - DNA, 25 bp, Homo sapien
tttatataccacagccccttttcca

SEQ ID NO: 2057674 - DNA, 25 bp, Homo sapien
tatataccacagccccttttccact

SEQ ID NO: 2057675 - DNA, 25 bp, Homo sapien
agcttttatataccacagccccttt

SEQ ID NO: 2057676 - DNA, 25 bp, Homo sapien
catagcttttatataccacagcccc

SEQ ID NO: 2057677 - DNA, 25 bp, Homo sapien
agtcctgagcagcttccggttacgg

SEQ ID NO: 2057678 - DNA, 25 bp, Homo sapien
cctgagcagcttccggttacgggta

SEQ ID NO: 2057679 - DNA, 25 bp, Homo sapien
tcctgagcagcttccggttacgggt

SEQ ID NO: 2057680 - DNA, 25 bp, Homo sapien
cccagtcctgagcagcttccggtta

SEQ ID NO: 2057681 - DNA, 25 bp, Homo sapien
ccttatccagggtgccgatgtgcag

SEQ ID NO: 2057682 - DNA, 25 bp, Homo sapien
ggtgccgatgtgcagcatgtatgct

SEQ ID NO: 2057683 - DNA, 25 bp, Homo sapien
cactcttctcggaccttatccaggg

SEQ ID NO: 2057684 - DNA, 25 bp, Homo sapien
ttctcggaccttatccagggtgccg

SEQ ID NO: 2057685 - DNA, 25 bp, Homo sapien
aggactctgagcactgggagttatt

SEQ ID NO: 2057686 - DNA, 25 bp, Homo sapien
agcactgggagttattgcatctctc

SEQ ID NO: 2057687 - DNA, 25 bp, Homo sapien
gactctgagcactgggagttattgc

SEQ ID NO: 2057688 - DNA, 25 bp, Homo sapien
tctgagcactgggagttattgcatc

SEQ ID NO: 2057689 - DNA, 25 bp, Homo sapien
atatttggtgaagtaggcaaaggag

SEQ ID NO: 2057690 - DNA, 25 bp, Homo sapien
tggtgaagtaggcaaaggagggtat

SEQ ID NO: 2057691 - DNA, 25 bp, Homo sapien
cctcatcatatttggtgaagtaggc

SEQ ID NO: 2057692 - DNA, 25 bp, Homo sapien
catcatatttggtgaagtaggcaaa

SEQ ID NO: 2057693 - DNA, 25 bp, Homo sapien
tgagtcctctactgcggtctttgaa

SEQ ID NO: 2057694 - DNA, 25 bp, Homo sapien
ctctactgcggtctttgaagttgcc

SEQ ID NO: 2057695 - DNA, 25 bp, Homo sapien
gtcctctactgcggtctttgaagtt

SEQ ID NO: 2057696 - DNA, 25 bp, Homo sapien
gagtcctctactgcggtctttgaag

SEQ ID NO: 2057697 - DNA, 25 bp, Homo sapien
tgtcccggcatttctgctcatagtt

SEQ ID NO: 2057698 - DNA, 25 bp, Homo sapien
ttcgggttcaccaggttggcactcc

SEQ ID NO: 2057699 - DNA, 25 bp, Homo sapien
ttggcactccggctgacggcctgtt

SEQ ID NO: 2057700 - DNA, 25 bp, Homo sapien
ttttcttgttgcttcgggttcacca

SEQ ID NO: 2057701 - DNA, 25 bp, Homo sapien
tcttttgtttatggatagcatccat

SEQ ID NO: 2057702 - DNA, 25 bp, Homo sapien
ttgtttatggatagcatccattatg

SEQ ID NO: 2057703 - DNA, 25 bp, Homo sapien
gctcttttgtttatggatagcatcc

SEQ ID NO: 2057704 - DNA, 25 bp, Homo sapien
gtttatggatagcatccattatgag

SEQ ID NO: 2057705 - DNA, 25 bp, Homo sapien
ggaatgcaagctggacctctgaatc

SEQ ID NO: 2057706 - DNA, 25 bp, Homo sapien
gtctattgaattcagagggttcccc

SEQ ID NO: 2057707 - DNA, 25 bp, Homo sapien
tctgaatagcggcagcagacctgaa

SEQ ID NO: 2057708 - DNA, 25 bp, Homo sapien
gaaatgcatatacccatctggactg

SEQ ID NO: 2057709 - DNA, 25 bp, Homo sapien
aactctgtgcaagctgaatgtgaca

SEQ ID NO: 2057710 - DNA, 25 bp, Homo sapien
ttctcttaaactctgtgcaagctga

SEQ ID NO: 2057711 - DNA, 25 bp, Homo sapien
gcaagctgaatgtgacattgtgcca

SEQ ID NO: 2057712 - DNA, 25 bp, Homo sapien
tgaatgtgacattgtgccacattgt

SEQ ID NO: 2057713 - DNA, 25 bp, Homo sapien
ttgaagacttcaagggcccgcttca

SEQ ID NO: 2057714 - DNA, 25 bp, Homo sapien
tgaagacttcaagggcccgcttcag

SEQ ID NO: 2057715 - DNA, 25 bp, Homo sapien
gcttgaagacttcaagggcccgctt

SEQ ID NO: 2057716 - DNA, 25 bp, Homo sapien
ctgcttgaagacttcaagggcccgc

SEQ ID NO: 2057717 - DNA, 25 bp, Homo sapien
tcccaggcacaagaaattcttcact

SEQ ID NO: 2057718 - DNA, 25 bp, Homo sapien
ctcaatcccaggcacaagaaattct

SEQ ID NO: 2057719 - DNA, 25 bp, Homo sapien
aatcccaggcacaagaaattcttca

SEQ ID NO: 2057720 - DNA, 25 bp, Homo sapien
catttggggagagcaacatgccaaa

SEQ ID NO: 2057721 - DNA, 25 bp, Homo sapien
gtattacctcatgtacttacacttt

SEQ ID NO: 2057722 - DNA, 25 bp, Homo sapien
ttgtggaatggttcaatagagcaaa

SEQ ID NO: 2057723 - DNA, 25 bp, Homo sapien
cattattattacagtcattgtgttg

SEQ ID NO: 2057724 - DNA, 25 bp, Homo sapien
ttctggaactcagcattgaccttct

SEQ ID NO: 2057725 - DNA, 25 bp, Homo sapien
ccttaagcgaactccctcggaggtg

SEQ ID NO: 2057726 - DNA, 25 bp, Homo sapien
tccagagagctaagtgaccactgaa

SEQ ID NO: 2057727 - DNA, 25 bp, Homo sapien
tgccttggccctggtaaatttcttg

SEQ ID NO: 2057728 - DNA, 25 bp, Homo sapien
cctttgattcgtctttggcctggaa

SEQ ID NO: 2057729 - DNA, 25 bp, Homo sapien
cctgactgaggatcttgagtttgag

SEQ ID NO: 2057730 - DNA, 25 bp, Homo sapien
tgcgcctgactgaggatcttgagtt

SEQ ID NO: 2057731 - DNA, 25 bp, Homo sapien
tgactgaggatcttgagtttgagcc

SEQ ID NO: 2057732 - DNA, 25 bp, Homo sapien
cactgcgcctgactgaggatcttga

SEQ ID NO: 2057733 - DNA, 25 bp, Homo sapien
ggagctcccaggcattattaaccaa

SEQ ID NO: 2057734 - DNA, 25 bp, Homo sapien
ttcaacctcctggtaactctgtctg

SEQ ID NO: 2057735 - DNA, 25 bp, Homo sapien
tctgtctgctgaagcgagggagctc

SEQ ID NO: 2057736 - DNA, 25 bp, Homo sapien
tgaagcgagggagctcccaggcatt

SEQ ID NO: 2057737 - DNA, 25 bp, Homo sapien
acacggcttcttcctagagaggttg

SEQ ID NO: 2057738 - DNA, 25 bp, Homo sapien
ttgccatacctctcttcaattgctg

SEQ ID NO: 2057739 - DNA, 25 bp, Homo sapien
gagcagatctttgccatacctctct

SEQ ID NO: 2057740 - DNA, 25 bp, Homo sapien
ttgatttcagactgtccacacggct

SEQ ID NO: 2057741 - DNA, 25 bp, Homo sapien
gagacggctccggcagcggaaccgc

SEQ ID NO: 2057742 - DNA, 25 bp, Homo sapien
agagacggctccggcagcggaaccg

SEQ ID NO: 2057743 - DNA, 25 bp, Homo sapien
agacggctccggcagcggaaccgcc

SEQ ID NO: 2057744 - DNA, 25 bp, Homo sapien
gagagacggctccggcagcggaacc

SEQ ID NO: 2057745 - DNA, 25 bp, Homo sapien
aagacttgggagactcagaagcgga

SEQ ID NO: 2057746 - DNA, 25 bp, Homo sapien
taattgtgcacctcaaaagaagcca

SEQ ID NO: 2057747 - DNA, 25 bp, Homo sapien
gggtccgtgggttcaaggacatgaa

SEQ ID NO: 2057748 - DNA, 25 bp, Homo sapien
gcggagaatgaagcaaaaggtaatt

SEQ ID NO: 2057749 - DNA, 25 bp, Homo sapien
tcctctgcagatgtattccaaggcc

SEQ ID NO: 2057750 - DNA, 25 bp, Homo sapien
ctggggtcctgagccgacagacact

SEQ ID NO: 2057751 - DNA, 25 bp, Homo sapien
ggccatttcattcccaggaggaaat

SEQ ID NO: 2057752 - DNA, 25 bp, Homo sapien
tcttcagagaggacagagcatcatc

SEQ ID NO: 2057753 - DNA, 25 bp, Homo sapien
ctcttcagagaggacagagcatcat

SEQ ID NO: 2057754 - DNA, 25 bp, Homo sapien
cagagaggacagagcatcatcgtac

SEQ ID NO: 2057755 - DNA, 25 bp, Homo sapien
ttcagagaggacagagcatcatcgt

SEQ ID NO: 2057756 - DNA, 25 bp, Homo sapien
gccattgttcagatgttggataatg

SEQ ID NO: 2057757 - DNA, 25 bp, Homo sapien
ctttgcagttcttgcggccattgtt

SEQ ID NO: 2057758 - DNA, 25 bp, Homo sapien
tttgcagttcttgcggccattgttc

SEQ ID NO: 2057759 - DNA, 25 bp, Homo sapien
gataatgttgtcatagccgatggtg

SEQ ID NO: 2057760 - DNA, 25 bp, Homo sapien
tttgagatggcgcagggacccactt

SEQ ID NO: 2057761 - DNA, 25 bp, Homo sapien
caccctggagatgaaagaacatgtt

SEQ ID NO: 2057762 - DNA, 25 bp, Homo sapien
ttaggagcctgtcaggcttctccac

SEQ ID NO: 2057763 - DNA, 25 bp, Homo sapien
gacccacttaggagcctgtcaggct

SEQ ID NO: 2057764 - DNA, 25 bp, Homo sapien
catgttcatcgaagtccaatgcctt

SEQ ID NO: 2057765 - DNA, 25 bp, Homo sapien
agtacatgttcatcgaagtccaatg

SEQ ID NO: 2057766 - DNA, 25 bp, Homo sapien
gattttttacccagcttgatctaat

SEQ ID NO: 2057767 - DNA, 25 bp, Homo sapien
ttacccagcttgatctaatgaacat

SEQ ID NO: 2057768 - DNA, 25 bp, Homo sapien
aaagtttcccttgaacagtgagcgc

SEQ ID NO: 2057769 - DNA, 25 bp, Homo sapien
aagtttcccttgaacagtgagcgcg

SEQ ID NO: 2057770 - DNA, 25 bp, Homo sapien
ttcccttgaacagtgagcgcgtcat

SEQ ID NO: 2057771 - DNA, 25 bp, Homo sapien
gtttcccttgaacagtgagcgcgtc

SEQ ID NO: 2057772 - DNA, 25 bp, Homo sapien
ggccgcaggtagcacagagcgggga

SEQ ID NO: 2057773 - DNA, 25 bp, Homo sapien
cgggccgcaggtagcacagagcggg

SEQ ID NO: 2057774 - DNA, 25 bp, Homo sapien
gccgggccgcaggtagcacagagcg

SEQ ID NO: 2057775 - DNA, 25 bp, Homo sapien
ccgcaggtagcacagagcggggagg

SEQ ID NO: 2057776 - DNA, 25 bp, Homo sapien
gcagtaggggactgtacatcaactt

SEQ ID NO: 2057777 - DNA, 25 bp, Homo sapien
gataatccactaccactggaccagc

SEQ ID NO: 2057778 - DNA, 25 bp, Homo sapien
gggactgtacatcaactttagtgac

SEQ ID NO: 2057779 - DNA, 25 bp, Homo sapien
ttagcagtaggggactgtacatcaa

SEQ ID NO: 2057780 - DNA, 25 bp, Homo sapien
taggcctgcctggttaaaaacagcc

SEQ ID NO: 2057781 - DNA, 25 bp, Homo sapien
tatgacagccattttgttgccacac

SEQ ID NO: 2057782 - DNA, 25 bp, Homo sapien
aaaacagccaggtgcctatgaggtc

SEQ ID NO: 2057783 - DNA, 25 bp, Homo sapien
cacagaagggccacttgggcagtgt

SEQ ID NO: 2057784 - DNA, 25 bp, Homo sapien
tccaatccattagccaaagtatttt

SEQ ID NO: 2057785 - DNA, 25 bp, Homo sapien
caaagtagtaatcaccactgacact

SEQ ID NO: 2057786 - DNA, 25 bp, Homo sapien
tataaaatgctccaacaagccgggc

SEQ ID NO: 2057787 - DNA, 25 bp, Homo sapien
catttacgtgccaggagtgggctac

SEQ ID NO: 2057788 - DNA, 25 bp, Homo sapien
tatgcaggtacatcctctgggcaga

SEQ ID NO: 2057789 - DNA, 25 bp, Homo sapien
tcagccttgaattatctagcccagt

SEQ ID NO: 2057790 - DNA, 25 bp, Homo sapien
gagaagccagctatgctcttcagta

SEQ ID NO: 2057791 - DNA, 25 bp, Homo sapien
tgcctacagtacctctttatgcagg

SEQ ID NO: 2057792 - DNA, 25 bp, Homo sapien
ctgaactggtatttgatgtgaatcc

SEQ ID NO: 2057793 - DNA, 25 bp, Homo sapien
ggaactaatttactagaacaatgac

SEQ ID NO: 2057794 - DNA, 25 bp, Homo sapien
ggagtatgagagtaacccttttaca

SEQ ID NO: 2057795 - DNA, 25 bp, Homo sapien
gatttctgtacataaggagtatgag

SEQ ID NO: 2057796 - DNA, 25 bp, Homo sapien
gaaatttgttacaatctctttcagc

SEQ ID NO: 2057797 - DNA, 25 bp, Homo sapien
aaatccagccaagaaatttgttaca

SEQ ID NO: 2057798 - DNA, 25 bp, Homo sapien
cagccaagaaatttgttacaatctc

SEQ ID NO: 2057799 - DNA, 25 bp, Homo sapien
cagctttgcatctgattgttctgag

SEQ ID NO: 2057800 - DNA, 25 bp, Homo sapien
taacttcatatcttaaacataactt

SEQ ID NO: 2057801 - DNA, 25 bp, Homo sapien
taatgactagcctaactacagattt

SEQ ID NO: 2057802 - DNA, 25 bp, Homo sapien
aaataaaagcaggtcgtaagttctg

SEQ ID NO: 2057803 - DNA, 25 bp, Homo sapien
agcaggtcgtaagttctgacctgga

SEQ ID NO: 2057804 - DNA, 25 bp, Homo sapien
ttggtgctggctgacgacatgagac

SEQ ID NO: 2057805 - DNA, 25 bp, Homo sapien
cccgcatagataacagccacttgtt

SEQ ID NO: 2057806 - DNA, 25 bp, Homo sapien
acttgttcttcaatagccatgggag

SEQ ID NO: 2057807 - DNA, 25 bp, Homo sapien
acccgcatagataacagccacttgt

SEQ ID NO: 2057808 - DNA, 25 bp, Homo sapien
gcatagataacagccacttgttctt

SEQ ID NO: 2057809 - DNA, 25 bp, Homo sapien
tcaggaagctaaggctgcaggactg

SEQ ID NO: 2057810 - DNA, 25 bp, Homo sapien
acttcagcctaggccgtaagaatga

SEQ ID NO: 2057811 - DNA, 25 bp, Homo sapien
cctaggccgtaagaatgaaacttcg

SEQ ID NO: 2057812 - DNA, 25 bp, Homo sapien
tcagcctaggccgtaagaatgaaac

SEQ ID NO: 2057813 - DNA, 25 bp, Homo sapien
gcacgccacgactcaaaagttgttg

SEQ ID NO: 2057814 - DNA, 25 bp, Homo sapien
cgcacgccacgactcaaaagttgtt

SEQ ID NO: 2057815 - DNA, 25 bp, Homo sapien
ttagacgcacgccacgactcaaaag

SEQ ID NO: 2057816 - DNA, 25 bp, Homo sapien
gacgcacgccacgactcaaaagttg

SEQ ID NO: 2057817 - DNA, 25 bp, Homo sapien
tactgtactgtaactcagtgacaca

SEQ ID NO: 2057818 - DNA, 25 bp, Homo sapien
ttaagatgctaatctaatgatagcc

SEQ ID NO: 2057819 - DNA, 25 bp, Homo sapien
taatatattaataccttaagatgct

SEQ ID NO: 2057820 - DNA, 25 bp, Homo sapien
aatgatagcccccttactgccaaag

SEQ ID NO: 2057821 - DNA, 25 bp, Homo sapien
ggatccgacacgagatacagacaga

SEQ ID NO: 2057822 - DNA, 25 bp, Homo sapien
ttgggcagcggatccgacacgagat

SEQ ID NO: 2057823 - DNA, 25 bp, Homo sapien
cagacagaccaacgttaattgcagg

SEQ ID NO: 2057824 - DNA, 25 bp, Homo sapien
caacgttaattgcagggcggatacc

SEQ ID NO: 2057825 - DNA, 25 bp, Homo sapien
caaatctttcacgacctgacctgta

SEQ ID NO: 2057826 - DNA, 25 bp, Homo sapien
tgcaaagcatcagtaccccaaatct

SEQ ID NO: 2057827 - DNA, 25 bp, Homo sapien
tataatgtaaggaaatacgcacgct

SEQ ID NO: 2057828 - DNA, 25 bp, Homo sapien
tacgcacgctagcaagcttaaagta

SEQ ID NO: 2057829 - DNA, 25 bp, Homo sapien
gtcagtgatggaaatgacatttgtt

SEQ ID NO: 2057830 - DNA, 25 bp, Homo sapien
cagtgatggaaatgacatttgttgg

SEQ ID NO: 2057831 - DNA, 25 bp, Homo sapien
tcagtgatggaaatgacatttgttg

SEQ ID NO: 2057832 - DNA, 25 bp, Homo sapien
gtagccgacaccacaatggtgtact

SEQ ID NO: 2057833 - DNA, 25 bp, Homo sapien
atccgaggccgtagccgacaccaca

SEQ ID NO: 2057834 - DNA, 25 bp, Homo sapien
cgtagccgacaccacaatggtgtac

SEQ ID NO: 2057835 - DNA, 25 bp, Homo sapien
cgaggccgtagccgacaccacaatg

SEQ ID NO: 2057836 - DNA, 25 bp, Homo sapien
tcttttgaccaatagcaacataaat

SEQ ID NO: 2057837 - DNA, 25 bp, Homo sapien
ttttgaccaatagcaacataaatac

SEQ ID NO: 2057838 - DNA, 25 bp, Homo sapien
tgaccaatagcaacataaatacagt

SEQ ID NO: 2057839 - DNA, 25 bp, Homo sapien
ttgaccaatagcaacataaatacag

SEQ ID NO: 2057840 - DNA, 25 bp, Homo sapien
ccaatcgtacattctatttactgag

SEQ ID NO: 2057841 - DNA, 25 bp, Homo sapien
ccccacaccgagatagtagagatag

SEQ ID NO: 2057842 - DNA, 25 bp, Homo sapien
accattaaccctacagtcctgccac

SEQ ID NO: 2057843 - DNA, 25 bp, Homo sapien
cagtggcggcatgggtcctccatat

SEQ ID NO: 2057844 - DNA, 25 bp, Homo sapien
cacgaccctgggattaagagtccca

SEQ ID NO: 2057845 - DNA, 25 bp, Homo sapien
tgcccaacatggggctcaaacccac

SEQ ID NO: 2057846 - DNA, 25 bp, Homo sapien
gggattaagagtcccatgctctacc

SEQ ID NO: 2057847 - DNA, 25 bp, Homo sapien
gtgcccaacatggggctcaaaccca

SEQ ID NO: 2057848 - DNA, 25 bp, Homo sapien
tcgtattagattctaatgtccccat

SEQ ID NO: 2057849 - DNA, 25 bp, Homo sapien
taatccttccattgagcaaatttta

SEQ ID NO: 2057850 - DNA, 25 bp, Homo sapien
tataatccttccattgagcaaattt

SEQ ID NO: 2057851 - DNA, 25 bp, Homo sapien
attttactattaatcctcgtattag

SEQ ID NO: 2057852 - DNA, 25 bp, Homo sapien
ataatcagttcacgctgaccacgac

SEQ ID NO: 2057853 - DNA, 25 bp, Homo sapien
caccaataatcagttcacgctgacc

SEQ ID NO: 2057854 - DNA, 25 bp, Homo sapien
caataatcagttcacgctgaccacg

SEQ ID NO: 2057855 - DNA, 25 bp, Homo sapien
aattcgaggaatgataccgggggct

SEQ ID NO: 2057856 - DNA, 25 bp, Homo sapien
gaagctgcaactatatctaacgaac

SEQ ID NO: 2057857 - DNA, 25 bp, Homo sapien
aagaaaaaccctaagcataatcagt

SEQ ID NO: 2057858 - DNA, 25 bp, Homo sapien
tatatctaacgaacattaaacctac

SEQ ID NO: 2057859 - DNA, 25 bp, Homo sapien
tcagttttgatgtttgttagaagct

SEQ ID NO: 2057860 - DNA, 25 bp, Homo sapien
ctttccatcaatagcattaccaagg

SEQ ID NO: 2057861 - DNA, 25 bp, Homo sapien
gggcatcaactacacgacccaacag

SEQ ID NO: 2057862 - DNA, 25 bp, Homo sapien
ttaccaagggcatcaactacacgac

SEQ ID NO: 2057863 - DNA, 25 bp, Homo sapien
ccatcaatagcattaccaagggcat

SEQ ID NO: 2057864 - DNA, 25 bp, Homo sapien
tagtttatcatttccaaacacgaca

SEQ ID NO: 2057865 - DNA, 25 bp, Homo sapien
gtttatcatttccaaacacgacaac

SEQ ID NO: 2057866 - DNA, 25 bp, Homo sapien
ccaaacacgacaacaccaacattgt

SEQ ID NO: 2057867 - DNA, 25 bp, Homo sapien
attagtttatcatttccaaacacga

SEQ ID NO: 2057868 - DNA, 25 bp, Homo sapien
catgtacgcgggcaataccatcacc

SEQ ID NO: 2057869 - DNA, 25 bp, Homo sapien
cctcagcccatgtacgcgggcaata

SEQ ID NO: 2057870 - DNA, 25 bp, Homo sapien
gaatacgctcttcaagaatagagga

SEQ ID NO: 2057871 - DNA, 25 bp, Homo sapien
tcagctccaagaatacgctcttcaa

SEQ ID NO: 2057872 - DNA, 25 bp, Homo sapien
gcctggccaacacagcaaaatccca

SEQ ID NO: 2057873 - DNA, 25 bp, Homo sapien
gaggccaagagtttggaccagcctg

SEQ ID NO: 2057874 - DNA, 25 bp, Homo sapien
tggccaacacagcaaaatcccatct

SEQ ID NO: 2057875 - DNA, 25 bp, Homo sapien
gcgggcggaccacttgaggccaaga

SEQ ID NO: 2057876 - DNA, 25 bp, Homo sapien
gaacctgagagtctatacaaactag

SEQ ID NO: 2057877 - DNA, 25 bp, Homo sapien
ccaagggccattaccagaacaaaga

SEQ ID NO: 2057878 - DNA, 25 bp, Homo sapien
ggaagtcttccagaggtcacaaaga

SEQ ID NO: 2057879 - DNA, 25 bp, Homo sapien
tttgactataacaagagaaccatga

SEQ ID NO: 2057880 - DNA, 25 bp, Homo sapien
cacagttatacgatgtatgtaattt

SEQ ID NO: 2057881 - DNA, 25 bp, Homo sapien
tgcggcgtagactgagaaataataa

SEQ ID NO: 2057882 - DNA, 25 bp, Homo sapien
agtaagtgcggcgtagactgagaaa

SEQ ID NO: 2057883 - DNA, 25 bp, Homo sapien
tcttcatctagtaagtgcggcgtag

SEQ ID NO: 2057884 - DNA, 25 bp, Homo sapien
cttttgaagatgagtgttagaggca

SEQ ID NO: 2057885 - DNA, 25 bp, Homo sapien
atgagtgttagaggcatggaagttc

SEQ ID NO: 2057886 - DNA, 25 bp, Homo sapien
gagtgttagaggcatggaagttcct

SEQ ID NO: 2057887 - DNA, 25 bp, Homo sapien
gttagaggcatggaagttccttgca

SEQ ID NO: 2057888 - DNA, 25 bp, Homo sapien
tcactgtcaattctgaagcctctac

SEQ ID NO: 2057889 - DNA, 25 bp, Homo sapien
cactgtcaattctgaagcctctacc

SEQ ID NO: 2057890 - DNA, 25 bp, Homo sapien
gtaatactgcgactggtcactgtca

SEQ ID NO: 2057891 - DNA, 25 bp, Homo sapien
ccttcaagttgtaatactgcgactg

SEQ ID NO: 2057892 - DNA, 25 bp, Homo sapien
gggcctgctgaccttcacacaatgt

SEQ ID NO: 2057893 - DNA, 25 bp, Homo sapien
taaacacgtccaagtgccacaaagc

SEQ ID NO: 2057894 - DNA, 25 bp, Homo sapien
tgaaatggttctttgcacctgcagg

SEQ ID NO: 2057895 - DNA, 25 bp, Homo sapien
agcgggacgcgaccctaagaatcga

SEQ ID NO: 2057896 - DNA, 25 bp, Homo sapien
cctctgcgcaggtgacgagcaaaag

SEQ ID NO: 2057897 - DNA, 25 bp, Homo sapien
gagttaactgtctgccctgtaccat

SEQ ID NO: 2057898 - DNA, 25 bp, Homo sapien
tgtcagccgaagacaggaatcttga

SEQ ID NO: 2057899 - DNA, 25 bp, Homo sapien
cgattcagaacaggcctcggagagc

SEQ ID NO: 2057900 - DNA, 25 bp, Homo sapien
tcgccctcctgcagagagcgcccga

SEQ ID NO: 2057901 - DNA, 25 bp, Homo sapien
aagatggcggcattcgccacagccc

SEQ ID NO: 2057902 - DNA, 25 bp, Homo sapien
ccacgggtgcaagatggcggcattc

SEQ ID NO: 2057903 - DNA, 25 bp, Homo sapien
ccggagaagccacgggtgcaagatg

SEQ ID NO: 2057904 - DNA, 25 bp, Homo sapien
gcctgcatcatgccggccttcggtg

SEQ ID NO: 2057905 - DNA, 25 bp, Homo sapien
ccacccggccgcctgcatcatgccg

SEQ ID NO: 2057906 - DNA, 25 bp, Homo sapien
cggccgcctgcatcatgccggcctt

SEQ ID NO: 2057907 - DNA, 25 bp, Homo sapien
tgcatcatgccggccttcggtgctc

SEQ ID NO: 2057908 - DNA, 25 bp, Homo sapien
gggcgcggaccacggccgcagcaac

SEQ ID NO: 2057909 - DNA, 25 bp, Homo sapien
cacggccgcagcaacgcgcacggac

SEQ ID NO: 2057910 - DNA, 25 bp, Homo sapien
cggccgcagcaacgcgcacggacag

SEQ ID NO: 2057911 - DNA, 25 bp, Homo sapien
ggaccacggccgcagcaacgcgcac

SEQ ID NO: 2057912 - DNA, 25 bp, Homo sapien
tttgcagttactccgcaggcggtac

SEQ ID NO: 2057913 - DNA, 25 bp, Homo sapien
ttgcagttactccgcaggcggtact

SEQ ID NO: 2057914 - DNA, 25 bp, Homo sapien
ctttgcagttactccgcaggcggta

SEQ ID NO: 2057915 - DNA, 25 bp, Homo sapien
tgcagttactccgcaggcggtactt

SEQ ID NO: 2057916 - DNA, 25 bp, Homo sapien
cacgtcctggacatgtattccggaa

SEQ ID NO: 2057917 - DNA, 25 bp, Homo sapien
gcacgtcctggacatgtattccgga

SEQ ID NO: 2057918 - DNA, 25 bp, Homo sapien
tgcacgtcctggacatgtattccgg

SEQ ID NO: 2057919 - DNA, 25 bp, Homo sapien
gaagcgaggcttgcaatgccagagc

SEQ ID NO: 2057920 - DNA, 25 bp, Homo sapien
taggcggctctatctctcgtagtgt

SEQ ID NO: 2057921 - DNA, 25 bp, Homo sapien
tagtgttgattataccgcggaaggc

SEQ ID NO: 2057922 - DNA, 25 bp, Homo sapien
gccaggagtctcaggtaaaaccaca

SEQ ID NO: 2057923 - DNA, 25 bp, Homo sapien
tgagtagaggccactctaattttct

SEQ ID NO: 2057924 - DNA, 25 bp, Homo sapien
ttgagtagaggccactctaattttc

SEQ ID NO: 2057925 - DNA, 25 bp, Homo sapien
gagtagaggccactctaattttctc

SEQ ID NO: 2057926 - DNA, 25 bp, Homo sapien
cctggaacacaatggagaataaact

SEQ ID NO: 2057927 - DNA, 25 bp, Homo sapien
gattccagattgaaggcctggaaca

SEQ ID NO: 2057928 - DNA, 25 bp, Homo sapien
gaatgtggcaaatatgtgtatgtgg

SEQ ID NO: 2057929 - DNA, 25 bp, Homo sapien
aatataaaaaacattgaccaggctg

SEQ ID NO: 2057930 - DNA, 25 bp, Homo sapien
tgtcccccaatccagctttgatctg

SEQ ID NO: 2057931 - DNA, 25 bp, Homo sapien
gatctgccataaagttgacatttaa

SEQ ID NO: 2057932 - DNA, 25 bp, Homo sapien
gaggctgctcatttgcaccgtgtcc

SEQ ID NO: 2057933 - DNA, 25 bp, Homo sapien
gacatttaagtgttcgcctgtttcc

SEQ ID NO: 2057934 - DNA, 25 bp, Homo sapien
acatgtccctattctgcatcgaccc

SEQ ID NO: 2057935 - DNA, 25 bp, Homo sapien
tgtgatgtgtttctaggttgagccc

SEQ ID NO: 2057936 - DNA, 25 bp, Homo sapien
taatttctccatgcgacatgtccct

SEQ ID NO: 2057937 - DNA, 25 bp, Homo sapien
ggtgctcttgggaattaatttctcc

SEQ ID NO: 2057938 - DNA, 25 bp, Homo sapien
gacagacagcagtaatcttgaggga

SEQ ID NO: 2057939 - DNA, 25 bp, Homo sapien
gtgtctgggggaatggccgctttga

SEQ ID NO: 2057940 - DNA, 25 bp, Homo sapien
tgtctgggggaatggccgctttgac

SEQ ID NO: 2057941 - DNA, 25 bp, Homo sapien
tggtgtctgggggaatggccgcttt

SEQ ID NO: 2057942 - DNA, 25 bp, Homo sapien
ggtgtctgggggaatggccgctttg

SEQ ID NO: 2057943 - DNA, 25 bp, Homo sapien
cagactttctaaatagatggagttt

SEQ ID NO: 2057944 - DNA, 25 bp, Homo sapien
tcacctggttagaaagagagacttg

SEQ ID NO: 2057945 - DNA, 25 bp, Homo sapien
ccccattttcagaacttacagactt

SEQ ID NO: 2057946 - DNA, 25 bp, Homo sapien
gaccagtcttaattggccagcccag

SEQ ID NO: 2057947 - DNA, 25 bp, Homo sapien
tgagtcttgagatatgtcttcagca

SEQ ID NO: 2057948 - DNA, 25 bp, Homo sapien
tgggaaacgctccacccgccagtgg

SEQ ID NO: 2057949 - DNA, 25 bp, Homo sapien
cgggtccttggccagatcttgagtc

SEQ ID NO: 2057950 - DNA, 25 bp, Homo sapien
tccccagggctgactgcaaatcgga

SEQ ID NO: 2057951 - DNA, 25 bp, Homo sapien
tgggattcagacaccgcaagctgct

SEQ ID NO: 2057952 - DNA, 25 bp, Homo sapien
gcagatattggtgccgctgcccgag

SEQ ID NO: 2057953 - DNA, 25 bp, Homo sapien
tactgagcagcgcacagaaaaggga

SEQ ID NO: 2057954 - DNA, 25 bp, Homo sapien
aaggtgcccggacagaaacttgagc

SEQ ID NO: 2057955 - DNA, 25 bp, Homo sapien
tcattcatatgagaagtgcccagtt

SEQ ID NO: 2057956 - DNA, 25 bp, Homo sapien
gctatgaggctaaactggaactccc

SEQ ID NO: 2057957 - DNA, 25 bp, Homo sapien
taactgaggtaaagagtaactgtcc

SEQ ID NO: 2057958 - DNA, 25 bp, Homo sapien
tgatgccttggcagataatgtcagg

SEQ ID NO: 2057959 - DNA, 25 bp, Homo sapien
gaacatactaacatacgtgcatcgg

SEQ ID NO: 2057960 - DNA, 25 bp, Homo sapien
taatacccctcgtggcaggtaagag

SEQ ID NO: 2057961 - DNA, 25 bp, Homo sapien
ggttaaatgcttattcacaccgaag

SEQ ID NO: 2057962 - DNA, 25 bp, Homo sapien
atgcagccaggctagaccagctcag

SEQ ID NO: 2057963 - DNA, 25 bp, Homo sapien
gattccttggctagataaggtgtaa

SEQ ID NO: 2057964 - DNA, 25 bp, Homo sapien
ggccgagaagcgatgattggtattt

SEQ ID NO: 2057965 - DNA, 25 bp, Homo sapien
gactgcaggcgtatgccactctgct

SEQ ID NO: 2057966 - DNA, 25 bp, Homo sapien
cactgtctggattgaggctaagtat

SEQ ID NO: 2057967 - DNA, 25 bp, Homo sapien
taaatgtggacaatttattggcggc

SEQ ID NO: 2057968 - DNA, 25 bp, Homo sapien
aaggcaactgacattagagggctct

SEQ ID NO: 2057969 - DNA, 25 bp, Homo sapien
ccttctctaacggtgtaatatgcat

SEQ ID NO: 2057970 - DNA, 25 bp, Homo sapien
cccacacgttagatacaagtataca

SEQ ID NO: 2057971 - DNA, 25 bp, Homo sapien
cagatagatacccaccatgaggtgt

SEQ ID NO: 2057972 - DNA, 25 bp, Homo sapien
gaggctacaggcacttgcaaatccg

SEQ ID NO: 2057973 - DNA, 25 bp, Homo sapien
tgaaaagttatgtggcctctgaggc

SEQ ID NO: 2057974 - DNA, 25 bp, Homo sapien
caaatccgagaggaaagtgccgtct

SEQ ID NO: 2057975 - DNA, 25 bp, Homo sapien
gggctgctgagatgaatgacacaca

SEQ ID NO: 2057976 - DNA, 25 bp, Homo sapien
taccgttgctatggccctttgcctg

SEQ ID NO: 2057977 - DNA, 25 bp, Homo sapien
tcttatcattaagagtatgagaatt

SEQ ID NO: 2057978 - DNA, 25 bp, Homo sapien
catacacatgcatcagtgtctgcct

SEQ ID NO: 2057979 - DNA, 25 bp, Homo sapien
tactggtgtatccttggaccttcac

SEQ ID NO: 2057980 - DNA, 25 bp, Homo sapien
ccttctgaagattcactactggtgt

SEQ ID NO: 2057981 - DNA, 25 bp, Homo sapien
ggcttttaagatcatgaacctccag

SEQ ID NO: 2057982 - DNA, 25 bp, Homo sapien
gctttagcaactcatatatcagtct

SEQ ID NO: 2057983 - DNA, 25 bp, Homo sapien
agggcagaggcccattttaatgaat

SEQ ID NO: 2057984 - DNA, 25 bp, Homo sapien
aatgaatgtttttgcatgacctgtt

SEQ ID NO: 2057985 - DNA, 25 bp, Homo sapien
gacctgttcttatgttaaccacata

SEQ ID NO: 2057986 - DNA, 25 bp, Homo sapien
ttttttcccaattccacacagcagg

SEQ ID NO: 2057987 - DNA, 25 bp, Homo sapien
gacctagctgttgcatcatcatgac

SEQ ID NO: 2057988 - DNA, 25 bp, Homo sapien
taaagagtacagaggccattgaagc

SEQ ID NO: 2057989 - DNA, 25 bp, Homo sapien
gtgaaaaacagagcagtgacctagc

SEQ ID NO: 2057990 - DNA, 25 bp, Homo sapien
tgtatggctaggaaccaatgcactt

SEQ ID NO: 2057991 - DNA, 25 bp, Homo sapien
agaaagttttgcagtcgctccgaca

SEQ ID NO: 2057992 - DNA, 25 bp, Homo sapien
tagagtgcttatcaacttccaggga

SEQ ID NO: 2057993 - DNA, 25 bp, Homo sapien
ggagtgttccacagacaggcttttg

SEQ ID NO: 2057994 - DNA, 25 bp, Homo sapien
gatgcaggcgtttttcccctctggg

SEQ ID NO: 2057995 - DNA, 25 bp, Homo sapien
aataagtgtcaacccatcaggcaag

SEQ ID NO: 2057996 - DNA, 25 bp, Homo sapien
gtctgaaatccaggagaatgtctct

SEQ ID NO: 2057997 - DNA, 25 bp, Homo sapien
gtgccatgggcccttgtagcaagca

SEQ ID NO: 2057998 - DNA, 25 bp, Homo sapien
agcaagcatggcctgaaaaagcgaa

SEQ ID NO: 2057999 - DNA, 25 bp, Homo sapien
tctgccatggacttcaaacttggac

SEQ ID NO: 2058000 - DNA, 25 bp, Homo sapien
tagatcttgtagtaccctcgtacca

SEQ ID NO: 2058001 - DNA, 25 bp, Homo sapien
gacatgaaacctttctcttactcca

SEQ ID NO: 2058002 - DNA, 25 bp, Homo sapien
tgtgggctgggtctactgtagatct

SEQ ID NO: 2058003 - DNA, 25 bp, Homo sapien
ctggcaccttccccagctgcctgac

SEQ ID NO: 2058004 - DNA, 25 bp, Homo sapien
tcccagccgctatctcaaaaaaggt

SEQ ID NO: 2058005 - DNA, 25 bp, Homo sapien
ccagccgctatctcaaaaaaggtct

SEQ ID NO: 2058006 - DNA, 25 bp, Homo sapien
cccagccgctatctcaaaaaaggtc

SEQ ID NO: 2058007 - DNA, 25 bp, Homo sapien
caaaaaaggtctcatccatgctcat

SEQ ID NO: 2058008 - DNA, 25 bp, Homo sapien
ttaattgttcggtcgtccctgacac

SEQ ID NO: 2058009 - DNA, 25 bp, Homo sapien
ggagaattaaagagatgatcctgtt

SEQ ID NO: 2058010 - DNA, 25 bp, Homo sapien
agggagaattaaagagatgatcctg

SEQ ID NO: 2058011 - DNA, 25 bp, Homo sapien
gatcctgttaattgttcggtcgtcc

SEQ ID NO: 2058012 - DNA, 25 bp, Homo sapien
ggccagtccatgaacccattcctgg

SEQ ID NO: 2058013 - DNA, 25 bp, Homo sapien
gtccatgaacccattcctggattct

SEQ ID NO: 2058014 - DNA, 25 bp, Homo sapien
acagcttgatccctcacagactggc

SEQ ID NO: 2058015 - DNA, 25 bp, Homo sapien
tcagacccgctgcctgctcagaagc

SEQ ID NO: 2058016 - DNA, 25 bp, Homo sapien
aagagctgttctccacgcgttccag

SEQ ID NO: 2058017 - DNA, 25 bp, Homo sapien
tgtgtgccatctgctagtgcggtga

SEQ ID NO: 2058018 - DNA, 25 bp, Homo sapien
tggtgagtgtggcttggcaaacaga

SEQ ID NO: 2058019 - DNA, 25 bp, Homo sapien
cgttccaggggctgtagcttggcca

SEQ ID NO: 2058020 - DNA, 25 bp, Homo sapien
cactgactttatcatgtgggctaga

SEQ ID NO: 2058021 - DNA, 25 bp, Homo sapien
gactttatcatgtgggctagaagga

SEQ ID NO: 2058022 - DNA, 25 bp, Homo sapien
ctctcactgactttatcatgtgggc

SEQ ID NO: 2058023 - DNA, 25 bp, Homo sapien
tcatgtgggctagaaggagcctttg

SEQ ID NO: 2058024 - DNA, 25 bp, Homo sapien
gcaggacttaatcatacagccttcc

SEQ ID NO: 2058025 - DNA, 25 bp, Homo sapien
catccctgtccgcaggacttaatca

SEQ ID NO: 2058026 - DNA, 25 bp, Homo sapien
gacttaatcatacagccttccctca

SEQ ID NO: 2058027 - DNA, 25 bp, Homo sapien
tgtccgcaggacttaatcatacagc

SEQ ID NO: 2058028 - DNA, 25 bp, Homo sapien
gaaccctggtaactgcttcatttcc

SEQ ID NO: 2058029 - DNA, 25 bp, Homo sapien
ccaggtgctcaggtaatttcccaat

SEQ ID NO: 2058030 - DNA, 25 bp, Homo sapien
tcttcagctgggatttaacctgggc

SEQ ID NO: 2058031 - DNA, 25 bp, Homo sapien
caggtaatttcccaattacattgga

SEQ ID NO: 2058032 - DNA, 25 bp, Homo sapien
tattttgcttccttgactcaatgcc

SEQ ID NO: 2058033 - DNA, 25 bp, Homo sapien
tctttctgcagcagaccgcatctag

SEQ ID NO: 2058034 - DNA, 25 bp, Homo sapien
ctccccagcggccatcagtgcctgg

SEQ ID NO: 2058035 - DNA, 25 bp, Homo sapien
atctagaatcccctgccacgttcag

SEQ ID NO: 2058036 - DNA, 25 bp, Homo sapien
catcatccttcgttatgggcagcct

SEQ ID NO: 2058037 - DNA, 25 bp, Homo sapien
taacaaggcgtttggtgtgtgcatg

SEQ ID NO: 2058038 - DNA, 25 bp, Homo sapien
ggcacgcgtcctgcgttaacaaggc

SEQ ID NO: 2058039 - DNA, 25 bp, Homo sapien
ggacctcagggtcgtgtgcactaag

SEQ ID NO: 2058040 - DNA, 25 bp, Homo sapien
tgagaatgcgttcttggcacgcgtc

SEQ ID NO: 2058041 - DNA, 25 bp, Homo sapien
catgtgtgcacgttccgtgttcacg

SEQ ID NO: 2058042 - DNA, 25 bp, Homo sapien
tctccatgtgtgcacgttccgtgtt

SEQ ID NO: 2058043 - DNA, 25 bp, Homo sapien
agtgcacgtccctctccatgtgtgc

SEQ ID NO: 2058044 - DNA, 25 bp, Homo sapien
tgtgcacgttccgtgttcacgccgc

SEQ ID NO: 2058045 - DNA, 25 bp, Homo sapien
cattgtagtagtgtaggatgtaggc

SEQ ID NO: 2058046 - DNA, 25 bp, Homo sapien
ttgtagtagtgtaggatgtaggcca

SEQ ID NO: 2058047 - DNA, 25 bp, Homo sapien
ccattgtagtagtgtaggatgtagg

SEQ ID NO: 2058048 - DNA, 25 bp, Homo sapien
attgtagtagtgtaggatgtaggcc

SEQ ID NO: 2058049 - DNA, 25 bp, Homo sapien
ttctgctgctcgccagccagacctg

SEQ ID NO: 2058050 - DNA, 25 bp, Homo sapien
ttaacagccggctcccttctgctgc

SEQ ID NO: 2058051 - DNA, 25 bp, Homo sapien
tcccttctgctgctcgccagccaga

SEQ ID NO: 2058052 - DNA, 25 bp, Homo sapien
tgctcgccagccagacctgcttgaa

SEQ ID NO: 2058053 - DNA, 25 bp, Homo sapien
tgtggtcgtgtagcccgggccatct

SEQ ID NO: 2058054 - DNA, 25 bp, Homo sapien
gggccatctgctcattgtacgctgc

SEQ ID NO: 2058055 - DNA, 25 bp, Homo sapien
catctgctcattgtacgctgctttt

SEQ ID NO: 2058056 - DNA, 25 bp, Homo sapien
gctcattgtacgctgcttttgttct

SEQ ID NO: 2058057 - DNA, 25 bp, Homo sapien
tatcccgaaatctgagttggaacaa

SEQ ID NO: 2058058 - DNA, 25 bp, Homo sapien
taggtcaccccttgagcaagctttc

SEQ ID NO: 2058059 - DNA, 25 bp, Homo sapien
tcctcccggagttgtaccaatcagt

SEQ ID NO: 2058060 - DNA, 25 bp, Homo sapien
ttcttacaatatgaactcctcccgg

SEQ ID NO: 2058061 - DNA, 25 bp, Homo sapien
tccttgaccccgagctcaaggctgg

SEQ ID NO: 2058062 - DNA, 25 bp, Homo sapien
ttgttgggccactgagcgggacatt

SEQ ID NO: 2058063 - DNA, 25 bp, Homo sapien
ttccttgaaacatgcctgggtgtgc

SEQ ID NO: 2058064 - DNA, 25 bp, Homo sapien
aaacatgcctgggtgtgccgctgtg

SEQ ID NO: 2058065 - DNA, 25 bp, Homo sapien
gccacggaaccagagggatagggca

SEQ ID NO: 2058066 - DNA, 25 bp, Homo sapien
aggaagtttgcgcccgctggaacct

SEQ ID NO: 2058067 - DNA, 25 bp, Homo sapien
tggaaggaagtttgcgcccgctgga

SEQ ID NO: 2058068 - DNA, 25 bp, Homo sapien
ctgccacggaaccagagggataggg

SEQ ID NO: 2058069 - DNA, 25 bp, Homo sapien
gcttgttcaggcctgggacagtttt

SEQ ID NO: 2058070 - DNA, 25 bp, Homo sapien
taggggtcttaggggagtgcaaagc

SEQ ID NO: 2058071 - DNA, 25 bp, Homo sapien
ttgttcaggcctgggacagttttag

SEQ ID NO: 2058072 - DNA, 25 bp, Homo sapien
ctctgcttgttcaggcctgggacag

SEQ ID NO: 2058073 - DNA, 25 bp, Homo sapien
tggtgtggtatctgggagacctcct

SEQ ID NO: 2058074 - DNA, 25 bp, Homo sapien
gtaggggcttagggcagcattttcc

SEQ ID NO: 2058075 - DNA, 25 bp, Homo sapien
gactgatccttgaagtaggggctta

SEQ ID NO: 2058076 - DNA, 25 bp, Homo sapien
gaagaggtaccatgggctactgctg

SEQ ID NO: 2058077 - DNA, 25 bp, Homo sapien
caatcatcacaaagctctgtttgga

SEQ ID NO: 2058078 - DNA, 25 bp, Homo sapien
cagctgggatggaagcgtgaggtcc

SEQ ID NO: 2058079 - DNA, 25 bp, Homo sapien
cttcctggaggcgttgagtcttcag

SEQ ID NO: 2058080 - DNA, 25 bp, Homo sapien
atcacaaagctctgtttggatgcca

SEQ ID NO: 2058081 - DNA, 25 bp, Homo sapien
tagacttggtcccatgtcacttccg

SEQ ID NO: 2058082 - DNA, 25 bp, Homo sapien
tagggtcctggatgggccatatcag

SEQ ID NO: 2058083 - DNA, 25 bp, Homo sapien
ccatatcaggagatgtcctgaagat

SEQ ID NO: 2058084 - DNA, 25 bp, Homo sapien
gtcccatgtcacttccgagagctga

SEQ ID NO: 2058085 - DNA, 25 bp, Homo sapien
ggcagcaaaacggtcacctgccctt

SEQ ID NO: 2058086 - DNA, 25 bp, Homo sapien
ttggcacctgctattaggcccctgg

SEQ ID NO: 2058087 - DNA, 25 bp, Homo sapien
agccttggcagcaaaacggtcacct

SEQ ID NO: 2058088 - DNA, 25 bp, Homo sapien
gggcctatggacttctcttggcacc

SEQ ID NO: 2058089 - DNA, 25 bp, Homo sapien
tccttggcccactgggacgttgctg

SEQ ID NO: 2058090 - DNA, 25 bp, Homo sapien
actgggacgttgctgccagtggctc

SEQ ID NO: 2058091 - DNA, 25 bp, Homo sapien
ggcccactgggacgttgctgccagt

SEQ ID NO: 2058092 - DNA, 25 bp, Homo sapien
gcctccttggcccactgggacgttg

SEQ ID NO: 2058093 - DNA, 25 bp, Homo sapien
gggcctggaagggcgtcttggaaga

SEQ ID NO: 2058094 - DNA, 25 bp, Homo sapien
ttggccttttcctctggcgacttgg

SEQ ID NO: 2058095 - DNA, 25 bp, Homo sapien
cgtcttggaagatggtgcccacggg

SEQ ID NO: 2058096 - DNA, 25 bp, Homo sapien
tgttggccttttcctctggcgactt

SEQ ID NO: 2058097 - DNA, 25 bp, Homo sapien
cgtatgcaatgtgtcagatgcctca

SEQ ID NO: 2058098 - DNA, 25 bp, Homo sapien
tattgaatgcttccgtatgcaatgt

SEQ ID NO: 2058099 - DNA, 25 bp, Homo sapien
tacttattgaatgcttccgtatgca

SEQ ID NO: 2058100 - DNA, 25 bp, Homo sapien
aatgcttccgtatgcaatgtgtcag

SEQ ID NO: 2058101 - DNA, 25 bp, Homo sapien
caaacaagtccggtgagattgacgt

SEQ ID NO: 2058102 - DNA, 25 bp, Homo sapien
caatatgagatacctttgccaggac

SEQ ID NO: 2058103 - DNA, 25 bp, Homo sapien
tcttcgttagtttagccgaggacag

SEQ ID NO: 2058104 - DNA, 25 bp, Homo sapien
aaacggtggtggtgatgcactcttc

SEQ ID NO: 2058105 - DNA, 25 bp, Homo sapien
tgtaaactagaactgctctacaaaa

SEQ ID NO: 2058106 - DNA, 25 bp, Homo sapien
atgtaaactagaactgctctacaaa

SEQ ID NO: 2058107 - DNA, 25 bp, Homo sapien
tcctgcgcgcgtagagcaaatgcta

SEQ ID NO: 2058108 - DNA, 25 bp, Homo sapien
gctgtagcaacgtctgtcaggcccc

SEQ ID NO: 2058109 - DNA, 25 bp, Homo sapien
catggcacgttgctagtttacaggg

SEQ ID NO: 2058110 - DNA, 25 bp, Homo sapien
tctgggagtggaatgctttgcatgc

SEQ ID NO: 2058111 - DNA, 25 bp, Homo sapien
taactacaccttatgcctgctgggt

SEQ ID NO: 2058112 - DNA, 25 bp, Homo sapien
tgcatcaatgaaaaggcggagacat

SEQ ID NO: 2058113 - DNA, 25 bp, Homo sapien
tacccagggcatgtcggaggaagcc

SEQ ID NO: 2058114 - DNA, 25 bp, Homo sapien
tctttgtccaagataagaggcacta

SEQ ID NO: 2058115 - DNA, 25 bp, Homo sapien
tatactcactatctggtgtaggcac

SEQ ID NO: 2058116 - DNA, 25 bp, Homo sapien
tcataacctacaaggtgggcattgt

SEQ ID NO: 2058117 - DNA, 25 bp, Homo sapien
ccaagtcctgcgtgttcagcatggt

SEQ ID NO: 2058118 - DNA, 25 bp, Homo sapien
taatgtgcccaagttctcacagttg

SEQ ID NO: 2058119 - DNA, 25 bp, Homo sapien
accttgttgctgtccttttctctac

SEQ ID NO: 2058120 - DNA, 25 bp, Homo sapien
aggaaaatcagaagttaggtgctga

SEQ ID NO: 2058121 - DNA, 25 bp, Homo sapien
ttgttgctgtccttttctctacagg

SEQ ID NO: 2058122 - DNA, 25 bp, Homo sapien
tcagaagttaggtgctgagctctgc

SEQ ID NO: 2058123 - DNA, 25 bp, Homo sapien
cttgccactgggtttattgaaactg

SEQ ID NO: 2058124 - DNA, 25 bp, Homo sapien
ttctccacttctatcccctgggtga

SEQ ID NO: 2058125 - DNA, 25 bp, Homo sapien
caagcagatgctaagatgagttctt

SEQ ID NO: 2058126 - DNA, 25 bp, Homo sapien
tgcttaaaatacaccatcttgatgg

SEQ ID NO: 2058127 - DNA, 25 bp, Homo sapien
tctgcagcaagtcccagcctggtca

SEQ ID NO: 2058128 - DNA, 25 bp, Homo sapien
tcatccacactctgcagcaagtccc

SEQ ID NO: 2058129 - DNA, 25 bp, Homo sapien
actctgcagcaagtcccagcctggt

SEQ ID NO: 2058130 - DNA, 25 bp, Homo sapien
tccacactctgcagcaagtcccagc

SEQ ID NO: 2058131 - DNA, 25 bp, Homo sapien
ccagtgccaatgctagaggctttga

SEQ ID NO: 2058132 - DNA, 25 bp, Homo sapien
taattattatcactgtaggttcaat

SEQ ID NO: 2058133 - DNA, 25 bp, Homo sapien
gggcagccacagattatgacacatg

SEQ ID NO: 2058134 - DNA, 25 bp, Homo sapien
ctgctgaccgccaaggtggagggca

SEQ ID NO: 2058135 - DNA, 25 bp, Homo sapien
cagaagggaagaggtctctccaggt

SEQ ID NO: 2058136 - DNA, 25 bp, Homo sapien
agtagccactgctgtcgtgctccag

SEQ ID NO: 2058137 - DNA, 25 bp, Homo sapien
cacagttgaagatggtggccacgcc

SEQ ID NO: 2058138 - DNA, 25 bp, Homo sapien
tggccacgccggtgctggtgttggt

SEQ ID NO: 2058139 - DNA, 25 bp, Homo sapien
caaagatggtcacgaagacgttggc

SEQ ID NO: 2058140 - DNA, 25 bp, Homo sapien
caaagctctctgtcgtcttggtaac

SEQ ID NO: 2058141 - DNA, 25 bp, Homo sapien
tgacttcgtacttgacgggcaccag

SEQ ID NO: 2058142 - DNA, 25 bp, Homo sapien
tgtgtctccgttggccccaaagatg

SEQ ID NO: 2058143 - DNA, 25 bp, Homo sapien
tccttggggagaggctcagtacata

SEQ ID NO: 2058144 - DNA, 25 bp, Homo sapien
agctcagtccctgccccatgctgag

SEQ ID NO: 2058145 - DNA, 25 bp, Homo sapien
tgctgagggagtggcacttccttgg

SEQ ID NO: 2058146 - DNA, 25 bp, Homo sapien
tctcttgcccatggtccagctcagt

SEQ ID NO: 2058147 - DNA, 25 bp, Homo sapien
ccatctcggtgatggtgatggtctt

SEQ ID NO: 2058148 - DNA, 25 bp, Homo sapien
caagttctctcttggggataaaccg

SEQ ID NO: 2058149 - DNA, 25 bp, Homo sapien
caatgtcccccaagtagatgctgtc

SEQ ID NO: 2058150 - DNA, 25 bp, Homo sapien
gccaggcaagttctctcttggggat

SEQ ID NO: 2058151 - DNA, 25 bp, Homo sapien
gcccgtttctatgacgatctcgtag

SEQ ID NO: 2058152 - DNA, 25 bp, Homo sapien
ggatgagccagacgttctccctggt

SEQ ID NO: 2058153 - DNA, 25 bp, Homo sapien
ggcccgctgcctagaagaattttcc

SEQ ID NO: 2058154 - DNA, 25 bp, Homo sapien
catgagaaactctttggatcggttc

SEQ ID NO: 2058155 - DNA, 25 bp, Homo sapien
gtctcgtcgcgggagttgtccttca

SEQ ID NO: 2058156 - DNA, 25 bp, Homo sapien
acagatcttgttgttggcacaggca

SEQ ID NO: 2058157 - DNA, 25 bp, Homo sapien
cactggaagtggaaggtctcgtcgc

SEQ ID NO: 2058158 - DNA, 25 bp, Homo sapien
gcacaggcaaagtcgcggaccgtct

SEQ ID NO: 2058159 - DNA, 25 bp, Homo sapien
tatccacatataattcattgccccc

SEQ ID NO: 2058160 - DNA, 25 bp, Homo sapien
catggctaactgagtggccagcact

SEQ ID NO: 2058161 - DNA, 25 bp, Homo sapien
agcatggctaactgagtggccagca

SEQ ID NO: 2058162 - DNA, 25 bp, Homo sapien
atggctaactgagtggccagcacta

SEQ ID NO: 2058163 - DNA, 25 bp, Homo sapien
gcatggctaactgagtggccagcac

SEQ ID NO: 2058164 - DNA, 25 bp, Homo sapien
gttgttccgctcaaacttgttccag

SEQ ID NO: 2058165 - DNA, 25 bp, Homo sapien
gtgtccgtgttgttccgctcaaact

SEQ ID NO: 2058166 - DNA, 25 bp, Homo sapien
ttgttgtcgtgccagaccctcagct

SEQ ID NO: 2058167 - DNA, 25 bp, Homo sapien
tgttgtcgtgccagaccctcagctt

SEQ ID NO: 2058168 - DNA, 25 bp, Homo sapien
cactatccccgttctccccgaagat

SEQ ID NO: 2058169 - DNA, 25 bp, Homo sapien
cgttctccccgaagatgatgatgaa

SEQ ID NO: 2058170 - DNA, 25 bp, Homo sapien
tttgccgactgcttcagggccagtg

SEQ ID NO: 2058171 - DNA, 25 bp, Homo sapien
ttgccgactgcttcagggccagtgt

SEQ ID NO: 2058172 - DNA, 25 bp, Homo sapien
tttatgcctgagatcctactatgag

SEQ ID NO: 2058173 - DNA, 25 bp, Homo sapien
cagattccttgtaatggctcctgga

SEQ ID NO: 2058174 - DNA, 25 bp, Homo sapien
taatgtgatgagcttgccagattcc

SEQ ID NO: 2058175 - DNA, 25 bp, Homo sapien
gatgacagtgtgttccctctcagct

SEQ ID NO: 2058176 - DNA, 25 bp, Homo sapien
tcgataacggcacacatttcacaca

SEQ ID NO: 2058177 - DNA, 25 bp, Homo sapien
cagccagtctccatagtagaacatg

SEQ ID NO: 2058178 - DNA, 25 bp, Homo sapien
cggtgtaggaggtccactccatcat

SEQ ID NO: 2058179 - DNA, 25 bp, Homo sapien
cgctggtcttaactgcgacggtgta

SEQ ID NO: 2058180 - DNA, 25 bp, Homo sapien
atgggctgggttcatgtaatgatcc

SEQ ID NO: 2058181 - DNA, 25 bp, Homo sapien
tgggctgggttcatgtaatgatcct

SEQ ID NO: 2058182 - DNA, 25 bp, Homo sapien
caaggtccattgacaagccagagga

SEQ ID NO: 2058183 - DNA, 25 bp, Homo sapien
tttaacaaggtccattgacaagcca

SEQ ID NO: 2058184 - DNA, 25 bp, Homo sapien
aacaaggtccattgacaagccagag

SEQ ID NO: 2058185 - DNA, 25 bp, Homo sapien
gtccattgacaagccagaggaacca

SEQ ID NO: 2058186 - DNA, 25 bp, Homo sapien
ccatgatgaaggtgtcgttctgctc

SEQ ID NO: 2058187 - DNA, 25 bp, Homo sapien
aggtgtcgttctgctcccgctcaaa

SEQ ID NO: 2058188 - DNA, 25 bp, Homo sapien
tgaatggagcaatgtctaggatctc

SEQ ID NO: 2058189 - DNA, 25 bp, Homo sapien
ggccatcaatccggatccgcatctt

SEQ ID NO: 2058190 - DNA, 25 bp, Homo sapien
gactgattgcttgactgctgactga

SEQ ID NO: 2058191 - DNA, 25 bp, Homo sapien
tgatactgctgataaggccctcggg

SEQ ID NO: 2058192 - DNA, 25 bp, Homo sapien
caattcgaccttcaatgctgactga

SEQ ID NO: 2058193 - DNA, 25 bp, Homo sapien
tcttcccacagtgccgcatgtacaa

SEQ ID NO: 2058194 - DNA, 25 bp, Homo sapien
tgccgtagagggtcatgaagatgtt

SEQ ID NO: 2058195 - DNA, 25 bp, Homo sapien
tgctcccgttgatgccgtagagggt

SEQ ID NO: 2058196 - DNA, 25 bp, Homo sapien
ccgttgatgccgtagagggtcatga

SEQ ID NO: 2058197 - DNA, 25 bp, Homo sapien
ctctgtgctcccgttgatgccgtag

SEQ ID NO: 2058198 - DNA, 25 bp, Homo sapien
ggagcactgcctcaatccactggag

SEQ ID NO: 2058199 - DNA, 25 bp, Homo sapien
aagagaatgtctgccctctgtctcc

SEQ ID NO: 2058200 - DNA, 25 bp, Homo sapien
ggttttgccatttagcctgaggtgt

SEQ ID NO: 2058201 - DNA, 25 bp, Homo sapien
agaagtgagacaatcccctagttcc

SEQ ID NO: 2058202 - DNA, 25 bp, Homo sapien
catcattgtcctggtgggggttgca

SEQ ID NO: 2058203 - DNA, 25 bp, Homo sapien
ctattaatcacagcggtcatgttcc

SEQ ID NO: 2058204 - DNA, 25 bp, Homo sapien
tcctggtgggggttgcatgcttttc

SEQ ID NO: 2058205 - DNA, 25 bp, Homo sapien
tccaaaccggagctattaatcacag

SEQ ID NO: 2058206 - DNA, 25 bp, Homo sapien
cacaccatccgtctggccacagatg

SEQ ID NO: 2058207 - DNA, 25 bp, Homo sapien
ccacaccatccgtctggccacagat

SEQ ID NO: 2058208 - DNA, 25 bp, Homo sapien
ttcagttaaggagggtattgtgtgg

SEQ ID NO: 2058209 - DNA, 25 bp, Homo sapien
ggacaccattggctgcaccgtgaga

SEQ ID NO: 2058210 - DNA, 25 bp, Homo sapien
gagattcacagtatcccagatgcca

SEQ ID NO: 2058211 - DNA, 25 bp, Homo sapien
gcaccgtgagactcagagattcaca

SEQ ID NO: 2058212 - DNA, 25 bp, Homo sapien
caccatggcatccaagaggtcgaag

SEQ ID NO: 2058213 - DNA, 25 bp, Homo sapien
acacgggaggtgatgccgtcgcctc

SEQ ID NO: 2058214 - DNA, 25 bp, Homo sapien
catccaagaggtcgaagacacggga

SEQ ID NO: 2058215 - DNA, 25 bp, Homo sapien
caatgttcaccaccatggcatccaa

SEQ ID NO: 2058216 - DNA, 25 bp, Homo sapien
tgccaaacacaactcttccaccagc

SEQ ID NO: 2058217 - DNA, 25 bp, Homo sapien
ctgccaaacacaactcttccaccag

SEQ ID NO: 2058218 - DNA, 25 bp, Homo sapien
ggtcactatcatggggccccgagaa

SEQ ID NO: 2058219 - DNA, 25 bp, Homo sapien
ggtggtcactatcatggggccccga

SEQ ID NO: 2058220 - DNA, 25 bp, Homo sapien
atccctagggtggtcactatcatgg

SEQ ID NO: 2058221 - DNA, 25 bp, Homo sapien
tccctagggtggtcactatcatggg

SEQ ID NO: 2058222 - DNA, 25 bp, Homo sapien
tgcgcttactacgttcatcatcctc

SEQ ID NO: 2058223 - DNA, 25 bp, Homo sapien
gaaagatgaaggctcggctgtcagt

SEQ ID NO: 2058224 - DNA, 25 bp, Homo sapien
atccaagcctgcgacgtagaactcc

SEQ ID NO: 2058225 - DNA, 25 bp, Homo sapien
ggtagtccaaccagatgcgcttact

SEQ ID NO: 2058226 - DNA, 25 bp, Homo sapien
gctgatgtcgacatcggccatcttg

SEQ ID NO: 2058227 - DNA, 25 bp, Homo sapien
ttgggccctcttgaacgtagtcagc

SEQ ID NO: 2058228 - DNA, 25 bp, Homo sapien
aacgtagtcagccatgggcccggtc

SEQ ID NO: 2058229 - DNA, 25 bp, Homo sapien
gctcagggcgatctcccagaagtca

SEQ ID NO: 2058230 - DNA, 25 bp, Homo sapien
tcagcggcctcgatgatgaaggtgt

SEQ ID NO: 2058231 - DNA, 25 bp, Homo sapien
gtaaaagagcctctcgagtcgccca

SEQ ID NO: 2058232 - DNA, 25 bp, Homo sapien
tagatgacgcctaggtcagcggcct

SEQ ID NO: 2058233 - DNA, 25 bp, Homo sapien
cgcccgcataggaacaggaactcgt

SEQ ID NO: 2058234 - DNA, 25 bp, Homo sapien
gtgtccccgaggtctccatagatgg

SEQ ID NO: 2058235 - DNA, 25 bp, Homo sapien
tcctctctcgaacttgttggtccgg

SEQ ID NO: 2058236 - DNA, 25 bp, Homo sapien
ttgccaaggtatcgctccccagtgt

SEQ ID NO: 2058237 - DNA, 25 bp, Homo sapien
tggtgatgtacaccttggcatccgt

SEQ ID NO: 2058238 - DNA, 25 bp, Homo sapien
tgtgaagatctgcaccgagtacagc

SEQ ID NO: 2058239 - DNA, 25 bp, Homo sapien
tgaagatctgcaccgagtacagcac

SEQ ID NO: 2058240 - DNA, 25 bp, Homo sapien
aagatctgcaccgagtacagcacaa

SEQ ID NO: 2058241 - DNA, 25 bp, Homo sapien
gtgaagatctgcaccgagtacagca

SEQ ID NO: 2058242 - DNA, 25 bp, Homo sapien
gcaagccaccgatcgcatgggaaag

SEQ ID NO: 2058243 - DNA, 25 bp, Homo sapien
gatgtcatatggaaccagttctcga

SEQ ID NO: 2058244 - DNA, 25 bp, Homo sapien
tcatcctcagaggtggcaagccacc

SEQ ID NO: 2058245 - DNA, 25 bp, Homo sapien
tgtagacttgccgtaaggacccatc

SEQ ID NO: 2058246 - DNA, 25 bp, Homo sapien
cccgtgttattatggccaatccgaa

SEQ ID NO: 2058247 - DNA, 25 bp, Homo sapien
gtctttatccgggaggagcctgcgg

SEQ ID NO: 2058248 - DNA, 25 bp, Homo sapien
ggattcatgcccgtgttattatggc

SEQ ID NO: 2058249 - DNA, 25 bp, Homo sapien
gatgtccacgtgagagcagtgccac

SEQ ID NO: 2058250 - DNA, 25 bp, Homo sapien
tctctaatagcagtgcatcaggatg

SEQ ID NO: 2058251 - DNA, 25 bp, Homo sapien
tgtctgacctactccatccctggac

SEQ ID NO: 2058252 - DNA, 25 bp, Homo sapien
ctctctaatagcagtgcatcaggat

SEQ ID NO: 2058253 - DNA, 25 bp, Homo sapien
gtctgacctactccatccctggaca

SEQ ID NO: 2058254 - DNA, 25 bp, Homo sapien
aaagacatcactggtgtagagggtg

SEQ ID NO: 2058255 - DNA, 25 bp, Homo sapien
tgcacacggcatcgcagccatagat

SEQ ID NO: 2058256 - DNA, 25 bp, Homo sapien
tagagggtgatctcgtaaggaacaa

SEQ ID NO: 2058257 - DNA, 25 bp, Homo sapien
tcttgttggtacacagatacttctg

SEQ ID NO: 2058258 - DNA, 25 bp, Homo sapien
aggccagagtctgtcctcgcctgca

SEQ ID NO: 2058259 - DNA, 25 bp, Homo sapien
aaatggatacgtttgtcctcaaggg

SEQ ID NO: 2058260 - DNA, 25 bp, Homo sapien
ctggctttgggcatgcccagccaga

SEQ ID NO: 2058261 - DNA, 25 bp, Homo sapien
tgtcctagggcatgtagggagaaat

SEQ ID NO: 2058262 - DNA, 25 bp, Homo sapien
gatgaggaatctgaaccctcgagag

SEQ ID NO: 2058263 - DNA, 25 bp, Homo sapien
cattattatctctatgctgcagatg

SEQ ID NO: 2058264 - DNA, 25 bp, Homo sapien
ttttggatattgctatcatcctgca

SEQ ID NO: 2058265 - DNA, 25 bp, Homo sapien
ccctcgagaggttaggttctctaca

SEQ ID NO: 2058266 - DNA, 25 bp, Homo sapien
ggccacagggaaacgtcatgcactt

SEQ ID NO: 2058267 - DNA, 25 bp, Homo sapien
gcctcgtctgaagctctgcatggaa

SEQ ID NO: 2058268 - DNA, 25 bp, Homo sapien
ggtctctgatgatggacccgtcgtc

SEQ ID NO: 2058269 - DNA, 25 bp, Homo sapien
tcgtcttcgtttttggccagccagc

SEQ ID NO: 2058270 - DNA, 25 bp, Homo sapien
gctgtccctctcaaacttatcgctg

SEQ ID NO: 2058271 - DNA, 25 bp, Homo sapien
gccaagccggactttccacaggtct

SEQ ID NO: 2058272 - DNA, 25 bp, Homo sapien
gcgtctccaccgtgaagatttcaat

SEQ ID NO: 2058273 - DNA, 25 bp, Homo sapien
ctgtgttgtcatggccaagccggac

SEQ ID NO: 2058274 - DNA, 25 bp, Homo sapien
ttaaccccagtctttatggtcactg

SEQ ID NO: 2058275 - DNA, 25 bp, Homo sapien
attagcatctgtgcccgcattcttc

SEQ ID NO: 2058276 - DNA, 25 bp, Homo sapien
cgcattcttcttaaccccagtcttt

SEQ ID NO: 2058277 - DNA, 25 bp, Homo sapien
catctgtgcccgcattcttcttaac

SEQ ID NO: 2058278 - DNA, 25 bp, Homo sapien
caggttgtcgagggggttgttgtca

SEQ ID NO: 2058279 - DNA, 25 bp, Homo sapien
cagggccaggttgtcgagggggttg

SEQ ID NO: 2058280 - DNA, 25 bp, Homo sapien
ctccagggccaggttgtcgaggggg

SEQ ID NO: 2058281 - DNA, 25 bp, Homo sapien
tcgagggggttgttgtcaccgcctc

SEQ ID NO: 2058282 - DNA, 25 bp, Homo sapien
cactgccagccaacgttggcatgga

SEQ ID NO: 2058283 - DNA, 25 bp, Homo sapien
ccagccaacgttggcatggaaagta

SEQ ID NO: 2058284 - DNA, 25 bp, Homo sapien
ccaacgttggcatggaaagtagtac

SEQ ID NO: 2058285 - DNA, 25 bp, Homo sapien
tccactgccagccaacgttggcatg

SEQ ID NO: 2058286 - DNA, 25 bp, Homo sapien
atcctccagtgtcacagccagccca

SEQ ID NO: 2058287 - DNA, 25 bp, Homo sapien
cctcggatgtcacagccagctcgcc

SEQ ID NO: 2058288 - DNA, 25 bp, Homo sapien
ccagcccactctcatcctccaacgt

SEQ ID NO: 2058289 - DNA, 25 bp, Homo sapien
gccagctcgccctcatcctccagtg

SEQ ID NO: 2058290 - DNA, 25 bp, Homo sapien
tgctctgttgcctgtgttgtcgtgg

SEQ ID NO: 2058291 - DNA, 25 bp, Homo sapien
gcgaatccgaatcttggtcagggcc

SEQ ID NO: 2058292 - DNA, 25 bp, Homo sapien
cagtaatgtctattctgtccaggaa

SEQ ID NO: 2058293 - DNA, 25 bp, Homo sapien
ccaggtcaatggcatagatggtgaa

SEQ ID NO: 2058294 - DNA, 25 bp, Homo sapien
catttaggtgtgaagagggccatat

SEQ ID NO: 2058295 - DNA, 25 bp, Homo sapien
cacactgctccatgcacgggaggaa

SEQ ID NO: 2058296 - DNA, 25 bp, Homo sapien
tcagaaactgaagacggatttgccc

SEQ ID NO: 2058297 - DNA, 25 bp, Homo sapien
ggccatatggatcacaccatgtgaa

SEQ ID NO: 2058298 - DNA, 25 bp, Homo sapien
taacccctccacaaagtatcagtgt

SEQ ID NO: 2058299 - DNA, 25 bp, Homo sapien
gccactcaacgccattctctgtttg

SEQ ID NO: 2058300 - DNA, 25 bp, Homo sapien
cctccacaaagtatcagtgttactg

SEQ ID NO: 2058301 - DNA, 25 bp, Homo sapien
tcagcatctgccactcaacgccatt

SEQ ID NO: 2058302 - DNA, 25 bp, Homo sapien
cctcgccgtagatggttaggtagac

SEQ ID NO: 2058303 - DNA, 25 bp, Homo sapien
ggtcgttcgcccgtgtctccatact

SEQ ID NO: 2058304 - DNA, 25 bp, Homo sapien
tcaaatttgttggacttgtctgact

SEQ ID NO: 2058305 - DNA, 25 bp, Homo sapien
taggtagacgttagcatcagtgccg

SEQ ID NO: 2058306 - DNA, 25 bp, Homo sapien
ctgtagacacagaaagatgcagtgt

SEQ ID NO: 2058307 - DNA, 25 bp, Homo sapien
gtgtttggacctgaggcacagcctc

SEQ ID NO: 2058308 - DNA, 25 bp, Homo sapien
acagaaagatgcagtgtggagggcc

SEQ ID NO: 2058309 - DNA, 25 bp, Homo sapien
catggggtgtttggacctgaggcac

SEQ ID NO: 2058310 - DNA, 25 bp, Homo sapien
cgacaagttcgttgtcctccttgcc

SEQ ID NO: 2058311 - DNA, 25 bp, Homo sapien
gcggtgggcttcgaacttgtgctgc

SEQ ID NO: 2058312 - DNA, 25 bp, Homo sapien
gctcaggacccggcttgccagctgg

SEQ ID NO: 2058313 - DNA, 25 bp, Homo sapien
gctggcaccaactccacgacaagtt

SEQ ID NO: 2058314 - DNA, 25 bp, Homo sapien
tcctctgatgaggacgactcctctt

SEQ ID NO: 2058315 - DNA, 25 bp, Homo sapien
cgtcctcttcgtcgctgcccttcct

SEQ ID NO: 2058316 - DNA, 25 bp, Homo sapien
cctcgtcctcttcgtcgctgccctt

SEQ ID NO: 2058317 - DNA, 25 bp, Homo sapien
cctcctcctccggcgtgaggtccac

SEQ ID NO: 2058318 - DNA, 25 bp, Homo sapien
acggtgtccacgaaccagctgggcc

SEQ ID NO: 2058319 - DNA, 25 bp, Homo sapien
agccggagcttatagacctcgccca

SEQ ID NO: 2058320 - DNA, 25 bp, Homo sapien
gcccgtgtgcccgagccggagctta

SEQ ID NO: 2058321 - DNA, 25 bp, Homo sapien
cacacggtgtccacgaaccagctgg

SEQ ID NO: 2058322 - DNA, 25 bp, Homo sapien
agggcagggcagcggctgtcgtggc

SEQ ID NO: 2058323 - DNA, 25 bp, Homo sapien
acacccccgcccaacaaagagccag

SEQ ID NO: 2058324 - DNA, 25 bp, Homo sapien
cagggcagcggctgtcgtggcccca

SEQ ID NO: 2058325 - DNA, 25 bp, Homo sapien
agcggctgtcgtggccccagcgtcc

SEQ ID NO: 2058326 - DNA, 25 bp, Homo sapien
caaaaacttttgagcggctggagag

SEQ ID NO: 2058327 - DNA, 25 bp, Homo sapien
gcctttctctccatagatctgcatg

SEQ ID NO: 2058328 - DNA, 25 bp, Homo sapien
tgtgtccttggacgcccgttcaaaa

SEQ ID NO: 2058329 - DNA, 25 bp, Homo sapien
tctgcatgtagactcgggcactggt

SEQ ID NO: 2058330 - DNA, 25 bp, Homo sapien
cagtgctgtcatgcccaatcaccag

SEQ ID NO: 2058331 - DNA, 25 bp, Homo sapien
cggttggcgggaaaggtgtactgct

SEQ ID NO: 2058332 - DNA, 25 bp, Homo sapien
tactgcttgccttgacggggcacac

SEQ ID NO: 2058333 - DNA, 25 bp, Homo sapien
ggcacacggatctgaacgctgccca

SEQ ID NO: 2058334 - DNA, 25 bp, Homo sapien
ggtgtcagatttatccccatagagc

SEQ ID NO: 2058335 - DNA, 25 bp, Homo sapien
tagactctagaatccgtgctggccc

SEQ ID NO: 2058336 - DNA, 25 bp, Homo sapien
gagacatccccagtcttcaagctga

SEQ ID NO: 2058337 - DNA, 25 bp, Homo sapien
tttccaatgttcagggtctcgaggg

SEQ ID NO: 2058338 - DNA, 25 bp, Homo sapien
tgctgtcactgggtagcaactctcg

SEQ ID NO: 2058339 - DNA, 25 bp, Homo sapien
tgtcgcgctgctgtcactgggtagc

SEQ ID NO: 2058340 - DNA, 25 bp, Homo sapien
ttcagtgtcgcgctgctgtcactgg

SEQ ID NO: 2058341 - DNA, 25 bp, Homo sapien
gggtagcaactctcggaccagctgc

SEQ ID NO: 2058342 - DNA, 25 bp, Homo sapien
ggaactccacgttgtcgctctcagg

SEQ ID NO: 2058343 - DNA, 25 bp, Homo sapien
cagactcgatagtgaactcgtcagc

SEQ ID NO: 2058344 - DNA, 25 bp, Homo sapien
gctgccggagcctttgccatcgtgt

SEQ ID NO: 2058345 - DNA, 25 bp, Homo sapien
acattccgcatggtgacagactcga

SEQ ID NO: 2058346 - DNA, 25 bp, Homo sapien
cacacagtcacatggtaccgggcca

SEQ ID NO: 2058347 - DNA, 25 bp, Homo sapien
gatagacgttggcatcggtcccagc

SEQ ID NO: 2058348 - DNA, 25 bp, Homo sapien
tattcctgcagttgtagagcagccg

SEQ ID NO: 2058349 - DNA, 25 bp, Homo sapien
cagcaccttcaagttcacctgtgca

SEQ ID NO: 2058350 - DNA, 25 bp, Homo sapien
catttccctcactatctcattgtca

SEQ ID NO: 2058351 - DNA, 25 bp, Homo sapien
atccagccagcggttgcaattgaag

SEQ ID NO: 2058352 - DNA, 25 bp, Homo sapien
cctgcgcactgttgggccttctgca

SEQ ID NO: 2058353 - DNA, 25 bp, Homo sapien
tgcccatgatcctgcgcactgttgg

SEQ ID NO: 2058354 - DNA, 25 bp, Homo sapien
aacctgccaagatccgggagctcaa

SEQ ID NO: 2058355 - DNA, 25 bp, Homo sapien
tcttataaaacctgccaagatccgg

SEQ ID NO: 2058356 - DNA, 25 bp, Homo sapien
ttatcatgccatactcgaatcttat

SEQ ID NO: 2058357 - DNA, 25 bp, Homo sapien
gaaccagaactccttttatcatgcc

SEQ ID NO: 2058358 - DNA, 25 bp, Homo sapien
tctttaggtcggttgtccagaccca

SEQ ID NO: 2058359 - DNA, 25 bp, Homo sapien
gattcaggagaatctcatctgtccg

SEQ ID NO: 2058360 - DNA, 25 bp, Homo sapien
cctaaacttctcgattatgccgggt

SEQ ID NO: 2058361 - DNA, 25 bp, Homo sapien
aaccacttgttgttgggattcagga

SEQ ID NO: 2058362 - DNA, 25 bp, Homo sapien
cagccagttgctacaagggaaggtc

SEQ ID NO: 2058363 - DNA, 25 bp, Homo sapien
tgcctctcaatcaacccatccgctt

SEQ ID NO: 2058364 - DNA, 25 bp, Homo sapien
ttgctacaagggaaggtctgctgga

SEQ ID NO: 2058365 - DNA, 25 bp, Homo sapien
cagttgctacaagggaaggtctgct

SEQ ID NO: 2058366 - DNA, 25 bp, Homo sapien
tgatgaaccttaacttataagaagc

SEQ ID NO: 2058367 - DNA, 25 bp, Homo sapien
cattgtgatgaaccttaacttataa

SEQ ID NO: 2058368 - DNA, 25 bp, Homo sapien
cttaacttataagaagcaccagatg

SEQ ID NO: 2058369 - DNA, 25 bp, Homo sapien
tgaccattgtgatgaaccttaactt

SEQ ID NO: 2058370 - DNA, 25 bp, Homo sapien
attgccatgcccgacggagacccga

SEQ ID NO: 2058371 - DNA, 25 bp, Homo sapien
cagccagctcgatgtggaagatgtc

SEQ ID NO: 2058372 - DNA, 25 bp, Homo sapien
gaagatgtccgtgcggcctcggtca

SEQ ID NO: 2058373 - DNA, 25 bp, Homo sapien
aagacggtgacaatatacgtaatag

SEQ ID NO: 2058374 - DNA, 25 bp, Homo sapien
caggaaagagagtgttcaatgtgag

SEQ ID NO: 2058375 - DNA, 25 bp, Homo sapien
agagagtgttcaatgtgagctgcat

SEQ ID NO: 2058376 - DNA, 25 bp, Homo sapien
ctggtgtggaaacaacaggaaagag

SEQ ID NO: 2058377 - DNA, 25 bp, Homo sapien
agagtgttcaatgtgagctgcatca

SEQ ID NO: 2058378 - DNA, 25 bp, Homo sapien
agatgccacctaatgtccctctcga

SEQ ID NO: 2058379 - DNA, 25 bp, Homo sapien
gtccctctcgacctcatttcatctt

SEQ ID NO: 2058380 - DNA, 25 bp, Homo sapien
ttccccatcatgtcctactcctcca

SEQ ID NO: 2058381 - DNA, 25 bp, Homo sapien
ctccagatgccacctaatgtccctc

SEQ ID NO: 2058382 - DNA, 25 bp, Homo sapien
tccgcccactaagatatccctttgg

SEQ ID NO: 2058383 - DNA, 25 bp, Homo sapien
cctttggattttgccatcgtcttcg

SEQ ID NO: 2058384 - DNA, 25 bp, Homo sapien
gcccactaagatatccctttggatt

SEQ ID NO: 2058385 - DNA, 25 bp, Homo sapien
tgccatcgtcttcgtccaaggccag

SEQ ID NO: 2058386 - DNA, 25 bp, Homo sapien
tgcagagccccccttattgttgtgg

SEQ ID NO: 2058387 - DNA, 25 bp, Homo sapien
catccaggatgaacctgtcttcagc

SEQ ID NO: 2058388 - DNA, 25 bp, Homo sapien
gccccccttattgttgtggccaaca

SEQ ID NO: 2058389 - DNA, 25 bp, Homo sapien
caaatccggggcatccaggatgaac

SEQ ID NO: 2058390 - DNA, 25 bp, Homo sapien
cctgcaccaattacatcaccagtgt

SEQ ID NO: 2058391 - DNA, 25 bp, Homo sapien
ctgtgtctccatactctccaaaaat

SEQ ID NO: 2058392 - DNA, 25 bp, Homo sapien
cagtgtataccttgacttcatactt

SEQ ID NO: 2058393 - DNA, 25 bp, Homo sapien
tgtgtctccatactctccaaaaata

SEQ ID NO: 2058394 - DNA, 25 bp, Homo sapien
ctctttccggagatgattttctgca

SEQ ID NO: 2058395 - DNA, 25 bp, Homo sapien
cccctctttccggagatgattttct

SEQ ID NO: 2058396 - DNA, 25 bp, Homo sapien
ctttccggagatgattttctgcagt

SEQ ID NO: 2058397 - DNA, 25 bp, Homo sapien
cttccccctctttccggagatgatt

SEQ ID NO: 2058398 - DNA, 25 bp, Homo sapien
gagtaaaagccatcaccaggtagat

SEQ ID NO: 2058399 - DNA, 25 bp, Homo sapien
cagagcaacctgagcttcactggag

SEQ ID NO: 2058400 - DNA, 25 bp, Homo sapien
gataggaggagaccgcagtgttacc

SEQ ID NO: 2058401 - DNA, 25 bp, Homo sapien
caacgttcatacaagcccctaagtc

SEQ ID NO: 2058402 - DNA, 25 bp, Homo sapien
gtgtggcacagactttcctcacaga

SEQ ID NO: 2058403 - DNA, 25 bp, Homo sapien
atatccctgattgcagaatcactgc

SEQ ID NO: 2058404 - DNA, 25 bp, Homo sapien
cactgcacagcagtgtgtggcacag

SEQ ID NO: 2058405 - DNA, 25 bp, Homo sapien
tcctcacagagtttagagagggagg

SEQ ID NO: 2058406 - DNA, 25 bp, Homo sapien
gggtgtctaatactgccctcaggcc

SEQ ID NO: 2058407 - DNA, 25 bp, Homo sapien
gaaacctcctcagggttgatgaatg

SEQ ID NO: 2058408 - DNA, 25 bp, Homo sapien
tgcgatagggcctgaatcacagaaa

SEQ ID NO: 2058409 - DNA, 25 bp, Homo sapien
tccttgcagggcttgatgcgatagg

SEQ ID NO: 2058410 - DNA, 25 bp, Homo sapien
gggagacagtgcttaacttccagcc

SEQ ID NO: 2058411 - DNA, 25 bp, Homo sapien
ggctgctatcagtgtggagatgtcc

SEQ ID NO: 2058412 - DNA, 25 bp, Homo sapien
gagacagtgcttaacttccagccag

SEQ ID NO: 2058413 - DNA, 25 bp, Homo sapien
tgtggagatgtccatgcagttactc

SEQ ID NO: 2058414 - DNA, 25 bp, Homo sapien
ccagttgttgcagttgaagtagtaa

SEQ ID NO: 2058415 - DNA, 25 bp, Homo sapien
tcaagcccgtgttgtcatgctcaat

SEQ ID NO: 2058416 - DNA, 25 bp, Homo sapien
tgaggcctcttcatgtcggtcacaa

SEQ ID NO: 2058417 - DNA, 25 bp, Homo sapien
gaagtagtaacggagatgaggcctc

SEQ ID NO: 2058418 - DNA, 25 bp, Homo sapien
ttatagatgaggcccacattgttgg

SEQ ID NO: 2058419 - DNA, 25 bp, Homo sapien
cacatcgacgttgcccttctcaaag

SEQ ID NO: 2058420 - DNA, 25 bp, Homo sapien
ttctcacccggaacacatcgacgtt

SEQ ID NO: 2058421 - DNA, 25 bp, Homo sapien
cacattgttggttctcacccggaac

SEQ ID NO: 2058422 - DNA, 25 bp, Homo sapien
attctctccaaaaagcgtgatgaag

SEQ ID NO: 2058423 - DNA, 25 bp, Homo sapien
gcttgggagagagcccattctctcc

SEQ ID NO: 2058424 - DNA, 25 bp, Homo sapien
tggagcttgggagagagcccattct

SEQ ID NO: 2058425 - DNA, 25 bp, Homo sapien
aagacattggcatccgtccctgcac

SEQ ID NO: 2058426 - DNA, 25 bp, Homo sapien
ttgtagtactcgtgttccagctccc

SEQ ID NO: 2058427 - DNA, 25 bp, Homo sapien
gctccgcttcgtacagggccaggaa

SEQ ID NO: 2058428 - DNA, 25 bp, Homo sapien
tcctccgaggcgtagttcagcagct

SEQ ID NO: 2058429 - DNA, 25 bp, Homo sapien
gccaggaagtcgatgtccttcttcc

SEQ ID NO: 2058430 - DNA, 25 bp, Homo sapien
aaactataggatcagaaaacaggcc

SEQ ID NO: 2058431 - DNA, 25 bp, Homo sapien
cgctaagtgcagaaaagcggtcaga

SEQ ID NO: 2058432 - DNA, 25 bp, Homo sapien
ttgggactagcagtaacatagggag

SEQ ID NO: 2058433 - DNA, 25 bp, Homo sapien
gaagggagtcgggaaacatgctaca

SEQ ID NO: 2058434 - DNA, 25 bp, Homo sapien
tgggtcacgcctatggtgcaggcct

SEQ ID NO: 2058435 - DNA, 25 bp, Homo sapien
tgtctctctgaagtggccttatctg

SEQ ID NO: 2058436 - DNA, 25 bp, Homo sapien
ggaatggtctgcaaggaagcatgaa

SEQ ID NO: 2058437 - DNA, 25 bp, Homo sapien
atctccatgtgatggcctgtctggg

SEQ ID NO: 2058438 - DNA, 25 bp, Homo sapien
acagccacagagtctttgctaggtg

SEQ ID NO: 2058439 - DNA, 25 bp, Homo sapien
cagccacagagtctttgctaggtga

SEQ ID NO: 2058440 - DNA, 25 bp, Homo sapien
ccacagccacagagtctttgctagg

SEQ ID NO: 2058441 - DNA, 25 bp, Homo sapien
cacagccacagagtctttgctaggt

SEQ ID NO: 2058442 - DNA, 25 bp, Homo sapien
tttttcttcatacgcaggaggccac

SEQ ID NO: 2058443 - DNA, 25 bp, Homo sapien
tgagggccgttcaaacacagtgaca

SEQ ID NO: 2058444 - DNA, 25 bp, Homo sapien
gatcttgagcagagggacttgccca

SEQ ID NO: 2058445 - DNA, 25 bp, Homo sapien
tcccactggagaagagtacaggacg

SEQ ID NO: 2058446 - DNA, 25 bp, Homo sapien
tgaatttgctgggttcgatcctagg

SEQ ID NO: 2058447 - DNA, 25 bp, Homo sapien
gttcgatcctaggaagtgagttgtg

SEQ ID NO: 2058448 - DNA, 25 bp, Homo sapien
ctgagtgaatttgctgggttcgatc

SEQ ID NO: 2058449 - DNA, 25 bp, Homo sapien
tgctgggttcgatcctaggaagtga

SEQ ID NO: 2058450 - DNA, 25 bp, Homo sapien
agtctttgagatctccagaggctct

SEQ ID NO: 2058451 - DNA, 25 bp, Homo sapien
tctgagctctcatgggggttgaagt

SEQ ID NO: 2058452 - DNA, 25 bp, Homo sapien
ctccagaggctcttgtcaactttgt

SEQ ID NO: 2058453 - DNA, 25 bp, Homo sapien
caactttgtcgctgaatgtggaatt

SEQ ID NO: 2058454 - DNA, 25 bp, Homo sapien
gaatgtacttaccattactgaactg

SEQ ID NO: 2058455 - DNA, 25 bp, Homo sapien
cagagacagaatatacaacagtgtg

SEQ ID NO: 2058456 - DNA, 25 bp, Homo sapien
gaaatctttgtttgtgttaaagcaa

SEQ ID NO: 2058457 - DNA, 25 bp, Homo sapien
caattttgtaaatgttagattcccg

SEQ ID NO: 2058458 - DNA, 25 bp, Homo sapien
ccacagtgatgtaagagcctgacat

SEQ ID NO: 2058459 - DNA, 25 bp, Homo sapien
acaccattgataaatccctcttaca

SEQ ID NO: 2058460 - DNA, 25 bp, Homo sapien
aatccctcttacattgcttcccagg

SEQ ID NO: 2058461 - DNA, 25 bp, Homo sapien
agccacagtgatgtaagagcctgac

SEQ ID NO: 2058462 - DNA, 25 bp, Homo sapien
aattgctaagcacttattgagtcaa

SEQ ID NO: 2058463 - DNA, 25 bp, Homo sapien
catgagaggaagaggtctttataaa

SEQ ID NO: 2058464 - DNA, 25 bp, Homo sapien
caattgctaagcacttattgagtca

SEQ ID NO: 2058465 - DNA, 25 bp, Homo sapien
tgagaggaagaggtctttataaata

SEQ ID NO: 2058466 - DNA, 25 bp, Homo sapien
tagggtcttccttcagctgcaacaa

SEQ ID NO: 2058467 - DNA, 25 bp, Homo sapien
tctctctcggatgacaaaattgggt

SEQ ID NO: 2058468 - DNA, 25 bp, Homo sapien
taccccaggatccaagtacagagct

SEQ ID NO: 2058469 - DNA, 25 bp, Homo sapien
caagaccgcatgtgtgtccgaggat

SEQ ID NO: 2058470 - DNA, 25 bp, Homo sapien
gattcgaagtcgtccagcacgtact

SEQ ID NO: 2058471 - DNA, 25 bp, Homo sapien
cgttgaccaggtactgcggatggaa

SEQ ID NO: 2058472 - DNA, 25 bp, Homo sapien
tacttgacgcggatggacacgtcgg

SEQ ID NO: 2058473 - DNA, 25 bp, Homo sapien
tagtagacagcttgcggcgattcga

SEQ ID NO: 2058474 - DNA, 25 bp, Homo sapien
ttcacagtgaccacatccgtcttca

SEQ ID NO: 2058475 - DNA, 25 bp, Homo sapien
ccacatccatggtgtacttctctga

SEQ ID NO: 2058476 - DNA, 25 bp, Homo sapien
ccatggtgtacttctctgagatggg

SEQ ID NO: 2058477 - DNA, 25 bp, Homo sapien
ggttcacagtgaccacatccgtctt

SEQ ID NO: 2058478 - DNA, 25 bp, Homo sapien
ggcccgatgattgtggatccatgct

SEQ ID NO: 2058479 - DNA, 25 bp, Homo sapien
tagttaaagccagggtgaagccaat

SEQ ID NO: 2058480 - DNA, 25 bp, Homo sapien
gaagccaatattggtgtctgccaca

SEQ ID NO: 2058481 - DNA, 25 bp, Homo sapien
gaagtgcaaggaccagtctctggct

SEQ ID NO: 2058482 - DNA, 25 bp, Homo sapien
actgggaccggtagtagggcatgtc

SEQ ID NO: 2058483 - DNA, 25 bp, Homo sapien
cgttgcccactacagcacacttctt

SEQ ID NO: 2058484 - DNA, 25 bp, Homo sapien
acgaagtcggcgctgttgatctccc

SEQ ID NO: 2058485 - DNA, 25 bp, Homo sapien
tgttcttcaagatgcctccgttgcc

SEQ ID NO: 2058486 - DNA, 25 bp, Homo sapien
ttttccctggatggacaggcccagt

SEQ ID NO: 2058487 - DNA, 25 bp, Homo sapien
gacttctgcgggagactgtccttat

SEQ ID NO: 2058488 - DNA, 25 bp, Homo sapien
gcactattagacttgtaccagagaa

SEQ ID NO: 2058489 - DNA, 25 bp, Homo sapien
cagccagtaggtgagtaaactgcac

SEQ ID NO: 2058490 - DNA, 25 bp, Homo sapien
cctaaaacagttaccgcctggcact

SEQ ID NO: 2058491 - DNA, 25 bp, Homo sapien
ctatgaactgcaaatcctaaaacag

SEQ ID NO: 2058492 - DNA, 25 bp, Homo sapien
agccactctcattggtttactcatg

SEQ ID NO: 2058493 - DNA, 25 bp, Homo sapien
tgagtagtagtgacagagagactat

SEQ ID NO: 2058494 - DNA, 25 bp, Homo sapien
tggttgatgtggtagatgccactgg

SEQ ID NO: 2058495 - DNA, 25 bp, Homo sapien
cctggttgatgtggtagatgccact

SEQ ID NO: 2058496 - DNA, 25 bp, Homo sapien
ctcctggttgatgtggtagatgcca

SEQ ID NO: 2058497 - DNA, 25 bp, Homo sapien
tcctggttgatgtggtagatgccac

SEQ ID NO: 2058498 - DNA, 25 bp, Homo sapien
tgaagagaaaggcaggggcgttgca

SEQ ID NO: 2058499 - DNA, 25 bp, Homo sapien
gaagagaaaggcaggggcgttgcag

SEQ ID NO: 2058500 - DNA, 25 bp, Homo sapien
ctgggtggtgaagagaaaggcaggg

SEQ ID NO: 2058501 - DNA, 25 bp, Homo sapien
tggtgaagagaaaggcaggggcgtt

SEQ ID NO: 2058502 - DNA, 25 bp, Homo sapien
tacaaaccagaatgtcagtgtgcct

SEQ ID NO: 2058503 - DNA, 25 bp, Homo sapien
tgtaattcgaaagctcatgcctgcc

SEQ ID NO: 2058504 - DNA, 25 bp, Homo sapien
tggcattacaaactggcatctgggc

SEQ ID NO: 2058505 - DNA, 25 bp, Homo sapien
catctgggccttttagctttgctag

SEQ ID NO: 2058506 - DNA, 25 bp, Homo sapien
acactccctcatggcaccaggttcc

SEQ ID NO: 2058507 - DNA, 25 bp, Homo sapien
gacactccctcatggcaccaggttc

SEQ ID NO: 2058508 - DNA, 25 bp, Homo sapien
ctgacactccctcatggcaccaggt

SEQ ID NO: 2058509 - DNA, 25 bp, Homo sapien
tgacactccctcatggcaccaggtt

SEQ ID NO: 2058510 - DNA, 25 bp, Homo sapien
agggaggcaatgaccagcctggaag

SEQ ID NO: 2058511 - DNA, 25 bp, Homo sapien
gagcaaagggaggcaatgaccagcc

SEQ ID NO: 2058512 - DNA, 25 bp, Homo sapien
gcaaagggaggcaatgaccagcctg

SEQ ID NO: 2058513 - DNA, 25 bp, Homo sapien
agcaaagggaggcaatgaccagcct

SEQ ID NO: 2058514 - DNA, 25 bp, Homo sapien
ttggcctcagagatgttcatcgccc

SEQ ID NO: 2058515 - DNA, 25 bp, Homo sapien
agagatgttcatcgcccatttgcac

SEQ ID NO: 2058516 - DNA, 25 bp, Homo sapien
ctggaggctcttccacctgtcgaac

SEQ ID NO: 2058517 - DNA, 25 bp, Homo sapien
tgtcgaacagctctgactgcttcac

SEQ ID NO: 2058518 - DNA, 25 bp, Homo sapien
cccagaaatgctccctcctgatctc

SEQ ID NO: 2058519 - DNA, 25 bp, Homo sapien
cccataggccaagtccagtcctggg

SEQ ID NO: 2058520 - DNA, 25 bp, Homo sapien
gagcgcgatcattcccagaaatgct

SEQ ID NO: 2058521 - DNA, 25 bp, Homo sapien
catgagcagggtaggcgggacagag

SEQ ID NO: 2058522 - DNA, 25 bp, Homo sapien
catgagtactgagctggcatagggc

SEQ ID NO: 2058523 - DNA, 25 bp, Homo sapien
atattcaaaaggcccctcataaaat

SEQ ID NO: 2058524 - DNA, 25 bp, Homo sapien
cttccaatatttcgtgcctcagctc

SEQ ID NO: 2058525 - DNA, 25 bp, Homo sapien
cacttccaatatttcgtgcctcagc

SEQ ID NO: 2058526 - DNA, 25 bp, Homo sapien
ttatattcaaaaggcccctcataaa

SEQ ID NO: 2058527 - DNA, 25 bp, Homo sapien
cagcagatgtcccattaggggcttc

SEQ ID NO: 2058528 - DNA, 25 bp, Homo sapien
catcccagcagatgtcccattaggg

SEQ ID NO: 2058529 - DNA, 25 bp, Homo sapien
ccccatcccagcagatgtcccatta

SEQ ID NO: 2058530 - DNA, 25 bp, Homo sapien
agcagatgtcccattaggggcttca

SEQ ID NO: 2058531 - DNA, 25 bp, Homo sapien
tcatctttctcaaagcattgaataa

SEQ ID NO: 2058532 - DNA, 25 bp, Homo sapien
ttacccgtgatgtccagagctccct

SEQ ID NO: 2058533 - DNA, 25 bp, Homo sapien
cacttccatggaaagaactgtggtc

SEQ ID NO: 2058534 - DNA, 25 bp, Homo sapien
ccacaccctcgggcatgtctgtgga

SEQ ID NO: 2058535 - DNA, 25 bp, Homo sapien
gcagggagtttcgagccaccagaac

SEQ ID NO: 2058536 - DNA, 25 bp, Homo sapien
gtgcagggagtttcgagccaccaga

SEQ ID NO: 2058537 - DNA, 25 bp, Homo sapien
accaggtgggataccaaagtgcagg

SEQ ID NO: 2058538 - DNA, 25 bp, Homo sapien
ggaaccaggtgggataccaaagtgc

SEQ ID NO: 2058539 - DNA, 25 bp, Homo sapien
gagctggagtcactgccgctctgca

SEQ ID NO: 2058540 - DNA, 25 bp, Homo sapien
taaagagccccgtccaattggtcag

SEQ ID NO: 2058541 - DNA, 25 bp, Homo sapien
aattggtcagctggtcaccactctg

SEQ ID NO: 2058542 - DNA, 25 bp, Homo sapien
tgcactgctggatcatccgtgacat

SEQ ID NO: 2058543 - DNA, 25 bp, Homo sapien
taaaggaggcgatggtactgactcc

SEQ ID NO: 2058544 - DNA, 25 bp, Homo sapien
gatggtgatcataaaccacagccct

SEQ ID NO: 2058545 - DNA, 25 bp, Homo sapien
tctacagtgctctctgcggttctgc

SEQ ID NO: 2058546 - DNA, 25 bp, Homo sapien
ggttaagcctgcctaccagagagcc

SEQ ID NO: 2058547 - DNA, 25 bp, Homo sapien
aaggtgttaacaccagccccagaag

SEQ ID NO: 2058548 - DNA, 25 bp, Homo sapien
cccagaagtggccactttcttcaga

SEQ ID NO: 2058549 - DNA, 25 bp, Homo sapien
agctgccatgttcctttaaaggtgt

SEQ ID NO: 2058550 - DNA, 25 bp, Homo sapien
ccactttcttcagagcttcaatagc

SEQ ID NO: 2058551 - DNA, 25 bp, Homo sapien
gggatgaataatcctcaacctaagg

SEQ ID NO: 2058552 - DNA, 25 bp, Homo sapien
taggggggctcgcattccaccattc

SEQ ID NO: 2058553 - DNA, 25 bp, Homo sapien
tcctcaacctaaggatataaacagt

SEQ ID NO: 2058554 - DNA, 25 bp, Homo sapien
gcaatgcttgcctctagagattctt

SEQ ID NO: 2058555 - DNA, 25 bp, Homo sapien
tggaccttttagagcatcacgcacc

SEQ ID NO: 2058556 - DNA, 25 bp, Homo sapien
gggatggcaccataacatgcacact

SEQ ID NO: 2058557 - DNA, 25 bp, Homo sapien
catgcacactttcgctcaagaagct

SEQ ID NO: 2058558 - DNA, 25 bp, Homo sapien
agggccctgctcatcctatgaccat

SEQ ID NO: 2058559 - DNA, 25 bp, Homo sapien
tctcagcaggatgaacgggcgcaat

SEQ ID NO: 2058560 - DNA, 25 bp, Homo sapien
ccacccagattagagcggagatgct

SEQ ID NO: 2058561 - DNA, 25 bp, Homo sapien
cggagatgcttctggttgcgccgca

SEQ ID NO: 2058562 - DNA, 25 bp, Homo sapien
catccccaggtccaggtaaggagat

SEQ ID NO: 2058563 - DNA, 25 bp, Homo sapien
tccttttccaggctccactcaaagc

SEQ ID NO: 2058564 - DNA, 25 bp, Homo sapien
ttccttttccaggctccactcaaag

SEQ ID NO: 2058565 - DNA, 25 bp, Homo sapien
tcactcttccttttccaggctccac

SEQ ID NO: 2058566 - DNA, 25 bp, Homo sapien
ctcttccttttccaggctccactca

SEQ ID NO: 2058567 - DNA, 25 bp, Homo sapien
cagtggttcccaaattgactccgtg

SEQ ID NO: 2058568 - DNA, 25 bp, Homo sapien
caaattgactccgtggaacactggg

SEQ ID NO: 2058569 - DNA, 25 bp, Homo sapien
tcccaaattgactccgtggaacact

SEQ ID NO: 2058570 - DNA, 25 bp, Homo sapien
gtggttcccaaattgactccgtgga

SEQ ID NO: 2058571 - DNA, 25 bp, Homo sapien
agagcagcatcccttctttccaggg

SEQ ID NO: 2058572 - DNA, 25 bp, Homo sapien
ggcagtcgaacagaaggctttgtcc

SEQ ID NO: 2058573 - DNA, 25 bp, Homo sapien
cccctcgagaaccacactctggata

SEQ ID NO: 2058574 - DNA, 25 bp, Homo sapien
tctggatagatcctccagtccctgt

SEQ ID NO: 2058575 - DNA, 25 bp, Homo sapien
tacttttccttgacccagtttcgca

SEQ ID NO: 2058576 - DNA, 25 bp, Homo sapien
cagtttcgcatcctcaagtctcagg

SEQ ID NO: 2058577 - DNA, 25 bp, Homo sapien
tacacatgtaggcagcacaaagtca

SEQ ID NO: 2058578 - DNA, 25 bp, Homo sapien
agttggctcagtgatgagggccttc

SEQ ID NO: 2058579 - DNA, 25 bp, Homo sapien
caggtagtttggttggcgtttgcca

SEQ ID NO: 2058580 - DNA, 25 bp, Homo sapien
tgccatgggcggttgtattttcccc

SEQ ID NO: 2058581 - DNA, 25 bp, Homo sapien
gccagagcaagcaggtagtttggtt

SEQ ID NO: 2058582 - DNA, 25 bp, Homo sapien
caagaccagggaggacttgccagag

SEQ ID NO: 2058583 - DNA, 25 bp, Homo sapien
cttaatgtagttcctgccatacagg

SEQ ID NO: 2058584 - DNA, 25 bp, Homo sapien
tcctgccatacaggatctgttgcag

SEQ ID NO: 2058585 - DNA, 25 bp, Homo sapien
aatgtagttcctgccatacaggatc

SEQ ID NO: 2058586 - DNA, 25 bp, Homo sapien
ctcttaatgtagttcctgccataca

SEQ ID NO: 2058587 - DNA, 25 bp, Homo sapien
aaggcaaaggcgcagatgaagatga

SEQ ID NO: 2058588 - DNA, 25 bp, Homo sapien
tgaagatgaagagcaaagttcggct

SEQ ID NO: 2058589 - DNA, 25 bp, Homo sapien
agcaaagttcggctccccaacaaat

SEQ ID NO: 2058590 - DNA, 25 bp, Homo sapien
caccaaggcaaaggcgcagatgaag

SEQ ID NO: 2058591 - DNA, 25 bp, Homo sapien
caggcaatgactcgcggggttccgg

SEQ ID NO: 2058592 - DNA, 25 bp, Homo sapien
gcggccaggcaatgactcgcggggt

SEQ ID NO: 2058593 - DNA, 25 bp, Homo sapien
ggccaggcaatgactcgcggggttc

SEQ ID NO: 2058594 - DNA, 25 bp, Homo sapien
ccaggcaatgactcgcggggttccg

SEQ ID NO: 2058595 - DNA, 25 bp, Homo sapien
gagctgggggcatccaagcgtcgca

SEQ ID NO: 2058596 - DNA, 25 bp, Homo sapien
cttcgaggggcaaagtttctggttg

SEQ ID NO: 2058597 - DNA, 25 bp, Homo sapien
tgggggcatccaagcgtcgcaggcg

SEQ ID NO: 2058598 - DNA, 25 bp, Homo sapien
caaagtttctggttggcgcggccgg

SEQ ID NO: 2058599 - DNA, 25 bp, Homo sapien
tctgccgcggccaggggccttcccc

SEQ ID NO: 2058600 - DNA, 25 bp, Homo sapien
ctggggcggcaagcaggacagggcc

SEQ ID NO: 2058601 - DNA, 25 bp, Homo sapien
gggcggcaagcaggacagggccggt

SEQ ID NO: 2058602 - DNA, 25 bp, Homo sapien
gcagggagctctgccgcggccaggg

SEQ ID NO: 2058603 - DNA, 25 bp, Homo sapien
atcgcggttgcccagcgcgctgtgc

SEQ ID NO: 2058604 - DNA, 25 bp, Homo sapien
caatggggagcaagacccgggctcc

SEQ ID NO: 2058605 - DNA, 25 bp, Homo sapien
gcgggccacgtttgatctccgggcc

SEQ ID NO: 2058606 - DNA, 25 bp, Homo sapien
caagggatcgcgaaggttggcctcc

SEQ ID NO: 2058607 - DNA, 25 bp, Homo sapien
gggcgtacaaaacacccgcgcagtc

SEQ ID NO: 2058608 - DNA, 25 bp, Homo sapien
aaacacccgcgcagtctggctaatg

SEQ ID NO: 2058609 - DNA, 25 bp, Homo sapien
cagtctggctaatgataggcgggcc

SEQ ID NO: 2058610 - DNA, 25 bp, Homo sapien
gcggagcgcaaaacgccgggtttga

SEQ ID NO: 2058611 - DNA, 25 bp, Homo sapien
tatgaggtaggtcctacacacaggc

SEQ ID NO: 2058612 - DNA, 25 bp, Homo sapien
ttcttgggagtgggacttgttcatt

SEQ ID NO: 2058613 - DNA, 25 bp, Homo sapien
tgcactgggccaaattatgaggtag

SEQ ID NO: 2058614 - DNA, 25 bp, Homo sapien
aatttttctctacttggtgctcaag

SEQ ID NO: 2058615 - DNA, 25 bp, Homo sapien
ggctgtagggtagaaacacttggat

SEQ ID NO: 2058616 - DNA, 25 bp, Homo sapien
cgcattttgttggtggtctgtataa

SEQ ID NO: 2058617 - DNA, 25 bp, Homo sapien
gccctttgatgaattcagctaagag

SEQ ID NO: 2058618 - DNA, 25 bp, Homo sapien
cagtgcaagcccctagacgcatttt

SEQ ID NO: 2058619 - DNA, 25 bp, Homo sapien
aaagggatgagtgttccactgtgat

SEQ ID NO: 2058620 - DNA, 25 bp, Homo sapien
cactgtgatcatctacttctgaagc

SEQ ID NO: 2058621 - DNA, 25 bp, Homo sapien
cttctgaagcaccaagggatgtttc

SEQ ID NO: 2058622 - DNA, 25 bp, Homo sapien
caagggatgtttcaaatcctaacac

SEQ ID NO: 2058623 - DNA, 25 bp, Homo sapien
cctggccaatccacagtcagtgatg

SEQ ID NO: 2058624 - DNA, 25 bp, Homo sapien
tgcttcctggccaatccacagtcag

SEQ ID NO: 2058625 - DNA, 25 bp, Homo sapien
ggccaatccacagtcagtgatgact

SEQ ID NO: 2058626 - DNA, 25 bp, Homo sapien
ttcctggccaatccacagtcagtga

SEQ ID NO: 2058627 - DNA, 25 bp, Homo sapien
ccatgcatagcaggcagcggctcca

SEQ ID NO: 2058628 - DNA, 25 bp, Homo sapien
atgcatagcaggcagcggctccagg

SEQ ID NO: 2058629 - DNA, 25 bp, Homo sapien
gccatgcatagcaggcagcggctcc

SEQ ID NO: 2058630 - DNA, 25 bp, Homo sapien
agccatgcatagcaggcagcggctc

SEQ ID NO: 2058631 - DNA, 25 bp, Homo sapien
tctcttccattcctagtttgtcaag

SEQ ID NO: 2058632 - DNA, 25 bp, Homo sapien
ttatttagacgagtcacgtttattg

SEQ ID NO: 2058633 - DNA, 25 bp, Homo sapien
tcaagagcccttatcacgaatgggt

SEQ ID NO: 2058634 - DNA, 25 bp, Homo sapien
cacgaatgggtgttgatattatttt

SEQ ID NO: 2058635 - DNA, 25 bp, Homo sapien
cagggtatgaaagaggaactgtcag

SEQ ID NO: 2058636 - DNA, 25 bp, Homo sapien
agggtatgaaagaggaactgtcaga

SEQ ID NO: 2058637 - DNA, 25 bp, Homo sapien
catggggattaatgggattacagtt

SEQ ID NO: 2058638 - DNA, 25 bp, Homo sapien
tgactgaaactcctaaaaatatcca

SEQ ID NO: 2058639 - DNA, 25 bp, Homo sapien
aaaaatatccatgtgtgggttcgtt

SEQ ID NO: 2058640 - DNA, 25 bp, Homo sapien
ttttggcaattatgactgaaactcc

SEQ ID NO: 2058641 - DNA, 25 bp, Homo sapien
gtgtgtgtgttaagttttcaactca

SEQ ID NO: 2058642 - DNA, 25 bp, Homo sapien
taagggacatagcttgaccagttat

SEQ ID NO: 2058643 - DNA, 25 bp, Homo sapien
catggtgttggatttgtctgagcta

SEQ ID NO: 2058644 - DNA, 25 bp, Homo sapien
atgagaaagcccctcaattcttgga

SEQ ID NO: 2058645 - DNA, 25 bp, Homo sapien
catggtactgacacttgaatggact

SEQ ID NO: 2058646 - DNA, 25 bp, Homo sapien
caccaccacgctcttcaaagcaccc

SEQ ID NO: 2058647 - DNA, 25 bp, Homo sapien
tctgcttcattaagcctccattcac

SEQ ID NO: 2058648 - DNA, 25 bp, Homo sapien
ggcagctggacagcagtagagtttc

SEQ ID NO: 2058649 - DNA, 25 bp, Homo sapien
taaattcaggtaatttggggcagct

SEQ ID NO: 2058650 - DNA, 25 bp, Homo sapien
aaggaagcatccctgttagccagcc

SEQ ID NO: 2058651 - DNA, 25 bp, Homo sapien
gctcttcagaggtcataggcccttc

SEQ ID NO: 2058652 - DNA, 25 bp, Homo sapien
gaaagtgccgatggtctcactggta

SEQ ID NO: 2058653 - DNA, 25 bp, Homo sapien
tagccagcccgagttggagggtttc

SEQ ID NO: 2058654 - DNA, 25 bp, Homo sapien
tatcagcttgcattgcttcactgct

SEQ ID NO: 2058655 - DNA, 25 bp, Homo sapien
taattttatcagcttgcattgcttc

SEQ ID NO: 2058656 - DNA, 25 bp, Homo sapien
gatacctttggtctcataattttat

SEQ ID NO: 2058657 - DNA, 25 bp, Homo sapien
tcatgctggcaaatactttgatacc

SEQ ID NO: 2058658 - DNA, 25 bp, Homo sapien
gcttgagctcaggagtttgaggcta

SEQ ID NO: 2058659 - DNA, 25 bp, Homo sapien
gagtccgaggcgggcagattgcttg

SEQ ID NO: 2058660 - DNA, 25 bp, Homo sapien
gggagtccgaggcgggcagattgct

SEQ ID NO: 2058661 - DNA, 25 bp, Homo sapien
ttgagctcaggagtttgaggctagc

SEQ ID NO: 2058662 - DNA, 25 bp, Homo sapien
ggcagtctacagagtaaaatcataa

SEQ ID NO: 2058663 - DNA, 25 bp, Homo sapien
tactcaaagcaggaggcagtctaca

SEQ ID NO: 2058664 - DNA, 25 bp, Homo sapien
gagggttatctcttaactacattaa

SEQ ID NO: 2058665 - DNA, 25 bp, Homo sapien
ggagcgaattttcttacctgatgag

SEQ ID NO: 2058666 - DNA, 25 bp, Homo sapien
tgtagtgtacctgacccagataagg

SEQ ID NO: 2058667 - DNA, 25 bp, Homo sapien
caaatagcaggtgggcatgtctttc

SEQ ID NO: 2058668 - DNA, 25 bp, Homo sapien
ggtggtcctcagtacataacctaga

SEQ ID NO: 2058669 - DNA, 25 bp, Homo sapien
aatgatttgggtcaggtggctagcc

SEQ ID NO: 2058670 - DNA, 25 bp, Homo sapien
agtacagggtcatgatcctgagtca

SEQ ID NO: 2058671 - DNA, 25 bp, Homo sapien
tacagggtcatgatcctgagtcact

SEQ ID NO: 2058672 - DNA, 25 bp, Homo sapien
gggtcatgatcctgagtcactgcaa

SEQ ID NO: 2058673 - DNA, 25 bp, Homo sapien
tggagtacagggtcatgatcctgag

SEQ ID NO: 2058674 - DNA, 25 bp, Homo sapien
tgcctttggctcagtagattctact

SEQ ID NO: 2058675 - DNA, 25 bp, Homo sapien
ctcagtagattctactggctttggg

SEQ ID NO: 2058676 - DNA, 25 bp, Homo sapien
gggatggaatgcctttggctcagta

SEQ ID NO: 2058677 - DNA, 25 bp, Homo sapien
tggaatgcctttggctcagtagatt

SEQ ID NO: 2058678 - DNA, 25 bp, Homo sapien
ccacctaatttatgtttttgctaga

SEQ ID NO: 2058679 - DNA, 25 bp, Homo sapien
tcactaggcaggaacattagactcc

SEQ ID NO: 2058680 - DNA, 25 bp, Homo sapien
caaacattattcaaccaggcaagca

SEQ ID NO: 2058681 - DNA, 25 bp, Homo sapien
ggtgttacaaaccagtcactaggca

SEQ ID NO: 2058682 - DNA, 25 bp, Homo sapien
gttaaccccgttccatagagtcaga

SEQ ID NO: 2058683 - DNA, 25 bp, Homo sapien
gagtgacaacagacctcaggcacga

SEQ ID NO: 2058684 - DNA, 25 bp, Homo sapien
taatcatgatgttgccataaggcca

SEQ ID NO: 2058685 - DNA, 25 bp, Homo sapien
caagtggctcacctaattgtcagaa

SEQ ID NO: 2058686 - DNA, 25 bp, Homo sapien
agtgaccacattaaaggctgacgga

SEQ ID NO: 2058687 - DNA, 25 bp, Homo sapien
tctgacaatctaaagggtaacaaaa

SEQ ID NO: 2058688 - DNA, 25 bp, Homo sapien
aaattgggggagtctctgacaatct

SEQ ID NO: 2058689 - DNA, 25 bp, Homo sapien
acagagatatcagttataagaacca

SEQ ID NO: 2058690 - DNA, 25 bp, Homo sapien
ttctatctgattacagagtcaataa

SEQ ID NO: 2058691 - DNA, 25 bp, Homo sapien
cacctgggcacttcagtttgagaaa

SEQ ID NO: 2058692 - DNA, 25 bp, Homo sapien
aagtgcacccaataaaacctcagag

SEQ ID NO: 2058693 - DNA, 25 bp, Homo sapien
taacacactttatgtcagggcagaa

SEQ ID NO: 2058694 - DNA, 25 bp, Homo sapien
ccaagctttggccacgtactgaaac

SEQ ID NO: 2058695 - DNA, 25 bp, Homo sapien
tatgaaagtgaaatccatctctcag

SEQ ID NO: 2058696 - DNA, 25 bp, Homo sapien
tctctcaggaagatacagttatggt

SEQ ID NO: 2058697 - DNA, 25 bp, Homo sapien
gactccatccattaacgtatgaaag

SEQ ID NO: 2058698 - DNA, 25 bp, Homo sapien
gaacgtttccacagactagagatcc

SEQ ID NO: 2058699 - DNA, 25 bp, Homo sapien
tggtggtgacagacgtactgcttgc

SEQ ID NO: 2058700 - DNA, 25 bp, Homo sapien
tcaggaatgttacttccactgctgg

SEQ ID NO: 2058701 - DNA, 25 bp, Homo sapien
tgagactatccaaaaacataggagg

SEQ ID NO: 2058702 - DNA, 25 bp, Homo sapien
actgctggttatgacccctgtctca

SEQ ID NO: 2058703 - DNA, 25 bp, Homo sapien
caaaacttcacatctttgggtggaa

SEQ ID NO: 2058704 - DNA, 25 bp, Homo sapien
gcatatattcttgattctctctaaa

SEQ ID NO: 2058705 - DNA, 25 bp, Homo sapien
tgaggaagaggctacttgattttaa

SEQ ID NO: 2058706 - DNA, 25 bp, Homo sapien
cacatatttaaatcccagtgggatt

SEQ ID NO: 2058707 - DNA, 25 bp, Homo sapien
tagctagctatcacaggatcctcag

SEQ ID NO: 2058708 - DNA, 25 bp, Homo sapien
tcgtgatgcctgcttaacacccctt

SEQ ID NO: 2058709 - DNA, 25 bp, Homo sapien
cctttcccggtatggattgagtatc

SEQ ID NO: 2058710 - DNA, 25 bp, Homo sapien
cattggactcctttgtacataaacg

SEQ ID NO: 2058711 - DNA, 25 bp, Homo sapien
gatcaactggaataagggaaagaaa

SEQ ID NO: 2058712 - DNA, 25 bp, Homo sapien
gggatcaactggaataagggaaaga

SEQ ID NO: 2058713 - DNA, 25 bp, Homo sapien
ctggggatcaactggaataagggaa

SEQ ID NO: 2058714 - DNA, 25 bp, Homo sapien
tggggatcaactggaataagggaaa

SEQ ID NO: 2058715 - DNA, 25 bp, Homo sapien
tatcaagggttactgggttctgagc

SEQ ID NO: 2058716 - DNA, 25 bp, Homo sapien
tcaagagcagtacatagtccaacgc

SEQ ID NO: 2058717 - DNA, 25 bp, Homo sapien
cacactcgggaattgctgcgctaac

SEQ ID NO: 2058718 - DNA, 25 bp, Homo sapien
tattgtgtactgaagccaagccact

SEQ ID NO: 2058719 - DNA, 25 bp, Homo sapien
cataactgctacatgattaaatatg

SEQ ID NO: 2058720 - DNA, 25 bp, Homo sapien
cttttaacaaaacataactgctaca

SEQ ID NO: 2058721 - DNA, 25 bp, Homo sapien
tttaatgatacaacttttgagcacc

SEQ ID NO: 2058722 - DNA, 25 bp, Homo sapien
tacaacttttgagcaccattcgcac

SEQ ID NO: 2058723 - DNA, 25 bp, Homo sapien
ctgacaatatggcactagcaataat

SEQ ID NO: 2058724 - DNA, 25 bp, Homo sapien
ggcactagcaataataaggcagtca

SEQ ID NO: 2058725 - DNA, 25 bp, Homo sapien
tccttgaaataagctgttttccact

SEQ ID NO: 2058726 - DNA, 25 bp, Homo sapien
ataataaggcagtcatatttttcct

SEQ ID NO: 2058727 - DNA, 25 bp, Homo sapien
tcactgttgcacagtatcagaagat

SEQ ID NO: 2058728 - DNA, 25 bp, Homo sapien
cagtatcagaagatgttccaagctt

SEQ ID NO: 2058729 - DNA, 25 bp, Homo sapien
tatcagaagatgttccaagcttcag

SEQ ID NO: 2058730 - DNA, 25 bp, Homo sapien
tgcacagtatcagaagatgttccaa

SEQ ID NO: 2058731 - DNA, 25 bp, Homo sapien
gtaactgctacataattcatacatg

SEQ ID NO: 2058732 - DNA, 25 bp, Homo sapien
tttgttatctctccattcttggtgt

SEQ ID NO: 2058733 - DNA, 25 bp, Homo sapien
tctattcagttatcaactggtaaga

SEQ ID NO: 2058734 - DNA, 25 bp, Homo sapien
taaactagcaattcttctaaagcaa

SEQ ID NO: 2058735 - DNA, 25 bp, Homo sapien
aattacatgtggagtaactatatct

SEQ ID NO: 2058736 - DNA, 25 bp, Homo sapien
gtggagtaactatatctaagaagca

SEQ ID NO: 2058737 - DNA, 25 bp, Homo sapien
atggatactataaaatgtctattct

SEQ ID NO: 2058738 - DNA, 25 bp, Homo sapien
tacatgtggagtaactatatctaag

SEQ ID NO: 2058739 - DNA, 25 bp, Homo sapien
ggcaaaattataccgagccaattat

SEQ ID NO: 2058740 - DNA, 25 bp, Homo sapien
taatctaaacaaatttcaagtggca

SEQ ID NO: 2058741 - DNA, 25 bp, Homo sapien
ctttcaccaacaggataagcattgt

SEQ ID NO: 2058742 - DNA, 25 bp, Homo sapien
gtttcagtaacataaactttcacca

SEQ ID NO: 2058743 - DNA, 25 bp, Homo sapien
cactaaaagggccttcggagagaag

SEQ ID NO: 2058744 - DNA, 25 bp, Homo sapien
taacaggaggagagaattgtattcc

SEQ ID NO: 2058745 - DNA, 25 bp, Homo sapien
tgatactaaggtaattctagcaacc

SEQ ID NO: 2058746 - DNA, 25 bp, Homo sapien
ccttggttgcagaagtcctgatact

SEQ ID NO: 2058747 - DNA, 25 bp, Homo sapien
tattggcgtatggtggaatggtact

SEQ ID NO: 2058748 - DNA, 25 bp, Homo sapien
cttgatattggcgtatggtggaatg

SEQ ID NO: 2058749 - DNA, 25 bp, Homo sapien
tgacatgcttgatattggcgtatgg

SEQ ID NO: 2058750 - DNA, 25 bp, Homo sapien
ctgatgacatgcttgatattggcgt

SEQ ID NO: 2058751 - DNA, 25 bp, Homo sapien
tagcagcaggatcaaccgaagtcac

SEQ ID NO: 2058752 - DNA, 25 bp, Homo sapien
cgaagtcacactgggcacccttaca

SEQ ID NO: 2058753 - DNA, 25 bp, Homo sapien
aggcggaatagcagcaggatcaacc

SEQ ID NO: 2058754 - DNA, 25 bp, Homo sapien
ggatcaaccgaagtcacactgggca

SEQ ID NO: 2058755 - DNA, 25 bp, Homo sapien
tctttcctgggaatcatctgagcaa

SEQ ID NO: 2058756 - DNA, 25 bp, Homo sapien
tcttaaagccgaccaacttgatggc

SEQ ID NO: 2058757 - DNA, 25 bp, Homo sapien
caatcagaaacgaggatgagtgttc

SEQ ID NO: 2058758 - DNA, 25 bp, Homo sapien
tatgtaggaaactgagcactgttac

SEQ ID NO: 2058759 - DNA, 25 bp, Homo sapien
gcttgaggcaataacataagcctgg

SEQ ID NO: 2058760 - DNA, 25 bp, Homo sapien
ttggcctccagtgctactcgaagac

SEQ ID NO: 2058761 - DNA, 25 bp, Homo sapien
ttttcccgaggtagataaagacaga

SEQ ID NO: 2058762 - DNA, 25 bp, Homo sapien
agtggtcctccacagggatcaaacg

SEQ ID NO: 2058763 - DNA, 25 bp, Homo sapien
caaagaaggcagctgaaaaggttta

SEQ ID NO: 2058764 - DNA, 25 bp, Homo sapien
cattagaaaaccaagtggaccaaga

SEQ ID NO: 2058765 - DNA, 25 bp, Homo sapien
tcgtagacagccaggagaactctcc

SEQ ID NO: 2058766 - DNA, 25 bp, Homo sapien
gatgacactagcaaacccaagtttg

SEQ ID NO: 2058767 - DNA, 25 bp, Homo sapien
tttataaatctatccaagagcaatt

SEQ ID NO: 2058768 - DNA, 25 bp, Homo sapien
atctatccaagagcaattagttgca

SEQ ID NO: 2058769 - DNA, 25 bp, Homo sapien
tgcaagggtaatgaacaatagtgaa

SEQ ID NO: 2058770 - DNA, 25 bp, Homo sapien
ccaagagcaattagttgcaagggta

SEQ ID NO: 2058771 - DNA, 25 bp, Homo sapien
tctattgtaagatcaataacatcta

SEQ ID NO: 2058772 - DNA, 25 bp, Homo sapien
gaagagctttctattgtaagatcaa

SEQ ID NO: 2058773 - DNA, 25 bp, Homo sapien
gtcttcctcttcgtcagaagagctt

SEQ ID NO: 2058774 - DNA, 25 bp, Homo sapien
caaggcttactgaggacgcttgaac

SEQ ID NO: 2058775 - DNA, 25 bp, Homo sapien
tctcattggacaccaagaaccatct

SEQ ID NO: 2058776 - DNA, 25 bp, Homo sapien
gtacacggttggctggatactttca

SEQ ID NO: 2058777 - DNA, 25 bp, Homo sapien
catctacatcagaacagtcattgag

SEQ ID NO: 2058778 - DNA, 25 bp, Homo sapien
tctttcttcggtctcattggacacc

SEQ ID NO: 2058779 - DNA, 25 bp, Homo sapien
cagtaagttgtagtgaacaaaggca

SEQ ID NO: 2058780 - DNA, 25 bp, Homo sapien
gaatttagttcagtaagttgtagtg

SEQ ID NO: 2058781 - DNA, 25 bp, Homo sapien
tagtccatatcagctgttaaaaggg

SEQ ID NO: 2058782 - DNA, 25 bp, Homo sapien
gcattgccaacagctgttgtattag

SEQ ID NO: 2058783 - DNA, 25 bp, Homo sapien
ccgctcgtgtcagcgacggtagtcc

SEQ ID NO: 2058784 - DNA, 25 bp, Homo sapien
ggactaccgtcgctgacacgagcgg

SEQ ID NO: 2058785 - DNA, 25 bp, Homo sapien
ggcagcttttttgtcacacacagga

SEQ ID NO: 2058786 - DNA, 25 bp, Homo sapien
taatattagactttcataggcagct

SEQ ID NO: 2058787 - DNA, 25 bp, Homo sapien
cattcatttgtagatagagggcagc

SEQ ID NO: 2058788 - DNA, 25 bp, Homo sapien
caggacaaatccaggtgggcttttt

SEQ ID NO: 2058789 - DNA, 25 bp, Homo sapien
ctgcagatgtgtacaagtcactgca

SEQ ID NO: 2058790 - DNA, 25 bp, Homo sapien
tacaagtcactgcacggcatgggat

SEQ ID NO: 2058791 - DNA, 25 bp, Homo sapien
tcactgcacggcatgggattgtcag

SEQ ID NO: 2058792 - DNA, 25 bp, Homo sapien
cacggcatgggattgtcagcctcat

SEQ ID NO: 2058793 - DNA, 25 bp, Homo sapien
cagtttccctatttagagaaccact

SEQ ID NO: 2058794 - DNA, 25 bp, Homo sapien
tagtcccaaggacagaggttttaga

SEQ ID NO: 2058795 - DNA, 25 bp, Homo sapien
tagatcctcttcagtaactactgtg

SEQ ID NO: 2058796 - DNA, 25 bp, Homo sapien
gactcacgtccactgcaaatcactt

SEQ ID NO: 2058797 - DNA, 25 bp, Homo sapien
tccgtttcccattactgcaccagat

SEQ ID NO: 2058798 - DNA, 25 bp, Homo sapien
tcaaggatacccgaaggctagttgt

SEQ ID NO: 2058799 - DNA, 25 bp, Homo sapien
agggcacatcaaggatacccgaagg

SEQ ID NO: 2058800 - DNA, 25 bp, Homo sapien
tcactatcaggatctgcagtaagtt

SEQ ID NO: 2058801 - DNA, 25 bp, Homo sapien
cgaaggctagttgtagcaatttcac

SEQ ID NO: 2058802 - DNA, 25 bp, Homo sapien
ggctgatgtaagctgccgtacaaga

SEQ ID NO: 2058803 - DNA, 25 bp, Homo sapien
ctggaatgatcagggtttctaatac

SEQ ID NO: 2058804 - DNA, 25 bp, Homo sapien
gctgccgtacaagatatacagacat

SEQ ID NO: 2058805 - DNA, 25 bp, Homo sapien
gaatgatcagggtttctaatacctt

SEQ ID NO: 2058806 - DNA, 25 bp, Homo sapien
aattcaccaagctacttcactgaaa

SEQ ID NO: 2058807 - DNA, 25 bp, Homo sapien
cactgcgaaggggacaaaattcacc

SEQ ID NO: 2058808 - DNA, 25 bp, Homo sapien
aaaattcaccaagctacttcactga

SEQ ID NO: 2058809 - DNA, 25 bp, Homo sapien
tggtcaatcactgcgaaggggacaa

SEQ ID NO: 2058810 - DNA, 25 bp, Homo sapien
tattaactggtatctcaaaattgac

SEQ ID NO: 2058811 - DNA, 25 bp, Homo sapien
ttaggaacatgtaataagaacactg

SEQ ID NO: 2058812 - DNA, 25 bp, Homo sapien
caggaatattattctgtttaggaac

SEQ ID NO: 2058813 - DNA, 25 bp, Homo sapien
aatattaacactgaagctgatggtc

SEQ ID NO: 2058814 - DNA, 25 bp, Homo sapien
aaattactgctttttagagattaca

SEQ ID NO: 2058815 - DNA, 25 bp, Homo sapien
ggaaaataaagagatgatattcagg

SEQ ID NO: 2058816 - DNA, 25 bp, Homo sapien
aaacacagaaagtcaaccctcagtg

SEQ ID NO: 2058817 - DNA, 25 bp, Homo sapien
tgtcctgctacccaaaacggagagc

SEQ ID NO: 2058818 - DNA, 25 bp, Homo sapien
tgatgcccaagaaatggaaatttgg

SEQ ID NO: 2058819 - DNA, 25 bp, Homo sapien
gggcgtccagggcgcttctgttcaa

SEQ ID NO: 2058820 - DNA, 25 bp, Homo sapien
catttttaggcggtggtgcatagcc

SEQ ID NO: 2058821 - DNA, 25 bp, Homo sapien
gctgaagataacctaactaaagatg

SEQ ID NO: 2058822 - DNA, 25 bp, Homo sapien
gctgtcttccttgcaccaagggaac

SEQ ID NO: 2058823 - DNA, 25 bp, Homo sapien
gtctctgcagcaggttcttgtctgt

SEQ ID NO: 2058824 - DNA, 25 bp, Homo sapien
caagccctactatgagctgctgtct

SEQ ID NO: 2058825 - DNA, 25 bp, Homo sapien
ttggagtcaaagatgggagatggtc

SEQ ID NO: 2058826 - DNA, 25 bp, Homo sapien
cacgggcaaggaccacctatcaaat

SEQ ID NO: 2058827 - DNA, 25 bp, Homo sapien
caggatcacgggcaaggaccaccta

SEQ ID NO: 2058828 - DNA, 25 bp, Homo sapien
gatcacgggcaaggaccacctatca

SEQ ID NO: 2058829 - DNA, 25 bp, Homo sapien
aggatcacgggcaaggaccacctat

SEQ ID NO: 2058830 - DNA, 25 bp, Homo sapien
gggatgccagactcatcagacaaag

SEQ ID NO: 2058831 - DNA, 25 bp, Homo sapien
ggatgccagactcatcagacaaagg

SEQ ID NO: 2058832 - DNA, 25 bp, Homo sapien
cagggatgccagactcatcagacaa

SEQ ID NO: 2058833 - DNA, 25 bp, Homo sapien
ccagggatgccagactcatcagaca

SEQ ID NO: 2058834 - DNA, 25 bp, Homo sapien
ttacttttatacatagactatttgg

SEQ ID NO: 2058835 - DNA, 25 bp, Homo sapien
gcaacttgtctctgccaggcaaagt

SEQ ID NO: 2058836 - DNA, 25 bp, Homo sapien
tatacatagactatttggatagtta

SEQ ID NO: 2058837 - DNA, 25 bp, Homo sapien
tcttgagggcaacttgtctctgcca

SEQ ID NO: 2058838 - DNA, 25 bp, Homo sapien
ataatctctcctaccacctggcaaa

SEQ ID NO: 2058839 - DNA, 25 bp, Homo sapien
tgaacttggactgtataatctctcc

SEQ ID NO: 2058840 - DNA, 25 bp, Homo sapien
aactgaacttggactgtataatctc

SEQ ID NO: 2058841 - DNA, 25 bp, Homo sapien
tctctcctaccacctggcaaaaaat

SEQ ID NO: 2058842 - DNA, 25 bp, Homo sapien
tctctaacttgttgaggtgtcaaag

SEQ ID NO: 2058843 - DNA, 25 bp, Homo sapien
atctctctaacttgttgaggtgtca

SEQ ID NO: 2058844 - DNA, 25 bp, Homo sapien
ctctctaacttgttgaggtgtcaaa

SEQ ID NO: 2058845 - DNA, 25 bp, Homo sapien
tctctctaacttgttgaggtgtcaa

SEQ ID NO: 2058846 - DNA, 25 bp, Homo sapien
ttggagaccttggaacagagaacct

SEQ ID NO: 2058847 - DNA, 25 bp, Homo sapien
ggactggtgctagtccacggcctga

SEQ ID NO: 2058848 - DNA, 25 bp, Homo sapien
gtaatgctcgaattcctgctgctca

SEQ ID NO: 2058849 - DNA, 25 bp, Homo sapien
attcacgtggaatctcaagggcccc

SEQ ID NO: 2058850 - DNA, 25 bp, Homo sapien
tggctgcacaacattaccaacatac

SEQ ID NO: 2058851 - DNA, 25 bp, Homo sapien
acagtggaagtagaatggtaactgc

SEQ ID NO: 2058852 - DNA, 25 bp, Homo sapien
atagacagtggaagtagaatggtaa

SEQ ID NO: 2058853 - DNA, 25 bp, Homo sapien
acatacttaacaccactcaactgta

SEQ ID NO: 2058854 - DNA, 25 bp, Homo sapien
catggttgccgaatttttatccgta

SEQ ID NO: 2058855 - DNA, 25 bp, Homo sapien
caaacattcggcattgatgcctcaa

SEQ ID NO: 2058856 - DNA, 25 bp, Homo sapien
atttcagtcatggttgccgaatttt

SEQ ID NO: 2058857 - DNA, 25 bp, Homo sapien
ttatccgtatattcaaacattcggc

SEQ ID NO: 2058858 - DNA, 25 bp, Homo sapien
tcttgaagcagcacagaaccaacag

SEQ ID NO: 2058859 - DNA, 25 bp, Homo sapien
catctcaaatgtgggcttagtatct

SEQ ID NO: 2058860 - DNA, 25 bp, Homo sapien
acatcaaggacatcataaaagggca

SEQ ID NO: 2058861 - DNA, 25 bp, Homo sapien
taaactcgtgggcttgatgagaaca

SEQ ID NO: 2058862 - DNA, 25 bp, Homo sapien
ggaaggcaacgagtggattccagcc

SEQ ID NO: 2058863 - DNA, 25 bp, Homo sapien
tccagccacggccaagtcaggttct

SEQ ID NO: 2058864 - DNA, 25 bp, Homo sapien
cacggccaagtcaggttctacaggt

SEQ ID NO: 2058865 - DNA, 25 bp, Homo sapien
agtcaggttctacaggtgatgagcc

SEQ ID NO: 2058866 - DNA, 25 bp, Homo sapien
ggctgcagccgctcttcaataaatg

SEQ ID NO: 2058867 - DNA, 25 bp, Homo sapien
gattttaatctgaaccgcagggctg

SEQ ID NO: 2058868 - DNA, 25 bp, Homo sapien
tcatcaggaggtcatgcttgcgtcc

SEQ ID NO: 2058869 - DNA, 25 bp, Homo sapien
tatcggcgtctatacaattctcgga

SEQ ID NO: 2058870 - DNA, 25 bp, Homo sapien
ggatgttaatgcaactggctctatg

SEQ ID NO: 2058871 - DNA, 25 bp, Homo sapien
tatttggcaaaggatgttaatgcaa

SEQ ID NO: 2058872 - DNA, 25 bp, Homo sapien
atgttaatgcaactggctctatggg

SEQ ID NO: 2058873 - DNA, 25 bp, Homo sapien
acattatttggcaaaggatgttaat

SEQ ID NO: 2058874 - DNA, 25 bp, Homo sapien
atgaaaaacactgataacaccaaat

SEQ ID NO: 2058875 - DNA, 25 bp, Homo sapien
tgagaaactggatcactccatacat

SEQ ID NO: 2058876 - DNA, 25 bp, Homo sapien
ggatgctgagaaactggatcactcc

SEQ ID NO: 2058877 - DNA, 25 bp, Homo sapien
gcgaggatgctgagaaactggatca

SEQ ID NO: 2058878 - DNA, 25 bp, Homo sapien
attggcatcacactcaaacaggctg

SEQ ID NO: 2058879 - DNA, 25 bp, Homo sapien
aaacaggctgcctaaccaaaatgca

SEQ ID NO: 2058880 - DNA, 25 bp, Homo sapien
aaaaaccaggcaatacatagtctct

SEQ ID NO: 2058881 - DNA, 25 bp, Homo sapien
aatcaacagccaaatcaactagagg

SEQ ID NO: 2058882 - DNA, 25 bp, Homo sapien
aaggaaagggatcggtgttatatct

SEQ ID NO: 2058883 - DNA, 25 bp, Homo sapien
aagtgaggaaatatagttgtctctc

SEQ ID NO: 2058884 - DNA, 25 bp, Homo sapien
tggtaccagggtcccctgcagatac

SEQ ID NO: 2058885 - DNA, 25 bp, Homo sapien
tcctcctacgtactttacatcattt

SEQ ID NO: 2058886 - DNA, 25 bp, Homo sapien
gtagcatcagccataagaagaggag

SEQ ID NO: 2058887 - DNA, 25 bp, Homo sapien
gggccttttctcgtgacagacctga

SEQ ID NO: 2058888 - DNA, 25 bp, Homo sapien
cattaggttcctcgaagatgttagg

SEQ ID NO: 2058889 - DNA, 25 bp, Homo sapien
gccgattattgaaggcagggatccc

SEQ ID NO: 2058890 - DNA, 25 bp, Homo sapien
cgtgacaggagcattcgggaagatt

SEQ ID NO: 2058891 - DNA, 25 bp, Homo sapien
cctagagctgggtcgcaactgaggc

SEQ ID NO: 2058892 - DNA, 25 bp, Homo sapien
actgggcgccgcttaagacgccgcg

SEQ ID NO: 2058893 - DNA, 25 bp, Homo sapien
aactgaggcgttatccgcgggcctg

SEQ ID NO: 2058894 - DNA, 25 bp, Homo sapien
gttctttgtagttgcttcccagcat

SEQ ID NO: 2058895 - DNA, 25 bp, Homo sapien
agtgttctttgtagttgcttcccag

SEQ ID NO: 2058896 - DNA, 25 bp, Homo sapien
tgttctttgtagttgcttcccagca

SEQ ID NO: 2058897 - DNA, 25 bp, Homo sapien
gcagtgttctttgtagttgcttccc

SEQ ID NO: 2058898 - DNA, 25 bp, Homo sapien
tgccccttcctcaatgtgtagcagc

SEQ ID NO: 2058899 - DNA, 25 bp, Homo sapien
cagctcctggatgggttgggtaggt

SEQ ID NO: 2058900 - DNA, 25 bp, Homo sapien
tctgccccttcctcaatgtgtagca

SEQ ID NO: 2058901 - DNA, 25 bp, Homo sapien
ccttcctcaatgtgtagcagctcct

SEQ ID NO: 2058902 - DNA, 25 bp, Homo sapien
aacttccttataacatagtaatgtg

SEQ ID NO: 2058903 - DNA, 25 bp, Homo sapien
tccttataacatagtaatgtggtat

SEQ ID NO: 2058904 - DNA, 25 bp, Homo sapien
tccaacttccttataacatagtaat

SEQ ID NO: 2058905 - DNA, 25 bp, Homo sapien
cttccttataacatagtaatgtggt

SEQ ID NO: 2058906 - DNA, 25 bp, Homo sapien
ccgagtctccggttgctatggcgac

SEQ ID NO: 2058907 - DNA, 25 bp, Homo sapien
cgggaagcggtaaggaacgcatata

SEQ ID NO: 2058908 - DNA, 25 bp, Homo sapien
tgaaattcacgcatcaggcgcggga

SEQ ID NO: 2058909 - DNA, 25 bp, Homo sapien
tgctgcgggacgattccgagtctcc

SEQ ID NO: 2058910 - DNA, 25 bp, Homo sapien
tagtttttattaatcgcatgggctc

SEQ ID NO: 2058911 - DNA, 25 bp, Homo sapien
ttagtttttattaatcgcatgggct

SEQ ID NO: 2058912 - DNA, 25 bp, Homo sapien
tattgatttttggctgaatactgag

SEQ ID NO: 2058913 - DNA, 25 bp, Homo sapien
ttattgatttttggctgaatactga

SEQ ID NO: 2058914 - DNA, 25 bp, Homo sapien
tagtctcgaattgccttggccatca

SEQ ID NO: 2058915 - DNA, 25 bp, Homo sapien
atttccggggtcagcggctcctgca

SEQ ID NO: 2058916 - DNA, 25 bp, Homo sapien
atcagcggggccactttcttggcag

SEQ ID NO: 2058917 - DNA, 25 bp, Homo sapien
tcgtcgggagaatcttcccttgtag

SEQ ID NO: 2058918 - DNA, 25 bp, Homo sapien
tctgtcggccgctgggtttgttttc

SEQ ID NO: 2058919 - DNA, 25 bp, Homo sapien
catcataaggcgtcttggccacaga

SEQ ID NO: 2058920 - DNA, 25 bp, Homo sapien
agatcatctttgtctgtcggccgct

SEQ ID NO: 2058921 - DNA, 25 bp, Homo sapien
gcatcataaggcgtcttggccacag

SEQ ID NO: 2058922 - DNA, 25 bp, Homo sapien
cggattttcgtggtcactactcgca

SEQ ID NO: 2058923 - DNA, 25 bp, Homo sapien
gtggtcactactcgcagccgctgct

SEQ ID NO: 2058924 - DNA, 25 bp, Homo sapien
ttttcgtggtcactactcgcagccg

SEQ ID NO: 2058925 - DNA, 25 bp, Homo sapien
gtgcggatcggattttcgtggtcac

SEQ ID NO: 2058926 - DNA, 25 bp, Homo sapien
tccagaacgggttcaagagccgagt

SEQ ID NO: 2058927 - DNA, 25 bp, Homo sapien
ttccagaacgggttcaagagccgag

SEQ ID NO: 2058928 - DNA, 25 bp, Homo sapien
ccttccagaacgggttcaagagccg

SEQ ID NO: 2058929 - DNA, 25 bp, Homo sapien
ccagaacgggttcaagagccgagta

SEQ ID NO: 2058930 - DNA, 25 bp, Homo sapien
ttccacgtcgccgagggcgtccgga

SEQ ID NO: 2058931 - DNA, 25 bp, Homo sapien
gggcgtccggattgttcctaggcac

SEQ ID NO: 2058932 - DNA, 25 bp, Homo sapien
tcgccgagggcgtccggattgttcc

SEQ ID NO: 2058933 - DNA, 25 bp, Homo sapien
agggcgtccggattgttcctaggca

SEQ ID NO: 2058934 - DNA, 25 bp, Homo sapien
cgagtacaccggcatcttagcgttc

SEQ ID NO: 2058935 - DNA, 25 bp, Homo sapien
gtacaccggcatcttagcgttcact

SEQ ID NO: 2058936 - DNA, 25 bp, Homo sapien
ggcctggagcccgagtacaccggca

SEQ ID NO: 2058937 - DNA, 25 bp, Homo sapien
gagcccgagtacaccggcatcttag

SEQ ID NO: 2058938 - DNA, 25 bp, Homo sapien
ctgcgtccagggaaagcagcttcct

SEQ ID NO: 2058939 - DNA, 25 bp, Homo sapien
tgcgtccagggaaagcagcttcctc

SEQ ID NO: 2058940 - DNA, 25 bp, Homo sapien
cagatcgtagttggcctgcatccag

SEQ ID NO: 2058941 - DNA, 25 bp, Homo sapien
tcaaaagcggacagcagatcgtagt

SEQ ID NO: 2058942 - DNA, 25 bp, Homo sapien
cctgggaggtcatggcctcaaaagc

SEQ ID NO: 2058943 - DNA, 25 bp, Homo sapien
gctccgagaagacatggctgggcac

SEQ ID NO: 2058944 - DNA, 25 bp, Homo sapien
tcaggcccggtgtttcggtccacga

SEQ ID NO: 2058945 - DNA, 25 bp, Homo sapien
cgtcgcgttttctgggaagccccag

SEQ ID NO: 2058946 - DNA, 25 bp, Homo sapien
gacaggaggcgatttctgagccgaa

SEQ ID NO: 2058947 - DNA, 25 bp, Homo sapien
tctgttgccccggaggtgttctgcg

SEQ ID NO: 2058948 - DNA, 25 bp, Homo sapien
cgctaagtctctggcaaagtcgccc

SEQ ID NO: 2058949 - DNA, 25 bp, Homo sapien
gccgctaagtctctggcaaagtcgc

SEQ ID NO: 2058950 - DNA, 25 bp, Homo sapien
ccgctaagtctctggcaaagtcgcc

SEQ ID NO: 2058951 - DNA, 25 bp, Homo sapien
ggccgctaagtctctggcaaagtcg

SEQ ID NO: 2058952 - DNA, 25 bp, Homo sapien
cgcaggcgcttcaccgtctttctga

SEQ ID NO: 2058953 - DNA, 25 bp, Homo sapien
cttccgcaggcgcttcaccgtcttt

SEQ ID NO: 2058954 - DNA, 25 bp, Homo sapien
aggcgcttcaccgtctttctgattc

SEQ ID NO: 2058955 - DNA, 25 bp, Homo sapien
gcgcttcaccgtctttctgattcca

SEQ ID NO: 2058956 - DNA, 25 bp, Homo sapien
tgcggtcatgggcaaggcggagagt

SEQ ID NO: 2058957 - DNA, 25 bp, Homo sapien
ctgcggtcatgggcaaggcggagag

SEQ ID NO: 2058958 - DNA, 25 bp, Homo sapien
cggtcatgggcaaggcggagagttt

SEQ ID NO: 2058959 - DNA, 25 bp, Homo sapien
gcggtcatgggcaaggcggagagtt

SEQ ID NO: 2058960 - DNA, 25 bp, Homo sapien
ggctccgtcttagtggccagacgca

SEQ ID NO: 2058961 - DNA, 25 bp, Homo sapien
tatttctctagctttttcggctccg

SEQ ID NO: 2058962 - DNA, 25 bp, Homo sapien
actgcgcgcagcgtagtggaccctg

SEQ ID NO: 2058963 - DNA, 25 bp, Homo sapien
cagagctgtgcaggcgtcgctgtcc

SEQ ID NO: 2058964 - DNA, 25 bp, Homo sapien
ttggccctccatgtacccagcttcc

SEQ ID NO: 2058965 - DNA, 25 bp, Homo sapien
ctaccgttggccctccatgtaccca

SEQ ID NO: 2058966 - DNA, 25 bp, Homo sapien
taccgttggccctccatgtacccag

SEQ ID NO: 2058967 - DNA, 25 bp, Homo sapien
gccctccatgtacccagcttccaca

SEQ ID NO: 2058968 - DNA, 25 bp, Homo sapien
gaggatcgtagtgcaatactggcga

SEQ ID NO: 2058969 - DNA, 25 bp, Homo sapien
tcacgaagaggatcgtagtgcaata

SEQ ID NO: 2058970 - DNA, 25 bp, Homo sapien
ggcgatgcctccagagctccctgaa

SEQ ID NO: 2058971 - DNA, 25 bp, Homo sapien
tgcaatactggcgatgcctccagag

SEQ ID NO: 2058972 - DNA, 25 bp, Homo sapien
ggcctcttttcacgtgcaccggcat

SEQ ID NO: 2058973 - DNA, 25 bp, Homo sapien
acgtgcaccggcatccactcaggtg

SEQ ID NO: 2058974 - DNA, 25 bp, Homo sapien
gcttgaaggcctcttttcacgtgca

SEQ ID NO: 2058975 - DNA, 25 bp, Homo sapien
tgaaggcctcttttcacgtgcaccg

SEQ ID NO: 2058976 - DNA, 25 bp, Homo sapien
tagtctcgaattgccttggccatca

SEQ ID NO: 2058977 - DNA, 25 bp, Homo sapien
atttccggggtcagcggctcctgca

SEQ ID NO: 2058978 - DNA, 25 bp, Homo sapien
atcagcggggccactttcttggcag

SEQ ID NO: 2058979 - DNA, 25 bp, Homo sapien
tcgtcgggagaatcttcccttgtag

SEQ ID NO: 2058980 - DNA, 25 bp, Homo sapien
catcataaggcgtcttggccacaga

SEQ ID NO: 2058981 - DNA, 25 bp, Homo sapien
agcatcataaggcgtcttggccaca

SEQ ID NO: 2058982 - DNA, 25 bp, Homo sapien
gcatcataaggcgtcttggccacag

SEQ ID NO: 2058983 - DNA, 25 bp, Homo sapien
tctgtcggccgctgggtttgttttc

SEQ ID NO: 2058984 - DNA, 25 bp, Homo sapien
tttgtctgtcggccgctgggtttgt

SEQ ID NO: 2058985 - DNA, 25 bp, Homo sapien
tgtctgtcggccgctgggtttgttt

SEQ ID NO: 2058986 - DNA, 25 bp, Homo sapien
ctttgtctgtcggccgctgggtttg

SEQ ID NO: 2058987 - DNA, 25 bp, Homo sapien
cggattttcgtggtcactactcgca

SEQ ID NO: 2058988 - DNA, 25 bp, Homo sapien
gtggtcactactcgcagccgctgct

SEQ ID NO: 2058989 - DNA, 25 bp, Homo sapien
ttttcgtggtcactactcgcagccg

SEQ ID NO: 2058990 - DNA, 25 bp, Homo sapien
gtgcggatcggattttcgtggtcac

SEQ ID NO: 2058991 - DNA, 25 bp, Homo sapien
cgagtgcggcattgtctttctctgt

SEQ ID NO: 2058992 - DNA, 25 bp, Homo sapien
ttctctgtgcggtacggctgatcgg

SEQ ID NO: 2058993 - DNA, 25 bp, Homo sapien
tcatctgtctctcgagcgagtgcgg

SEQ ID NO: 2058994 - DNA, 25 bp, Homo sapien
cagaacgggttcaagaaccgagtag

SEQ ID NO: 2058995 - DNA, 25 bp, Homo sapien
agggcgtccggattgttcctaggca

SEQ ID NO: 2058996 - DNA, 25 bp, Homo sapien
ttccacgtcgccgagggcgtccgga

SEQ ID NO: 2058997 - DNA, 25 bp, Homo sapien
tcgccgagggcgtccggattgttcc

SEQ ID NO: 2058998 - DNA, 25 bp, Homo sapien
gggcgtccggattgttcctaggcac

SEQ ID NO: 2058999 - DNA, 25 bp, Homo sapien
cgagtacaccggcatcttagcgttc

SEQ ID NO: 2059000 - DNA, 25 bp, Homo sapien
gtacaccggcatcttagcgttcact

SEQ ID NO: 2059001 - DNA, 25 bp, Homo sapien
ggcctggagcccgagtacaccggca

SEQ ID NO: 2059002 - DNA, 25 bp, Homo sapien
gagcccgagtacaccggcatcttag

SEQ ID NO: 2059003 - DNA, 25 bp, Homo sapien
ctgcgtccagggaaagcagcttcct

SEQ ID NO: 2059004 - DNA, 25 bp, Homo sapien
tgcgtccagggaaagcagcttcctc

SEQ ID NO: 2059005 - DNA, 25 bp, Homo sapien
gctccgagaagacatggctgggcac

SEQ ID NO: 2059006 - DNA, 25 bp, Homo sapien
cctgggaggtcatggcctcaaaagc

SEQ ID NO: 2059007 - DNA, 25 bp, Homo sapien
cagatcgtagttggcctgcatccag

SEQ ID NO: 2059008 - DNA, 25 bp, Homo sapien
tcaaaagcggacagcagatcgtagt

SEQ ID NO: 2059009 - DNA, 25 bp, Homo sapien
tcaggcccggtgtttcggtccacga

SEQ ID NO: 2059010 - DNA, 25 bp, Homo sapien
cgtcgcgttttctgggaagccccag

SEQ ID NO: 2059011 - DNA, 25 bp, Homo sapien
tctgttgccccggaggtgttctgcg

SEQ ID NO: 2059012 - DNA, 25 bp, Homo sapien
gacaggaggcgatttctgagccgaa

SEQ ID NO: 2059013 - DNA, 25 bp, Homo sapien
cgctaagtctctggcaaagtcgccc

SEQ ID NO: 2059014 - DNA, 25 bp, Homo sapien
gccgctaagtctctggcaaagtcgc

SEQ ID NO: 2059015 - DNA, 25 bp, Homo sapien
ccgctaagtctctggcaaagtcgcc

SEQ ID NO: 2059016 - DNA, 25 bp, Homo sapien
ggccgctaagtctctggcaaagtcg

SEQ ID NO: 2059017 - DNA, 25 bp, Homo sapien
cttccgcaggcgcttcaccgtcttt

SEQ ID NO: 2059018 - DNA, 25 bp, Homo sapien
gcgcttcaccgtctttctgattcca

SEQ ID NO: 2059019 - DNA, 25 bp, Homo sapien
aggcgcttcaccgtctttctgattc

SEQ ID NO: 2059020 - DNA, 25 bp, Homo sapien
cgcaggcgcttcaccgtctttctga

SEQ ID NO: 2059021 - DNA, 25 bp, Homo sapien
gcggtcatgggcaaggcggagagtt

SEQ ID NO: 2059022 - DNA, 25 bp, Homo sapien
tgcggtcatgggcaaggcggagagt

SEQ ID NO: 2059023 - DNA, 25 bp, Homo sapien
ctgcggtcatgggcaaggcggagag

SEQ ID NO: 2059024 - DNA, 25 bp, Homo sapien
cggtcatgggcaaggcggagagttt

SEQ ID NO: 2059025 - DNA, 25 bp, Homo sapien
ggctccgtcttagtggccagacgca

SEQ ID NO: 2059026 - DNA, 25 bp, Homo sapien
cagagctgtgcaggcgtcgctgtcc

SEQ ID NO: 2059027 - DNA, 25 bp, Homo sapien
tatttctctagctttttcggctccg

SEQ ID NO: 2059028 - DNA, 25 bp, Homo sapien
actgcgcgcagcgtagtggaccctg

SEQ ID NO: 2059029 - DNA, 25 bp, Homo sapien
ttggccctccatgtacccagcttcc

SEQ ID NO: 2059030 - DNA, 25 bp, Homo sapien
gccctccatgtacccagcttccaca

SEQ ID NO: 2059031 - DNA, 25 bp, Homo sapien
taccgttggccctccatgtacccag

SEQ ID NO: 2059032 - DNA, 25 bp, Homo sapien
ctaccgttggccctccatgtaccca

SEQ ID NO: 2059033 - DNA, 25 bp, Homo sapien
tcacgaagaggatcgtagtgcaata

SEQ ID NO: 2059034 - DNA, 25 bp, Homo sapien
gaggatcgtagtgcaatactggcga

SEQ ID NO: 2059035 - DNA, 25 bp, Homo sapien
ggcgatgcctccagagctccctgaa

SEQ ID NO: 2059036 - DNA, 25 bp, Homo sapien
tgcaatactggcgatgcctccagag

SEQ ID NO: 2059037 - DNA, 25 bp, Homo sapien
ggcctcttttcacgtgcaccggcat

SEQ ID NO: 2059038 - DNA, 25 bp, Homo sapien
acgtgcaccggcatccactcaggtg

SEQ ID NO: 2059039 - DNA, 25 bp, Homo sapien
gcttgaaggcctcttttcacgtgca

SEQ ID NO: 2059040 - DNA, 25 bp, Homo sapien
tgaaggcctcttttcacgtgcaccg

SEQ ID NO: 2059041 - DNA, 25 bp, Homo sapien
tagtctcgaattgccttggccatca

SEQ ID NO: 2059042 - DNA, 25 bp, Homo sapien
atttccggggtcagcggctcctgca

SEQ ID NO: 2059043 - DNA, 25 bp, Homo sapien
atcagcggggccactttcttggcag

SEQ ID NO: 2059044 - DNA, 25 bp, Homo sapien
tcgtcgggagaatcttcccttgtag

SEQ ID NO: 2059045 - DNA, 25 bp, Homo sapien
catcataaggcgtcttggccacaga

SEQ ID NO: 2059046 - DNA, 25 bp, Homo sapien
agcatcataaggcgtcttggccaca

SEQ ID NO: 2059047 - DNA, 25 bp, Homo sapien
gcatcataaggcgtcttggccacag

SEQ ID NO: 2059048 - DNA, 25 bp, Homo sapien
tctgtcggccgctgggtttgttttc

SEQ ID NO: 2059049 - DNA, 25 bp, Homo sapien
tttgtctgtcggccgctgggtttgt

SEQ ID NO: 2059050 - DNA, 25 bp, Homo sapien
tgtctgtcggccgctgggtttgttt

SEQ ID NO: 2059051 - DNA, 25 bp, Homo sapien
ctttgtctgtcggccgctgggtttg

SEQ ID NO: 2059052 - DNA, 25 bp, Homo sapien
cggattttcgtggtcactactcgca

SEQ ID NO: 2059053 - DNA, 25 bp, Homo sapien
gtggtcactactcgcagccgctgct

SEQ ID NO: 2059054 - DNA, 25 bp, Homo sapien
ttttcgtggtcactactcgcagccg

SEQ ID NO: 2059055 - DNA, 25 bp, Homo sapien
gtgcggatcggattttcgtggtcac

SEQ ID NO: 2059056 - DNA, 25 bp, Homo sapien
cgagtgcggcattgtctttctctgt

SEQ ID NO: 2059057 - DNA, 25 bp, Homo sapien
tctctcgagcgagtgcggcattgtc

SEQ ID NO: 2059058 - DNA, 25 bp, Homo sapien
tcatctgtctctcgagcgagtgcgg

SEQ ID NO: 2059059 - DNA, 25 bp, Homo sapien
cagaacgggttcaagaaccgagtag

SEQ ID NO: 2059060 - DNA, 25 bp, Homo sapien
ttccacgtcgccgagggcgtccgga

SEQ ID NO: 2059061 - DNA, 25 bp, Homo sapien
agggcgtccggattgttcctaggca

SEQ ID NO: 2059062 - DNA, 25 bp, Homo sapien
gggcgtccggattgttcctaggcac

SEQ ID NO: 2059063 - DNA, 25 bp, Homo sapien
tcgccgagggcgtccggattgttcc

SEQ ID NO: 2059064 - DNA, 25 bp, Homo sapien
cgagtacaccggcatcttagcgttc

SEQ ID NO: 2059065 - DNA, 25 bp, Homo sapien
gtacaccggcatcttagcgttcact

SEQ ID NO: 2059066 - DNA, 25 bp, Homo sapien
ggcctggagcccgagtacaccggca

SEQ ID NO: 2059067 - DNA, 25 bp, Homo sapien
gagcccgagtacaccggcatcttag

SEQ ID NO: 2059068 - DNA, 25 bp, Homo sapien
tggcgcggagagtgcttctgggttt

SEQ ID NO: 2059069 - DNA, 25 bp, Homo sapien
gcgcggagagtgcttctgggtttgc

SEQ ID NO: 2059070 - DNA, 25 bp, Homo sapien
ttctgggtttgcctgggaggtcatg

SEQ ID NO: 2059071 - DNA, 25 bp, Homo sapien
gcggagagtgcttctgggtttgcct

SEQ ID NO: 2059072 - DNA, 25 bp, Homo sapien
gctccgagaagacatggctgggcac

SEQ ID NO: 2059073 - DNA, 25 bp, Homo sapien
cagatcgtagttggcctgcatccag

SEQ ID NO: 2059074 - DNA, 25 bp, Homo sapien
tcaaaagcggacagcagatcgtagt

SEQ ID NO: 2059075 - DNA, 25 bp, Homo sapien
gttttcggcccggcggaatcagcgc

SEQ ID NO: 2059076 - DNA, 25 bp, Homo sapien
tcaggcccggtgtttcggtccacga

SEQ ID NO: 2059077 - DNA, 25 bp, Homo sapien
cgtcgcgttttctgggaagccccag

SEQ ID NO: 2059078 - DNA, 25 bp, Homo sapien
gacaggaggcgatttctgagccgaa

SEQ ID NO: 2059079 - DNA, 25 bp, Homo sapien
tctgttgccccggaggtgttctgcg

SEQ ID NO: 2059080 - DNA, 25 bp, Homo sapien
cgctaagtctctggcaaagtcgccc

SEQ ID NO: 2059081 - DNA, 25 bp, Homo sapien
gccgctaagtctctggcaaagtcgc

SEQ ID NO: 2059082 - DNA, 25 bp, Homo sapien
ccgctaagtctctggcaaagtcgcc

SEQ ID NO: 2059083 - DNA, 25 bp, Homo sapien
ggccgctaagtctctggcaaagtcg

SEQ ID NO: 2059084 - DNA, 25 bp, Homo sapien
cttccgcaggcgcttcaccgtcttt

SEQ ID NO: 2059085 - DNA, 25 bp, Homo sapien
gcgcttcaccgtctttctgattcca

SEQ ID NO: 2059086 - DNA, 25 bp, Homo sapien
tgtctgcggtcatgggcaaggcgga

SEQ ID NO: 2059087 - DNA, 25 bp, Homo sapien
gtctccgccaggatgtctgcggtca

SEQ ID NO: 2059088 - DNA, 25 bp, Homo sapien
ggctccgtcttagtggccagacgca

SEQ ID NO: 2059089 - DNA, 25 bp, Homo sapien
actgcgcgcagcgtagtggaccctg

SEQ ID NO: 2059090 - DNA, 25 bp, Homo sapien
tagctttttcggctccgtcttagtg

SEQ ID NO: 2059091 - DNA, 25 bp, Homo sapien
caaatatttctctagctttttcggc

SEQ ID NO: 2059092 - DNA, 25 bp, Homo sapien
cagagctgtgcaggcgtcgctgtcc

SEQ ID NO: 2059093 - DNA, 25 bp, Homo sapien
cgcggtcgcggctctgtccgagctc

SEQ ID NO: 2059094 - DNA, 25 bp, Homo sapien
tgcaggcgtcgctgtcctcgcggtc

SEQ ID NO: 2059095 - DNA, 25 bp, Homo sapien
ggtcgcggctctgtccgagctcggg

SEQ ID NO: 2059096 - DNA, 25 bp, Homo sapien
tcaaaggctcaactttgcaccaagt

SEQ ID NO: 2059097 - DNA, 25 bp, Homo sapien
tgtccattggaagtttcgttcccca

SEQ ID NO: 2059098 - DNA, 25 bp, Homo sapien
tgtattcggagttatcagtgtcaac

SEQ ID NO: 2059099 - DNA, 25 bp, Homo sapien
gttcccaatgcgttcatatcttctg

SEQ ID NO: 2059100 - DNA, 25 bp, Homo sapien
cttgtagtctcgaattgccttggcc

SEQ ID NO: 2059101 - DNA, 25 bp, Homo sapien
tagtctcgaattgccttggccatca

SEQ ID NO: 2059102 - DNA, 25 bp, Homo sapien
atcagcggggccactttcttggcag

SEQ ID NO: 2059103 - DNA, 25 bp, Homo sapien
tgtagtctcgaattgccttggccat

SEQ ID NO: 2059104 - DNA, 25 bp, Homo sapien
ggctggcttgatctccccattttcg

SEQ ID NO: 2059105 - DNA, 25 bp, Homo sapien
ggaggctggcttgatctccccattt

SEQ ID NO: 2059106 - DNA, 25 bp, Homo sapien
cagggagccagcgaaggatgctgct

SEQ ID NO: 2059107 - DNA, 25 bp, Homo sapien
ctggcttgatctccccattttcggg

SEQ ID NO: 2059108 - DNA, 25 bp, Homo sapien
ctctctgccgttggggttgtttcca

SEQ ID NO: 2059109 - DNA, 25 bp, Homo sapien
tcataaggcgtcttggccacagatt

SEQ ID NO: 2059110 - DNA, 25 bp, Homo sapien
tttccacgtgcagatcggatattcg

SEQ ID NO: 2059111 - DNA, 25 bp, Homo sapien
cagatcggatattcgttgtcattac

SEQ ID NO: 2059112 - DNA, 25 bp, Homo sapien
acctctcccacgtcgctgagggcgt

SEQ ID NO: 2059113 - DNA, 25 bp, Homo sapien
tgagggcgtccggattgtttctaag

SEQ ID NO: 2059114 - DNA, 25 bp, Homo sapien
gattcctccgtaattcgtctgtctc

SEQ ID NO: 2059115 - DNA, 25 bp, Homo sapien
cgtctgtctctctaacgagtgcgtg

SEQ ID NO: 2059116 - DNA, 25 bp, Homo sapien
ccggaactttggtgaagagagtgct

SEQ ID NO: 2059117 - DNA, 25 bp, Homo sapien
cgagtacaccggcatcttagcattc

SEQ ID NO: 2059118 - DNA, 25 bp, Homo sapien
tcctcccggaactttggtgaagaga

SEQ ID NO: 2059119 - DNA, 25 bp, Homo sapien
tacaccggcatcttagcattcactc

SEQ ID NO: 2059120 - DNA, 25 bp, Homo sapien
gtcatggagtcagaatccgaaagcg

SEQ ID NO: 2059121 - DNA, 25 bp, Homo sapien
gagtcagaatccgaaagcggatcgt

SEQ ID NO: 2059122 - DNA, 25 bp, Homo sapien
tccgaaagcggatcgtagttggcct

SEQ ID NO: 2059123 - DNA, 25 bp, Homo sapien
tcagaatccgaaagcggatcgtagt

SEQ ID NO: 2059124 - DNA, 25 bp, Homo sapien
ggactcacgagtgcccttggattcg

SEQ ID NO: 2059125 - DNA, 25 bp, Homo sapien
tatttttcacatgacagagtgggct

SEQ ID NO: 2059126 - DNA, 25 bp, Homo sapien
caggaggcaatttcttagccgaatc

SEQ ID NO: 2059127 - DNA, 25 bp, Homo sapien
ccgcaactgatcgtaggtgaggtat

SEQ ID NO: 2059128 - DNA, 25 bp, Homo sapien
tctgtcttgaagtccgaaggctgcc

SEQ ID NO: 2059129 - DNA, 25 bp, Homo sapien
caaatgagcagtcggtggcttcccc

SEQ ID NO: 2059130 - DNA, 25 bp, Homo sapien
tttcctggcgagacgatttgtgccc

SEQ ID NO: 2059131 - DNA, 25 bp, Homo sapien
tctctcggtcgttggaaagctgctc

SEQ ID NO: 2059132 - DNA, 25 bp, Homo sapien
ccgctaagtctctggcaaagtcgcc

SEQ ID NO: 2059133 - DNA, 25 bp, Homo sapien
cgctaagtctctggcaaagtcgccc

SEQ ID NO: 2059134 - DNA, 25 bp, Homo sapien
gccgctaagtctctggcaaagtcgc

SEQ ID NO: 2059135 - DNA, 25 bp, Homo sapien
ggccgctaagtctctggcaaagtcg

SEQ ID NO: 2059136 - DNA, 25 bp, Homo sapien
tatttctctagctttttcggctccg

SEQ ID NO: 2059137 - DNA, 25 bp, Homo sapien
cgcaggcgcttcaccgtctttctga

SEQ ID NO: 2059138 - DNA, 25 bp, Homo sapien
ggcaaggcggagagtttctgcaaat

SEQ ID NO: 2059139 - DNA, 25 bp, Homo sapien
ggctccgtcttagtggccagacgca

SEQ ID NO: 2059140 - DNA, 25 bp, Homo sapien
cagcaggccacttggtctggaacgg

SEQ ID NO: 2059141 - DNA, 25 bp, Homo sapien
cagcgacctcgggatgtggagtcac

SEQ ID NO: 2059142 - DNA, 25 bp, Homo sapien
gcaggcccgcttttgttcctcggga

SEQ ID NO: 2059143 - DNA, 25 bp, Homo sapien
cacagcctggagtgacctctgcagt

SEQ ID NO: 2059144 - DNA, 25 bp, Homo sapien
gagctgggccttatgtagcccatcc

SEQ ID NO: 2059145 - DNA, 25 bp, Homo sapien
cagagctgggccttatgtagcccat

SEQ ID NO: 2059146 - DNA, 25 bp, Homo sapien
gctgggccttatgtagcccatccca

SEQ ID NO: 2059147 - DNA, 25 bp, Homo sapien
tgggccttatgtagcccatcccagg

SEQ ID NO: 2059148 - DNA, 25 bp, Homo sapien
agccctgaccctcttagctcttggg

SEQ ID NO: 2059149 - DNA, 25 bp, Homo sapien
ctagccctgaccctcttagctcttg

SEQ ID NO: 2059150 - DNA, 25 bp, Homo sapien
ggctctagccctgaccctcttagct

SEQ ID NO: 2059151 - DNA, 25 bp, Homo sapien
ctgccccgcccccatacgtactcat

SEQ ID NO: 2059152 - DNA, 25 bp, Homo sapien
gagcatagttgaccaattctgacat

SEQ ID NO: 2059153 - DNA, 25 bp, Homo sapien
tttctggatctgtagacacttcttt

SEQ ID NO: 2059154 - DNA, 25 bp, Homo sapien
ttctgagcatagttgaccaattctg

SEQ ID NO: 2059155 - DNA, 25 bp, Homo sapien
aaatgtcttttctggatctgtagac

SEQ ID NO: 2059156 - DNA, 25 bp, Homo sapien
aagtagaatcgccaagtcagaggga

SEQ ID NO: 2059157 - DNA, 25 bp, Homo sapien
tgaacaaagctagagtgggcagtct

SEQ ID NO: 2059158 - DNA, 25 bp, Homo sapien
tgccagattacttgccaacagggtt

SEQ ID NO: 2059159 - DNA, 25 bp, Homo sapien
tctgctaacctcgaaggaactcgtc

SEQ ID NO: 2059160 - DNA, 25 bp, Homo sapien
catcgagctaatgtgaagactcttc

SEQ ID NO: 2059161 - DNA, 25 bp, Homo sapien
gctttgtcgagctctgtccccagtt

SEQ ID NO: 2059162 - DNA, 25 bp, Homo sapien
gcacctagatgggaatgcaccagcc

SEQ ID NO: 2059163 - DNA, 25 bp, Homo sapien
tagtcactctacaaagaccaggtct

SEQ ID NO: 2059164 - DNA, 25 bp, Homo sapien
tgcatttaatctaccagtgggactg

SEQ ID NO: 2059165 - DNA, 25 bp, Homo sapien
aaaacatatacctagccaggcaggg

SEQ ID NO: 2059166 - DNA, 25 bp, Homo sapien
gctccattggccatcagaacagaaa

SEQ ID NO: 2059167 - DNA, 25 bp, Homo sapien
gctggcacgctcagaagatctcgta

SEQ ID NO: 2059168 - DNA, 25 bp, Homo sapien
gcatccattgatgacctctgcctga

SEQ ID NO: 2059169 - DNA, 25 bp, Homo sapien
gattgtcttgcaggatgtccacact

SEQ ID NO: 2059170 - DNA, 25 bp, Homo sapien
tgtacagctcccatcaatggtgtga

SEQ ID NO: 2059171 - DNA, 25 bp, Homo sapien
gatcaccgggttcaggtgtgtcacc

SEQ ID NO: 2059172 - DNA, 25 bp, Homo sapien
tagccatccgagtgggtaagaaatg

SEQ ID NO: 2059173 - DNA, 25 bp, Homo sapien
tattgggtcatacggccactctacg

SEQ ID NO: 2059174 - DNA, 25 bp, Homo sapien
gtttgattagttgaggaacagccca

SEQ ID NO: 2059175 - DNA, 25 bp, Homo sapien
ccttatgggccaattgcgtatcttc

SEQ ID NO: 2059176 - DNA, 25 bp, Homo sapien
tcaaagggctaatgtgcatgaaagt

SEQ ID NO: 2059177 - DNA, 25 bp, Homo sapien
tatagctgcgcagggctccattttg

SEQ ID NO: 2059178 - DNA, 25 bp, Homo sapien
tatggtagagcctgccaagtttccc

SEQ ID NO: 2059179 - DNA, 25 bp, Homo sapien
ccccgcagaggttgtaccactttgt

SEQ ID NO: 2059180 - DNA, 25 bp, Homo sapien
gatgtaaaccgtggaagtggccagt

SEQ ID NO: 2059181 - DNA, 25 bp, Homo sapien
cacaaggccttgaagcaagatgtaa

SEQ ID NO: 2059182 - DNA, 25 bp, Homo sapien
caggggctcagctgatcgggcacaa

SEQ ID NO: 2059183 - DNA, 25 bp, Homo sapien
cagctgatcgggcacaaggccttga

SEQ ID NO: 2059184 - DNA, 25 bp, Homo sapien
ggctctcctgtaataatgttctcat

SEQ ID NO: 2059185 - DNA, 25 bp, Homo sapien
ggcctcctaatgcactgaattacag

SEQ ID NO: 2059186 - DNA, 25 bp, Homo sapien
gcctcctaatgcactgaattacagg

SEQ ID NO: 2059187 - DNA, 25 bp, Homo sapien
tctttctcatttcgaatttgtgtgt

SEQ ID NO: 2059188 - DNA, 25 bp, Homo sapien
ggctgagtctctgatgtgcgatgaa

SEQ ID NO: 2059189 - DNA, 25 bp, Homo sapien
cattgttactgtcggtaaggcaccc

SEQ ID NO: 2059190 - DNA, 25 bp, Homo sapien
taaggcacccctggactatggattc

SEQ ID NO: 2059191 - DNA, 25 bp, Homo sapien
tctcagctcagggttagacaaacaa

SEQ ID NO: 2059192 - DNA, 25 bp, Homo sapien
taatagccagggtgactagcacacc

SEQ ID NO: 2059193 - DNA, 25 bp, Homo sapien
tccattgccgcagcttctcatcaga

SEQ ID NO: 2059194 - DNA, 25 bp, Homo sapien
tagaaaagttgtgttggccacacac

SEQ ID NO: 2059195 - DNA, 25 bp, Homo sapien
ggcacctaagcttcgagaacattca

SEQ ID NO: 2059196 - DNA, 25 bp, Homo sapien
gattttggctatcaacattccaacc

SEQ ID NO: 2059197 - DNA, 25 bp, Homo sapien
tttccaaatggccaaacataccaga

SEQ ID NO: 2059198 - DNA, 25 bp, Homo sapien
cctgaggctccaacttctaaccaat

SEQ ID NO: 2059199 - DNA, 25 bp, Homo sapien
cccgctctggtcctggtgttctaag

SEQ ID NO: 2059200 - DNA, 25 bp, Homo sapien
tgcaaggcccaggattatcacagta

SEQ ID NO: 2059201 - DNA, 25 bp, Homo sapien
catcagagtgagcttcaataaggtg

SEQ ID NO: 2059202 - DNA, 25 bp, Homo sapien
tgcccaagagccctgtagaactatt

SEQ ID NO: 2059203 - DNA, 25 bp, Homo sapien
caagactgctgatctctaaacaagc

SEQ ID NO: 2059204 - DNA, 25 bp, Homo sapien
aatttttcccatagtgtcagaggca

SEQ ID NO: 2059205 - DNA, 25 bp, Homo sapien
ggttaaaaagcgatcagcactgact

SEQ ID NO: 2059206 - DNA, 25 bp, Homo sapien
gactggtgtctaccgatgctggcac

SEQ ID NO: 2059207 - DNA, 25 bp, Homo sapien
gaaaaagaagtcacccgtgctggga

SEQ ID NO: 2059208 - DNA, 25 bp, Homo sapien
tcacaataggtgctgcagaatgtgg

SEQ ID NO: 2059209 - DNA, 25 bp, Homo sapien
cacaataggtgctgcagaatgtggt

SEQ ID NO: 2059210 - DNA, 25 bp, Homo sapien
caggccctctggtcattcacaatgg

SEQ ID NO: 2059211 - DNA, 25 bp, Homo sapien
gattcccttcacatgttcacagctg

SEQ ID NO: 2059212 - DNA, 25 bp, Homo sapien
cacaggtactggatcgtctgacagc

SEQ ID NO: 2059213 - DNA, 25 bp, Homo sapien
atgagcacctgggtcatcacagcac

SEQ ID NO: 2059214 - DNA, 25 bp, Homo sapien
caaaggcaactgggaacaggatgtg

SEQ ID NO: 2059215 - DNA, 25 bp, Homo sapien
aggcaactgggaacaggatgtgctg

SEQ ID NO: 2059216 - DNA, 25 bp, Homo sapien
aaaggcaactgggaacaggatgtgc

SEQ ID NO: 2059217 - DNA, 25 bp, Homo sapien
aaggcaactgggaacaggatgtgct

SEQ ID NO: 2059218 - DNA, 25 bp, Homo sapien
taagcatgtgctactggctcaccag

SEQ ID NO: 2059219 - DNA, 25 bp, Homo sapien
tacaagtcagaaggtgcacagtccc

SEQ ID NO: 2059220 - DNA, 25 bp, Homo sapien
aaagagtgatggatgctcgcaggcc

SEQ ID NO: 2059221 - DNA, 25 bp, Homo sapien
ttcttacaggaagggagccagcatc

SEQ ID NO: 2059222 - DNA, 25 bp, Homo sapien
gactgagacattcgaaaaaatccac

SEQ ID NO: 2059223 - DNA, 25 bp, Homo sapien
tctttgtgcagacctttgccacata

SEQ ID NO: 2059224 - DNA, 25 bp, Homo sapien
gagtgactggtgttactatctgcaa

SEQ ID NO: 2059225 - DNA, 25 bp, Homo sapien
tacttcttattcaattgtagctcca

SEQ ID NO: 2059226 - DNA, 25 bp, Homo sapien
ctattctgttttagaaaatgcttta

SEQ ID NO: 2059227 - DNA, 25 bp, Homo sapien
agaaaatgctttatacagaagatac

SEQ ID NO: 2059228 - DNA, 25 bp, Homo sapien
ttagaaaatgctttatacagaagat

SEQ ID NO: 2059229 - DNA, 25 bp, Homo sapien
aaaatgctttatacagaagatacat

SEQ ID NO: 2059230 - DNA, 25 bp, Homo sapien
atcttgagccccaccaacatcatcc

SEQ ID NO: 2059231 - DNA, 25 bp, Homo sapien
gatgcccagcatgccgacatcttga

SEQ ID NO: 2059232 - DNA, 25 bp, Homo sapien
cagtctttactaagatgcccagcat

SEQ ID NO: 2059233 - DNA, 25 bp, Homo sapien
tactaagatgcccagcatgccgaca

SEQ ID NO: 2059234 - DNA, 25 bp, Homo sapien
ggtatctgtggcatactctaaagca

SEQ ID NO: 2059235 - DNA, 25 bp, Homo sapien
tgtggattgctatcagaggtgctcc

SEQ ID NO: 2059236 - DNA, 25 bp, Homo sapien
gcagtcacaaatggtccaggcccca

SEQ ID NO: 2059237 - DNA, 25 bp, Homo sapien
gcttccaaaaagaacgtcttctctg

SEQ ID NO: 2059238 - DNA, 25 bp, Homo sapien
agaactgctgggaattacactcaga

SEQ ID NO: 2059239 - DNA, 25 bp, Homo sapien
tattttgcaaatcaggccatctttc

SEQ ID NO: 2059240 - DNA, 25 bp, Homo sapien
atgaaaatgttctggtgccaatccc

SEQ ID NO: 2059241 - DNA, 25 bp, Homo sapien
tctggtgccaatcccatgaccacag

SEQ ID NO: 2059242 - DNA, 25 bp, Homo sapien
tgaccacagcattaggatcacttgt

SEQ ID NO: 2059243 - DNA, 25 bp, Homo sapien
cggaatgcttgattcagaatttgat

SEQ ID NO: 2059244 - DNA, 25 bp, Homo sapien
tagtgcccgatcatcaactagcagc

SEQ ID NO: 2059245 - DNA, 25 bp, Homo sapien
caggtagtgcccgatcatcaactag

SEQ ID NO: 2059246 - DNA, 25 bp, Homo sapien
tgaaatcaggtagtgcccgatcatc

SEQ ID NO: 2059247 - DNA, 25 bp, Homo sapien
gtgcccgatcatcaactagcagcat

SEQ ID NO: 2059248 - DNA, 25 bp, Homo sapien
tcatcttcagagatatcaaattcca

SEQ ID NO: 2059249 - DNA, 25 bp, Homo sapien
gtctgacttgtttccgctctagtaa

SEQ ID NO: 2059250 - DNA, 25 bp, Homo sapien
ggctgcagtcagagatgtgaatatt

SEQ ID NO: 2059251 - DNA, 25 bp, Homo sapien
tagtaaacttctggctgcagtcaga

SEQ ID NO: 2059252 - DNA, 25 bp, Homo sapien
aatgattacagaagcaccacgtaac

SEQ ID NO: 2059253 - DNA, 25 bp, Homo sapien
taatgattacagaagcaccacgtaa

SEQ ID NO: 2059254 - DNA, 25 bp, Homo sapien
ctaatgattacagaagcaccacgta

SEQ ID NO: 2059255 - DNA, 25 bp, Homo sapien
tttaagagcttcctgtgcgcctggc

SEQ ID NO: 2059256 - DNA, 25 bp, Homo sapien
cttttaagagcttcctgtgcgcctg

SEQ ID NO: 2059257 - DNA, 25 bp, Homo sapien
gcttcctgtgcgcctggcacagctg

SEQ ID NO: 2059258 - DNA, 25 bp, Homo sapien
ttcctgtgcgcctggcacagctgca

SEQ ID NO: 2059259 - DNA, 25 bp, Homo sapien
agcttttaatgcacggcatgctgcc

SEQ ID NO: 2059260 - DNA, 25 bp, Homo sapien
tgagatctaccaaaacagcttttaa

SEQ ID NO: 2059261 - DNA, 25 bp, Homo sapien
tgtgaagtgtgccactgagatctac

SEQ ID NO: 2059262 - DNA, 25 bp, Homo sapien
gccactgagatctaccaaaacagct

SEQ ID NO: 2059263 - DNA, 25 bp, Homo sapien
cagctgaggagactctggcagtcac

SEQ ID NO: 2059264 - DNA, 25 bp, Homo sapien
tggcagctgaggagactctggcagt

SEQ ID NO: 2059265 - DNA, 25 bp, Homo sapien
ctgaggagactctggcagtcaccat

SEQ ID NO: 2059266 - DNA, 25 bp, Homo sapien
gctgaggagactctggcagtcacca

SEQ ID NO: 2059267 - DNA, 25 bp, Homo sapien
gaagatacaatggatgtgttccagt

SEQ ID NO: 2059268 - DNA, 25 bp, Homo sapien
gatgtgttccagtagcagacgaggt

SEQ ID NO: 2059269 - DNA, 25 bp, Homo sapien
tccagtagcagacgaggtgtctagc

SEQ ID NO: 2059270 - DNA, 25 bp, Homo sapien
tagcagacgaggtgtctagcgaaaa

SEQ ID NO: 2059271 - DNA, 25 bp, Homo sapien
caagcatcttggtgtttaaataaac

SEQ ID NO: 2059272 - DNA, 25 bp, Homo sapien
aagcatcttggtgtttaaataaact

SEQ ID NO: 2059273 - DNA, 25 bp, Homo sapien
tcaagcatcttggtgtttaaataaa

SEQ ID NO: 2059274 - DNA, 25 bp, Homo sapien
gcatcttggtgtttaaataaacttc

SEQ ID NO: 2059275 - DNA, 25 bp, Homo sapien
ccaccttttgggattctgactagaa

SEQ ID NO: 2059276 - DNA, 25 bp, Homo sapien
cacgttggtgccttttatattctac

SEQ ID NO: 2059277 - DNA, 25 bp, Homo sapien
cagagcaatatcaggacaactaaga

SEQ ID NO: 2059278 - DNA, 25 bp, Homo sapien
gaactacatttaatctacagagcaa

SEQ ID NO: 2059279 - DNA, 25 bp, Homo sapien
taggaactccataattgaatagaag

SEQ ID NO: 2059280 - DNA, 25 bp, Homo sapien
gtaaacttactgtagaactctgctg

SEQ ID NO: 2059281 - DNA, 25 bp, Homo sapien
gacaataattaccaaccacaagtga

SEQ ID NO: 2059282 - DNA, 25 bp, Homo sapien
cataaatggctattggattttacct

SEQ ID NO: 2059283 - DNA, 25 bp, Homo sapien
aatcagtatgggctcacagatattt

SEQ ID NO: 2059284 - DNA, 25 bp, Homo sapien
gaccatcaacagaaggctagtttaa

SEQ ID NO: 2059285 - DNA, 25 bp, Homo sapien
ggagtgtcctcatatattatttcaa

SEQ ID NO: 2059286 - DNA, 25 bp, Homo sapien
attgttttagctttggccattgaga

SEQ ID NO: 2059287 - DNA, 25 bp, Homo sapien
aaaagtttattgaccctgtgctagg

SEQ ID NO: 2059288 - DNA, 25 bp, Homo sapien
cacttacagagacatacacataaca

SEQ ID NO: 2059289 - DNA, 25 bp, Homo sapien
aaccagcaagctaaacacccttaat

SEQ ID NO: 2059290 - DNA, 25 bp, Homo sapien
gaggagattcctactggagaagagt

SEQ ID NO: 2059291 - DNA, 25 bp, Homo sapien
taatactcgttacctgaactacaag

SEQ ID NO: 2059292 - DNA, 25 bp, Homo sapien
aacatgtataatactcgttacctga

SEQ ID NO: 2059293 - DNA, 25 bp, Homo sapien
cgttacctgaactacaagctggtat

SEQ ID NO: 2059294 - DNA, 25 bp, Homo sapien
catgtataatactcgttacctgaac

SEQ ID NO: 2059295 - DNA, 25 bp, Homo sapien
ttttgtctgcaactactcgggcccc

SEQ ID NO: 2059296 - DNA, 25 bp, Homo sapien
gacggtattattcagccactcccca

SEQ ID NO: 2059297 - DNA, 25 bp, Homo sapien
tacactttgcctccctcgttgcggg

SEQ ID NO: 2059298 - DNA, 25 bp, Homo sapien
tagcacccaagttccatggtactgc

SEQ ID NO: 2059299 - DNA, 25 bp, Homo sapien
cgcgggtcctcagccgggatagaca

SEQ ID NO: 2059300 - DNA, 25 bp, Homo sapien
gctgctgcccgacggacgccggaag

SEQ ID NO: 2059301 - DNA, 25 bp, Homo sapien
ctccgtacgccgtcctcaggaaagg

SEQ ID NO: 2059302 - DNA, 25 bp, Homo sapien
gaaaggcccccgctaatggcaaagc

SEQ ID NO: 2059303 - DNA, 25 bp, Homo sapien
tcctcttgatccaggtaagttatgt

SEQ ID NO: 2059304 - DNA, 25 bp, Homo sapien
gtctcctcttgatccaggtaagtta

SEQ ID NO: 2059305 - DNA, 25 bp, Homo sapien
ctcttgatccaggtaagttatgtgg

SEQ ID NO: 2059306 - DNA, 25 bp, Homo sapien
cttgatccaggtaagttatgtggac

SEQ ID NO: 2059307 - DNA, 25 bp, Homo sapien
ctagggataaccactcacatcatgg

SEQ ID NO: 2059308 - DNA, 25 bp, Homo sapien
gctgctccaccaagaaatagaaatg

SEQ ID NO: 2059309 - DNA, 25 bp, Homo sapien
cagtcctggagagttactgcctttc

SEQ ID NO: 2059310 - DNA, 25 bp, Homo sapien
cacatcatggctaagttgcaaggaa

SEQ ID NO: 2059311 - DNA, 25 bp, Homo sapien
aaggtcagccagctaagatataaat

SEQ ID NO: 2059312 - DNA, 25 bp, Homo sapien
tgaccaaagtaataacttctactgg

SEQ ID NO: 2059313 - DNA, 25 bp, Homo sapien
agtaataacttctactggcatgtcc

SEQ ID NO: 2059314 - DNA, 25 bp, Homo sapien
tcagccagctaagatataaatattc

SEQ ID NO: 2059315 - DNA, 25 bp, Homo sapien
attgcaattgagtttactattatca

SEQ ID NO: 2059316 - DNA, 25 bp, Homo sapien
caattgagtttactattatcaatgg

SEQ ID NO: 2059317 - DNA, 25 bp, Homo sapien
attgagtttactattatcaatggca

SEQ ID NO: 2059318 - DNA, 25 bp, Homo sapien
tgcaattgagtttactattatcaat

SEQ ID NO: 2059319 - DNA, 25 bp, Homo sapien
tagctgtgatttaattcccggctct

SEQ ID NO: 2059320 - DNA, 25 bp, Homo sapien
tgtgatttaattcccggctcttctc

SEQ ID NO: 2059321 - DNA, 25 bp, Homo sapien
tcgaataaggttcattagctgtgat

SEQ ID NO: 2059322 - DNA, 25 bp, Homo sapien
ctctcatcacggttcttacagatcg

SEQ ID NO: 2059323 - DNA, 25 bp, Homo sapien
taaagggttagatcttgctacctcg

SEQ ID NO: 2059324 - DNA, 25 bp, Homo sapien
cagttgtcactatcgcagcctttgc

SEQ ID NO: 2059325 - DNA, 25 bp, Homo sapien
aacagggctgttgttgactcctact

SEQ ID NO: 2059326 - DNA, 25 bp, Homo sapien
tgcttatagcgcttccagtccacag

SEQ ID NO: 2059327 - DNA, 25 bp, Homo sapien
gccaggtgtggtgttatgctcctgt

SEQ ID NO: 2059328 - DNA, 25 bp, Homo sapien
ttgagcctggaaggccaaagctgca

SEQ ID NO: 2059329 - DNA, 25 bp, Homo sapien
tgggtgccagagaccctctttccaa

SEQ ID NO: 2059330 - DNA, 25 bp, Homo sapien
caggtgtggtgttatgctcctgtag

SEQ ID NO: 2059331 - DNA, 25 bp, Homo sapien
ttcttgtcacttccacagctagagg

SEQ ID NO: 2059332 - DNA, 25 bp, Homo sapien
tcttgtcacttccacagctagaggg

SEQ ID NO: 2059333 - DNA, 25 bp, Homo sapien
cttgtcacttccacagctagagggc

SEQ ID NO: 2059334 - DNA, 25 bp, Homo sapien
tccaggctcagccaaaaacgctcga

SEQ ID NO: 2059335 - DNA, 25 bp, Homo sapien
gttttgagagcttgctgaccctgag

SEQ ID NO: 2059336 - DNA, 25 bp, Homo sapien
ccaagtttacatgtgatcaaatgct

SEQ ID NO: 2059337 - DNA, 25 bp, Homo sapien
tgactgcaaccaccaaacacattct

SEQ ID NO: 2059338 - DNA, 25 bp, Homo sapien
taaaggctcagcagtggtaaaaatg

SEQ ID NO: 2059339 - DNA, 25 bp, Homo sapien
gggttaagtcaaggtcactaatgag

SEQ ID NO: 2059340 - DNA, 25 bp, Homo sapien
tcactaatgagtaaaggctcagcag

SEQ ID NO: 2059341 - DNA, 25 bp, Homo sapien
cagtggtaaaaatggtacacaggac

SEQ ID NO: 2059342 - DNA, 25 bp, Homo sapien
actgcgatggcgttgacgcagagca

SEQ ID NO: 2059343 - DNA, 25 bp, Homo sapien
ctgcctgcagcagtgagtacagggt

SEQ ID NO: 2059344 - DNA, 25 bp, Homo sapien
tgttcttgaggaatcgctcctcgtg

SEQ ID NO: 2059345 - DNA, 25 bp, Homo sapien
cagcagtgagtacagggtaaaggcc

SEQ ID NO: 2059346 - DNA, 25 bp, Homo sapien
cgaggccgccccgaagtccaagcga

SEQ ID NO: 2059347 - DNA, 25 bp, Homo sapien
aggccgccccgaagtccaagcgatt

SEQ ID NO: 2059348 - DNA, 25 bp, Homo sapien
gaagtccaagcgatttctctcccgc

SEQ ID NO: 2059349 - DNA, 25 bp, Homo sapien
tccgaggccgccccgaagtccaagc

SEQ ID NO: 2059350 - DNA, 25 bp, Homo sapien
gtggcgcctccacggccggcgcctt

SEQ ID NO: 2059351 - DNA, 25 bp, Homo sapien
tggcgcctccacggccggcgccttc

SEQ ID NO: 2059352 - DNA, 25 bp, Homo sapien
tcaggtactgtagctatagccaagg

SEQ ID NO: 2059353 - DNA, 25 bp, Homo sapien
caagtacccttacaagattcagaga

SEQ ID NO: 2059354 - DNA, 25 bp, Homo sapien
aaatgccagggatatggtctaggtc

SEQ ID NO: 2059355 - DNA, 25 bp, Homo sapien
ggttgggcacaacttaagatgttac

SEQ ID NO: 2059356 - DNA, 25 bp, Homo sapien
ccctctgagtgggagagccaatgcc

SEQ ID NO: 2059357 - DNA, 25 bp, Homo sapien
ggagagccaatgcccacatgggctc

SEQ ID NO: 2059358 - DNA, 25 bp, Homo sapien
agtgggagagccaatgcccacatgg

SEQ ID NO: 2059359 - DNA, 25 bp, Homo sapien
tgctgcccctctgagtgggagagcc

SEQ ID NO: 2059360 - DNA, 25 bp, Homo sapien
cctttccgtatcttcacctgcgtat

SEQ ID NO: 2059361 - DNA, 25 bp, Homo sapien
caagttcaggttcatcccctttccg

SEQ ID NO: 2059362 - DNA, 25 bp, Homo sapien
ctttccgtatcttcacctgcgtata

SEQ ID NO: 2059363 - DNA, 25 bp, Homo sapien
gccagccaagttcaggttcatcccc

SEQ ID NO: 2059364 - DNA, 25 bp, Homo sapien
aagtaggaaggcctacgatgggctc

SEQ ID NO: 2059365 - DNA, 25 bp, Homo sapien
tatcagcaacactactggaagacct

SEQ ID NO: 2059366 - DNA, 25 bp, Homo sapien
ttggatttaacatcacagtaagtag

SEQ ID NO: 2059367 - DNA, 25 bp, Homo sapien
cataatatgatcttgtggacttgga

SEQ ID NO: 2059368 - DNA, 25 bp, Homo sapien
ctaagcatttaagtaaccactaatc

SEQ ID NO: 2059369 - DNA, 25 bp, Homo sapien
gcaccagggtctacttagagaaatc

SEQ ID NO: 2059370 - DNA, 25 bp, Homo sapien
caaaggtctgtattgtccccagttg

SEQ ID NO: 2059371 - DNA, 25 bp, Homo sapien
tgaggatgactgctgacactttggt

SEQ ID NO: 2059372 - DNA, 25 bp, Homo sapien
tagttactattcctagagcagaagg

SEQ ID NO: 2059373 - DNA, 25 bp, Homo sapien
tcaggcaggctttttggaagcgaag

SEQ ID NO: 2059374 - DNA, 25 bp, Homo sapien
tcctgatcaaacttgctgcataggg

SEQ ID NO: 2059375 - DNA, 25 bp, Homo sapien
gagatgggcgccaagcttttctttc

SEQ ID NO: 2059376 - DNA, 25 bp, Homo sapien
tttcctgatcaaacttgctgcatag

SEQ ID NO: 2059377 - DNA, 25 bp, Homo sapien
agcttttgctgagatgggcgccaag

SEQ ID NO: 2059378 - DNA, 25 bp, Homo sapien
tcaggcttgcattaagtcttctgac

SEQ ID NO: 2059379 - DNA, 25 bp, Homo sapien
taagtcttctgacttgcagggatct

SEQ ID NO: 2059380 - DNA, 25 bp, Homo sapien
cagggatctccttttgatgcatatt

SEQ ID NO: 2059381 - DNA, 25 bp, Homo sapien
gacacagaaccaaaatcttctagtg

SEQ ID NO: 2059382 - DNA, 25 bp, Homo sapien
tttcttctcggtaggctagctccct

SEQ ID NO: 2059383 - DNA, 25 bp, Homo sapien
cggtaggctagctcccttttcatct

SEQ ID NO: 2059384 - DNA, 25 bp, Homo sapien
caccatttcttctcggtaggctagc

SEQ ID NO: 2059385 - DNA, 25 bp, Homo sapien
tctcggtaggctagctcccttttca

SEQ ID NO: 2059386 - DNA, 25 bp, Homo sapien
agagctgcttgagcagacacgtgga

SEQ ID NO: 2059387 - DNA, 25 bp, Homo sapien
agggaagtatgtggtgccatgcaaa

SEQ ID NO: 2059388 - DNA, 25 bp, Homo sapien
cattctgggaacattagaggggaga

SEQ ID NO: 2059389 - DNA, 25 bp, Homo sapien
gtcattcattctgggaacattagag

SEQ ID NO: 2059390 - DNA, 25 bp, Homo sapien
aagatgcctttgaccagggtggtaa

SEQ ID NO: 2059391 - DNA, 25 bp, Homo sapien
ctctagaggtgggtctaagggtaca

SEQ ID NO: 2059392 - DNA, 25 bp, Homo sapien
gtgggtctaagggtacagggcaaca

SEQ ID NO: 2059393 - DNA, 25 bp, Homo sapien
tctgagcctctagggatccaagatg

SEQ ID NO: 2059394 - DNA, 25 bp, Homo sapien
aattcttgttccagtcgtctccgta

SEQ ID NO: 2059395 - DNA, 25 bp, Homo sapien
ccagtcgtctccgtaaatctatttg

SEQ ID NO: 2059396 - DNA, 25 bp, Homo sapien
ctggaattcttgttccagtcgtctc

SEQ ID NO: 2059397 - DNA, 25 bp, Homo sapien
tgttccagtcgtctccgtaaatcta

SEQ ID NO: 2059398 - DNA, 25 bp, Homo sapien
gaatgaggtgagttggtttcttgtg

SEQ ID NO: 2059399 - DNA, 25 bp, Homo sapien
tttcagtgaatgaggtgagttggtt

SEQ ID NO: 2059400 - DNA, 25 bp, Homo sapien
ttttcagtgaatgaggtgagttggt

SEQ ID NO: 2059401 - DNA, 25 bp, Homo sapien
ttcagtgaatgaggtgagttggttt

SEQ ID NO: 2059402 - DNA, 25 bp, Homo sapien
tcagaaatttgtatgttatccttgc

SEQ ID NO: 2059403 - DNA, 25 bp, Homo sapien
actgcttcagaaatttgtatgttat

SEQ ID NO: 2059404 - DNA, 25 bp, Homo sapien
atatggactgcttcagaaatttgta

SEQ ID NO: 2059405 - DNA, 25 bp, Homo sapien
agaaatttgtatgttatccttgcac

SEQ ID NO: 2059406 - DNA, 25 bp, Homo sapien
ggaaaatgtctgtccacagaggaag

SEQ ID NO: 2059407 - DNA, 25 bp, Homo sapien
agaaggaaaatgtctgtccacagag

SEQ ID NO: 2059408 - DNA, 25 bp, Homo sapien
atagaaggaaaatgtctgtccacag

SEQ ID NO: 2059409 - DNA, 25 bp, Homo sapien
ttaatagaaggaaaatgtctgtcca

SEQ ID NO: 2059410 - DNA, 25 bp, Homo sapien
gatgaaaaagctatgctccttgttc

SEQ ID NO: 2059411 - DNA, 25 bp, Homo sapien
agctgttgtcatcctttgtagatac

SEQ ID NO: 2059412 - DNA, 25 bp, Homo sapien
gggtcttttccaacttccacaagca

SEQ ID NO: 2059413 - DNA, 25 bp, Homo sapien
ggtcttttccaacttccacaagcag

SEQ ID NO: 2059414 - DNA, 25 bp, Homo sapien
tcttttccaacttccacaagcagcc

SEQ ID NO: 2059415 - DNA, 25 bp, Homo sapien
ttttccaacttccacaagcagccag

SEQ ID NO: 2059416 - DNA, 25 bp, Homo sapien
atctttcctgcgcatatgtaaccga

SEQ ID NO: 2059417 - DNA, 25 bp, Homo sapien
gggaaatctggtgattcatctttcc

SEQ ID NO: 2059418 - DNA, 25 bp, Homo sapien
gattcatctttcctgcgcatatgta

SEQ ID NO: 2059419 - DNA, 25 bp, Homo sapien
cctgcgcatatgtaaccgattcagc

SEQ ID NO: 2059420 - DNA, 25 bp, Homo sapien
ttgcgcccctccagaaggtgcggat

SEQ ID NO: 2059421 - DNA, 25 bp, Homo sapien
tcctccagtgatggatggtgaactg

SEQ ID NO: 2059422 - DNA, 25 bp, Homo sapien
cccactggccggaaggcgctggaat

SEQ ID NO: 2059423 - DNA, 25 bp, Homo sapien
tcgtcgtcgtcagggtctcgacctt

SEQ ID NO: 2059424 - DNA, 25 bp, Homo sapien
cggatagaaggcgtccttgcggccc

SEQ ID NO: 2059425 - DNA, 25 bp, Homo sapien
ccagaacatgcagaagggcggatag

SEQ ID NO: 2059426 - DNA, 25 bp, Homo sapien
caggtaggtgggcaccgggagcccg

SEQ ID NO: 2059427 - DNA, 25 bp, Homo sapien
ggctttcgcctagcgcgcagcctag

SEQ ID NO: 2059428 - DNA, 25 bp, Homo sapien
cccgcgccccccagggcctcagcgg

SEQ ID NO: 2059429 - DNA, 25 bp, Homo sapien
ccccccagggcctcagcggcggcac

SEQ ID NO: 2059430 - DNA, 25 bp, Homo sapien
gcccgcgccccccagggcctcagcg

SEQ ID NO: 2059431 - DNA, 25 bp, Homo sapien
gcgccccccagggcctcagcggcgg

SEQ ID NO: 2059432 - DNA, 25 bp, Homo sapien
tctttcttatggcacaagctgaagg

SEQ ID NO: 2059433 - DNA, 25 bp, Homo sapien
gggtgcgggaagagcccgccgcagc

SEQ ID NO: 2059434 - DNA, 25 bp, Homo sapien
atcctctttcttatggcacaagctg

SEQ ID NO: 2059435 - DNA, 25 bp, Homo sapien
ccgcagcccgggaacttctgcagga

SEQ ID NO: 2059436 - DNA, 25 bp, Homo sapien
gcagccacagagaggctggcggctg

SEQ ID NO: 2059437 - DNA, 25 bp, Homo sapien
ctgcgcgggcctttggcccctgccc

SEQ ID NO: 2059438 - DNA, 25 bp, Homo sapien
cgcgccgcccgaagcagcagccaca

SEQ ID NO: 2059439 - DNA, 25 bp, Homo sapien
gcccacgccggccacacagccaccc

SEQ ID NO: 2059440 - DNA, 25 bp, Homo sapien
ccgcggcggccacggcggccgcctt

SEQ ID NO: 2059441 - DNA, 25 bp, Homo sapien
gcggccgcggcggccacggcggccg

SEQ ID NO: 2059442 - DNA, 25 bp, Homo sapien
gccgcggcggccacggcggccgcct

SEQ ID NO: 2059443 - DNA, 25 bp, Homo sapien
cggcggccacggcggccgccttcac

SEQ ID NO: 2059444 - DNA, 25 bp, Homo sapien
ggctggggcagtgcgcgcttgcggc

SEQ ID NO: 2059445 - DNA, 25 bp, Homo sapien
ctggggcagtgcgcgcttgcggctg

SEQ ID NO: 2059446 - DNA, 25 bp, Homo sapien
cggctggggcagtgcgcgcttgcgg

SEQ ID NO: 2059447 - DNA, 25 bp, Homo sapien
gcgcttgcggctgccgccgttgaac

SEQ ID NO: 2059448 - DNA, 25 bp, Homo sapien
caggcgaagaccagctcgtcctggg

SEQ ID NO: 2059449 - DNA, 25 bp, Homo sapien
agatgacggcgccacgagttgaagt

SEQ ID NO: 2059450 - DNA, 25 bp, Homo sapien
tcttgtcggtgagcttgagatgacg

SEQ ID NO: 2059451 - DNA, 25 bp, Homo sapien
tcgtcctggggactcttgtcggtga

SEQ ID NO: 2059452 - DNA, 25 bp, Homo sapien
cgtcgggcgtgcggtgggagtggaa

SEQ ID NO: 2059453 - DNA, 25 bp, Homo sapien
ttggcgtcgggcgtgcggtgggagt

SEQ ID NO: 2059454 - DNA, 25 bp, Homo sapien
tggcgtcgggcgtgcggtgggagtg

SEQ ID NO: 2059455 - DNA, 25 bp, Homo sapien
ggcgtcgggcgtgcggtgggagtgg

SEQ ID NO: 2059456 - DNA, 25 bp, Homo sapien
tgtagcgcgcgggaatgaagctgcc

SEQ ID NO: 2059457 - DNA, 25 bp, Homo sapien
tcgaaggcgaaattgtctggcagct

SEQ ID NO: 2059458 - DNA, 25 bp, Homo sapien
catttgatgcacttggcgcgcgagc

SEQ ID NO: 2059459 - DNA, 25 bp, Homo sapien
caggcgcactcgtgtgacacgtcga

SEQ ID NO: 2059460 - DNA, 25 bp, Homo sapien
ctcgcgtttggtgatcatgccgcag

SEQ ID NO: 2059461 - DNA, 25 bp, Homo sapien
atggccccggcacgccgcaggatct

SEQ ID NO: 2059462 - DNA, 25 bp, Homo sapien
cttgcacagacgctcggcctcgcgt

SEQ ID NO: 2059463 - DNA, 25 bp, Homo sapien
cggcacgccgcaggatctccagttg

SEQ ID NO: 2059464 - DNA, 25 bp, Homo sapien
tggatctcgttgtagctgaagttct

SEQ ID NO: 2059465 - DNA, 25 bp, Homo sapien
cgcgacggttgtggatctcgttgta

SEQ ID NO: 2059466 - DNA, 25 bp, Homo sapien
cacgcgacggttgtggatctcgttg

SEQ ID NO: 2059467 - DNA, 25 bp, Homo sapien
cgttgtagctgaagttcttgagcag

SEQ ID NO: 2059468 - DNA, 25 bp, Homo sapien
ggcacaggcgctcttgcccgtcgat

SEQ ID NO: 2059469 - DNA, 25 bp, Homo sapien
ccaacgacacgatgggaatgccgta

SEQ ID NO: 2059470 - DNA, 25 bp, Homo sapien
gatgggaatgccgtagaggatcacc

SEQ ID NO: 2059471 - DNA, 25 bp, Homo sapien
cgtcgatcaccaacgacacgatggg

SEQ ID NO: 2059472 - DNA, 25 bp, Homo sapien
cgccagcaggatgtcgttgggccct

SEQ ID NO: 2059473 - DNA, 25 bp, Homo sapien
ggctggaaggcgctcgacggcgacg

SEQ ID NO: 2059474 - DNA, 25 bp, Homo sapien
tggttgggtttgaggttggcgtgcc

SEQ ID NO: 2059475 - DNA, 25 bp, Homo sapien
gtcgttgggccctggcagcggactg

SEQ ID NO: 2059476 - DNA, 25 bp, Homo sapien
cgctcggaggcgaagcatccaagcg

SEQ ID NO: 2059477 - DNA, 25 bp, Homo sapien
gtcctcgtatccagcgggcgggact

SEQ ID NO: 2059478 - DNA, 25 bp, Homo sapien
taacctctgggtgtctttaggcgtg

SEQ ID NO: 2059479 - DNA, 25 bp, Homo sapien
tggctgccggcccatcttccgaggg

SEQ ID NO: 2059480 - DNA, 25 bp, Homo sapien
ctccgcgcgaagatccgggctctgg

SEQ ID NO: 2059481 - DNA, 25 bp, Homo sapien
gctctggcccgagcgaatggcgctc

SEQ ID NO: 2059482 - DNA, 25 bp, Homo sapien
gagcgaatggcgctcaaaccccggc

SEQ ID NO: 2059483 - DNA, 25 bp, Homo sapien
gatccgggctctggcccgagcgaat

SEQ ID NO: 2059484 - DNA, 25 bp, Homo sapien
cggcgttgaactccgcggtatagga

SEQ ID NO: 2059485 - DNA, 25 bp, Homo sapien
tgaactccgcggtataggaggccac

SEQ ID NO: 2059486 - DNA, 25 bp, Homo sapien
ttccgagccggcgttgaactccgcg

SEQ ID NO: 2059487 - DNA, 25 bp, Homo sapien
tgtccgcggtgctgacgagatgcat

SEQ ID NO: 2059488 - DNA, 25 bp, Homo sapien
tagggcttggataggacagacctcg

SEQ ID NO: 2059489 - DNA, 25 bp, Homo sapien
tccacgtagggtagtagatcgcata

SEQ ID NO: 2059490 - DNA, 25 bp, Homo sapien
tttcataatcgagggagacagcgca

SEQ ID NO: 2059491 - DNA, 25 bp, Homo sapien
aaagttcccgcatgtttgagcgtcc

SEQ ID NO: 2059492 - DNA, 25 bp, Homo sapien
tctgggggagatgttgccagggcag

SEQ ID NO: 2059493 - DNA, 25 bp, Homo sapien
ggggagatgttgccagggcagacat

SEQ ID NO: 2059494 - DNA, 25 bp, Homo sapien
cagggcagacatttcggaaaggtcc

SEQ ID NO: 2059495 - DNA, 25 bp, Homo sapien
tccctcgggcccgatgttaattaca

SEQ ID NO: 2059496 - DNA, 25 bp, Homo sapien
cctttttgctgccggtcctgattca

SEQ ID NO: 2059497 - DNA, 25 bp, Homo sapien
tccctttttgctgccggtcctgatt

SEQ ID NO: 2059498 - DNA, 25 bp, Homo sapien
catcaagaactgctgaaatcagaga

SEQ ID NO: 2059499 - DNA, 25 bp, Homo sapien
ctttttgctgccggtcctgattcat

SEQ ID NO: 2059500 - DNA, 25 bp, Homo sapien
cctctggtgggtcagtgaaagcagc

SEQ ID NO: 2059501 - DNA, 25 bp, Homo sapien
acctctggtgggtcagtgaaagcag

SEQ ID NO: 2059502 - DNA, 25 bp, Homo sapien
tcttgactggcttgtaaacaggttt

SEQ ID NO: 2059503 - DNA, 25 bp, Homo sapien
ggctattagtgtaaaaggacaggaa

SEQ ID NO: 2059504 - DNA, 25 bp, Homo sapien
ctctcgtgttttaagtgcatgcagt

SEQ ID NO: 2059505 - DNA, 25 bp, Homo sapien
taagcagggtattgatcctcacgtg

SEQ ID NO: 2059506 - DNA, 25 bp, Homo sapien
attgacagggcattaataaacgctc

SEQ ID NO: 2059507 - DNA, 25 bp, Homo sapien
gacagggcattaataaacgctctta

SEQ ID NO: 2059508 - DNA, 25 bp, Homo sapien
cattaataaacgctcttacagccat

SEQ ID NO: 2059509 - DNA, 25 bp, Homo sapien
gggcattaataaacgctcttacagc

SEQ ID NO: 2059510 - DNA, 25 bp, Homo sapien
gcaggtatgatgcagcttgtaaggc

SEQ ID NO: 2059511 - DNA, 25 bp, Homo sapien
ggtatgatgcagcttgtaaggcatg

SEQ ID NO: 2059512 - DNA, 25 bp, Homo sapien
caggtatgatgcagcttgtaaggca

SEQ ID NO: 2059513 - DNA, 25 bp, Homo sapien
atgatgcagcttgtaaggcatgcgg

SEQ ID NO: 2059514 - DNA, 25 bp, Homo sapien
tgggttttgcacggagtcctttggc

SEQ ID NO: 2059515 - DNA, 25 bp, Homo sapien
gttttgcacggagtcctttggcctc

SEQ ID NO: 2059516 - DNA, 25 bp, Homo sapien
cttgggttttgcacggagtcctttg

SEQ ID NO: 2059517 - DNA, 25 bp, Homo sapien
ctgcccagttcaaggaagaggcctc

SEQ ID NO: 2059518 - DNA, 25 bp, Homo sapien
tgcccagttcaaggaagaggcctcc

SEQ ID NO: 2059519 - DNA, 25 bp, Homo sapien
tccagcttctgagtctgctttgtgc

SEQ ID NO: 2059520 - DNA, 25 bp, Homo sapien
agcttctgagtctgctttgtgctgc

SEQ ID NO: 2059521 - DNA, 25 bp, Homo sapien
tccttccagcttctgagtctgcttt

SEQ ID NO: 2059522 - DNA, 25 bp, Homo sapien
tctgagtctgctttgtgctgctctt

SEQ ID NO: 2059523 - DNA, 25 bp, Homo sapien
cttccacaaatctccttcctgctca

SEQ ID NO: 2059524 - DNA, 25 bp, Homo sapien
tccttccacaaatctccttcctgct

SEQ ID NO: 2059525 - DNA, 25 bp, Homo sapien
ctgaatcctgcagacatccgaccat

SEQ ID NO: 2059526 - DNA, 25 bp, Homo sapien
gaatcctgcagacatccgaccatca

SEQ ID NO: 2059527 - DNA, 25 bp, Homo sapien
atcctgaatcctgcagacatccgac

SEQ ID NO: 2059528 - DNA, 25 bp, Homo sapien
tcatcctgaatcctgcagacatccg

SEQ ID NO: 2059529 - DNA, 25 bp, Homo sapien
ctgcaggtcccggacatcgcagctg

SEQ ID NO: 2059530 - DNA, 25 bp, Homo sapien
ggtcccggacatcgcagctgagctg

SEQ ID NO: 2059531 - DNA, 25 bp, Homo sapien
gataatggattttgtactcaatttc

SEQ ID NO: 2059532 - DNA, 25 bp, Homo sapien
ccagcggctgtgaatttgagaaact

SEQ ID NO: 2059533 - DNA, 25 bp, Homo sapien
agctgcttggcatattgctcttgta

SEQ ID NO: 2059534 - DNA, 25 bp, Homo sapien
tgtaccagtagtgccattgccaaat

SEQ ID NO: 2059535 - DNA, 25 bp, Homo sapien
caccagctgcttggcatattgctct

SEQ ID NO: 2059536 - DNA, 25 bp, Homo sapien
ttgctcttgtaccagtagtgccatt

SEQ ID NO: 2059537 - DNA, 25 bp, Homo sapien
caggaaggatggatttgtcagggaa

SEQ ID NO: 2059538 - DNA, 25 bp, Homo sapien
aaggatggatttgtcagggaagggt

SEQ ID NO: 2059539 - DNA, 25 bp, Homo sapien
ggaaggatggatttgtcagggaagg

SEQ ID NO: 2059540 - DNA, 25 bp, Homo sapien
agggaagggtggttgacaggctggg

SEQ ID NO: 2059541 - DNA, 25 bp, Homo sapien
tcatttgtgatgatctggccatgct

SEQ ID NO: 2059542 - DNA, 25 bp, Homo sapien
gtgtcctaattgcttctgacactct

SEQ ID NO: 2059543 - DNA, 25 bp, Homo sapien
gggctgctgtgctccgagtgtccta

SEQ ID NO: 2059544 - DNA, 25 bp, Homo sapien
tttgtgatgatctggccatgcttgg

SEQ ID NO: 2059545 - DNA, 25 bp, Homo sapien
cagctgctactcttatatattctca

SEQ ID NO: 2059546 - DNA, 25 bp, Homo sapien
ctcgctcctcggtgagctctgggtc

SEQ ID NO: 2059547 - DNA, 25 bp, Homo sapien
tctcatactgctccctcgctcctcg

SEQ ID NO: 2059548 - DNA, 25 bp, Homo sapien
ccgcagctgctactcttatatattc

SEQ ID NO: 2059549 - DNA, 25 bp, Homo sapien
tgccaagctactaacaccagtagtc

SEQ ID NO: 2059550 - DNA, 25 bp, Homo sapien
ccctgccaagctactaacaccagta

SEQ ID NO: 2059551 - DNA, 25 bp, Homo sapien
ccaagctactaacaccagtagtcac

SEQ ID NO: 2059552 - DNA, 25 bp, Homo sapien
ctgccaagctactaacaccagtagt

SEQ ID NO: 2059553 - DNA, 25 bp, Homo sapien
tatcttgaaatggtcgacacctgca

SEQ ID NO: 2059554 - DNA, 25 bp, Homo sapien
cgtggaggtttagtgtcacacagca

SEQ ID NO: 2059555 - DNA, 25 bp, Homo sapien
agcagacctcaatgtgtggtacaga

SEQ ID NO: 2059556 - DNA, 25 bp, Homo sapien
cactgagattgcaacaggtgaccac

SEQ ID NO: 2059557 - DNA, 25 bp, Homo sapien
aaggctttgcggagtcctcttcatc

SEQ ID NO: 2059558 - DNA, 25 bp, Homo sapien
ttaaggctttgcggagtcctcttca

SEQ ID NO: 2059559 - DNA, 25 bp, Homo sapien
ggctttgcggagtcctcttcatcca

SEQ ID NO: 2059560 - DNA, 25 bp, Homo sapien
taaggctttgcggagtcctcttcat

SEQ ID NO: 2059561 - DNA, 25 bp, Homo sapien
cagattggagggcatatagggccaa

SEQ ID NO: 2059562 - DNA, 25 bp, Homo sapien
tcctggtagcaccttcatcagattg

SEQ ID NO: 2059563 - DNA, 25 bp, Homo sapien
catatagggccaatgcgggtggcat

SEQ ID NO: 2059564 - DNA, 25 bp, Homo sapien
ccttcatcagattggagggcatata

SEQ ID NO: 2059565 - DNA, 25 bp, Homo sapien
catggccacagtgcaagttggagtg

SEQ ID NO: 2059566 - DNA, 25 bp, Homo sapien
tgtctgggttggagtcaagttctcc

SEQ ID NO: 2059567 - DNA, 25 bp, Homo sapien
ccatgactgggtgatggtttgctga

SEQ ID NO: 2059568 - DNA, 25 bp, Homo sapien
tttcccatctgagtgccatgactgg

SEQ ID NO: 2059569 - DNA, 25 bp, Homo sapien
tctcatcggaacatgacagggagcc

SEQ ID NO: 2059570 - DNA, 25 bp, Homo sapien
aagtggtcaatcgagcgggcctgac

SEQ ID NO: 2059571 - DNA, 25 bp, Homo sapien
taaatgccctaattgggaagtggtc

SEQ ID NO: 2059572 - DNA, 25 bp, Homo sapien
tgtcaataaacaagctcaaggtgag

SEQ ID NO: 2059573 - DNA, 25 bp, Homo sapien
cattgtaccattcaatctgtcggct

SEQ ID NO: 2059574 - DNA, 25 bp, Homo sapien
taccattcaatctgtcggctattcc

SEQ ID NO: 2059575 - DNA, 25 bp, Homo sapien
aaagcattgtaccattcaatctgtc

SEQ ID NO: 2059576 - DNA, 25 bp, Homo sapien
tgtaccattcaatctgtcggctatt

SEQ ID NO: 2059577 - DNA, 25 bp, Homo sapien
gcaacaaatgactttgatgaacctc

SEQ ID NO: 2059578 - DNA, 25 bp, Homo sapien
ctgcaacaaatgactttgatgaacc

SEQ ID NO: 2059579 - DNA, 25 bp, Homo sapien
caacaaatgactttgatgaacctca

SEQ ID NO: 2059580 - DNA, 25 bp, Homo sapien
tgcaacaaatgactttgatgaacct

SEQ ID NO: 2059581 - DNA, 25 bp, Homo sapien
cattctccattcagcagctgcaaag

SEQ ID NO: 2059582 - DNA, 25 bp, Homo sapien
tcattctccattcagcagctgcaaa

SEQ ID NO: 2059583 - DNA, 25 bp, Homo sapien
tagctggcggtctctaccactgtgc

SEQ ID NO: 2059584 - DNA, 25 bp, Homo sapien
ctaccactgtgcttgctaggtatca

SEQ ID NO: 2059585 - DNA, 25 bp, Homo sapien
tgcttgctaggtatcagttccactg

SEQ ID NO: 2059586 - DNA, 25 bp, Homo sapien
cagttccactgcgtttagcttcctc

SEQ ID NO: 2059587 - DNA, 25 bp, Homo sapien
gcttggatgacacttgaagggtaca

SEQ ID NO: 2059588 - DNA, 25 bp, Homo sapien
tcatttgcggaacttggtggatgtg

SEQ ID NO: 2059589 - DNA, 25 bp, Homo sapien
ggatgacacttgaagggtacaacca

SEQ ID NO: 2059590 - DNA, 25 bp, Homo sapien
gtgttgctggaacgttcactctgca

SEQ ID NO: 2059591 - DNA, 25 bp, Homo sapien
accgatagggttacttgtggctgca

SEQ ID NO: 2059592 - DNA, 25 bp, Homo sapien
tggccttctgaggagccaccgatag

SEQ ID NO: 2059593 - DNA, 25 bp, Homo sapien
aggtactcggtctgccccaggtcct

SEQ ID NO: 2059594 - DNA, 25 bp, Homo sapien
gctgcaggagaccattcctaggtac

SEQ ID NO: 2059595 - DNA, 25 bp, Homo sapien
ctgagcgcatgcccctgctcccaca

SEQ ID NO: 2059596 - DNA, 25 bp, Homo sapien
gcgcatgcccctgctcccacagtca

SEQ ID NO: 2059597 - DNA, 25 bp, Homo sapien
gcatgcccctgctcccacagtcagc

SEQ ID NO: 2059598 - DNA, 25 bp, Homo sapien
atgcccctgctcccacagtcagcat

SEQ ID NO: 2059599 - DNA, 25 bp, Homo sapien
ccctgctgagccagatggggttggg

SEQ ID NO: 2059600 - DNA, 25 bp, Homo sapien
ctgctgagccagatggggttgggcc

SEQ ID NO: 2059601 - DNA, 25 bp, Homo sapien
agccagatggggttgggcccatatt

SEQ ID NO: 2059602 - DNA, 25 bp, Homo sapien
gctgagccagatggggttgggccca

SEQ ID NO: 2059603 - DNA, 25 bp, Homo sapien
ttcagggtatagtctgcgtctgatc

SEQ ID NO: 2059604 - DNA, 25 bp, Homo sapien
ggtatagtctgcgtctgatccgttg

SEQ ID NO: 2059605 - DNA, 25 bp, Homo sapien
tagtctgcgtctgatccgttgtggc

SEQ ID NO: 2059606 - DNA, 25 bp, Homo sapien
gtctgcgtctgatccgttgtggcat

SEQ ID NO: 2059607 - DNA, 25 bp, Homo sapien
gagttgttggtgctgcgaaggccac

SEQ ID NO: 2059608 - DNA, 25 bp, Homo sapien
ccttccctacatcgataaacagtgg

SEQ ID NO: 2059609 - DNA, 25 bp, Homo sapien
gaaggcctccttccctacatcgata

SEQ ID NO: 2059610 - DNA, 25 bp, Homo sapien
catcgataaacagtggagttgttgg

SEQ ID NO: 2059611 - DNA, 25 bp, Homo sapien
cagctttgcctttggagggtggtca

SEQ ID NO: 2059612 - DNA, 25 bp, Homo sapien
ggtcaggggacaaagatttggatcc

SEQ ID NO: 2059613 - DNA, 25 bp, Homo sapien
caggggacaaagatttggatcccat

SEQ ID NO: 2059614 - DNA, 25 bp, Homo sapien
agccctcagtgtaggcagctttgcc

SEQ ID NO: 2059615 - DNA, 25 bp, Homo sapien
ctgcctggcatgggagctgctcctg

SEQ ID NO: 2059616 - DNA, 25 bp, Homo sapien
ggcatgggagctgctcctgggctga

SEQ ID NO: 2059617 - DNA, 25 bp, Homo sapien
gcatgggagctgctcctgggctgac

SEQ ID NO: 2059618 - DNA, 25 bp, Homo sapien
cctggcatgggagctgctcctgggc

SEQ ID NO: 2059619 - DNA, 25 bp, Homo sapien
gcaaggggtgccctcatcaacaggc

SEQ ID NO: 2059620 - DNA, 25 bp, Homo sapien
caaggggtgccctcatcaacaggca

SEQ ID NO: 2059621 - DNA, 25 bp, Homo sapien
ggcaaggggtgccctcatcaacagg

SEQ ID NO: 2059622 - DNA, 25 bp, Homo sapien
ggccctggctgtccacttgacagtg

SEQ ID NO: 2059623 - DNA, 25 bp, Homo sapien
aaggccctggctgtccacttgacag

SEQ ID NO: 2059624 - DNA, 25 bp, Homo sapien
tgtccacttgacagtggtcacacac

SEQ ID NO: 2059625 - DNA, 25 bp, Homo sapien
ctggctgtccacttgacagtggtca

SEQ ID NO: 2059626 - DNA, 25 bp, Homo sapien
cagtcagaagctccctgcggacagg

SEQ ID NO: 2059627 - DNA, 25 bp, Homo sapien
cgctttgcgtcattgcacggttcct

SEQ ID NO: 2059628 - DNA, 25 bp, Homo sapien
ggagagtctcctatgctcagtcaga

SEQ ID NO: 2059629 - DNA, 25 bp, Homo sapien
tcctctggtgtgtaggagagtctcc

SEQ ID NO: 2059630 - DNA, 25 bp, Homo sapien
tacaagaacctggtgtgcaaggacc

SEQ ID NO: 2059631 - DNA, 25 bp, Homo sapien
gctccacttgggaggaaagatacaa

SEQ ID NO: 2059632 - DNA, 25 bp, Homo sapien
gttttccagctgagccgccatccag

SEQ ID NO: 2059633 - DNA, 25 bp, Homo sapien
gcaaagttgacggtatccaatggcc

SEQ ID NO: 2059634 - DNA, 25 bp, Homo sapien
aggaaacgggtatggcataaaggag

SEQ ID NO: 2059635 - DNA, 25 bp, Homo sapien
gaggtaagaggcacaagcagctctg

SEQ ID NO: 2059636 - DNA, 25 bp, Homo sapien
tattggcagagtgatatacattgtc

SEQ ID NO: 2059637 - DNA, 25 bp, Homo sapien
aaacacagtggccaatccatcaaaa

SEQ ID NO: 2059638 - DNA, 25 bp, Homo sapien
ccaatccatcaaaaatcaggctgca

SEQ ID NO: 2059639 - DNA, 25 bp, Homo sapien
cattgtcgaataaaacacagtggcc

SEQ ID NO: 2059640 - DNA, 25 bp, Homo sapien
ctgctttatcacttagcgcaggctc

SEQ ID NO: 2059641 - DNA, 25 bp, Homo sapien
cccaaatggaggcaagtctttacca

SEQ ID NO: 2059642 - DNA, 25 bp, Homo sapien
ccaaatggaggcaagtctttaccat

SEQ ID NO: 2059643 - DNA, 25 bp, Homo sapien
ctttatcacttagcgcaggctctgc

SEQ ID NO: 2059644 - DNA, 25 bp, Homo sapien
atttttatcattttgccacgctcca

SEQ ID NO: 2059645 - DNA, 25 bp, Homo sapien
tatcattttgccacgctccattgac

SEQ ID NO: 2059646 - DNA, 25 bp, Homo sapien
ttttgccacgctccattgaccgatg

SEQ ID NO: 2059647 - DNA, 25 bp, Homo sapien
cacgctccattgaccgatggatttt

SEQ ID NO: 2059648 - DNA, 25 bp, Homo sapien
tgatggcatttagatatgaaccgcc

SEQ ID NO: 2059649 - DNA, 25 bp, Homo sapien
aatattgtcgtttacattctgtgcc

SEQ ID NO: 2059650 - DNA, 25 bp, Homo sapien
catcaacgaaaaggaaattcaggaa

SEQ ID NO: 2059651 - DNA, 25 bp, Homo sapien
tatgaaccttcaagcccaattgtgc

SEQ ID NO: 2059652 - DNA, 25 bp, Homo sapien
cggaggtcgggggaaatcctggctg

SEQ ID NO: 2059653 - DNA, 25 bp, Homo sapien
ctgcgccaacactcgggctgcggag

SEQ ID NO: 2059654 - DNA, 25 bp, Homo sapien
gagcttgttgctctctgcgccaaca

SEQ ID NO: 2059655 - DNA, 25 bp, Homo sapien
ctcccccgtaagcctgggagcttgt

SEQ ID NO: 2059656 - DNA, 25 bp, Homo sapien
aaagattggctggttgtagatgtgt

SEQ ID NO: 2059657 - DNA, 25 bp, Homo sapien
ggtttgtcaaagattggctggttgt

SEQ ID NO: 2059658 - DNA, 25 bp, Homo sapien
tgtcaaagattggctggttgtagat

SEQ ID NO: 2059659 - DNA, 25 bp, Homo sapien
caaagattggctggttgtagatgtg

SEQ ID NO: 2059660 - DNA, 25 bp, Homo sapien
cctttttattacctgacaattacat

SEQ ID NO: 2059661 - DNA, 25 bp, Homo sapien
tttattacctgacaattacatatta

SEQ ID NO: 2059662 - DNA, 25 bp, Homo sapien
ttacctgacaattacatattaagaa

SEQ ID NO: 2059663 - DNA, 25 bp, Homo sapien
acctgacaattacatattaagaatt

SEQ ID NO: 2059664 - DNA, 25 bp, Homo sapien
aagccagcccacaaagcttcccaca

SEQ ID NO: 2059665 - DNA, 25 bp, Homo sapien
agctctggagaaagccagcccacaa

SEQ ID NO: 2059666 - DNA, 25 bp, Homo sapien
tggagaaagccagcccacaaagctt

SEQ ID NO: 2059667 - DNA, 25 bp, Homo sapien
gcagctctggagaaagccagcccac

SEQ ID NO: 2059668 - DNA, 25 bp, Homo sapien
cataataatttctttgacctccacc

SEQ ID NO: 2059669 - DNA, 25 bp, Homo sapien
atttctttgacctccaccacatgag

SEQ ID NO: 2059670 - DNA, 25 bp, Homo sapien
tctttgacctccaccacatgagttt

SEQ ID NO: 2059671 - DNA, 25 bp, Homo sapien
taatttctttgacctccaccacatg

SEQ ID NO: 2059672 - DNA, 25 bp, Homo sapien
acagatgcagaagcaattttaggcc

SEQ ID NO: 2059673 - DNA, 25 bp, Homo sapien
caggtttgcattaaagcactgatca

SEQ ID NO: 2059674 - DNA, 25 bp, Homo sapien
tatccactttagagcggcagaggct

SEQ ID NO: 2059675 - DNA, 25 bp, Homo sapien
cccattctggccgtgattaaaattc

SEQ ID NO: 2059676 - DNA, 25 bp, Homo sapien
agccagcctttccaagcgctcccca

SEQ ID NO: 2059677 - DNA, 25 bp, Homo sapien
cctcaaggaaggtccttgctggctc

SEQ ID NO: 2059678 - DNA, 25 bp, Homo sapien
aagcgctccccattcatcagtctct

SEQ ID NO: 2059679 - DNA, 25 bp, Homo sapien
ccaagaccctcaaggaaggtccttg

SEQ ID NO: 2059680 - DNA, 25 bp, Homo sapien
tgctgtctggccagacttgtcacac

SEQ ID NO: 2059681 - DNA, 25 bp, Homo sapien
cccttgcccaatgagtggcctcgaa

SEQ ID NO: 2059682 - DNA, 25 bp, Homo sapien
tctggccagacttgtcacacatcat

SEQ ID NO: 2059683 - DNA, 25 bp, Homo sapien
tgctgttatttatgagtcccccttg

SEQ ID NO: 2059684 - DNA, 25 bp, Homo sapien
tggctgacgcacagaagaagccgtt

SEQ ID NO: 2059685 - DNA, 25 bp, Homo sapien
gactttccgtgcaataaagcagcag

SEQ ID NO: 2059686 - DNA, 25 bp, Homo sapien
cagagtaattaagtggctgacgcac

SEQ ID NO: 2059687 - DNA, 25 bp, Homo sapien
tacaaagaattgactaaattgccca

SEQ ID NO: 2059688 - DNA, 25 bp, Homo sapien
cagcagcatggaaggattagcccat

SEQ ID NO: 2059689 - DNA, 25 bp, Homo sapien
catggaaggattagcccattccaca

SEQ ID NO: 2059690 - DNA, 25 bp, Homo sapien
caccaaagtggccttttgtcagcag

SEQ ID NO: 2059691 - DNA, 25 bp, Homo sapien
tagtgctcctcacacatttcaccaa

SEQ ID NO: 2059692 - DNA, 25 bp, Homo sapien
tccatgaacagagctgagcttcgaa

SEQ ID NO: 2059693 - DNA, 25 bp, Homo sapien
tgtaacagctgggagcaatctcaac

SEQ ID NO: 2059694 - DNA, 25 bp, Homo sapien
tagtaagatcctagtctgccaatgt

SEQ ID NO: 2059695 - DNA, 25 bp, Homo sapien
ctcatgggtgatcgtgaaagctcca

SEQ ID NO: 2059696 - DNA, 25 bp, Homo sapien
tgccctgttggcacaagtgtcaggg

SEQ ID NO: 2059697 - DNA, 25 bp, Homo sapien
ttctgccctgttggcacaagtgtca

SEQ ID NO: 2059698 - DNA, 25 bp, Homo sapien
gcacaagtgtcagggggacaccaaa

SEQ ID NO: 2059699 - DNA, 25 bp, Homo sapien
cagccttctgccctgttggcacaag

SEQ ID NO: 2059700 - DNA, 25 bp, Homo sapien
gtgtcaggctgccaattaaggcatg

SEQ ID NO: 2059701 - DNA, 25 bp, Homo sapien
tctcctattgcacaaacttcccgag

SEQ ID NO: 2059702 - DNA, 25 bp, Homo sapien
tgccaattaaggcatggctctccta

SEQ ID NO: 2059703 - DNA, 25 bp, Homo sapien
attaaggcatggctctcctattgca

SEQ ID NO: 2059704 - DNA, 25 bp, Homo sapien
gggacatccatatataaatcagcat

SEQ ID NO: 2059705 - DNA, 25 bp, Homo sapien
ccatatataaatcagcattggccat

SEQ ID NO: 2059706 - DNA, 25 bp, Homo sapien
ccctatcagggacatccatatataa

SEQ ID NO: 2059707 - DNA, 25 bp, Homo sapien
catccatatataaatcagcattggc

SEQ ID NO: 2059708 - DNA, 25 bp, Homo sapien
caggtgatcgcaaatgctatgcgga

SEQ ID NO: 2059709 - DNA, 25 bp, Homo sapien
gaagaaccaatcaccgaaattcctg

SEQ ID NO: 2059710 - DNA, 25 bp, Homo sapien
caagacaagtgggtgaacggcaaca

SEQ ID NO: 2059711 - DNA, 25 bp, Homo sapien
tagttgccattaatccaggtgatcg

SEQ ID NO: 2059712 - DNA, 25 bp, Homo sapien
tcacttactgatccgagaagggaga

SEQ ID NO: 2059713 - DNA, 25 bp, Homo sapien
tgacacagtaacaaacgcagggtac

SEQ ID NO: 2059714 - DNA, 25 bp, Homo sapien
gatgtcaccctgtaaattgagtcag

SEQ ID NO: 2059715 - DNA, 25 bp, Homo sapien
ccttcgcctcggtgcttggctggca

SEQ ID NO: 2059716 - DNA, 25 bp, Homo sapien
tgaagtcatcgaagatgtgctgagg

SEQ ID NO: 2059717 - DNA, 25 bp, Homo sapien
tttgaagtcatcgaagatgtgctga

SEQ ID NO: 2059718 - DNA, 25 bp, Homo sapien
aagatgtgctgaggaaatgggaact

SEQ ID NO: 2059719 - DNA, 25 bp, Homo sapien
tcatttgaagtcatcgaagatgtgc

SEQ ID NO: 2059720 - DNA, 25 bp, Homo sapien
tgagactgaactcatggcctctccc

SEQ ID NO: 2059721 - DNA, 25 bp, Homo sapien
ctgagactgaactcatggcctctcc

SEQ ID NO: 2059722 - DNA, 25 bp, Homo sapien
ctgaactcatggcctctcccataag

SEQ ID NO: 2059723 - DNA, 25 bp, Homo sapien
aactcatggcctctcccataagcat

SEQ ID NO: 2059724 - DNA, 25 bp, Homo sapien
tttttaatctaatgaactctcgtag

SEQ ID NO: 2059725 - DNA, 25 bp, Homo sapien
ttaatctaatgaactctcgtagcct

SEQ ID NO: 2059726 - DNA, 25 bp, Homo sapien
ggtgctcaaagtagcttatagattt

SEQ ID NO: 2059727 - DNA, 25 bp, Homo sapien
ctccaaggtgctcaaagtagcttat

SEQ ID NO: 2059728 - DNA, 25 bp, Homo sapien
tctcttgttatcataatttcaccca

SEQ ID NO: 2059729 - DNA, 25 bp, Homo sapien
tttgcataatgaaagcatggtggca

SEQ ID NO: 2059730 - DNA, 25 bp, Homo sapien
catggtggcagtaatagcttttttc

SEQ ID NO: 2059731 - DNA, 25 bp, Homo sapien
aaggggctcccgcactgtcagatgt

SEQ ID NO: 2059732 - DNA, 25 bp, Homo sapien
gccccatccatgaaagcaagaaact

SEQ ID NO: 2059733 - DNA, 25 bp, Homo sapien
cactcccgaaggcctgtagccccat

SEQ ID NO: 2059734 - DNA, 25 bp, Homo sapien
tagccccatccatgaaagcaagaaa

SEQ ID NO: 2059735 - DNA, 25 bp, Homo sapien
cccatccatgaaagcaagaaactgg

SEQ ID NO: 2059736 - DNA, 25 bp, Homo sapien
ttgcctctgatgtctttagcgaagc

SEQ ID NO: 2059737 - DNA, 25 bp, Homo sapien
ccgtcagtgtactttggaagaggtg

SEQ ID NO: 2059738 - DNA, 25 bp, Homo sapien
gtatgaacactcaacaaaccgtcag

SEQ ID NO: 2059739 - DNA, 25 bp, Homo sapien
taaaccaggaaggtggtatgaacac

SEQ ID NO: 2059740 - DNA, 25 bp, Homo sapien
ccaagaggcctaacagtttgaattt

SEQ ID NO: 2059741 - DNA, 25 bp, Homo sapien
taatttggttggattaactgtctag

SEQ ID NO: 2059742 - DNA, 25 bp, Homo sapien
gttggctcttccaagaggcctaaca

SEQ ID NO: 2059743 - DNA, 25 bp, Homo sapien
ggattaactgtctagtttgctgggc

SEQ ID NO: 2059744 - DNA, 25 bp, Homo sapien
ttctctttgacaatacggccacagg

SEQ ID NO: 2059745 - DNA, 25 bp, Homo sapien
ttgacaatacggccacaggcacaga

SEQ ID NO: 2059746 - DNA, 25 bp, Homo sapien
tgacaatacggccacaggcacagac

SEQ ID NO: 2059747 - DNA, 25 bp, Homo sapien
tctttgacaatacggccacaggcac

SEQ ID NO: 2059748 - DNA, 25 bp, Homo sapien
cacgtcttttagaggacattaattt

SEQ ID NO: 2059749 - DNA, 25 bp, Homo sapien
ccactaattcttattgtatggatcc

SEQ ID NO: 2059750 - DNA, 25 bp, Homo sapien
gctttcacgtcttttagaggacatt

SEQ ID NO: 2059751 - DNA, 25 bp, Homo sapien
acccagccactaattcttattgtat

SEQ ID NO: 2059752 - DNA, 25 bp, Homo sapien
tggatgaatcaatacctggaacagg

SEQ ID NO: 2059753 - DNA, 25 bp, Homo sapien
tgaatcaatacctggaacaggctgg

SEQ ID NO: 2059754 - DNA, 25 bp, Homo sapien
aatgctggatgaatcaatacctgga

SEQ ID NO: 2059755 - DNA, 25 bp, Homo sapien
tgctggatgaatcaatacctggaac

SEQ ID NO: 2059756 - DNA, 25 bp, Homo sapien
tggtcctggcgtcctgaaagcccat

SEQ ID NO: 2059757 - DNA, 25 bp, Homo sapien
ctggtcctggcgtcctgaaagccca

SEQ ID NO: 2059758 - DNA, 25 bp, Homo sapien
actatagcctaggactcagcctcct

SEQ ID NO: 2059759 - DNA, 25 bp, Homo sapien
gggactataagcacctgcaaccaag

SEQ ID NO: 2059760 - DNA, 25 bp, Homo sapien
tccatttctgaggtagtcccccact

SEQ ID NO: 2059761 - DNA, 25 bp, Homo sapien
cataatgcactatagcctaggactc

SEQ ID NO: 2059762 - DNA, 25 bp, Homo sapien
tgatgacgatcacgtccttgtcctt

SEQ ID NO: 2059763 - DNA, 25 bp, Homo sapien
ttaggggtgtgctgatgacgatcac

SEQ ID NO: 2059764 - DNA, 25 bp, Homo sapien
ttgtccttcaagagctcccaactga

SEQ ID NO: 2059765 - DNA, 25 bp, Homo sapien
tgtgctgatgacgatcacgtccttg

SEQ ID NO: 2059766 - DNA, 25 bp, Homo sapien
tgccaagaccatcctcggtgatttt

SEQ ID NO: 2059767 - DNA, 25 bp, Homo sapien
gttgccaagaccatcctcggtgatt

SEQ ID NO: 2059768 - DNA, 25 bp, Homo sapien
gaccatcctcggtgatttttgtttg

SEQ ID NO: 2059769 - DNA, 25 bp, Homo sapien
caagaccatcctcggtgatttttgt

SEQ ID NO: 2059770 - DNA, 25 bp, Homo sapien
tacagcggacctagtgaaaaaccaa

SEQ ID NO: 2059771 - DNA, 25 bp, Homo sapien
ccgttacggaaagaggcagtccctg

SEQ ID NO: 2059772 - DNA, 25 bp, Homo sapien
caaagggatggagacgttctgtgcc

SEQ ID NO: 2059773 - DNA, 25 bp, Homo sapien
aaaaccaatggtgcctaaggcggtg

SEQ ID NO: 2059774 - DNA, 25 bp, Homo sapien
tggaggtgataacctgaacttggct

SEQ ID NO: 2059775 - DNA, 25 bp, Homo sapien
gataggcctaattatgatgaatgct

SEQ ID NO: 2059776 - DNA, 25 bp, Homo sapien
tatatcagggcatcaagagaaggat

SEQ ID NO: 2059777 - DNA, 25 bp, Homo sapien
gatgaatgctctcttaccagtataa

SEQ ID NO: 2059778 - DNA, 25 bp, Homo sapien
gaagttggcaataggtcagaatgaa

SEQ ID NO: 2059779 - DNA, 25 bp, Homo sapien
gacattgagcttacatatatacttg

SEQ ID NO: 2059780 - DNA, 25 bp, Homo sapien
gaaagtttaagcatgtcactgaagg

SEQ ID NO: 2059781 - DNA, 25 bp, Homo sapien
ttttatcctaaagcaggatgaccag

SEQ ID NO: 2059782 - DNA, 25 bp, Homo sapien
gaccttcttcaaaggtcttctccat

SEQ ID NO: 2059783 - DNA, 25 bp, Homo sapien
gttccaagatctcattttgaccttc

SEQ ID NO: 2059784 - DNA, 25 bp, Homo sapien
gatctcattttgaccttcttcaaag

SEQ ID NO: 2059785 - DNA, 25 bp, Homo sapien
gagttctgttccaagatctcatttt

SEQ ID NO: 2059786 - DNA, 25 bp, Homo sapien
tctcatgtagcttcctaagtatgct

SEQ ID NO: 2059787 - DNA, 25 bp, Homo sapien
tctgttatctgctaagtctgattca

SEQ ID NO: 2059788 - DNA, 25 bp, Homo sapien
tagtctattgttcatttatcactga

SEQ ID NO: 2059789 - DNA, 25 bp, Homo sapien
tcatgcagtttggacgggagcacag

SEQ ID NO: 2059790 - DNA, 25 bp, Homo sapien
tgtagaaggatctcgagtcagccct

SEQ ID NO: 2059791 - DNA, 25 bp, Homo sapien
tgataaaactacaccagtcccaagg

SEQ ID NO: 2059792 - DNA, 25 bp, Homo sapien
tacttcaagctaagcagtgacaggc

SEQ ID NO: 2059793 - DNA, 25 bp, Homo sapien
gggagacagcccaaacatagacctt

SEQ ID NO: 2059794 - DNA, 25 bp, Homo sapien
tataatttagggagtgaacaccaaa

SEQ ID NO: 2059795 - DNA, 25 bp, Homo sapien
aaaaattagtcccatagtaacatgg

SEQ ID NO: 2059796 - DNA, 25 bp, Homo sapien
aaattagtcccatagtaacatggta

SEQ ID NO: 2059797 - DNA, 25 bp, Homo sapien
caccaaaatgtaatcccatataaaa

SEQ ID NO: 2059798 - DNA, 25 bp, Homo sapien
ggaaccacatcgtacttttgacaat

SEQ ID NO: 2059799 - DNA, 25 bp, Homo sapien
gaaatcacaggacatgtaagcaatg

SEQ ID NO: 2059800 - DNA, 25 bp, Homo sapien
tccacctttcaacggtgacagggct

SEQ ID NO: 2059801 - DNA, 25 bp, Homo sapien
taacacaggtaagagcaaacaaggt

SEQ ID NO: 2059802 - DNA, 25 bp, Homo sapien
ttaatatctccatcacagtgcacca

SEQ ID NO: 2059803 - DNA, 25 bp, Homo sapien
aatctcacctcacgtgctcaatgtt

SEQ ID NO: 2059804 - DNA, 25 bp, Homo sapien
aacagggtctgcatccatcatattg

SEQ ID NO: 2059805 - DNA, 25 bp, Homo sapien
gctcaatgttctagctggtaagcac

SEQ ID NO: 2059806 - DNA, 25 bp, Homo sapien
ctggcttctcgagcagaacagactg

SEQ ID NO: 2059807 - DNA, 25 bp, Homo sapien
gggaaatgcagtagacgccagagca

SEQ ID NO: 2059808 - DNA, 25 bp, Homo sapien
cgccagagcatcaaaggccatgtat

SEQ ID NO: 2059809 - DNA, 25 bp, Homo sapien
tgaggctacaattgagagaaactgc

SEQ ID NO: 2059810 - DNA, 25 bp, Homo sapien
gaacacctaaggtggtcagctcctt

SEQ ID NO: 2059811 - DNA, 25 bp, Homo sapien
taaatgactggatggcacatatccc

SEQ ID NO: 2059812 - DNA, 25 bp, Homo sapien
tctcaatggagaatcgcttttgggc

SEQ ID NO: 2059813 - DNA, 25 bp, Homo sapien
tagtgcagctgagtttagaagcaac

SEQ ID NO: 2059814 - DNA, 25 bp, Homo sapien
tattaaaacaaaggctgccagctgg

SEQ ID NO: 2059815 - DNA, 25 bp, Homo sapien
tatttcccagggtaacttaagcagc

SEQ ID NO: 2059816 - DNA, 25 bp, Homo sapien
tatactccagcgagatcacctgtgg

SEQ ID NO: 2059817 - DNA, 25 bp, Homo sapien
taagttagtacatcccagaatctgc

SEQ ID NO: 2059818 - DNA, 25 bp, Homo sapien
tatcgtaaatgctatcatgaggcta

SEQ ID NO: 2059819 - DNA, 25 bp, Homo sapien
tggtatcgtagggaaaacattggct

SEQ ID NO: 2059820 - DNA, 25 bp, Homo sapien
tctggagaccacacactatcattat

SEQ ID NO: 2059821 - DNA, 25 bp, Homo sapien
tagcaggattctgactacctctgga

SEQ ID NO: 2059822 - DNA, 25 bp, Homo sapien
gaggataaccagcaagtaccacctg

SEQ ID NO: 2059823 - DNA, 25 bp, Homo sapien
tatgtctaagtatcaatgccttcga

SEQ ID NO: 2059824 - DNA, 25 bp, Homo sapien
gaaggcgcaaattggaatgttcagc

SEQ ID NO: 2059825 - DNA, 25 bp, Homo sapien
gacgaagagggtatctaacactgaa

SEQ ID NO: 2059826 - DNA, 25 bp, Homo sapien
caatcagcggtattccagaaggtag

SEQ ID NO: 2059827 - DNA, 25 bp, Homo sapien
gagatgcgctccactactgaaacag

SEQ ID NO: 2059828 - DNA, 25 bp, Homo sapien
gaaagcatggccattcggttctcag

SEQ ID NO: 2059829 - DNA, 25 bp, Homo sapien
taagtcagtgagaactccaacagcc

SEQ ID NO: 2059830 - DNA, 25 bp, Homo sapien
cctagatcaagaagcagcgcacaca

SEQ ID NO: 2059831 - DNA, 25 bp, Homo sapien
gaataacagattaggtactgcaact

SEQ ID NO: 2059832 - DNA, 25 bp, Homo sapien
cctttgggacactcagttttatgcc

SEQ ID NO: 2059833 - DNA, 25 bp, Homo sapien
cacaatactgtgatactggatcatg

SEQ ID NO: 2059834 - DNA, 25 bp, Homo sapien
atttctagacactaattttcccatc

SEQ ID NO: 2059835 - DNA, 25 bp, Homo sapien
tttcccatctaatattcaaatatag

SEQ ID NO: 2059836 - DNA, 25 bp, Homo sapien
gtatttctagacactaattttccca

SEQ ID NO: 2059837 - DNA, 25 bp, Homo sapien
ctaatattcaaatataggaaacaga

SEQ ID NO: 2059838 - DNA, 25 bp, Homo sapien
tgaacttttggatagtaaacagtcc

SEQ ID NO: 2059839 - DNA, 25 bp, Homo sapien
tgatgagacctcaagtgctgttttc

SEQ ID NO: 2059840 - DNA, 25 bp, Homo sapien
agtccatagggaccacacacaatgc

SEQ ID NO: 2059841 - DNA, 25 bp, Homo sapien
cacaaggtgctttaattgatgagac

SEQ ID NO: 2059842 - DNA, 25 bp, Homo sapien
catgcttgagcaacgcactgaaggg

SEQ ID NO: 2059843 - DNA, 25 bp, Homo sapien
gatgaagttcaatccagcaaggagt

SEQ ID NO: 2059844 - DNA, 25 bp, Homo sapien
gagttaatactttgtccaaccactg

SEQ ID NO: 2059845 - DNA, 25 bp, Homo sapien
caaggagtacttgttaccgtctgcc

SEQ ID NO: 2059846 - DNA, 25 bp, Homo sapien
ccacaggcagggaaaatggctatgt

SEQ ID NO: 2059847 - DNA, 25 bp, Homo sapien
gggaaaatggctatgtttaggtaca

SEQ ID NO: 2059848 - DNA, 25 bp, Homo sapien
caggcagggaaaatggctatgttta

SEQ ID NO: 2059849 - DNA, 25 bp, Homo sapien
ttatgaaattcaagtccacaggcag

SEQ ID NO: 2059850 - DNA, 25 bp, Homo sapien
tattcaccatcatccaaaatggaac

SEQ ID NO: 2059851 - DNA, 25 bp, Homo sapien
attcaccatcatccaaaatggaaca

SEQ ID NO: 2059852 - DNA, 25 bp, Homo sapien
ttattcaccatcatccaaaatggaa

SEQ ID NO: 2059853 - DNA, 25 bp, Homo sapien
ttcaccatcatccaaaatggaacac

SEQ ID NO: 2059854 - DNA, 25 bp, Homo sapien
taaatgtattcaacaagtagacctc

SEQ ID NO: 2059855 - DNA, 25 bp, Homo sapien
cggcattcagcattcttaacaggta

SEQ ID NO: 2059856 - DNA, 25 bp, Homo sapien
gaagggcagtatctttaccaagtaa

SEQ ID NO: 2059857 - DNA, 25 bp, Homo sapien
tgctatcaactcaggtcaagtctaa

SEQ ID NO: 2059858 - DNA, 25 bp, Homo sapien
gaatgcaatgaaacataattacact

SEQ ID NO: 2059859 - DNA, 25 bp, Homo sapien
tacaaatgaactccagaatatgcaa

SEQ ID NO: 2059860 - DNA, 25 bp, Homo sapien
gctgactctataacctcattgaaaa

SEQ ID NO: 2059861 - DNA, 25 bp, Homo sapien
tacactgtggaaatttaagaaccaa

SEQ ID NO: 2059862 - DNA, 25 bp, Homo sapien
aactcattcttatggtgcacattct

SEQ ID NO: 2059863 - DNA, 25 bp, Homo sapien
aaaccctgattaacagactgagcca

SEQ ID NO: 2059864 - DNA, 25 bp, Homo sapien
ctagttagctgatagacggcttcaa

SEQ ID NO: 2059865 - DNA, 25 bp, Homo sapien
ttcaaaaccctgattaacagactga

SEQ ID NO: 2059866 - DNA, 25 bp, Homo sapien
gcaagttgacatgataggtttatgt

SEQ ID NO: 2059867 - DNA, 25 bp, Homo sapien
gacatgataggtttatgtacattat

SEQ ID NO: 2059868 - DNA, 25 bp, Homo sapien
caagttgacatgataggtttatgta

SEQ ID NO: 2059869 - DNA, 25 bp, Homo sapien
gttgacatgataggtttatgtacat

SEQ ID NO: 2059870 - DNA, 25 bp, Homo sapien
cacctatgtagtataagcgcactcc

SEQ ID NO: 2059871 - DNA, 25 bp, Homo sapien
caaagattgcactatcacttaggca

SEQ ID NO: 2059872 - DNA, 25 bp, Homo sapien
cagcaaaaacttccccacctatgta

SEQ ID NO: 2059873 - DNA, 25 bp, Homo sapien
ttacacactgttgcagggtgccagc

SEQ ID NO: 2059874 - DNA, 25 bp, Homo sapien
ttaaaatacatgtgtactgactgaa

SEQ ID NO: 2059875 - DNA, 25 bp, Homo sapien
ttctgaagtctaactttaaatatac

SEQ ID NO: 2059876 - DNA, 25 bp, Homo sapien
ctttctgaagtctaactttaaatat

SEQ ID NO: 2059877 - DNA, 25 bp, Homo sapien
aatgatataaggtatttccaggatc

SEQ ID NO: 2059878 - DNA, 25 bp, Homo sapien
taaagccatctacagtgagtgaggg

SEQ ID NO: 2059879 - DNA, 25 bp, Homo sapien
gagtaaacctaagcagaacctctct

SEQ ID NO: 2059880 - DNA, 25 bp, Homo sapien
tgaatttgatgggtctgtaaagcca

SEQ ID NO: 2059881 - DNA, 25 bp, Homo sapien
gtcatttctaccgtggcatttcggt

SEQ ID NO: 2059882 - DNA, 25 bp, Homo sapien
aaatgcaggttctgagtaagtaact

SEQ ID NO: 2059883 - DNA, 25 bp, Homo sapien
atgcaggttctgagtaagtaactgg

SEQ ID NO: 2059884 - DNA, 25 bp, Homo sapien
ctatcgaacaccaaaatgcaggttc

SEQ ID NO: 2059885 - DNA, 25 bp, Homo sapien
atcgaacaccaaaatgcaggttctg

SEQ ID NO: 2059886 - DNA, 25 bp, Homo sapien
tttaaaatttgggcccagcacgatg

SEQ ID NO: 2059887 - DNA, 25 bp, Homo sapien
taaattcacgtcatcctgtatactt

SEQ ID NO: 2059888 - DNA, 25 bp, Homo sapien
ttccatgtaacttaaattcacgtca

SEQ ID NO: 2059889 - DNA, 25 bp, Homo sapien
cataaaagggtgtagtatttccatg

SEQ ID NO: 2059890 - DNA, 25 bp, Homo sapien
tgattaacaggggaaagagtagtag

SEQ ID NO: 2059891 - DNA, 25 bp, Homo sapien
gctatgattaacaggggaaagagta

SEQ ID NO: 2059892 - DNA, 25 bp, Homo sapien
aaagagtagtaggagatagttctgc

SEQ ID NO: 2059893 - DNA, 25 bp, Homo sapien
gggaaagagtagtaggagatagttc

SEQ ID NO: 2059894 - DNA, 25 bp, Homo sapien
aatgaagactcccttgttatgtggc

SEQ ID NO: 2059895 - DNA, 25 bp, Homo sapien
aagggagatcctaccacttttggca

SEQ ID NO: 2059896 - DNA, 25 bp, Homo sapien
ggagggttatacacacaattgaatg

SEQ ID NO: 2059897 - DNA, 25 bp, Homo sapien
taggtggacatagaaagacacatgg

SEQ ID NO: 2059898 - DNA, 25 bp, Homo sapien
catactttgattcaactgttggtca

SEQ ID NO: 2059899 - DNA, 25 bp, Homo sapien
ccatactttgattcaactgttggtc

SEQ ID NO: 2059900 - DNA, 25 bp, Homo sapien
gaataagcattatttccatgatgga

SEQ ID NO: 2059901 - DNA, 25 bp, Homo sapien
taagcattatttccatgatggatac

SEQ ID NO: 2059902 - DNA, 25 bp, Homo sapien
ggaagaaagaaatcgagacactaca

SEQ ID NO: 2059903 - DNA, 25 bp, Homo sapien
cagcttaatcctcatcctaacatca

SEQ ID NO: 2059904 - DNA, 25 bp, Homo sapien
tgacgttcgtgttataatatgtaag

SEQ ID NO: 2059905 - DNA, 25 bp, Homo sapien
tctgcatctcgcttagcttcaacaa

SEQ ID NO: 2059906 - DNA, 25 bp, Homo sapien
gtaagtgttgctatgtctatagaac

SEQ ID NO: 2059907 - DNA, 25 bp, Homo sapien
gatcattgggtggatattcagttac

SEQ ID NO: 2059908 - DNA, 25 bp, Homo sapien
agttttaggagattcagaaggcaaa

SEQ ID NO: 2059909 - DNA, 25 bp, Homo sapien
tttaggagattcagaaggcaaaaat

SEQ ID NO: 2059910 - DNA, 25 bp, Homo sapien
taggagattcagaaggcaaaaatac

SEQ ID NO: 2059911 - DNA, 25 bp, Homo sapien
gttttaggagattcagaaggcaaaa

SEQ ID NO: 2059912 - DNA, 25 bp, Homo sapien
catccagaggcggaagttctgttag

SEQ ID NO: 2059913 - DNA, 25 bp, Homo sapien
tctgtggctcaattcctgctgggaa

SEQ ID NO: 2059914 - DNA, 25 bp, Homo sapien
ttctgttaggatctcggtgtgtcgg

SEQ ID NO: 2059915 - DNA, 25 bp, Homo sapien
tggaatggagtgagtatagtcatcc

SEQ ID NO: 2059916 - DNA, 25 bp, Homo sapien
caattgccttgagttcatgatgact

SEQ ID NO: 2059917 - DNA, 25 bp, Homo sapien
ccttttcgatgggatacctggagac

SEQ ID NO: 2059918 - DNA, 25 bp, Homo sapien
ggccagcgccataatcggcaatata

SEQ ID NO: 2059919 - DNA, 25 bp, Homo sapien
tcaactctctgatagtggtaagggt

SEQ ID NO: 2059920 - DNA, 25 bp, Homo sapien
tgtactcagtccccaaatttcagag

SEQ ID NO: 2059921 - DNA, 25 bp, Homo sapien
cctgttgtatcccactgatctatcg

SEQ ID NO: 2059922 - DNA, 25 bp, Homo sapien
tatcccactgatctatcgtatttgg

SEQ ID NO: 2059923 - DNA, 25 bp, Homo sapien
tgatctatcgtatttggtgtactca

SEQ ID NO: 2059924 - DNA, 25 bp, Homo sapien
gaaagctctgtacagctggatccct

SEQ ID NO: 2059925 - DNA, 25 bp, Homo sapien
gctggatccctatacgttcttaaga

SEQ ID NO: 2059926 - DNA, 25 bp, Homo sapien
tattacaaaagactgcagaaagctc

SEQ ID NO: 2059927 - DNA, 25 bp, Homo sapien
ttaagaatcaagcaaacagcctgtg

SEQ ID NO: 2059928 - DNA, 25 bp, Homo sapien
cacaggaatgtactaccacgcttgg

SEQ ID NO: 2059929 - DNA, 25 bp, Homo sapien
gggacaaggtcccaatgtctcatgc

SEQ ID NO: 2059930 - DNA, 25 bp, Homo sapien
cataagccatcgcatctgacctgat

SEQ ID NO: 2059931 - DNA, 25 bp, Homo sapien
gccatcgcatctgacctgattaatt

SEQ ID NO: 2059932 - DNA, 25 bp, Homo sapien
ttgctttgttgaccaggctggtctt

SEQ ID NO: 2059933 - DNA, 25 bp, Homo sapien
ttttatctgtctatagaaatggggt

SEQ ID NO: 2059934 - DNA, 25 bp, Homo sapien
attttatctgtctatagaaatgggg

SEQ ID NO: 2059935 - DNA, 25 bp, Homo sapien
tttatctgtctatagaaatggggtc

SEQ ID NO: 2059936 - DNA, 25 bp, Homo sapien
aattttccattaggcactctttcag

SEQ ID NO: 2059937 - DNA, 25 bp, Homo sapien
gagacttgtgccctgtaaacagtct

SEQ ID NO: 2059938 - DNA, 25 bp, Homo sapien
aaagaactcgcttttggctttctga

SEQ ID NO: 2059939 - DNA, 25 bp, Homo sapien
ttaccatgaacacttgaaacgcttg

SEQ ID NO: 2059940 - DNA, 25 bp, Homo sapien
tatgctgcgtgccatttttcaccag

SEQ ID NO: 2059941 - DNA, 25 bp, Homo sapien
tgttatgactccctgatgttggtga

SEQ ID NO: 2059942 - DNA, 25 bp, Homo sapien
ttctacccagttttgctgcatgtat

SEQ ID NO: 2059943 - DNA, 25 bp, Homo sapien
tgagtttgaccatgatatatctaag

SEQ ID NO: 2059944 - DNA, 25 bp, Homo sapien
tgaaaataaagcatcactggctaat

SEQ ID NO: 2059945 - DNA, 25 bp, Homo sapien
cgatgatgataatagaagaaaactg

SEQ ID NO: 2059946 - DNA, 25 bp, Homo sapien
cgcttcaaggaaaacgatgatgata

SEQ ID NO: 2059947 - DNA, 25 bp, Homo sapien
aaactgtagttgtaacatttctttg

SEQ ID NO: 2059948 - DNA, 25 bp, Homo sapien
taactgtagcaatgcttgactcagg

SEQ ID NO: 2059949 - DNA, 25 bp, Homo sapien
tgcatgttctgcatgaacactatag

SEQ ID NO: 2059950 - DNA, 25 bp, Homo sapien
gaacactatagcacctcaattttga

SEQ ID NO: 2059951 - DNA, 25 bp, Homo sapien
ggttactggcaatctactgttctca

SEQ ID NO: 2059952 - DNA, 25 bp, Homo sapien
gaagtatgctttatcaagctaagaa

SEQ ID NO: 2059953 - DNA, 25 bp, Homo sapien
tgccacgtctggctagaaatacact

SEQ ID NO: 2059954 - DNA, 25 bp, Homo sapien
gggtcacccatactcattactaaaa

SEQ ID NO: 2059955 - DNA, 25 bp, Homo sapien
taattgtgctgactataaaagtgat

SEQ ID NO: 2059956 - DNA, 25 bp, Homo sapien
tccttgggatgaaagatcaaaaatg

SEQ ID NO: 2059957 - DNA, 25 bp, Homo sapien
aacaatacagattccaatggactgg

SEQ ID NO: 2059958 - DNA, 25 bp, Homo sapien
caaaaatgtgattacatggtcagag

SEQ ID NO: 2059959 - DNA, 25 bp, Homo sapien
gagtggcataaacttttctttcgct

SEQ ID NO: 2059960 - DNA, 25 bp, Homo sapien
ggctttctcaagctcatctaatcgt

SEQ ID NO: 2059961 - DNA, 25 bp, Homo sapien
gcgtgaatggcaagatggacgacat

SEQ ID NO: 2059962 - DNA, 25 bp, Homo sapien
cacatttagtattacagttttgagt

SEQ ID NO: 2059963 - DNA, 25 bp, Homo sapien
ccagcagtctcttcacaactggcgg

SEQ ID NO: 2059964 - DNA, 25 bp, Homo sapien
cagcaagccacgctaggaaaacagc

SEQ ID NO: 2059965 - DNA, 25 bp, Homo sapien
agcaagccacgctaggaaaacagcc

SEQ ID NO: 2059966 - DNA, 25 bp, Homo sapien
gcagcaagccacgctaggaaaacag

SEQ ID NO: 2059967 - DNA, 25 bp, Homo sapien
gcaagccacgctaggaaaacagcct

SEQ ID NO: 2059968 - DNA, 25 bp, Homo sapien
ctaccttgaacatcaagtaataatt

SEQ ID NO: 2059969 - DNA, 25 bp, Homo sapien
tattgaaaggatgatgtagagacta

SEQ ID NO: 2059970 - DNA, 25 bp, Homo sapien
atattgaaaggatgatgtagagact

SEQ ID NO: 2059971 - DNA, 25 bp, Homo sapien
gactaccttgaacatcaagtaataa

SEQ ID NO: 2059972 - DNA, 25 bp, Homo sapien
taaacatggcaaacagagtccgtgg

SEQ ID NO: 2059973 - DNA, 25 bp, Homo sapien
tgttgtaaggactcctcttgtggga

SEQ ID NO: 2059974 - DNA, 25 bp, Homo sapien
gagtccgtggagaaaagctgtagtc

SEQ ID NO: 2059975 - DNA, 25 bp, Homo sapien
taaactttcataactaataggaggc

SEQ ID NO: 2059976 - DNA, 25 bp, Homo sapien
aactacactgttgagctgggacggg

SEQ ID NO: 2059977 - DNA, 25 bp, Homo sapien
tcaatgactagtgaagaagactgcc

SEQ ID NO: 2059978 - DNA, 25 bp, Homo sapien
ttccagaaggaggtgcccgataagc

SEQ ID NO: 2059979 - DNA, 25 bp, Homo sapien
taagggcagagagatcaaccagcag

SEQ ID NO: 2059980 - DNA, 25 bp, Homo sapien
gctgagctctttatacaatcaacag

SEQ ID NO: 2059981 - DNA, 25 bp, Homo sapien
caacagagctatctgtgcctgacaa

SEQ ID NO: 2059982 - DNA, 25 bp, Homo sapien
cataacaatctgaagctaatctgga

SEQ ID NO: 2059983 - DNA, 25 bp, Homo sapien
ctaatctggagacctaaaaagagcc

SEQ ID NO: 2059984 - DNA, 25 bp, Homo sapien
gccatgtgcatgtctatactcctag

SEQ ID NO: 2059985 - DNA, 25 bp, Homo sapien
taattgacccgtggacaacatgggt

SEQ ID NO: 2059986 - DNA, 25 bp, Homo sapien
aaattgagagcccaaatgacagcca

SEQ ID NO: 2059987 - DNA, 25 bp, Homo sapien
gatagcctctgcaagtacatgtagg

SEQ ID NO: 2059988 - DNA, 25 bp, Homo sapien
aaactttaactcatcattgcattgt

SEQ ID NO: 2059989 - DNA, 25 bp, Homo sapien
cagcctattgaaaaccataaagaat

SEQ ID NO: 2059990 - DNA, 25 bp, Homo sapien
cctcatccccactgacttggagtta

SEQ ID NO: 2059991 - DNA, 25 bp, Homo sapien
ggagttatacgttattctatttcaa

SEQ ID NO: 2059992 - DNA, 25 bp, Homo sapien
ctgcaagtccgagatcagggtacca

SEQ ID NO: 2059993 - DNA, 25 bp, Homo sapien
agcatggttaggttccaagtaaggc

SEQ ID NO: 2059994 - DNA, 25 bp, Homo sapien
gctgcaagtccgagatcagggtacc

SEQ ID NO: 2059995 - DNA, 25 bp, Homo sapien
aggttccaagtaaggccctcttctg

SEQ ID NO: 2059996 - DNA, 25 bp, Homo sapien
cagttcatccggaaggccagtagga

SEQ ID NO: 2059997 - DNA, 25 bp, Homo sapien
ggcattataacctcagccccaacta

SEQ ID NO: 2059998 - DNA, 25 bp, Homo sapien
aatgggcctaacttgtgtctgtgtc

SEQ ID NO: 2059999 - DNA, 25 bp, Homo sapien
tctaagtttctagtacctgggcact

SEQ ID NO: 2060000 - DNA, 25 bp, Homo sapien
ttcttcagctgtgcttcaaaggctt

SEQ ID NO: 2060001 - DNA, 25 bp, Homo sapien
gttcttcagctgtgcttcaaaggct

SEQ ID NO: 2060002 - DNA, 25 bp, Homo sapien
tgttcttcagctgtgcttcaaaggc

SEQ ID NO: 2060003 - DNA, 25 bp, Homo sapien
tcttcagctgtgcttcaaaggcttc

SEQ ID NO: 2060004 - DNA, 25 bp, Homo sapien
cgcagcggccatgtgacacggccca

SEQ ID NO: 2060005 - DNA, 25 bp, Homo sapien
ccgcagcggccatgtgacacggccc

SEQ ID NO: 2060006 - DNA, 25 bp, Homo sapien
caggtcccgccccgtcagatccggg

SEQ ID NO: 2060007 - DNA, 25 bp, Homo sapien
tgcaaggtggcgccaggtcccgccc

SEQ ID NO: 2060008 - DNA, 25 bp, Homo sapien
cttcctcttccgatgggatggaggg

SEQ ID NO: 2060009 - DNA, 25 bp, Homo sapien
gttccttcctcttccgatgggatgg

SEQ ID NO: 2060010 - DNA, 25 bp, Homo sapien
cgattggaggcggaactgaaaacac

SEQ ID NO: 2060011 - DNA, 25 bp, Homo sapien
attggaggcggaactgaaaacactc

SEQ ID NO: 2060012 - DNA, 25 bp, Homo sapien
gggaatgggcgattggaggcggaac

SEQ ID NO: 2060013 - DNA, 25 bp, Homo sapien
tgggcgattggaggcggaactgaaa

SEQ ID NO: 2060014 - DNA, 25 bp, Homo sapien
gctggcgagctgcttctccgccgcc

SEQ ID NO: 2060015 - DNA, 25 bp, Homo sapien
gggcgcgaggcacgccggccgaaag

SEQ ID NO: 2060016 - DNA, 25 bp, Homo sapien
cctgccgcccgctgattggcgcctc

SEQ ID NO: 2060017 - DNA, 25 bp, Homo sapien
gccgcgcgggtagacccgcctgcca

SEQ ID NO: 2060018 - DNA, 25 bp, Homo sapien
cgaggccgagcaccgcgggaagggc

SEQ ID NO: 2060019 - DNA, 25 bp, Homo sapien
aacgaggccgagcaccgcgggaagg

SEQ ID NO: 2060020 - DNA, 25 bp, Homo sapien
aggaacgaggccgagcaccgcggga

SEQ ID NO: 2060021 - DNA, 25 bp, Homo sapien
ggcgcggggagtcgccggccaccgc

SEQ ID NO: 2060022 - DNA, 25 bp, Homo sapien
tcagcacgagggaagctcggggtgt

SEQ ID NO: 2060023 - DNA, 25 bp, Homo sapien
ctcgaatcggaagggagacgtcgct

SEQ ID NO: 2060024 - DNA, 25 bp, Homo sapien
gtgtgagccgcgcatcgggggcctc

SEQ ID NO: 2060025 - DNA, 25 bp, Homo sapien
gcatcgggggcctcgaatcggaagg

SEQ ID NO: 2060026 - DNA, 25 bp, Homo sapien
cattaagacgattcccggtgaccgc

SEQ ID NO: 2060027 - DNA, 25 bp, Homo sapien
gtgaggccggcagcggacacgtgct

SEQ ID NO: 2060028 - DNA, 25 bp, Homo sapien
gcctcgtccaccgtccgtcgtgagg

SEQ ID NO: 2060029 - DNA, 25 bp, Homo sapien
cgatccctcgccagcgtcgtgggtg

SEQ ID NO: 2060030 - DNA, 25 bp, Homo sapien
tctaatacagggttggtttgtggag

SEQ ID NO: 2060031 - DNA, 25 bp, Homo sapien
tgcctcaggctgacgaaagtgatct

SEQ ID NO: 2060032 - DNA, 25 bp, Homo sapien
cagggttggtttgtggagatccttt

SEQ ID NO: 2060033 - DNA, 25 bp, Homo sapien
cgaaagtgatctaatacagggttgg

SEQ ID NO: 2060034 - DNA, 25 bp, Homo sapien
aaactcctactgtggcatagtggac

SEQ ID NO: 2060035 - DNA, 25 bp, Homo sapien
caaactcctactgtggcatagtgga

SEQ ID NO: 2060036 - DNA, 25 bp, Homo sapien
aactcctactgtggcatagtggaca

SEQ ID NO: 2060037 - DNA, 25 bp, Homo sapien
actcctactgtggcatagtggacaa

SEQ ID NO: 2060038 - DNA, 25 bp, Homo sapien
gtggccctttgacgatactgatggc

SEQ ID NO: 2060039 - DNA, 25 bp, Homo sapien
tggccctttgacgatactgatggct

SEQ ID NO: 2060040 - DNA, 25 bp, Homo sapien
ggccctttgacgatactgatggctg

SEQ ID NO: 2060041 - DNA, 25 bp, Homo sapien
tccagggcgttccactgctctacca

SEQ ID NO: 2060042 - DNA, 25 bp, Homo sapien
cagggcgttccactgctctaccagc

SEQ ID NO: 2060043 - DNA, 25 bp, Homo sapien
agggcgttccactgctctaccagca

SEQ ID NO: 2060044 - DNA, 25 bp, Homo sapien
ttctccagggcgttccactgctcta

SEQ ID NO: 2060045 - DNA, 25 bp, Homo sapien
ggaaatcaagtacaggtatctgtga

SEQ ID NO: 2060046 - DNA, 25 bp, Homo sapien
tcaagtacaggtatctgtgaaaaac

SEQ ID NO: 2060047 - DNA, 25 bp, Homo sapien
ctggaaatcaagtacaggtatctgt

SEQ ID NO: 2060048 - DNA, 25 bp, Homo sapien
gaaaaacaggcataattctgagcat

SEQ ID NO: 2060049 - DNA, 25 bp, Homo sapien
ccttcacagcgtttgccagacatca

SEQ ID NO: 2060050 - DNA, 25 bp, Homo sapien
gcgtttgccagacatcattcctgca

SEQ ID NO: 2060051 - DNA, 25 bp, Homo sapien
ttcacagcgtttgccagacatcatt

SEQ ID NO: 2060052 - DNA, 25 bp, Homo sapien
acagcgtttgccagacatcattcct

SEQ ID NO: 2060053 - DNA, 25 bp, Homo sapien
gcatactggacatccagtctgtgat

SEQ ID NO: 2060054 - DNA, 25 bp, Homo sapien
agcatactggacatccagtctgtga

SEQ ID NO: 2060055 - DNA, 25 bp, Homo sapien
tgtgccccacagcatactggacatc

SEQ ID NO: 2060056 - DNA, 25 bp, Homo sapien
acagcatactggacatccagtctgt

SEQ ID NO: 2060057 - DNA, 25 bp, Homo sapien
cgaggccaccttctctggcatccat

SEQ ID NO: 2060058 - DNA, 25 bp, Homo sapien
ctcaagtcgaggccaccttctctgg

SEQ ID NO: 2060059 - DNA, 25 bp, Homo sapien
aagtcgaggccaccttctctggcat

SEQ ID NO: 2060060 - DNA, 25 bp, Homo sapien
gtcgaggccaccttctctggcatcc

SEQ ID NO: 2060061 - DNA, 25 bp, Homo sapien
acccagagagccccatagtcagttc

SEQ ID NO: 2060062 - DNA, 25 bp, Homo sapien
gagagccccatagtcagttccccat

SEQ ID NO: 2060063 - DNA, 25 bp, Homo sapien
ctgcacccagagagccccatagtca

SEQ ID NO: 2060064 - DNA, 25 bp, Homo sapien
agagagccccatagtcagttcccca

SEQ ID NO: 2060065 - DNA, 25 bp, Homo sapien
gtagctttgccacgtttcaccatag

SEQ ID NO: 2060066 - DNA, 25 bp, Homo sapien
tccagtgagatggaagcaccttaag

SEQ ID NO: 2060067 - DNA, 25 bp, Homo sapien
tgtcatttacctgccagagctctgt

SEQ ID NO: 2060068 - DNA, 25 bp, Homo sapien
tctccaatgaatgggtcacaatagg

SEQ ID NO: 2060069 - DNA, 25 bp, Homo sapien
tccacggcattaatccacttgtcag

SEQ ID NO: 2060070 - DNA, 25 bp, Homo sapien
atccacttgtcagggcaaatgctta

SEQ ID NO: 2060071 - DNA, 25 bp, Homo sapien
taatccacttgtcagggcaaatgct

SEQ ID NO: 2060072 - DNA, 25 bp, Homo sapien
ggcattaatccacttgtcagggcaa

SEQ ID NO: 2060073 - DNA, 25 bp, Homo sapien
ctttcccacctctgtccaacacatg

SEQ ID NO: 2060074 - DNA, 25 bp, Homo sapien
taggctgtgtttatacacacacgtg

SEQ ID NO: 2060075 - DNA, 25 bp, Homo sapien
tacacacacgtgctgttggactgtc

SEQ ID NO: 2060076 - DNA, 25 bp, Homo sapien
cccttggagttctgagtttaggctg

SEQ ID NO: 2060077 - DNA, 25 bp, Homo sapien
tttagttgccgcttactgacttggg

SEQ ID NO: 2060078 - DNA, 25 bp, Homo sapien
tgataactacccttttctgagcacg

SEQ ID NO: 2060079 - DNA, 25 bp, Homo sapien
gatgatgccctaaaatctacgttgc

SEQ ID NO: 2060080 - DNA, 25 bp, Homo sapien
gctctcgttactcagcagcagtgat

SEQ ID NO: 2060081 - DNA, 25 bp, Homo sapien
aagtgctcccacagcgtcttgtcca

SEQ ID NO: 2060082 - DNA, 25 bp, Homo sapien
ctgtgcgggagggaagccactcggc

SEQ ID NO: 2060083 - DNA, 25 bp, Homo sapien
taggatgatgtaaagtgctcccaca

SEQ ID NO: 2060084 - DNA, 25 bp, Homo sapien
cactcggctggataggatgatgtaa

SEQ ID NO: 2060085 - DNA, 25 bp, Homo sapien
tgtagaagcacaagtgagttggtga

SEQ ID NO: 2060086 - DNA, 25 bp, Homo sapien
tgaagagcggatccccaccaccaag

SEQ ID NO: 2060087 - DNA, 25 bp, Homo sapien
tgagttggtgaagagcggatcccca

SEQ ID NO: 2060088 - DNA, 25 bp, Homo sapien
ctgtgtagaagcacaagtgagttgg

SEQ ID NO: 2060089 - DNA, 25 bp, Homo sapien
ctgactgcaggtccgcgagcctggg

SEQ ID NO: 2060090 - DNA, 25 bp, Homo sapien
ggggcccggacgctcctccatgtgc

SEQ ID NO: 2060091 - DNA, 25 bp, Homo sapien
ctactaacttcagtccacatcacag

SEQ ID NO: 2060092 - DNA, 25 bp, Homo sapien
cacatcacagcctccgagagtgggg

SEQ ID NO: 2060093 - DNA, 25 bp, Homo sapien
ccctctgtgctctccgcaagcacca

SEQ ID NO: 2060094 - DNA, 25 bp, Homo sapien
cctctgtgctctccgcaagcaccat

SEQ ID NO: 2060095 - DNA, 25 bp, Homo sapien
cccctctgtgctctccgcaagcacc

SEQ ID NO: 2060096 - DNA, 25 bp, Homo sapien
ttggtgcccattgccccgagcttgg

SEQ ID NO: 2060097 - DNA, 25 bp, Homo sapien
tcttgcaggtttggtgttggtgccc

SEQ ID NO: 2060098 - DNA, 25 bp, Homo sapien
ggcacagagggtaggtttcttgcag

SEQ ID NO: 2060099 - DNA, 25 bp, Homo sapien
cgagcttgggcccatgcagatcagt

SEQ ID NO: 2060100 - DNA, 25 bp, Homo sapien
aagacaggcttgtgaccaggtcaca

SEQ ID NO: 2060101 - DNA, 25 bp, Homo sapien
gaccaggtcacataggtgtaggcag

SEQ ID NO: 2060102 - DNA, 25 bp, Homo sapien
gattgttaactcagtgtgtatggag

SEQ ID NO: 2060103 - DNA, 25 bp, Homo sapien
agtctgcagggaattggaatgatcc

SEQ ID NO: 2060104 - DNA, 25 bp, Homo sapien
gtccagcaggttacccggtggagcc

SEQ ID NO: 2060105 - DNA, 25 bp, Homo sapien
tccagcaggttacccggtggagcct

SEQ ID NO: 2060106 - DNA, 25 bp, Homo sapien
ccagcaggttacccggtggagcctg

SEQ ID NO: 2060107 - DNA, 25 bp, Homo sapien
aatgtccagcaggttacccggtgga

SEQ ID NO: 2060108 - DNA, 25 bp, Homo sapien
cttcaggcaagaggatgtttagtgc

SEQ ID NO: 2060109 - DNA, 25 bp, Homo sapien
tcaggcaagaggatgtttagtgcag

SEQ ID NO: 2060110 - DNA, 25 bp, Homo sapien
ggcaagaggatgtttagtgcagctc

SEQ ID NO: 2060111 - DNA, 25 bp, Homo sapien
caagaggatgtttagtgcagctccc

SEQ ID NO: 2060112 - DNA, 25 bp, Homo sapien
gatggagaacttcgagaagctctga

SEQ ID NO: 2060113 - DNA, 25 bp, Homo sapien
aatgttatgtaatagaatgcagaag

SEQ ID NO: 2060114 - DNA, 25 bp, Homo sapien
cactacagataggttactttgggct

SEQ ID NO: 2060115 - DNA, 25 bp, Homo sapien
tgcccccaatttgccaatcagctgg

SEQ ID NO: 2060116 - DNA, 25 bp, Homo sapien
gaacagtgttaccaagagtctgggc

SEQ ID NO: 2060117 - DNA, 25 bp, Homo sapien
gactgaagacacacagcttggagga

SEQ ID NO: 2060118 - DNA, 25 bp, Homo sapien
agtctaaattggaaacccggatctg

SEQ ID NO: 2060119 - DNA, 25 bp, Homo sapien
tgtaccaagaaacgctgcatagacg

SEQ ID NO: 2060120 - DNA, 25 bp, Homo sapien
tgttgctgtcctgtgaactttcaga

SEQ ID NO: 2060121 - DNA, 25 bp, Homo sapien
gaatcactaaggcaaactttgttga

SEQ ID NO: 2060122 - DNA, 25 bp, Homo sapien
cgtgcgaccgaagttatggaagatt

SEQ ID NO: 2060123 - DNA, 25 bp, Homo sapien
ggaagattgtcccttgaatcactaa

SEQ ID NO: 2060124 - DNA, 25 bp, Homo sapien
tgaagctcggaagctcccctgatga

SEQ ID NO: 2060125 - DNA, 25 bp, Homo sapien
ttaggagcccgggaaaatgccatca

SEQ ID NO: 2060126 - DNA, 25 bp, Homo sapien
catgggccggtgcaagtttctatat

SEQ ID NO: 2060127 - DNA, 25 bp, Homo sapien
tgacactgagctacagagggctgac

SEQ ID NO: 2060128 - DNA, 25 bp, Homo sapien
gcccttgggcgctgccaggaagtgc

SEQ ID NO: 2060129 - DNA, 25 bp, Homo sapien
gttgaggccggcgagcccagggagg

SEQ ID NO: 2060130 - DNA, 25 bp, Homo sapien
gcgcgcccgaacagcttcatctgtg

SEQ ID NO: 2060131 - DNA, 25 bp, Homo sapien
gaactgccgctccagctcttgcagg

SEQ ID NO: 2060132 - DNA, 25 bp, Homo sapien
cagggggcatcacgaaggccgcctt

SEQ ID NO: 2060133 - DNA, 25 bp, Homo sapien
cctcgcccagcgcagggggcatcac

SEQ ID NO: 2060134 - DNA, 25 bp, Homo sapien
ggccgccgggcccgaagagcaggct

SEQ ID NO: 2060135 - DNA, 25 bp, Homo sapien
gggccgccgggcccgaagagcaggc

SEQ ID NO: 2060136 - DNA, 25 bp, Homo sapien
gggccgtgccatgcggcagctctgg

SEQ ID NO: 2060137 - DNA, 25 bp, Homo sapien
gcagctctggcgcttgatgtggcgg

SEQ ID NO: 2060138 - DNA, 25 bp, Homo sapien
tggcgcttgatgtggcggtgcaggt

SEQ ID NO: 2060139 - DNA, 25 bp, Homo sapien
ttgcggccgcgtcggggccgtgcca

SEQ ID NO: 2060140 - DNA, 25 bp, Homo sapien
gcacgaacttggcgttgcagtggat

SEQ ID NO: 2060141 - DNA, 25 bp, Homo sapien
tgtgcacgaacttggcgttgcagtg

SEQ ID NO: 2060142 - DNA, 25 bp, Homo sapien
cgaacttggcgttgcagtggatgca

SEQ ID NO: 2060143 - DNA, 25 bp, Homo sapien
gaacttggcgttgcagtggatgcac

SEQ ID NO: 2060144 - DNA, 25 bp, Homo sapien
tgtgtgcttccgcatgtggattttc

SEQ ID NO: 2060145 - DNA, 25 bp, Homo sapien
catgtggattttcagcttgtcctgc

SEQ ID NO: 2060146 - DNA, 25 bp, Homo sapien
ggccgctcccctgtgtgcttccgca

SEQ ID NO: 2060147 - DNA, 25 bp, Homo sapien
gcatgtggattttcagcttgtcctg

SEQ ID NO: 2060148 - DNA, 25 bp, Homo sapien
gacattcccatgaatactggcaggc

SEQ ID NO: 2060149 - DNA, 25 bp, Homo sapien
ctctcattttcaaaatggttctcca

SEQ ID NO: 2060150 - DNA, 25 bp, Homo sapien
caggagagaaaaggacattcccatg

SEQ ID NO: 2060151 - DNA, 25 bp, Homo sapien
ctcattttcaaaatggttctccagg

SEQ ID NO: 2060152 - DNA, 25 bp, Homo sapien
tcagagaggacagatccagtcctcc

SEQ ID NO: 2060153 - DNA, 25 bp, Homo sapien
ctgtgagaggaggatcagagaggac

SEQ ID NO: 2060154 - DNA, 25 bp, Homo sapien
gagaggacagatccagtcctcccac

SEQ ID NO: 2060155 - DNA, 25 bp, Homo sapien
gatcagagaggacagatccagtcct

SEQ ID NO: 2060156 - DNA, 25 bp, Homo sapien
ctgtgctcacaggaaggctggagag

SEQ ID NO: 2060157 - DNA, 25 bp, Homo sapien
gtgctcacaggaaggctggagagcc

SEQ ID NO: 2060158 - DNA, 25 bp, Homo sapien
tgctcacaggaaggctggagagccc

SEQ ID NO: 2060159 - DNA, 25 bp, Homo sapien
tgtgctcacaggaaggctggagagc

SEQ ID NO: 2060160 - DNA, 25 bp, Homo sapien
tttgatgagaacctgtgggatgctc

SEQ ID NO: 2060161 - DNA, 25 bp, Homo sapien
ctgctttgatgagaacctgtgggat

SEQ ID NO: 2060162 - DNA, 25 bp, Homo sapien
aacctgtgggatgctctttcgtact

SEQ ID NO: 2060163 - DNA, 25 bp, Homo sapien
gagaacctgtgggatgctctttcgt

SEQ ID NO: 2060164 - DNA, 25 bp, Homo sapien
ctttggctcctggcttccagacttt

SEQ ID NO: 2060165 - DNA, 25 bp, Homo sapien
ctgagggcagcatgtctgggtcctt

SEQ ID NO: 2060166 - DNA, 25 bp, Homo sapien
tgagggcagcatgtctgggtccttg

SEQ ID NO: 2060167 - DNA, 25 bp, Homo sapien
caggatacactgaaatgaccaaacc

SEQ ID NO: 2060168 - DNA, 25 bp, Homo sapien
cctagtctagtaagtcatgttcaca

SEQ ID NO: 2060169 - DNA, 25 bp, Homo sapien
gcaccgccaccggaacaagtgtggg

SEQ ID NO: 2060170 - DNA, 25 bp, Homo sapien
tatccagtctcattcacaaccttgc

SEQ ID NO: 2060171 - DNA, 25 bp, Homo sapien
ccggtatgggtcctcatgtgccgcg

SEQ ID NO: 2060172 - DNA, 25 bp, Homo sapien
aagcggacctcgcagatggtgcaca

SEQ ID NO: 2060173 - DNA, 25 bp, Homo sapien
atgggtcctcatgtgccgcggcagc

SEQ ID NO: 2060174 - DNA, 25 bp, Homo sapien
gcagatggtgcacatgtatggcttc

SEQ ID NO: 2060175 - DNA, 25 bp, Homo sapien
gataggcaccgtagtcgttctccgc

SEQ ID NO: 2060176 - DNA, 25 bp, Homo sapien
ttctccgccttgatgggtcccagag

SEQ ID NO: 2060177 - DNA, 25 bp, Homo sapien
gattcgatggagaagtcccggatca

SEQ ID NO: 2060178 - DNA, 25 bp, Homo sapien
tcttgatgaccagatccagtggccc

SEQ ID NO: 2060179 - DNA, 25 bp, Homo sapien
ctgaataggccttctctgtgagatg

SEQ ID NO: 2060180 - DNA, 25 bp, Homo sapien
tctgtgagatggtctgtcttggaag

SEQ ID NO: 2060181 - DNA, 25 bp, Homo sapien
tccctgggggtgtctgaataggcct

SEQ ID NO: 2060182 - DNA, 25 bp, Homo sapien
agatggtctgtcttggaagggcttt

SEQ ID NO: 2060183 - DNA, 25 bp, Homo sapien
cagcaaagtcctccgtgtcatcatc

SEQ ID NO: 2060184 - DNA, 25 bp, Homo sapien
aaagtcctccgtgtcatcatcgtca

SEQ ID NO: 2060185 - DNA, 25 bp, Homo sapien
gcaaagtcctccgtgtcatcatcgt

SEQ ID NO: 2060186 - DNA, 25 bp, Homo sapien
gtcagcaaagtcctccgtgtcatca

SEQ ID NO: 2060187 - DNA, 25 bp, Homo sapien
gcctcaggctggacaaagtcgatct

SEQ ID NO: 2060188 - DNA, 25 bp, Homo sapien
tctcatagacgtagggctggctggc

SEQ ID NO: 2060189 - DNA, 25 bp, Homo sapien
tagggtgccggctgtgaaaagcttc

SEQ ID NO: 2060190 - DNA, 25 bp, Homo sapien
gccatcgtgccgttgctcattgagg

SEQ ID NO: 2060191 - DNA, 25 bp, Homo sapien
gaccttactcgttcattgcagttga

SEQ ID NO: 2060192 - DNA, 25 bp, Homo sapien
tcattgcagttgaagtttccttcca

SEQ ID NO: 2060193 - DNA, 25 bp, Homo sapien
tgcactggctactaggaagcttaaa

SEQ ID NO: 2060194 - DNA, 25 bp, Homo sapien
aacaaatttcgtggcccattttcag

SEQ ID NO: 2060195 - DNA, 25 bp, Homo sapien
catttatcttctggatgtttctgtc

SEQ ID NO: 2060196 - DNA, 25 bp, Homo sapien
acatttatcttctggatgtttctgt

SEQ ID NO: 2060197 - DNA, 25 bp, Homo sapien
ttctggtgttggatggctccctgga

SEQ ID NO: 2060198 - DNA, 25 bp, Homo sapien
ctgccttcacaggagatgtcccctt

SEQ ID NO: 2060199 - DNA, 25 bp, Homo sapien
ccttcacaggagatgtccccttctg

SEQ ID NO: 2060200 - DNA, 25 bp, Homo sapien
ccccttctggtgttggatggctccc

SEQ ID NO: 2060201 - DNA, 25 bp, Homo sapien
cccagtgctgtgggtagggctctgg

SEQ ID NO: 2060202 - DNA, 25 bp, Homo sapien
gtgccaagggctcccagtgctgtgg

SEQ ID NO: 2060203 - DNA, 25 bp, Homo sapien
cagtgctgtgggtagggctctggaa

SEQ ID NO: 2060204 - DNA, 25 bp, Homo sapien
gctcccagtgctgtgggtagggctc

SEQ ID NO: 2060205 - DNA, 25 bp, Homo sapien
ttgaggaaggtgtcagcaagaagca

SEQ ID NO: 2060206 - DNA, 25 bp, Homo sapien
tgagcattggaatccttccgcgaag

SEQ ID NO: 2060207 - DNA, 25 bp, Homo sapien
tccttccgcgaaggaaatcagggaa

SEQ ID NO: 2060208 - DNA, 25 bp, Homo sapien
aatctcttggcgctgtatttgagga

SEQ ID NO: 2060209 - DNA, 25 bp, Homo sapien
tattcacggccactcccctgccctt

SEQ ID NO: 2060210 - DNA, 25 bp, Homo sapien
gctctgcattattcacggccactcc

SEQ ID NO: 2060211 - DNA, 25 bp, Homo sapien
aggaagccgctctgcattattcacg

SEQ ID NO: 2060212 - DNA, 25 bp, Homo sapien
ccaggaagccgctctgcattattca

SEQ ID NO: 2060213 - DNA, 25 bp, Homo sapien
gacctccatgtgggatctggccggg

SEQ ID NO: 2060214 - DNA, 25 bp, Homo sapien
cctccatgtgggatctggccgggga

SEQ ID NO: 2060215 - DNA, 25 bp, Homo sapien
ctccatgtgggatctggccggggag

SEQ ID NO: 2060216 - DNA, 25 bp, Homo sapien
agacctccatgtgggatctggccgg

SEQ ID NO: 2060217 - DNA, 25 bp, Homo sapien
tactttgaaatagtcagtatcactt

SEQ ID NO: 2060218 - DNA, 25 bp, Homo sapien
cacttctactgtcgaaagcaggaaa

SEQ ID NO: 2060219 - DNA, 25 bp, Homo sapien
gcacagatgggcctatttactttga

SEQ ID NO: 2060220 - DNA, 25 bp, Homo sapien
catcactaggcatttggtataatgt

SEQ ID NO: 2060221 - DNA, 25 bp, Homo sapien
ggtagctgcggcatcccagggcctc

SEQ ID NO: 2060222 - DNA, 25 bp, Homo sapien
ccagggcctcctctactgtaccata

SEQ ID NO: 2060223 - DNA, 25 bp, Homo sapien
acacaggtagctgcggcatcccagg

SEQ ID NO: 2060224 - DNA, 25 bp, Homo sapien
tcacacaggtagctgcggcatccca

SEQ ID NO: 2060225 - DNA, 25 bp, Homo sapien
caatctctggctaacatcacatgca

SEQ ID NO: 2060226 - DNA, 25 bp, Homo sapien
ggatccagccctagtaggcaatgca

SEQ ID NO: 2060227 - DNA, 25 bp, Homo sapien
cataatccttgctggcatccctggg

SEQ ID NO: 2060228 - DNA, 25 bp, Homo sapien
tgaggaagcccacccatttggaggt

SEQ ID NO: 2060229 - DNA, 25 bp, Homo sapien
ctttcccaggtcgatctgcagcctc

SEQ ID NO: 2060230 - DNA, 25 bp, Homo sapien
tcccaggtcgatctgcagcctcctt

SEQ ID NO: 2060231 - DNA, 25 bp, Homo sapien
actcctgaaggagggccgccagctt

SEQ ID NO: 2060232 - DNA, 25 bp, Homo sapien
cccactcctgaaggagggccgccag

SEQ ID NO: 2060233 - DNA, 25 bp, Homo sapien
gagcttcatcaatgtgctgggtaga

SEQ ID NO: 2060234 - DNA, 25 bp, Homo sapien
tccccaggatacagacttccatgtg

SEQ ID NO: 2060235 - DNA, 25 bp, Homo sapien
tgaagaggacgcatttgagcttcat

SEQ ID NO: 2060236 - DNA, 25 bp, Homo sapien
ccacccacagtgctacaggcattag

SEQ ID NO: 2060237 - DNA, 25 bp, Homo sapien
aaaggtagaaatgacacgacacagg

SEQ ID NO: 2060238 - DNA, 25 bp, Homo sapien
acacgacacaggtcagcgtcatcct

SEQ ID NO: 2060239 - DNA, 25 bp, Homo sapien
gaaatgacacgacacaggtcagcgt

SEQ ID NO: 2060240 - DNA, 25 bp, Homo sapien
ggtagaaatgacacgacacaggtca

SEQ ID NO: 2060241 - DNA, 25 bp, Homo sapien
ctcccagcacgtccagaaatcagaa

SEQ ID NO: 2060242 - DNA, 25 bp, Homo sapien
ctgctctgtccgctaatctcccagc

SEQ ID NO: 2060243 - DNA, 25 bp, Homo sapien
gaaacaccagttgaagatgccccat

SEQ ID NO: 2060244 - DNA, 25 bp, Homo sapien
agaaacaccagttgaagatgcccca

SEQ ID NO: 2060245 - DNA, 25 bp, Homo sapien
ccagcataagaagagtgagttgggt

SEQ ID NO: 2060246 - DNA, 25 bp, Homo sapien
cggcagcatcaggtcagccttgagg

SEQ ID NO: 2060247 - DNA, 25 bp, Homo sapien
gcagcaggcccagcataagaagagt

SEQ ID NO: 2060248 - DNA, 25 bp, Homo sapien
agccttgagggcatcggtgcagcag

SEQ ID NO: 2060249 - DNA, 25 bp, Homo sapien
aaggccttggctcttgcagttctgc

SEQ ID NO: 2060250 - DNA, 25 bp, Homo sapien
tcacaaaagagaaggggtgggctcc

SEQ ID NO: 2060251 - DNA, 25 bp, Homo sapien
ccacttcgtggggtatgatgtagcc

SEQ ID NO: 2060252 - DNA, 25 bp, Homo sapien
gatgtagcctctaggacctgcttcc

SEQ ID NO: 2060253 - DNA, 25 bp, Homo sapien
gaagagggacataggtccacttcca

SEQ ID NO: 2060254 - DNA, 25 bp, Homo sapien
gggaagagggacataggtccacttc

SEQ ID NO: 2060255 - DNA, 25 bp, Homo sapien
ggtccacttccagggggaccgagca

SEQ ID NO: 2060256 - DNA, 25 bp, Homo sapien
cagggggaccgagcactggcacctc

SEQ ID NO: 2060257 - DNA, 25 bp, Homo sapien
tacattaccgaagtcctgttcctta

SEQ ID NO: 2060258 - DNA, 25 bp, Homo sapien
ctacattaccgaagtcctgttcctt

SEQ ID NO: 2060259 - DNA, 25 bp, Homo sapien
acattaccgaagtcctgttccttat

SEQ ID NO: 2060260 - DNA, 25 bp, Homo sapien
ccatctaagggaagggtacgctgga

SEQ ID NO: 2060261 - DNA, 25 bp, Homo sapien
ggtgcaaagtttgtgtctgacccca

SEQ ID NO: 2060262 - DNA, 25 bp, Homo sapien
gagccctgtttccataggccatttg

SEQ ID NO: 2060263 - DNA, 25 bp, Homo sapien
tagaagcctcagttgcagaccagct

SEQ ID NO: 2060264 - DNA, 25 bp, Homo sapien
ttactgctccatacagcagcaaaat

SEQ ID NO: 2060265 - DNA, 25 bp, Homo sapien
gaatgcttctctgtaacggaatttg

SEQ ID NO: 2060266 - DNA, 25 bp, Homo sapien
tactgctccatacagcagcaaaatc

SEQ ID NO: 2060267 - DNA, 25 bp, Homo sapien
ctgtaacggaatttgtcataatggg

SEQ ID NO: 2060268 - DNA, 25 bp, Homo sapien
ttagcaacccatattaggaacttac

SEQ ID NO: 2060269 - DNA, 25 bp, Homo sapien
tctgattatgaggttataaagggcc

SEQ ID NO: 2060270 - DNA, 25 bp, Homo sapien
gaagttcccctgactgtaaatggtg

SEQ ID NO: 2060271 - DNA, 25 bp, Homo sapien
tttgttccttctgattatgaggtta

SEQ ID NO: 2060272 - DNA, 25 bp, Homo sapien
ttcccctcctatcttgtccctgaag

SEQ ID NO: 2060273 - DNA, 25 bp, Homo sapien
cagtggacccatttggtgaacttcc

SEQ ID NO: 2060274 - DNA, 25 bp, Homo sapien
ggacccatttggtgaacttccaatc

SEQ ID NO: 2060275 - DNA, 25 bp, Homo sapien
gagcttcagtggacccatttggtga

SEQ ID NO: 2060276 - DNA, 25 bp, Homo sapien
cagtggcggcaggtggctcttgagg

SEQ ID NO: 2060277 - DNA, 25 bp, Homo sapien
agcagtggcggcaggtggctcttga

SEQ ID NO: 2060278 - DNA, 25 bp, Homo sapien
caggtggctcttgaggtccctgcag

SEQ ID NO: 2060279 - DNA, 25 bp, Homo sapien
gtggcggcaggtggctcttgaggtc

SEQ ID NO: 2060280 - DNA, 25 bp, Homo sapien
catccagcatgaacctggacccaca

SEQ ID NO: 2060281 - DNA, 25 bp, Homo sapien
ccagcatgaacctggacccacagta

SEQ ID NO: 2060282 - DNA, 25 bp, Homo sapien
gcatgaacctggacccacagtatgc

SEQ ID NO: 2060283 - DNA, 25 bp, Homo sapien
gcatccagcatgaacctggacccac

SEQ ID NO: 2060284 - DNA, 25 bp, Homo sapien
gcctggtcctctgctgggctttacg

SEQ ID NO: 2060285 - DNA, 25 bp, Homo sapien
gagcctggtcctctgctgggcttta

SEQ ID NO: 2060286 - DNA, 25 bp, Homo sapien
tggtcctctgctgggctttacggca

SEQ ID NO: 2060287 - DNA, 25 bp, Homo sapien
tcctctgctgggctttacggcaggg

SEQ ID NO: 2060288 - DNA, 25 bp, Homo sapien
ccccaccttcgtcatgaaggacagt

SEQ ID NO: 2060289 - DNA, 25 bp, Homo sapien
tcatgaaggacagttcctgaacctg

SEQ ID NO: 2060290 - DNA, 25 bp, Homo sapien
aagcaacttggatcatgtcattctc

SEQ ID NO: 2060291 - DNA, 25 bp, Homo sapien
cattctcttgttcaatcacctttga

SEQ ID NO: 2060292 - DNA, 25 bp, Homo sapien
agggaaaggtgagagcgtagcaggt

SEQ ID NO: 2060293 - DNA, 25 bp, Homo sapien
aaaggtgagagcgtagcaggtgctg

SEQ ID NO: 2060294 - DNA, 25 bp, Homo sapien
tgagtccccggattttctcagatca

SEQ ID NO: 2060295 - DNA, 25 bp, Homo sapien
ttcctgtgagtccccggattttctc

SEQ ID NO: 2060296 - DNA, 25 bp, Homo sapien
cattcacagtgcatcagaacttggg

SEQ ID NO: 2060297 - DNA, 25 bp, Homo sapien
gagggaactcttaggactgcttggc

SEQ ID NO: 2060298 - DNA, 25 bp, Homo sapien
cagctcatggttattgtatcggaca

SEQ ID NO: 2060299 - DNA, 25 bp, Homo sapien
cacttgatatctacaggcagctcat

SEQ ID NO: 2060300 - DNA, 25 bp, Homo sapien
tggcctccgtttatcccatttggca

SEQ ID NO: 2060301 - DNA, 25 bp, Homo sapien
gtattcacacttaggccagtgcttc

SEQ ID NO: 2060302 - DNA, 25 bp, Homo sapien
tattcacacttaggccagtgcttct

SEQ ID NO: 2060303 - DNA, 25 bp, Homo sapien
actcggtggcctccgtttatcccat

SEQ ID NO: 2060304 - DNA, 25 bp, Homo sapien
catgcctggtaaggagcagctgcgc

SEQ ID NO: 2060305 - DNA, 25 bp, Homo sapien
taggctcacagcattagtcaacact

SEQ ID NO: 2060306 - DNA, 25 bp, Homo sapien
cggaaattacaggaggagtgccatc

SEQ ID NO: 2060307 - DNA, 25 bp, Homo sapien
cttaacacgttgtgaaccctggagg

SEQ ID NO: 2060308 - DNA, 25 bp, Homo sapien
ggctgagtccctctcattatttctt

SEQ ID NO: 2060309 - DNA, 25 bp, Homo sapien
tatttcagtgactacccaagattgg

SEQ ID NO: 2060310 - DNA, 25 bp, Homo sapien
cagctgcctggataatgatatcatc

SEQ ID NO: 2060311 - DNA, 25 bp, Homo sapien
ataatgatatcatctggctgagtcc

SEQ ID NO: 2060312 - DNA, 25 bp, Homo sapien
tttcggtcataagtctgaatctcca

SEQ ID NO: 2060313 - DNA, 25 bp, Homo sapien
tccacgtgatcatgaagcttatgaa

SEQ ID NO: 2060314 - DNA, 25 bp, Homo sapien
taagtctgaatctccacgtgatcat

SEQ ID NO: 2060315 - DNA, 25 bp, Homo sapien
aagcattgtcccatcttgtgtggaa

SEQ ID NO: 2060316 - DNA, 25 bp, Homo sapien
tgggctcctcgtgcatcactacaca

SEQ ID NO: 2060317 - DNA, 25 bp, Homo sapien
ctctctgggaacctaagagggagga

SEQ ID NO: 2060318 - DNA, 25 bp, Homo sapien
tggaaaacaaggtcgcaaatcaagc

SEQ ID NO: 2060319 - DNA, 25 bp, Homo sapien
tggtaatggaggctgaagcaacccc

SEQ ID NO: 2060320 - DNA, 25 bp, Homo sapien
agacaaatataagacagggaaggtg

SEQ ID NO: 2060321 - DNA, 25 bp, Homo sapien
cagggaaggtgtggatatattatat

SEQ ID NO: 2060322 - DNA, 25 bp, Homo sapien
agacagggaaggtgtggatatatta

SEQ ID NO: 2060323 - DNA, 25 bp, Homo sapien
acaaatataagacagggaaggtgtg

SEQ ID NO: 2060324 - DNA, 25 bp, Homo sapien
taagacacgcaaaggtcagaaaagc

SEQ ID NO: 2060325 - DNA, 25 bp, Homo sapien
tccaggatccagaagattctaacct

SEQ ID NO: 2060326 - DNA, 25 bp, Homo sapien
cctagagtaggacaaagacggaggc

SEQ ID NO: 2060327 - DNA, 25 bp, Homo sapien
caagttactattggcccctccagga

SEQ ID NO: 2060328 - DNA, 25 bp, Homo sapien
gggacaaagacagctgctttggcaa

SEQ ID NO: 2060329 - DNA, 25 bp, Homo sapien
tttcagggacaaagacagctgcttt

SEQ ID NO: 2060330 - DNA, 25 bp, Homo sapien
ctttcagggacaaagacagctgctt

SEQ ID NO: 2060331 - DNA, 25 bp, Homo sapien
tcagggacaaagacagctgctttgg

SEQ ID NO: 2060332 - DNA, 25 bp, Homo sapien
tctcactcctaggtgcacacccaag

SEQ ID NO: 2060333 - DNA, 25 bp, Homo sapien
tggataaaaagatatgtaaggtaga

SEQ ID NO: 2060334 - DNA, 25 bp, Homo sapien
gtaaggtagaatgacctagcaatct

SEQ ID NO: 2060335 - DNA, 25 bp, Homo sapien
aaaagatatgtaaggtagaatgacc

SEQ ID NO: 2060336 - DNA, 25 bp, Homo sapien
ccttcctctcatgatgtgatgccag

SEQ ID NO: 2060337 - DNA, 25 bp, Homo sapien
ccttatgaacggcttagtgctgtcc

SEQ ID NO: 2060338 - DNA, 25 bp, Homo sapien
tggaggaaccctgaaatcattatgc

SEQ ID NO: 2060339 - DNA, 25 bp, Homo sapien
tggttgcaaactccgaatatactaa

SEQ ID NO: 2060340 - DNA, 25 bp, Homo sapien
cccggccttatgagtgacctttaca

SEQ ID NO: 2060341 - DNA, 25 bp, Homo sapien
gtgcccggccttatgagtgaccttt

SEQ ID NO: 2060342 - DNA, 25 bp, Homo sapien
tgcccggccttatgagtgaccttta

SEQ ID NO: 2060343 - DNA, 25 bp, Homo sapien
ggccttatgagtgacctttacacac

SEQ ID NO: 2060344 - DNA, 25 bp, Homo sapien
tagttcatgtgtaacaggcaggtcc

SEQ ID NO: 2060345 - DNA, 25 bp, Homo sapien
taggctggcgtttctcgaaccgtca

SEQ ID NO: 2060346 - DNA, 25 bp, Homo sapien
tgggcccagacagcttgcttaggtc

SEQ ID NO: 2060347 - DNA, 25 bp, Homo sapien
gctggacagactgaagagggtccct

SEQ ID NO: 2060348 - DNA, 25 bp, Homo sapien
ccgtggcaggagaaacgccacggtc

SEQ ID NO: 2060349 - DNA, 25 bp, Homo sapien
gtggcaggagaaacgccacggtcac

SEQ ID NO: 2060350 - DNA, 25 bp, Homo sapien
caggagaaacgccacggtcacaggc

SEQ ID NO: 2060351 - DNA, 25 bp, Homo sapien
tggcaggagaaacgccacggtcaca

SEQ ID NO: 2060352 - DNA, 25 bp, Homo sapien
aaagacctgcatgggtgtcctacag

SEQ ID NO: 2060353 - DNA, 25 bp, Homo sapien
tgctgatgaggcatcgccttcgatg

SEQ ID NO: 2060354 - DNA, 25 bp, Homo sapien
cgatggcccccactggttgtgagga

SEQ ID NO: 2060355 - DNA, 25 bp, Homo sapien
ccccactggttgtgaggaaggcctt

SEQ ID NO: 2060356 - DNA, 25 bp, Homo sapien
tcagcatgaaatagagtactcagcc

SEQ ID NO: 2060357 - DNA, 25 bp, Homo sapien
tagtcttcaaactaggtgagttccc

SEQ ID NO: 2060358 - DNA, 25 bp, Homo sapien
tgtgcaggatgctcaagaggtctga

SEQ ID NO: 2060359 - DNA, 25 bp, Homo sapien
gataggacggctacaataaaaaggc

SEQ ID NO: 2060360 - DNA, 25 bp, Homo sapien
gcagcacagattttcctgaaggcca

SEQ ID NO: 2060361 - DNA, 25 bp, Homo sapien
tacaacgcatatgtgtaggcagcac

SEQ ID NO: 2060362 - DNA, 25 bp, Homo sapien
tccctagggcttatggatggcaagt

SEQ ID NO: 2060363 - DNA, 25 bp, Homo sapien
ttgggagggccacatgtacatttgc

SEQ ID NO: 2060364 - DNA, 25 bp, Homo sapien
tcctgtgagtgtagacaagcttccc

SEQ ID NO: 2060365 - DNA, 25 bp, Homo sapien
gaaagtcccagagcatcactcagat

SEQ ID NO: 2060366 - DNA, 25 bp, Homo sapien
taaactcgagtcctatgaaaatgcc

SEQ ID NO: 2060367 - DNA, 25 bp, Homo sapien
tctggcagcacgacatcaaggtagt

SEQ ID NO: 2060368 - DNA, 25 bp, Homo sapien
ccttctgcgcgaagctgggtaccag

SEQ ID NO: 2060369 - DNA, 25 bp, Homo sapien
agaactggaagtggtctgccactag

SEQ ID NO: 2060370 - DNA, 25 bp, Homo sapien
ttccttctgcgcgaagctgggtacc

SEQ ID NO: 2060371 - DNA, 25 bp, Homo sapien
ccgaccaataagtcgctggagtggg

SEQ ID NO: 2060372 - DNA, 25 bp, Homo sapien
gcagtggcgagagttgctctctgca

SEQ ID NO: 2060373 - DNA, 25 bp, Homo sapien
tttcggaagaggtgcgtggccccac

SEQ ID NO: 2060374 - DNA, 25 bp, Homo sapien
tctctcctatttcggaagaggtgcg

SEQ ID NO: 2060375 - DNA, 25 bp, Homo sapien
aaaggagcccgctggcgtgggccgg

SEQ ID NO: 2060376 - DNA, 25 bp, Homo sapien
tccccgcagcgcgtagcgagaatgc

SEQ ID NO: 2060377 - DNA, 25 bp, Homo sapien
gcgtagcgagaatgcccgcagcgct

SEQ ID NO: 2060378 - DNA, 25 bp, Homo sapien
gagttgaacgctttgcggacgccgc

SEQ ID NO: 2060379 - DNA, 25 bp, Homo sapien
agttgaacgctttgcggacgccgcc

SEQ ID NO: 2060380 - DNA, 25 bp, Homo sapien
ggcgggccgaggccgccgcagaccc

SEQ ID NO: 2060381 - DNA, 25 bp, Homo sapien
gaggcgggccgaggccgccgcagac

SEQ ID NO: 2060382 - DNA, 25 bp, Homo sapien
ctagcccagaggcgggccgaggccg

SEQ ID NO: 2060383 - DNA, 25 bp, Homo sapien
cgggccgaggccgccgcagacccac

SEQ ID NO: 2060384 - DNA, 25 bp, Homo sapien
gctcgtgcccgggccgtgtcctgag

SEQ ID NO: 2060385 - DNA, 25 bp, Homo sapien
gctgggaatccacgcggccgcgctg

SEQ ID NO: 2060386 - DNA, 25 bp, Homo sapien
ggctgggaatccacgcggccgcgct

SEQ ID NO: 2060387 - DNA, 25 bp, Homo sapien
cgcgctcgtgcccgggccgtgtcct

SEQ ID NO: 2060388 - DNA, 25 bp, Homo sapien
gccgcagccggcgggaggttgtcat

SEQ ID NO: 2060389 - DNA, 25 bp, Homo sapien
tgccgcagccggcgggaggttgtca

SEQ ID NO: 2060390 - DNA, 25 bp, Homo sapien
ctgccgcagccggcgggaggttgtc

SEQ ID NO: 2060391 - DNA, 25 bp, Homo sapien
ggttttgagagagcactccctcccc

SEQ ID NO: 2060392 - DNA, 25 bp, Homo sapien
cactcgcgcgttacgcttcacttta

SEQ ID NO: 2060393 - DNA, 25 bp, Homo sapien
cgttacgcttcactttatgacacca

SEQ ID NO: 2060394 - DNA, 25 bp, Homo sapien
aggacgatctcaccactcgcgcgtt

SEQ ID NO: 2060395 - DNA, 25 bp, Homo sapien
ggacgatctcaccactcgcgcgtta

SEQ ID NO: 2060396 - DNA, 25 bp, Homo sapien
tcttcaacaatcagggactatgcca

SEQ ID NO: 2060397 - DNA, 25 bp, Homo sapien
tgttttccaccaactacacaccaga

SEQ ID NO: 2060398 - DNA, 25 bp, Homo sapien
taaaacaccatgtgccacagaagtc

SEQ ID NO: 2060399 - DNA, 25 bp, Homo sapien
cacacttgctgttgatatgtcctag

SEQ ID NO: 2060400 - DNA, 25 bp, Homo sapien
cacccagccctgcttcggtaatttt

SEQ ID NO: 2060401 - DNA, 25 bp, Homo sapien
caaatcgccagggtagtgggtcaga

SEQ ID NO: 2060402 - DNA, 25 bp, Homo sapien
caatgtgggccaagacaaatcgcca

SEQ ID NO: 2060403 - DNA, 25 bp, Homo sapien
catagatcaaaacaacgagcttggc

SEQ ID NO: 2060404 - DNA, 25 bp, Homo sapien
tgaagtagacttgatggacccagtc

SEQ ID NO: 2060405 - DNA, 25 bp, Homo sapien
cagtgagttctaggacaaatgcaaa

SEQ ID NO: 2060406 - DNA, 25 bp, Homo sapien
aaggctgtagatgctgtttccggga

SEQ ID NO: 2060407 - DNA, 25 bp, Homo sapien
taagtagctctctgtctcgcatagt

SEQ ID NO: 2060408 - DNA, 25 bp, Homo sapien
aaaacagactatggccttgtccaag

SEQ ID NO: 2060409 - DNA, 25 bp, Homo sapien
agatgatccagagccttagggatac

SEQ ID NO: 2060410 - DNA, 25 bp, Homo sapien
ccttctcagtgctatgacatttgtg

SEQ ID NO: 2060411 - DNA, 25 bp, Homo sapien
tgtggtcatctcattgcaggaaggg

SEQ ID NO: 2060412 - DNA, 25 bp, Homo sapien
aatgtaaacgatttccttctcagtg

SEQ ID NO: 2060413 - DNA, 25 bp, Homo sapien
tagtttagtgcaaaccaatctaggg

SEQ ID NO: 2060414 - DNA, 25 bp, Homo sapien
ggtgcctatcaggaacgacaggtga

SEQ ID NO: 2060415 - DNA, 25 bp, Homo sapien
caaaggtgcctatcaggaacgacag

SEQ ID NO: 2060416 - DNA, 25 bp, Homo sapien
ggctgccaaaggtgcctatcaggaa

SEQ ID NO: 2060417 - DNA, 25 bp, Homo sapien
tatcaggaacgacaggtgatttgct

SEQ ID NO: 2060418 - DNA, 25 bp, Homo sapien
tgccagacccggctgtagttatcag

SEQ ID NO: 2060419 - DNA, 25 bp, Homo sapien
cttctaccggaaacagagccacggg

SEQ ID NO: 2060420 - DNA, 25 bp, Homo sapien
gttaccgcctgagaggccggcgcct

SEQ ID NO: 2060421 - DNA, 25 bp, Homo sapien
ctccaggcagggcttcgtgccagac

SEQ ID NO: 2060422 - DNA, 25 bp, Homo sapien
taggggcgctggaatgactgatgtc

SEQ ID NO: 2060423 - DNA, 25 bp, Homo sapien
aatggggcccgttggtcctcagtga

SEQ ID NO: 2060424 - DNA, 25 bp, Homo sapien
tcagtgaagcggcagctactgggcc

SEQ ID NO: 2060425 - DNA, 25 bp, Homo sapien
gctttattggagaggccccaaagat

SEQ ID NO: 2060426 - DNA, 25 bp, Homo sapien
ccggtcccagcaacaagcgggagag

SEQ ID NO: 2060427 - DNA, 25 bp, Homo sapien
tcccggtcccagcaacaagcgggag

SEQ ID NO: 2060428 - DNA, 25 bp, Homo sapien
ggtcccagcaacaagcgggagagga

SEQ ID NO: 2060429 - DNA, 25 bp, Homo sapien
ttcccggtcccagcaacaagcggga

SEQ ID NO: 2060430 - DNA, 25 bp, Homo sapien
cgtgtcatccttgaacaggggctat

SEQ ID NO: 2060431 - DNA, 25 bp, Homo sapien
taaagatatggactgcttcacgaat

SEQ ID NO: 2060432 - DNA, 25 bp, Homo sapien
ttgcgtgtcatccttgaacaggggc

SEQ ID NO: 2060433 - DNA, 25 bp, Homo sapien
tcattcctattctagtatatgtgct

SEQ ID NO: 2060434 - DNA, 25 bp, Homo sapien
agcaactatgcggctggaaggagcc

SEQ ID NO: 2060435 - DNA, 25 bp, Homo sapien
tcagcaactatgcggctggaaggag

SEQ ID NO: 2060436 - DNA, 25 bp, Homo sapien
cagcaactatgcggctggaaggagc

SEQ ID NO: 2060437 - DNA, 25 bp, Homo sapien
gcaactatgcggctggaaggagcct

SEQ ID NO: 2060438 - DNA, 25 bp, Homo sapien
acctcctggcctccatcagtgggag

SEQ ID NO: 2060439 - DNA, 25 bp, Homo sapien
gcggctgggaatctgcccaggacct

SEQ ID NO: 2060440 - DNA, 25 bp, Homo sapien
ttaggtttctcagccggagctgcag

SEQ ID NO: 2060441 - DNA, 25 bp, Homo sapien
ggagattcgggtgacctcctggcct

SEQ ID NO: 2060442 - DNA, 25 bp, Homo sapien
ccttcactgggctggcaagtcgagg

SEQ ID NO: 2060443 - DNA, 25 bp, Homo sapien
cgccacatcgttgcacacttatttt

SEQ ID NO: 2060444 - DNA, 25 bp, Homo sapien
ttgactgacgtgacccacggggcca

SEQ ID NO: 2060445 - DNA, 25 bp, Homo sapien
tcgagggcaatgatagccctcagtt

SEQ ID NO: 2060446 - DNA, 25 bp, Homo sapien
tccacatgggtgaattcttctataa

SEQ ID NO: 2060447 - DNA, 25 bp, Homo sapien
cacatgggtgaattcttctataacc

SEQ ID NO: 2060448 - DNA, 25 bp, Homo sapien
atgggtgaattcttctataacctgg

SEQ ID NO: 2060449 - DNA, 25 bp, Homo sapien
tttccacatgggtgaattcttctat

SEQ ID NO: 2060450 - DNA, 25 bp, Homo sapien
taagccacagaactaaaaaagcaaa

SEQ ID NO: 2060451 - DNA, 25 bp, Homo sapien
ggaacattgttaagccacagaacta

SEQ ID NO: 2060452 - DNA, 25 bp, Homo sapien
ttcccaggaacattgttaagccaca

SEQ ID NO: 2060453 - DNA, 25 bp, Homo sapien
tgttaagccacagaactaaaaaagc

SEQ ID NO: 2060454 - DNA, 25 bp, Homo sapien
agcaccgatgccttagttttaaatt

SEQ ID NO: 2060455 - DNA, 25 bp, Homo sapien
aagcaccgatgccttagttttaaat

SEQ ID NO: 2060456 - DNA, 25 bp, Homo sapien
ggcacaaagcatttgctacctcagc

SEQ ID NO: 2060457 - DNA, 25 bp, Homo sapien
cctcagcgagggacaaattcgacat

SEQ ID NO: 2060458 - DNA, 25 bp, Homo sapien
aagcatttgctacctcagcgaggga

SEQ ID NO: 2060459 - DNA, 25 bp, Homo sapien
caaagcatttgctacctcagcgagg

SEQ ID NO: 2060460 - DNA, 25 bp, Homo sapien
gggcacagcacttataatcggcatg

SEQ ID NO: 2060461 - DNA, 25 bp, Homo sapien
cacaaaattggtgttgttcttcttg

SEQ ID NO: 2060462 - DNA, 25 bp, Homo sapien
tataatcggcatgtgacacaaaatt

SEQ ID NO: 2060463 - DNA, 25 bp, Homo sapien
ctttcttgggcacagcacttataat

SEQ ID NO: 2060464 - DNA, 25 bp, Homo sapien
ggagcatccatggtgaaatatgtgc

SEQ ID NO: 2060465 - DNA, 25 bp, Homo sapien
tttatgcagagtggtgatattgcgg

SEQ ID NO: 2060466 - DNA, 25 bp, Homo sapien
tgtctgaactaaaatctagaaaggg

SEQ ID NO: 2060467 - DNA, 25 bp, Homo sapien
tctgtccattgcaggagcatccatg

SEQ ID NO: 2060468 - DNA, 25 bp, Homo sapien
tgctggcgaaatcatcatcaggtgc

SEQ ID NO: 2060469 - DNA, 25 bp, Homo sapien
tagactgagcggaccatgagcacag

SEQ ID NO: 2060470 - DNA, 25 bp, Homo sapien
agaattccggttaacagcatagagc

SEQ ID NO: 2060471 - DNA, 25 bp, Homo sapien
gatgagacaccatatcgtacttgag

SEQ ID NO: 2060472 - DNA, 25 bp, Homo sapien
cagctggagtttgcacaaagggaaa

SEQ ID NO: 2060473 - DNA, 25 bp, Homo sapien
taatcggcagggataaagagtggcc

SEQ ID NO: 2060474 - DNA, 25 bp, Homo sapien
cagcaaagtcttttcacgactgggt

SEQ ID NO: 2060475 - DNA, 25 bp, Homo sapien
gaaatgcattttagtctggcagcaa

SEQ ID NO: 2060476 - DNA, 25 bp, Homo sapien
cactgcagcctgagggtttcaccga

SEQ ID NO: 2060477 - DNA, 25 bp, Homo sapien
tcacaacgcagtggataagagccaa

SEQ ID NO: 2060478 - DNA, 25 bp, Homo sapien
gacacatttggttcttgccccaagg

SEQ ID NO: 2060479 - DNA, 25 bp, Homo sapien
gagacttcacccataactgagggca

SEQ ID NO: 2060480 - DNA, 25 bp, Homo sapien
gcttcggccacatcttggagatcca

SEQ ID NO: 2060481 - DNA, 25 bp, Homo sapien
ctgggcttcggccacatcttggaga

SEQ ID NO: 2060482 - DNA, 25 bp, Homo sapien
gcctgggcttcggccacatcttgga

SEQ ID NO: 2060483 - DNA, 25 bp, Homo sapien
tcggccacatcttggagatccagtc

SEQ ID NO: 2060484 - DNA, 25 bp, Homo sapien
taaccttatccaaatgtgcttgagt

SEQ ID NO: 2060485 - DNA, 25 bp, Homo sapien
caaatgtgccatagatcatcttttg

SEQ ID NO: 2060486 - DNA, 25 bp, Homo sapien
ccctctgcattgtcctccaaatgtg

SEQ ID NO: 2060487 - DNA, 25 bp, Homo sapien
agccaggtcaataaccttatccaaa

SEQ ID NO: 2060488 - DNA, 25 bp, Homo sapien
ggattcgtgacagccttgagagctt

SEQ ID NO: 2060489 - DNA, 25 bp, Homo sapien
gaaggactcttttaggattcgtgac

SEQ ID NO: 2060490 - DNA, 25 bp, Homo sapien
gactcttttaggattcgtgacagcc

SEQ ID NO: 2060491 - DNA, 25 bp, Homo sapien
ttttaggattcgtgacagccttgag

SEQ ID NO: 2060492 - DNA, 25 bp, Homo sapien
gcaacacgagtgacccaaataccac

SEQ ID NO: 2060493 - DNA, 25 bp, Homo sapien
caaataccactgcagcgagcatcaa

SEQ ID NO: 2060494 - DNA, 25 bp, Homo sapien
gtcaaatgtggacccaaccttgaaa

SEQ ID NO: 2060495 - DNA, 25 bp, Homo sapien
cacagtcaaatgtggacccaacctt

SEQ ID NO: 2060496 - DNA, 25 bp, Homo sapien
tccaccccaaccatgggctcctcca

SEQ ID NO: 2060497 - DNA, 25 bp, Homo sapien
ctgagaagagaccgtggcagacgaa

SEQ ID NO: 2060498 - DNA, 25 bp, Homo sapien
agaagagaccgtggcagacgaagaa

SEQ ID NO: 2060499 - DNA, 25 bp, Homo sapien
cattgctgagaagagaccgtggcag

SEQ ID NO: 2060500 - DNA, 25 bp, Homo sapien
tatggatttgttgattcctcctcct

SEQ ID NO: 2060501 - DNA, 25 bp, Homo sapien
aatccatccgtggatttgctgattg

SEQ ID NO: 2060502 - DNA, 25 bp, Homo sapien
tgtcatggcactgtttgggggagtt

SEQ ID NO: 2060503 - DNA, 25 bp, Homo sapien
ttcttcaatccatccgtggatttgc

SEQ ID NO: 2060504 - DNA, 25 bp, Homo sapien
tcaagcgaagagagccttcggaagg

SEQ ID NO: 2060505 - DNA, 25 bp, Homo sapien
ccttcggaaggttgccatgaccact

SEQ ID NO: 2060506 - DNA, 25 bp, Homo sapien
gaaggttgccatgaccacttagcat

SEQ ID NO: 2060507 - DNA, 25 bp, Homo sapien
gaagagagccttcggaaggttgcca

SEQ ID NO: 2060508 - DNA, 25 bp, Homo sapien
ctgggcagcttctggatgtagttct

SEQ ID NO: 2060509 - DNA, 25 bp, Homo sapien
gcagcttctggatgtagttcttcat

SEQ ID NO: 2060510 - DNA, 25 bp, Homo sapien
gggcagcttctggatgtagttcttc

SEQ ID NO: 2060511 - DNA, 25 bp, Homo sapien
tctgggcagcttctggatgtagttc

SEQ ID NO: 2060512 - DNA, 25 bp, Homo sapien
tcaaccatcactaatagcaagaatc

SEQ ID NO: 2060513 - DNA, 25 bp, Homo sapien
tagcaagaatcttccacgctagatg

SEQ ID NO: 2060514 - DNA, 25 bp, Homo sapien
aatagcaagaatcttccacgctaga

SEQ ID NO: 2060515 - DNA, 25 bp, Homo sapien
caaccatcactaatagcaagaatct

SEQ ID NO: 2060516 - DNA, 25 bp, Homo sapien
caaagtggtactgatacttgccaaa

SEQ ID NO: 2060517 - DNA, 25 bp, Homo sapien
ttgccaaagagatgaatgccatcta

SEQ ID NO: 2060518 - DNA, 25 bp, Homo sapien
tgccaaagagatgaatgccatctaa

SEQ ID NO: 2060519 - DNA, 25 bp, Homo sapien
acaaagtggtactgatacttgccaa

SEQ ID NO: 2060520 - DNA, 25 bp, Homo sapien
atttttcaaaccacacatcagagcc

SEQ ID NO: 2060521 - DNA, 25 bp, Homo sapien
ttttcaaaccacacatcagagccat

SEQ ID NO: 2060522 - DNA, 25 bp, Homo sapien
tttttcaaaccacacatcagagcca

SEQ ID NO: 2060523 - DNA, 25 bp, Homo sapien
aatggaatcatacccccaaaagtat

SEQ ID NO: 2060524 - DNA, 25 bp, Homo sapien
tatatcttcacactagacaaaatag

SEQ ID NO: 2060525 - DNA, 25 bp, Homo sapien
tagaagataaagataggctaaaaca

SEQ ID NO: 2060526 - DNA, 25 bp, Homo sapien
acttttttaatacatggatacattt

SEQ ID NO: 2060527 - DNA, 25 bp, Homo sapien
ccggtaccctccctgcaggatgctg

SEQ ID NO: 2060528 - DNA, 25 bp, Homo sapien
ctccggtaccctccctgcaggatgc

SEQ ID NO: 2060529 - DNA, 25 bp, Homo sapien
tccggtaccctccctgcaggatgct

SEQ ID NO: 2060530 - DNA, 25 bp, Homo sapien
cttgagagaagacgcacgcagttcc

SEQ ID NO: 2060531 - DNA, 25 bp, Homo sapien
gtcgctgggaacagacctcgcacta

SEQ ID NO: 2060532 - DNA, 25 bp, Homo sapien
tccgaggcttggaggaactgtgtgc

SEQ ID NO: 2060533 - DNA, 25 bp, Homo sapien
acgcagttcccgtgcgtgtcgctgg

SEQ ID NO: 2060534 - DNA, 25 bp, Homo sapien
cgcgccgctgtcagagtctcgtggc

SEQ ID NO: 2060535 - DNA, 25 bp, Homo sapien
gcgcctcccgcacttggctccggga

SEQ ID NO: 2060536 - DNA, 25 bp, Homo sapien
cgccgccggtgtccgccggtccctg

SEQ ID NO: 2060537 - DNA, 25 bp, Homo sapien
gggacgcagtcctggcgtcctcctt

SEQ ID NO: 2060538 - DNA, 25 bp, Homo sapien
tctacccgaaagtcgggagcaagga

SEQ ID NO: 2060539 - DNA, 25 bp, Homo sapien
aaatgctctcggcactccagcgagc

SEQ ID NO: 2060540 - DNA, 25 bp, Homo sapien
gaaataaaacaactcggcaactgct

SEQ ID NO: 2060541 - DNA, 25 bp, Homo sapien
cccggcgcacggctatttttacaga

SEQ ID NO: 2060542 - DNA, 25 bp, Homo sapien
ctgaaaccgcaagcttgccgcaccc

SEQ ID NO: 2060543 - DNA, 25 bp, Homo sapien
gggcgccgaatctcagcgggcaatc

SEQ ID NO: 2060544 - DNA, 25 bp, Homo sapien
tctcagcgggcaatcgcgctcggcg

SEQ ID NO: 2060545 - DNA, 25 bp, Homo sapien
cgccgaatctcagcgggcaatcgcg

SEQ ID NO: 2060546 - DNA, 25 bp, Homo sapien
tggcgcccaggagaggcgagatggc

SEQ ID NO: 2060547 - DNA, 25 bp, Homo sapien
gagaggcgagatggcgaatcccggc

SEQ ID NO: 2060548 - DNA, 25 bp, Homo sapien
gagatggcgaatcccggccgcctag

SEQ ID NO: 2060549 - DNA, 25 bp, Homo sapien
cccaggagaggcgagatggcgaatc

SEQ ID NO: 2060550 - DNA, 25 bp, Homo sapien
ggatagtctatcgtggaacctaagg

SEQ ID NO: 2060551 - DNA, 25 bp, Homo sapien
aacctaaggtatgttcaggctcagg

SEQ ID NO: 2060552 - DNA, 25 bp, Homo sapien
taatatatctcgctttcagcagctg

SEQ ID NO: 2060553 - DNA, 25 bp, Homo sapien
caaatgaacagtttggacagccatc

SEQ ID NO: 2060554 - DNA, 25 bp, Homo sapien
gaatgtgaggctgacttatcatcag

SEQ ID NO: 2060555 - DNA, 25 bp, Homo sapien
aagtcttggcaaactaggaattgca

SEQ ID NO: 2060556 - DNA, 25 bp, Homo sapien
tcattccaaaagcaaggacgataca

SEQ ID NO: 2060557 - DNA, 25 bp, Homo sapien
tatgggctcggacacaatagttctg

SEQ ID NO: 2060558 - DNA, 25 bp, Homo sapien
gcagttacctattgtctcgatgggc

SEQ ID NO: 2060559 - DNA, 25 bp, Homo sapien
aaggcatcctgggtaaggccacggt

SEQ ID NO: 2060560 - DNA, 25 bp, Homo sapien
caagggaaatatgtgcaagcagctc

SEQ ID NO: 2060561 - DNA, 25 bp, Homo sapien
tgcaaccacgtagcaatggaacagt

SEQ ID NO: 2060562 - DNA, 25 bp, Homo sapien
caaaagctgtcacaagtatgactca

SEQ ID NO: 2060563 - DNA, 25 bp, Homo sapien
tacccaaaagctgtcacaagtatga

SEQ ID NO: 2060564 - DNA, 25 bp, Homo sapien
ttctggtctacccaaaagctgtcac

SEQ ID NO: 2060565 - DNA, 25 bp, Homo sapien
ggtctacccaaaagctgtcacaagt

SEQ ID NO: 2060566 - DNA, 25 bp, Homo sapien
cgggtgcattcaagggggtatgggc

SEQ ID NO: 2060567 - DNA, 25 bp, Homo sapien
agacaagttcgggtgcattcaaggg

SEQ ID NO: 2060568 - DNA, 25 bp, Homo sapien
gggtgcattcaagggggtatgggca

SEQ ID NO: 2060569 - DNA, 25 bp, Homo sapien
atcagacaagttcgggtgcattcaa

SEQ ID NO: 2060570 - DNA, 25 bp, Homo sapien
catggttgcccgactcatagaagtg

SEQ ID NO: 2060571 - DNA, 25 bp, Homo sapien
acgtcctgcttggagccatgcacca

SEQ ID NO: 2060572 - DNA, 25 bp, Homo sapien
gcatggttgcccgactcatagaagt

SEQ ID NO: 2060573 - DNA, 25 bp, Homo sapien
tgcaccagccaaatgttggcatggt

SEQ ID NO: 2060574 - DNA, 25 bp, Homo sapien
caaatcggtggacccgttgcggtct

SEQ ID NO: 2060575 - DNA, 25 bp, Homo sapien
ctgtcgtctagacagggcgcagccc

SEQ ID NO: 2060576 - DNA, 25 bp, Homo sapien
tgtgtctgtggcagcgggcgtgtgt

SEQ ID NO: 2060577 - DNA, 25 bp, Homo sapien
cccttccccggtgactgattgtgtc

SEQ ID NO: 2060578 - DNA, 25 bp, Homo sapien
ctccggctcgggttcatcaggacga

SEQ ID NO: 2060579 - DNA, 25 bp, Homo sapien
ccacctctgggtggcgagtgacccg

SEQ ID NO: 2060580 - DNA, 25 bp, Homo sapien
ccgcgcgcctgagccgagtgtttct

SEQ ID NO: 2060581 - DNA, 25 bp, Homo sapien
acgagcaggtaactgtcccgggcgc

SEQ ID NO: 2060582 - DNA, 25 bp, Homo sapien
gggagagagtcagcgactgccaacc

SEQ ID NO: 2060583 - DNA, 25 bp, Homo sapien
agagtcagcgactgccaaccgcagc

SEQ ID NO: 2060584 - DNA, 25 bp, Homo sapien
ccgctgccttcgcagaccggggaga

SEQ ID NO: 2060585 - DNA, 25 bp, Homo sapien
cgttctatgggtgtgcgtgcccgcg

SEQ ID NO: 2060586 - DNA, 25 bp, Homo sapien
cgtctggtcccagatattgtcctct

SEQ ID NO: 2060587 - DNA, 25 bp, Homo sapien
ctggtcccagatattgtcctctaat

SEQ ID NO: 2060588 - DNA, 25 bp, Homo sapien
tctggtcccagatattgtcctctaa

SEQ ID NO: 2060589 - DNA, 25 bp, Homo sapien
gtctggtcccagatattgtcctcta

SEQ ID NO: 2060590 - DNA, 25 bp, Homo sapien
gccaggcggccatgggactggtgag

SEQ ID NO: 2060591 - DNA, 25 bp, Homo sapien
ggactggtgaggcagtaacaggctc

SEQ ID NO: 2060592 - DNA, 25 bp, Homo sapien
gagccaggcggccatgggactggtg

SEQ ID NO: 2060593 - DNA, 25 bp, Homo sapien
actggtgaggcagtaacaggctctc

SEQ ID NO: 2060594 - DNA, 25 bp, Homo sapien
gtgctctgccactggcatgaaggac

SEQ ID NO: 2060595 - DNA, 25 bp, Homo sapien
gatggctggacgtgcctggatgtgc

SEQ ID NO: 2060596 - DNA, 25 bp, Homo sapien
tcagatggctggacgtgcctggatg

SEQ ID NO: 2060597 - DNA, 25 bp, Homo sapien
tgctctgccactggcatgaaggacc

SEQ ID NO: 2060598 - DNA, 25 bp, Homo sapien
tgcacaaggtagaaatgatccccac

SEQ ID NO: 2060599 - DNA, 25 bp, Homo sapien
ctctttgcacaaggtagaaatgatc

SEQ ID NO: 2060600 - DNA, 25 bp, Homo sapien
ctttgcacaaggtagaaatgatccc

SEQ ID NO: 2060601 - DNA, 25 bp, Homo sapien
tttgcacaaggtagaaatgatcccc

SEQ ID NO: 2060602 - DNA, 25 bp, Homo sapien
ctcctctaggtgaaacaaaaacgtg

SEQ ID NO: 2060603 - DNA, 25 bp, Homo sapien
cttgtgccaggtttgttctaggctt

SEQ ID NO: 2060604 - DNA, 25 bp, Homo sapien
tgagtgacgtccacaaaagcgtgtg

SEQ ID NO: 2060605 - DNA, 25 bp, Homo sapien
tggttgcctgcagcctcattcgcac

SEQ ID NO: 2060606 - DNA, 25 bp, Homo sapien
cgtttgcctttaggcccaggtggct

SEQ ID NO: 2060607 - DNA, 25 bp, Homo sapien
caagttgagccaaagacctctgtgt

SEQ ID NO: 2060608 - DNA, 25 bp, Homo sapien
gatggggtaattcccggaatgcaga

SEQ ID NO: 2060609 - DNA, 25 bp, Homo sapien
cgtggcaagccttggaggcccaagt

SEQ ID NO: 2060610 - DNA, 25 bp, Homo sapien
agaggttatgcctttgtagggttgt

SEQ ID NO: 2060611 - DNA, 25 bp, Homo sapien
cactgcgatggaggcaccctcttca

SEQ ID NO: 2060612 - DNA, 25 bp, Homo sapien
ggccgaggcaggcactgcgatggag

SEQ ID NO: 2060613 - DNA, 25 bp, Homo sapien
gcagtggagaggttatgcctttgta

SEQ ID NO: 2060614 - DNA, 25 bp, Homo sapien
gttgcatagagaccctgtgacatgg

SEQ ID NO: 2060615 - DNA, 25 bp, Homo sapien
agttgcatagagaccctgtgacatg

SEQ ID NO: 2060616 - DNA, 25 bp, Homo sapien
gcatagagaccctgtgacatggaca

SEQ ID NO: 2060617 - DNA, 25 bp, Homo sapien
tgcatagagaccctgtgacatggac

SEQ ID NO: 2060618 - DNA, 25 bp, Homo sapien
ttggatgacttccctggctgagcca

SEQ ID NO: 2060619 - DNA, 25 bp, Homo sapien
tggatgacttccctggctgagccat

SEQ ID NO: 2060620 - DNA, 25 bp, Homo sapien
attggatgacttccctggctgagcc

SEQ ID NO: 2060621 - DNA, 25 bp, Homo sapien
tattactgatgtcaccgtctgtgtg

SEQ ID NO: 2060622 - DNA, 25 bp, Homo sapien
tgtgatgtggagactttgcaagctg

SEQ ID NO: 2060623 - DNA, 25 bp, Homo sapien
catcagtgacgcgttcttggcggag

SEQ ID NO: 2060624 - DNA, 25 bp, Homo sapien
gcaagctgttttccacggagtccaa

SEQ ID NO: 2060625 - DNA, 25 bp, Homo sapien
gctgagaaatcgctggtgtgctgta

SEQ ID NO: 2060626 - DNA, 25 bp, Homo sapien
aacagctgagaaatcgctggtgtgc

SEQ ID NO: 2060627 - DNA, 25 bp, Homo sapien
tgagaaatcgctggtgtgctgtagc

SEQ ID NO: 2060628 - DNA, 25 bp, Homo sapien
cagctgagaaatcgctggtgtgctg

SEQ ID NO: 2060629 - DNA, 25 bp, Homo sapien
ctcccatgctctgggtacctgtcat

SEQ ID NO: 2060630 - DNA, 25 bp, Homo sapien
ttgctgccgatgtccctcccatgct

SEQ ID NO: 2060631 - DNA, 25 bp, Homo sapien
ggtctgcatgacattagtcatgaat

SEQ ID NO: 2060632 - DNA, 25 bp, Homo sapien
tgctctgggtacctgtcatatttga

SEQ ID NO: 2060633 - DNA, 25 bp, Homo sapien
gtggccacgttgattggtttacttc

SEQ ID NO: 2060634 - DNA, 25 bp, Homo sapien
caaacacgtggccacgttgattggt

SEQ ID NO: 2060635 - DNA, 25 bp, Homo sapien
cgttgattggtttacttccagtcct

SEQ ID NO: 2060636 - DNA, 25 bp, Homo sapien
ttgattggtttacttccagtcctcc

SEQ ID NO: 2060637 - DNA, 25 bp, Homo sapien
gagcagagatccaaaccccttgtaa

SEQ ID NO: 2060638 - DNA, 25 bp, Homo sapien
tggaagagcagagatccaaacccct

SEQ ID NO: 2060639 - DNA, 25 bp, Homo sapien
gtggaagagcagagatccaaacccc

SEQ ID NO: 2060640 - DNA, 25 bp, Homo sapien
gaagagcagagatccaaaccccttg

SEQ ID NO: 2060641 - DNA, 25 bp, Homo sapien
ggaggaacactcagtgtcgcgtgat

SEQ ID NO: 2060642 - DNA, 25 bp, Homo sapien
gcgtgatgtgttcccctgtcctctg

SEQ ID NO: 2060643 - DNA, 25 bp, Homo sapien
ttggaagatcaaatatgtggccttc

SEQ ID NO: 2060644 - DNA, 25 bp, Homo sapien
ctttggaagatcaaatatgtggcct

SEQ ID NO: 2060645 - DNA, 25 bp, Homo sapien
cagggtgtgatactgactgagtttc

SEQ ID NO: 2060646 - DNA, 25 bp, Homo sapien
cttgatattgcaagtcgtggcctcc

SEQ ID NO: 2060647 - DNA, 25 bp, Homo sapien
cctggtgtcagggtgtgatactgac

SEQ ID NO: 2060648 - DNA, 25 bp, Homo sapien
gtggcctccattcccctgggatgat

SEQ ID NO: 2060649 - DNA, 25 bp, Homo sapien
cccaggaccaggtggtagcaacggt

SEQ ID NO: 2060650 - DNA, 25 bp, Homo sapien
caggtggtagcaacggtatttaggt

SEQ ID NO: 2060651 - DNA, 25 bp, Homo sapien
taggtttttaaggtgggtgatgtca

SEQ ID NO: 2060652 - DNA, 25 bp, Homo sapien
ctgtgtttccgccccaggaccaggt

SEQ ID NO: 2060653 - DNA, 25 bp, Homo sapien
caggtggcgcatcctccaaaactct

SEQ ID NO: 2060654 - DNA, 25 bp, Homo sapien
aactctttgaagaatctacattttt

SEQ ID NO: 2060655 - DNA, 25 bp, Homo sapien
taggaggggctagagcatccaagca

SEQ ID NO: 2060656 - DNA, 25 bp, Homo sapien
cagcctgaagaggttctctgggact

SEQ ID NO: 2060657 - DNA, 25 bp, Homo sapien
catagccgtggaagtttgggaccca

SEQ ID NO: 2060658 - DNA, 25 bp, Homo sapien
cctgcctttgtgtcaaccaggaggc

SEQ ID NO: 2060659 - DNA, 25 bp, Homo sapien
ccatatttagtctggaatccagcct

SEQ ID NO: 2060660 - DNA, 25 bp, Homo sapien
tggtggtatgcgagtccatagccgt

SEQ ID NO: 2060661 - DNA, 25 bp, Homo sapien
tgggcatcatcagggggctctgtat

SEQ ID NO: 2060662 - DNA, 25 bp, Homo sapien
ctgggcatcatcagggggctctgta

SEQ ID NO: 2060663 - DNA, 25 bp, Homo sapien
cctgggcatcatcagggggctctgt

SEQ ID NO: 2060664 - DNA, 25 bp, Homo sapien
caggtgcacgttgtgaccttgttgg

SEQ ID NO: 2060665 - DNA, 25 bp, Homo sapien
ttggaaacaccaggtgcacgttgtg

SEQ ID NO: 2060666 - DNA, 25 bp, Homo sapien
aaaaagcaaggtgccggaaatccat

SEQ ID NO: 2060667 - DNA, 25 bp, Homo sapien
caaaaagcaaggtgccggaaatcca

SEQ ID NO: 2060668 - DNA, 25 bp, Homo sapien
ttccccgcttttctgaagctggggc

SEQ ID NO: 2060669 - DNA, 25 bp, Homo sapien
ggtggacgggcagaggagggccatg

SEQ ID NO: 2060670 - DNA, 25 bp, Homo sapien
gaagtgatgtattctcctgttcccc

SEQ ID NO: 2060671 - DNA, 25 bp, Homo sapien
tctgggccccgctgcggaacaggga

SEQ ID NO: 2060672 - DNA, 25 bp, Homo sapien
cccactcggagttgctgagggacca

SEQ ID NO: 2060673 - DNA, 25 bp, Homo sapien
gcctggaattgtctgagacactgaa

SEQ ID NO: 2060674 - DNA, 25 bp, Homo sapien
aaaggggagtatttgtcccattgag

SEQ ID NO: 2060675 - DNA, 25 bp, Homo sapien
actcggagttgctgagggaccacgt

SEQ ID NO: 2060676 - DNA, 25 bp, Homo sapien
gggagaaccatcagcagccatgcat

SEQ ID NO: 2060677 - DNA, 25 bp, Homo sapien
catgacacagtggtccttcgggcct

SEQ ID NO: 2060678 - DNA, 25 bp, Homo sapien
tgctgacaactagctcctataggga

SEQ ID NO: 2060679 - DNA, 25 bp, Homo sapien
tagaagtgtgcgctgtgattcccct

SEQ ID NO: 2060680 - DNA, 25 bp, Homo sapien
ctggtctccagggtagctccttggg

SEQ ID NO: 2060681 - DNA, 25 bp, Homo sapien
gtggattgcgttctgtggccctgcc

SEQ ID NO: 2060682 - DNA, 25 bp, Homo sapien
catctcaatccatggtatccaagtg

SEQ ID NO: 2060683 - DNA, 25 bp, Homo sapien
ggccctgccatctcaatccatggta

SEQ ID NO: 2060684 - DNA, 25 bp, Homo sapien
aggaggtagacctggaactgggcct

SEQ ID NO: 2060685 - DNA, 25 bp, Homo sapien
ttatgcccctccatgcatttgtgcc

SEQ ID NO: 2060686 - DNA, 25 bp, Homo sapien
aggtagacctggaactgggccttgg

SEQ ID NO: 2060687 - DNA, 25 bp, Homo sapien
tgcccctccatgcatttgtgcctcc

SEQ ID NO: 2060688 - DNA, 25 bp, Homo sapien
taggctcaaagaaggccagattgag

SEQ ID NO: 2060689 - DNA, 25 bp, Homo sapien
aaggccagattgaggacagccttcc

SEQ ID NO: 2060690 - DNA, 25 bp, Homo sapien
agaaggccagattgaggacagcctt

SEQ ID NO: 2060691 - DNA, 25 bp, Homo sapien
aaggccatcacacagacaaagagct

SEQ ID NO: 2060692 - DNA, 25 bp, Homo sapien
caggcctggttgattgagattgctt

SEQ ID NO: 2060693 - DNA, 25 bp, Homo sapien
cctgagccaatttggcgatgccctt

SEQ ID NO: 2060694 - DNA, 25 bp, Homo sapien
tgattgagattgcttgccggtccag

SEQ ID NO: 2060695 - DNA, 25 bp, Homo sapien
acgtccacccgctttgatgaatggg

SEQ ID NO: 2060696 - DNA, 25 bp, Homo sapien
tgaaccatccacagcgtgctgggca

SEQ ID NO: 2060697 - DNA, 25 bp, Homo sapien
gatctttccttccagcgcactgctt

SEQ ID NO: 2060698 - DNA, 25 bp, Homo sapien
tgacaccgaagcacactgggtggca

SEQ ID NO: 2060699 - DNA, 25 bp, Homo sapien
tgttccctgcgtgcagaacctctgc

SEQ ID NO: 2060700 - DNA, 25 bp, Homo sapien
tccagcagatcacctgcaaggattc

SEQ ID NO: 2060701 - DNA, 25 bp, Homo sapien
tgcaaggattcctcctaccgacatg

SEQ ID NO: 2060702 - DNA, 25 bp, Homo sapien
tttccagcagatcacctgcaaggat

SEQ ID NO: 2060703 - DNA, 25 bp, Homo sapien
ggattcctcctaccgacatgttgtc

SEQ ID NO: 2060704 - DNA, 25 bp, Homo sapien
tgtggaggataaagctgggtatact

SEQ ID NO: 2060705 - DNA, 25 bp, Homo sapien
tgatgtggaggataaagctgggtat

SEQ ID NO: 2060706 - DNA, 25 bp, Homo sapien
ggaggataaagctgggtatacttgc

SEQ ID NO: 2060707 - DNA, 25 bp, Homo sapien
tggaggataaagctgggtatacttg

SEQ ID NO: 2060708 - DNA, 25 bp, Homo sapien
gagggtcagatgagggcaggctcag

SEQ ID NO: 2060709 - DNA, 25 bp, Homo sapien
gaagagagggtcagatgagggcagg

SEQ ID NO: 2060710 - DNA, 25 bp, Homo sapien
gtgaagaagagagggtcagatgagg

SEQ ID NO: 2060711 - DNA, 25 bp, Homo sapien
gagagggtcagatgagggcaggctc

SEQ ID NO: 2060712 - DNA, 25 bp, Homo sapien
ggcatcccgcactggcagttgtacc

SEQ ID NO: 2060713 - DNA, 25 bp, Homo sapien
ccacagcatctgggcatcccgcact

SEQ ID NO: 2060714 - DNA, 25 bp, Homo sapien
cactggcagttgtaccctgtcctca

SEQ ID NO: 2060715 - DNA, 25 bp, Homo sapien
gaggaggaggactgccacagcatct

SEQ ID NO: 2060716 - DNA, 25 bp, Homo sapien
tcaaagatcatgagactgtcaggaa

SEQ ID NO: 2060717 - DNA, 25 bp, Homo sapien
gttaagtgggcattggattctatga

SEQ ID NO: 2060718 - DNA, 25 bp, Homo sapien
tctgcggggcacttcaaaacctcat

SEQ ID NO: 2060719 - DNA, 25 bp, Homo sapien
tcaggaagattttccttgaaggtta

SEQ ID NO: 2060720 - DNA, 25 bp, Homo sapien
gcaggtgagcctgccaaaagggctg

SEQ ID NO: 2060721 - DNA, 25 bp, Homo sapien
gtgagcctgccaaaagggctgtggc

SEQ ID NO: 2060722 - DNA, 25 bp, Homo sapien
ggtgagcctgccaaaagggctgtgg

SEQ ID NO: 2060723 - DNA, 25 bp, Homo sapien
caggtgagcctgccaaaagggctgt

SEQ ID NO: 2060724 - DNA, 25 bp, Homo sapien
gggttctcaatggagcttgtgtcaa

SEQ ID NO: 2060725 - DNA, 25 bp, Homo sapien
gattttgaggggttctcaatggagc

SEQ ID NO: 2060726 - DNA, 25 bp, Homo sapien
catcttgagtttgaagaacaagatg

SEQ ID NO: 2060727 - DNA, 25 bp, Homo sapien
aatggagcttgtgtcaacacagtgc

SEQ ID NO: 2060728 - DNA, 25 bp, Homo sapien
ttttcgcctcactatagtcttccag

SEQ ID NO: 2060729 - DNA, 25 bp, Homo sapien
acagcataaaatagagcttctccat

SEQ ID NO: 2060730 - DNA, 25 bp, Homo sapien
tttgttccactcatttttcgcctca

SEQ ID NO: 2060731 - DNA, 25 bp, Homo sapien
ccaggcactgtgcagattctgtctt

SEQ ID NO: 2060732 - DNA, 25 bp, Homo sapien
atttcctgggcacgcatggtggcaa

SEQ ID NO: 2060733 - DNA, 25 bp, Homo sapien
ggtgtccgatagctgcaaactccag

SEQ ID NO: 2060734 - DNA, 25 bp, Homo sapien
caaactccaggcagcatgagcgtgc

SEQ ID NO: 2060735 - DNA, 25 bp, Homo sapien
tatatagcagtttagggacatgccc

SEQ ID NO: 2060736 - DNA, 25 bp, Homo sapien
tctgtcctcttgagatcgtatgctg

SEQ ID NO: 2060737 - DNA, 25 bp, Homo sapien
gcccaggaccgcaagattcacaggt

SEQ ID NO: 2060738 - DNA, 25 bp, Homo sapien
attcacaggtgtaagtacccagcca

SEQ ID NO: 2060739 - DNA, 25 bp, Homo sapien
ttgagatcgtatgctgcccaggacc

SEQ ID NO: 2060740 - DNA, 25 bp, Homo sapien
caggtgtaagcacacggctgtgccc

SEQ ID NO: 2060741 - DNA, 25 bp, Homo sapien
aagcacccggccgtactcatcggca

SEQ ID NO: 2060742 - DNA, 25 bp, Homo sapien
ggcgctcataggtgtaagcacttgg

SEQ ID NO: 2060743 - DNA, 25 bp, Homo sapien
ggccatacccatcggcgctcatagg

SEQ ID NO: 2060744 - DNA, 25 bp, Homo sapien
ggaatccaggagcagtttaacaggg

SEQ ID NO: 2060745 - DNA, 25 bp, Homo sapien
cattagctgttggtcacaaggtgga

SEQ ID NO: 2060746 - DNA, 25 bp, Homo sapien
tcacaaggtggttggcagttctcag

SEQ ID NO: 2060747 - DNA, 25 bp, Homo sapien
catagcagctgacttgtcccagagt

SEQ ID NO: 2060748 - DNA, 25 bp, Homo sapien
accatgctgctctaggacgttttca

SEQ ID NO: 2060749 - DNA, 25 bp, Homo sapien
acgatgaacgcagtgtgaagggccc

SEQ ID NO: 2060750 - DNA, 25 bp, Homo sapien
ccccacgatgaacgcagtgtgaagg

SEQ ID NO: 2060751 - DNA, 25 bp, Homo sapien
gggcttccacagtggaccatgctgc

SEQ ID NO: 2060752 - DNA, 25 bp, Homo sapien
caagagagcgtgttgctggagggac

SEQ ID NO: 2060753 - DNA, 25 bp, Homo sapien
tctttggatgtcttgcatgcagatg

SEQ ID NO: 2060754 - DNA, 25 bp, Homo sapien
gagccagtgcgccaattcttcactg

SEQ ID NO: 2060755 - DNA, 25 bp, Homo sapien
tacaggcagcaagtccaagagagcg

SEQ ID NO: 2060756 - DNA, 25 bp, Homo sapien
ccgggtggtctggtggttaggatgg

SEQ ID NO: 2060757 - DNA, 25 bp, Homo sapien
ggtggtctggtggttaggatggccc

SEQ ID NO: 2060758 - DNA, 25 bp, Homo sapien
cgggtggtctggtggttaggatggc

SEQ ID NO: 2060759 - DNA, 25 bp, Homo sapien
gggtggtctggtggttaggatggcc

SEQ ID NO: 2060760 - DNA, 25 bp, Homo sapien
gggccagaggttgagacaaaacgta

SEQ ID NO: 2060761 - DNA, 25 bp, Homo sapien
ggagcggcccaaaattaccctgctc

SEQ ID NO: 2060762 - DNA, 25 bp, Homo sapien
acgtaaagacagtattcttcccgag

SEQ ID NO: 2060763 - DNA, 25 bp, Homo sapien
gacagtattcttcccgagcgcatcg

SEQ ID NO: 2060764 - DNA, 25 bp, Homo sapien
gattttctcgtctaacctcactgtg

SEQ ID NO: 2060765 - DNA, 25 bp, Homo sapien
ggaacttgatcccaccatggaaggg

SEQ ID NO: 2060766 - DNA, 25 bp, Homo sapien
aagccagagactagctgcccttgga

SEQ ID NO: 2060767 - DNA, 25 bp, Homo sapien
ccagagcttctattgtcagggacag

SEQ ID NO: 2060768 - DNA, 25 bp, Homo sapien
gcagaacaagatggacaagctgatc

SEQ ID NO: 2060769 - DNA, 25 bp, Homo sapien
gtggagacgaccactccccagcaga

SEQ ID NO: 2060770 - DNA, 25 bp, Homo sapien
agaacaagatggacaagctgatcga

SEQ ID NO: 2060771 - DNA, 25 bp, Homo sapien
atgaagtggccgtggagacgaccac

SEQ ID NO: 2060772 - DNA, 25 bp, Homo sapien
gtatctgtggatgtcttggggcaaa

SEQ ID NO: 2060773 - DNA, 25 bp, Homo sapien
ggtacccacaaggtattcatcaggc

SEQ ID NO: 2060774 - DNA, 25 bp, Homo sapien
aatgcgtctgggtcatctttgtgtc

SEQ ID NO: 2060775 - DNA, 25 bp, Homo sapien
tcttatctgagacttgtatctgtgg

SEQ ID NO: 2060776 - DNA, 25 bp, Homo sapien
ataccaacctgcctgagctgcgttt

SEQ ID NO: 2060777 - DNA, 25 bp, Homo sapien
tccttgttgcccttcgcccatacca

SEQ ID NO: 2060778 - DNA, 25 bp, Homo sapien
ttgcccttcgcccataccaacctgc

SEQ ID NO: 2060779 - DNA, 25 bp, Homo sapien
cttcgcccataccaacctgcctgag

SEQ ID NO: 2060780 - DNA, 25 bp, Homo sapien
tcagtagccttgtacagaggcaaag

SEQ ID NO: 2060781 - DNA, 25 bp, Homo sapien
agaggcaaaggggcttccgtgtggg

SEQ ID NO: 2060782 - DNA, 25 bp, Homo sapien
ccaatttgttggtcccacgcctggg

SEQ ID NO: 2060783 - DNA, 25 bp, Homo sapien
tgcctggacccggaaacaggcatgc

SEQ ID NO: 2060784 - DNA, 25 bp, Homo sapien
cagcagtgggcagccgtagagtcac

SEQ ID NO: 2060785 - DNA, 25 bp, Homo sapien
caggcatgccttgagtcaccagcag

SEQ ID NO: 2060786 - DNA, 25 bp, Homo sapien
agatcactaagtgtaagaggccaag

SEQ ID NO: 2060787 - DNA, 25 bp, Homo sapien
gatcactaagtgtaagaggccaagc

SEQ ID NO: 2060788 - DNA, 25 bp, Homo sapien
tctgattagcagagactcggcgtca

SEQ ID NO: 2060789 - DNA, 25 bp, Homo sapien
cgtcacagtctagggcaaagagggt

SEQ ID NO: 2060790 - DNA, 25 bp, Homo sapien
gtgtgtgcagacaaagccgtgcgcc

SEQ ID NO: 2060791 - DNA, 25 bp, Homo sapien
cagaggcgactgtctgattagcaga

SEQ ID NO: 2060792 - DNA, 25 bp, Homo sapien
ctggttggcatctttggctctctct

SEQ ID NO: 2060793 - DNA, 25 bp, Homo sapien
agggaccataccctttggtctctgg

SEQ ID NO: 2060794 - DNA, 25 bp, Homo sapien
atggaggtgatgtctcctggttggc

SEQ ID NO: 2060795 - DNA, 25 bp, Homo sapien
ctggtcggagggaccataccctttg

SEQ ID NO: 2060796 - DNA, 25 bp, Homo sapien
ctcccaggaatggccacattagaca

SEQ ID NO: 2060797 - DNA, 25 bp, Homo sapien
tcccaggaatggccacattagacat

SEQ ID NO: 2060798 - DNA, 25 bp, Homo sapien
actcccaggaatggccacattagac

SEQ ID NO: 2060799 - DNA, 25 bp, Homo sapien
agtgagtgatccaaccagccagctg

SEQ ID NO: 2060800 - DNA, 25 bp, Homo sapien
acagcatcagtgagtgatccaacca

SEQ ID NO: 2060801 - DNA, 25 bp, Homo sapien
atcagtgagtgatccaaccagccag

SEQ ID NO: 2060802 - DNA, 25 bp, Homo sapien
gtacagaccccgcacagcatcagtg

SEQ ID NO: 2060803 - DNA, 25 bp, Homo sapien
cagggaccgtgacgggccccagctc

SEQ ID NO: 2060804 - DNA, 25 bp, Homo sapien
ggccttggatacaattgcccccaaa

SEQ ID NO: 2060805 - DNA, 25 bp, Homo sapien
tgagggccttggatacaattgcccc

SEQ ID NO: 2060806 - DNA, 25 bp, Homo sapien
ttggatacaattgcccccaaaccag

SEQ ID NO: 2060807 - DNA, 25 bp, Homo sapien
gcagtcctctgcgtttggtgtctgt

SEQ ID NO: 2060808 - DNA, 25 bp, Homo sapien
ctggcagtcctctgcgtttggtgtc

SEQ ID NO: 2060809 - DNA, 25 bp, Homo sapien
cacagtgccaagggttggaggtctg

SEQ ID NO: 2060810 - DNA, 25 bp, Homo sapien
agtcctctgcgtttggtgtctgtcc

SEQ ID NO: 2060811 - DNA, 25 bp, Homo sapien
tgctggggttcccggatagcccttc

SEQ ID NO: 2060812 - DNA, 25 bp, Homo sapien
ctgctggggttcccggatagccctt

SEQ ID NO: 2060813 - DNA, 25 bp, Homo sapien
gaatacaaaccgtgttccaggcatg

SEQ ID NO: 2060814 - DNA, 25 bp, Homo sapien
cctatagaactaatgtccacccggg

SEQ ID NO: 2060815 - DNA, 25 bp, Homo sapien
aagtgaggtccattctcccaacggg

SEQ ID NO: 2060816 - DNA, 25 bp, Homo sapien
gcatatgacagccttgcagggaact

SEQ ID NO: 2060817 - DNA, 25 bp, Homo sapien
gaatatgcccaatctagtctgacct

SEQ ID NO: 2060818 - DNA, 25 bp, Homo sapien
tggttctcaagtgggaaacgctcct

SEQ ID NO: 2060819 - DNA, 25 bp, Homo sapien
cataaaggagaatttgcagtttccc

SEQ ID NO: 2060820 - DNA, 25 bp, Homo sapien
cagatttggccggtggactatagtt

SEQ ID NO: 2060821 - DNA, 25 bp, Homo sapien
gcccagggaaaggcttctttgtctc

SEQ ID NO: 2060822 - DNA, 25 bp, Homo sapien
cagggaaaggcttctttgtctcagg

SEQ ID NO: 2060823 - DNA, 25 bp, Homo sapien
agggaaaggcttctttgtctcagga

SEQ ID NO: 2060824 - DNA, 25 bp, Homo sapien
cccagggaaaggcttctttgtctca

SEQ ID NO: 2060825 - DNA, 25 bp, Homo sapien
gccaatgaaaatgcccgtgatgtga

SEQ ID NO: 2060826 - DNA, 25 bp, Homo sapien
tcccctctagaagaaggattcgagc

SEQ ID NO: 2060827 - DNA, 25 bp, Homo sapien
cagcttgccagtagccaattagggt

SEQ ID NO: 2060828 - DNA, 25 bp, Homo sapien
gattcgagccacagacagcttgcca

SEQ ID NO: 2060829 - DNA, 25 bp, Homo sapien
tcccagacccaacggtgagctcaga

SEQ ID NO: 2060830 - DNA, 25 bp, Homo sapien
ctcagagcaagcttcacgcaggacg

SEQ ID NO: 2060831 - DNA, 25 bp, Homo sapien
cagggcgagcttgccatcgtggcca

SEQ ID NO: 2060832 - DNA, 25 bp, Homo sapien
aggacgctccgaaacactgtgtgga

SEQ ID NO: 2060833 - DNA, 25 bp, Homo sapien
gcccgtgttccttgtcagacagaca

SEQ ID NO: 2060834 - DNA, 25 bp, Homo sapien
cggaacactcacacggaagggctgg

SEQ ID NO: 2060835 - DNA, 25 bp, Homo sapien
gaaaccattggctgggcctttgagg

SEQ ID NO: 2060836 - DNA, 25 bp, Homo sapien
ctgggagtggacgacaggacctacc

SEQ ID NO: 2060837 - DNA, 25 bp, Homo sapien
gaggaacagagagccttatcacacc

SEQ ID NO: 2060838 - DNA, 25 bp, Homo sapien
gtagggcgacgatgaggaacagaga

SEQ ID NO: 2060839 - DNA, 25 bp, Homo sapien
atgaggaacagagagccttatcaca

SEQ ID NO: 2060840 - DNA, 25 bp, Homo sapien
caaaggtagggcgacgatgaggaac

SEQ ID NO: 2060841 - DNA, 25 bp, Homo sapien
atccccggtgactttcaaaagtatg

SEQ ID NO: 2060842 - DNA, 25 bp, Homo sapien
tcccaagctgaaggtcctgatgctt

SEQ ID NO: 2060843 - DNA, 25 bp, Homo sapien
aagctgaaggtcctgatgcttcagc

SEQ ID NO: 2060844 - DNA, 25 bp, Homo sapien
ccaagctgaaggtcctgatgcttca

SEQ ID NO: 2060845 - DNA, 25 bp, Homo sapien
agggctcccaagctgaaggtcctga

SEQ ID NO: 2060846 - DNA, 25 bp, Homo sapien
aggagcacccccgaacctggtcatg

SEQ ID NO: 2060847 - DNA, 25 bp, Homo sapien
aacctggtcatgaacgggtgtgagc

SEQ ID NO: 2060848 - DNA, 25 bp, Homo sapien
ccccgaacctggtcatgaacgggtg

SEQ ID NO: 2060849 - DNA, 25 bp, Homo sapien
cgaacctggtcatgaacgggtgtga

SEQ ID NO: 2060850 - DNA, 25 bp, Homo sapien
ccggtggggcggctttcctgtcagc

SEQ ID NO: 2060851 - DNA, 25 bp, Homo sapien
acacaaatatgccgccgagccggtg

SEQ ID NO: 2060852 - DNA, 25 bp, Homo sapien
tcagaaccagaagccacacaaatat

SEQ ID NO: 2060853 - DNA, 25 bp, Homo sapien
ggcggctttcctgtcagcggctgcc

SEQ ID NO: 2060854 - DNA, 25 bp, Homo sapien
ctgccaccaccttcccttgccacct

SEQ ID NO: 2060855 - DNA, 25 bp, Homo sapien
tgccaccaccttcccttgccacctc

SEQ ID NO: 2060856 - DNA, 25 bp, Homo sapien
tggattgatgggcaagtcctcggaa

SEQ ID NO: 2060857 - DNA, 25 bp, Homo sapien
attgatgggcaagtcctcggaatgc

SEQ ID NO: 2060858 - DNA, 25 bp, Homo sapien
ctggattgatgggcaagtcctcgga

SEQ ID NO: 2060859 - DNA, 25 bp, Homo sapien
gtcctcggaatgccaagccagccat

SEQ ID NO: 2060860 - DNA, 25 bp, Homo sapien
aaggccacagccgtcggataaatgc

SEQ ID NO: 2060861 - DNA, 25 bp, Homo sapien
cacaacctgggttctctgacctagc

SEQ ID NO: 2060862 - DNA, 25 bp, Homo sapien
ccacagccgtcggataaatgcacct

SEQ ID NO: 2060863 - DNA, 25 bp, Homo sapien
cctagccaggtacaaatggcttggt

SEQ ID NO: 2060864 - DNA, 25 bp, Homo sapien
tgcttcactagcaaaggggccgcca

SEQ ID NO: 2060865 - DNA, 25 bp, Homo sapien
tttgcttcactagcaaaggggccgc

SEQ ID NO: 2060866 - DNA, 25 bp, Homo sapien
ttgcttcactagcaaaggggccgcc

SEQ ID NO: 2060867 - DNA, 25 bp, Homo sapien
gcttcactagcaaaggggccgccat

SEQ ID NO: 2060868 - DNA, 25 bp, Homo sapien
cagttaaagcaattggaggcagcgt

SEQ ID NO: 2060869 - DNA, 25 bp, Homo sapien
gcctgactgccgcaggcagttaaag

SEQ ID NO: 2060870 - DNA, 25 bp, Homo sapien
ctgccgcaggcagttaaagcaattg

SEQ ID NO: 2060871 - DNA, 25 bp, Homo sapien
tgttgagctgcctgactgccgcagg

SEQ ID NO: 2060872 - DNA, 25 bp, Homo sapien
tttttggtgtagacaaagatggagg

SEQ ID NO: 2060873 - DNA, 25 bp, Homo sapien
gatggaggtggcttgtggacagatg

SEQ ID NO: 2060874 - DNA, 25 bp, Homo sapien
ggtggcttgtggacagatgtgaggc

SEQ ID NO: 2060875 - DNA, 25 bp, Homo sapien
atgacatgagggcagtgggcgtggt

SEQ ID NO: 2060876 - DNA, 25 bp, Homo sapien
ggttggtagcaaggaggaggcaccg

SEQ ID NO: 2060877 - DNA, 25 bp, Homo sapien
ggaggcaccgctccctctcccaact

SEQ ID NO: 2060878 - DNA, 25 bp, Homo sapien
tcttgcacaatccaggatcccaaga

SEQ ID NO: 2060879 - DNA, 25 bp, Homo sapien
ctcccaacttaatccgatgggcagg

SEQ ID NO: 2060880 - DNA, 25 bp, Homo sapien
tttttcagttgcatcctcctggagc

SEQ ID NO: 2060881 - DNA, 25 bp, Homo sapien
gtaactttgcgactctgcccttggt

SEQ ID NO: 2060882 - DNA, 25 bp, Homo sapien
cttggtgagtggtatctttctgctt

SEQ ID NO: 2060883 - DNA, 25 bp, Homo sapien
ttctgcttaggacctaagtgaccac

SEQ ID NO: 2060884 - DNA, 25 bp, Homo sapien
gtcatttgcagggctttagttttgc

SEQ ID NO: 2060885 - DNA, 25 bp, Homo sapien
tagttttgctaagtgcaagtccagg

SEQ ID NO: 2060886 - DNA, 25 bp, Homo sapien
cagggtgggtgtagtcatttgcagg

SEQ ID NO: 2060887 - DNA, 25 bp, Homo sapien
ttagttttgctaagtgcaagtccag

SEQ ID NO: 2060888 - DNA, 25 bp, Homo sapien
tgagacaacagaccagaggctgaag

SEQ ID NO: 2060889 - DNA, 25 bp, Homo sapien
gagacaacagaccagaggctgaagc

SEQ ID NO: 2060890 - DNA, 25 bp, Homo sapien
ctgagacaacagaccagaggctgaa

SEQ ID NO: 2060891 - DNA, 25 bp, Homo sapien
tgttatttcccagcatgcgctcctg

SEQ ID NO: 2060892 - DNA, 25 bp, Homo sapien
tctcccgggcactgtaatttccctg

SEQ ID NO: 2060893 - DNA, 25 bp, Homo sapien
ggcagccagactctgtcattcttgt

SEQ ID NO: 2060894 - DNA, 25 bp, Homo sapien
tctggaattacctcgggcagggcct

SEQ ID NO: 2060895 - DNA, 25 bp, Homo sapien
ccactttgtgttgggtagattaatt

SEQ ID NO: 2060896 - DNA, 25 bp, Homo sapien
tttgtgttgggtagattaattgcag

SEQ ID NO: 2060897 - DNA, 25 bp, Homo sapien
gccactttgtgttgggtagattaat

SEQ ID NO: 2060898 - DNA, 25 bp, Homo sapien
actttgtgttgggtagattaattgc

SEQ ID NO: 2060899 - DNA, 25 bp, Homo sapien
tatccatggactggctttccaactg

SEQ ID NO: 2060900 - DNA, 25 bp, Homo sapien
tggctttccaactgtcttctctcac

SEQ ID NO: 2060901 - DNA, 25 bp, Homo sapien
gactggctttccaactgtcttctct

SEQ ID NO: 2060902 - DNA, 25 bp, Homo sapien
ggactggctttccaactgtcttctc

SEQ ID NO: 2060903 - DNA, 25 bp, Homo sapien
cccagagggcaccaccagcctctga

SEQ ID NO: 2060904 - DNA, 25 bp, Homo sapien
ttgctgcaaaatccaccacccagag

SEQ ID NO: 2060905 - DNA, 25 bp, Homo sapien
tgcaaaatccaccacccagagggca

SEQ ID NO: 2060906 - DNA, 25 bp, Homo sapien
agagggcaccaccagcctctgactg

SEQ ID NO: 2060907 - DNA, 25 bp, Homo sapien
taggtttgggtgcaaatccagcttc

SEQ ID NO: 2060908 - DNA, 25 bp, Homo sapien
tagacccagcgagaagtcatcgctt

SEQ ID NO: 2060909 - DNA, 25 bp, Homo sapien
aggtcctttgcaggctgctgagtgt

SEQ ID NO: 2060910 - DNA, 25 bp, Homo sapien
ctgagtgttgggagcttaatagacc

SEQ ID NO: 2060911 - DNA, 25 bp, Homo sapien
catctcaggtgtggcgtcttgtccc

SEQ ID NO: 2060912 - DNA, 25 bp, Homo sapien
gcagagcctgagatcgaattatata

SEQ ID NO: 2060913 - DNA, 25 bp, Homo sapien
caatgccatctgagctgaaagtccc

SEQ ID NO: 2060914 - DNA, 25 bp, Homo sapien
cagaaccaccagagtgatgctgtca

SEQ ID NO: 2060915 - DNA, 25 bp, Homo sapien
caggtccacgttacctccgtgcccg

SEQ ID NO: 2060916 - DNA, 25 bp, Homo sapien
tcaaacgcctgaacattatgcctgg

SEQ ID NO: 2060917 - DNA, 25 bp, Homo sapien
gcctggcacctagtgaagcattcag

SEQ ID NO: 2060918 - DNA, 25 bp, Homo sapien
tattaaagagcttccgggcatgccg

SEQ ID NO: 2060919 - DNA, 25 bp, Homo sapien
tggaccaagcaggaagaaccactca

SEQ ID NO: 2060920 - DNA, 25 bp, Homo sapien
ctttaatgaagtggtggcgccagta

SEQ ID NO: 2060921 - DNA, 25 bp, Homo sapien
cattccctttaatgaagtggtggcg

SEQ ID NO: 2060922 - DNA, 25 bp, Homo sapien
cagtaggctgtagcgcttttggtca

SEQ ID NO: 2060923 - DNA, 25 bp, Homo sapien
ggcgccagtaggctgtagcgctttt

SEQ ID NO: 2060924 - DNA, 25 bp, Homo sapien
acattcagctaggtgataacaccca

SEQ ID NO: 2060925 - DNA, 25 bp, Homo sapien
cagctaggtgataacacccatagaa

SEQ ID NO: 2060926 - DNA, 25 bp, Homo sapien
taggtgataacacccatagaaaaaa

SEQ ID NO: 2060927 - DNA, 25 bp, Homo sapien
atcgtttaatggaacataaactcct

SEQ ID NO: 2060928 - DNA, 25 bp, Homo sapien
gctcattgagctaagaacagtgtcg

SEQ ID NO: 2060929 - DNA, 25 bp, Homo sapien
tgacaagtgaaatgatgaccgcccc

SEQ ID NO: 2060930 - DNA, 25 bp, Homo sapien
ttctggttcggccactagcaggctc

SEQ ID NO: 2060931 - DNA, 25 bp, Homo sapien
taagtccgggaaaaacctgatgtca

SEQ ID NO: 2060932 - DNA, 25 bp, Homo sapien
tcgaaagccttgatggagaaaccgg

SEQ ID NO: 2060933 - DNA, 25 bp, Homo sapien
caaagctgatctgcacggtaaagcc

SEQ ID NO: 2060934 - DNA, 25 bp, Homo sapien
tgttgaagatgacctctagccagca

SEQ ID NO: 2060935 - DNA, 25 bp, Homo sapien
cataaactcgtggtcattgggccgc

SEQ ID NO: 2060936 - DNA, 25 bp, Homo sapien
gcagggcgccctgctccgccctcat

SEQ ID NO: 2060937 - DNA, 25 bp, Homo sapien
cttccacagaagcatctggagcctg

SEQ ID NO: 2060938 - DNA, 25 bp, Homo sapien
ccacagaagcatctggagcctgcag

SEQ ID NO: 2060939 - DNA, 25 bp, Homo sapien
ctccttccacagaagcatctggagc

SEQ ID NO: 2060940 - DNA, 25 bp, Homo sapien
gccagcttgtggagagtgctgcaca

SEQ ID NO: 2060941 - DNA, 25 bp, Homo sapien
caaggccagcctcataaggttgctg

SEQ ID NO: 2060942 - DNA, 25 bp, Homo sapien
gagtgctgcacacacgttggtctca

SEQ ID NO: 2060943 - DNA, 25 bp, Homo sapien
ctgtaccaatttgatgcaaaagtga

SEQ ID NO: 2060944 - DNA, 25 bp, Homo sapien
agtcttcctgattgtctccacatcc

SEQ ID NO: 2060945 - DNA, 25 bp, Homo sapien
cagtcttcctgattgtctccacatc

SEQ ID NO: 2060946 - DNA, 25 bp, Homo sapien
ttgtctccacatccccacaccccat

SEQ ID NO: 2060947 - DNA, 25 bp, Homo sapien
tgattgtctccacatccccacaccc

SEQ ID NO: 2060948 - DNA, 25 bp, Homo sapien
tgaggcacaagtcactggccgaagt

SEQ ID NO: 2060949 - DNA, 25 bp, Homo sapien
tattgcctggtgtgagctgtggaca

SEQ ID NO: 2060950 - DNA, 25 bp, Homo sapien
cataggctgtgttctctaagtggct

SEQ ID NO: 2060951 - DNA, 25 bp, Homo sapien
tgggccaatgcctacacttaataag

SEQ ID NO: 2060952 - DNA, 25 bp, Homo sapien
caggatccgatggaaaagctccttc

SEQ ID NO: 2060953 - DNA, 25 bp, Homo sapien
aaattccaatgcaggatccgatgga

SEQ ID NO: 2060954 - DNA, 25 bp, Homo sapien
ctgcattccggccaataaattccaa

SEQ ID NO: 2060955 - DNA, 25 bp, Homo sapien
ggatggcattttgaacatttactgc

SEQ ID NO: 2060956 - DNA, 25 bp, Homo sapien
cctggcagctccttattaatatctg

SEQ ID NO: 2060957 - DNA, 25 bp, Homo sapien
gcagctccttattaatatctgtgtc

SEQ ID NO: 2060958 - DNA, 25 bp, Homo sapien
tggcagctccttattaatatctgtg

SEQ ID NO: 2060959 - DNA, 25 bp, Homo sapien
ggcagctccttattaatatctgtgt

SEQ ID NO: 2060960 - DNA, 25 bp, Homo sapien
gatccagtgtccagagcgtaaagga

SEQ ID NO: 2060961 - DNA, 25 bp, Homo sapien
cagagcgtaaaggactgcaggatga

SEQ ID NO: 2060962 - DNA, 25 bp, Homo sapien
cccgtccacggaacggatccagtgt

SEQ ID NO: 2060963 - DNA, 25 bp, Homo sapien
gaacggatccagtgtccagagcgta

SEQ ID NO: 2060964 - DNA, 25 bp, Homo sapien
tccccctgtttcagcggaggaaggc

SEQ ID NO: 2060965 - DNA, 25 bp, Homo sapien
ctgtttcagcggaggaaggcacagc

SEQ ID NO: 2060966 - DNA, 25 bp, Homo sapien
cagataattcgttccccctgtttca

SEQ ID NO: 2060967 - DNA, 25 bp, Homo sapien
agccccccaggggccagataattcg

SEQ ID NO: 2060968 - DNA, 25 bp, Homo sapien
ttcaacctaagggacatagaaactg

SEQ ID NO: 2060969 - DNA, 25 bp, Homo sapien
taaatggtccatgtagattcccggg

SEQ ID NO: 2060970 - DNA, 25 bp, Homo sapien
cctttagttgtgcaactggttaaga

SEQ ID NO: 2060971 - DNA, 25 bp, Homo sapien
atgaagacctgggtcagcgcccatc

SEQ ID NO: 2060972 - DNA, 25 bp, Homo sapien
agcagctggcaaaaccagccccaga

SEQ ID NO: 2060973 - DNA, 25 bp, Homo sapien
acagcagctggcaaaaccagcccca

SEQ ID NO: 2060974 - DNA, 25 bp, Homo sapien
ctcaatgcccccggccacagcagct

SEQ ID NO: 2060975 - DNA, 25 bp, Homo sapien
ccacagcagctggcaaaaccagccc

SEQ ID NO: 2060976 - DNA, 25 bp, Homo sapien
ggcggggggggtgtgctccagctcc

SEQ ID NO: 2060977 - DNA, 25 bp, Homo sapien
gggcggggggggtgtgctccagctc

SEQ ID NO: 2060978 - DNA, 25 bp, Homo sapien
cagctgtcttagtttccgattggca

SEQ ID NO: 2060979 - DNA, 25 bp, Homo sapien
gtggccccttggaaaatgaacttca

SEQ ID NO: 2060980 - DNA, 25 bp, Homo sapien
gaatgactgcttaaatcctgagaac

SEQ ID NO: 2060981 - DNA, 25 bp, Homo sapien
tccactcaccgaaaatgaggccctg

SEQ ID NO: 2060982 - DNA, 25 bp, Homo sapien
tggtttgagaaaatccatcgggtat

SEQ ID NO: 2060983 - DNA, 25 bp, Homo sapien
ttggtttgagaaaatccatcgggta

SEQ ID NO: 2060984 - DNA, 25 bp, Homo sapien
cagttggtttgagaaaatccatcgg

SEQ ID NO: 2060985 - DNA, 25 bp, Homo sapien
agttggtttgagaaaatccatcggg

SEQ ID NO: 2060986 - DNA, 25 bp, Homo sapien
tagcgcactcgggagatgcatccca

SEQ ID NO: 2060987 - DNA, 25 bp, Homo sapien
ggagatgcatcccaagcgtgctggg

SEQ ID NO: 2060988 - DNA, 25 bp, Homo sapien
ggacacggggctgcccattcctagc

SEQ ID NO: 2060989 - DNA, 25 bp, Homo sapien
cccaggcgtgcaattcacctctgcc

SEQ ID NO: 2060990 - DNA, 25 bp, Homo sapien
cagacttatctgtgcggaaggaagg

SEQ ID NO: 2060991 - DNA, 25 bp, Homo sapien
gaaaggagtttcagggtctcagccg

SEQ ID NO: 2060992 - DNA, 25 bp, Homo sapien
taagaggcgacaacgtcactgaggc

SEQ ID NO: 2060993 - DNA, 25 bp, Homo sapien
cagagacgtagagtaaaggaaggaa

SEQ ID NO: 2060994 - DNA, 25 bp, Homo sapien
aaactccaaaggtgcgcggccacga

SEQ ID NO: 2060995 - DNA, 25 bp, Homo sapien
aaggtgcgcggccacgacagtatct

SEQ ID NO: 2060996 - DNA, 25 bp, Homo sapien
ccaaaactccaaaggtgcgcggcca

SEQ ID NO: 2060997 - DNA, 25 bp, Homo sapien
tgccccaaaactccaaaggtgcgcg

SEQ ID NO: 2060998 - DNA, 25 bp, Homo sapien
gatccggaaatgaaggcgtctaatt

SEQ ID NO: 2060999 - DNA, 25 bp, Homo sapien
ccccttgttgatccggaaatgaagg

SEQ ID NO: 2061000 - DNA, 25 bp, Homo sapien
tttttaaccgcagactgcaggagca

SEQ ID NO: 2061001 - DNA, 25 bp, Homo sapien
actgcaggagcagtgcccgtagacc

SEQ ID NO: 2061002 - DNA, 25 bp, Homo sapien
aatgcctgagatccggccacctgaa

SEQ ID NO: 2061003 - DNA, 25 bp, Homo sapien
cgtaagattcacagcaacacagcct

SEQ ID NO: 2061004 - DNA, 25 bp, Homo sapien
tcttgacttccgaggaatgcctgag

SEQ ID NO: 2061005 - DNA, 25 bp, Homo sapien
tagttcgcagagtcggctaaggtga

SEQ ID NO: 2061006 - DNA, 25 bp, Homo sapien
aggagggggagcgagtaggacgagg

SEQ ID NO: 2061007 - DNA, 25 bp, Homo sapien
agggggagcgagtaggacgagggcg

SEQ ID NO: 2061008 - DNA, 25 bp, Homo sapien
caggagggggagcgagtaggacgag

SEQ ID NO: 2061009 - DNA, 25 bp, Homo sapien
gagggggagcgagtaggacgagggc

SEQ ID NO: 2061010 - DNA, 25 bp, Homo sapien
gtgagcgccttcagatccgcctcgg

SEQ ID NO: 2061011 - DNA, 25 bp, Homo sapien
ttcttgagcaccgagtgcgtgagcg

SEQ ID NO: 2061012 - DNA, 25 bp, Homo sapien
cgggactccacggcctggagcagca

SEQ ID NO: 2061013 - DNA, 25 bp, Homo sapien
aggaggcacgcggtgcgcgtcccgc

SEQ ID NO: 2061014 - DNA, 25 bp, Homo sapien
cgagcgcagatcgtttggtcctgaa

SEQ ID NO: 2061015 - DNA, 25 bp, Homo sapien
ggctcctccagagacgccggacgag

SEQ ID NO: 2061016 - DNA, 25 bp, Homo sapien
ccggacgagcgcagatcgtttggtc

SEQ ID NO: 2061017 - DNA, 25 bp, Homo sapien
gcgcagatcgtttggtcctgaacat

SEQ ID NO: 2061018 - DNA, 25 bp, Homo sapien
ggcgaggagaaaagtcgtttgcctg

SEQ ID NO: 2061019 - DNA, 25 bp, Homo sapien
aggcgaggagaaaagtcgtttgcct

SEQ ID NO: 2061020 - DNA, 25 bp, Homo sapien
gaggcgaggagaaaagtcgtttgcc

SEQ ID NO: 2061021 - DNA, 25 bp, Homo sapien
aggaggcgaggagaaaagtcgtttg

SEQ ID NO: 2061022 - DNA, 25 bp, Homo sapien
ctccgcacaccatgaagaagtcggg

SEQ ID NO: 2061023 - DNA, 25 bp, Homo sapien
ccatgaagaagtcgggcgccgagtt

SEQ ID NO: 2061024 - DNA, 25 bp, Homo sapien
acaccatgaagaagtcgggcgccga

SEQ ID NO: 2061025 - DNA, 25 bp, Homo sapien
cgcacaccatgaagaagtcgggcgc

SEQ ID NO: 2061026 - DNA, 25 bp, Homo sapien
cacagaaagctttggctagaccgct

SEQ ID NO: 2061027 - DNA, 25 bp, Homo sapien
tatccttagtaaccggatctcctcg

SEQ ID NO: 2061028 - DNA, 25 bp, Homo sapien
cccgcatgagacgtctggcaaaata

SEQ ID NO: 2061029 - DNA, 25 bp, Homo sapien
gtttccttgcaaagccccgctggtc

SEQ ID NO: 2061030 - DNA, 25 bp, Homo sapien
aggaggccccggtgtcctctcggcg

SEQ ID NO: 2061031 - DNA, 25 bp, Homo sapien
tggcgctccggtccttctgccgccg

SEQ ID NO: 2061032 - DNA, 25 bp, Homo sapien
tgggctgctcgcctcgacccagctg

SEQ ID NO: 2061033 - DNA, 25 bp, Homo sapien
gtcgcgcccgggagcctccttgtcc

SEQ ID NO: 2061034 - DNA, 25 bp, Homo sapien
ggcggctcggcgccgacggactggc

SEQ ID NO: 2061035 - DNA, 25 bp, Homo sapien
ggctcggcgccgacggactggctct

SEQ ID NO: 2061036 - DNA, 25 bp, Homo sapien
ctcggcgccgacggactggctctgt

SEQ ID NO: 2061037 - DNA, 25 bp, Homo sapien
gcggctcggcgccgacggactggct

SEQ ID NO: 2061038 - DNA, 25 bp, Homo sapien
tccgtgcgccgagcagcaagcgagt

SEQ ID NO: 2061039 - DNA, 25 bp, Homo sapien
cgccgagcagcaagcgagtgtgccc

SEQ ID NO: 2061040 - DNA, 25 bp, Homo sapien
aggatcttccgtgcgccgagcagca

SEQ ID NO: 2061041 - DNA, 25 bp, Homo sapien
ctcggggacaggatcttccgtgcgc

SEQ ID NO: 2061042 - DNA, 25 bp, Homo sapien
cctccccagatcaaacgattctccc

SEQ ID NO: 2061043 - DNA, 25 bp, Homo sapien
agtctcactcttcacccgggctaga

SEQ ID NO: 2061044 - DNA, 25 bp, Homo sapien
cgggctagagtccagtggctcgatt

SEQ ID NO: 2061045 - DNA, 25 bp, Homo sapien
tggtagtgacgcggtttaaccatgt

SEQ ID NO: 2061046 - DNA, 25 bp, Homo sapien
cctcttgaccggctgctggctagga

SEQ ID NO: 2061047 - DNA, 25 bp, Homo sapien
tcttgaccggctgctggctaggaat

SEQ ID NO: 2061048 - DNA, 25 bp, Homo sapien
gctgcctcttgaccggctgctggct

SEQ ID NO: 2061049 - DNA, 25 bp, Homo sapien
tggggctgcctcttgaccggctgct

SEQ ID NO: 2061050 - DNA, 25 bp, Homo sapien
gacctaggagaatagaaaggccctc

SEQ ID NO: 2061051 - DNA, 25 bp, Homo sapien
tcatacaggtgaccgcacatgctgc

SEQ ID NO: 2061052 - DNA, 25 bp, Homo sapien
gattcagaacagaaagcctgcggag

SEQ ID NO: 2061053 - DNA, 25 bp, Homo sapien
cattgctagctataagaccttaggg

SEQ ID NO: 2061054 - DNA, 25 bp, Homo sapien
gaaatggcagggcacgatgactcac

SEQ ID NO: 2061055 - DNA, 25 bp, Homo sapien
ggcacgatgactcacgtctgttatc

SEQ ID NO: 2061056 - DNA, 25 bp, Homo sapien
cagggcacgatgactcacgtctgtt

SEQ ID NO: 2061057 - DNA, 25 bp, Homo sapien
aatggcagggcacgatgactcacgt

SEQ ID NO: 2061058 - DNA, 25 bp, Homo sapien
atggagacgatgaagaaattccttg

SEQ ID NO: 2061059 - DNA, 25 bp, Homo sapien
gcttcccagctgtggaatctctgcc

SEQ ID NO: 2061060 - DNA, 25 bp, Homo sapien
tacacagggtgcttaccagtcagct

SEQ ID NO: 2061061 - DNA, 25 bp, Homo sapien
gaatgggcagagcatgttaagtaga

SEQ ID NO: 2061062 - DNA, 25 bp, Homo sapien
cagctgtcccctggtgtcctccact

SEQ ID NO: 2061063 - DNA, 25 bp, Homo sapien
ttggagatgcaggagtacgggagaa

SEQ ID NO: 2061064 - DNA, 25 bp, Homo sapien
gagtacgggagaagcggaataaatc

SEQ ID NO: 2061065 - DNA, 25 bp, Homo sapien
gatgcaggagtacgggagaagcgga

SEQ ID NO: 2061066 - DNA, 25 bp, Homo sapien
tgtggacatgccaagtaaaggagca

SEQ ID NO: 2061067 - DNA, 25 bp, Homo sapien
catctagcaggtaatgtcacttctc

SEQ ID NO: 2061068 - DNA, 25 bp, Homo sapien
tcctctccaagaatgtgcgttcctg

SEQ ID NO: 2061069 - DNA, 25 bp, Homo sapien
taaaggagcagcacactctagcaac

SEQ ID NO: 2061070 - DNA, 25 bp, Homo sapien
cacatacacattgggaggaaggaca

SEQ ID NO: 2061071 - DNA, 25 bp, Homo sapien
gaggtccctttgcaacaatttgatg

SEQ ID NO: 2061072 - DNA, 25 bp, Homo sapien
gaacagttaggtatgcaaacttcag

SEQ ID NO: 2061073 - DNA, 25 bp, Homo sapien
gactgtgagataccgtaagtgaaca

SEQ ID NO: 2061074 - DNA, 25 bp, Homo sapien
gagttcagcccggtgaccccgccat

SEQ ID NO: 2061075 - DNA, 25 bp, Homo sapien
gtgaccccgccatcctcgcggcccc

SEQ ID NO: 2061076 - DNA, 25 bp, Homo sapien
gtccacagtccacaccgcctacacc

SEQ ID NO: 2061077 - DNA, 25 bp, Homo sapien
aggtcagacaggcgcgagttcagcc

SEQ ID NO: 2061078 - DNA, 25 bp, Homo sapien
tcccccatcgcggtcccgcacggcg

SEQ ID NO: 2061079 - DNA, 25 bp, Homo sapien
atcgcggtcccgcacggcggcggag

SEQ ID NO: 2061080 - DNA, 25 bp, Homo sapien
tggcggcaccgggatcccgccgcca

SEQ ID NO: 2061081 - DNA, 25 bp, Homo sapien
cgcggtcccgcacggcggcggaggg

SEQ ID NO: 2061082 - DNA, 25 bp, Homo sapien
attggaggaggcgatgccgccgagg

SEQ ID NO: 2061083 - DNA, 25 bp, Homo sapien
gagattggaggaggcgatgccgccg

SEQ ID NO: 2061084 - DNA, 25 bp, Homo sapien
agattggaggaggcgatgccgccga

SEQ ID NO: 2061085 - DNA, 25 bp, Homo sapien
gattggaggaggcgatgccgccgag

SEQ ID NO: 2061086 - DNA, 25 bp, Homo sapien
tggtgacccagcctccagtcacccg

SEQ ID NO: 2061087 - DNA, 25 bp, Homo sapien
gtgacccagcctccagtcacccggc

SEQ ID NO: 2061088 - DNA, 25 bp, Homo sapien
gacccagcctccagtcacccggcgg

SEQ ID NO: 2061089 - DNA, 25 bp, Homo sapien
agcctccagtcacccggcggccgcc

SEQ ID NO: 2061090 - DNA, 25 bp, Homo sapien
tgtcgccgttcatttctgagcgccg

SEQ ID NO: 2061091 - DNA, 25 bp, Homo sapien
aacaatgaagccactgtgtcgccgt

SEQ ID NO: 2061092 - DNA, 25 bp, Homo sapien
tgagcgccgtttcacacgcggagcg

SEQ ID NO: 2061093 - DNA, 25 bp, Homo sapien
gaagccactgtgtcgccgttcattt

SEQ ID NO: 2061094 - DNA, 25 bp, Homo sapien
cagatacgccatgatgaacatgacc

SEQ ID NO: 2061095 - DNA, 25 bp, Homo sapien
gctggcactgtctctgggaagatgt

SEQ ID NO: 2061096 - DNA, 25 bp, Homo sapien
tctgggaagatgtaatgccacccat

SEQ ID NO: 2061097 - DNA, 25 bp, Homo sapien
tctctgggaagatgtaatgccaccc

SEQ ID NO: 2061098 - DNA, 25 bp, Homo sapien
actgtctctgggaagatgtaatgcc

SEQ ID NO: 2061099 - DNA, 25 bp, Homo sapien
ctccccgtgatccactctcataatg

SEQ ID NO: 2061100 - DNA, 25 bp, Homo sapien
ctgaaacttgtcctgatctccccgt

SEQ ID NO: 2061101 - DNA, 25 bp, Homo sapien
tgtgacatggaagccagagacgatt

SEQ ID NO: 2061102 - DNA, 25 bp, Homo sapien
acatggaagccagagacgattatct

SEQ ID NO: 2061103 - DNA, 25 bp, Homo sapien
gggatcagagctaagactgtcagca

SEQ ID NO: 2061104 - DNA, 25 bp, Homo sapien
ccatgactatccaccgtgtcttcga

SEQ ID NO: 2061105 - DNA, 25 bp, Homo sapien
gagctaagactgtcagcagcacttt

SEQ ID NO: 2061106 - DNA, 25 bp, Homo sapien
tatccaccgtgtcttcgaaagtggg

SEQ ID NO: 2061107 - DNA, 25 bp, Homo sapien
tcctgggttctgttgcttcagtgct

SEQ ID NO: 2061108 - DNA, 25 bp, Homo sapien
tgctgctgctttgctccgatctaaa

SEQ ID NO: 2061109 - DNA, 25 bp, Homo sapien
tcacagagccctacacctgggtttt

SEQ ID NO: 2061110 - DNA, 25 bp, Homo sapien
tttgctccgatctaaagcgctcaca

SEQ ID NO: 2061111 - DNA, 25 bp, Homo sapien
gcaggcgagggccagccgccttacc

SEQ ID NO: 2061112 - DNA, 25 bp, Homo sapien
cagccgccttacccgggcacctcat

SEQ ID NO: 2061113 - DNA, 25 bp, Homo sapien
ctgcaggcgagggccagccgcctta

SEQ ID NO: 2061114 - DNA, 25 bp, Homo sapien
gccagccgccttacccgggcacctc

SEQ ID NO: 2061115 - DNA, 25 bp, Homo sapien
acgggtcttggtgtttcacagtgca

SEQ ID NO: 2061116 - DNA, 25 bp, Homo sapien
actttttcagttgccgtgaccatgg

SEQ ID NO: 2061117 - DNA, 25 bp, Homo sapien
tcacagtgcagaacacagtttctgc

SEQ ID NO: 2061118 - DNA, 25 bp, Homo sapien
gctttcaaggcaacgactttttcag

SEQ ID NO: 2061119 - DNA, 25 bp, Homo sapien
tctggtttctccaagctcggccttt

SEQ ID NO: 2061120 - DNA, 25 bp, Homo sapien
cctccggttctggtttctccaagct

SEQ ID NO: 2061121 - DNA, 25 bp, Homo sapien
tggtttctccaagctcggcctttac

SEQ ID NO: 2061122 - DNA, 25 bp, Homo sapien
gttctggtttctccaagctcggcct

SEQ ID NO: 2061123 - DNA, 25 bp, Homo sapien
ccttgacttggaagggtcgcctgtg

SEQ ID NO: 2061124 - DNA, 25 bp, Homo sapien
tctccttgacttggaagggtcgcct

SEQ ID NO: 2061125 - DNA, 25 bp, Homo sapien
gtcgcctgtggccccgctcccccat

SEQ ID NO: 2061126 - DNA, 25 bp, Homo sapien
cttctccttgacttggaagggtcgc

SEQ ID NO: 2061127 - DNA, 25 bp, Homo sapien
ttgagaactgccgacaggacgtcct

SEQ ID NO: 2061128 - DNA, 25 bp, Homo sapien
cctcggagtcccaagcaattgtctg

SEQ ID NO: 2061129 - DNA, 25 bp, Homo sapien
gcaagccacgcatccacatgggttc

SEQ ID NO: 2061130 - DNA, 25 bp, Homo sapien
caattgtctggtttgtgatggaccc

SEQ ID NO: 2061131 - DNA, 25 bp, Homo sapien
cgcctcattttgcctctgacctcct

SEQ ID NO: 2061132 - DNA, 25 bp, Homo sapien
cctcattttgcctctgacctcctgg

SEQ ID NO: 2061133 - DNA, 25 bp, Homo sapien
tccctggcccagctgagcagggagg

SEQ ID NO: 2061134 - DNA, 25 bp, Homo sapien
tcattttgcctctgacctcctggct

SEQ ID NO: 2061135 - DNA, 25 bp, Homo sapien
cactgatgatgaaggatcccgaggg

SEQ ID NO: 2061136 - DNA, 25 bp, Homo sapien
ccttgcccttacactgatgatgaag

SEQ ID NO: 2061137 - DNA, 25 bp, Homo sapien
gggaaccttgcccttacactgatga

SEQ ID NO: 2061138 - DNA, 25 bp, Homo sapien
gatgatgaaggatcccgagggctct

SEQ ID NO: 2061139 - DNA, 25 bp, Homo sapien
caggaggttgggccaccgggcaacg

SEQ ID NO: 2061140 - DNA, 25 bp, Homo sapien
ccaggtcggtgtcaaacttgcagga

SEQ ID NO: 2061141 - DNA, 25 bp, Homo sapien
gtgtcaaacttgcaggaggaggaaa

SEQ ID NO: 2061142 - DNA, 25 bp, Homo sapien
cgtcccaggtcggtgtcaaacttgc

SEQ ID NO: 2061143 - DNA, 25 bp, Homo sapien
caggcgtcccaggtcggtgtcaaac

SEQ ID NO: 2061144 - DNA, 25 bp, Homo sapien
gctgggcttcgtgcaaccgtgaact

SEQ ID NO: 2061145 - DNA, 25 bp, Homo sapien
gaggattctattaaaccgcgccgaa

SEQ ID NO: 2061146 - DNA, 25 bp, Homo sapien
cctttctaaggtggatccgggtgca

SEQ ID NO: 2061147 - DNA, 25 bp, Homo sapien
gaagtgtcccgggaactgatcctca

SEQ ID NO: 2061148 - DNA, 25 bp, Homo sapien
ctcctgcccgccaagggactggagt

SEQ ID NO: 2061149 - DNA, 25 bp, Homo sapien
caggacatggctggggaaccgctca

SEQ ID NO: 2061150 - DNA, 25 bp, Homo sapien
agagcgcccttggcattgggcacac

SEQ ID NO: 2061151 - DNA, 25 bp, Homo sapien
ccagtctctagggtagggtcctcag

SEQ ID NO: 2061152 - DNA, 25 bp, Homo sapien
gcaccagtgtcccaggcctggcggt

SEQ ID NO: 2061153 - DNA, 25 bp, Homo sapien
tctggggcaccagtgtcccaggcct

SEQ ID NO: 2061154 - DNA, 25 bp, Homo sapien
gtgtcccaggcctggcggtgccatc

SEQ ID NO: 2061155 - DNA, 25 bp, Homo sapien
ggctctggggcaccagtgtcccagg

SEQ ID NO: 2061156 - DNA, 25 bp, Homo sapien
tgaagtgcaactttccctcaaggac

SEQ ID NO: 2061157 - DNA, 25 bp, Homo sapien
tggcccacccgacaggctgaatgac

SEQ ID NO: 2061158 - DNA, 25 bp, Homo sapien
gctgaatgaccttccacagtctttg

SEQ ID NO: 2061159 - DNA, 25 bp, Homo sapien
taagccctatcttggctgcaagtgt

SEQ ID NO: 2061160 - DNA, 25 bp, Homo sapien
caccatgacctttgccaagccatgc

SEQ ID NO: 2061161 - DNA, 25 bp, Homo sapien
cggatcccgcatgggaacccttgca

SEQ ID NO: 2061162 - DNA, 25 bp, Homo sapien
cacactggagtccagtgccactgcc

SEQ ID NO: 2061163 - DNA, 25 bp, Homo sapien
gaacccttgcagtcgtcagggcctg

SEQ ID NO: 2061164 - DNA, 25 bp, Homo sapien
tgcagcaccaacgagagagctccgg

SEQ ID NO: 2061165 - DNA, 25 bp, Homo sapien
ctgccgtccagtgttgggtgagaaa

SEQ ID NO: 2061166 - DNA, 25 bp, Homo sapien
ccctgccgtccagtgttgggtgaga

SEQ ID NO: 2061167 - DNA, 25 bp, Homo sapien
acatgtagccccggatggaggtgca

SEQ ID NO: 2061168 - DNA, 25 bp, Homo sapien
agcctccgaaggtgcccagacacag

SEQ ID NO: 2061169 - DNA, 25 bp, Homo sapien
gcctccgaaggtgcccagacacaga

SEQ ID NO: 2061170 - DNA, 25 bp, Homo sapien
ctcccaagatgctgtatcagcaaca

SEQ ID NO: 2061171 - DNA, 25 bp, Homo sapien
caagatgctgtatcagcaacagcct

SEQ ID NO: 2061172 - DNA, 25 bp, Homo sapien
tgtcctgtgcgcttggcaggtaacg

SEQ ID NO: 2061173 - DNA, 25 bp, Homo sapien
gctcctcatcgctgatgctggtgtt

SEQ ID NO: 2061174 - DNA, 25 bp, Homo sapien
aaggatactggagctgggctgatcc

SEQ ID NO: 2061175 - DNA, 25 bp, Homo sapien
tggttgagctttgggagcccgggaa

SEQ ID NO: 2061176 - DNA, 25 bp, Homo sapien
gggcttcctaacatcgtggagtcag

SEQ ID NO: 2061177 - DNA, 25 bp, Homo sapien
tgaagcgcatggcatgacgctgccc

SEQ ID NO: 2061178 - DNA, 25 bp, Homo sapien
taacatcgtggagtcagggtcccga

SEQ ID NO: 2061179 - DNA, 25 bp, Homo sapien
tgccaacatggcgatggggctcctg

SEQ ID NO: 2061180 - DNA, 25 bp, Homo sapien
gggcatctgaccagctgggttggct

SEQ ID NO: 2061181 - DNA, 25 bp, Homo sapien
cccagggaggggcatctgaccagct

SEQ ID NO: 2061182 - DNA, 25 bp, Homo sapien
ctgggttggctgcaaggacagctgc

SEQ ID NO: 2061183 - DNA, 25 bp, Homo sapien
gctgcaaggacagctgctgagtctg

SEQ ID NO: 2061184 - DNA, 25 bp, Homo sapien
tctccgcagctaagtgggctggccc

SEQ ID NO: 2061185 - DNA, 25 bp, Homo sapien
tctcctctccgcagctaagtgggct

SEQ ID NO: 2061186 - DNA, 25 bp, Homo sapien
cctctccgcagctaagtgggctggc

SEQ ID NO: 2061187 - DNA, 25 bp, Homo sapien
tcctctccgcagctaagtgggctgg

SEQ ID NO: 2061188 - DNA, 25 bp, Homo sapien
gttacaatactgttcctctagcaag

SEQ ID NO: 2061189 - DNA, 25 bp, Homo sapien
gcaagacccatctagaatttagtgg

SEQ ID NO: 2061190 - DNA, 25 bp, Homo sapien
gaaacacttacatgaccactggcca

SEQ ID NO: 2061191 - DNA, 25 bp, Homo sapien
tgaggaaatagaacgctgccagctt

SEQ ID NO: 2061192 - DNA, 25 bp, Homo sapien
acagtcttgaacctgttgctaggtc

SEQ ID NO: 2061193 - DNA, 25 bp, Homo sapien
aactttggtagatattactaaacag

SEQ ID NO: 2061194 - DNA, 25 bp, Homo sapien
tatagtcctacatggactacatgta

SEQ ID NO: 2061195 - DNA, 25 bp, Homo sapien
tattatgaataattgcactatcaac

SEQ ID NO: 2061196 - DNA, 25 bp, Homo sapien
gccaggaactcaggtgatagtttcc

SEQ ID NO: 2061197 - DNA, 25 bp, Homo sapien
tagcatcacctagcgacattttgaa

SEQ ID NO: 2061198 - DNA, 25 bp, Homo sapien
tacatttgtatacccaccatctgga

SEQ ID NO: 2061199 - DNA, 25 bp, Homo sapien
aggaaatcttgccatactaggccag

SEQ ID NO: 2061200 - DNA, 25 bp, Homo sapien
atgaggcatacttaatatataaaac

SEQ ID NO: 2061201 - DNA, 25 bp, Homo sapien
aacaactttaatgaggcatacttaa

SEQ ID NO: 2061202 - DNA, 25 bp, Homo sapien
gtatacacctatcactgcaataaag

SEQ ID NO: 2061203 - DNA, 25 bp, Homo sapien
tatgtatacacctatcactgcaata

SEQ ID NO: 2061204 - DNA, 25 bp, Homo sapien
ggatgatgccaagtgtcttagaaca

SEQ ID NO: 2061205 - DNA, 25 bp, Homo sapien
ggagctgtcagtctaatattattgc

SEQ ID NO: 2061206 - DNA, 25 bp, Homo sapien
tcttattatgtggaaagctatacac

SEQ ID NO: 2061207 - DNA, 25 bp, Homo sapien
tcctttagggtaggcgtgctgatta

SEQ ID NO: 2061208 - DNA, 25 bp, Homo sapien
caatgacagtaatggaggaccaacc

SEQ ID NO: 2061209 - DNA, 25 bp, Homo sapien
catttgcttcaattgggcacctgaa

SEQ ID NO: 2061210 - DNA, 25 bp, Homo sapien
ggtttcacctcggaccacattcagg

SEQ ID NO: 2061211 - DNA, 25 bp, Homo sapien
tgaaggaccccagagtcaacaagat

SEQ ID NO: 2061212 - DNA, 25 bp, Homo sapien
aaaacatgcttttcatcccacgtgg

SEQ ID NO: 2061213 - DNA, 25 bp, Homo sapien
tgatggactcaaataacacgggcct

SEQ ID NO: 2061214 - DNA, 25 bp, Homo sapien
tccagacgaggatagggaagcttcc

SEQ ID NO: 2061215 - DNA, 25 bp, Homo sapien
taattccagcaacagttcacaggcc

SEQ ID NO: 2061216 - DNA, 25 bp, Homo sapien
tattgccaactagcaccaattctcc

SEQ ID NO: 2061217 - DNA, 25 bp, Homo sapien
ctccaaatcaaagtgtgtgaggaaa

SEQ ID NO: 2061218 - DNA, 25 bp, Homo sapien
cagaagatacaccaagtaacctgtc

SEQ ID NO: 2061219 - DNA, 25 bp, Homo sapien
tctacgctgagttatctattgccaa

SEQ ID NO: 2061220 - DNA, 25 bp, Homo sapien
aacagctggatgtcctgtggattcc

SEQ ID NO: 2061221 - DNA, 25 bp, Homo sapien
tgtggattccagtacaggccgactg

SEQ ID NO: 2061222 - DNA, 25 bp, Homo sapien
actgctgagttgtagacaagagacc

SEQ ID NO: 2061223 - DNA, 25 bp, Homo sapien
tcagtcggaatccatggtgaacagc

SEQ ID NO: 2061224 - DNA, 25 bp, Homo sapien
cagttccatgcacaagcaaaagtgg

SEQ ID NO: 2061225 - DNA, 25 bp, Homo sapien
caaaagtggtgagagtttgcaggtg

SEQ ID NO: 2061226 - DNA, 25 bp, Homo sapien
ggtgctgtggtgtgcggggagccca

SEQ ID NO: 2061227 - DNA, 25 bp, Homo sapien
acccctgccaactggtcacagggca

SEQ ID NO: 2061228 - DNA, 25 bp, Homo sapien
cattaggcttttgcaatctaatggg

SEQ ID NO: 2061229 - DNA, 25 bp, Homo sapien
agaagggtttaccatctatgaaggg

SEQ ID NO: 2061230 - DNA, 25 bp, Homo sapien
caatctaatggggtaactaagaagg

SEQ ID NO: 2061231 - DNA, 25 bp, Homo sapien
ggcttttgcaatctaatggggtaac

SEQ ID NO: 2061232 - DNA, 25 bp, Homo sapien
gtgcagcacgttcaacaacatccag

SEQ ID NO: 2061233 - DNA, 25 bp, Homo sapien
gaagttcacagacagcccagtagga

SEQ ID NO: 2061234 - DNA, 25 bp, Homo sapien
tcttcctgtaagatcgtgcagcacg

SEQ ID NO: 2061235 - DNA, 25 bp, Homo sapien
ttgaccaggaatgaagccttctgct

SEQ ID NO: 2061236 - DNA, 25 bp, Homo sapien
tgcaattggtgcttctcttatttgt

SEQ ID NO: 2061237 - DNA, 25 bp, Homo sapien
ctcttatttgttgacttgtgcacca

SEQ ID NO: 2061238 - DNA, 25 bp, Homo sapien
caaacatcggttctaagaaggcagg

SEQ ID NO: 2061239 - DNA, 25 bp, Homo sapien
aacaaaagtggcctctctcggctca

SEQ ID NO: 2061240 - DNA, 25 bp, Homo sapien
tctaatggaacaacggcttcccgct

SEQ ID NO: 2061241 - DNA, 25 bp, Homo sapien
aggtggtgacactgccacggcagct

SEQ ID NO: 2061242 - DNA, 25 bp, Homo sapien
aaagatgaacaagcaaccagcggct

SEQ ID NO: 2061243 - DNA, 25 bp, Homo sapien
cggcagctgaggcgactcagcccag

SEQ ID NO: 2061244 - DNA, 25 bp, Homo sapien
cagacaaagagaccgcagagaggaa

SEQ ID NO: 2061245 - DNA, 25 bp, Homo sapien
tcagacaaagagaccgcagagagga

SEQ ID NO: 2061246 - DNA, 25 bp, Homo sapien
acaaagagaccgcagagaggaagga

SEQ ID NO: 2061247 - DNA, 25 bp, Homo sapien
caatcagacaaagagaccgcagaga

SEQ ID NO: 2061248 - DNA, 25 bp, Homo sapien
aggcagggccacagacgagcatgca

SEQ ID NO: 2061249 - DNA, 25 bp, Homo sapien
cagacgagcatgcacagtgtttccc

SEQ ID NO: 2061250 - DNA, 25 bp, Homo sapien
gagcccaggtctctcgtggacactg

SEQ ID NO: 2061251 - DNA, 25 bp, Homo sapien
gctccttgagcccaggtctctcgtg

SEQ ID NO: 2061252 - DNA, 25 bp, Homo sapien
tgtggcacgatggggccagaaagag

SEQ ID NO: 2061253 - DNA, 25 bp, Homo sapien
ctgtggcacgatggggccagaaaga

SEQ ID NO: 2061254 - DNA, 25 bp, Homo sapien
tctaatgggacagccacaaccatac

SEQ ID NO: 2061255 - DNA, 25 bp, Homo sapien
aaatctgaatacagtcatgtatgca

SEQ ID NO: 2061256 - DNA, 25 bp, Homo sapien
gctttgctgagaaggtagtaatttc

SEQ ID NO: 2061257 - DNA, 25 bp, Homo sapien
tgaagtgctctaatagctgggctgc

SEQ ID NO: 2061258 - DNA, 25 bp, Homo sapien
taaacctatatagaatcctacatga

SEQ ID NO: 2061259 - DNA, 25 bp, Homo sapien
cctacatgaaactgatagtctaatc

SEQ ID NO: 2061260 - DNA, 25 bp, Homo sapien
catttttaggcagattcgagtttgg

SEQ ID NO: 2061261 - DNA, 25 bp, Homo sapien
cataaacctattcgttggtcaacaa

SEQ ID NO: 2061262 - DNA, 25 bp, Homo sapien
ctccacttatgtgcttcagaatctg

SEQ ID NO: 2061263 - DNA, 25 bp, Homo sapien
tcagaatctgcattctgtccacggc

SEQ ID NO: 2061264 - DNA, 25 bp, Homo sapien
gaatctgcattctgtccacggccat

SEQ ID NO: 2061265 - DNA, 25 bp, Homo sapien
ctgcctctccacttatgtgcttcag

SEQ ID NO: 2061266 - DNA, 25 bp, Homo sapien
tgttttgtgacccagcacatggtct

SEQ ID NO: 2061267 - DNA, 25 bp, Homo sapien
tctaatgtaggatttaaagttataa

SEQ ID NO: 2061268 - DNA, 25 bp, Homo sapien
tgtaagcaccacttgagccgcatct

SEQ ID NO: 2061269 - DNA, 25 bp, Homo sapien
ttttcctgtaagcaccacttgagcc

SEQ ID NO: 2061270 - DNA, 25 bp, Homo sapien
tgctgttgggctggtggacggtgtc

SEQ ID NO: 2061271 - DNA, 25 bp, Homo sapien
tcggtctcctcgactttctgtcagg

SEQ ID NO: 2061272 - DNA, 25 bp, Homo sapien
tggacggtgtcaggcactcggtctc

SEQ ID NO: 2061273 - DNA, 25 bp, Homo sapien
ggtgtcaggcactcggtctcctcga

SEQ ID NO: 2061274 - DNA, 25 bp, Homo sapien
tacaagccacattaatacagcagag

SEQ ID NO: 2061275 - DNA, 25 bp, Homo sapien
taagctgaacttgccttgggccttc

SEQ ID NO: 2061276 - DNA, 25 bp, Homo sapien
tgttccagttggacactaagctgaa

SEQ ID NO: 2061277 - DNA, 25 bp, Homo sapien
tacaccattcattttacacgcagcg

SEQ ID NO: 2061278 - DNA, 25 bp, Homo sapien
ctgcactaatgctgtgcagtgaata

SEQ ID NO: 2061279 - DNA, 25 bp, Homo sapien
tgtccacctgacgatcggccagcgg

SEQ ID NO: 2061280 - DNA, 25 bp, Homo sapien
tgacagacaagccatgaaactgtga

SEQ ID NO: 2061281 - DNA, 25 bp, Homo sapien
aggactctgtccacctgacgatcgg

SEQ ID NO: 2061282 - DNA, 25 bp, Homo sapien
agaagctgcatacacaaaggcctgg

SEQ ID NO: 2061283 - DNA, 25 bp, Homo sapien
tgacagcgttggagcacaggatccg

SEQ ID NO: 2061284 - DNA, 25 bp, Homo sapien
cacaggatccgtaggaggaaaaaga

SEQ ID NO: 2061285 - DNA, 25 bp, Homo sapien
gcacaggatccgtaggaggaaaaag

SEQ ID NO: 2061286 - DNA, 25 bp, Homo sapien
cagcgttggagcacaggatccgtag

SEQ ID NO: 2061287 - DNA, 25 bp, Homo sapien
agagcagggtgtaagggtggcaaca

SEQ ID NO: 2061288 - DNA, 25 bp, Homo sapien
tgtaagggtggcaacagggctaaga

SEQ ID NO: 2061289 - DNA, 25 bp, Homo sapien
cagggtgtaagggtggcaacagggc

SEQ ID NO: 2061290 - DNA, 25 bp, Homo sapien
agggtggcaacagggctaagaacac

SEQ ID NO: 2061291 - DNA, 25 bp, Homo sapien
atctggaagaattctgacccatcac

SEQ ID NO: 2061292 - DNA, 25 bp, Homo sapien
gatctggaagaattctgacccatca

SEQ ID NO: 2061293 - DNA, 25 bp, Homo sapien
ggatctggaagaattctgacccatc

SEQ ID NO: 2061294 - DNA, 25 bp, Homo sapien
cattcaaattgctccacagtaagca

SEQ ID NO: 2061295 - DNA, 25 bp, Homo sapien
ctccacagtaagcaaaatgcgagcc

SEQ ID NO: 2061296 - DNA, 25 bp, Homo sapien
ccacagtaagcaaaatgcgagccag

SEQ ID NO: 2061297 - DNA, 25 bp, Homo sapien
catgacattcaaattgctccacagt

SEQ ID NO: 2061298 - DNA, 25 bp, Homo sapien
caaccatgaagtgagttggcaagct

SEQ ID NO: 2061299 - DNA, 25 bp, Homo sapien
tcagagtcaacttgcctgggaccca

SEQ ID NO: 2061300 - DNA, 25 bp, Homo sapien
tattaacattccagcacttagcctg

SEQ ID NO: 2061301 - DNA, 25 bp, Homo sapien
gaccttggcctcaataggatcttgc

SEQ ID NO: 2061302 - DNA, 25 bp, Homo sapien
cagcttgcagcaaccttgagctaaa

SEQ ID NO: 2061303 - DNA, 25 bp, Homo sapien
tgatttccaggacccgttccactga

SEQ ID NO: 2061304 - DNA, 25 bp, Homo sapien
tcagtctgtctttgggcagcgcaac

SEQ ID NO: 2061305 - DNA, 25 bp, Homo sapien
cgacgccttgcttaatgatttccag

SEQ ID NO: 2061306 - DNA, 25 bp, Homo sapien
catcactgagtctgggtctgttgcc

SEQ ID NO: 2061307 - DNA, 25 bp, Homo sapien
catgtgtagaactgtagagactgac

SEQ ID NO: 2061308 - DNA, 25 bp, Homo sapien
gctgcatttgcctgatgggtcccac

SEQ ID NO: 2061309 - DNA, 25 bp, Homo sapien
cagtacttgctaggctggtggcaga

SEQ ID NO: 2061310 - DNA, 25 bp, Homo sapien
ctcacctccactctgcttttcactt

SEQ ID NO: 2061311 - DNA, 25 bp, Homo sapien
tgtgtttcaaatggatgtagtttaa

SEQ ID NO: 2061312 - DNA, 25 bp, Homo sapien
gcttttcacttcttccaaaggagaa

SEQ ID NO: 2061313 - DNA, 25 bp, Homo sapien
aattctttgcatggttctgtgtgtc

SEQ ID NO: 2061314 - DNA, 25 bp, Homo sapien
gaatgtgtatagtggttaggcagaa

SEQ ID NO: 2061315 - DNA, 25 bp, Homo sapien
gcctggttactaagaacgttcctca

SEQ ID NO: 2061316 - DNA, 25 bp, Homo sapien
tggtttcataggcaactgtgggagc

SEQ ID NO: 2061317 - DNA, 25 bp, Homo sapien
acgttcctcattgcaccactgatgg

SEQ ID NO: 2061318 - DNA, 25 bp, Homo sapien
tagaagcatcttaacccaaggccaa

SEQ ID NO: 2061319 - DNA, 25 bp, Homo sapien
tgtagttcattcgtagtcctccaag

SEQ ID NO: 2061320 - DNA, 25 bp, Homo sapien
tataatccttaagactgcttgcagg

SEQ ID NO: 2061321 - DNA, 25 bp, Homo sapien
taaagttgccttcatacagagaacg

SEQ ID NO: 2061322 - DNA, 25 bp, Homo sapien
ggacacaaacatgggctagatagaa

SEQ ID NO: 2061323 - DNA, 25 bp, Homo sapien
ggcccacaggcataaattctacagt

SEQ ID NO: 2061324 - DNA, 25 bp, Homo sapien
aaatgctcatggtctaagtgtaaag

SEQ ID NO: 2061325 - DNA, 25 bp, Homo sapien
gttttactctcgttgctcaggccag

SEQ ID NO: 2061326 - DNA, 25 bp, Homo sapien
cctgaaatgaaggatgagttcgaaa

SEQ ID NO: 2061327 - DNA, 25 bp, Homo sapien
taaagcagggcgtataccaagtttg

SEQ ID NO: 2061328 - DNA, 25 bp, Homo sapien
cttcaatgacatttaggtcttgtgc

SEQ ID NO: 2061329 - DNA, 25 bp, Homo sapien
aaagagatcgcgtttgtaaagcagg

SEQ ID NO: 2061330 - DNA, 25 bp, Homo sapien
gaaaccaccaaccagtccatggaaa

SEQ ID NO: 2061331 - DNA, 25 bp, Homo sapien
tcagcatcacaaccacaagtctagg

SEQ ID NO: 2061332 - DNA, 25 bp, Homo sapien
tattcggagtgcattttgacctgac

SEQ ID NO: 2061333 - DNA, 25 bp, Homo sapien
tacagattaacaagctcagtgctcc

SEQ ID NO: 2061334 - DNA, 25 bp, Homo sapien
tggtggcttcctagagtctcagact

SEQ ID NO: 2061335 - DNA, 25 bp, Homo sapien
tacttccaaatctataggttatgtg

SEQ ID NO: 2061336 - DNA, 25 bp, Homo sapien
tctcataattggtgcctcggtgctc

SEQ ID NO: 2061337 - DNA, 25 bp, Homo sapien
tatctaatatggcttaatacttcca

SEQ ID NO: 2061338 - DNA, 25 bp, Homo sapien
tctgcttctgttccatcaagaaata

SEQ ID NO: 2061339 - DNA, 25 bp, Homo sapien
agccagaactggatttgtccaaaat

SEQ ID NO: 2061340 - DNA, 25 bp, Homo sapien
ctagccagaactggatttgtccaaa

SEQ ID NO: 2061341 - DNA, 25 bp, Homo sapien
tagccagaactggatttgtccaaaa

SEQ ID NO: 2061342 - DNA, 25 bp, Homo sapien
aagagtcagtgatgccaaaaaaggc

SEQ ID NO: 2061343 - DNA, 25 bp, Homo sapien
cagagacctatgacgcttgatgccc

SEQ ID NO: 2061344 - DNA, 25 bp, Homo sapien
gaatttagattaccctgccaccatg

SEQ ID NO: 2061345 - DNA, 25 bp, Homo sapien
ttcagggtaacttcaaacttcagga

SEQ ID NO: 2061346 - DNA, 25 bp, Homo sapien
gccatttttgagacttccggagaaa

SEQ ID NO: 2061347 - DNA, 25 bp, Homo sapien
tgaaagattctacaggacaaatggt

SEQ ID NO: 2061348 - DNA, 25 bp, Homo sapien
tgctgtgcattagattatacctagg

SEQ ID NO: 2061349 - DNA, 25 bp, Homo sapien
tgattttaacacattgccaacagcc

SEQ ID NO: 2061350 - DNA, 25 bp, Homo sapien
tactatcttatttgaaaggcaggac

SEQ ID NO: 2061351 - DNA, 25 bp, Homo sapien
caatgctcgaatctactaattaggg

SEQ ID NO: 2061352 - DNA, 25 bp, Homo sapien
tgcagtcactaatgctcaatgctcg

SEQ ID NO: 2061353 - DNA, 25 bp, Homo sapien
caaaagcataagtccatgcaggtac

SEQ ID NO: 2061354 - DNA, 25 bp, Homo sapien
ctatgtggtggcatatagagcttca

SEQ ID NO: 2061355 - DNA, 25 bp, Homo sapien
caacaaattcttactgatggagctg

SEQ ID NO: 2061356 - DNA, 25 bp, Homo sapien
tgagtatcaacctgtcccgaggatg

SEQ ID NO: 2061357 - DNA, 25 bp, Homo sapien
tcaaagaagtcgagtttcattcctc

SEQ ID NO: 2061358 - DNA, 25 bp, Homo sapien
aactggtaacctggagaatgtttat

SEQ ID NO: 2061359 - DNA, 25 bp, Homo sapien
gagaatgtttataacttatagcgca

SEQ ID NO: 2061360 - DNA, 25 bp, Homo sapien
taacttatagcgcattcataatggg

SEQ ID NO: 2061361 - DNA, 25 bp, Homo sapien
tcataatgggtatgggaaatttagg

SEQ ID NO: 2061362 - DNA, 25 bp, Homo sapien
gcagttgtgctagggatgttcacca

SEQ ID NO: 2061363 - DNA, 25 bp, Homo sapien
cgattgcactaaagaagaaactcac

SEQ ID NO: 2061364 - DNA, 25 bp, Homo sapien
tggaatctatttaagttcaaagcag

SEQ ID NO: 2061365 - DNA, 25 bp, Homo sapien
gaaactcactgggacctaatcaatg

SEQ ID NO: 2061366 - DNA, 25 bp, Homo sapien
tggcattcaggaaaagcagctggtt

SEQ ID NO: 2061367 - DNA, 25 bp, Homo sapien
aagtctttgcctcacctaaagtggg

SEQ ID NO: 2061368 - DNA, 25 bp, Homo sapien
cctggacatgcctgaccttgggaat

SEQ ID NO: 2061369 - DNA, 25 bp, Homo sapien
ttgacaggaagcctgccaacatggc

SEQ ID NO: 2061370 - DNA, 25 bp, Homo sapien
ttggcatcacctaagaagtctttgc

SEQ ID NO: 2061371 - DNA, 25 bp, Homo sapien
ttcttgtgtatagaatgagtgaggg

SEQ ID NO: 2061372 - DNA, 25 bp, Homo sapien
aaagttgtataatgttggctctgac

SEQ ID NO: 2061373 - DNA, 25 bp, Homo sapien
tgagttaattcttgtgtatagaatg

SEQ ID NO: 2061374 - DNA, 25 bp, Homo sapien
taatctggtagaggaacatcattag

SEQ ID NO: 2061375 - DNA, 25 bp, Homo sapien
tgtgtggcttgttccagaactttgt

SEQ ID NO: 2061376 - DNA, 25 bp, Homo sapien
gaacctctcaaggactgtgtggctt

SEQ ID NO: 2061377 - DNA, 25 bp, Homo sapien
cattagaactcagcgaacctctcaa

SEQ ID NO: 2061378 - DNA, 25 bp, Homo sapien
agtcttccaacttaggctttgtcaa

SEQ ID NO: 2061379 - DNA, 25 bp, Homo sapien
ccaaatcacctggtaaggttttgat

SEQ ID NO: 2061380 - DNA, 25 bp, Homo sapien
gttcaacgtatagatcaatttcagg

SEQ ID NO: 2061381 - DNA, 25 bp, Homo sapien
atactaagtctctaatccatgagga

SEQ ID NO: 2061382 - DNA, 25 bp, Homo sapien
caagggcacagatgtccattcctct

SEQ ID NO: 2061383 - DNA, 25 bp, Homo sapien
caatgcctcctgtatataccaatgg

SEQ ID NO: 2061384 - DNA, 25 bp, Homo sapien
aactggaattataggtctttactgg

SEQ ID NO: 2061385 - DNA, 25 bp, Homo sapien
taggaacaggaagccttaactggaa

SEQ ID NO: 2061386 - DNA, 25 bp, Homo sapien
caggtcttatgctgaagatgttaat

SEQ ID NO: 2061387 - DNA, 25 bp, Homo sapien
tgatttgattttgtaggtggtgtga

SEQ ID NO: 2061388 - DNA, 25 bp, Homo sapien
tataaatatcattgtccagacacaa

SEQ ID NO: 2061389 - DNA, 25 bp, Homo sapien
gcacctagcctctagcaagtcattt

SEQ ID NO: 2061390 - DNA, 25 bp, Homo sapien
ggagattgcattgaaaaacgactaa

SEQ ID NO: 2061391 - DNA, 25 bp, Homo sapien
ccttttttagatcaattgcacagca

SEQ ID NO: 2061392 - DNA, 25 bp, Homo sapien
aatggtggttaccagcggccaaggg

SEQ ID NO: 2061393 - DNA, 25 bp, Homo sapien
gcaggaagaataagtttgatccttt

SEQ ID NO: 2061394 - DNA, 25 bp, Homo sapien
tacttagtgccagtaggtgaaacac

SEQ ID NO: 2061395 - DNA, 25 bp, Homo sapien
taaatctaagggctggcatcatgac

SEQ ID NO: 2061396 - DNA, 25 bp, Homo sapien
actttgatcagagaagggactccag

SEQ ID NO: 2061397 - DNA, 25 bp, Homo sapien
gagagacttggattctactttcggc

SEQ ID NO: 2061398 - DNA, 25 bp, Homo sapien
aataagcagttgtgcaagtctgcat

SEQ ID NO: 2061399 - DNA, 25 bp, Homo sapien
taataagcagttgtgcaagtctgca

SEQ ID NO: 2061400 - DNA, 25 bp, Homo sapien
ataataagcagttgtgcaagtctgc

SEQ ID NO: 2061401 - DNA, 25 bp, Homo sapien
tataataagcagttgtgcaagtctg

SEQ ID NO: 2061402 - DNA, 25 bp, Homo sapien
gcatgcttcgaccacatcagtcagg

SEQ ID NO: 2061403 - DNA, 25 bp, Homo sapien
tcagtcaggctcaaaagcaccaagt

SEQ ID NO: 2061404 - DNA, 25 bp, Homo sapien
tgacagtcatcagacgcagcatgct

SEQ ID NO: 2061405 - DNA, 25 bp, Homo sapien
aaatggcctggcctagcattcaagg

SEQ ID NO: 2061406 - DNA, 25 bp, Homo sapien
tgccttctgaggtaagcagcacaca

SEQ ID NO: 2061407 - DNA, 25 bp, Homo sapien
aatctaaaaatcatcggctgtcagg

SEQ ID NO: 2061408 - DNA, 25 bp, Homo sapien
taagtggccaaggtatttaagctga

SEQ ID NO: 2061409 - DNA, 25 bp, Homo sapien
tgaaacagcaagagctttactgcct

SEQ ID NO: 2061410 - DNA, 25 bp, Homo sapien
caatgctgaagcgtagaacagtgag

SEQ ID NO: 2061411 - DNA, 25 bp, Homo sapien
tcactgagggtcgagaagcaatgct

SEQ ID NO: 2061412 - DNA, 25 bp, Homo sapien
gcaagttaaagacaagagttcctct

SEQ ID NO: 2061413 - DNA, 25 bp, Homo sapien
cataaacatatctccgcaagtggcg

SEQ ID NO: 2061414 - DNA, 25 bp, Homo sapien
tctacagctcccagagtaagcaatg

SEQ ID NO: 2061415 - DNA, 25 bp, Homo sapien
catgttttgggcagtgttgaaaaga

SEQ ID NO: 2061416 - DNA, 25 bp, Homo sapien
tctcaagtggtaatgaaactacaca

SEQ ID NO: 2061417 - DNA, 25 bp, Homo sapien
tgggctggccattcctaaaatatgg

SEQ ID NO: 2061418 - DNA, 25 bp, Homo sapien
agaccgtcgaggctgggaagaacct

SEQ ID NO: 2061419 - DNA, 25 bp, Homo sapien
accgtaccacccactgcaaaaacat

SEQ ID NO: 2061420 - DNA, 25 bp, Homo sapien
ggaacaaaccgtaccacccactgca

SEQ ID NO: 2061421 - DNA, 25 bp, Homo sapien
accgtcgaggctgggaagaacctgc

SEQ ID NO: 2061422 - DNA, 25 bp, Homo sapien
acattcttcataggagttgtaccaa

SEQ ID NO: 2061423 - DNA, 25 bp, Homo sapien
tgagttgttcctaatcttttgctat

SEQ ID NO: 2061424 - DNA, 25 bp, Homo sapien
cacaaatgcacgtaggattgctggg

SEQ ID NO: 2061425 - DNA, 25 bp, Homo sapien
aaactagtacattgtcattttgcac

SEQ ID NO: 2061426 - DNA, 25 bp, Homo sapien
gaagttttgcgtcttctgtaggtca

SEQ ID NO: 2061427 - DNA, 25 bp, Homo sapien
gaaggaagttttgcgtcttctgtag

SEQ ID NO: 2061428 - DNA, 25 bp, Homo sapien
aggaagttttgcgtcttctgtaggt

SEQ ID NO: 2061429 - DNA, 25 bp, Homo sapien
tgaaggaagttttgcgtcttctgta

SEQ ID NO: 2061430 - DNA, 25 bp, Homo sapien
caggagtttggatccatggtcccat

SEQ ID NO: 2061431 - DNA, 25 bp, Homo sapien
tcccaggagtttggatccatggtcc

SEQ ID NO: 2061432 - DNA, 25 bp, Homo sapien
gattgtagagaactgtctgttccag

SEQ ID NO: 2061433 - DNA, 25 bp, Homo sapien
tgtctgttccagatcaatcccagga

SEQ ID NO: 2061434 - DNA, 25 bp, Homo sapien
gagagaacgaaactgtgccgacata

SEQ ID NO: 2061435 - DNA, 25 bp, Homo sapien
tactgatggagagaacgaaactgtg

SEQ ID NO: 2061436 - DNA, 25 bp, Homo sapien
tgatgatcctctgggcagcatactg

SEQ ID NO: 2061437 - DNA, 25 bp, Homo sapien
ccgacatatttgctaaagctgccaa

SEQ ID NO: 2061438 - DNA, 25 bp, Homo sapien
gttgtattgaatggttcttattacc

SEQ ID NO: 2061439 - DNA, 25 bp, Homo sapien
ggttcttattaccaccaggatcagg

SEQ ID NO: 2061440 - DNA, 25 bp, Homo sapien
gatttcagttaaaactcgttctgaa

SEQ ID NO: 2061441 - DNA, 25 bp, Homo sapien
gaatggttcttattaccaccaggat

SEQ ID NO: 2061442 - DNA, 25 bp, Homo sapien
tgtgttacgtataagcacatctaca

SEQ ID NO: 2061443 - DNA, 25 bp, Homo sapien
tataagcacatctacatctgacaag

SEQ ID NO: 2061444 - DNA, 25 bp, Homo sapien
tttctatcgaatactttgtgttacg

SEQ ID NO: 2061445 - DNA, 25 bp, Homo sapien
cgaatactttgtgttacgtataagc

SEQ ID NO: 2061446 - DNA, 25 bp, Homo sapien
aaattgacaaaatcctgaaaattct

SEQ ID NO: 2061447 - DNA, 25 bp, Homo sapien
ggcagcagccccttggaaaaattga

SEQ ID NO: 2061448 - DNA, 25 bp, Homo sapien
tggcagcagccccttggaaaaattg

SEQ ID NO: 2061449 - DNA, 25 bp, Homo sapien
agcagccccttggaaaaattgacaa

SEQ ID NO: 2061450 - DNA, 25 bp, Homo sapien
cttcatgaatggatctgttgaagcc

SEQ ID NO: 2061451 - DNA, 25 bp, Homo sapien
ttcatgaatggatctgttgaagcca

SEQ ID NO: 2061452 - DNA, 25 bp, Homo sapien
cacttcatgaatggatctgttgaag

SEQ ID NO: 2061453 - DNA, 25 bp, Homo sapien
tcatgaatggatctgttgaagccat

SEQ ID NO: 2061454 - DNA, 25 bp, Homo sapien
acacatggtgtgaattcctttcttc

SEQ ID NO: 2061455 - DNA, 25 bp, Homo sapien
tcctttcttcaacatgatacagaat

SEQ ID NO: 2061456 - DNA, 25 bp, Homo sapien
acaatattataagggccatatacac

SEQ ID NO: 2061457 - DNA, 25 bp, Homo sapien
cttccgtaaggatcaacaatattat

SEQ ID NO: 2061458 - DNA, 25 bp, Homo sapien
tcctgggcaacgtgtggctgttaaa

SEQ ID NO: 2061459 - DNA, 25 bp, Homo sapien
ggcagcgaccgagatgatttaaaaa

SEQ ID NO: 2061460 - DNA, 25 bp, Homo sapien
cctgaacaggctgaatcctgggcaa

SEQ ID NO: 2061461 - DNA, 25 bp, Homo sapien
cgggtacttagcagatggcagcgac

SEQ ID NO: 2061462 - DNA, 25 bp, Homo sapien
ctgtgcgagccaacatgtatgttct

SEQ ID NO: 2061463 - DNA, 25 bp, Homo sapien
gattttccatatctgtgcgagccaa

SEQ ID NO: 2061464 - DNA, 25 bp, Homo sapien
caaagagctgtgtacaaactattaa

SEQ ID NO: 2061465 - DNA, 25 bp, Homo sapien
tattttgatggagcaaggtatacaa

SEQ ID NO: 2061466 - DNA, 25 bp, Homo sapien
tctggagaggcagccgctttgctgc

SEQ ID NO: 2061467 - DNA, 25 bp, Homo sapien
ttgtctgtaggggtttggcgcatct

SEQ ID NO: 2061468 - DNA, 25 bp, Homo sapien
catctgtcagattggccaacaccag

SEQ ID NO: 2061469 - DNA, 25 bp, Homo sapien
tgtgttcttgaaggacataatggct

SEQ ID NO: 2061470 - DNA, 25 bp, Homo sapien
cagtgagtaaccttgaataaattta

SEQ ID NO: 2061471 - DNA, 25 bp, Homo sapien
tctttaaatttactccaagcatcca

SEQ ID NO: 2061472 - DNA, 25 bp, Homo sapien
tctgtcagtgagtaaccttgaataa

SEQ ID NO: 2061473 - DNA, 25 bp, Homo sapien
catacacaaattctgtcagtgagta

SEQ ID NO: 2061474 - DNA, 25 bp, Homo sapien
gctttattctatattcctccttgta

SEQ ID NO: 2061475 - DNA, 25 bp, Homo sapien
gaggccatcagtcttcccttcaaat

SEQ ID NO: 2061476 - DNA, 25 bp, Homo sapien
ggcacttgtagcaagtctcagaaac

SEQ ID NO: 2061477 - DNA, 25 bp, Homo sapien
caggatttcatctgcaattgattgc

SEQ ID NO: 2061478 - DNA, 25 bp, Homo sapien
aactggacctcatcagcaacagagc

SEQ ID NO: 2061479 - DNA, 25 bp, Homo sapien
ttatcctgaaaactggacctcatca

SEQ ID NO: 2061480 - DNA, 25 bp, Homo sapien
tcctgaaaactggacctcatcagca

SEQ ID NO: 2061481 - DNA, 25 bp, Homo sapien
aaactggacctcatcagcaacagag

SEQ ID NO: 2061482 - DNA, 25 bp, Homo sapien
agggtccaagcaagtggttcactac

SEQ ID NO: 2061483 - DNA, 25 bp, Homo sapien
gttccagtacaaggattctcctcct

SEQ ID NO: 2061484 - DNA, 25 bp, Homo sapien
gacaacaaatttcactccggaactg

SEQ ID NO: 2061485 - DNA, 25 bp, Homo sapien
tcactactcatccagccgcagttcc

SEQ ID NO: 2061486 - DNA, 25 bp, Homo sapien
cccatccgactgctgagggaaaaca

SEQ ID NO: 2061487 - DNA, 25 bp, Homo sapien
cttcacaagtttgctggtgtatgga

SEQ ID NO: 2061488 - DNA, 25 bp, Homo sapien
tcttcacaagtttgctggtgtatgg

SEQ ID NO: 2061489 - DNA, 25 bp, Homo sapien
ggtcttcacaagtttgctggtgtat

SEQ ID NO: 2061490 - DNA, 25 bp, Homo sapien
gctctgtcgcaaaacttctttgtgg

SEQ ID NO: 2061491 - DNA, 25 bp, Homo sapien
caaccattgttgatatagcttctac

SEQ ID NO: 2061492 - DNA, 25 bp, Homo sapien
cgcaaaacttctttgtggaagagtt

SEQ ID NO: 2061493 - DNA, 25 bp, Homo sapien
atggacctcgcatcaaatacttgtg

SEQ ID NO: 2061494 - DNA, 25 bp, Homo sapien
gtattgaagatgactgatgtttttc

SEQ ID NO: 2061495 - DNA, 25 bp, Homo sapien
aatggtattgaagatgactgatgtt

SEQ ID NO: 2061496 - DNA, 25 bp, Homo sapien
taatccattttctgtaataaatggt

SEQ ID NO: 2061497 - DNA, 25 bp, Homo sapien
ataaatggtattgaagatgactgat

SEQ ID NO: 2061498 - DNA, 25 bp, Homo sapien
cttgtaggatggagttccaagaaca

SEQ ID NO: 2061499 - DNA, 25 bp, Homo sapien
tgttaccaagacaaaccttcttgta

SEQ ID NO: 2061500 - DNA, 25 bp, Homo sapien
catggaaactgttaccaagacaaac

SEQ ID NO: 2061501 - DNA, 25 bp, Homo sapien
tcacatggaaactgttaccaagaca

SEQ ID NO: 2061502 - DNA, 25 bp, Homo sapien
tccttttagagagctttacccagag

SEQ ID NO: 2061503 - DNA, 25 bp, Homo sapien
tttcattggaggaccttcccctaca

SEQ ID NO: 2061504 - DNA, 25 bp, Homo sapien
tggaaatacaatcaggaagtcagga

SEQ ID NO: 2061505 - DNA, 25 bp, Homo sapien
aaaaagatgtgcctcctagctgact

SEQ ID NO: 2061506 - DNA, 25 bp, Homo sapien
aagagtggaatatcagtgatcaact

SEQ ID NO: 2061507 - DNA, 25 bp, Homo sapien
tggaatatcagtgatcaactgcatc

SEQ ID NO: 2061508 - DNA, 25 bp, Homo sapien
gagtggaatatcagtgatcaactgc

SEQ ID NO: 2061509 - DNA, 25 bp, Homo sapien
ggaatatcagtgatcaactgcatca

SEQ ID NO: 2061510 - DNA, 25 bp, Homo sapien
agatgcaaagtactgttcctggatg

SEQ ID NO: 2061511 - DNA, 25 bp, Homo sapien
taatatcgagtgtcaacttgatcgg

SEQ ID NO: 2061512 - DNA, 25 bp, Homo sapien
tcggattgaaagatgcaaagtactg

SEQ ID NO: 2061513 - DNA, 25 bp, Homo sapien
aaagatgcaaagtactgttcctgga

SEQ ID NO: 2061514 - DNA, 25 bp, Homo sapien
acaaagcattgtgtgtctgccaaat

SEQ ID NO: 2061515 - DNA, 25 bp, Homo sapien
aaagcattgtgtgtctgccaaatga

SEQ ID NO: 2061516 - DNA, 25 bp, Homo sapien
aagcattgtgtgtctgccaaatgaa

SEQ ID NO: 2061517 - DNA, 25 bp, Homo sapien
caaagcattgtgtgtctgccaaatg

SEQ ID NO: 2061518 - DNA, 25 bp, Homo sapien
gaagaccttaattagtgcaccaaga

SEQ ID NO: 2061519 - DNA, 25 bp, Homo sapien
taattagtgcaccaagatttcctgt

SEQ ID NO: 2061520 - DNA, 25 bp, Homo sapien
ccaagatttcctgttcgaggattgt

SEQ ID NO: 2061521 - DNA, 25 bp, Homo sapien
gaaaggaagaccttaattagtgcac

SEQ ID NO: 2061522 - DNA, 25 bp, Homo sapien
ctgcattgtgcttactaactgccaa

SEQ ID NO: 2061523 - DNA, 25 bp, Homo sapien
tgcattgtgcttactaactgccaag

SEQ ID NO: 2061524 - DNA, 25 bp, Homo sapien
ccaacaatacgtgctcacttcatgt

SEQ ID NO: 2061525 - DNA, 25 bp, Homo sapien
tctgcatcacgttttggtagttctt

SEQ ID NO: 2061526 - DNA, 25 bp, Homo sapien
tccaacaatacgtgctcacttcatg

SEQ ID NO: 2061527 - DNA, 25 bp, Homo sapien
ctgcatcacgttttggtagttcttg

SEQ ID NO: 2061528 - DNA, 25 bp, Homo sapien
catacatttaacacgttattgcaca

SEQ ID NO: 2061529 - DNA, 25 bp, Homo sapien
ttaaagtctcagatgatgtgttagc

SEQ ID NO: 2061530 - DNA, 25 bp, Homo sapien
actggctttatctcagtggtctgga

SEQ ID NO: 2061531 - DNA, 25 bp, Homo sapien
gatacatacatttaacacgttattg

SEQ ID NO: 2061532 - DNA, 25 bp, Homo sapien
ctacctcaatctcgcaagcagctga

SEQ ID NO: 2061533 - DNA, 25 bp, Homo sapien
tttcagcactgaattgcgacatggc

SEQ ID NO: 2061534 - DNA, 25 bp, Homo sapien
tatcaacaatgcctatgtcagggtt

SEQ ID NO: 2061535 - DNA, 25 bp, Homo sapien
gaaagccagctctatttagcaaaaa

SEQ ID NO: 2061536 - DNA, 25 bp, Homo sapien
tcaaaatgctgggattataggcgtg

SEQ ID NO: 2061537 - DNA, 25 bp, Homo sapien
tccactcgcatcagcctctcaaaat

SEQ ID NO: 2061538 - DNA, 25 bp, Homo sapien
agccactgtgtccggcctagacagc

SEQ ID NO: 2061539 - DNA, 25 bp, Homo sapien
tgagccactgtgtccggcctagaca

SEQ ID NO: 2061540 - DNA, 25 bp, Homo sapien
actgaaatggttgcttcctccaaga

SEQ ID NO: 2061541 - DNA, 25 bp, Homo sapien
gactgaaatggttgcttcctccaag

SEQ ID NO: 2061542 - DNA, 25 bp, Homo sapien
ctgcagactgaaatggttgcttcct

SEQ ID NO: 2061543 - DNA, 25 bp, Homo sapien
gacctgcagactgaaatggttgctt

SEQ ID NO: 2061544 - DNA, 25 bp, Homo sapien
gatatttataaggtgtctgccagcc

SEQ ID NO: 2061545 - DNA, 25 bp, Homo sapien
ggatagacatctaacccaagcctag

SEQ ID NO: 2061546 - DNA, 25 bp, Homo sapien
gatatgtgcagcatgtctccgctcc

SEQ ID NO: 2061547 - DNA, 25 bp, Homo sapien
ctacttttcggaggtgagcagaggc

SEQ ID NO: 2061548 - DNA, 25 bp, Homo sapien
ggaggcaacactaaacacctatcaa

SEQ ID NO: 2061549 - DNA, 25 bp, Homo sapien
gaggcaacactaaacacctatcaaa

SEQ ID NO: 2061550 - DNA, 25 bp, Homo sapien
aggcaacactaaacacctatcaaaa

SEQ ID NO: 2061551 - DNA, 25 bp, Homo sapien
catgagcagcagtactcagtgataa

SEQ ID NO: 2061552 - DNA, 25 bp, Homo sapien
tatgacctttctcaccaatccacag

SEQ ID NO: 2061553 - DNA, 25 bp, Homo sapien
gatgctatagctcatccccagtatg

SEQ ID NO: 2061554 - DNA, 25 bp, Homo sapien
gtcgtatcactatcacatgagcagc

SEQ ID NO: 2061555 - DNA, 25 bp, Homo sapien
tatacccacaggaccgtaaagcatg

SEQ ID NO: 2061556 - DNA, 25 bp, Homo sapien
acccacaggaccgtaaagcatgctg

SEQ ID NO: 2061557 - DNA, 25 bp, Homo sapien
cacaggaccgtaaagcatgctgcta

SEQ ID NO: 2061558 - DNA, 25 bp, Homo sapien
gtatatacccacaggaccgtaaagc

SEQ ID NO: 2061559 - DNA, 25 bp, Homo sapien
gagaagctgattccagaacgggtca

SEQ ID NO: 2061560 - DNA, 25 bp, Homo sapien
cgattctgctgctattcgatcccat

SEQ ID NO: 2061561 - DNA, 25 bp, Homo sapien
gagatagattccgtgcctgataact

SEQ ID NO: 2061562 - DNA, 25 bp, Homo sapien
tcatttttaggaagatcgccgattc

SEQ ID NO: 2061563 - DNA, 25 bp, Homo sapien
aagcagataatttgtccttaaacct

SEQ ID NO: 2061564 - DNA, 25 bp, Homo sapien
agcagataatttgtccttaaacctg

SEQ ID NO: 2061565 - DNA, 25 bp, Homo sapien
gcagataatttgtccttaaacctgc

SEQ ID NO: 2061566 - DNA, 25 bp, Homo sapien
tgaaaggaaactacatggcctcagg

SEQ ID NO: 2061567 - DNA, 25 bp, Homo sapien
gaaatactgatctggctcctcatcg

SEQ ID NO: 2061568 - DNA, 25 bp, Homo sapien
tcagggaccaaaggcggctcaggtc

SEQ ID NO: 2061569 - DNA, 25 bp, Homo sapien
gagcaagatgcttccccgatgatgc

SEQ ID NO: 2061570 - DNA, 25 bp, Homo sapien
tgttaagcccaattagaaaatgcta

SEQ ID NO: 2061571 - DNA, 25 bp, Homo sapien
aaatatcctgaaggccgggcgctgt

SEQ ID NO: 2061572 - DNA, 25 bp, Homo sapien
gcctctatattaagacagctaatca

SEQ ID NO: 2061573 - DNA, 25 bp, Homo sapien
caggggccccaataactcaattcaa

SEQ ID NO: 2061574 - DNA, 25 bp, Homo sapien
ccatattgatggactttaggtagtc

SEQ ID NO: 2061575 - DNA, 25 bp, Homo sapien
tggctgccttctacagaggttgtac

SEQ ID NO: 2061576 - DNA, 25 bp, Homo sapien
ttcttgggcatcattccacagacat

SEQ ID NO: 2061577 - DNA, 25 bp, Homo sapien
gaggttgtaccaacttggattctca

SEQ ID NO: 2061578 - DNA, 25 bp, Homo sapien
tctttctcggcaggcaacaacaaac

SEQ ID NO: 2061579 - DNA, 25 bp, Homo sapien
tcgaacacgtctctttctcaaggag

SEQ ID NO: 2061580 - DNA, 25 bp, Homo sapien
accctagggtatacaccccagatag

SEQ ID NO: 2061581 - DNA, 25 bp, Homo sapien
gatagtgtagccacttcataatggc

SEQ ID NO: 2061582 - DNA, 25 bp, Homo sapien
gtcaggagaagtcgctgtcgccgcc

SEQ ID NO: 2061583 - DNA, 25 bp, Homo sapien
gggtcaggagaagtcgctgtcgccg

SEQ ID NO: 2061584 - DNA, 25 bp, Homo sapien
cacggacccgcggacggatgggagg

SEQ ID NO: 2061585 - DNA, 25 bp, Homo sapien
tgctccagctccacggacccgcgga

SEQ ID NO: 2061586 - DNA, 25 bp, Homo sapien
gctcaggcctccatgtttccacgtc

SEQ ID NO: 2061587 - DNA, 25 bp, Homo sapien
tcaggcctccatgtttccacgtctc

SEQ ID NO: 2061588 - DNA, 25 bp, Homo sapien
ggctcaggcctccatgtttccacgt

SEQ ID NO: 2061589 - DNA, 25 bp, Homo sapien
aggcctccatgtttccacgtctcag

SEQ ID NO: 2061590 - DNA, 25 bp, Homo sapien
gaagagggaagcgaccgagaacgcg

SEQ ID NO: 2061591 - DNA, 25 bp, Homo sapien
ggccgcgtcggtgcggaggccagga

SEQ ID NO: 2061592 - DNA, 25 bp, Homo sapien
cgggtacagatccggctccggtccg

SEQ ID NO: 2061593 - DNA, 25 bp, Homo sapien
gagaacgcggctagggaccagaccc

SEQ ID NO: 2061594 - DNA, 25 bp, Homo sapien
tatatatgtagctgtgatggctcct

SEQ ID NO: 2061595 - DNA, 25 bp, Homo sapien
gctgtgatggctccttagcatgaaa

SEQ ID NO: 2061596 - DNA, 25 bp, Homo sapien
tatgtagctgtgatggctccttagc

SEQ ID NO: 2061597 - DNA, 25 bp, Homo sapien
tatatatatgtagctgtgatggctc

SEQ ID NO: 2061598 - DNA, 25 bp, Homo sapien
gataaaaatcacatagcggcccagg

SEQ ID NO: 2061599 - DNA, 25 bp, Homo sapien
taaatcagtgacttgaccagccaca

SEQ ID NO: 2061600 - DNA, 25 bp, Homo sapien
gagttaggacccagacttcattagg

SEQ ID NO: 2061601 - DNA, 25 bp, Homo sapien
tgttgtcccaccactacacagatgc

SEQ ID NO: 2061602 - DNA, 25 bp, Homo sapien
tcatatgaattagagaaccaaagat

SEQ ID NO: 2061603 - DNA, 25 bp, Homo sapien
tactccactcaaattagaagagccc

SEQ ID NO: 2061604 - DNA, 25 bp, Homo sapien
taattactatatttgtggacaagct

SEQ ID NO: 2061605 - DNA, 25 bp, Homo sapien
tggacaagctgctccactgtgttgg

SEQ ID NO: 2061606 - DNA, 25 bp, Homo sapien
ttccggtctcagataaaaaggtcag

SEQ ID NO: 2061607 - DNA, 25 bp, Homo sapien
gactcctatcctgaattccggtctc

SEQ ID NO: 2061608 - DNA, 25 bp, Homo sapien
agtatcaggtaaatatctagactcc

SEQ ID NO: 2061609 - DNA, 25 bp, Homo sapien
tcagagacaattacaaggaagatgc

SEQ ID NO: 2061610 - DNA, 25 bp, Homo sapien
ggtccttttgttggtaatccattca

SEQ ID NO: 2061611 - DNA, 25 bp, Homo sapien
tcacagatttctgttggtccttttg

SEQ ID NO: 2061612 - DNA, 25 bp, Homo sapien
tggtccttttgttggtaatccattc

SEQ ID NO: 2061613 - DNA, 25 bp, Homo sapien
acagatttctgttggtccttttgtt

SEQ ID NO: 2061614 - DNA, 25 bp, Homo sapien
caaaatctagtgtttcacccaagta

SEQ ID NO: 2061615 - DNA, 25 bp, Homo sapien
cacaaactattgaagcttctggttc

SEQ ID NO: 2061616 - DNA, 25 bp, Homo sapien
tgcacttaccagtcagaaaatatgg

SEQ ID NO: 2061617 - DNA, 25 bp, Homo sapien
cactgctcttattcaaggcatgtga

SEQ ID NO: 2061618 - DNA, 25 bp, Homo sapien
taggccatatacgactaacgaaggg

SEQ ID NO: 2061619 - DNA, 25 bp, Homo sapien
gagcagaactggaatgacgatacaa

SEQ ID NO: 2061620 - DNA, 25 bp, Homo sapien
cagagggtatatatatggctccagg

SEQ ID NO: 2061621 - DNA, 25 bp, Homo sapien
gattcttgtattgctttcttaggcc

SEQ ID NO: 2061622 - DNA, 25 bp, Homo sapien
taataatgaggtgcctgcttccaaa

SEQ ID NO: 2061623 - DNA, 25 bp, Homo sapien
aagaaataataggtggtaggcatga

SEQ ID NO: 2061624 - DNA, 25 bp, Homo sapien
cagtgaggttgggtacccttgctac

SEQ ID NO: 2061625 - DNA, 25 bp, Homo sapien
catttggtaggtgctagacagttta

SEQ ID NO: 2061626 - DNA, 25 bp, Homo sapien
aaggagagaaccgcttgcgcccagg

SEQ ID NO: 2061627 - DNA, 25 bp, Homo sapien
cccaggaaagccgaaactgccgtga

SEQ ID NO: 2061628 - DNA, 25 bp, Homo sapien
aaagccgaaactgccgtgagctatg

SEQ ID NO: 2061629 - DNA, 25 bp, Homo sapien
accgcttgcgcccaggaaagccgaa

SEQ ID NO: 2061630 - DNA, 25 bp, Homo sapien
ccacaattacggcttttaagagact

SEQ ID NO: 2061631 - DNA, 25 bp, Homo sapien
tctagaaggtggctacgagatatta

SEQ ID NO: 2061632 - DNA, 25 bp, Homo sapien
gactttttagctctcttcggaatga

SEQ ID NO: 2061633 - DNA, 25 bp, Homo sapien
ttcacacatatggaaactgggtcag

SEQ ID NO: 2061634 - DNA, 25 bp, Homo sapien
gacgagaacagaggcctaacggtga

SEQ ID NO: 2061635 - DNA, 25 bp, Homo sapien
tatcggagaggcaaatgcaagctcc

SEQ ID NO: 2061636 - DNA, 25 bp, Homo sapien
gcgccggtggtggacaaagaataca

SEQ ID NO: 2061637 - DNA, 25 bp, Homo sapien
tgtgaaaccgatacttggccacgga

SEQ ID NO: 2061638 - DNA, 25 bp, Homo sapien
accgcctaggactctgcgagcgcgg

SEQ ID NO: 2061639 - DNA, 25 bp, Homo sapien
aacccaggccgctagcccgggcaca

SEQ ID NO: 2061640 - DNA, 25 bp, Homo sapien
gcgggccgcgaccgccgaggaggga

SEQ ID NO: 2061641 - DNA, 25 bp, Homo sapien
tgagagcgaaggcaggcaccgcgga

SEQ ID NO: 2061642 - DNA, 25 bp, Homo sapien
agctgacaatgtccgcacttccgga

SEQ ID NO: 2061643 - DNA, 25 bp, Homo sapien
cgcgaccgcggaaacgcagctgaca

SEQ ID NO: 2061644 - DNA, 25 bp, Homo sapien
gacaatgtccgcacttccggaggga

SEQ ID NO: 2061645 - DNA, 25 bp, Homo sapien
ggaaacgcagctgacaatgtccgca

SEQ ID NO: 2061646 - DNA, 25 bp, Homo sapien
atcccagaagaaactgaagaaacaa

SEQ ID NO: 2061647 - DNA, 25 bp, Homo sapien
atatcccagaagaaactgaagaaac

SEQ ID NO: 2061648 - DNA, 25 bp, Homo sapien
tatcccagaagaaactgaagaaaca

SEQ ID NO: 2061649 - DNA, 25 bp, Homo sapien
tcccagaagaaactgaagaaacaaa

SEQ ID NO: 2061650 - DNA, 25 bp, Homo sapien
tgtttcttcagtttcttctgggata

SEQ ID NO: 2061651 - DNA, 25 bp, Homo sapien
ttgtttcttcagtttcttctgggat

SEQ ID NO: 2061652 - DNA, 25 bp, Homo sapien
gtttcttcagtttcttctgggatat

SEQ ID NO: 2061653 - DNA, 25 bp, Homo sapien
tttgtttcttcagtttcttctggga

SEQ ID NO: 2061654 - DNA, 25 bp, Homo sapien
aatgggccctctccccaaatctaag

SEQ ID NO: 2061655 - DNA, 25 bp, Homo sapien
tacatagccacttcaaaatgggccc

SEQ ID NO: 2061656 - DNA, 25 bp, Homo sapien
taggacacctttggaataactatga

SEQ ID NO: 2061657 - DNA, 25 bp, Homo sapien
gatggccccacttagatgtacatag

SEQ ID NO: 2061658 - DNA, 25 bp, Homo sapien
ttttatattcagtacctcaggcccg

SEQ ID NO: 2061659 - DNA, 25 bp, Homo sapien
ccagaataagctgaagtcctccaag

SEQ ID NO: 2061660 - DNA, 25 bp, Homo sapien
gaagtgtacagaatcactcaggttc

SEQ ID NO: 2061661 - DNA, 25 bp, Homo sapien
cgggcctgaggtactgaatataaaa

SEQ ID NO: 2061662 - DNA, 25 bp, Homo sapien
gagggcccattttgaagtggctatg

SEQ ID NO: 2061663 - DNA, 25 bp, Homo sapien
cagcagataatcatacgggcctgag

SEQ ID NO: 2061664 - DNA, 25 bp, Homo sapien
ttctactatcacaaacaaaaccgag

SEQ ID NO: 2061665 - DNA, 25 bp, Homo sapien
tggaggacttcagcttattctggag

SEQ ID NO: 2061666 - DNA, 25 bp, Homo sapien
cattgagatgatccttacggaaaag

SEQ ID NO: 2061667 - DNA, 25 bp, Homo sapien
agcacctaagatgcgccgccggacc

SEQ ID NO: 2061668 - DNA, 25 bp, Homo sapien
gatgcgccgccggacctacagagct

SEQ ID NO: 2061669 - DNA, 25 bp, Homo sapien
taagatgcgccgccggacctacaga

SEQ ID NO: 2061670 - DNA, 25 bp, Homo sapien
ctaagatgcgccgccggacctacag

SEQ ID NO: 2061671 - DNA, 25 bp, Homo sapien
aagcacctaagatgcgccgccggac

SEQ ID NO: 2061672 - DNA, 25 bp, Homo sapien
ctgtaggtccggcggcgcatcttag

SEQ ID NO: 2061673 - DNA, 25 bp, Homo sapien
agctctgtaggtccggcggcgcatc

SEQ ID NO: 2061674 - DNA, 25 bp, Homo sapien
gagctctgtaggtccggcggcgcat

SEQ ID NO: 2061675 - DNA, 25 bp, Homo sapien
ggtccggcggcgcatcttaggtgct

SEQ ID NO: 2061676 - DNA, 25 bp, Homo sapien
gtccggcggcgcatcttaggtgctt

SEQ ID NO: 2061677 - DNA, 25 bp, Homo sapien
tctgtaggtccggcggcgcatctta

SEQ ID NO: 2061678 - DNA, 25 bp, Homo sapien
gtttgtggcctaccttcataatgga

SEQ ID NO: 2061679 - DNA, 25 bp, Homo sapien
cttttgcatttgaaggtctgggcca

SEQ ID NO: 2061680 - DNA, 25 bp, Homo sapien
tgagtccctttatggcaaaattctg

SEQ ID NO: 2061681 - DNA, 25 bp, Homo sapien
ctaacatcctgtgcaacttgggtgg

SEQ ID NO: 2061682 - DNA, 25 bp, Homo sapien
tcatcaagacttcgaattgggttct

SEQ ID NO: 2061683 - DNA, 25 bp, Homo sapien
tccagaagcgtgctctgtggtctct

SEQ ID NO: 2061684 - DNA, 25 bp, Homo sapien
tggcccagaccttcaaatgcaaaag

SEQ ID NO: 2061685 - DNA, 25 bp, Homo sapien
cagaattttgccataaagggactca

SEQ ID NO: 2061686 - DNA, 25 bp, Homo sapien
tccattatgaaggtaggccacaaac

SEQ ID NO: 2061687 - DNA, 25 bp, Homo sapien
agagaccacagagcacgcttctgga

SEQ ID NO: 2061688 - DNA, 25 bp, Homo sapien
ccacccaagttgcacaggatgttag

SEQ ID NO: 2061689 - DNA, 25 bp, Homo sapien
ggaagaacccaattcgaagtcttga

SEQ ID NO: 2061690 - DNA, 25 bp, Homo sapien
aagcaatggggctggacacaaggtc

SEQ ID NO: 2061691 - DNA, 25 bp, Homo sapien
tgcttaaaaacgcagagagtaatgc

SEQ ID NO: 2061692 - DNA, 25 bp, Homo sapien
agcaatggggctggacacaaggtcg

SEQ ID NO: 2061693 - DNA, 25 bp, Homo sapien
caatggggctggacacaaggtcggt

SEQ ID NO: 2061694 - DNA, 25 bp, Homo sapien
gcaatggggctggacacaaggtcgg

SEQ ID NO: 2061695 - DNA, 25 bp, Homo sapien
gcttaaaaacgcagagagtaatgct

SEQ ID NO: 2061696 - DNA, 25 bp, Homo sapien
accgaccttgtgtccagccccattg

SEQ ID NO: 2061697 - DNA, 25 bp, Homo sapien
gaccttgtgtccagccccattgctt

SEQ ID NO: 2061698 - DNA, 25 bp, Homo sapien
gcattactctctgcgtttttaagca

SEQ ID NO: 2061699 - DNA, 25 bp, Homo sapien
ccgaccttgtgtccagccccattgc

SEQ ID NO: 2061700 - DNA, 25 bp, Homo sapien
cgaccttgtgtccagccccattgct

SEQ ID NO: 2061701 - DNA, 25 bp, Homo sapien
ccaccgaccttgtgtccagccccat

SEQ ID NO: 2061702 - DNA, 25 bp, Homo sapien
taaaccatatcctaagaaaccgtga

SEQ ID NO: 2061703 - DNA, 25 bp, Homo sapien
tctgtgctgatgaacctatttctgg

SEQ ID NO: 2061704 - DNA, 25 bp, Homo sapien
cctaagaaaccgtgatatcagataa

SEQ ID NO: 2061705 - DNA, 25 bp, Homo sapien
taagaatggctaagatctgtgctga

SEQ ID NO: 2061706 - DNA, 25 bp, Homo sapien
gtgagaattcttagttgccatttga

SEQ ID NO: 2061707 - DNA, 25 bp, Homo sapien
tgacaggacaccttggattgatggt

SEQ ID NO: 2061708 - DNA, 25 bp, Homo sapien
taaattaacattacagccaagatga

SEQ ID NO: 2061709 - DNA, 25 bp, Homo sapien
accatcaatccaaggtgtcctgtca

SEQ ID NO: 2061710 - DNA, 25 bp, Homo sapien
tcagcacagatcttagccattctta

SEQ ID NO: 2061711 - DNA, 25 bp, Homo sapien
ccagaaataggttcatcagcacaga

SEQ ID NO: 2061712 - DNA, 25 bp, Homo sapien
tcaaatggcaactaagaattctcac

SEQ ID NO: 2061713 - DNA, 25 bp, Homo sapien
tatctgatatcacggtttcttagga

SEQ ID NO: 2061714 - DNA, 25 bp, Homo sapien
tggtggagttggcaggtgtgcgcag

SEQ ID NO: 2061715 - DNA, 25 bp, Homo sapien
aacagtgtgtaccattccgacgtta

SEQ ID NO: 2061716 - DNA, 25 bp, Homo sapien
gtgtaccattccgacgttacaatgg

SEQ ID NO: 2061717 - DNA, 25 bp, Homo sapien
cagtgtgtaccattccgacgttaca

SEQ ID NO: 2061718 - DNA, 25 bp, Homo sapien
tgcatatacgaaaagccacgaagta

SEQ ID NO: 2061719 - DNA, 25 bp, Homo sapien
gtgtgtaccattccgacgttacaat

SEQ ID NO: 2061720 - DNA, 25 bp, Homo sapien
tacttcgtggcttttcgtatatgca

SEQ ID NO: 2061721 - DNA, 25 bp, Homo sapien
attgtaacgtcggaatggtacacac

SEQ ID NO: 2061722 - DNA, 25 bp, Homo sapien
ccattgtaacgtcggaatggtacac

SEQ ID NO: 2061723 - DNA, 25 bp, Homo sapien
tgtaacgtcggaatggtacacactg

SEQ ID NO: 2061724 - DNA, 25 bp, Homo sapien
gtaacgtcggaatggtacacactgt

SEQ ID NO: 2061725 - DNA, 25 bp, Homo sapien
taacgtcggaatggtacacactgtt

SEQ ID NO: 2061726 - DNA, 25 bp, Homo sapien
attaaagctttgatctagttaacca

SEQ ID NO: 2061727 - DNA, 25 bp, Homo sapien
tggttaactagatcaaagctttaat

SEQ ID NO: 2061728 - DNA, 25 bp, Homo sapien
ccaacactttattcttcatacttag

SEQ ID NO: 2061729 - DNA, 25 bp, Homo sapien
taactcgacattttgaaaagctgaa

SEQ ID NO: 2061730 - DNA, 25 bp, Homo sapien
cccaaagaatagaaataactcgaca

SEQ ID NO: 2061731 - DNA, 25 bp, Homo sapien
ttgccttgcccccaaagaatagaaa

SEQ ID NO: 2061732 - DNA, 25 bp, Homo sapien
attaaagctttgatctagttaacca

SEQ ID NO: 2061733 - DNA, 25 bp, Homo sapien
gctttgatctagttaaccaacactt

SEQ ID NO: 2061734 - DNA, 25 bp, Homo sapien
tgtcgagttatttctattctttggg

SEQ ID NO: 2061735 - DNA, 25 bp, Homo sapien
cagcttttcaaaatgtcgagttatt

SEQ ID NO: 2061736 - DNA, 25 bp, Homo sapien
caattttcagcttttcaaaatgtcg

SEQ ID NO: 2061737 - DNA, 25 bp, Homo sapien
ctaagtatgaagaataaagtgttgg

SEQ ID NO: 2061738 - DNA, 25 bp, Homo sapien
tggttaactagatcaaagctttaat

SEQ ID NO: 2061739 - DNA, 25 bp, Homo sapien
aagtgttggttaactagatcaaagc

SEQ ID NO: 2061740 - DNA, 25 bp, Homo sapien
gatgactttcttaggacacctttgg

SEQ ID NO: 2061741 - DNA, 25 bp, Homo sapien
atgactttcttaggacacctttgga

SEQ ID NO: 2061742 - DNA, 25 bp, Homo sapien
ccaaaggtgtcctaagaaagtcatc

SEQ ID NO: 2061743 - DNA, 25 bp, Homo sapien
tccaaaggtgtcctaagaaagtcat

SEQ ID NO: 2061744 - DNA, 25 bp, Homo sapien
tatgcgattcatagttgtgatccaa

SEQ ID NO: 2061745 - DNA, 25 bp, Homo sapien
gtatgcgattcatagttgtgatcca

SEQ ID NO: 2061746 - DNA, 25 bp, Homo sapien
ttggatcacaactatgaatcgcata

SEQ ID NO: 2061747 - DNA, 25 bp, Homo sapien
tggatcacaactatgaatcgcatac

SEQ ID NO: 2061748 - DNA, 25 bp, Homo sapien
gttgtgatccaacagttcctcatgt

SEQ ID NO: 2061749 - DNA, 25 bp, Homo sapien
gttcctcatgttccactcaaaaaag

SEQ ID NO: 2061750 - DNA, 25 bp, Homo sapien
gatccaacagttcctcatgttccac

SEQ ID NO: 2061751 - DNA, 25 bp, Homo sapien
ttcatagttgtgatccaacagttcc

SEQ ID NO: 2061752 - DNA, 25 bp, Homo sapien
atgcgattcatagttgtgatccaac

SEQ ID NO: 2061753 - DNA, 25 bp, Homo sapien
gcgattcatagttgtgatccaacag

SEQ ID NO: 2061754 - DNA, 25 bp, Homo sapien
ggaactgttggatcacaactatgaa

SEQ ID NO: 2061755 - DNA, 25 bp, Homo sapien
ggaacatgaggaactgttggatcac

SEQ ID NO: 2061756 - DNA, 25 bp, Homo sapien
gttggatcacaactatgaatcgcat

SEQ ID NO: 2061757 - DNA, 25 bp, Homo sapien
acatgaggaactgttggatcacaac

SEQ ID NO: 2061758 - DNA, 25 bp, Homo sapien
cttttttgagtggaacatgaggaac

SEQ ID NO: 2061759 - DNA, 25 bp, Homo sapien
ctgttggatcacaactatgaatcgc

SEQ ID NO: 2061760 - DNA, 25 bp, Homo sapien
catgcaaatcaagaggttccaatct

SEQ ID NO: 2061761 - DNA, 25 bp, Homo sapien
ggttccaatcttcgtgttcacttta

SEQ ID NO: 2061762 - DNA, 25 bp, Homo sapien
ttccaatcttcgtgttcactttaag

SEQ ID NO: 2061763 - DNA, 25 bp, Homo sapien
atgcaaatcaagaggttccaatctt

SEQ ID NO: 2061764 - DNA, 25 bp, Homo sapien
tgcaaatcaagaggttccaatcttc

SEQ ID NO: 2061765 - DNA, 25 bp, Homo sapien
gttccaatcttcgtgttcactttaa

SEQ ID NO: 2061766 - DNA, 25 bp, Homo sapien
aagattggaacctcttgatttgcat

SEQ ID NO: 2061767 - DNA, 25 bp, Homo sapien
taaagtgaacacgaagattggaacc

SEQ ID NO: 2061768 - DNA, 25 bp, Homo sapien
gaagattggaacctcttgatttgca

SEQ ID NO: 2061769 - DNA, 25 bp, Homo sapien
ttaaagtgaacacgaagattggaac

SEQ ID NO: 2061770 - DNA, 25 bp, Homo sapien
cttaaagtgaacacgaagattggaa

SEQ ID NO: 2061771 - DNA, 25 bp, Homo sapien
agattggaacctcttgatttgcatg

SEQ ID NO: 2061772 - DNA, 25 bp, Homo sapien
ggttcgctattcacttgacccggag

SEQ ID NO: 2061773 - DNA, 25 bp, Homo sapien
atggttcgctattcacttgacccgg

SEQ ID NO: 2061774 - DNA, 25 bp, Homo sapien
gttcgctattcacttgacccggaga

SEQ ID NO: 2061775 - DNA, 25 bp, Homo sapien
tggttcgctattcacttgacccgga

SEQ ID NO: 2061776 - DNA, 25 bp, Homo sapien
tcacttgacccggagaaccccacga

SEQ ID NO: 2061777 - DNA, 25 bp, Homo sapien
ttcgctattcacttgacccggagaa

SEQ ID NO: 2061778 - DNA, 25 bp, Homo sapien
tctccgggtcaagtgaatagcgaac

SEQ ID NO: 2061779 - DNA, 25 bp, Homo sapien
ttctccgggtcaagtgaatagcgaa

SEQ ID NO: 2061780 - DNA, 25 bp, Homo sapien
ctccgggtcaagtgaatagcgaacc

SEQ ID NO: 2061781 - DNA, 25 bp, Homo sapien
ccgggtcaagtgaatagcgaaccat

SEQ ID NO: 2061782 - DNA, 25 bp, Homo sapien
tccgggtcaagtgaatagcgaacca

SEQ ID NO: 2061783 - DNA, 25 bp, Homo sapien
tcgtggggttctccgggtcaagtga

SEQ ID NO: 2061784 - DNA, 25 bp, Homo sapien
gtacgtattgacagaattacactgt

SEQ ID NO: 2061785 - DNA, 25 bp, Homo sapien
tacgtattgacagaattacactgta

SEQ ID NO: 2061786 - DNA, 25 bp, Homo sapien
agtacgtattgacagaattacactg

SEQ ID NO: 2061787 - DNA, 25 bp, Homo sapien
tattgacagaattacactgtacttt

SEQ ID NO: 2061788 - DNA, 25 bp, Homo sapien
cgtattgacagaattacactgtact

SEQ ID NO: 2061789 - DNA, 25 bp, Homo sapien
taagtacgtattgacagaattacac

SEQ ID NO: 2061790 - DNA, 25 bp, Homo sapien
acagtgtaattctgtcaatacgtac

SEQ ID NO: 2061791 - DNA, 25 bp, Homo sapien
aaagtacagtgtaattctgtcaata

SEQ ID NO: 2061792 - DNA, 25 bp, Homo sapien
agtacagtgtaattctgtcaatacg

SEQ ID NO: 2061793 - DNA, 25 bp, Homo sapien
tgtaattctgtcaatacgtacttac

SEQ ID NO: 2061794 - DNA, 25 bp, Homo sapien
gtgtaattctgtcaatacgtactta

SEQ ID NO: 2061795 - DNA, 25 bp, Homo sapien
cagtgtaattctgtcaatacgtact

SEQ ID NO: 2061796 - DNA, 25 bp, Homo sapien
cagtgtaattctgtcaatacgtact

SEQ ID NO: 2061797 - DNA, 25 bp, Homo sapien
acagtgtaattctgtcaatacgtac

SEQ ID NO: 2061798 - DNA, 25 bp, Homo sapien
aaagtacagtgtaattctgtcaata

SEQ ID NO: 2061799 - DNA, 25 bp, Homo sapien
agtacagtgtaattctgtcaatacg

SEQ ID NO: 2061800 - DNA, 25 bp, Homo sapien
tgtaattctgtcaatacgtacttac

SEQ ID NO: 2061801 - DNA, 25 bp, Homo sapien
ctagaggaaagtacagtgtaattct

SEQ ID NO: 2061802 - DNA, 25 bp, Homo sapien
ttcgaatcatctgatatttatactg

SEQ ID NO: 2061803 - DNA, 25 bp, Homo sapien
tgatatttatactgaatgagttact

SEQ ID NO: 2061804 - DNA, 25 bp, Homo sapien
ctgatatttatactgaatgagttac

SEQ ID NO: 2061805 - DNA, 25 bp, Homo sapien
catctgatatttatactgaatgagt

SEQ ID NO: 2061806 - DNA, 25 bp, Homo sapien
cgaatcatctgatatttatactgaa

SEQ ID NO: 2061807 - DNA, 25 bp, Homo sapien
gaatcatctgatatttatactgaat

SEQ ID NO: 2061808 - DNA, 25 bp, Homo sapien
actcattcagtataaatatcagatg

SEQ ID NO: 2061809 - DNA, 25 bp, Homo sapien
ttcagtataaatatcagatgattcg

SEQ ID NO: 2061810 - DNA, 25 bp, Homo sapien
cagtataaatatcagatgattcgaa

SEQ ID NO: 2061811 - DNA, 25 bp, Homo sapien
gtaactcattcagtataaatatcag

SEQ ID NO: 2061812 - DNA, 25 bp, Homo sapien
tcagtataaatatcagatgattcga

SEQ ID NO: 2061813 - DNA, 25 bp, Homo sapien
agtaactcattcagtataaatatca

SEQ ID NO: 2061814 - DNA, 25 bp, Homo sapien
gatgatggcatttcttaggacacct

SEQ ID NO: 2061815 - DNA, 25 bp, Homo sapien
gaaaacaactactctctgagcagct

SEQ ID NO: 2061816 - DNA, 25 bp, Homo sapien
ggacacctttggattaataatgaaa

SEQ ID NO: 2061817 - DNA, 25 bp, Homo sapien
ctgcgatgatggcatttcttaggac

SEQ ID NO: 2061818 - DNA, 25 bp, Homo sapien
taatgaaaacaactactctctgagc

SEQ ID NO: 2061819 - DNA, 25 bp, Homo sapien
cacctttggattaataatgaaaaca

SEQ ID NO: 2061820 - DNA, 25 bp, Homo sapien
gtcctaagaaatgccatcatcgcag

SEQ ID NO: 2061821 - DNA, 25 bp, Homo sapien
tgttttcattattaatccaaaggtg

SEQ ID NO: 2061822 - DNA, 25 bp, Homo sapien
agctgctcagagagtagttgttttc

SEQ ID NO: 2061823 - DNA, 25 bp, Homo sapien
aggtgtcctaagaaatgccatcatc

SEQ ID NO: 2061824 - DNA, 25 bp, Homo sapien
tttcattattaatccaaaggtgtcc

SEQ ID NO: 2061825 - DNA, 25 bp, Homo sapien
gctgctcagagagtagttgttttca

SEQ ID NO: 2061826 - DNA, 25 bp, Homo sapien
tgaggcccgtgtggctacttctgtg

SEQ ID NO: 2061827 - DNA, 25 bp, Homo sapien
cagtgctgtagttactggaagataa

SEQ ID NO: 2061828 - DNA, 25 bp, Homo sapien
ggttgactggattggtgaggcccgt

SEQ ID NO: 2061829 - DNA, 25 bp, Homo sapien
gaagcagtgctgtagttactggaag

SEQ ID NO: 2061830 - DNA, 25 bp, Homo sapien
ctgtagttactggaagataaaaggg

SEQ ID NO: 2061831 - DNA, 25 bp, Homo sapien
ggcccgtgtggctacttctgtggaa

SEQ ID NO: 2061832 - DNA, 25 bp, Homo sapien
cccttttatcttccagtaactacag

SEQ ID NO: 2061833 - DNA, 25 bp, Homo sapien
acgggcctcaccaatccagtcaacc

SEQ ID NO: 2061834 - DNA, 25 bp, Homo sapien
cttccagtaactacagcactgcttc

SEQ ID NO: 2061835 - DNA, 25 bp, Homo sapien
tatcttccagtaactacagcactgc

SEQ ID NO: 2061836 - DNA, 25 bp, Homo sapien
acagaagtagccacacgggcctcac

SEQ ID NO: 2061837 - DNA, 25 bp, Homo sapien
ttccacagaagtagccacacgggcc

SEQ ID NO: 2061838 - DNA, 25 bp, Homo sapien
tcgagtcattttacgcctggaagat

SEQ ID NO: 2061839 - DNA, 25 bp, Homo sapien
tgccctgcggatgcgtcgagtcatt

SEQ ID NO: 2061840 - DNA, 25 bp, Homo sapien
ggtgttgagagagacggcactcact

SEQ ID NO: 2061841 - DNA, 25 bp, Homo sapien
gtgttgcgtacaggagggctcttaa

SEQ ID NO: 2061842 - DNA, 25 bp, Homo sapien
cacgttactacaagagtgttgcgta

SEQ ID NO: 2061843 - DNA, 25 bp, Homo sapien
taaagtgggtcatagcccgaaggtg

SEQ ID NO: 2061844 - DNA, 25 bp, Homo sapien
tacgcaacactcttgtagtaacgtg

SEQ ID NO: 2061845 - DNA, 25 bp, Homo sapien
ttcgggctatgacccactttaagag

SEQ ID NO: 2061846 - DNA, 25 bp, Homo sapien
gtaaaatgactcgacgcatccgcag

SEQ ID NO: 2061847 - DNA, 25 bp, Homo sapien
tacagaaacccctttgctgtcaggg

SEQ ID NO: 2061848 - DNA, 25 bp, Homo sapien
aatacagcctgtttcaatccaatgc

SEQ ID NO: 2061849 - DNA, 25 bp, Homo sapien
gatcttccaggcgtaaaatgactcg

SEQ ID NO: 2061850 - DNA, 25 bp, Homo sapien
cagagggacgtgatgggcgggaatg

SEQ ID NO: 2061851 - DNA, 25 bp, Homo sapien
gaatggggactaccgggctcctcca

SEQ ID NO: 2061852 - DNA, 25 bp, Homo sapien
gagggacgtgatgggcgggaatggg

SEQ ID NO: 2061853 - DNA, 25 bp, Homo sapien
tccgcagagggacgtgatgggcggg

SEQ ID NO: 2061854 - DNA, 25 bp, Homo sapien
atggggactaccgggctcctccact

SEQ ID NO: 2061855 - DNA, 25 bp, Homo sapien
gcagagggacgtgatgggcgggaat

SEQ ID NO: 2061856 - DNA, 25 bp, Homo sapien
ccgcccatcacgtccctctgcggac

SEQ ID NO: 2061857 - DNA, 25 bp, Homo sapien
tcccgcccatcacgtccctctgcgg

SEQ ID NO: 2061858 - DNA, 25 bp, Homo sapien
ccattcccgcccatcacgtccctct

SEQ ID NO: 2061859 - DNA, 25 bp, Homo sapien
tggaggagcccggtagtccccattc

SEQ ID NO: 2061860 - DNA, 25 bp, Homo sapien
attcccgcccatcacgtccctctgc

SEQ ID NO: 2061861 - DNA, 25 bp, Homo sapien
agtggaggagcccggtagtccccat

SEQ ID NO: 2061862 - DNA, 25 bp, Homo sapien
cattcccgcccatcacgtccctctg

SEQ ID NO: 2061863 - DNA, 25 bp, Homo sapien
ccgcccatcacgtccctctgcggac

SEQ ID NO: 2061864 - DNA, 25 bp, Homo sapien
cagtggaggagcccggtagtcccca

SEQ ID NO: 2061865 - DNA, 25 bp, Homo sapien
tggaggagcccggtagtccccattc

SEQ ID NO: 2061866 - DNA, 25 bp, Homo sapien
ttcccgcccatcacgtccctctgcg

SEQ ID NO: 2061867 - DNA, 25 bp, Homo sapien
agtggaggagcccggtagtccccat

SEQ ID NO: 2061868 - DNA, 25 bp, Homo sapien
ctactaaatcctcgctggaggcggt

SEQ ID NO: 2061869 - DNA, 25 bp, Homo sapien
gagtgtttctcctgcgttgctccga

SEQ ID NO: 2061870 - DNA, 25 bp, Homo sapien
ttcttatgcgggaggacgtggcgga

SEQ ID NO: 2061871 - DNA, 25 bp, Homo sapien
tggaggcggtggcttcttatgcggg

SEQ ID NO: 2061872 - DNA, 25 bp, Homo sapien
gaactcctagggctactaaatcctc

SEQ ID NO: 2061873 - DNA, 25 bp, Homo sapien
tagggctactaaatcctcgctggag

SEQ ID NO: 2061874 - DNA, 25 bp, Homo sapien
cggcgatggcaggaggattgggccc

SEQ ID NO: 2061875 - DNA, 25 bp, Homo sapien
gaggatttagtagccctaggagttc

SEQ ID NO: 2061876 - DNA, 25 bp, Homo sapien
ccgaagccaggatggcggcgatggc

SEQ ID NO: 2061877 - DNA, 25 bp, Homo sapien
tcggagcaacgcaggagaaacactc

SEQ ID NO: 2061878 - DNA, 25 bp, Homo sapien
accgcctccagcgaggatttagtag

SEQ ID NO: 2061879 - DNA, 25 bp, Homo sapien
tccagcgaggatttagtagccctag

SEQ ID NO: 2061880 - DNA, 25 bp, Homo sapien
tctcgcgagaagtcaagttctcatg

SEQ ID NO: 2061881 - DNA, 25 bp, Homo sapien
gtttcttcggctacgaatctcgcga

SEQ ID NO: 2061882 - DNA, 25 bp, Homo sapien
cgaatctcgcgagaagtcaagttct

SEQ ID NO: 2061883 - DNA, 25 bp, Homo sapien
cgagaagtcaagttctcatgagttc

SEQ ID NO: 2061884 - DNA, 25 bp, Homo sapien
atgagttctcccaaaatccaccgct

SEQ ID NO: 2061885 - DNA, 25 bp, Homo sapien
tcggctacgaatctcgcgagaagtc

SEQ ID NO: 2061886 - DNA, 25 bp, Homo sapien
agcggtggattttgggagaactcat

SEQ ID NO: 2061887 - DNA, 25 bp, Homo sapien
agaacttgacttctcgcgagattcg

SEQ ID NO: 2061888 - DNA, 25 bp, Homo sapien
gacttctcgcgagattcgtagccga

SEQ ID NO: 2061889 - DNA, 25 bp, Homo sapien
agattcgtagccgaagaaacgagat

SEQ ID NO: 2061890 - DNA, 25 bp, Homo sapien
tcgcgagattcgtagccgaagaaac

SEQ ID NO: 2061891 - DNA, 25 bp, Homo sapien
gaactcatgagaacttgacttctcg

SEQ ID NO: 2061892 - DNA, 25 bp, Homo sapien
ctgagactagtttaaaaaacagcct

SEQ ID NO: 2061893 - DNA, 25 bp, Homo sapien
cctgcaacaagagtattctcatcac

SEQ ID NO: 2061894 - DNA, 25 bp, Homo sapien
ttaaaaaacagcctgcaacaagagt

SEQ ID NO: 2061895 - DNA, 25 bp, Homo sapien
gcaacaagagtattctcatcaccag

SEQ ID NO: 2061896 - DNA, 25 bp, Homo sapien
tggagcgcctgcaggtttctgtgtc

SEQ ID NO: 2061897 - DNA, 25 bp, Homo sapien
ggagcgcctgcaggtttctgtgtct

SEQ ID NO: 2061898 - DNA, 25 bp, Homo sapien
gagcgcctgcaggtttctgtgtctt

SEQ ID NO: 2061899 - DNA, 25 bp, Homo sapien
tagagacatgctatctgataatgac

SEQ ID NO: 2061900 - DNA, 25 bp, Homo sapien
tgataatgacaagtgttcacaaaga

SEQ ID NO: 2061901 - DNA, 25 bp, Homo sapien
gatttgggccaatggttttgacacc

SEQ ID NO: 2061902 - DNA, 25 bp, Homo sapien
gaatgttcttgcattggtagccatc

SEQ ID NO: 2061903 - DNA, 25 bp, Homo sapien
tatacatgatcacgaatgcagacac

SEQ ID NO: 2061904 - DNA, 25 bp, Homo sapien
ctatacatgatcacgaatgcagaca

SEQ ID NO: 2061905 - DNA, 25 bp, Homo sapien
atacatgatcacgaatgcagacacc

SEQ ID NO: 2061906 - DNA, 25 bp, Homo sapien
tacatgatcacgaatgcagacacca

SEQ ID NO: 2061907 - DNA, 25 bp, Homo sapien
agcttggattaacataggtgggaga

SEQ ID NO: 2061908 - DNA, 25 bp, Homo sapien
gcttggattaacataggtgggagat

SEQ ID NO: 2061909 - DNA, 25 bp, Homo sapien
gcttgtagttgtttcttggaaagct

SEQ ID NO: 2061910 - DNA, 25 bp, Homo sapien
tagcttgtagttgtttcttggaaag

SEQ ID NO: 2061911 - DNA, 25 bp, Homo sapien
ctatagcttgtagttgtttcttgga

SEQ ID NO: 2061912 - DNA, 25 bp, Homo sapien
tatagcttgtagttgtttcttggaa

SEQ ID NO: 2061913 - DNA, 25 bp, Homo sapien
agttgcaaagcctcctctattcgac

SEQ ID NO: 2061914 - DNA, 25 bp, Homo sapien
aagcctcctctattcgaccctgaag

SEQ ID NO: 2061915 - DNA, 25 bp, Homo sapien
taaagttgcaaagcctcctctattc

SEQ ID NO: 2061916 - DNA, 25 bp, Homo sapien
ttgattgtaaagttgcaaagcctcc

SEQ ID NO: 2061917 - DNA, 25 bp, Homo sapien
tctttctcagtcctatcacagtctt

SEQ ID NO: 2061918 - DNA, 25 bp, Homo sapien
gtctttctcagtcctatcacagtct

SEQ ID NO: 2061919 - DNA, 25 bp, Homo sapien
cagcttttcgtaggattgtcgtgac

SEQ ID NO: 2061920 - DNA, 25 bp, Homo sapien
tttgaggagtaacaactgctgaaag

SEQ ID NO: 2061921 - DNA, 25 bp, Homo sapien
tccaatcagcgcatgtgcagtgttg

SEQ ID NO: 2061922 - DNA, 25 bp, Homo sapien
ctttgaggagtaacaactgctgaaa

SEQ ID NO: 2061923 - DNA, 25 bp, Homo sapien
ttgggagtttcaggcgagatctctg

SEQ ID NO: 2061924 - DNA, 25 bp, Homo sapien
ggcgagatctctgtatactctaagt

SEQ ID NO: 2061925 - DNA, 25 bp, Homo sapien
gtatttatcatagcgttccaagcgg

SEQ ID NO: 2061926 - DNA, 25 bp, Homo sapien
ggcgtaatgcttgtccataaaactc

SEQ ID NO: 2061927 - DNA, 25 bp, Homo sapien
cctggtgtcgttgatgcgtgcataa

SEQ ID NO: 2061928 - DNA, 25 bp, Homo sapien
tgatgcgtgcataaggctttgcttg

SEQ ID NO: 2061929 - DNA, 25 bp, Homo sapien
tcttgaatcctggtgtcgttgatgc

SEQ ID NO: 2061930 - DNA, 25 bp, Homo sapien
cgttgatgcgtgcataaggctttgc

SEQ ID NO: 2061931 - DNA, 25 bp, Homo sapien
atttgaggaaaatgtagtgtgcatg

SEQ ID NO: 2061932 - DNA, 25 bp, Homo sapien
tcaggcagaagtgtaatttgaggaa

SEQ ID NO: 2061933 - DNA, 25 bp, Homo sapien
ttgaggaaaatgtagtgtgcatgtg

SEQ ID NO: 2061934 - DNA, 25 bp, Homo sapien
ctctcaggcagaagtgtaatttgag

SEQ ID NO: 2061935 - DNA, 25 bp, Homo sapien
ccagctgatcgactgtcttttctgc

SEQ ID NO: 2061936 - DNA, 25 bp, Homo sapien
gaagccatgaggagtaactgaactg

SEQ ID NO: 2061937 - DNA, 25 bp, Homo sapien
tgaactgaggcgaataggctcatag

SEQ ID NO: 2061938 - DNA, 25 bp, Homo sapien
caaagtaaccagctgatcgactgtc

SEQ ID NO: 2061939 - DNA, 25 bp, Homo sapien
ctacagctgcaaccgtaaaagaagc

SEQ ID NO: 2061940 - DNA, 25 bp, Homo sapien
ttcatccctacagctgcaaccgtaa

SEQ ID NO: 2061941 - DNA, 25 bp, Homo sapien
gctgcaaccgtaaaagaagccaccc

SEQ ID NO: 2061942 - DNA, 25 bp, Homo sapien
agaagccacccctaaagcagccatt

SEQ ID NO: 2061943 - DNA, 25 bp, Homo sapien
caaactttctccagtctcggttccg

SEQ ID NO: 2061944 - DNA, 25 bp, Homo sapien
gggagcggatagaccactcccagag

SEQ ID NO: 2061945 - DNA, 25 bp, Homo sapien
ccagcggacgcagagtttcagggaa

SEQ ID NO: 2061946 - DNA, 25 bp, Homo sapien
gagtgtgcagcgctttcattcaaac

SEQ ID NO: 2061947 - DNA, 25 bp, Homo sapien
gagaccaggtttgtacacgcacgtg

SEQ ID NO: 2061948 - DNA, 25 bp, Homo sapien
caccagggacaaagcatcatgccaa

SEQ ID NO: 2061949 - DNA, 25 bp, Homo sapien
tgtttgttgagtatccaccagggac

SEQ ID NO: 2061950 - DNA, 25 bp, Homo sapien
ttctaaggctgagcggaacagcgca

SEQ ID NO: 2061951 - DNA, 25 bp, Homo sapien
ggaaacaatggtggtcattcttggg

SEQ ID NO: 2061952 - DNA, 25 bp, Homo sapien
actgtccaaagtctgaaagtcaggc

SEQ ID NO: 2061953 - DNA, 25 bp, Homo sapien
tgaaggacatgcttgtgacatcaag

SEQ ID NO: 2061954 - DNA, 25 bp, Homo sapien
acagcctgactgtcaaaggtgtatt

SEQ ID NO: 2061955 - DNA, 25 bp, Homo sapien
cacgtttttagtgacggtgctgttc

SEQ ID NO: 2061956 - DNA, 25 bp, Homo sapien
tgccagcgtggtttgaatcatcacg

SEQ ID NO: 2061957 - DNA, 25 bp, Homo sapien
catctgagctgccagcgtggtttga

SEQ ID NO: 2061958 - DNA, 25 bp, Homo sapien
tgaatcatcacgtttttagtgacgg

SEQ ID NO: 2061959 - DNA, 25 bp, Homo sapien
caagttataggggggtccattgaga

SEQ ID NO: 2061960 - DNA, 25 bp, Homo sapien
tctcctatcctctgcttggtcagtg

SEQ ID NO: 2061961 - DNA, 25 bp, Homo sapien
cttcctccaggaggggcaagttata

SEQ ID NO: 2061962 - DNA, 25 bp, Homo sapien
attgagagacagacagttctcttcc

SEQ ID NO: 2061963 - DNA, 25 bp, Homo sapien
agcagcccatgctcattgtagacat

SEQ ID NO: 2061964 - DNA, 25 bp, Homo sapien
ggtctggctataaccctgctggcgc

SEQ ID NO: 2061965 - DNA, 25 bp, Homo sapien
gacattcctcacaatgtagacattt

SEQ ID NO: 2061966 - DNA, 25 bp, Homo sapien
ccatgtgcaggaatctgacatgggc

SEQ ID NO: 2061967 - DNA, 25 bp, Homo sapien
actcctgtttgccgtgctgagtcct

SEQ ID NO: 2061968 - DNA, 25 bp, Homo sapien
cccactcctgtttgccgtgctgagt

SEQ ID NO: 2061969 - DNA, 25 bp, Homo sapien
gccccactcctgtttgccgtgctga

SEQ ID NO: 2061970 - DNA, 25 bp, Homo sapien
ttgccccactcctgtttgccgtgct

SEQ ID NO: 2061971 - DNA, 25 bp, Homo sapien
gggtcttgaggatcccgccacaaaa

SEQ ID NO: 2061972 - DNA, 25 bp, Homo sapien
caatgtgttgggaatgtcggagaac

SEQ ID NO: 2061973 - DNA, 25 bp, Homo sapien
caaacacaatgtgttgggaatgtcg

SEQ ID NO: 2061974 - DNA, 25 bp, Homo sapien
gtgttgggaatgtcggagaaccaca

SEQ ID NO: 2061975 - DNA, 25 bp, Homo sapien
agccgcctctcgtccaaggttactg

SEQ ID NO: 2061976 - DNA, 25 bp, Homo sapien
ggtagccttggtcccatgctggctt

SEQ ID NO: 2061977 - DNA, 25 bp, Homo sapien
caggtggtaggacccctctttctgg

SEQ ID NO: 2061978 - DNA, 25 bp, Homo sapien
ggttctggtccttgttatcttgggc

SEQ ID NO: 2061979 - DNA, 25 bp, Homo sapien
gtttgccaggtaatgagaggaatac

SEQ ID NO: 2061980 - DNA, 25 bp, Homo sapien
agtcttcagtttgccaggtaatgag

SEQ ID NO: 2061981 - DNA, 25 bp, Homo sapien
ttaagtcttcagtttgccaggtaat

SEQ ID NO: 2061982 - DNA, 25 bp, Homo sapien
agtttgccaggtaatgagaggaata

SEQ ID NO: 2061983 - DNA, 25 bp, Homo sapien
gcttggtctgaccactggcaaaccc

SEQ ID NO: 2061984 - DNA, 25 bp, Homo sapien
aacaggcttggtctgaccactggca

SEQ ID NO: 2061985 - DNA, 25 bp, Homo sapien
ctgctctcaaagctggtgtaggttg

SEQ ID NO: 2061986 - DNA, 25 bp, Homo sapien
ctggtgtaggttgcaggtctacttt

SEQ ID NO: 2061987 - DNA, 25 bp, Homo sapien
taaggaagatgtctatcttttctct

SEQ ID NO: 2061988 - DNA, 25 bp, Homo sapien
cccagggcaactgacagtggcctct

SEQ ID NO: 2061989 - DNA, 25 bp, Homo sapien
tggctcagccacaagagcaataagg

SEQ ID NO: 2061990 - DNA, 25 bp, Homo sapien
gggcaactgacagtggcctctggct

SEQ ID NO: 2061991 - DNA, 25 bp, Homo sapien
cttgggttgtgttgacgagatctac

SEQ ID NO: 2061992 - DNA, 25 bp, Homo sapien
caaaggccagtcttctcttacaaaa

SEQ ID NO: 2061993 - DNA, 25 bp, Homo sapien
gagatctaccaaaggccagtcttct

SEQ ID NO: 2061994 - DNA, 25 bp, Homo sapien
tctcttacaaaatccatggggcaaa

SEQ ID NO: 2061995 - DNA, 25 bp, Homo sapien
gaaccgctgctggttgtttcccgtc

SEQ ID NO: 2061996 - DNA, 25 bp, Homo sapien
cagtcatgagttctataaccagcaa

SEQ ID NO: 2061997 - DNA, 25 bp, Homo sapien
aaattctcgacatcggcaatggaac

SEQ ID NO: 2061998 - DNA, 25 bp, Homo sapien
tggaataacaacaaaattttctgcc

SEQ ID NO: 2061999 - DNA, 25 bp, Homo sapien
ccagcgagctgactgaagctctgcc

SEQ ID NO: 2062000 - DNA, 25 bp, Homo sapien
agcgagctgactgaagctctgccct

SEQ ID NO: 2062001 - DNA, 25 bp, Homo sapien
cagcgagctgactgaagctctgccc

SEQ ID NO: 2062002 - DNA, 25 bp, Homo sapien
tctcgttctctcatgaaaatgccaa

SEQ ID NO: 2062003 - DNA, 25 bp, Homo sapien
tttctcgttctctcatgaaaatgcc

SEQ ID NO: 2062004 - DNA, 25 bp, Homo sapien
tcgttctctcatgaaaatgccaatg

SEQ ID NO: 2062005 - DNA, 25 bp, Homo sapien
tctttctcgttctctcatgaaaatg

SEQ ID NO: 2062006 - DNA, 25 bp, Homo sapien
ggctcgctgaagacaagcaccctga

SEQ ID NO: 2062007 - DNA, 25 bp, Homo sapien
ctgcttctccgggaaaggggccaca

SEQ ID NO: 2062008 - DNA, 25 bp, Homo sapien
gggcgctaggttgcagattttccaa

SEQ ID NO: 2062009 - DNA, 25 bp, Homo sapien
gggccacagtagtatgggcagcaga

SEQ ID NO: 2062010 - DNA, 25 bp, Homo sapien
aaggcctggatcagtgcaagcaaga

SEQ ID NO: 2062011 - DNA, 25 bp, Homo sapien
tgcatcatcatggtagacagcaccg

SEQ ID NO: 2062012 - DNA, 25 bp, Homo sapien
aacttctgggatcaggccttttgca

SEQ ID NO: 2062013 - DNA, 25 bp, Homo sapien
tatggggattcatatccaacttctg

SEQ ID NO: 2062014 - DNA, 25 bp, Homo sapien
tggacatcacaggataaacttacct

SEQ ID NO: 2062015 - DNA, 25 bp, Homo sapien
aactggacatcacaggataaactta

SEQ ID NO: 2062016 - DNA, 25 bp, Homo sapien
ggacatcacaggataaacttacctt

SEQ ID NO: 2062017 - DNA, 25 bp, Homo sapien
catggggccggaactggacatcaca

SEQ ID NO: 2062018 - DNA, 25 bp, Homo sapien
tagagggctacttcttctggaacct

SEQ ID NO: 2062019 - DNA, 25 bp, Homo sapien
tatgttctcacaatccttcatacag

SEQ ID NO: 2062020 - DNA, 25 bp, Homo sapien
tccttcctgggagacctatgtattc

SEQ ID NO: 2062021 - DNA, 25 bp, Homo sapien
acttcacatagagggctacttcttc

SEQ ID NO: 2062022 - DNA, 25 bp, Homo sapien
agaaatgctctcttagactggtaac

SEQ ID NO: 2062023 - DNA, 25 bp, Homo sapien
tggcaggtttttccaagtgcaatct

SEQ ID NO: 2062024 - DNA, 25 bp, Homo sapien
tctctttctacaagaccatgttgcc

SEQ ID NO: 2062025 - DNA, 25 bp, Homo sapien
ggagttgaacatcccaacaagttct

SEQ ID NO: 2062026 - DNA, 25 bp, Homo sapien
gagttgaacatcccaacaagttctc

SEQ ID NO: 2062027 - DNA, 25 bp, Homo sapien
accatttgaaatatgccaagagtac

SEQ ID NO: 2062028 - DNA, 25 bp, Homo sapien
ttgaaatatgccaagagtactccac

SEQ ID NO: 2062029 - DNA, 25 bp, Homo sapien
gagtactccacagactccactttgc

SEQ ID NO: 2062030 - DNA, 25 bp, Homo sapien
tatgccaagagtactccacagactc

SEQ ID NO: 2062031 - DNA, 25 bp, Homo sapien
cttcaccccatggttgagcccagag

SEQ ID NO: 2062032 - DNA, 25 bp, Homo sapien
gagcccagagctattctcaagaatg

SEQ ID NO: 2062033 - DNA, 25 bp, Homo sapien
catggttgagcccagagctattctc

SEQ ID NO: 2062034 - DNA, 25 bp, Homo sapien
cagagctattctcaagaatgagagg

SEQ ID NO: 2062035 - DNA, 25 bp, Homo sapien
tccaggccaaagagttaggagttta

SEQ ID NO: 2062036 - DNA, 25 bp, Homo sapien
ctgtccaggccaaagagttaggagt

SEQ ID NO: 2062037 - DNA, 25 bp, Homo sapien
caggccaaagagttaggagtttagt

SEQ ID NO: 2062038 - DNA, 25 bp, Homo sapien
gagtttagttttcttggttctgtca

SEQ ID NO: 2062039 - DNA, 25 bp, Homo sapien
ctggctacagcaacattgttgaagg

SEQ ID NO: 2062040 - DNA, 25 bp, Homo sapien
cagcaacattgttgaaggtgtgtct

SEQ ID NO: 2062041 - DNA, 25 bp, Homo sapien
gctacagcaacattgttgaaggtgt

SEQ ID NO: 2062042 - DNA, 25 bp, Homo sapien
tacagcaacattgttgaaggtgtgt

SEQ ID NO: 2062043 - DNA, 25 bp, Homo sapien
tttgagagaccggcctgttcccatc

SEQ ID NO: 2062044 - DNA, 25 bp, Homo sapien
gtgacaatagcccacagcctttcca

SEQ ID NO: 2062045 - DNA, 25 bp, Homo sapien
tctagttcagtgacaatagcccaca

SEQ ID NO: 2062046 - DNA, 25 bp, Homo sapien
tcagtgacaatagcccacagccttt

SEQ ID NO: 2062047 - DNA, 25 bp, Homo sapien
tagtgaggccattcacaagaagcaa

SEQ ID NO: 2062048 - DNA, 25 bp, Homo sapien
agattgggtagtgaggccattcaca

SEQ ID NO: 2062049 - DNA, 25 bp, Homo sapien
gggtagtgaggccattcacaagaag

SEQ ID NO: 2062050 - DNA, 25 bp, Homo sapien
tgaggccattcacaagaagcaaaga

SEQ ID NO: 2062051 - DNA, 25 bp, Homo sapien
tagcttgtgtatctccacttttata

SEQ ID NO: 2062052 - DNA, 25 bp, Homo sapien
gttttactagatctccgaaattcag

SEQ ID NO: 2062053 - DNA, 25 bp, Homo sapien
gaaatcaagctcgttaattgtaata

SEQ ID NO: 2062054 - DNA, 25 bp, Homo sapien
gacactgaattctacgtatgtacga

SEQ ID NO: 2062055 - DNA, 25 bp, Homo sapien
gaaggcaggaccaaagggtggccag

SEQ ID NO: 2062056 - DNA, 25 bp, Homo sapien
catacaccagcatactagtgccact

SEQ ID NO: 2062057 - DNA, 25 bp, Homo sapien
gcagtttctccatacaccagcatac

SEQ ID NO: 2062058 - DNA, 25 bp, Homo sapien
caggaccaaagggtggccagctgta

SEQ ID NO: 2062059 - DNA, 25 bp, Homo sapien
tgcatggtccaccttcgggcaaagg

SEQ ID NO: 2062060 - DNA, 25 bp, Homo sapien
tctgcagacactcacacttgcatgg

SEQ ID NO: 2062061 - DNA, 25 bp, Homo sapien
aaacactgttctggcgctcatgccc

SEQ ID NO: 2062062 - DNA, 25 bp, Homo sapien
aggtccggtgaccatgctgagagca

SEQ ID NO: 2062063 - DNA, 25 bp, Homo sapien
ctgcagacagagccatcaacctcct

SEQ ID NO: 2062064 - DNA, 25 bp, Homo sapien
agcagccccactgtgttccagggct

SEQ ID NO: 2062065 - DNA, 25 bp, Homo sapien
ccactgtgttccagggctgcagaca

SEQ ID NO: 2062066 - DNA, 25 bp, Homo sapien
ggctgcagacagagccatcaacctc

SEQ ID NO: 2062067 - DNA, 25 bp, Homo sapien
cagatacctgggaaccaaagcccca

SEQ ID NO: 2062068 - DNA, 25 bp, Homo sapien
tagaagaggcgatgccaacttggtc

SEQ ID NO: 2062069 - DNA, 25 bp, Homo sapien
tggtcatcacttgccttagaagagg

SEQ ID NO: 2062070 - DNA, 25 bp, Homo sapien
tgccttggactgtttctggtcatca

SEQ ID NO: 2062071 - DNA, 25 bp, Homo sapien
cctctggaaggactctggccaaagt

SEQ ID NO: 2062072 - DNA, 25 bp, Homo sapien
ggctttggttgaagctggtgcttct

SEQ ID NO: 2062073 - DNA, 25 bp, Homo sapien
tggctttggttgaagctggtgcttc

SEQ ID NO: 2062074 - DNA, 25 bp, Homo sapien
gctgggcggataactgctgatgaat

SEQ ID NO: 2062075 - DNA, 25 bp, Homo sapien
gctgggcaggattgctgccgcgtag

SEQ ID NO: 2062076 - DNA, 25 bp, Homo sapien
tgctgccgcgtaggggcctggactc

SEQ ID NO: 2062077 - DNA, 25 bp, Homo sapien
gcctggactcgcagggcgctgggcg

SEQ ID NO: 2062078 - DNA, 25 bp, Homo sapien
aaaccgtgggtaggccgcttgtcat

SEQ ID NO: 2062079 - DNA, 25 bp, Homo sapien
caataaaagctggacttgcctgttg

SEQ ID NO: 2062080 - DNA, 25 bp, Homo sapien
tatgacagtagaggaagcctgctgc

SEQ ID NO: 2062081 - DNA, 25 bp, Homo sapien
ctagtccattatcccaaaccgtggg

SEQ ID NO: 2062082 - DNA, 25 bp, Homo sapien
actggttcaaatctgagagaatgta

SEQ ID NO: 2062083 - DNA, 25 bp, Homo sapien
ctggttcaaatctgagagaatgtac

SEQ ID NO: 2062084 - DNA, 25 bp, Homo sapien
gtcaccatggcttgatcaaacttaa

SEQ ID NO: 2062085 - DNA, 25 bp, Homo sapien
cactggttcaaatctgagagaatgt

SEQ ID NO: 2062086 - DNA, 25 bp, Homo sapien
gccaagtagagtaaggatgggtcac

SEQ ID NO: 2062087 - DNA, 25 bp, Homo sapien
aagtagagtaaggatgggtcacagt

SEQ ID NO: 2062088 - DNA, 25 bp, Homo sapien
ctggccaagtagagtaaggatgggt

SEQ ID NO: 2062089 - DNA, 25 bp, Homo sapien
ccaagtagagtaaggatgggtcaca

SEQ ID NO: 2062090 - DNA, 25 bp, Homo sapien
aagctgatccaacggcatattttcc

SEQ ID NO: 2062091 - DNA, 25 bp, Homo sapien
cttggccacctccaatgcaagctga

SEQ ID NO: 2062092 - DNA, 25 bp, Homo sapien
cctccaatgcaagctgatccaacgg

SEQ ID NO: 2062093 - DNA, 25 bp, Homo sapien
tgcaagctgatccaacggcatattt

SEQ ID NO: 2062094 - DNA, 25 bp, Homo sapien
aacagcaaatctgaaatgcagctat

SEQ ID NO: 2062095 - DNA, 25 bp, Homo sapien
ctgaaatgcagctatttctagcaaa

SEQ ID NO: 2062096 - DNA, 25 bp, Homo sapien
aaatctgaaatgcagctatttctag

SEQ ID NO: 2062097 - DNA, 25 bp, Homo sapien
tctgaaatgcagctatttctagcaa

SEQ ID NO: 2062098 - DNA, 25 bp, Homo sapien
gcagtaattcttgatccagatcctc

SEQ ID NO: 2062099 - DNA, 25 bp, Homo sapien
cttaattcgtgaaccaggtgtgcag

SEQ ID NO: 2062100 - DNA, 25 bp, Homo sapien
cgtgaaccaggtgtgcagtaattct

SEQ ID NO: 2062101 - DNA, 25 bp, Homo sapien
gtaattcttgatccagatcctccca

SEQ ID NO: 2062102 - DNA, 25 bp, Homo sapien
tattatgcagtactaggagctatcc

SEQ ID NO: 2062103 - DNA, 25 bp, Homo sapien
ggtccagtcctatcaacagctaagt

SEQ ID NO: 2062104 - DNA, 25 bp, Homo sapien
tcaaagccacgtacataaagggaac

SEQ ID NO: 2062105 - DNA, 25 bp, Homo sapien
tgtggtctctcaagatggtgcctca

SEQ ID NO: 2062106 - DNA, 25 bp, Homo sapien
tccttaagactcagtcctgctttct

SEQ ID NO: 2062107 - DNA, 25 bp, Homo sapien
catgtccttaagactcagtcctgct

SEQ ID NO: 2062108 - DNA, 25 bp, Homo sapien
caaatccatgtccttaagactcagt

SEQ ID NO: 2062109 - DNA, 25 bp, Homo sapien
tccatgtccttaagactcagtcctg

SEQ ID NO: 2062110 - DNA, 25 bp, Homo sapien
gatgtttacaactccaagggtaggc

SEQ ID NO: 2062111 - DNA, 25 bp, Homo sapien
gactgagtgctctacttgggatcca

SEQ ID NO: 2062112 - DNA, 25 bp, Homo sapien
gaaatagcagtatctccacatgggc

SEQ ID NO: 2062113 - DNA, 25 bp, Homo sapien
gatgggaaactacgaggcacttcag

SEQ ID NO: 2062114 - DNA, 25 bp, Homo sapien
tgtacagctctgttcaagccccgag

SEQ ID NO: 2062115 - DNA, 25 bp, Homo sapien
cagctgatactgtgggacatctgga

SEQ ID NO: 2062116 - DNA, 25 bp, Homo sapien
caacgctttcttggttcactggcta

SEQ ID NO: 2062117 - DNA, 25 bp, Homo sapien
gagtataaaatagccaacccatgtc

SEQ ID NO: 2062118 - DNA, 25 bp, Homo sapien
agaaatattatagaaccagtttgtt

SEQ ID NO: 2062119 - DNA, 25 bp, Homo sapien
tatagaaccagtttgttttactata

SEQ ID NO: 2062120 - DNA, 25 bp, Homo sapien
ttcactagctatgataacagctcca

SEQ ID NO: 2062121 - DNA, 25 bp, Homo sapien
tacaaagtagcccacaattcttgcc

SEQ ID NO: 2062122 - DNA, 25 bp, Homo sapien
tagctatgataacagctccagcacc

SEQ ID NO: 2062123 - DNA, 25 bp, Homo sapien
caatacccatgatagagggatcaca

SEQ ID NO: 2062124 - DNA, 25 bp, Homo sapien
tcattaaagtagccagcatcattag

SEQ ID NO: 2062125 - DNA, 25 bp, Homo sapien
tacagcaagattctctgcagtcatt

SEQ ID NO: 2062126 - DNA, 25 bp, Homo sapien
aagattctctgcagtcattgccatg

SEQ ID NO: 2062127 - DNA, 25 bp, Homo sapien
gcaagattctctgcagtcattgcca

SEQ ID NO: 2062128 - DNA, 25 bp, Homo sapien
tgttttacagcaagattctctgcag

SEQ ID NO: 2062129 - DNA, 25 bp, Homo sapien
cacagtagggagcttggctcatgct

SEQ ID NO: 2062130 - DNA, 25 bp, Homo sapien
acacagtagggagcttggctcatgc

SEQ ID NO: 2062131 - DNA, 25 bp, Homo sapien
tgacacagtagggagcttggctcat

SEQ ID NO: 2062132 - DNA, 25 bp, Homo sapien
gacacagtagggagcttggctcatg

SEQ ID NO: 2062133 - DNA, 25 bp, Homo sapien
gacatccattcacaatggactgaaa

SEQ ID NO: 2062134 - DNA, 25 bp, Homo sapien
tgccaaatatatagcatctgaagaa

SEQ ID NO: 2062135 - DNA, 25 bp, Homo sapien
acatgccttgccaaatatatagcat

SEQ ID NO: 2062136 - DNA, 25 bp, Homo sapien
ctgacatccattcacaatggactga

SEQ ID NO: 2062137 - DNA, 25 bp, Homo sapien
tccgtaagctccaaagggcgttcgc

SEQ ID NO: 2062138 - DNA, 25 bp, Homo sapien
gggcgttcgcttagcagcaactaca

SEQ ID NO: 2062139 - DNA, 25 bp, Homo sapien
tttgccagcagacaaggcagccttg

SEQ ID NO: 2062140 - DNA, 25 bp, Homo sapien
gaagtctttcagaaggcctccgtaa

SEQ ID NO: 2062141 - DNA, 25 bp, Homo sapien
cccacgaccccgactctccgcggcg

SEQ ID NO: 2062142 - DNA, 25 bp, Homo sapien
ggcaggaccccgaggggcgaggaga

SEQ ID NO: 2062143 - DNA, 25 bp, Homo sapien
actctccgcggcggccggaagcgga

SEQ ID NO: 2062144 - DNA, 25 bp, Homo sapien
cgaccccgactctccgcggcggccg

SEQ ID NO: 2062145 - DNA, 25 bp, Homo sapien
cggccgctcgcaatcacccagattt

SEQ ID NO: 2062146 - DNA, 25 bp, Homo sapien
gggtcccagcgtaagatggtcctac

SEQ ID NO: 2062147 - DNA, 25 bp, Homo sapien
atttcaagagcgtgggtggcgcccc

SEQ ID NO: 2062148 - DNA, 25 bp, Homo sapien
tcggcggcgcgggtctgtggtgtgg

SEQ ID NO: 2062149 - DNA, 25 bp, Homo sapien
ggacggggctcggatagaccacaac

SEQ ID NO: 2062150 - DNA, 25 bp, Homo sapien
acggggctcggatagaccacaacgc

SEQ ID NO: 2062151 - DNA, 25 bp, Homo sapien
ggggacggggctcggatagaccaca

SEQ ID NO: 2062152 - DNA, 25 bp, Homo sapien
ggggctcggatagaccacaacgcgc

SEQ ID NO: 2062153 - DNA, 25 bp, Homo sapien
gagaatttggtttgacacctctcac

SEQ ID NO: 2062154 - DNA, 25 bp, Homo sapien
accgagagaatttggtttgacacct

SEQ ID NO: 2062155 - DNA, 25 bp, Homo sapien
cgagagaatttggtttgacacctct

SEQ ID NO: 2062156 - DNA, 25 bp, Homo sapien
tccaaaccgagagaatttggtttga

SEQ ID NO: 2062157 - DNA, 25 bp, Homo sapien
gactcttcccctttgtctccgccaa

SEQ ID NO: 2062158 - DNA, 25 bp, Homo sapien
ctagccccgacaggcgatgactctt

SEQ ID NO: 2062159 - DNA, 25 bp, Homo sapien
gccaacaccctaaacactgggcagg

SEQ ID NO: 2062160 - DNA, 25 bp, Homo sapien
atcatatcctagccccgacaggcga

SEQ ID NO: 2062161 - DNA, 25 bp, Homo sapien
gattgtagtaggctagggcgctttc

SEQ ID NO: 2062162 - DNA, 25 bp, Homo sapien
ggattatgaaaacgtggcgagcgaa

SEQ ID NO: 2062163 - DNA, 25 bp, Homo sapien
tgagtcctggccgatgatgacgaga

SEQ ID NO: 2062164 - DNA, 25 bp, Homo sapien
tgacgagaccactgcgcaatctgag

SEQ ID NO: 2062165 - DNA, 25 bp, Homo sapien
caaacactttggtgacactcttgca

SEQ ID NO: 2062166 - DNA, 25 bp, Homo sapien
caaatgctcatgtataggccgggcg

SEQ ID NO: 2062167 - DNA, 25 bp, Homo sapien
tacagtggacacatatcgacccaat

SEQ ID NO: 2062168 - DNA, 25 bp, Homo sapien
tctctgagtcgtcagcgaatgcccc

SEQ ID NO: 2062169 - DNA, 25 bp, Homo sapien
tggcctaagccccaggagatgcaga

SEQ ID NO: 2062170 - DNA, 25 bp, Homo sapien
taactgcaactatgagggcacaggg

SEQ ID NO: 2062171 - DNA, 25 bp, Homo sapien
tagtaaccgctaaaggcacctggtg

SEQ ID NO: 2062172 - DNA, 25 bp, Homo sapien
caaaagcgtttgagcacactgagga

SEQ ID NO: 2062173 - DNA, 25 bp, Homo sapien
gatttaacagatccttgaatttact

SEQ ID NO: 2062174 - DNA, 25 bp, Homo sapien
tacttttaccagatttaacagatcc

SEQ ID NO: 2062175 - DNA, 25 bp, Homo sapien
gatctacttttaccagatttaacag

SEQ ID NO: 2062176 - DNA, 25 bp, Homo sapien
taccagatttaacagatccttgaat

SEQ ID NO: 2062177 - DNA, 25 bp, Homo sapien
aaactaatgctggaaacatgcatct

SEQ ID NO: 2062178 - DNA, 25 bp, Homo sapien
atcaaactaatgctggaaacatgca

SEQ ID NO: 2062179 - DNA, 25 bp, Homo sapien
attgggaatcaaactaatgctggaa

SEQ ID NO: 2062180 - DNA, 25 bp, Homo sapien
ggaatcaaactaatgctggaaacat

SEQ ID NO: 2062181 - DNA, 25 bp, Homo sapien
gacacgctgggatgtggattgagtc

SEQ ID NO: 2062182 - DNA, 25 bp, Homo sapien
cacgctgggatgtggattgagtcca

SEQ ID NO: 2062183 - DNA, 25 bp, Homo sapien
tggattgagtccatggttagagaag

SEQ ID NO: 2062184 - DNA, 25 bp, Homo sapien
gatgtggattgagtccatggttaga

SEQ ID NO: 2062185 - DNA, 25 bp, Homo sapien
agagtacatcacataaaatggcaga

SEQ ID NO: 2062186 - DNA, 25 bp, Homo sapien
gagtaggaagccctagggattggtc

SEQ ID NO: 2062187 - DNA, 25 bp, Homo sapien
aaagttgtccctccataactacagg

SEQ ID NO: 2062188 - DNA, 25 bp, Homo sapien
tgtcggccctgtagaacctatagat

SEQ ID NO: 2062189 - DNA, 25 bp, Homo sapien
ggctgactgtataaggtatcctcaa

SEQ ID NO: 2062190 - DNA, 25 bp, Homo sapien
gatatgcaagtactgctgtcggccc

SEQ ID NO: 2062191 - DNA, 25 bp, Homo sapien
tctcaatgcatatggaacagtctcc

SEQ ID NO: 2062192 - DNA, 25 bp, Homo sapien
tagccaatgggctaaagaaatcaca

SEQ ID NO: 2062193 - DNA, 25 bp, Homo sapien
tggaacaccccacttagcagcatac

SEQ ID NO: 2062194 - DNA, 25 bp, Homo sapien
gtctccaatattcaaacaagtctga

SEQ ID NO: 2062195 - DNA, 25 bp, Homo sapien
cactgttacccgttcttcaaattca

SEQ ID NO: 2062196 - DNA, 25 bp, Homo sapien
caaattcattcaggggagtataaag

SEQ ID NO: 2062197 - DNA, 25 bp, Homo sapien
tggattgttcgtataaaggccactg

SEQ ID NO: 2062198 - DNA, 25 bp, Homo sapien
attcattcaggggagtataaaggtt

SEQ ID NO: 2062199 - DNA, 25 bp, Homo sapien
gataaaaacggaatttagcacagag

SEQ ID NO: 2062200 - DNA, 25 bp, Homo sapien
ggataaaaacggaatttagcacaga

SEQ ID NO: 2062201 - DNA, 25 bp, Homo sapien
tgacagaggtgcaaagtgactgtac

SEQ ID NO: 2062202 - DNA, 25 bp, Homo sapien
gttgacagaggtgcaaagtgactgt

SEQ ID NO: 2062203 - DNA, 25 bp, Homo sapien
catgttgacagaggtgcaaagtgac

SEQ ID NO: 2062204 - DNA, 25 bp, Homo sapien
tgttgacagaggtgcaaagtgactg

SEQ ID NO: 2062205 - DNA, 25 bp, Homo sapien
aagccactcctcaagctgacttata

SEQ ID NO: 2062206 - DNA, 25 bp, Homo sapien
agccactcctcaagctgacttatat

SEQ ID NO: 2062207 - DNA, 25 bp, Homo sapien
tgcttggatcagaggttccatggtc

SEQ ID NO: 2062208 - DNA, 25 bp, Homo sapien
gcccgctgcagctagtgccattatt

SEQ ID NO: 2062209 - DNA, 25 bp, Homo sapien
tctcacacggttaaaaagcatggca

SEQ ID NO: 2062210 - DNA, 25 bp, Homo sapien
gaaatacctgaagtgtctacataag

SEQ ID NO: 2062211 - DNA, 25 bp, Homo sapien
ctgttgtgttttgcaggcccgctgc

SEQ ID NO: 2062212 - DNA, 25 bp, Homo sapien
ctggaggagcgcttccggtagccgg

SEQ ID NO: 2062213 - DNA, 25 bp, Homo sapien
tccggtagccggtgggcttcacacc

SEQ ID NO: 2062214 - DNA, 25 bp, Homo sapien
tggaggagcgcttccggtagccggt

SEQ ID NO: 2062215 - DNA, 25 bp, Homo sapien
ccggtagccggtgggcttcacacca

SEQ ID NO: 2062216 - DNA, 25 bp, Homo sapien
attcttaagacagtgttcattctgc

SEQ ID NO: 2062217 - DNA, 25 bp, Homo sapien
aaattcttaagacagtgttcattct

SEQ ID NO: 2062218 - DNA, 25 bp, Homo sapien
aattcttaagacagtgttcattctg

SEQ ID NO: 2062219 - DNA, 25 bp, Homo sapien
tgtggctggccttattgctgcttcc

SEQ ID NO: 2062220 - DNA, 25 bp, Homo sapien
tcctagaggcaggtctcctgtggct

SEQ ID NO: 2062221 - DNA, 25 bp, Homo sapien
taaggtgtgcccacggtctgaggtc

SEQ ID NO: 2062222 - DNA, 25 bp, Homo sapien
tgcttccagccacgaggcatgataa

SEQ ID NO: 2062223 - DNA, 25 bp, Homo sapien
gataaccagaatgacgtcatctcaa

SEQ ID NO: 2062224 - DNA, 25 bp, Homo sapien
tgcttcagacagtgaagaaggcggc

SEQ ID NO: 2062225 - DNA, 25 bp, Homo sapien
ccccgctgtactgcttcagacagtg

SEQ ID NO: 2062226 - DNA, 25 bp, Homo sapien
gcggcaggtgttggataaccagaat

SEQ ID NO: 2062227 - DNA, 25 bp, Homo sapien
tgagatcgtcgttggtgtagtccgc

SEQ ID NO: 2062228 - DNA, 25 bp, Homo sapien
tgtagtccgcgtgccggatgcacat

SEQ ID NO: 2062229 - DNA, 25 bp, Homo sapien
tcgtcgttggtgtagtccgcgtgcc

SEQ ID NO: 2062230 - DNA, 25 bp, Homo sapien
accttgagatcgtcgttggtgtagt

SEQ ID NO: 2062231 - DNA, 25 bp, Homo sapien
taagggcaacgagagcagcaaatgg

SEQ ID NO: 2062232 - DNA, 25 bp, Homo sapien
ctaagggcaacgagagcagcaaatg

SEQ ID NO: 2062233 - DNA, 25 bp, Homo sapien
gtgctgctgcttggcatgcatctct

SEQ ID NO: 2062234 - DNA, 25 bp, Homo sapien
gctgctgcttggcatgcatctctcc

SEQ ID NO: 2062235 - DNA, 25 bp, Homo sapien
cccggtgctgctgcttggcatgcat

SEQ ID NO: 2062236 - DNA, 25 bp, Homo sapien
cggtgctgctgcttggcatgcatct

SEQ ID NO: 2062237 - DNA, 25 bp, Homo sapien
agactcagccctttggccctttctt

SEQ ID NO: 2062238 - DNA, 25 bp, Homo sapien
gcagactcagccctttggccctttc

SEQ ID NO: 2062239 - DNA, 25 bp, Homo sapien
cagactcagccctttggccctttct

SEQ ID NO: 2062240 - DNA, 25 bp, Homo sapien
tgcaaaccttctaccaggctggtcc

SEQ ID NO: 2062241 - DNA, 25 bp, Homo sapien
cattttataggtccagcagatggct

SEQ ID NO: 2062242 - DNA, 25 bp, Homo sapien
ggtgggcagtatccttgcaaacctt

SEQ ID NO: 2062243 - DNA, 25 bp, Homo sapien
cagctccagttggtacttgggttac

SEQ ID NO: 2062244 - DNA, 25 bp, Homo sapien
tcctctttgtggtactccagcatgc

SEQ ID NO: 2062245 - DNA, 25 bp, Homo sapien
tgcctgttgagctcatggcgcttcc

SEQ ID NO: 2062246 - DNA, 25 bp, Homo sapien
ccgctggaccgtgacctgcctgttg

SEQ ID NO: 2062247 - DNA, 25 bp, Homo sapien
aatccttctctttccgctggaccgt

SEQ ID NO: 2062248 - DNA, 25 bp, Homo sapien
tcatgtaaatcttcagttgcttttt

SEQ ID NO: 2062249 - DNA, 25 bp, Homo sapien
tcttcagttgctttttgagcttcct

SEQ ID NO: 2062250 - DNA, 25 bp, Homo sapien
cagttgctttttgagcttcctctca

SEQ ID NO: 2062251 - DNA, 25 bp, Homo sapien
cttttccagcttttctaccagttct

SEQ ID NO: 2062252 - DNA, 25 bp, Homo sapien
ctggaagcagaggaagcagtgtgag

SEQ ID NO: 2062253 - DNA, 25 bp, Homo sapien
aagcagaggaagcagtgtgagaaca

SEQ ID NO: 2062254 - DNA, 25 bp, Homo sapien
gaagcagaggaagcagtgtgagaac

SEQ ID NO: 2062255 - DNA, 25 bp, Homo sapien
cagaggaagcagtgtgagaacagac

SEQ ID NO: 2062256 - DNA, 25 bp, Homo sapien
agccgtcagaaatgcgccagtcagg

SEQ ID NO: 2062257 - DNA, 25 bp, Homo sapien
tgaccagtgcggcccatgggcagcc

SEQ ID NO: 2062258 - DNA, 25 bp, Homo sapien
ccatgggcagccgtcagaaatgcgc

SEQ ID NO: 2062259 - DNA, 25 bp, Homo sapien
cagaaatgcgccagtcagggacgct

SEQ ID NO: 2062260 - DNA, 25 bp, Homo sapien
agcagtagcgtctggcagaaggtct

SEQ ID NO: 2062261 - DNA, 25 bp, Homo sapien
ttggtcagccgggatatttcctgct

SEQ ID NO: 2062262 - DNA, 25 bp, Homo sapien
gctgaacgccgaattccacctgggc

SEQ ID NO: 2062263 - DNA, 25 bp, Homo sapien
tatttcctgctgaacgccgaattcc

SEQ ID NO: 2062264 - DNA, 25 bp, Homo sapien
tttaggccttggtaggccaagccga

SEQ ID NO: 2062265 - DNA, 25 bp, Homo sapien
gctttaggccttggtaggccaagcc

SEQ ID NO: 2062266 - DNA, 25 bp, Homo sapien
taggccttggtaggccaagccgagt

SEQ ID NO: 2062267 - DNA, 25 bp, Homo sapien
gccttggtaggccaagccgagttct

SEQ ID NO: 2062268 - DNA, 25 bp, Homo sapien
ttgatctggcattaatgttcggctc

SEQ ID NO: 2062269 - DNA, 25 bp, Homo sapien
tcactgttaggccaacttgatctgg

SEQ ID NO: 2062270 - DNA, 25 bp, Homo sapien
gcttttcactgttaggccaacttga

SEQ ID NO: 2062271 - DNA, 25 bp, Homo sapien
ggccaacttgatctggcattaatgt

SEQ ID NO: 2062272 - DNA, 25 bp, Homo sapien
ctggtcggcgctcacgatctgggtc

SEQ ID NO: 2062273 - DNA, 25 bp, Homo sapien
tcggcgctcacgatctgggtcctga

SEQ ID NO: 2062274 - DNA, 25 bp, Homo sapien
cttggtcggccacggctttcctcag

SEQ ID NO: 2062275 - DNA, 25 bp, Homo sapien
agccgtggctggagttattctgcgt

SEQ ID NO: 2062276 - DNA, 25 bp, Homo sapien
gtgcagcagtaagacaggggaagga

SEQ ID NO: 2062277 - DNA, 25 bp, Homo sapien
aacagactgtgaacagtccattgaa

SEQ ID NO: 2062278 - DNA, 25 bp, Homo sapien
tctgcattcgggtccaaatctatgt

SEQ ID NO: 2062279 - DNA, 25 bp, Homo sapien
gccagatctgcattcgggtccaaat

SEQ ID NO: 2062280 - DNA, 25 bp, Homo sapien
ttgtaggccagatctgcattcgggt

SEQ ID NO: 2062281 - DNA, 25 bp, Homo sapien
taggccagatctgcattcgggtcca

SEQ ID NO: 2062282 - DNA, 25 bp, Homo sapien
cagcttcaggaagaccgtcatgtcc

SEQ ID NO: 2062283 - DNA, 25 bp, Homo sapien
gcttcaggaagaccgtcatgtccat

SEQ ID NO: 2062284 - DNA, 25 bp, Homo sapien
gcagcttcaggaagaccgtcatgtc

SEQ ID NO: 2062285 - DNA, 25 bp, Homo sapien
cttcaggaagaccgtcatgtccatg

SEQ ID NO: 2062286 - DNA, 25 bp, Homo sapien
atcctcagtgtctccgatctcagat

SEQ ID NO: 2062287 - DNA, 25 bp, Homo sapien
cagattctaagctactttggtttga

SEQ ID NO: 2062288 - DNA, 25 bp, Homo sapien
tcagtgtctccgatctcagatgtgg

SEQ ID NO: 2062289 - DNA, 25 bp, Homo sapien
tctaagctactttggtttgatgggt

SEQ ID NO: 2062290 - DNA, 25 bp, Homo sapien
ctttatgatggtcatttcatcccga

SEQ ID NO: 2062291 - DNA, 25 bp, Homo sapien
tcatcccgaaggttgtcgtatctct

SEQ ID NO: 2062292 - DNA, 25 bp, Homo sapien
gaaggttgtcgtatctctgctccaa

SEQ ID NO: 2062293 - DNA, 25 bp, Homo sapien
tggtcatttcatcccgaaggttgtc

SEQ ID NO: 2062294 - DNA, 25 bp, Homo sapien
gtaccgggatcgctcctcctccagt

SEQ ID NO: 2062295 - DNA, 25 bp, Homo sapien
ttctggtaccgggatcgctcctcct

SEQ ID NO: 2062296 - DNA, 25 bp, Homo sapien
taccgggatcgctcctcctccagtt

SEQ ID NO: 2062297 - DNA, 25 bp, Homo sapien
aggttctggtaccgggatcgctcct

SEQ ID NO: 2062298 - DNA, 25 bp, Homo sapien
ttagactggcacaggatttggttgt

SEQ ID NO: 2062299 - DNA, 25 bp, Homo sapien
tttagactggcacaggatttggttg

SEQ ID NO: 2062300 - DNA, 25 bp, Homo sapien
agactggcacaggatttggttgttg

SEQ ID NO: 2062301 - DNA, 25 bp, Homo sapien
ctttagactggcacaggatttggtt

SEQ ID NO: 2062302 - DNA, 25 bp, Homo sapien
gagagcaataggggaaaaatgtctc

SEQ ID NO: 2062303 - DNA, 25 bp, Homo sapien
gtggtcacggacaactgctctgaaa

SEQ ID NO: 2062304 - DNA, 25 bp, Homo sapien
tgtgggcgtcctccaagatcttgcg

SEQ ID NO: 2062305 - DNA, 25 bp, Homo sapien
ctctacctccatggtgtatgttgag

SEQ ID NO: 2062306 - DNA, 25 bp, Homo sapien
atcttgcgctccgagtgggccctct

SEQ ID NO: 2062307 - DNA, 25 bp, Homo sapien
gccccgcacgtgcttctggatggtg

SEQ ID NO: 2062308 - DNA, 25 bp, Homo sapien
gcctcaatcctgagggccttcagct

SEQ ID NO: 2062309 - DNA, 25 bp, Homo sapien
cacgttgagacgtttcagatgctct

SEQ ID NO: 2062310 - DNA, 25 bp, Homo sapien
ttgagcatccggaaggcacactgga

SEQ ID NO: 2062311 - DNA, 25 bp, Homo sapien
caaggatacacatcttgtgggtttg

SEQ ID NO: 2062312 - DNA, 25 bp, Homo sapien
acaaggatacacatcttgtgggttt

SEQ ID NO: 2062313 - DNA, 25 bp, Homo sapien
aggatacacatcttgtgggtttgca

SEQ ID NO: 2062314 - DNA, 25 bp, Homo sapien
aaggatacacatcttgtgggtttgc

SEQ ID NO: 2062315 - DNA, 25 bp, Homo sapien
actggaacaacacaaagagcaagaa

SEQ ID NO: 2062316 - DNA, 25 bp, Homo sapien
cactggaacaacacaaagagcaaga

SEQ ID NO: 2062317 - DNA, 25 bp, Homo sapien
gggttttggcttcactggaacaaca

SEQ ID NO: 2062318 - DNA, 25 bp, Homo sapien
ggttttggcttcactggaacaacac

SEQ ID NO: 2062319 - DNA, 25 bp, Homo sapien
ccgggtgaaggcctggataacaacg

SEQ ID NO: 2062320 - DNA, 25 bp, Homo sapien
gataacaacggcagctctgcggacc

SEQ ID NO: 2062321 - DNA, 25 bp, Homo sapien
tctgcggaccctctggtaggcctgg

SEQ ID NO: 2062322 - DNA, 25 bp, Homo sapien
gcgggccctctgcatgcggtaatgt

SEQ ID NO: 2062323 - DNA, 25 bp, Homo sapien
tcatgatggtggctgtccggaactt

SEQ ID NO: 2062324 - DNA, 25 bp, Homo sapien
agccatccccggacagttttctgga

SEQ ID NO: 2062325 - DNA, 25 bp, Homo sapien
cggaacttgtcagcccgcagcttct

SEQ ID NO: 2062326 - DNA, 25 bp, Homo sapien
ccacctggcctgctcgaaagaagat

SEQ ID NO: 2062327 - DNA, 25 bp, Homo sapien
tgggccaggctgctcgtgaagctgg

SEQ ID NO: 2062328 - DNA, 25 bp, Homo sapien
gccaggctgctcgtgaagctggcaa

SEQ ID NO: 2062329 - DNA, 25 bp, Homo sapien
caggctgctcgtgaagctggcaaga

SEQ ID NO: 2062330 - DNA, 25 bp, Homo sapien
gctgctcgtgaagctggcaagagtg

SEQ ID NO: 2062331 - DNA, 25 bp, Homo sapien
ccgataccggttgaaaaagtcatgg

SEQ ID NO: 2062332 - DNA, 25 bp, Homo sapien
ttcttgaccagcacccgataccggt

SEQ ID NO: 2062333 - DNA, 25 bp, Homo sapien
tttttgtctgtgttggcgagctctc

SEQ ID NO: 2062334 - DNA, 25 bp, Homo sapien
gacagacctgcagatggcctttttg

SEQ ID NO: 2062335 - DNA, 25 bp, Homo sapien
agcaggttctcttagagctccagat

SEQ ID NO: 2062336 - DNA, 25 bp, Homo sapien
ggttctcttagagctccagatcttc

SEQ ID NO: 2062337 - DNA, 25 bp, Homo sapien
cttccagcattgcggcccttgggtt

SEQ ID NO: 2062338 - DNA, 25 bp, Homo sapien
ttccagcattgcggcccttgggttc

SEQ ID NO: 2062339 - DNA, 25 bp, Homo sapien
taggaggacttgttcctcccagcag

SEQ ID NO: 2062340 - DNA, 25 bp, Homo sapien
ctaggaggacttgttcctcccagca

SEQ ID NO: 2062341 - DNA, 25 bp, Homo sapien
tcagtggtgtgcttcctccagaatc

SEQ ID NO: 2062342 - DNA, 25 bp, Homo sapien
gcttcctccagaatcaagggcttct

SEQ ID NO: 2062343 - DNA, 25 bp, Homo sapien
gtgtgcttcctccagaatcaagggc

SEQ ID NO: 2062344 - DNA, 25 bp, Homo sapien
cctccagaatcaagggcttcttcac

SEQ ID NO: 2062345 - DNA, 25 bp, Homo sapien
caactgggtgtatgggagaagctca

SEQ ID NO: 2062346 - DNA, 25 bp, Homo sapien
gcgccctgacagggtcaaggagtca

SEQ ID NO: 2062347 - DNA, 25 bp, Homo sapien
gaagctcaggacccgtgactgcttc

SEQ ID NO: 2062348 - DNA, 25 bp, Homo sapien
aaggagtcacaactgggtgtatggg

SEQ ID NO: 2062349 - DNA, 25 bp, Homo sapien
tgcacaggcacgagacctaggagct

SEQ ID NO: 2062350 - DNA, 25 bp, Homo sapien
ggacatatttcttagccgctgcaca

SEQ ID NO: 2062351 - DNA, 25 bp, Homo sapien
aactctgccgaaaaagccctctgct

SEQ ID NO: 2062352 - DNA, 25 bp, Homo sapien
atagaccggtatagggaagcccgag

SEQ ID NO: 2062353 - DNA, 25 bp, Homo sapien
actgattcgaatcgtctccaacacc

SEQ ID NO: 2062354 - DNA, 25 bp, Homo sapien
cagctgcactgattcgaatcgtctc

SEQ ID NO: 2062355 - DNA, 25 bp, Homo sapien
acaccccgcaggctctgagttgctg

SEQ ID NO: 2062356 - DNA, 25 bp, Homo sapien
tggatgggtagccagctgcactgat

SEQ ID NO: 2062357 - DNA, 25 bp, Homo sapien
gcaatgaccagtcataagcagctgc

SEQ ID NO: 2062358 - DNA, 25 bp, Homo sapien
ggtcttcattaccaggggcggcaat

SEQ ID NO: 2062359 - DNA, 25 bp, Homo sapien
cctgtggttgctcggccacaagagg

SEQ ID NO: 2062360 - DNA, 25 bp, Homo sapien
ttccaggatccaagggggtcttcat

SEQ ID NO: 2062361 - DNA, 25 bp, Homo sapien
tcagtctgtctgcagcaagtaagat

SEQ ID NO: 2062362 - DNA, 25 bp, Homo sapien
ctggggagtgtaagtccaggtggtc

SEQ ID NO: 2062363 - DNA, 25 bp, Homo sapien
gatgtctggggagtgtaagtccagg

SEQ ID NO: 2062364 - DNA, 25 bp, Homo sapien
agtgtaagtccaggtggtcatcatg

SEQ ID NO: 2062365 - DNA, 25 bp, Homo sapien
cttgatgcagcggacatagtgaggt

SEQ ID NO: 2062366 - DNA, 25 bp, Homo sapien
aaaggggagcttctcatcgttgggc

SEQ ID NO: 2062367 - DNA, 25 bp, Homo sapien
catagtgaggtgtcgtggcattcag

SEQ ID NO: 2062368 - DNA, 25 bp, Homo sapien
tgagcagatgcagggaggtacggaa

SEQ ID NO: 2062369 - DNA, 25 bp, Homo sapien
ggtggccaacggttttcttgtgctc

SEQ ID NO: 2062370 - DNA, 25 bp, Homo sapien
tgaaacaagtcagccactagtggga

SEQ ID NO: 2062371 - DNA, 25 bp, Homo sapien
ggtctggcagaacggacgctgatct

SEQ ID NO: 2062372 - DNA, 25 bp, Homo sapien
cttcgaagatgaccccttcccaggg

SEQ ID NO: 2062373 - DNA, 25 bp, Homo sapien
cttatgcaggaacacttcactatca

SEQ ID NO: 2062374 - DNA, 25 bp, Homo sapien
tcacagtggattagaatgagtgtgc

SEQ ID NO: 2062375 - DNA, 25 bp, Homo sapien
ctatcacagtggattagaatgagtg

SEQ ID NO: 2062376 - DNA, 25 bp, Homo sapien
cagtggattagaatgagtgtgccca

SEQ ID NO: 2062377 - DNA, 25 bp, Homo sapien
ggaatcaacacgtgtcagtttcact

SEQ ID NO: 2062378 - DNA, 25 bp, Homo sapien
caaccattagaagcatccaatttcc

SEQ ID NO: 2062379 - DNA, 25 bp, Homo sapien
atggacaatcatgcgggaatcaaca

SEQ ID NO: 2062380 - DNA, 25 bp, Homo sapien
gacacaccaaccattagaagcatcc

SEQ ID NO: 2062381 - DNA, 25 bp, Homo sapien
gatcacctcgagcaaggcatccaca

SEQ ID NO: 2062382 - DNA, 25 bp, Homo sapien
catcgatcacctcgagcaaggcatc

SEQ ID NO: 2062383 - DNA, 25 bp, Homo sapien
tttaccatcgatcacctcgagcaag

SEQ ID NO: 2062384 - DNA, 25 bp, Homo sapien
gacagacaccgccttccacgccgct

SEQ ID NO: 2062385 - DNA, 25 bp, Homo sapien
tgagatcagataagctcaggcacgt

SEQ ID NO: 2062386 - DNA, 25 bp, Homo sapien
ccttcaggatattgatctgctcttc

SEQ ID NO: 2062387 - DNA, 25 bp, Homo sapien
tgctcttcatacaccgtgtctctgt

SEQ ID NO: 2062388 - DNA, 25 bp, Homo sapien
gctggccttcaggatattgatctgc

SEQ ID NO: 2062389 - DNA, 25 bp, Homo sapien
gaaaaccatcagagaggtactccac

SEQ ID NO: 2062390 - DNA, 25 bp, Homo sapien
atgatgaaggccgtgttggacatgc

SEQ ID NO: 2062391 - DNA, 25 bp, Homo sapien
ctggagtgccggtcatagagcttct

SEQ ID NO: 2062392 - DNA, 25 bp, Homo sapien
cgatgatgaaggccgtgttggacat

SEQ ID NO: 2062393 - DNA, 25 bp, Homo sapien
ctgctggagtgccggtcatagagct

SEQ ID NO: 2062394 - DNA, 25 bp, Homo sapien
agggtccaagggatctgttccttca

SEQ ID NO: 2062395 - DNA, 25 bp, Homo sapien
aagggatctgttccttcatgtattc

SEQ ID NO: 2062396 - DNA, 25 bp, Homo sapien
agcttggcttcaatgaggtcgatac

SEQ ID NO: 2062397 - DNA, 25 bp, Homo sapien
gaggtcgatacaaggttggttatca

SEQ ID NO: 2062398 - DNA, 25 bp, Homo sapien
taacattcacctcccccaggggctc

SEQ ID NO: 2062399 - DNA, 25 bp, Homo sapien
ccaggggctcagtgagttctgggtt

SEQ ID NO: 2062400 - DNA, 25 bp, Homo sapien
ctcccccaggggctcagtgagttct

SEQ ID NO: 2062401 - DNA, 25 bp, Homo sapien
cccccaggggctcagtgagttctgg

SEQ ID NO: 2062402 - DNA, 25 bp, Homo sapien
tttgcatagttgatacagaactgct

SEQ ID NO: 2062403 - DNA, 25 bp, Homo sapien
atttgcatagttgatacagaactgc

SEQ ID NO: 2062404 - DNA, 25 bp, Homo sapien
aaagctgtttacctcaaatgtctca

SEQ ID NO: 2062405 - DNA, 25 bp, Homo sapien
ttgcatagttgatacagaactgctc

SEQ ID NO: 2062406 - DNA, 25 bp, Homo sapien
tcaaccactgtatagatcagggccg

SEQ ID NO: 2062407 - DNA, 25 bp, Homo sapien
ctcatcaaccactgtatagatcagg

SEQ ID NO: 2062408 - DNA, 25 bp, Homo sapien
ttaacatctgtctcatcaaccactg

SEQ ID NO: 2062409 - DNA, 25 bp, Homo sapien
ccactgtatagatcagggccgtggt

SEQ ID NO: 2062410 - DNA, 25 bp, Homo sapien
aactgtcctccgcaagaatgggctg

SEQ ID NO: 2062411 - DNA, 25 bp, Homo sapien
cctctgctaccttggcatcttgaag

SEQ ID NO: 2062412 - DNA, 25 bp, Homo sapien
tctgttacagcctgtgttgctccca

SEQ ID NO: 2062413 - DNA, 25 bp, Homo sapien
ccacaagaaagtaacagaggactga

SEQ ID NO: 2062414 - DNA, 25 bp, Homo sapien
ggcaatgtctcgttcttttccactt

SEQ ID NO: 2062415 - DNA, 25 bp, Homo sapien
gagggaggcaatgtctcgttctttt

SEQ ID NO: 2062416 - DNA, 25 bp, Homo sapien
tccacttcccggatgtggctggctg

SEQ ID NO: 2062417 - DNA, 25 bp, Homo sapien
ctctggactccacttttgccactct

SEQ ID NO: 2062418 - DNA, 25 bp, Homo sapien
accccgatgaaggagtgctgcttga

SEQ ID NO: 2062419 - DNA, 25 bp, Homo sapien
catggtcttgacgtaggtctccgag

SEQ ID NO: 2062420 - DNA, 25 bp, Homo sapien
gcatagatgtgcttcgccagggcgt

SEQ ID NO: 2062421 - DNA, 25 bp, Homo sapien
gcgcattgatcacctgctgcaggga

SEQ ID NO: 2062422 - DNA, 25 bp, Homo sapien
acttgtagtccagccgaggaagcca

SEQ ID NO: 2062423 - DNA, 25 bp, Homo sapien
tcctccccaaggacttgtagtccag

SEQ ID NO: 2062424 - DNA, 25 bp, Homo sapien
tccccaaggacttgtagtccagccg

SEQ ID NO: 2062425 - DNA, 25 bp, Homo sapien
caaggacttgtagtccagccgagga

SEQ ID NO: 2062426 - DNA, 25 bp, Homo sapien
tcagccaggccttggtcactgcagg

SEQ ID NO: 2062427 - DNA, 25 bp, Homo sapien
tgttcctcatctcacctgtccctga

SEQ ID NO: 2062428 - DNA, 25 bp, Homo sapien
aggtgttcctcatctcacctgtccc

SEQ ID NO: 2062429 - DNA, 25 bp, Homo sapien
cctcagccaggccttggtcactgca

SEQ ID NO: 2062430 - DNA, 25 bp, Homo sapien
cttccaaggtgcaagatagaagcaa

SEQ ID NO: 2062431 - DNA, 25 bp, Homo sapien
agcctgaatcgccacacttccaagg

SEQ ID NO: 2062432 - DNA, 25 bp, Homo sapien
tatcttaaaaatgctcatctgatgg

SEQ ID NO: 2062433 - DNA, 25 bp, Homo sapien
aattatcttaaaaatgctcatctga

SEQ ID NO: 2062434 - DNA, 25 bp, Homo sapien
gaaggcttgtcgagtcttctcaaag

SEQ ID NO: 2062435 - DNA, 25 bp, Homo sapien
ttctcaaagtcctcagcatcgtcca

SEQ ID NO: 2062436 - DNA, 25 bp, Homo sapien
gagtgtgaaggcttgtcgagtcttc

SEQ ID NO: 2062437 - DNA, 25 bp, Homo sapien
gtctcctccctgtgatgtatagaaa

SEQ ID NO: 2062438 - DNA, 25 bp, Homo sapien
tcctatgctccaagccatactgagc

SEQ ID NO: 2062439 - DNA, 25 bp, Homo sapien
gcatcctatgctccaagccatactg

SEQ ID NO: 2062440 - DNA, 25 bp, Homo sapien
atcctatgctccaagccatactgag

SEQ ID NO: 2062441 - DNA, 25 bp, Homo sapien
catcctatgctccaagccatactga

SEQ ID NO: 2062442 - DNA, 25 bp, Homo sapien
cctcctgcaagttggccccgaaaag

SEQ ID NO: 2062443 - DNA, 25 bp, Homo sapien
aatttcacctcctgcaagttggccc

SEQ ID NO: 2062444 - DNA, 25 bp, Homo sapien
aaaaaatttcacctcctgcaagttg

SEQ ID NO: 2062445 - DNA, 25 bp, Homo sapien
ctcctgcaagttggccccgaaaagc

SEQ ID NO: 2062446 - DNA, 25 bp, Homo sapien
aattctggaagaccggcagcagcac

SEQ ID NO: 2062447 - DNA, 25 bp, Homo sapien
cagagctggtaaaagatgtggtaat

SEQ ID NO: 2062448 - DNA, 25 bp, Homo sapien
ctggaagaccggcagcagcacagag

SEQ ID NO: 2062449 - DNA, 25 bp, Homo sapien
cacagagctggtaaaagatgtggta

SEQ ID NO: 2062450 - DNA, 25 bp, Homo sapien
tctggatgtacttgccaaaacggct

SEQ ID NO: 2062451 - DNA, 25 bp, Homo sapien
ccgatgatgtggtaccttttgtcaa

SEQ ID NO: 2062452 - DNA, 25 bp, Homo sapien
aggtaagtcctcatgttggccccga

SEQ ID NO: 2062453 - DNA, 25 bp, Homo sapien
tgccaaaacggctgctgttgtcatt

SEQ ID NO: 2062454 - DNA, 25 bp, Homo sapien
caacggtggcgaaatagcgcatggc

SEQ ID NO: 2062455 - DNA, 25 bp, Homo sapien
ttctcttcgatgttggtttcactgg

SEQ ID NO: 2062456 - DNA, 25 bp, Homo sapien
catgatgggactggatgccagcacc

SEQ ID NO: 2062457 - DNA, 25 bp, Homo sapien
tacttggctgataccgtcttcccgg

SEQ ID NO: 2062458 - DNA, 25 bp, Homo sapien
gaattggaaactccctgagaggatg

SEQ ID NO: 2062459 - DNA, 25 bp, Homo sapien
ctgaattggaaactccctgagagga

SEQ ID NO: 2062460 - DNA, 25 bp, Homo sapien
aacactcacttaggcccaacacaca

SEQ ID NO: 2062461 - DNA, 25 bp, Homo sapien
tggaaactccctgagaggatgaaga

SEQ ID NO: 2062462 - DNA, 25 bp, Homo sapien
tgtttatcgcccaggcccaatgcaa

SEQ ID NO: 2062463 - DNA, 25 bp, Homo sapien
agactggtcagctttggatgtccga

SEQ ID NO: 2062464 - DNA, 25 bp, Homo sapien
gcattaagattcaggtgcaaatcct

SEQ ID NO: 2062465 - DNA, 25 bp, Homo sapien
gatgtccgaggtacacagatgcaca

SEQ ID NO: 2062466 - DNA, 25 bp, Homo sapien
acagcagctgaatggtttgttgaaa

SEQ ID NO: 2062467 - DNA, 25 bp, Homo sapien
gcagctgaatggtttgttgaaagcc

SEQ ID NO: 2062468 - DNA, 25 bp, Homo sapien
agctgaatggtttgttgaaagccat

SEQ ID NO: 2062469 - DNA, 25 bp, Homo sapien
cagcagctgaatggtttgttgaaag

SEQ ID NO: 2062470 - DNA, 25 bp, Homo sapien
ggctctaagctatcacatcacactg

SEQ ID NO: 2062471 - DNA, 25 bp, Homo sapien
gaataaagtcctattatcatcccca

SEQ ID NO: 2062472 - DNA, 25 bp, Homo sapien
ggtcacacagctggttactgggcca

SEQ ID NO: 2062473 - DNA, 25 bp, Homo sapien
gcatcttccgggtaggcactttctg

SEQ ID NO: 2062474 - DNA, 25 bp, Homo sapien
ctgtaacaactgtgcccaaagtctt

SEQ ID NO: 2062475 - DNA, 25 bp, Homo sapien
gcccaaagtcttacggcactcaaga

SEQ ID NO: 2062476 - DNA, 25 bp, Homo sapien
gcccatgaatctgtcagctgtaaca

SEQ ID NO: 2062477 - DNA, 25 bp, Homo sapien
ggcactcaagagctttcaaaggttc

SEQ ID NO: 2062478 - DNA, 25 bp, Homo sapien
cagagctgttggcatggtataacat

SEQ ID NO: 2062479 - DNA, 25 bp, Homo sapien
gatgaaagcatccagccatgacagg

SEQ ID NO: 2062480 - DNA, 25 bp, Homo sapien
gtcttagagcgctgtcagagctgtt

SEQ ID NO: 2062481 - DNA, 25 bp, Homo sapien
taacatggtaagaaccaagccacat

SEQ ID NO: 2062482 - DNA, 25 bp, Homo sapien
ctttcagaaccataaagaaaccatc

SEQ ID NO: 2062483 - DNA, 25 bp, Homo sapien
cttctctttcagaaccataaagaaa

SEQ ID NO: 2062484 - DNA, 25 bp, Homo sapien
tctctttcagaaccataaagaaacc

SEQ ID NO: 2062485 - DNA, 25 bp, Homo sapien
ttcagaaccataaagaaaccatctt

SEQ ID NO: 2062486 - DNA, 25 bp, Homo sapien
gccactgtaggtatagatgacatct

SEQ ID NO: 2062487 - DNA, 25 bp, Homo sapien
gattggcaactgttcataaggatta

SEQ ID NO: 2062488 - DNA, 25 bp, Homo sapien
gggtccatgtctcccatgttttggc

SEQ ID NO: 2062489 - DNA, 25 bp, Homo sapien
gacatcttgtccatagattggcaac

SEQ ID NO: 2062490 - DNA, 25 bp, Homo sapien
ggaaacggaccttcaaattatgcaa

SEQ ID NO: 2062491 - DNA, 25 bp, Homo sapien
ctcatgaagatagctaagggcagtc

SEQ ID NO: 2062492 - DNA, 25 bp, Homo sapien
tatggttggactccaggaaacggac

SEQ ID NO: 2062493 - DNA, 25 bp, Homo sapien
tctggattccgtaagaagggcagct

SEQ ID NO: 2062494 - DNA, 25 bp, Homo sapien
ctcggtggagatgtccccggacctg

SEQ ID NO: 2062495 - DNA, 25 bp, Homo sapien
gagatgtccccggacctgagagagc

SEQ ID NO: 2062496 - DNA, 25 bp, Homo sapien
tccccggacctgagagagcacagct

SEQ ID NO: 2062497 - DNA, 25 bp, Homo sapien
gaaggcagcacagggaccgccaggt

SEQ ID NO: 2062498 - DNA, 25 bp, Homo sapien
gtctgagctgtaggctcttgtctcc

SEQ ID NO: 2062499 - DNA, 25 bp, Homo sapien
ggtcagggatccagacccttgtgca

SEQ ID NO: 2062500 - DNA, 25 bp, Homo sapien
gctgagcgccatacctcatcagggt

SEQ ID NO: 2062501 - DNA, 25 bp, Homo sapien
tctccttctttgtagtccttggtta

SEQ ID NO: 2062502 - DNA, 25 bp, Homo sapien
aggttcccagccctacttgcagtca

SEQ ID NO: 2062503 - DNA, 25 bp, Homo sapien
tagctatcctgatttgcagacaaag

SEQ ID NO: 2062504 - DNA, 25 bp, Homo sapien
gatgacagacaggaaccactatgcc

SEQ ID NO: 2062505 - DNA, 25 bp, Homo sapien
tctcaacataactaggaggttccca

SEQ ID NO: 2062506 - DNA, 25 bp, Homo sapien
ccattcctgtgattaggggaccaag

SEQ ID NO: 2062507 - DNA, 25 bp, Homo sapien
ttgatagctggcagtataaactccc

SEQ ID NO: 2062508 - DNA, 25 bp, Homo sapien
ttcctgtgattaggggaccaagaac

SEQ ID NO: 2062509 - DNA, 25 bp, Homo sapien
gtataaactccctgtccattcctgt

SEQ ID NO: 2062510 - DNA, 25 bp, Homo sapien
taaagattaattaagccctgcaccc

SEQ ID NO: 2062511 - DNA, 25 bp, Homo sapien
tcacaatcatttctacaggtaccgc

SEQ ID NO: 2062512 - DNA, 25 bp, Homo sapien
tgtgcttgcacaaagtgggacacac

SEQ ID NO: 2062513 - DNA, 25 bp, Homo sapien
gtctgaaggagtgttcatgggccca

SEQ ID NO: 2062514 - DNA, 25 bp, Homo sapien
tgaagattcagatatagggtgctgg

SEQ ID NO: 2062515 - DNA, 25 bp, Homo sapien
aggtgaagattcagatatagggtgc

SEQ ID NO: 2062516 - DNA, 25 bp, Homo sapien
agatatagggtgctggtccccactc

SEQ ID NO: 2062517 - DNA, 25 bp, Homo sapien
gattcagatatagggtgctggtccc

SEQ ID NO: 2062518 - DNA, 25 bp, Homo sapien
tggagactgtgaatgacctaatggc

SEQ ID NO: 2062519 - DNA, 25 bp, Homo sapien
tggattgtaaatccccgagtctgaa

SEQ ID NO: 2062520 - DNA, 25 bp, Homo sapien
gcatgtccactttcaatgaacttgg

SEQ ID NO: 2062521 - DNA, 25 bp, Homo sapien
caagggaacattctttggagactgt

SEQ ID NO: 2062522 - DNA, 25 bp, Homo sapien
tgtaacttctaggtcttatctgtca

SEQ ID NO: 2062523 - DNA, 25 bp, Homo sapien
tctaggtcttatctgtcactactcc

SEQ ID NO: 2062524 - DNA, 25 bp, Homo sapien
ttctctctgcagagttagcacagcc

SEQ ID NO: 2062525 - DNA, 25 bp, Homo sapien
gcacagccatagctcctgtaacttc

SEQ ID NO: 2062526 - DNA, 25 bp, Homo sapien
ccaggaggaagtcccagaagagaac

SEQ ID NO: 2062527 - DNA, 25 bp, Homo sapien
ggaagagtccaggaggaagtcccag

SEQ ID NO: 2062528 - DNA, 25 bp, Homo sapien
tccaggaggaagtcccagaagagaa

SEQ ID NO: 2062529 - DNA, 25 bp, Homo sapien
agagtccaggaggaagtcccagaag

SEQ ID NO: 2062530 - DNA, 25 bp, Homo sapien
tatggtgggaggcaagttccaaaag

SEQ ID NO: 2062531 - DNA, 25 bp, Homo sapien
aaggcaggttggagtcacatcgtag

SEQ ID NO: 2062532 - DNA, 25 bp, Homo sapien
gccatcagctgagttgaagccaggg

SEQ ID NO: 2062533 - DNA, 25 bp, Homo sapien
gaaagggcccaactaggccatcagc

SEQ ID NO: 2062534 - DNA, 25 bp, Homo sapien
agccagaagttgactgagtagttta

SEQ ID NO: 2062535 - DNA, 25 bp, Homo sapien
ccagaagttgactgagtagtttagc

SEQ ID NO: 2062536 - DNA, 25 bp, Homo sapien
gaagttgactgagtagtttagcgat

SEQ ID NO: 2062537 - DNA, 25 bp, Homo sapien
gaagccagaagttgactgagtagtt

SEQ ID NO: 2062538 - DNA, 25 bp, Homo sapien
tacatgcaagcatcgtgagaagcca

SEQ ID NO: 2062539 - DNA, 25 bp, Homo sapien
tactactgaagctgggaccttgtca

SEQ ID NO: 2062540 - DNA, 25 bp, Homo sapien
tataaaccaccatgaggcataccag

SEQ ID NO: 2062541 - DNA, 25 bp, Homo sapien
aactctgcacccagatggaactggc

SEQ ID NO: 2062542 - DNA, 25 bp, Homo sapien
ggtccactgcccccgctgccttcct

SEQ ID NO: 2062543 - DNA, 25 bp, Homo sapien
tgcccccgctgccttcctgctcctt

SEQ ID NO: 2062544 - DNA, 25 bp, Homo sapien
ctggtccactgcccccgctgccttc

SEQ ID NO: 2062545 - DNA, 25 bp, Homo sapien
ccactgcccccgctgccttcctgct

SEQ ID NO: 2062546 - DNA, 25 bp, Homo sapien
catgagagaattcccccagttagtg

SEQ ID NO: 2062547 - DNA, 25 bp, Homo sapien
ccagcatgagagaattcccccagtt

SEQ ID NO: 2062548 - DNA, 25 bp, Homo sapien
gagaattcccccagttagtggaggc

SEQ ID NO: 2062549 - DNA, 25 bp, Homo sapien
caccagcatgagagaattcccccag

SEQ ID NO: 2062550 - DNA, 25 bp, Homo sapien
ggtcgtcctcagcgctcattaaaca

SEQ ID NO: 2062551 - DNA, 25 bp, Homo sapien
ttatactgcgttaatatgctaaaaa

SEQ ID NO: 2062552 - DNA, 25 bp, Homo sapien
gtcctcagcgctcattaaacactaa

SEQ ID NO: 2062553 - DNA, 25 bp, Homo sapien
cattaaacactaattatactgcgtt

SEQ ID NO: 2062554 - DNA, 25 bp, Homo sapien
cgatcttgagtgcaaccatttcaga

SEQ ID NO: 2062555 - DNA, 25 bp, Homo sapien
gaaaaatgtgtttccactgaagtat

SEQ ID NO: 2062556 - DNA, 25 bp, Homo sapien
acgatcttgagtgcaaccatttcag

SEQ ID NO: 2062557 - DNA, 25 bp, Homo sapien
caacgatcttgagtgcaaccatttc

SEQ ID NO: 2062558 - DNA, 25 bp, Homo sapien
cattgtcctaaggtgacttcactga

SEQ ID NO: 2062559 - DNA, 25 bp, Homo sapien
acttcttgagaaatcgcggtgttat

SEQ ID NO: 2062560 - DNA, 25 bp, Homo sapien
tatgtggtccatcaaaagtcctcaa

SEQ ID NO: 2062561 - DNA, 25 bp, Homo sapien
gctttgaactcaaccataagagaag

SEQ ID NO: 2062562 - DNA, 25 bp, Homo sapien
catcactataggtgccttccaagct

SEQ ID NO: 2062563 - DNA, 25 bp, Homo sapien
cagatccaagatacacagccaagat

SEQ ID NO: 2062564 - DNA, 25 bp, Homo sapien
ccacatcactataggtgccttccaa

SEQ ID NO: 2062565 - DNA, 25 bp, Homo sapien
ctcagatccaagatacacagccaag

SEQ ID NO: 2062566 - DNA, 25 bp, Homo sapien
cagaaccaaggtaggcaaaggcacc

SEQ ID NO: 2062567 - DNA, 25 bp, Homo sapien
tccagtgtcaataccctaagagggc

SEQ ID NO: 2062568 - DNA, 25 bp, Homo sapien
tacgggaccagcaggaaaaaccatg

SEQ ID NO: 2062569 - DNA, 25 bp, Homo sapien
aatcttatcacaactggtccgctgg

SEQ ID NO: 2062570 - DNA, 25 bp, Homo sapien
atgcagaatgttgaagtatagggcc

SEQ ID NO: 2062571 - DNA, 25 bp, Homo sapien
tgcagaatgttgaagtatagggcca

SEQ ID NO: 2062572 - DNA, 25 bp, Homo sapien
gcagaatgttgaagtatagggccaa

SEQ ID NO: 2062573 - DNA, 25 bp, Homo sapien
ctggtagaggaggtaaggagtcctc

SEQ ID NO: 2062574 - DNA, 25 bp, Homo sapien
tggtagaggaggtaaggagtcctca

SEQ ID NO: 2062575 - DNA, 25 bp, Homo sapien
ggtagaggaggtaaggagtcctcag

SEQ ID NO: 2062576 - DNA, 25 bp, Homo sapien
tgagaacagaggactctcacactcc

SEQ ID NO: 2062577 - DNA, 25 bp, Homo sapien
cacactcccttggatttatcaacag

SEQ ID NO: 2062578 - DNA, 25 bp, Homo sapien
gatagcagcgcctagctcagtgaca

SEQ ID NO: 2062579 - DNA, 25 bp, Homo sapien
gaagtctctcgtgccttgagaacag

SEQ ID NO: 2062580 - DNA, 25 bp, Homo sapien
tcatttctgtggctctaggaaggtc

SEQ ID NO: 2062581 - DNA, 25 bp, Homo sapien
tctgtggctctaggaaggtcttcct

SEQ ID NO: 2062582 - DNA, 25 bp, Homo sapien
cctgagatgtacacacatgcggttc

SEQ ID NO: 2062583 - DNA, 25 bp, Homo sapien
cacacatgcggttcatttctgtggc

SEQ ID NO: 2062584 - DNA, 25 bp, Homo sapien
gatgagtgccagcagacatacgata

SEQ ID NO: 2062585 - DNA, 25 bp, Homo sapien
tgagtgccagcagacatacgatagg

SEQ ID NO: 2062586 - DNA, 25 bp, Homo sapien
gagtgccagcagacatacgatagga

SEQ ID NO: 2062587 - DNA, 25 bp, Homo sapien
agtgccagcagacatacgataggaa

SEQ ID NO: 2062588 - DNA, 25 bp, Homo sapien
tacattaaaaagcttatccgccatg

SEQ ID NO: 2062589 - DNA, 25 bp, Homo sapien
agcagtacattaaaaagcttatccg

SEQ ID NO: 2062590 - DNA, 25 bp, Homo sapien
cagtacattaaaaagcttatccgcc

SEQ ID NO: 2062591 - DNA, 25 bp, Homo sapien
agtacattaaaaagcttatccgcca

SEQ ID NO: 2062592 - DNA, 25 bp, Homo sapien
ggtggtcctcaaaaccaggatctta

SEQ ID NO: 2062593 - DNA, 25 bp, Homo sapien
taagattcctaagggccttctccac

SEQ ID NO: 2062594 - DNA, 25 bp, Homo sapien
gatcttaagattcctaagggccttc

SEQ ID NO: 2062595 - DNA, 25 bp, Homo sapien
ctctagggctgaagatctgacaggt

SEQ ID NO: 2062596 - DNA, 25 bp, Homo sapien
cctgaaagtgtctggcactgactgg

SEQ ID NO: 2062597 - DNA, 25 bp, Homo sapien
tttgacatcaccctgaaagtgtctg

SEQ ID NO: 2062598 - DNA, 25 bp, Homo sapien
tctggcactgactggtgctctttct

SEQ ID NO: 2062599 - DNA, 25 bp, Homo sapien
tctttctccatccagaaaaacctca

SEQ ID NO: 2062600 - DNA, 25 bp, Homo sapien
ggaggcgcgccctcgagagccggcg

SEQ ID NO: 2062601 - DNA, 25 bp, Homo sapien
gcgccctcacgccaggttgtctcct

SEQ ID NO: 2062602 - DNA, 25 bp, Homo sapien
ggttccctgttgtgggtatgcggga

SEQ ID NO: 2062603 - DNA, 25 bp, Homo sapien
aggaaaggacgcctcggaggcgcgc

SEQ ID NO: 2062604 - DNA, 25 bp, Homo sapien
acagtgacgaggaggacaccgcgga

SEQ ID NO: 2062605 - DNA, 25 bp, Homo sapien
gagaaggcgaccctgagtactaggt

SEQ ID NO: 2062606 - DNA, 25 bp, Homo sapien
tggcgctgcggaacctctaggagcc

SEQ ID NO: 2062607 - DNA, 25 bp, Homo sapien
aagttagggactccgaggacagtga

SEQ ID NO: 2062608 - DNA, 25 bp, Homo sapien
tggcgccatgttcccgggctggcct

SEQ ID NO: 2062609 - DNA, 25 bp, Homo sapien
cggcgcgacctttactcccgccgcg

SEQ ID NO: 2062610 - DNA, 25 bp, Homo sapien
tcgcccaccgacatggcccgggccg

SEQ ID NO: 2062611 - DNA, 25 bp, Homo sapien
ggcctggagtttctcgatcttctcg

SEQ ID NO: 2062612 - DNA, 25 bp, Homo sapien
aacaatgccacttggacctcggacc

SEQ ID NO: 2062613 - DNA, 25 bp, Homo sapien
cacccgtaactggttccaactgtct

SEQ ID NO: 2062614 - DNA, 25 bp, Homo sapien
tttccacctgcagataggcaatggt

SEQ ID NO: 2062615 - DNA, 25 bp, Homo sapien
tcggaccaacctgacattcatttgt

SEQ ID NO: 2062616 - DNA, 25 bp, Homo sapien
gttctggaccagcttgccgctgaaa

SEQ ID NO: 2062617 - DNA, 25 bp, Homo sapien
agcttgtctaataagtggcagcacg

SEQ ID NO: 2062618 - DNA, 25 bp, Homo sapien
cagcttgccgctgaaagcttgtcta

SEQ ID NO: 2062619 - DNA, 25 bp, Homo sapien
cagcacgtgggctgaatgaactgct

SEQ ID NO: 2062620 - DNA, 25 bp, Homo sapien
cagcctcgatcaggaattttgacct

SEQ ID NO: 2062621 - DNA, 25 bp, Homo sapien
gttcacagcctcgatcaggaatttt

SEQ ID NO: 2062622 - DNA, 25 bp, Homo sapien
agctcctgggagttcactatgttga

SEQ ID NO: 2062623 - DNA, 25 bp, Homo sapien
tggctgttcacagcctcgatcagga

SEQ ID NO: 2062624 - DNA, 25 bp, Homo sapien
ttgtctatggaggtactggcccaca

SEQ ID NO: 2062625 - DNA, 25 bp, Homo sapien
gattagtttgccagaacatttctgg

SEQ ID NO: 2062626 - DNA, 25 bp, Homo sapien
gtagggcatttgcacacaggacaga

SEQ ID NO: 2062627 - DNA, 25 bp, Homo sapien
catggccgcatcagagattagtttg

SEQ ID NO: 2062628 - DNA, 25 bp, Homo sapien
gaaaagatatattgatgctcacgga

SEQ ID NO: 2062629 - DNA, 25 bp, Homo sapien
aaagaagcatacaagcatactgtag

SEQ ID NO: 2062630 - DNA, 25 bp, Homo sapien
gtgaactccaaaataggcacaggtt

SEQ ID NO: 2062631 - DNA, 25 bp, Homo sapien
tttatccaggagttaaaagaagcat

SEQ ID NO: 2062632 - DNA, 25 bp, Homo sapien
gcatgccttgcgcatgggatgaatg

SEQ ID NO: 2062633 - DNA, 25 bp, Homo sapien
agcacttgatgggtggacaggacct

SEQ ID NO: 2062634 - DNA, 25 bp, Homo sapien
tgaatgttttgaggcagcacttgat

SEQ ID NO: 2062635 - DNA, 25 bp, Homo sapien
cgcatgggatgaatgttttgaggca

SEQ ID NO: 2062636 - DNA, 25 bp, Homo sapien
caaacacatcttgtttgctgctaca

SEQ ID NO: 2062637 - DNA, 25 bp, Homo sapien
gctggtaggcgatttgcatctgaag

SEQ ID NO: 2062638 - DNA, 25 bp, Homo sapien
caaactctcggcgtttctcttcctt

SEQ ID NO: 2062639 - DNA, 25 bp, Homo sapien
tgctacacctgcttcaaactctcgg

SEQ ID NO: 2062640 - DNA, 25 bp, Homo sapien
tgttccatagcacgttcttcctgtt

SEQ ID NO: 2062641 - DNA, 25 bp, Homo sapien
gtttctgttccatagcacgttcttc

SEQ ID NO: 2062642 - DNA, 25 bp, Homo sapien
ttccatagcacgttcttcctgttct

SEQ ID NO: 2062643 - DNA, 25 bp, Homo sapien
tctgttccatagcacgttcttcctg

SEQ ID NO: 2062644 - DNA, 25 bp, Homo sapien
cacatgacctcatccacaagctgtc

SEQ ID NO: 2062645 - DNA, 25 bp, Homo sapien
gttttcttgtacacatgacctcatc

SEQ ID NO: 2062646 - DNA, 25 bp, Homo sapien
gtgccaaatatttatggtatatctt

SEQ ID NO: 2062647 - DNA, 25 bp, Homo sapien
ggtatatcttctgttctcttatcat

SEQ ID NO: 2062648 - DNA, 25 bp, Homo sapien
ctgtgccaaatatttatggtatatc

SEQ ID NO: 2062649 - DNA, 25 bp, Homo sapien
ccaaatatttatggtatatcttctg

SEQ ID NO: 2062650 - DNA, 25 bp, Homo sapien
gaatcccttccagcaggtagcaggc

SEQ ID NO: 2062651 - DNA, 25 bp, Homo sapien
ggtagcaggcaccaaaaaaatgtct

SEQ ID NO: 2062652 - DNA, 25 bp, Homo sapien
gtaaggaatcccttccagcaggtag

SEQ ID NO: 2062653 - DNA, 25 bp, Homo sapien
tcagtaaggaatcccttccagcagg

SEQ ID NO: 2062654 - DNA, 25 bp, Homo sapien
gaagggccctttgcacgagcttcat

SEQ ID NO: 2062655 - DNA, 25 bp, Homo sapien
gagcttcatgttcaagtcctgttcg

SEQ ID NO: 2062656 - DNA, 25 bp, Homo sapien
tgtttctttagcatatcctgttcat

SEQ ID NO: 2062657 - DNA, 25 bp, Homo sapien
cctgttcgtctctgtattcctgctg

SEQ ID NO: 2062658 - DNA, 25 bp, Homo sapien
gataacaattcaacacggagctcct

SEQ ID NO: 2062659 - DNA, 25 bp, Homo sapien
gggcttctcgcttttccttggctaa

SEQ ID NO: 2062660 - DNA, 25 bp, Homo sapien
gatgctggtgatctgggcattcagc

SEQ ID NO: 2062661 - DNA, 25 bp, Homo sapien
tggctaatcggtcttcctcccagag

SEQ ID NO: 2062662 - DNA, 25 bp, Homo sapien
aagacaaaacccagcctttcgtgag

SEQ ID NO: 2062663 - DNA, 25 bp, Homo sapien
actgctctattgaggcacacatctg

SEQ ID NO: 2062664 - DNA, 25 bp, Homo sapien
tcagagacctggatgcaggccatcg

SEQ ID NO: 2062665 - DNA, 25 bp, Homo sapien
gtgaggcactgctctattgaggcac

SEQ ID NO: 2062666 - DNA, 25 bp, Homo sapien
ggttacctcaagcttaagacctaga

SEQ ID NO: 2062667 - DNA, 25 bp, Homo sapien
gcaaccagtagcaaagatgtccaaa

SEQ ID NO: 2062668 - DNA, 25 bp, Homo sapien
cagggtatgagtgcatgctttacac

SEQ ID NO: 2062669 - DNA, 25 bp, Homo sapien
tgaaatgactgtcaccaggagaaga

SEQ ID NO: 2062670 - DNA, 25 bp, Homo sapien
tctcctcaatggtttctttcttcaa

SEQ ID NO: 2062671 - DNA, 25 bp, Homo sapien
ctgaattgctggtctagcttttcag

SEQ ID NO: 2062672 - DNA, 25 bp, Homo sapien
tctcatcctatcttttttctcctca

SEQ ID NO: 2062673 - DNA, 25 bp, Homo sapien
ttcagccacaaaatcctgcctctct

SEQ ID NO: 2062674 - DNA, 25 bp, Homo sapien
ttttcttctaatgctaaaagctcac

SEQ ID NO: 2062675 - DNA, 25 bp, Homo sapien
ttctaatgctaaaagctcacgtagc

SEQ ID NO: 2062676 - DNA, 25 bp, Homo sapien
tttcttctaatgctaaaagctcacg

SEQ ID NO: 2062677 - DNA, 25 bp, Homo sapien
tcttctaatgctaaaagctcacgta

SEQ ID NO: 2062678 - DNA, 25 bp, Homo sapien
tcatcaaaatacaggctatcacaaa

SEQ ID NO: 2062679 - DNA, 25 bp, Homo sapien
tattaaccagcaatagctatggatt

SEQ ID NO: 2062680 - DNA, 25 bp, Homo sapien
tgaacaggtttcaatcaaaataatg

SEQ ID NO: 2062681 - DNA, 25 bp, Homo sapien
tataaacatctcagccatgatcctt

SEQ ID NO: 2062682 - DNA, 25 bp, Homo sapien
gatcccgctcacttgacttaatgga

SEQ ID NO: 2062683 - DNA, 25 bp, Homo sapien
tggtcccactcagctttcaagcgat

SEQ ID NO: 2062684 - DNA, 25 bp, Homo sapien
cattatgcttctgatggctgcgtcg

SEQ ID NO: 2062685 - DNA, 25 bp, Homo sapien
cttgattcttgctcgcacaaggctg

SEQ ID NO: 2062686 - DNA, 25 bp, Homo sapien
gctctaaaccatgctaaagtcagga

SEQ ID NO: 2062687 - DNA, 25 bp, Homo sapien
ctcagacaccggaggagcagatgca

SEQ ID NO: 2062688 - DNA, 25 bp, Homo sapien
taatagcacccaacaatggctcagc

SEQ ID NO: 2062689 - DNA, 25 bp, Homo sapien
tggttcccaacacaagtaatagcac

SEQ ID NO: 2062690 - DNA, 25 bp, Homo sapien
tcccgctgtacggtgccaaaccgct

SEQ ID NO: 2062691 - DNA, 25 bp, Homo sapien
taacctcccgctgtacggtgccaaa

SEQ ID NO: 2062692 - DNA, 25 bp, Homo sapien
cttaacctcccgctgtacggtgcca

SEQ ID NO: 2062693 - DNA, 25 bp, Homo sapien
ccgctgtacggtgccaaaccgctgg

SEQ ID NO: 2062694 - DNA, 25 bp, Homo sapien
ctgcgggacccgcttccgcgacgca

SEQ ID NO: 2062695 - DNA, 25 bp, Homo sapien
ggacccgcttccgcgacgcagaagt

SEQ ID NO: 2062696 - DNA, 25 bp, Homo sapien
gcgggacccgcttccgcgacgcaga

SEQ ID NO: 2062697 - DNA, 25 bp, Homo sapien
gggacccgcttccgcgacgcagaag

SEQ ID NO: 2062698 - DNA, 25 bp, Homo sapien
ctcgcgggattaggggccggtagag

SEQ ID NO: 2062699 - DNA, 25 bp, Homo sapien
cagaaaccagggcttagactcagga

SEQ ID NO: 2062700 - DNA, 25 bp, Homo sapien
gcgtggccgcaaatatcttacaggg

SEQ ID NO: 2062701 - DNA, 25 bp, Homo sapien
taaggcaaagctcagggagcctaag

SEQ ID NO: 2062702 - DNA, 25 bp, Homo sapien
gcctaagtgccttgtcaaaccaaat

SEQ ID NO: 2062703 - DNA, 25 bp, Homo sapien
ccagtaactggtttctgagaatcag

SEQ ID NO: 2062704 - DNA, 25 bp, Homo sapien
acacaaatcagggaaccaggacgga

SEQ ID NO: 2062705 - DNA, 25 bp, Homo sapien
agagtctgagggtcacagtggacca

SEQ ID NO: 2062706 - DNA, 25 bp, Homo sapien
tcacagtggaccagggtcaggatgt

SEQ ID NO: 2062707 - DNA, 25 bp, Homo sapien
agcacaggtggtaaccacagttgca

SEQ ID NO: 2062708 - DNA, 25 bp, Homo sapien
atttccagtcaagagcaaggtggta

SEQ ID NO: 2062709 - DNA, 25 bp, Homo sapien
tggtaaccacagttgcatttccagt

SEQ ID NO: 2062710 - DNA, 25 bp, Homo sapien
gttgcatttccagtcaagagcaagg

SEQ ID NO: 2062711 - DNA, 25 bp, Homo sapien
aagccaattaagaatgacactgtga

SEQ ID NO: 2062712 - DNA, 25 bp, Homo sapien
agccaattaagaatgacactgtgat

SEQ ID NO: 2062713 - DNA, 25 bp, Homo sapien
tgcaacaaatcagtacctacgtcaa

SEQ ID NO: 2062714 - DNA, 25 bp, Homo sapien
gccctcttaaggacgcaatttactg

SEQ ID NO: 2062715 - DNA, 25 bp, Homo sapien
taagtacaactaatgtgtatgccct

SEQ ID NO: 2062716 - DNA, 25 bp, Homo sapien
ggtgagcatagaacacttgtgagca

SEQ ID NO: 2062717 - DNA, 25 bp, Homo sapien
ttctataacggttctttcaattgca

SEQ ID NO: 2062718 - DNA, 25 bp, Homo sapien
ttgatcttcgagtccaacgggctcc

SEQ ID NO: 2062719 - DNA, 25 bp, Homo sapien
cgtctcggtttcctggagtgtccag

SEQ ID NO: 2062720 - DNA, 25 bp, Homo sapien
tactaagagtttacgtggcctgaaa

SEQ ID NO: 2062721 - DNA, 25 bp, Homo sapien
caatgaaaacgccttgggcccgaag

SEQ ID NO: 2062722 - DNA, 25 bp, Homo sapien
tacggcttgggaaaatcggcgcaga

SEQ ID NO: 2062723 - DNA, 25 bp, Homo sapien
atcctccgggaaggcggcaatgaaa

SEQ ID NO: 2062724 - DNA, 25 bp, Homo sapien
caaggttgtgcagcccaaagggcct

SEQ ID NO: 2062725 - DNA, 25 bp, Homo sapien
ccagcaggttgaaggtgtccggcca

SEQ ID NO: 2062726 - DNA, 25 bp, Homo sapien
ccccgcggcctaggtaagtgaatcg

SEQ ID NO: 2062727 - DNA, 25 bp, Homo sapien
ccaaacaaggttcacaaaagggctg

SEQ ID NO: 2062728 - DNA, 25 bp, Homo sapien
gaatcgctcagggtccttggaaaga

SEQ ID NO: 2062729 - DNA, 25 bp, Homo sapien
tattaagtacagtgcctaccacagg

SEQ ID NO: 2062730 - DNA, 25 bp, Homo sapien
ccttggtgaggctatgtttcccgga

SEQ ID NO: 2062731 - DNA, 25 bp, Homo sapien
cattttgcttgataaccggagggcg

SEQ ID NO: 2062732 - DNA, 25 bp, Homo sapien
caccaggcgttgttgcagttcacac

SEQ ID NO: 2062733 - DNA, 25 bp, Homo sapien
tcgtgggctccactgtgtcctcggt

SEQ ID NO: 2062734 - DNA, 25 bp, Homo sapien
aggacacccacatcatcgaagctgg

SEQ ID NO: 2062735 - DNA, 25 bp, Homo sapien
gagagactgacatgggttccaggcc

SEQ ID NO: 2062736 - DNA, 25 bp, Homo sapien
tcgtgggttccagctcgtgctcgtg

SEQ ID NO: 2062737 - DNA, 25 bp, Homo sapien
caatggcatgcggtcagatccctat

SEQ ID NO: 2062738 - DNA, 25 bp, Homo sapien
tcagcagaagcttaactcatgagtc

SEQ ID NO: 2062739 - DNA, 25 bp, Homo sapien
gcattagatgcaaagacaacagcct

SEQ ID NO: 2062740 - DNA, 25 bp, Homo sapien
tatcttagtggttctgctcctctga

SEQ ID NO: 2062741 - DNA, 25 bp, Homo sapien
aattacttaaagctgcagggctggg

SEQ ID NO: 2062742 - DNA, 25 bp, Homo sapien
tgaggaatcctatgcagcacctggg

SEQ ID NO: 2062743 - DNA, 25 bp, Homo sapien
caggagatgcacgttgtcaggaaag

SEQ ID NO: 2062744 - DNA, 25 bp, Homo sapien
tcaggaaagatgagccaggctggca

SEQ ID NO: 2062745 - DNA, 25 bp, Homo sapien
caccagctgttcgacattggacaaa

SEQ ID NO: 2062746 - DNA, 25 bp, Homo sapien
gagtctaggctctactaacaccagc

SEQ ID NO: 2062747 - DNA, 25 bp, Homo sapien
ttaaaagctgggtttgagtctaggc

SEQ ID NO: 2062748 - DNA, 25 bp, Homo sapien
caaggtcaccgaaaactcctgttag

SEQ ID NO: 2062749 - DNA, 25 bp, Homo sapien
tgttgtctctcataaagccagtctg

SEQ ID NO: 2062750 - DNA, 25 bp, Homo sapien
tccctgaggaagtatgtagagacac

SEQ ID NO: 2062751 - DNA, 25 bp, Homo sapien
gacactgccaggtctcatccagaag

SEQ ID NO: 2062752 - DNA, 25 bp, Homo sapien
ggtccagcccctagtagatcagtgt

SEQ ID NO: 2062753 - DNA, 25 bp, Homo sapien
gaatcctacagtctgtagaagcctc

SEQ ID NO: 2062754 - DNA, 25 bp, Homo sapien
cttgaatcctacagtctgtagaagc

SEQ ID NO: 2062755 - DNA, 25 bp, Homo sapien
tgaatcctacagtctgtagaagcct

SEQ ID NO: 2062756 - DNA, 25 bp, Homo sapien
aatcctacagtctgtagaagcctcc

SEQ ID NO: 2062757 - DNA, 25 bp, Homo sapien
tactgctttctagctccaggttttt

SEQ ID NO: 2062758 - DNA, 25 bp, Homo sapien
ctactgctttctagctccaggtttt

SEQ ID NO: 2062759 - DNA, 25 bp, Homo sapien
tgctttctagctccaggttttttaa

SEQ ID NO: 2062760 - DNA, 25 bp, Homo sapien
ctgctttctagctccaggtttttta

SEQ ID NO: 2062761 - DNA, 25 bp, Homo sapien
ggtttgctatgtgcgcaatggagca

SEQ ID NO: 2062762 - DNA, 25 bp, Homo sapien
tgaggtttgctatgtgcgcaatgga

SEQ ID NO: 2062763 - DNA, 25 bp, Homo sapien
agcaggtctgtatgttgaatgaggt

SEQ ID NO: 2062764 - DNA, 25 bp, Homo sapien
tatgtgcgcaatggagcattacaaa

SEQ ID NO: 2062765 - DNA, 25 bp, Homo sapien
tcaatgctgtgcacccaacaggaac

SEQ ID NO: 2062766 - DNA, 25 bp, Homo sapien
caaaggaatccaagtgcttaggcca

SEQ ID NO: 2062767 - DNA, 25 bp, Homo sapien
aatagtttacatcgccagtgtctgg

SEQ ID NO: 2062768 - DNA, 25 bp, Homo sapien
taagctccctgaaggtaggtatcct

SEQ ID NO: 2062769 - DNA, 25 bp, Homo sapien
gcaaccagactgctgtatctcggaa

SEQ ID NO: 2062770 - DNA, 25 bp, Homo sapien
cagactgctgtatctcggaagcggg

SEQ ID NO: 2062771 - DNA, 25 bp, Homo sapien
gaagcgggttccacccaggctgaaa

SEQ ID NO: 2062772 - DNA, 25 bp, Homo sapien
tgtatctcggaagcgggttccaccc

SEQ ID NO: 2062773 - DNA, 25 bp, Homo sapien
attaacaccataggtcaatgtggtt

SEQ ID NO: 2062774 - DNA, 25 bp, Homo sapien
taacaccataggtcaatgtggttgt

SEQ ID NO: 2062775 - DNA, 25 bp, Homo sapien
acaccataggtcaatgtggttgttg

SEQ ID NO: 2062776 - DNA, 25 bp, Homo sapien
caccataggtcaatgtggttgttgg

SEQ ID NO: 2062777 - DNA, 25 bp, Homo sapien
tctgggtcaggtggctcttgcttca

SEQ ID NO: 2062778 - DNA, 25 bp, Homo sapien
ttcctctggggccaatttggaggca

SEQ ID NO: 2062779 - DNA, 25 bp, Homo sapien
gaggcagaatcatccttgttctcct

SEQ ID NO: 2062780 - DNA, 25 bp, Homo sapien
aggtggctcttgcttcacagaaggc

SEQ ID NO: 2062781 - DNA, 25 bp, Homo sapien
ctggatagcaaagcgggcaaagcta

SEQ ID NO: 2062782 - DNA, 25 bp, Homo sapien
ctgttagctggatagcaaagcgggc

SEQ ID NO: 2062783 - DNA, 25 bp, Homo sapien
tagctggatagcaaagcgggcaaag

SEQ ID NO: 2062784 - DNA, 25 bp, Homo sapien
tagcaaagcgggcaaagctagttgc

SEQ ID NO: 2062785 - DNA, 25 bp, Homo sapien
ctgggtatccgccttctcttgcttc

SEQ ID NO: 2062786 - DNA, 25 bp, Homo sapien
gcaccaatacgggagaagtcaggac

SEQ ID NO: 2062787 - DNA, 25 bp, Homo sapien
gcagccaggcaccaatacgggagaa

SEQ ID NO: 2062788 - DNA, 25 bp, Homo sapien
tggtgtccactcgtcctgggtatcc

SEQ ID NO: 2062789 - DNA, 25 bp, Homo sapien
tggggtaaggccacaacccaactca

SEQ ID NO: 2062790 - DNA, 25 bp, Homo sapien
gtgagggaggattgcagcagacttg

SEQ ID NO: 2062791 - DNA, 25 bp, Homo sapien
tgagggaggattgcagcagacttgg

SEQ ID NO: 2062792 - DNA, 25 bp, Homo sapien
tctgtggaagctgcaacagggcccg

SEQ ID NO: 2062793 - DNA, 25 bp, Homo sapien
cctgcttcgttggagcctgggtatg

SEQ ID NO: 2062794 - DNA, 25 bp, Homo sapien
tcccgtaaaaacacaaggtcagtgc

SEQ ID NO: 2062795 - DNA, 25 bp, Homo sapien
agctgggcctctttcgacgacggta

SEQ ID NO: 2062796 - DNA, 25 bp, Homo sapien
agtccatccgccgtaggcaggctgc

SEQ ID NO: 2062797 - DNA, 25 bp, Homo sapien
cgcacttgcggttctgccggcggtt

SEQ ID NO: 2062798 - DNA, 25 bp, Homo sapien
ttgtcgcagcagaagtcgcagcggc

SEQ ID NO: 2062799 - DNA, 25 bp, Homo sapien
aaactgcaggcattggcgccaacga

SEQ ID NO: 2062800 - DNA, 25 bp, Homo sapien
gctcgtcctcgtctacacagtaata

SEQ ID NO: 2062801 - DNA, 25 bp, Homo sapien
gtaatagatgaactcggcaggtggc

SEQ ID NO: 2062802 - DNA, 25 bp, Homo sapien
gtcctcgtctacacagtaatagatg

SEQ ID NO: 2062803 - DNA, 25 bp, Homo sapien
tctacacagtaatagatgaactcgg

SEQ ID NO: 2062804 - DNA, 25 bp, Homo sapien
acagcctcccttgcggcgggcatgt

SEQ ID NO: 2062805 - DNA, 25 bp, Homo sapien
cagcctcccttgcggcgggcatgtt

SEQ ID NO: 2062806 - DNA, 25 bp, Homo sapien
tcacagcctcccttgcggcgggcat

SEQ ID NO: 2062807 - DNA, 25 bp, Homo sapien
agcctcccttgcggcgggcatgttt

SEQ ID NO: 2062808 - DNA, 25 bp, Homo sapien
gaaagatcagaaagggtggtttcag

SEQ ID NO: 2062809 - DNA, 25 bp, Homo sapien
tggtttcagcttggtggcaccaggc

SEQ ID NO: 2062810 - DNA, 25 bp, Homo sapien
gatcagaaagggtggtttcagcttg

SEQ ID NO: 2062811 - DNA, 25 bp, Homo sapien
gggtggtttcagcttggtggcacca

SEQ ID NO: 2062812 - DNA, 25 bp, Homo sapien
gagtgcgtcgctgacatctctgatg

SEQ ID NO: 2062813 - DNA, 25 bp, Homo sapien
acatctctgatgacggcgacgcagg

SEQ ID NO: 2062814 - DNA, 25 bp, Homo sapien
ccaggggagtgcgtcgctgacatct

SEQ ID NO: 2062815 - DNA, 25 bp, Homo sapien
gacatctctgatgacggcgacgcag

SEQ ID NO: 2062816 - DNA, 25 bp, Homo sapien
cactggcgcctgagaccagggcggg

SEQ ID NO: 2062817 - DNA, 25 bp, Homo sapien
tgggtctgacagccccggcatactc

SEQ ID NO: 2062818 - DNA, 25 bp, Homo sapien
gggcaatggccacaatcctcttggg

SEQ ID NO: 2062819 - DNA, 25 bp, Homo sapien
ccgtaggcaacgtcgctggacacat

SEQ ID NO: 2062820 - DNA, 25 bp, Homo sapien
ggccaggggccgaggtgagccttgg

SEQ ID NO: 2062821 - DNA, 25 bp, Homo sapien
gccaggggccgaggtgagccttggg

SEQ ID NO: 2062822 - DNA, 25 bp, Homo sapien
cctttccacaatccggaggcagcgt

SEQ ID NO: 2062823 - DNA, 25 bp, Homo sapien
tctccgttcacacttgcagaacagc

SEQ ID NO: 2062824 - DNA, 25 bp, Homo sapien
aacagccccgatgccacatcatggg

SEQ ID NO: 2062825 - DNA, 25 bp, Homo sapien
agaacagccccgatgccacatcatg

SEQ ID NO: 2062826 - DNA, 25 bp, Homo sapien
gcaggtggagcaggccccacagtct

SEQ ID NO: 2062827 - DNA, 25 bp, Homo sapien
ggagcaggccccacagtcttctgtt

SEQ ID NO: 2062828 - DNA, 25 bp, Homo sapien
agcaggccccacagtcttctgttac

SEQ ID NO: 2062829 - DNA, 25 bp, Homo sapien
aggtggagcaggccccacagtcttc

SEQ ID NO: 2062830 - DNA, 25 bp, Homo sapien
aggctgcacactccccacagcccac

SEQ ID NO: 2062831 - DNA, 25 bp, Homo sapien
ctgcacactccccacagcccacacg

SEQ ID NO: 2062832 - DNA, 25 bp, Homo sapien
ctggcaggctgcacactccccacag

SEQ ID NO: 2062833 - DNA, 25 bp, Homo sapien
tggcaggctgcacactccccacagc

SEQ ID NO: 2062834 - DNA, 25 bp, Homo sapien
ggtcctcccatgtctactgacccta

SEQ ID NO: 2062835 - DNA, 25 bp, Homo sapien
tactgaccctacatcagctggcatc

SEQ ID NO: 2062836 - DNA, 25 bp, Homo sapien
ccaggaatggtagggacgagatcac

SEQ ID NO: 2062837 - DNA, 25 bp, Homo sapien
gcctcatcaccgtatctgagaaggt

SEQ ID NO: 2062838 - DNA, 25 bp, Homo sapien
tggagagcaccctataaaatgactc

SEQ ID NO: 2062839 - DNA, 25 bp, Homo sapien
tcatcatcccttcagactctaccag

SEQ ID NO: 2062840 - DNA, 25 bp, Homo sapien
gagagcaccctataaaatgactctt

SEQ ID NO: 2062841 - DNA, 25 bp, Homo sapien
tatggagagcaccctataaaatgac

SEQ ID NO: 2062842 - DNA, 25 bp, Homo sapien
tcccggttgaaggcaattctctgtg

SEQ ID NO: 2062843 - DNA, 25 bp, Homo sapien
ttcccggttgaaggcaattctctgt

SEQ ID NO: 2062844 - DNA, 25 bp, Homo sapien
ctgttcccggttgaaggcaattctc

SEQ ID NO: 2062845 - DNA, 25 bp, Homo sapien
tgttcccggttgaaggcaattctct

SEQ ID NO: 2062846 - DNA, 25 bp, Homo sapien
cgacagtctttgcacaacgttttga

SEQ ID NO: 2062847 - DNA, 25 bp, Homo sapien
tgcacaacgttttgagccgctgcct

SEQ ID NO: 2062848 - DNA, 25 bp, Homo sapien
ttttgagccgctgcctttgggtgcc

SEQ ID NO: 2062849 - DNA, 25 bp, Homo sapien
tctttgcacaacgttttgagccgct

SEQ ID NO: 2062850 - DNA, 25 bp, Homo sapien
aggtgtggggctccaagagcacccc

SEQ ID NO: 2062851 - DNA, 25 bp, Homo sapien
ccatctggctcaccttagaccaaca

SEQ ID NO: 2062852 - DNA, 25 bp, Homo sapien
aatcacaaccctcacccatctggct

SEQ ID NO: 2062853 - DNA, 25 bp, Homo sapien
agagcacccccaatcacaaccctca

SEQ ID NO: 2062854 - DNA, 25 bp, Homo sapien
gggctgtgtcagtgtcagccttggt

SEQ ID NO: 2062855 - DNA, 25 bp, Homo sapien
agtgtcagccttggtctcatccctc

SEQ ID NO: 2062856 - DNA, 25 bp, Homo sapien
cagggaatgaagctggggctgtgtc

SEQ ID NO: 2062857 - DNA, 25 bp, Homo sapien
gtcagccttggtctcatccctcggg

SEQ ID NO: 2062858 - DNA, 25 bp, Homo sapien
ccaacctgacgtttccgagtcttgg

SEQ ID NO: 2062859 - DNA, 25 bp, Homo sapien
tccaacctgacgtttccgagtcttg

SEQ ID NO: 2062860 - DNA, 25 bp, Homo sapien
caacctgacgtttccgagtcttggc

SEQ ID NO: 2062861 - DNA, 25 bp, Homo sapien
tgctggcaaccgccacgggatgggc

SEQ ID NO: 2062862 - DNA, 25 bp, Homo sapien
ctaggtatctcatgttgtgaagtac

SEQ ID NO: 2062863 - DNA, 25 bp, Homo sapien
gggctggatagcacaagatgccttg

SEQ ID NO: 2062864 - DNA, 25 bp, Homo sapien
tgcttcggatcctgtctcctgtggg

SEQ ID NO: 2062865 - DNA, 25 bp, Homo sapien
acgcagggcccaggtatcgagtcag

SEQ ID NO: 2062866 - DNA, 25 bp, Homo sapien
tgaagtcgaagagggtgagatcaca

SEQ ID NO: 2062867 - DNA, 25 bp, Homo sapien
cataaatttaaccacaccatttgat

SEQ ID NO: 2062868 - DNA, 25 bp, Homo sapien
tttaccagaatcaggctctacccca

SEQ ID NO: 2062869 - DNA, 25 bp, Homo sapien
gattttaccagaatcaggctctacc

SEQ ID NO: 2062870 - DNA, 25 bp, Homo sapien
ataaatttaaccacaccatttgatt

SEQ ID NO: 2062871 - DNA, 25 bp, Homo sapien
tggcccctgacttgcgaaagacttc

SEQ ID NO: 2062872 - DNA, 25 bp, Homo sapien
gtgtctgagcgtccacaggtggccc

SEQ ID NO: 2062873 - DNA, 25 bp, Homo sapien
tgcgaaagacttcgcggcgcttcca

SEQ ID NO: 2062874 - DNA, 25 bp, Homo sapien
gtaataggtgtctgagcgtccacag

SEQ ID NO: 2062875 - DNA, 25 bp, Homo sapien
ggaggccacaggaagcagcagtagc

SEQ ID NO: 2062876 - DNA, 25 bp, Homo sapien
ctcagtgttacaacctcgacttcct

SEQ ID NO: 2062877 - DNA, 25 bp, Homo sapien
tcgacttcctctgcgagacacaact

SEQ ID NO: 2062878 - DNA, 25 bp, Homo sapien
gacttcctctgcgagacacaactgc

SEQ ID NO: 2062879 - DNA, 25 bp, Homo sapien
tacaacctcgacttcctctgcgaga

SEQ ID NO: 2062880 - DNA, 25 bp, Homo sapien
tctcctccttactgttctcatcctc

SEQ ID NO: 2062881 - DNA, 25 bp, Homo sapien
cctccttactgttctcatcctccat

SEQ ID NO: 2062882 - DNA, 25 bp, Homo sapien
ttctcctccttactgttctcatcct

SEQ ID NO: 2062883 - DNA, 25 bp, Homo sapien
tcctccttactgttctcatcctcca

SEQ ID NO: 2062884 - DNA, 25 bp, Homo sapien
ccgtcctcagcctaaatccccccat

SEQ ID NO: 2062885 - DNA, 25 bp, Homo sapien
ctgtcagagttcagagctgcattcc

SEQ ID NO: 2062886 - DNA, 25 bp, Homo sapien
gctgcattccttcccgtcctcagcc

SEQ ID NO: 2062887 - DNA, 25 bp, Homo sapien
tgtcagagttcagagctgcattcct

SEQ ID NO: 2062888 - DNA, 25 bp, Homo sapien
tcagtattccgacgccgccattcct

SEQ ID NO: 2062889 - DNA, 25 bp, Homo sapien
ccccgtcagcgttctgagccacaat

SEQ ID NO: 2062890 - DNA, 25 bp, Homo sapien
cattcctccccgtcagcgttctgag

SEQ ID NO: 2062891 - DNA, 25 bp, Homo sapien
attcctcccccttatcggcctgagg

SEQ ID NO: 2062892 - DNA, 25 bp, Homo sapien
gctgttcgttgctcccggaaccgga

SEQ ID NO: 2062893 - DNA, 25 bp, Homo sapien
tctaggcccgtggacccatggcgag

SEQ ID NO: 2062894 - DNA, 25 bp, Homo sapien
cagtttggcaccaggccggtatctt

SEQ ID NO: 2062895 - DNA, 25 bp, Homo sapien
tcctctgaagcggtagctgtcgcct

SEQ ID NO: 2062896 - DNA, 25 bp, Homo sapien
ggccctgccggcgctctcctctccc

SEQ ID NO: 2062897 - DNA, 25 bp, Homo sapien
cctggccctgccggcgctctcctct

SEQ ID NO: 2062898 - DNA, 25 bp, Homo sapien
ccctgccggcgctctcctctcccac

SEQ ID NO: 2062899 - DNA, 25 bp, Homo sapien
tccctggccctgccggcgctctcct

SEQ ID NO: 2062900 - DNA, 25 bp, Homo sapien
ttcgtgggtccctccgaacatcaac

SEQ ID NO: 2062901 - DNA, 25 bp, Homo sapien
gtctatcctgtgttcgtgggtccct

SEQ ID NO: 2062902 - DNA, 25 bp, Homo sapien
gttcgtgggtccctccgaacatcaa

SEQ ID NO: 2062903 - DNA, 25 bp, Homo sapien
tctcgctggggtctatcctgtgttc

SEQ ID NO: 2062904 - DNA, 25 bp, Homo sapien
gcaaggatgagtggactccgcagcc

SEQ ID NO: 2062905 - DNA, 25 bp, Homo sapien
gaggaggcaaggatgagtggactcc

SEQ ID NO: 2062906 - DNA, 25 bp, Homo sapien
aggatgagtggactccgcagcccca

SEQ ID NO: 2062907 - DNA, 25 bp, Homo sapien
taacaaaacccagggagaggaggca

SEQ ID NO: 2062908 - DNA, 25 bp, Homo sapien
agaaccggagaaacagatgagtgga

SEQ ID NO: 2062909 - DNA, 25 bp, Homo sapien
ctctgataaaggcagatgggcggtc

SEQ ID NO: 2062910 - DNA, 25 bp, Homo sapien
gcggtcaaccggtggatgggcacag

SEQ ID NO: 2062911 - DNA, 25 bp, Homo sapien
gatgagtggaggaacggacacacgg

SEQ ID NO: 2062912 - DNA, 25 bp, Homo sapien
tggaatgcagggtgtaaggggtccg

SEQ ID NO: 2062913 - DNA, 25 bp, Homo sapien
ctggaatgcagggtgtaaggggtcc

SEQ ID NO: 2062914 - DNA, 25 bp, Homo sapien
gctgtgcgcacattgcgctcctgct

SEQ ID NO: 2062915 - DNA, 25 bp, Homo sapien
atcagggccagcaatcccgcgcggt

SEQ ID NO: 2062916 - DNA, 25 bp, Homo sapien
ggctgtgcgcacattgcgctcctgc

SEQ ID NO: 2062917 - DNA, 25 bp, Homo sapien
aatcccgcgcggtttgtcatggctg

SEQ ID NO: 2062918 - DNA, 25 bp, Homo sapien
gcaccaaaaccgcacagaaacctac

SEQ ID NO: 2062919 - DNA, 25 bp, Homo sapien
cacatgcagcaccaaaaccgcacag

SEQ ID NO: 2062920 - DNA, 25 bp, Homo sapien
atgcagcaccaaaaccgcacagaaa

SEQ ID NO: 2062921 - DNA, 25 bp, Homo sapien
tgcagcaccaaaaccgcacagaaac

SEQ ID NO: 2062922 - DNA, 25 bp, Homo sapien
taatggcgattgcactggcgcttgg

SEQ ID NO: 2062923 - DNA, 25 bp, Homo sapien
ggcacccgcatacctcgtcagctgg

SEQ ID NO: 2062924 - DNA, 25 bp, Homo sapien
agctcaaagacatcacgtacaaggg

SEQ ID NO: 2062925 - DNA, 25 bp, Homo sapien
ttctcccagcagtaatggcgattgc

SEQ ID NO: 2062926 - DNA, 25 bp, Homo sapien
tgaatagcggtgataagggagaata

SEQ ID NO: 2062927 - DNA, 25 bp, Homo sapien
cagggaacggtgaggaggcatggaa

SEQ ID NO: 2062928 - DNA, 25 bp, Homo sapien
ggatgaatagcggtgataagggaga

SEQ ID NO: 2062929 - DNA, 25 bp, Homo sapien
agaatggagggttcagggaacggtg

SEQ ID NO: 2062930 - DNA, 25 bp, Homo sapien
cctggagccgcttacagtatgtttt

SEQ ID NO: 2062931 - DNA, 25 bp, Homo sapien
ggagccgcttacagtatgttttgct

SEQ ID NO: 2062932 - DNA, 25 bp, Homo sapien
cacctggagccgcttacagtatgtt

SEQ ID NO: 2062933 - DNA, 25 bp, Homo sapien
agcacctggagccgcttacagtatg

SEQ ID NO: 2062934 - DNA, 25 bp, Homo sapien
ctgaggattatacacatcacagaag

SEQ ID NO: 2062935 - DNA, 25 bp, Homo sapien
cacatcacagaagagtcgtgtggcc

SEQ ID NO: 2062936 - DNA, 25 bp, Homo sapien
atacacatcacagaagagtcgtgtg

SEQ ID NO: 2062937 - DNA, 25 bp, Homo sapien
tgaggattatacacatcacagaaga

SEQ ID NO: 2062938 - DNA, 25 bp, Homo sapien
ctcactgcgtggcaccctcacttac

SEQ ID NO: 2062939 - DNA, 25 bp, Homo sapien
cccacctctcactgcgtggcaccct

SEQ ID NO: 2062940 - DNA, 25 bp, Homo sapien
tctgtcctggctggttgcccgtatc

SEQ ID NO: 2062941 - DNA, 25 bp, Homo sapien
tcctggctggttgcccgtatcctgc

SEQ ID NO: 2062942 - DNA, 25 bp, Homo sapien
ccttcaatgcgtgtggggtacatgg

SEQ ID NO: 2062943 - DNA, 25 bp, Homo sapien
catggacccaaaggacgtctggctc

SEQ ID NO: 2062944 - DNA, 25 bp, Homo sapien
ggtacatggacccaaaggacgtctg

SEQ ID NO: 2062945 - DNA, 25 bp, Homo sapien
tgtggggtacatggacccaaaggac

SEQ ID NO: 2062946 - DNA, 25 bp, Homo sapien
tggagggaactgtggatgtgcgctg

SEQ ID NO: 2062947 - DNA, 25 bp, Homo sapien
atggtccgccccctcagtctgacac

SEQ ID NO: 2062948 - DNA, 25 bp, Homo sapien
cactgatgttcccacatggtccgcc

SEQ ID NO: 2062949 - DNA, 25 bp, Homo sapien
tgtggatgtgcgctgcatgccctcc

SEQ ID NO: 2062950 - DNA, 25 bp, Homo sapien
tggcgcaaggcaacacgtgggttga

SEQ ID NO: 2062951 - DNA, 25 bp, Homo sapien
aggaaacacagaagatctgcaggtc

SEQ ID NO: 2062952 - DNA, 25 bp, Homo sapien
tagcagcgctccatgtggcgcaagg

SEQ ID NO: 2062953 - DNA, 25 bp, Homo sapien
agaagatctgcaggtctgtgtcatc

SEQ ID NO: 2062954 - DNA, 25 bp, Homo sapien
gaaggacaaagtacaggccctgctc

SEQ ID NO: 2062955 - DNA, 25 bp, Homo sapien
ggaaggacaaagtacaggccctgct

SEQ ID NO: 2062956 - DNA, 25 bp, Homo sapien
aggacaaagtacaggccctgctctg

SEQ ID NO: 2062957 - DNA, 25 bp, Homo sapien
tgggaaggacaaagtacaggccctg

SEQ ID NO: 2062958 - DNA, 25 bp, Homo sapien
gaatgcgttcgagcagcttcttgcc

SEQ ID NO: 2062959 - DNA, 25 bp, Homo sapien
tttcctgaaggcgagtgcgggcact

SEQ ID NO: 2062960 - DNA, 25 bp, Homo sapien
tgctgcttggcacgtagaatgatgg

SEQ ID NO: 2062961 - DNA, 25 bp, Homo sapien
tggcctcaagctcatggaatcggcg

SEQ ID NO: 2062962 - DNA, 25 bp, Homo sapien
tctgcttctgccgatgccgcttgta

SEQ ID NO: 2062963 - DNA, 25 bp, Homo sapien
tccatttatccttgtgcttctgctt

SEQ ID NO: 2062964 - DNA, 25 bp, Homo sapien
cagtgacgcagggtccttggcatca

SEQ ID NO: 2062965 - DNA, 25 bp, Homo sapien
gatgccgcttgtatcgctcctcctt

SEQ ID NO: 2062966 - DNA, 25 bp, Homo sapien
agacccttgctccattctagccctt

SEQ ID NO: 2062967 - DNA, 25 bp, Homo sapien
gttgagcaagacaagtcaggtcagg

SEQ ID NO: 2062968 - DNA, 25 bp, Homo sapien
ccattctagccctttctggctcttg

SEQ ID NO: 2062969 - DNA, 25 bp, Homo sapien
ctgttgagcaagacaagtcaggtca

SEQ ID NO: 2062970 - DNA, 25 bp, Homo sapien
cagacttcttctcccgacgcttcac

SEQ ID NO: 2062971 - DNA, 25 bp, Homo sapien
tcagacttcttctcccgacgcttca

SEQ ID NO: 2062972 - DNA, 25 bp, Homo sapien
gaatggggactcttctgtgtcgctc

SEQ ID NO: 2062973 - DNA, 25 bp, Homo sapien
aggaatggggactcttctgtgtcgc

SEQ ID NO: 2062974 - DNA, 25 bp, Homo sapien
ggaatggggactcttctgtgtcgct

SEQ ID NO: 2062975 - DNA, 25 bp, Homo sapien
caggaatggggactcttctgtgtcg

SEQ ID NO: 2062976 - DNA, 25 bp, Homo sapien
ggccatggtcatcaaaggcccctgc

SEQ ID NO: 2062977 - DNA, 25 bp, Homo sapien
gccatggtcatcaaaggcccctgca

SEQ ID NO: 2062978 - DNA, 25 bp, Homo sapien
ccatggtcatcaaaggcccctgcac

SEQ ID NO: 2062979 - DNA, 25 bp, Homo sapien
caggccatggtcatcaaaggcccct

SEQ ID NO: 2062980 - DNA, 25 bp, Homo sapien
aggtcaggatccagaggtaggtcct

SEQ ID NO: 2062981 - DNA, 25 bp, Homo sapien
cagaggtaggtcctcatctgagagt

SEQ ID NO: 2062982 - DNA, 25 bp, Homo sapien
ggatgcgccctaacttctgtgatgg

SEQ ID NO: 2062983 - DNA, 25 bp, Homo sapien
ccttgactgttgatgacgccactgc

SEQ ID NO: 2062984 - DNA, 25 bp, Homo sapien
actctgagggcgtcactggtgagag

SEQ ID NO: 2062985 - DNA, 25 bp, Homo sapien
agggactctgagggcgtcactggtg

SEQ ID NO: 2062986 - DNA, 25 bp, Homo sapien
gactctgagggcgtcactggtgaga

SEQ ID NO: 2062987 - DNA, 25 bp, Homo sapien
gggactctgagggcgtcactggtga

SEQ ID NO: 2062988 - DNA, 25 bp, Homo sapien
ccctgaccgccctgcccgcatgccc

SEQ ID NO: 2062989 - DNA, 25 bp, Homo sapien
gaatctcaggactggccctgaccgc

SEQ ID NO: 2062990 - DNA, 25 bp, Homo sapien
tgcagggcagaatctcaggactggc

SEQ ID NO: 2062991 - DNA, 25 bp, Homo sapien
agggcagaatctcaggactggccct

SEQ ID NO: 2062992 - DNA, 25 bp, Homo sapien
cgaggaagggaagtacttgtacgat

SEQ ID NO: 2062993 - DNA, 25 bp, Homo sapien
gatggagggcggccttgccctagcc

SEQ ID NO: 2062994 - DNA, 25 bp, Homo sapien
gtggatggagggcggccttgcccta

SEQ ID NO: 2062995 - DNA, 25 bp, Homo sapien
ggatggagggcggccttgccctagc

SEQ ID NO: 2062996 - DNA, 25 bp, Homo sapien
aggtggatggagggcggccttgccc

SEQ ID NO: 2062997 - DNA, 25 bp, Homo sapien
tggcgcagccggcacttctgccgga

SEQ ID NO: 2062998 - DNA, 25 bp, Homo sapien
ttctgccggatcttgttggggcccc

SEQ ID NO: 2062999 - DNA, 25 bp, Homo sapien
gccggcacttctgccggatcttgtt

SEQ ID NO: 2063000 - DNA, 25 bp, Homo sapien
gcagccggcacttctgccggatctt

SEQ ID NO: 2063001 - DNA, 25 bp, Homo sapien
tcatgtcccgacagaaatcacagtg

SEQ ID NO: 2063002 - DNA, 25 bp, Homo sapien
cttcatgtcccgacagaaatcacag

SEQ ID NO: 2063003 - DNA, 25 bp, Homo sapien
ttcatgtcccgacagaaatcacagt

SEQ ID NO: 2063004 - DNA, 25 bp, Homo sapien
gcgggctgaccgtttgatctgctgc

SEQ ID NO: 2063005 - DNA, 25 bp, Homo sapien
catgcgggctgaccgtttgatctgc

SEQ ID NO: 2063006 - DNA, 25 bp, Homo sapien
cacacatgcgggctgaccgtttgat

SEQ ID NO: 2063007 - DNA, 25 bp, Homo sapien
tcaccacacatgcgggctgaccgtt

SEQ ID NO: 2063008 - DNA, 25 bp, Homo sapien
gaaacggaaccactttacacatcca

SEQ ID NO: 2063009 - DNA, 25 bp, Homo sapien
caggcagggctgaaacggaaccact

SEQ ID NO: 2063010 - DNA, 25 bp, Homo sapien
gcagggctgaaacggaaccacttta

SEQ ID NO: 2063011 - DNA, 25 bp, Homo sapien
ggctgaaacggaaccactttacaca

SEQ ID NO: 2063012 - DNA, 25 bp, Homo sapien
tctggatcagggacaggcctcttgc

SEQ ID NO: 2063013 - DNA, 25 bp, Homo sapien
gccgatagcgaatctctagcttggg

SEQ ID NO: 2063014 - DNA, 25 bp, Homo sapien
gctcccgtgacttcttgtgccgata

SEQ ID NO: 2063015 - DNA, 25 bp, Homo sapien
aagcagagccccgagcaagcatggc

SEQ ID NO: 2063016 - DNA, 25 bp, Homo sapien
ccaaagtgagtgagcactggatggc

SEQ ID NO: 2063017 - DNA, 25 bp, Homo sapien
cagagagtagggccaaagtgagtga

SEQ ID NO: 2063018 - DNA, 25 bp, Homo sapien
agagagtagggccaaagtgagtgag

SEQ ID NO: 2063019 - DNA, 25 bp, Homo sapien
aagtgagtgagcactggatggcttg

SEQ ID NO: 2063020 - DNA, 25 bp, Homo sapien
cattccagctcaccacagacgtgta

SEQ ID NO: 2063021 - DNA, 25 bp, Homo sapien
tctattactcacaatggagccccat

SEQ ID NO: 2063022 - DNA, 25 bp, Homo sapien
gacgtgtatcactaatccccataac

SEQ ID NO: 2063023 - DNA, 25 bp, Homo sapien
gcctcttcccgtgggatcttctatt

SEQ ID NO: 2063024 - DNA, 25 bp, Homo sapien
ttccctgtccatccatggccctcac

SEQ ID NO: 2063025 - DNA, 25 bp, Homo sapien
gccttccctgtccatccatggccct

SEQ ID NO: 2063026 - DNA, 25 bp, Homo sapien
cttccctgtccatccatggccctca

SEQ ID NO: 2063027 - DNA, 25 bp, Homo sapien
ctgccttccctgtccatccatggcc

SEQ ID NO: 2063028 - DNA, 25 bp, Homo sapien
cccatggaaccactcattgcagttg

SEQ ID NO: 2063029 - DNA, 25 bp, Homo sapien
tgatccggatgcagtccccatggaa

SEQ ID NO: 2063030 - DNA, 25 bp, Homo sapien
catcttctcagtgatccggatgcag

SEQ ID NO: 2063031 - DNA, 25 bp, Homo sapien
gacagtaccactcccggatggcctt

SEQ ID NO: 2063032 - DNA, 25 bp, Homo sapien
tggaggctctgggtctgaaccatct

SEQ ID NO: 2063033 - DNA, 25 bp, Homo sapien
tccggtttgcggcagatgcagtaga

SEQ ID NO: 2063034 - DNA, 25 bp, Homo sapien
gatgggcgcattctccccattctcg

SEQ ID NO: 2063035 - DNA, 25 bp, Homo sapien
tcatgaagcagttgatgtccggttt

SEQ ID NO: 2063036 - DNA, 25 bp, Homo sapien
tacggatccttaagcagcccccacc

SEQ ID NO: 2063037 - DNA, 25 bp, Homo sapien
acggatccttaagcagcccccaccg

SEQ ID NO: 2063038 - DNA, 25 bp, Homo sapien
cggatccttaagcagcccccaccgt

SEQ ID NO: 2063039 - DNA, 25 bp, Homo sapien
ttacggatccttaagcagcccccac

SEQ ID NO: 2063040 - DNA, 25 bp, Homo sapien
cattacaactccaccgtggtcagca

SEQ ID NO: 2063041 - DNA, 25 bp, Homo sapien
tgacatcctattactctgctccata

SEQ ID NO: 2063042 - DNA, 25 bp, Homo sapien
gcctgcagatttcacatcggggccc

SEQ ID NO: 2063043 - DNA, 25 bp, Homo sapien
agggatccccactctgcctgcagat

SEQ ID NO: 2063044 - DNA, 25 bp, Homo sapien
cacactcgctaatgggtcatggcga

SEQ ID NO: 2063045 - DNA, 25 bp, Homo sapien
cgtccacactcgctaatgggtcatg

SEQ ID NO: 2063046 - DNA, 25 bp, Homo sapien
gctaatgggtcatggcgaccctcca

SEQ ID NO: 2063047 - DNA, 25 bp, Homo sapien
cctgcgtccacactcgctaatgggt

SEQ ID NO: 2063048 - DNA, 25 bp, Homo sapien
agtcgcggctgtccacggatacccg

SEQ ID NO: 2063049 - DNA, 25 bp, Homo sapien
gcgtaactcactgcggacttcccat

SEQ ID NO: 2063050 - DNA, 25 bp, Homo sapien
tgtccacggatacccggacacggac

SEQ ID NO: 2063051 - DNA, 25 bp, Homo sapien
gtttatctcatagacccacctggca

SEQ ID NO: 2063052 - DNA, 25 bp, Homo sapien
ccttacaacccgcttatccctctgc

SEQ ID NO: 2063053 - DNA, 25 bp, Homo sapien
cccgatcatggtttcccacggaact

SEQ ID NO: 2063054 - DNA, 25 bp, Homo sapien
tggtttcccacggaactgccacacg

SEQ ID NO: 2063055 - DNA, 25 bp, Homo sapien
gcttatccctctgccctaagaaccc

SEQ ID NO: 2063056 - DNA, 25 bp, Homo sapien
agtccacagactccggttatggctc

SEQ ID NO: 2063057 - DNA, 25 bp, Homo sapien
catcattctgcccatagactcccgc

SEQ ID NO: 2063058 - DNA, 25 bp, Homo sapien
agactcccgccgttcagtccacaga

SEQ ID NO: 2063059 - DNA, 25 bp, Homo sapien
agtcggccgacagaccccactgttg

SEQ ID NO: 2063060 - DNA, 25 bp, Homo sapien
cactcggcggcgtcccaggcggttg

SEQ ID NO: 2063061 - DNA, 25 bp, Homo sapien
gacccgcgaacctgcacagaccact

SEQ ID NO: 2063062 - DNA, 25 bp, Homo sapien
cgcccacaactacttccgcttctag

SEQ ID NO: 2063063 - DNA, 25 bp, Homo sapien
ggcggttgcaaaggcgcccacaact

SEQ ID NO: 2063064 - DNA, 25 bp, Homo sapien
ggcagcgtactcctattgcgcaggc

SEQ ID NO: 2063065 - DNA, 25 bp, Homo sapien
cgtatccgtatggtggccgaatcca

SEQ ID NO: 2063066 - DNA, 25 bp, Homo sapien
tatgttcgccgggaacatggccgcg

SEQ ID NO: 2063067 - DNA, 25 bp, Homo sapien
tgcaaaccagtaggtggccggccta

SEQ ID NO: 2063068 - DNA, 25 bp, Homo sapien
tcagtagagtccgtacggcggctgc

SEQ ID NO: 2063069 - DNA, 25 bp, Homo sapien
tacggcggctgcttgtacggcctcg

SEQ ID NO: 2063070 - DNA, 25 bp, Homo sapien
tacggcctcgacgtacaggcaacat

SEQ ID NO: 2063071 - DNA, 25 bp, Homo sapien
cttgtcagtagagtccgtacggcgg

SEQ ID NO: 2063072 - DNA, 25 bp, Homo sapien
gacttcctcatagatgccgtcatct

SEQ ID NO: 2063073 - DNA, 25 bp, Homo sapien
cctactgcgtgacttcctcatagat

SEQ ID NO: 2063074 - DNA, 25 bp, Homo sapien
ggctgcacctactgcgtgacttcct

SEQ ID NO: 2063075 - DNA, 25 bp, Homo sapien
gccgtcatcttggaatccgattccg

SEQ ID NO: 2063076 - DNA, 25 bp, Homo sapien
cgtttgtcaggcagagaggttcaca

SEQ ID NO: 2063077 - DNA, 25 bp, Homo sapien
gaattccgtacgttcctaggcgaca

SEQ ID NO: 2063078 - DNA, 25 bp, Homo sapien
catatgacggcgacctaattgcgga

SEQ ID NO: 2063079 - DNA, 25 bp, Homo sapien
taattgcggattcttcacgggcgcc

SEQ ID NO: 2063080 - DNA, 25 bp, Homo sapien
tggcctcccagtcattttttagaac

SEQ ID NO: 2063081 - DNA, 25 bp, Homo sapien
gaaactgcaccatttagataccact

SEQ ID NO: 2063082 - DNA, 25 bp, Homo sapien
tggttttagtataatcacagacttg

SEQ ID NO: 2063083 - DNA, 25 bp, Homo sapien
tttagaactctttcactacctccaa

SEQ ID NO: 2063084 - DNA, 25 bp, Homo sapien
caatacttgtaatctgtcttctgga

SEQ ID NO: 2063085 - DNA, 25 bp, Homo sapien
tcctgccagcaagttatgaaagttg

SEQ ID NO: 2063086 - DNA, 25 bp, Homo sapien
tgttttactgactgaagaaactgcc

SEQ ID NO: 2063087 - DNA, 25 bp, Homo sapien
taatgactgttatggattttgcagc

SEQ ID NO: 2063088 - DNA, 25 bp, Homo sapien
gagctcagcccactagaagaaatgt

SEQ ID NO: 2063089 - DNA, 25 bp, Homo sapien
tatgtctgcagccatttaagcctag

SEQ ID NO: 2063090 - DNA, 25 bp, Homo sapien
cctgttaaattagaacgggtggcag

SEQ ID NO: 2063091 - DNA, 25 bp, Homo sapien
tccatctcttaaaaaggagggagct

SEQ ID NO: 2063092 - DNA, 25 bp, Homo sapien
gcatttcagaaagggagctgccatc

SEQ ID NO: 2063093 - DNA, 25 bp, Homo sapien
atttcagaaagggagctgccatcac

SEQ ID NO: 2063094 - DNA, 25 bp, Homo sapien
tcagcatttcagaaagggagctgcc

SEQ ID NO: 2063095 - DNA, 25 bp, Homo sapien
ttcagaaagggagctgccatcaccc

SEQ ID NO: 2063096 - DNA, 25 bp, Homo sapien
caagtgtgagttcactgttacgaca

SEQ ID NO: 2063097 - DNA, 25 bp, Homo sapien
tgtgattctactttcataagcaatg

SEQ ID NO: 2063098 - DNA, 25 bp, Homo sapien
aaggatgtcgttgccaattctgaag

SEQ ID NO: 2063099 - DNA, 25 bp, Homo sapien
actgcatcaccattgtgattctact

SEQ ID NO: 2063100 - DNA, 25 bp, Homo sapien
tccacagcagcttcggaattggcaa

SEQ ID NO: 2063101 - DNA, 25 bp, Homo sapien
gaattggcaaccacatcctttgtca

SEQ ID NO: 2063102 - DNA, 25 bp, Homo sapien
gaactcacacttgtcactgcttatg

SEQ ID NO: 2063103 - DNA, 25 bp, Homo sapien
tcacagtggtgatgttcctgcccag

SEQ ID NO: 2063104 - DNA, 25 bp, Homo sapien
ctagtgttttgagctggaagtgatc

SEQ ID NO: 2063105 - DNA, 25 bp, Homo sapien
agaacctagtgttttgagctggaag

SEQ ID NO: 2063106 - DNA, 25 bp, Homo sapien
aacctagtgttttgagctggaagtg

SEQ ID NO: 2063107 - DNA, 25 bp, Homo sapien
ctcagaaaccatccacttttgggct

SEQ ID NO: 2063108 - DNA, 25 bp, Homo sapien
tgagcctgcgcttcggaagcatgga

SEQ ID NO: 2063109 - DNA, 25 bp, Homo sapien
aagcatggatgtgcgcctgcgctgc

SEQ ID NO: 2063110 - DNA, 25 bp, Homo sapien
ctggttagcgcggaaagagcacctc

SEQ ID NO: 2063111 - DNA, 25 bp, Homo sapien
tgaaatctccccagactggttagcg

SEQ ID NO: 2063112 - DNA, 25 bp, Homo sapien
ggcggtttgaattttgcttacagag

SEQ ID NO: 2063113 - DNA, 25 bp, Homo sapien
tgaattttgcttacagagtcccgtc

SEQ ID NO: 2063114 - DNA, 25 bp, Homo sapien
gcgcggcgggcggtttgaattttgc

SEQ ID NO: 2063115 - DNA, 25 bp, Homo sapien
ttttgcttacagagtcccgtctcac

SEQ ID NO: 2063116 - DNA, 25 bp, Homo sapien
gacccagcggcgagtagccttttgc

SEQ ID NO: 2063117 - DNA, 25 bp, Homo sapien
cttttgctcccggacggacttgagg

SEQ ID NO: 2063118 - DNA, 25 bp, Homo sapien
tccaacggagactgcggtatccgca

SEQ ID NO: 2063119 - DNA, 25 bp, Homo sapien
ctgcctttggaagcgcccgaggtag

SEQ ID NO: 2063120 - DNA, 25 bp, Homo sapien
tggatgctttagaccctccccttct

SEQ ID NO: 2063121 - DNA, 25 bp, Homo sapien
tgggttggatgctttagaccctccc

SEQ ID NO: 2063122 - DNA, 25 bp, Homo sapien
ggaggctgggttggatgctttagac

SEQ ID NO: 2063123 - DNA, 25 bp, Homo sapien
gctgggttggatgctttagaccctc

SEQ ID NO: 2063124 - DNA, 25 bp, Homo sapien
gaatattttacgacactgccggagg

SEQ ID NO: 2063125 - DNA, 25 bp, Homo sapien
tatgttataacctgagtcccttgtg

SEQ ID NO: 2063126 - DNA, 25 bp, Homo sapien
tgtgaacttttgaacataccaacag

SEQ ID NO: 2063127 - DNA, 25 bp, Homo sapien
gacaagaagtttcacgtgttactga

SEQ ID NO: 2063128 - DNA, 25 bp, Homo sapien
cgatggcatttcagtctataggtaa

SEQ ID NO: 2063129 - DNA, 25 bp, Homo sapien
agtgtctaaattccatcgatggcat

SEQ ID NO: 2063130 - DNA, 25 bp, Homo sapien
aaaagatcaagctgatgaggttagg

SEQ ID NO: 2063131 - DNA, 25 bp, Homo sapien
tggacttaaagatcactagtgtcta

SEQ ID NO: 2063132 - DNA, 25 bp, Homo sapien
caggccctcagtctattgccaggag

SEQ ID NO: 2063133 - DNA, 25 bp, Homo sapien
ccaataattttatgatgccactgtt

SEQ ID NO: 2063134 - DNA, 25 bp, Homo sapien
caacttcgcagagcaggctgatgtc

SEQ ID NO: 2063135 - DNA, 25 bp, Homo sapien
tctggaaacttcagtacaacttcgc

SEQ ID NO: 2063136 - DNA, 25 bp, Homo sapien
gcccaacttgggaatactcctgcag

SEQ ID NO: 2063137 - DNA, 25 bp, Homo sapien
gtgttccggttcagggagcagcagc

SEQ ID NO: 2063138 - DNA, 25 bp, Homo sapien
tttccgtagggaattggactggcag

SEQ ID NO: 2063139 - DNA, 25 bp, Homo sapien
gctccaggtcatttccgtagggaat

SEQ ID NO: 2063140 - DNA, 25 bp, Homo sapien
ggagatcgtctggtcccatccctct

SEQ ID NO: 2063141 - DNA, 25 bp, Homo sapien
gatggaaacgccataggggcttcag

SEQ ID NO: 2063142 - DNA, 25 bp, Homo sapien
ccataggggcttcaggagatcgtct

SEQ ID NO: 2063143 - DNA, 25 bp, Homo sapien
gggcttcaggagatcgtctggtccc

SEQ ID NO: 2063144 - DNA, 25 bp, Homo sapien
aaggtcaggagttcctggagctggg

SEQ ID NO: 2063145 - DNA, 25 bp, Homo sapien
cacaaggtcaggagttcctggagct

SEQ ID NO: 2063146 - DNA, 25 bp, Homo sapien
tgcacaaggtcaggagttcctggag

SEQ ID NO: 2063147 - DNA, 25 bp, Homo sapien
caaggtcaggagttcctggagctgg

SEQ ID NO: 2063148 - DNA, 25 bp, Homo sapien
caggaggctgtgctcatttctaatt

SEQ ID NO: 2063149 - DNA, 25 bp, Homo sapien
tcttctcctggctctttggtgtggg

SEQ ID NO: 2063150 - DNA, 25 bp, Homo sapien
tggctccctgtctgccgcattaact

SEQ ID NO: 2063151 - DNA, 25 bp, Homo sapien
ttaacttccagctctccacaaacag

SEQ ID NO: 2063152 - DNA, 25 bp, Homo sapien
ggtgtttgttattgccgctttacag

SEQ ID NO: 2063153 - DNA, 25 bp, Homo sapien
tagcccgggtccaggtcagaatttc

SEQ ID NO: 2063154 - DNA, 25 bp, Homo sapien
ccgggtccaggtcagaatttctgaa

SEQ ID NO: 2063155 - DNA, 25 bp, Homo sapien
ctctggactggatgcaggtggccca

SEQ ID NO: 2063156 - DNA, 25 bp, Homo sapien
gacagacacccctccgcttccaggt

SEQ ID NO: 2063157 - DNA, 25 bp, Homo sapien
ttctgatctcctgaggtggacctgt

SEQ ID NO: 2063158 - DNA, 25 bp, Homo sapien
ctgtgcccatggctaaagacagaca

SEQ ID NO: 2063159 - DNA, 25 bp, Homo sapien
ccagtggctcatatcctcccatcct

SEQ ID NO: 2063160 - DNA, 25 bp, Homo sapien
tggtatctcttcctttgtcctccat

SEQ ID NO: 2063161 - DNA, 25 bp, Homo sapien
cacagtcctcaagatggtatctctt

SEQ ID NO: 2063162 - DNA, 25 bp, Homo sapien
gatggtatctcttcctttgtcctcc

SEQ ID NO: 2063163 - DNA, 25 bp, Homo sapien
cacacagtcctcaagatggtatctc

SEQ ID NO: 2063164 - DNA, 25 bp, Homo sapien
gactttaggcacaactatcaatttg

SEQ ID NO: 2063165 - DNA, 25 bp, Homo sapien
ccattccaaggtgtctcttgtctgt

SEQ ID NO: 2063166 - DNA, 25 bp, Homo sapien
tcttgtctgtagctggtgcctttcc

SEQ ID NO: 2063167 - DNA, 25 bp, Homo sapien
ggcacaactatcaatttgtctgtgt

SEQ ID NO: 2063168 - DNA, 25 bp, Homo sapien
ctcagggacatgagaataatgtgtc

SEQ ID NO: 2063169 - DNA, 25 bp, Homo sapien
gaaaagtccttaggagactcaggga

SEQ ID NO: 2063170 - DNA, 25 bp, Homo sapien
caccaatgcttgtggcttgttgaaa

SEQ ID NO: 2063171 - DNA, 25 bp, Homo sapien
taatgtgtccagtgaccataaggct

SEQ ID NO: 2063172 - DNA, 25 bp, Homo sapien
ctactggaaactgagtgtggtaaat

SEQ ID NO: 2063173 - DNA, 25 bp, Homo sapien
tctactggaaactgagtgtggtaaa

SEQ ID NO: 2063174 - DNA, 25 bp, Homo sapien
tcaggttggatcttttctggggaac

SEQ ID NO: 2063175 - DNA, 25 bp, Homo sapien
ggttggatcttttctggggaactga

SEQ ID NO: 2063176 - DNA, 25 bp, Homo sapien
acccgttcatcttcaggtgtagttc

SEQ ID NO: 2063177 - DNA, 25 bp, Homo sapien
gttacccgttcatcttcaggtgtag

SEQ ID NO: 2063178 - DNA, 25 bp, Homo sapien
cacagttacccgttcatcttcaggt

SEQ ID NO: 2063179 - DNA, 25 bp, Homo sapien
cagttacccgttcatcttcaggtgt

SEQ ID NO: 2063180 - DNA, 25 bp, Homo sapien
ctcccaaggcacttaatgatttcgg

SEQ ID NO: 2063181 - DNA, 25 bp, Homo sapien
taatgatttcggatgaatgactctg

SEQ ID NO: 2063182 - DNA, 25 bp, Homo sapien
caaggcacttaatgatttcggatga

SEQ ID NO: 2063183 - DNA, 25 bp, Homo sapien
cacttaatgatttcggatgaatgac

SEQ ID NO: 2063184 - DNA, 25 bp, Homo sapien
tggaacgaacatcccacaggggccc

SEQ ID NO: 2063185 - DNA, 25 bp, Homo sapien
cacagccagggtgataccttctcct

SEQ ID NO: 2063186 - DNA, 25 bp, Homo sapien
tggaactctaggtcttacacgagta

SEQ ID NO: 2063187 - DNA, 25 bp, Homo sapien
tcaggggctaagctcagtgaccaag

SEQ ID NO: 2063188 - DNA, 25 bp, Homo sapien
ttgtaaagaattcaaccagagcaga

SEQ ID NO: 2063189 - DNA, 25 bp, Homo sapien
cagacagtcagagcctacattttca

SEQ ID NO: 2063190 - DNA, 25 bp, Homo sapien
gtaaagaattcaaccagagcagaca

SEQ ID NO: 2063191 - DNA, 25 bp, Homo sapien
agagcagacagtcagagcctacatt

SEQ ID NO: 2063192 - DNA, 25 bp, Homo sapien
cttgccctggcagattctgtcctcc

SEQ ID NO: 2063193 - DNA, 25 bp, Homo sapien
tgccctggcagattctgtcctcctc

SEQ ID NO: 2063194 - DNA, 25 bp, Homo sapien
ccctggcagattctgtcctcctcca

SEQ ID NO: 2063195 - DNA, 25 bp, Homo sapien
tggcagattctgtcctcctccagct

SEQ ID NO: 2063196 - DNA, 25 bp, Homo sapien
tttctctacccctgcaagggggtga

SEQ ID NO: 2063197 - DNA, 25 bp, Homo sapien
cactgctgacgattccaggacctga

SEQ ID NO: 2063198 - DNA, 25 bp, Homo sapien
tccccactgctgacgattccaggac

SEQ ID NO: 2063199 - DNA, 25 bp, Homo sapien
tgcaagggggtgaccatttggaacc

SEQ ID NO: 2063200 - DNA, 25 bp, Homo sapien
ttcagtaatagctcctgtacaggca

SEQ ID NO: 2063201 - DNA, 25 bp, Homo sapien
catccctgcgcataagcttggagct

SEQ ID NO: 2063202 - DNA, 25 bp, Homo sapien
gcaaggcttccatttagctccagaa

SEQ ID NO: 2063203 - DNA, 25 bp, Homo sapien
ggctctggccgtgcccattcagtaa

SEQ ID NO: 2063204 - DNA, 25 bp, Homo sapien
attatctcatttgaccctccctcat

SEQ ID NO: 2063205 - DNA, 25 bp, Homo sapien
tctcatttgaccctccctcatcatc

SEQ ID NO: 2063206 - DNA, 25 bp, Homo sapien
tcacggtttgccagatgtttgcata

SEQ ID NO: 2063207 - DNA, 25 bp, Homo sapien
agatgtttgcatattcattatctca

SEQ ID NO: 2063208 - DNA, 25 bp, Homo sapien
gcctcgtaagactcaaataacctaa

SEQ ID NO: 2063209 - DNA, 25 bp, Homo sapien
ttttatcactggtcatgagccttga

SEQ ID NO: 2063210 - DNA, 25 bp, Homo sapien
ttgatggcctcgtaagactcaaata

SEQ ID NO: 2063211 - DNA, 25 bp, Homo sapien
aatgactgttttatcactggtcatg

SEQ ID NO: 2063212 - DNA, 25 bp, Homo sapien
gaggtggccagccaaaataatgtga

SEQ ID NO: 2063213 - DNA, 25 bp, Homo sapien
gtggccagccaaaataatgtgaggc

SEQ ID NO: 2063214 - DNA, 25 bp, Homo sapien
ggtggccagccaaaataatgtgagg

SEQ ID NO: 2063215 - DNA, 25 bp, Homo sapien
cctgaggtggccagccaaaataatg

SEQ ID NO: 2063216 - DNA, 25 bp, Homo sapien
atgcaaagtcattggccccgatgcc

SEQ ID NO: 2063217 - DNA, 25 bp, Homo sapien
tcattggccccgatgccaactcctc

SEQ ID NO: 2063218 - DNA, 25 bp, Homo sapien
tgcaaagtcattggccccgatgcca

SEQ ID NO: 2063219 - DNA, 25 bp, Homo sapien
aaagtcattggccccgatgccaact

SEQ ID NO: 2063220 - DNA, 25 bp, Homo sapien
tagtgcattttccaatatgatccca

SEQ ID NO: 2063221 - DNA, 25 bp, Homo sapien
tgcacacataggagtcgcagcgcaa

SEQ ID NO: 2063222 - DNA, 25 bp, Homo sapien
ttttgcccacgctaaaattcgacag

SEQ ID NO: 2063223 - DNA, 25 bp, Homo sapien
caactatgtactaatggcagccaac

SEQ ID NO: 2063224 - DNA, 25 bp, Homo sapien
aaggccccaggaccgcgcggctgag

SEQ ID NO: 2063225 - DNA, 25 bp, Homo sapien
ggaaggccccaggaccgcgcggctg

SEQ ID NO: 2063226 - DNA, 25 bp, Homo sapien
gctccccaggtgagctcgtctccgc

SEQ ID NO: 2063227 - DNA, 25 bp, Homo sapien
caggtgagctcgtctccgcgggact

SEQ ID NO: 2063228 - DNA, 25 bp, Homo sapien
aaactagcgagtttccgagcggcgg

SEQ ID NO: 2063229 - DNA, 25 bp, Homo sapien
tgccaaactagcgagtttccgagcg

SEQ ID NO: 2063230 - DNA, 25 bp, Homo sapien
caagccactgccaaactagcgagtt

SEQ ID NO: 2063231 - DNA, 25 bp, Homo sapien
cactgccaaactagcgagtttccga

SEQ ID NO: 2063232 - DNA, 25 bp, Homo sapien
gggcagttcacactgcgagttcaga

SEQ ID NO: 2063233 - DNA, 25 bp, Homo sapien
cgagttcagattcggatcgcagtcc

SEQ ID NO: 2063234 - DNA, 25 bp, Homo sapien
tgctgtcctggacccgtttgggatg

SEQ ID NO: 2063235 - DNA, 25 bp, Homo sapien
gaagggttaatacagcgtcctctcc

SEQ ID NO: 2063236 - DNA, 25 bp, Homo sapien
tggcggtaggtagcccctgggagag

SEQ ID NO: 2063237 - DNA, 25 bp, Homo sapien
ctggcggtaggtagcccctgggaga

SEQ ID NO: 2063238 - DNA, 25 bp, Homo sapien
actggcggtaggtagcccctgggag

SEQ ID NO: 2063239 - DNA, 25 bp, Homo sapien
cgctttcgccgctgggcgacccaga

SEQ ID NO: 2063240 - DNA, 25 bp, Homo sapien
gctttcgccgctgggcgacccagag

SEQ ID NO: 2063241 - DNA, 25 bp, Homo sapien
gccgctgggcgacccagagccccag

SEQ ID NO: 2063242 - DNA, 25 bp, Homo sapien
ttcgccgctgggcgacccagagccc

SEQ ID NO: 2063243 - DNA, 25 bp, Homo sapien
cagcggctcgggtttgacatcccag

SEQ ID NO: 2063244 - DNA, 25 bp, Homo sapien
cggctcgggtttgacatcccagctg

SEQ ID NO: 2063245 - DNA, 25 bp, Homo sapien
gcagcggctcgggtttgacatccca

SEQ ID NO: 2063246 - DNA, 25 bp, Homo sapien
cgggccggctccctgagcctcctcc

SEQ ID NO: 2063247 - DNA, 25 bp, Homo sapien
agcactctcgaaagcactacctcga

SEQ ID NO: 2063248 - DNA, 25 bp, Homo sapien
tttccattcatggatctgtgcctgg

SEQ ID NO: 2063249 - DNA, 25 bp, Homo sapien
agtgggtcagcagcgtcccgacaga

SEQ ID NO: 2063250 - DNA, 25 bp, Homo sapien
tacctcgagacgtgcatttccattc

SEQ ID NO: 2063251 - DNA, 25 bp, Homo sapien
ttgaggttcagcatgatcccacagc

SEQ ID NO: 2063252 - DNA, 25 bp, Homo sapien
cagaaccaattgaggttcagcatga

SEQ ID NO: 2063253 - DNA, 25 bp, Homo sapien
gcatgatcccacagctgtcaaggac

SEQ ID NO: 2063254 - DNA, 25 bp, Homo sapien
tcagcatgatcccacagctgtcaag

SEQ ID NO: 2063255 - DNA, 25 bp, Homo sapien
cctgcatctcagccattctttcaag

SEQ ID NO: 2063256 - DNA, 25 bp, Homo sapien
ctgcatctcagccattctttcaagc

SEQ ID NO: 2063257 - DNA, 25 bp, Homo sapien
ccctgcatctcagccattctttcaa

SEQ ID NO: 2063258 - DNA, 25 bp, Homo sapien
tcaggctgttcctaataaggcaggt

SEQ ID NO: 2063259 - DNA, 25 bp, Homo sapien
tcctaataaggcaggtgatgtggct

SEQ ID NO: 2063260 - DNA, 25 bp, Homo sapien
tcacaggagtgctacctggagcccc

SEQ ID NO: 2063261 - DNA, 25 bp, Homo sapien
ctggagccccatctcgaacctgctt

SEQ ID NO: 2063262 - DNA, 25 bp, Homo sapien
tctttggacatttccgtaggcctga

SEQ ID NO: 2063263 - DNA, 25 bp, Homo sapien
cattgtggctaccagtagaactttg

SEQ ID NO: 2063264 - DNA, 25 bp, Homo sapien
taataaattcagctcacgaccacag

SEQ ID NO: 2063265 - DNA, 25 bp, Homo sapien
tgaagggtaggcagcaaaacctaat

SEQ ID NO: 2063266 - DNA, 25 bp, Homo sapien
ggttcaacagagagctccctggagc

SEQ ID NO: 2063267 - DNA, 25 bp, Homo sapien
caattcctgtttagtccaaggcgta

SEQ ID NO: 2063268 - DNA, 25 bp, Homo sapien
gcacagactgcatgtgttgcctggt

SEQ ID NO: 2063269 - DNA, 25 bp, Homo sapien
gctgttttaaactgcgagcgctcag

SEQ ID NO: 2063270 - DNA, 25 bp, Homo sapien
tgctcaaaaccaacacagtagatgt

SEQ ID NO: 2063271 - DNA, 25 bp, Homo sapien
tatggcctgaatacctccccaaagg

SEQ ID NO: 2063272 - DNA, 25 bp, Homo sapien
ggcatcaagcaataggtcacctttg

SEQ ID NO: 2063273 - DNA, 25 bp, Homo sapien
cagtgttggcaaacggtctgttctc

SEQ ID NO: 2063274 - DNA, 25 bp, Homo sapien
tcaaggtgtcacatgtggcccactt

SEQ ID NO: 2063275 - DNA, 25 bp, Homo sapien
tttggcccaagggttcatcaaggtg

SEQ ID NO: 2063276 - DNA, 25 bp, Homo sapien
tctgcggtccttgcacactgagcct

SEQ ID NO: 2063277 - DNA, 25 bp, Homo sapien
tgtcccatagccttgttggaggcgg

SEQ ID NO: 2063278 - DNA, 25 bp, Homo sapien
ccaaaccgagccttgagatccttct

SEQ ID NO: 2063279 - DNA, 25 bp, Homo sapien
tctgacttgaaagcagagctgaaca

SEQ ID NO: 2063280 - DNA, 25 bp, Homo sapien
agttgttgcttataaggaccccttg

SEQ ID NO: 2063281 - DNA, 25 bp, Homo sapien
agcagagctgaacaccctgccactg

SEQ ID NO: 2063282 - DNA, 25 bp, Homo sapien
tcactgttgtaggaccaggcacgtt

SEQ ID NO: 2063283 - DNA, 25 bp, Homo sapien
gcttcgtaataatgatgcccatcac

SEQ ID NO: 2063284 - DNA, 25 bp, Homo sapien
ctgggcttcgtaataatgatgccca

SEQ ID NO: 2063285 - DNA, 25 bp, Homo sapien
ccaggcacgttattaaacatgtgca

SEQ ID NO: 2063286 - DNA, 25 bp, Homo sapien
catcctggagttgccaagagccgct

SEQ ID NO: 2063287 - DNA, 25 bp, Homo sapien
caaggacgtgagcttgcctttcaaa

SEQ ID NO: 2063288 - DNA, 25 bp, Homo sapien
gctgcaccctgaaggtttccgtatt

SEQ ID NO: 2063289 - DNA, 25 bp, Homo sapien
tccgtatttactgccgggtgtcact

SEQ ID NO: 2063290 - DNA, 25 bp, Homo sapien
ccaaagatgattatttgtcaatgtc

SEQ ID NO: 2063291 - DNA, 25 bp, Homo sapien
gccaaagatgattatttgtcaatgt

SEQ ID NO: 2063292 - DNA, 25 bp, Homo sapien
ttgccaaagatgattatttgtcaat

SEQ ID NO: 2063293 - DNA, 25 bp, Homo sapien
ttgtcaatgtcagaagatccgcatc

SEQ ID NO: 2063294 - DNA, 25 bp, Homo sapien
aagtgatgcctaacatttataacca

SEQ ID NO: 2063295 - DNA, 25 bp, Homo sapien
ccgcatcgccaaaatagccaaagtg

SEQ ID NO: 2063296 - DNA, 25 bp, Homo sapien
tcattccatagagataaagcttaac

SEQ ID NO: 2063297 - DNA, 25 bp, Homo sapien
gtgctgaaagccattccccgcatcg

SEQ ID NO: 2063298 - DNA, 25 bp, Homo sapien
caaacttgcagtggagaataatgga

SEQ ID NO: 2063299 - DNA, 25 bp, Homo sapien
gaagctgccacatggctattctaag

SEQ ID NO: 2063300 - DNA, 25 bp, Homo sapien
tgctcaaacttgcagtggagaataa

SEQ ID NO: 2063301 - DNA, 25 bp, Homo sapien
tggctattctaaggggacactgctc

SEQ ID NO: 2063302 - DNA, 25 bp, Homo sapien
gccatcccgagtgagggatcccact

SEQ ID NO: 2063303 - DNA, 25 bp, Homo sapien
gagtgacttcgtcctattctgtccc

SEQ ID NO: 2063304 - DNA, 25 bp, Homo sapien
tggaagcacacctggagctggccat

SEQ ID NO: 2063305 - DNA, 25 bp, Homo sapien
tggtcagagtgacttcgtcctattc

SEQ ID NO: 2063306 - DNA, 25 bp, Homo sapien
tgagtttgtcagtgcgatgatctga

SEQ ID NO: 2063307 - DNA, 25 bp, Homo sapien
gagtttgtcagtgcgatgatctgaa

SEQ ID NO: 2063308 - DNA, 25 bp, Homo sapien
ttgagtttgtcagtgcgatgatctg

SEQ ID NO: 2063309 - DNA, 25 bp, Homo sapien
agtttgtcagtgcgatgatctgaaa

SEQ ID NO: 2063310 - DNA, 25 bp, Homo sapien
catgagctccattgctttcttgtcc

SEQ ID NO: 2063311 - DNA, 25 bp, Homo sapien
ccgttgaggctcttgttctttgtct

SEQ ID NO: 2063312 - DNA, 25 bp, Homo sapien
tgagagcttacagtggattccccac

SEQ ID NO: 2063313 - DNA, 25 bp, Homo sapien
tcagcatgaaatcaaaccagcaagg

SEQ ID NO: 2063314 - DNA, 25 bp, Homo sapien
taattattgttgtagttccactccc

SEQ ID NO: 2063315 - DNA, 25 bp, Homo sapien
cacagttggcccctgaatgttcctg

SEQ ID NO: 2063316 - DNA, 25 bp, Homo sapien
tgcattgtttccataattattgttg

SEQ ID NO: 2063317 - DNA, 25 bp, Homo sapien
cctgcttcctgctacgcttatagta

SEQ ID NO: 2063318 - DNA, 25 bp, Homo sapien
gatgggatccctgcatactgcttgg

SEQ ID NO: 2063319 - DNA, 25 bp, Homo sapien
cagccgtgggacttgacagaatgag

SEQ ID NO: 2063320 - DNA, 25 bp, Homo sapien
gaattagtagacagccctcccaatg

SEQ ID NO: 2063321 - DNA, 25 bp, Homo sapien
tcccaatgcaggttaagacgacagc

SEQ ID NO: 2063322 - DNA, 25 bp, Homo sapien
ctcctgaaatgtggtttcttgattt

SEQ ID NO: 2063323 - DNA, 25 bp, Homo sapien
ctgaaatgtggtttcttgatttagc

SEQ ID NO: 2063324 - DNA, 25 bp, Homo sapien
tgaaatgtggtttcttgatttagct

SEQ ID NO: 2063325 - DNA, 25 bp, Homo sapien
cctgaaatgtggtttcttgatttag

SEQ ID NO: 2063326 - DNA, 25 bp, Homo sapien
ccagcagtaagctcgatgaagccat

SEQ ID NO: 2063327 - DNA, 25 bp, Homo sapien
tgtaggaaccatgcaaactccagca

SEQ ID NO: 2063328 - DNA, 25 bp, Homo sapien
gctgtccatcatgcacctggcagga

SEQ ID NO: 2063329 - DNA, 25 bp, Homo sapien
gcacagtcactttgggaagaataca

SEQ ID NO: 2063330 - DNA, 25 bp, Homo sapien
gagaacagacccctgtggtcccttg

SEQ ID NO: 2063331 - DNA, 25 bp, Homo sapien
caacacagctggatgtagggtggca

SEQ ID NO: 2063332 - DNA, 25 bp, Homo sapien
gtctgagaacagaccagatggcacc

SEQ ID NO: 2063333 - DNA, 25 bp, Homo sapien
ccttaaggcgtctgatcaccatcca

SEQ ID NO: 2063334 - DNA, 25 bp, Homo sapien
aggcaccgggatggcataaagccag

SEQ ID NO: 2063335 - DNA, 25 bp, Homo sapien
tgctttaccaagtgagattttcctg

SEQ ID NO: 2063336 - DNA, 25 bp, Homo sapien
caagaacgcgtagagaaatgaatgt

SEQ ID NO: 2063337 - DNA, 25 bp, Homo sapien
gccagccgtgggattgcttatccag

SEQ ID NO: 2063338 - DNA, 25 bp, Homo sapien
tcggtacacgcagctctctggagca

SEQ ID NO: 2063339 - DNA, 25 bp, Homo sapien
cgacggtttgggaagagaatccaat

SEQ ID NO: 2063340 - DNA, 25 bp, Homo sapien
gctgttttctcggtggcactgatct

SEQ ID NO: 2063341 - DNA, 25 bp, Homo sapien
tcttgaatggcaccagatactgaca

SEQ ID NO: 2063342 - DNA, 25 bp, Homo sapien
gaggcagggactaatttcaggtgtc

SEQ ID NO: 2063343 - DNA, 25 bp, Homo sapien
tagaatgccgtcagctgctcctttt

SEQ ID NO: 2063344 - DNA, 25 bp, Homo sapien
gagggccctgtgttgccactagaat

SEQ ID NO: 2063345 - DNA, 25 bp, Homo sapien
ttgcctgtggtctcgagggccctgt

SEQ ID NO: 2063346 - DNA, 25 bp, Homo sapien
aggcacgaggctgggtactgagaac

SEQ ID NO: 2063347 - DNA, 25 bp, Homo sapien
ccctcggggtcagggattctgctga

SEQ ID NO: 2063348 - DNA, 25 bp, Homo sapien
ttctgctgaaaggtgatcatgggca

SEQ ID NO: 2063349 - DNA, 25 bp, Homo sapien
gtatagacatctaatgactgagtcc

SEQ ID NO: 2063350 - DNA, 25 bp, Homo sapien
gctccaatagtttgtcaagagaata

SEQ ID NO: 2063351 - DNA, 25 bp, Homo sapien
taaaagtatcggcagccaggactgg

SEQ ID NO: 2063352 - DNA, 25 bp, Homo sapien
gtcaagggagcagctccaatagttt

SEQ ID NO: 2063353 - DNA, 25 bp, Homo sapien
cagccaggactggttttagccaaaa

SEQ ID NO: 2063354 - DNA, 25 bp, Homo sapien
tatgagatctctggtgcaggccact

SEQ ID NO: 2063355 - DNA, 25 bp, Homo sapien
gaattggccctcattctccgtggac

SEQ ID NO: 2063356 - DNA, 25 bp, Homo sapien
tcgacattcaggatcaagcagggcc

SEQ ID NO: 2063357 - DNA, 25 bp, Homo sapien
ctccgtggaccaaatgatgcatatg

SEQ ID NO: 2063358 - DNA, 25 bp, Homo sapien
tttgaactcatgagtaaggacagca

SEQ ID NO: 2063359 - DNA, 25 bp, Homo sapien
agagtctgggttttgaactcatgag

SEQ ID NO: 2063360 - DNA, 25 bp, Homo sapien
tcagctccagctttgatcgtgtcct

SEQ ID NO: 2063361 - DNA, 25 bp, Homo sapien
caggagaacaccgagttaggaatgg

SEQ ID NO: 2063362 - DNA, 25 bp, Homo sapien
tccgcagcggactacgagcagcaaa

SEQ ID NO: 2063363 - DNA, 25 bp, Homo sapien
aataaacttcatcatgtggttgtca

SEQ ID NO: 2063364 - DNA, 25 bp, Homo sapien
atgtggttgtcaaatccgcagcgga

SEQ ID NO: 2063365 - DNA, 25 bp, Homo sapien
cctcactttatacacaattgtaata

SEQ ID NO: 2063366 - DNA, 25 bp, Homo sapien
ggtcctgggacatacagggagtctt

SEQ ID NO: 2063367 - DNA, 25 bp, Homo sapien
gtatggggtcccttgcacacatttg

SEQ ID NO: 2063368 - DNA, 25 bp, Homo sapien
gcagtggggttgaggtcctgggaca

SEQ ID NO: 2063369 - DNA, 25 bp, Homo sapien
ggtatggggtcccttgcacacattt

SEQ ID NO: 2063370 - DNA, 25 bp, Homo sapien
catctggagatagaaatgctcaggg

SEQ ID NO: 2063371 - DNA, 25 bp, Homo sapien
gctcctatcagctgctccttagggc

SEQ ID NO: 2063372 - DNA, 25 bp, Homo sapien
tcactggcccaagtgctcctatcag

SEQ ID NO: 2063373 - DNA, 25 bp, Homo sapien
gccatctggagatagaaatgctcag

SEQ ID NO: 2063374 - DNA, 25 bp, Homo sapien
cttttctggtggccgaaattctcac

SEQ ID NO: 2063375 - DNA, 25 bp, Homo sapien
gacagaaacacctttcaaaaccaca

SEQ ID NO: 2063376 - DNA, 25 bp, Homo sapien
aggtgaaggacagaaacacctttca

SEQ ID NO: 2063377 - DNA, 25 bp, Homo sapien
cagcttgtttaggtgaaggacagaa

SEQ ID NO: 2063378 - DNA, 25 bp, Homo sapien
tgaaggacagaaacacctttcaaaa

SEQ ID NO: 2063379 - DNA, 25 bp, Homo sapien
caaaacatgcttaatcaggtcccca

SEQ ID NO: 2063380 - DNA, 25 bp, Homo sapien
tatgtgactctaatctgatccaggg

SEQ ID NO: 2063381 - DNA, 25 bp, Homo sapien
tagaaagtttcacgaggacagggac

SEQ ID NO: 2063382 - DNA, 25 bp, Homo sapien
tagcaagacccgcaggtgattcgtg

SEQ ID NO: 2063383 - DNA, 25 bp, Homo sapien
gttggcagaacacgtgaaggatccg

SEQ ID NO: 2063384 - DNA, 25 bp, Homo sapien
gaaatcttgcagaggtagctccgaa

SEQ ID NO: 2063385 - DNA, 25 bp, Homo sapien
tccgaggagcgagaggaatgtccat

SEQ ID NO: 2063386 - DNA, 25 bp, Homo sapien
taccccagtgaggttgaaggcacca

SEQ ID NO: 2063387 - DNA, 25 bp, Homo sapien
ggctttgtctggcttaaaagtcaga

SEQ ID NO: 2063388 - DNA, 25 bp, Homo sapien
ccaaggtcttatgcatgacaggaga

SEQ ID NO: 2063389 - DNA, 25 bp, Homo sapien
ggctgatccttctaatgcatagtta

SEQ ID NO: 2063390 - DNA, 25 bp, Homo sapien
cataaaggcatatgggttggacaac

SEQ ID NO: 2063391 - DNA, 25 bp, Homo sapien
gatgggccacttgactaacacagtc

SEQ ID NO: 2063392 - DNA, 25 bp, Homo sapien
acaacgatgggccacttgactaaca

SEQ ID NO: 2063393 - DNA, 25 bp, Homo sapien
ggtgacaacgatgggccacttgact

SEQ ID NO: 2063394 - DNA, 25 bp, Homo sapien
ctaggtgacaacgatgggccacttg

SEQ ID NO: 2063395 - DNA, 25 bp, Homo sapien
gaataattccccgataggctttggc

SEQ ID NO: 2063396 - DNA, 25 bp, Homo sapien
taattccccgataggctttggctaa

SEQ ID NO: 2063397 - DNA, 25 bp, Homo sapien
agatgaataattccccgataggctt

SEQ ID NO: 2063398 - DNA, 25 bp, Homo sapien
aaagatgaataattccccgataggc

SEQ ID NO: 2063399 - DNA, 25 bp, Homo sapien
acctcggtagccctcagtttcatgg

SEQ ID NO: 2063400 - DNA, 25 bp, Homo sapien
ttcatggcattccacttttgaataa

SEQ ID NO: 2063401 - DNA, 25 bp, Homo sapien
tcggtagccctcagtttcatggcat

SEQ ID NO: 2063402 - DNA, 25 bp, Homo sapien
agtttcatggcattccacttttgaa

SEQ ID NO: 2063403 - DNA, 25 bp, Homo sapien
tcattctagaaacagctgctgctcc

SEQ ID NO: 2063404 - DNA, 25 bp, Homo sapien
gaaacagctgctgctccacgggcgg

SEQ ID NO: 2063405 - DNA, 25 bp, Homo sapien
tagaaacagctgctgctccacgggc

SEQ ID NO: 2063406 - DNA, 25 bp, Homo sapien
tctagaaacagctgctgctccacgg

SEQ ID NO: 2063407 - DNA, 25 bp, Homo sapien
ccgcctgctccgtggtataaggcag

SEQ ID NO: 2063408 - DNA, 25 bp, Homo sapien
tggagggttgctgccacccccaact

SEQ ID NO: 2063409 - DNA, 25 bp, Homo sapien
cgcctgctccgtggtataaggcagc

SEQ ID NO: 2063410 - DNA, 25 bp, Homo sapien
tcatggagggttgctgccaccccca

SEQ ID NO: 2063411 - DNA, 25 bp, Homo sapien
tcttgcgggagacatttgggccatt

SEQ ID NO: 2063412 - DNA, 25 bp, Homo sapien
ctctgatccgcatttctgaaaaaca

SEQ ID NO: 2063413 - DNA, 25 bp, Homo sapien
ctagcagtgtcgcttaggaaatgac

SEQ ID NO: 2063414 - DNA, 25 bp, Homo sapien
catttccttcttgcgggagacattt

SEQ ID NO: 2063415 - DNA, 25 bp, Homo sapien
tctgcttgaaaggaacatgattaat

SEQ ID NO: 2063416 - DNA, 25 bp, Homo sapien
aaggaacatgattaatagcatcacc

SEQ ID NO: 2063417 - DNA, 25 bp, Homo sapien
gaaaggaacatgattaatagcatca

SEQ ID NO: 2063418 - DNA, 25 bp, Homo sapien
tgcttgaaaggaacatgattaatag

SEQ ID NO: 2063419 - DNA, 25 bp, Homo sapien
tgctagctaccctacacagctgttg

SEQ ID NO: 2063420 - DNA, 25 bp, Homo sapien
gcagaattggtcacacctgttagat

SEQ ID NO: 2063421 - DNA, 25 bp, Homo sapien
taagaaagacctatctcagccagga

SEQ ID NO: 2063422 - DNA, 25 bp, Homo sapien
gagagtaaacaatgaccgtcccagg

SEQ ID NO: 2063423 - DNA, 25 bp, Homo sapien
tacagagtacttttgcagtcaccgg

SEQ ID NO: 2063424 - DNA, 25 bp, Homo sapien
taaggaatgaaattggtgaccctca

SEQ ID NO: 2063425 - DNA, 25 bp, Homo sapien
caaaatgggctcctcccagtaagga

SEQ ID NO: 2063426 - DNA, 25 bp, Homo sapien
gacctaggcattggagtacagataa

SEQ ID NO: 2063427 - DNA, 25 bp, Homo sapien
ccagggtttctatgcccggcacagt

SEQ ID NO: 2063428 - DNA, 25 bp, Homo sapien
ttcaactccttatgtggcagctggc

SEQ ID NO: 2063429 - DNA, 25 bp, Homo sapien
caacttgtgtcatgtgtccgggcct

SEQ ID NO: 2063430 - DNA, 25 bp, Homo sapien
acaggcttgatggagacgctcgtct

SEQ ID NO: 2063431 - DNA, 25 bp, Homo sapien
ggctcaagaagtcagaccgtacatg

SEQ ID NO: 2063432 - DNA, 25 bp, Homo sapien
aaagcactttgaccgtgcccactga

SEQ ID NO: 2063433 - DNA, 25 bp, Homo sapien
tatcccgtaagttatcatgagcctg

SEQ ID NO: 2063434 - DNA, 25 bp, Homo sapien
gaacatgatggctcagcaatgcact

SEQ ID NO: 2063435 - DNA, 25 bp, Homo sapien
tgcaggatctctggatgatagtggc

SEQ ID NO: 2063436 - DNA, 25 bp, Homo sapien
agaagaactgcaggatctctggatg

SEQ ID NO: 2063437 - DNA, 25 bp, Homo sapien
aattttatttgcgtagaagaactgc

SEQ ID NO: 2063438 - DNA, 25 bp, Homo sapien
ttacagaattttatttgcgtagaag

SEQ ID NO: 2063439 - DNA, 25 bp, Homo sapien
gcttagtgttcctttgatcttcttc

SEQ ID NO: 2063440 - DNA, 25 bp, Homo sapien
tcctttagtttcagatatggagaac

SEQ ID NO: 2063441 - DNA, 25 bp, Homo sapien
ctgctggtagagcttagtgttcctt

SEQ ID NO: 2063442 - DNA, 25 bp, Homo sapien
tggagaacaggcttgaaatgttgtt

SEQ ID NO: 2063443 - DNA, 25 bp, Homo sapien
gccgagtatctcagactgtcgttct

SEQ ID NO: 2063444 - DNA, 25 bp, Homo sapien
tctgcttaacctgactggtgaaaaa

SEQ ID NO: 2063445 - DNA, 25 bp, Homo sapien
tcaggagggaatctcgtgtctgctt

SEQ ID NO: 2063446 - DNA, 25 bp, Homo sapien
aaaacaaaggccgagtatctcagac

SEQ ID NO: 2063447 - DNA, 25 bp, Homo sapien
gatgtacagacacgtaagacagatg

SEQ ID NO: 2063448 - DNA, 25 bp, Homo sapien
catgcctggcttagggttgtattat

SEQ ID NO: 2063449 - DNA, 25 bp, Homo sapien
cacatgatgcatacagaaattgtct

SEQ ID NO: 2063450 - DNA, 25 bp, Homo sapien
gaggaacactaatcatattgtgaag

SEQ ID NO: 2063451 - DNA, 25 bp, Homo sapien
caaattcacagggtcatacagtcca

SEQ ID NO: 2063452 - DNA, 25 bp, Homo sapien
tatctatgaagaaggaacccaaacc

SEQ ID NO: 2063453 - DNA, 25 bp, Homo sapien
tacagtccatacaccagcaggtcga

SEQ ID NO: 2063454 - DNA, 25 bp, Homo sapien
tggatcttgcccagaacgacggtca

SEQ ID NO: 2063455 - DNA, 25 bp, Homo sapien
gggcttcataggccatggttcccaa

SEQ ID NO: 2063456 - DNA, 25 bp, Homo sapien
ggttcccaagtttctcattgccatg

SEQ ID NO: 2063457 - DNA, 25 bp, Homo sapien
tctcattgccatgtgacgcttttta

SEQ ID NO: 2063458 - DNA, 25 bp, Homo sapien
ccatgtgacgctttttagcactggg

SEQ ID NO: 2063459 - DNA, 25 bp, Homo sapien
gaaaagaaagatatcattgatgtcc

SEQ ID NO: 2063460 - DNA, 25 bp, Homo sapien
tgggctgggaagtagggatggaaag

SEQ ID NO: 2063461 - DNA, 25 bp, Homo sapien
gggctggcccaggattctcctctgt

SEQ ID NO: 2063462 - DNA, 25 bp, Homo sapien
ccttttctgcttgggctgggaagta

SEQ ID NO: 2063463 - DNA, 25 bp, Homo sapien
taatacatggtaggggttcaactgc

SEQ ID NO: 2063464 - DNA, 25 bp, Homo sapien
tctattgccacatctaaggtcatga

SEQ ID NO: 2063465 - DNA, 25 bp, Homo sapien
tttttgttgttcttactcatgcttt

SEQ ID NO: 2063466 - DNA, 25 bp, Homo sapien
cattagaaccattgacttgtatgtg

SEQ ID NO: 2063467 - DNA, 25 bp, Homo sapien
ttgatctggaggtgcatggggactc

SEQ ID NO: 2063468 - DNA, 25 bp, Homo sapien
tctggaggtgcatggggactcggtt

SEQ ID NO: 2063469 - DNA, 25 bp, Homo sapien
tgcatggggactcggtttctctgcc

SEQ ID NO: 2063470 - DNA, 25 bp, Homo sapien
gaggtgcatggggactcggtttctc

SEQ ID NO: 2063471 - DNA, 25 bp, Homo sapien
tttatattagcatacttgtgaattt

SEQ ID NO: 2063472 - DNA, 25 bp, Homo sapien
ttatattagcatacttgtgaatttt

SEQ ID NO: 2063473 - DNA, 25 bp, Homo sapien
atattagcatacttgtgaattttaa

SEQ ID NO: 2063474 - DNA, 25 bp, Homo sapien
tatattagcatacttgtgaatttta

SEQ ID NO: 2063475 - DNA, 25 bp, Homo sapien
taggcgtaagtagaactcaaggtca

SEQ ID NO: 2063476 - DNA, 25 bp, Homo sapien
gaactgagtggctccacctggaaga

SEQ ID NO: 2063477 - DNA, 25 bp, Homo sapien
ctaagggctttagccagccaaggca

SEQ ID NO: 2063478 - DNA, 25 bp, Homo sapien
tcatgctcccatgcacggcaaagta

SEQ ID NO: 2063479 - DNA, 25 bp, Homo sapien
caggcggctgccacgtgatgaaccg

SEQ ID NO: 2063480 - DNA, 25 bp, Homo sapien
cccgttcctgactcgggagggctgc

SEQ ID NO: 2063481 - DNA, 25 bp, Homo sapien
ccgggtagtagccaaatgtgatgac

SEQ ID NO: 2063482 - DNA, 25 bp, Homo sapien
tgatgactcggctaaattttcccag

SEQ ID NO: 2063483 - DNA, 25 bp, Homo sapien
cagggtctgtccaggataacgggtc

SEQ ID NO: 2063484 - DNA, 25 bp, Homo sapien
ccaggataacgggtcggcacagagt

SEQ ID NO: 2063485 - DNA, 25 bp, Homo sapien
gaagggaaattaggaggtgacgcag

SEQ ID NO: 2063486 - DNA, 25 bp, Homo sapien
aagtttatagagtatttgggcaggg

SEQ ID NO: 2063487 - DNA, 25 bp, Homo sapien
accgacaagaatattgtagggtggc

SEQ ID NO: 2063488 - DNA, 25 bp, Homo sapien
tggaatgaaaccgacaagaatattg

SEQ ID NO: 2063489 - DNA, 25 bp, Homo sapien
gaatattgtagggtggcacaagcat

SEQ ID NO: 2063490 - DNA, 25 bp, Homo sapien
tgaaaccgacaagaatattgtaggg

SEQ ID NO: 2063491 - DNA, 25 bp, Homo sapien
gccagcctggtcgacactttctgca

SEQ ID NO: 2063492 - DNA, 25 bp, Homo sapien
cagcctggtcgacactttctgcaga

SEQ ID NO: 2063493 - DNA, 25 bp, Homo sapien
tcatgccagcctggtcgacactttc

SEQ ID NO: 2063494 - DNA, 25 bp, Homo sapien
tttgcttccccacgccatgctgagg

SEQ ID NO: 2063495 - DNA, 25 bp, Homo sapien
gacactgtgttccatgccaagcagc

SEQ ID NO: 2063496 - DNA, 25 bp, Homo sapien
tcatcgtggctgattgttgcaccaa

SEQ ID NO: 2063497 - DNA, 25 bp, Homo sapien
tatcgtctcgctctgcattgggtca

SEQ ID NO: 2063498 - DNA, 25 bp, Homo sapien
tgctcaagaaacaccgtatgtcccg

SEQ ID NO: 2063499 - DNA, 25 bp, Homo sapien
acagtccactcgcctccaaggcaga

SEQ ID NO: 2063500 - DNA, 25 bp, Homo sapien
ccacagtccactcgcctccaaggca

SEQ ID NO: 2063501 - DNA, 25 bp, Homo sapien
agtccactcgcctccaaggcagaca

SEQ ID NO: 2063502 - DNA, 25 bp, Homo sapien
ctccacagtccactcgcctccaagg

SEQ ID NO: 2063503 - DNA, 25 bp, Homo sapien
gcgtggctagcttcttgctctgtgc

SEQ ID NO: 2063504 - DNA, 25 bp, Homo sapien
ccagcgtggctagcttcttgctctg

SEQ ID NO: 2063505 - DNA, 25 bp, Homo sapien
agcccagcgtggctagcttcttgct

SEQ ID NO: 2063506 - DNA, 25 bp, Homo sapien
gtggctagcttcttgctctgtgctc

SEQ ID NO: 2063507 - DNA, 25 bp, Homo sapien
agcaaacaattgtttgaggcattcg

SEQ ID NO: 2063508 - DNA, 25 bp, Homo sapien
gtttgaggcattcgtaacacttgaa

SEQ ID NO: 2063509 - DNA, 25 bp, Homo sapien
cttttcactttcacggaagcaaaca

SEQ ID NO: 2063510 - DNA, 25 bp, Homo sapien
ggcattcgtaacacttgaatgtgat

SEQ ID NO: 2063511 - DNA, 25 bp, Homo sapien
gttcccatcaacagtgaactggggc

SEQ ID NO: 2063512 - DNA, 25 bp, Homo sapien
cccatcaacagtgaactggggctct

SEQ ID NO: 2063513 - DNA, 25 bp, Homo sapien
ctgttcccatcaacagtgaactggg

SEQ ID NO: 2063514 - DNA, 25 bp, Homo sapien
tgaactggggctctgcgatgttcat

SEQ ID NO: 2063515 - DNA, 25 bp, Homo sapien
caccacagtcaatgggcagcaaagg

SEQ ID NO: 2063516 - DNA, 25 bp, Homo sapien
cgatctagagttccagagcccagtc

SEQ ID NO: 2063517 - DNA, 25 bp, Homo sapien
cacaagagctgctacccaggcagaa

SEQ ID NO: 2063518 - DNA, 25 bp, Homo sapien
tggtttgtttacagagtccagccct

SEQ ID NO: 2063519 - DNA, 25 bp, Homo sapien
taccatacctccaccagacagttat

SEQ ID NO: 2063520 - DNA, 25 bp, Homo sapien
gctgatagccagagagctgtctggt

SEQ ID NO: 2063521 - DNA, 25 bp, Homo sapien
tcacactgacagctgatagccagag

SEQ ID NO: 2063522 - DNA, 25 bp, Homo sapien
accagacagttatcacactgacagc

SEQ ID NO: 2063523 - DNA, 25 bp, Homo sapien
gagtctcagagcagtcagtgagtca

SEQ ID NO: 2063524 - DNA, 25 bp, Homo sapien
taacgaactacgagatctgagcggc

SEQ ID NO: 2063525 - DNA, 25 bp, Homo sapien
tgcgaaggcgctgagtaacgaacta

SEQ ID NO: 2063526 - DNA, 25 bp, Homo sapien
aggcattttgtagacggatgactgc

SEQ ID NO: 2063527 - DNA, 25 bp, Homo sapien
tcaattctttccctgcccagagtct

SEQ ID NO: 2063528 - DNA, 25 bp, Homo sapien
aatctccaacttcagctgggccctg

SEQ ID NO: 2063529 - DNA, 25 bp, Homo sapien
ggccctgagcacccctcaattcttt

SEQ ID NO: 2063530 - DNA, 25 bp, Homo sapien
tccaacttcagctgggccctgagca

SEQ ID NO: 2063531 - DNA, 25 bp, Homo sapien
tctggtttcatgttcatttgggcct

SEQ ID NO: 2063532 - DNA, 25 bp, Homo sapien
ttgaccacactgacaaggcctggtg

SEQ ID NO: 2063533 - DNA, 25 bp, Homo sapien
ggccttgacacgttgttttacctga

SEQ ID NO: 2063534 - DNA, 25 bp, Homo sapien
ttgtattgtctgcaaggccatttga

SEQ ID NO: 2063535 - DNA, 25 bp, Homo sapien
caatcaagaatgtgccaaggatggc

SEQ ID NO: 2063536 - DNA, 25 bp, Homo sapien
gcaatcaagaatgtgccaaggatgg

SEQ ID NO: 2063537 - DNA, 25 bp, Homo sapien
aatcaagaatgtgccaaggatggct

SEQ ID NO: 2063538 - DNA, 25 bp, Homo sapien
gcaaatccaatgtatatctcaactt

SEQ ID NO: 2063539 - DNA, 25 bp, Homo sapien
tcaatagccatatgtcactatattg

SEQ ID NO: 2063540 - DNA, 25 bp, Homo sapien
gttgcatgaaccgaaaatatacaga

SEQ ID NO: 2063541 - DNA, 25 bp, Homo sapien
ggattggaacttttagctccatcct

SEQ ID NO: 2063542 - DNA, 25 bp, Homo sapien
tagtaaagagttttgggtgataaca

SEQ ID NO: 2063543 - DNA, 25 bp, Homo sapien
tacacaagctcattatagtaaagag

SEQ ID NO: 2063544 - DNA, 25 bp, Homo sapien
ggtgaagaaatatcctcccatgtca

SEQ ID NO: 2063545 - DNA, 25 bp, Homo sapien
cccatgtcacaaccgttgggagggc

SEQ ID NO: 2063546 - DNA, 25 bp, Homo sapien
ggccgcccgcgccagtgtgagcctg

SEQ ID NO: 2063547 - DNA, 25 bp, Homo sapien
agtgtgagcctgagctgacggcggc

SEQ ID NO: 2063548 - DNA, 25 bp, Homo sapien
gaggctcgcagaaggggagggccgg

SEQ ID NO: 2063549 - DNA, 25 bp, Homo sapien
tcggccgctcttcgggccgcctctg

SEQ ID NO: 2063550 - DNA, 25 bp, Homo sapien
caaaactgaaagactcgtgttttca

SEQ ID NO: 2063551 - DNA, 25 bp, Homo sapien
cgtgttttcagataggaagcgccta

SEQ ID NO: 2063552 - DNA, 25 bp, Homo sapien
gaagcgcctactcactgaatgctaa

SEQ ID NO: 2063553 - DNA, 25 bp, Homo sapien
tatgaaattgtagaccgttaggtat

SEQ ID NO: 2063554 - DNA, 25 bp, Homo sapien
ggaatccacctgtcaatttgcaatt

SEQ ID NO: 2063555 - DNA, 25 bp, Homo sapien
cagcattttaagtattcgacacgaa

SEQ ID NO: 2063556 - DNA, 25 bp, Homo sapien
caaaaagtctcagtagccaattcac

SEQ ID NO: 2063557 - DNA, 25 bp, Homo sapien
tcgacacgaacattaaagatttggt

SEQ ID NO: 2063558 - DNA, 25 bp, Homo sapien
tgtgaacaatctattgaggttaatc

SEQ ID NO: 2063559 - DNA, 25 bp, Homo sapien
tcaagcacaatagtgagaagggggt

SEQ ID NO: 2063560 - DNA, 25 bp, Homo sapien
caatctattgaggttaatcattacc

SEQ ID NO: 2063561 - DNA, 25 bp, Homo sapien
gaggttaatcattacctttggacca

SEQ ID NO: 2063562 - DNA, 25 bp, Homo sapien
tactgtattgattccgataggtagc

SEQ ID NO: 2063563 - DNA, 25 bp, Homo sapien
aagtttctggattttatgtcttgcc

SEQ ID NO: 2063564 - DNA, 25 bp, Homo sapien
tagaatagccaattatgtcagtgcc

SEQ ID NO: 2063565 - DNA, 25 bp, Homo sapien
caatgcaaagtgagcatctttcttt

SEQ ID NO: 2063566 - DNA, 25 bp, Homo sapien
gtctgctagacacatatgacttggg

SEQ ID NO: 2063567 - DNA, 25 bp, Homo sapien
ggacattgaccttaacatagcccat

SEQ ID NO: 2063568 - DNA, 25 bp, Homo sapien
ccagcagacatcgaaggtacaaaga

SEQ ID NO: 2063569 - DNA, 25 bp, Homo sapien
gaagagagtgagacaatccccaaac

SEQ ID NO: 2063570 - DNA, 25 bp, Homo sapien
gtcaggatgctaattatacacccag

SEQ ID NO: 2063571 - DNA, 25 bp, Homo sapien
aggagacagggcaaaccttgggcct

SEQ ID NO: 2063572 - DNA, 25 bp, Homo sapien
ggtctgcgattgtccaccgtggctt

SEQ ID NO: 2063573 - DNA, 25 bp, Homo sapien
catgagatttgtaaagatggaggca

SEQ ID NO: 2063574 - DNA, 25 bp, Homo sapien
tcaagtgccagtggagtgccttgag

SEQ ID NO: 2063575 - DNA, 25 bp, Homo sapien
aagggggccgcagttcaagggcagc

SEQ ID NO: 2063576 - DNA, 25 bp, Homo sapien
ggaagggggccgcagttcaagggca

SEQ ID NO: 2063577 - DNA, 25 bp, Homo sapien
gggggccgcagttcaagggcagcag

SEQ ID NO: 2063578 - DNA, 25 bp, Homo sapien
gggccgcagttcaagggcagcagct

SEQ ID NO: 2063579 - DNA, 25 bp, Homo sapien
gaactagatggaggctaacaaggcc

SEQ ID NO: 2063580 - DNA, 25 bp, Homo sapien
ctacataacgacaacaccagggcta

SEQ ID NO: 2063581 - DNA, 25 bp, Homo sapien
tatactggcatgtctttaccctcaa

SEQ ID NO: 2063582 - DNA, 25 bp, Homo sapien
ttcaactttgtaccctaggagcctc

SEQ ID NO: 2063583 - DNA, 25 bp, Homo sapien
ggaactcacagcctagtctgggagc

SEQ ID NO: 2063584 - DNA, 25 bp, Homo sapien
ggaaggagaacctctatcttcaggg

SEQ ID NO: 2063585 - DNA, 25 bp, Homo sapien
ggcaccattcctagaggaccactga

SEQ ID NO: 2063586 - DNA, 25 bp, Homo sapien
gacacagcagggcaccattcctaga

SEQ ID NO: 2063587 - DNA, 25 bp, Homo sapien
ctaaaggacaggaacaagaatattc

SEQ ID NO: 2063588 - DNA, 25 bp, Homo sapien
cagacacagcctggattccagtcat

SEQ ID NO: 2063589 - DNA, 25 bp, Homo sapien
aaggacaggaacaagaatattccag

SEQ ID NO: 2063590 - DNA, 25 bp, Homo sapien
ggacaggaacaagaatattccagac

SEQ ID NO: 2063591 - DNA, 25 bp, Homo sapien
tcttgactgagtctgataagcttaa

SEQ ID NO: 2063592 - DNA, 25 bp, Homo sapien
cacttctatggatagaagcacaaac

SEQ ID NO: 2063593 - DNA, 25 bp, Homo sapien
agaattgggtcaaacctaatcctag

SEQ ID NO: 2063594 - DNA, 25 bp, Homo sapien
tttaagctggagagtcttttattga

SEQ ID NO: 2063595 - DNA, 25 bp, Homo sapien
tgagcacctcctacgtgtcaatagc

SEQ ID NO: 2063596 - DNA, 25 bp, Homo sapien
taacttttgaccaaaggaggtgaga

SEQ ID NO: 2063597 - DNA, 25 bp, Homo sapien
gggatacactggtaaacactacaga

SEQ ID NO: 2063598 - DNA, 25 bp, Homo sapien
gctactctaggcacttgggatacac

SEQ ID NO: 2063599 - DNA, 25 bp, Homo sapien
tttactctaaatgaaatgaggatca

SEQ ID NO: 2063600 - DNA, 25 bp, Homo sapien
gtaaggatgtagatttttactctaa

SEQ ID NO: 2063601 - DNA, 25 bp, Homo sapien
gatttaagcagagtgcagatgtctg

SEQ ID NO: 2063602 - DNA, 25 bp, Homo sapien
aaccctttagactattgtaaggatg

SEQ ID NO: 2063603 - DNA, 25 bp, Homo sapien
cttagatggtactgaaagtcaggag

SEQ ID NO: 2063604 - DNA, 25 bp, Homo sapien
gatcacggaaatgagtatagattaa

SEQ ID NO: 2063605 - DNA, 25 bp, Homo sapien
actggatgagatcacggaaatgagt

SEQ ID NO: 2063606 - DNA, 25 bp, Homo sapien
gatgagatcacggaaatgagtatag

SEQ ID NO: 2063607 - DNA, 25 bp, Homo sapien
gagcacggcaattcaaccatgtgag

SEQ ID NO: 2063608 - DNA, 25 bp, Homo sapien
tactcctttagctaggagcacggca

SEQ ID NO: 2063609 - DNA, 25 bp, Homo sapien
taggcggataattgctggagtgaca

SEQ ID NO: 2063610 - DNA, 25 bp, Homo sapien
catgcaacttagaggacagagaacg

SEQ ID NO: 2063611 - DNA, 25 bp, Homo sapien
tgtcctgtgcgtctctcgagtgtaa

SEQ ID NO: 2063612 - DNA, 25 bp, Homo sapien
acttgcaacgcctggcaaggctctt

SEQ ID NO: 2063613 - DNA, 25 bp, Homo sapien
aatatgtgattccttgactgtcctg

SEQ ID NO: 2063614 - DNA, 25 bp, Homo sapien
acacctctggggctcgtgattcggg

SEQ ID NO: 2063615 - DNA, 25 bp, Homo sapien
aaaagccctgttgaagattgatagc

SEQ ID NO: 2063616 - DNA, 25 bp, Homo sapien
tactgagagtgacagcggtatgcag

SEQ ID NO: 2063617 - DNA, 25 bp, Homo sapien
gcggtggctccatcacttgtcccaa

SEQ ID NO: 2063618 - DNA, 25 bp, Homo sapien
ttctcagtagtttcacggtcgcccc

SEQ ID NO: 2063619 - DNA, 25 bp, Homo sapien
cacaacaggataatagcggaattac

SEQ ID NO: 2063620 - DNA, 25 bp, Homo sapien
gcatccttctagtcttagtagcagc

SEQ ID NO: 2063621 - DNA, 25 bp, Homo sapien
gcggaattaccctgaattgactttc

SEQ ID NO: 2063622 - DNA, 25 bp, Homo sapien
tagtagcagcttggttactcgggtg

SEQ ID NO: 2063623 - DNA, 25 bp, Homo sapien
tgtctattacgaatacaccaacaag

SEQ ID NO: 2063624 - DNA, 25 bp, Homo sapien
caacaagtaatgatgcctgtctgag

SEQ ID NO: 2063625 - DNA, 25 bp, Homo sapien
gtaaatgtgttaccatacagagaac

SEQ ID NO: 2063626 - DNA, 25 bp, Homo sapien
tgcatagtttgatgtgccatagaca

SEQ ID NO: 2063627 - DNA, 25 bp, Homo sapien
tacctttagcactttggtattcatt

SEQ ID NO: 2063628 - DNA, 25 bp, Homo sapien
cgcaagaactacctttagcactttg

SEQ ID NO: 2063629 - DNA, 25 bp, Homo sapien
gaaaacccacacttcgcaagaacta

SEQ ID NO: 2063630 - DNA, 25 bp, Homo sapien
agcagaaaacccacacttcgcaaga

SEQ ID NO: 2063631 - DNA, 25 bp, Homo sapien
tgatctatgcccgtctctggaggtg

SEQ ID NO: 2063632 - DNA, 25 bp, Homo sapien
tggctggtcggaaaggatttcctca

SEQ ID NO: 2063633 - DNA, 25 bp, Homo sapien
cagtatgcgtttgacttaaaatgtg

SEQ ID NO: 2063634 - DNA, 25 bp, Homo sapien
taaaatgtgatagtgtctgtgtgaa

SEQ ID NO: 2063635 - DNA, 25 bp, Homo sapien
tttatgcttgcttgtattgggcccc

SEQ ID NO: 2063636 - DNA, 25 bp, Homo sapien
aacagtggacattgagcagccttgc

SEQ ID NO: 2063637 - DNA, 25 bp, Homo sapien
tataagggtagatatggcaacccct

SEQ ID NO: 2063638 - DNA, 25 bp, Homo sapien
gatagggagtatagccacatggttc

SEQ ID NO: 2063639 - DNA, 25 bp, Homo sapien
taatgaagtcccatatacccatcgc

SEQ ID NO: 2063640 - DNA, 25 bp, Homo sapien
ccatcgcacggattaagtagttaca

SEQ ID NO: 2063641 - DNA, 25 bp, Homo sapien
tctctcttatatagcgacagtgcca

SEQ ID NO: 2063642 - DNA, 25 bp, Homo sapien
gaaactcagcccatataattagcag

SEQ ID NO: 2063643 - DNA, 25 bp, Homo sapien
gaaggaatcattccagtgctagaaa

SEQ ID NO: 2063644 - DNA, 25 bp, Homo sapien
gcaaaggtggcaatgcttaaactaa

SEQ ID NO: 2063645 - DNA, 25 bp, Homo sapien
aaaagcagcgtcactctacctaatg

SEQ ID NO: 2063646 - DNA, 25 bp, Homo sapien
tcagaacttgtcaggcatggctcag

SEQ ID NO: 2063647 - DNA, 25 bp, Homo sapien
tggttattctaagccctttgccatc

SEQ ID NO: 2063648 - DNA, 25 bp, Homo sapien
actgtaccacagacacaatatgtat

SEQ ID NO: 2063649 - DNA, 25 bp, Homo sapien
taagccctttgccatcaatgatcat

SEQ ID NO: 2063650 - DNA, 25 bp, Homo sapien
gttgcagatgtattgactgtaccac

SEQ ID NO: 2063651 - DNA, 25 bp, Homo sapien
ccatcctagaaaccactgagtttgc

SEQ ID NO: 2063652 - DNA, 25 bp, Homo sapien
gcctggagaacttttagctatagaa

SEQ ID NO: 2063653 - DNA, 25 bp, Homo sapien
cagatgtgtttacttttgcctggag

SEQ ID NO: 2063654 - DNA, 25 bp, Homo sapien
aacacttgtgtgatgatagtcctcc

SEQ ID NO: 2063655 - DNA, 25 bp, Homo sapien
tagatttagtcacacgcttttgaga

SEQ ID NO: 2063656 - DNA, 25 bp, Homo sapien
catggtgttgcctttattttccggg

SEQ ID NO: 2063657 - DNA, 25 bp, Homo sapien
gaatgagagatgagccatgtacacc

SEQ ID NO: 2063658 - DNA, 25 bp, Homo sapien
gaagtatctctttggagccaagcca

SEQ ID NO: 2063659 - DNA, 25 bp, Homo sapien
tagttactcaccattttatgcagag

SEQ ID NO: 2063660 - DNA, 25 bp, Homo sapien
ggtgagttgcaggtatctttgacta

SEQ ID NO: 2063661 - DNA, 25 bp, Homo sapien
ttagttcacaccctttctgagagcc

SEQ ID NO: 2063662 - DNA, 25 bp, Homo sapien
gctcccttcgttattgccaacttta

SEQ ID NO: 2063663 - DNA, 25 bp, Homo sapien
taagcttgtggatgtcttggatctg

SEQ ID NO: 2063664 - DNA, 25 bp, Homo sapien
ttaagcttgtggatgtcttggatct

SEQ ID NO: 2063665 - DNA, 25 bp, Homo sapien
ccctggaataacagtccccattctt

SEQ ID NO: 2063666 - DNA, 25 bp, Homo sapien
aaggagaaggtgaagtgatggtgat

SEQ ID NO: 2063667 - DNA, 25 bp, Homo sapien
gaccctggaataacagtccccattc

SEQ ID NO: 2063668 - DNA, 25 bp, Homo sapien
gagaaggtgaagtgatggtgatcag

SEQ ID NO: 2063669 - DNA, 25 bp, Homo sapien
tgacaggcttaatgcaatttctacc

SEQ ID NO: 2063670 - DNA, 25 bp, Homo sapien
tgctaagaactacacaatgctgata

SEQ ID NO: 2063671 - DNA, 25 bp, Homo sapien
gaaagtgggaaggatcagtctacct

SEQ ID NO: 2063672 - DNA, 25 bp, Homo sapien
tcatggattgaaacacaacatggta

SEQ ID NO: 2063673 - DNA, 25 bp, Homo sapien
gtcagggacggctggcatcaccatc

SEQ ID NO: 2063674 - DNA, 25 bp, Homo sapien
cgtcagggacggctggcatcaccat

SEQ ID NO: 2063675 - DNA, 25 bp, Homo sapien
gctgccacagttgctgcttcaggca

SEQ ID NO: 2063676 - DNA, 25 bp, Homo sapien
cttcaggcagaaatcaggggcagtg

SEQ ID NO: 2063677 - DNA, 25 bp, Homo sapien
ttgaagaaaacctgcagagctgcca

SEQ ID NO: 2063678 - DNA, 25 bp, Homo sapien
acctgcagagctgccagggtccaca

SEQ ID NO: 2063679 - DNA, 25 bp, Homo sapien
gctggggaaacctgtgactgctgct

SEQ ID NO: 2063680 - DNA, 25 bp, Homo sapien
aactctgggaaagtccatgtcggcc

SEQ ID NO: 2063681 - DNA, 25 bp, Homo sapien
ccttatagaactctgggaaagtcca

SEQ ID NO: 2063682 - DNA, 25 bp, Homo sapien
gtccatgtcggccatgaagcagcct

SEQ ID NO: 2063683 - DNA, 25 bp, Homo sapien
gcatggagtgtacttcacatttcat

SEQ ID NO: 2063684 - DNA, 25 bp, Homo sapien
cccatgagttctcagagagcatgga

SEQ ID NO: 2063685 - DNA, 25 bp, Homo sapien
cagagagcatggagtgtacttcaca

SEQ ID NO: 2063686 - DNA, 25 bp, Homo sapien
ctctccaacccatgagttctcagag

SEQ ID NO: 2063687 - DNA, 25 bp, Homo sapien
tctgtgttgagcagtctagggctct

SEQ ID NO: 2063688 - DNA, 25 bp, Homo sapien
gttgagcagtctagggctctggtgc

SEQ ID NO: 2063689 - DNA, 25 bp, Homo sapien
tgttgagcagtctagggctctggtg

SEQ ID NO: 2063690 - DNA, 25 bp, Homo sapien
tgtgttgagcagtctagggctctgg

SEQ ID NO: 2063691 - DNA, 25 bp, Homo sapien
tcctaagaagctgggaacacaggca

SEQ ID NO: 2063692 - DNA, 25 bp, Homo sapien
ggaacacaggcacatgctaccacac

SEQ ID NO: 2063693 - DNA, 25 bp, Homo sapien
gggaacacaggcacatgctaccaca

SEQ ID NO: 2063694 - DNA, 25 bp, Homo sapien
gcctcctaagaagctgggaacacag

SEQ ID NO: 2063695 - DNA, 25 bp, Homo sapien
ccaagtagttgtgatcacaagggtg

SEQ ID NO: 2063696 - DNA, 25 bp, Homo sapien
tacttgcggtttcggacttgggcca

SEQ ID NO: 2063697 - DNA, 25 bp, Homo sapien
cacaagggtgaacttccacatccag

SEQ ID NO: 2063698 - DNA, 25 bp, Homo sapien
agacttagtccagacacctgatggg

SEQ ID NO: 2063699 - DNA, 25 bp, Homo sapien
cagggagcacagagtaagagcccgc

SEQ ID NO: 2063700 - DNA, 25 bp, Homo sapien
tcttgaccctgaagtagccataggc

SEQ ID NO: 2063701 - DNA, 25 bp, Homo sapien
ctgggactcgtagctgacactgcct

SEQ ID NO: 2063702 - DNA, 25 bp, Homo sapien
gctctgagtaggcaagacccaggga

SEQ ID NO: 2063703 - DNA, 25 bp, Homo sapien
gatctaggcagttctgtggctccct

SEQ ID NO: 2063704 - DNA, 25 bp, Homo sapien
gatctgacgacatggcagctccttg

SEQ ID NO: 2063705 - DNA, 25 bp, Homo sapien
caagatagatgtttccggagtgcag

SEQ ID NO: 2063706 - DNA, 25 bp, Homo sapien
ccctggcttttttgggcgatctgac

SEQ ID NO: 2063707 - DNA, 25 bp, Homo sapien
tgcttcctgacagaggagatcttct

SEQ ID NO: 2063708 - DNA, 25 bp, Homo sapien
tcccgagactgagtagtttacaaag

SEQ ID NO: 2063709 - DNA, 25 bp, Homo sapien
taagtgtgcatgtgccatagatcca

SEQ ID NO: 2063710 - DNA, 25 bp, Homo sapien
cccattggtgtatgagtctgttctc

SEQ ID NO: 2063711 - DNA, 25 bp, Homo sapien
tatcttttgaatatgtgtggtatct

SEQ ID NO: 2063712 - DNA, 25 bp, Homo sapien
tgaatatgtgtggtatctgcagtga

SEQ ID NO: 2063713 - DNA, 25 bp, Homo sapien
tatgtgtggtatctgcagtgatggc

SEQ ID NO: 2063714 - DNA, 25 bp, Homo sapien
ggtatctgcagtgatggcttctatt

SEQ ID NO: 2063715 - DNA, 25 bp, Homo sapien
tactcagcagcttattgattgattt

SEQ ID NO: 2063716 - DNA, 25 bp, Homo sapien
tctaaattactcagcagcttattga

SEQ ID NO: 2063717 - DNA, 25 bp, Homo sapien
aattactcagcagcttattgattga

SEQ ID NO: 2063718 - DNA, 25 bp, Homo sapien
actcagcagcttattgattgatttc

SEQ ID NO: 2063719 - DNA, 25 bp, Homo sapien
tggtcagtgtggtttctgagatgtc

SEQ ID NO: 2063720 - DNA, 25 bp, Homo sapien
agcgcttgaagtgtcatacactccc

SEQ ID NO: 2063721 - DNA, 25 bp, Homo sapien
gaacagtcagtgagcgcttgaagtg

SEQ ID NO: 2063722 - DNA, 25 bp, Homo sapien
caatccactggcaaggaacagtcag

SEQ ID NO: 2063723 - DNA, 25 bp, Homo sapien
ctccgtggttttccagttggttgat

SEQ ID NO: 2063724 - DNA, 25 bp, Homo sapien
ttgaatccaccattgtcggaatggc

SEQ ID NO: 2063725 - DNA, 25 bp, Homo sapien
ggttgatttctaggactgtaagatc

SEQ ID NO: 2063726 - DNA, 25 bp, Homo sapien
gctgccttgaatgagatgtagatct

SEQ ID NO: 2063727 - DNA, 25 bp, Homo sapien
tcctgtctatctgcagacctggtgt

SEQ ID NO: 2063728 - DNA, 25 bp, Homo sapien
gaacataaacatttcctgtaggacc

SEQ ID NO: 2063729 - DNA, 25 bp, Homo sapien
tgatgtccacaaatctatttcctgt

SEQ ID NO: 2063730 - DNA, 25 bp, Homo sapien
tttcctgtccaaattatgcaaagca

SEQ ID NO: 2063731 - DNA, 25 bp, Homo sapien
gaaattcaccctcagtgccggactc

SEQ ID NO: 2063732 - DNA, 25 bp, Homo sapien
tgtcaaccttgctcacaggtggaga

SEQ ID NO: 2063733 - DNA, 25 bp, Homo sapien
ccttaaacttggctctgcaactgcc

SEQ ID NO: 2063734 - DNA, 25 bp, Homo sapien
gactccttagccttaaacttggctc

SEQ ID NO: 2063735 - DNA, 25 bp, Homo sapien
caaggcatgtgactttatggcagga

SEQ ID NO: 2063736 - DNA, 25 bp, Homo sapien
ggcatgtgactttatggcaggattt

SEQ ID NO: 2063737 - DNA, 25 bp, Homo sapien
gcatgtgactttatggcaggatttc

SEQ ID NO: 2063738 - DNA, 25 bp, Homo sapien
aaggcatgtgactttatggcaggat

SEQ ID NO: 2063739 - DNA, 25 bp, Homo sapien
agttccagcgtagcctatctgtgcc

SEQ ID NO: 2063740 - DNA, 25 bp, Homo sapien
cagctccacaaagttccagcgtagc

SEQ ID NO: 2063741 - DNA, 25 bp, Homo sapien
tccacaaagttccagcgtagcctat

SEQ ID NO: 2063742 - DNA, 25 bp, Homo sapien
ctgcccgtgttggcactggaattcc

SEQ ID NO: 2063743 - DNA, 25 bp, Homo sapien
atttgcctttgatgtaattctagag

SEQ ID NO: 2063744 - DNA, 25 bp, Homo sapien
tgatgtaattctagagcctccttta

SEQ ID NO: 2063745 - DNA, 25 bp, Homo sapien
cctttgatgtaattctagagcctcc

SEQ ID NO: 2063746 - DNA, 25 bp, Homo sapien
ttgcctttgatgtaattctagagcc

SEQ ID NO: 2063747 - DNA, 25 bp, Homo sapien
tgccttgtagatgggctcaaggtac

SEQ ID NO: 2063748 - DNA, 25 bp, Homo sapien
acagtgggtctgaatggctccagtg

SEQ ID NO: 2063749 - DNA, 25 bp, Homo sapien
ctgcacagacggtccagtgggcagc

SEQ ID NO: 2063750 - DNA, 25 bp, Homo sapien
gctgccttgtagatgggctcaaggt

SEQ ID NO: 2063751 - DNA, 25 bp, Homo sapien
gggctgggccggatgccctgcatgc

SEQ ID NO: 2063752 - DNA, 25 bp, Homo sapien
gatgccctgcatgctgataactcca

SEQ ID NO: 2063753 - DNA, 25 bp, Homo sapien
gggccggatgccctgcatgctgata

SEQ ID NO: 2063754 - DNA, 25 bp, Homo sapien
ccggatgccctgcatgctgataact

SEQ ID NO: 2063755 - DNA, 25 bp, Homo sapien
gcgaggcatctaagtgggagcacca

SEQ ID NO: 2063756 - DNA, 25 bp, Homo sapien
tcaggtagctgtccgacttcatagg

SEQ ID NO: 2063757 - DNA, 25 bp, Homo sapien
gaaaatggtccattgcgaagctgga

SEQ ID NO: 2063758 - DNA, 25 bp, Homo sapien
ctcaaggaggcggagaagattctct

SEQ ID NO: 2063759 - DNA, 25 bp, Homo sapien
ttcctgatatgggaaaacccaggtg

SEQ ID NO: 2063760 - DNA, 25 bp, Homo sapien
ccttgagcactctgggcgagatgaa

SEQ ID NO: 2063761 - DNA, 25 bp, Homo sapien
cgttcatatctacaagacggcagct

SEQ ID NO: 2063762 - DNA, 25 bp, Homo sapien
catccacaggtgaaatgtacgagta

SEQ ID NO: 2063763 - DNA, 25 bp, Homo sapien
tgcctgtactaggtgggtcgctcct

SEQ ID NO: 2063764 - DNA, 25 bp, Homo sapien
tggaactagggcagcaataacctca

SEQ ID NO: 2063765 - DNA, 25 bp, Homo sapien
caagtggatgttctatgctctcagg

SEQ ID NO: 2063766 - DNA, 25 bp, Homo sapien
tctggcaaactggacatgatggcgt

SEQ ID NO: 2063767 - DNA, 25 bp, Homo sapien
gagtcaactgctaggtcttctgagc

SEQ ID NO: 2063768 - DNA, 25 bp, Homo sapien
ggtagtgtatctccaaaccagaagt

SEQ ID NO: 2063769 - DNA, 25 bp, Homo sapien
gatatcattcttgcgcggctaggag

SEQ ID NO: 2063770 - DNA, 25 bp, Homo sapien
cagaagtttcctgtgctaaatgggc

SEQ ID NO: 2063771 - DNA, 25 bp, Homo sapien
tatatagtttcctgtacgcatggca

SEQ ID NO: 2063772 - DNA, 25 bp, Homo sapien
tacatgataatcctcccagggcagg

SEQ ID NO: 2063773 - DNA, 25 bp, Homo sapien
gggcaggcccatttttgtttcgaga

SEQ ID NO: 2063774 - DNA, 25 bp, Homo sapien
tactatgtaggtgtgggtctgctgc

SEQ ID NO: 2063775 - DNA, 25 bp, Homo sapien
ccaactatgtgaagattagagggct

SEQ ID NO: 2063776 - DNA, 25 bp, Homo sapien
taacttgagcttgccagcatagatg

SEQ ID NO: 2063777 - DNA, 25 bp, Homo sapien
tgtcaaaataaagaagctaggtgct

SEQ ID NO: 2063778 - DNA, 25 bp, Homo sapien
tgtcaagtacacaaccaaggaataa

SEQ ID NO: 2063779 - DNA, 25 bp, Homo sapien
cctgctttagtttcctaatgctgcc

SEQ ID NO: 2063780 - DNA, 25 bp, Homo sapien
ccttaacaagttaccacagtggctt

SEQ ID NO: 2063781 - DNA, 25 bp, Homo sapien
gttacagtaaatatggaattgccaa

SEQ ID NO: 2063782 - DNA, 25 bp, Homo sapien
tgtcctttaattccctattacctgc

SEQ ID NO: 2063783 - DNA, 25 bp, Homo sapien
caaggcctatcacaataatgaacag

SEQ ID NO: 2063784 - DNA, 25 bp, Homo sapien
cacaaggcctatcacaataatgaac

SEQ ID NO: 2063785 - DNA, 25 bp, Homo sapien
aaggcctatcacaataatgaacaga

SEQ ID NO: 2063786 - DNA, 25 bp, Homo sapien
acaaggcctatcacaataatgaaca

SEQ ID NO: 2063787 - DNA, 25 bp, Homo sapien
tctctgtactttcaattgtactgtc

SEQ ID NO: 2063788 - DNA, 25 bp, Homo sapien
ctttcaattgtactgtcaatttcta

SEQ ID NO: 2063789 - DNA, 25 bp, Homo sapien
tctactaatgctatcttctcagact

SEQ ID NO: 2063790 - DNA, 25 bp, Homo sapien
ctgtactttcaattgtactgtcaat

SEQ ID NO: 2063791 - DNA, 25 bp, Homo sapien
cttcaactacatctgcagttttcat

SEQ ID NO: 2063792 - DNA, 25 bp, Homo sapien
tcatgcggtggcagcaggtaacatc

SEQ ID NO: 2063793 - DNA, 25 bp, Homo sapien
aaatgtcggatacagaggtacccca

SEQ ID NO: 2063794 - DNA, 25 bp, Homo sapien
tgagatcatttaagcggcagcgcca

SEQ ID NO: 2063795 - DNA, 25 bp, Homo sapien
ttagagcttgaagggtggttccacc

SEQ ID NO: 2063796 - DNA, 25 bp, Homo sapien
gaagctttccgtacccaacagcgaa

SEQ ID NO: 2063797 - DNA, 25 bp, Homo sapien
cttttagaagacactcggcggcgca

SEQ ID NO: 2063798 - DNA, 25 bp, Homo sapien
ggtgttccacgaatacagcccaagt

SEQ ID NO: 2063799 - DNA, 25 bp, Homo sapien
tacagttaagataggcggcagtgag

SEQ ID NO: 2063800 - DNA, 25 bp, Homo sapien
tgggtcgcccgagaaacttcacact

SEQ ID NO: 2063801 - DNA, 25 bp, Homo sapien
atcttcacatctggtcgaccctcgg

SEQ ID NO: 2063802 - DNA, 25 bp, Homo sapien
tcacactttttaccaggcaagacgg

SEQ ID NO: 2063803 - DNA, 25 bp, Homo sapien
cgtgggttttcgcaaggtgacccat

SEQ ID NO: 2063804 - DNA, 25 bp, Homo sapien
acgcactcggtggtgttgacgctct

SEQ ID NO: 2063805 - DNA, 25 bp, Homo sapien
taggcgtgggacagcatcgccgcca

SEQ ID NO: 2063806 - DNA, 25 bp, Homo sapien
tgacgctctttctccggagcagggc

SEQ ID NO: 2063807 - DNA, 25 bp, Homo sapien
cgtgggacagcatcgccgccatcat

SEQ ID NO: 2063808 - DNA, 25 bp, Homo sapien
gcatcgtcccctccgtacagcaccc

SEQ ID NO: 2063809 - DNA, 25 bp, Homo sapien
cctgggcatcgtcccctccgtacag

SEQ ID NO: 2063810 - DNA, 25 bp, Homo sapien
gggcatcgtcccctccgtacagcac

SEQ ID NO: 2063811 - DNA, 25 bp, Homo sapien
ccctgggcatcgtcccctccgtaca

SEQ ID NO: 2063812 - DNA, 25 bp, Homo sapien
tcccgggcatcgaacctggcggctg

SEQ ID NO: 2063813 - DNA, 25 bp, Homo sapien
agcagcagcgacgaccggtcctcct

SEQ ID NO: 2063814 - DNA, 25 bp, Homo sapien
cccgcccgggatctgctgggtctga

SEQ ID NO: 2063815 - DNA, 25 bp, Homo sapien
ggcggagcccgctcctctggagaca

SEQ ID NO: 2063816 - DNA, 25 bp, Homo sapien
gcgcgtgcggtcgaagcgcacacct

SEQ ID NO: 2063817 - DNA, 25 bp, Homo sapien
cagcagaggctgaaactaagggcca

SEQ ID NO: 2063818 - DNA, 25 bp, Homo sapien
cgaagcgcacacctggatttgtttc

SEQ ID NO: 2063819 - DNA, 25 bp, Homo sapien
ttcatccctgtagcccatgtggctg

SEQ ID NO: 2063820 - DNA, 25 bp, Homo sapien
agctgtggcaatatccgaaagtggg

SEQ ID NO: 2063821 - DNA, 25 bp, Homo sapien
gcaatatccgaaagtgggaagttgg

SEQ ID NO: 2063822 - DNA, 25 bp, Homo sapien
ctgtggcaatatccgaaagtgggaa

SEQ ID NO: 2063823 - DNA, 25 bp, Homo sapien
ggcaatatccgaaagtgggaagttg

SEQ ID NO: 2063824 - DNA, 25 bp, Homo sapien
gaggcggaagtattgatttgactta

SEQ ID NO: 2063825 - DNA, 25 bp, Homo sapien
gatttgacttagatatggactttta

SEQ ID NO: 2063826 - DNA, 25 bp, Homo sapien
gccggcacgtgactcagtgccaata

SEQ ID NO: 2063827 - DNA, 25 bp, Homo sapien
tggacttttaatgccggcacgtgac

SEQ ID NO: 2063828 - DNA, 25 bp, Homo sapien
catcagtgcagtagtgtagactctg

SEQ ID NO: 2063829 - DNA, 25 bp, Homo sapien
tctgtgatgggagtcctatccgggc

SEQ ID NO: 2063830 - DNA, 25 bp, Homo sapien
gctgaacatgccatcaaggcctgtc

SEQ ID NO: 2063831 - DNA, 25 bp, Homo sapien
tctgcagcatcagtgcagtagtgta

SEQ ID NO: 2063832 - DNA, 25 bp, Homo sapien
ggatggcaagcagtggaaggtgaaa

SEQ ID NO: 2063833 - DNA, 25 bp, Homo sapien
tgggatggcaagcagtggaaggtga

SEQ ID NO: 2063834 - DNA, 25 bp, Homo sapien
gaaagctgggttgttcctgctgatg

SEQ ID NO: 2063835 - DNA, 25 bp, Homo sapien
ctttgggatggcaagcagtggaagg

SEQ ID NO: 2063836 - DNA, 25 bp, Homo sapien
tccaagcccaagactcctgagtcat

SEQ ID NO: 2063837 - DNA, 25 bp, Homo sapien
ctttgagtggcttcgctcacaggac

SEQ ID NO: 2063838 - DNA, 25 bp, Homo sapien
catctttgtgtagagggagccccag

SEQ ID NO: 2063839 - DNA, 25 bp, Homo sapien
tagggtaaccaggagtcccctctga

SEQ ID NO: 2063840 - DNA, 25 bp, Homo sapien
tatcagtatgatgcctgtttcccat

SEQ ID NO: 2063841 - DNA, 25 bp, Homo sapien
cttatcagtatgatgcctgtttccc

SEQ ID NO: 2063842 - DNA, 25 bp, Homo sapien
ttatcagtatgatgcctgtttccca

SEQ ID NO: 2063843 - DNA, 25 bp, Homo sapien
aggaatctggacagtagaacacaaa

SEQ ID NO: 2063844 - DNA, 25 bp, Homo sapien
tggtaatgaagctgctgcagttatc

SEQ ID NO: 2063845 - DNA, 25 bp, Homo sapien
tgagcacttggtaatgaagctgctg

SEQ ID NO: 2063846 - DNA, 25 bp, Homo sapien
cggaggacgtggcatgagcacttgg

SEQ ID NO: 2063847 - DNA, 25 bp, Homo sapien
cacttggtaatgaagctgctgcagt

SEQ ID NO: 2063848 - DNA, 25 bp, Homo sapien
atgtgtctaatagcactgggctcag

SEQ ID NO: 2063849 - DNA, 25 bp, Homo sapien
aatctccatgtgtctaatagcactg

SEQ ID NO: 2063850 - DNA, 25 bp, Homo sapien
tccatgtgtctaatagcactgggct

SEQ ID NO: 2063851 - DNA, 25 bp, Homo sapien
agggccctgcatactcgaacactca

SEQ ID NO: 2063852 - DNA, 25 bp, Homo sapien
aaaggtgtcatgatctggtaggagc

SEQ ID NO: 2063853 - DNA, 25 bp, Homo sapien
ctactgtctgggagtgttagggcaa

SEQ ID NO: 2063854 - DNA, 25 bp, Homo sapien
tgagggtctgctgaactgactctct

SEQ ID NO: 2063855 - DNA, 25 bp, Homo sapien
tgtattttcagactaagtcttctac

SEQ ID NO: 2063856 - DNA, 25 bp, Homo sapien
ttgtgattgtggtatctcctatgcc

SEQ ID NO: 2063857 - DNA, 25 bp, Homo sapien
taatcgcaggtatcagcacatctag

SEQ ID NO: 2063858 - DNA, 25 bp, Homo sapien
gattgtggtatctcctatgccaggt

SEQ ID NO: 2063859 - DNA, 25 bp, Homo sapien
cccgcatttgggataatcgcaggta

SEQ ID NO: 2063860 - DNA, 25 bp, Homo sapien
tcctgaccgggcatctgggaatgtc

SEQ ID NO: 2063861 - DNA, 25 bp, Homo sapien
tgattccaggtcttttggcccacaa

SEQ ID NO: 2063862 - DNA, 25 bp, Homo sapien
agtctggtcggaggagttgttcatc

SEQ ID NO: 2063863 - DNA, 25 bp, Homo sapien
tgtaataagtaactcctgattccag

SEQ ID NO: 2063864 - DNA, 25 bp, Homo sapien
tacagatggctggacaagtgaactc

SEQ ID NO: 2063865 - DNA, 25 bp, Homo sapien
cctggatctttctgaagggctgaag

SEQ ID NO: 2063866 - DNA, 25 bp, Homo sapien
tctgagaggcaagacataagccctg

SEQ ID NO: 2063867 - DNA, 25 bp, Homo sapien
aagggaatgtgcttgcggcttgcaa

SEQ ID NO: 2063868 - DNA, 25 bp, Homo sapien
tcccactcccatcattcaggattct

SEQ ID NO: 2063869 - DNA, 25 bp, Homo sapien
gctcccactcccatcattcaggatt

SEQ ID NO: 2063870 - DNA, 25 bp, Homo sapien
ggtgccagactctccttggctccca

SEQ ID NO: 2063871 - DNA, 25 bp, Homo sapien
ccactcccatcattcaggattcttg

SEQ ID NO: 2063872 - DNA, 25 bp, Homo sapien
gatgtatgcaggaggtacaccagta

SEQ ID NO: 2063873 - DNA, 25 bp, Homo sapien
ggtgatgtatgcaggaggtacacca

SEQ ID NO: 2063874 - DNA, 25 bp, Homo sapien
tgtatgcaggaggtacaccagtagg

SEQ ID NO: 2063875 - DNA, 25 bp, Homo sapien
ctggtgatgtatgcaggaggtacac

SEQ ID NO: 2063876 - DNA, 25 bp, Homo sapien
ggcttgaaggtgtccattcagagaa

SEQ ID NO: 2063877 - DNA, 25 bp, Homo sapien
tggcttgaaggtgtccattcagaga

SEQ ID NO: 2063878 - DNA, 25 bp, Homo sapien
cattgggagcagatggcttgaaggt

SEQ ID NO: 2063879 - DNA, 25 bp, Homo sapien
atggcttgaaggtgtccattcagag

SEQ ID NO: 2063880 - DNA, 25 bp, Homo sapien
ctagcagcagcaggataggtgattt

SEQ ID NO: 2063881 - DNA, 25 bp, Homo sapien
gtggagggctaagggttatatagaa

SEQ ID NO: 2063882 - DNA, 25 bp, Homo sapien
ggatgtggagggctaagggttatat

SEQ ID NO: 2063883 - DNA, 25 bp, Homo sapien
tgggggaagaggcctagcagcagca

SEQ ID NO: 2063884 - DNA, 25 bp, Homo sapien
tgggcttcctccatattaattcttc

SEQ ID NO: 2063885 - DNA, 25 bp, Homo sapien
tccactgttgattcactagacatag

SEQ ID NO: 2063886 - DNA, 25 bp, Homo sapien
gacataggtgatggcttccttttct

SEQ ID NO: 2063887 - DNA, 25 bp, Homo sapien
atgagttagattttccccaacgctt

SEQ ID NO: 2063888 - DNA, 25 bp, Homo sapien
ccagctactgatctgctgataggtt

SEQ ID NO: 2063889 - DNA, 25 bp, Homo sapien
tgatttctgaaccacgagtctgatt

SEQ ID NO: 2063890 - DNA, 25 bp, Homo sapien
gaaccacgagtctgatttccacctc

SEQ ID NO: 2063891 - DNA, 25 bp, Homo sapien
actcttctcatagctctctctccag

SEQ ID NO: 2063892 - DNA, 25 bp, Homo sapien
ttgtgacagacacgagcccagcatg

SEQ ID NO: 2063893 - DNA, 25 bp, Homo sapien
catccctccagtgtaatacttgtga

SEQ ID NO: 2063894 - DNA, 25 bp, Homo sapien
gtctgcagtgaggagtattgttttc

SEQ ID NO: 2063895 - DNA, 25 bp, Homo sapien
tgtgactcagctggcgtgctcatgg

SEQ ID NO: 2063896 - DNA, 25 bp, Homo sapien
ttaagggtggagttggcctctctcc

SEQ ID NO: 2063897 - DNA, 25 bp, Homo sapien
attaagggtggagttggcctctctc

SEQ ID NO: 2063898 - DNA, 25 bp, Homo sapien
cattaagggtggagttggcctctct

SEQ ID NO: 2063899 - DNA, 25 bp, Homo sapien
gcagcggaggcttggtaatgacata

SEQ ID NO: 2063900 - DNA, 25 bp, Homo sapien
taaaggcagcccaaggttaacaatg

SEQ ID NO: 2063901 - DNA, 25 bp, Homo sapien
aatggataatttgccgctgtttgcc

SEQ ID NO: 2063902 - DNA, 25 bp, Homo sapien
gaaggctgtttttccgtggtgtgca

SEQ ID NO: 2063903 - DNA, 25 bp, Homo sapien
cagtttgtataactgtgttttactc

SEQ ID NO: 2063904 - DNA, 25 bp, Homo sapien
tgttttactctttaactcacttcca

SEQ ID NO: 2063905 - DNA, 25 bp, Homo sapien
caacaaatgagcagccatgattttc

SEQ ID NO: 2063906 - DNA, 25 bp, Homo sapien
cttccacaacaaatgagcagccatg

SEQ ID NO: 2063907 - DNA, 25 bp, Homo sapien
acatccatatcaaccgctccttagt

SEQ ID NO: 2063908 - DNA, 25 bp, Homo sapien
catatcaaccgctccttagtcttct

SEQ ID NO: 2063909 - DNA, 25 bp, Homo sapien
cttagtcttcttcaaaaagtgctca

SEQ ID NO: 2063910 - DNA, 25 bp, Homo sapien
caaccgctccttagtcttcttcaaa

SEQ ID NO: 2063911 - DNA, 25 bp, Homo sapien
caggtgtcttgtcagttctatgtgg

SEQ ID NO: 2063912 - DNA, 25 bp, Homo sapien
tccattctgagctccaactatgcca

SEQ ID NO: 2063913 - DNA, 25 bp, Homo sapien
tcttgtcagttctatgtggaggttc

SEQ ID NO: 2063914 - DNA, 25 bp, Homo sapien
aggctgccaggtccattctgagctc

SEQ ID NO: 2063915 - DNA, 25 bp, Homo sapien
tagatattcctcttaagcttccttg

SEQ ID NO: 2063916 - DNA, 25 bp, Homo sapien
gactactgttacttctgccaccctt

SEQ ID NO: 2063917 - DNA, 25 bp, Homo sapien
gatattcctcttaagcttccttggc

SEQ ID NO: 2063918 - DNA, 25 bp, Homo sapien
ctcgcttgatttgactactgttact

SEQ ID NO: 2063919 - DNA, 25 bp, Homo sapien
attgcagcagctagtgtcatcaggg

SEQ ID NO: 2063920 - DNA, 25 bp, Homo sapien
agcagctagtgtcatcaggggcccg

SEQ ID NO: 2063921 - DNA, 25 bp, Homo sapien
cagcagctagtgtcatcaggggccc

SEQ ID NO: 2063922 - DNA, 25 bp, Homo sapien
gcaggtctggcactttatgtgatga

SEQ ID NO: 2063923 - DNA, 25 bp, Homo sapien
gatgatggtggcacatctaacaatt

SEQ ID NO: 2063924 - DNA, 25 bp, Homo sapien
gggcttgagtatgaattagcaggtc

SEQ ID NO: 2063925 - DNA, 25 bp, Homo sapien
tttgtcatcttcatggcaccgcttc

SEQ ID NO: 2063926 - DNA, 25 bp, Homo sapien
tacattgagctatgacagctctcct

SEQ ID NO: 2063927 - DNA, 25 bp, Homo sapien
tagcatacattgagctatgacagct

SEQ ID NO: 2063928 - DNA, 25 bp, Homo sapien
tttccagctttcctcgtagcatcca

SEQ ID NO: 2063929 - DNA, 25 bp, Homo sapien
gcatccactttacacttagcataca

SEQ ID NO: 2063930 - DNA, 25 bp, Homo sapien
agctgccaattggatatgggtattg

SEQ ID NO: 2063931 - DNA, 25 bp, Homo sapien
aaacgtcttgcgagctgagtcaggg

SEQ ID NO: 2063932 - DNA, 25 bp, Homo sapien
ctgagccaatcagggtcttgcttgg

SEQ ID NO: 2063933 - DNA, 25 bp, Homo sapien
tatgggtattgtagctgaaacgtct

SEQ ID NO: 2063934 - DNA, 25 bp, Homo sapien
tgtgatggcaatgagaagtcaacac

SEQ ID NO: 2063935 - DNA, 25 bp, Homo sapien
ctgtgatggcaatgagaagtcaaca

SEQ ID NO: 2063936 - DNA, 25 bp, Homo sapien
gtgatggcaatgagaagtcaacaca

SEQ ID NO: 2063937 - DNA, 25 bp, Homo sapien
gaatgttcgttctctaaggacaggg

SEQ ID NO: 2063938 - DNA, 25 bp, Homo sapien
gacttacctgcccttgacattggag

SEQ ID NO: 2063939 - DNA, 25 bp, Homo sapien
agtattcattctacctgggcaccca

SEQ ID NO: 2063940 - DNA, 25 bp, Homo sapien
tatggtaaggtcaggacagcttccc

SEQ ID NO: 2063941 - DNA, 25 bp, Homo sapien
tctgtgacggtagcaaaataaatga

SEQ ID NO: 2063942 - DNA, 25 bp, Homo sapien
gatgcacttgttagcctggcccttg

SEQ ID NO: 2063943 - DNA, 25 bp, Homo sapien
aacccatgctgatgctggatgcact

SEQ ID NO: 2063944 - DNA, 25 bp, Homo sapien
gctggtgtctgtgacggtagcaaaa

SEQ ID NO: 2063945 - DNA, 25 bp, Homo sapien
ctggtaactgagacatcaggtccca

SEQ ID NO: 2063946 - DNA, 25 bp, Homo sapien
gatactaccctgagattttggaact

SEQ ID NO: 2063947 - DNA, 25 bp, Homo sapien
cccgctgatactaccctgagatttt

SEQ ID NO: 2063948 - DNA, 25 bp, Homo sapien
tttggaactggtaactgagacatca

SEQ ID NO: 2063949 - DNA, 25 bp, Homo sapien
cctggattgatgaaagagtctcctt

SEQ ID NO: 2063950 - DNA, 25 bp, Homo sapien
tccttgggaatatacctgccctcca

SEQ ID NO: 2063951 - DNA, 25 bp, Homo sapien
ttgcacctggattgatgaaagagtc

SEQ ID NO: 2063952 - DNA, 25 bp, Homo sapien
tcatcaccttgcacctggattgatg

SEQ ID NO: 2063953 - DNA, 25 bp, Homo sapien
ttatactctactgaaaatctgctgt

SEQ ID NO: 2063954 - DNA, 25 bp, Homo sapien
actgaaaatctgctgtaagacattc

SEQ ID NO: 2063955 - DNA, 25 bp, Homo sapien
tgaaaatctgctgtaagacattcac

SEQ ID NO: 2063956 - DNA, 25 bp, Homo sapien
ctgaaaatctgctgtaagacattca

SEQ ID NO: 2063957 - DNA, 25 bp, Homo sapien
agagaaactagggtgtcccctgagg

SEQ ID NO: 2063958 - DNA, 25 bp, Homo sapien
aattccggagaggagagaattcagg

SEQ ID NO: 2063959 - DNA, 25 bp, Homo sapien
ggagagaaactagggtgtcccctga

SEQ ID NO: 2063960 - DNA, 25 bp, Homo sapien
acacacactgggaattccggagagg

SEQ ID NO: 2063961 - DNA, 25 bp, Homo sapien
ggctctgacattatttcagcttcct

SEQ ID NO: 2063962 - DNA, 25 bp, Homo sapien
acatccatcagcaaatcgggctctg

SEQ ID NO: 2063963 - DNA, 25 bp, Homo sapien
cagcaaatcgggctctgacattatt

SEQ ID NO: 2063964 - DNA, 25 bp, Homo sapien
aatcgggctctgacattatttcagc

SEQ ID NO: 2063965 - DNA, 25 bp, Homo sapien
tagctcagcattagtgtctgctgca

SEQ ID NO: 2063966 - DNA, 25 bp, Homo sapien
agcattagtgtctgctgcacagctt

SEQ ID NO: 2063967 - DNA, 25 bp, Homo sapien
aaatagctcagcattagtgtctgct

SEQ ID NO: 2063968 - DNA, 25 bp, Homo sapien
cacagcttaaaggttcttgctgtct

SEQ ID NO: 2063969 - DNA, 25 bp, Homo sapien
tagaagtctccttctctgttgcagg

SEQ ID NO: 2063970 - DNA, 25 bp, Homo sapien
ccagtggtgtaaaattcttcccaag

SEQ ID NO: 2063971 - DNA, 25 bp, Homo sapien
tgttgcaggttacagcatagcttgt

SEQ ID NO: 2063972 - DNA, 25 bp, Homo sapien
ccaagacctgagtgatgaactcact

SEQ ID NO: 2063973 - DNA, 25 bp, Homo sapien
agtggatcaacttggttttgtacat

SEQ ID NO: 2063974 - DNA, 25 bp, Homo sapien
acatgccaatgtgcctgacaaacac

SEQ ID NO: 2063975 - DNA, 25 bp, Homo sapien
atgccaatgtgcctgacaaacacat

SEQ ID NO: 2063976 - DNA, 25 bp, Homo sapien
ggttgatgtaatgccacatgccaat

SEQ ID NO: 2063977 - DNA, 25 bp, Homo sapien
ccacatgccaatgtgcctgacaaac

SEQ ID NO: 2063978 - DNA, 25 bp, Homo sapien
ttaccaaatcatccgaagtggctcc

SEQ ID NO: 2063979 - DNA, 25 bp, Homo sapien
cagaaatgcagttcatcgcaggagt

SEQ ID NO: 2063980 - DNA, 25 bp, Homo sapien
ggaccgaaaatgctgacgccaatgc

SEQ ID NO: 2063981 - DNA, 25 bp, Homo sapien
aaagcagccgtggacgtggagttac

SEQ ID NO: 2063982 - DNA, 25 bp, Homo sapien
ggccaacttcaacccgtatggaaga

SEQ ID NO: 2063983 - DNA, 25 bp, Homo sapien
tatagcaaggccaacttcaacccgt

SEQ ID NO: 2063984 - DNA, 25 bp, Homo sapien
tcaacccgtatggaagatgtggctg

SEQ ID NO: 2063985 - DNA, 25 bp, Homo sapien
gagctactatagcaaggccaacttc

SEQ ID NO: 2063986 - DNA, 25 bp, Homo sapien
tcgttgaagtatttggcagggctcc

SEQ ID NO: 2063987 - DNA, 25 bp, Homo sapien
ctatatgtccagcaggattacaggc

SEQ ID NO: 2063988 - DNA, 25 bp, Homo sapien
gccaggtactatatgtccagcagga

SEQ ID NO: 2063989 - DNA, 25 bp, Homo sapien
ggctcccacgtaggccaggtactat

SEQ ID NO: 2063990 - DNA, 25 bp, Homo sapien
ttgcctccaggataaacaacgatgg

SEQ ID NO: 2063991 - DNA, 25 bp, Homo sapien
acaacactgaccacaacaacataaa

SEQ ID NO: 2063992 - DNA, 25 bp, Homo sapien
tcgcaattgggctgaagataaactg

SEQ ID NO: 2063993 - DNA, 25 bp, Homo sapien
gataaacaacgatggcaacaacact

SEQ ID NO: 2063994 - DNA, 25 bp, Homo sapien
ttatgctcccatgtggataaaggaa

SEQ ID NO: 2063995 - DNA, 25 bp, Homo sapien
gagcaggctcttgcctacaaaaacc

SEQ ID NO: 2063996 - DNA, 25 bp, Homo sapien
acaaaaacctggcttagctcattta

SEQ ID NO: 2063997 - DNA, 25 bp, Homo sapien
tggtggcatcgttgcttcgtgtgca

SEQ ID NO: 2063998 - DNA, 25 bp, Homo sapien
caggcgaacagctgcagtcagggct

SEQ ID NO: 2063999 - DNA, 25 bp, Homo sapien
aggcgaacagctgcagtcagggctg

SEQ ID NO: 2064000 - DNA, 25 bp, Homo sapien
acaggcgaacagctgcagtcagggc

SEQ ID NO: 2064001 - DNA, 25 bp, Homo sapien
ggacaggcgaacagctgcagtcagg

SEQ ID NO: 2064002 - DNA, 25 bp, Homo sapien
gaacagtctgagctctagctgagat

SEQ ID NO: 2064003 - DNA, 25 bp, Homo sapien
ggaacagtctgagctctagctgaga

SEQ ID NO: 2064004 - DNA, 25 bp, Homo sapien
acagtctgagctctagctgagatat

SEQ ID NO: 2064005 - DNA, 25 bp, Homo sapien
aacagtctgagctctagctgagata

SEQ ID NO: 2064006 - DNA, 25 bp, Homo sapien
gcatcctttccaattatccctctct

SEQ ID NO: 2064007 - DNA, 25 bp, Homo sapien
gtgcatcctttccaattatccctct

SEQ ID NO: 2064008 - DNA, 25 bp, Homo sapien
ggtgcatcctttccaattatccctc

SEQ ID NO: 2064009 - DNA, 25 bp, Homo sapien
atcctttccaattatccctctctta

SEQ ID NO: 2064010 - DNA, 25 bp, Homo sapien
caaaattactggctgggacattgac

SEQ ID NO: 2064011 - DNA, 25 bp, Homo sapien
ccccatactgcaggcttagaaaaat

SEQ ID NO: 2064012 - DNA, 25 bp, Homo sapien
agtctactgcacttcttagggcacg

SEQ ID NO: 2064013 - DNA, 25 bp, Homo sapien
cattctctctacttgggatacaggc

SEQ ID NO: 2064014 - DNA, 25 bp, Homo sapien
gaatgaccaaggggactacccaagc

SEQ ID NO: 2064015 - DNA, 25 bp, Homo sapien
cattgcatagatgttcagcattgtt

SEQ ID NO: 2064016 - DNA, 25 bp, Homo sapien
cagcattgtttttgtctgcgatgaa

SEQ ID NO: 2064017 - DNA, 25 bp, Homo sapien
agaaaaagcattgcatagatgttca

SEQ ID NO: 2064018 - DNA, 25 bp, Homo sapien
tctccttagaccatgttgagttggg

SEQ ID NO: 2064019 - DNA, 25 bp, Homo sapien
tctggagaagatagtgatgcatcac

SEQ ID NO: 2064020 - DNA, 25 bp, Homo sapien
gccttttaagagcaaggattggcca

SEQ ID NO: 2064021 - DNA, 25 bp, Homo sapien
gacttataatgcttctcccactaga

SEQ ID NO: 2064022 - DNA, 25 bp, Homo sapien
gctgcaggtctggttgtgtacatac

SEQ ID NO: 2064023 - DNA, 25 bp, Homo sapien
tgttgctgcaggtctggttgtgtac

SEQ ID NO: 2064024 - DNA, 25 bp, Homo sapien
tgctgcaggtctggttgtgtacata

SEQ ID NO: 2064025 - DNA, 25 bp, Homo sapien
gttgctgcaggtctggttgtgtaca

SEQ ID NO: 2064026 - DNA, 25 bp, Homo sapien
tcacccagatcagcacctattgtct

SEQ ID NO: 2064027 - DNA, 25 bp, Homo sapien
cccagatcagcacctattgtctttt

SEQ ID NO: 2064028 - DNA, 25 bp, Homo sapien
cccaaaaaattcatcctcacccaga

SEQ ID NO: 2064029 - DNA, 25 bp, Homo sapien
tcagcacctattgtctttttcctta

SEQ ID NO: 2064030 - DNA, 25 bp, Homo sapien
cattgctgtagggtcttgttctcgg

SEQ ID NO: 2064031 - DNA, 25 bp, Homo sapien
tagcgatgccaaacacaaaggcttc

SEQ ID NO: 2064032 - DNA, 25 bp, Homo sapien
tactctattaaaacctgctgcttct

SEQ ID NO: 2064033 - DNA, 25 bp, Homo sapien
tcagaaggaattgccaaattctggg

SEQ ID NO: 2064034 - DNA, 25 bp, Homo sapien
tcatcaggttttcagcaattagcat

SEQ ID NO: 2064035 - DNA, 25 bp, Homo sapien
ggtttcatcaggttttcagcaatta

SEQ ID NO: 2064036 - DNA, 25 bp, Homo sapien
agcctgactgtggtttcatcaggtt

SEQ ID NO: 2064037 - DNA, 25 bp, Homo sapien
tttcatcaggttttcagcaattagc

SEQ ID NO: 2064038 - DNA, 25 bp, Homo sapien
gtaatggtgattgagaaaagcaggt

SEQ ID NO: 2064039 - DNA, 25 bp, Homo sapien
aaggtaatggtgattgagaaaagca

SEQ ID NO: 2064040 - DNA, 25 bp, Homo sapien
aggtacaggaaagtgtgtataacac

SEQ ID NO: 2064041 - DNA, 25 bp, Homo sapien
tacaggaaagtgtgtataacaccat

SEQ ID NO: 2064042 - DNA, 25 bp, Homo sapien
ttctcatgtttacagcggttggtgg

SEQ ID NO: 2064043 - DNA, 25 bp, Homo sapien
gcttgaaacggtggggggctctcga

SEQ ID NO: 2064044 - DNA, 25 bp, Homo sapien
tcttgtcctgaggtgcttgaaacgg

SEQ ID NO: 2064045 - DNA, 25 bp, Homo sapien
tctcatgtttacagcggttggtggg

SEQ ID NO: 2064046 - DNA, 25 bp, Homo sapien
tgatacttgcttgacccttgctgct

SEQ ID NO: 2064047 - DNA, 25 bp, Homo sapien
ttccttgggctccacttcctgacag

SEQ ID NO: 2064048 - DNA, 25 bp, Homo sapien
acttgtctgagtacatggccagcca

SEQ ID NO: 2064049 - DNA, 25 bp, Homo sapien
gaatttctgtgtcagttactgcagc

SEQ ID NO: 2064050 - DNA, 25 bp, Homo sapien
aggatgacctgaatttgcctcttac

SEQ ID NO: 2064051 - DNA, 25 bp, Homo sapien
acttgggcaagagtcttccctctgc

SEQ ID NO: 2064052 - DNA, 25 bp, Homo sapien
ctgcaaggatgacctgaatttgcct

SEQ ID NO: 2064053 - DNA, 25 bp, Homo sapien
tggtaacttgggcaagagtcttccc

SEQ ID NO: 2064054 - DNA, 25 bp, Homo sapien
tgtgctgcaaccacacatccttgta

SEQ ID NO: 2064055 - DNA, 25 bp, Homo sapien
atccttgtacaaagcataggaggtt

SEQ ID NO: 2064056 - DNA, 25 bp, Homo sapien
gctgcaaccacacatccttgtacaa

SEQ ID NO: 2064057 - DNA, 25 bp, Homo sapien
agcataggaggtttcttgtcttcta

SEQ ID NO: 2064058 - DNA, 25 bp, Homo sapien
gattagtcaacaaatgggctttctg

SEQ ID NO: 2064059 - DNA, 25 bp, Homo sapien
aaacatcatcttccatgggattagt

SEQ ID NO: 2064060 - DNA, 25 bp, Homo sapien
ggctttctgattagctagcacaggg

SEQ ID NO: 2064061 - DNA, 25 bp, Homo sapien
tctgattagctagcacagggaaggg

SEQ ID NO: 2064062 - DNA, 25 bp, Homo sapien
ccaggttctgcttgtagtgccacag

SEQ ID NO: 2064063 - DNA, 25 bp, Homo sapien
tgcttgtagtgccacaggcttgatt

SEQ ID NO: 2064064 - DNA, 25 bp, Homo sapien
ggttctgcttgtagtgccacaggct

SEQ ID NO: 2064065 - DNA, 25 bp, Homo sapien
tctgcttgtagtgccacaggcttga

SEQ ID NO: 2064066 - DNA, 25 bp, Homo sapien
catgggaacagaagcctgtttcctg

SEQ ID NO: 2064067 - DNA, 25 bp, Homo sapien
tgctgcttctggaccactaagcact

SEQ ID NO: 2064068 - DNA, 25 bp, Homo sapien
cctcctctctggaagttgttcttgc

SEQ ID NO: 2064069 - DNA, 25 bp, Homo sapien
tctatgtctttactacaccttgaca

SEQ ID NO: 2064070 - DNA, 25 bp, Homo sapien
tctggcttgaccgctctcctcagtg

SEQ ID NO: 2064071 - DNA, 25 bp, Homo sapien
ttctctggcttgaccgctctcctca

SEQ ID NO: 2064072 - DNA, 25 bp, Homo sapien
tgtgaggctgctctttgcaaagtca

SEQ ID NO: 2064073 - DNA, 25 bp, Homo sapien
ttagatacgccccagtgctcctgaa

SEQ ID NO: 2064074 - DNA, 25 bp, Homo sapien
ccactggcacagaggttagatacgc

SEQ ID NO: 2064075 - DNA, 25 bp, Homo sapien
ggttgattgagaaagcccagccact

SEQ ID NO: 2064076 - DNA, 25 bp, Homo sapien
tgccacttgtgttggctgagagcct

SEQ ID NO: 2064077 - DNA, 25 bp, Homo sapien
gccacttgtgttggctgagagcctg

SEQ ID NO: 2064078 - DNA, 25 bp, Homo sapien
ggtgccacttgtgttggctgagagc

SEQ ID NO: 2064079 - DNA, 25 bp, Homo sapien
ggggtgccacttgtgttggctgaga

SEQ ID NO: 2064080 - DNA, 25 bp, Homo sapien
tctctggacattacttgctgtgcca

SEQ ID NO: 2064081 - DNA, 25 bp, Homo sapien
gacattacttgctgtgccacataca

SEQ ID NO: 2064082 - DNA, 25 bp, Homo sapien
tgctctctggacattacttgctgtg

SEQ ID NO: 2064083 - DNA, 25 bp, Homo sapien
tctggacattacttgctgtgccaca

SEQ ID NO: 2064084 - DNA, 25 bp, Homo sapien
caggctctaaggaggaactggaacg

SEQ ID NO: 2064085 - DNA, 25 bp, Homo sapien
cagggtatatcttttacagcccgta

SEQ ID NO: 2064086 - DNA, 25 bp, Homo sapien
cacaggctctaaggaggaactggaa

SEQ ID NO: 2064087 - DNA, 25 bp, Homo sapien
gggcccagggtatatcttttacagc

SEQ ID NO: 2064088 - DNA, 25 bp, Homo sapien
cctcttccatgagctcagagcggcc

SEQ ID NO: 2064089 - DNA, 25 bp, Homo sapien
tccatgagctcagagcggcccagcc

SEQ ID NO: 2064090 - DNA, 25 bp, Homo sapien
cttccatgagctcagagcggcccag

SEQ ID NO: 2064091 - DNA, 25 bp, Homo sapien
tcttccatgagctcagagcggccca

SEQ ID NO: 2064092 - DNA, 25 bp, Homo sapien
gcactgggcatctgacaggttaata

SEQ ID NO: 2064093 - DNA, 25 bp, Homo sapien
atagaaacctctcttataactcttg

SEQ ID NO: 2064094 - DNA, 25 bp, Homo sapien
tggcactggcggcatgaggagcact

SEQ ID NO: 2064095 - DNA, 25 bp, Homo sapien
ggttaatatctttctgctttgtaat

SEQ ID NO: 2064096 - DNA, 25 bp, Homo sapien
agagcagcagaagtcccttgactcc

SEQ ID NO: 2064097 - DNA, 25 bp, Homo sapien
cagaagttctgcattgaggtttcag

SEQ ID NO: 2064098 - DNA, 25 bp, Homo sapien
agaagtcccttgactccccattcat

SEQ ID NO: 2064099 - DNA, 25 bp, Homo sapien
ggccctgtgtcttggcagaagttct

SEQ ID NO: 2064100 - DNA, 25 bp, Homo sapien
ttgaagtgtctaaagccaggcgtga

SEQ ID NO: 2064101 - DNA, 25 bp, Homo sapien
cgctggattctacagctggtatgtg

SEQ ID NO: 2064102 - DNA, 25 bp, Homo sapien
cctgctcggcgccagttggaagaga

SEQ ID NO: 2064103 - DNA, 25 bp, Homo sapien
agctttgtcctgctcggcgccagtt

SEQ ID NO: 2064104 - DNA, 25 bp, Homo sapien
caatctgcaggagtgttctgagaca

SEQ ID NO: 2064105 - DNA, 25 bp, Homo sapien
gagccatggctccatgactaactcc

SEQ ID NO: 2064106 - DNA, 25 bp, Homo sapien
tgttggattccctggcaatctgcag

SEQ ID NO: 2064107 - DNA, 25 bp, Homo sapien
tccctctgccctgttggattccctg

SEQ ID NO: 2064108 - DNA, 25 bp, Homo sapien
tcagtaatttcagaacctgagtgtt

SEQ ID NO: 2064109 - DNA, 25 bp, Homo sapien
caagcaactgagatacactgcagct

SEQ ID NO: 2064110 - DNA, 25 bp, Homo sapien
taatttcagaacctgagtgttggct

SEQ ID NO: 2064111 - DNA, 25 bp, Homo sapien
gagtgttggctgacatcaagcaact

SEQ ID NO: 2064112 - DNA, 25 bp, Homo sapien
cacttgcgtgtttccataagggcct

SEQ ID NO: 2064113 - DNA, 25 bp, Homo sapien
aacacttgcgtgtttccataagggc

SEQ ID NO: 2064114 - DNA, 25 bp, Homo sapien
agaacacttgcgtgtttccataagg

SEQ ID NO: 2064115 - DNA, 25 bp, Homo sapien
cttgcgtgtttccataagggcctag

SEQ ID NO: 2064116 - DNA, 25 bp, Homo sapien
gtgtcgtagagggaatgcagccctt

SEQ ID NO: 2064117 - DNA, 25 bp, Homo sapien
tcccatgtggtgtcgtagagggaat

SEQ ID NO: 2064118 - DNA, 25 bp, Homo sapien
tatttcccatgtggtgtcgtagagg

SEQ ID NO: 2064119 - DNA, 25 bp, Homo sapien
gtcgtagagggaatgcagcccttct

SEQ ID NO: 2064120 - DNA, 25 bp, Homo sapien
gtccactgtgcaggccctgttgcct

SEQ ID NO: 2064121 - DNA, 25 bp, Homo sapien
gaatggtccactgtgcaggccctgt

SEQ ID NO: 2064122 - DNA, 25 bp, Homo sapien
tggtccactgtgcaggccctgttgc

SEQ ID NO: 2064123 - DNA, 25 bp, Homo sapien
ctatggattcatggtttcatagaat

SEQ ID NO: 2064124 - DNA, 25 bp, Homo sapien
catctcttcccatcttccactggga

SEQ ID NO: 2064125 - DNA, 25 bp, Homo sapien
cttcccatcttccactgggaagttt

SEQ ID NO: 2064126 - DNA, 25 bp, Homo sapien
tctcttcccatcttccactgggaag

SEQ ID NO: 2064127 - DNA, 25 bp, Homo sapien
tcttcccatcttccactgggaagtt

SEQ ID NO: 2064128 - DNA, 25 bp, Homo sapien
cttcttctcgactcaatgaagagtt

SEQ ID NO: 2064129 - DNA, 25 bp, Homo sapien
gggagccactctgtatttcactgtt

SEQ ID NO: 2064130 - DNA, 25 bp, Homo sapien
tctcgactcaatgaagagttcattg

SEQ ID NO: 2064131 - DNA, 25 bp, Homo sapien
tcaaggtccctgtgaagatccacat

SEQ ID NO: 2064132 - DNA, 25 bp, Homo sapien
ctccctgctgagcaaagaggacttt

SEQ ID NO: 2064133 - DNA, 25 bp, Homo sapien
gcagagatcactgtttgaaggcagc

SEQ ID NO: 2064134 - DNA, 25 bp, Homo sapien
cctctggcctgctctttggctccct

SEQ ID NO: 2064135 - DNA, 25 bp, Homo sapien
tctatcctcacactgcctctggcct

SEQ ID NO: 2064136 - DNA, 25 bp, Homo sapien
tgaacaccttacaattgttgcagac

SEQ ID NO: 2064137 - DNA, 25 bp, Homo sapien
caccttacaattgttgcagacaaac

SEQ ID NO: 2064138 - DNA, 25 bp, Homo sapien
ccttacaattgttgcagacaaacat

SEQ ID NO: 2064139 - DNA, 25 bp, Homo sapien
ttacaattgttgcagacaaacatca

SEQ ID NO: 2064140 - DNA, 25 bp, Homo sapien
cagggaatcggcgtttcagcagacg

SEQ ID NO: 2064141 - DNA, 25 bp, Homo sapien
gcgctgtttccccagatttgcaggg

SEQ ID NO: 2064142 - DNA, 25 bp, Homo sapien
gatccatccagagtagaaagctgag

SEQ ID NO: 2064143 - DNA, 25 bp, Homo sapien
ttattctcacaggtaccagaggtgg

SEQ ID NO: 2064144 - DNA, 25 bp, Homo sapien
aggtgagatcggcactggctccaag

SEQ ID NO: 2064145 - DNA, 25 bp, Homo sapien
tgtggaaactgccaaaagaccttgg

SEQ ID NO: 2064146 - DNA, 25 bp, Homo sapien
agaccttggatgtgagctgccacct

SEQ ID NO: 2064147 - DNA, 25 bp, Homo sapien
gcctggttaatgctgggaccaccat

SEQ ID NO: 2064148 - DNA, 25 bp, Homo sapien
agtccagctttgatacctgcactgc

SEQ ID NO: 2064149 - DNA, 25 bp, Homo sapien
acctgcactgctgacgtctactctg

SEQ ID NO: 2064150 - DNA, 25 bp, Homo sapien
ttttgtctttcagtcccatgatgaa

SEQ ID NO: 2064151 - DNA, 25 bp, Homo sapien
cactgctgacgtctactctgctggg

SEQ ID NO: 2064152 - DNA, 25 bp, Homo sapien
tgagcttggctgatttaccaggagg

SEQ ID NO: 2064153 - DNA, 25 bp, Homo sapien
agcaggccatgggtttataataaga

SEQ ID NO: 2064154 - DNA, 25 bp, Homo sapien
gggataacagcttgagaagtaccat

SEQ ID NO: 2064155 - DNA, 25 bp, Homo sapien
gtaccattaaatgtcttcccataca

SEQ ID NO: 2064156 - DNA, 25 bp, Homo sapien
ccaataagtatttccaacctctaga

SEQ ID NO: 2064157 - DNA, 25 bp, Homo sapien
ttaaaaataccccagtgccacatgt

SEQ ID NO: 2064158 - DNA, 25 bp, Homo sapien
tgtaaaccagcctcttccaataagt

SEQ ID NO: 2064159 - DNA, 25 bp, Homo sapien
tgcttctggccaaccctaattctgc

SEQ ID NO: 2064160 - DNA, 25 bp, Homo sapien
ctctcaggctgccgaatggagttaa

SEQ ID NO: 2064161 - DNA, 25 bp, Homo sapien
tctcaggctgccgaatggagttaaa

SEQ ID NO: 2064162 - DNA, 25 bp, Homo sapien
ctcaggctgccgaatggagttaaaa

SEQ ID NO: 2064163 - DNA, 25 bp, Homo sapien
tcaggctgccgaatggagttaaaac

SEQ ID NO: 2064164 - DNA, 25 bp, Homo sapien
ttaatcgaaatgtctgaatacccgt

SEQ ID NO: 2064165 - DNA, 25 bp, Homo sapien
catgggagccagtcattaatcgaaa

SEQ ID NO: 2064166 - DNA, 25 bp, Homo sapien
acagcaaatgcttcctcgggaccca

SEQ ID NO: 2064167 - DNA, 25 bp, Homo sapien
cacagcatgggagccagtcattaat

SEQ ID NO: 2064168 - DNA, 25 bp, Homo sapien
gaaacgcttgctccttggtccggtg

SEQ ID NO: 2064169 - DNA, 25 bp, Homo sapien
cttgaagaagtcattctcctgagac

SEQ ID NO: 2064170 - DNA, 25 bp, Homo sapien
tgtcttgaagaagtcattctcctga

SEQ ID NO: 2064171 - DNA, 25 bp, Homo sapien
cggtgtgaactctctagaagatgtc

SEQ ID NO: 2064172 - DNA, 25 bp, Homo sapien
ctttggtaatgaacaattccactcc

SEQ ID NO: 2064173 - DNA, 25 bp, Homo sapien
gcttcaaagggccacgtgttgggca

SEQ ID NO: 2064174 - DNA, 25 bp, Homo sapien
cgggtagagtagtatctggaacaga

SEQ ID NO: 2064175 - DNA, 25 bp, Homo sapien
tgtctggacaggttggcacatcttc

SEQ ID NO: 2064176 - DNA, 25 bp, Homo sapien
caggttggaggaaggtaattgccct

SEQ ID NO: 2064177 - DNA, 25 bp, Homo sapien
ggtcctgcataaatacccaggtctg

SEQ ID NO: 2064178 - DNA, 25 bp, Homo sapien
tccactagccgatggtcatcagcag

SEQ ID NO: 2064179 - DNA, 25 bp, Homo sapien
caacttcttttagcagccacagtaa

SEQ ID NO: 2064180 - DNA, 25 bp, Homo sapien
aagtgagtttatcaactgggtcagc

SEQ ID NO: 2064181 - DNA, 25 bp, Homo sapien
caagtgagtttatcaactgggtcag

SEQ ID NO: 2064182 - DNA, 25 bp, Homo sapien
gtcaagtgagtttatcaactgggtc

SEQ ID NO: 2064183 - DNA, 25 bp, Homo sapien
aagtcaagtgagtttatcaactggg

SEQ ID NO: 2064184 - DNA, 25 bp, Homo sapien
tagctagaagtttatagacactagg

SEQ ID NO: 2064185 - DNA, 25 bp, Homo sapien
ctaattttgagtcaagtagaagtct

SEQ ID NO: 2064186 - DNA, 25 bp, Homo sapien
attttgagtcaagtagaagtctgag

SEQ ID NO: 2064187 - DNA, 25 bp, Homo sapien
agctagaagtttatagacactaggg

SEQ ID NO: 2064188 - DNA, 25 bp, Homo sapien
catgctgtccaactggcccatgtgt

SEQ ID NO: 2064189 - DNA, 25 bp, Homo sapien
gtggacagttgtgtcattcttggct

SEQ ID NO: 2064190 - DNA, 25 bp, Homo sapien
agttgtgtcattcttggctcccaag

SEQ ID NO: 2064191 - DNA, 25 bp, Homo sapien
caagtgtctcagatctccatgctgt

SEQ ID NO: 2064192 - DNA, 25 bp, Homo sapien
gtcgcttgcctctggtgatcactca

SEQ ID NO: 2064193 - DNA, 25 bp, Homo sapien
gcaaggtctctcgtcttttagtcgc

SEQ ID NO: 2064194 - DNA, 25 bp, Homo sapien
gggagtatgatgcaaggtctctcgt

SEQ ID NO: 2064195 - DNA, 25 bp, Homo sapien
tcgtcttttagtcgcttgcctctgg

SEQ ID NO: 2064196 - DNA, 25 bp, Homo sapien
gaagagccacaccttaaagacagtt

SEQ ID NO: 2064197 - DNA, 25 bp, Homo sapien
gctggcaactaacatgggttcctgg

SEQ ID NO: 2064198 - DNA, 25 bp, Homo sapien
gagtctgagcaagggactctctatg

SEQ ID NO: 2064199 - DNA, 25 bp, Homo sapien
tctctatgaagtggagccatttgca

SEQ ID NO: 2064200 - DNA, 25 bp, Homo sapien
aacttgccagttccccatgaaacca

SEQ ID NO: 2064201 - DNA, 25 bp, Homo sapien
tgcaagctgtcccttataatctact

SEQ ID NO: 2064202 - DNA, 25 bp, Homo sapien
actggcggcatctcctttaccaggg

SEQ ID NO: 2064203 - DNA, 25 bp, Homo sapien
cctggcactgggtaagtttcatgtc

SEQ ID NO: 2064204 - DNA, 25 bp, Homo sapien
tgcaatatgatagtactcgtaatac

SEQ ID NO: 2064205 - DNA, 25 bp, Homo sapien
gcaattttaagctggacttccctgt

SEQ ID NO: 2064206 - DNA, 25 bp, Homo sapien
ggaccaagatatctagttatcaaag

SEQ ID NO: 2064207 - DNA, 25 bp, Homo sapien
tttcctgtcatttgcacatctctga

SEQ ID NO: 2064208 - DNA, 25 bp, Homo sapien
agctcttgaccttcagttcctctga

SEQ ID NO: 2064209 - DNA, 25 bp, Homo sapien
gctcttgaccttcagttcctctgag

SEQ ID NO: 2064210 - DNA, 25 bp, Homo sapien
cagctcttgaccttcagttcctctg

SEQ ID NO: 2064211 - DNA, 25 bp, Homo sapien
ttcagctcttgaccttcagttcctc

SEQ ID NO: 2064212 - DNA, 25 bp, Homo sapien
gagaagcttgtttaggattttgcct

SEQ ID NO: 2064213 - DNA, 25 bp, Homo sapien
gattttgcctgttagtcataactcc

SEQ ID NO: 2064214 - DNA, 25 bp, Homo sapien
tgtagattttggagaagcttgttta

SEQ ID NO: 2064215 - DNA, 25 bp, Homo sapien
ccattcagatataatgtagattttg

SEQ ID NO: 2064216 - DNA, 25 bp, Homo sapien
gtttgtattctttgtggatcttgca

SEQ ID NO: 2064217 - DNA, 25 bp, Homo sapien
tgtggatcttgcaactaaagtcaga

SEQ ID NO: 2064218 - DNA, 25 bp, Homo sapien
tcttgcaactaaagtcagagcccat

SEQ ID NO: 2064219 - DNA, 25 bp, Homo sapien
gatcttgcaactaaagtcagagccc

SEQ ID NO: 2064220 - DNA, 25 bp, Homo sapien
tcactggtgtagagaaaggctcttc

SEQ ID NO: 2064221 - DNA, 25 bp, Homo sapien
ggctcttctttgcaactctccacag

SEQ ID NO: 2064222 - DNA, 25 bp, Homo sapien
ctcttctttgcaactctccacaggt

SEQ ID NO: 2064223 - DNA, 25 bp, Homo sapien
aaggctcttctttgcaactctccac

SEQ ID NO: 2064224 - DNA, 25 bp, Homo sapien
gctctgtcatgtgttctgtatcatc

SEQ ID NO: 2064225 - DNA, 25 bp, Homo sapien
tctgtcatgtgttctgtatcatcca

SEQ ID NO: 2064226 - DNA, 25 bp, Homo sapien
ctgctctgtcatgtgttctgtatca

SEQ ID NO: 2064227 - DNA, 25 bp, Homo sapien
tgtcatgtgttctgtatcatccagt

SEQ ID NO: 2064228 - DNA, 25 bp, Homo sapien
taaaagctccagttaggttgtggct

SEQ ID NO: 2064229 - DNA, 25 bp, Homo sapien
actctggcttctgcttagtaaaagc

SEQ ID NO: 2064230 - DNA, 25 bp, Homo sapien
agctccagttaggttgtggcttctc

SEQ ID NO: 2064231 - DNA, 25 bp, Homo sapien
tgcttagtaaaagctccagttaggt

SEQ ID NO: 2064232 - DNA, 25 bp, Homo sapien
ttgtccgataattcattttatccag

SEQ ID NO: 2064233 - DNA, 25 bp, Homo sapien
tagagccttagtctcatgtctaggc

SEQ ID NO: 2064234 - DNA, 25 bp, Homo sapien
tagtaattcatatttgtccgataat

SEQ ID NO: 2064235 - DNA, 25 bp, Homo sapien
gctgccccattgttacaagtagaat

SEQ ID NO: 2064236 - DNA, 25 bp, Homo sapien
tcttctgtctgtatgttggctttat

SEQ ID NO: 2064237 - DNA, 25 bp, Homo sapien
tctgtctgtatgttggctttattga

SEQ ID NO: 2064238 - DNA, 25 bp, Homo sapien
agcagcttggatgccctacattttc

SEQ ID NO: 2064239 - DNA, 25 bp, Homo sapien
tgtctgtatgttggctttattgaca

SEQ ID NO: 2064240 - DNA, 25 bp, Homo sapien
cctgcctccacagagagattgaaag

SEQ ID NO: 2064241 - DNA, 25 bp, Homo sapien
aatgcttcagcaacatcataggttg

SEQ ID NO: 2064242 - DNA, 25 bp, Homo sapien
tcagcaacatcataggttgacccat

SEQ ID NO: 2064243 - DNA, 25 bp, Homo sapien
ctccacagagagattgaaagtcaat

SEQ ID NO: 2064244 - DNA, 25 bp, Homo sapien
ttcctggatccctgtttgaacgcaa

SEQ ID NO: 2064245 - DNA, 25 bp, Homo sapien
ctggttctgctgagcagttctgcct

SEQ ID NO: 2064246 - DNA, 25 bp, Homo sapien
ctgttaaagctggttctgctgagca

SEQ ID NO: 2064247 - DNA, 25 bp, Homo sapien
cctgtttgaacgcaaagtgattaga

SEQ ID NO: 2064248 - DNA, 25 bp, Homo sapien
tcacagagcaataaacacttttatt

SEQ ID NO: 2064249 - DNA, 25 bp, Homo sapien
aagacagaaaggatgaggatgtgtt

SEQ ID NO: 2064250 - DNA, 25 bp, Homo sapien
caaagacagaaaggatgaggatgtg

SEQ ID NO: 2064251 - DNA, 25 bp, Homo sapien
cttttattacatgggcaaagacaga

SEQ ID NO: 2064252 - DNA, 25 bp, Homo sapien
taccactgttggtatggtgcgctgt

SEQ ID NO: 2064253 - DNA, 25 bp, Homo sapien
tccttttatcgtatttcttgtgaat

SEQ ID NO: 2064254 - DNA, 25 bp, Homo sapien
gtgggactggtaccactgttggtat

SEQ ID NO: 2064255 - DNA, 25 bp, Homo sapien
gcgctgttgatgagcatgatgcatt

SEQ ID NO: 2064256 - DNA, 25 bp, Homo sapien
ctcgttattgaatgcattgtagaca

SEQ ID NO: 2064257 - DNA, 25 bp, Homo sapien
tgaatgcattgtagacaacatcgat

SEQ ID NO: 2064258 - DNA, 25 bp, Homo sapien
gcattgtagacaacatcgatgatca

SEQ ID NO: 2064259 - DNA, 25 bp, Homo sapien
tcgttattgaatgcattgtagacaa

SEQ ID NO: 2064260 - DNA, 25 bp, Homo sapien
cagggcacagtatttctcatttctt

SEQ ID NO: 2064261 - DNA, 25 bp, Homo sapien
ccttgtccagcctcagggcacagta

SEQ ID NO: 2064262 - DNA, 25 bp, Homo sapien
ggagaaattccccttgtccagcctc

SEQ ID NO: 2064263 - DNA, 25 bp, Homo sapien
aaattccccttgtccagcctcaggg

SEQ ID NO: 2064264 - DNA, 25 bp, Homo sapien
gtggatgcggcagggctaatcttgg

SEQ ID NO: 2064265 - DNA, 25 bp, Homo sapien
gatgcggcagggctaatcttggtgt

SEQ ID NO: 2064266 - DNA, 25 bp, Homo sapien
tgtgtggatgcggcagggctaatct

SEQ ID NO: 2064267 - DNA, 25 bp, Homo sapien
atgcggcagggctaatcttggtgtt

SEQ ID NO: 2064268 - DNA, 25 bp, Homo sapien
tgctagttgtcccaaggatgctcat

SEQ ID NO: 2064269 - DNA, 25 bp, Homo sapien
ttgcccccagtcttgcagcgcttgt

SEQ ID NO: 2064270 - DNA, 25 bp, Homo sapien
agcgcttgtgctagttgtcccaagg

SEQ ID NO: 2064271 - DNA, 25 bp, Homo sapien
cccagtcttgcagcgcttgtgctag

SEQ ID NO: 2064272 - DNA, 25 bp, Homo sapien
ctttcttgaatcaacccagggtctc

SEQ ID NO: 2064273 - DNA, 25 bp, Homo sapien
tctttcttgaatcaacccagggtct

SEQ ID NO: 2064274 - DNA, 25 bp, Homo sapien
gggcgggactgaggcgacttgaagg

SEQ ID NO: 2064275 - DNA, 25 bp, Homo sapien
gactgaggcgacttgaagggagatg

SEQ ID NO: 2064276 - DNA, 25 bp, Homo sapien
ttttctgagctcaaggggcgggact

SEQ ID NO: 2064277 - DNA, 25 bp, Homo sapien
gaggcgacttgaagggagatgcttt

SEQ ID NO: 2064278 - DNA, 25 bp, Homo sapien
caaagagtaaatctgtctgcttaca

SEQ ID NO: 2064279 - DNA, 25 bp, Homo sapien
agcctcggtgttggcccaggcagaa

SEQ ID NO: 2064280 - DNA, 25 bp, Homo sapien
gaagtgccactgaatcatcaatcac

SEQ ID NO: 2064281 - DNA, 25 bp, Homo sapien
tgcttacaaggatgactctgcagct

SEQ ID NO: 2064282 - DNA, 25 bp, Homo sapien
aagacccaaatgaccaccagggcag

SEQ ID NO: 2064283 - DNA, 25 bp, Homo sapien
ctaagacccaaatgaccaccagggc

SEQ ID NO: 2064284 - DNA, 25 bp, Homo sapien
taagacccaaatgaccaccagggca

SEQ ID NO: 2064285 - DNA, 25 bp, Homo sapien
ctgaaatatagtcgcagcgtaagga

SEQ ID NO: 2064286 - DNA, 25 bp, Homo sapien
tatagtcgcagcgtaaggaagagag

SEQ ID NO: 2064287 - DNA, 25 bp, Homo sapien
gaaatatagtcgcagcgtaaggaag

SEQ ID NO: 2064288 - DNA, 25 bp, Homo sapien
aatatagtcgcagcgtaaggaagag

SEQ ID NO: 2064289 - DNA, 25 bp, Homo sapien
taaagacctatgagccagcaatggg

SEQ ID NO: 2064290 - DNA, 25 bp, Homo sapien
tctgcagaactgttactctgagaag

SEQ ID NO: 2064291 - DNA, 25 bp, Homo sapien
aactgttactctgagaagtgacagc

SEQ ID NO: 2064292 - DNA, 25 bp, Homo sapien
ttaaagacctatgagccagcaatgg

SEQ ID NO: 2064293 - DNA, 25 bp, Homo sapien
catgtggctgacagcccagtagctg

SEQ ID NO: 2064294 - DNA, 25 bp, Homo sapien
gattgagtttgagaaagccaggtac

SEQ ID NO: 2064295 - DNA, 25 bp, Homo sapien
ttgtggattgaacctgcatgtggct

SEQ ID NO: 2064296 - DNA, 25 bp, Homo sapien
ccaggtactggcgaaggcttgtaac

SEQ ID NO: 2064297 - DNA, 25 bp, Homo sapien
ttctcactgaagaaactcaggtgcc

SEQ ID NO: 2064298 - DNA, 25 bp, Homo sapien
caatcagcacactcaaatccgctag

SEQ ID NO: 2064299 - DNA, 25 bp, Homo sapien
aaatccgctaggtgtgctggacagg

SEQ ID NO: 2064300 - DNA, 25 bp, Homo sapien
catctgggcctgaattcccaatcag

SEQ ID NO: 2064301 - DNA, 25 bp, Homo sapien
ttcatctgggcctgaattcccaatc

SEQ ID NO: 2064302 - DNA, 25 bp, Homo sapien
catgttgccctttgcattagactca

SEQ ID NO: 2064303 - DNA, 25 bp, Homo sapien
tgctggtcacggcaaaattccagag

SEQ ID NO: 2064304 - DNA, 25 bp, Homo sapien
tccagagctgctccatttgacatgt

SEQ ID NO: 2064305 - DNA, 25 bp, Homo sapien
tggacactcggttgccagctctgct

SEQ ID NO: 2064306 - DNA, 25 bp, Homo sapien
caagcccatataatagagggttaga

SEQ ID NO: 2064307 - DNA, 25 bp, Homo sapien
ggatacaagcccatataatagaggg

SEQ ID NO: 2064308 - DNA, 25 bp, Homo sapien
ataatagagggttagacacatgaac

SEQ ID NO: 2064309 - DNA, 25 bp, Homo sapien
cctggacatgggtgggatacaagcc

SEQ ID NO: 2064310 - DNA, 25 bp, Homo sapien
tcaacttgccaaagccttgtcatct

SEQ ID NO: 2064311 - DNA, 25 bp, Homo sapien
tgccaaagccttgtcatctggtttc

SEQ ID NO: 2064312 - DNA, 25 bp, Homo sapien
cttgccaaagccttgtcatctggtt

SEQ ID NO: 2064313 - DNA, 25 bp, Homo sapien
acttgccaaagccttgtcatctggt

SEQ ID NO: 2064314 - DNA, 25 bp, Homo sapien
tcaaatgatggctaatcggggagct

SEQ ID NO: 2064315 - DNA, 25 bp, Homo sapien
caaatgatggctaatcggggagctt

SEQ ID NO: 2064316 - DNA, 25 bp, Homo sapien
aaatgatggctaatcggggagcttt

SEQ ID NO: 2064317 - DNA, 25 bp, Homo sapien
gaggcagggcctatcgttagtttga

SEQ ID NO: 2064318 - DNA, 25 bp, Homo sapien
gctctctccagtgaagattacctga

SEQ ID NO: 2064319 - DNA, 25 bp, Homo sapien
gattgtttgtccctcagtggtagaa

SEQ ID NO: 2064320 - DNA, 25 bp, Homo sapien
gatgtatgtggaccgcctttgcaca

SEQ ID NO: 2064321 - DNA, 25 bp, Homo sapien
aaacaggattccatcaaaatatgaa

SEQ ID NO: 2064322 - DNA, 25 bp, Homo sapien
ttttcacaaacaggattccatcaaa

SEQ ID NO: 2064323 - DNA, 25 bp, Homo sapien
cagagcctctacaaattttcacaaa

SEQ ID NO: 2064324 - DNA, 25 bp, Homo sapien
ttcacaaacaggattccatcaaaat

SEQ ID NO: 2064325 - DNA, 25 bp, Homo sapien
tccctgccgtgagcagctgtctgtc

SEQ ID NO: 2064326 - DNA, 25 bp, Homo sapien
tggagttagtcttgtggccatagcc

SEQ ID NO: 2064327 - DNA, 25 bp, Homo sapien
ttccctgccgtgagcagctgtctgt

SEQ ID NO: 2064328 - DNA, 25 bp, Homo sapien
taacatcagtaatgcttggaactaa

SEQ ID NO: 2064329 - DNA, 25 bp, Homo sapien
ttgcatttgcttggtgactcctggt

SEQ ID NO: 2064330 - DNA, 25 bp, Homo sapien
tgtgggctgtgatgcaaattgtcct

SEQ ID NO: 2064331 - DNA, 25 bp, Homo sapien
tgcttggaactaatacccctgtggg

SEQ ID NO: 2064332 - DNA, 25 bp, Homo sapien
ctttccgaccctgggttctgcccat

SEQ ID NO: 2064333 - DNA, 25 bp, Homo sapien
ggcagttctgtagccagccagtgtt

SEQ ID NO: 2064334 - DNA, 25 bp, Homo sapien
tgttctttccgaccctgggttctgc

SEQ ID NO: 2064335 - DNA, 25 bp, Homo sapien
gggcagttctgtagccagccagtgt

SEQ ID NO: 2064336 - DNA, 25 bp, Homo sapien
tttatcatctgctgtaacttctcct

SEQ ID NO: 2064337 - DNA, 25 bp, Homo sapien
ctttatcatctgctgtaacttctcc

SEQ ID NO: 2064338 - DNA, 25 bp, Homo sapien
ttatcatctgctgtaacttctcctt

SEQ ID NO: 2064339 - DNA, 25 bp, Homo sapien
acatcgctgtctgttcccctgagag

SEQ ID NO: 2064340 - DNA, 25 bp, Homo sapien
aacacccttggcacatcgctgtctg

SEQ ID NO: 2064341 - DNA, 25 bp, Homo sapien
attccttggcttcaaacacccttgg

SEQ ID NO: 2064342 - DNA, 25 bp, Homo sapien
gatgctacaggaagatattccttgg

SEQ ID NO: 2064343 - DNA, 25 bp, Homo sapien
gagagcagcctgggtcctgtattag

SEQ ID NO: 2064344 - DNA, 25 bp, Homo sapien
agcagcctgggtcctgtattagagg

SEQ ID NO: 2064345 - DNA, 25 bp, Homo sapien
gcagcctgggtcctgtattagagga

SEQ ID NO: 2064346 - DNA, 25 bp, Homo sapien
gagcagcctgggtcctgtattagag

SEQ ID NO: 2064347 - DNA, 25 bp, Homo sapien
gctgctcagttggtctacagttcat

SEQ ID NO: 2064348 - DNA, 25 bp, Homo sapien
tggctgctcagttggtctacagttc

SEQ ID NO: 2064349 - DNA, 25 bp, Homo sapien
gctcagttggtctacagttcatttt

SEQ ID NO: 2064350 - DNA, 25 bp, Homo sapien
tgctcagttggtctacagttcattt

SEQ ID NO: 2064351 - DNA, 25 bp, Homo sapien
tcaaccctggttcgtgctccttttc

SEQ ID NO: 2064352 - DNA, 25 bp, Homo sapien
ctctgtttcaccttgtagaggtcca

SEQ ID NO: 2064353 - DNA, 25 bp, Homo sapien
tctctgtttcaccttgtagaggtcc

SEQ ID NO: 2064354 - DNA, 25 bp, Homo sapien
cttctctgtttcaccttgtagaggt

SEQ ID NO: 2064355 - DNA, 25 bp, Homo sapien
tctgtttcaccttgtagaggtccac

SEQ ID NO: 2064356 - DNA, 25 bp, Homo sapien
ctctctcaatcttcccttttcttgg

SEQ ID NO: 2064357 - DNA, 25 bp, Homo sapien
tcaatcttcccttttcttggctcac

SEQ ID NO: 2064358 - DNA, 25 bp, Homo sapien
ccttttcttggctcactctgcccca

SEQ ID NO: 2064359 - DNA, 25 bp, Homo sapien
cttttcttggctcactctgccccat

SEQ ID NO: 2064360 - DNA, 25 bp, Homo sapien
tatggacccttaatgcaggtaaggt

SEQ ID NO: 2064361 - DNA, 25 bp, Homo sapien
ctatggacccttaatgcaggtaagg

SEQ ID NO: 2064362 - DNA, 25 bp, Homo sapien
atggacccttaatgcaggtaaggtc

SEQ ID NO: 2064363 - DNA, 25 bp, Homo sapien
atgcaggtaaggtctgacagttttg

SEQ ID NO: 2064364 - DNA, 25 bp, Homo sapien
tccatgctggtatcgccaggtgtcc

SEQ ID NO: 2064365 - DNA, 25 bp, Homo sapien
tcaacaagcacctgttaggcacctg

SEQ ID NO: 2064366 - DNA, 25 bp, Homo sapien
tagctccgggcttcagttttaggta

SEQ ID NO: 2064367 - DNA, 25 bp, Homo sapien
ggcagaagtagttcattcaacaagc

SEQ ID NO: 2064368 - DNA, 25 bp, Homo sapien
tcttcaaagtaacaacctgacatat

SEQ ID NO: 2064369 - DNA, 25 bp, Homo sapien
tcatcttcaaagtaacaacctgaca

SEQ ID NO: 2064370 - DNA, 25 bp, Homo sapien
caatcatcttcaaagtaacaacctg

SEQ ID NO: 2064371 - DNA, 25 bp, Homo sapien
cctgacatattataaccacttgaca

SEQ ID NO: 2064372 - DNA, 25 bp, Homo sapien
ccatgcactcaatgaacacttttga

SEQ ID NO: 2064373 - DNA, 25 bp, Homo sapien
acacttttgaaacgggcactgatcc

SEQ ID NO: 2064374 - DNA, 25 bp, Homo sapien
gaacacttttgaaacgggcactgat

SEQ ID NO: 2064375 - DNA, 25 bp, Homo sapien
atgaacacttttgaaacgggcactg

SEQ ID NO: 2064376 - DNA, 25 bp, Homo sapien
catatcagaaagctgcagaggatat

SEQ ID NO: 2064377 - DNA, 25 bp, Homo sapien
aaagctgcagaggatattctctctt

SEQ ID NO: 2064378 - DNA, 25 bp, Homo sapien
agaaagctgcagaggatattctctc

SEQ ID NO: 2064379 - DNA, 25 bp, Homo sapien
gctgcagaggatattctctcttgtt

SEQ ID NO: 2064380 - DNA, 25 bp, Homo sapien
atttagctttgccacacctttcatt

SEQ ID NO: 2064381 - DNA, 25 bp, Homo sapien
tttagctttgccacacctttcatta

SEQ ID NO: 2064382 - DNA, 25 bp, Homo sapien
ttagctttgccacacctttcattac

SEQ ID NO: 2064383 - DNA, 25 bp, Homo sapien
agtagaatagaaataagcaggatag

SEQ ID NO: 2064384 - DNA, 25 bp, Homo sapien
gggtttcctatcccacagtagaata

SEQ ID NO: 2064385 - DNA, 25 bp, Homo sapien
gtttcctatcccacagtagaataga

SEQ ID NO: 2064386 - DNA, 25 bp, Homo sapien
ctggggtttcctatcccacagtaga

SEQ ID NO: 2064387 - DNA, 25 bp, Homo sapien
cctcatccaaatgtttgacagtgtg

SEQ ID NO: 2064388 - DNA, 25 bp, Homo sapien
atgtatatttggcattcctgcatcc

SEQ ID NO: 2064389 - DNA, 25 bp, Homo sapien
ccaaatgtttgacagtgtgatattc

SEQ ID NO: 2064390 - DNA, 25 bp, Homo sapien
tcctgcatcctcatccaaatgtttg

SEQ ID NO: 2064391 - DNA, 25 bp, Homo sapien
gactaagtctataagttggaccaga

SEQ ID NO: 2064392 - DNA, 25 bp, Homo sapien
gagatactttcaagaagactaagtc

SEQ ID NO: 2064393 - DNA, 25 bp, Homo sapien
cagcggagcaactttatgtgatttt

SEQ ID NO: 2064394 - DNA, 25 bp, Homo sapien
ccattgcaattgtttctgtactgaa

SEQ ID NO: 2064395 - DNA, 25 bp, Homo sapien
cttggggagtaagtcctccagctct

SEQ ID NO: 2064396 - DNA, 25 bp, Homo sapien
tggggagtaagtcctccagctctca

SEQ ID NO: 2064397 - DNA, 25 bp, Homo sapien
ggagtaagtcctccagctctcagca

SEQ ID NO: 2064398 - DNA, 25 bp, Homo sapien
gggagtaagtcctccagctctcagc

SEQ ID NO: 2064399 - DNA, 25 bp, Homo sapien
ctgtttgtggaatgcttggaagtcc

SEQ ID NO: 2064400 - DNA, 25 bp, Homo sapien
ttgtggaatgcttggaagtcccaga

SEQ ID NO: 2064401 - DNA, 25 bp, Homo sapien
gcatggactggtctgtttgtggaat

SEQ ID NO: 2064402 - DNA, 25 bp, Homo sapien
cttggcatcactgtagcatggactg

SEQ ID NO: 2064403 - DNA, 25 bp, Homo sapien
tatattatgctaaacgttccctgga

SEQ ID NO: 2064404 - DNA, 25 bp, Homo sapien
gtagttctgctccatagggccccat

SEQ ID NO: 2064405 - DNA, 25 bp, Homo sapien
tactggcggacagagagtctttgct

SEQ ID NO: 2064406 - DNA, 25 bp, Homo sapien
gagtcattagcatttggaggtccct

SEQ ID NO: 2064407 - DNA, 25 bp, Homo sapien
caagagctctctgacaatgaatgtg

SEQ ID NO: 2064408 - DNA, 25 bp, Homo sapien
gagctctctgacaatgaatgtgtcc

SEQ ID NO: 2064409 - DNA, 25 bp, Homo sapien
ggagatgtgactgtataatttaagc

SEQ ID NO: 2064410 - DNA, 25 bp, Homo sapien
taatttaagcacatcccaagagctc

SEQ ID NO: 2064411 - DNA, 25 bp, Homo sapien
tgttctttccgtgggcctgtctcgt

SEQ ID NO: 2064412 - DNA, 25 bp, Homo sapien
tcgtagtcactgctattggagtcct

SEQ ID NO: 2064413 - DNA, 25 bp, Homo sapien
cagttttttctgagcgcggggcaag

SEQ ID NO: 2064414 - DNA, 25 bp, Homo sapien
gatcccattatgctccaacctctgt

SEQ ID NO: 2064415 - DNA, 25 bp, Homo sapien
atcagcgttttgtccctatattggc

SEQ ID NO: 2064416 - DNA, 25 bp, Homo sapien
catagatgccagtaacatacaagac

SEQ ID NO: 2064417 - DNA, 25 bp, Homo sapien
ttcgtgcccatatggtgtcacccag

SEQ ID NO: 2064418 - DNA, 25 bp, Homo sapien
catacaagacttgtcctatcagcgt

SEQ ID NO: 2064419 - DNA, 25 bp, Homo sapien
tgcctttgattctccggaagggtgg

SEQ ID NO: 2064420 - DNA, 25 bp, Homo sapien
ttgattctccggaagggtggtcctc

SEQ ID NO: 2064421 - DNA, 25 bp, Homo sapien
gattctccggaagggtggtcctcag

SEQ ID NO: 2064422 - DNA, 25 bp, Homo sapien
ttgcctttgattctccggaagggtg

SEQ ID NO: 2064423 - DNA, 25 bp, Homo sapien
gttctcaaaataatgtggatctaca

SEQ ID NO: 2064424 - DNA, 25 bp, Homo sapien
cctgagtaagagtaggaggcatcca

SEQ ID NO: 2064425 - DNA, 25 bp, Homo sapien
ttctgagcatcctgagtaagagtag

SEQ ID NO: 2064426 - DNA, 25 bp, Homo sapien
caagctctgacaatccctgttgagg

SEQ ID NO: 2064427 - DNA, 25 bp, Homo sapien
ggaggcatccagcaagctctgacaa

SEQ ID NO: 2064428 - DNA, 25 bp, Homo sapien
cgtgtagaggagacttgatgctttc

SEQ ID NO: 2064429 - DNA, 25 bp, Homo sapien
gaatttccttttcgctaatccacat

SEQ ID NO: 2064430 - DNA, 25 bp, Homo sapien
tgggaaatagtttgcgaacatctga

SEQ ID NO: 2064431 - DNA, 25 bp, Homo sapien
gaacatctgattgtggcgtgtagag

SEQ ID NO: 2064432 - DNA, 25 bp, Homo sapien
ggcttttcttgctttcctaggtcaa

SEQ ID NO: 2064433 - DNA, 25 bp, Homo sapien
ttttcttgctttcctaggtcaaaga

SEQ ID NO: 2064434 - DNA, 25 bp, Homo sapien
tcttgctttcctaggtcaaagagca

SEQ ID NO: 2064435 - DNA, 25 bp, Homo sapien
ttgctttcctaggtcaaagagcaaa

SEQ ID NO: 2064436 - DNA, 25 bp, Homo sapien
gaaagcatccttaagcagctttaca

SEQ ID NO: 2064437 - DNA, 25 bp, Homo sapien
aagcagctttacagatctggctagg

SEQ ID NO: 2064438 - DNA, 25 bp, Homo sapien
cacatcatggaagtaatcatccatt

SEQ ID NO: 2064439 - DNA, 25 bp, Homo sapien
tcatggaagtaatcatccatttgga

SEQ ID NO: 2064440 - DNA, 25 bp, Homo sapien
cagcctgagtctaccacttatttct

SEQ ID NO: 2064441 - DNA, 25 bp, Homo sapien
agcctgagtctaccacttatttctg

SEQ ID NO: 2064442 - DNA, 25 bp, Homo sapien
ccagcctgagtctaccacttatttc

SEQ ID NO: 2064443 - DNA, 25 bp, Homo sapien
tccagcctgagtctaccacttattt

SEQ ID NO: 2064444 - DNA, 25 bp, Homo sapien
gaggcccattaaaactggtgtttca

SEQ ID NO: 2064445 - DNA, 25 bp, Homo sapien
tccaccttgaggcccattaaaactg

SEQ ID NO: 2064446 - DNA, 25 bp, Homo sapien
ccttgaggcccattaaaactggtgt

SEQ ID NO: 2064447 - DNA, 25 bp, Homo sapien
cattaaaactggtgtttcattcacc

SEQ ID NO: 2064448 - DNA, 25 bp, Homo sapien
ctgcaagcccgtctggagattttca

SEQ ID NO: 2064449 - DNA, 25 bp, Homo sapien
gatccattcatccaatcctccagaa

SEQ ID NO: 2064450 - DNA, 25 bp, Homo sapien
gcccgtctggagattttcagagatc

SEQ ID NO: 2064451 - DNA, 25 bp, Homo sapien
tcagagatccattcatccaatcctc

SEQ ID NO: 2064452 - DNA, 25 bp, Homo sapien
tcacagcagagtaatgactctaaga

SEQ ID NO: 2064453 - DNA, 25 bp, Homo sapien
gactctaagagactgaatgattaaa

SEQ ID NO: 2064454 - DNA, 25 bp, Homo sapien
gtgattgtaaactggcaaacaacta

SEQ ID NO: 2064455 - DNA, 25 bp, Homo sapien
ttgtatgacagctttcttaactgca

SEQ ID NO: 2064456 - DNA, 25 bp, Homo sapien
accctgggagactttgacactgaag

SEQ ID NO: 2064457 - DNA, 25 bp, Homo sapien
agagaaccctgggagactttgacac

SEQ ID NO: 2064458 - DNA, 25 bp, Homo sapien
ccagcattcacagaagaggactcca

SEQ ID NO: 2064459 - DNA, 25 bp, Homo sapien
cagcattcacagaagaggactccat

SEQ ID NO: 2064460 - DNA, 25 bp, Homo sapien
gaaatgggatcctgaaatttgctat

SEQ ID NO: 2064461 - DNA, 25 bp, Homo sapien
gctatattcagctcatcagaattta

SEQ ID NO: 2064462 - DNA, 25 bp, Homo sapien
cagctcatcagaatttatggatgaa

SEQ ID NO: 2064463 - DNA, 25 bp, Homo sapien
tcctgaaatttgctatattcagctc

SEQ ID NO: 2064464 - DNA, 25 bp, Homo sapien
tagctcagtgtctggacacatccag

SEQ ID NO: 2064465 - DNA, 25 bp, Homo sapien
cctgttctatatgacaagccatcag

SEQ ID NO: 2064466 - DNA, 25 bp, Homo sapien
gagcaatctttctgaaggtgaccac

SEQ ID NO: 2064467 - DNA, 25 bp, Homo sapien
ccagccactgtttggtgggtgtata

SEQ ID NO: 2064468 - DNA, 25 bp, Homo sapien
tcttgatgtattgggtctttgcctg

SEQ ID NO: 2064469 - DNA, 25 bp, Homo sapien
cagattgctcttgatgtattgggtc

SEQ ID NO: 2064470 - DNA, 25 bp, Homo sapien
tgctcttgatgtattgggtctttgc

SEQ ID NO: 2064471 - DNA, 25 bp, Homo sapien
ctctagcagattgctcttgatgtat

SEQ ID NO: 2064472 - DNA, 25 bp, Homo sapien
cactagcagaaagttggtgatatgt

SEQ ID NO: 2064473 - DNA, 25 bp, Homo sapien
cagaaagttggtgatatgtttgatt

SEQ ID NO: 2064474 - DNA, 25 bp, Homo sapien
agttggtgatatgtttgattttgaa

SEQ ID NO: 2064475 - DNA, 25 bp, Homo sapien
tagcagaaagttggtgatatgtttg

SEQ ID NO: 2064476 - DNA, 25 bp, Homo sapien
ctgcccaatatttggtgatgaatga

SEQ ID NO: 2064477 - DNA, 25 bp, Homo sapien
catcctctgcccaatatttggtgat

SEQ ID NO: 2064478 - DNA, 25 bp, Homo sapien
acatcctctgcccaatatttggtga

SEQ ID NO: 2064479 - DNA, 25 bp, Homo sapien
cctctgcccaatatttggtgatgaa

SEQ ID NO: 2064480 - DNA, 25 bp, Homo sapien
tcgtgatcagaaagacaggctactc

SEQ ID NO: 2064481 - DNA, 25 bp, Homo sapien
gctactctgcgtgactaaagtgatt

SEQ ID NO: 2064482 - DNA, 25 bp, Homo sapien
gtgattcaggatccattacctcaat

SEQ ID NO: 2064483 - DNA, 25 bp, Homo sapien
gagaaatgtggagcagtagtaccct

SEQ ID NO: 2064484 - DNA, 25 bp, Homo sapien
gaatgggcatgactagggatctaaa

SEQ ID NO: 2064485 - DNA, 25 bp, Homo sapien
tgtccagttccagcatcataggagt

SEQ ID NO: 2064486 - DNA, 25 bp, Homo sapien
ccttgctgtagaacccagtcctgaa

SEQ ID NO: 2064487 - DNA, 25 bp, Homo sapien
gactgagttaagaacccttgctgta

SEQ ID NO: 2064488 - DNA, 25 bp, Homo sapien
gatgttcgcaggctccattgacaaa

SEQ ID NO: 2064489 - DNA, 25 bp, Homo sapien
tgtgtagtacggttccaactcccag

SEQ ID NO: 2064490 - DNA, 25 bp, Homo sapien
ttgatacgcagaccaggcaaatgca

SEQ ID NO: 2064491 - DNA, 25 bp, Homo sapien
gagggcatccctgcgcattgatacg

SEQ ID NO: 2064492 - DNA, 25 bp, Homo sapien
gggctcgggatctcttggaccgaat

SEQ ID NO: 2064493 - DNA, 25 bp, Homo sapien
ggatctcttggaccgaatggaactt

SEQ ID NO: 2064494 - DNA, 25 bp, Homo sapien
tcttggaccgaatggaactttttgc

SEQ ID NO: 2064495 - DNA, 25 bp, Homo sapien
ctcgggatctcttggaccgaatgga

SEQ ID NO: 2064496 - DNA, 25 bp, Homo sapien
tgaaatatggagaatagtcttagat

SEQ ID NO: 2064497 - DNA, 25 bp, Homo sapien
gcttttgtactcttcggagcttcct

SEQ ID NO: 2064498 - DNA, 25 bp, Homo sapien
ccctggccccgaaggtgttggctga

SEQ ID NO: 2064499 - DNA, 25 bp, Homo sapien
tgtactcttcggagcttccttgttc

SEQ ID NO: 2064500 - DNA, 25 bp, Homo sapien
tggggaggattggggcaacaggagc

SEQ ID NO: 2064501 - DNA, 25 bp, Homo sapien
gggctgagtcgttggtgtgtgaata

SEQ ID NO: 2064502 - DNA, 25 bp, Homo sapien
gatggtggggctgagtcgttggtgt

SEQ ID NO: 2064503 - DNA, 25 bp, Homo sapien
ctgcgcagaatgtagatggtggggc

SEQ ID NO: 2064504 - DNA, 25 bp, Homo sapien
aatgtagatggtggggctgagtcgt

SEQ ID NO: 2064505 - DNA, 25 bp, Homo sapien
cgaatacggagctggcggcttcgac

SEQ ID NO: 2064506 - DNA, 25 bp, Homo sapien
gcttcgacggccaaaagaatagaaa

SEQ ID NO: 2064507 - DNA, 25 bp, Homo sapien
ggctggctgatcaggactgctgtaa

SEQ ID NO: 2064508 - DNA, 25 bp, Homo sapien
gataaggtccacttgttttgcggga

SEQ ID NO: 2064509 - DNA, 25 bp, Homo sapien
tgtagatgggcactggggtacagtg

SEQ ID NO: 2064510 - DNA, 25 bp, Homo sapien
caagtgtagatgggcactggggtac

SEQ ID NO: 2064511 - DNA, 25 bp, Homo sapien
cgcaagtgtagatgggcactggggt

SEQ ID NO: 2064512 - DNA, 25 bp, Homo sapien
tagatgggcactggggtacagtgag

SEQ ID NO: 2064513 - DNA, 25 bp, Homo sapien
ctcaggcagagaccgggcgttgagt

SEQ ID NO: 2064514 - DNA, 25 bp, Homo sapien
ccgggcgttgagtaggagctcccca

SEQ ID NO: 2064515 - DNA, 25 bp, Homo sapien
tgagtaggagctccccagttcgtgc

SEQ ID NO: 2064516 - DNA, 25 bp, Homo sapien
cagagaccgggcgttgagtaggagc

SEQ ID NO: 2064517 - DNA, 25 bp, Homo sapien
tcccaaactttgcatgtgaaacttc

SEQ ID NO: 2064518 - DNA, 25 bp, Homo sapien
atcccaaactttgcatgtgaaactt

SEQ ID NO: 2064519 - DNA, 25 bp, Homo sapien
aaccaactccttggccaaaacactg

SEQ ID NO: 2064520 - DNA, 25 bp, Homo sapien
ggccaaaacactgtcagagaacgca

SEQ ID NO: 2064521 - DNA, 25 bp, Homo sapien
tgtggcaaagtctaacttgacatcc

SEQ ID NO: 2064522 - DNA, 25 bp, Homo sapien
cctctaatcttgtggcaaagtctaa

SEQ ID NO: 2064523 - DNA, 25 bp, Homo sapien
cacataggacctgaccctatgtgga

SEQ ID NO: 2064524 - DNA, 25 bp, Homo sapien
gacctgaccctatgtggacactgtt

SEQ ID NO: 2064525 - DNA, 25 bp, Homo sapien
gtggacactgttctttacatgttca

SEQ ID NO: 2064526 - DNA, 25 bp, Homo sapien
taggacctgaccctatgtggacact

SEQ ID NO: 2064527 - DNA, 25 bp, Homo sapien
caaagtgatgctttcacggtgatga

SEQ ID NO: 2064528 - DNA, 25 bp, Homo sapien
gcgcaaagtgatgctttcacggtga

SEQ ID NO: 2064529 - DNA, 25 bp, Homo sapien
gcagcgcaaagtgatgctttcacgg

SEQ ID NO: 2064530 - DNA, 25 bp, Homo sapien
acagcagcgcaaagtgatgctttca

SEQ ID NO: 2064531 - DNA, 25 bp, Homo sapien
gatccagatttgacggttatgtccc

SEQ ID NO: 2064532 - DNA, 25 bp, Homo sapien
ttagctccatttatccaaccatttg

SEQ ID NO: 2064533 - DNA, 25 bp, Homo sapien
catgagttgcttgaaggaaaaggcc

SEQ ID NO: 2064534 - DNA, 25 bp, Homo sapien
gatggttattaggtatgttagctcc

SEQ ID NO: 2064535 - DNA, 25 bp, Homo sapien
tctagtgcctaagtatggctgtttc

SEQ ID NO: 2064536 - DNA, 25 bp, Homo sapien
tggctggtttagctaatctagtgcc

SEQ ID NO: 2064537 - DNA, 25 bp, Homo sapien
tatgtattggcttttctcggcagag

SEQ ID NO: 2064538 - DNA, 25 bp, Homo sapien
tgtctcaatactgatgatggtgttt

SEQ ID NO: 2064539 - DNA, 25 bp, Homo sapien
tttgatggggtgcagagaatctgaa

SEQ ID NO: 2064540 - DNA, 25 bp, Homo sapien
ctctaacaactttgatggggtgcag

SEQ ID NO: 2064541 - DNA, 25 bp, Homo sapien
aacaactttgatggggtgcagagaa

SEQ ID NO: 2064542 - DNA, 25 bp, Homo sapien
ggggtgcagagaatctgaagcagtc

SEQ ID NO: 2064543 - DNA, 25 bp, Homo sapien
aatgagaataagcaggaaactcgca

SEQ ID NO: 2064544 - DNA, 25 bp, Homo sapien
gaatgagaataagcaggaaactcgc

SEQ ID NO: 2064545 - DNA, 25 bp, Homo sapien
ctttgaatgagaataagcaggaaac

SEQ ID NO: 2064546 - DNA, 25 bp, Homo sapien
ttgaatgagaataagcaggaaactc

SEQ ID NO: 2064547 - DNA, 25 bp, Homo sapien
tgtactgtgggaattataggtattc

SEQ ID NO: 2064548 - DNA, 25 bp, Homo sapien
aggcaagtctgcaagtgtgatggtg

SEQ ID NO: 2064549 - DNA, 25 bp, Homo sapien
tctttctgcaattgaggcccttcca

SEQ ID NO: 2064550 - DNA, 25 bp, Homo sapien
gagtcacagaggtattgatcagaaa

SEQ ID NO: 2064551 - DNA, 25 bp, Homo sapien
gttgttccagtccagatagtgacat

SEQ ID NO: 2064552 - DNA, 25 bp, Homo sapien
tttggaggggttgttccagtccaga

SEQ ID NO: 2064553 - DNA, 25 bp, Homo sapien
gaggggttgttccagtccagatagt

SEQ ID NO: 2064554 - DNA, 25 bp, Homo sapien
tgtttggaggggttgttccagtcca

SEQ ID NO: 2064555 - DNA, 25 bp, Homo sapien
agttgtgtgaactttgcaggttttg

SEQ ID NO: 2064556 - DNA, 25 bp, Homo sapien
cagtagttgtgtgaactttgcaggt

SEQ ID NO: 2064557 - DNA, 25 bp, Homo sapien
ccacagtagttgtgtgaactttgca

SEQ ID NO: 2064558 - DNA, 25 bp, Homo sapien
gttgtgtgaactttgcaggttttgg

SEQ ID NO: 2064559 - DNA, 25 bp, Homo sapien
cagtgctgatgggtgactttttccc

SEQ ID NO: 2064560 - DNA, 25 bp, Homo sapien
ggatatagtgactgggttcttaaga

SEQ ID NO: 2064561 - DNA, 25 bp, Homo sapien
gaattagactacttgcaaagtgaag

SEQ ID NO: 2064562 - DNA, 25 bp, Homo sapien
ttcccagacctgtgcactgtgttgc

SEQ ID NO: 2064563 - DNA, 25 bp, Homo sapien
tgtaggagccgatggaagagtgggt

SEQ ID NO: 2064564 - DNA, 25 bp, Homo sapien
gtgcatgggtgtaggagccgatgga

SEQ ID NO: 2064565 - DNA, 25 bp, Homo sapien
gaagagtgggtgaataatcgaagaa

SEQ ID NO: 2064566 - DNA, 25 bp, Homo sapien
ggaagagtgggtgaataatcgaaga

SEQ ID NO: 2064567 - DNA, 25 bp, Homo sapien
tatggggctggccattgtagcatgg

SEQ ID NO: 2064568 - DNA, 25 bp, Homo sapien
ctggccatatggggctggccattgt

SEQ ID NO: 2064569 - DNA, 25 bp, Homo sapien
catatggggctggccattgtagcat

SEQ ID NO: 2064570 - DNA, 25 bp, Homo sapien
ggctggccattgtagcatggggact

SEQ ID NO: 2064571 - DNA, 25 bp, Homo sapien
ccaagtcgtcttttttatgcccgca

SEQ ID NO: 2064572 - DNA, 25 bp, Homo sapien
cagaggttagggtgcaatcctggca

SEQ ID NO: 2064573 - DNA, 25 bp, Homo sapien
cctgtgtagcaggagagttgactgt

SEQ ID NO: 2064574 - DNA, 25 bp, Homo sapien
gtccacagttctccaagggtagttc

SEQ ID NO: 2064575 - DNA, 25 bp, Homo sapien
aatgtgaatggttcacaaccattgc

SEQ ID NO: 2064576 - DNA, 25 bp, Homo sapien
gataaaaagtgcatagagcaaagga

SEQ ID NO: 2064577 - DNA, 25 bp, Homo sapien
tggttcacaaccattgcttaaaatt

SEQ ID NO: 2064578 - DNA, 25 bp, Homo sapien
agatgccttctagggtgataaaaag

SEQ ID NO: 2064579 - DNA, 25 bp, Homo sapien
gcattcgctgactgcacagataatt

SEQ ID NO: 2064580 - DNA, 25 bp, Homo sapien
gggagcattcgctgactgcacagat

SEQ ID NO: 2064581 - DNA, 25 bp, Homo sapien
gagcattcgctgactgcacagataa

SEQ ID NO: 2064582 - DNA, 25 bp, Homo sapien
ctggggagcattcgctgactgcaca

SEQ ID NO: 2064583 - DNA, 25 bp, Homo sapien
gaagcataacagtattgctgttggc

SEQ ID NO: 2064584 - DNA, 25 bp, Homo sapien
gggaatgtaacactattgctgctat

SEQ ID NO: 2064585 - DNA, 25 bp, Homo sapien
cctagggtcccatcagctatgaaag

SEQ ID NO: 2064586 - DNA, 25 bp, Homo sapien
gcataaatggctttcattcctaggg

SEQ ID NO: 2064587 - DNA, 25 bp, Homo sapien
acaaggtaggccagatcctggtgac

SEQ ID NO: 2064588 - DNA, 25 bp, Homo sapien
caaggtaggccagatcctggtgaca

SEQ ID NO: 2064589 - DNA, 25 bp, Homo sapien
gacatatctcagatttgtctttgtt

SEQ ID NO: 2064590 - DNA, 25 bp, Homo sapien
gagccattggtcagtaaacatggga

SEQ ID NO: 2064591 - DNA, 25 bp, Homo sapien
gactcatacttaacaccctgattaa

SEQ ID NO: 2064592 - DNA, 25 bp, Homo sapien
ccctgattaacagcccaattgtgtt

SEQ ID NO: 2064593 - DNA, 25 bp, Homo sapien
catggctagagtgtttactatcatc

SEQ ID NO: 2064594 - DNA, 25 bp, Homo sapien
agctactggcaatgcacatacctct

SEQ ID NO: 2064595 - DNA, 25 bp, Homo sapien
tactggcaatgcacatacctctgcc

SEQ ID NO: 2064596 - DNA, 25 bp, Homo sapien
cagcacagggtgttggagagtccag

SEQ ID NO: 2064597 - DNA, 25 bp, Homo sapien
catttaggagcttgtagcttcagct

SEQ ID NO: 2064598 - DNA, 25 bp, Homo sapien
tagagagtacgaccaaggaattggc

SEQ ID NO: 2064599 - DNA, 25 bp, Homo sapien
caaggaattggctacagtcatgtgt

SEQ ID NO: 2064600 - DNA, 25 bp, Homo sapien
gcagccattgtctgtaggacttgat

SEQ ID NO: 2064601 - DNA, 25 bp, Homo sapien
taggacttgattagagagtacgacc

SEQ ID NO: 2064602 - DNA, 25 bp, Homo sapien
gaaattggcaaacggtaattctgtc

SEQ ID NO: 2064603 - DNA, 25 bp, Homo sapien
gcaaacggtaattctgtcctgtgct

SEQ ID NO: 2064604 - DNA, 25 bp, Homo sapien
ttccctctgcactctaacatctggc

SEQ ID NO: 2064605 - DNA, 25 bp, Homo sapien
tgcactctaacatctggcctttcat

SEQ ID NO: 2064606 - DNA, 25 bp, Homo sapien
gttaggctgccagccgcccttgaga

SEQ ID NO: 2064607 - DNA, 25 bp, Homo sapien
tttgccatttctgccgccaggtttg

SEQ ID NO: 2064608 - DNA, 25 bp, Homo sapien
gccgccaggtttgttctggcctctg

SEQ ID NO: 2064609 - DNA, 25 bp, Homo sapien
tgtgggcatgttcactaagaggcac

SEQ ID NO: 2064610 - DNA, 25 bp, Homo sapien
gggccacgaagacactggaaaatat

SEQ ID NO: 2064611 - DNA, 25 bp, Homo sapien
taaaaaatagcgtttgagaaggcag

SEQ ID NO: 2064612 - DNA, 25 bp, Homo sapien
ttgttgcaagtctctcagctccaag

SEQ ID NO: 2064613 - DNA, 25 bp, Homo sapien
gacgttttgtctggtctagttccat

SEQ ID NO: 2064614 - DNA, 25 bp, Homo sapien
cgagtggggttacataaagtatcct

SEQ ID NO: 2064615 - DNA, 25 bp, Homo sapien
ggagtctttattaactagattttca

SEQ ID NO: 2064616 - DNA, 25 bp, Homo sapien
tccagaagttgcaccgagtggggtt

SEQ ID NO: 2064617 - DNA, 25 bp, Homo sapien
ggttacataaagtatcctggagtct

SEQ ID NO: 2064618 - DNA, 25 bp, Homo sapien
aaaatggcaggctacgtggtctttc

SEQ ID NO: 2064619 - DNA, 25 bp, Homo sapien
gtcccatttgctgatttcaagcctg

SEQ ID NO: 2064620 - DNA, 25 bp, Homo sapien
gcttcaagcttgagataataatgga

SEQ ID NO: 2064621 - DNA, 25 bp, Homo sapien
gaggcatcagttgaaggcttcaagc

SEQ ID NO: 2064622 - DNA, 25 bp, Homo sapien
gcatttgtgtgacatcaggattttc

SEQ ID NO: 2064623 - DNA, 25 bp, Homo sapien
ccctctgcaggacggattcatttcc

SEQ ID NO: 2064624 - DNA, 25 bp, Homo sapien
tgcaggacggattcatttcctctca

SEQ ID NO: 2064625 - DNA, 25 bp, Homo sapien
aaccaggcatttgtgtgacatcagg

SEQ ID NO: 2064626 - DNA, 25 bp, Homo sapien
gaatggacttgactgtgggatcacc

SEQ ID NO: 2064627 - DNA, 25 bp, Homo sapien
cgaagagattggattctgatatggt

SEQ ID NO: 2064628 - DNA, 25 bp, Homo sapien
ctgatatggttgagtgtggttcacc

SEQ ID NO: 2064629 - DNA, 25 bp, Homo sapien
tccctgcatcatgcgaagagattgg

SEQ ID NO: 2064630 - DNA, 25 bp, Homo sapien
ttaaaactgcattctattttcacca

SEQ ID NO: 2064631 - DNA, 25 bp, Homo sapien
gtaattagctttttatcctctcgtg

SEQ ID NO: 2064632 - DNA, 25 bp, Homo sapien
caccaaaggactgtcagaaaactcc

SEQ ID NO: 2064633 - DNA, 25 bp, Homo sapien
ttaatccttgtctccgtcaccaaag

SEQ ID NO: 2064634 - DNA, 25 bp, Homo sapien
ccctcttttaagtgggatcctgaca

SEQ ID NO: 2064635 - DNA, 25 bp, Homo sapien
cacaaactggttgcaccctatattt

SEQ ID NO: 2064636 - DNA, 25 bp, Homo sapien
gttcttgatgtgttacaaacatttg

SEQ ID NO: 2064637 - DNA, 25 bp, Homo sapien
tcttgatgtgttacaaacatttgcc

SEQ ID NO: 2064638 - DNA, 25 bp, Homo sapien
ggttgcaccctatatttcctggttg

SEQ ID NO: 2064639 - DNA, 25 bp, Homo sapien
ggtgcccttatttccactcattcct

SEQ ID NO: 2064640 - DNA, 25 bp, Homo sapien
ttatttccactcattcctaactctg

SEQ ID NO: 2064641 - DNA, 25 bp, Homo sapien
tgcccttatttccactcattcctaa

SEQ ID NO: 2064642 - DNA, 25 bp, Homo sapien
cactcattcctaactctgaccccat

SEQ ID NO: 2064643 - DNA, 25 bp, Homo sapien
catccaagggtctcttcctaaacca

SEQ ID NO: 2064644 - DNA, 25 bp, Homo sapien
tccacagtgacaactccgtcgtcct

SEQ ID NO: 2064645 - DNA, 25 bp, Homo sapien
tgctgccctccacagtgacaactcc

SEQ ID NO: 2064646 - DNA, 25 bp, Homo sapien
tgaagcaccagtcatccaagggtct

SEQ ID NO: 2064647 - DNA, 25 bp, Homo sapien
ctgagaagtgacttctgaattgtca

SEQ ID NO: 2064648 - DNA, 25 bp, Homo sapien
ctagtgctgagaagtgacttctgaa

SEQ ID NO: 2064649 - DNA, 25 bp, Homo sapien
gacttctgaattgtcaagacatttc

SEQ ID NO: 2064650 - DNA, 25 bp, Homo sapien
gagaagtgacttctgaattgtcaag

SEQ ID NO: 2064651 - DNA, 25 bp, Homo sapien
tcgagctgtcttcttatccaccttc

SEQ ID NO: 2064652 - DNA, 25 bp, Homo sapien
gatcatataagtcctgcccttgaag

SEQ ID NO: 2064653 - DNA, 25 bp, Homo sapien
tatccttgatcatataagtcctgcc

SEQ ID NO: 2064654 - DNA, 25 bp, Homo sapien
gcccttgaagatgcatccgcctcga

SEQ ID NO: 2064655 - DNA, 25 bp, Homo sapien
tcccttttgtagtttcttctgcttc

SEQ ID NO: 2064656 - DNA, 25 bp, Homo sapien
cccttttgtagtttcttctgcttca

SEQ ID NO: 2064657 - DNA, 25 bp, Homo sapien
ctcccttttgtagtttcttctgctt

SEQ ID NO: 2064658 - DNA, 25 bp, Homo sapien
ccttttgtagtttcttctgcttcat

SEQ ID NO: 2064659 - DNA, 25 bp, Homo sapien
aattctcgagattgccttggtggag

SEQ ID NO: 2064660 - DNA, 25 bp, Homo sapien
gttctcttggttggtcactccacaa

SEQ ID NO: 2064661 - DNA, 25 bp, Homo sapien
gatatgtgagatactgggtcagact

SEQ ID NO: 2064662 - DNA, 25 bp, Homo sapien
gccggttcagctctctcaatggtgg

SEQ ID NO: 2064663 - DNA, 25 bp, Homo sapien
ggggacacctatcagaaggggactc

SEQ ID NO: 2064664 - DNA, 25 bp, Homo sapien
actggggacacctatcagaagggga

SEQ ID NO: 2064665 - DNA, 25 bp, Homo sapien
gactggggacacctatcagaagggg

SEQ ID NO: 2064666 - DNA, 25 bp, Homo sapien
gggacacctatcagaaggggactca

SEQ ID NO: 2064667 - DNA, 25 bp, Homo sapien
acagtccactttttgctcataagca

SEQ ID NO: 2064668 - DNA, 25 bp, Homo sapien
tgatttccggtaccattcaaaacca

SEQ ID NO: 2064669 - DNA, 25 bp, Homo sapien
cagagaaagcataggccattcgaag

SEQ ID NO: 2064670 - DNA, 25 bp, Homo sapien
ggaattgttatcacaggaaacctct

SEQ ID NO: 2064671 - DNA, 25 bp, Homo sapien
tcttgagatatgtgcatcctagggc

SEQ ID NO: 2064672 - DNA, 25 bp, Homo sapien
gccccagaggagacttgttcgtaac

SEQ ID NO: 2064673 - DNA, 25 bp, Homo sapien
tgttcgtaacttatgagtccaaagt

SEQ ID NO: 2064674 - DNA, 25 bp, Homo sapien
ggctagaatattcaattcctgttgc

SEQ ID NO: 2064675 - DNA, 25 bp, Homo sapien
ttcctgttgctgaggtggtgcccca

SEQ ID NO: 2064676 - DNA, 25 bp, Homo sapien
gatagatcataacaggatttaccgg

SEQ ID NO: 2064677 - DNA, 25 bp, Homo sapien
gctacatagccgtccagcactttgc

SEQ ID NO: 2064678 - DNA, 25 bp, Homo sapien
taataacaagatagatcataacagg

SEQ ID NO: 2064679 - DNA, 25 bp, Homo sapien
gatttaccggatgtttattgccagc

SEQ ID NO: 2064680 - DNA, 25 bp, Homo sapien
ccgtgactgtattgttgcccgtggg

SEQ ID NO: 2064681 - DNA, 25 bp, Homo sapien
ggccgtgactgtattgttgcccgtg

SEQ ID NO: 2064682 - DNA, 25 bp, Homo sapien
agttgagggccgtgactgtattgtt

SEQ ID NO: 2064683 - DNA, 25 bp, Homo sapien
tgagggccgtgactgtattgttgcc

SEQ ID NO: 2064684 - DNA, 25 bp, Homo sapien
atccattctgtagaaaacctgagaa

SEQ ID NO: 2064685 - DNA, 25 bp, Homo sapien
tatccattctgtagaaaacctgaga

SEQ ID NO: 2064686 - DNA, 25 bp, Homo sapien
gaacgcttttctatagacagcaaag

SEQ ID NO: 2064687 - DNA, 25 bp, Homo sapien
gaataagcctagagagccagctgca

SEQ ID NO: 2064688 - DNA, 25 bp, Homo sapien
taactatggagcaccaggatgtatg

SEQ ID NO: 2064689 - DNA, 25 bp, Homo sapien
taaacggtggccaggaataagccta

SEQ ID NO: 2064690 - DNA, 25 bp, Homo sapien
tcttccgcataggaaccatgagttt

SEQ ID NO: 2064691 - DNA, 25 bp, Homo sapien
cttccgcataggaaccatgagtttc

SEQ ID NO: 2064692 - DNA, 25 bp, Homo sapien
gctgaaataactgcactggtgatga

SEQ ID NO: 2064693 - DNA, 25 bp, Homo sapien
gatattgccacaccatactgtgagc

SEQ ID NO: 2064694 - DNA, 25 bp, Homo sapien
taatcgatttttctctgacaggaat

SEQ ID NO: 2064695 - DNA, 25 bp, Homo sapien
gttaatatgtttagacgctgctggg

SEQ ID NO: 2064696 - DNA, 25 bp, Homo sapien
tcctcggaatcggaaggcttccctg

SEQ ID NO: 2064697 - DNA, 25 bp, Homo sapien
tgatgtcttcctcggaatcggaagg

SEQ ID NO: 2064698 - DNA, 25 bp, Homo sapien
cctggagcttggtgtgctgggcttg

SEQ ID NO: 2064699 - DNA, 25 bp, Homo sapien
tctcagtttgatgtcttcctcggaa

SEQ ID NO: 2064700 - DNA, 25 bp, Homo sapien
agcaacaattggcaagagggctggt

SEQ ID NO: 2064701 - DNA, 25 bp, Homo sapien
aacaattggcaagagggctggttgt

SEQ ID NO: 2064702 - DNA, 25 bp, Homo sapien
tggcagtaggaggtacgctggcact

SEQ ID NO: 2064703 - DNA, 25 bp, Homo sapien
ggtacgctggcactgaagatgccca

SEQ ID NO: 2064704 - DNA, 25 bp, Homo sapien
ttggaattactttcagatttttgca

SEQ ID NO: 2064705 - DNA, 25 bp, Homo sapien
tttggaattactttcagatttttgc

SEQ ID NO: 2064706 - DNA, 25 bp, Homo sapien
ggaattactttcagatttttgcaag

SEQ ID NO: 2064707 - DNA, 25 bp, Homo sapien
tggaattactttcagatttttgcaa

SEQ ID NO: 2064708 - DNA, 25 bp, Homo sapien
tggttcaattcgcttagtactaaac

SEQ ID NO: 2064709 - DNA, 25 bp, Homo sapien
acagccacttggaaacaccgtaggt

SEQ ID NO: 2064710 - DNA, 25 bp, Homo sapien
gaatcccatgctaggtgggcccctt

SEQ ID NO: 2064711 - DNA, 25 bp, Homo sapien
tcctttgagtaagtctggaatccca

SEQ ID NO: 2064712 - DNA, 25 bp, Homo sapien
ggtcagaaatgtcgccttcagatct

SEQ ID NO: 2064713 - DNA, 25 bp, Homo sapien
tgggtcagaaatgtcgccttcagat

SEQ ID NO: 2064714 - DNA, 25 bp, Homo sapien
gaaatgtcgccttcagatctcttgg

SEQ ID NO: 2064715 - DNA, 25 bp, Homo sapien
cgccttcagatctcttggacagcat

SEQ ID NO: 2064716 - DNA, 25 bp, Homo sapien
ttttgactttggcctgttgtaagcc

SEQ ID NO: 2064717 - DNA, 25 bp, Homo sapien
cagcccctggctttgggagggtcca

SEQ ID NO: 2064718 - DNA, 25 bp, Homo sapien
gaatcccactcctttcctatgacag

SEQ ID NO: 2064719 - DNA, 25 bp, Homo sapien
ggagggtccaggcttaccaactgct

SEQ ID NO: 2064720 - DNA, 25 bp, Homo sapien
taattgggatccagtcacgctctgc

SEQ ID NO: 2064721 - DNA, 25 bp, Homo sapien
cttgtctcttcagttagacatgcat

SEQ ID NO: 2064722 - DNA, 25 bp, Homo sapien
tgtctcttcagttagacatgcatgc

SEQ ID NO: 2064723 - DNA, 25 bp, Homo sapien
cttcagttagacatgcatgccttgt

SEQ ID NO: 2064724 - DNA, 25 bp, Homo sapien
tctcttcagttagacatgcatgcct

SEQ ID NO: 2064725 - DNA, 25 bp, Homo sapien
gagagaataacccttgtcacatgac

SEQ ID NO: 2064726 - DNA, 25 bp, Homo sapien
gctctttttaatgttatctgccaag

SEQ ID NO: 2064727 - DNA, 25 bp, Homo sapien
tcacatgactgagtgtgtgactgat

SEQ ID NO: 2064728 - DNA, 25 bp, Homo sapien
ttggcattagcacacttctcctggt

SEQ ID NO: 2064729 - DNA, 25 bp, Homo sapien
tcagtcgtgtgttccaactgtccct

SEQ ID NO: 2064730 - DNA, 25 bp, Homo sapien
gattgggcaaactcatccatctgac

SEQ ID NO: 2064731 - DNA, 25 bp, Homo sapien
actcatccatctgactgctgctggt

SEQ ID NO: 2064732 - DNA, 25 bp, Homo sapien
caactgtcccttttagtgattgggc

SEQ ID NO: 2064733 - DNA, 25 bp, Homo sapien
atattcttccaggatccttttccat

SEQ ID NO: 2064734 - DNA, 25 bp, Homo sapien
agtcgaatctattttgactagaaga

SEQ ID NO: 2064735 - DNA, 25 bp, Homo sapien
gaagtgaagtcgaatctattttgac

SEQ ID NO: 2064736 - DNA, 25 bp, Homo sapien
tcaacagaagtgaagtcgaatctat

SEQ ID NO: 2064737 - DNA, 25 bp, Homo sapien
taaatgctagtgatttgtttgcatt

SEQ ID NO: 2064738 - DNA, 25 bp, Homo sapien
ctgaacgatagcaataacttcttgg

SEQ ID NO: 2064739 - DNA, 25 bp, Homo sapien
tcattcatacaccaatcgatatcct

SEQ ID NO: 2064740 - DNA, 25 bp, Homo sapien
ccaatcgatatcctaattggtctgc

SEQ ID NO: 2064741 - DNA, 25 bp, Homo sapien
cgatatcctaattggtctgcctcaa

SEQ ID NO: 2064742 - DNA, 25 bp, Homo sapien
catacaccaatcgatatcctaattg

SEQ ID NO: 2064743 - DNA, 25 bp, Homo sapien
ccatgggaaccagtgacctgttcaa

SEQ ID NO: 2064744 - DNA, 25 bp, Homo sapien
acaagactgcagggctaatatcaca

SEQ ID NO: 2064745 - DNA, 25 bp, Homo sapien
catgggaaccagtgacctgttcaaa

SEQ ID NO: 2064746 - DNA, 25 bp, Homo sapien
agactgcagggctaatatcacagtc

SEQ ID NO: 2064747 - DNA, 25 bp, Homo sapien
cttgggagccactgcagtgttcagc

SEQ ID NO: 2064748 - DNA, 25 bp, Homo sapien
tgggagccactgcagtgttcagctg

SEQ ID NO: 2064749 - DNA, 25 bp, Homo sapien
ggagccactgcagtgttcagctgct

SEQ ID NO: 2064750 - DNA, 25 bp, Homo sapien
caggggcccttgcaaggccctggcc

SEQ ID NO: 2064751 - DNA, 25 bp, Homo sapien
tctttgcgtgtggaacaagtaatct

SEQ ID NO: 2064752 - DNA, 25 bp, Homo sapien
tgctgcagagcagcgagatcccagg

SEQ ID NO: 2064753 - DNA, 25 bp, Homo sapien
aacaagtaatctggcacgttggcgg

SEQ ID NO: 2064754 - DNA, 25 bp, Homo sapien
agtaatctggcacgttggcggtttt

SEQ ID NO: 2064755 - DNA, 25 bp, Homo sapien
tgggcaacagaaaatcgcaggattg

SEQ ID NO: 2064756 - DNA, 25 bp, Homo sapien
caacccatgacggacagtaaaggga

SEQ ID NO: 2064757 - DNA, 25 bp, Homo sapien
tgttccctgatagcagggcttttct

SEQ ID NO: 2064758 - DNA, 25 bp, Homo sapien
ggcttttctgggcaacacaattctg

SEQ ID NO: 2064759 - DNA, 25 bp, Homo sapien
aaccagtctgtcaacactgtctcag

SEQ ID NO: 2064760 - DNA, 25 bp, Homo sapien
tcataaacaaccagtctgtcaacac

SEQ ID NO: 2064761 - DNA, 25 bp, Homo sapien
agccactcataaacaaccagtctgt

SEQ ID NO: 2064762 - DNA, 25 bp, Homo sapien
gtctgtcaacactgtctcagaagtg

SEQ ID NO: 2064763 - DNA, 25 bp, Homo sapien
cgagtaggcagactgaagatttctc

SEQ ID NO: 2064764 - DNA, 25 bp, Homo sapien
tgacagtgcttagagtcctgaagga

SEQ ID NO: 2064765 - DNA, 25 bp, Homo sapien
tgagggcctacggatgaatgagtct

SEQ ID NO: 2064766 - DNA, 25 bp, Homo sapien
cagttatgaaagagcccaaatgagg

SEQ ID NO: 2064767 - DNA, 25 bp, Homo sapien
ggaatgcacaagctaacatatcagt

SEQ ID NO: 2064768 - DNA, 25 bp, Homo sapien
gtgtgacaggatctgtattctatca

SEQ ID NO: 2064769 - DNA, 25 bp, Homo sapien
gggatatagtttgtgtgacaggatc

SEQ ID NO: 2064770 - DNA, 25 bp, Homo sapien
tgtgggatatagtttgtgtgacagg

SEQ ID NO: 2064771 - DNA, 25 bp, Homo sapien
cacatctgcatatttcccgtgatga

SEQ ID NO: 2064772 - DNA, 25 bp, Homo sapien
ctcagactcagttcttgcaacccac

SEQ ID NO: 2064773 - DNA, 25 bp, Homo sapien
ttcttcctcagactcagttcttgca

SEQ ID NO: 2064774 - DNA, 25 bp, Homo sapien
ttcctcagactcagttcttgcaacc

SEQ ID NO: 2064775 - DNA, 25 bp, Homo sapien
catgctagctcttgccttttcttcc

SEQ ID NO: 2064776 - DNA, 25 bp, Homo sapien
ttaactggccccctagactaggaga

SEQ ID NO: 2064777 - DNA, 25 bp, Homo sapien
cttctttgtgctcaccgtaatctat

SEQ ID NO: 2064778 - DNA, 25 bp, Homo sapien
tgtgctcaccgtaatctatccttcc

SEQ ID NO: 2064779 - DNA, 25 bp, Homo sapien
cccctagactaggagaggctccatc

SEQ ID NO: 2064780 - DNA, 25 bp, Homo sapien
tctttgctgctctatgagtattggc

SEQ ID NO: 2064781 - DNA, 25 bp, Homo sapien
catgaagaaggctttttctatgtgg

SEQ ID NO: 2064782 - DNA, 25 bp, Homo sapien
gagtattggcctgtttcccatgcaa

SEQ ID NO: 2064783 - DNA, 25 bp, Homo sapien
taggaagagagaatccccatgaaga

SEQ ID NO: 2064784 - DNA, 25 bp, Homo sapien
gagctgagggttaagctcaagatta

SEQ ID NO: 2064785 - DNA, 25 bp, Homo sapien
ttaagctcaagattactggagccca

SEQ ID NO: 2064786 - DNA, 25 bp, Homo sapien
cagagtcatgggcagtgactgaact

SEQ ID NO: 2064787 - DNA, 25 bp, Homo sapien
tgactgaactggaatcatcagaact

SEQ ID NO: 2064788 - DNA, 25 bp, Homo sapien
ccaatgctctgaggtttacgttcat

SEQ ID NO: 2064789 - DNA, 25 bp, Homo sapien
gaagacgggacaatgttcttggcct

SEQ ID NO: 2064790 - DNA, 25 bp, Homo sapien
gcctccacaggggaaaattagcagc

SEQ ID NO: 2064791 - DNA, 25 bp, Homo sapien
ctgggcctccacaggggaaaattag

SEQ ID NO: 2064792 - DNA, 25 bp, Homo sapien
aaggacttgcattcaatcccaaata

SEQ ID NO: 2064793 - DNA, 25 bp, Homo sapien
gcattcaatcccaaatacgctgacc

SEQ ID NO: 2064794 - DNA, 25 bp, Homo sapien
cccaaatacgctgacctctggaatc

SEQ ID NO: 2064795 - DNA, 25 bp, Homo sapien
caatcccaaatacgctgacctctgg

SEQ ID NO: 2064796 - DNA, 25 bp, Homo sapien
gcttgcacgaaggttgcttgcacga

SEQ ID NO: 2064797 - DNA, 25 bp, Homo sapien
gcttgcacgaaggttgcttgcacaa

SEQ ID NO: 2064798 - DNA, 25 bp, Homo sapien
gaaggttgcttgcacaaaggctaca

SEQ ID NO: 2064799 - DNA, 25 bp, Homo sapien
tgcacaaaggctacacatagcagct

SEQ ID NO: 2064800 - DNA, 25 bp, Homo sapien
aatttgagggcatctttagaacatt

SEQ ID NO: 2064801 - DNA, 25 bp, Homo sapien
ttgagggcatctttagaacatttga

SEQ ID NO: 2064802 - DNA, 25 bp, Homo sapien
tttgagggcatctttagaacatttg

SEQ ID NO: 2064803 - DNA, 25 bp, Homo sapien
ggaatttgagggcatctttagaaca

SEQ ID NO: 2064804 - DNA, 25 bp, Homo sapien
tggagcattgcagatcagccgactc

SEQ ID NO: 2064805 - DNA, 25 bp, Homo sapien
tgaggttcctttcacagacagaatc

SEQ ID NO: 2064806 - DNA, 25 bp, Homo sapien
gagacacagtgctactcaagtgtga

SEQ ID NO: 2064807 - DNA, 25 bp, Homo sapien
ggaatttaccgatgctcagctcgaa

SEQ ID NO: 2064808 - DNA, 25 bp, Homo sapien
acagccatttgcattgtaaaccatg

SEQ ID NO: 2064809 - DNA, 25 bp, Homo sapien
gtttcttcaccttgcaacagccatt

SEQ ID NO: 2064810 - DNA, 25 bp, Homo sapien
gccatttgcattgtaaaccatggag

SEQ ID NO: 2064811 - DNA, 25 bp, Homo sapien
gcattgtaaaccatggagatttatt

SEQ ID NO: 2064812 - DNA, 25 bp, Homo sapien
gagggcattttatgctaaagttgcc

SEQ ID NO: 2064813 - DNA, 25 bp, Homo sapien
ctcacaaggaggagaactgctgaca

SEQ ID NO: 2064814 - DNA, 25 bp, Homo sapien
tggaaagctgcccaagagggcattt

SEQ ID NO: 2064815 - DNA, 25 bp, Homo sapien
gcaaggtgaattgacaatctgtggc

SEQ ID NO: 2064816 - DNA, 25 bp, Homo sapien
gtggcagttcaaaaggtcaatcaaa

SEQ ID NO: 2064817 - DNA, 25 bp, Homo sapien
ttaattgatgtcagctatcccttga

SEQ ID NO: 2064818 - DNA, 25 bp, Homo sapien
gaagacagtccaatggagtgtggca

SEQ ID NO: 2064819 - DNA, 25 bp, Homo sapien
gagtgtggcagttcaaaaggtcaat

SEQ ID NO: 2064820 - DNA, 25 bp, Homo sapien
ctaaggctgaaagttaaaggcagga

SEQ ID NO: 2064821 - DNA, 25 bp, Homo sapien
ggaactgcagcaccgtttctgcatc

SEQ ID NO: 2064822 - DNA, 25 bp, Homo sapien
ctgcagcaccgtttctgcatccaaa

SEQ ID NO: 2064823 - DNA, 25 bp, Homo sapien
aactgcagcaccgtttctgcatcca

SEQ ID NO: 2064824 - DNA, 25 bp, Homo sapien
tctgcatccaaaactagctgtgcaa

SEQ ID NO: 2064825 - DNA, 25 bp, Homo sapien
aaggcacaatatttgtccgaagaag

SEQ ID NO: 2064826 - DNA, 25 bp, Homo sapien
ggcacaatatttgtccgaagaagcc

SEQ ID NO: 2064827 - DNA, 25 bp, Homo sapien
ctaaaggcacaatatttgtccgaag

SEQ ID NO: 2064828 - DNA, 25 bp, Homo sapien
cacaatatttgtccgaagaagccag

SEQ ID NO: 2064829 - DNA, 25 bp, Homo sapien
aacaaaagagggatgcgactgcctg

SEQ ID NO: 2064830 - DNA, 25 bp, Homo sapien
aggagtctgaagtggtcaggtctgg

SEQ ID NO: 2064831 - DNA, 25 bp, Homo sapien
gagggatgcgactgcctgaacatgc

SEQ ID NO: 2064832 - DNA, 25 bp, Homo sapien
tgaacatgcacaggagtctgaagtg

SEQ ID NO: 2064833 - DNA, 25 bp, Homo sapien
gctcagaagcagcatgcttaaatcc

SEQ ID NO: 2064834 - DNA, 25 bp, Homo sapien
gaagcagcatgcttaaatccctctg

SEQ ID NO: 2064835 - DNA, 25 bp, Homo sapien
tcagaagcagcatgcttaaatccct

SEQ ID NO: 2064836 - DNA, 25 bp, Homo sapien
agcatgcttaaatccctctgaaatg

SEQ ID NO: 2064837 - DNA, 25 bp, Homo sapien
tcataactctggctcctaaaactaa

SEQ ID NO: 2064838 - DNA, 25 bp, Homo sapien
aactaatgttgtgaagcttcagttc

SEQ ID NO: 2064839 - DNA, 25 bp, Homo sapien
gcatcttcataactctggctcctaa

SEQ ID NO: 2064840 - DNA, 25 bp, Homo sapien
tctggctcctaaaactaatgttgtg

SEQ ID NO: 2064841 - DNA, 25 bp, Homo sapien
ttcctctgggaagtcgtcatgcggc

SEQ ID NO: 2064842 - DNA, 25 bp, Homo sapien
cctctgggaagtcgtcatgcggctc

SEQ ID NO: 2064843 - DNA, 25 bp, Homo sapien
gggaagtcgtcatgcggctccagct

SEQ ID NO: 2064844 - DNA, 25 bp, Homo sapien
tctgggaagtcgtcatgcggctcca

SEQ ID NO: 2064845 - DNA, 25 bp, Homo sapien
tcacccttgtagaatctgaacaata

SEQ ID NO: 2064846 - DNA, 25 bp, Homo sapien
gatgacaatgagtatcttctgaaac

SEQ ID NO: 2064847 - DNA, 25 bp, Homo sapien
gtagaatctgaacaataatgaaagg

SEQ ID NO: 2064848 - DNA, 25 bp, Homo sapien
ctctttacctaagggattggcaggc

SEQ ID NO: 2064849 - DNA, 25 bp, Homo sapien
gagggtatagacagagttgtttttc

SEQ ID NO: 2064850 - DNA, 25 bp, Homo sapien
tgaggatggttatgacactaagagt

SEQ ID NO: 2064851 - DNA, 25 bp, Homo sapien
catttcgagccatttccccagtgac

SEQ ID NO: 2064852 - DNA, 25 bp, Homo sapien
agccagggaagctaaacactgtata

SEQ ID NO: 2064853 - DNA, 25 bp, Homo sapien
ctgcaggttccgtaaagttgtttct

SEQ ID NO: 2064854 - DNA, 25 bp, Homo sapien
tgcaggttccgtaaagttgtttcta

SEQ ID NO: 2064855 - DNA, 25 bp, Homo sapien
tgtagatttcgcctgagtttcccca

SEQ ID NO: 2064856 - DNA, 25 bp, Homo sapien
ctaatgtagatttcgcctgagtttc

SEQ ID NO: 2064857 - DNA, 25 bp, Homo sapien
catgacagatttgtattcagcgata

SEQ ID NO: 2064858 - DNA, 25 bp, Homo sapien
gcgataaacgcctgaccttgctcta

SEQ ID NO: 2064859 - DNA, 25 bp, Homo sapien
gatgaaagagtctgcttaactcctg

SEQ ID NO: 2064860 - DNA, 25 bp, Homo sapien
tcatctattaggcatgacagatttg

SEQ ID NO: 2064861 - DNA, 25 bp, Homo sapien
gaaggtatatatggtgcttccttgc

SEQ ID NO: 2064862 - DNA, 25 bp, Homo sapien
tgaaactctgggcatgttattctct

SEQ ID NO: 2064863 - DNA, 25 bp, Homo sapien
gaaactctgggcatgttattctctc

SEQ ID NO: 2064864 - DNA, 25 bp, Homo sapien
gcctggtactgggaaggtatatatg

SEQ ID NO: 2064865 - DNA, 25 bp, Homo sapien
taacgacaatagtgacatctgagga

SEQ ID NO: 2064866 - DNA, 25 bp, Homo sapien
tgtacaaactcagcttaacttggct

SEQ ID NO: 2064867 - DNA, 25 bp, Homo sapien
gcatccatcctatcctaacgacaat

SEQ ID NO: 2064868 - DNA, 25 bp, Homo sapien
aataatgtggctagtcttgaagaga

SEQ ID NO: 2064869 - DNA, 25 bp, Homo sapien
agctctgctgaaaaacattctctac

SEQ ID NO: 2064870 - DNA, 25 bp, Homo sapien
gctctgctgaaaaacattctctacc

SEQ ID NO: 2064871 - DNA, 25 bp, Homo sapien
cagctctgctgaaaaacattctcta

SEQ ID NO: 2064872 - DNA, 25 bp, Homo sapien
cttagtgtccttaggtttgtgcttt

SEQ ID NO: 2064873 - DNA, 25 bp, Homo sapien
aatggaatgacacaggaatgtagtt

SEQ ID NO: 2064874 - DNA, 25 bp, Homo sapien
acaggaatgtagttgaaatccagtg

SEQ ID NO: 2064875 - DNA, 25 bp, Homo sapien
aaatggaatgacacaggaatgtagt

SEQ ID NO: 2064876 - DNA, 25 bp, Homo sapien
caaattctgtcccaaatttggatga

SEQ ID NO: 2064877 - DNA, 25 bp, Homo sapien
ttctgtcccaaatttggatgaattg

SEQ ID NO: 2064878 - DNA, 25 bp, Homo sapien
tgtcccaaatttggatgaattgttt

SEQ ID NO: 2064879 - DNA, 25 bp, Homo sapien
cattgagttccaaattctgtcccaa

SEQ ID NO: 2064880 - DNA, 25 bp, Homo sapien
agaggactagaagtagtcggggcct

SEQ ID NO: 2064881 - DNA, 25 bp, Homo sapien
ctcagaaagaggactagaagtagtc

SEQ ID NO: 2064882 - DNA, 25 bp, Homo sapien
aaatatagaggcctggatggtcata

SEQ ID NO: 2064883 - DNA, 25 bp, Homo sapien
aatatagaggcctggatggtcatac

SEQ ID NO: 2064884 - DNA, 25 bp, Homo sapien
cagcaacgcatgtgttctttagacg

SEQ ID NO: 2064885 - DNA, 25 bp, Homo sapien
tgatctatatcagcaacgcatgtgt

SEQ ID NO: 2064886 - DNA, 25 bp, Homo sapien
ttctttagacgttcttcaccggcag

SEQ ID NO: 2064887 - DNA, 25 bp, Homo sapien
tagacgttcttcaccggcagaggac

SEQ ID NO: 2064888 - DNA, 25 bp, Homo sapien
cttcggctcccagagatgtggtccc

SEQ ID NO: 2064889 - DNA, 25 bp, Homo sapien
atgtggtccctgtcttggtttccag

SEQ ID NO: 2064890 - DNA, 25 bp, Homo sapien
tatggcagcgacacctctgatagcc

SEQ ID NO: 2064891 - DNA, 25 bp, Homo sapien
ccgatttgtccgtctcagctggcgc

SEQ ID NO: 2064892 - DNA, 25 bp, Homo sapien
tgggaatcgctcctcacctgccaat

SEQ ID NO: 2064893 - DNA, 25 bp, Homo sapien
ctgatctctgggaatcgctcctcac

SEQ ID NO: 2064894 - DNA, 25 bp, Homo sapien
gatctctgggaatcgctcctcacct

SEQ ID NO: 2064895 - DNA, 25 bp, Homo sapien
tctgggaatcgctcctcacctgcca

SEQ ID NO: 2064896 - DNA, 25 bp, Homo sapien
tatggcctttgataacaatgttgct

SEQ ID NO: 2064897 - DNA, 25 bp, Homo sapien
taacaatgttgcttgaaggtctaga

SEQ ID NO: 2064898 - DNA, 25 bp, Homo sapien
ccaaggtgtttgataggcaaatatg

SEQ ID NO: 2064899 - DNA, 25 bp, Homo sapien
gatagacaaattgatcctctcagca

SEQ ID NO: 2064900 - DNA, 25 bp, Homo sapien
tatgccctactaaacgtgaaagcgg

SEQ ID NO: 2064901 - DNA, 25 bp, Homo sapien
aatcgcctagtttggttatatgccc

SEQ ID NO: 2064902 - DNA, 25 bp, Homo sapien
ctagtctaggagaaagaggttccct

SEQ ID NO: 2064903 - DNA, 25 bp, Homo sapien
tggtttgctaagctgaattagagca

SEQ ID NO: 2064904 - DNA, 25 bp, Homo sapien
taggcaaccgctttgatggagagct

SEQ ID NO: 2064905 - DNA, 25 bp, Homo sapien
tgagctgctttaggcaaccgctttg

SEQ ID NO: 2064906 - DNA, 25 bp, Homo sapien
gctgaatgaaactctactccaagga

SEQ ID NO: 2064907 - DNA, 25 bp, Homo sapien
gcagctgaatgaaactctactccaa

SEQ ID NO: 2064908 - DNA, 25 bp, Homo sapien
tctcttgcactagttggtaagtcac

SEQ ID NO: 2064909 - DNA, 25 bp, Homo sapien
gaaggccctgatccaagtactttgc

SEQ ID NO: 2064910 - DNA, 25 bp, Homo sapien
taagagcttttatgaacgaatgaac

SEQ ID NO: 2064911 - DNA, 25 bp, Homo sapien
gaatacttactaatggaaggccctg

SEQ ID NO: 2064912 - DNA, 25 bp, Homo sapien
tgtatttgcaccacagaactcagca

SEQ ID NO: 2064913 - DNA, 25 bp, Homo sapien
ttttcagtgacattatgctggcagc

SEQ ID NO: 2064914 - DNA, 25 bp, Homo sapien
gcagcttgaaattggccttcttcgg

SEQ ID NO: 2064915 - DNA, 25 bp, Homo sapien
tgtaggctctaggacaccacaggaa

SEQ ID NO: 2064916 - DNA, 25 bp, Homo sapien
gggatgaaagcataggtcccctcat

SEQ ID NO: 2064917 - DNA, 25 bp, Homo sapien
tgagacttgcaatcatcatgacgtt

SEQ ID NO: 2064918 - DNA, 25 bp, Homo sapien
tcatcatgacgtttacccagggatg

SEQ ID NO: 2064919 - DNA, 25 bp, Homo sapien
ctccctgagacttgcaatcatcatg

SEQ ID NO: 2064920 - DNA, 25 bp, Homo sapien
aactctgggttctttgctctgcata

SEQ ID NO: 2064921 - DNA, 25 bp, Homo sapien
gatcagcagccatgctgtcatattt

SEQ ID NO: 2064922 - DNA, 25 bp, Homo sapien
gagagtccacgggatagcaatttgc

SEQ ID NO: 2064923 - DNA, 25 bp, Homo sapien
aaaatcaccaactatgatgagagtc

SEQ ID NO: 2064924 - DNA, 25 bp, Homo sapien
ttccatgcaagattccagggaaaaa

SEQ ID NO: 2064925 - DNA, 25 bp, Homo sapien
tgcaagattccagggaaaaagaaaa

SEQ ID NO: 2064926 - DNA, 25 bp, Homo sapien
caagattccagggaaaaagaaaatg

SEQ ID NO: 2064927 - DNA, 25 bp, Homo sapien
attccagggaaaaagaaaatggcat

SEQ ID NO: 2064928 - DNA, 25 bp, Homo sapien
ttcctgggtcttggctgaaatgatt

SEQ ID NO: 2064929 - DNA, 25 bp, Homo sapien
attcctgggtcttggctgaaatgat

SEQ ID NO: 2064930 - DNA, 25 bp, Homo sapien
ctgggtcttggctgaaatgattttg

SEQ ID NO: 2064931 - DNA, 25 bp, Homo sapien
cctgggtcttggctgaaatgatttt

SEQ ID NO: 2064932 - DNA, 25 bp, Homo sapien
tggagtaggactcattgctctgtat

SEQ ID NO: 2064933 - DNA, 25 bp, Homo sapien
caaatatttgtgagtaccacgctta

SEQ ID NO: 2064934 - DNA, 25 bp, Homo sapien
taccacgcttacagggcatcatagc

SEQ ID NO: 2064935 - DNA, 25 bp, Homo sapien
gaggtccagtgcatcgccattgctg

SEQ ID NO: 2064936 - DNA, 25 bp, Homo sapien
ttccatttacctcatccctggtagg

SEQ ID NO: 2064937 - DNA, 25 bp, Homo sapien
gagagaacaattccatttacctcat

SEQ ID NO: 2064938 - DNA, 25 bp, Homo sapien
ttgttaggatgcctgaagtcttcat

SEQ ID NO: 2064939 - DNA, 25 bp, Homo sapien
catccctggtaggaatatttgttag

SEQ ID NO: 2064940 - DNA, 25 bp, Homo sapien
tgggagctgcgttcttttataactc

SEQ ID NO: 2064941 - DNA, 25 bp, Homo sapien
tgtgggagctgcgttcttttataac

SEQ ID NO: 2064942 - DNA, 25 bp, Homo sapien
ctctccattctctcccgtggccctc

SEQ ID NO: 2064943 - DNA, 25 bp, Homo sapien
attctctcccgtggccctctctctt

SEQ ID NO: 2064944 - DNA, 25 bp, Homo sapien
tttacacacacatatggtcgctttg

SEQ ID NO: 2064945 - DNA, 25 bp, Homo sapien
tatggtcgctttgaacttctcccac

SEQ ID NO: 2064946 - DNA, 25 bp, Homo sapien
cacatatggtcgctttgaacttctc

SEQ ID NO: 2064947 - DNA, 25 bp, Homo sapien
cacacacatatggtcgctttgaact

SEQ ID NO: 2064948 - DNA, 25 bp, Homo sapien
gctctgcataatggctcagaggaaa

SEQ ID NO: 2064949 - DNA, 25 bp, Homo sapien
tctattcctgacactatggaggaga

SEQ ID NO: 2064950 - DNA, 25 bp, Homo sapien
cattaagtgctccacttgtgagctg

SEQ ID NO: 2064951 - DNA, 25 bp, Homo sapien
caaagcacggcttaccaactggagc

SEQ ID NO: 2064952 - DNA, 25 bp, Homo sapien
tgcccacttcaatcagccctagatt

SEQ ID NO: 2064953 - DNA, 25 bp, Homo sapien
acatcaagaaccttggctatctgac

SEQ ID NO: 2064954 - DNA, 25 bp, Homo sapien
gattctgccgcttcaattttctttc

SEQ ID NO: 2064955 - DNA, 25 bp, Homo sapien
tatctgactgtaacgtctctttcct

SEQ ID NO: 2064956 - DNA, 25 bp, Homo sapien
cactcttggttgctgatattgatca

SEQ ID NO: 2064957 - DNA, 25 bp, Homo sapien
tgcctgctcccttgtatcccgagcc

SEQ ID NO: 2064958 - DNA, 25 bp, Homo sapien
tcccttgtatcccgagccctggaaa

SEQ ID NO: 2064959 - DNA, 25 bp, Homo sapien
ctggaaacccatccactcttggttg

SEQ ID NO: 2064960 - DNA, 25 bp, Homo sapien
ttttctgaagtggcaacttcacttt

SEQ ID NO: 2064961 - DNA, 25 bp, Homo sapien
caagaccagcatgcgggtaaacacc

SEQ ID NO: 2064962 - DNA, 25 bp, Homo sapien
cttcctcacatggagaaggacagca

SEQ ID NO: 2064963 - DNA, 25 bp, Homo sapien
ggcaacttgtcaaaagacgtcattt

SEQ ID NO: 2064964 - DNA, 25 bp, Homo sapien
gttcagcgtggcttgggatgcttca

SEQ ID NO: 2064965 - DNA, 25 bp, Homo sapien
gggtctagtttctcgctacatgggc

SEQ ID NO: 2064966 - DNA, 25 bp, Homo sapien
gacataacacctggattccccaaga

SEQ ID NO: 2064967 - DNA, 25 bp, Homo sapien
tacatgggcgtatgcacaggtctgc

SEQ ID NO: 2064968 - DNA, 25 bp, Homo sapien
cagtttagctaggtggttcagggtc

SEQ ID NO: 2064969 - DNA, 25 bp, Homo sapien
taggctgccattgcgggtattcatc

SEQ ID NO: 2064970 - DNA, 25 bp, Homo sapien
gattttccccgtgcaaattgtggca

SEQ ID NO: 2064971 - DNA, 25 bp, Homo sapien
caagggatcaatatgtcagtggaca

SEQ ID NO: 2064972 - DNA, 25 bp, Homo sapien
tgacagtggacagaaaaggcgtttg

SEQ ID NO: 2064973 - DNA, 25 bp, Homo sapien
tccctctacggtaaggcaggaagcc

SEQ ID NO: 2064974 - DNA, 25 bp, Homo sapien
ctgtccagtctgtctgtcgagtatc

SEQ ID NO: 2064975 - DNA, 25 bp, Homo sapien
gagtatccctctacggtaaggcagg

SEQ ID NO: 2064976 - DNA, 25 bp, Homo sapien
tgtctgtcgagtatccctctacggt

SEQ ID NO: 2064977 - DNA, 25 bp, Homo sapien
atccaggactctttatgctcataac

SEQ ID NO: 2064978 - DNA, 25 bp, Homo sapien
gccgctctgccaccagaactcattt

SEQ ID NO: 2064979 - DNA, 25 bp, Homo sapien
gtgatacctgacagccaaccagccg

SEQ ID NO: 2064980 - DNA, 25 bp, Homo sapien
ctctctgattcccattgggtgatac

SEQ ID NO: 2064981 - DNA, 25 bp, Homo sapien
ggctttgcaactcaaacagattgtt

SEQ ID NO: 2064982 - DNA, 25 bp, Homo sapien
gggatctagatacggctgttaaagc

SEQ ID NO: 2064983 - DNA, 25 bp, Homo sapien
tgctactcattcaaagggctttgca

SEQ ID NO: 2064984 - DNA, 25 bp, Homo sapien
tgttaaagctgcagtgttccatacc

SEQ ID NO: 2064985 - DNA, 25 bp, Homo sapien
ttgacatcctccaataaaatttcta

SEQ ID NO: 2064986 - DNA, 25 bp, Homo sapien
ttaatcccggttgacatcctccaat

SEQ ID NO: 2064987 - DNA, 25 bp, Homo sapien
catcctccaataaaatttctaaggt

SEQ ID NO: 2064988 - DNA, 25 bp, Homo sapien
gacatcctccaataaaatttctaag

SEQ ID NO: 2064989 - DNA, 25 bp, Homo sapien
gcctggattgcaggagtcctatgat

SEQ ID NO: 2064990 - DNA, 25 bp, Homo sapien
ctggattgcaggagtcctatgatgt

SEQ ID NO: 2064991 - DNA, 25 bp, Homo sapien
ttcaaaaaccttggcctgcgatggc

SEQ ID NO: 2064992 - DNA, 25 bp, Homo sapien
tggcctggattgcaggagtcctatg

SEQ ID NO: 2064993 - DNA, 25 bp, Homo sapien
ggcctctatgtagttccggttctca

SEQ ID NO: 2064994 - DNA, 25 bp, Homo sapien
cagataaggttgaataaagtggcac

SEQ ID NO: 2064995 - DNA, 25 bp, Homo sapien
acattactgccctggttaccgcagt

SEQ ID NO: 2064996 - DNA, 25 bp, Homo sapien
ggctgcagtctgtacaaagtttggt

SEQ ID NO: 2064997 - DNA, 25 bp, Homo sapien
taaagttttgaaatcaccaaggcca

SEQ ID NO: 2064998 - DNA, 25 bp, Homo sapien
cagataagtagcttggagtttaccc

SEQ ID NO: 2064999 - DNA, 25 bp, Homo sapien
gactgaggtcttgaaagtcaccatc

SEQ ID NO: 2065000 - DNA, 25 bp, Homo sapien
tgttcgagacataccactagctaaa

SEQ ID NO: 2065001 - DNA, 25 bp, Homo sapien
cctctggagacgcaggcacaaggat

SEQ ID NO: 2065002 - DNA, 25 bp, Homo sapien
ggagctagagacatagccacagcca

SEQ ID NO: 2065003 - DNA, 25 bp, Homo sapien
gcaagtcaatcaagctcatggctga

SEQ ID NO: 2065004 - DNA, 25 bp, Homo sapien
tggcagacaaaagcctcgactcagg

SEQ ID NO: 2065005 - DNA, 25 bp, Homo sapien
gtatctttgtgacgggcatttcttg

SEQ ID NO: 2065006 - DNA, 25 bp, Homo sapien
tacatctgtatctttgtgacgggca

SEQ ID NO: 2065007 - DNA, 25 bp, Homo sapien
tctcttacatctgtatctttgtgac

SEQ ID NO: 2065008 - DNA, 25 bp, Homo sapien
tgtgacgggcatttcttgatgtatt

SEQ ID NO: 2065009 - DNA, 25 bp, Homo sapien
cctcaaatataggacccatacttgt

SEQ ID NO: 2065010 - DNA, 25 bp, Homo sapien
aatataggacccatacttgtcatgc

SEQ ID NO: 2065011 - DNA, 25 bp, Homo sapien
agtgtcctcaaatataggacccata

SEQ ID NO: 2065012 - DNA, 25 bp, Homo sapien
aggacccatacttgtcatgctcaaa

SEQ ID NO: 2065013 - DNA, 25 bp, Homo sapien
tcagacctctcatccaggatccctg

SEQ ID NO: 2065014 - DNA, 25 bp, Homo sapien
ggtatcgttttagaactaattcaca

SEQ ID NO: 2065015 - DNA, 25 bp, Homo sapien
tgaagacactggttttggatcctga

SEQ ID NO: 2065016 - DNA, 25 bp, Homo sapien
cactggttttggatcctgaaaatgg

SEQ ID NO: 2065017 - DNA, 25 bp, Homo sapien
ttattccaagtgtatcgatccttta

SEQ ID NO: 2065018 - DNA, 25 bp, Homo sapien
ttttccaataccaatccaatcagtt

SEQ ID NO: 2065019 - DNA, 25 bp, Homo sapien
ctttgtatgtaagttgtgttggcat

SEQ ID NO: 2065020 - DNA, 25 bp, Homo sapien
tggttacccgacacattattccaag

SEQ ID NO: 2065021 - DNA, 25 bp, Homo sapien
ttccatacagttggtgtatttgtag

SEQ ID NO: 2065022 - DNA, 25 bp, Homo sapien
tcttttataagaacagcccatccag

SEQ ID NO: 2065023 - DNA, 25 bp, Homo sapien
ctaatgatctgattagacgagaaag

SEQ ID NO: 2065024 - DNA, 25 bp, Homo sapien
tcacctgtgagactaatgatctgat

SEQ ID NO: 2065025 - DNA, 25 bp, Homo sapien
gagaacccagatgtggaaatgccag

SEQ ID NO: 2065026 - DNA, 25 bp, Homo sapien
acccagatgtggaaatgccagacat

SEQ ID NO: 2065027 - DNA, 25 bp, Homo sapien
gaacccagatgtggaaatgccagac

SEQ ID NO: 2065028 - DNA, 25 bp, Homo sapien
cacaactgagaacccagatgtggaa

SEQ ID NO: 2065029 - DNA, 25 bp, Homo sapien
aaaggcaatgtctctcagtaatgca

SEQ ID NO: 2065030 - DNA, 25 bp, Homo sapien
ggcaatgtctctcagtaatgcattc

SEQ ID NO: 2065031 - DNA, 25 bp, Homo sapien
tcaggcaccctgaaaacttaaacgc

SEQ ID NO: 2065032 - DNA, 25 bp, Homo sapien
aggcaccctgaaaacttaaacgcat

SEQ ID NO: 2065033 - DNA, 25 bp, Homo sapien
taaatagtagtgaccaaagccattg

SEQ ID NO: 2065034 - DNA, 25 bp, Homo sapien
cagaaacatgcaccgctaccaacaa

SEQ ID NO: 2065035 - DNA, 25 bp, Homo sapien
ccatcatcacgatccttaaatagta

SEQ ID NO: 2065036 - DNA, 25 bp, Homo sapien
tgtacaatatcatccggagagaaag

SEQ ID NO: 2065037 - DNA, 25 bp, Homo sapien
tcaagctcttggaggcttgaggatg

SEQ ID NO: 2065038 - DNA, 25 bp, Homo sapien
gatgccacaaccacaataaggcatc

SEQ ID NO: 2065039 - DNA, 25 bp, Homo sapien
ggatgccacaaccacaataaggcat

SEQ ID NO: 2065040 - DNA, 25 bp, Homo sapien
ctcaagctcttggaggcttgaggat

SEQ ID NO: 2065041 - DNA, 25 bp, Homo sapien
tgttcataacatacactcggtgtcc

SEQ ID NO: 2065042 - DNA, 25 bp, Homo sapien
tagctcctcctttgcactagtgaag

SEQ ID NO: 2065043 - DNA, 25 bp, Homo sapien
aatacccaggttccagcgttgagtg

SEQ ID NO: 2065044 - DNA, 25 bp, Homo sapien
gctatcttcctagagaatacccagg

SEQ ID NO: 2065045 - DNA, 25 bp, Homo sapien
ttctcagcagccttcgtgctccata

SEQ ID NO: 2065046 - DNA, 25 bp, Homo sapien
agccttcgtgctccatacaccaagg

SEQ ID NO: 2065047 - DNA, 25 bp, Homo sapien
ccttcgtgctccatacaccaaggtg

SEQ ID NO: 2065048 - DNA, 25 bp, Homo sapien
tcgtgctccatacaccaaggtgtag

SEQ ID NO: 2065049 - DNA, 25 bp, Homo sapien
caattccgtggcctacttgagggct

SEQ ID NO: 2065050 - DNA, 25 bp, Homo sapien
cagaaaatatacaccacaatactga

SEQ ID NO: 2065051 - DNA, 25 bp, Homo sapien
aatatacaccacaatactgatttcc

SEQ ID NO: 2065052 - DNA, 25 bp, Homo sapien
tttctttccacaattccgtggccta

SEQ ID NO: 2065053 - DNA, 25 bp, Homo sapien
gccagggaaatcagaggggtctggc

SEQ ID NO: 2065054 - DNA, 25 bp, Homo sapien
gacatcaagttcataggccatgacc

SEQ ID NO: 2065055 - DNA, 25 bp, Homo sapien
cagacacgtgacagttgggattgaa

SEQ ID NO: 2065056 - DNA, 25 bp, Homo sapien
gattgaaggccagtgtccaattcaa

SEQ ID NO: 2065057 - DNA, 25 bp, Homo sapien
gtccaattcaataagaacctcgagg

SEQ ID NO: 2065058 - DNA, 25 bp, Homo sapien
tcaataagaacctcgaggagtgggt

SEQ ID NO: 2065059 - DNA, 25 bp, Homo sapien
aagacaatgcggcattccatgatca

SEQ ID NO: 2065060 - DNA, 25 bp, Homo sapien
caagcccatgaagacaatgcggcat

SEQ ID NO: 2065061 - DNA, 25 bp, Homo sapien
ctccaagcccatgaagacaatgcgg

SEQ ID NO: 2065062 - DNA, 25 bp, Homo sapien
cccatgaagacaatgcggcattcca

SEQ ID NO: 2065063 - DNA, 25 bp, Homo sapien
tctggttcctatgataggcataggc

SEQ ID NO: 2065064 - DNA, 25 bp, Homo sapien
gggtcattatgatctgctgaaactc

SEQ ID NO: 2065065 - DNA, 25 bp, Homo sapien
tatgataggcataggcactacgtgg

SEQ ID NO: 2065066 - DNA, 25 bp, Homo sapien
tacgtggcagtgcagagcctttggt

SEQ ID NO: 2065067 - DNA, 25 bp, Homo sapien
ctgccaggttttcgagctgcttaat

SEQ ID NO: 2065068 - DNA, 25 bp, Homo sapien
caggttttcgagctgcttaatgcaa

SEQ ID NO: 2065069 - DNA, 25 bp, Homo sapien
tttcgagctgcttaatgcaaccaca

SEQ ID NO: 2065070 - DNA, 25 bp, Homo sapien
cgagctgcttaatgcaaccacatgc

SEQ ID NO: 2065071 - DNA, 25 bp, Homo sapien
ttaattgtatttgagggcgctcatt

SEQ ID NO: 2065072 - DNA, 25 bp, Homo sapien
tatttgagggcgctcattttttcat

SEQ ID NO: 2065073 - DNA, 25 bp, Homo sapien
tttgagggcgctcattttttcatca

SEQ ID NO: 2065074 - DNA, 25 bp, Homo sapien
gctgccagttcaagtttagaagaat

SEQ ID NO: 2065075 - DNA, 25 bp, Homo sapien
tgctggaaaggggagacccctcttg

SEQ ID NO: 2065076 - DNA, 25 bp, Homo sapien
tggttgctggaccataacctgtacc

SEQ ID NO: 2065077 - DNA, 25 bp, Homo sapien
gggagacccctcttgctattttgat

SEQ ID NO: 2065078 - DNA, 25 bp, Homo sapien
gttgaagccagaagaggtaattggg

SEQ ID NO: 2065079 - DNA, 25 bp, Homo sapien
tgtaggatccaggtgatgcctcggc

SEQ ID NO: 2065080 - DNA, 25 bp, Homo sapien
ctgactctgtaggatccaggtgatg

SEQ ID NO: 2065081 - DNA, 25 bp, Homo sapien
gatccaggtgatgcctcggcgaata

SEQ ID NO: 2065082 - DNA, 25 bp, Homo sapien
ccaggtgatgcctcggcgaataggt

SEQ ID NO: 2065083 - DNA, 25 bp, Homo sapien
cctttaattgctggagtgtgtgacc

SEQ ID NO: 2065084 - DNA, 25 bp, Homo sapien
accctttaattgctggagtgtgtga

SEQ ID NO: 2065085 - DNA, 25 bp, Homo sapien
tatttttatctatagctgtaaagtc

SEQ ID NO: 2065086 - DNA, 25 bp, Homo sapien
ttttcagctgaagaccaagaatagg

SEQ ID NO: 2065087 - DNA, 25 bp, Homo sapien
gctgaagaccaagaataggaagcag

SEQ ID NO: 2065088 - DNA, 25 bp, Homo sapien
ttcagatcctctaaagataaattga

SEQ ID NO: 2065089 - DNA, 25 bp, Homo sapien
cacaagtggagccttaacacaaaat

SEQ ID NO: 2065090 - DNA, 25 bp, Homo sapien
tctacgttgagatattcacatttca

SEQ ID NO: 2065091 - DNA, 25 bp, Homo sapien
aaaatgtcttaatgtctacgttgag

SEQ ID NO: 2065092 - DNA, 25 bp, Homo sapien
gtggagccttaacacaaaatgtctt

SEQ ID NO: 2065093 - DNA, 25 bp, Homo sapien
gggcctgcctgttagaatacctaac

SEQ ID NO: 2065094 - DNA, 25 bp, Homo sapien
ggaaaaaaccgtgcaaaaatgctga

SEQ ID NO: 2065095 - DNA, 25 bp, Homo sapien
tctagtaagggcacaaaaatggaca

SEQ ID NO: 2065096 - DNA, 25 bp, Homo sapien
aacaggagttgacagacacctatac

SEQ ID NO: 2065097 - DNA, 25 bp, Homo sapien
caaagtagggcattacgtagtggta

SEQ ID NO: 2065098 - DNA, 25 bp, Homo sapien
aaagacaaagtagggcattacgtag

SEQ ID NO: 2065099 - DNA, 25 bp, Homo sapien
aagacactaccaagaaactgtatca

SEQ ID NO: 2065100 - DNA, 25 bp, Homo sapien
cgtagtggtaaagggatcagtgcaa

SEQ ID NO: 2065101 - DNA, 25 bp, Homo sapien
ttcccattctccatagccatctcca

SEQ ID NO: 2065102 - DNA, 25 bp, Homo sapien
cttcccattctccatagccatctcc

SEQ ID NO: 2065103 - DNA, 25 bp, Homo sapien
tcccattctccatagccatctccat

SEQ ID NO: 2065104 - DNA, 25 bp, Homo sapien
ttggaagagtccctgcaaggtgact

SEQ ID NO: 2065105 - DNA, 25 bp, Homo sapien
tggctgcacctgctaaccatttagg

SEQ ID NO: 2065106 - DNA, 25 bp, Homo sapien
caaggtgactatagaccctagcagg

SEQ ID NO: 2065107 - DNA, 25 bp, Homo sapien
cagtggtacacttcctggctgcacc

SEQ ID NO: 2065108 - DNA, 25 bp, Homo sapien
gaaatcttcctcactaccatttttc

SEQ ID NO: 2065109 - DNA, 25 bp, Homo sapien
tttttcccatctcgagcagaagaaa

SEQ ID NO: 2065110 - DNA, 25 bp, Homo sapien
ttcccatctcgagcagaagaaaatt

SEQ ID NO: 2065111 - DNA, 25 bp, Homo sapien
ccatttttcccatctcgagcagaag

SEQ ID NO: 2065112 - DNA, 25 bp, Homo sapien
aggactttagcatcatagaagcagc

SEQ ID NO: 2065113 - DNA, 25 bp, Homo sapien
tgacaactgcaacaaattcttagat

SEQ ID NO: 2065114 - DNA, 25 bp, Homo sapien
gagtcaggaaactctgtccacttcc

SEQ ID NO: 2065115 - DNA, 25 bp, Homo sapien
attaactaacacacagtcatggctg

SEQ ID NO: 2065116 - DNA, 25 bp, Homo sapien
tctgacacaccttttaattctgtag

SEQ ID NO: 2065117 - DNA, 25 bp, Homo sapien
cataaaggtaacagtgcccagtaca

SEQ ID NO: 2065118 - DNA, 25 bp, Homo sapien
gtagtatctaccatttgaaggaaaa

SEQ ID NO: 2065119 - DNA, 25 bp, Homo sapien
tctaccatttgaaggaaaactataa

SEQ ID NO: 2065120 - DNA, 25 bp, Homo sapien
aaaactgtagaggaactttctgaga

SEQ ID NO: 2065121 - DNA, 25 bp, Homo sapien
cagctgctatcctggaaaactgtag

SEQ ID NO: 2065122 - DNA, 25 bp, Homo sapien
tcccagctgctatcctggaaaactg

SEQ ID NO: 2065123 - DNA, 25 bp, Homo sapien
ctgctatcctggaaaactgtagagg

SEQ ID NO: 2065124 - DNA, 25 bp, Homo sapien
tgagaatgatccatggagccatagg

SEQ ID NO: 2065125 - DNA, 25 bp, Homo sapien
tagggactaaagcaatatgcaccag

SEQ ID NO: 2065126 - DNA, 25 bp, Homo sapien
gaaatggcccatggaaatcgcagat

SEQ ID NO: 2065127 - DNA, 25 bp, Homo sapien
tctgcatagctgttgagtaagtcct

SEQ ID NO: 2065128 - DNA, 25 bp, Homo sapien
cactgtcacgatgcttttcagagga

SEQ ID NO: 2065129 - DNA, 25 bp, Homo sapien
cagggagatgttagtctcccctttc

SEQ ID NO: 2065130 - DNA, 25 bp, Homo sapien
ctgcctctcaatcgctccttggtat

SEQ ID NO: 2065131 - DNA, 25 bp, Homo sapien
cacacagaaacaccccgtgggtggg

SEQ ID NO: 2065132 - DNA, 25 bp, Homo sapien
ccattccatgggcatcaaaaattac

SEQ ID NO: 2065133 - DNA, 25 bp, Homo sapien
tccattccatgggcatcaaaaatta

SEQ ID NO: 2065134 - DNA, 25 bp, Homo sapien
ttccatgggcatcaaaaattacaat

SEQ ID NO: 2065135 - DNA, 25 bp, Homo sapien
cattccatgggcatcaaaaattaca

SEQ ID NO: 2065136 - DNA, 25 bp, Homo sapien
ttctgtttttcgtcagaaatggaag

SEQ ID NO: 2065137 - DNA, 25 bp, Homo sapien
atttctgtttttcgtcagaaatgga

SEQ ID NO: 2065138 - DNA, 25 bp, Homo sapien
gacatttctgtttttcgtcagaaat

SEQ ID NO: 2065139 - DNA, 25 bp, Homo sapien
tctgtttttcgtcagaaatggaaga

SEQ ID NO: 2065140 - DNA, 25 bp, Homo sapien
tcaacaggaggctctgtacactagg

SEQ ID NO: 2065141 - DNA, 25 bp, Homo sapien
aggaggtccactcccaaggcagcga

SEQ ID NO: 2065142 - DNA, 25 bp, Homo sapien
caaggcagcgagctctccttgtgct

SEQ ID NO: 2065143 - DNA, 25 bp, Homo sapien
tacactagggaccacatctagccca

SEQ ID NO: 2065144 - DNA, 25 bp, Homo sapien
gatccttgtgcttgttgcgaagaga

SEQ ID NO: 2065145 - DNA, 25 bp, Homo sapien
tccttgtgcttgttgcgaagagact

SEQ ID NO: 2065146 - DNA, 25 bp, Homo sapien
agggatccttgtgcttgttgcgaag

SEQ ID NO: 2065147 - DNA, 25 bp, Homo sapien
cttgtgcttgttgcgaagagactga

SEQ ID NO: 2065148 - DNA, 25 bp, Homo sapien
gctgagcaaattggccatgacttac

SEQ ID NO: 2065149 - DNA, 25 bp, Homo sapien
ttattgaggcaactttgctgaagtc

SEQ ID NO: 2065150 - DNA, 25 bp, Homo sapien
catgcatagagcatttctattgctg

SEQ ID NO: 2065151 - DNA, 25 bp, Homo sapien
ttgctgagcaaattggccatgactt

SEQ ID NO: 2065152 - DNA, 25 bp, Homo sapien
cgcaggacatcctcaatccaaagat

SEQ ID NO: 2065153 - DNA, 25 bp, Homo sapien
gaatctgaagctagtaaacaacagc

SEQ ID NO: 2065154 - DNA, 25 bp, Homo sapien
tgccgtcccagactgcagacagttg

SEQ ID NO: 2065155 - DNA, 25 bp, Homo sapien
ggttcccgtcaacaaggccagatgg

SEQ ID NO: 2065156 - DNA, 25 bp, Homo sapien
gtgtcctcaactctgagacactctc

SEQ ID NO: 2065157 - DNA, 25 bp, Homo sapien
taattccattcactagggaggagcc

SEQ ID NO: 2065158 - DNA, 25 bp, Homo sapien
ccttaattccattcactagggagga

SEQ ID NO: 2065159 - DNA, 25 bp, Homo sapien
acagcgaacagggaggagataatag

SEQ ID NO: 2065160 - DNA, 25 bp, Homo sapien
ctccacctaccctgtttgagcgatg

SEQ ID NO: 2065161 - DNA, 25 bp, Homo sapien
cattttgctctgaatgaagcaacaa

SEQ ID NO: 2065162 - DNA, 25 bp, Homo sapien
ctaccctgtttgagcgatgtgattc

SEQ ID NO: 2065163 - DNA, 25 bp, Homo sapien
aacaacctcatcagatggccctcca

SEQ ID NO: 2065164 - DNA, 25 bp, Homo sapien
agagccacagactagggtcgctctc

SEQ ID NO: 2065165 - DNA, 25 bp, Homo sapien
ctgaagcgcatgctgagagccacag

SEQ ID NO: 2065166 - DNA, 25 bp, Homo sapien
ctgagagccacagactagggtcgct

SEQ ID NO: 2065167 - DNA, 25 bp, Homo sapien
cctgaagcgcatgctgagagccaca

SEQ ID NO: 2065168 - DNA, 25 bp, Homo sapien
atacgggtaaactctgtgtcatggg

SEQ ID NO: 2065169 - DNA, 25 bp, Homo sapien
cacatgtgcaggttttatacgggta

SEQ ID NO: 2065170 - DNA, 25 bp, Homo sapien
tatacaatttatgttgtcaccccgg

SEQ ID NO: 2065171 - DNA, 25 bp, Homo sapien
taataggtaacttttcgatcctcac

SEQ ID NO: 2065172 - DNA, 25 bp, Homo sapien
tatttctgtgggtcgatggtatttt

SEQ ID NO: 2065173 - DNA, 25 bp, Homo sapien
tagttcctccaagtttgatgtcagt

SEQ ID NO: 2065174 - DNA, 25 bp, Homo sapien
gtaaaaaggcataatcaatctcaaa

SEQ ID NO: 2065175 - DNA, 25 bp, Homo sapien
aaatatttatctctggatgtcgcaa

SEQ ID NO: 2065176 - DNA, 25 bp, Homo sapien
caggatatgttgtcgaagagaagga

SEQ ID NO: 2065177 - DNA, 25 bp, Homo sapien
ccattcattgcagggaaccacatca

SEQ ID NO: 2065178 - DNA, 25 bp, Homo sapien
cttggcagaacaggtcaggatatgt

SEQ ID NO: 2065179 - DNA, 25 bp, Homo sapien
tctgaagatcgctagaaataactgg

SEQ ID NO: 2065180 - DNA, 25 bp, Homo sapien
ctaaaggagacttgcccttccaaga

SEQ ID NO: 2065181 - DNA, 25 bp, Homo sapien
cctaaaggagacttgcccttccaag

SEQ ID NO: 2065182 - DNA, 25 bp, Homo sapien
gcccttccaagacagtatctttggt

SEQ ID NO: 2065183 - DNA, 25 bp, Homo sapien
cccttccaagacagtatctttggtt

SEQ ID NO: 2065184 - DNA, 25 bp, Homo sapien
tcgctggggtcaatgggagaagcta

SEQ ID NO: 2065185 - DNA, 25 bp, Homo sapien
ggcctagctacatcaggactcagag

SEQ ID NO: 2065186 - DNA, 25 bp, Homo sapien
ctggcctagctacatcaggactcag

SEQ ID NO: 2065187 - DNA, 25 bp, Homo sapien
gctggggtcaatgggagaagctaca

SEQ ID NO: 2065188 - DNA, 25 bp, Homo sapien
taatggtcttacctgcacgacagct

SEQ ID NO: 2065189 - DNA, 25 bp, Homo sapien
actgtctttgtctgagcgtgcaaga

SEQ ID NO: 2065190 - DNA, 25 bp, Homo sapien
tcgttaccacctcaaacaaagctgg

SEQ ID NO: 2065191 - DNA, 25 bp, Homo sapien
cgtgcaagagttcctgtgagagtcc

SEQ ID NO: 2065192 - DNA, 25 bp, Homo sapien
agtatcagaacaaacaccagttgca

SEQ ID NO: 2065193 - DNA, 25 bp, Homo sapien
gagttcccagaaagtatcagaacaa

SEQ ID NO: 2065194 - DNA, 25 bp, Homo sapien
atatattgagttcccagaaagtatc

SEQ ID NO: 2065195 - DNA, 25 bp, Homo sapien
cccagaaagtatcagaacaaacacc

SEQ ID NO: 2065196 - DNA, 25 bp, Homo sapien
gattgcatctccctgtatagtacct

SEQ ID NO: 2065197 - DNA, 25 bp, Homo sapien
tagtacctagactatcagcatacat

SEQ ID NO: 2065198 - DNA, 25 bp, Homo sapien
cctgtatagtacctagactatcagc

SEQ ID NO: 2065199 - DNA, 25 bp, Homo sapien
gcatctccctgtatagtacctagac

SEQ ID NO: 2065200 - DNA, 25 bp, Homo sapien
cagaaaagtagggtgttgctataaa

SEQ ID NO: 2065201 - DNA, 25 bp, Homo sapien
tattccagatctctcaagcaagtag

SEQ ID NO: 2065202 - DNA, 25 bp, Homo sapien
tgagacttcctagccatgctttctg

SEQ ID NO: 2065203 - DNA, 25 bp, Homo sapien
aagtgtgtaccgcatccctgtttgc

SEQ ID NO: 2065204 - DNA, 25 bp, Homo sapien
ggtagccattgagctgagacttcat

SEQ ID NO: 2065205 - DNA, 25 bp, Homo sapien
ttcaccatgtagacgggcaggcaaa

SEQ ID NO: 2065206 - DNA, 25 bp, Homo sapien
tatttacaaagtgcggtgggaacag

SEQ ID NO: 2065207 - DNA, 25 bp, Homo sapien
aatgacaagctattacgtgccaggc

SEQ ID NO: 2065208 - DNA, 25 bp, Homo sapien
cacctgcagggatagcgacaatagt

SEQ ID NO: 2065209 - DNA, 25 bp, Homo sapien
cctatttcactgaggagggacaggc

SEQ ID NO: 2065210 - DNA, 25 bp, Homo sapien
gcttgcttttaccagagtgagggaa

SEQ ID NO: 2065211 - DNA, 25 bp, Homo sapien
gggcttctgccttgcgtaactggag

SEQ ID NO: 2065212 - DNA, 25 bp, Homo sapien
tccatgtcaaacctaaggcccaggg

SEQ ID NO: 2065213 - DNA, 25 bp, Homo sapien
ggaattggtcatacccctgactgca

SEQ ID NO: 2065214 - DNA, 25 bp, Homo sapien
ggcaggcaccctctaccaattggct

SEQ ID NO: 2065215 - DNA, 25 bp, Homo sapien
gactgcttcaaggaaactaatggcc

SEQ ID NO: 2065216 - DNA, 25 bp, Homo sapien
agaatgtacaggtgtcccctttcaa

SEQ ID NO: 2065217 - DNA, 25 bp, Homo sapien
gaagaatgtacaggtgtcccctttc

SEQ ID NO: 2065218 - DNA, 25 bp, Homo sapien
aatgtacaggtgtcccctttcaata

SEQ ID NO: 2065219 - DNA, 25 bp, Homo sapien
caggtgtcccctttcaataaagtat

SEQ ID NO: 2065220 - DNA, 25 bp, Homo sapien
gctctatgtgctcgggtacattttt

SEQ ID NO: 2065221 - DNA, 25 bp, Homo sapien
gctacatttccagtagattgcacct

SEQ ID NO: 2065222 - DNA, 25 bp, Homo sapien
gatctgttcttattaaaactgtggg

SEQ ID NO: 2065223 - DNA, 25 bp, Homo sapien
cttcatcttagggtcctgcttgata

SEQ ID NO: 2065224 - DNA, 25 bp, Homo sapien
gacacgtatgcatcgagtcttccta

SEQ ID NO: 2065225 - DNA, 25 bp, Homo sapien
taagtaacacagtaaattgcggcct

SEQ ID NO: 2065226 - DNA, 25 bp, Homo sapien
gggaccttggttatctcttatgagc

SEQ ID NO: 2065227 - DNA, 25 bp, Homo sapien
tcttatgagcccgtgaagatggcca

SEQ ID NO: 2065228 - DNA, 25 bp, Homo sapien
cagaagcactatgtccggccaagaa

SEQ ID NO: 2065229 - DNA, 25 bp, Homo sapien
caggcagaagcactatgtccggcca

SEQ ID NO: 2065230 - DNA, 25 bp, Homo sapien
ggcagaagcactatgtccggccaag

SEQ ID NO: 2065231 - DNA, 25 bp, Homo sapien
gaagcactatgtccggccaagaaaa

SEQ ID NO: 2065232 - DNA, 25 bp, Homo sapien
tgcgtacttgctgtactcgctcttc

SEQ ID NO: 2065233 - DNA, 25 bp, Homo sapien
tcttctgtatcagcagctcgcgaca

SEQ ID NO: 2065234 - DNA, 25 bp, Homo sapien
tttcttgcgtacttgctgtactcgc

SEQ ID NO: 2065235 - DNA, 25 bp, Homo sapien
caagatgtctgccatcagtgcttct

SEQ ID NO: 2065236 - DNA, 25 bp, Homo sapien
tgggttctaccaatctgagctggat

SEQ ID NO: 2065237 - DNA, 25 bp, Homo sapien
gctgctgaaaccctaacttgtgagt

SEQ ID NO: 2065238 - DNA, 25 bp, Homo sapien
ttctgggttctaccaatctgagctg

SEQ ID NO: 2065239 - DNA, 25 bp, Homo sapien
caatggtttgcttctactttctggg

SEQ ID NO: 2065240 - DNA, 25 bp, Homo sapien
tgttaagccaaacagcagggttctt

SEQ ID NO: 2065241 - DNA, 25 bp, Homo sapien
cagcagcggagacttgccctgtgat

SEQ ID NO: 2065242 - DNA, 25 bp, Homo sapien
tgccctgtgattggcgcagagcttg

SEQ ID NO: 2065243 - DNA, 25 bp, Homo sapien
ctggcaacagcagataaaagggtct

SEQ ID NO: 2065244 - DNA, 25 bp, Homo sapien
ttgaagacctttgggtagttccatg

SEQ ID NO: 2065245 - DNA, 25 bp, Homo sapien
aatttgttctgttacatctgatgca

SEQ ID NO: 2065246 - DNA, 25 bp, Homo sapien
cttgaagacctttgggtagttccat

SEQ ID NO: 2065247 - DNA, 25 bp, Homo sapien
acatctgatgcactaagtccttgta

SEQ ID NO: 2065248 - DNA, 25 bp, Homo sapien
ggtcacttagtagccccaggtcatc

SEQ ID NO: 2065249 - DNA, 25 bp, Homo sapien
catggtcacttagtagccccaggtc

SEQ ID NO: 2065250 - DNA, 25 bp, Homo sapien
atggtcacttagtagccccaggtca

SEQ ID NO: 2065251 - DNA, 25 bp, Homo sapien
tggtcacttagtagccccaggtcat

SEQ ID NO: 2065252 - DNA, 25 bp, Homo sapien
gataaaggaattctataggactctg

SEQ ID NO: 2065253 - DNA, 25 bp, Homo sapien
caaacactaaatggtccaaggcaat

SEQ ID NO: 2065254 - DNA, 25 bp, Homo sapien
taactgtctttaatcctggatacca

SEQ ID NO: 2065255 - DNA, 25 bp, Homo sapien
gataccagggcctgtcacatagttg

SEQ ID NO: 2065256 - DNA, 25 bp, Homo sapien
gaaaccagctgattgagggagaaac

SEQ ID NO: 2065257 - DNA, 25 bp, Homo sapien
gaaaccatcttagtagtcactgcag

SEQ ID NO: 2065258 - DNA, 25 bp, Homo sapien
ccttataacactaatggtctgggca

SEQ ID NO: 2065259 - DNA, 25 bp, Homo sapien
tattagaacattggctagctccaca

SEQ ID NO: 2065260 - DNA, 25 bp, Homo sapien
tactgccagacaactaggagtggtg

SEQ ID NO: 2065261 - DNA, 25 bp, Homo sapien
ggaggtttataaaggcaggtgccca

SEQ ID NO: 2065262 - DNA, 25 bp, Homo sapien
caatctaaatggcttggaggtgggt

SEQ ID NO: 2065263 - DNA, 25 bp, Homo sapien
ggtgcccagatctcacagcagaaac

SEQ ID NO: 2065264 - DNA, 25 bp, Homo sapien
gtaggacactaacaggcactatttt

SEQ ID NO: 2065265 - DNA, 25 bp, Homo sapien
tagaagtacatatgcactatttaga

SEQ ID NO: 2065266 - DNA, 25 bp, Homo sapien
cactgcgccagctagtttcttaaaa

SEQ ID NO: 2065267 - DNA, 25 bp, Homo sapien
ccaatacatcgagaaatagaagtac

SEQ ID NO: 2065268 - DNA, 25 bp, Homo sapien
catgcccagccgttcttccttttta

SEQ ID NO: 2065269 - DNA, 25 bp, Homo sapien
gtgttggaattagctttaggccacc

SEQ ID NO: 2065270 - DNA, 25 bp, Homo sapien
agtttagagacagttggaagataaa

SEQ ID NO: 2065271 - DNA, 25 bp, Homo sapien
gccaccaggatattccttcaagttc

SEQ ID NO: 2065272 - DNA, 25 bp, Homo sapien
cttcaagttcagttcagatgggtaa

SEQ ID NO: 2065273 - DNA, 25 bp, Homo sapien
tgcctgaaatagtaaccctctgggt

SEQ ID NO: 2065274 - DNA, 25 bp, Homo sapien
tcttcccaacagtacccagagtaat

SEQ ID NO: 2065275 - DNA, 25 bp, Homo sapien
tggcactttgtatatggcatcttcc

SEQ ID NO: 2065276 - DNA, 25 bp, Homo sapien
ggaatatatccaccatgagactctg

SEQ ID NO: 2065277 - DNA, 25 bp, Homo sapien
tcaaagatgaagcttctttggtttg

SEQ ID NO: 2065278 - DNA, 25 bp, Homo sapien
caaagatgaagcttctttggtttga

SEQ ID NO: 2065279 - DNA, 25 bp, Homo sapien
aagatgaagcttctttggtttgagg

SEQ ID NO: 2065280 - DNA, 25 bp, Homo sapien
aaagatgaagcttctttggtttgag

SEQ ID NO: 2065281 - DNA, 25 bp, Homo sapien
agttaccaatatctctatagccagg

SEQ ID NO: 2065282 - DNA, 25 bp, Homo sapien
ttgggtttacagactacattgagaa

SEQ ID NO: 2065283 - DNA, 25 bp, Homo sapien
aaacggccagaatttgctaatcaat

SEQ ID NO: 2065284 - DNA, 25 bp, Homo sapien
tactatctgatctcataaggaaact

SEQ ID NO: 2065285 - DNA, 25 bp, Homo sapien
gcaagtttagaacttcaaatcttga

SEQ ID NO: 2065286 - DNA, 25 bp, Homo sapien
ttgagacatctatagcaagatgctg

SEQ ID NO: 2065287 - DNA, 25 bp, Homo sapien
gatgctgatccaatgtggctccaaa

SEQ ID NO: 2065288 - DNA, 25 bp, Homo sapien
ggaccaacagtaaagcaagtttaga

SEQ ID NO: 2065289 - DNA, 25 bp, Homo sapien
ggcaatgttgtattcaagtctggtt

SEQ ID NO: 2065290 - DNA, 25 bp, Homo sapien
gctgtttgtctaattggcaatgttg

SEQ ID NO: 2065291 - DNA, 25 bp, Homo sapien
ctttattactaggatgatttgtgac

SEQ ID NO: 2065292 - DNA, 25 bp, Homo sapien
gttcattcattcgttgtgggtctga

SEQ ID NO: 2065293 - DNA, 25 bp, Homo sapien
aatttctcgagtctcacctttccat

SEQ ID NO: 2065294 - DNA, 25 bp, Homo sapien
ttccatacttcctgcacagaattca

SEQ ID NO: 2065295 - DNA, 25 bp, Homo sapien
ctttccatacttcctgcacagaatt

SEQ ID NO: 2065296 - DNA, 25 bp, Homo sapien
acctttccatacttcctgcacagaa

SEQ ID NO: 2065297 - DNA, 25 bp, Homo sapien
caagctgcatgaagtcccctaaaac

SEQ ID NO: 2065298 - DNA, 25 bp, Homo sapien
tttatccaatcctagagtgtctcca

SEQ ID NO: 2065299 - DNA, 25 bp, Homo sapien
tgcatattgagaggcaaagctccgt

SEQ ID NO: 2065300 - DNA, 25 bp, Homo sapien
tcacatctgtgaaaccctgcaacac

SEQ ID NO: 2065301 - DNA, 25 bp, Homo sapien
gctgaagcagacaaacaagtcacaa

SEQ ID NO: 2065302 - DNA, 25 bp, Homo sapien
tctagaatgaggtggatggtaaatc

SEQ ID NO: 2065303 - DNA, 25 bp, Homo sapien
ctcacagtctagctgaagcagacaa

SEQ ID NO: 2065304 - DNA, 25 bp, Homo sapien
ttattaccactatacacttctagaa

SEQ ID NO: 2065305 - DNA, 25 bp, Homo sapien
caatgaagctgggtcttggatgagt

SEQ ID NO: 2065306 - DNA, 25 bp, Homo sapien
caaacagcgtatgagcaagcagagt

SEQ ID NO: 2065307 - DNA, 25 bp, Homo sapien
aagcagagtcttgaaagcgcatgcc

SEQ ID NO: 2065308 - DNA, 25 bp, Homo sapien
gggtaagcacattccaagcagagca

SEQ ID NO: 2065309 - DNA, 25 bp, Homo sapien
cagctcgataaaactaagcgctaac

SEQ ID NO: 2065310 - DNA, 25 bp, Homo sapien
accaaacagctcgataaaactaagc

SEQ ID NO: 2065311 - DNA, 25 bp, Homo sapien
tcgataaaactaagcgctaacggaa

SEQ ID NO: 2065312 - DNA, 25 bp, Homo sapien
gcgctaacggaaaaatatccaaaca

SEQ ID NO: 2065313 - DNA, 25 bp, Homo sapien
aggtaccttgccaactgaggcttgc

SEQ ID NO: 2065314 - DNA, 25 bp, Homo sapien
gcttctgaacttcttaccacttgga

SEQ ID NO: 2065315 - DNA, 25 bp, Homo sapien
tgattgagaggatcgtttcgcagtc

SEQ ID NO: 2065316 - DNA, 25 bp, Homo sapien
ttctgtaatttactaggcatcatct

SEQ ID NO: 2065317 - DNA, 25 bp, Homo sapien
tctttccagatggaaggaggagcac

SEQ ID NO: 2065318 - DNA, 25 bp, Homo sapien
gtctttccagatggaaggaggagca

SEQ ID NO: 2065319 - DNA, 25 bp, Homo sapien
ctttccagatggaaggaggagcaca

SEQ ID NO: 2065320 - DNA, 25 bp, Homo sapien
aaggaaagtcaacctggctgcccca

SEQ ID NO: 2065321 - DNA, 25 bp, Homo sapien
cgtaactgctacagtctgtctgtgg

SEQ ID NO: 2065322 - DNA, 25 bp, Homo sapien
tcagaaaacagtagtacaagccatt

SEQ ID NO: 2065323 - DNA, 25 bp, Homo sapien
tgaaacatctgtattggatagctac

SEQ ID NO: 2065324 - DNA, 25 bp, Homo sapien
ttcaaataatgaaggttgggtcagg

SEQ ID NO: 2065325 - DNA, 25 bp, Homo sapien
tgtttaagctgggtagttcccacta

SEQ ID NO: 2065326 - DNA, 25 bp, Homo sapien
tgaatgaacttacttgacgtcagat

SEQ ID NO: 2065327 - DNA, 25 bp, Homo sapien
aaaaaatatcaagactctgggcaag

SEQ ID NO: 2065328 - DNA, 25 bp, Homo sapien
ctcagctagctgcaatctgcagtct

SEQ ID NO: 2065329 - DNA, 25 bp, Homo sapien
tcagctagctgcaatctgcagtctc

SEQ ID NO: 2065330 - DNA, 25 bp, Homo sapien
cagctagctgcaatctgcagtctcc

SEQ ID NO: 2065331 - DNA, 25 bp, Homo sapien
atctcagcattcacatgcctgtaat

SEQ ID NO: 2065332 - DNA, 25 bp, Homo sapien
taatctcagcattcacatgcctgta

SEQ ID NO: 2065333 - DNA, 25 bp, Homo sapien
tgtaatctcagcattcacatgcctg

SEQ ID NO: 2065334 - DNA, 25 bp, Homo sapien
ctgtaatctcagcattcacatgcct

SEQ ID NO: 2065335 - DNA, 25 bp, Homo sapien
aatccagtatgataggctgggcgcg

SEQ ID NO: 2065336 - DNA, 25 bp, Homo sapien
caagtagggatctctatgccatgca

SEQ ID NO: 2065337 - DNA, 25 bp, Homo sapien
ggagttctgaggttaaaccaccagc

SEQ ID NO: 2065338 - DNA, 25 bp, Homo sapien
gctggagggttatcctttggtacaa

SEQ ID NO: 2065339 - DNA, 25 bp, Homo sapien
tggaatatcaattggtaaaccctta

SEQ ID NO: 2065340 - DNA, 25 bp, Homo sapien
tttagcatctgagtgtttggcattg

SEQ ID NO: 2065341 - DNA, 25 bp, Homo sapien
ttacaaaacgttaggtggaatatca

SEQ ID NO: 2065342 - DNA, 25 bp, Homo sapien
ggtaaacccttatttagcatctgag

SEQ ID NO: 2065343 - DNA, 25 bp, Homo sapien
gcgtgagccacagcgaccgacctag

SEQ ID NO: 2065344 - DNA, 25 bp, Homo sapien
tcctgcaaagtaacggaacctctgt

SEQ ID NO: 2065345 - DNA, 25 bp, Homo sapien
tagtggcttacgacttgccttaaga

SEQ ID NO: 2065346 - DNA, 25 bp, Homo sapien
tagagagcaattaccactatagtgg

SEQ ID NO: 2065347 - DNA, 25 bp, Homo sapien
caaatcatgctgcaatgtcccagaa

SEQ ID NO: 2065348 - DNA, 25 bp, Homo sapien
gagggaggacctgtgaaagtgctca

SEQ ID NO: 2065349 - DNA, 25 bp, Homo sapien
attgtcccattgaatgacagctgcc

SEQ ID NO: 2065350 - DNA, 25 bp, Homo sapien
gatgccaacaaaggttttctctcag

SEQ ID NO: 2065351 - DNA, 25 bp, Homo sapien
ccagggcaaggatgccaacaaaggt

SEQ ID NO: 2065352 - DNA, 25 bp, Homo sapien
caagatgagggtccagatcaagtgg

SEQ ID NO: 2065353 - DNA, 25 bp, Homo sapien
catccatatatagcaaccatcagga

SEQ ID NO: 2065354 - DNA, 25 bp, Homo sapien
gctacttgaagaggacaggaaatcc

SEQ ID NO: 2065355 - DNA, 25 bp, Homo sapien
cataagcatggtatgtgtacagaca

SEQ ID NO: 2065356 - DNA, 25 bp, Homo sapien
atgtgtattaagtccacggatgtca

SEQ ID NO: 2065357 - DNA, 25 bp, Homo sapien
aattgccataggcactttcttgagc

SEQ ID NO: 2065358 - DNA, 25 bp, Homo sapien
cacggatgtcaattgccataggcac

SEQ ID NO: 2065359 - DNA, 25 bp, Homo sapien
taagtccacggatgtcaattgccat

SEQ ID NO: 2065360 - DNA, 25 bp, Homo sapien
gcagcatgaccacgggattgcaaga

SEQ ID NO: 2065361 - DNA, 25 bp, Homo sapien
ctaaaaacttagtacagtgtgtcag

SEQ ID NO: 2065362 - DNA, 25 bp, Homo sapien
taaaacaggatgtctcaacctcagc

SEQ ID NO: 2065363 - DNA, 25 bp, Homo sapien
cactaaggtgaaaaaccttgaatca

SEQ ID NO: 2065364 - DNA, 25 bp, Homo sapien
tagacatcgctcttgccagcactta

SEQ ID NO: 2065365 - DNA, 25 bp, Homo sapien
ctgaagtagtagacatcgctcttgc

SEQ ID NO: 2065366 - DNA, 25 bp, Homo sapien
ggagggccgggcaatccatcctctt

SEQ ID NO: 2065367 - DNA, 25 bp, Homo sapien
ttagcccagattttcggatcacttc

SEQ ID NO: 2065368 - DNA, 25 bp, Homo sapien
gccccggccacggccacagacgccg

SEQ ID NO: 2065369 - DNA, 25 bp, Homo sapien
cccggccacggccacagacgccgcc

SEQ ID NO: 2065370 - DNA, 25 bp, Homo sapien
cggccacggccacagacgccgccgc

SEQ ID NO: 2065371 - DNA, 25 bp, Homo sapien
cggccccggccacggccacagacgc

SEQ ID NO: 2065372 - DNA, 25 bp, Homo sapien
gccccgagcgccttccctgcgcacg

SEQ ID NO: 2065373 - DNA, 25 bp, Homo sapien
cgccccgagcgccttccctgcgcac

SEQ ID NO: 2065374 - DNA, 25 bp, Homo sapien
gagcgccttccctgcgcacgccgct

SEQ ID NO: 2065375 - DNA, 25 bp, Homo sapien
cccgagcgccttccctgcgcacgcc

SEQ ID NO: 2065376 - DNA, 25 bp, Homo sapien
gggacggggcgagcgcgctgccctg

SEQ ID NO: 2065377 - DNA, 25 bp, Homo sapien
cccctgctctatggcggagtcgccg

SEQ ID NO: 2065378 - DNA, 25 bp, Homo sapien
tggcccccctgctctatggcggagt

SEQ ID NO: 2065379 - DNA, 25 bp, Homo sapien
tctatggcggagtcgccgccagcgc

SEQ ID NO: 2065380 - DNA, 25 bp, Homo sapien
gctgcgcttcttccgtaaccgagcc

SEQ ID NO: 2065381 - DNA, 25 bp, Homo sapien
gcctcttaggtcctccaagcgctat

SEQ ID NO: 2065382 - DNA, 25 bp, Homo sapien
tccaagcgctatgggcggccatctt

SEQ ID NO: 2065383 - DNA, 25 bp, Homo sapien
ggacgcgcgcaagcatcatagagcg

SEQ ID NO: 2065384 - DNA, 25 bp, Homo sapien
catacatacaggcatggaggaattt

SEQ ID NO: 2065385 - DNA, 25 bp, Homo sapien
tttaagagtagagcaactgaggctc

SEQ ID NO: 2065386 - DNA, 25 bp, Homo sapien
cacagcatgatggagggtctggatt

SEQ ID NO: 2065387 - DNA, 25 bp, Homo sapien
cacacatggtatcctaatagaaggc

SEQ ID NO: 2065388 - DNA, 25 bp, Homo sapien
ggagacaaaacaactagagattaaa

SEQ ID NO: 2065389 - DNA, 25 bp, Homo sapien
cataattaggagatagcttgaaaac

SEQ ID NO: 2065390 - DNA, 25 bp, Homo sapien
catgccctattatatggcagtataa

SEQ ID NO: 2065391 - DNA, 25 bp, Homo sapien
gaataattgatctatcgtctaactt

SEQ ID NO: 2065392 - DNA, 25 bp, Homo sapien
tgattttatagcagaacggcctcat

SEQ ID NO: 2065393 - DNA, 25 bp, Homo sapien
tgccatattcttgtacaactatgag

SEQ ID NO: 2065394 - DNA, 25 bp, Homo sapien
tatgtgcgttgacttagaagtaaac

SEQ ID NO: 2065395 - DNA, 25 bp, Homo sapien
gaactatcttcagccatgtgtacaa

SEQ ID NO: 2065396 - DNA, 25 bp, Homo sapien
ccatcttttgcattgaggatgaagt

SEQ ID NO: 2065397 - DNA, 25 bp, Homo sapien
tccacgtcttgatggagttctgtgt

SEQ ID NO: 2065398 - DNA, 25 bp, Homo sapien
gatgaaatccacgtcttgatggagt

SEQ ID NO: 2065399 - DNA, 25 bp, Homo sapien
tgaatgactattatgatgaaatcca

SEQ ID NO: 2065400 - DNA, 25 bp, Homo sapien
aaacatcactagtttggaatatgct

SEQ ID NO: 2065401 - DNA, 25 bp, Homo sapien
catcactagtttggaatatgctggg

SEQ ID NO: 2065402 - DNA, 25 bp, Homo sapien
cactagtttggaatatgctgggttt

SEQ ID NO: 2065403 - DNA, 25 bp, Homo sapien
tcactagtttggaatatgctgggtt

SEQ ID NO: 2065404 - DNA, 25 bp, Homo sapien
taaccgcggatataatttgaagatg

SEQ ID NO: 2065405 - DNA, 25 bp, Homo sapien
tgaacatacaaagccacaaggatgg

SEQ ID NO: 2065406 - DNA, 25 bp, Homo sapien
tggaggatattctggaaaatccaca

SEQ ID NO: 2065407 - DNA, 25 bp, Homo sapien
caaggatggttataaccgcggatat

SEQ ID NO: 2065408 - DNA, 25 bp, Homo sapien
tttattctgtgcaactgaatcctgc

SEQ ID NO: 2065409 - DNA, 25 bp, Homo sapien
ttagatggtctgtcagtaaaggtac

SEQ ID NO: 2065410 - DNA, 25 bp, Homo sapien
cactaaggagactagagttgttgaa

SEQ ID NO: 2065411 - DNA, 25 bp, Homo sapien
gaattatgcaacctagtgtctgtat

SEQ ID NO: 2065412 - DNA, 25 bp, Homo sapien
tcgtagcgcttgatgtacactaagt

SEQ ID NO: 2065413 - DNA, 25 bp, Homo sapien
cactaagtcgataaagtctcgaggg

SEQ ID NO: 2065414 - DNA, 25 bp, Homo sapien
aaatggagcccacggcaaaactttg

SEQ ID NO: 2065415 - DNA, 25 bp, Homo sapien
aatgttcatatttccttcgtagcgc

SEQ ID NO: 2065416 - DNA, 25 bp, Homo sapien
atcagatagtttagctggtgattct

SEQ ID NO: 2065417 - DNA, 25 bp, Homo sapien
aatcctgtgtaccatattatacact

SEQ ID NO: 2065418 - DNA, 25 bp, Homo sapien
tggtgattctggaattatcccttca

SEQ ID NO: 2065419 - DNA, 25 bp, Homo sapien
tacacttgcaatgatttatcccatg

SEQ ID NO: 2065420 - DNA, 25 bp, Homo sapien
cagctacttgagaatcttgccaaca

SEQ ID NO: 2065421 - DNA, 25 bp, Homo sapien
taaacgtgttcacagtagccctgaa

SEQ ID NO: 2065422 - DNA, 25 bp, Homo sapien
tttcaaagaactagcctgtggtccc

SEQ ID NO: 2065423 - DNA, 25 bp, Homo sapien
gcctcatagaatggaggattccttc

SEQ ID NO: 2065424 - DNA, 25 bp, Homo sapien
ggaattttctagaagccttactgga

SEQ ID NO: 2065425 - DNA, 25 bp, Homo sapien
tagaagccttactggaaacagttat

SEQ ID NO: 2065426 - DNA, 25 bp, Homo sapien
agccttactggaaacagttatcttt

SEQ ID NO: 2065427 - DNA, 25 bp, Homo sapien
ttttctagaagccttactggaaaca

SEQ ID NO: 2065428 - DNA, 25 bp, Homo sapien
cacaggcacaatcatggtgcatgac

SEQ ID NO: 2065429 - DNA, 25 bp, Homo sapien
atggtgcatgacagcctcaaactcc

SEQ ID NO: 2065430 - DNA, 25 bp, Homo sapien
gcccagtctgtagtgtactggctat

SEQ ID NO: 2065431 - DNA, 25 bp, Homo sapien
tgcccagtctgtagtgtactggcta

SEQ ID NO: 2065432 - DNA, 25 bp, Homo sapien
gggcagtttgttgggcaattgcctt

SEQ ID NO: 2065433 - DNA, 25 bp, Homo sapien
ctcgattataacctaaaacttcttg

SEQ ID NO: 2065434 - DNA, 25 bp, Homo sapien
cagtttgttgggcaattgccttgaa

SEQ ID NO: 2065435 - DNA, 25 bp, Homo sapien
cactttccagcctgatgtatctcga

SEQ ID NO: 2065436 - DNA, 25 bp, Homo sapien
tagcagtggcactacacgatctgac

SEQ ID NO: 2065437 - DNA, 25 bp, Homo sapien
cagtgcctggcatgcgatagtcatt

SEQ ID NO: 2065438 - DNA, 25 bp, Homo sapien
gaaccctgcttgaagttagaaactg

SEQ ID NO: 2065439 - DNA, 25 bp, Homo sapien
tgtccacttagctccaatcatttga

SEQ ID NO: 2065440 - DNA, 25 bp, Homo sapien
tccttgtggaaatctccatatctct

SEQ ID NO: 2065441 - DNA, 25 bp, Homo sapien
ttagtaactactggggctcctctcc

SEQ ID NO: 2065442 - DNA, 25 bp, Homo sapien
gctggaacatattcagatggactca

SEQ ID NO: 2065443 - DNA, 25 bp, Homo sapien
tatcttcactcatagggtcagtgga

SEQ ID NO: 2065444 - DNA, 25 bp, Homo sapien
gactcatggtcaaggatatcttcac

SEQ ID NO: 2065445 - DNA, 25 bp, Homo sapien
caattggttgaaactggattccttc

SEQ ID NO: 2065446 - DNA, 25 bp, Homo sapien
aggagtttgttaaatcccatccctg

SEQ ID NO: 2065447 - DNA, 25 bp, Homo sapien
ctaaactcgggtctccaatctccca

SEQ ID NO: 2065448 - DNA, 25 bp, Homo sapien
taaactcgggtctccaatctcccat

SEQ ID NO: 2065449 - DNA, 25 bp, Homo sapien
tctgctttgtgtgtgagaggctccg

SEQ ID NO: 2065450 - DNA, 25 bp, Homo sapien
tctcccatctgctttgtgtgtgaga

SEQ ID NO: 2065451 - DNA, 25 bp, Homo sapien
ggctgaagggagatcagcaagtccc

SEQ ID NO: 2065452 - DNA, 25 bp, Homo sapien
gggcagactctcagcgaccggaacg

SEQ ID NO: 2065453 - DNA, 25 bp, Homo sapien
agactctcagcgaccggaacgacag

SEQ ID NO: 2065454 - DNA, 25 bp, Homo sapien
ccccgcgcaaactggccgagaatag

SEQ ID NO: 2065455 - DNA, 25 bp, Homo sapien
gaagggcgtggggggcagcgacttg

SEQ ID NO: 2065456 - DNA, 25 bp, Homo sapien
tggaagggcgtggggggcagcgact

SEQ ID NO: 2065457 - DNA, 25 bp, Homo sapien
gctgtgactgcggaggaagctgcga

SEQ ID NO: 2065458 - DNA, 25 bp, Homo sapien
cgcgggtgtcgagctctgctgtgac

SEQ ID NO: 2065459 - DNA, 25 bp, Homo sapien
ctttgtggtgtctcgcgttgggtaa

SEQ ID NO: 2065460 - DNA, 25 bp, Homo sapien
aacaggcctgagctttcggcggaga

SEQ ID NO: 2065461 - DNA, 25 bp, Homo sapien
caaggagataaaggcatcaggtggt

SEQ ID NO: 2065462 - DNA, 25 bp, Homo sapien
cggttagtgctcctattcatgagaa

SEQ ID NO: 2065463 - DNA, 25 bp, Homo sapien
gctgctctgaccagtttgagtggca

SEQ ID NO: 2065464 - DNA, 25 bp, Homo sapien
gactgaaaagcacctattcggttag

SEQ ID NO: 2065465 - DNA, 25 bp, Homo sapien
tgtgagtttgggcagatgtataata

SEQ ID NO: 2065466 - DNA, 25 bp, Homo sapien
tataataaactttggctccacccca

SEQ ID NO: 2065467 - DNA, 25 bp, Homo sapien
cacactgaatcatcataatcaccca

SEQ ID NO: 2065468 - DNA, 25 bp, Homo sapien
ggtgaacaattggtgaacccacact

SEQ ID NO: 2065469 - DNA, 25 bp, Homo sapien
aaacaggctctatggagagaggaca

SEQ ID NO: 2065470 - DNA, 25 bp, Homo sapien
tacatcatagtaaaacaggctctat

SEQ ID NO: 2065471 - DNA, 25 bp, Homo sapien
catagtaaaacaggctctatggaga

SEQ ID NO: 2065472 - DNA, 25 bp, Homo sapien
aatatgaaaatgtacgtgacctaat

SEQ ID NO: 2065473 - DNA, 25 bp, Homo sapien
gatactatttcctcgtattaccacc

SEQ ID NO: 2065474 - DNA, 25 bp, Homo sapien
taacatgatgatactatttcctcgt

SEQ ID NO: 2065475 - DNA, 25 bp, Homo sapien
ctcgttccaaggcttctaacatgat

SEQ ID NO: 2065476 - DNA, 25 bp, Homo sapien
cgttccaaggcttctaacatgatga

SEQ ID NO: 2065477 - DNA, 25 bp, Homo sapien
ttcataaaaggatcaaatccccgca

SEQ ID NO: 2065478 - DNA, 25 bp, Homo sapien
taaaaggatcaaatccccgcaatat

SEQ ID NO: 2065479 - DNA, 25 bp, Homo sapien
ttcgtctatcacaaggttcataaaa

SEQ ID NO: 2065480 - DNA, 25 bp, Homo sapien
cgtctatcacaaggttcataaaagg

SEQ ID NO: 2065481 - DNA, 25 bp, Homo sapien
ttggaacggaatgcatggcttccct

SEQ ID NO: 2065482 - DNA, 25 bp, Homo sapien
gctcacggatgccttggaacggaat

SEQ ID NO: 2065483 - DNA, 25 bp, Homo sapien
aacggaatgcatggcttccctcatg

SEQ ID NO: 2065484 - DNA, 25 bp, Homo sapien
gatgccttggaacggaatgcatggc

SEQ ID NO: 2065485 - DNA, 25 bp, Homo sapien
ggtaagaaaccaagcaacaggatgt

SEQ ID NO: 2065486 - DNA, 25 bp, Homo sapien
gagaaggttgttcacgcaatcctga

SEQ ID NO: 2065487 - DNA, 25 bp, Homo sapien
tctagttgaaaataggccctgggac

SEQ ID NO: 2065488 - DNA, 25 bp, Homo sapien
tattccagtcgtccagggatattgc

SEQ ID NO: 2065489 - DNA, 25 bp, Homo sapien
ctgagagtacggtgggcaagctgac

SEQ ID NO: 2065490 - DNA, 25 bp, Homo sapien
ggtgccctgatatgaataggtacac

SEQ ID NO: 2065491 - DNA, 25 bp, Homo sapien
ggcttcaccacaaagatcacattga

SEQ ID NO: 2065492 - DNA, 25 bp, Homo sapien
tttgtatctggagtaattggtgccc

SEQ ID NO: 2065493 - DNA, 25 bp, Homo sapien
tctatctcctctgcagttatctggg

SEQ ID NO: 2065494 - DNA, 25 bp, Homo sapien
gagtgactcgaagccatgtcctcat

SEQ ID NO: 2065495 - DNA, 25 bp, Homo sapien
ttgattcggtcatgacactcatggc

SEQ ID NO: 2065496 - DNA, 25 bp, Homo sapien
ggttgtccttgatctatctcctctg

SEQ ID NO: 2065497 - DNA, 25 bp, Homo sapien
tggaagaaatggtacaggtgcttgt

SEQ ID NO: 2065498 - DNA, 25 bp, Homo sapien
ccctggaagaaatggtacaggtgct

SEQ ID NO: 2065499 - DNA, 25 bp, Homo sapien
tgcaggcataatcatgatacctagt

SEQ ID NO: 2065500 - DNA, 25 bp, Homo sapien
taatcatgatacctagtggcagcag

SEQ ID NO: 2065501 - DNA, 25 bp, Homo sapien
cctttcgttcataaagatttgagga

SEQ ID NO: 2065502 - DNA, 25 bp, Homo sapien
tcctttcgttcataaagatttgagg

SEQ ID NO: 2065503 - DNA, 25 bp, Homo sapien
ggaagcttctttgtaggcaagtagg

SEQ ID NO: 2065504 - DNA, 25 bp, Homo sapien
tgctgctgacttgcgcaggaaactg

SEQ ID NO: 2065505 - DNA, 25 bp, Homo sapien
gcaagtaggtactgtttagtggctg

SEQ ID NO: 2065506 - DNA, 25 bp, Homo sapien
tgtgggtcagcctctgagattggag

SEQ ID NO: 2065507 - DNA, 25 bp, Homo sapien
gaggaggtctgagaaagcattaact

SEQ ID NO: 2065508 - DNA, 25 bp, Homo sapien
tctacactgagataagaatctgagt

SEQ ID NO: 2065509 - DNA, 25 bp, Homo sapien
tctgagtaaagtagtccatgtggga

SEQ ID NO: 2065510 - DNA, 25 bp, Homo sapien
tgagcaagttactattgcaggcacc

SEQ ID NO: 2065511 - DNA, 25 bp, Homo sapien
aggtaatggccttgcaagagatgct

SEQ ID NO: 2065512 - DNA, 25 bp, Homo sapien
gggctttgaattgcatttatctgta

SEQ ID NO: 2065513 - DNA, 25 bp, Homo sapien
cacactggcagtatggttgaagagt

SEQ ID NO: 2065514 - DNA, 25 bp, Homo sapien
ctggcagtatggttgaagagtaaaa

SEQ ID NO: 2065515 - DNA, 25 bp, Homo sapien
tttatctgtaacagtcaccagtggg

SEQ ID NO: 2065516 - DNA, 25 bp, Homo sapien
caaccttcatgagcggatgccagct

SEQ ID NO: 2065517 - DNA, 25 bp, Homo sapien
cttaacccgtcatccagcaaatcat

SEQ ID NO: 2065518 - DNA, 25 bp, Homo sapien
tcattaaaagaggttgtcaaagaca

SEQ ID NO: 2065519 - DNA, 25 bp, Homo sapien
gatgccagctgaaggcttgtcctta

SEQ ID NO: 2065520 - DNA, 25 bp, Homo sapien
ggcagcgtaggctttgggtgagcta

SEQ ID NO: 2065521 - DNA, 25 bp, Homo sapien
cctgagggcagcgtaggctttgggt

SEQ ID NO: 2065522 - DNA, 25 bp, Homo sapien
tgagctaggacgtgcatggctgcat

SEQ ID NO: 2065523 - DNA, 25 bp, Homo sapien
tgcatggcgtgtggctcgtgtgact

SEQ ID NO: 2065524 - DNA, 25 bp, Homo sapien
gagatttatgagattcattagcaca

SEQ ID NO: 2065525 - DNA, 25 bp, Homo sapien
gtaggaagtctcctgtctgtagttc

SEQ ID NO: 2065526 - DNA, 25 bp, Homo sapien
tgtagttcttctctacaaccaaggt

SEQ ID NO: 2065527 - DNA, 25 bp, Homo sapien
cagggcttgcaattagtaggaagtc

SEQ ID NO: 2065528 - DNA, 25 bp, Homo sapien
gatgccgcccaggtgtagaacagca

SEQ ID NO: 2065529 - DNA, 25 bp, Homo sapien
gccagttagtgtgccccagtgacat

SEQ ID NO: 2065530 - DNA, 25 bp, Homo sapien
gatatgatcagtgtggtatgctctg

SEQ ID NO: 2065531 - DNA, 25 bp, Homo sapien
gatgtggctgagtcagatgccgccc

SEQ ID NO: 2065532 - DNA, 25 bp, Homo sapien
tcaacggaagctattaccataatgg

SEQ ID NO: 2065533 - DNA, 25 bp, Homo sapien
tgagcataatagcaccacaacagtt

SEQ ID NO: 2065534 - DNA, 25 bp, Homo sapien
tgcagccaacacaatttcaaccgaa

SEQ ID NO: 2065535 - DNA, 25 bp, Homo sapien
tcatgtcacctgaacctgcagccaa

SEQ ID NO: 2065536 - DNA, 25 bp, Homo sapien
gaagttatacctaatgttactccaa

SEQ ID NO: 2065537 - DNA, 25 bp, Homo sapien
tgttactccaacagaccttacaaca

SEQ ID NO: 2065538 - DNA, 25 bp, Homo sapien
caatagaagttatacctaatgttac

SEQ ID NO: 2065539 - DNA, 25 bp, Homo sapien
gaccttacaacaataaccacttcaa

SEQ ID NO: 2065540 - DNA, 25 bp, Homo sapien
cagtagtctttggaataatggtaaa

SEQ ID NO: 2065541 - DNA, 25 bp, Homo sapien
tggtaaaatggaataggcagcccct

SEQ ID NO: 2065542 - DNA, 25 bp, Homo sapien
ccctaatggtgcatcagtgctgcag

SEQ ID NO: 2065543 - DNA, 25 bp, Homo sapien
ggctccaggtccctaatggtgcatc

SEQ ID NO: 2065544 - DNA, 25 bp, Homo sapien
ttgccacaactcttatagttcaggt

SEQ ID NO: 2065545 - DNA, 25 bp, Homo sapien
ctaattgccacaactcttatagttc

SEQ ID NO: 2065546 - DNA, 25 bp, Homo sapien
ttatagttcaggtcttgtattttgt

SEQ ID NO: 2065547 - DNA, 25 bp, Homo sapien
aattgccacaactcttatagttcag

SEQ ID NO: 2065548 - DNA, 25 bp, Homo sapien
ttcatgcagacagaaagtccagtca

SEQ ID NO: 2065549 - DNA, 25 bp, Homo sapien
tccagtcatgccacctgcctctctg

SEQ ID NO: 2065550 - DNA, 25 bp, Homo sapien
tcattcatgcagacagaaagtccag

SEQ ID NO: 2065551 - DNA, 25 bp, Homo sapien
tgcagacagaaagtccagtcatgcc

SEQ ID NO: 2065552 - DNA, 25 bp, Homo sapien
cagtagaatgcctgtgatgggaaga

SEQ ID NO: 2065553 - DNA, 25 bp, Homo sapien
tgtgagtacatcagtccctccagac

SEQ ID NO: 2065554 - DNA, 25 bp, Homo sapien
cagacttccaattaatcgtcccagg

SEQ ID NO: 2065555 - DNA, 25 bp, Homo sapien
tcgtcccaggttttggacaatatag

SEQ ID NO: 2065556 - DNA, 25 bp, Homo sapien
tggaagacctataaagggaccaaga

SEQ ID NO: 2065557 - DNA, 25 bp, Homo sapien
ggaccaagaatccttctctcacact

SEQ ID NO: 2065558 - DNA, 25 bp, Homo sapien
ctgtaactaagaatggaagacctat

SEQ ID NO: 2065559 - DNA, 25 bp, Homo sapien
aaagggaccaagaatccttctctca

SEQ ID NO: 2065560 - DNA, 25 bp, Homo sapien
cagtcttggcaaggctaatcaacac

SEQ ID NO: 2065561 - DNA, 25 bp, Homo sapien
tggtgcataactttaaagccttctc

SEQ ID NO: 2065562 - DNA, 25 bp, Homo sapien
ccagcaggtcttcatcgttggaaaa

SEQ ID NO: 2065563 - DNA, 25 bp, Homo sapien
accttaaatgatggttccaaactga

SEQ ID NO: 2065564 - DNA, 25 bp, Homo sapien
tgttgatgatatagagctgtatcct

SEQ ID NO: 2065565 - DNA, 25 bp, Homo sapien
tactctttcagtgattaccctcaaa

SEQ ID NO: 2065566 - DNA, 25 bp, Homo sapien
tgatactaacaagccatatcagctt

SEQ ID NO: 2065567 - DNA, 25 bp, Homo sapien
tacctgtgttcttatgctttaagca

SEQ ID NO: 2065568 - DNA, 25 bp, Homo sapien
caaatgcctcatctgacaccagatc

SEQ ID NO: 2065569 - DNA, 25 bp, Homo sapien
tgtgcaaatgcctcatctgacacca

SEQ ID NO: 2065570 - DNA, 25 bp, Homo sapien
aaatgcctcatctgacaccagatct

SEQ ID NO: 2065571 - DNA, 25 bp, Homo sapien
ttattgtgcaaatgcctcatctgac

SEQ ID NO: 2065572 - DNA, 25 bp, Homo sapien
ttgtgattgatcacaaatttgagtt

SEQ ID NO: 2065573 - DNA, 25 bp, Homo sapien
agaatgcaggcatttggccaaagct

SEQ ID NO: 2065574 - DNA, 25 bp, Homo sapien
aatgacaagaatgcaggcatttggc

SEQ ID NO: 2065575 - DNA, 25 bp, Homo sapien
ttttgaggaccatccaattcactaa

SEQ ID NO: 2065576 - DNA, 25 bp, Homo sapien
atattgcattgcatgctgtccttca

SEQ ID NO: 2065577 - DNA, 25 bp, Homo sapien
tatattgcattgcatgctgtccttc

SEQ ID NO: 2065578 - DNA, 25 bp, Homo sapien
gtatattgcattgcatgctgtcctt

SEQ ID NO: 2065579 - DNA, 25 bp, Homo sapien
caagtaaatagttagagtgatcaaa

SEQ ID NO: 2065580 - DNA, 25 bp, Homo sapien
cagggatgcccattctcttcaaaga

SEQ ID NO: 2065581 - DNA, 25 bp, Homo sapien
aattgagcagacattagctttgaaa

SEQ ID NO: 2065582 - DNA, 25 bp, Homo sapien
tgttactaaggtcatcattcaatac

SEQ ID NO: 2065583 - DNA, 25 bp, Homo sapien
ctcagcaaccatggcgtgctgcctt

SEQ ID NO: 2065584 - DNA, 25 bp, Homo sapien
tggctgcaccaagggtagagatgaa

SEQ ID NO: 2065585 - DNA, 25 bp, Homo sapien
aaccatggcgtgctgccttggtgaa

SEQ ID NO: 2065586 - DNA, 25 bp, Homo sapien
agagatgaatttggcctggttttcc

SEQ ID NO: 2065587 - DNA, 25 bp, Homo sapien
tctccacgtccttcagcataagaat

SEQ ID NO: 2065588 - DNA, 25 bp, Homo sapien
tccacgtccttcagcataagaatct

SEQ ID NO: 2065589 - DNA, 25 bp, Homo sapien
tttctccacgtccttcagcataaga

SEQ ID NO: 2065590 - DNA, 25 bp, Homo sapien
gtttctccacgtccttcagcataag

SEQ ID NO: 2065591 - DNA, 25 bp, Homo sapien
ctgtccactggcctttctgcttggg

SEQ ID NO: 2065592 - DNA, 25 bp, Homo sapien
tgtccactggcctttctgcttgggt

SEQ ID NO: 2065593 - DNA, 25 bp, Homo sapien
tccactggcctttctgcttgggttc

SEQ ID NO: 2065594 - DNA, 25 bp, Homo sapien
gtccactggcctttctgcttgggtt

SEQ ID NO: 2065595 - DNA, 25 bp, Homo sapien
gcaggagttcccagtatgctgtcca

SEQ ID NO: 2065596 - DNA, 25 bp, Homo sapien
agttcccagtatgctgtccacaggc

SEQ ID NO: 2065597 - DNA, 25 bp, Homo sapien
ttttctgcaggagttcccagtatgc

SEQ ID NO: 2065598 - DNA, 25 bp, Homo sapien
tttttctgcaggagttcccagtatg

SEQ ID NO: 2065599 - DNA, 25 bp, Homo sapien
gtcactgttgccatagcttttccac

SEQ ID NO: 2065600 - DNA, 25 bp, Homo sapien
gggtactgtcactgttgccatagct

SEQ ID NO: 2065601 - DNA, 25 bp, Homo sapien
tgcttggggtactgtcactgttgcc

SEQ ID NO: 2065602 - DNA, 25 bp, Homo sapien
tagccagtgcttggggtactgtcac

SEQ ID NO: 2065603 - DNA, 25 bp, Homo sapien
tgtcacaaaggatcgtgggattagt

SEQ ID NO: 2065604 - DNA, 25 bp, Homo sapien
gtcacaaaggatcgtgggattagtc

SEQ ID NO: 2065605 - DNA, 25 bp, Homo sapien
ttgtcacaaaggatcgtgggattag

SEQ ID NO: 2065606 - DNA, 25 bp, Homo sapien
aattgtcacaaaggatcgtgggatt

SEQ ID NO: 2065607 - DNA, 25 bp, Homo sapien
gatctgcttgcaacccatgggattt

SEQ ID NO: 2065608 - DNA, 25 bp, Homo sapien
aaatatgaatgatatacttagtcca

SEQ ID NO: 2065609 - DNA, 25 bp, Homo sapien
ccaggtcactcaattgtatagcttc

SEQ ID NO: 2065610 - DNA, 25 bp, Homo sapien
atcatgacccattgtgaaaatatga

SEQ ID NO: 2065611 - DNA, 25 bp, Homo sapien
cactgcaaccaggagaactcaagag

SEQ ID NO: 2065612 - DNA, 25 bp, Homo sapien
cccggcctaagctaattttgaaatg

SEQ ID NO: 2065613 - DNA, 25 bp, Homo sapien
tgcagaaccgctttttgtggtttag

SEQ ID NO: 2065614 - DNA, 25 bp, Homo sapien
caaccaggagaactcaagaggttct

SEQ ID NO: 2065615 - DNA, 25 bp, Homo sapien
aatatgcgtatcatctggttgccag

SEQ ID NO: 2065616 - DNA, 25 bp, Homo sapien
gaacttggagctttacaggattgaa

SEQ ID NO: 2065617 - DNA, 25 bp, Homo sapien
gacataatctcctcgggaacttgga

SEQ ID NO: 2065618 - DNA, 25 bp, Homo sapien
caggattgaacatgataacttgact

SEQ ID NO: 2065619 - DNA, 25 bp, Homo sapien
ttctgagcgaatccatcactctcct

SEQ ID NO: 2065620 - DNA, 25 bp, Homo sapien
ctcaatgggttctgagcgaatccat

SEQ ID NO: 2065621 - DNA, 25 bp, Homo sapien
tttaaatgctgaacatctcaatggg

SEQ ID NO: 2065622 - DNA, 25 bp, Homo sapien
taaatgctgaacatctcaatgggtt

SEQ ID NO: 2065623 - DNA, 25 bp, Homo sapien
ccccttagttgacataattcagaga

SEQ ID NO: 2065624 - DNA, 25 bp, Homo sapien
ctcatgctgctttcggttgtggctt

SEQ ID NO: 2065625 - DNA, 25 bp, Homo sapien
ctgtggttcttgtctactgctgtgg

SEQ ID NO: 2065626 - DNA, 25 bp, Homo sapien
gaaacaaaatgtcatggcatagaaa

SEQ ID NO: 2065627 - DNA, 25 bp, Homo sapien
ggagagctatccctgcaagagttgg

SEQ ID NO: 2065628 - DNA, 25 bp, Homo sapien
ctccaggagagctatccctgcaaga

SEQ ID NO: 2065629 - DNA, 25 bp, Homo sapien
ggccctataaagcaggtgacacact

SEQ ID NO: 2065630 - DNA, 25 bp, Homo sapien
cctgcaagagttggccctataaagc

SEQ ID NO: 2065631 - DNA, 25 bp, Homo sapien
tgccactcgcagtcctgacgggcag

SEQ ID NO: 2065632 - DNA, 25 bp, Homo sapien
gaggagataagtagctgtccccgtg

SEQ ID NO: 2065633 - DNA, 25 bp, Homo sapien
gcaaggaaacttcgcaggctggtga

SEQ ID NO: 2065634 - DNA, 25 bp, Homo sapien
tgctcatcgccctgtggagcagatc

SEQ ID NO: 2065635 - DNA, 25 bp, Homo sapien
tggctctccttgagtgtttgcttat

SEQ ID NO: 2065636 - DNA, 25 bp, Homo sapien
tgcacggatggcatgggccaactcg

SEQ ID NO: 2065637 - DNA, 25 bp, Homo sapien
aagacagtagtgctgtgtgctgcac

SEQ ID NO: 2065638 - DNA, 25 bp, Homo sapien
cttcgatcgcggtttccagcagaaa

SEQ ID NO: 2065639 - DNA, 25 bp, Homo sapien
ctttgacttttaaggtagacttatg

SEQ ID NO: 2065640 - DNA, 25 bp, Homo sapien
tgacttttaaggtagacttatgcat

SEQ ID NO: 2065641 - DNA, 25 bp, Homo sapien
tcaccctttcaaagttcactttgac

SEQ ID NO: 2065642 - DNA, 25 bp, Homo sapien
ttcaccctttcaaagttcactttga

SEQ ID NO: 2065643 - DNA, 25 bp, Homo sapien
acaggaaggataagaaccacagaac

SEQ ID NO: 2065644 - DNA, 25 bp, Homo sapien
ccatccaaacaagtttaggaccaca

SEQ ID NO: 2065645 - DNA, 25 bp, Homo sapien
aaccacagaactagaagaaaagcca

SEQ ID NO: 2065646 - DNA, 25 bp, Homo sapien
caaacaagtttaggaccacagtcca

SEQ ID NO: 2065647 - DNA, 25 bp, Homo sapien
cccagggccctgagtcgctggttgg

SEQ ID NO: 2065648 - DNA, 25 bp, Homo sapien
tcccagggccctgagtcgctggttg

SEQ ID NO: 2065649 - DNA, 25 bp, Homo sapien
ccagggccctgagtcgctggttgga

SEQ ID NO: 2065650 - DNA, 25 bp, Homo sapien
cacaccctttagaggtacagtagct

SEQ ID NO: 2065651 - DNA, 25 bp, Homo sapien
tacttccaggtaaagagacctacga

SEQ ID NO: 2065652 - DNA, 25 bp, Homo sapien
gcttttgcatgttggataactttca

SEQ ID NO: 2065653 - DNA, 25 bp, Homo sapien
tgcccatccgggaaataattccacc

SEQ ID NO: 2065654 - DNA, 25 bp, Homo sapien
gaagtaatctcccatgctatggtcc

SEQ ID NO: 2065655 - DNA, 25 bp, Homo sapien
tggcaccagtattgccccaggcagg

SEQ ID NO: 2065656 - DNA, 25 bp, Homo sapien
cccaggcaggtttatgtacaaaaga

SEQ ID NO: 2065657 - DNA, 25 bp, Homo sapien
tagactttgactgggaggtggcacc

SEQ ID NO: 2065658 - DNA, 25 bp, Homo sapien
cattgaagaccctaaaaatcccagt

SEQ ID NO: 2065659 - DNA, 25 bp, Homo sapien
acaggctgtttcctcgtcgtataga

SEQ ID NO: 2065660 - DNA, 25 bp, Homo sapien
tttctgcagcatcgcaacaggttcg

SEQ ID NO: 2065661 - DNA, 25 bp, Homo sapien
gctttcatgctgttagcccctgatg

SEQ ID NO: 2065662 - DNA, 25 bp, Homo sapien
gttgatgatgcccataattgcaaga

SEQ ID NO: 2065663 - DNA, 25 bp, Homo sapien
gatgatgcccataattgcaagacta

SEQ ID NO: 2065664 - DNA, 25 bp, Homo sapien
gatgcccataattgcaagactattc

SEQ ID NO: 2065665 - DNA, 25 bp, Homo sapien
tgatgatgcccataattgcaagact

SEQ ID NO: 2065666 - DNA, 25 bp, Homo sapien
gatataggctattctctgggatgag

SEQ ID NO: 2065667 - DNA, 25 bp, Homo sapien
ggtggagacccaactacaatgacat

SEQ ID NO: 2065668 - DNA, 25 bp, Homo sapien
cattgtcatgccagaactataaaga

SEQ ID NO: 2065669 - DNA, 25 bp, Homo sapien
gaaggtgttgagctcttatacatga

SEQ ID NO: 2065670 - DNA, 25 bp, Homo sapien
aactgaaaatgggaaggcaacttga

SEQ ID NO: 2065671 - DNA, 25 bp, Homo sapien
gaaagaacaacttgggaccatgagt

SEQ ID NO: 2065672 - DNA, 25 bp, Homo sapien
tccatgtacaaatagggcttctgtg

SEQ ID NO: 2065673 - DNA, 25 bp, Homo sapien
tcacagagttcgtgtcaggctcaaa

SEQ ID NO: 2065674 - DNA, 25 bp, Homo sapien
atctttgtcttcacactgaatagac

SEQ ID NO: 2065675 - DNA, 25 bp, Homo sapien
cacactgaatagactgaggaagagg

SEQ ID NO: 2065676 - DNA, 25 bp, Homo sapien
ctttgtcttcacactgaatagactg

SEQ ID NO: 2065677 - DNA, 25 bp, Homo sapien
cttcacactgaatagactgaggaag

SEQ ID NO: 2065678 - DNA, 25 bp, Homo sapien
ggtattaagtaaggatcaatgttta

SEQ ID NO: 2065679 - DNA, 25 bp, Homo sapien
tattgtgtatggtattaagtaagga

SEQ ID NO: 2065680 - DNA, 25 bp, Homo sapien
tatggtattaagtaaggatcaatgt

SEQ ID NO: 2065681 - DNA, 25 bp, Homo sapien
ttcaggttaattattgtgtatggta

SEQ ID NO: 2065682 - DNA, 25 bp, Homo sapien
tagagttctctatatcaataattat

SEQ ID NO: 2065683 - DNA, 25 bp, Homo sapien
ctatacccttagcaaagttcaagta

SEQ ID NO: 2065684 - DNA, 25 bp, Homo sapien
atatttaagaactatacccttagca

SEQ ID NO: 2065685 - DNA, 25 bp, Homo sapien
aatgcaaaaagtgaatagttttact

SEQ ID NO: 2065686 - DNA, 25 bp, Homo sapien
tctcacaatggtagtccagctggtg

SEQ ID NO: 2065687 - DNA, 25 bp, Homo sapien
gatggattctcttactacactgcaa

SEQ ID NO: 2065688 - DNA, 25 bp, Homo sapien
acactcaggaacgaccaagggcagt

SEQ ID NO: 2065689 - DNA, 25 bp, Homo sapien
caagggcagtttcgaggcaagatag

SEQ ID NO: 2065690 - DNA, 25 bp, Homo sapien
gaagagtccatccattaaatataga

SEQ ID NO: 2065691 - DNA, 25 bp, Homo sapien
cattttaacatgaaacttgggctgt

SEQ ID NO: 2065692 - DNA, 25 bp, Homo sapien
gagaataaataagactcacgcagtc

SEQ ID NO: 2065693 - DNA, 25 bp, Homo sapien
tcatcttcttgcaaagccattggta

SEQ ID NO: 2065694 - DNA, 25 bp, Homo sapien
tccgtaacctaatcaacattaaata

SEQ ID NO: 2065695 - DNA, 25 bp, Homo sapien
tcatttccgtaacctaatcaacatt

SEQ ID NO: 2065696 - DNA, 25 bp, Homo sapien
catttccgtaacctaatcaacatta

SEQ ID NO: 2065697 - DNA, 25 bp, Homo sapien
ttcagatgaaagtgctacctgggtt

SEQ ID NO: 2065698 - DNA, 25 bp, Homo sapien
gatgaaagtgctacctgggttttta

SEQ ID NO: 2065699 - DNA, 25 bp, Homo sapien
cttgtagagacagccttagatacct

SEQ ID NO: 2065700 - DNA, 25 bp, Homo sapien
gatacctttgtcctaggagtttcag

SEQ ID NO: 2065701 - DNA, 25 bp, Homo sapien
gcttcaagtatgttaaccttttctc

SEQ ID NO: 2065702 - DNA, 25 bp, Homo sapien
ctgggcttcaagtatgttaaccttt

SEQ ID NO: 2065703 - DNA, 25 bp, Homo sapien
cttcaagtatgttaaccttttctct

SEQ ID NO: 2065704 - DNA, 25 bp, Homo sapien
aggatgcgagaccactgcctggtgt

SEQ ID NO: 2065705 - DNA, 25 bp, Homo sapien
ctggtggacaggatgcgagaccact

SEQ ID NO: 2065706 - DNA, 25 bp, Homo sapien
caagttcagcaggagtgcgtcctgt

SEQ ID NO: 2065707 - DNA, 25 bp, Homo sapien
aggagtgcgtcctgtgaaagcagca

SEQ ID NO: 2065708 - DNA, 25 bp, Homo sapien
tcctggatgacactgcgcaggttct

SEQ ID NO: 2065709 - DNA, 25 bp, Homo sapien
gacactgcgcaggttctgatgttgg

SEQ ID NO: 2065710 - DNA, 25 bp, Homo sapien
tctgatgttgggagtgaatcacaaa

SEQ ID NO: 2065711 - DNA, 25 bp, Homo sapien
tgggagtgaatcacaaactgcagat

SEQ ID NO: 2065712 - DNA, 25 bp, Homo sapien
gcttagaagcattgtgacctcggag

SEQ ID NO: 2065713 - DNA, 25 bp, Homo sapien
tactatcattccatagggaaacggg

SEQ ID NO: 2065714 - DNA, 25 bp, Homo sapien
tggcaacaccatcaagcttagaagc

SEQ ID NO: 2065715 - DNA, 25 bp, Homo sapien
tttgagtccacatccatcattatgg

SEQ ID NO: 2065716 - DNA, 25 bp, Homo sapien
gagattgggagtgtgcgagaggcag

SEQ ID NO: 2065717 - DNA, 25 bp, Homo sapien
gggagattgggagtgtgcgagaggc

SEQ ID NO: 2065718 - DNA, 25 bp, Homo sapien
ttgggagtgtgcgagaggcaggact

SEQ ID NO: 2065719 - DNA, 25 bp, Homo sapien
aagtccggggagattgggagtgtgc

SEQ ID NO: 2065720 - DNA, 25 bp, Homo sapien
ttctgtttaggatccaatgtttctc

SEQ ID NO: 2065721 - DNA, 25 bp, Homo sapien
tgggcccccagtggaataaaggata

SEQ ID NO: 2065722 - DNA, 25 bp, Homo sapien
catctgtggggactcatactgcctt

SEQ ID NO: 2065723 - DNA, 25 bp, Homo sapien
tgtaaacatcactgactatgggccc

SEQ ID NO: 2065724 - DNA, 25 bp, Homo sapien
tgagttgcagtagcttgttttccaa

SEQ ID NO: 2065725 - DNA, 25 bp, Homo sapien
agttgcagtagcttgttttccaaag

SEQ ID NO: 2065726 - DNA, 25 bp, Homo sapien
tttgagttgcagtagcttgttttcc

SEQ ID NO: 2065727 - DNA, 25 bp, Homo sapien
tggatttgagttgcagtagcttgtt

SEQ ID NO: 2065728 - DNA, 25 bp, Homo sapien
gctcctcctccagggcattgcccat

SEQ ID NO: 2065729 - DNA, 25 bp, Homo sapien
tctgctcctcctccagggcattgcc

SEQ ID NO: 2065730 - DNA, 25 bp, Homo sapien
ctgcctggaggacttcttctgctcc

SEQ ID NO: 2065731 - DNA, 25 bp, Homo sapien
ttctgctcctcctccagggcattgc

SEQ ID NO: 2065732 - DNA, 25 bp, Homo sapien
tggagacagcccactgttgcgagtt

SEQ ID NO: 2065733 - DNA, 25 bp, Homo sapien
gcgagttattatcagggcaggagat

SEQ ID NO: 2065734 - DNA, 25 bp, Homo sapien
caggagataggccatcacttcccaa

SEQ ID NO: 2065735 - DNA, 25 bp, Homo sapien
gctgcatggccttactaagccatgt

SEQ ID NO: 2065736 - DNA, 25 bp, Homo sapien
ggatctgagccactgaaccttattc

SEQ ID NO: 2065737 - DNA, 25 bp, Homo sapien
tattctggggcatgctcctctgcct

SEQ ID NO: 2065738 - DNA, 25 bp, Homo sapien
ctctgcctttgactgggctttcagc

SEQ ID NO: 2065739 - DNA, 25 bp, Homo sapien
ctgcctttgactgggctttcagcct

SEQ ID NO: 2065740 - DNA, 25 bp, Homo sapien
ctggttcccctttctaagtcacata

SEQ ID NO: 2065741 - DNA, 25 bp, Homo sapien
tggttcccctttctaagtcacatat

SEQ ID NO: 2065742 - DNA, 25 bp, Homo sapien
ttcccctttctaagtcacatatttc

SEQ ID NO: 2065743 - DNA, 25 bp, Homo sapien
cattctctgtacaaggttctccaat

SEQ ID NO: 2065744 - DNA, 25 bp, Homo sapien
ccattctctgtacaaggttctccaa

SEQ ID NO: 2065745 - DNA, 25 bp, Homo sapien
ttccattctctgtacaaggttctcc

SEQ ID NO: 2065746 - DNA, 25 bp, Homo sapien
ttttccattctctgtacaaggttct

SEQ ID NO: 2065747 - DNA, 25 bp, Homo sapien
gattcagattttcaacatgttgttt

SEQ ID NO: 2065748 - DNA, 25 bp, Homo sapien
cagattttcaacatgttgtttcaat

SEQ ID NO: 2065749 - DNA, 25 bp, Homo sapien
ttgattcagattttcaacatgttgt

SEQ ID NO: 2065750 - DNA, 25 bp, Homo sapien
gtttttcagcaacttgattcagatt

SEQ ID NO: 2065751 - DNA, 25 bp, Homo sapien
cacttcttcagattgcgtttggtag

SEQ ID NO: 2065752 - DNA, 25 bp, Homo sapien
tcagattgcgtttggtagttttcaa

SEQ ID NO: 2065753 - DNA, 25 bp, Homo sapien
tctcacttcttcagattgcgtttgg

SEQ ID NO: 2065754 - DNA, 25 bp, Homo sapien
cttcagattgcgtttggtagttttc

SEQ ID NO: 2065755 - DNA, 25 bp, Homo sapien
ttcaatacttcattctctttgttca

SEQ ID NO: 2065756 - DNA, 25 bp, Homo sapien
ttcattctctttgttcatttctaag

SEQ ID NO: 2065757 - DNA, 25 bp, Homo sapien
tcattctctttgttcatttctaaga

SEQ ID NO: 2065758 - DNA, 25 bp, Homo sapien
cttgattttcaatacttcattctct

SEQ ID NO: 2065759 - DNA, 25 bp, Homo sapien
aaactgcaacaagaaggatccattt

SEQ ID NO: 2065760 - DNA, 25 bp, Homo sapien
tccaaactgcaacaagaaggatcca

SEQ ID NO: 2065761 - DNA, 25 bp, Homo sapien
ccaaactgcaacaagaaggatccat

SEQ ID NO: 2065762 - DNA, 25 bp, Homo sapien
agccctgttgaaggtttccacagtg

SEQ ID NO: 2065763 - DNA, 25 bp, Homo sapien
tctgggtcctgatcttttgcagagt

SEQ ID NO: 2065764 - DNA, 25 bp, Homo sapien
tgatttgtactgtcatgtcttattt

SEQ ID NO: 2065765 - DNA, 25 bp, Homo sapien
gtgatttgtactgtcatgtcttatt

SEQ ID NO: 2065766 - DNA, 25 bp, Homo sapien
acatctgggtcctgatcttttgcag

SEQ ID NO: 2065767 - DNA, 25 bp, Homo sapien
attatcttccatcttatcccttggg

SEQ ID NO: 2065768 - DNA, 25 bp, Homo sapien
tagactcatacaaggcagaattatc

SEQ ID NO: 2065769 - DNA, 25 bp, Homo sapien
tcaataatgtgagcggacgtagact

SEQ ID NO: 2065770 - DNA, 25 bp, Homo sapien
catactcggtttcttcaataatgtg

SEQ ID NO: 2065771 - DNA, 25 bp, Homo sapien
caaccttggtcttttagaagttcag

SEQ ID NO: 2065772 - DNA, 25 bp, Homo sapien
ttccatcatattaagactggcttcc

SEQ ID NO: 2065773 - DNA, 25 bp, Homo sapien
caagacgaagtaaaattaatagagc

SEQ ID NO: 2065774 - DNA, 25 bp, Homo sapien
atagagctaaaacgccaaccttggt

SEQ ID NO: 2065775 - DNA, 25 bp, Homo sapien
cctgtttgtacagccccagagctaa

SEQ ID NO: 2065776 - DNA, 25 bp, Homo sapien
caatatgcagtgtgcttggaagcca

SEQ ID NO: 2065777 - DNA, 25 bp, Homo sapien
tcgctttggcgccacaaacagcaga

SEQ ID NO: 2065778 - DNA, 25 bp, Homo sapien
gaagtaagagaaacacccatagagt

SEQ ID NO: 2065779 - DNA, 25 bp, Homo sapien
cattaaaacaggtctagcagtggct

SEQ ID NO: 2065780 - DNA, 25 bp, Homo sapien
ccccaggattgaggcaaagacagag

SEQ ID NO: 2065781 - DNA, 25 bp, Homo sapien
gcaaggtgtaaacaactgactccag

SEQ ID NO: 2065782 - DNA, 25 bp, Homo sapien
gattgaccgcacagaggtattcact

SEQ ID NO: 2065783 - DNA, 25 bp, Homo sapien
tgaggcaccatctgtatgagtcttg

SEQ ID NO: 2065784 - DNA, 25 bp, Homo sapien
ccatgctggatgtctggcaggtttt

SEQ ID NO: 2065785 - DNA, 25 bp, Homo sapien
ggctgctgattgaaaagcaccatgc

SEQ ID NO: 2065786 - DNA, 25 bp, Homo sapien
gcaggaaaggtctcttacttgttca

SEQ ID NO: 2065787 - DNA, 25 bp, Homo sapien
aacaaataacatgcctatcagtaat

SEQ ID NO: 2065788 - DNA, 25 bp, Homo sapien
ttcaatgttgagcatactgtaaaca

SEQ ID NO: 2065789 - DNA, 25 bp, Homo sapien
tactgtaaacaaataagctaacaaa

SEQ ID NO: 2065790 - DNA, 25 bp, Homo sapien
taacaaataacatgcctatcagtaa

SEQ ID NO: 2065791 - DNA, 25 bp, Homo sapien
aattgtgtctgccagggtacctgac

SEQ ID NO: 2065792 - DNA, 25 bp, Homo sapien
tgacgtcggccttatgacgttggcc

SEQ ID NO: 2065793 - DNA, 25 bp, Homo sapien
ctgccttgggcagaaattcctctgt

SEQ ID NO: 2065794 - DNA, 25 bp, Homo sapien
gaaagaaccttcttatgacgtcggc

SEQ ID NO: 2065795 - DNA, 25 bp, Homo sapien
cccgaaggtggccagactcgcctac

SEQ ID NO: 2065796 - DNA, 25 bp, Homo sapien
cacctggacacccacacacatggag

SEQ ID NO: 2065797 - DNA, 25 bp, Homo sapien
tggggaagccgctggaaaggcacct

SEQ ID NO: 2065798 - DNA, 25 bp, Homo sapien
ctcttcaacaaggacccttttacag

SEQ ID NO: 2065799 - DNA, 25 bp, Homo sapien
ttgtggggcgcccagccgacgcggg

SEQ ID NO: 2065800 - DNA, 25 bp, Homo sapien
ctcccctgggcgatcggaccttggg

SEQ ID NO: 2065801 - DNA, 25 bp, Homo sapien
gccgacgcggggtcccggtgctgct

SEQ ID NO: 2065802 - DNA, 25 bp, Homo sapien
gctcctcccctgggcgatcggacct

SEQ ID NO: 2065803 - DNA, 25 bp, Homo sapien
ctcctgcacagagagacttctttga

SEQ ID NO: 2065804 - DNA, 25 bp, Homo sapien
ataatgctgattaaattttgtttga

SEQ ID NO: 2065805 - DNA, 25 bp, Homo sapien
ctctcctgcacagagagacttcttt

SEQ ID NO: 2065806 - DNA, 25 bp, Homo sapien
ttttgtttgatgatgatggtttcta

SEQ ID NO: 2065807 - DNA, 25 bp, Homo sapien
tactttacagcccttgttacaccag

SEQ ID NO: 2065808 - DNA, 25 bp, Homo sapien
tctctttcagattcttaaatgctac

SEQ ID NO: 2065809 - DNA, 25 bp, Homo sapien
gcccttgttacaccagaggtttgaa

SEQ ID NO: 2065810 - DNA, 25 bp, Homo sapien
gattcttaaatgctactttacagcc

SEQ ID NO: 2065811 - DNA, 25 bp, Homo sapien
ttacttttgggtgcacagtgcctgg

SEQ ID NO: 2065812 - DNA, 25 bp, Homo sapien
caaacccacaaactgagtaggatag

SEQ ID NO: 2065813 - DNA, 25 bp, Homo sapien
cagggtgctggtactattctatttc

SEQ ID NO: 2065814 - DNA, 25 bp, Homo sapien
gccagacacaaaagtgcacacgtta

SEQ ID NO: 2065815 - DNA, 25 bp, Homo sapien
tctccaagtgggaactccaagtgga

SEQ ID NO: 2065816 - DNA, 25 bp, Homo sapien
tctgtgctggccaggaagacttcaa

SEQ ID NO: 2065817 - DNA, 25 bp, Homo sapien
tctccaaggccgatgagataagccc

SEQ ID NO: 2065818 - DNA, 25 bp, Homo sapien
gataagccctggtcataagtgagaa

SEQ ID NO: 2065819 - DNA, 25 bp, Homo sapien
gttgtatcattcgaatgcctttgca

SEQ ID NO: 2065820 - DNA, 25 bp, Homo sapien
cactatatttgtagtcttagatccc

SEQ ID NO: 2065821 - DNA, 25 bp, Homo sapien
agtccgttgtatcattcgaatgcct

SEQ ID NO: 2065822 - DNA, 25 bp, Homo sapien
catctccattaaatgctgttaattc

SEQ ID NO: 2065823 - DNA, 25 bp, Homo sapien
tgaaaacagaagggtcaggcaactg

SEQ ID NO: 2065824 - DNA, 25 bp, Homo sapien
acagaagggtcaggcaactgagtga

SEQ ID NO: 2065825 - DNA, 25 bp, Homo sapien
ctgctgaaaacagaagggtcaggca

SEQ ID NO: 2065826 - DNA, 25 bp, Homo sapien
aaacagaagggtcaggcaactgagt

SEQ ID NO: 2065827 - DNA, 25 bp, Homo sapien
agacagacttgggagcagtatatgg

SEQ ID NO: 2065828 - DNA, 25 bp, Homo sapien
tgggagcagtatatggaagctctgc

SEQ ID NO: 2065829 - DNA, 25 bp, Homo sapien
atcattacaaggctcttgggagaca

SEQ ID NO: 2065830 - DNA, 25 bp, Homo sapien
gaattgtacgatttcttcactgatg

SEQ ID NO: 2065831 - DNA, 25 bp, Homo sapien
cccatcattggttctacttgtttcc

SEQ ID NO: 2065832 - DNA, 25 bp, Homo sapien
tcccatcattggttctacttgtttc

SEQ ID NO: 2065833 - DNA, 25 bp, Homo sapien
tatgaaatgacttctttgcaaagat

SEQ ID NO: 2065834 - DNA, 25 bp, Homo sapien
ttagggctcatattctttatgaaat

SEQ ID NO: 2065835 - DNA, 25 bp, Homo sapien
tctttatgaaatgacttctttgcaa

SEQ ID NO: 2065836 - DNA, 25 bp, Homo sapien
attctttatgaaatgacttctttgc

SEQ ID NO: 2065837 - DNA, 25 bp, Homo sapien
attccaacaccagagcaatcccatg

SEQ ID NO: 2065838 - DNA, 25 bp, Homo sapien
agagcaatcccatgacactgccgtc

SEQ ID NO: 2065839 - DNA, 25 bp, Homo sapien
tggaactcatactagaagcacccaa

SEQ ID NO: 2065840 - DNA, 25 bp, Homo sapien
aacaatgcgatgaccagaggctggg

SEQ ID NO: 2065841 - DNA, 25 bp, Homo sapien
tagtgtatgcccagcaggctttctt

SEQ ID NO: 2065842 - DNA, 25 bp, Homo sapien
gattctacacagtagtgtatgccca

SEQ ID NO: 2065843 - DNA, 25 bp, Homo sapien
tctgatctgattctacacagtagtg

SEQ ID NO: 2065844 - DNA, 25 bp, Homo sapien
cacagtagtgtatgcccagcaggct

SEQ ID NO: 2065845 - DNA, 25 bp, Homo sapien
cgtccattgtctggagttcaggaaa

SEQ ID NO: 2065846 - DNA, 25 bp, Homo sapien
ttgtgcagtaatgtgtatggctttt

SEQ ID NO: 2065847 - DNA, 25 bp, Homo sapien
tcttgttgtgaattcaaaaggcttc

SEQ ID NO: 2065848 - DNA, 25 bp, Homo sapien
tgagcaaagcatcatcagagatgat

SEQ ID NO: 2065849 - DNA, 25 bp, Homo sapien
tatgaagagctttgcctaccattcc

SEQ ID NO: 2065850 - DNA, 25 bp, Homo sapien
tctattgtggagatggaattcattc

SEQ ID NO: 2065851 - DNA, 25 bp, Homo sapien
ttgcctaccattccaagtgacaggg

SEQ ID NO: 2065852 - DNA, 25 bp, Homo sapien
gataagcccataaagaccaatgagg

SEQ ID NO: 2065853 - DNA, 25 bp, Homo sapien
ccttttcactcttataagtggctct

SEQ ID NO: 2065854 - DNA, 25 bp, Homo sapien
tccttttcactcttataagtggctc

SEQ ID NO: 2065855 - DNA, 25 bp, Homo sapien
ttttcactcttataagtggctctca

SEQ ID NO: 2065856 - DNA, 25 bp, Homo sapien
tttcactcttataagtggctctcat

SEQ ID NO: 2065857 - DNA, 25 bp, Homo sapien
tagacttcgatcttgatgtgccact

SEQ ID NO: 2065858 - DNA, 25 bp, Homo sapien
ttaatattctacaacgcctgtgaca

SEQ ID NO: 2065859 - DNA, 25 bp, Homo sapien
tctacaacgcctgtgacaactactt

SEQ ID NO: 2065860 - DNA, 25 bp, Homo sapien
ccaagtgttggatatgtaatttcga

SEQ ID NO: 2065861 - DNA, 25 bp, Homo sapien
gactttggcgctgcgacactggttg

SEQ ID NO: 2065862 - DNA, 25 bp, Homo sapien
ggttgccacagtctttgccgctcgt

SEQ ID NO: 2065863 - DNA, 25 bp, Homo sapien
ttggcagactccaccgactttggcg

SEQ ID NO: 2065864 - DNA, 25 bp, Homo sapien
tagcctggcgttcttggaagcggcc

SEQ ID NO: 2065865 - DNA, 25 bp, Homo sapien
ggctgcgttcatccgcacgacttct

SEQ ID NO: 2065866 - DNA, 25 bp, Homo sapien
ggcgggctgcgttcatccgcacgac

SEQ ID NO: 2065867 - DNA, 25 bp, Homo sapien
tgcgttcatccgcacgacttctctc

SEQ ID NO: 2065868 - DNA, 25 bp, Homo sapien
cgggctgcgttcatccgcacgactt

SEQ ID NO: 2065869 - DNA, 25 bp, Homo sapien
actgtccagggaatcctttaatatc

SEQ ID NO: 2065870 - DNA, 25 bp, Homo sapien
cacctttgccagagtgaaattcaca

SEQ ID NO: 2065871 - DNA, 25 bp, Homo sapien
tgtccagggaatcctttaatatcat

SEQ ID NO: 2065872 - DNA, 25 bp, Homo sapien
tttgccagagtgaaattcacatggc

SEQ ID NO: 2065873 - DNA, 25 bp, Homo sapien
tctcccgcttggtacattgctcctt

SEQ ID NO: 2065874 - DNA, 25 bp, Homo sapien
tgttccacattccatcatagacaca

SEQ ID NO: 2065875 - DNA, 25 bp, Homo sapien
catatacgtgagatgccactaggaa

SEQ ID NO: 2065876 - DNA, 25 bp, Homo sapien
cagcctctatgtggtcaaggtctcc

SEQ ID NO: 2065877 - DNA, 25 bp, Homo sapien
aagttgatttggaaccagtgcccac

SEQ ID NO: 2065878 - DNA, 25 bp, Homo sapien
aggactgtgtcgaaaatctgggcac

SEQ ID NO: 2065879 - DNA, 25 bp, Homo sapien
atctgggcacatttccctttaagca

SEQ ID NO: 2065880 - DNA, 25 bp, Homo sapien
ctgagtccagggacaaaatctgctt

SEQ ID NO: 2065881 - DNA, 25 bp, Homo sapien
taagcatttgcacgttccatatttg

SEQ ID NO: 2065882 - DNA, 25 bp, Homo sapien
tgctgggtctccttgtggttctctg

SEQ ID NO: 2065883 - DNA, 25 bp, Homo sapien
actgctgggtctccttgtggttctc

SEQ ID NO: 2065884 - DNA, 25 bp, Homo sapien
ctgctgggtctccttgtggttctct

SEQ ID NO: 2065885 - DNA, 25 bp, Homo sapien
aactgctgggtctccttgtggttct

SEQ ID NO: 2065886 - DNA, 25 bp, Homo sapien
gaatgacctcgttggctgagaccaa

SEQ ID NO: 2065887 - DNA, 25 bp, Homo sapien
ctgagaccaatggagtcagcttccc

SEQ ID NO: 2065888 - DNA, 25 bp, Homo sapien
tgcagccaagccgaagcacagactg

SEQ ID NO: 2065889 - DNA, 25 bp, Homo sapien
tccaggaggcttccaaagaatgacc

SEQ ID NO: 2065890 - DNA, 25 bp, Homo sapien
ctgattaaatttaaacgaagttcat

SEQ ID NO: 2065891 - DNA, 25 bp, Homo sapien
tccccattactgctgccctgaaggg

SEQ ID NO: 2065892 - DNA, 25 bp, Homo sapien
gagtcctggcccgttagtctctctc

SEQ ID NO: 2065893 - DNA, 25 bp, Homo sapien
cttgtccatgtgtctgcgacctgga

SEQ ID NO: 2065894 - DNA, 25 bp, Homo sapien
ggagggagtaggatgtatgccagcc

SEQ ID NO: 2065895 - DNA, 25 bp, Homo sapien
taggatgtatgccagccaccctagc

SEQ ID NO: 2065896 - DNA, 25 bp, Homo sapien
gagtaggatgtatgccagccaccct

SEQ ID NO: 2065897 - DNA, 25 bp, Homo sapien
agggagtaggatgtatgccagccac

SEQ ID NO: 2065898 - DNA, 25 bp, Homo sapien
acatactttctaaaggagtggactg

SEQ ID NO: 2065899 - DNA, 25 bp, Homo sapien
tgaggtctctgtttcaactccacca

SEQ ID NO: 2065900 - DNA, 25 bp, Homo sapien
tactttctaaaggagtggactgatt

SEQ ID NO: 2065901 - DNA, 25 bp, Homo sapien
gtggacttttcattgactcacatga

SEQ ID NO: 2065902 - DNA, 25 bp, Homo sapien
ggcaatatgctctccaaatggttta

SEQ ID NO: 2065903 - DNA, 25 bp, Homo sapien
actttgggattatctacatgttcca

SEQ ID NO: 2065904 - DNA, 25 bp, Homo sapien
taaaagccaatatggcaatatgctc

SEQ ID NO: 2065905 - DNA, 25 bp, Homo sapien
caaatggtttattgacctcagcaac

SEQ ID NO: 2065906 - DNA, 25 bp, Homo sapien
ctaagagggtctatcagcgtgtgtc

SEQ ID NO: 2065907 - DNA, 25 bp, Homo sapien
tcaccagtaagatttgcagcccgag

SEQ ID NO: 2065908 - DNA, 25 bp, Homo sapien
cattcctcatgcatctggttgaaca

SEQ ID NO: 2065909 - DNA, 25 bp, Homo sapien
gatggtttaagtaagtgagatcacc

SEQ ID NO: 2065910 - DNA, 25 bp, Homo sapien
ccaaaatgtattggacttgacaaag

SEQ ID NO: 2065911 - DNA, 25 bp, Homo sapien
gaaccaaaatgtattggacttgaca

SEQ ID NO: 2065912 - DNA, 25 bp, Homo sapien
aaagaaccaaaatgtattggacttg

SEQ ID NO: 2065913 - DNA, 25 bp, Homo sapien
accaaaatgtattggacttgacaaa

SEQ ID NO: 2065914 - DNA, 25 bp, Homo sapien
agccataaatcatggcagtaatgtg

SEQ ID NO: 2065915 - DNA, 25 bp, Homo sapien
tctacggtccacaacactatctaca

SEQ ID NO: 2065916 - DNA, 25 bp, Homo sapien
cactggtgacgtgtgtctatttagg

SEQ ID NO: 2065917 - DNA, 25 bp, Homo sapien
caaaacagctgacactggtgacgtg

SEQ ID NO: 2065918 - DNA, 25 bp, Homo sapien
ttcctccagctctacggtccacaac

SEQ ID NO: 2065919 - DNA, 25 bp, Homo sapien
actactgaagttccagacggtgaca

SEQ ID NO: 2065920 - DNA, 25 bp, Homo sapien
ctactgaagttccagacggtgacat

SEQ ID NO: 2065921 - DNA, 25 bp, Homo sapien
gggatggagtctgtgtaaactactg

SEQ ID NO: 2065922 - DNA, 25 bp, Homo sapien
gggaagggaggatattagtgcctgg

SEQ ID NO: 2065923 - DNA, 25 bp, Homo sapien
gtaagttattttggcccagcatgag

SEQ ID NO: 2065924 - DNA, 25 bp, Homo sapien
taggatggtaagttattttggccca

SEQ ID NO: 2065925 - DNA, 25 bp, Homo sapien
cattcacccatttagctgtggggag

SEQ ID NO: 2065926 - DNA, 25 bp, Homo sapien
gagactaggatggtaagttattttg

SEQ ID NO: 2065927 - DNA, 25 bp, Homo sapien
gaagtcaacatgtgtaaagcgcacg

SEQ ID NO: 2065928 - DNA, 25 bp, Homo sapien
ccaaggtcaggcgtggttcaacaat

SEQ ID NO: 2065929 - DNA, 25 bp, Homo sapien
aacattcatcttatgggctccggga

SEQ ID NO: 2065930 - DNA, 25 bp, Homo sapien
taattggaccagagggtgaacacct

SEQ ID NO: 2065931 - DNA, 25 bp, Homo sapien
aaatgacaccacaaacgtttcctgt

SEQ ID NO: 2065932 - DNA, 25 bp, Homo sapien
ttccggcatcctgtccggggacaga

SEQ ID NO: 2065933 - DNA, 25 bp, Homo sapien
gacaccacaaacgtttcctgtgcct

SEQ ID NO: 2065934 - DNA, 25 bp, Homo sapien
aatgacaccacaaacgtttcctgtg

SEQ ID NO: 2065935 - DNA, 25 bp, Homo sapien
gccctggtgccataggagccttcct

SEQ ID NO: 2065936 - DNA, 25 bp, Homo sapien
catcttgctatttgccctggtgcca

SEQ ID NO: 2065937 - DNA, 25 bp, Homo sapien
ctggtgccataggagccttcctttt

SEQ ID NO: 2065938 - DNA, 25 bp, Homo sapien
ttgccctggtgccataggagccttc

SEQ ID NO: 2065939 - DNA, 25 bp, Homo sapien
acacccacagatgcccccctgctgc

SEQ ID NO: 2065940 - DNA, 25 bp, Homo sapien
gttctgagccctgtgctgtctgcct

SEQ ID NO: 2065941 - DNA, 25 bp, Homo sapien
gacacccacagatgcccccctgctg

SEQ ID NO: 2065942 - DNA, 25 bp, Homo sapien
ttggttctgagccctgtgctgtctg

SEQ ID NO: 2065943 - DNA, 25 bp, Homo sapien
tggggggtgacaacaattcaggctc

SEQ ID NO: 2065944 - DNA, 25 bp, Homo sapien
caaagcacaggtaccgtttccattt

SEQ ID NO: 2065945 - DNA, 25 bp, Homo sapien
tgagttgctgctatggagacaaagc

SEQ ID NO: 2065946 - DNA, 25 bp, Homo sapien
ggctctttcagttgggtgccatcaa

SEQ ID NO: 2065947 - DNA, 25 bp, Homo sapien
caggttagataattaaactcaacct

SEQ ID NO: 2065948 - DNA, 25 bp, Homo sapien
taattaaactcaacctgttcctgca

SEQ ID NO: 2065949 - DNA, 25 bp, Homo sapien
ttctaatagagggtaattcaagcat

SEQ ID NO: 2065950 - DNA, 25 bp, Homo sapien
ggtaattcaagcatgtttgttggtg

SEQ ID NO: 2065951 - DNA, 25 bp, Homo sapien
tctcagaaccatggtcaaagtccaa

SEQ ID NO: 2065952 - DNA, 25 bp, Homo sapien
gaaagagtttggtgagttcaaatga

SEQ ID NO: 2065953 - DNA, 25 bp, Homo sapien
caaagtccaaaggtgagcttgagtt

SEQ ID NO: 2065954 - DNA, 25 bp, Homo sapien
ttgtctgaatcagcacaggataggg

SEQ ID NO: 2065955 - DNA, 25 bp, Homo sapien
ctgaccatgccacgatgggccagaa

SEQ ID NO: 2065956 - DNA, 25 bp, Homo sapien
ccatgccacgatgggccagaatagg

SEQ ID NO: 2065957 - DNA, 25 bp, Homo sapien
cgatgggccagaataggattcagga

SEQ ID NO: 2065958 - DNA, 25 bp, Homo sapien
tcatctgctgaccatgccacgatgg

SEQ ID NO: 2065959 - DNA, 25 bp, Homo sapien
taatgaccgtgaatgctatccaggg

SEQ ID NO: 2065960 - DNA, 25 bp, Homo sapien
tatgtcgatgtgatgctgaactcag

SEQ ID NO: 2065961 - DNA, 25 bp, Homo sapien
gctgacttcaaatgtctcccaagaa

SEQ ID NO: 2065962 - DNA, 25 bp, Homo sapien
caagaacaccatgagctaatgaccg

SEQ ID NO: 2065963 - DNA, 25 bp, Homo sapien
tcagcagcgatttagtggagtggtt

SEQ ID NO: 2065964 - DNA, 25 bp, Homo sapien
agggtatggatttcctgaactcgga

SEQ ID NO: 2065965 - DNA, 25 bp, Homo sapien
tttgtccctacaatgatccccatgc

SEQ ID NO: 2065966 - DNA, 25 bp, Homo sapien
gtacggtatcgttggcttgtgcttt

SEQ ID NO: 2065967 - DNA, 25 bp, Homo sapien
ttggcccacgcattgcaaggcccag

SEQ ID NO: 2065968 - DNA, 25 bp, Homo sapien
agttgcttggcccacgcattgcaag

SEQ ID NO: 2065969 - DNA, 25 bp, Homo sapien
ttgcttggcccacgcattgcaaggc

SEQ ID NO: 2065970 - DNA, 25 bp, Homo sapien
gcaagttgcttggcccacgcattgc

SEQ ID NO: 2065971 - DNA, 25 bp, Homo sapien
cacaatttgcattgcctcggcagct

SEQ ID NO: 2065972 - DNA, 25 bp, Homo sapien
ccacccacggtgtttgactcaatta

SEQ ID NO: 2065973 - DNA, 25 bp, Homo sapien
tctgctcccttgctacaatggtgaa

SEQ ID NO: 2065974 - DNA, 25 bp, Homo sapien
gactcaattacctcctgcagctgcg

SEQ ID NO: 2065975 - DNA, 25 bp, Homo sapien
ccagtcccattggcctgtatttcat

SEQ ID NO: 2065976 - DNA, 25 bp, Homo sapien
ggccccagtcccattggcctgtatt

SEQ ID NO: 2065977 - DNA, 25 bp, Homo sapien
tttaggccccagtcccattggcctg

SEQ ID NO: 2065978 - DNA, 25 bp, Homo sapien
ttaggccccagtcccattggcctgt

SEQ ID NO: 2065979 - DNA, 25 bp, Homo sapien
tgtcatgtacagactatgtttaggg

SEQ ID NO: 2065980 - DNA, 25 bp, Homo sapien
taaaagtttctttgctgtcatgtac

SEQ ID NO: 2065981 - DNA, 25 bp, Homo sapien
ctttgctgtcatgtacagactatgt

SEQ ID NO: 2065982 - DNA, 25 bp, Homo sapien
ttctaaaagtttctttgctgtcatg

SEQ ID NO: 2065983 - DNA, 25 bp, Homo sapien
tcagcttgaataagctgcttaggct

SEQ ID NO: 2065984 - DNA, 25 bp, Homo sapien
ggttgcatcagcttgaataagctgc

SEQ ID NO: 2065985 - DNA, 25 bp, Homo sapien
cactggttgcatcagcttgaataag

SEQ ID NO: 2065986 - DNA, 25 bp, Homo sapien
tgcatcagcttgaataagctgctta

SEQ ID NO: 2065987 - DNA, 25 bp, Homo sapien
cacaaccctactaagatgtctcctg

SEQ ID NO: 2065988 - DNA, 25 bp, Homo sapien
gggccacatctagcccacagataac

SEQ ID NO: 2065989 - DNA, 25 bp, Homo sapien
ctatgtccacaaccctactaagatg

SEQ ID NO: 2065990 - DNA, 25 bp, Homo sapien
tagcccacagataacctctatgtcc

SEQ ID NO: 2065991 - DNA, 25 bp, Homo sapien
tttaaacaatcaagaacacaagtaa

SEQ ID NO: 2065992 - DNA, 25 bp, Homo sapien
aatcaagaacacaagtaattgtcac

SEQ ID NO: 2065993 - DNA, 25 bp, Homo sapien
taaacaatcaagaacacaagtaatt

SEQ ID NO: 2065994 - DNA, 25 bp, Homo sapien
tcttttttaaacaatcaagaacaca

SEQ ID NO: 2065995 - DNA, 25 bp, Homo sapien
tgcaggtgcaaatcggcaatggcct

SEQ ID NO: 2065996 - DNA, 25 bp, Homo sapien
aatggaatcaacgaaacctgtgcac

SEQ ID NO: 2065997 - DNA, 25 bp, Homo sapien
tattctgggaaacacgtaggctgag

SEQ ID NO: 2065998 - DNA, 25 bp, Homo sapien
tcccaggtgtgaagaggtaattgca

SEQ ID NO: 2065999 - DNA, 25 bp, Homo sapien
tacttcagcataagatgtacataaa

SEQ ID NO: 2066000 - DNA, 25 bp, Homo sapien
taaagaaacactctttatatattcc

SEQ ID NO: 2066001 - DNA, 25 bp, Homo sapien
tgcattacttcagcataagatgtac

SEQ ID NO: 2066002 - DNA, 25 bp, Homo sapien
agaaacactctttatatattccacc

SEQ ID NO: 2066003 - DNA, 25 bp, Homo sapien
gagaatatagctcctcccagggtgg

SEQ ID NO: 2066004 - DNA, 25 bp, Homo sapien
ggctgcatagcaagaggccgtaaaa

SEQ ID NO: 2066005 - DNA, 25 bp, Homo sapien
tggttccagcagactaggtggctgc

SEQ ID NO: 2066006 - DNA, 25 bp, Homo sapien
gaatcccattggtgcagatgcagtg

SEQ ID NO: 2066007 - DNA, 25 bp, Homo sapien
gaacctgtgtgccactcttgcttgg

SEQ ID NO: 2066008 - DNA, 25 bp, Homo sapien
gagtcactgatgagacaaataggtg

SEQ ID NO: 2066009 - DNA, 25 bp, Homo sapien
tcttggctgttgactcccaggatca

SEQ ID NO: 2066010 - DNA, 25 bp, Homo sapien
gaacggttaataaagcagagtcact

SEQ ID NO: 2066011 - DNA, 25 bp, Homo sapien
gagggagatttttgcagacatggtg

SEQ ID NO: 2066012 - DNA, 25 bp, Homo sapien
gggagatttttgcagacatggtgga

SEQ ID NO: 2066013 - DNA, 25 bp, Homo sapien
tgagggagatttttgcagacatggt

SEQ ID NO: 2066014 - DNA, 25 bp, Homo sapien
gagatttttgcagacatggtggagc

SEQ ID NO: 2066015 - DNA, 25 bp, Homo sapien
tctggtgtttcaagctggctgtttc

SEQ ID NO: 2066016 - DNA, 25 bp, Homo sapien
gtttcaagaggccttactgatcttg

SEQ ID NO: 2066017 - DNA, 25 bp, Homo sapien
acaaatgcatccaaattctggtgtt

SEQ ID NO: 2066018 - DNA, 25 bp, Homo sapien
ccttactgatcttgacctggtgaga

SEQ ID NO: 2066019 - DNA, 25 bp, Homo sapien
tgctttcggtttttcagagatccca

SEQ ID NO: 2066020 - DNA, 25 bp, Homo sapien
ggagctgagagtttgctttcggttt

SEQ ID NO: 2066021 - DNA, 25 bp, Homo sapien
cgtcactataagtagcaggtggcca

SEQ ID NO: 2066022 - DNA, 25 bp, Homo sapien
ggtgatcagcccactcgtcactata

SEQ ID NO: 2066023 - DNA, 25 bp, Homo sapien
agttttaggcatttccgggatctgc

SEQ ID NO: 2066024 - DNA, 25 bp, Homo sapien
ttaggcatttccgggatctgctggt

SEQ ID NO: 2066025 - DNA, 25 bp, Homo sapien
ttttaggcatttccgggatctgctg

SEQ ID NO: 2066026 - DNA, 25 bp, Homo sapien
aagttttaggcatttccgggatctg

SEQ ID NO: 2066027 - DNA, 25 bp, Homo sapien
tgagccaccgcgcttggcctcccac

SEQ ID NO: 2066028 - DNA, 25 bp, Homo sapien
ttccatattgaaacctctccctcat

SEQ ID NO: 2066029 - DNA, 25 bp, Homo sapien
ttctcccctccttcatggaaatttc

SEQ ID NO: 2066030 - DNA, 25 bp, Homo sapien
ctccttcatggaaatttccatattg

SEQ ID NO: 2066031 - DNA, 25 bp, Homo sapien
tttccatattgaaacctctccctca

SEQ ID NO: 2066032 - DNA, 25 bp, Homo sapien
tatcatgctctgtaggataccccag

SEQ ID NO: 2066033 - DNA, 25 bp, Homo sapien
cctctggagggctaaagtatcattt

SEQ ID NO: 2066034 - DNA, 25 bp, Homo sapien
ttagttgctcacacatacccttggg

SEQ ID NO: 2066035 - DNA, 25 bp, Homo sapien
ttctcggatagggaggcaggcaacc

SEQ ID NO: 2066036 - DNA, 25 bp, Homo sapien
tgttatgaagcgctcagctaccgcg

SEQ ID NO: 2066037 - DNA, 25 bp, Homo sapien
caagagcaatattggagacatcccc

SEQ ID NO: 2066038 - DNA, 25 bp, Homo sapien
gaatgttctgccaaacagccgacca

SEQ ID NO: 2066039 - DNA, 25 bp, Homo sapien
ttaatagtcaacagaggcaaccaga

SEQ ID NO: 2066040 - DNA, 25 bp, Homo sapien
tattgctacagaacggtcatgtaca

SEQ ID NO: 2066041 - DNA, 25 bp, Homo sapien
acatttattgctacagaacggtcat

SEQ ID NO: 2066042 - DNA, 25 bp, Homo sapien
tttattgctacagaacggtcatgta

SEQ ID NO: 2066043 - DNA, 25 bp, Homo sapien
catttattgctacagaacggtcatg

SEQ ID NO: 2066044 - DNA, 25 bp, Homo sapien
gacttcatcgaataactacagatgg

SEQ ID NO: 2066045 - DNA, 25 bp, Homo sapien
taatggccttgaccaagctgggttt

SEQ ID NO: 2066046 - DNA, 25 bp, Homo sapien
cacaacctgtttggacacttctaca

SEQ ID NO: 2066047 - DNA, 25 bp, Homo sapien
tgaaaaaatcgaggcactcagccac

SEQ ID NO: 2066048 - DNA, 25 bp, Homo sapien
tcttggtaacacatggtaaaataac

SEQ ID NO: 2066049 - DNA, 25 bp, Homo sapien
cgctgcgacctacaactaaaaacaa

SEQ ID NO: 2066050 - DNA, 25 bp, Homo sapien
agtcgcaaaaaatttccccgctgcg

SEQ ID NO: 2066051 - DNA, 25 bp, Homo sapien
gctgcagctatgtgtacagtcgcaa

SEQ ID NO: 2066052 - DNA, 25 bp, Homo sapien
tgagtccacttcaagtcccatgaga

SEQ ID NO: 2066053 - DNA, 25 bp, Homo sapien
aagagatccccagcctaagtgtcgt

SEQ ID NO: 2066054 - DNA, 25 bp, Homo sapien
tagcgagcagctttcagtggccgtt

SEQ ID NO: 2066055 - DNA, 25 bp, Homo sapien
tacagatagcgtagtatggaccctt

SEQ ID NO: 2066056 - DNA, 25 bp, Homo sapien
ttgtgcccagacgtcaaagctagct

SEQ ID NO: 2066057 - DNA, 25 bp, Homo sapien
ttttcagacgaaggaggaggcagtt

SEQ ID NO: 2066058 - DNA, 25 bp, Homo sapien
taatattgttcctagggatacccgc

SEQ ID NO: 2066059 - DNA, 25 bp, Homo sapien
gatgagtcgctgtgccatagcttga

SEQ ID NO: 2066060 - DNA, 25 bp, Homo sapien
gaaagattgccgttcagtctctggg

SEQ ID NO: 2066061 - DNA, 25 bp, Homo sapien
tacagctgttaaggaagtggtctct

SEQ ID NO: 2066062 - DNA, 25 bp, Homo sapien
gatatgttaaagaaagtcgtccctc

SEQ ID NO: 2066063 - DNA, 25 bp, Homo sapien
aatgctgaaacctcttgcgtctgcg

SEQ ID NO: 2066064 - DNA, 25 bp, Homo sapien
gaaagaaaatatctgtcaatttggg

SEQ ID NO: 2066065 - DNA, 25 bp, Homo sapien
aaatatctgtcaatttgggtgaaat

SEQ ID NO: 2066066 - DNA, 25 bp, Homo sapien
tatttgtaacagaaaaagtatgctt

SEQ ID NO: 2066067 - DNA, 25 bp, Homo sapien
atctgtcaatttgggtgaaattcac

SEQ ID NO: 2066068 - DNA, 25 bp, Homo sapien
ttatggctgatacactgatgagagt

SEQ ID NO: 2066069 - DNA, 25 bp, Homo sapien
ttttatggctgatacactgatgaga

SEQ ID NO: 2066070 - DNA, 25 bp, Homo sapien
tgatcgatctcagaaatggctgaaa

SEQ ID NO: 2066071 - DNA, 25 bp, Homo sapien
gagagttttgaatgatcgatctcag

SEQ ID NO: 2066072 - DNA, 25 bp, Homo sapien
tctgtcccatgtgattcgatgcgtc

SEQ ID NO: 2066073 - DNA, 25 bp, Homo sapien
cagacacgcagctttcggattcaga

SEQ ID NO: 2066074 - DNA, 25 bp, Homo sapien
gtgtgggccggccaaggagagaggg

SEQ ID NO: 2066075 - DNA, 25 bp, Homo sapien
tgattcgatgcgtctcccattccag

SEQ ID NO: 2066076 - DNA, 25 bp, Homo sapien
ctctttgaaagcctcgttgatgtca

SEQ ID NO: 2066077 - DNA, 25 bp, Homo sapien
aggatgacggccaccgcctggtgga

SEQ ID NO: 2066078 - DNA, 25 bp, Homo sapien
tgtcaggtcctcatcgtcattattg

SEQ ID NO: 2066079 - DNA, 25 bp, Homo sapien
gctctcgggcattgttggccatcct

SEQ ID NO: 2066080 - DNA, 25 bp, Homo sapien
catatgttgcataaccacgcttcaa

SEQ ID NO: 2066081 - DNA, 25 bp, Homo sapien
cagggtgtgcccatactgatacagg

SEQ ID NO: 2066082 - DNA, 25 bp, Homo sapien
gggaacttttccatcttatgccatg

SEQ ID NO: 2066083 - DNA, 25 bp, Homo sapien
ctgtgggacaaaagggatgcaacat

SEQ ID NO: 2066084 - DNA, 25 bp, Homo sapien
tatatgtaagacaccagagcaatgg

SEQ ID NO: 2066085 - DNA, 25 bp, Homo sapien
gggttcaaatattccaagggctgtc

SEQ ID NO: 2066086 - DNA, 25 bp, Homo sapien
gaagtgtgcacgacgtcttgtctca

SEQ ID NO: 2066087 - DNA, 25 bp, Homo sapien
tatgaggaagtcgtcacagcagcag

SEQ ID NO: 2066088 - DNA, 25 bp, Homo sapien
caaagattttcaggctaacgaccaa

SEQ ID NO: 2066089 - DNA, 25 bp, Homo sapien
tagcgtaagcgcctttccagatggc

SEQ ID NO: 2066090 - DNA, 25 bp, Homo sapien
cactgtctgccacaggtgtgtatgg

SEQ ID NO: 2066091 - DNA, 25 bp, Homo sapien
ggcctgtccggaagctgagcatttg

SEQ ID NO: 2066092 - DNA, 25 bp, Homo sapien
tcgtcatcggatttgatctcagagc

SEQ ID NO: 2066093 - DNA, 25 bp, Homo sapien
tcttgcaggttctcatcaccctcgt

SEQ ID NO: 2066094 - DNA, 25 bp, Homo sapien
gaggagacactctgcccctgtagtc

SEQ ID NO: 2066095 - DNA, 25 bp, Homo sapien
tccgaagatttcgtgtcttgcaggt

SEQ ID NO: 2066096 - DNA, 25 bp, Homo sapien
tcaggtcaggggaagtcgcagactg

SEQ ID NO: 2066097 - DNA, 25 bp, Homo sapien
agctgtggaaccggaacctggtttg

SEQ ID NO: 2066098 - DNA, 25 bp, Homo sapien
ccggaacctggtttggcagaagaga

SEQ ID NO: 2066099 - DNA, 25 bp, Homo sapien
acgccatcttcacgatgggtcccca

SEQ ID NO: 2066100 - DNA, 25 bp, Homo sapien
tgcagtggagcgcactgattcgtac

SEQ ID NO: 2066101 - DNA, 25 bp, Homo sapien
ccagggtgctgcagtggagcgcact

SEQ ID NO: 2066102 - DNA, 25 bp, Homo sapien
gggtgctgcagtggagcgcactgat

SEQ ID NO: 2066103 - DNA, 25 bp, Homo sapien
tgctgcagtggagcgcactgattcg

SEQ ID NO: 2066104 - DNA, 25 bp, Homo sapien
gtccgccaacagatctgacaattat

SEQ ID NO: 2066105 - DNA, 25 bp, Homo sapien
tgtgagcttctcaattcccccattg

SEQ ID NO: 2066106 - DNA, 25 bp, Homo sapien
tgacaattatcttaatgcccatatg

SEQ ID NO: 2066107 - DNA, 25 bp, Homo sapien
taatgcccatatgcttaattgtgag

SEQ ID NO: 2066108 - DNA, 25 bp, Homo sapien
taaaatgtcacctggctttccaaaa

SEQ ID NO: 2066109 - DNA, 25 bp, Homo sapien
aatgtcacctggctttccaaaactg

SEQ ID NO: 2066110 - DNA, 25 bp, Homo sapien
tcacctggctttccaaaactggcag

SEQ ID NO: 2066111 - DNA, 25 bp, Homo sapien
ataataaaatgtcacctggctttcc

SEQ ID NO: 2066112 - DNA, 25 bp, Homo sapien
aatgccaccacaccggaaaatgtac

SEQ ID NO: 2066113 - DNA, 25 bp, Homo sapien
atcagctgctgagttccaaatccaa

SEQ ID NO: 2066114 - DNA, 25 bp, Homo sapien
gctgctgagttccaaatccaaaggg

SEQ ID NO: 2066115 - DNA, 25 bp, Homo sapien
ggtttctgccaatgccaccacaccg

SEQ ID NO: 2066116 - DNA, 25 bp, Homo sapien
cattgccatgcaaggaaggatgttt

SEQ ID NO: 2066117 - DNA, 25 bp, Homo sapien
gacattgaacttgtggcactgagac

SEQ ID NO: 2066118 - DNA, 25 bp, Homo sapien
tagcacatgccttcaagcgaaaaca

SEQ ID NO: 2066119 - DNA, 25 bp, Homo sapien
catgaagcatttgtcaactaagagg

SEQ ID NO: 2066120 - DNA, 25 bp, Homo sapien
aatgtactgagactgatatctccca

SEQ ID NO: 2066121 - DNA, 25 bp, Homo sapien
gctctgtggcgttaagtacaaacct

SEQ ID NO: 2066122 - DNA, 25 bp, Homo sapien
agacaacacttgaggcttatgagcc

SEQ ID NO: 2066123 - DNA, 25 bp, Homo sapien
tctgaatggtggttatttggcctct

SEQ ID NO: 2066124 - DNA, 25 bp, Homo sapien
ctaaataattcttcgtgctgattca

SEQ ID NO: 2066125 - DNA, 25 bp, Homo sapien
gagcatagaggagaagtgtactcct

SEQ ID NO: 2066126 - DNA, 25 bp, Homo sapien
gaaggtaaccacagatttgagcata

SEQ ID NO: 2066127 - DNA, 25 bp, Homo sapien
tatttatttgtattcccaatggatc

SEQ ID NO: 2066128 - DNA, 25 bp, Homo sapien
aataatagcctgtgtagttcaagaa

SEQ ID NO: 2066129 - DNA, 25 bp, Homo sapien
tcagttacggtgatctttgtctcta

SEQ ID NO: 2066130 - DNA, 25 bp, Homo sapien
aatagcctgtgtagttcaagaaccc

SEQ ID NO: 2066131 - DNA, 25 bp, Homo sapien
agaaccccctcaaaactcaagctat

SEQ ID NO: 2066132 - DNA, 25 bp, Homo sapien
gagctggggcatccaatgatcttgg

SEQ ID NO: 2066133 - DNA, 25 bp, Homo sapien
aaatacgtcataatgtgactaggag

SEQ ID NO: 2066134 - DNA, 25 bp, Homo sapien
aaaggagattcccacaagtcaattc

SEQ ID NO: 2066135 - DNA, 25 bp, Homo sapien
gacccatgtctgcttcaaaatgagc

SEQ ID NO: 2066136 - DNA, 25 bp, Homo sapien
atgacaggcattttcccggtccaga

SEQ ID NO: 2066137 - DNA, 25 bp, Homo sapien
tgacaggcattttcccggtccagag

SEQ ID NO: 2066138 - DNA, 25 bp, Homo sapien
tcttccttgctccacatagcaggct

SEQ ID NO: 2066139 - DNA, 25 bp, Homo sapien
tctgaatgcctgaagtgcaagcata

SEQ ID NO: 2066140 - DNA, 25 bp, Homo sapien
taaagttaatccatcctagtgaacc

SEQ ID NO: 2066141 - DNA, 25 bp, Homo sapien
tgaaccaaacatatctagcacagag

SEQ ID NO: 2066142 - DNA, 25 bp, Homo sapien
ctgtgagagtgcacagtcatgctgc

SEQ ID NO: 2066143 - DNA, 25 bp, Homo sapien
tgtgagagtgcacagtcatgctgct

SEQ ID NO: 2066144 - DNA, 25 bp, Homo sapien
gcccatccctaaggatccctaggga

SEQ ID NO: 2066145 - DNA, 25 bp, Homo sapien
gtccaggtggcccatccctaaggat

SEQ ID NO: 2066146 - DNA, 25 bp, Homo sapien
gggttaacgcccacatcactaaggc

SEQ ID NO: 2066147 - DNA, 25 bp, Homo sapien
tgtatggatccagtctaagaggtcc

SEQ ID NO: 2066148 - DNA, 25 bp, Homo sapien
aagaggtccaccttgtgctgatgca

SEQ ID NO: 2066149 - DNA, 25 bp, Homo sapien
tagactcccaggaccaatgcagttc

SEQ ID NO: 2066150 - DNA, 25 bp, Homo sapien
cattgttgaatggtgcagggcataa

SEQ ID NO: 2066151 - DNA, 25 bp, Homo sapien
gcacaggtcactgcacgggagtgta

SEQ ID NO: 2066152 - DNA, 25 bp, Homo sapien
gttttgctgccattcgtaaagccta

SEQ ID NO: 2066153 - DNA, 25 bp, Homo sapien
tgggcatcccatcccaaggacagga

SEQ ID NO: 2066154 - DNA, 25 bp, Homo sapien
tgctttgttgcccagaaaggagtgc

SEQ ID NO: 2066155 - DNA, 25 bp, Homo sapien
ttgtgatcctcccgccttggcttcc

SEQ ID NO: 2066156 - DNA, 25 bp, Homo sapien
cagtggcatgatcttggctcactgc

SEQ ID NO: 2066157 - DNA, 25 bp, Homo sapien
ttacaggcgtgcacctttacgccca

SEQ ID NO: 2066158 - DNA, 25 bp, Homo sapien
ccttggaagatatagtcagttatgg

SEQ ID NO: 2066159 - DNA, 25 bp, Homo sapien
tacgggtcttgccaagtcgggtctc

SEQ ID NO: 2066160 - DNA, 25 bp, Homo sapien
gctaattattcacttgagggctggc

SEQ ID NO: 2066161 - DNA, 25 bp, Homo sapien
aacacccaaaggagactagagcgcc

SEQ ID NO: 2066162 - DNA, 25 bp, Homo sapien
cagagcaaggcattctggacaagcc

SEQ ID NO: 2066163 - DNA, 25 bp, Homo sapien
gaggttgctaatctgctctccgaaa

SEQ ID NO: 2066164 - DNA, 25 bp, Homo sapien
tgatgttgaccaccaatagcttggg

SEQ ID NO: 2066165 - DNA, 25 bp, Homo sapien
tcagtttggttccaccagagcaagg

SEQ ID NO: 2066166 - DNA, 25 bp, Homo sapien
aggcttcaaatgctgagctaaggaa

SEQ ID NO: 2066167 - DNA, 25 bp, Homo sapien
ttgttgcagattggaagagctcaac

SEQ ID NO: 2066168 - DNA, 25 bp, Homo sapien
tgaattctggtaatatgcccagcct

SEQ ID NO: 2066169 - DNA, 25 bp, Homo sapien
tcaacataaggctttcggtaaatgg

SEQ ID NO: 2066170 - DNA, 25 bp, Homo sapien
tatcaaatggtcaaaggctaacttc

SEQ ID NO: 2066171 - DNA, 25 bp, Homo sapien
ggagttacgctatgatctgcttggc

SEQ ID NO: 2066172 - DNA, 25 bp, Homo sapien
aatagtctctgaagcaatgccctgg

SEQ ID NO: 2066173 - DNA, 25 bp, Homo sapien
taaaattcataccagtttgcacggg

SEQ ID NO: 2066174 - DNA, 25 bp, Homo sapien
tgggaccatgcttaaacgagaaatg

SEQ ID NO: 2066175 - DNA, 25 bp, Homo sapien
cttaaaagaacctcataataatttg

SEQ ID NO: 2066176 - DNA, 25 bp, Homo sapien
tgcttaaacgagaaatgctacagtg

SEQ ID NO: 2066177 - DNA, 25 bp, Homo sapien
cttttgggaccatgcttaaacgaga

SEQ ID NO: 2066178 - DNA, 25 bp, Homo sapien
ggcaaaataggacactaaggtgctt

SEQ ID NO: 2066179 - DNA, 25 bp, Homo sapien
tgcttagagacgaggtagagcttgt

SEQ ID NO: 2066180 - DNA, 25 bp, Homo sapien
tagagcttgtgaggatcagaactac

SEQ ID NO: 2066181 - DNA, 25 bp, Homo sapien
gagaatcactggtcaagttacattc

SEQ ID NO: 2066182 - DNA, 25 bp, Homo sapien
taaagctctaatacgtggcaaactg

SEQ ID NO: 2066183 - DNA, 25 bp, Homo sapien
tatctcccagactcagaattgacag

SEQ ID NO: 2066184 - DNA, 25 bp, Homo sapien
catagccaaggagttggaacaaccc

SEQ ID NO: 2066185 - DNA, 25 bp, Homo sapien
tcatcctcaagggaaacatgtgtct

SEQ ID NO: 2066186 - DNA, 25 bp, Homo sapien
ctatagagtctataaatttcatcac

SEQ ID NO: 2066187 - DNA, 25 bp, Homo sapien
ttctaactctatatgataactatag

SEQ ID NO: 2066188 - DNA, 25 bp, Homo sapien
actatagagtctataaatttcatca

SEQ ID NO: 2066189 - DNA, 25 bp, Homo sapien
tatatgataactatagagtctataa

SEQ ID NO: 2066190 - DNA, 25 bp, Homo sapien
gagaacatgaatagcatcatccagt

SEQ ID NO: 2066191 - DNA, 25 bp, Homo sapien
ccatgaccaccaggcatagctgtgg

SEQ ID NO: 2066192 - DNA, 25 bp, Homo sapien
ggctccattatgagaaggtccaatg

SEQ ID NO: 2066193 - DNA, 25 bp, Homo sapien
gcccactgcatggttccggagaaca

SEQ ID NO: 2066194 - DNA, 25 bp, Homo sapien
taatacaaatagtgttgtttccaga

SEQ ID NO: 2066195 - DNA, 25 bp, Homo sapien
tacatgtgctatatacggtactgcc

SEQ ID NO: 2066196 - DNA, 25 bp, Homo sapien
ttaaggaactttctggcaggtatta

SEQ ID NO: 2066197 - DNA, 25 bp, Homo sapien
tttagtcgacaaaaaacacactgtg

SEQ ID NO: 2066198 - DNA, 25 bp, Homo sapien
caaatcagagacagggaaaagcaaa

SEQ ID NO: 2066199 - DNA, 25 bp, Homo sapien
gtttttcacaactagacaatgcgta

SEQ ID NO: 2066200 - DNA, 25 bp, Homo sapien
tgatatcaaataccactctccagtg

SEQ ID NO: 2066201 - DNA, 25 bp, Homo sapien
tggtatgcgtgtaagggcctcaaaa

SEQ ID NO: 2066202 - DNA, 25 bp, Homo sapien
gacattatgattccttccgtacaga

SEQ ID NO: 2066203 - DNA, 25 bp, Homo sapien
taagggtccttcataattaggagac

SEQ ID NO: 2066204 - DNA, 25 bp, Homo sapien
ttcataattaggagacgatgaggcc

SEQ ID NO: 2066205 - DNA, 25 bp, Homo sapien
aattaggagacgatgaggcctgtcc

SEQ ID NO: 2066206 - DNA, 25 bp, Homo sapien
caaagagtgtaagggtccttcataa

SEQ ID NO: 2066207 - DNA, 25 bp, Homo sapien
ccatttctagaccaaacagctgtgc

SEQ ID NO: 2066208 - DNA, 25 bp, Homo sapien
tccatttctagaccaaacagctgtg

SEQ ID NO: 2066209 - DNA, 25 bp, Homo sapien
attaaagtgggaattacaatcagat

SEQ ID NO: 2066210 - DNA, 25 bp, Homo sapien
atattaaagtgggaattacaatcag

SEQ ID NO: 2066211 - DNA, 25 bp, Homo sapien
ctgatattaaagtgggaattacaat

SEQ ID NO: 2066212 - DNA, 25 bp, Homo sapien
tgatattaaagtgggaattacaatc

SEQ ID NO: 2066213 - DNA, 25 bp, Homo sapien
tgtaaaaagacgcttgccaatattt

SEQ ID NO: 2066214 - DNA, 25 bp, Homo sapien
catgtaaaaagacgcttgccaatat

SEQ ID NO: 2066215 - DNA, 25 bp, Homo sapien
agacacatgtaaaaagacgcttgcc

SEQ ID NO: 2066216 - DNA, 25 bp, Homo sapien
cacatgtaaaaagacgcttgccaat

SEQ ID NO: 2066217 - DNA, 25 bp, Homo sapien
cagaatttggacagagccgtcggtg

SEQ ID NO: 2066218 - DNA, 25 bp, Homo sapien
cagagccgtcggtgtgaaaatagca

SEQ ID NO: 2066219 - DNA, 25 bp, Homo sapien
gccgtcggtgtgaaaatagcaatct

SEQ ID NO: 2066220 - DNA, 25 bp, Homo sapien
gtgtgaaaatagcaatctgtcccca

SEQ ID NO: 2066221 - DNA, 25 bp, Homo sapien
tatctggtaatttgtctctcccacc

SEQ ID NO: 2066222 - DNA, 25 bp, Homo sapien
tgtctgttataggaatgttaaagct

SEQ ID NO: 2066223 - DNA, 25 bp, Homo sapien
cctacaaaatcaggaagtacaaggg

SEQ ID NO: 2066224 - DNA, 25 bp, Homo sapien
tgtaaacgactatactgttatctgg

SEQ ID NO: 2066225 - DNA, 25 bp, Homo sapien
gaagggtttgatgaaaagctgttgt

SEQ ID NO: 2066226 - DNA, 25 bp, Homo sapien
gagttgaagggtttgatgaaaagct

SEQ ID NO: 2066227 - DNA, 25 bp, Homo sapien
gttgaagggtttgatgaaaagctgt

SEQ ID NO: 2066228 - DNA, 25 bp, Homo sapien
tgaagggtttgatgaaaagctgttg

SEQ ID NO: 2066229 - DNA, 25 bp, Homo sapien
gaatattcccacatccataattgag

SEQ ID NO: 2066230 - DNA, 25 bp, Homo sapien
tccagtgactgttatgcaagaaagc

SEQ ID NO: 2066231 - DNA, 25 bp, Homo sapien
cataattgagtgcagcttagtacca

SEQ ID NO: 2066232 - DNA, 25 bp, Homo sapien
ctatatactggaagcttcagagcct

SEQ ID NO: 2066233 - DNA, 25 bp, Homo sapien
tctccagtctgggagctgccggctg

SEQ ID NO: 2066234 - DNA, 25 bp, Homo sapien
ccggctgccccgcttcctctatttg

SEQ ID NO: 2066235 - DNA, 25 bp, Homo sapien
gaagcaagtgctttccccagagcat

SEQ ID NO: 2066236 - DNA, 25 bp, Homo sapien
cagagcatctccagtctgggagctg

SEQ ID NO: 2066237 - DNA, 25 bp, Homo sapien
ccactgggagcagctcagatatcaa

SEQ ID NO: 2066238 - DNA, 25 bp, Homo sapien
tctggcacatgataagaagaacaca

SEQ ID NO: 2066239 - DNA, 25 bp, Homo sapien
ggtgcccagccgataatgttttgat

SEQ ID NO: 2066240 - DNA, 25 bp, Homo sapien
tgacatcatacaattggaccactgg

SEQ ID NO: 2066241 - DNA, 25 bp, Homo sapien
ctacagataatatctgctacagtag

SEQ ID NO: 2066242 - DNA, 25 bp, Homo sapien
ttcactacagataatatctgctaca

SEQ ID NO: 2066243 - DNA, 25 bp, Homo sapien
tgcttcactacagataatatctgct

SEQ ID NO: 2066244 - DNA, 25 bp, Homo sapien
cactacagataatatctgctacagt

SEQ ID NO: 2066245 - DNA, 25 bp, Homo sapien
gaagttgggcttcctgatcgtgcac

SEQ ID NO: 2066246 - DNA, 25 bp, Homo sapien
gattttaccttgcaacagctggagt

SEQ ID NO: 2066247 - DNA, 25 bp, Homo sapien
cacactgtgtttgcctgagagaaga

SEQ ID NO: 2066248 - DNA, 25 bp, Homo sapien
aaggtgctgatgctggtaactccca

SEQ ID NO: 2066249 - DNA, 25 bp, Homo sapien
tacagagaggttcccttccgagagt

SEQ ID NO: 2066250 - DNA, 25 bp, Homo sapien
taacatgacactgagacgaagggca

SEQ ID NO: 2066251 - DNA, 25 bp, Homo sapien
ccgctagtggattttgacaagtgca

SEQ ID NO: 2066252 - DNA, 25 bp, Homo sapien
cacctttgagatgcagagaacagaa

SEQ ID NO: 2066253 - DNA, 25 bp, Homo sapien
gaagaggtgctgtaatggtttgtac

SEQ ID NO: 2066254 - DNA, 25 bp, Homo sapien
tatactgtctgtcccgttggcagga

SEQ ID NO: 2066255 - DNA, 25 bp, Homo sapien
ccactacgatggaaagtggacatcg

SEQ ID NO: 2066256 - DNA, 25 bp, Homo sapien
gaggaagactggaattgatgtctgc

SEQ ID NO: 2066257 - DNA, 25 bp, Homo sapien
caaacgttcatgtggatgcaggcta

SEQ ID NO: 2066258 - DNA, 25 bp, Homo sapien
ctgtggaatatgagaagagttgccc

SEQ ID NO: 2066259 - DNA, 25 bp, Homo sapien
ggagctccaagggtcactgctgtga

SEQ ID NO: 2066260 - DNA, 25 bp, Homo sapien
gattcatcccactggaggagctcca

SEQ ID NO: 2066261 - DNA, 25 bp, Homo sapien
taaaccttcagtagcaatccaaagg

SEQ ID NO: 2066262 - DNA, 25 bp, Homo sapien
cattctctgggcctattggcctaca

SEQ ID NO: 2066263 - DNA, 25 bp, Homo sapien
aaacatgccctaggtagctattata

SEQ ID NO: 2066264 - DNA, 25 bp, Homo sapien
tactaggtatacactaggccatcag

SEQ ID NO: 2066265 - DNA, 25 bp, Homo sapien
taacacagagtactctgcttgatgc

SEQ ID NO: 2066266 - DNA, 25 bp, Homo sapien
taaatagatggcacatatgacaaat

SEQ ID NO: 2066267 - DNA, 25 bp, Homo sapien
atgcgtttaggactgttaacacaga

SEQ ID NO: 2066268 - DNA, 25 bp, Homo sapien
tatcactaaacaagagtctcctgac

SEQ ID NO: 2066269 - DNA, 25 bp, Homo sapien
gagttacacctaggacgggtcacaa

SEQ ID NO: 2066270 - DNA, 25 bp, Homo sapien
cgggctctattatgcgtggaacaaa

SEQ ID NO: 2066271 - DNA, 25 bp, Homo sapien
aaaggacttctgacacacgggctct

SEQ ID NO: 2066272 - DNA, 25 bp, Homo sapien
taaaagagctaacacactgaaggga

SEQ ID NO: 2066273 - DNA, 25 bp, Homo sapien
ccctattgtagtcggcagtgcttgc

SEQ ID NO: 2066274 - DNA, 25 bp, Homo sapien
cagtgcttgctgatggagcatagac

SEQ ID NO: 2066275 - DNA, 25 bp, Homo sapien
ggagctagggaaagtgctggttgct

SEQ ID NO: 2066276 - DNA, 25 bp, Homo sapien
ggaaggatagcctggcgagtcccta

SEQ ID NO: 2066277 - DNA, 25 bp, Homo sapien
aggagaaagaaccaactgagttttg

SEQ ID NO: 2066278 - DNA, 25 bp, Homo sapien
tgcattgaccacagcagcccaagct

SEQ ID NO: 2066279 - DNA, 25 bp, Homo sapien
ctgaggagaaagaaccaactgagtt

SEQ ID NO: 2066280 - DNA, 25 bp, Homo sapien
agaaagaaccaactgagttttgctt

SEQ ID NO: 2066281 - DNA, 25 bp, Homo sapien
gaaacaaaggtatgcctcctactct

SEQ ID NO: 2066282 - DNA, 25 bp, Homo sapien
actggtcttggcatatcggtttcac

SEQ ID NO: 2066283 - DNA, 25 bp, Homo sapien
taagaagctctcatttttactggtc

SEQ ID NO: 2066284 - DNA, 25 bp, Homo sapien
ttactatggtacattagctgttcca

SEQ ID NO: 2066285 - DNA, 25 bp, Homo sapien
catcatcacaaaaaggtctaccggg

SEQ ID NO: 2066286 - DNA, 25 bp, Homo sapien
taacaatgggtctagaaagctgctg

SEQ ID NO: 2066287 - DNA, 25 bp, Homo sapien
tactagaaatcacccagctctggag

SEQ ID NO: 2066288 - DNA, 25 bp, Homo sapien
gaaactagaatggaacctggcacag

SEQ ID NO: 2066289 - DNA, 25 bp, Homo sapien
tttcacatctactgccctctgtctt

SEQ ID NO: 2066290 - DNA, 25 bp, Homo sapien
acagtgcaggtgaacagtccaagac

SEQ ID NO: 2066291 - DNA, 25 bp, Homo sapien
gtgaaaggacttacgccagggcctg

SEQ ID NO: 2066292 - DNA, 25 bp, Homo sapien
tccaagtgatggttaaagggcgatc

SEQ ID NO: 2066293 - DNA, 25 bp, Homo sapien
taatgcactgtaaggcgtcaaggca

SEQ ID NO: 2066294 - DNA, 25 bp, Homo sapien
caatgggttgcccaaagcaagcacc

SEQ ID NO: 2066295 - DNA, 25 bp, Homo sapien
taaatactacggactccttaggagc

SEQ ID NO: 2066296 - DNA, 25 bp, Homo sapien
tgaagggaagtatacatcatgcacc

SEQ ID NO: 2066297 - DNA, 25 bp, Homo sapien
tatgaattatccaggtcgtatcccc

SEQ ID NO: 2066298 - DNA, 25 bp, Homo sapien
ttcttcatcccgttggcctacactg

SEQ ID NO: 2066299 - DNA, 25 bp, Homo sapien
tctttctgttcttcatcccgttggc

SEQ ID NO: 2066300 - DNA, 25 bp, Homo sapien
ctgttcttcatcccgttggcctaca

SEQ ID NO: 2066301 - DNA, 25 bp, Homo sapien
ctttctgttcttcatcccgttggcc

SEQ ID NO: 2066302 - DNA, 25 bp, Homo sapien
ttcactccattaggcattgtgctgg

SEQ ID NO: 2066303 - DNA, 25 bp, Homo sapien
tgcattctgtaacgtgctgtcaggg

SEQ ID NO: 2066304 - DNA, 25 bp, Homo sapien
tttgtttaacagagcgcatagagtc

SEQ ID NO: 2066305 - DNA, 25 bp, Homo sapien
ggaaagtagttagctcctctccaag

SEQ ID NO: 2066306 - DNA, 25 bp, Homo sapien
caatagtagaccctcccttggcata

SEQ ID NO: 2066307 - DNA, 25 bp, Homo sapien
cactgtgcatgggagatgagtctcc

SEQ ID NO: 2066308 - DNA, 25 bp, Homo sapien
gagccacagtaatgaggagtacccc

SEQ ID NO: 2066309 - DNA, 25 bp, Homo sapien
gttgctgggtaacattcaaagtgcc

SEQ ID NO: 2066310 - DNA, 25 bp, Homo sapien
gagggatgaaattgcaggtcttgcc

SEQ ID NO: 2066311 - DNA, 25 bp, Homo sapien
ttggccccttgagagggatgaaatt

SEQ ID NO: 2066312 - DNA, 25 bp, Homo sapien
tcttgccgggctgctaagtgcacag

SEQ ID NO: 2066313 - DNA, 25 bp, Homo sapien
gaaaaacaagtgtatgtggctccag

SEQ ID NO: 2066314 - DNA, 25 bp, Homo sapien
tcaattaatactccagaatgcacag

SEQ ID NO: 2066315 - DNA, 25 bp, Homo sapien
tcccactccaaagatacagaggtga

SEQ ID NO: 2066316 - DNA, 25 bp, Homo sapien
tttaggagcaactgggcacaccttc

SEQ ID NO: 2066317 - DNA, 25 bp, Homo sapien
taccaatgcttacgatttcctctgc

SEQ ID NO: 2066318 - DNA, 25 bp, Homo sapien
gaggtgtctggtgttaaatgccaaa

SEQ ID NO: 2066319 - DNA, 25 bp, Homo sapien
cttctcaaacgacaggcatgaaaga

SEQ ID NO: 2066320 - DNA, 25 bp, Homo sapien
ctgaaagcaacttctcaaacgacag

SEQ ID NO: 2066321 - DNA, 25 bp, Homo sapien
agaggtgtctggtgttaaatgccaa

SEQ ID NO: 2066322 - DNA, 25 bp, Homo sapien
cagccacagttttaactttcctgta

SEQ ID NO: 2066323 - DNA, 25 bp, Homo sapien
agctttactccctgggttgcaaagg

SEQ ID NO: 2066324 - DNA, 25 bp, Homo sapien
aacatggcatcataccagccacagt

SEQ ID NO: 2066325 - DNA, 25 bp, Homo sapien
tttgcaaaatcatgagaattttcaa

SEQ ID NO: 2066326 - DNA, 25 bp, Homo sapien
cctccaagcctgcatgaagagcatt

SEQ ID NO: 2066327 - DNA, 25 bp, Homo sapien
gagcattggctgttgtatcactgaa

SEQ ID NO: 2066328 - DNA, 25 bp, Homo sapien
gaagagcattggctgttgtatcact

SEQ ID NO: 2066329 - DNA, 25 bp, Homo sapien
tgccctccaagcctgcatgaagagc

SEQ ID NO: 2066330 - DNA, 25 bp, Homo sapien
gaggtgcagtaacgatcaaattaga

SEQ ID NO: 2066331 - DNA, 25 bp, Homo sapien
ggtgtcccaatgttgatcatgttga

SEQ ID NO: 2066332 - DNA, 25 bp, Homo sapien
gggccagtggctacctcactgaaca

SEQ ID NO: 2066333 - DNA, 25 bp, Homo sapien
tgaaagaaccgaagcttacaactgt

SEQ ID NO: 2066334 - DNA, 25 bp, Homo sapien
gaatgtggtactgtgccataaatac

SEQ ID NO: 2066335 - DNA, 25 bp, Homo sapien
tctttagcactgcaaaaaggaaagt

SEQ ID NO: 2066336 - DNA, 25 bp, Homo sapien
gaaccaagtcatggatctttagcac

SEQ ID NO: 2066337 - DNA, 25 bp, Homo sapien
gaagcaacacagcatttagagacag

SEQ ID NO: 2066338 - DNA, 25 bp, Homo sapien
agcattttcttacggtggaggcaac

SEQ ID NO: 2066339 - DNA, 25 bp, Homo sapien
ggataagggctatctaatccctgaa

SEQ ID NO: 2066340 - DNA, 25 bp, Homo sapien
taagtctttcattacggataagggc

SEQ ID NO: 2066341 - DNA, 25 bp, Homo sapien
caagctgtgggaatggaatacatat

SEQ ID NO: 2066342 - DNA, 25 bp, Homo sapien
ggatccactctctaaagctctgaaa

SEQ ID NO: 2066343 - DNA, 25 bp, Homo sapien
ctctgaaagcatctatttttctact

SEQ ID NO: 2066344 - DNA, 25 bp, Homo sapien
ctaggatccactctctaaagctctg

SEQ ID NO: 2066345 - DNA, 25 bp, Homo sapien
gatccactctctaaagctctgaaag

SEQ ID NO: 2066346 - DNA, 25 bp, Homo sapien
agtacatcaaagagttgccgcccat

SEQ ID NO: 2066347 - DNA, 25 bp, Homo sapien
cccattatagtagtacatcaaagag

SEQ ID NO: 2066348 - DNA, 25 bp, Homo sapien
tatagtagtacatcaaagagttgcc

SEQ ID NO: 2066349 - DNA, 25 bp, Homo sapien
cgctttcccattatagtagtacatc

SEQ ID NO: 2066350 - DNA, 25 bp, Homo sapien
gcagtacatggtctcggattctttt

SEQ ID NO: 2066351 - DNA, 25 bp, Homo sapien
caaactcgctgtcccttttttcaca

SEQ ID NO: 2066352 - DNA, 25 bp, Homo sapien
cctcagtaccactctaacaactttt

SEQ ID NO: 2066353 - DNA, 25 bp, Homo sapien
gcccgggattgtgtatgcgcagtac

SEQ ID NO: 2066354 - DNA, 25 bp, Homo sapien
tctgacctcgctcaaaaggagagag

SEQ ID NO: 2066355 - DNA, 25 bp, Homo sapien
tgcctgagaactcgactcggagaaa

SEQ ID NO: 2066356 - DNA, 25 bp, Homo sapien
agcattgtacgcagctgcctgagaa

SEQ ID NO: 2066357 - DNA, 25 bp, Homo sapien
tgaaacagagtagcagtgcggcccg

SEQ ID NO: 2066358 - DNA, 25 bp, Homo sapien
tggagttgggtgctttcactgtagc

SEQ ID NO: 2066359 - DNA, 25 bp, Homo sapien
agggcgcacgttctccactctggag

SEQ ID NO: 2066360 - DNA, 25 bp, Homo sapien
tcacgctatttgctgggctctaaag

SEQ ID NO: 2066361 - DNA, 25 bp, Homo sapien
gacaatctactgcaacttcacgcta

SEQ ID NO: 2066362 - DNA, 25 bp, Homo sapien
cttcgaaccgacgaatatcttacag

SEQ ID NO: 2066363 - DNA, 25 bp, Homo sapien
ccgacgaatatcttacagctgtcag

SEQ ID NO: 2066364 - DNA, 25 bp, Homo sapien
ggcacccctgagaccacattttcag

SEQ ID NO: 2066365 - DNA, 25 bp, Homo sapien
gaaccgacgaatatcttacagctgt

SEQ ID NO: 2066366 - DNA, 25 bp, Homo sapien
agcccagtatctgtataaatatttt

SEQ ID NO: 2066367 - DNA, 25 bp, Homo sapien
tttagcaaacatctcatgcacattt

SEQ ID NO: 2066368 - DNA, 25 bp, Homo sapien
ttagcaaacatctcatgcacatttt

SEQ ID NO: 2066369 - DNA, 25 bp, Homo sapien
gcccagtatctgtataaatatttta

SEQ ID NO: 2066370 - DNA, 25 bp, Homo sapien
gaactatccactcgaccacagagct

SEQ ID NO: 2066371 - DNA, 25 bp, Homo sapien
gaatggtcatatggaaggaattccc

SEQ ID NO: 2066372 - DNA, 25 bp, Homo sapien
tctcctcccgaatataacttggtag

SEQ ID NO: 2066373 - DNA, 25 bp, Homo sapien
catattgcagtgtaaggcaggcaac

SEQ ID NO: 2066374 - DNA, 25 bp, Homo sapien
gatgagtaaccttgctgctccccag

SEQ ID NO: 2066375 - DNA, 25 bp, Homo sapien
gaggacacctagttcagagaatcag

SEQ ID NO: 2066376 - DNA, 25 bp, Homo sapien
agctactaagacactggaatcaggg

SEQ ID NO: 2066377 - DNA, 25 bp, Homo sapien
cataacatagtgtgaacaagccagc

SEQ ID NO: 2066378 - DNA, 25 bp, Homo sapien
tggatatctttaactaatcaactgc

SEQ ID NO: 2066379 - DNA, 25 bp, Homo sapien
ttggatatctttaactaatcaactg

SEQ ID NO: 2066380 - DNA, 25 bp, Homo sapien
tcggaaaaacacgatagccagctgt

SEQ ID NO: 2066381 - DNA, 25 bp, Homo sapien
cctggcagagagtgtattcaaaaac

SEQ ID NO: 2066382 - DNA, 25 bp, Homo sapien
gaacctggtctgtcctttacctaga

SEQ ID NO: 2066383 - DNA, 25 bp, Homo sapien
tataatctgcacacaataggagctc

SEQ ID NO: 2066384 - DNA, 25 bp, Homo sapien
tatttcctgatgacgtagaagaaaa

SEQ ID NO: 2066385 - DNA, 25 bp, Homo sapien
ttttcttagagggacaccatattct

SEQ ID NO: 2066386 - DNA, 25 bp, Homo sapien
aaatattatttcctgatgacgtaga

SEQ ID NO: 2066387 - DNA, 25 bp, Homo sapien
gagggacaccatattctatggttaa

SEQ ID NO: 2066388 - DNA, 25 bp, Homo sapien
gaaacaagcctaatcggtcaagtct

SEQ ID NO: 2066389 - DNA, 25 bp, Homo sapien
cattgatatcaaagagacacctggt

SEQ ID NO: 2066390 - DNA, 25 bp, Homo sapien
catgtggccatacacacttcggtgc

SEQ ID NO: 2066391 - DNA, 25 bp, Homo sapien
taaattattactgggccaacctgga

SEQ ID NO: 2066392 - DNA, 25 bp, Homo sapien
tggccactgaatgctctgtgacgct

SEQ ID NO: 2066393 - DNA, 25 bp, Homo sapien
gccactgaatgctctgtgacgctct

SEQ ID NO: 2066394 - DNA, 25 bp, Homo sapien
cactgaatgctctgtgacgctcttg

SEQ ID NO: 2066395 - DNA, 25 bp, Homo sapien
tttggccactgaatgctctgtgacg

SEQ ID NO: 2066396 - DNA, 25 bp, Homo sapien
gtttcaggtctgactgtttgcttcc

SEQ ID NO: 2066397 - DNA, 25 bp, Homo sapien
tacataccatatgccctgaattacc

SEQ ID NO: 2066398 - DNA, 25 bp, Homo sapien
tgtgccggccacaatcatgggactc

SEQ ID NO: 2066399 - DNA, 25 bp, Homo sapien
tatcccgtcgtgtgtagatttggca

SEQ ID NO: 2066400 - DNA, 25 bp, Homo sapien
tacaattcgctcaagatggcaactc

SEQ ID NO: 2066401 - DNA, 25 bp, Homo sapien
gaaacatacagaaccggtcagcaag

SEQ ID NO: 2066402 - DNA, 25 bp, Homo sapien
cagctactaaccatgtgcacgtggg

SEQ ID NO: 2066403 - DNA, 25 bp, Homo sapien
gaaagaagctaccatttgaaggcca

SEQ ID NO: 2066404 - DNA, 25 bp, Homo sapien
gtatggatcacctctcatctgttta

SEQ ID NO: 2066405 - DNA, 25 bp, Homo sapien
tcccctaagactgcctagtgatcag

SEQ ID NO: 2066406 - DNA, 25 bp, Homo sapien
tatgccagaacctgattcccctaag

SEQ ID NO: 2066407 - DNA, 25 bp, Homo sapien
gcctagtgatcagcagtgagatttt

SEQ ID NO: 2066408 - DNA, 25 bp, Homo sapien
ctttttcatccgacgtccgatggcc

SEQ ID NO: 2066409 - DNA, 25 bp, Homo sapien
ttttcatccgacgtccgatggccat

SEQ ID NO: 2066410 - DNA, 25 bp, Homo sapien
tttttcatccgacgtccgatggcca

SEQ ID NO: 2066411 - DNA, 25 bp, Homo sapien
ggaagcacaataacagcatctacgg

SEQ ID NO: 2066412 - DNA, 25 bp, Homo sapien
ggaacagctgtactggcctcaagaa

SEQ ID NO: 2066413 - DNA, 25 bp, Homo sapien
ggcactgaactctcacccatgttaa

SEQ ID NO: 2066414 - DNA, 25 bp, Homo sapien
caagtcaactgtatgaggaagcaca

SEQ ID NO: 2066415 - DNA, 25 bp, Homo sapien
gggctgtgcatcacttgggcagacc

SEQ ID NO: 2066416 - DNA, 25 bp, Homo sapien
ttgcggggggatctatagccagccc

SEQ ID NO: 2066417 - DNA, 25 bp, Homo sapien
gggatctatagccagccccaccaag

SEQ ID NO: 2066418 - DNA, 25 bp, Homo sapien
atcacttgggcagacccgttcccgg

SEQ ID NO: 2066419 - DNA, 25 bp, Homo sapien
gagtaggaagatacatcaggcacca

SEQ ID NO: 2066420 - DNA, 25 bp, Homo sapien
cacagttaagctggatgccatagaa

SEQ ID NO: 2066421 - DNA, 25 bp, Homo sapien
tcaggcaccactccttagaagagat

SEQ ID NO: 2066422 - DNA, 25 bp, Homo sapien
caggattgggcttcaaggcagagaa

SEQ ID NO: 2066423 - DNA, 25 bp, Homo sapien
tcacaaagtatctatccctgcaggg

SEQ ID NO: 2066424 - DNA, 25 bp, Homo sapien
cttttacgtcttaccacacaatcgg

SEQ ID NO: 2066425 - DNA, 25 bp, Homo sapien
caaagtatctatccctgcagggatg

SEQ ID NO: 2066426 - DNA, 25 bp, Homo sapien
cacaatcggctacttccagactttc

SEQ ID NO: 2066427 - DNA, 25 bp, Homo sapien
ctaaaaaggatagagcccagatggc

SEQ ID NO: 2066428 - DNA, 25 bp, Homo sapien
taatttccagcccactaataaggaa

SEQ ID NO: 2066429 - DNA, 25 bp, Homo sapien
cagatggctgatatttcgttcactt

SEQ ID NO: 2066430 - DNA, 25 bp, Homo sapien
tcgttcacttgtgatcgatatcata

SEQ ID NO: 2066431 - DNA, 25 bp, Homo sapien
tctcgtgggcaattagatagctgtc

SEQ ID NO: 2066432 - DNA, 25 bp, Homo sapien
gcttgtcctgtagaccctgcctggt

SEQ ID NO: 2066433 - DNA, 25 bp, Homo sapien
tcttcgcaaaaaacgagggctacga

SEQ ID NO: 2066434 - DNA, 25 bp, Homo sapien
cagtaataagcagagctctcgtggg

SEQ ID NO: 2066435 - DNA, 25 bp, Homo sapien
cagaatgctcttggttacagctgac

SEQ ID NO: 2066436 - DNA, 25 bp, Homo sapien
aacttttgctgtactagggacctgg

SEQ ID NO: 2066437 - DNA, 25 bp, Homo sapien
gctctgggcgcatggaaactcattt

SEQ ID NO: 2066438 - DNA, 25 bp, Homo sapien
ccttctagataaacgtgctgctctg

SEQ ID NO: 2066439 - DNA, 25 bp, Homo sapien
gaagatggcaaacctggaggaactt

SEQ ID NO: 2066440 - DNA, 25 bp, Homo sapien
tggcaaacctggaggaacttttcga

SEQ ID NO: 2066441 - DNA, 25 bp, Homo sapien
gatggcaaacctggaggaacttttc

SEQ ID NO: 2066442 - DNA, 25 bp, Homo sapien
tgaagatggcaaacctggaggaact

SEQ ID NO: 2066443 - DNA, 25 bp, Homo sapien
ccatggcactactgtgaagaggcct

SEQ ID NO: 2066444 - DNA, 25 bp, Homo sapien
atggcactactgtgaagaggcctcc

SEQ ID NO: 2066445 - DNA, 25 bp, Homo sapien
gcctccttcggggattattgctaga

SEQ ID NO: 2066446 - DNA, 25 bp, Homo sapien
agggttcctgggttgcccatatcca

SEQ ID NO: 2066447 - DNA, 25 bp, Homo sapien
tgcctctctgtaccgcatatcatga

SEQ ID NO: 2066448 - DNA, 25 bp, Homo sapien
gaagaacctcattttgtgaacgcac

SEQ ID NO: 2066449 - DNA, 25 bp, Homo sapien
tgtgaacgcacacaacttcccctgg

SEQ ID NO: 2066450 - DNA, 25 bp, Homo sapien
tatgaactcgactgagaaccctgcc

SEQ ID NO: 2066451 - DNA, 25 bp, Homo sapien
ccataatatataaatcgcttgatta

SEQ ID NO: 2066452 - DNA, 25 bp, Homo sapien
taactttatcgttacttgtaatcaa

SEQ ID NO: 2066453 - DNA, 25 bp, Homo sapien
caagagtagatagtaccatttatat

SEQ ID NO: 2066454 - DNA, 25 bp, Homo sapien
ttattctgatatgcaataaaacaag

SEQ ID NO: 2066455 - DNA, 25 bp, Homo sapien
agctgcctgccattcatctttaatc

SEQ ID NO: 2066456 - DNA, 25 bp, Homo sapien
cagctgcctgccattcatctttaat

SEQ ID NO: 2066457 - DNA, 25 bp, Homo sapien
gcccggacaataatatttcttagaa

SEQ ID NO: 2066458 - DNA, 25 bp, Homo sapien
ttttatcacagtgcattttgaggcc

SEQ ID NO: 2066459 - DNA, 25 bp, Homo sapien
cagtcttgaatgcagcggcgggatc

SEQ ID NO: 2066460 - DNA, 25 bp, Homo sapien
cagtgcattttgaggcctgcaagaa

SEQ ID NO: 2066461 - DNA, 25 bp, Homo sapien
tccaactaagtgactctccatcaac

SEQ ID NO: 2066462 - DNA, 25 bp, Homo sapien
ttttccaactaagtgactctccatc

SEQ ID NO: 2066463 - DNA, 25 bp, Homo sapien
tattttccaactaagtgactctcca

SEQ ID NO: 2066464 - DNA, 25 bp, Homo sapien
tatattttccaactaagtgactctc

SEQ ID NO: 2066465 - DNA, 25 bp, Homo sapien
caacagcatttaataataagtgaat

SEQ ID NO: 2066466 - DNA, 25 bp, Homo sapien
tagcacgaaatgtcttgggaaatca

SEQ ID NO: 2066467 - DNA, 25 bp, Homo sapien
catcagtttcaaagtaaagaatagc

SEQ ID NO: 2066468 - DNA, 25 bp, Homo sapien
tcttctcaccccatcagtttcaaag

SEQ ID NO: 2066469 - DNA, 25 bp, Homo sapien
gaccaaatggtgctactgcagcata

SEQ ID NO: 2066470 - DNA, 25 bp, Homo sapien
ggagaactatcacaaccaggccaag

SEQ ID NO: 2066471 - DNA, 25 bp, Homo sapien
taagcttgctaactaagtacaggcc

SEQ ID NO: 2066472 - DNA, 25 bp, Homo sapien
caggccaaggtctcagtaagccact

SEQ ID NO: 2066473 - DNA, 25 bp, Homo sapien
tcagtgggcattaagtgtggagttc

SEQ ID NO: 2066474 - DNA, 25 bp, Homo sapien
gagggtgagctccatgcatgaattg

SEQ ID NO: 2066475 - DNA, 25 bp, Homo sapien
aaagaagtcacttagtcacgtagcc

SEQ ID NO: 2066476 - DNA, 25 bp, Homo sapien
aaggacatcacagctttagtcagca

SEQ ID NO: 2066477 - DNA, 25 bp, Homo sapien
tatccatagttttcccagaatgtta

SEQ ID NO: 2066478 - DNA, 25 bp, Homo sapien
cacgcaggtgagtcatgtgtttcac

SEQ ID NO: 2066479 - DNA, 25 bp, Homo sapien
tgtgtttcacctgacccaatcctct

SEQ ID NO: 2066480 - DNA, 25 bp, Homo sapien
ggaagcctatgactttatccatagt

SEQ ID NO: 2066481 - DNA, 25 bp, Homo sapien
gacagctgtcaattagatggcacgc

SEQ ID NO: 2066482 - DNA, 25 bp, Homo sapien
aagaggcagtccacgttactacggg

SEQ ID NO: 2066483 - DNA, 25 bp, Homo sapien
cactcagtaggccaatgagcggcag

SEQ ID NO: 2066484 - DNA, 25 bp, Homo sapien
gaaaagatggccctctgacaacaga

SEQ ID NO: 2066485 - DNA, 25 bp, Homo sapien
caaaggaggcactggtttgccaatg

SEQ ID NO: 2066486 - DNA, 25 bp, Homo sapien
ggtgctccagttgagtagtaacagc

SEQ ID NO: 2066487 - DNA, 25 bp, Homo sapien
ttaaagactcggatacacacaggca

SEQ ID NO: 2066488 - DNA, 25 bp, Homo sapien
tggtttgccaatgtgtccatttcct

SEQ ID NO: 2066489 - DNA, 25 bp, Homo sapien
catcaaagtacgaggaaagctagct

SEQ ID NO: 2066490 - DNA, 25 bp, Homo sapien
cacttgggtctcaagaggtctgcaa

SEQ ID NO: 2066491 - DNA, 25 bp, Homo sapien
aactaaaaagattcagtgccctgct

SEQ ID NO: 2066492 - DNA, 25 bp, Homo sapien
gagttaaagctgcatgttagggtcc

SEQ ID NO: 2066493 - DNA, 25 bp, Homo sapien
cagtcaggaacgatgcgatctgccc

SEQ ID NO: 2066494 - DNA, 25 bp, Homo sapien
gagttctagctaaccctgaacggag

SEQ ID NO: 2066495 - DNA, 25 bp, Homo sapien
cagtgggcctggaatcgaccagaca

SEQ ID NO: 2066496 - DNA, 25 bp, Homo sapien
tcatgggcttaagtagcagggaacc

SEQ ID NO: 2066497 - DNA, 25 bp, Homo sapien
ttcaggataaagcagacatggtccc

SEQ ID NO: 2066498 - DNA, 25 bp, Homo sapien
ttcccaggaaggatgcataagacct

SEQ ID NO: 2066499 - DNA, 25 bp, Homo sapien
caggcctagaacagtgaagtcacca

SEQ ID NO: 2066500 - DNA, 25 bp, Homo sapien
taagacctcgatggatgtgctgaac

SEQ ID NO: 2066501 - DNA, 25 bp, Homo sapien
tcgatgaaccaaaaatgagcaagcc

SEQ ID NO: 2066502 - DNA, 25 bp, Homo sapien
gaaaacaagatatgggctgggacat

SEQ ID NO: 2066503 - DNA, 25 bp, Homo sapien
gattggtctcagataggcagctttc

SEQ ID NO: 2066504 - DNA, 25 bp, Homo sapien
tgagcaagcctatgggcaaactaag

SEQ ID NO: 2066505 - DNA, 25 bp, Homo sapien
agcttttggagctccttagggcaca

SEQ ID NO: 2066506 - DNA, 25 bp, Homo sapien
tagggcacaccatctgaaggtttcc

SEQ ID NO: 2066507 - DNA, 25 bp, Homo sapien
taattgctaataaagaacctgccgg

SEQ ID NO: 2066508 - DNA, 25 bp, Homo sapien
taaaaaagcgtcatatgtccatcag

SEQ ID NO: 2066509 - DNA, 25 bp, Homo sapien
taacaatacggcacaagagaaactg

SEQ ID NO: 2066510 - DNA, 25 bp, Homo sapien
tccacggctacattacgaaggcttt

SEQ ID NO: 2066511 - DNA, 25 bp, Homo sapien
gattcactggaagacacactatggt

SEQ ID NO: 2066512 - DNA, 25 bp, Homo sapien
cactgtttatggagattgctgcgac

SEQ ID NO: 2066513 - DNA, 25 bp, Homo sapien
tcagtttcacccgagggaagtattc

SEQ ID NO: 2066514 - DNA, 25 bp, Homo sapien
aaaactctaatgacctccgccttga

SEQ ID NO: 2066515 - DNA, 25 bp, Homo sapien
tgagagctttacaccagagacacag

SEQ ID NO: 2066516 - DNA, 25 bp, Homo sapien
tgtgtctgtgaggaatcacgccaat

SEQ ID NO: 2066517 - DNA, 25 bp, Homo sapien
taagatgagtatgagcccctttctg

SEQ ID NO: 2066518 - DNA, 25 bp, Homo sapien
ctggtggcaaccctgtaagtttgat

SEQ ID NO: 2066519 - DNA, 25 bp, Homo sapien
ttctctcccataagatgagtatgag

SEQ ID NO: 2066520 - DNA, 25 bp, Homo sapien
accctgtaagtttgattctctccca

SEQ ID NO: 2066521 - DNA, 25 bp, Homo sapien
tctactgctcttccccgatgtttac

SEQ ID NO: 2066522 - DNA, 25 bp, Homo sapien
tccaggtaacagacatctactgctc

SEQ ID NO: 2066523 - DNA, 25 bp, Homo sapien
tgccaagagaaacgacaaaaaagtg

SEQ ID NO: 2066524 - DNA, 25 bp, Homo sapien
caggtaacagacatctactgctctt

SEQ ID NO: 2066525 - DNA, 25 bp, Homo sapien
tatattgacacttaatagtgaggcc

SEQ ID NO: 2066526 - DNA, 25 bp, Homo sapien
tctctaacaaacaaatcgtaactcc

SEQ ID NO: 2066527 - DNA, 25 bp, Homo sapien
gaccctagcctagtaattcccattg

SEQ ID NO: 2066528 - DNA, 25 bp, Homo sapien
cacagcaggcaaattatctatgtaa

SEQ ID NO: 2066529 - DNA, 25 bp, Homo sapien
cagccgctgcggatattttttggca

SEQ ID NO: 2066530 - DNA, 25 bp, Homo sapien
ggcgcgttcactgcggaattttcga

SEQ ID NO: 2066531 - DNA, 25 bp, Homo sapien
ctccggtactagaatgcgacagccg

SEQ ID NO: 2066532 - DNA, 25 bp, Homo sapien
ttcgagacaaccctccggtactaga

SEQ ID NO: 2066533 - DNA, 25 bp, Homo sapien
gagctagagacagacgagcaactta

SEQ ID NO: 2066534 - DNA, 25 bp, Homo sapien
ggtaggtgtttcacccaccgctgaa

SEQ ID NO: 2066535 - DNA, 25 bp, Homo sapien
ggcatcagactagggaactcatcat

SEQ ID NO: 2066536 - DNA, 25 bp, Homo sapien
ccagtaggataataacagggtcatg

SEQ ID NO: 2066537 - DNA, 25 bp, Homo sapien
taagagaagcctctcaatgactgaa

SEQ ID NO: 2066538 - DNA, 25 bp, Homo sapien
cagcctgcagcactagttattgttc

SEQ ID NO: 2066539 - DNA, 25 bp, Homo sapien
gaatctaggagcatgactcaatcaa

SEQ ID NO: 2066540 - DNA, 25 bp, Homo sapien
gaaggttggtagatgaatggtccca

SEQ ID NO: 2066541 - DNA, 25 bp, Homo sapien
cagaagatctaagcccaaatacgtg

SEQ ID NO: 2066542 - DNA, 25 bp, Homo sapien
ttttctttcgaccttatgggtagca

SEQ ID NO: 2066543 - DNA, 25 bp, Homo sapien
cacgccgagggaggcaccagaagat

SEQ ID NO: 2066544 - DNA, 25 bp, Homo sapien
tcgaccttatgggtagcacgccgag

SEQ ID NO: 2066545 - DNA, 25 bp, Homo sapien
tgcctacactccaactgacgtcttc

SEQ ID NO: 2066546 - DNA, 25 bp, Homo sapien
tgacgtcttcataatcgccctgtct

SEQ ID NO: 2066547 - DNA, 25 bp, Homo sapien
ggtcgtccatgagtgaccctcctca

SEQ ID NO: 2066548 - DNA, 25 bp, Homo sapien
gctgcgcccctctcgcctgcctaca

SEQ ID NO: 2066549 - DNA, 25 bp, Homo sapien
ttccatactccagtcccacacagct

SEQ ID NO: 2066550 - DNA, 25 bp, Homo sapien
ttctctgaaacattccatactccag

SEQ ID NO: 2066551 - DNA, 25 bp, Homo sapien
tctgaaacattccatactccagtcc

SEQ ID NO: 2066552 - DNA, 25 bp, Homo sapien
tgaaacattccatactccagtccca

SEQ ID NO: 2066553 - DNA, 25 bp, Homo sapien
gaaaatccattgtacgttgcctgac

SEQ ID NO: 2066554 - DNA, 25 bp, Homo sapien
gtgttaatgtagacccactgcctac

SEQ ID NO: 2066555 - DNA, 25 bp, Homo sapien
ttgcctgactaacggaccatgtctt

SEQ ID NO: 2066556 - DNA, 25 bp, Homo sapien
gaacggctaaatggcctagcaaatg

SEQ ID NO: 2066557 - DNA, 25 bp, Homo sapien
aacctgaacttgacacaagaagctg

SEQ ID NO: 2066558 - DNA, 25 bp, Homo sapien
caaacctgaacttgacacaagaagc

SEQ ID NO: 2066559 - DNA, 25 bp, Homo sapien
aaacctgaacttgacacaagaagct

SEQ ID NO: 2066560 - DNA, 25 bp, Homo sapien
tctttctgcatcaaacctgaacttg

SEQ ID NO: 2066561 - DNA, 25 bp, Homo sapien
catagggagtcccatctccatagtt

SEQ ID NO: 2066562 - DNA, 25 bp, Homo sapien
tcatgtggtcatagggagtcccatc

SEQ ID NO: 2066563 - DNA, 25 bp, Homo sapien
gattgtcatgtgacccaaggtccct

SEQ ID NO: 2066564 - DNA, 25 bp, Homo sapien
tgtattctggaattgacaaaaggtg

SEQ ID NO: 2066565 - DNA, 25 bp, Homo sapien
ccaggaccctgagctacttctgtct

SEQ ID NO: 2066566 - DNA, 25 bp, Homo sapien
caggaccctgagctacttctgtctt

SEQ ID NO: 2066567 - DNA, 25 bp, Homo sapien
gattacgaaatgttccatccacgct

SEQ ID NO: 2066568 - DNA, 25 bp, Homo sapien
ggcaaatacgcaggatggaaagtct

SEQ ID NO: 2066569 - DNA, 25 bp, Homo sapien
tgatcacggctgataacagacggcc

SEQ ID NO: 2066570 - DNA, 25 bp, Homo sapien
gtgaaaagacctacatgaaccatcg

SEQ ID NO: 2066571 - DNA, 25 bp, Homo sapien
caaaatctctcaaccactgcaagct

SEQ ID NO: 2066572 - DNA, 25 bp, Homo sapien
ttttcacctataacagccagcttgg

SEQ ID NO: 2066573 - DNA, 25 bp, Homo sapien
gatttgaatccctataagtaccata

SEQ ID NO: 2066574 - DNA, 25 bp, Homo sapien
ttttaaaagtctggcgcatcttgac

SEQ ID NO: 2066575 - DNA, 25 bp, Homo sapien
gtacttaggctcaaatgtgcaaacc

SEQ ID NO: 2066576 - DNA, 25 bp, Homo sapien
ggctcaaatgtgcaaaccacactat

SEQ ID NO: 2066577 - DNA, 25 bp, Homo sapien
gggtcatgtcttagttttaggccaa

SEQ ID NO: 2066578 - DNA, 25 bp, Homo sapien
tcaggggtcatgtcttagttttagg

SEQ ID NO: 2066579 - DNA, 25 bp, Homo sapien
gaaatattcttcaatcgttgatcat

SEQ ID NO: 2066580 - DNA, 25 bp, Homo sapien
tggagacaatgattagttgtagccc

SEQ ID NO: 2066581 - DNA, 25 bp, Homo sapien
caatgattagttgtagccctgtgac

SEQ ID NO: 2066582 - DNA, 25 bp, Homo sapien
cgttgatcatctagtgacatttcaa

SEQ ID NO: 2066583 - DNA, 25 bp, Homo sapien
ttacctacctaaacacgagcagact

SEQ ID NO: 2066584 - DNA, 25 bp, Homo sapien
ttgggatcaagagaagttacctacc

SEQ ID NO: 2066585 - DNA, 25 bp, Homo sapien
gactgagttttcacagctagcaacg

SEQ ID NO: 2066586 - DNA, 25 bp, Homo sapien
tgaaaacaaaactgtgagtctcccc

SEQ ID NO: 2066587 - DNA, 25 bp, Homo sapien
ggaagatatgtcattagtgtgaaag

SEQ ID NO: 2066588 - DNA, 25 bp, Homo sapien
atggtaaaaagctgtaactcttcct

SEQ ID NO: 2066589 - DNA, 25 bp, Homo sapien
gtggaatggtaaaaagctgtaactc

SEQ ID NO: 2066590 - DNA, 25 bp, Homo sapien
caattcagtaagtggaatggtaaaa

SEQ ID NO: 2066591 - DNA, 25 bp, Homo sapien
ctgaagaatgacgataaccagacat

SEQ ID NO: 2066592 - DNA, 25 bp, Homo sapien
ttgagagaaaacaagaagcagggaa

SEQ ID NO: 2066593 - DNA, 25 bp, Homo sapien
cttgagagaaaacaagaagcaggga

SEQ ID NO: 2066594 - DNA, 25 bp, Homo sapien
agagaaaacaagaagcagggaaggg

SEQ ID NO: 2066595 - DNA, 25 bp, Homo sapien
tgagagaaaacaagaagcagggaag

SEQ ID NO: 2066596 - DNA, 25 bp, Homo sapien
cttcctcaaacattgcaagtttcat

SEQ ID NO: 2066597 - DNA, 25 bp, Homo sapien
cctttcttcctcaaacattgcaagt

SEQ ID NO: 2066598 - DNA, 25 bp, Homo sapien
ctttcttcctcaaacattgcaagtt

SEQ ID NO: 2066599 - DNA, 25 bp, Homo sapien
ttcttcctcaaacattgcaagtttc

SEQ ID NO: 2066600 - DNA, 25 bp, Homo sapien
taaacctgtaaccaatacttatgtc

SEQ ID NO: 2066601 - DNA, 25 bp, Homo sapien
aacctgtaaccaatacttatgtcca

SEQ ID NO: 2066602 - DNA, 25 bp, Homo sapien
gaacatctttaacatctcacattga

SEQ ID NO: 2066603 - DNA, 25 bp, Homo sapien
ctgctacctgggaaattctgaagaa

SEQ ID NO: 2066604 - DNA, 25 bp, Homo sapien
aagaacatctttaacatctcacatt

SEQ ID NO: 2066605 - DNA, 25 bp, Homo sapien
tacctgggaaattctgaagaacatc

SEQ ID NO: 2066606 - DNA, 25 bp, Homo sapien
ggcttctctcatggtcataggattc

SEQ ID NO: 2066607 - DNA, 25 bp, Homo sapien
gattccagatctacttgcttcctca

SEQ ID NO: 2066608 - DNA, 25 bp, Homo sapien
catgtcaacttcaccctaaagcagg

SEQ ID NO: 2066609 - DNA, 25 bp, Homo sapien
gcttcctcattgactttcaatggca

SEQ ID NO: 2066610 - DNA, 25 bp, Homo sapien
tggcaggaagtgagctgtaatctct

SEQ ID NO: 2066611 - DNA, 25 bp, Homo sapien
gggaggcacgttgcctacaagtgcc

SEQ ID NO: 2066612 - DNA, 25 bp, Homo sapien
atggcaggaagtgagctgtaatctc

SEQ ID NO: 2066613 - DNA, 25 bp, Homo sapien
atgaacattgtacccttgtaagaac

SEQ ID NO: 2066614 - DNA, 25 bp, Homo sapien
catgaacattgtacccttgtaagaa

SEQ ID NO: 2066615 - DNA, 25 bp, Homo sapien
tcatgaacattgtacccttgtaaga

SEQ ID NO: 2066616 - DNA, 25 bp, Homo sapien
tgaacattgtacccttgtaagaaca

SEQ ID NO: 2066617 - DNA, 25 bp, Homo sapien
ttcccacgccatcagagatacaagg

SEQ ID NO: 2066618 - DNA, 25 bp, Homo sapien
tgtctttgctcagtaacttcaaggg

SEQ ID NO: 2066619 - DNA, 25 bp, Homo sapien
gatacaaggacctggcacctgaacc

SEQ ID NO: 2066620 - DNA, 25 bp, Homo sapien
tccacttctagcaccaatggcttag

SEQ ID NO: 2066621 - DNA, 25 bp, Homo sapien
aaagtcacacgtaagacaggagaga

SEQ ID NO: 2066622 - DNA, 25 bp, Homo sapien
ggtggaaagtcacacgtaagacagg

SEQ ID NO: 2066623 - DNA, 25 bp, Homo sapien
ggaaagtcacacgtaagacaggaga

SEQ ID NO: 2066624 - DNA, 25 bp, Homo sapien
gcaggtggaaagtcacacgtaagac

SEQ ID NO: 2066625 - DNA, 25 bp, Homo sapien
gaaacaggaatctgatacaacgtga

SEQ ID NO: 2066626 - DNA, 25 bp, Homo sapien
gggtgctcatgctataccaacacat

SEQ ID NO: 2066627 - DNA, 25 bp, Homo sapien
catccttattacttagcctttgtgg

SEQ ID NO: 2066628 - DNA, 25 bp, Homo sapien
cagatgtgatactcaggtaggaaga

SEQ ID NO: 2066629 - DNA, 25 bp, Homo sapien
aagccttagtagaggcaatacgttt

SEQ ID NO: 2066630 - DNA, 25 bp, Homo sapien
caatacgtttaagctctgtgtgtgt

SEQ ID NO: 2066631 - DNA, 25 bp, Homo sapien
gagaacagggtaccaataaatgtga

SEQ ID NO: 2066632 - DNA, 25 bp, Homo sapien
ctgagaacagggtaccaataaatgt

SEQ ID NO: 2066633 - DNA, 25 bp, Homo sapien
cctaactcgattgccaacagaatgt

SEQ ID NO: 2066634 - DNA, 25 bp, Homo sapien
taactcgattgccaacagaatgttt

SEQ ID NO: 2066635 - DNA, 25 bp, Homo sapien
ccctaactcgattgccaacagaatg

SEQ ID NO: 2066636 - DNA, 25 bp, Homo sapien
ctcgattgccaacagaatgtttcat

SEQ ID NO: 2066637 - DNA, 25 bp, Homo sapien
ccaggaatgcatgacgatgaaaagt

SEQ ID NO: 2066638 - DNA, 25 bp, Homo sapien
ggaatgcatgacgatgaaaagtttc

SEQ ID NO: 2066639 - DNA, 25 bp, Homo sapien
tttccaggaatgcatgacgatgaaa

SEQ ID NO: 2066640 - DNA, 25 bp, Homo sapien
tgcatgacgatgaaaagtttctatt

SEQ ID NO: 2066641 - DNA, 25 bp, Homo sapien
cattccctaggagaataagcctgac

SEQ ID NO: 2066642 - DNA, 25 bp, Homo sapien
ccttccttgttactctcctgtgctc

SEQ ID NO: 2066643 - DNA, 25 bp, Homo sapien
tatgaataggaagtaataaattccc

SEQ ID NO: 2066644 - DNA, 25 bp, Homo sapien
cttccatatgaataggaagtaataa

SEQ ID NO: 2066645 - DNA, 25 bp, Homo sapien
taaattcccccaatatatctggtga

SEQ ID NO: 2066646 - DNA, 25 bp, Homo sapien
cagttcttacattattggtgatttc

SEQ ID NO: 2066647 - DNA, 25 bp, Homo sapien
ttctaacatcttctcgagtctaaga

SEQ ID NO: 2066648 - DNA, 25 bp, Homo sapien
tcttacattattggtgatttctaac

SEQ ID NO: 2066649 - DNA, 25 bp, Homo sapien
tcattcataaccaataacagttctt

SEQ ID NO: 2066650 - DNA, 25 bp, Homo sapien
gaaattctttgtctatggaaggctc

SEQ ID NO: 2066651 - DNA, 25 bp, Homo sapien
ttaatccagaatccttgcagcaatc

SEQ ID NO: 2066652 - DNA, 25 bp, Homo sapien
cacatggggcaagattagttttggg

SEQ ID NO: 2066653 - DNA, 25 bp, Homo sapien
ggaaggctcaaggattgatcccagg

SEQ ID NO: 2066654 - DNA, 25 bp, Homo sapien
tccgcgatggctacagtaacacatt

SEQ ID NO: 2066655 - DNA, 25 bp, Homo sapien
aaaacactggcaactccgcgatggc

SEQ ID NO: 2066656 - DNA, 25 bp, Homo sapien
tcctgctgagctaaaatctctgcag

SEQ ID NO: 2066657 - DNA, 25 bp, Homo sapien
tctctgcagggaatctgtgagtaaa

SEQ ID NO: 2066658 - DNA, 25 bp, Homo sapien
ttttctataccatctctcgtaacac

SEQ ID NO: 2066659 - DNA, 25 bp, Homo sapien
gcattttctataccatctctcgtaa

SEQ ID NO: 2066660 - DNA, 25 bp, Homo sapien
cagagcattttctataccatctctc

SEQ ID NO: 2066661 - DNA, 25 bp, Homo sapien
tctataccatctctcgtaacactca

SEQ ID NO: 2066662 - DNA, 25 bp, Homo sapien
aacctgtaatgcttaagactgggcc

SEQ ID NO: 2066663 - DNA, 25 bp, Homo sapien
aaagcttaggcttctgaccactaga

SEQ ID NO: 2066664 - DNA, 25 bp, Homo sapien
taaatgaatgcacaaataggtccca

SEQ ID NO: 2066665 - DNA, 25 bp, Homo sapien
taagacacagcagagtagcggctgg

SEQ ID NO: 2066666 - DNA, 25 bp, Homo sapien
aatttttgcaaggtatgaagtcagc

SEQ ID NO: 2066667 - DNA, 25 bp, Homo sapien
ggaagaggcaatacacaaatactag

SEQ ID NO: 2066668 - DNA, 25 bp, Homo sapien
cccacagtttgcctaatcaagagta

SEQ ID NO: 2066669 - DNA, 25 bp, Homo sapien
gtataatctgatactcctcccacag

SEQ ID NO: 2066670 - DNA, 25 bp, Homo sapien
gggatacagcaaagattaaagaaga

SEQ ID NO: 2066671 - DNA, 25 bp, Homo sapien
tatgctgggaacaagggatacagca

SEQ ID NO: 2066672 - DNA, 25 bp, Homo sapien
gtgccagacaatatgctgggaacaa

SEQ ID NO: 2066673 - DNA, 25 bp, Homo sapien
cacgcccggcgccattcactttttt

SEQ ID NO: 2066674 - DNA, 25 bp, Homo sapien
ttcagtctttggaaagaatgtcagg

SEQ ID NO: 2066675 - DNA, 25 bp, Homo sapien
agggaaagctcccagcacgtgtttc

SEQ ID NO: 2066676 - DNA, 25 bp, Homo sapien
tggaaagaatgtcagggaaagctcc

SEQ ID NO: 2066677 - DNA, 25 bp, Homo sapien
agctcccagcacgtgtttccatcaa

SEQ ID NO: 2066678 - DNA, 25 bp, Homo sapien
cttcatgaggtcaggtactagttca

SEQ ID NO: 2066679 - DNA, 25 bp, Homo sapien
gttcacacccagaaatgatggctga

SEQ ID NO: 2066680 - DNA, 25 bp, Homo sapien
tatgacatgggaaagatgttacact

SEQ ID NO: 2066681 - DNA, 25 bp, Homo sapien
tttgtcagccccaagatgaacttac

SEQ ID NO: 2066682 - DNA, 25 bp, Homo sapien
ttattttttcagtcgccaagaggag

SEQ ID NO: 2066683 - DNA, 25 bp, Homo sapien
tttttcagtcgccaagaggagaaaa

SEQ ID NO: 2066684 - DNA, 25 bp, Homo sapien
tattttttcagtcgccaagaggaga

SEQ ID NO: 2066685 - DNA, 25 bp, Homo sapien
tcattcatgcttaagcaacaccacc

SEQ ID NO: 2066686 - DNA, 25 bp, Homo sapien
aaaatgccactgaacgcatggctgc

SEQ ID NO: 2066687 - DNA, 25 bp, Homo sapien
gcatggctgcagttcaattgacgtg

SEQ ID NO: 2066688 - DNA, 25 bp, Homo sapien
cagtgctgactgtgaaaacgctgca

SEQ ID NO: 2066689 - DNA, 25 bp, Homo sapien
tacatcgcttaatgggcaaaatgcc

SEQ ID NO: 2066690 - DNA, 25 bp, Homo sapien
aagagaaaggtatgtaaaagatgat

SEQ ID NO: 2066691 - DNA, 25 bp, Homo sapien
aaagagaaaggtatgtaaaagatga

SEQ ID NO: 2066692 - DNA, 25 bp, Homo sapien
tcatctgtaaattccaggacctcaa

SEQ ID NO: 2066693 - DNA, 25 bp, Homo sapien
tctaacacagtgctatacgatgcaa

SEQ ID NO: 2066694 - DNA, 25 bp, Homo sapien
tcagttaaggactctgtctaacaca

SEQ ID NO: 2066695 - DNA, 25 bp, Homo sapien
ccatagatggctcaatacattggca

SEQ ID NO: 2066696 - DNA, 25 bp, Homo sapien
ccagctctgtcaatcttaatattct

SEQ ID NO: 2066697 - DNA, 25 bp, Homo sapien
aggaccaagcactgcccacttatct

SEQ ID NO: 2066698 - DNA, 25 bp, Homo sapien
aacacacatcataattcagcctcca

SEQ ID NO: 2066699 - DNA, 25 bp, Homo sapien
aaaaaagcattgtagatgctgttga

SEQ ID NO: 2066700 - DNA, 25 bp, Homo sapien
tgttcgtcttgtttcagcaccctcg

SEQ ID NO: 2066701 - DNA, 25 bp, Homo sapien
caactctcactaactgacacagata

SEQ ID NO: 2066702 - DNA, 25 bp, Homo sapien
tctagggtcatagaaccaactctca

SEQ ID NO: 2066703 - DNA, 25 bp, Homo sapien
cgtttgaaggacacaaagagctcta

SEQ ID NO: 2066704 - DNA, 25 bp, Homo sapien
ctagctggtgtaaccaataatggaa

SEQ ID NO: 2066705 - DNA, 25 bp, Homo sapien
gtctctaactagctggtgtaaccaa

SEQ ID NO: 2066706 - DNA, 25 bp, Homo sapien
ccacagtattaccccaagtctctaa

SEQ ID NO: 2066707 - DNA, 25 bp, Homo sapien
ccccaagtctctaactagctggtgt

SEQ ID NO: 2066708 - DNA, 25 bp, Homo sapien
cagttggtaccatcgaattgagtcc

SEQ ID NO: 2066709 - DNA, 25 bp, Homo sapien
cacacctgggtatttgatatgctga

SEQ ID NO: 2066710 - DNA, 25 bp, Homo sapien
gctgcacaaatactgccgcacatgt

SEQ ID NO: 2066711 - DNA, 25 bp, Homo sapien
tgaacaatcaatcgtgtggctgcac

SEQ ID NO: 2066712 - DNA, 25 bp, Homo sapien
cacagatagcatttcgtgcgaagcc

SEQ ID NO: 2066713 - DNA, 25 bp, Homo sapien
taaacgttgaaaatcacaggcctgg

SEQ ID NO: 2066714 - DNA, 25 bp, Homo sapien
gactttgagctagacaaacctgagg

SEQ ID NO: 2066715 - DNA, 25 bp, Homo sapien
gacttggacgaggttgcaaacttcc

SEQ ID NO: 2066716 - DNA, 25 bp, Homo sapien
tgaaccatcatggctgaattgtttt

SEQ ID NO: 2066717 - DNA, 25 bp, Homo sapien
ctgaaccatcatggctgaattgttt

SEQ ID NO: 2066718 - DNA, 25 bp, Homo sapien
tctgaaccatcatggctgaattgtt

SEQ ID NO: 2066719 - DNA, 25 bp, Homo sapien
acttgccaaagaagttggtccattt

SEQ ID NO: 2066720 - DNA, 25 bp, Homo sapien
ttggccataaacgtggcaatgtcca

SEQ ID NO: 2066721 - DNA, 25 bp, Homo sapien
cttggccataaacgtggcaatgtcc

SEQ ID NO: 2066722 - DNA, 25 bp, Homo sapien
gagcaatttgaagcaagactctctc

SEQ ID NO: 2066723 - DNA, 25 bp, Homo sapien
caggagagcaatttgaagcaagact

SEQ ID NO: 2066724 - DNA, 25 bp, Homo sapien
catttcgtctctaacaggagagcaa

SEQ ID NO: 2066725 - DNA, 25 bp, Homo sapien
aaattctcatttcgtctctaacagg

SEQ ID NO: 2066726 - DNA, 25 bp, Homo sapien
agtaaatcactcagctctttgtccg

SEQ ID NO: 2066727 - DNA, 25 bp, Homo sapien
gcagccattcgctgttggtgatgca

SEQ ID NO: 2066728 - DNA, 25 bp, Homo sapien
gctctttgtccgtccctaaggcagc

SEQ ID NO: 2066729 - DNA, 25 bp, Homo sapien
tttgtccgtccctaaggcagccatt

SEQ ID NO: 2066730 - DNA, 25 bp, Homo sapien
taaccgcaatcagaaaatccagtcc

SEQ ID NO: 2066731 - DNA, 25 bp, Homo sapien
gagaaaacacaatcggatttttgga

SEQ ID NO: 2066732 - DNA, 25 bp, Homo sapien
aaacatggaaataaccgcaatcaga

SEQ ID NO: 2066733 - DNA, 25 bp, Homo sapien
cagtcccaatccttggagaaaacac

SEQ ID NO: 2066734 - DNA, 25 bp, Homo sapien
agacacacagccaagatccctgact

SEQ ID NO: 2066735 - DNA, 25 bp, Homo sapien
gccgaggcggcgttcatgtctaacc

SEQ ID NO: 2066736 - DNA, 25 bp, Homo sapien
ggcgcacggaattgcaagttcagca

SEQ ID NO: 2066737 - DNA, 25 bp, Homo sapien
gtcgggcaggctaggatgcatcccc

SEQ ID NO: 2066738 - DNA, 25 bp, Homo sapien
cagttcagtttttgcccgttgcatc

SEQ ID NO: 2066739 - DNA, 25 bp, Homo sapien
catttttcctcagatcgtcagttac

SEQ ID NO: 2066740 - DNA, 25 bp, Homo sapien
tgaaatttattcgagtttacatccc

SEQ ID NO: 2066741 - DNA, 25 bp, Homo sapien
tccctcggaggcactttgaaattta

SEQ ID NO: 2066742 - DNA, 25 bp, Homo sapien
taagtccctgttcgccagcactgta

SEQ ID NO: 2066743 - DNA, 25 bp, Homo sapien
caagcgtgctttatccggtatatgc

SEQ ID NO: 2066744 - DNA, 25 bp, Homo sapien
gcacttgagttcctaggcacgctaa

SEQ ID NO: 2066745 - DNA, 25 bp, Homo sapien
cctggtattgctagatgtgcgagta

SEQ ID NO: 2066746 - DNA, 25 bp, Homo sapien
cttgttccaagtttagaggtgtctc

SEQ ID NO: 2066747 - DNA, 25 bp, Homo sapien
cagtcctgctccagggatatccaca

SEQ ID NO: 2066748 - DNA, 25 bp, Homo sapien
tagtatctcacatgtgtatccccaa

SEQ ID NO: 2066749 - DNA, 25 bp, Homo sapien
gtaatccattcacatccgggaactg

SEQ ID NO: 2066750 - DNA, 25 bp, Homo sapien
tatagagcgctggaagtgtgtgaac

SEQ ID NO: 2066751 - DNA, 25 bp, Homo sapien
taagccacgactgactcaacccatt

SEQ ID NO: 2066752 - DNA, 25 bp, Homo sapien
catttctggccaagcagttaccttc

SEQ ID NO: 2066753 - DNA, 25 bp, Homo sapien
aatgtagtttgtgccataagccacg

SEQ ID NO: 2066754 - DNA, 25 bp, Homo sapien
ctttccctgaggcccaactggactt

SEQ ID NO: 2066755 - DNA, 25 bp, Homo sapien
acaggtcaaaatgccatcttggaaa

SEQ ID NO: 2066756 - DNA, 25 bp, Homo sapien
gcattgagttaaatacgcatctcca

SEQ ID NO: 2066757 - DNA, 25 bp, Homo sapien
caagggcaggagtctattttattca

SEQ ID NO: 2066758 - DNA, 25 bp, Homo sapien
aataatggtgactaagacagcgtcc

SEQ ID NO: 2066759 - DNA, 25 bp, Homo sapien
cctatgccttactcctgcgggttaa

SEQ ID NO: 2066760 - DNA, 25 bp, Homo sapien
cagagggacttctgccagggtaacc

SEQ ID NO: 2066761 - DNA, 25 bp, Homo sapien
tacacccagggaagtggttcacatg

SEQ ID NO: 2066762 - DNA, 25 bp, Homo sapien
catttatataggtgcagaggtcagg

SEQ ID NO: 2066763 - DNA, 25 bp, Homo sapien
gctgattgggcccagactactctgg

SEQ ID NO: 2066764 - DNA, 25 bp, Homo sapien
tccacagagtcaaaagctgcggctg

SEQ ID NO: 2066765 - DNA, 25 bp, Homo sapien
cggctgctgctccaaatcttgcttt

SEQ ID NO: 2066766 - DNA, 25 bp, Homo sapien
tggtaatagttgcaagataagcagc

SEQ ID NO: 2066767 - DNA, 25 bp, Homo sapien
gacagatcacaacactagcattgta

SEQ ID NO: 2066768 - DNA, 25 bp, Homo sapien
ggagtgtgacagatcacaacactag

SEQ ID NO: 2066769 - DNA, 25 bp, Homo sapien
cacaacactagcattgtacctcaaa

SEQ ID NO: 2066770 - DNA, 25 bp, Homo sapien
ctgcaggagtgtgacagatcacaac

SEQ ID NO: 2066771 - DNA, 25 bp, Homo sapien
ttacaaaaccaaagctatatagcac

SEQ ID NO: 2066772 - DNA, 25 bp, Homo sapien
ctcatctgtgtaatttaaaccattt

SEQ ID NO: 2066773 - DNA, 25 bp, Homo sapien
tttgagcaccatctgaagacatttg

SEQ ID NO: 2066774 - DNA, 25 bp, Homo sapien
cattttgagcaccatctgaagacat

SEQ ID NO: 2066775 - DNA, 25 bp, Homo sapien
ttaaaccattttgagcaccatctga

SEQ ID NO: 2066776 - DNA, 25 bp, Homo sapien
caccatgcccgtccaagagataatg

SEQ ID NO: 2066777 - DNA, 25 bp, Homo sapien
accatgcccgtccaagagataatgt

SEQ ID NO: 2066778 - DNA, 25 bp, Homo sapien
ccaccatgcccgtccaagagataat

SEQ ID NO: 2066779 - DNA, 25 bp, Homo sapien
gagataatgttcttagattggtgtt

SEQ ID NO: 2066780 - DNA, 25 bp, Homo sapien
gagtagcagttctcaacccaagtgc

SEQ ID NO: 2066781 - DNA, 25 bp, Homo sapien
cataagtgccaatctacaagaaagg

SEQ ID NO: 2066782 - DNA, 25 bp, Homo sapien
gaggcacctgtgctattttctccag

SEQ ID NO: 2066783 - DNA, 25 bp, Homo sapien
caagtgcatgttacaatgtcctgag

SEQ ID NO: 2066784 - DNA, 25 bp, Homo sapien
gcagacagccgcagcaggtgggaga

SEQ ID NO: 2066785 - DNA, 25 bp, Homo sapien
ctcccagataaagttattccaagca

SEQ ID NO: 2066786 - DNA, 25 bp, Homo sapien
aggagcttgtattgtatcccataag

SEQ ID NO: 2066787 - DNA, 25 bp, Homo sapien
gggcgtaggagcttgtattgtatcc

SEQ ID NO: 2066788 - DNA, 25 bp, Homo sapien
tctcaatctccaagacacttaattt

SEQ ID NO: 2066789 - DNA, 25 bp, Homo sapien
tatataccttctcaatctccaagac

SEQ ID NO: 2066790 - DNA, 25 bp, Homo sapien
ggctctttgttggaccacctctgaa

SEQ ID NO: 2066791 - DNA, 25 bp, Homo sapien
ttctccatagccttaaacatagagg

SEQ ID NO: 2066792 - DNA, 25 bp, Homo sapien
catccaggaggagcaagaggagtga

SEQ ID NO: 2066793 - DNA, 25 bp, Homo sapien
tccaggaggagcaagaggagtgacc

SEQ ID NO: 2066794 - DNA, 25 bp, Homo sapien
caggaggagcaagaggagtgaccac

SEQ ID NO: 2066795 - DNA, 25 bp, Homo sapien
ttatccatccaggaggagcaagagg

SEQ ID NO: 2066796 - DNA, 25 bp, Homo sapien
ccttcagcgttggtgagatcccgct

SEQ ID NO: 2066797 - DNA, 25 bp, Homo sapien
cttcagcgttggtgagatcccgctg

SEQ ID NO: 2066798 - DNA, 25 bp, Homo sapien
tcagcgttggtgagatcccgctgaa

SEQ ID NO: 2066799 - DNA, 25 bp, Homo sapien
agcgttggtgagatcccgctgaagt

SEQ ID NO: 2066800 - DNA, 25 bp, Homo sapien
cctgtaaccaattgagaggtgacag

SEQ ID NO: 2066801 - DNA, 25 bp, Homo sapien
cttgaaatccaagggcctgagcacc

SEQ ID NO: 2066802 - DNA, 25 bp, Homo sapien
tgcatgcctacagagccttatattg

SEQ ID NO: 2066803 - DNA, 25 bp, Homo sapien
cagaactcattgggccttgaaatcc

SEQ ID NO: 2066804 - DNA, 25 bp, Homo sapien
caaggaactggtcaaagcccatgca

SEQ ID NO: 2066805 - DNA, 25 bp, Homo sapien
caaaagcttagtacttccaggagcc

SEQ ID NO: 2066806 - DNA, 25 bp, Homo sapien
ggagccctaggcatccaccaattct

SEQ ID NO: 2066807 - DNA, 25 bp, Homo sapien
gccaaaagcttagtacttccaggag

SEQ ID NO: 2066808 - DNA, 25 bp, Homo sapien
ccaattctgatgctttcagacttct

SEQ ID NO: 2066809 - DNA, 25 bp, Homo sapien
tcctcttggagactgccaagttgca

SEQ ID NO: 2066810 - DNA, 25 bp, Homo sapien
cagaaggatagcatctttgaatggc

SEQ ID NO: 2066811 - DNA, 25 bp, Homo sapien
tggagactgccaagttgcaaacttt

SEQ ID NO: 2066812 - DNA, 25 bp, Homo sapien
gaaggatagcatctttgaatggcca

SEQ ID NO: 2066813 - DNA, 25 bp, Homo sapien
attatctatcaatgaggtattttca

SEQ ID NO: 2066814 - DNA, 25 bp, Homo sapien
tcattaacgctttccttacaaagaa

SEQ ID NO: 2066815 - DNA, 25 bp, Homo sapien
ctttattatctatcaatgaggtatt

SEQ ID NO: 2066816 - DNA, 25 bp, Homo sapien
tattttcattaacgctttccttaca

SEQ ID NO: 2066817 - DNA, 25 bp, Homo sapien
gaggatttagtcttgaacatatgag

SEQ ID NO: 2066818 - DNA, 25 bp, Homo sapien
ttggtgtctctttgaatcactggag

SEQ ID NO: 2066819 - DNA, 25 bp, Homo sapien
tcactggaggatttagtcttgaaca

SEQ ID NO: 2066820 - DNA, 25 bp, Homo sapien
cattccactcttatgcttcccctaa

SEQ ID NO: 2066821 - DNA, 25 bp, Homo sapien
tgcattagaggcaaagtcaagcctg

SEQ ID NO: 2066822 - DNA, 25 bp, Homo sapien
tcaagcctggtgttgacagacacag

SEQ ID NO: 2066823 - DNA, 25 bp, Homo sapien
gacagacacagattctgcacgagct

SEQ ID NO: 2066824 - DNA, 25 bp, Homo sapien
cacgagctttagcagccgtgtcagc

SEQ ID NO: 2066825 - DNA, 25 bp, Homo sapien
ctcatctcgagctggtgagtgccca

SEQ ID NO: 2066826 - DNA, 25 bp, Homo sapien
gaaagcttcaagacgaggtacaaca

SEQ ID NO: 2066827 - DNA, 25 bp, Homo sapien
tagaatttaatggaaccagccctcc

SEQ ID NO: 2066828 - DNA, 25 bp, Homo sapien
gggattcgtacattgctcatctcga

SEQ ID NO: 2066829 - DNA, 25 bp, Homo sapien
ttataactccttgaccatcacatgt

SEQ ID NO: 2066830 - DNA, 25 bp, Homo sapien
tgtgcgaggaagtgccgttctctcc

SEQ ID NO: 2066831 - DNA, 25 bp, Homo sapien
tttataactccttgaccatcacatg

SEQ ID NO: 2066832 - DNA, 25 bp, Homo sapien
acatgtgcgaggaagtgccgttctc

SEQ ID NO: 2066833 - DNA, 25 bp, Homo sapien
gtcattcttcgttcaaggacctgct

SEQ ID NO: 2066834 - DNA, 25 bp, Homo sapien
tagtcattcttcgttcaaggacctg

SEQ ID NO: 2066835 - DNA, 25 bp, Homo sapien
ggctggagaattcatcatcccttct

SEQ ID NO: 2066836 - DNA, 25 bp, Homo sapien
tcctagtcattcttcgttcaaggac

SEQ ID NO: 2066837 - DNA, 25 bp, Homo sapien
tgaagatggtattgtgggctctgat

SEQ ID NO: 2066838 - DNA, 25 bp, Homo sapien
aagatggtattgtgggctctgattc

SEQ ID NO: 2066839 - DNA, 25 bp, Homo sapien
atagatgcagataaggctgcttaat

SEQ ID NO: 2066840 - DNA, 25 bp, Homo sapien
tagatgcagataaggctgcttaatt

SEQ ID NO: 2066841 - DNA, 25 bp, Homo sapien
tcactgctctcctcattcaggtgtc

SEQ ID NO: 2066842 - DNA, 25 bp, Homo sapien
ctgatgctgcatccaccggacttca

SEQ ID NO: 2066843 - DNA, 25 bp, Homo sapien
cctgacagaacagaggtgagagccc

SEQ ID NO: 2066844 - DNA, 25 bp, Homo sapien
ttctccagctgagtgtgccctgaca

SEQ ID NO: 2066845 - DNA, 25 bp, Homo sapien
aatagatcctagaactcgggtcagc

SEQ ID NO: 2066846 - DNA, 25 bp, Homo sapien
taatagatcctagaactcgggtcag

SEQ ID NO: 2066847 - DNA, 25 bp, Homo sapien
tagatcctagaactcgggtcagcag

SEQ ID NO: 2066848 - DNA, 25 bp, Homo sapien
gatcctagaactcgggtcagcagga

SEQ ID NO: 2066849 - DNA, 25 bp, Homo sapien
cttcattaatttccaactttgcact

SEQ ID NO: 2066850 - DNA, 25 bp, Homo sapien
actttgcactctcaagagagttcac

SEQ ID NO: 2066851 - DNA, 25 bp, Homo sapien
ggaattccagggactcttcattaat

SEQ ID NO: 2066852 - DNA, 25 bp, Homo sapien
cctccagtgtgactggaggaattcc

SEQ ID NO: 2066853 - DNA, 25 bp, Homo sapien
gcatgctgctcgtaagtggcttgat

SEQ ID NO: 2066854 - DNA, 25 bp, Homo sapien
catttctccttgtgcttagcgcttg

SEQ ID NO: 2066855 - DNA, 25 bp, Homo sapien
gcttgcgaatgcaatgccactggct

SEQ ID NO: 2066856 - DNA, 25 bp, Homo sapien
ttagcgcttggcactgaccttgtgg

SEQ ID NO: 2066857 - DNA, 25 bp, Homo sapien
ctctgctaattggatgacgtcaaca

SEQ ID NO: 2066858 - DNA, 25 bp, Homo sapien
ttctccccgggatagagtctggctc

SEQ ID NO: 2066859 - DNA, 25 bp, Homo sapien
tgctctgtggcaaggacctgcttgg

SEQ ID NO: 2066860 - DNA, 25 bp, Homo sapien
ggctctggagtcacaattgacccgt

SEQ ID NO: 2066861 - DNA, 25 bp, Homo sapien
gatgcttatgactggttccgattag

SEQ ID NO: 2066862 - DNA, 25 bp, Homo sapien
atctgatgcttatgactggttccga

SEQ ID NO: 2066863 - DNA, 25 bp, Homo sapien
cttatgactggttccgattagttga

SEQ ID NO: 2066864 - DNA, 25 bp, Homo sapien
actggttccgattagttgatcctca

SEQ ID NO: 2066865 - DNA, 25 bp, Homo sapien
tcatcacaagcgtcttgcaagggct

SEQ ID NO: 2066866 - DNA, 25 bp, Homo sapien
ttttaaagacgaggactcagaggcc

SEQ ID NO: 2066867 - DNA, 25 bp, Homo sapien
tctctggtacgaggcaaggtgtcga

SEQ ID NO: 2066868 - DNA, 25 bp, Homo sapien
tctcggtgatcaaaaccaaagctgg

SEQ ID NO: 2066869 - DNA, 25 bp, Homo sapien
tccggtggataatgtctcccgttcc

SEQ ID NO: 2066870 - DNA, 25 bp, Homo sapien
cactcttcttcgctggcacattcac

SEQ ID NO: 2066871 - DNA, 25 bp, Homo sapien
tcacgacttaacgtttcaggaatat

SEQ ID NO: 2066872 - DNA, 25 bp, Homo sapien
aagcacccacttcacgacttaacgt

SEQ ID NO: 2066873 - DNA, 25 bp, Homo sapien
ccccggggcccagacagttggtgct

SEQ ID NO: 2066874 - DNA, 25 bp, Homo sapien
gcccagacagttggtgcttaagcgt

SEQ ID NO: 2066875 - DNA, 25 bp, Homo sapien
ccggggcccagacagttggtgctta

SEQ ID NO: 2066876 - DNA, 25 bp, Homo sapien
gggcccagacagttggtgcttaagc

SEQ ID NO: 2066877 - DNA, 25 bp, Homo sapien
ctgcattttcctcgggccgccattt

SEQ ID NO: 2066878 - DNA, 25 bp, Homo sapien
ggaaaaatcacggtcctctaggaga

SEQ ID NO: 2066879 - DNA, 25 bp, Homo sapien
tgagctcagatttcgtttcccgcgg

SEQ ID NO: 2066880 - DNA, 25 bp, Homo sapien
atttatccgggaacgaacgtgcgtg

SEQ ID NO: 2066881 - DNA, 25 bp, Homo sapien
gacattttaatgtcggatgttctaa

SEQ ID NO: 2066882 - DNA, 25 bp, Homo sapien
ctgctctcccgccaccgaagtcgct

SEQ ID NO: 2066883 - DNA, 25 bp, Homo sapien
accgaagtcgctgggaaattctgct

SEQ ID NO: 2066884 - DNA, 25 bp, Homo sapien
actgagacattttaatgtcggatgt

SEQ ID NO: 2066885 - DNA, 25 bp, Homo sapien
gctagtcgggctccgcgtgctcccc

SEQ ID NO: 2066886 - DNA, 25 bp, Homo sapien
ctgctagtcgggctccgcgtgctcc

SEQ ID NO: 2066887 - DNA, 25 bp, Homo sapien
ctccctgctagtcgggctccgcgtg

SEQ ID NO: 2066888 - DNA, 25 bp, Homo sapien
ccctgctagtcgggctccgcgtgct

SEQ ID NO: 2066889 - DNA, 25 bp, Homo sapien
ccttgtctcgggtcgtgctgtcgcg

SEQ ID NO: 2066890 - DNA, 25 bp, Homo sapien
gcgacactggggacccaacaggccg

SEQ ID NO: 2066891 - DNA, 25 bp, Homo sapien
gccccaggtgccttgtctcgggtcg

SEQ ID NO: 2066892 - DNA, 25 bp, Homo sapien
tcgggtcgtgctgtcgcgcgacact

SEQ ID NO: 2066893 - DNA, 25 bp, Homo sapien
gcggctcagcggcctcccacccagg

SEQ ID NO: 2066894 - DNA, 25 bp, Homo sapien
tgcggctcagcggcctcccacccag

SEQ ID NO: 2066895 - DNA, 25 bp, Homo sapien
tctctatgattttgtgatcagtaga

SEQ ID NO: 2066896 - DNA, 25 bp, Homo sapien
agggcattatgtgtgaatcaagtac

SEQ ID NO: 2066897 - DNA, 25 bp, Homo sapien
ctgcgtcagaaagttggtcacatgg

SEQ ID NO: 2066898 - DNA, 25 bp, Homo sapien
tgaagtctctttcaaggctaagatc

SEQ ID NO: 2066899 - DNA, 25 bp, Homo sapien
cagaagcagggggtctttgtctctc

SEQ ID NO: 2066900 - DNA, 25 bp, Homo sapien
agaagcagggggtctttgtctctcc

SEQ ID NO: 2066901 - DNA, 25 bp, Homo sapien
tatgcggattatctagtcctttagg

SEQ ID NO: 2066902 - DNA, 25 bp, Homo sapien
tgataacccaaagttaatgacatat

SEQ ID NO: 2066903 - DNA, 25 bp, Homo sapien
gattctttgcaccattgattctttc

SEQ ID NO: 2066904 - DNA, 25 bp, Homo sapien
taatcaggaagtcgaatatgcggat

SEQ ID NO: 2066905 - DNA, 25 bp, Homo sapien
gtgttctggaaaatgccggttcgaa

SEQ ID NO: 2066906 - DNA, 25 bp, Homo sapien
gctgaatgctgactttaggtgccca

SEQ ID NO: 2066907 - DNA, 25 bp, Homo sapien
tatgagcagtgtagtgcccagtcct

SEQ ID NO: 2066908 - DNA, 25 bp, Homo sapien
ttcgaattgcaaggaggcagaatca

SEQ ID NO: 2066909 - DNA, 25 bp, Homo sapien
gaagatgtgtgagctccccctggtg

SEQ ID NO: 2066910 - DNA, 25 bp, Homo sapien
agatgtgtgagctccccctggtgct

SEQ ID NO: 2066911 - DNA, 25 bp, Homo sapien
gatgtgtgagctccccctggtgctt

SEQ ID NO: 2066912 - DNA, 25 bp, Homo sapien
aggaagatgtgtgagctccccctgg

SEQ ID NO: 2066913 - DNA, 25 bp, Homo sapien
ccctttttaatgacatttctctgat

SEQ ID NO: 2066914 - DNA, 25 bp, Homo sapien
gacatttctctgatttgcactgcca

SEQ ID NO: 2066915 - DNA, 25 bp, Homo sapien
ccccctttttaatgacatttctctg

SEQ ID NO: 2066916 - DNA, 25 bp, Homo sapien
tgtgtgcacgcacccccccttttta

SEQ ID NO: 2066917 - DNA, 25 bp, Homo sapien
tctcctacttcagtgatccagcatc

SEQ ID NO: 2066918 - DNA, 25 bp, Homo sapien
ctacttcagtgatccagcatccaca

SEQ ID NO: 2066919 - DNA, 25 bp, Homo sapien
tcctacttcagtgatccagcatcca

SEQ ID NO: 2066920 - DNA, 25 bp, Homo sapien
cctctctcctacttcagtgatccag

SEQ ID NO: 2066921 - DNA, 25 bp, Homo sapien
gtaggtaactaaatctttggcttca

SEQ ID NO: 2066922 - DNA, 25 bp, Homo sapien
actggcccttttctgatggattagg

SEQ ID NO: 2066923 - DNA, 25 bp, Homo sapien
gagtagcccttaaatggaggctgaa

SEQ ID NO: 2066924 - DNA, 25 bp, Homo sapien
gattaggtagagtgacatggcctga

SEQ ID NO: 2066925 - DNA, 25 bp, Homo sapien
gaaaagcaatattgtgttggcagac

SEQ ID NO: 2066926 - DNA, 25 bp, Homo sapien
gggtagacagctgacttcgtgctca

SEQ ID NO: 2066927 - DNA, 25 bp, Homo sapien
aaagattgagtaaggcttcgtttct

SEQ ID NO: 2066928 - DNA, 25 bp, Homo sapien
tatcaaagggtgtttcacggccaga

SEQ ID NO: 2066929 - DNA, 25 bp, Homo sapien
tgctcagatctgctactgatatcaa

SEQ ID NO: 2066930 - DNA, 25 bp, Homo sapien
tcataacgatttgaaatacagagct

SEQ ID NO: 2066931 - DNA, 25 bp, Homo sapien
gaggaaacatcttgttcataacgat

SEQ ID NO: 2066932 - DNA, 25 bp, Homo sapien
gagcttaaagtttcatgcactgaat

SEQ ID NO: 2066933 - DNA, 25 bp, Homo sapien
gaaacatcttgttcataacgatttg

SEQ ID NO: 2066934 - DNA, 25 bp, Homo sapien
caattcagccttgcggttttcgttt

SEQ ID NO: 2066935 - DNA, 25 bp, Homo sapien
ctaggcattgcgcaattcagccttg

SEQ ID NO: 2066936 - DNA, 25 bp, Homo sapien
gcattgcgcaattcagccttgcggt

SEQ ID NO: 2066937 - DNA, 25 bp, Homo sapien
cagccttgcggttttcgtttctttg

SEQ ID NO: 2066938 - DNA, 25 bp, Homo sapien
tttggcctaggtgctgtgcagagct

SEQ ID NO: 2066939 - DNA, 25 bp, Homo sapien
caaggtttggctttgtaaacgctgc

SEQ ID NO: 2066940 - DNA, 25 bp, Homo sapien
tgggcttgggctgttgattgctttt

SEQ ID NO: 2066941 - DNA, 25 bp, Homo sapien
tgttttctaatgtgctgttgtgtgg

SEQ ID NO: 2066942 - DNA, 25 bp, Homo sapien
gcatccatcccagcaagtctctctc

SEQ ID NO: 2066943 - DNA, 25 bp, Homo sapien
tggtctctggttgggcagtcacccc

SEQ ID NO: 2066944 - DNA, 25 bp, Homo sapien
tccatcccagcaagtctctctccat

SEQ ID NO: 2066945 - DNA, 25 bp, Homo sapien
ttcctttggtctctggttgggcagt

SEQ ID NO: 2066946 - DNA, 25 bp, Homo sapien
gtcttcccagcccactagtctggaa

SEQ ID NO: 2066947 - DNA, 25 bp, Homo sapien
caaagaacaggatggtgtcgaagac

SEQ ID NO: 2066948 - DNA, 25 bp, Homo sapien
tagtctggaacaagtcagtctcaaa

SEQ ID NO: 2066949 - DNA, 25 bp, Homo sapien
tctcaaacataacaacagacactgg

SEQ ID NO: 2066950 - DNA, 25 bp, Homo sapien
gctacaggaaacagaaacatcaccc

SEQ ID NO: 2066951 - DNA, 25 bp, Homo sapien
caggacagaggcagattgtgactca

SEQ ID NO: 2066952 - DNA, 25 bp, Homo sapien
tgcaggtggaaagtgggcctttcgt

SEQ ID NO: 2066953 - DNA, 25 bp, Homo sapien
ggccttggcgcgagacaggacagag

SEQ ID NO: 2066954 - DNA, 25 bp, Homo sapien
tggaaaggacgaggttctggtcctg

SEQ ID NO: 2066955 - DNA, 25 bp, Homo sapien
agcattgaattctggggtgactttc

SEQ ID NO: 2066956 - DNA, 25 bp, Homo sapien
tgactgctctctgcccggtgcaccc

SEQ ID NO: 2066957 - DNA, 25 bp, Homo sapien
ctgcccggtgcacccatccccgcta

SEQ ID NO: 2066958 - DNA, 25 bp, Homo sapien
gatacaatgggatttctccttggcc

SEQ ID NO: 2066959 - DNA, 25 bp, Homo sapien
tctgggttacatctcgatacaatgg

SEQ ID NO: 2066960 - DNA, 25 bp, Homo sapien
tccttggaagatgcctatctgggtt

SEQ ID NO: 2066961 - DNA, 25 bp, Homo sapien
ttggccaccttgcaatgacccatgt

SEQ ID NO: 2066962 - DNA, 25 bp, Homo sapien
tttctggcgttcttccactaatggc

SEQ ID NO: 2066963 - DNA, 25 bp, Homo sapien
gctgttaatcattttctggcgttct

SEQ ID NO: 2066964 - DNA, 25 bp, Homo sapien
tcattttctggcgttcttccactaa

SEQ ID NO: 2066965 - DNA, 25 bp, Homo sapien
tgttaatcattttctggcgttcttc

SEQ ID NO: 2066966 - DNA, 25 bp, Homo sapien
tttgcagacatcatgtaattaatcc

SEQ ID NO: 2066967 - DNA, 25 bp, Homo sapien
ccggaggttctcaaactgctttgca

SEQ ID NO: 2066968 - DNA, 25 bp, Homo sapien
atcatgtaattaatccctataaagc

SEQ ID NO: 2066969 - DNA, 25 bp, Homo sapien
atttctatagcacctttcccggagg

SEQ ID NO: 2066970 - DNA, 25 bp, Homo sapien
tgtgttctgtgaactctacagcagg

SEQ ID NO: 2066971 - DNA, 25 bp, Homo sapien
aaaccacgttctgatgattgtgttg

SEQ ID NO: 2066972 - DNA, 25 bp, Homo sapien
tctacagcaggcataaggtttgctg

SEQ ID NO: 2066973 - DNA, 25 bp, Homo sapien
ttgctgccaaaaaaaccacgttctg

SEQ ID NO: 2066974 - DNA, 25 bp, Homo sapien
gtaagtatgatggaatccttgtccc

SEQ ID NO: 2066975 - DNA, 25 bp, Homo sapien
gtttgtaagtatgatggaatccttg

SEQ ID NO: 2066976 - DNA, 25 bp, Homo sapien
ggaatccttgtccctagggagctca

SEQ ID NO: 2066977 - DNA, 25 bp, Homo sapien
gaatccttgtccctagggagctcac

SEQ ID NO: 2066978 - DNA, 25 bp, Homo sapien
gaggtgatgggtaggccttttccaa

SEQ ID NO: 2066979 - DNA, 25 bp, Homo sapien
tgctagagtcacttcattggtgtca

SEQ ID NO: 2066980 - DNA, 25 bp, Homo sapien
ccaagattccgtttccagagagtca

SEQ ID NO: 2066981 - DNA, 25 bp, Homo sapien
tgatgggtagaccttttccaggagg

SEQ ID NO: 2066982 - DNA, 25 bp, Homo sapien
tgagtgctcaacataatgctggtac

SEQ ID NO: 2066983 - DNA, 25 bp, Homo sapien
gcttgaagaccatgacatagaaccg

SEQ ID NO: 2066984 - DNA, 25 bp, Homo sapien
ttttgtggcatcaggtacgtctgca

SEQ ID NO: 2066985 - DNA, 25 bp, Homo sapien
catagaaccgcaaactgagtgctca

SEQ ID NO: 2066986 - DNA, 25 bp, Homo sapien
acaccgtggtcactttgaaagccct

SEQ ID NO: 2066987 - DNA, 25 bp, Homo sapien
tcttccagcgtgtttacaacaccgt

SEQ ID NO: 2066988 - DNA, 25 bp, Homo sapien
gaaagccctcaatacagaaagccat

SEQ ID NO: 2066989 - DNA, 25 bp, Homo sapien
cacactgttgctgcaactcttccag

SEQ ID NO: 2066990 - DNA, 25 bp, Homo sapien
tgatgcccaaatcaaccagctagaa

SEQ ID NO: 2066991 - DNA, 25 bp, Homo sapien
ctatagtacagatgtccggagacac

SEQ ID NO: 2066992 - DNA, 25 bp, Homo sapien
gagacactggttcgttttgatgccc

SEQ ID NO: 2066993 - DNA, 25 bp, Homo sapien
gggaaagtctaatcaccgttctgca

SEQ ID NO: 2066994 - DNA, 25 bp, Homo sapien
tcactccctgcattactcgcaaatg

SEQ ID NO: 2066995 - DNA, 25 bp, Homo sapien
ttcaattcttgctgtccataaaagc

SEQ ID NO: 2066996 - DNA, 25 bp, Homo sapien
tgtccataaaagctctcatcactcc

SEQ ID NO: 2066997 - DNA, 25 bp, Homo sapien
gttcgcattcgatttaaattctgaa

SEQ ID NO: 2066998 - DNA, 25 bp, Homo sapien
aaccagcgcaacattttcttcccgg

SEQ ID NO: 2066999 - DNA, 25 bp, Homo sapien
accagtagcacaaccagcgcaacat

SEQ ID NO: 2067000 - DNA, 25 bp, Homo sapien
gcgcaacattttcttcccggaatgc

SEQ ID NO: 2067001 - DNA, 25 bp, Homo sapien
ttttcttcccggaatgccttggcca

SEQ ID NO: 2067002 - DNA, 25 bp, Homo sapien
gcacatcggaaatgtaagcttcgca

SEQ ID NO: 2067003 - DNA, 25 bp, Homo sapien
aatccattttcacgtactcgagtcg

SEQ ID NO: 2067004 - DNA, 25 bp, Homo sapien
gagtcgtataacagaaaatttccag

SEQ ID NO: 2067005 - DNA, 25 bp, Homo sapien
cctggatcagcgtaacagcgcacat

SEQ ID NO: 2067006 - DNA, 25 bp, Homo sapien
gaaaggttcctcctgtgactccata

SEQ ID NO: 2067007 - DNA, 25 bp, Homo sapien
tgaaggcggataacagaaaggttcc

SEQ ID NO: 2067008 - DNA, 25 bp, Homo sapien
tgcggcccagctgttattagaacgg

SEQ ID NO: 2067009 - DNA, 25 bp, Homo sapien
aacggaaagcgttggcccttctgca

SEQ ID NO: 2067010 - DNA, 25 bp, Homo sapien
tcaaaggttgcgagaggctgatgct

SEQ ID NO: 2067011 - DNA, 25 bp, Homo sapien
aagaacggcccacatagttcccaag

SEQ ID NO: 2067012 - DNA, 25 bp, Homo sapien
ttcttttccgactgtgtataccaca

SEQ ID NO: 2067013 - DNA, 25 bp, Homo sapien
agctttcatccgcagatgagcctcc

SEQ ID NO: 2067014 - DNA, 25 bp, Homo sapien
ggtctcgcagcgagtacacaatggt

SEQ ID NO: 2067015 - DNA, 25 bp, Homo sapien
cagggtctcgcagcgagtacacaat

SEQ ID NO: 2067016 - DNA, 25 bp, Homo sapien
aggacagggtctcgcagcgagtaca

SEQ ID NO: 2067017 - DNA, 25 bp, Homo sapien
gacagggtctcgcagcgagtacaca

SEQ ID NO: 2067018 - DNA, 25 bp, Homo sapien
gaaggaagctgcttcaacagcactg

SEQ ID NO: 2067019 - DNA, 25 bp, Homo sapien
cataccacctgattgaaggaagctg

SEQ ID NO: 2067020 - DNA, 25 bp, Homo sapien
aaggaagctgcttcaacagcactgt

SEQ ID NO: 2067021 - DNA, 25 bp, Homo sapien
accacctgattgaaggaagctgctt

SEQ ID NO: 2067022 - DNA, 25 bp, Homo sapien
ttggcagcaagttggaggtaagcac

SEQ ID NO: 2067023 - DNA, 25 bp, Homo sapien
tgatctatccctttaattgattttg

SEQ ID NO: 2067024 - DNA, 25 bp, Homo sapien
aacactgtgatctatccctttaatt

SEQ ID NO: 2067025 - DNA, 25 bp, Homo sapien
tggcagcaagttggaggtaagcaca

SEQ ID NO: 2067026 - DNA, 25 bp, Homo sapien
gagttgctgctccacttcaccaagg

SEQ ID NO: 2067027 - DNA, 25 bp, Homo sapien
cagaaatagttacgggagtggccaa

SEQ ID NO: 2067028 - DNA, 25 bp, Homo sapien
tctttgaagcaaattgagggcagcc

SEQ ID NO: 2067029 - DNA, 25 bp, Homo sapien
tcaatcagtcagatagggcagagcc

SEQ ID NO: 2067030 - DNA, 25 bp, Homo sapien
tctttggtttcgaatgatcagtgtc

SEQ ID NO: 2067031 - DNA, 25 bp, Homo sapien
tacagagggctaaatacaatatccc

SEQ ID NO: 2067032 - DNA, 25 bp, Homo sapien
tctccattatgcatgagctgcttct

SEQ ID NO: 2067033 - DNA, 25 bp, Homo sapien
gaagtactcctagcaatttgcatgc

SEQ ID NO: 2067034 - DNA, 25 bp, Homo sapien
gagaatgagatagtcatccagcttt

SEQ ID NO: 2067035 - DNA, 25 bp, Homo sapien
atgagatagtcatccagctttcctg

SEQ ID NO: 2067036 - DNA, 25 bp, Homo sapien
tcatcagagaatgagatagtcatcc

SEQ ID NO: 2067037 - DNA, 25 bp, Homo sapien
tcagagaatgagatagtcatccagc

SEQ ID NO: 2067038 - DNA, 25 bp, Homo sapien
tttttcccatctacaaaagacagca

SEQ ID NO: 2067039 - DNA, 25 bp, Homo sapien
tttcccatctacaaaagacagcagc

SEQ ID NO: 2067040 - DNA, 25 bp, Homo sapien
ttttcccatctacaaaagacagcag

SEQ ID NO: 2067041 - DNA, 25 bp, Homo sapien
ctttttcccatctacaaaagacagc

SEQ ID NO: 2067042 - DNA, 25 bp, Homo sapien
gttagccgtatttgctatttatata

SEQ ID NO: 2067043 - DNA, 25 bp, Homo sapien
ttagccgtatttgctatttatatat

SEQ ID NO: 2067044 - DNA, 25 bp, Homo sapien
tgttagccgtatttgctatttatat

SEQ ID NO: 2067045 - DNA, 25 bp, Homo sapien
tagctttcctccttcgcataggttg

SEQ ID NO: 2067046 - DNA, 25 bp, Homo sapien
cataggttggccctccatggatata

SEQ ID NO: 2067047 - DNA, 25 bp, Homo sapien
cattgtcagccatctgggagaggga

SEQ ID NO: 2067048 - DNA, 25 bp, Homo sapien
gagcccagagccttgaattacgtgg

SEQ ID NO: 2067049 - DNA, 25 bp, Homo sapien
aatgtcacagaggtggaactgtatc

SEQ ID NO: 2067050 - DNA, 25 bp, Homo sapien
ctaggaaacatctttcgatgattct

SEQ ID NO: 2067051 - DNA, 25 bp, Homo sapien
ttaaagtcactctgcttggcttcca

SEQ ID NO: 2067052 - DNA, 25 bp, Homo sapien
tgtatccttccacttagatttgtca

SEQ ID NO: 2067053 - DNA, 25 bp, Homo sapien
tctgtttacgatgaagttggtctgt

SEQ ID NO: 2067054 - DNA, 25 bp, Homo sapien
gaaattctggtgaggagagacttct

SEQ ID NO: 2067055 - DNA, 25 bp, Homo sapien
aagatggctttttggtgaaaacttg

SEQ ID NO: 2067056 - DNA, 25 bp, Homo sapien
tttccgagttgttaaatgacgtgga

SEQ ID NO: 2067057 - DNA, 25 bp, Homo sapien
gctgccactatttggaagtttgttt

SEQ ID NO: 2067058 - DNA, 25 bp, Homo sapien
gatgtgacacgatcatgccaggata

SEQ ID NO: 2067059 - DNA, 25 bp, Homo sapien
ggacaggattatgtgccagccaaga

SEQ ID NO: 2067060 - DNA, 25 bp, Homo sapien
gggacaccctgcgttgaagagaaaa

SEQ ID NO: 2067061 - DNA, 25 bp, Homo sapien
taaatggtacccagtgaagcccact

SEQ ID NO: 2067062 - DNA, 25 bp, Homo sapien
ggtactccaagtagggcaattctcc

SEQ ID NO: 2067063 - DNA, 25 bp, Homo sapien
gctgtgaaggcctgtgaatccaatt

SEQ ID NO: 2067064 - DNA, 25 bp, Homo sapien
aaacttcactaggtcacgttgccag

SEQ ID NO: 2067065 - DNA, 25 bp, Homo sapien
tccaattacagctttcatccagagt

SEQ ID NO: 2067066 - DNA, 25 bp, Homo sapien
cttcatctatgcctccattgcactt

SEQ ID NO: 2067067 - DNA, 25 bp, Homo sapien
tatgcctccattgcacttatctcca

SEQ ID NO: 2067068 - DNA, 25 bp, Homo sapien
tctatgcctccattgcacttatctc

SEQ ID NO: 2067069 - DNA, 25 bp, Homo sapien
tcatctatgcctccattgcacttat

SEQ ID NO: 2067070 - DNA, 25 bp, Homo sapien
caatacccttacaatcatgataatg

SEQ ID NO: 2067071 - DNA, 25 bp, Homo sapien
gatgcgagttaacatttccaggatg

SEQ ID NO: 2067072 - DNA, 25 bp, Homo sapien
ttcttagaacataatccaataccct

SEQ ID NO: 2067073 - DNA, 25 bp, Homo sapien
tgacccttcgcatgatcagtgtttt

SEQ ID NO: 2067074 - DNA, 25 bp, Homo sapien
taatgaggtggcttccctaagcagc

SEQ ID NO: 2067075 - DNA, 25 bp, Homo sapien
gaaagtgagaagaatccctcctggg

SEQ ID NO: 2067076 - DNA, 25 bp, Homo sapien
gacttgtgatttcggcactggccca

SEQ ID NO: 2067077 - DNA, 25 bp, Homo sapien
gacgtgtctgggcaagcatacagca

SEQ ID NO: 2067078 - DNA, 25 bp, Homo sapien
atgatgcttccaccggccaagttcc

SEQ ID NO: 2067079 - DNA, 25 bp, Homo sapien
tgcttccaccggccaagttccaagt

SEQ ID NO: 2067080 - DNA, 25 bp, Homo sapien
tgaatgatgcttccaccggccaagt

SEQ ID NO: 2067081 - DNA, 25 bp, Homo sapien
atgcttccaccggccaagttccaag

SEQ ID NO: 2067082 - DNA, 25 bp, Homo sapien
gctgctgagctagttgagctttcta

SEQ ID NO: 2067083 - DNA, 25 bp, Homo sapien
ggcatatgcagtggcttcattcaga

SEQ ID NO: 2067084 - DNA, 25 bp, Homo sapien
tgtgccagaggtcataaagagctgc

SEQ ID NO: 2067085 - DNA, 25 bp, Homo sapien
ggcccataagtcctctcaagcgatt

SEQ ID NO: 2067086 - DNA, 25 bp, Homo sapien
agctaatgcaggctgtacccagtga

SEQ ID NO: 2067087 - DNA, 25 bp, Homo sapien
cagtgccgcgggcactggagccggc

SEQ ID NO: 2067088 - DNA, 25 bp, Homo sapien
taatgcaggctgtacccagtgagcc

SEQ ID NO: 2067089 - DNA, 25 bp, Homo sapien
agtgccgcgggcactggagccggca

SEQ ID NO: 2067090 - DNA, 25 bp, Homo sapien
gacagcatgcacctgcaactatgcg

SEQ ID NO: 2067091 - DNA, 25 bp, Homo sapien
cctgacgcgagtagctgtggccaga

SEQ ID NO: 2067092 - DNA, 25 bp, Homo sapien
tctcttgccccgtctgaagttggaa

SEQ ID NO: 2067093 - DNA, 25 bp, Homo sapien
tctgcaaagggcaaactgtttagaa

SEQ ID NO: 2067094 - DNA, 25 bp, Homo sapien
gttctcagtttttcatccagaaacc

SEQ ID NO: 2067095 - DNA, 25 bp, Homo sapien
acatgccaatgtgccaactctcctt

SEQ ID NO: 2067096 - DNA, 25 bp, Homo sapien
gacagcataaaagatattgatgaag

SEQ ID NO: 2067097 - DNA, 25 bp, Homo sapien
ctcaaagctgcaaccttcatatgga

SEQ ID NO: 2067098 - DNA, 25 bp, Homo sapien
tgttagggccacacctctgaagagg

SEQ ID NO: 2067099 - DNA, 25 bp, Homo sapien
cttccttatctggttgagccctcca

SEQ ID NO: 2067100 - DNA, 25 bp, Homo sapien
tactcctatttcttgaacacactga

SEQ ID NO: 2067101 - DNA, 25 bp, Homo sapien
ttcttgattgggagacctctggaaa

SEQ ID NO: 2067102 - DNA, 25 bp, Homo sapien
gagacctctggaaattatacttaat

SEQ ID NO: 2067103 - DNA, 25 bp, Homo sapien
ttgcctttcccttgaactaccagaa

SEQ ID NO: 2067104 - DNA, 25 bp, Homo sapien
catcaacagcgtataagttgaaaag

SEQ ID NO: 2067105 - DNA, 25 bp, Homo sapien
aatctcaggtctggttgctgtcctg

SEQ ID NO: 2067106 - DNA, 25 bp, Homo sapien
caggtctggttgctgtcctgagcta

SEQ ID NO: 2067107 - DNA, 25 bp, Homo sapien
aagttgaaaagaatctcaggtctgg

SEQ ID NO: 2067108 - DNA, 25 bp, Homo sapien
tattgcagctcatacaatctcaggg

SEQ ID NO: 2067109 - DNA, 25 bp, Homo sapien
aagagtgacatgcaggaagcttccc

SEQ ID NO: 2067110 - DNA, 25 bp, Homo sapien
cagaaggcgatggacgagcaagtca

SEQ ID NO: 2067111 - DNA, 25 bp, Homo sapien
ttactatcagaagaccagcacagga

SEQ ID NO: 2067112 - DNA, 25 bp, Homo sapien
ttcccaactatgagggtctggaggc

SEQ ID NO: 2067113 - DNA, 25 bp, Homo sapien
tagatgtcctgtcaccaggaaagtg

SEQ ID NO: 2067114 - DNA, 25 bp, Homo sapien
tatctatggtaaatctcaggagctc

SEQ ID NO: 2067115 - DNA, 25 bp, Homo sapien
tctcagagaccttgaaagcccaaat

SEQ ID NO: 2067116 - DNA, 25 bp, Homo sapien
tactctgaaattatcagtagcacga

SEQ ID NO: 2067117 - DNA, 25 bp, Homo sapien
cagtcttcataactccttaagtctc

SEQ ID NO: 2067118 - DNA, 25 bp, Homo sapien
tagcacgatatccagaccacagtct

SEQ ID NO: 2067119 - DNA, 25 bp, Homo sapien
taactccttaagtctccaaatctct

SEQ ID NO: 2067120 - DNA, 25 bp, Homo sapien
ctctctgttgaatttggcatagttc

SEQ ID NO: 2067121 - DNA, 25 bp, Homo sapien
ctcacttgtgttagaccatatggag

SEQ ID NO: 2067122 - DNA, 25 bp, Homo sapien
gtgttagaccatatggagagctctc

SEQ ID NO: 2067123 - DNA, 25 bp, Homo sapien
accatatggagagctctctgttgaa

SEQ ID NO: 2067124 - DNA, 25 bp, Homo sapien
taatcaaagatgagtattttccaaa

SEQ ID NO: 2067125 - DNA, 25 bp, Homo sapien
aatcaaagatgagtattttccaaac

SEQ ID NO: 2067126 - DNA, 25 bp, Homo sapien
ttaatcaaagatgagtattttccaa

SEQ ID NO: 2067127 - DNA, 25 bp, Homo sapien
ctggatctccaatagtgtgtaaaac

SEQ ID NO: 2067128 - DNA, 25 bp, Homo sapien
ctatattgactggatctccaatagt

SEQ ID NO: 2067129 - DNA, 25 bp, Homo sapien
tattgactggatctccaatagtgtg

SEQ ID NO: 2067130 - DNA, 25 bp, Homo sapien
gactggatctccaatagtgtgtaaa

SEQ ID NO: 2067131 - DNA, 25 bp, Homo sapien
gccaggtggttgtggtcccattcca

SEQ ID NO: 2067132 - DNA, 25 bp, Homo sapien
gatggtgtagcagatcagagaacga

SEQ ID NO: 2067133 - DNA, 25 bp, Homo sapien
cacttgttagtcttggctgccctgt

SEQ ID NO: 2067134 - DNA, 25 bp, Homo sapien
gctgctggcaagaaagtcgggtcta

SEQ ID NO: 2067135 - DNA, 25 bp, Homo sapien
ctgtgaagttgccaccatgaaagct

SEQ ID NO: 2067136 - DNA, 25 bp, Homo sapien
atctttcagtaataatgacattgag

SEQ ID NO: 2067137 - DNA, 25 bp, Homo sapien
ttcagtaataatgacattgagctcc

SEQ ID NO: 2067138 - DNA, 25 bp, Homo sapien
cagtaataatgacattgagctcctc

SEQ ID NO: 2067139 - DNA, 25 bp, Homo sapien
tctttcagtaataatgacattgagc

SEQ ID NO: 2067140 - DNA, 25 bp, Homo sapien
cagattcaaactcaagtcgaaggca

SEQ ID NO: 2067141 - DNA, 25 bp, Homo sapien
cttggatgaggctgtcaaagaactg

SEQ ID NO: 2067142 - DNA, 25 bp, Homo sapien
tcatgttcagtagaatatcttcacg

SEQ ID NO: 2067143 - DNA, 25 bp, Homo sapien
tttacaggagaatatcacacagtgc

SEQ ID NO: 2067144 - DNA, 25 bp, Homo sapien
tcctcgttgtcttcatgtggagtag

SEQ ID NO: 2067145 - DNA, 25 bp, Homo sapien
tgtcttcatgtggagtaggcgagga

SEQ ID NO: 2067146 - DNA, 25 bp, Homo sapien
acaggggagaggaggaattggtctt

SEQ ID NO: 2067147 - DNA, 25 bp, Homo sapien
tcatgtggagtaggcgaggaggagg

SEQ ID NO: 2067148 - DNA, 25 bp, Homo sapien
cagctactcgggagattaaggtagg

SEQ ID NO: 2067149 - DNA, 25 bp, Homo sapien
aggctgcagtgagctatgattgggc

SEQ ID NO: 2067150 - DNA, 25 bp, Homo sapien
aaggtaggaggatcaactgaggctg

SEQ ID NO: 2067151 - DNA, 25 bp, Homo sapien
aggatcaactgaggctgggaagtca

SEQ ID NO: 2067152 - DNA, 25 bp, Homo sapien
ttgaatcacagtgcgctgcattcag

SEQ ID NO: 2067153 - DNA, 25 bp, Homo sapien
tgctaattattaagggaaggaccca

SEQ ID NO: 2067154 - DNA, 25 bp, Homo sapien
gatttatggagaaggttcattttga

SEQ ID NO: 2067155 - DNA, 25 bp, Homo sapien
aaaggtaataaggtatgggccagct

SEQ ID NO: 2067156 - DNA, 25 bp, Homo sapien
tgacacaagtaaggcatggacctgt

SEQ ID NO: 2067157 - DNA, 25 bp, Homo sapien
catttgagccttgggtagggatgtc

SEQ ID NO: 2067158 - DNA, 25 bp, Homo sapien
ggacctgttaccatttgagccttgg

SEQ ID NO: 2067159 - DNA, 25 bp, Homo sapien
cttattggtaggatggttaggagat

SEQ ID NO: 2067160 - DNA, 25 bp, Homo sapien
tgatttagtccaactccagacaaga

SEQ ID NO: 2067161 - DNA, 25 bp, Homo sapien
tgcttggcacatggtcaataagtgt

SEQ ID NO: 2067162 - DNA, 25 bp, Homo sapien
tttgtaggtgcccaataatagtaga

SEQ ID NO: 2067163 - DNA, 25 bp, Homo sapien
tgccaggagggtgtataaataacac

SEQ ID NO: 2067164 - DNA, 25 bp, Homo sapien
ggacagtacatcctgggatgggacc

SEQ ID NO: 2067165 - DNA, 25 bp, Homo sapien
ggatgggaccctatgctcccctatg

SEQ ID NO: 2067166 - DNA, 25 bp, Homo sapien
catctctaacttgtggcaaaggaca

SEQ ID NO: 2067167 - DNA, 25 bp, Homo sapien
tgctcccctatgccatttagacaga

SEQ ID NO: 2067168 - DNA, 25 bp, Homo sapien
tatagcatatggctgttaagtttaa

SEQ ID NO: 2067169 - DNA, 25 bp, Homo sapien
agcatatggctgttaagtttaacaa

SEQ ID NO: 2067170 - DNA, 25 bp, Homo sapien
caggaggccggatgtgcacagatcc

SEQ ID NO: 2067171 - DNA, 25 bp, Homo sapien
ggagaaaggcctggccatgaacatt

SEQ ID NO: 2067172 - DNA, 25 bp, Homo sapien
tacgtggttcaagtccggagacaac

SEQ ID NO: 2067173 - DNA, 25 bp, Homo sapien
taacacatacagtgcatccagccag

SEQ ID NO: 2067174 - DNA, 25 bp, Homo sapien
catatacactctctacatgggagga

SEQ ID NO: 2067175 - DNA, 25 bp, Homo sapien
ccagccaggatttgttggagacacc

SEQ ID NO: 2067176 - DNA, 25 bp, Homo sapien
tctcactgcagtgtgcatagctaca

SEQ ID NO: 2067177 - DNA, 25 bp, Homo sapien
ggatacttgtgaaaatgacactgct

SEQ ID NO: 2067178 - DNA, 25 bp, Homo sapien
ctctgatactcgtgaggactctgga

SEQ ID NO: 2067179 - DNA, 25 bp, Homo sapien
gccacgtgtacagattatgccttct

SEQ ID NO: 2067180 - DNA, 25 bp, Homo sapien
tttaagctccaaatctggatttacc

SEQ ID NO: 2067181 - DNA, 25 bp, Homo sapien
agagatatgtaagcagcctgaatgt

SEQ ID NO: 2067182 - DNA, 25 bp, Homo sapien
caagagatatgtaagcagcctgaat

SEQ ID NO: 2067183 - DNA, 25 bp, Homo sapien
aatgtaggatcaatgtaggcaaagc

SEQ ID NO: 2067184 - DNA, 25 bp, Homo sapien
tccaagtcctgttgctcacggtgtc

SEQ ID NO: 2067185 - DNA, 25 bp, Homo sapien
gagcaaatgttcagaaatccaagtc

SEQ ID NO: 2067186 - DNA, 25 bp, Homo sapien
tatggctttgccacagagcaaatgt

SEQ ID NO: 2067187 - DNA, 25 bp, Homo sapien
actgataaagtggattagcctgaga

SEQ ID NO: 2067188 - DNA, 25 bp, Homo sapien
aaatacttagagtagtgatggtggt

SEQ ID NO: 2067189 - DNA, 25 bp, Homo sapien
aaaatacttagagtagtgatggtgg

SEQ ID NO: 2067190 - DNA, 25 bp, Homo sapien
cagcaccaatatcccagcgtcgctg

SEQ ID NO: 2067191 - DNA, 25 bp, Homo sapien
tcccagcgtcgctggagggaatgat

SEQ ID NO: 2067192 - DNA, 25 bp, Homo sapien
caaaacatatgtcagctgtggttcg

SEQ ID NO: 2067193 - DNA, 25 bp, Homo sapien
gtaccctacactactccagcattga

SEQ ID NO: 2067194 - DNA, 25 bp, Homo sapien
ttgatttgtactagagaaacagagc

SEQ ID NO: 2067195 - DNA, 25 bp, Homo sapien
agtccccttgtttgaccaccagaat

SEQ ID NO: 2067196 - DNA, 25 bp, Homo sapien
gataaaagacgtacttcacaggagc

SEQ ID NO: 2067197 - DNA, 25 bp, Homo sapien
tatctctcattgtagcatgaaggaa

SEQ ID NO: 2067198 - DNA, 25 bp, Homo sapien
caaagatagcaagtagataaaagac

SEQ ID NO: 2067199 - DNA, 25 bp, Homo sapien
caggtttaaactctatctctcattg

SEQ ID NO: 2067200 - DNA, 25 bp, Homo sapien
tcctccatgagatgatgcagaatga

SEQ ID NO: 2067201 - DNA, 25 bp, Homo sapien
ctccatgagatgatgcagaatgaaa

SEQ ID NO: 2067202 - DNA, 25 bp, Homo sapien
ttcctccatgagatgatgcagaatg

SEQ ID NO: 2067203 - DNA, 25 bp, Homo sapien
cctccatgagatgatgcagaatgaa

SEQ ID NO: 2067204 - DNA, 25 bp, Homo sapien
gagagctgccaactcagggatattg

SEQ ID NO: 2067205 - DNA, 25 bp, Homo sapien
gctgccaactcagggatattgggcc

SEQ ID NO: 2067206 - DNA, 25 bp, Homo sapien
cagagagctgccaactcagggatat

SEQ ID NO: 2067207 - DNA, 25 bp, Homo sapien
gccaactcagggatattgggcctcc

SEQ ID NO: 2067208 - DNA, 25 bp, Homo sapien
tctgcaccaagttttcatgggccag

SEQ ID NO: 2067209 - DNA, 25 bp, Homo sapien
tctctggggccacatgatctaccat

SEQ ID NO: 2067210 - DNA, 25 bp, Homo sapien
gggccacatgatctaccatctgctc

SEQ ID NO: 2067211 - DNA, 25 bp, Homo sapien
cagggagcaccatgacctctagtct

SEQ ID NO: 2067212 - DNA, 25 bp, Homo sapien
cagagggagagggatttgttgggag

SEQ ID NO: 2067213 - DNA, 25 bp, Homo sapien
ggagaagggagtccaccagagtcct

SEQ ID NO: 2067214 - DNA, 25 bp, Homo sapien
gagagggatttgttgggagaaggga

SEQ ID NO: 2067215 - DNA, 25 bp, Homo sapien
agtccaccagagtccttcctggaga

SEQ ID NO: 2067216 - DNA, 25 bp, Homo sapien
gaagtggaccactcaaacgggtaca

SEQ ID NO: 2067217 - DNA, 25 bp, Homo sapien
caagatcagagttggactgagaagt

SEQ ID NO: 2067218 - DNA, 25 bp, Homo sapien
ctgagaagtggaccactcaaacggg

SEQ ID NO: 2067219 - DNA, 25 bp, Homo sapien
gctgccctgcacaccaagatcagag

SEQ ID NO: 2067220 - DNA, 25 bp, Homo sapien
gaagatggtgattctccaaggccat

SEQ ID NO: 2067221 - DNA, 25 bp, Homo sapien
gcttgacattgcatcctttgctcta

SEQ ID NO: 2067222 - DNA, 25 bp, Homo sapien
cttcttttgatgacttctgaaagac

SEQ ID NO: 2067223 - DNA, 25 bp, Homo sapien
ttgaggtatcacaacttgcttgaca

SEQ ID NO: 2067224 - DNA, 25 bp, Homo sapien
agatagttgaggtatcacaacttgc

SEQ ID NO: 2067225 - DNA, 25 bp, Homo sapien
tattaaccagttgctagaggcaagc

SEQ ID NO: 2067226 - DNA, 25 bp, Homo sapien
catagatggcttccttgacaaaatc

SEQ ID NO: 2067227 - DNA, 25 bp, Homo sapien
ctggcaagggaatatcacaaggtat

SEQ ID NO: 2067228 - DNA, 25 bp, Homo sapien
gatgtgatggtaaaagaacttccaa

SEQ ID NO: 2067229 - DNA, 25 bp, Homo sapien
gggctacagtgtgatgacatcaaaa

SEQ ID NO: 2067230 - DNA, 25 bp, Homo sapien
tccatgctcatcaattgtagaagtc

SEQ ID NO: 2067231 - DNA, 25 bp, Homo sapien
gatttaggcacatccaattccatgc

SEQ ID NO: 2067232 - DNA, 25 bp, Homo sapien
tctgcccattgacacctttgagcgt

SEQ ID NO: 2067233 - DNA, 25 bp, Homo sapien
aattggtgagccatcatcatctagg

SEQ ID NO: 2067234 - DNA, 25 bp, Homo sapien
cttgcaaggaaattggtgagccatc

SEQ ID NO: 2067235 - DNA, 25 bp, Homo sapien
tggtgagccatcatcatctaggcta

SEQ ID NO: 2067236 - DNA, 25 bp, Homo sapien
caaggaaattggtgagccatcatca

SEQ ID NO: 2067237 - DNA, 25 bp, Homo sapien
tcttggctctagaagaagcttctgt

SEQ ID NO: 2067238 - DNA, 25 bp, Homo sapien
tctttccactccactaaggcatagg

SEQ ID NO: 2067239 - DNA, 25 bp, Homo sapien
tcataactttgctccgccaatgggc

SEQ ID NO: 2067240 - DNA, 25 bp, Homo sapien
ttgtgggacaaagctgtgttcttgg

SEQ ID NO: 2067241 - DNA, 25 bp, Homo sapien
ggctccattctgctctacccccaga

SEQ ID NO: 2067242 - DNA, 25 bp, Homo sapien
ctccattctgctctacccccagagg

SEQ ID NO: 2067243 - DNA, 25 bp, Homo sapien
gctccattctgctctacccccagag

SEQ ID NO: 2067244 - DNA, 25 bp, Homo sapien
caagcagtgattttcagtattacca

SEQ ID NO: 2067245 - DNA, 25 bp, Homo sapien
gaagttggatcttgagacaagcagt

SEQ ID NO: 2067246 - DNA, 25 bp, Homo sapien
ttccaaaaatgatgctacagccaca

SEQ ID NO: 2067247 - DNA, 25 bp, Homo sapien
cttccaaaaatgatgctacagccac

SEQ ID NO: 2067248 - DNA, 25 bp, Homo sapien
tctgcaactagtagatccatggtct

SEQ ID NO: 2067249 - DNA, 25 bp, Homo sapien
tcctctctggtgacacgctgtgctg

SEQ ID NO: 2067250 - DNA, 25 bp, Homo sapien
ggaacatgggttgtagttggcttct

SEQ ID NO: 2067251 - DNA, 25 bp, Homo sapien
ggcttctgttgccatggcctaattg

SEQ ID NO: 2067252 - DNA, 25 bp, Homo sapien
cttagagatttgttgagaggctgct

SEQ ID NO: 2067253 - DNA, 25 bp, Homo sapien
gaggctgcttccgagaggttactga

SEQ ID NO: 2067254 - DNA, 25 bp, Homo sapien
gaactactgactactctgaatgagg

SEQ ID NO: 2067255 - DNA, 25 bp, Homo sapien
cagtttgaagattaaggacttagag

SEQ ID NO: 2067256 - DNA, 25 bp, Homo sapien
ctctttccggttgtaagttgcttgg

SEQ ID NO: 2067257 - DNA, 25 bp, Homo sapien
gcacctagcaggaaatgttgaagaa

SEQ ID NO: 2067258 - DNA, 25 bp, Homo sapien
ttggtgtttcacaggaagacaatgg

SEQ ID NO: 2067259 - DNA, 25 bp, Homo sapien
tgttgaagaagcaacgccatgtttg

SEQ ID NO: 2067260 - DNA, 25 bp, Homo sapien
tttgattgtgagttctgtcagttcc

SEQ ID NO: 2067261 - DNA, 25 bp, Homo sapien
gacttcatataaacccctgtgcctt

SEQ ID NO: 2067262 - DNA, 25 bp, Homo sapien
tagtttgccaataggagccattttg

SEQ ID NO: 2067263 - DNA, 25 bp, Homo sapien
caactgtaggttgtatgggacttca

SEQ ID NO: 2067264 - DNA, 25 bp, Homo sapien
tacacaggaaccacagttgtcttaa

SEQ ID NO: 2067265 - DNA, 25 bp, Homo sapien
aaataatcagtcctgttaacaggcc

SEQ ID NO: 2067266 - DNA, 25 bp, Homo sapien
tagtgtggttcacacattgcacaag

SEQ ID NO: 2067267 - DNA, 25 bp, Homo sapien
tacggcatattatgaagcaggagca

SEQ ID NO: 2067268 - DNA, 25 bp, Homo sapien
gcagtcaccagcgcaaaggctgttt

SEQ ID NO: 2067269 - DNA, 25 bp, Homo sapien
caaagcagtcaccagcgcaaaggct

SEQ ID NO: 2067270 - DNA, 25 bp, Homo sapien
aagcagtcaccagcgcaaaggctgt

SEQ ID NO: 2067271 - DNA, 25 bp, Homo sapien
aaagcagtcaccagcgcaaaggctg

SEQ ID NO: 2067272 - DNA, 25 bp, Homo sapien
ctgggataaagcagcaccttttttt

SEQ ID NO: 2067273 - DNA, 25 bp, Homo sapien
gctgggataaagcagcacctttttt

SEQ ID NO: 2067274 - DNA, 25 bp, Homo sapien
ctgctgggataaagcagcacctttt

SEQ ID NO: 2067275 - DNA, 25 bp, Homo sapien
tgctgggataaagcagcaccttttt

SEQ ID NO: 2067276 - DNA, 25 bp, Homo sapien
acattggattcatttgtacagatgt

SEQ ID NO: 2067277 - DNA, 25 bp, Homo sapien
ggattcatttgtacagatgtagcac

SEQ ID NO: 2067278 - DNA, 25 bp, Homo sapien
ttggattcatttgtacagatgtagc

SEQ ID NO: 2067279 - DNA, 25 bp, Homo sapien
atggaaacattggattcatttgtac

SEQ ID NO: 2067280 - DNA, 25 bp, Homo sapien
agcgaccttgattggttagctctcc

SEQ ID NO: 2067281 - DNA, 25 bp, Homo sapien
gaacttggagtagcgaccttgattg

SEQ ID NO: 2067282 - DNA, 25 bp, Homo sapien
taatcatacctgaacttggagtagc

SEQ ID NO: 2067283 - DNA, 25 bp, Homo sapien
catacctgaacttggagtagcgacc

SEQ ID NO: 2067284 - DNA, 25 bp, Homo sapien
tacggcatctctctacttggtgagc

SEQ ID NO: 2067285 - DNA, 25 bp, Homo sapien
cttgaagactgcgaatggaagctcg

SEQ ID NO: 2067286 - DNA, 25 bp, Homo sapien
tcattgctgaccatacctttacggc

SEQ ID NO: 2067287 - DNA, 25 bp, Homo sapien
gaagtgcctgccgtatagatgcaag

SEQ ID NO: 2067288 - DNA, 25 bp, Homo sapien
cttagtagggtctctaacatccacc

SEQ ID NO: 2067289 - DNA, 25 bp, Homo sapien
ttcttctgaccggtggtggaaccag

SEQ ID NO: 2067290 - DNA, 25 bp, Homo sapien
gaaacacacagaataggtatctgca

SEQ ID NO: 2067291 - DNA, 25 bp, Homo sapien
gtgagtccacaaatccttagtaggg

SEQ ID NO: 2067292 - DNA, 25 bp, Homo sapien
gacgcagtacttctccaaacagatg

SEQ ID NO: 2067293 - DNA, 25 bp, Homo sapien
taaggcatagtgtagaagataatcc

SEQ ID NO: 2067294 - DNA, 25 bp, Homo sapien
gataatccggaaggacgcagtactt

SEQ ID NO: 2067295 - DNA, 25 bp, Homo sapien
cagataacaataaggcatagtgtag

SEQ ID NO: 2067296 - DNA, 25 bp, Homo sapien
ctgcaagggtagaagaataatgaga

SEQ ID NO: 2067297 - DNA, 25 bp, Homo sapien
tgagagtggcaatgaaggtcaaaga

SEQ ID NO: 2067298 - DNA, 25 bp, Homo sapien
gaagaataatgagagtggcaatgaa

SEQ ID NO: 2067299 - DNA, 25 bp, Homo sapien
gagtggcaatgaaggtcaaagaaca

SEQ ID NO: 2067300 - DNA, 25 bp, Homo sapien
cttatgaagagttgcataactccac

SEQ ID NO: 2067301 - DNA, 25 bp, Homo sapien
gaagagttgcataactccacttctt

SEQ ID NO: 2067302 - DNA, 25 bp, Homo sapien
tgaagagttgcataactccacttct

SEQ ID NO: 2067303 - DNA, 25 bp, Homo sapien
tatgaagagttgcataactccactt

SEQ ID NO: 2067304 - DNA, 25 bp, Homo sapien
cagtttttcagggtctcctcctttg

SEQ ID NO: 2067305 - DNA, 25 bp, Homo sapien
tctaagagtttattgctggctgaag

SEQ ID NO: 2067306 - DNA, 25 bp, Homo sapien
ggagtacatacctcgaagcttctgt

SEQ ID NO: 2067307 - DNA, 25 bp, Homo sapien
gctgaagtaaaggttctgatggcca

SEQ ID NO: 2067308 - DNA, 25 bp, Homo sapien
tcagcatgttcaaccagaaaacttg

SEQ ID NO: 2067309 - DNA, 25 bp, Homo sapien
tacagcacttgccaatacatcaaaa

SEQ ID NO: 2067310 - DNA, 25 bp, Homo sapien
agcaccctgagagttagtgttacag

SEQ ID NO: 2067311 - DNA, 25 bp, Homo sapien
tagtgttacagcacttgccaataca

SEQ ID NO: 2067312 - DNA, 25 bp, Homo sapien
taaatcagcaccctgagagttagtg

SEQ ID NO: 2067313 - DNA, 25 bp, Homo sapien
taacaaaatgtgcagggtgccaggg

SEQ ID NO: 2067314 - DNA, 25 bp, Homo sapien
ctaggcatttaacaaaatgtgcagg

SEQ ID NO: 2067315 - DNA, 25 bp, Homo sapien
cagggtgccaggggaccagtaggaa

SEQ ID NO: 2067316 - DNA, 25 bp, Homo sapien
atttaacaaaatgtgcagggtgcca

SEQ ID NO: 2067317 - DNA, 25 bp, Homo sapien
gagtgagcaactccaatggccagaa

SEQ ID NO: 2067318 - DNA, 25 bp, Homo sapien
agccccttgaggtgtcccttgagga

SEQ ID NO: 2067319 - DNA, 25 bp, Homo sapien
tgctccccgcggaagaggtcttctt

SEQ ID NO: 2067320 - DNA, 25 bp, Homo sapien
cttgcaccgaaaggaacgtcttgga

SEQ ID NO: 2067321 - DNA, 25 bp, Homo sapien
atatttgaagacactcattccccgt

SEQ ID NO: 2067322 - DNA, 25 bp, Homo sapien
ttgcactcatcagtcatggatattt

SEQ ID NO: 2067323 - DNA, 25 bp, Homo sapien
gaagacactcattccccgtgctcag

SEQ ID NO: 2067324 - DNA, 25 bp, Homo sapien
ggataacaacatgcaggtcatatga

SEQ ID NO: 2067325 - DNA, 25 bp, Homo sapien
cagctgcaagaccaacaagggatgg

SEQ ID NO: 2067326 - DNA, 25 bp, Homo sapien
caagaccaacaagggatgggcagat

SEQ ID NO: 2067327 - DNA, 25 bp, Homo sapien
ggccttcctccatatcatcgagaaa

SEQ ID NO: 2067328 - DNA, 25 bp, Homo sapien
tcgagaaagatgagtccgcacagag

SEQ ID NO: 2067329 - DNA, 25 bp, Homo sapien
aggcaatggcctgaatatccctgct

SEQ ID NO: 2067330 - DNA, 25 bp, Homo sapien
ctgaggcaatggcctgaatatccct

SEQ ID NO: 2067331 - DNA, 25 bp, Homo sapien
tctctgaggcaatggcctgaatatc

SEQ ID NO: 2067332 - DNA, 25 bp, Homo sapien
gaggcaatggcctgaatatccctgc

SEQ ID NO: 2067333 - DNA, 25 bp, Homo sapien
aaagcagcagcggaattgggataga

SEQ ID NO: 2067334 - DNA, 25 bp, Homo sapien
caagagaagtatcagtcactggtcc

SEQ ID NO: 2067335 - DNA, 25 bp, Homo sapien
ggtttcaccaaagacccagatctag

SEQ ID NO: 2067336 - DNA, 25 bp, Homo sapien
cccagaggacggcttgaattaatgt

SEQ ID NO: 2067337 - DNA, 25 bp, Homo sapien
gtttcacaggatctctgtgcttaat

SEQ ID NO: 2067338 - DNA, 25 bp, Homo sapien
tttcacaggatctctgtgcttaatc

SEQ ID NO: 2067339 - DNA, 25 bp, Homo sapien
tgtttcacaggatctctgtgcttaa

SEQ ID NO: 2067340 - DNA, 25 bp, Homo sapien
cattgcatttagtggccgcagcaca

SEQ ID NO: 2067341 - DNA, 25 bp, Homo sapien
gatgattaattgacagttctccagc

SEQ ID NO: 2067342 - DNA, 25 bp, Homo sapien
tggagccaggagcagatgaattctt

SEQ ID NO: 2067343 - DNA, 25 bp, Homo sapien
tgaacttctccgatttgcagggtga

SEQ ID NO: 2067344 - DNA, 25 bp, Homo sapien
cttcttgccttcctgagaccctttt

SEQ ID NO: 2067345 - DNA, 25 bp, Homo sapien
caatgccacacgatgctttgtgaca

SEQ ID NO: 2067346 - DNA, 25 bp, Homo sapien
cacacgatgctttgtgacagctgct

SEQ ID NO: 2067347 - DNA, 25 bp, Homo sapien
acattcctcaatgccacacgatgct

SEQ ID NO: 2067348 - DNA, 25 bp, Homo sapien
gggcctctcacattcaggagcagag

SEQ ID NO: 2067349 - DNA, 25 bp, Homo sapien
cacagaaaattgaagagcttgttca

SEQ ID NO: 2067350 - DNA, 25 bp, Homo sapien
agggtacacagcaaggagcgacaca

SEQ ID NO: 2067351 - DNA, 25 bp, Homo sapien
gcaaggagcgacacagaaaattgaa

SEQ ID NO: 2067352 - DNA, 25 bp, Homo sapien
ccagggtacacagcaaggagcgaca

SEQ ID NO: 2067353 - DNA, 25 bp, Homo sapien
caccatggttgctctgctcccaggt

SEQ ID NO: 2067354 - DNA, 25 bp, Homo sapien
tattccaccatggttgctctgctcc

SEQ ID NO: 2067355 - DNA, 25 bp, Homo sapien
tcctttgcctctattccaccatggt

SEQ ID NO: 2067356 - DNA, 25 bp, Homo sapien
cctctattccaccatggttgctctg

SEQ ID NO: 2067357 - DNA, 25 bp, Homo sapien
gcttcagggtagcatgccttctcct

SEQ ID NO: 2067358 - DNA, 25 bp, Homo sapien
tgtcatattgcttttgcagcttcag

SEQ ID NO: 2067359 - DNA, 25 bp, Homo sapien
ctcaaatttggggatatagtgtcat

SEQ ID NO: 2067360 - DNA, 25 bp, Homo sapien
ttttgcagcttcagggtagcatgcc

SEQ ID NO: 2067361 - DNA, 25 bp, Homo sapien
tgatacatccgtcaaaggaggaaaa

SEQ ID NO: 2067362 - DNA, 25 bp, Homo sapien
catacttgatacatccgtcaaagga

SEQ ID NO: 2067363 - DNA, 25 bp, Homo sapien
tacttgatacatccgtcaaaggagg

SEQ ID NO: 2067364 - DNA, 25 bp, Homo sapien
cttcatacttgatacatccgtcaaa

SEQ ID NO: 2067365 - DNA, 25 bp, Homo sapien
tcttgtaagtggctttccttttgcc

SEQ ID NO: 2067366 - DNA, 25 bp, Homo sapien
agcatatccatttttggcctttgtt

SEQ ID NO: 2067367 - DNA, 25 bp, Homo sapien
cctgtgtgcaactgcccttgtggta

SEQ ID NO: 2067368 - DNA, 25 bp, Homo sapien
aagatttccgttcctatctcttgta

SEQ ID NO: 2067369 - DNA, 25 bp, Homo sapien
tcttccgtttaagtggtggcctgaa

SEQ ID NO: 2067370 - DNA, 25 bp, Homo sapien
tgttagactgatggcttagggcttg

SEQ ID NO: 2067371 - DNA, 25 bp, Homo sapien
ggccccagcacattcttccgtttaa

SEQ ID NO: 2067372 - DNA, 25 bp, Homo sapien
ctaaatgacttgtctactgttagac

SEQ ID NO: 2067373 - DNA, 25 bp, Homo sapien
agatgtcagcttttgagcagcaatg

SEQ ID NO: 2067374 - DNA, 25 bp, Homo sapien
gtcagcttttgagcagcaatgtttg

SEQ ID NO: 2067375 - DNA, 25 bp, Homo sapien
tttgcacctttaattgccttaatca

SEQ ID NO: 2067376 - DNA, 25 bp, Homo sapien
ttaattgccttaatcagtggaaatg

SEQ ID NO: 2067377 - DNA, 25 bp, Homo sapien
agctgtttgctagcgagctgcctct

SEQ ID NO: 2067378 - DNA, 25 bp, Homo sapien
gaagctgtttgctagcgagctgcct

SEQ ID NO: 2067379 - DNA, 25 bp, Homo sapien
cgtggattccagtcctattagggaa

SEQ ID NO: 2067380 - DNA, 25 bp, Homo sapien
ccagtcctattagggaaggagcgag

SEQ ID NO: 2067381 - DNA, 25 bp, Homo sapien
tgtaggataatttctctaaccacct

SEQ ID NO: 2067382 - DNA, 25 bp, Homo sapien
tctctaaccaccttttctcccacaa

SEQ ID NO: 2067383 - DNA, 25 bp, Homo sapien
ttattgtaggataatttctctaacc

SEQ ID NO: 2067384 - DNA, 25 bp, Homo sapien
ttgtaggataatttctctaaccacc

SEQ ID NO: 2067385 - DNA, 25 bp, Homo sapien
tggcacaacgagataagaaaaagtc

SEQ ID NO: 2067386 - DNA, 25 bp, Homo sapien
ggcacaacgagataagaaaaagtcc

SEQ ID NO: 2067387 - DNA, 25 bp, Homo sapien
gcacaacgagataagaaaaagtccc

SEQ ID NO: 2067388 - DNA, 25 bp, Homo sapien
cttggcacaacgagataagaaaaag

SEQ ID NO: 2067389 - DNA, 25 bp, Homo sapien
gaatgttccataaattactgcagcc

SEQ ID NO: 2067390 - DNA, 25 bp, Homo sapien
cagacttgtcaacttccctggaagc

SEQ ID NO: 2067391 - DNA, 25 bp, Homo sapien
tctctaaaattaggcatcggctgag

SEQ ID NO: 2067392 - DNA, 25 bp, Homo sapien
tctggctgtggcaagactccttcaa

SEQ ID NO: 2067393 - DNA, 25 bp, Homo sapien
gaaattgccagtttggtagtgtcat

SEQ ID NO: 2067394 - DNA, 25 bp, Homo sapien
ctgtaatgcacctggtattgtgaga

SEQ ID NO: 2067395 - DNA, 25 bp, Homo sapien
gagaaattgccagtttggtagtgtc

SEQ ID NO: 2067396 - DNA, 25 bp, Homo sapien
caatctgtaatgcacctggtattgt

SEQ ID NO: 2067397 - DNA, 25 bp, Homo sapien
tcaggttgtagaaatggttagtgaa

SEQ ID NO: 2067398 - DNA, 25 bp, Homo sapien
ggttagtgaagtcgggcatctcagc

SEQ ID NO: 2067399 - DNA, 25 bp, Homo sapien
ataggtctgctgtcagttcccataa

SEQ ID NO: 2067400 - DNA, 25 bp, Homo sapien
aggccttcaataggtctgctgtcag

SEQ ID NO: 2067401 - DNA, 25 bp, Homo sapien
tgaccagcgcctcataagttgaatg

SEQ ID NO: 2067402 - DNA, 25 bp, Homo sapien
cattgtcataacatcagccggtgga

SEQ ID NO: 2067403 - DNA, 25 bp, Homo sapien
tgaaccaatctgaaactcgccaagg

SEQ ID NO: 2067404 - DNA, 25 bp, Homo sapien
ccaggtttcaggactctcaggctga

SEQ ID NO: 2067405 - DNA, 25 bp, Homo sapien
tgactgcaatgacaacttaaagatg

SEQ ID NO: 2067406 - DNA, 25 bp, Homo sapien
gtattctgttaacctaagttgccaa

SEQ ID NO: 2067407 - DNA, 25 bp, Homo sapien
tatggactcattatttgactggcaa

SEQ ID NO: 2067408 - DNA, 25 bp, Homo sapien
taaaggtcaggcatatactgcttaa

SEQ ID NO: 2067409 - DNA, 25 bp, Homo sapien
gttcttcatccatagtatccactag

SEQ ID NO: 2067410 - DNA, 25 bp, Homo sapien
ggtttctagcatagagcagcggcat

SEQ ID NO: 2067411 - DNA, 25 bp, Homo sapien
tcaaaatagaaactgctgcacctgg

SEQ ID NO: 2067412 - DNA, 25 bp, Homo sapien
ttttgatcaccccaaatggtttata

SEQ ID NO: 2067413 - DNA, 25 bp, Homo sapien
ctctggttccattagagtcagggaa

SEQ ID NO: 2067414 - DNA, 25 bp, Homo sapien
aacaatctgtagtgtagcagggtgg

SEQ ID NO: 2067415 - DNA, 25 bp, Homo sapien
tgtattcttagacaaggccggctag

SEQ ID NO: 2067416 - DNA, 25 bp, Homo sapien
acaaggccggctagaaggaagatgt

SEQ ID NO: 2067417 - DNA, 25 bp, Homo sapien
tcagccaccctgattccttgggaag

SEQ ID NO: 2067418 - DNA, 25 bp, Homo sapien
ttgaaggtcctgtagagcttgccgc

SEQ ID NO: 2067419 - DNA, 25 bp, Homo sapien
cagtctgatcttgacttggaggtca

SEQ ID NO: 2067420 - DNA, 25 bp, Homo sapien
ggtcagtcagggtatactcagccac

SEQ ID NO: 2067421 - DNA, 25 bp, Homo sapien
tggtggataaagaggctcttctctg

SEQ ID NO: 2067422 - DNA, 25 bp, Homo sapien
agtggtggataaagaggctcttctc

SEQ ID NO: 2067423 - DNA, 25 bp, Homo sapien
gtggtggataaagaggctcttctct

SEQ ID NO: 2067424 - DNA, 25 bp, Homo sapien
gtgtctgtgagtgttgtacccacat

SEQ ID NO: 2067425 - DNA, 25 bp, Homo sapien
gaatctaaagtctccctcgtactgg

SEQ ID NO: 2067426 - DNA, 25 bp, Homo sapien
cactgaagtctttatccatgtaccc

SEQ ID NO: 2067427 - DNA, 25 bp, Homo sapien
tactggccggtgtaaacaaacactg

SEQ ID NO: 2067428 - DNA, 25 bp, Homo sapien
cctgcaagtcattaatgaccttgtg

SEQ ID NO: 2067429 - DNA, 25 bp, Homo sapien
gattcatagaccagatcaaaggcat

SEQ ID NO: 2067430 - DNA, 25 bp, Homo sapien
tccagattcatagaccagatcaaag

SEQ ID NO: 2067431 - DNA, 25 bp, Homo sapien
cagattcatagaccagatcaaaggc

SEQ ID NO: 2067432 - DNA, 25 bp, Homo sapien
tttccagattcatagaccagatcaa

SEQ ID NO: 2067433 - DNA, 25 bp, Homo sapien
gccgcacactctctaaatctattta

SEQ ID NO: 2067434 - DNA, 25 bp, Homo sapien
cggaaggtttcaatggccgccgcac

SEQ ID NO: 2067435 - DNA, 25 bp, Homo sapien
tgttcttctgcggaaggtttcaatg

SEQ ID NO: 2067436 - DNA, 25 bp, Homo sapien
cagaagggcactgacagagcaggct

SEQ ID NO: 2067437 - DNA, 25 bp, Homo sapien
tttggattttgacgggataatagaa

SEQ ID NO: 2067438 - DNA, 25 bp, Homo sapien
aatagaacgcttaatggaagaaatc

SEQ ID NO: 2067439 - DNA, 25 bp, Homo sapien
ttttgacgggataatagaacgctta

SEQ ID NO: 2067440 - DNA, 25 bp, Homo sapien
gggataatagaacgcttaatggaag

SEQ ID NO: 2067441 - DNA, 25 bp, Homo sapien
atagtgaatcccctctgctttgcca

SEQ ID NO: 2067442 - DNA, 25 bp, Homo sapien
tatcaagttcagacttatcaggcca

SEQ ID NO: 2067443 - DNA, 25 bp, Homo sapien
caagttcagacttatcaggccaata

SEQ ID NO: 2067444 - DNA, 25 bp, Homo sapien
ttccacatagtgaatcccctctgct

SEQ ID NO: 2067445 - DNA, 25 bp, Homo sapien
ggtacctcttttgactttctcatgg

SEQ ID NO: 2067446 - DNA, 25 bp, Homo sapien
tttccatgtctcaatgtcccaatga

SEQ ID NO: 2067447 - DNA, 25 bp, Homo sapien
tgacccaaccacagaacaaggcatt

SEQ ID NO: 2067448 - DNA, 25 bp, Homo sapien
cactcacttgtagggctaattggcc

SEQ ID NO: 2067449 - DNA, 25 bp, Homo sapien
ttcctctctgtgcttgatcctgaac

SEQ ID NO: 2067450 - DNA, 25 bp, Homo sapien
tctctgtgcttgatcctgaacaatg

SEQ ID NO: 2067451 - DNA, 25 bp, Homo sapien
cctctctgtgcttgatcctgaacaa

SEQ ID NO: 2067452 - DNA, 25 bp, Homo sapien
tcctctctgtgcttgatcctgaaca

SEQ ID NO: 2067453 - DNA, 25 bp, Homo sapien
cagttgtatgtcgggctgaaaaaat

SEQ ID NO: 2067454 - DNA, 25 bp, Homo sapien
gttgtatgtcgggctgaaaaaatgc

SEQ ID NO: 2067455 - DNA, 25 bp, Homo sapien
tgtatgtcgggctgaaaaaatgctc

SEQ ID NO: 2067456 - DNA, 25 bp, Homo sapien
gtatgtcgggctgaaaaaatgctcc

SEQ ID NO: 2067457 - DNA, 25 bp, Homo sapien
ttaggcgactttttctgagctgagg

SEQ ID NO: 2067458 - DNA, 25 bp, Homo sapien
tcattggcatttgtcatatctcggc

SEQ ID NO: 2067459 - DNA, 25 bp, Homo sapien
tagatggtggcttttttaggcgact

SEQ ID NO: 2067460 - DNA, 25 bp, Homo sapien
ttcaggctctctctcgatcgcagaa

SEQ ID NO: 2067461 - DNA, 25 bp, Homo sapien
tcttttcaagttgctgagtttttga

SEQ ID NO: 2067462 - DNA, 25 bp, Homo sapien
tttctatgcctaacagctcttttca

SEQ ID NO: 2067463 - DNA, 25 bp, Homo sapien
atgccaacaccattggccctgctgg

SEQ ID NO: 2067464 - DNA, 25 bp, Homo sapien
gccctgctggaaaccgattaaacaa

SEQ ID NO: 2067465 - DNA, 25 bp, Homo sapien
ctaaattttcacacacacaaaaatt

SEQ ID NO: 2067466 - DNA, 25 bp, Homo sapien
ttcacacacacaaaaattgcccact

SEQ ID NO: 2067467 - DNA, 25 bp, Homo sapien
aattttcacacacacaaaaattgcc

SEQ ID NO: 2067468 - DNA, 25 bp, Homo sapien
ttttcacacacacaaaaattgccca

SEQ ID NO: 2067469 - DNA, 25 bp, Homo sapien
tacaagctgatacaatagcattgat

SEQ ID NO: 2067470 - DNA, 25 bp, Homo sapien
gctgatacaatagcattgattctga

SEQ ID NO: 2067471 - DNA, 25 bp, Homo sapien
caatagcattgattctgaaagccct

SEQ ID NO: 2067472 - DNA, 25 bp, Homo sapien
gggagaagaatacaagctgatacaa

SEQ ID NO: 2067473 - DNA, 25 bp, Homo sapien
tacggttgtgttgtcgttcgtgctg

SEQ ID NO: 2067474 - DNA, 25 bp, Homo sapien
cgttcgtgctgctgttatctatcat

SEQ ID NO: 2067475 - DNA, 25 bp, Homo sapien
ccgtgcttatcactgctgttacggt

SEQ ID NO: 2067476 - DNA, 25 bp, Homo sapien
tcactgctgttacggttgtgttgtc

SEQ ID NO: 2067477 - DNA, 25 bp, Homo sapien
agccactcccgagctctgagaagca

SEQ ID NO: 2067478 - DNA, 25 bp, Homo sapien
gagaacagagttcacgacagccact

SEQ ID NO: 2067479 - DNA, 25 bp, Homo sapien
ctcagcagtgctgccgaggacatct

SEQ ID NO: 2067480 - DNA, 25 bp, Homo sapien
gagatatacaggtagtgacagccac

SEQ ID NO: 2067481 - DNA, 25 bp, Homo sapien
tgatgcctgatgtagcctggtcctg

SEQ ID NO: 2067482 - DNA, 25 bp, Homo sapien
atgcctgatgtagcctggtcctgag

SEQ ID NO: 2067483 - DNA, 25 bp, Homo sapien
ctgatgcctgatgtagcctggtcct

SEQ ID NO: 2067484 - DNA, 25 bp, Homo sapien
gatgcctgatgtagcctggtcctga

SEQ ID NO: 2067485 - DNA, 25 bp, Homo sapien
ggtgcagcctccttgagtatcccac

SEQ ID NO: 2067486 - DNA, 25 bp, Homo sapien
gctcccactcaaggtgcagcctcct

SEQ ID NO: 2067487 - DNA, 25 bp, Homo sapien
tgcagcctccttgagtatcccacat

SEQ ID NO: 2067488 - DNA, 25 bp, Homo sapien
aaggtgcagcctccttgagtatccc

SEQ ID NO: 2067489 - DNA, 25 bp, Homo sapien
catctatatttagcgagtgttttgc

SEQ ID NO: 2067490 - DNA, 25 bp, Homo sapien
cctgttccctttttatgagttgttg

SEQ ID NO: 2067491 - DNA, 25 bp, Homo sapien
gagtgttttgctaatatccaaggag

SEQ ID NO: 2067492 - DNA, 25 bp, Homo sapien
ctcctgttccctttttatgagttgt

SEQ ID NO: 2067493 - DNA, 25 bp, Homo sapien
cacatgagtggtcagagaaacttaa

SEQ ID NO: 2067494 - DNA, 25 bp, Homo sapien
tatttctttcactcaactcactcca

SEQ ID NO: 2067495 - DNA, 25 bp, Homo sapien
tggaatatttacacatgagtggtca

SEQ ID NO: 2067496 - DNA, 25 bp, Homo sapien
tttacacatgagtggtcagagaaac

SEQ ID NO: 2067497 - DNA, 25 bp, Homo sapien
cccacattagggttgtcaggttcat

SEQ ID NO: 2067498 - DNA, 25 bp, Homo sapien
gcacccgctgcttgttccaatccat

SEQ ID NO: 2067499 - DNA, 25 bp, Homo sapien
ctgttgtaaaaagctcttaactggc

SEQ ID NO: 2067500 - DNA, 25 bp, Homo sapien
taaaaagctcttaactggcttctca

SEQ ID NO: 2067501 - DNA, 25 bp, Homo sapien
gtcttgtggacaacttagctcaaca

SEQ ID NO: 2067502 - DNA, 25 bp, Homo sapien
tagagactgtttgcctctgatgtca

SEQ ID NO: 2067503 - DNA, 25 bp, Homo sapien
caacacttcctgacttaatccacgg

SEQ ID NO: 2067504 - DNA, 25 bp, Homo sapien
taatccacggaattagaacatctgc

SEQ ID NO: 2067505 - DNA, 25 bp, Homo sapien
gaattctacatgaaatcgtgccact

SEQ ID NO: 2067506 - DNA, 25 bp, Homo sapien
tgaattctacatgaaatcgtgccac

SEQ ID NO: 2067507 - DNA, 25 bp, Homo sapien
ggtcactgtctaagtaagggtcagc

SEQ ID NO: 2067508 - DNA, 25 bp, Homo sapien
cgttaggtcactgtctaagtaaggg

SEQ ID NO: 2067509 - DNA, 25 bp, Homo sapien
ggctgagcgaggtccccccacgtta

SEQ ID NO: 2067510 - DNA, 25 bp, Homo sapien
ccccacgttaggtcactgtctaagt

SEQ ID NO: 2067511 - DNA, 25 bp, Homo sapien
aaaagagcggcgtttgtgacctgag

SEQ ID NO: 2067512 - DNA, 25 bp, Homo sapien
ggtgggaaaagagcggcgtttgtga

SEQ ID NO: 2067513 - DNA, 25 bp, Homo sapien
gaacacttccatctgccctttggaa

SEQ ID NO: 2067514 - DNA, 25 bp, Homo sapien
aattgaacacttccatctgcccttt

SEQ ID NO: 2067515 - DNA, 25 bp, Homo sapien
tagggacctttggatctaggctaaa

SEQ ID NO: 2067516 - DNA, 25 bp, Homo sapien
tcaatggtacaaaggcttcactcag

SEQ ID NO: 2067517 - DNA, 25 bp, Homo sapien
gaaggagtgctcctgacccagactt

SEQ ID NO: 2067518 - DNA, 25 bp, Homo sapien
tcttggctcccaaatctaaggatac

SEQ ID NO: 2067519 - DNA, 25 bp, Homo sapien
gtttgtctgagaaagatcttaagcc

SEQ ID NO: 2067520 - DNA, 25 bp, Homo sapien
tgtttgtctgagaaagatcttaagc

SEQ ID NO: 2067521 - DNA, 25 bp, Homo sapien
gatgtttgtctgagaaagatcttaa

SEQ ID NO: 2067522 - DNA, 25 bp, Homo sapien
gagatgtttgtctgagaaagatctt

SEQ ID NO: 2067523 - DNA, 25 bp, Homo sapien
ggagtttgcaagataacgaaaacca

SEQ ID NO: 2067524 - DNA, 25 bp, Homo sapien
tgccctatcagcagctgcccaagat

SEQ ID NO: 2067525 - DNA, 25 bp, Homo sapien
aaccatagagtggaaaatctgcaaa

SEQ ID NO: 2067526 - DNA, 25 bp, Homo sapien
tcagcagctgcccaagatcttggta

SEQ ID NO: 2067527 - DNA, 25 bp, Homo sapien
ttcctacaacagcctatatctagtt

SEQ ID NO: 2067528 - DNA, 25 bp, Homo sapien
atcactgttcatgcatttcctacaa

SEQ ID NO: 2067529 - DNA, 25 bp, Homo sapien
ctacaacagcctatatctagttcat

SEQ ID NO: 2067530 - DNA, 25 bp, Homo sapien
catcactgttcatgcatttcctaca

SEQ ID NO: 2067531 - DNA, 25 bp, Homo sapien
tcagggccggaagacgcttgttaaa

SEQ ID NO: 2067532 - DNA, 25 bp, Homo sapien
tgagcctggcagaacgggtaacata

SEQ ID NO: 2067533 - DNA, 25 bp, Homo sapien
ccccatttgagtgggcccagcttat

SEQ ID NO: 2067534 - DNA, 25 bp, Homo sapien
ttgctcccaacacctaccagtggat

SEQ ID NO: 2067535 - DNA, 25 bp, Homo sapien
gtgatgtccttcaagagccagccat

SEQ ID NO: 2067536 - DNA, 25 bp, Homo sapien
tgtccttcaagagccagccatactc

SEQ ID NO: 2067537 - DNA, 25 bp, Homo sapien
gatgtccttcaagagccagccatac

SEQ ID NO: 2067538 - DNA, 25 bp, Homo sapien
ccttcaagagccagccatactctgg

SEQ ID NO: 2067539 - DNA, 25 bp, Homo sapien
tccatctccaagttttgccaagtgt

SEQ ID NO: 2067540 - DNA, 25 bp, Homo sapien
taaaactgtgttcaatggtagacta

SEQ ID NO: 2067541 - DNA, 25 bp, Homo sapien
taagcactagaaagactgtttccac

SEQ ID NO: 2067542 - DNA, 25 bp, Homo sapien
gatggtgactgctccctcttggatt

SEQ ID NO: 2067543 - DNA, 25 bp, Homo sapien
tttacttactagacatcgccaccca

SEQ ID NO: 2067544 - DNA, 25 bp, Homo sapien
caattgtaaaagtgagaaccttgtg

SEQ ID NO: 2067545 - DNA, 25 bp, Homo sapien
gatctctttcacatggcaagaggag

SEQ ID NO: 2067546 - DNA, 25 bp, Homo sapien
ttaaggcaatgtacccaaaaccata

SEQ ID NO: 2067547 - DNA, 25 bp, Homo sapien
cgttctgctacctggtaatacagca

SEQ ID NO: 2067548 - DNA, 25 bp, Homo sapien
aggaaggcatgcgatattagggtac

SEQ ID NO: 2067549 - DNA, 25 bp, Homo sapien
gctacctggtaatacagcacagcac

SEQ ID NO: 2067550 - DNA, 25 bp, Homo sapien
cgatattagggtacgttctgctacc

SEQ ID NO: 2067551 - DNA, 25 bp, Homo sapien
gaaaagagaaccagcggccatgtgg

SEQ ID NO: 2067552 - DNA, 25 bp, Homo sapien
tgttccagatacaaagtaaggcgca

SEQ ID NO: 2067553 - DNA, 25 bp, Homo sapien
gagacaattaggaggcactgcagta

SEQ ID NO: 2067554 - DNA, 25 bp, Homo sapien
gatgagccagtatctccaaatgcgt

SEQ ID NO: 2067555 - DNA, 25 bp, Homo sapien
aacctactaaattgaactatatgag

SEQ ID NO: 2067556 - DNA, 25 bp, Homo sapien
tctaagattacaaattatcagttcc

SEQ ID NO: 2067557 - DNA, 25 bp, Homo sapien
gagtatcaatacaagcaacatgagt

SEQ ID NO: 2067558 - DNA, 25 bp, Homo sapien
tacaagcaacatgagtaagccttaa

SEQ ID NO: 2067559 - DNA, 25 bp, Homo sapien
cctataatcgctgccaaaaacactg

SEQ ID NO: 2067560 - DNA, 25 bp, Homo sapien
caaacattgagacaaaggatggcag

SEQ ID NO: 2067561 - DNA, 25 bp, Homo sapien
tgatcagggatattaattgcagcca

SEQ ID NO: 2067562 - DNA, 25 bp, Homo sapien
ggaacaagggaggatctgaactatt

SEQ ID NO: 2067563 - DNA, 25 bp, Homo sapien
gagtgttaagatcatcacagaccag

SEQ ID NO: 2067564 - DNA, 25 bp, Homo sapien
tgctctcacaaaggcaaatggtatc

SEQ ID NO: 2067565 - DNA, 25 bp, Homo sapien
cagaccagttaatgtgcccatatac

SEQ ID NO: 2067566 - DNA, 25 bp, Homo sapien
tcagcaatacttaggatgaggcact

SEQ ID NO: 2067567 - DNA, 25 bp, Homo sapien
ctgttccaggttcacttatcaaaat

SEQ ID NO: 2067568 - DNA, 25 bp, Homo sapien
gctcagatatacaaatgtcctttaa

SEQ ID NO: 2067569 - DNA, 25 bp, Homo sapien
aataatttaacatggttagctgttc

SEQ ID NO: 2067570 - DNA, 25 bp, Homo sapien
tttaacatggttagctgttccaggt

SEQ ID NO: 2067571 - DNA, 25 bp, Homo sapien
tacaattgcatgtgtcaagattaca

SEQ ID NO: 2067572 - DNA, 25 bp, Homo sapien
tgcatgtgtcaagattacaatggaa

SEQ ID NO: 2067573 - DNA, 25 bp, Homo sapien
tgtgtcaagattacaatggaaacac

SEQ ID NO: 2067574 - DNA, 25 bp, Homo sapien
tatttacaattgcatgtgtcaagat

SEQ ID NO: 2067575 - DNA, 25 bp, Homo sapien
tgaatgaaacattgacagtctctgg

SEQ ID NO: 2067576 - DNA, 25 bp, Homo sapien
ctctggcgagaatcaagcaattatc

SEQ ID NO: 2067577 - DNA, 25 bp, Homo sapien
gattgcaatatggttgtccagtgtc

SEQ ID NO: 2067578 - DNA, 25 bp, Homo sapien
ctgtagatctgattgcaatatggtt

SEQ ID NO: 2067579 - DNA, 25 bp, Homo sapien
tagtggctttctccttttttgccaa

SEQ ID NO: 2067580 - DNA, 25 bp, Homo sapien
ttagtggctttctccttttttgcca

SEQ ID NO: 2067581 - DNA, 25 bp, Homo sapien
gctgggtcaacatcattcatgagag

SEQ ID NO: 2067582 - DNA, 25 bp, Homo sapien
taaacttctagcagatgtgatacag

SEQ ID NO: 2067583 - DNA, 25 bp, Homo sapien
gacaccatgttagaaagctcacaag

SEQ ID NO: 2067584 - DNA, 25 bp, Homo sapien
gaactggcattatctctatcacaag

SEQ ID NO: 2067585 - DNA, 25 bp, Homo sapien
gtttcacaggttgataactctcaac

SEQ ID NO: 2067586 - DNA, 25 bp, Homo sapien
tgtttcacaggttgataactctcaa

SEQ ID NO: 2067587 - DNA, 25 bp, Homo sapien
tcacaggttgataactctcaacttg

SEQ ID NO: 2067588 - DNA, 25 bp, Homo sapien
tttcacaggttgataactctcaact

SEQ ID NO: 2067589 - DNA, 25 bp, Homo sapien
taaagcacctagttgcaagcccaaa

SEQ ID NO: 2067590 - DNA, 25 bp, Homo sapien
ggctagtgagcaacacggtatggta

SEQ ID NO: 2067591 - DNA, 25 bp, Homo sapien
ggattgtcatcccaaacgtaaagct

SEQ ID NO: 2067592 - DNA, 25 bp, Homo sapien
tttgagctcacttgggcaaaagcag

SEQ ID NO: 2067593 - DNA, 25 bp, Homo sapien
gatagaagctgtagaaatcttgcac

SEQ ID NO: 2067594 - DNA, 25 bp, Homo sapien
cgagaacatgggaagggtgagagca

SEQ ID NO: 2067595 - DNA, 25 bp, Homo sapien
aatcttgcaccaacaatggcgagaa

SEQ ID NO: 2067596 - DNA, 25 bp, Homo sapien
ctaggtaacaaggctgatccagatg

SEQ ID NO: 2067597 - DNA, 25 bp, Homo sapien
cacctagctggtaacgtctgagaat

SEQ ID NO: 2067598 - DNA, 25 bp, Homo sapien
tctgtgcgtgatgcctataagagcc

SEQ ID NO: 2067599 - DNA, 25 bp, Homo sapien
tactagcatcgtactacagggacaa

SEQ ID NO: 2067600 - DNA, 25 bp, Homo sapien
aaaatagctgatacggtgaatggcc

SEQ ID NO: 2067601 - DNA, 25 bp, Homo sapien
ggtcaacactattttcataatgcta

SEQ ID NO: 2067602 - DNA, 25 bp, Homo sapien
gaaggaaaggacactataaggctcg

SEQ ID NO: 2067603 - DNA, 25 bp, Homo sapien
gcccagaacaccaacaagggagtag

SEQ ID NO: 2067604 - DNA, 25 bp, Homo sapien
gacaggaaagctgactgaatgcaga

SEQ ID NO: 2067605 - DNA, 25 bp, Homo sapien
cgaagtatcatttaagcaaacttac

SEQ ID NO: 2067606 - DNA, 25 bp, Homo sapien
ccgaagtatcatttaagcaaactta

SEQ ID NO: 2067607 - DNA, 25 bp, Homo sapien
cccgaagtatcatttaagcaaactt

SEQ ID NO: 2067608 - DNA, 25 bp, Homo sapien
tcttcaccttgattcgactgaacaa

SEQ ID NO: 2067609 - DNA, 25 bp, Homo sapien
caccttgattcgactgaacaaatat

SEQ ID NO: 2067610 - DNA, 25 bp, Homo sapien
tggactggagtaccaataaaagtaa

SEQ ID NO: 2067611 - DNA, 25 bp, Homo sapien
cctggactggagtaccaataaaagt

SEQ ID NO: 2067612 - DNA, 25 bp, Homo sapien
taaatattctccattctttgtaaaa

SEQ ID NO: 2067613 - DNA, 25 bp, Homo sapien
taacataaatattctccattctttg

SEQ ID NO: 2067614 - DNA, 25 bp, Homo sapien
tcttcacaaacatgctttaagttta

SEQ ID NO: 2067615 - DNA, 25 bp, Homo sapien
taattacaatccttcttcacaaaca

SEQ ID NO: 2067616 - DNA, 25 bp, Homo sapien
aagtgatattctttctgatattcct

SEQ ID NO: 2067617 - DNA, 25 bp, Homo sapien
aaagtgatattctttctgatattcc

SEQ ID NO: 2067618 - DNA, 25 bp, Homo sapien
taaagtgatattctttctgatattc

SEQ ID NO: 2067619 - DNA, 25 bp, Homo sapien
ccatagatcggggtaggttgataaa

SEQ ID NO: 2067620 - DNA, 25 bp, Homo sapien
caaaatccatagatcggggtaggtt

SEQ ID NO: 2067621 - DNA, 25 bp, Homo sapien
acttaacataacgaagtggaacaat

SEQ ID NO: 2067622 - DNA, 25 bp, Homo sapien
taacgaagtggaacaatgccatctt

SEQ ID NO: 2067623 - DNA, 25 bp, Homo sapien
ttgattgaatgccacagtaataagc

SEQ ID NO: 2067624 - DNA, 25 bp, Homo sapien
tggcccttgaaatttcatggaataa

SEQ ID NO: 2067625 - DNA, 25 bp, Homo sapien
gattgaatgccacagtaataagcag

SEQ ID NO: 2067626 - DNA, 25 bp, Homo sapien
catggaataaagcttaacaggttga

SEQ ID NO: 2067627 - DNA, 25 bp, Homo sapien
tttcattttaaagggctcttgtaca

SEQ ID NO: 2067628 - DNA, 25 bp, Homo sapien
gggctcttgtacacaccttgagtac

SEQ ID NO: 2067629 - DNA, 25 bp, Homo sapien
cttgtacacaccttgagtacataaa

SEQ ID NO: 2067630 - DNA, 25 bp, Homo sapien
ttaaagggctcttgtacacaccttg

SEQ ID NO: 2067631 - DNA, 25 bp, Homo sapien
ctttcattaagacattcacaaccag

SEQ ID NO: 2067632 - DNA, 25 bp, Homo sapien
cacaaccagctttgttaataaaagg

SEQ ID NO: 2067633 - DNA, 25 bp, Homo sapien
tgtcttttcgtaaacagttgtcaaa

SEQ ID NO: 2067634 - DNA, 25 bp, Homo sapien
ccatgctcatcactttcattaagac

SEQ ID NO: 2067635 - DNA, 25 bp, Homo sapien
agacttacagggaggacttgtagct

SEQ ID NO: 2067636 - DNA, 25 bp, Homo sapien
cagatctgctttaatatgcctgtta

SEQ ID NO: 2067637 - DNA, 25 bp, Homo sapien
ccatgacacagatctgctttaatat

SEQ ID NO: 2067638 - DNA, 25 bp, Homo sapien
tacagggaggacttgtagctccatg

SEQ ID NO: 2067639 - DNA, 25 bp, Homo sapien
aacctgtaagtcattttacataact

SEQ ID NO: 2067640 - DNA, 25 bp, Homo sapien
gataaaactataggaagtgagtgac

SEQ ID NO: 2067641 - DNA, 25 bp, Homo sapien
gatcaattctcactttgtttcgaaa

SEQ ID NO: 2067642 - DNA, 25 bp, Homo sapien
gccttttggaatatctgtgtcctca

SEQ ID NO: 2067643 - DNA, 25 bp, Homo sapien
aaaaatgtaggtgttgctgatatat

SEQ ID NO: 2067644 - DNA, 25 bp, Homo sapien
tgatatattgttggtggcagctgtt

SEQ ID NO: 2067645 - DNA, 25 bp, Homo sapien
tgaagcaattaataatgtgctactc

SEQ ID NO: 2067646 - DNA, 25 bp, Homo sapien
atgacatctgtaataatgacatcaa

SEQ ID NO: 2067647 - DNA, 25 bp, Homo sapien
tgtgctactcttcttaactaatgca

SEQ ID NO: 2067648 - DNA, 25 bp, Homo sapien
ttaactaatgcagccataatgacat

SEQ ID NO: 2067649 - DNA, 25 bp, Homo sapien
gtacatcgacttccaagaaaacagc

SEQ ID NO: 2067650 - DNA, 25 bp, Homo sapien
ctgacactgatgtacatcgacttcc

SEQ ID NO: 2067651 - DNA, 25 bp, Homo sapien
gggcaatcctcaaacatggcccaca

SEQ ID NO: 2067652 - DNA, 25 bp, Homo sapien
ggggcaatcctcaaacatggcccac

SEQ ID NO: 2067653 - DNA, 25 bp, Homo sapien
agaactgaatgctggggcaatcctc

SEQ ID NO: 2067654 - DNA, 25 bp, Homo sapien
gaatgctggggcaatcctcaaacat

SEQ ID NO: 2067655 - DNA, 25 bp, Homo sapien
ccacacccagctaccaagctacatt

SEQ ID NO: 2067656 - DNA, 25 bp, Homo sapien
cccagctaccaagctacattttttt

SEQ ID NO: 2067657 - DNA, 25 bp, Homo sapien
acacccagctaccaagctacatttt

SEQ ID NO: 2067658 - DNA, 25 bp, Homo sapien
cacccagctaccaagctacattttt

SEQ ID NO: 2067659 - DNA, 25 bp, Homo sapien
tgaaagccatacaccaaaaatctaa

SEQ ID NO: 2067660 - DNA, 25 bp, Homo sapien
aaagccatacaccaaaaatctaaga

SEQ ID NO: 2067661 - DNA, 25 bp, Homo sapien
gaaagccatacaccaaaaatctaag

SEQ ID NO: 2067662 - DNA, 25 bp, Homo sapien
agcagactgaagtggagctctgagc

SEQ ID NO: 2067663 - DNA, 25 bp, Homo sapien
aaagcagactgaagtggagctctga

SEQ ID NO: 2067664 - DNA, 25 bp, Homo sapien
cagactgaagtggagctctgagcca

SEQ ID NO: 2067665 - DNA, 25 bp, Homo sapien
actgaagtggagctctgagccagtg

SEQ ID NO: 2067666 - DNA, 25 bp, Homo sapien
agggatccccgcatagcaatgtccc

SEQ ID NO: 2067667 - DNA, 25 bp, Homo sapien
gcattatccacaacagccaaaggaa

SEQ ID NO: 2067668 - DNA, 25 bp, Homo sapien
tgagccatcgtctcaaaactgcact

SEQ ID NO: 2067669 - DNA, 25 bp, Homo sapien
caatgtcccctagcagcattatcca

SEQ ID NO: 2067670 - DNA, 25 bp, Homo sapien
gatcgccccatctgaatcttcaaag

SEQ ID NO: 2067671 - DNA, 25 bp, Homo sapien
tctggagatgcaaatgacagctggc

SEQ ID NO: 2067672 - DNA, 25 bp, Homo sapien
aaattaagcttttggagctctggag

SEQ ID NO: 2067673 - DNA, 25 bp, Homo sapien
caaaggctttagagagatgtaggtg

SEQ ID NO: 2067674 - DNA, 25 bp, Homo sapien
gctggaaggaataggggcgggccac

SEQ ID NO: 2067675 - DNA, 25 bp, Homo sapien
ggctggaaggaataggggcgggcca

SEQ ID NO: 2067676 - DNA, 25 bp, Homo sapien
ccaaaaccagtttgtcaaagaattg

SEQ ID NO: 2067677 - DNA, 25 bp, Homo sapien
caaaaccagtttgtcaaagaattga

SEQ ID NO: 2067678 - DNA, 25 bp, Homo sapien
cgaggcctaattccggcagctcctg

SEQ ID NO: 2067679 - DNA, 25 bp, Homo sapien
gggctgcggcgactgccggacactc

SEQ ID NO: 2067680 - DNA, 25 bp, Homo sapien
gactgccggacactccggggcagca

SEQ ID NO: 2067681 - DNA, 25 bp, Homo sapien
gagaaacgaggcctaattccggcag

SEQ ID NO: 2067682 - DNA, 25 bp, Homo sapien
cctctcatggtgaacttgaccacgg

SEQ ID NO: 2067683 - DNA, 25 bp, Homo sapien
ctggaaatccgggtcgctcccgacg

SEQ ID NO: 2067684 - DNA, 25 bp, Homo sapien
ttgaccacggcgagtctggagcccg

SEQ ID NO: 2067685 - DNA, 25 bp, Homo sapien
tgaacttgaccacggcgagtctgga

SEQ ID NO: 2067686 - DNA, 25 bp, Homo sapien
gagcccggcagggtggccgcgacgc

SEQ ID NO: 2067687 - DNA, 25 bp, Homo sapien
agagagcccggcagggtggccgcga

SEQ ID NO: 2067688 - DNA, 25 bp, Homo sapien
cagggtggccgcgacgccactggct

SEQ ID NO: 2067689 - DNA, 25 bp, Homo sapien
gggtggccgcgacgccactggcttt

SEQ ID NO: 2067690 - DNA, 25 bp, Homo sapien
tcagtgccgagtcacgccagggagc

SEQ ID NO: 2067691 - DNA, 25 bp, Homo sapien
aggccgaggcctggacagaagaggt

SEQ ID NO: 2067692 - DNA, 25 bp, Homo sapien
aagaggtggcgaccgccgagtcttc

SEQ ID NO: 2067693 - DNA, 25 bp, Homo sapien
ttctcccgggactctcagtgccgag

SEQ ID NO: 2067694 - DNA, 25 bp, Homo sapien
agtagcctcgcgctaacttgagcgg

SEQ ID NO: 2067695 - DNA, 25 bp, Homo sapien
gcgtcgtccggtttggccttcagcg

SEQ ID NO: 2067696 - DNA, 25 bp, Homo sapien
gcatccgcgtttcccagatctgagg

SEQ ID NO: 2067697 - DNA, 25 bp, Homo sapien
tcaaaagttggcatatgcatccgcg

SEQ ID NO: 2067698 - DNA, 25 bp, Homo sapien
ctcctgtactgtattcggggcaggt

SEQ ID NO: 2067699 - DNA, 25 bp, Homo sapien
agatgctcctgtactgtattcgggg

SEQ ID NO: 2067700 - DNA, 25 bp, Homo sapien
cccggggttcttagctgctgtccag

SEQ ID NO: 2067701 - DNA, 25 bp, Homo sapien
ccggggttcttagctgctgtccagg

SEQ ID NO: 2067702 - DNA, 25 bp, Homo sapien
tttaaatggcggccttctcactgtg

SEQ ID NO: 2067703 - DNA, 25 bp, Homo sapien
acttttaaatggcggccttctcact

SEQ ID NO: 2067704 - DNA, 25 bp, Homo sapien
ttttaaatggcggccttctcactgt

SEQ ID NO: 2067705 - DNA, 25 bp, Homo sapien
cttttaaatggcggccttctcactg

SEQ ID NO: 2067706 - DNA, 25 bp, Homo sapien
cccatggcaactggtggaaagcacc

SEQ ID NO: 2067707 - DNA, 25 bp, Homo sapien
gtacatcactcctcacagtagtggg

SEQ ID NO: 2067708 - DNA, 25 bp, Homo sapien
gccagactgagtaacttgaccacaa

SEQ ID NO: 2067709 - DNA, 25 bp, Homo sapien
tgtatgtgtagctcagcatagtgcc

SEQ ID NO: 2067710 - DNA, 25 bp, Homo sapien
aaatgctaggcatctgacaatttca

SEQ ID NO: 2067711 - DNA, 25 bp, Homo sapien
gcaaatgctaggcatctgacaattt

SEQ ID NO: 2067712 - DNA, 25 bp, Homo sapien
catggagcaaatgctaggcatctga

SEQ ID NO: 2067713 - DNA, 25 bp, Homo sapien
ggagcaaatgctaggcatctgacaa

SEQ ID NO: 2067714 - DNA, 25 bp, Homo sapien
tgcacttgctacttcatccttcgct

SEQ ID NO: 2067715 - DNA, 25 bp, Homo sapien
cagaagtgtaaacttgcgcaacatc

SEQ ID NO: 2067716 - DNA, 25 bp, Homo sapien
cccaagaaagacgtgcacttgctac

SEQ ID NO: 2067717 - DNA, 25 bp, Homo sapien
tgcgcaacatcctgctcccaagaaa

SEQ ID NO: 2067718 - DNA, 25 bp, Homo sapien
gacagttgcagcgaaagtcacggca

SEQ ID NO: 2067719 - DNA, 25 bp, Homo sapien
ccggcttaggccttgcaagtaggga

SEQ ID NO: 2067720 - DNA, 25 bp, Homo sapien
agacggcggctgtatagcgcttgcc

SEQ ID NO: 2067721 - DNA, 25 bp, Homo sapien
ggtctccatcgtaacgcggctggct

SEQ ID NO: 2067722 - DNA, 25 bp, Homo sapien
ggggcgcccaccggcggtctgatag

SEQ ID NO: 2067723 - DNA, 25 bp, Homo sapien
ctggggcgcccaccggcggtctgat

SEQ ID NO: 2067724 - DNA, 25 bp, Homo sapien
tggggcgcccaccggcggtctgata

SEQ ID NO: 2067725 - DNA, 25 bp, Homo sapien
gggcgcccaccggcggtctgatagg

SEQ ID NO: 2067726 - DNA, 25 bp, Homo sapien
gtatctgattcttaaagctgctttg

SEQ ID NO: 2067727 - DNA, 25 bp, Homo sapien
ggttcgtttgtctttgtctgtatct

SEQ ID NO: 2067728 - DNA, 25 bp, Homo sapien
tgtctgtatctgattcttaaagctg

SEQ ID NO: 2067729 - DNA, 25 bp, Homo sapien
tttgaattccatccatatggttcgt

SEQ ID NO: 2067730 - DNA, 25 bp, Homo sapien
ttgcctgtggccttacgtatttcgc

SEQ ID NO: 2067731 - DNA, 25 bp, Homo sapien
cctgtggccttacgtatttcgccaa

SEQ ID NO: 2067732 - DNA, 25 bp, Homo sapien
tgtggccttacgtatttcgccaaac

SEQ ID NO: 2067733 - DNA, 25 bp, Homo sapien
gcctgtggccttacgtatttcgcca

SEQ ID NO: 2067734 - DNA, 25 bp, Homo sapien
tagagtgttacacaggaatttgtag

SEQ ID NO: 2067735 - DNA, 25 bp, Homo sapien
ctgaggccctgattatgtttgaaca

SEQ ID NO: 2067736 - DNA, 25 bp, Homo sapien
gtttgatttagtcctcctgacaccc

SEQ ID NO: 2067737 - DNA, 25 bp, Homo sapien
agcagatacagtgtaggcatttctt

SEQ ID NO: 2067738 - DNA, 25 bp, Homo sapien
tatttcaggcactttctagaaccag

SEQ ID NO: 2067739 - DNA, 25 bp, Homo sapien
attaccttttaagtgtagtattcag

SEQ ID NO: 2067740 - DNA, 25 bp, Homo sapien
ttttgattagacattcattgggcaa

SEQ ID NO: 2067741 - DNA, 25 bp, Homo sapien
ttcagtttggtgcaacatatttttg

SEQ ID NO: 2067742 - DNA, 25 bp, Homo sapien
cattgttgtgccaatcagaatcacc

SEQ ID NO: 2067743 - DNA, 25 bp, Homo sapien
gatatttggcgaatgcatacatgca

SEQ ID NO: 2067744 - DNA, 25 bp, Homo sapien
aagatgggctgagcatatccggtga

SEQ ID NO: 2067745 - DNA, 25 bp, Homo sapien
taaagagatcttgggctaaagggat

SEQ ID NO: 2067746 - DNA, 25 bp, Homo sapien
gttctaaacaccactacacttggac

SEQ ID NO: 2067747 - DNA, 25 bp, Homo sapien
atctgtaactggttggaccaattag

SEQ ID NO: 2067748 - DNA, 25 bp, Homo sapien
tggttggaccaattagttctaaaca

SEQ ID NO: 2067749 - DNA, 25 bp, Homo sapien
tctaaacaccactacacttggacca

SEQ ID NO: 2067750 - DNA, 25 bp, Homo sapien
ccatatgtcactgatgctgccgggt

SEQ ID NO: 2067751 - DNA, 25 bp, Homo sapien
aatatcggtccagcaaatcaaagcc

SEQ ID NO: 2067752 - DNA, 25 bp, Homo sapien
ctggatgaagtttgcctggatcgcc

SEQ ID NO: 2067753 - DNA, 25 bp, Homo sapien
tgtttatgtcctgccttcacgcctg

SEQ ID NO: 2067754 - DNA, 25 bp, Homo sapien
tgcacctgtcgtttccgctcggtct

SEQ ID NO: 2067755 - DNA, 25 bp, Homo sapien
cattcttcactaatactaagctttt

SEQ ID NO: 2067756 - DNA, 25 bp, Homo sapien
gatgaaaacatcgtttcagttctac

SEQ ID NO: 2067757 - DNA, 25 bp, Homo sapien
ctgatgctgatcactctggctctga

SEQ ID NO: 2067758 - DNA, 25 bp, Homo sapien
catttgggtctgtggtcttaggtga

SEQ ID NO: 2067759 - DNA, 25 bp, Homo sapien
tcttaggtgagagaagccgcgcagg

SEQ ID NO: 2067760 - DNA, 25 bp, Homo sapien
aatattcacctcctcaactaatctg

SEQ ID NO: 2067761 - DNA, 25 bp, Homo sapien
ttcacctcctcaactaatctgcttt

SEQ ID NO: 2067762 - DNA, 25 bp, Homo sapien
tcaacgtgcttgtactgaaatcgcc

SEQ ID NO: 2067763 - DNA, 25 bp, Homo sapien
ctgccatcaacgtgcttgtactgaa

SEQ ID NO: 2067764 - DNA, 25 bp, Homo sapien
gaaatcgcctctaccattgtcatta

SEQ ID NO: 2067765 - DNA, 25 bp, Homo sapien
gcttgtactgaaatcgcctctacca

SEQ ID NO: 2067766 - DNA, 25 bp, Homo sapien
ctgaagagcagaatggcatactggg

SEQ ID NO: 2067767 - DNA, 25 bp, Homo sapien
cagaatggcatactgggctgatgga

SEQ ID NO: 2067768 - DNA, 25 bp, Homo sapien
gagcagaatggcatactgggctgat

SEQ ID NO: 2067769 - DNA, 25 bp, Homo sapien
gaatggcatactgggctgatggact

SEQ ID NO: 2067770 - DNA, 25 bp, Homo sapien
tttttccactttccatcactaccat

SEQ ID NO: 2067771 - DNA, 25 bp, Homo sapien
tatttttccactttccatcactacc

SEQ ID NO: 2067772 - DNA, 25 bp, Homo sapien
tttctatttttccactttccatcac

SEQ ID NO: 2067773 - DNA, 25 bp, Homo sapien
tctatttttccactttccatcacta

SEQ ID NO: 2067774 - DNA, 25 bp, Homo sapien
gcagcctttaccgcccaagcaatat

SEQ ID NO: 2067775 - DNA, 25 bp, Homo sapien
tttaatgtatgacatatcactgtct

SEQ ID NO: 2067776 - DNA, 25 bp, Homo sapien
tgtctactatcttgtattcatcagg

SEQ ID NO: 2067777 - DNA, 25 bp, Homo sapien
actgcagcctttaccgcccaagcaa

SEQ ID NO: 2067778 - DNA, 25 bp, Homo sapien
gagaatgatcaaaaactgcgacaga

SEQ ID NO: 2067779 - DNA, 25 bp, Homo sapien
ggcacaccctaagtaatgctttggg

SEQ ID NO: 2067780 - DNA, 25 bp, Homo sapien
cactttcgtagcgtcaaatttctga

SEQ ID NO: 2067781 - DNA, 25 bp, Homo sapien
tcacattaatcgtctctggaaacac

SEQ ID NO: 2067782 - DNA, 25 bp, Homo sapien
ttcagtaggcggttttcctctcacg

SEQ ID NO: 2067783 - DNA, 25 bp, Homo sapien
taggcggttttcctctcacggtgta

SEQ ID NO: 2067784 - DNA, 25 bp, Homo sapien
tgtaaacaaagcttccggaagcttg

SEQ ID NO: 2067785 - DNA, 25 bp, Homo sapien
gccgagtgatcttgctcagcagttc

SEQ ID NO: 2067786 - DNA, 25 bp, Homo sapien
ggaaaggggcggctgtggttgcagc

SEQ ID NO: 2067787 - DNA, 25 bp, Homo sapien
gcagacttaaacgttccagcctgct

SEQ ID NO: 2067788 - DNA, 25 bp, Homo sapien
tccttgggacagagcacccggggaa

SEQ ID NO: 2067789 - DNA, 25 bp, Homo sapien
gacttaaacgttccagcctgctggc

SEQ ID NO: 2067790 - DNA, 25 bp, Homo sapien
gcagagctctaagttatgccaacaa

SEQ ID NO: 2067791 - DNA, 25 bp, Homo sapien
gacagcgagatcttgggtcctttct

SEQ ID NO: 2067792 - DNA, 25 bp, Homo sapien
tatttactttaggtgcacaggttga

SEQ ID NO: 2067793 - DNA, 25 bp, Homo sapien
cacatgagcctatgaaacctggatt

SEQ ID NO: 2067794 - DNA, 25 bp, Homo sapien
tgatcagtatccctgcagtcccgtg

SEQ ID NO: 2067795 - DNA, 25 bp, Homo sapien
gaaatccataaccagagctgtgctc

SEQ ID NO: 2067796 - DNA, 25 bp, Homo sapien
aaatggtataaaacaatcttgaatc

SEQ ID NO: 2067797 - DNA, 25 bp, Homo sapien
agggcctgcttcagtacattagaat

SEQ ID NO: 2067798 - DNA, 25 bp, Homo sapien
ccagaaatgtgccatagaaacataa

SEQ ID NO: 2067799 - DNA, 25 bp, Homo sapien
tcaattagcctgtggtacaactggt

SEQ ID NO: 2067800 - DNA, 25 bp, Homo sapien
cattataggtcagttttcaagaaca

SEQ ID NO: 2067801 - DNA, 25 bp, Homo sapien
tcaagaacatattaaatcctcacgt

SEQ ID NO: 2067802 - DNA, 25 bp, Homo sapien
tgagggctgttgaccaattctctga

SEQ ID NO: 2067803 - DNA, 25 bp, Homo sapien
ttaggctgagctcctcaagtttgtg

SEQ ID NO: 2067804 - DNA, 25 bp, Homo sapien
aattctctgagaacctacccttgaa

SEQ ID NO: 2067805 - DNA, 25 bp, Homo sapien
tttgtggccccgaaagagctctttg

SEQ ID NO: 2067806 - DNA, 25 bp, Homo sapien
ttcatcccgtaggaaaaatcggtca

SEQ ID NO: 2067807 - DNA, 25 bp, Homo sapien
tcatcccgtaggaaaaatcggtcat

SEQ ID NO: 2067808 - DNA, 25 bp, Homo sapien
ccctacatggaggactggctccagg

SEQ ID NO: 2067809 - DNA, 25 bp, Homo sapien
gaagcctcagcagggattggttcac

SEQ ID NO: 2067810 - DNA, 25 bp, Homo sapien
atccttcgtcttgacagaccctaca

SEQ ID NO: 2067811 - DNA, 25 bp, Homo sapien
cctcagcagggattggttcactgca

SEQ ID NO: 2067812 - DNA, 25 bp, Homo sapien
ggtgggcaaggtatttacaatctgg

SEQ ID NO: 2067813 - DNA, 25 bp, Homo sapien
tacaatctggcaggaaagacaaaga

SEQ ID NO: 2067814 - DNA, 25 bp, Homo sapien
caatctggcaggaaagacaaagatg

SEQ ID NO: 2067815 - DNA, 25 bp, Homo sapien
ctgggtgggcaaggtatttacaatc

SEQ ID NO: 2067816 - DNA, 25 bp, Homo sapien
cagtgctccagtagaatgtgacagt

SEQ ID NO: 2067817 - DNA, 25 bp, Homo sapien
tcagtgctccagtagaatgtgacag

SEQ ID NO: 2067818 - DNA, 25 bp, Homo sapien
agtcagcagtgacaaacaccaatgc

SEQ ID NO: 2067819 - DNA, 25 bp, Homo sapien
catgagtcagcagtgacaaacacca

SEQ ID NO: 2067820 - DNA, 25 bp, Homo sapien
tcatgagtcagcagtgacaaacacc

SEQ ID NO: 2067821 - DNA, 25 bp, Homo sapien
tgagtcagcagtgacaaacaccaat

SEQ ID NO: 2067822 - DNA, 25 bp, Homo sapien
gccttgcaaaccttagtgtcccaca

SEQ ID NO: 2067823 - DNA, 25 bp, Homo sapien
gccttggaagattcggctctgatcc

SEQ ID NO: 2067824 - DNA, 25 bp, Homo sapien
ttccccatggcttcattgcactgag

SEQ ID NO: 2067825 - DNA, 25 bp, Homo sapien
catcctgaatagaggccaaggcccg

SEQ ID NO: 2067826 - DNA, 25 bp, Homo sapien
tgcggatcaagtttacaataaccat

SEQ ID NO: 2067827 - DNA, 25 bp, Homo sapien
catagtaagtcagggtttgaattcc

SEQ ID NO: 2067828 - DNA, 25 bp, Homo sapien
tccctgtgtctgagttgcggatcaa

SEQ ID NO: 2067829 - DNA, 25 bp, Homo sapien
taagtcagggtttgaattccctgtg

SEQ ID NO: 2067830 - DNA, 25 bp, Homo sapien
ttctggcgcattgtcttcctcagtc

SEQ ID NO: 2067831 - DNA, 25 bp, Homo sapien
tgaaggtatgatgaaccagacattt

SEQ ID NO: 2067832 - DNA, 25 bp, Homo sapien
gccaatccaatcaattcccaaatat

SEQ ID NO: 2067833 - DNA, 25 bp, Homo sapien
cagtcttgtcctgtgacttctctaa

SEQ ID NO: 2067834 - DNA, 25 bp, Homo sapien
ctccctgtttctgatgttcctctga

SEQ ID NO: 2067835 - DNA, 25 bp, Homo sapien
tccctgtttctgatgttcctctgac

SEQ ID NO: 2067836 - DNA, 25 bp, Homo sapien
agggatcctccctgtttctgatgtt

SEQ ID NO: 2067837 - DNA, 25 bp, Homo sapien
gatcctccctgtttctgatgttcct

SEQ ID NO: 2067838 - DNA, 25 bp, Homo sapien
tcatggagatagaatggggtctgca

SEQ ID NO: 2067839 - DNA, 25 bp, Homo sapien
gtgtgtactacatccccagactgag

SEQ ID NO: 2067840 - DNA, 25 bp, Homo sapien
catgtccgtgggttcctttcccaag

SEQ ID NO: 2067841 - DNA, 25 bp, Homo sapien
agtcccagcgtcagctctctgagct

SEQ ID NO: 2067842 - DNA, 25 bp, Homo sapien
cagcggagaagccacacttcttatc

SEQ ID NO: 2067843 - DNA, 25 bp, Homo sapien
gaagccacacttcttatcatgtatg

SEQ ID NO: 2067844 - DNA, 25 bp, Homo sapien
cacttcttatcatgtatggctttct

SEQ ID NO: 2067845 - DNA, 25 bp, Homo sapien
gaaggatgaagagcagcggagaagc

SEQ ID NO: 2067846 - DNA, 25 bp, Homo sapien
tcactctctaacatatttctgtgtg

SEQ ID NO: 2067847 - DNA, 25 bp, Homo sapien
ttctttcgtttgtgccttccctgtc

SEQ ID NO: 2067848 - DNA, 25 bp, Homo sapien
gacaccttcccactgatccctatcc

SEQ ID NO: 2067849 - DNA, 25 bp, Homo sapien
ctgaattctcacactgagctcatta

SEQ ID NO: 2067850 - DNA, 25 bp, Homo sapien
tcccactgatccctatccgccgcgc

SEQ ID NO: 2067851 - DNA, 25 bp, Homo sapien
taggggttctgcgaggtcccctgaa

SEQ ID NO: 2067852 - DNA, 25 bp, Homo sapien
tgcaaggtggcctggctgactgttg

SEQ ID NO: 2067853 - DNA, 25 bp, Homo sapien
gtaggggagattgccgtggaccagg

SEQ ID NO: 2067854 - DNA, 25 bp, Homo sapien
caggacagcaccaggataggaaggg

SEQ ID NO: 2067855 - DNA, 25 bp, Homo sapien
caggggttgatcatctgggtttttg

SEQ ID NO: 2067856 - DNA, 25 bp, Homo sapien
cattggcttaggtgtgcacatctca

SEQ ID NO: 2067857 - DNA, 25 bp, Homo sapien
gtccattggcttaggtgtgcacatc

SEQ ID NO: 2067858 - DNA, 25 bp, Homo sapien
tggcttaggtgtgcacatctcactc

SEQ ID NO: 2067859 - DNA, 25 bp, Homo sapien
caaggttcagtccacgctcgtgcat

SEQ ID NO: 2067860 - DNA, 25 bp, Homo sapien
gggtcatcaaggttcagtccacgct

SEQ ID NO: 2067861 - DNA, 25 bp, Homo sapien
cctcaagatcttgggggtcatcaag

SEQ ID NO: 2067862 - DNA, 25 bp, Homo sapien
tcttgggggtcatcaaggttcagtc

SEQ ID NO: 2067863 - DNA, 25 bp, Homo sapien
catgtggcagtcctcacgattgaaa

SEQ ID NO: 2067864 - DNA, 25 bp, Homo sapien
cgtgtaccgaaaatgaagactctcc

SEQ ID NO: 2067865 - DNA, 25 bp, Homo sapien
caagttcagaagcatagcgtgtacc

SEQ ID NO: 2067866 - DNA, 25 bp, Homo sapien
tctggccgttctgacactgggtgtt

SEQ ID NO: 2067867 - DNA, 25 bp, Homo sapien
tattccgtctgcacaggcaaccaag

SEQ ID NO: 2067868 - DNA, 25 bp, Homo sapien
gcctgccgcaaacacacggatggct

SEQ ID NO: 2067869 - DNA, 25 bp, Homo sapien
cagtagaaagctatggctgcaaaac

SEQ ID NO: 2067870 - DNA, 25 bp, Homo sapien
atagccctgggccacaagcgtgggt

SEQ ID NO: 2067871 - DNA, 25 bp, Homo sapien
taaactctgcattgtcatcccagcg

SEQ ID NO: 2067872 - DNA, 25 bp, Homo sapien
ggacctgtccttgtatatgtagaga

SEQ ID NO: 2067873 - DNA, 25 bp, Homo sapien
cactggcactgtatttggacctgtc

SEQ ID NO: 2067874 - DNA, 25 bp, Homo sapien
gatgattgaactccctgtgtacagc

SEQ ID NO: 2067875 - DNA, 25 bp, Homo sapien
caaatgtggaaaggcgtgacgttaa

SEQ ID NO: 2067876 - DNA, 25 bp, Homo sapien
gaaatacttccaccctctaactaga

SEQ ID NO: 2067877 - DNA, 25 bp, Homo sapien
gagaatgtgttttgacaaggccaag

SEQ ID NO: 2067878 - DNA, 25 bp, Homo sapien
ccaagcagtgctgggtgaactttca

SEQ ID NO: 2067879 - DNA, 25 bp, Homo sapien
gaagaatttcaaaaattagatgttc

SEQ ID NO: 2067880 - DNA, 25 bp, Homo sapien
tcaaaaattagatgttcagttcttt

SEQ ID NO: 2067881 - DNA, 25 bp, Homo sapien
gaatttcaaaaattagatgttcagt

SEQ ID NO: 2067882 - DNA, 25 bp, Homo sapien
atttcaaaaattagatgttcagttc

SEQ ID NO: 2067883 - DNA, 25 bp, Homo sapien
ccttaaatgttaccaaatgtgtcag

SEQ ID NO: 2067884 - DNA, 25 bp, Homo sapien
gacagtcccaattcaggattgcctg

SEQ ID NO: 2067885 - DNA, 25 bp, Homo sapien
aatgtgtcagcaaatgttcgttttc

SEQ ID NO: 2067886 - DNA, 25 bp, Homo sapien
tcagcatcccaaacggtaacatgtg

SEQ ID NO: 2067887 - DNA, 25 bp, Homo sapien
cacagatggtaactatggtgccagg

SEQ ID NO: 2067888 - DNA, 25 bp, Homo sapien
tgagatcagcatggaagccagttgc

SEQ ID NO: 2067889 - DNA, 25 bp, Homo sapien
tgccaggtgttccacaaggaagggc

SEQ ID NO: 2067890 - DNA, 25 bp, Homo sapien
tctgaatggctgaaactccaaggca

SEQ ID NO: 2067891 - DNA, 25 bp, Homo sapien
gaggcgagggtttgcctggtgaaag

SEQ ID NO: 2067892 - DNA, 25 bp, Homo sapien
caaatgaaagacgatgatacctaag

SEQ ID NO: 2067893 - DNA, 25 bp, Homo sapien
ctggtgaaagccaaacggcagccct

SEQ ID NO: 2067894 - DNA, 25 bp, Homo sapien
gatggctgccattatcccttctcac

SEQ ID NO: 2067895 - DNA, 25 bp, Homo sapien
catctttgacctttgggacctccag

SEQ ID NO: 2067896 - DNA, 25 bp, Homo sapien
gggctatttttatggccggcaaaca

SEQ ID NO: 2067897 - DNA, 25 bp, Homo sapien
tggtcatccatcttagagccgctga

SEQ ID NO: 2067898 - DNA, 25 bp, Homo sapien
gggccggcacagattacattttaag

SEQ ID NO: 2067899 - DNA, 25 bp, Homo sapien
gtgagtcctgggagtgagtggcacc

SEQ ID NO: 2067900 - DNA, 25 bp, Homo sapien
tgagtcctgggagtgagtggcacct

SEQ ID NO: 2067901 - DNA, 25 bp, Homo sapien
ccctggaagtgacttttctgtagga

SEQ ID NO: 2067902 - DNA, 25 bp, Homo sapien
caggtaccaccaaattgtccctgga

SEQ ID NO: 2067903 - DNA, 25 bp, Homo sapien
agagatgccaatcagcaggtaccac

SEQ ID NO: 2067904 - DNA, 25 bp, Homo sapien
tgtccctggaagtgacttttctgta

SEQ ID NO: 2067905 - DNA, 25 bp, Homo sapien
ttgaatggagggaatctctgatctc

SEQ ID NO: 2067906 - DNA, 25 bp, Homo sapien
gaatggagggaatctctgatctcct

SEQ ID NO: 2067907 - DNA, 25 bp, Homo sapien
gaattgaatggagggaatctctgat

SEQ ID NO: 2067908 - DNA, 25 bp, Homo sapien
tggagggaatctctgatctccttcc

SEQ ID NO: 2067909 - DNA, 25 bp, Homo sapien
tcctggcagcatctgaaagggtctg

SEQ ID NO: 2067910 - DNA, 25 bp, Homo sapien
atgtcctggcagcatctgaaagggt

SEQ ID NO: 2067911 - DNA, 25 bp, Homo sapien
cagcatctgaaagggtctgggacag

SEQ ID NO: 2067912 - DNA, 25 bp, Homo sapien
gcagcatctgaaagggtctgggaca

SEQ ID NO: 2067913 - DNA, 25 bp, Homo sapien
agaggacgctgagtccgagcctgtt

SEQ ID NO: 2067914 - DNA, 25 bp, Homo sapien
gtgactgccctgaccatctttgcaa

SEQ ID NO: 2067915 - DNA, 25 bp, Homo sapien
acagctgacgggcagagttgttcag

SEQ ID NO: 2067916 - DNA, 25 bp, Homo sapien
agattggtgccagggccaaccctat

SEQ ID NO: 2067917 - DNA, 25 bp, Homo sapien
cctaatcaatataaggtggtatctc

SEQ ID NO: 2067918 - DNA, 25 bp, Homo sapien
gtcataccgtttcccgtaacagctg

SEQ ID NO: 2067919 - DNA, 25 bp, Homo sapien
tctgtgttcacgcaagtcattgata

SEQ ID NO: 2067920 - DNA, 25 bp, Homo sapien
cattgataaaatgtaggactggccc

SEQ ID NO: 2067921 - DNA, 25 bp, Homo sapien
gccttcctgtgcacatctttttgga

SEQ ID NO: 2067922 - DNA, 25 bp, Homo sapien
tgaagtcctggcgaccactcccttg

SEQ ID NO: 2067923 - DNA, 25 bp, Homo sapien
tttggagccttctgagggtgaggag

SEQ ID NO: 2067924 - DNA, 25 bp, Homo sapien
ctgtgcacatctttttggagccttc

SEQ ID NO: 2067925 - DNA, 25 bp, Homo sapien
aagggcagtggcctggctctcaaag

SEQ ID NO: 2067926 - DNA, 25 bp, Homo sapien
tgccttccaggtaacgacttccagt

SEQ ID NO: 2067927 - DNA, 25 bp, Homo sapien
tgggacttgggcttcggcccttgcc

SEQ ID NO: 2067928 - DNA, 25 bp, Homo sapien
cagtggcctggctctcaaagcatct

SEQ ID NO: 2067929 - DNA, 25 bp, Homo sapien
agagctggggcaaagttcccaggca

SEQ ID NO: 2067930 - DNA, 25 bp, Homo sapien
agagacagagctggggcaaagttcc

SEQ ID NO: 2067931 - DNA, 25 bp, Homo sapien
agacagagctggggcaaagttccca

SEQ ID NO: 2067932 - DNA, 25 bp, Homo sapien
acagagctggggcaaagttcccagg

SEQ ID NO: 2067933 - DNA, 25 bp, Homo sapien
tgtgcgccatttcgctgtgcttcta

SEQ ID NO: 2067934 - DNA, 25 bp, Homo sapien
ggagcctccttgtgcgccatttcgc

SEQ ID NO: 2067935 - DNA, 25 bp, Homo sapien
gccatttcgctgtgcttctagatgc

SEQ ID NO: 2067936 - DNA, 25 bp, Homo sapien
tccttgtgcgccatttcgctgtgct

SEQ ID NO: 2067937 - DNA, 25 bp, Homo sapien
tgaggaccaattgacagcttcttgc

SEQ ID NO: 2067938 - DNA, 25 bp, Homo sapien
gttgacaagcatccgggcagggttt

SEQ ID NO: 2067939 - DNA, 25 bp, Homo sapien
gcgagtgtccagcttgcatgccagg

SEQ ID NO: 2067940 - DNA, 25 bp, Homo sapien
taaactctgtcaggaaaaacccagc

SEQ ID NO: 2067941 - DNA, 25 bp, Homo sapien
ctcccagaggagaaccgagaacctc

SEQ ID NO: 2067942 - DNA, 25 bp, Homo sapien
tctcccagaggagaaccgagaacct

SEQ ID NO: 2067943 - DNA, 25 bp, Homo sapien
tcccagaggagaaccgagaacctca

SEQ ID NO: 2067944 - DNA, 25 bp, Homo sapien
cccagaggagaaccgagaacctcac

SEQ ID NO: 2067945 - DNA, 25 bp, Homo sapien
aagagcgtgtggcttcctccgaagg

SEQ ID NO: 2067946 - DNA, 25 bp, Homo sapien
cagaatccagtgaacaccacttggc

SEQ ID NO: 2067947 - DNA, 25 bp, Homo sapien
tgtttactaaacaaagcgactgcac

SEQ ID NO: 2067948 - DNA, 25 bp, Homo sapien
tcctttgctgcctgcgaagagcgtg

SEQ ID NO: 2067949 - DNA, 25 bp, Homo sapien
ccaggaatcttcccctagtctgtct

SEQ ID NO: 2067950 - DNA, 25 bp, Homo sapien
caggaatcttcccctagtctgtctg

SEQ ID NO: 2067951 - DNA, 25 bp, Homo sapien
aggaatcttcccctagtctgtctgg

SEQ ID NO: 2067952 - DNA, 25 bp, Homo sapien
cagaatggcccacatcctacggtca

SEQ ID NO: 2067953 - DNA, 25 bp, Homo sapien
tggcccacatcctacggtcactcac

SEQ ID NO: 2067954 - DNA, 25 bp, Homo sapien
gaatggcccacatcctacggtcact

SEQ ID NO: 2067955 - DNA, 25 bp, Homo sapien
atggcccacatcctacggtcactca

SEQ ID NO: 2067956 - DNA, 25 bp, Homo sapien
gcctgagcccagttgtagggtgctg

SEQ ID NO: 2067957 - DNA, 25 bp, Homo sapien
cctgagcccagttgtagggtgctgc

SEQ ID NO: 2067958 - DNA, 25 bp, Homo sapien
ctgagcccagttgtagggtgctgct

SEQ ID NO: 2067959 - DNA, 25 bp, Homo sapien
ggcctgagcccagttgtagggtgct

SEQ ID NO: 2067960 - DNA, 25 bp, Homo sapien
caggtggccagggttgcagacttag

SEQ ID NO: 2067961 - DNA, 25 bp, Homo sapien
cagacttaggcccacttgctctggg

SEQ ID NO: 2067962 - DNA, 25 bp, Homo sapien
cagaaagcaccaattctgaggctcc

SEQ ID NO: 2067963 - DNA, 25 bp, Homo sapien
catcaaagaccctcttcaggggcac

SEQ ID NO: 2067964 - DNA, 25 bp, Homo sapien
cggggactgcttgccttgccacggc

SEQ ID NO: 2067965 - DNA, 25 bp, Homo sapien
gcttgccttgccacggctggtggaa

SEQ ID NO: 2067966 - DNA, 25 bp, Homo sapien
ccggggactgcttgccttgccacgg

SEQ ID NO: 2067967 - DNA, 25 bp, Homo sapien
ccttgccacggctggtggaaaacag

SEQ ID NO: 2067968 - DNA, 25 bp, Homo sapien
caggagtctctgtttagcctctgtg

SEQ ID NO: 2067969 - DNA, 25 bp, Homo sapien
gtttagcctctgtgctgtgcacatg

SEQ ID NO: 2067970 - DNA, 25 bp, Homo sapien
tagctgctcgatctgtgtagggaag

SEQ ID NO: 2067971 - DNA, 25 bp, Homo sapien
tgctaaaggttgtggagctgcttag

SEQ ID NO: 2067972 - DNA, 25 bp, Homo sapien
gagttcaagtcactatcccgctttc

SEQ ID NO: 2067973 - DNA, 25 bp, Homo sapien
cagtattgcttggaagtggaatcca

SEQ ID NO: 2067974 - DNA, 25 bp, Homo sapien
gcagtattgcttggaagtggaatcc

SEQ ID NO: 2067975 - DNA, 25 bp, Homo sapien
ccaacttcagagttcaagtcactat

SEQ ID NO: 2067976 - DNA, 25 bp, Homo sapien
agatcatctgcttgtggtctccctg

SEQ ID NO: 2067977 - DNA, 25 bp, Homo sapien
gtccattagggacccacagatcatc

SEQ ID NO: 2067978 - DNA, 25 bp, Homo sapien
cacagatcatctgcttgtggtctcc

SEQ ID NO: 2067979 - DNA, 25 bp, Homo sapien
cagggccactggtccattagggacc

SEQ ID NO: 2067980 - DNA, 25 bp, Homo sapien
ttgtggcactgtagtgggctccagc

SEQ ID NO: 2067981 - DNA, 25 bp, Homo sapien
gtaatggtggacacccctccttcca

SEQ ID NO: 2067982 - DNA, 25 bp, Homo sapien
tcagctctttgtggggagtggtcac

SEQ ID NO: 2067983 - DNA, 25 bp, Homo sapien
ttgtggggagtggtcacagagcctg

SEQ ID NO: 2067984 - DNA, 25 bp, Homo sapien
aagcccgagccttgctcttggcact

SEQ ID NO: 2067985 - DNA, 25 bp, Homo sapien
actcagctctttgtggggagtggtc

SEQ ID NO: 2067986 - DNA, 25 bp, Homo sapien
tgccagaaagtcacttaaagtactt

SEQ ID NO: 2067987 - DNA, 25 bp, Homo sapien
ccttcgattctctcattaaaccttt

SEQ ID NO: 2067988 - DNA, 25 bp, Homo sapien
ctcaccaagtatggaagtgcaggtg

SEQ ID NO: 2067989 - DNA, 25 bp, Homo sapien
agtgcaggtgccagaaagtcactta

SEQ ID NO: 2067990 - DNA, 25 bp, Homo sapien
tttgctcacagtggtcgtgggtcga

SEQ ID NO: 2067991 - DNA, 25 bp, Homo sapien
tgagtccctataagcttccttcctt

SEQ ID NO: 2067992 - DNA, 25 bp, Homo sapien
tttcaaacatgactgagtccctata

SEQ ID NO: 2067993 - DNA, 25 bp, Homo sapien
tgtttgctcacagtggtcgtgggtc

SEQ ID NO: 2067994 - DNA, 25 bp, Homo sapien
ctggaacaactccacgcacaggaag

SEQ ID NO: 2067995 - DNA, 25 bp, Homo sapien
aagacctgagcaacctggaacaact

SEQ ID NO: 2067996 - DNA, 25 bp, Homo sapien
acaggaagcccttaattgttcagtg

SEQ ID NO: 2067997 - DNA, 25 bp, Homo sapien
tgagtgtaggcaccaacggaagacc

SEQ ID NO: 2067998 - DNA, 25 bp, Homo sapien
cttcaggtttccatatggtggagta

SEQ ID NO: 2067999 - DNA, 25 bp, Homo sapien
tttccatatggtggagtagtgctgg

SEQ ID NO: 2068000 - DNA, 25 bp, Homo sapien
tggggtgaactcttggtctgctctc

SEQ ID NO: 2068001 - DNA, 25 bp, Homo sapien
tggagtctggatctgcgaggccaca

SEQ ID NO: 2068002 - DNA, 25 bp, Homo sapien
ggttcattcacatttgggtggcagg

SEQ ID NO: 2068003 - DNA, 25 bp, Homo sapien
tcattcacatttgggtggcaggtag

SEQ ID NO: 2068004 - DNA, 25 bp, Homo sapien
gctgtccattacattgtgctttctc

SEQ ID NO: 2068005 - DNA, 25 bp, Homo sapien
cctgctgtccattacattgtgcttt

SEQ ID NO: 2068006 - DNA, 25 bp, Homo sapien
aaggtcattggctgacatgggcacc

SEQ ID NO: 2068007 - DNA, 25 bp, Homo sapien
cgagatgggagcctgaagtagcaca

SEQ ID NO: 2068008 - DNA, 25 bp, Homo sapien
catgggcaccctcagcgagatggga

SEQ ID NO: 2068009 - DNA, 25 bp, Homo sapien
agtagcacagccgtgttaaacacag

SEQ ID NO: 2068010 - DNA, 25 bp, Homo sapien
taaaggaagattaggacgaggtgaa

SEQ ID NO: 2068011 - DNA, 25 bp, Homo sapien
aaggtctagggctgtgtttactctc

SEQ ID NO: 2068012 - DNA, 25 bp, Homo sapien
tttactgcgttctcggggtcaggac

SEQ ID NO: 2068013 - DNA, 25 bp, Homo sapien
ggtcaggacagttgctaggagcccc

SEQ ID NO: 2068014 - DNA, 25 bp, Homo sapien
tgaggtgcctcggttctttacaaca

SEQ ID NO: 2068015 - DNA, 25 bp, Homo sapien
ggtagttctggcttattatctccca

SEQ ID NO: 2068016 - DNA, 25 bp, Homo sapien
aacacttggatctccccactgggct

SEQ ID NO: 2068017 - DNA, 25 bp, Homo sapien
catgaactcgaatgacagttgggac

SEQ ID NO: 2068018 - DNA, 25 bp, Homo sapien
ctgagtcttcaccttgtcttctacc

SEQ ID NO: 2068019 - DNA, 25 bp, Homo sapien
tgagtcttcaccttgtcttctaccc

SEQ ID NO: 2068020 - DNA, 25 bp, Homo sapien
gagtcttcaccttgtcttctaccca

SEQ ID NO: 2068021 - DNA, 25 bp, Homo sapien
agtcttcaccttgtcttctacccat

SEQ ID NO: 2068022 - DNA, 25 bp, Homo sapien
tttcctcaagatggtattaataaaa

SEQ ID NO: 2068023 - DNA, 25 bp, Homo sapien
tgtgttttcctcaagatggtattaa

SEQ ID NO: 2068024 - DNA, 25 bp, Homo sapien
gttttcctcaagatggtattaataa

SEQ ID NO: 2068025 - DNA, 25 bp, Homo sapien
gtgttttcctcaagatggtattaat

SEQ ID NO: 2068026 - DNA, 25 bp, Homo sapien
tgtcactgtagatcaagaacaattt

SEQ ID NO: 2068027 - DNA, 25 bp, Homo sapien
cacatttgtcactgtagatcaagaa

SEQ ID NO: 2068028 - DNA, 25 bp, Homo sapien
gggttaattgtcaacaatgtgagct

SEQ ID NO: 2068029 - DNA, 25 bp, Homo sapien
ctgtagtgattgatttatgcaggtc

SEQ ID NO: 2068030 - DNA, 25 bp, Homo sapien
gccaggccacgaagatcattcactc

SEQ ID NO: 2068031 - DNA, 25 bp, Homo sapien
cttagggcactgaaatggttgctga

SEQ ID NO: 2068032 - DNA, 25 bp, Homo sapien
tcgccatctccttcttagggcactg

SEQ ID NO: 2068033 - DNA, 25 bp, Homo sapien
gaagatcattcactcctcgccatct

SEQ ID NO: 2068034 - DNA, 25 bp, Homo sapien
agctggagcaccattgcatggtctg

SEQ ID NO: 2068035 - DNA, 25 bp, Homo sapien
cattgcatggtctggtaaccaccag

SEQ ID NO: 2068036 - DNA, 25 bp, Homo sapien
tgtgcatgaacacaactaatctggc

SEQ ID NO: 2068037 - DNA, 25 bp, Homo sapien
cagcatggaagaggaattttcccca

SEQ ID NO: 2068038 - DNA, 25 bp, Homo sapien
ggttccttcgaaagcctggccttga

SEQ ID NO: 2068039 - DNA, 25 bp, Homo sapien
tccagtccgctgggcccattgctga

SEQ ID NO: 2068040 - DNA, 25 bp, Homo sapien
catgggggcactctcgtgacctctt

SEQ ID NO: 2068041 - DNA, 25 bp, Homo sapien
ccgctgggcccattgctgacaggag

SEQ ID NO: 2068042 - DNA, 25 bp, Homo sapien
aataacaatgggacttggcttctgg

SEQ ID NO: 2068043 - DNA, 25 bp, Homo sapien
agctgagaaaggacaagtgtgacct

SEQ ID NO: 2068044 - DNA, 25 bp, Homo sapien
cggacaaagctgattctcactaaag

SEQ ID NO: 2068045 - DNA, 25 bp, Homo sapien
ttttcacagtcgtccaaaaatcgga

SEQ ID NO: 2068046 - DNA, 25 bp, Homo sapien
tgctctcctttgaaggactggagtg

SEQ ID NO: 2068047 - DNA, 25 bp, Homo sapien
tccttctacctcttttgaatccaac

SEQ ID NO: 2068048 - DNA, 25 bp, Homo sapien
cctttgaaggactggagtgatagga

SEQ ID NO: 2068049 - DNA, 25 bp, Homo sapien
ccaactgctctcctttgaaggactg

SEQ ID NO: 2068050 - DNA, 25 bp, Homo sapien
gcccaggttaatgctgcacctcata

SEQ ID NO: 2068051 - DNA, 25 bp, Homo sapien
ggttaatgctgcacctcatacccat

SEQ ID NO: 2068052 - DNA, 25 bp, Homo sapien
gaatggtgcccaggttaatgctgca

SEQ ID NO: 2068053 - DNA, 25 bp, Homo sapien
tggtgcccaggttaatgctgcacct

SEQ ID NO: 2068054 - DNA, 25 bp, Homo sapien
ctgccttgtgatgctagaggaacca

SEQ ID NO: 2068055 - DNA, 25 bp, Homo sapien
tgccttgtgatgctagaggaaccag

SEQ ID NO: 2068056 - DNA, 25 bp, Homo sapien
ccagggagatcagggaggttactcc

SEQ ID NO: 2068057 - DNA, 25 bp, Homo sapien
cttgtgatgctagaggaaccaggga

SEQ ID NO: 2068058 - DNA, 25 bp, Homo sapien
catggcatgtggataagattaggac

SEQ ID NO: 2068059 - DNA, 25 bp, Homo sapien
gattaggacaagaggagatacccac

SEQ ID NO: 2068060 - DNA, 25 bp, Homo sapien
caaaatccttgtggctgctcaggga

SEQ ID NO: 2068061 - DNA, 25 bp, Homo sapien
gacatgcatgcatagctccctgata

SEQ ID NO: 2068062 - DNA, 25 bp, Homo sapien
ccgatagaccattcagtggtggaac

SEQ ID NO: 2068063 - DNA, 25 bp, Homo sapien
gtcagactacttatcaaccatgtgg

SEQ ID NO: 2068064 - DNA, 25 bp, Homo sapien
tgatggcattcccaaccgatagacc

SEQ ID NO: 2068065 - DNA, 25 bp, Homo sapien
gacccagctttctcgcaattaacag

SEQ ID NO: 2068066 - DNA, 25 bp, Homo sapien
cattcctgaagtttcattctttcaa

SEQ ID NO: 2068067 - DNA, 25 bp, Homo sapien
ctttatgtgcaaactttcattcctg

SEQ ID NO: 2068068 - DNA, 25 bp, Homo sapien
tcattcctgaagtttcattctttca

SEQ ID NO: 2068069 - DNA, 25 bp, Homo sapien
tatgtgcaaactttcattcctgaag

SEQ ID NO: 2068070 - DNA, 25 bp, Homo sapien
tcaagttcaaaaacccagcactgag

SEQ ID NO: 2068071 - DNA, 25 bp, Homo sapien
catcccagtctggagcctatcggac

SEQ ID NO: 2068072 - DNA, 25 bp, Homo sapien
ggatttgtcatttaagcagctggga

SEQ ID NO: 2068073 - DNA, 25 bp, Homo sapien
ggcgggagccctacatcactcaaaa

SEQ ID NO: 2068074 - DNA, 25 bp, Homo sapien
ttggcaggacttggagaaatactca

SEQ ID NO: 2068075 - DNA, 25 bp, Homo sapien
tggttactggaatgagcaaaaggct

SEQ ID NO: 2068076 - DNA, 25 bp, Homo sapien
catgctgaccaaaagtaatgctgtc

SEQ ID NO: 2068077 - DNA, 25 bp, Homo sapien
tccagcaggactctttgaaatacag

SEQ ID NO: 2068078 - DNA, 25 bp, Homo sapien
gagtccatacattctctgtacatgt

SEQ ID NO: 2068079 - DNA, 25 bp, Homo sapien
gacacaggttcctggactacccctg

SEQ ID NO: 2068080 - DNA, 25 bp, Homo sapien
tctctgtacatgtcctctgagggct

SEQ ID NO: 2068081 - DNA, 25 bp, Homo sapien
aggttcctggactacccctggtctg

SEQ ID NO: 2068082 - DNA, 25 bp, Homo sapien
ggcaatgtgtactccaaagctgatc

SEQ ID NO: 2068083 - DNA, 25 bp, Homo sapien
attaaccccacttgtctgagtctga

SEQ ID NO: 2068084 - DNA, 25 bp, Homo sapien
gctgatccaagaccaagaggcatct

SEQ ID NO: 2068085 - DNA, 25 bp, Homo sapien
gaggaaaggaattgaactgctcaca

SEQ ID NO: 2068086 - DNA, 25 bp, Homo sapien
gccttgtaagaactgaattgaaaga

SEQ ID NO: 2068087 - DNA, 25 bp, Homo sapien
gcatgtggacattggcaagttgcct

SEQ ID NO: 2068088 - DNA, 25 bp, Homo sapien
gttggtagcagagcatgtggacatt

SEQ ID NO: 2068089 - DNA, 25 bp, Homo sapien
ccccaaggagaaggatctatgagtt

SEQ ID NO: 2068090 - DNA, 25 bp, Homo sapien
ccaaggcttttgttgtagagccaaa

SEQ ID NO: 2068091 - DNA, 25 bp, Homo sapien
gcttttgttgtagagccaaaattga

SEQ ID NO: 2068092 - DNA, 25 bp, Homo sapien
aaaattgatcaaaggttactgcaat

SEQ ID NO: 2068093 - DNA, 25 bp, Homo sapien
caaaatatccaaggcttttgttgta

SEQ ID NO: 2068094 - DNA, 25 bp, Homo sapien
cataccagcaagcttccagaattag

SEQ ID NO: 2068095 - DNA, 25 bp, Homo sapien
gcaagcttccagaattagttcttgt

SEQ ID NO: 2068096 - DNA, 25 bp, Homo sapien
ccagaattagttcttgttctggcat

SEQ ID NO: 2068097 - DNA, 25 bp, Homo sapien
aatatcataccagcaagcttccaga

SEQ ID NO: 2068098 - DNA, 25 bp, Homo sapien
cggggccatgcttgacaggtgtcta

SEQ ID NO: 2068099 - DNA, 25 bp, Homo sapien
ggccatgcttgacaggtgtctaaaa

SEQ ID NO: 2068100 - DNA, 25 bp, Homo sapien
gggccatgcttgacaggtgtctaaa

SEQ ID NO: 2068101 - DNA, 25 bp, Homo sapien
ccatgcttgacaggtgtctaaaact

SEQ ID NO: 2068102 - DNA, 25 bp, Homo sapien
ttagtatgtgtgctgccaaaggcag

SEQ ID NO: 2068103 - DNA, 25 bp, Homo sapien
tagtatgtgtgctgccaaaggcagc

SEQ ID NO: 2068104 - DNA, 25 bp, Homo sapien
agtatgtgtgctgccaaaggcagca

SEQ ID NO: 2068105 - DNA, 25 bp, Homo sapien
tcagcgtcccctgcaactgagatgt

SEQ ID NO: 2068106 - DNA, 25 bp, Homo sapien
gtgtattagttacccagccagcaag

SEQ ID NO: 2068107 - DNA, 25 bp, Homo sapien
caccttctgtatgcttggagtttca

SEQ ID NO: 2068108 - DNA, 25 bp, Homo sapien
actgagatgtggaaactagagagcc

SEQ ID NO: 2068109 - DNA, 25 bp, Homo sapien
agcaagttcgcagtaaatgttagca

SEQ ID NO: 2068110 - DNA, 25 bp, Homo sapien
tatatatagcaattaacacagccct

SEQ ID NO: 2068111 - DNA, 25 bp, Homo sapien
cactttgtgattccaagtgtgtgca

SEQ ID NO: 2068112 - DNA, 25 bp, Homo sapien
ggccagctggtctaccctcttttgg

SEQ ID NO: 2068113 - DNA, 25 bp, Homo sapien
cagacagatgggagtgtggcaccat

SEQ ID NO: 2068114 - DNA, 25 bp, Homo sapien
cagtgtgttcccctcatggctgaca

SEQ ID NO: 2068115 - DNA, 25 bp, Homo sapien
ctgacaacattgacctgctgagcag

SEQ ID NO: 2068116 - DNA, 25 bp, Homo sapien
acagacagatgggagtgtggcacca

SEQ ID NO: 2068117 - DNA, 25 bp, Homo sapien
gtgctgcggtgctcctttgcctgtg

SEQ ID NO: 2068118 - DNA, 25 bp, Homo sapien
gtgccctgctcccagatacaggtgg

SEQ ID NO: 2068119 - DNA, 25 bp, Homo sapien
agcagtgctgcggtgctcctttgcc

SEQ ID NO: 2068120 - DNA, 25 bp, Homo sapien
tgcggtgctcctttgcctgtgccct

SEQ ID NO: 2068121 - DNA, 25 bp, Homo sapien
tgtaccaccacttgggatgtcctct

SEQ ID NO: 2068122 - DNA, 25 bp, Homo sapien
ttctgtaccaccacttgggatgtcc

SEQ ID NO: 2068123 - DNA, 25 bp, Homo sapien
ctgaacagccccttctgtaccacca

SEQ ID NO: 2068124 - DNA, 25 bp, Homo sapien
gtaccaccacttgggatgtcctctt

SEQ ID NO: 2068125 - DNA, 25 bp, Homo sapien
tatggactttattgcattggggtaa

SEQ ID NO: 2068126 - DNA, 25 bp, Homo sapien
tgtatccttcatactgttaatgtgg

SEQ ID NO: 2068127 - DNA, 25 bp, Homo sapien
tattgcattggggtaagttccttta

SEQ ID NO: 2068128 - DNA, 25 bp, Homo sapien
cataaaagggtgttgaatactacaa

SEQ ID NO: 2068129 - DNA, 25 bp, Homo sapien
ggtatccttcactttctagcactga

SEQ ID NO: 2068130 - DNA, 25 bp, Homo sapien
ctcggctcgtaggactgaagggcaa

SEQ ID NO: 2068131 - DNA, 25 bp, Homo sapien
tactgcaacttgttcctccgtgcag

SEQ ID NO: 2068132 - DNA, 25 bp, Homo sapien
gctgctgacatattgctatctctga

SEQ ID NO: 2068133 - DNA, 25 bp, Homo sapien
cataacactacagttgaaggatgct

SEQ ID NO: 2068134 - DNA, 25 bp, Homo sapien
ccctttgataagtgctcacagctac

SEQ ID NO: 2068135 - DNA, 25 bp, Homo sapien
gcaactctcgctttttcacagctag

SEQ ID NO: 2068136 - DNA, 25 bp, Homo sapien
gctactatccaaaggtctaatgctg

SEQ ID NO: 2068137 - DNA, 25 bp, Homo sapien
cctgtgaacacaagacaagaaatct

SEQ ID NO: 2068138 - DNA, 25 bp, Homo sapien
caatattagaaagtccggtgacctc

SEQ ID NO: 2068139 - DNA, 25 bp, Homo sapien
gaaatctcagcctggagtatgtgct

SEQ ID NO: 2068140 - DNA, 25 bp, Homo sapien
ccttactatgtgaattccctgtgaa

SEQ ID NO: 2068141 - DNA, 25 bp, Homo sapien
gcagctgcttcttgggagggtaact

SEQ ID NO: 2068142 - DNA, 25 bp, Homo sapien
cagctgcttcttgggagggtaactg

SEQ ID NO: 2068143 - DNA, 25 bp, Homo sapien
gcatagatcatctccggacagcaac

SEQ ID NO: 2068144 - DNA, 25 bp, Homo sapien
gatcatctccggacagcaacagcag

SEQ ID NO: 2068145 - DNA, 25 bp, Homo sapien
ttttcacactgagcactaggtgggt

SEQ ID NO: 2068146 - DNA, 25 bp, Homo sapien
cacactgagcactaggtgggtgctg

SEQ ID NO: 2068147 - DNA, 25 bp, Homo sapien
ctcagggatgccgtacagcaaactt

SEQ ID NO: 2068148 - DNA, 25 bp, Homo sapien
gccgtacagcaaacttccctgactt

SEQ ID NO: 2068149 - DNA, 25 bp, Homo sapien
gctgctggccgctcaatggaccgat

SEQ ID NO: 2068150 - DNA, 25 bp, Homo sapien
tggccgctcaatggaccgatttccc

SEQ ID NO: 2068151 - DNA, 25 bp, Homo sapien
gctggccgctcaatggaccgatttc

SEQ ID NO: 2068152 - DNA, 25 bp, Homo sapien
tgctggccgctcaatggaccgattt

SEQ ID NO: 2068153 - DNA, 25 bp, Homo sapien
gctgaggccagcacgcttgtctgtg

SEQ ID NO: 2068154 - DNA, 25 bp, Homo sapien
gaagtttctagacccgtcattcgtg

SEQ ID NO: 2068155 - DNA, 25 bp, Homo sapien
tcggacagcgtttttacatcaaagg

SEQ ID NO: 2068156 - DNA, 25 bp, Homo sapien
attttatggtctctccggcacccgg

SEQ ID NO: 2068157 - DNA, 25 bp, Homo sapien
ccctggctttttactgagcagcact

SEQ ID NO: 2068158 - DNA, 25 bp, Homo sapien
tgcttgcaatgcgacaaataactgt

SEQ ID NO: 2068159 - DNA, 25 bp, Homo sapien
gaaagacactatcgttatgctcacg

SEQ ID NO: 2068160 - DNA, 25 bp, Homo sapien
aattcagcccaacgtctggccaagt

SEQ ID NO: 2068161 - DNA, 25 bp, Homo sapien
cagcatcaaatgaagctgggctcac

SEQ ID NO: 2068162 - DNA, 25 bp, Homo sapien
agcatcaaatgaagctgggctcaca

SEQ ID NO: 2068163 - DNA, 25 bp, Homo sapien
tacaattcttgccactcattctgga

SEQ ID NO: 2068164 - DNA, 25 bp, Homo sapien
gttgttgcagagtaactgacttcag

SEQ ID NO: 2068165 - DNA, 25 bp, Homo sapien
tgacagtggcatcagagtgaagagt

SEQ ID NO: 2068166 - DNA, 25 bp, Homo sapien
ggacccggattatgcagctgatctc

SEQ ID NO: 2068167 - DNA, 25 bp, Homo sapien
taagttggctccaatacagcatgag

SEQ ID NO: 2068168 - DNA, 25 bp, Homo sapien
tcttgggagattaccaactgtggct

SEQ ID NO: 2068169 - DNA, 25 bp, Homo sapien
gatcccaaggtgttcaaatattcca

SEQ ID NO: 2068170 - DNA, 25 bp, Homo sapien
tcagtgagtaccaaataggagaggc

SEQ ID NO: 2068171 - DNA, 25 bp, Homo sapien
cccagtaaacatcacgctgagagtt

SEQ ID NO: 2068172 - DNA, 25 bp, Homo sapien
cacttggtaggaatatctctgggca

SEQ ID NO: 2068173 - DNA, 25 bp, Homo sapien
ttggctctacatatctggaaaggca

SEQ ID NO: 2068174 - DNA, 25 bp, Homo sapien
tgaggttccaaggtctctaccccac

SEQ ID NO: 2068175 - DNA, 25 bp, Homo sapien
tgttaagtgtgaatgtgcctgcctc

SEQ ID NO: 2068176 - DNA, 25 bp, Homo sapien
gaatgtgagggccacagagacccaa

SEQ ID NO: 2068177 - DNA, 25 bp, Homo sapien
cttggaaacaagctgccagaatgtg

SEQ ID NO: 2068178 - DNA, 25 bp, Homo sapien
caaggacagaggcaattgcgtgtat

SEQ ID NO: 2068179 - DNA, 25 bp, Homo sapien
tcatcttgctttagatttctgctgt

SEQ ID NO: 2068180 - DNA, 25 bp, Homo sapien
tcttgctttagatttctgctgtgta

SEQ ID NO: 2068181 - DNA, 25 bp, Homo sapien
cttgctttagatttctgctgtgtac

SEQ ID NO: 2068182 - DNA, 25 bp, Homo sapien
catcttgctttagatttctgctgtg

SEQ ID NO: 2068183 - DNA, 25 bp, Homo sapien
gtttgctaaccgcacaattgctgag

SEQ ID NO: 2068184 - DNA, 25 bp, Homo sapien
aattgctgagatgtacctgttgctc

SEQ ID NO: 2068185 - DNA, 25 bp, Homo sapien
cttacaatcatgtctgtgaagtccc

SEQ ID NO: 2068186 - DNA, 25 bp, Homo sapien
ttcctagcaggtacacagtgtttgc

SEQ ID NO: 2068187 - DNA, 25 bp, Homo sapien
cctggttccttagcccaggatagat

SEQ ID NO: 2068188 - DNA, 25 bp, Homo sapien
cctcctggttccttagcccaggata

SEQ ID NO: 2068189 - DNA, 25 bp, Homo sapien
ggttccttagcccaggatagatcca

SEQ ID NO: 2068190 - DNA, 25 bp, Homo sapien
tccttagcccaggatagatccactg

SEQ ID NO: 2068191 - DNA, 25 bp, Homo sapien
tttttcaatgtctgtgatgagatac

SEQ ID NO: 2068192 - DNA, 25 bp, Homo sapien
tatgtttttcaatgtctgtgatgag

SEQ ID NO: 2068193 - DNA, 25 bp, Homo sapien
ctaaaagagtttatgtttttcaatg

SEQ ID NO: 2068194 - DNA, 25 bp, Homo sapien
tgtttttcaatgtctgtgatgagat

SEQ ID NO: 2068195 - DNA, 25 bp, Homo sapien
gatttgctgaacgagatggatcctc

SEQ ID NO: 2068196 - DNA, 25 bp, Homo sapien
tgtgtctgaggatgttcactctagc

SEQ ID NO: 2068197 - DNA, 25 bp, Homo sapien
gagatggatcctcgagtctttcccc

SEQ ID NO: 2068198 - DNA, 25 bp, Homo sapien
cactctagcagatttgctgaacgag

SEQ ID NO: 2068199 - DNA, 25 bp, Homo sapien
tctagcaggtattctccgcacaact

SEQ ID NO: 2068200 - DNA, 25 bp, Homo sapien
caactgtgccaaatcgttctgagga

SEQ ID NO: 2068201 - DNA, 25 bp, Homo sapien
caaaagactatgatgcggcttccag

SEQ ID NO: 2068202 - DNA, 25 bp, Homo sapien
gctgtgaagctctaactatagtggc

SEQ ID NO: 2068203 - DNA, 25 bp, Homo sapien
ccactctcggcgtctggacttcgga

SEQ ID NO: 2068204 - DNA, 25 bp, Homo sapien
ccccaccttctaatccaggtgctgg

SEQ ID NO: 2068205 - DNA, 25 bp, Homo sapien
aggaaactatagtttgcttcccgca

SEQ ID NO: 2068206 - DNA, 25 bp, Homo sapien
tctggacttcggaggaaactatagt

SEQ ID NO: 2068207 - DNA, 25 bp, Homo sapien
cagaaacgctatggattggcatggg

SEQ ID NO: 2068208 - DNA, 25 bp, Homo sapien
aatcctcgccctcagaatgacaaag

SEQ ID NO: 2068209 - DNA, 25 bp, Homo sapien
tgggcgacgctgattgccagaaacg

SEQ ID NO: 2068210 - DNA, 25 bp, Homo sapien
gaagatttctgttgaggagctgcac

SEQ ID NO: 2068211 - DNA, 25 bp, Homo sapien
cccaaaagcaggtttatctcagtgt

SEQ ID NO: 2068212 - DNA, 25 bp, Homo sapien
tgctcccaggcacaccgaaatataa

SEQ ID NO: 2068213 - DNA, 25 bp, Homo sapien
tctgctcccaggcacaccgaaatat

SEQ ID NO: 2068214 - DNA, 25 bp, Homo sapien
ccaaaagcaggtttatctcagtgtc

SEQ ID NO: 2068215 - DNA, 25 bp, Homo sapien
cttcccccagatcgcagctgctcag

SEQ ID NO: 2068216 - DNA, 25 bp, Homo sapien
ggcgattgaagcaatgccccttccc

SEQ ID NO: 2068217 - DNA, 25 bp, Homo sapien
gggtgaggcgaaggcgattgaagca

SEQ ID NO: 2068218 - DNA, 25 bp, Homo sapien
aggcgaaggcgattgaagcaatgcc

SEQ ID NO: 2068219 - DNA, 25 bp, Homo sapien
ccaaacagaagacgtcggcgccgga

SEQ ID NO: 2068220 - DNA, 25 bp, Homo sapien
agaagacgtcggcgccggagcgggc

SEQ ID NO: 2068221 - DNA, 25 bp, Homo sapien
aacagaagacgtcggcgccggagcg

SEQ ID NO: 2068222 - DNA, 25 bp, Homo sapien
caaacagaagacgtcggcgccggag

SEQ ID NO: 2068223 - DNA, 25 bp, Homo sapien
tcatcgggctcgcaggtggccacgt

SEQ ID NO: 2068224 - DNA, 25 bp, Homo sapien
atgatgtcgcacctgaacggcctgc

SEQ ID NO: 2068225 - DNA, 25 bp, Homo sapien
ggagctgaagcgctacagtatcccc

SEQ ID NO: 2068226 - DNA, 25 bp, Homo sapien
acactcagtctcacgggccggtgct

SEQ ID NO: 2068227 - DNA, 25 bp, Homo sapien
ttaagggtgattggcagccattggc

SEQ ID NO: 2068228 - DNA, 25 bp, Homo sapien
tgggctttgcccaagttgagtctgc

SEQ ID NO: 2068229 - DNA, 25 bp, Homo sapien
tttttctgccgtatttggagaggcc

SEQ ID NO: 2068230 - DNA, 25 bp, Homo sapien
tgaagctgtgccctactgcgtcctc

SEQ ID NO: 2068231 - DNA, 25 bp, Homo sapien
tgttgtaaacacagatccattgatt

SEQ ID NO: 2068232 - DNA, 25 bp, Homo sapien
ctgttgtaaacacagatccattgat

SEQ ID NO: 2068233 - DNA, 25 bp, Homo sapien
ctgaaatcttcccagctaactttgg

SEQ ID NO: 2068234 - DNA, 25 bp, Homo sapien
tgctctctaggtcttttctgtgtct

SEQ ID NO: 2068235 - DNA, 25 bp, Homo sapien
agaacagccttgttggctctggtct

SEQ ID NO: 2068236 - DNA, 25 bp, Homo sapien
tctgaactcgatttgcaatcattgc

SEQ ID NO: 2068237 - DNA, 25 bp, Homo sapien
gggagatagcatatctttgagctcc

SEQ ID NO: 2068238 - DNA, 25 bp, Homo sapien
ctggaggggagatagcatatctttg

SEQ ID NO: 2068239 - DNA, 25 bp, Homo sapien
ctttgagctccccatggactgctgg

SEQ ID NO: 2068240 - DNA, 25 bp, Homo sapien
agatagcatatctttgagctcccca

SEQ ID NO: 2068241 - DNA, 25 bp, Homo sapien
cagtccagctcacagcggctagctt

SEQ ID NO: 2068242 - DNA, 25 bp, Homo sapien
ctttgggtcataccagagtttcatc

SEQ ID NO: 2068243 - DNA, 25 bp, Homo sapien
atgcattagccggagtcataggact

SEQ ID NO: 2068244 - DNA, 25 bp, Homo sapien
tgatttacagactcgcagtccagct

SEQ ID NO: 2068245 - DNA, 25 bp, Homo sapien
tgctgagaagctgatcaaatggaat

SEQ ID NO: 2068246 - DNA, 25 bp, Homo sapien
tccttgttgtgtggccctgctgaac

SEQ ID NO: 2068247 - DNA, 25 bp, Homo sapien
tcatctcctgcatccgatcctggga

SEQ ID NO: 2068248 - DNA, 25 bp, Homo sapien
tgctgaactgatgtgcactcatctc

SEQ ID NO: 2068249 - DNA, 25 bp, Homo sapien
catataagaaagtcgtgagacatcc

SEQ ID NO: 2068250 - DNA, 25 bp, Homo sapien
cgtgagacatccaagagccctcatt

SEQ ID NO: 2068251 - DNA, 25 bp, Homo sapien
ggccatgcctccatataagaaagtc

SEQ ID NO: 2068252 - DNA, 25 bp, Homo sapien
ttcccctgggagatctgcccaccag

SEQ ID NO: 2068253 - DNA, 25 bp, Homo sapien
cagtgccaagccttcccggactccg

SEQ ID NO: 2068254 - DNA, 25 bp, Homo sapien
gcagtgccaagccttcccggactcc

SEQ ID NO: 2068255 - DNA, 25 bp, Homo sapien
agtgccaagccttcccggactccgg

SEQ ID NO: 2068256 - DNA, 25 bp, Homo sapien
cgacattccagggcagtgccaagcc

SEQ ID NO: 2068257 - DNA, 25 bp, Homo sapien
tgcaatgggttgatagatttcctca

SEQ ID NO: 2068258 - DNA, 25 bp, Homo sapien
ggaagcccaactcctgttgcaatgg

SEQ ID NO: 2068259 - DNA, 25 bp, Homo sapien
taccaattcgtattttgacaagcct

SEQ ID NO: 2068260 - DNA, 25 bp, Homo sapien
cctcagggtggtaattaccaattcg

SEQ ID NO: 2068261 - DNA, 25 bp, Homo sapien
tttcacattcttgaggcaacagaaa

SEQ ID NO: 2068262 - DNA, 25 bp, Homo sapien
cataccagagaaaagtgcttgcttt

SEQ ID NO: 2068263 - DNA, 25 bp, Homo sapien
gaatttaacccagtgagtttactca

SEQ ID NO: 2068264 - DNA, 25 bp, Homo sapien
cattccagataatgtcataccagag

SEQ ID NO: 2068265 - DNA, 25 bp, Homo sapien
taccaaagtgtcatgacagtatgcc

SEQ ID NO: 2068266 - DNA, 25 bp, Homo sapien
gtagtgaactcggattttcaggagt

SEQ ID NO: 2068267 - DNA, 25 bp, Homo sapien
caggagtttgaatagttggatattt

SEQ ID NO: 2068268 - DNA, 25 bp, Homo sapien
gtttgattatcattaccaaagtgtc

SEQ ID NO: 2068269 - DNA, 25 bp, Homo sapien
gatgctgtgtgattcagacttctca

SEQ ID NO: 2068270 - DNA, 25 bp, Homo sapien
ggcgataatcttctagattcgtaac

SEQ ID NO: 2068271 - DNA, 25 bp, Homo sapien
tcgtaacaggttagagctgactttt

SEQ ID NO: 2068272 - DNA, 25 bp, Homo sapien
tgctgatgctgtgtgattcagactt

SEQ ID NO: 2068273 - DNA, 25 bp, Homo sapien
gagttaggttgattggaagtaacca

SEQ ID NO: 2068274 - DNA, 25 bp, Homo sapien
caaaatgactctgacagcctgaagc

SEQ ID NO: 2068275 - DNA, 25 bp, Homo sapien
gttaggttgattggaagtaaccagc

SEQ ID NO: 2068276 - DNA, 25 bp, Homo sapien
tttggagttaggttgattggaagta

SEQ ID NO: 2068277 - DNA, 25 bp, Homo sapien
taccagcttgttcatcccatagaag

SEQ ID NO: 2068278 - DNA, 25 bp, Homo sapien
ggagaaaaagacattgctaccagct

SEQ ID NO: 2068279 - DNA, 25 bp, Homo sapien
gacattgctaccagcttgttcatcc

SEQ ID NO: 2068280 - DNA, 25 bp, Homo sapien
tcccatagaagtcttccactctgct

SEQ ID NO: 2068281 - DNA, 25 bp, Homo sapien
accaatggtgcatcagagatgcaaa

SEQ ID NO: 2068282 - DNA, 25 bp, Homo sapien
tatttaacttaagttcgcagcccca

SEQ ID NO: 2068283 - DNA, 25 bp, Homo sapien
gagaatttgggatattcttccctct

SEQ ID NO: 2068284 - DNA, 25 bp, Homo sapien
cttagtttgattctactccttgtac

SEQ ID NO: 2068285 - DNA, 25 bp, Homo sapien
acatatggtatgtacagccacagct

SEQ ID NO: 2068286 - DNA, 25 bp, Homo sapien
gcggctgctaatttggaaagggata

SEQ ID NO: 2068287 - DNA, 25 bp, Homo sapien
aataattatctatgcgacggcggct

SEQ ID NO: 2068288 - DNA, 25 bp, Homo sapien
cgtgttgatgacaccaaagatacca

SEQ ID NO: 2068289 - DNA, 25 bp, Homo sapien
cagcagagctccctataagtgaaca

SEQ ID NO: 2068290 - DNA, 25 bp, Homo sapien
tctagaaagagcgatggcagcctga

SEQ ID NO: 2068291 - DNA, 25 bp, Homo sapien
gaattagaactctcagaatccctgg

SEQ ID NO: 2068292 - DNA, 25 bp, Homo sapien
actgccacacccatacgagagagga

SEQ ID NO: 2068293 - DNA, 25 bp, Homo sapien
gagcaacgaggtctggaactagcca

SEQ ID NO: 2068294 - DNA, 25 bp, Homo sapien
gagtcttgtagacctagctttctgg

SEQ ID NO: 2068295 - DNA, 25 bp, Homo sapien
tagcagccagctcattgtccaagga

SEQ ID NO: 2068296 - DNA, 25 bp, Homo sapien
ggatccagggaccatcccacaaaga

SEQ ID NO: 2068297 - DNA, 25 bp, Homo sapien
tggaagagatctcttggagagcatg

SEQ ID NO: 2068298 - DNA, 25 bp, Homo sapien
tacaaacacctgctggaactcacag

SEQ ID NO: 2068299 - DNA, 25 bp, Homo sapien
tcttttttacagtgacctccaaagc

SEQ ID NO: 2068300 - DNA, 25 bp, Homo sapien
gagagcatgttccacttgcccagtc

SEQ ID NO: 2068301 - DNA, 25 bp, Homo sapien
gatccacagtggtgtattcagaggc

SEQ ID NO: 2068302 - DNA, 25 bp, Homo sapien
tcaaaggcggtaaaagacaatcgta

SEQ ID NO: 2068303 - DNA, 25 bp, Homo sapien
aaagacaatcgtagaccataatggt

SEQ ID NO: 2068304 - DNA, 25 bp, Homo sapien
ccataatggtccaataacttggtga

SEQ ID NO: 2068305 - DNA, 25 bp, Homo sapien
tgctcgtttaagacttcctccaaaa

SEQ ID NO: 2068306 - DNA, 25 bp, Homo sapien
tgctggagaatcataattaggcccc

SEQ ID NO: 2068307 - DNA, 25 bp, Homo sapien
aaaatgcagcgcacttgctggagaa

SEQ ID NO: 2068308 - DNA, 25 bp, Homo sapien
tactgcttaagtgctcgtttaagac

SEQ ID NO: 2068309 - DNA, 25 bp, Homo sapien
tgtgggccatattcacacattgtgc

SEQ ID NO: 2068310 - DNA, 25 bp, Homo sapien
ctgtgggccatattcacacattgtg

SEQ ID NO: 2068311 - DNA, 25 bp, Homo sapien
tctgatataggcagccgcagggacg

SEQ ID NO: 2068312 - DNA, 25 bp, Homo sapien
agggacgttcacacgcctcgcatta

SEQ ID NO: 2068313 - DNA, 25 bp, Homo sapien
tttggtctgccctctgatataggca

SEQ ID NO: 2068314 - DNA, 25 bp, Homo sapien
gcctcgcattagtgaagtgatgaca

SEQ ID NO: 2068315 - DNA, 25 bp, Homo sapien
aacccagatccactcacagtcaaac

SEQ ID NO: 2068316 - DNA, 25 bp, Homo sapien
gacacaggtgcatcaaacactggaa

SEQ ID NO: 2068317 - DNA, 25 bp, Homo sapien
ggtgcatcaaacactggaacccaga

SEQ ID NO: 2068318 - DNA, 25 bp, Homo sapien
caggtgcatcaaacactggaaccca

SEQ ID NO: 2068319 - DNA, 25 bp, Homo sapien
ttacatccttcctggctatggtttg

SEQ ID NO: 2068320 - DNA, 25 bp, Homo sapien
tgttagcaattagcccagtgtccag

SEQ ID NO: 2068321 - DNA, 25 bp, Homo sapien
agccccagaggcgattttacatcct

SEQ ID NO: 2068322 - DNA, 25 bp, Homo sapien
tcgctgtagaaacatgtggctgaca

SEQ ID NO: 2068323 - DNA, 25 bp, Homo sapien
ccagaagaagggacacaaaccccat

SEQ ID NO: 2068324 - DNA, 25 bp, Homo sapien
gccagaagaagggacacaaacccca

SEQ ID NO: 2068325 - DNA, 25 bp, Homo sapien
tcagacttcgctgagccgaaagcct

SEQ ID NO: 2068326 - DNA, 25 bp, Homo sapien
tgataacgtgtttgcccctgtcctc

SEQ ID NO: 2068327 - DNA, 25 bp, Homo sapien
gaacaatctctacgctgcacttgag

SEQ ID NO: 2068328 - DNA, 25 bp, Homo sapien
tcgttgggccgtcttcactggtgct

SEQ ID NO: 2068329 - DNA, 25 bp, Homo sapien
gaaaatcacagtgtaatggctacag

SEQ ID NO: 2068330 - DNA, 25 bp, Homo sapien
caacctatggttgcaattgatcaac

SEQ ID NO: 2068331 - DNA, 25 bp, Homo sapien
gtttaccaagctctcgcatctgcag

SEQ ID NO: 2068332 - DNA, 25 bp, Homo sapien
caagtatagttcacacatatcgaca

SEQ ID NO: 2068333 - DNA, 25 bp, Homo sapien
tcacgggaccccagaataggaggaa

SEQ ID NO: 2068334 - DNA, 25 bp, Homo sapien
aagatgcatcagacgcacggagcga

SEQ ID NO: 2068335 - DNA, 25 bp, Homo sapien
gaagggcaccacctgctattgctca

SEQ ID NO: 2068336 - DNA, 25 bp, Homo sapien
cccaagggcttataacaaaggctca

SEQ ID NO: 2068337 - DNA, 25 bp, Homo sapien
taagcacaatggcatcacattgagc

SEQ ID NO: 2068338 - DNA, 25 bp, Homo sapien
ggtatggctgcagcctaatctctca

SEQ ID NO: 2068339 - DNA, 25 bp, Homo sapien
gagcaaaggatctcttttacatgcc

SEQ ID NO: 2068340 - DNA, 25 bp, Homo sapien
acatgccttaagttatggtttcttg

SEQ ID NO: 2068341 - DNA, 25 bp, Homo sapien
gcactatacatgcagggacctgggc

SEQ ID NO: 2068342 - DNA, 25 bp, Homo sapien
tcacttcacggtgggacggtcactc

SEQ ID NO: 2068343 - DNA, 25 bp, Homo sapien
ttcagatatactcgcaagggctcct

SEQ ID NO: 2068344 - DNA, 25 bp, Homo sapien
tgtatgaccgttacccatccgtggt

SEQ ID NO: 2068345 - DNA, 25 bp, Homo sapien
gagcacctctgaaatccatacttga

SEQ ID NO: 2068346 - DNA, 25 bp, Homo sapien
tatctacaggaaaggactaccacga

SEQ ID NO: 2068347 - DNA, 25 bp, Homo sapien
tgaccaatgaatggtggcctcgctg

SEQ ID NO: 2068348 - DNA, 25 bp, Homo sapien
caaggcacgtatcatgaacactgta

SEQ ID NO: 2068349 - DNA, 25 bp, Homo sapien
cccaaaggctgtatatatatcaagg

SEQ ID NO: 2068350 - DNA, 25 bp, Homo sapien
ttgggcatttgcctaacgccacggg

SEQ ID NO: 2068351 - DNA, 25 bp, Homo sapien
ccacatcggaggtatctggaggttg

SEQ ID NO: 2068352 - DNA, 25 bp, Homo sapien
tattaaaggtcctgatggacattcc

SEQ ID NO: 2068353 - DNA, 25 bp, Homo sapien
cacagagcggacagctcagggtcag

SEQ ID NO: 2068354 - DNA, 25 bp, Homo sapien
tgcagacaggattgacacagagcgg

SEQ ID NO: 2068355 - DNA, 25 bp, Homo sapien
cttggaacacagctcgtttgactgg

SEQ ID NO: 2068356 - DNA, 25 bp, Homo sapien
tgtgtgaatgcaccaagtcggccag

SEQ ID NO: 2068357 - DNA, 25 bp, Homo sapien
ggttttaaatcagacatagttatag

SEQ ID NO: 2068358 - DNA, 25 bp, Homo sapien
ggctatctgaaggaaaaaagactga

SEQ ID NO: 2068359 - DNA, 25 bp, Homo sapien
aatcagaaaattggggctatctgaa

SEQ ID NO: 2068360 - DNA, 25 bp, Homo sapien
catagttataggtgggtagaaatca

SEQ ID NO: 2068361 - DNA, 25 bp, Homo sapien
taattaattggaactccaaatgttc

SEQ ID NO: 2068362 - DNA, 25 bp, Homo sapien
gcaagagtttctcagaggattactc

SEQ ID NO: 2068363 - DNA, 25 bp, Homo sapien
aaaacgattgtaacactgtagatac

SEQ ID NO: 2068364 - DNA, 25 bp, Homo sapien
tctctggtatgttctactaaaacga

SEQ ID NO: 2068365 - DNA, 25 bp, Homo sapien
gactcagctcttctgatgttttcaa

SEQ ID NO: 2068366 - DNA, 25 bp, Homo sapien
ggatttccattaagagactcagctc

SEQ ID NO: 2068367 - DNA, 25 bp, Homo sapien
actcagctcttctgatgttttcaac

SEQ ID NO: 2068368 - DNA, 25 bp, Homo sapien
cttagagaacaatggatttccatta

SEQ ID NO: 2068369 - DNA, 25 bp, Homo sapien
ctgaatcaaatgagaaaagggagga

SEQ ID NO: 2068370 - DNA, 25 bp, Homo sapien
gaatcaaatgagaaaagggaggaaa

SEQ ID NO: 2068371 - DNA, 25 bp, Homo sapien
tgaatcaaatgagaaaagggaggaa

SEQ ID NO: 2068372 - DNA, 25 bp, Homo sapien
ccagcgttggtaaagggcattctcc

SEQ ID NO: 2068373 - DNA, 25 bp, Homo sapien
tactcaggtagttaggattcttctc

SEQ ID NO: 2068374 - DNA, 25 bp, Homo sapien
tgatgggagagtcagcgatacactg

SEQ ID NO: 2068375 - DNA, 25 bp, Homo sapien
gactggcatgggaaaaacgttgaga

SEQ ID NO: 2068376 - DNA, 25 bp, Homo sapien
ctgacaagaaacttaggtgctccct

SEQ ID NO: 2068377 - DNA, 25 bp, Homo sapien
tcacccatgtctgattgatgtccag

SEQ ID NO: 2068378 - DNA, 25 bp, Homo sapien
tcaggtgttggctcaagttctgccc

SEQ ID NO: 2068379 - DNA, 25 bp, Homo sapien
tcatattacaagacaccaaagatgg

SEQ ID NO: 2068380 - DNA, 25 bp, Homo sapien
aacttgagagtactcgatgtccagc

SEQ ID NO: 2068381 - DNA, 25 bp, Homo sapien
ggtcactggtaaatgctatcggaac

SEQ ID NO: 2068382 - DNA, 25 bp, Homo sapien
gattcgtctgtttgaggacccaacc

SEQ ID NO: 2068383 - DNA, 25 bp, Homo sapien
tacagcgtttcaatatggtcactgg

SEQ ID NO: 2068384 - DNA, 25 bp, Homo sapien
cagtactccagcctttccatgactt

SEQ ID NO: 2068385 - DNA, 25 bp, Homo sapien
tgccacaccagtcggtaggggttgc

SEQ ID NO: 2068386 - DNA, 25 bp, Homo sapien
tgactttttggacagtggcgcttac

SEQ ID NO: 2068387 - DNA, 25 bp, Homo sapien
cagtcggtaggggttgcagtactcc

SEQ ID NO: 2068388 - DNA, 25 bp, Homo sapien
gatatgggtcgcctctgttgaccac

SEQ ID NO: 2068389 - DNA, 25 bp, Homo sapien
ctgaggatatgggtcgcctctgttg

SEQ ID NO: 2068390 - DNA, 25 bp, Homo sapien
ctcctgaggatatgggtcgcctctg

SEQ ID NO: 2068391 - DNA, 25 bp, Homo sapien
gaggatatgggtcgcctctgttgac

SEQ ID NO: 2068392 - DNA, 25 bp, Homo sapien
tatggtaaaccctggtggaattaga

SEQ ID NO: 2068393 - DNA, 25 bp, Homo sapien
cagaactgctggatttatggtaaac

SEQ ID NO: 2068394 - DNA, 25 bp, Homo sapien
gaactgaaacagtgctgcatggaca

SEQ ID NO: 2068395 - DNA, 25 bp, Homo sapien
cctggtggtcatgtgtgtagttgat

SEQ ID NO: 2068396 - DNA, 25 bp, Homo sapien
cagttcctttagaatatgatctgca

SEQ ID NO: 2068397 - DNA, 25 bp, Homo sapien
tgagcagaaaacagaatgaccacct

SEQ ID NO: 2068398 - DNA, 25 bp, Homo sapien
tcaagtggaaaatggtccagttcct

SEQ ID NO: 2068399 - DNA, 25 bp, Homo sapien
acctcgcttctcttctcaagtggaa

SEQ ID NO: 2068400 - DNA, 25 bp, Homo sapien
gggcttccgtcccacttgattatag

SEQ ID NO: 2068401 - DNA, 25 bp, Homo sapien
cttgattatagtatctgtaaatggc

SEQ ID NO: 2068402 - DNA, 25 bp, Homo sapien
tgctccacttcatcgtgggcttccg

SEQ ID NO: 2068403 - DNA, 25 bp, Homo sapien
tgggccacctgtcaatagtgctcca

SEQ ID NO: 2068404 - DNA, 25 bp, Homo sapien
ggacgtaccgaaatccaatatagta

SEQ ID NO: 2068405 - DNA, 25 bp, Homo sapien
tggagcagctgtactgtggatactg

SEQ ID NO: 2068406 - DNA, 25 bp, Homo sapien
gatactgtgtgaaagcaatagccct

SEQ ID NO: 2068407 - DNA, 25 bp, Homo sapien
cttctgttaaaggatggacgtaccg

SEQ ID NO: 2068408 - DNA, 25 bp, Homo sapien
tcagagcagctgttcaatgaacagt

SEQ ID NO: 2068409 - DNA, 25 bp, Homo sapien
agcagctgttcaatgaacagtcttc

SEQ ID NO: 2068410 - DNA, 25 bp, Homo sapien
cctcagagcagctgttcaatgaaca

SEQ ID NO: 2068411 - DNA, 25 bp, Homo sapien
cagagcagctgttcaatgaacagtc

SEQ ID NO: 2068412 - DNA, 25 bp, Homo sapien
aatcctgcggtactgctcttgaatc

SEQ ID NO: 2068413 - DNA, 25 bp, Homo sapien
cgtttggcgatgaatggtgccagct

SEQ ID NO: 2068414 - DNA, 25 bp, Homo sapien
ctcttgaatcttgggggttcggcgt

SEQ ID NO: 2068415 - DNA, 25 bp, Homo sapien
ccatatcttgatgggggatccgcct

SEQ ID NO: 2068416 - DNA, 25 bp, Homo sapien
catacaggtaagtggattttattcc

SEQ ID NO: 2068417 - DNA, 25 bp, Homo sapien
acatacaggtaagtggattttattc

SEQ ID NO: 2068418 - DNA, 25 bp, Homo sapien
tacaggtaagtggattttattccag

SEQ ID NO: 2068419 - DNA, 25 bp, Homo sapien
taacatacaggtaagtggattttat

SEQ ID NO: 2068420 - DNA, 25 bp, Homo sapien
aataggaagtgtcatgaggtctcgg

SEQ ID NO: 2068421 - DNA, 25 bp, Homo sapien
gaagtgtcatgaggtctcggtccaa

SEQ ID NO: 2068422 - DNA, 25 bp, Homo sapien
aggaagtcgtgaacatctccaagag

SEQ ID NO: 2068423 - DNA, 25 bp, Homo sapien
ggtctcggtccaagaagagtctcag

SEQ ID NO: 2068424 - DNA, 25 bp, Homo sapien
ttagcattaatattccagttttcgg

SEQ ID NO: 2068425 - DNA, 25 bp, Homo sapien
cattaatattccagttttcggcttc

SEQ ID NO: 2068426 - DNA, 25 bp, Homo sapien
agcattaatattccagttttcggct

SEQ ID NO: 2068427 - DNA, 25 bp, Homo sapien
gtttagcattaatattccagttttc

SEQ ID NO: 2068428 - DNA, 25 bp, Homo sapien
tctgcggttgaacttgaggttttgc

SEQ ID NO: 2068429 - DNA, 25 bp, Homo sapien
tcttctgcggttgaacttgaggttt

SEQ ID NO: 2068430 - DNA, 25 bp, Homo sapien
tgcggttgaacttgaggttttgcac

SEQ ID NO: 2068431 - DNA, 25 bp, Homo sapien
ctcttctgcggttgaacttgaggtt

SEQ ID NO: 2068432 - DNA, 25 bp, Homo sapien
ttcaaggactcatccaaaacactcc

SEQ ID NO: 2068433 - DNA, 25 bp, Homo sapien
actcctctcccctaatgatctgaag

SEQ ID NO: 2068434 - DNA, 25 bp, Homo sapien
gatgtcgctgccaagggaccctttc

SEQ ID NO: 2068435 - DNA, 25 bp, Homo sapien
tcgttaatacactcacccttcaagg

SEQ ID NO: 2068436 - DNA, 25 bp, Homo sapien
ctaccaaacaattagcattcgtcca

SEQ ID NO: 2068437 - DNA, 25 bp, Homo sapien
taccaaacaattagcattcgtccag

SEQ ID NO: 2068438 - DNA, 25 bp, Homo sapien
accaaacaattagcattcgtccagg

SEQ ID NO: 2068439 - DNA, 25 bp, Homo sapien
tccttactatcctctatggcaggcc

SEQ ID NO: 2068440 - DNA, 25 bp, Homo sapien
tatctctagaaaacgctagcccagg

SEQ ID NO: 2068441 - DNA, 25 bp, Homo sapien
ggaccaaggaccatgggctttcctc

SEQ ID NO: 2068442 - DNA, 25 bp, Homo sapien
ccgctgctaaggagaagtgggcaca

SEQ ID NO: 2068443 - DNA, 25 bp, Homo sapien
gcggatcgcggagcaggacgcccgc

SEQ ID NO: 2068444 - DNA, 25 bp, Homo sapien
gcagccatgtttgcgccgagtgaac

SEQ ID NO: 2068445 - DNA, 25 bp, Homo sapien
gatcgcggagcaggacgcccgcggc

SEQ ID NO: 2068446 - DNA, 25 bp, Homo sapien
ccgcagccatgtttgcgccgagtga

SEQ ID NO: 2068447 - DNA, 25 bp, Homo sapien
tggccgagccgggtagcgatcccca

SEQ ID NO: 2068448 - DNA, 25 bp, Homo sapien
tagcgatccccacgcgcgtccccag

SEQ ID NO: 2068449 - DNA, 25 bp, Homo sapien
agtggccgagccgggtagcgatccc

SEQ ID NO: 2068450 - DNA, 25 bp, Homo sapien
tgacctcgcgccctcccggcgcgcc

SEQ ID NO: 2068451 - DNA, 25 bp, Homo sapien
cactgggaggaacaggcgcccattt

SEQ ID NO: 2068452 - DNA, 25 bp, Homo sapien
ggtttgtctgtatcatatccgcgca

SEQ ID NO: 2068453 - DNA, 25 bp, Homo sapien
caaggtcgcacactgagatcactgg

SEQ ID NO: 2068454 - DNA, 25 bp, Homo sapien
aaaggtctcaggcatcggtattcat

SEQ ID NO: 2068455 - DNA, 25 bp, Homo sapien
cagaactttctgaaaccggaataag

SEQ ID NO: 2068456 - DNA, 25 bp, Homo sapien
tgtgctcaaccaaaatgaggatgta

SEQ ID NO: 2068457 - DNA, 25 bp, Homo sapien
tgctggaggatgtgctcaaccaaaa

SEQ ID NO: 2068458 - DNA, 25 bp, Homo sapien
aggatgtgctcaaccaaaatgagga

SEQ ID NO: 2068459 - DNA, 25 bp, Homo sapien
ctcaaccaaaatgaggatgtaaact

SEQ ID NO: 2068460 - DNA, 25 bp, Homo sapien
tcatcatgggatatgctggcttccc

SEQ ID NO: 2068461 - DNA, 25 bp, Homo sapien
gaactaagttggaaatatggcgaca

SEQ ID NO: 2068462 - DNA, 25 bp, Homo sapien
ctgagttcacagcagatatggttgc

SEQ ID NO: 2068463 - DNA, 25 bp, Homo sapien
acaactattgtgaactatgcagcca

SEQ ID NO: 2068464 - DNA, 25 bp, Homo sapien
gtctctcggcctgaggtcaccacct

SEQ ID NO: 2068465 - DNA, 25 bp, Homo sapien
tcagtctctcggcctgaggtcacca

SEQ ID NO: 2068466 - DNA, 25 bp, Homo sapien
ctcagtctctcggcctgaggtcacc

SEQ ID NO: 2068467 - DNA, 25 bp, Homo sapien
cagtctctcggcctgaggtcaccac

SEQ ID NO: 2068468 - DNA, 25 bp, Homo sapien
ttaaagctaaacatctctttgtcac

SEQ ID NO: 2068469 - DNA, 25 bp, Homo sapien
cttaaagctaaacatctctttgtca

SEQ ID NO: 2068470 - DNA, 25 bp, Homo sapien
taaagctaaacatctctttgtcaca

SEQ ID NO: 2068471 - DNA, 25 bp, Homo sapien
tgtgacaaagagatgtttagcttta

SEQ ID NO: 2068472 - DNA, 25 bp, Homo sapien
gtgacaaagagatgtttagctttaa

SEQ ID NO: 2068473 - DNA, 25 bp, Homo sapien
tgacaaagagatgtttagctttaag

SEQ ID NO: 2068474 - DNA, 25 bp, Homo sapien
gctggcttaattttcttaaagctaa

SEQ ID NO: 2068475 - DNA, 25 bp, Homo sapien
gctaaacatctctttgtcacattcg

SEQ ID NO: 2068476 - DNA, 25 bp, Homo sapien
cattcgttcatgcttttgcaattat

SEQ ID NO: 2068477 - DNA, 25 bp, Homo sapien
tgtcacattcgttcatgcttttgca

SEQ ID NO: 2068478 - DNA, 25 bp, Homo sapien
taaagctaaacatctctttgtcaca

SEQ ID NO: 2068479 - DNA, 25 bp, Homo sapien
tatatgtgaaattaagtactactaa

SEQ ID NO: 2068480 - DNA, 25 bp, Homo sapien
cgaatgtgacaaagagatgtttagc

SEQ ID NO: 2068481 - DNA, 25 bp, Homo sapien
ttagtagtacttaatttcacatata

SEQ ID NO: 2068482 - DNA, 25 bp, Homo sapien
tgcaaaagcatgaacgaatgtgaca

SEQ ID NO: 2068483 - DNA, 25 bp, Homo sapien
tagctttaagaaaattaagccagca

SEQ ID NO: 2068484 - DNA, 25 bp, Homo sapien
taaaataattgcaaaagcatgaacg

SEQ ID NO: 2068485 - DNA, 25 bp, Homo sapien
tgacaaagagatgtttagctttaag

SEQ ID NO: 2068486 - DNA, 25 bp, Homo sapien
gtattctcaataggctgtattccca

SEQ ID NO: 2068487 - DNA, 25 bp, Homo sapien
tcttaataacaattgtgagtggctg

SEQ ID NO: 2068488 - DNA, 25 bp, Homo sapien
tattaactcacagcaggcttactga

SEQ ID NO: 2068489 - DNA, 25 bp, Homo sapien
cagcaggcttactgaatggcttcat

SEQ ID NO: 2068490 - DNA, 25 bp, Homo sapien
tttctccaccaaatgcatgtcatgt

SEQ ID NO: 2068491 - DNA, 25 bp, Homo sapien
ccatgtccttagatctaatctgtgc

SEQ ID NO: 2068492 - DNA, 25 bp, Homo sapien
tgggaatacagcctattgagaatac

SEQ ID NO: 2068493 - DNA, 25 bp, Homo sapien
cacagattagatctaaggacatggt

SEQ ID NO: 2068494 - DNA, 25 bp, Homo sapien
tacatgacatgcatttggtggagaa

SEQ ID NO: 2068495 - DNA, 25 bp, Homo sapien
cagccactcacaattgttattaaga

SEQ ID NO: 2068496 - DNA, 25 bp, Homo sapien
gaaatgaagccattcagtaagcctg

SEQ ID NO: 2068497 - DNA, 25 bp, Homo sapien
cagtaagcctgctgtgagttaataa

SEQ ID NO: 2068498 - DNA, 25 bp, Homo sapien
tagaacacagtataattcagcagta

SEQ ID NO: 2068499 - DNA, 25 bp, Homo sapien
cactagaatcaaatgaatagccttt

SEQ ID NO: 2068500 - DNA, 25 bp, Homo sapien
gaggcagattgattttccctctttc

SEQ ID NO: 2068501 - DNA, 25 bp, Homo sapien
gctgctaataatcctgaggcataga

SEQ ID NO: 2068502 - DNA, 25 bp, Homo sapien
tggtgtaagatactccagtaactta

SEQ ID NO: 2068503 - DNA, 25 bp, Homo sapien
caatatcgtataaaaatctgctcat

SEQ ID NO: 2068504 - DNA, 25 bp, Homo sapien
ttaaattaatgctaagagggatact

SEQ ID NO: 2068505 - DNA, 25 bp, Homo sapien
taagttactggagtatcttacacca

SEQ ID NO: 2068506 - DNA, 25 bp, Homo sapien
cagatttttatacgatattgccaat

SEQ ID NO: 2068507 - DNA, 25 bp, Homo sapien
ggaaagagggaaaatcaatctgcct

SEQ ID NO: 2068508 - DNA, 25 bp, Homo sapien
tgacaaccttaatatcacttgatgt

SEQ ID NO: 2068509 - DNA, 25 bp, Homo sapien
tctatgcctcaggattattagcagc

SEQ ID NO: 2068510 - DNA, 25 bp, Homo sapien
gaacgattcttaacgtggattctga

SEQ ID NO: 2068511 - DNA, 25 bp, Homo sapien
gacgtgtgcttataccctcgatttg

SEQ ID NO: 2068512 - DNA, 25 bp, Homo sapien
tatggcttgggcttggaacgattct

SEQ ID NO: 2068513 - DNA, 25 bp, Homo sapien
gaaaatacggtacatgtccccatgg

SEQ ID NO: 2068514 - DNA, 25 bp, Homo sapien
gaataggtatcacatccgagacgtg

SEQ ID NO: 2068515 - DNA, 25 bp, Homo sapien
cctcgatttgtccagcgttgcacgc

SEQ ID NO: 2068516 - DNA, 25 bp, Homo sapien
aagcccaagccatatcctccatggg

SEQ ID NO: 2068517 - DNA, 25 bp, Homo sapien
gcgtgcaacgctggacaaatcgagg

SEQ ID NO: 2068518 - DNA, 25 bp, Homo sapien
ttaagaatcgttccaagcccaagcc

SEQ ID NO: 2068519 - DNA, 25 bp, Homo sapien
gcacacgtctcggatgtgataccta

SEQ ID NO: 2068520 - DNA, 25 bp, Homo sapien
tattcagaatccacgttaagaatcg

SEQ ID NO: 2068521 - DNA, 25 bp, Homo sapien
caaatcgagggtataagcacacgtc

SEQ ID NO: 2068522 - DNA, 25 bp, Homo sapien
gcatggttcatgaaggcatagagat

SEQ ID NO: 2068523 - DNA, 25 bp, Homo sapien
tgatcctaccagtatctagtaccct

SEQ ID NO: 2068524 - DNA, 25 bp, Homo sapien
gagccactgaatctggccatagttg

SEQ ID NO: 2068525 - DNA, 25 bp, Homo sapien
taacggccggcttgttgattgcaac

SEQ ID NO: 2068526 - DNA, 25 bp, Homo sapien
gtgagctaactcctttcatggtgga

SEQ ID NO: 2068527 - DNA, 25 bp, Homo sapien
gagaattcagggtagtactttggta

SEQ ID NO: 2068528 - DNA, 25 bp, Homo sapien
tatatacagaacgattacagtggaa

SEQ ID NO: 2068529 - DNA, 25 bp, Homo sapien
tctctatgccttcatgaaccatgca

SEQ ID NO: 2068530 - DNA, 25 bp, Homo sapien
tccaccatgaaaggagttagctcac

SEQ ID NO: 2068531 - DNA, 25 bp, Homo sapien
gttgcaatcaacaagccggccgtta

SEQ ID NO: 2068532 - DNA, 25 bp, Homo sapien
aagggtactagatactggtaggatc

SEQ ID NO: 2068533 - DNA, 25 bp, Homo sapien
tcaactatggccagattcagtggct

SEQ ID NO: 2068534 - DNA, 25 bp, Homo sapien
tgaagaaatactggcaggttataaa

SEQ ID NO: 2068535 - DNA, 25 bp, Homo sapien
gatgcccaatgttggtgagattgtg

SEQ ID NO: 2068536 - DNA, 25 bp, Homo sapien
gattgtgggaggctcaatgcgtatc

SEQ ID NO: 2068537 - DNA, 25 bp, Homo sapien
caatgcgtatctttgatagtgaaga

SEQ ID NO: 2068538 - DNA, 25 bp, Homo sapien
ccactccctattactggtatacgga

SEQ ID NO: 2068539 - DNA, 25 bp, Homo sapien
tcgacgtgttgatgcccaatgttgg

SEQ ID NO: 2068540 - DNA, 25 bp, Homo sapien
caacattgggcatcaacacgtcgac

SEQ ID NO: 2068541 - DNA, 25 bp, Homo sapien
tttataacctgccagtatttcttca

SEQ ID NO: 2068542 - DNA, 25 bp, Homo sapien
ccacaatctcaccaacattgggcat

SEQ ID NO: 2068543 - DNA, 25 bp, Homo sapien
tcttcactatcaaagatacgcattg

SEQ ID NO: 2068544 - DNA, 25 bp, Homo sapien
aaagatacgcattgagcctcccaca

SEQ ID NO: 2068545 - DNA, 25 bp, Homo sapien
tccgtataccagtaatagggagtgg

SEQ ID NO: 2068546 - DNA, 25 bp, Homo sapien
tcatttaaactctagggcagtgctg

SEQ ID NO: 2068547 - DNA, 25 bp, Homo sapien
gtctgatcgcttgatagtaattgtg

SEQ ID NO: 2068548 - DNA, 25 bp, Homo sapien
gtcatctggaatcaggtacagctca

SEQ ID NO: 2068549 - DNA, 25 bp, Homo sapien
tacatgatcatagtggctcctttag

SEQ ID NO: 2068550 - DNA, 25 bp, Homo sapien
cctcccctgattgaagttgacatgc

SEQ ID NO: 2068551 - DNA, 25 bp, Homo sapien
tcctttagcccttggagcttaattg

SEQ ID NO: 2068552 - DNA, 25 bp, Homo sapien
tccaagggctaaaggagccactatg

SEQ ID NO: 2068553 - DNA, 25 bp, Homo sapien
cacaattactatcaagcgatcagac

SEQ ID NO: 2068554 - DNA, 25 bp, Homo sapien
tgagctgtacctgattccagatgac

SEQ ID NO: 2068555 - DNA, 25 bp, Homo sapien
cagcactgccctagagtttaaatga

SEQ ID NO: 2068556 - DNA, 25 bp, Homo sapien
aaattacaattaagctccaagggct

SEQ ID NO: 2068557 - DNA, 25 bp, Homo sapien
taaaggagccactatgatcatgtaa

SEQ ID NO: 2068558 - DNA, 25 bp, Homo sapien
tccttctacatgcagcgatgtcctg

SEQ ID NO: 2068559 - DNA, 25 bp, Homo sapien
tctacatgcagcgatgtcctgagga

SEQ ID NO: 2068560 - DNA, 25 bp, Homo sapien
gctgtgtcgatttcctgtggagatc

SEQ ID NO: 2068561 - DNA, 25 bp, Homo sapien
ttgctgtgtcgatttcctgtggaga

SEQ ID NO: 2068562 - DNA, 25 bp, Homo sapien
acatgcagcgatgtcctgaggattc

SEQ ID NO: 2068563 - DNA, 25 bp, Homo sapien
tcttgctgtgtcgatttcctgtgga

SEQ ID NO: 2068564 - DNA, 25 bp, Homo sapien
caggacatcgctgcatgtagaagga

SEQ ID NO: 2068565 - DNA, 25 bp, Homo sapien
tctccacaggaaatcgacacagcaa

SEQ ID NO: 2068566 - DNA, 25 bp, Homo sapien
tcctcaggacatcgctgcatgtaga

SEQ ID NO: 2068567 - DNA, 25 bp, Homo sapien
gaatcctcaggacatcgctgcatgt

SEQ ID NO: 2068568 - DNA, 25 bp, Homo sapien
gatctccacaggaaatcgacacagc

SEQ ID NO: 2068569 - DNA, 25 bp, Homo sapien
tccacaggaaatcgacacagcaaga

SEQ ID NO: 2068570 - DNA, 25 bp, Homo sapien
agagagaaactgatgcgcttaagtc

SEQ ID NO: 2068571 - DNA, 25 bp, Homo sapien
agagaaactgatgcgcttaagtcat

SEQ ID NO: 2068572 - DNA, 25 bp, Homo sapien
catttttactgggacgagagttgtc

SEQ ID NO: 2068573 - DNA, 25 bp, Homo sapien
tttttactgggacgagagttgtcag

SEQ ID NO: 2068574 - DNA, 25 bp, Homo sapien
tatgtgtggtatagaaggatgtttt

SEQ ID NO: 2068575 - DNA, 25 bp, Homo sapien
ctgggacgagagttgtcagttttaa

SEQ ID NO: 2068576 - DNA, 25 bp, Homo sapien
gcttaagtcatcatctaacattgtt

SEQ ID NO: 2068577 - DNA, 25 bp, Homo sapien
tgtttgggtaactattccaggtgtg

SEQ ID NO: 2068578 - DNA, 25 bp, Homo sapien
cattgtttgggtaactattccaggt

SEQ ID NO: 2068579 - DNA, 25 bp, Homo sapien
aacattgtttgggtaactattccag

SEQ ID NO: 2068580 - DNA, 25 bp, Homo sapien
gcgcttaagtcatcatctaacattg

SEQ ID NO: 2068581 - DNA, 25 bp, Homo sapien
catcatctaacattgtttgggtaac

SEQ ID NO: 2068582 - DNA, 25 bp, Homo sapien
cacacctggaatagttacccaaaca

SEQ ID NO: 2068583 - DNA, 25 bp, Homo sapien
tacccaaacaatgttagatgatgac

SEQ ID NO: 2068584 - DNA, 25 bp, Homo sapien
caaacaatgttagatgatgacttaa

SEQ ID NO: 2068585 - DNA, 25 bp, Homo sapien
caatgttagatgatgacttaagcgc

SEQ ID NO: 2068586 - DNA, 25 bp, Homo sapien
cctggaatagttacccaaacaatgt

SEQ ID NO: 2068587 - DNA, 25 bp, Homo sapien
gaatagttacccaaacaatgttaga

SEQ ID NO: 2068588 - DNA, 25 bp, Homo sapien
ctgacaactctcgtcccagtaaaaa

SEQ ID NO: 2068589 - DNA, 25 bp, Homo sapien
aaaacatccttctataccacacata

SEQ ID NO: 2068590 - DNA, 25 bp, Homo sapien
gacttaagcgcatcagtttctctct

SEQ ID NO: 2068591 - DNA, 25 bp, Homo sapien
gacaactctcgtcccagtaaaaatg

SEQ ID NO: 2068592 - DNA, 25 bp, Homo sapien
atgacttaagcgcatcagtttctct

SEQ ID NO: 2068593 - DNA, 25 bp, Homo sapien
ttaaaactgacaactctcgtcccag

SEQ ID NO: 2068594 - DNA, 25 bp, Homo sapien
ctcatctcctgttacctctcggcgt

SEQ ID NO: 2068595 - DNA, 25 bp, Homo sapien
atctcctgttacctctcggcgtctc

SEQ ID NO: 2068596 - DNA, 25 bp, Homo sapien
actcatctcctgttacctctcggcg

SEQ ID NO: 2068597 - DNA, 25 bp, Homo sapien
catctcctgttacctctcggcgtct

SEQ ID NO: 2068598 - DNA, 25 bp, Homo sapien
ctctcggcgtctccgaggacgcaag

SEQ ID NO: 2068599 - DNA, 25 bp, Homo sapien
ttacctctcggcgtctccgaggacg

SEQ ID NO: 2068600 - DNA, 25 bp, Homo sapien
gagacgccgagaggtaacaggagat

SEQ ID NO: 2068601 - DNA, 25 bp, Homo sapien
cttgcgtcctcggagacgccgagag

SEQ ID NO: 2068602 - DNA, 25 bp, Homo sapien
acgccgagaggtaacaggagatgag

SEQ ID NO: 2068603 - DNA, 25 bp, Homo sapien
cgccgagaggtaacaggagatgagt

SEQ ID NO: 2068604 - DNA, 25 bp, Homo sapien
cgtcctcggagacgccgagaggtaa

SEQ ID NO: 2068605 - DNA, 25 bp, Homo sapien
ccgagaggtaacaggagatgagtgg

SEQ ID NO: 2068606 - DNA, 25 bp, Homo sapien
gcgtctccgaggacgcaagggctcc

SEQ ID NO: 2068607 - DNA, 25 bp, Homo sapien
tccgaggacgcaagggctccagagc

SEQ ID NO: 2068608 - DNA, 25 bp, Homo sapien
cgcaagggctccagagcctggagct

SEQ ID NO: 2068609 - DNA, 25 bp, Homo sapien
actcatctcctgttacctctcggcg

SEQ ID NO: 2068610 - DNA, 25 bp, Homo sapien
ctctcggcgtctccgaggacgcaag

SEQ ID NO: 2068611 - DNA, 25 bp, Homo sapien
ttacctctcggcgtctccgaggacg

SEQ ID NO: 2068612 - DNA, 25 bp, Homo sapien
gaactattcagatgctatcgtttgg

SEQ ID NO: 2068613 - DNA, 25 bp, Homo sapien
cggcctttcaaacggatgaactatt

SEQ ID NO: 2068614 - DNA, 25 bp, Homo sapien
tcagatgctatcgtttggctaaaag

SEQ ID NO: 2068615 - DNA, 25 bp, Homo sapien
acggcctttcaaacggatgaactat

SEQ ID NO: 2068616 - DNA, 25 bp, Homo sapien
tattcagatgctatcgtttggctaa

SEQ ID NO: 2068617 - DNA, 25 bp, Homo sapien
gatgctatcgtttggctaaaagaac

SEQ ID NO: 2068618 - DNA, 25 bp, Homo sapien
tgttcttttagccaaacgatagcat

SEQ ID NO: 2068619 - DNA, 25 bp, Homo sapien
tagccaaacgatagcatctgaatag

SEQ ID NO: 2068620 - DNA, 25 bp, Homo sapien
aatagttcatccgtttgaaaggccg

SEQ ID NO: 2068621 - DNA, 25 bp, Homo sapien
tcttttagccaaacgatagcatctg

SEQ ID NO: 2068622 - DNA, 25 bp, Homo sapien
caaacgatagcatctgaatagttca

SEQ ID NO: 2068623 - DNA, 25 bp, Homo sapien
cttttagccaaacgatagcatctga

SEQ ID NO: 2068624 - DNA, 25 bp, Homo sapien
tgtggtagatcgaatattgaagtca

SEQ ID NO: 2068625 - DNA, 25 bp, Homo sapien
ctttcctgacttttgacgacctcct

SEQ ID NO: 2068626 - DNA, 25 bp, Homo sapien
gcagggagcatagtgcatgagctca

SEQ ID NO: 2068627 - DNA, 25 bp, Homo sapien
cctcctgaaccggttggaggacttg

SEQ ID NO: 2068628 - DNA, 25 bp, Homo sapien
gagcatagtgcatgagctcaacccg

SEQ ID NO: 2068629 - DNA, 25 bp, Homo sapien
tacactcacgtggaagctgagtgtc

SEQ ID NO: 2068630 - DNA, 25 bp, Homo sapien
cgggttgagctcatgcactatgctc

SEQ ID NO: 2068631 - DNA, 25 bp, Homo sapien
gacactcagcttccacgtgagtgta

SEQ ID NO: 2068632 - DNA, 25 bp, Homo sapien
gacttcaatattcgatctaccacat

SEQ ID NO: 2068633 - DNA, 25 bp, Homo sapien
gaggtcgtcaaaagtcaggaaagga

SEQ ID NO: 2068634 - DNA, 25 bp, Homo sapien
tgagctcatgcactatgctccctgc

SEQ ID NO: 2068635 - DNA, 25 bp, Homo sapien
caagtcctccaaccggttcaggagg

SEQ ID NO: 2068636 - DNA, 25 bp, Homo sapien
acaagaaattgctactcagtggaga

SEQ ID NO: 2068637 - DNA, 25 bp, Homo sapien
cacagctaatttgcaaagttgggaa

SEQ ID NO: 2068638 - DNA, 25 bp, Homo sapien
gggagtccacagctaatttgcaaag

SEQ ID NO: 2068639 - DNA, 25 bp, Homo sapien
aaagttttgccaccttagatcgtag

SEQ ID NO: 2068640 - DNA, 25 bp, Homo sapien
caccttagatcgtagctaagttctc

SEQ ID NO: 2068641 - DNA, 25 bp, Homo sapien
gagaagaaatcttagtgtaggtaaa

SEQ ID NO: 2068642 - DNA, 25 bp, Homo sapien
ggacagcttcccaatgttaaaagcc

SEQ ID NO: 2068643 - DNA, 25 bp, Homo sapien
tcccaatgttaaaagccttgctgga

SEQ ID NO: 2068644 - DNA, 25 bp, Homo sapien
cttcccaatgttaaaagccttgctg

SEQ ID NO: 2068645 - DNA, 25 bp, Homo sapien
gacagcttcccaatgttaaaagcct

SEQ ID NO: 2068646 - DNA, 25 bp, Homo sapien
cagcttcccaatgttaaaagccttg

SEQ ID NO: 2068647 - DNA, 25 bp, Homo sapien
ccaatgttaaaagccttgctggata

SEQ ID NO: 2068648 - DNA, 25 bp, Homo sapien
gcaaggcttttaacattgggaagct

SEQ ID NO: 2068649 - DNA, 25 bp, Homo sapien
cagcaaggcttttaacattgggaag

SEQ ID NO: 2068650 - DNA, 25 bp, Homo sapien
tatccagcaaggcttttaacattgg

SEQ ID NO: 2068651 - DNA, 25 bp, Homo sapien
ggcttttaacattgggaagctgtcc

SEQ ID NO: 2068652 - DNA, 25 bp, Homo sapien
caaggcttttaacattgggaagctg

SEQ ID NO: 2068653 - DNA, 25 bp, Homo sapien
tccagcaaggcttttaacattggga

SEQ ID NO: 2068654 - DNA, 25 bp, Homo sapien
gcaaattagctgtggactcccctct

SEQ ID NO: 2068655 - DNA, 25 bp, Homo sapien
tcccaactttgcaaattagctgtgg

SEQ ID NO: 2068656 - DNA, 25 bp, Homo sapien
aaaaagagaacttagctacgatcta

SEQ ID NO: 2068657 - DNA, 25 bp, Homo sapien
caacaatgctaccaattcccaactt

SEQ ID NO: 2068658 - DNA, 25 bp, Homo sapien
gctacgatctaaggtggcaaaactt

SEQ ID NO: 2068659 - DNA, 25 bp, Homo sapien
tctccactgagtagcaatttcttgt

SEQ ID NO: 2068660 - DNA, 25 bp, Homo sapien
ttgtacttggagacctgcctcccag

SEQ ID NO: 2068661 - DNA, 25 bp, Homo sapien
ccctgggagatgttttttgtattgc

SEQ ID NO: 2068662 - DNA, 25 bp, Homo sapien
cattagtgcaaacacaagtagaagg

SEQ ID NO: 2068663 - DNA, 25 bp, Homo sapien
tactcctccaacattagtgcaaaca

SEQ ID NO: 2068664 - DNA, 25 bp, Homo sapien
tgctcagtcataccgggcagagcag

SEQ ID NO: 2068665 - DNA, 25 bp, Homo sapien
gactcaatcctctcagttgtacttg

SEQ ID NO: 2068666 - DNA, 25 bp, Homo sapien
tgggaggcaggtctccaagtacaac

SEQ ID NO: 2068667 - DNA, 25 bp, Homo sapien
ctgctctgcccggtatgactgagca

SEQ ID NO: 2068668 - DNA, 25 bp, Homo sapien
gcaatacaaaaaacatctcccaggg

SEQ ID NO: 2068669 - DNA, 25 bp, Homo sapien
caagtacaactgagaggattgagtc

SEQ ID NO: 2068670 - DNA, 25 bp, Homo sapien
tccccaaaatagtcaagcttgaaga

SEQ ID NO: 2068671 - DNA, 25 bp, Homo sapien
tgtgtttgcactaatgttggaggag

SEQ ID NO: 2068672 - DNA, 25 bp, Homo sapien
cttgaatagtggtgctcacgatagc

SEQ ID NO: 2068673 - DNA, 25 bp, Homo sapien
tgccgttttgaaacttgaatagtgg

SEQ ID NO: 2068674 - DNA, 25 bp, Homo sapien
cgttttgaaacttgaatagtggtgc

SEQ ID NO: 2068675 - DNA, 25 bp, Homo sapien
gaaacttgaatagtggtgctcacga

SEQ ID NO: 2068676 - DNA, 25 bp, Homo sapien
tagtggtgctcacgatagcattgat

SEQ ID NO: 2068677 - DNA, 25 bp, Homo sapien
ggtgctcacgatagcattgatttat

SEQ ID NO: 2068678 - DNA, 25 bp, Homo sapien
taaatcaatgctatcgtgagcacca

SEQ ID NO: 2068679 - DNA, 25 bp, Homo sapien
gcaccactattcaagtttcaaaacg

SEQ ID NO: 2068680 - DNA, 25 bp, Homo sapien
ccactattcaagtttcaaaacggca

SEQ ID NO: 2068681 - DNA, 25 bp, Homo sapien
gctatcgtgagcaccactattcaag

SEQ ID NO: 2068682 - DNA, 25 bp, Homo sapien
tcaatgctatcgtgagcaccactat

SEQ ID NO: 2068683 - DNA, 25 bp, Homo sapien
cgtgagcaccactattcaagtttca

SEQ ID NO: 2068684 - DNA, 25 bp, Homo sapien
gtgctttagagatcacttctttgat

SEQ ID NO: 2068685 - DNA, 25 bp, Homo sapien
atcaaagaagtgatctctaaagcac

SEQ ID NO: 2068686 - DNA, 25 bp, Homo sapien
catgtccaaaatcctaaaagcacga

SEQ ID NO: 2068687 - DNA, 25 bp, Homo sapien
gaggagtctgacgttgatgtccagc

SEQ ID NO: 2068688 - DNA, 25 bp, Homo sapien
gagctgacaacctgatcaatgagga

SEQ ID NO: 2068689 - DNA, 25 bp, Homo sapien
tgtgacttctgggaactaattgggt

SEQ ID NO: 2068690 - DNA, 25 bp, Homo sapien
gatgatccgaggagaaaacatgtcc

SEQ ID NO: 2068691 - DNA, 25 bp, Homo sapien
agacacatgatgatccgaggagaaa

SEQ ID NO: 2068692 - DNA, 25 bp, Homo sapien
gagctggacatcaacgtcagactcc

SEQ ID NO: 2068693 - DNA, 25 bp, Homo sapien
tcctcattgatcaggttgtcagctc

SEQ ID NO: 2068694 - DNA, 25 bp, Homo sapien
tggacatgttttctcctcggatcat

SEQ ID NO: 2068695 - DNA, 25 bp, Homo sapien
caacgtcagactcctcattgatcag

SEQ ID NO: 2068696 - DNA, 25 bp, Homo sapien
gatcgtgcttttaggattttggaca

SEQ ID NO: 2068697 - DNA, 25 bp, Homo sapien
tagttcccagaagtcacaactcagc

SEQ ID NO: 2068698 - DNA, 25 bp, Homo sapien
caatggagttctcttgtccacggag

SEQ ID NO: 2068699 - DNA, 25 bp, Homo sapien
ttctcttgtccacggagagcagtgt

SEQ ID NO: 2068700 - DNA, 25 bp, Homo sapien
aatggagttctcttgtccacggaga

SEQ ID NO: 2068701 - DNA, 25 bp, Homo sapien
tcttgtccacggagagcagtgttgc

SEQ ID NO: 2068702 - DNA, 25 bp, Homo sapien
tggagttctcttgtccacggagagc

SEQ ID NO: 2068703 - DNA, 25 bp, Homo sapien
gagttctcttgtccacggagagcag

SEQ ID NO: 2068704 - DNA, 25 bp, Homo sapien
tgctaaatcttaccccaaagggcaa

SEQ ID NO: 2068705 - DNA, 25 bp, Homo sapien
tgtatggaatgctaaatcttacccc

SEQ ID NO: 2068706 - DNA, 25 bp, Homo sapien
tggaatgctaaatcttaccccaaag

SEQ ID NO: 2068707 - DNA, 25 bp, Homo sapien
gtatggaatgctaaatcttacccca

SEQ ID NO: 2068708 - DNA, 25 bp, Homo sapien
tatggaatgctaaatcttaccccaa

SEQ ID NO: 2068709 - DNA, 25 bp, Homo sapien
atgctaaatcttaccccaaagggca

SEQ ID NO: 2068710 - DNA, 25 bp, Homo sapien
tgccctttggggtaagatttagcat

SEQ ID NO: 2068711 - DNA, 25 bp, Homo sapien
ctttggggtaagatttagcattcca

SEQ ID NO: 2068712 - DNA, 25 bp, Homo sapien
ggggtaagatttagcattccataca

SEQ ID NO: 2068713 - DNA, 25 bp, Homo sapien
tggggtaagatttagcattccatac

SEQ ID NO: 2068714 - DNA, 25 bp, Homo sapien
gggtaagatttagcattccatacac

SEQ ID NO: 2068715 - DNA, 25 bp, Homo sapien
ttgccctttggggtaagatttagca

SEQ ID NO: 2068716 - DNA, 25 bp, Homo sapien
acactgctctccgtggacaagagaa

SEQ ID NO: 2068717 - DNA, 25 bp, Homo sapien
gcaacactgctctccgtggacaaga

SEQ ID NO: 2068718 - DNA, 25 bp, Homo sapien
tccgtggacaagagaactccattgt

SEQ ID NO: 2068719 - DNA, 25 bp, Homo sapien
tctccgtggacaagagaactccatt

SEQ ID NO: 2068720 - DNA, 25 bp, Homo sapien
cactgctctccgtggacaagagaac

SEQ ID NO: 2068721 - DNA, 25 bp, Homo sapien
tgctctccgtggacaagagaactcc

SEQ ID NO: 2068722 - DNA, 25 bp, Homo sapien
gtttctggtgttgcgagatggtaca

SEQ ID NO: 2068723 - DNA, 25 bp, Homo sapien
tggtacaggttatcttcagtgtgtc

SEQ ID NO: 2068724 - DNA, 25 bp, Homo sapien
tgttgcgagatggtacaggttatct

SEQ ID NO: 2068725 - DNA, 25 bp, Homo sapien
taatgtttctggtgttgcgagatgg

SEQ ID NO: 2068726 - DNA, 25 bp, Homo sapien
ttcagtgtgtcttggcggatgagtt

SEQ ID NO: 2068727 - DNA, 25 bp, Homo sapien
tcttcagtgtgtcttggcggatgag

SEQ ID NO: 2068728 - DNA, 25 bp, Homo sapien
gacacactgaagataacctgtacca

SEQ ID NO: 2068729 - DNA, 25 bp, Homo sapien
tgaagataacctgtaccatctcgca

SEQ ID NO: 2068730 - DNA, 25 bp, Homo sapien
gataacctgtaccatctcgcaacac

SEQ ID NO: 2068731 - DNA, 25 bp, Homo sapien
catctcgcaacaccagaaacattaa

SEQ ID NO: 2068732 - DNA, 25 bp, Homo sapien
aactcatccgccaagacacactgaa

SEQ ID NO: 2068733 - DNA, 25 bp, Homo sapien
tgtaccatctcgcaacaccagaaac

SEQ ID NO: 2068734 - DNA, 25 bp, Homo sapien
gaaggatatagaggccaaagagtaa

SEQ ID NO: 2068735 - DNA, 25 bp, Homo sapien
gaagattggtgcgttagaaggatat

SEQ ID NO: 2068736 - DNA, 25 bp, Homo sapien
attggtgcgttagaaggatatagag

SEQ ID NO: 2068737 - DNA, 25 bp, Homo sapien
aagattggtgcgttagaaggatata

SEQ ID NO: 2068738 - DNA, 25 bp, Homo sapien
aaggatatagaggccaaagagtaaa

SEQ ID NO: 2068739 - DNA, 25 bp, Homo sapien
gattggtgcgttagaaggatataga

SEQ ID NO: 2068740 - DNA, 25 bp, Homo sapien
ctatatccttctaacgcaccaatct

SEQ ID NO: 2068741 - DNA, 25 bp, Homo sapien
tctatatccttctaacgcaccaatc

SEQ ID NO: 2068742 - DNA, 25 bp, Homo sapien
ctctatatccttctaacgcaccaat

SEQ ID NO: 2068743 - DNA, 25 bp, Homo sapien
ttactctttggcctctatatccttc

SEQ ID NO: 2068744 - DNA, 25 bp, Homo sapien
tatatccttctaacgcaccaatctt

SEQ ID NO: 2068745 - DNA, 25 bp, Homo sapien
tttactctttggcctctatatcctt

SEQ ID NO: 2068746 - DNA, 25 bp, Homo sapien
gaagcaaagaagattaccattaaaa

SEQ ID NO: 2068747 - DNA, 25 bp, Homo sapien
ttttaatggtaatcttctttgcttc

SEQ ID NO: 2068748 - DNA, 25 bp, Homo sapien
cattaaaaatgatccaagtctccca

SEQ ID NO: 2068749 - DNA, 25 bp, Homo sapien
tacgaagagaaaagaacctggaaga

SEQ ID NO: 2068750 - DNA, 25 bp, Homo sapien
aaaatgatccaagtctcccagagcc

SEQ ID NO: 2068751 - DNA, 25 bp, Homo sapien
gcagaagatagtttacgaagagaaa

SEQ ID NO: 2068752 - DNA, 25 bp, Homo sapien
tccaagtctcccagagccaaaatgt

SEQ ID NO: 2068753 - DNA, 25 bp, Homo sapien
gaagcaaagaagattaccattaaaa

SEQ ID NO: 2068754 - DNA, 25 bp, Homo sapien
acattttggctctgggagacttgga

SEQ ID NO: 2068755 - DNA, 25 bp, Homo sapien
tcttccaggttcttttctcttcgta

SEQ ID NO: 2068756 - DNA, 25 bp, Homo sapien
tttctcttcgtaaactatcttctgc

SEQ ID NO: 2068757 - DNA, 25 bp, Homo sapien
ggctctgggagacttggatcatttt

SEQ ID NO: 2068758 - DNA, 25 bp, Homo sapien
ttttaatggtaatcttctttgcttc

SEQ ID NO: 2068759 - DNA, 25 bp, Homo sapien
gggagacttggatcatttttaatgg

SEQ ID NO: 2068760 - DNA, 25 bp, Homo sapien
gaacaaatgaagagtgaatcccggg

SEQ ID NO: 2068761 - DNA, 25 bp, Homo sapien
aatgaagagtgaatcccgggaaaag

SEQ ID NO: 2068762 - DNA, 25 bp, Homo sapien
acaaatgaagagtgaatcccgggaa

SEQ ID NO: 2068763 - DNA, 25 bp, Homo sapien
tgaagagtgaatcccgggaaaagaa

SEQ ID NO: 2068764 - DNA, 25 bp, Homo sapien
aacaaatgaagagtgaatcccggga

SEQ ID NO: 2068765 - DNA, 25 bp, Homo sapien
caaatgaagagtgaatcccgggaaa

SEQ ID NO: 2068766 - DNA, 25 bp, Homo sapien
tcccgggattcactcttcatttgtt

SEQ ID NO: 2068767 - DNA, 25 bp, Homo sapien
tttcccgggattcactcttcatttg

SEQ ID NO: 2068768 - DNA, 25 bp, Homo sapien
ttcccgggattcactcttcatttgt

SEQ ID NO: 2068769 - DNA, 25 bp, Homo sapien
ttcttttcccgggattcactcttca

SEQ ID NO: 2068770 - DNA, 25 bp, Homo sapien
cttttcccgggattcactcttcatt

SEQ ID NO: 2068771 - DNA, 25 bp, Homo sapien
cccgggattcactcttcatttgttc

SEQ ID NO: 2068772 - DNA, 25 bp, Homo sapien
taccatttacgtagattcacaaaaa

SEQ ID NO: 2068773 - DNA, 25 bp, Homo sapien
catttcctaccatttacgtagattc

SEQ ID NO: 2068774 - DNA, 25 bp, Homo sapien
tcctaccatttacgtagattcacaa

SEQ ID NO: 2068775 - DNA, 25 bp, Homo sapien
tttcctaccatttacgtagattcac

SEQ ID NO: 2068776 - DNA, 25 bp, Homo sapien
accatttcctaccatttacgtagat

SEQ ID NO: 2068777 - DNA, 25 bp, Homo sapien
cctaccatttacgtagattcacaaa

SEQ ID NO: 2068778 - DNA, 25 bp, Homo sapien
tgaatctacgtaaatggtaggaaat

SEQ ID NO: 2068779 - DNA, 25 bp, Homo sapien
gaatctacgtaaatggtaggaaatg

SEQ ID NO: 2068780 - DNA, 25 bp, Homo sapien
tgtgaatctacgtaaatggtaggaa

SEQ ID NO: 2068781 - DNA, 25 bp, Homo sapien
tttttgtgaatctacgtaaatggta

SEQ ID NO: 2068782 - DNA, 25 bp, Homo sapien
atctacgtaaatggtaggaaatggt

SEQ ID NO: 2068783 - DNA, 25 bp, Homo sapien
tttgtgaatctacgtaaatggtagg

SEQ ID NO: 2068784 - DNA, 25 bp, Homo sapien
taccatttacgtagattcacaaaaa

SEQ ID NO: 2068785 - DNA, 25 bp, Homo sapien
tttgatgacagtagggaaagaacca

SEQ ID NO: 2068786 - DNA, 25 bp, Homo sapien
gtggaatgttatttctaaatcacag

SEQ ID NO: 2068787 - DNA, 25 bp, Homo sapien
accatttcctaccatttacgtagat

SEQ ID NO: 2068788 - DNA, 25 bp, Homo sapien
tgacagtagggaaagaaccatttcc

SEQ ID NO: 2068789 - DNA, 25 bp, Homo sapien
aaagaaaatgagaggtggaatgtta

SEQ ID NO: 2068790 - DNA, 25 bp, Homo sapien
gatttagaaataacattccacctct

SEQ ID NO: 2068791 - DNA, 25 bp, Homo sapien
aatctacgtaaatggtaggaaatgg

SEQ ID NO: 2068792 - DNA, 25 bp, Homo sapien
ggttctttccctactgtcatcaaag

SEQ ID NO: 2068793 - DNA, 25 bp, Homo sapien
ggaaatggttctttccctactgtca

SEQ ID NO: 2068794 - DNA, 25 bp, Homo sapien
cattttctttttgtgaatctacgta

SEQ ID NO: 2068795 - DNA, 25 bp, Homo sapien
tttgtgaatctacgtaaatggtagg

SEQ ID NO: 2068796 - DNA, 25 bp, Homo sapien
tgtcttttctctcctccctacccaa

SEQ ID NO: 2068797 - DNA, 25 bp, Homo sapien
tattgtacaatgttcaagaactgtc

SEQ ID NO: 2068798 - DNA, 25 bp, Homo sapien
caatgttcaagaactgtcttttctc

SEQ ID NO: 2068799 - DNA, 25 bp, Homo sapien
tacaatgttcaagaactgtcttttc

SEQ ID NO: 2068800 - DNA, 25 bp, Homo sapien
ttgtacaatgttcaagaactgtctt

SEQ ID NO: 2068801 - DNA, 25 bp, Homo sapien
tgtacaatgttcaagaactgtcttt

SEQ ID NO: 2068802 - DNA, 25 bp, Homo sapien
gagaaaagacagttcttgaacattg

SEQ ID NO: 2068803 - DNA, 25 bp, Homo sapien
gaaaagacagttcttgaacattgta

SEQ ID NO: 2068804 - DNA, 25 bp, Homo sapien
gacagttcttgaacattgtacaata

SEQ ID NO: 2068805 - DNA, 25 bp, Homo sapien
aagacagttcttgaacattgtacaa

SEQ ID NO: 2068806 - DNA, 25 bp, Homo sapien
aaagacagttcttgaacattgtaca

SEQ ID NO: 2068807 - DNA, 25 bp, Homo sapien
ttgggtagggaggagagaaaagaca

SEQ ID NO: 2068808 - DNA, 25 bp, Homo sapien
ggtgaatttaccacaatccagagtg

SEQ ID NO: 2068809 - DNA, 25 bp, Homo sapien
gactcatgagtctggagcttcaagc

SEQ ID NO: 2068810 - DNA, 25 bp, Homo sapien
gatcctgagatttgactccaagacc

SEQ ID NO: 2068811 - DNA, 25 bp, Homo sapien
gaatggattcatttgtcagagctga

SEQ ID NO: 2068812 - DNA, 25 bp, Homo sapien
tctccattgagtcagattgctgggt

SEQ ID NO: 2068813 - DNA, 25 bp, Homo sapien
ggagcttcaagctagaatgccaatt

SEQ ID NO: 2068814 - DNA, 25 bp, Homo sapien
aattccaagaagcaatgccatgtgg

SEQ ID NO: 2068815 - DNA, 25 bp, Homo sapien
tcttggagtcaaatctcaggatcac

SEQ ID NO: 2068816 - DNA, 25 bp, Homo sapien
aattggcattctagcttgaagctcc

SEQ ID NO: 2068817 - DNA, 25 bp, Homo sapien
gcttgaagctccagactcatgagtc

SEQ ID NO: 2068818 - DNA, 25 bp, Homo sapien
ccagcaatctgactcaatggagaga

SEQ ID NO: 2068819 - DNA, 25 bp, Homo sapien
cactctggattgtggtaaattcacc

SEQ ID NO: 2068820 - DNA, 25 bp, Homo sapien
gcgatgccacgggagatggaaccaa

SEQ ID NO: 2068821 - DNA, 25 bp, Homo sapien
atgccacgggagatggaaccaagga

SEQ ID NO: 2068822 - DNA, 25 bp, Homo sapien
tctctgaccgagagggaagcgatgc

SEQ ID NO: 2068823 - DNA, 25 bp, Homo sapien
ctgaccgagagggaagcgatgccac

SEQ ID NO: 2068824 - DNA, 25 bp, Homo sapien
agctgtacgtctctgaccgagaggg

SEQ ID NO: 2068825 - DNA, 25 bp, Homo sapien
tgtacgtctctgaccgagagggaag

SEQ ID NO: 2068826 - DNA, 25 bp, Homo sapien
gtggcatcgcttccctctcggtcag

SEQ ID NO: 2068827 - DNA, 25 bp, Homo sapien
gcatcgcttccctctcggtcagaga

SEQ ID NO: 2068828 - DNA, 25 bp, Homo sapien
ccctctcggtcagagacgtacagct

SEQ ID NO: 2068829 - DNA, 25 bp, Homo sapien
tccttggttccatctcccgtggcat

SEQ ID NO: 2068830 - DNA, 25 bp, Homo sapien
ttggttccatctcccgtggcatcgc

SEQ ID NO: 2068831 - DNA, 25 bp, Homo sapien
gcttccctctcggtcagagacgtac

SEQ ID NO: 2068832 - DNA, 25 bp, Homo sapien
tcccgattgcgctgagactcaggcg

SEQ ID NO: 2068833 - DNA, 25 bp, Homo sapien
gacgggttcagacacagggtagccc

SEQ ID NO: 2068834 - DNA, 25 bp, Homo sapien
ggttcagacacagggtagcccctac

SEQ ID NO: 2068835 - DNA, 25 bp, Homo sapien
gggtagcccctactcctgcagttct

SEQ ID NO: 2068836 - DNA, 25 bp, Homo sapien
cgattgcgctgagactcaggcgctg

SEQ ID NO: 2068837 - DNA, 25 bp, Homo sapien
ctcaggcgctgggacgggttcagac

SEQ ID NO: 2068838 - DNA, 25 bp, Homo sapien
agaactgcaggagtaggggctaccc

SEQ ID NO: 2068839 - DNA, 25 bp, Homo sapien
cagcgcctgagtctcagcgcaatcg

SEQ ID NO: 2068840 - DNA, 25 bp, Homo sapien
cgcaatcgggaggtttcgcagcggg

SEQ ID NO: 2068841 - DNA, 25 bp, Homo sapien
cgcctgagtctcagcgcaatcggga

SEQ ID NO: 2068842 - DNA, 25 bp, Homo sapien
gtctgaacccgtcccagcgcctgag

SEQ ID NO: 2068843 - DNA, 25 bp, Homo sapien
gggctaccctgtgtctgaacccgtc

SEQ ID NO: 2068844 - DNA, 25 bp, Homo sapien
cgtcggtgttgcagtctgtgtcctt

SEQ ID NO: 2068845 - DNA, 25 bp, Homo sapien
tcataagacggcgtcggtgttgcag

SEQ ID NO: 2068846 - DNA, 25 bp, Homo sapien
ttggagtcataagacggcgtcggtg

SEQ ID NO: 2068847 - DNA, 25 bp, Homo sapien
gcgtcggtgttgcagtctgtgtcct

SEQ ID NO: 2068848 - DNA, 25 bp, Homo sapien
gtcggtgttgcagtctgtgtccttg

SEQ ID NO: 2068849 - DNA, 25 bp, Homo sapien
ataagacggcgtcggtgttgcagtc

SEQ ID NO: 2068850 - DNA, 25 bp, Homo sapien
caccgacgccgtcttatgactccaa

SEQ ID NO: 2068851 - DNA, 25 bp, Homo sapien
actgcaacaccgacgccgtcttatg

SEQ ID NO: 2068852 - DNA, 25 bp, Homo sapien
gactgcaacaccgacgccgtcttat

SEQ ID NO: 2068853 - DNA, 25 bp, Homo sapien
caaggacacagactgcaacaccgac

SEQ ID NO: 2068854 - DNA, 25 bp, Homo sapien
ctgcaacaccgacgccgtcttatga

SEQ ID NO: 2068855 - DNA, 25 bp, Homo sapien
aaggacacagactgcaacaccgacg

SEQ ID NO: 2068856 - DNA, 25 bp, Homo sapien
ctctggatccggaagttgcctctgc

SEQ ID NO: 2068857 - DNA, 25 bp, Homo sapien
tccgggacaggcagcgccttccgag

SEQ ID NO: 2068858 - DNA, 25 bp, Homo sapien
gatctacgctctctgatgcaacgcc

SEQ ID NO: 2068859 - DNA, 25 bp, Homo sapien
cttccgagctgcacaaacgcgtggg

SEQ ID NO: 2068860 - DNA, 25 bp, Homo sapien
cctctcgtaaccaatggaaccgcgg

SEQ ID NO: 2068861 - DNA, 25 bp, Homo sapien
gatgcaacgccggaatcgcggaaac

SEQ ID NO: 2068862 - DNA, 25 bp, Homo sapien
cggtttccgcgattccggcgttgca

SEQ ID NO: 2068863 - DNA, 25 bp, Homo sapien
tccggcgttgcatcagagagcgtag

SEQ ID NO: 2068864 - DNA, 25 bp, Homo sapien
ctcggaaggcgctgcctgtcccgga

SEQ ID NO: 2068865 - DNA, 25 bp, Homo sapien
cgcggttccattggttacgagaggt

SEQ ID NO: 2068866 - DNA, 25 bp, Homo sapien
cacgcgtttgtgcagctcggaaggc

SEQ ID NO: 2068867 - DNA, 25 bp, Homo sapien
gcagaggcaacttccggatccagag

SEQ ID NO: 2068868 - DNA, 25 bp, Homo sapien
tgtggcgtcccccacaggccaccgt

SEQ ID NO: 2068869 - DNA, 25 bp, Homo sapien
tctgttcttttaatgtggcgtcccc

SEQ ID NO: 2068870 - DNA, 25 bp, Homo sapien
caggatgagcgtctctgttctttta

SEQ ID NO: 2068871 - DNA, 25 bp, Homo sapien
caggcgcaggatgagcgtctctgtt

SEQ ID NO: 2068872 - DNA, 25 bp, Homo sapien
ccgccatgttgtctccgggccactt

SEQ ID NO: 2068873 - DNA, 25 bp, Homo sapien
tggcgcgtggtcttgcatttcctac

SEQ ID NO: 2068874 - DNA, 25 bp, Homo sapien
atgttgtctccgggccacttccgcg

SEQ ID NO: 2068875 - DNA, 25 bp, Homo sapien
cacttccgcgtttctggcgcgtggt

SEQ ID NO: 2068876 - DNA, 25 bp, Homo sapien
gaatccggggctcgccctagtcgcg

SEQ ID NO: 2068877 - DNA, 25 bp, Homo sapien
tcataacaggcttcggtaagagaac

SEQ ID NO: 2068878 - DNA, 25 bp, Homo sapien
tcttcaaagagccttcttggacatt

SEQ ID NO: 2068879 - DNA, 25 bp, Homo sapien
ttggtcctgttcgtggcgccgcgcc

SEQ ID NO: 2068880 - DNA, 25 bp, Homo sapien
cactgcgggcgcctctagggctcgt

SEQ ID NO: 2068881 - DNA, 25 bp, Homo sapien
tctagggctcgtttccctgtcccag

SEQ ID NO: 2068882 - DNA, 25 bp, Homo sapien
gcgggcgcctctagggctcgtttcc

SEQ ID NO: 2068883 - DNA, 25 bp, Homo sapien
gcgcctctagggctcgtttccctgt

SEQ ID NO: 2068884 - DNA, 25 bp, Homo sapien
ccctcacctcccggatggggtggct

SEQ ID NO: 2068885 - DNA, 25 bp, Homo sapien
cctccctcctggacggggtggctgc

SEQ ID NO: 2068886 - DNA, 25 bp, Homo sapien
cggatggggtggctggccgggcagg

SEQ ID NO: 2068887 - DNA, 25 bp, Homo sapien
acctcccggatggggtggctggccg

SEQ ID NO: 2068888 - DNA, 25 bp, Homo sapien
cggggcgacagggcagaggcgctcc

SEQ ID NO: 2068889 - DNA, 25 bp, Homo sapien
ggacggggcgacagggcagaggcgc

SEQ ID NO: 2068890 - DNA, 25 bp, Homo sapien
acggggcgacagggcagaggcgctc

SEQ ID NO: 2068891 - DNA, 25 bp, Homo sapien
gacggggcgacagggcagaggcgct

SEQ ID NO: 2068892 - DNA, 25 bp, Homo sapien
tttggagcctattctactacagtgc

SEQ ID NO: 2068893 - DNA, 25 bp, Homo sapien
ccactccagtatttgaatttcctcg

SEQ ID NO: 2068894 - DNA, 25 bp, Homo sapien
taaatgttcacgtgtttgaggctat

SEQ ID NO: 2068895 - DNA, 25 bp, Homo sapien
gaatgtctgtgtaatcatgcatcag

SEQ ID NO: 2068896 - DNA, 25 bp, Homo sapien
gaaccacttagctttcagatgatga

SEQ ID NO: 2068897 - DNA, 25 bp, Homo sapien
caaatcatttggtactatgggaagc

SEQ ID NO: 2068898 - DNA, 25 bp, Homo sapien
cagtcttaggaatgtggctgccaat

SEQ ID NO: 2068899 - DNA, 25 bp, Homo sapien
cacgcccggccgaataataggactt

SEQ ID NO: 2068900 - DNA, 25 bp, Homo sapien
ttcataaaaaaatagacgtgctttg

SEQ ID NO: 2068901 - DNA, 25 bp, Homo sapien
aagtcctgagagtctttcataaaaa

SEQ ID NO: 2068902 - DNA, 25 bp, Homo sapien
tcataaaaaaatagacgtgctttgt

SEQ ID NO: 2068903 - DNA, 25 bp, Homo sapien
caaagtcctgagagtctttcataaa

SEQ ID NO: 2068904 - DNA, 25 bp, Homo sapien
tcagctgtccccggtgcgcctgtac

SEQ ID NO: 2068905 - DNA, 25 bp, Homo sapien
atgaggtccgcgtagccccgctggt

SEQ ID NO: 2068906 - DNA, 25 bp, Homo sapien
cttcttgcggatgctgcgcccggag

SEQ ID NO: 2068907 - DNA, 25 bp, Homo sapien
cgatggcatcaagcggcgagcgctt

SEQ ID NO: 2068908 - DNA, 25 bp, Homo sapien
ccttcaaccgcttgcgatgcttctg

SEQ ID NO: 2068909 - DNA, 25 bp, Homo sapien
gcacgcactgccacacccgtctaat

SEQ ID NO: 2068910 - DNA, 25 bp, Homo sapien
ggggttacaggcacgcactgccaca

SEQ ID NO: 2068911 - DNA, 25 bp, Homo sapien
caggcacgcactgccacacccgtct

SEQ ID NO: 2068912 - DNA, 25 bp, Homo sapien
tggggttacaggcacgcactgccac

SEQ ID NO: 2068913 - DNA, 25 bp, Homo sapien
ccatgagcttagaattttgcaggaa

SEQ ID NO: 2068914 - DNA, 25 bp, Homo sapien
cccatgagcttagaattttgcagga

SEQ ID NO: 2068915 - DNA, 25 bp, Homo sapien
catgagcttagaattttgcaggaaa

SEQ ID NO: 2068916 - DNA, 25 bp, Homo sapien
caacagccaggatgatagttaacca

SEQ ID NO: 2068917 - DNA, 25 bp, Homo sapien
gtagtaagcacacagcaacagccag

SEQ ID NO: 2068918 - DNA, 25 bp, Homo sapien
gatggccagatggtcattgacagga

SEQ ID NO: 2068919 - DNA, 25 bp, Homo sapien
tgacaggaatcgaatggcaacgacg

SEQ ID NO: 2068920 - DNA, 25 bp, Homo sapien
tccagcactatgaaagtcaaacatg

SEQ ID NO: 2068921 - DNA, 25 bp, Homo sapien
gaaatgcagatggaaagagaacatg

SEQ ID NO: 2068922 - DNA, 25 bp, Homo sapien
aagtccaataagaagtatccaagcc

SEQ ID NO: 2068923 - DNA, 25 bp, Homo sapien
gaaagagaacatgtattccagcact

SEQ ID NO: 2068924 - DNA, 25 bp, Homo sapien
caatggtgacggcaaaagactggta

SEQ ID NO: 2068925 - DNA, 25 bp, Homo sapien
ggatcatcgatgttaggaccccatg

SEQ ID NO: 2068926 - DNA, 25 bp, Homo sapien
tataacccagggaatcggaggctca

SEQ ID NO: 2068927 - DNA, 25 bp, Homo sapien
gactggtagtcggaaggtgcctctc

SEQ ID NO: 2068928 - DNA, 25 bp, Homo sapien
tgatgaaccaatcctcgtatgcagt

SEQ ID NO: 2068929 - DNA, 25 bp, Homo sapien
gcacgttgtagagggtgatgaacca

SEQ ID NO: 2068930 - DNA, 25 bp, Homo sapien
gcaggctggtgtacagcacgttgta

SEQ ID NO: 2068931 - DNA, 25 bp, Homo sapien
aggagcacgggcaggctggtgtaca

SEQ ID NO: 2068932 - DNA, 25 bp, Homo sapien
aactgagcaaaggaatagtcactcg

SEQ ID NO: 2068933 - DNA, 25 bp, Homo sapien
tagcctctgcagatatcggaactga

SEQ ID NO: 2068934 - DNA, 25 bp, Homo sapien
tatgtaagaccatcggccatgcacc

SEQ ID NO: 2068935 - DNA, 25 bp, Homo sapien
tagccattgaagaaggagtaccaga

SEQ ID NO: 2068936 - DNA, 25 bp, Homo sapien
tccttcttgtccacttattccaacg

SEQ ID NO: 2068937 - DNA, 25 bp, Homo sapien
cacttattccaacgccaatgtgggc

SEQ ID NO: 2068938 - DNA, 25 bp, Homo sapien
tgtccacttattccaacgccaatgt

SEQ ID NO: 2068939 - DNA, 25 bp, Homo sapien
tcttgtccacttattccaacgccaa

SEQ ID NO: 2068940 - DNA, 25 bp, Homo sapien
gagcagaccaaggacaaatgtgaaa

SEQ ID NO: 2068941 - DNA, 25 bp, Homo sapien
cacacaaatatttcctatgaccagc

SEQ ID NO: 2068942 - DNA, 25 bp, Homo sapien
tctttcctgaacaagccactgagga

SEQ ID NO: 2068943 - DNA, 25 bp, Homo sapien
ggtatccagtcctcaaccttcccgc

SEQ ID NO: 2068944 - DNA, 25 bp, Homo sapien
tgataaatctccaaagcaaacccgt

SEQ ID NO: 2068945 - DNA, 25 bp, Homo sapien
aataaactagagctggctggctatg

SEQ ID NO: 2068946 - DNA, 25 bp, Homo sapien
tgtccttttggcacggctagttacg

SEQ ID NO: 2068947 - DNA, 25 bp, Homo sapien
gagatagatctaactccgagcaagc

SEQ ID NO: 2068948 - DNA, 25 bp, Homo sapien
actttgggtccgcatccgtctttct

SEQ ID NO: 2068949 - DNA, 25 bp, Homo sapien
ggtctttttctcgagaagaatttca

SEQ ID NO: 2068950 - DNA, 25 bp, Homo sapien
cagatgactgcgctgcactcgcagg

SEQ ID NO: 2068951 - DNA, 25 bp, Homo sapien
gtccgcatccgtctttcttcttctg

SEQ ID NO: 2068952 - DNA, 25 bp, Homo sapien
gatgattaaggcacggtttccaccg

SEQ ID NO: 2068953 - DNA, 25 bp, Homo sapien
aactttgcgtagacgccacctctat

SEQ ID NO: 2068954 - DNA, 25 bp, Homo sapien
caggaggtgcaaactttgcgtagac

SEQ ID NO: 2068955 - DNA, 25 bp, Homo sapien
caaccaagaaccagtgatgattaag

SEQ ID NO: 2068956 - DNA, 25 bp, Homo sapien
gggcacctgggttgcgtccatctct

SEQ ID NO: 2068957 - DNA, 25 bp, Homo sapien
attccattatgtggaagcaccacat

SEQ ID NO: 2068958 - DNA, 25 bp, Homo sapien
gcacctgggttgcgtccatctcttg

SEQ ID NO: 2068959 - DNA, 25 bp, Homo sapien
ccattatgtggaagcaccacattct

SEQ ID NO: 2068960 - DNA, 25 bp, Homo sapien
tgtgaggtgttatcttgctttggtt

SEQ ID NO: 2068961 - DNA, 25 bp, Homo sapien
gagcctcctttcacatgtttatcag

SEQ ID NO: 2068962 - DNA, 25 bp, Homo sapien
atttatcttcccctaatgattagtg

SEQ ID NO: 2068963 - DNA, 25 bp, Homo sapien
tgctttggttttgatttatcttccc

SEQ ID NO: 2068964 - DNA, 25 bp, Homo sapien
ttactatgtctcgattcatccacca

SEQ ID NO: 2068965 - DNA, 25 bp, Homo sapien
tatgtctcgattcatccaccatggg

SEQ ID NO: 2068966 - DNA, 25 bp, Homo sapien
accatgggggtaccatgtaattcat

SEQ ID NO: 2068967 - DNA, 25 bp, Homo sapien
tgggggtaccatgtaattcatcatt

SEQ ID NO: 2068968 - DNA, 25 bp, Homo sapien
aaaaatcttgaggaactgtcaggcc

SEQ ID NO: 2068969 - DNA, 25 bp, Homo sapien
aacagtttaatctgacctcatgctg

SEQ ID NO: 2068970 - DNA, 25 bp, Homo sapien
gcttatgtacctctatttgggcaca

SEQ ID NO: 2068971 - DNA, 25 bp, Homo sapien
gagagaagctctgtagggaaaaatc

SEQ ID NO: 2068972 - DNA, 25 bp, Homo sapien
tacagacagtcttgcatttgcaaag

SEQ ID NO: 2068973 - DNA, 25 bp, Homo sapien
tgctcaaatttaggctgcaccttga

SEQ ID NO: 2068974 - DNA, 25 bp, Homo sapien
ttaaacatgaggaaactgccccaag

SEQ ID NO: 2068975 - DNA, 25 bp, Homo sapien
gagaaaaatggcctctgaagggccc

SEQ ID NO: 2068976 - DNA, 25 bp, Homo sapien
aagttcacaagcaaatcctatattt

SEQ ID NO: 2068977 - DNA, 25 bp, Homo sapien
gaagttcacaagcaaatcctatatt

SEQ ID NO: 2068978 - DNA, 25 bp, Homo sapien
gtgtcttcagtcagaagttcacaag

SEQ ID NO: 2068979 - DNA, 25 bp, Homo sapien
gtcttcagtcagaagttcacaagca

SEQ ID NO: 2068980 - DNA, 25 bp, Homo sapien
ttgcagagtgtgtaacccgttgacg

SEQ ID NO: 2068981 - DNA, 25 bp, Homo sapien
gtcatcttgggcaaaggaaacggca

SEQ ID NO: 2068982 - DNA, 25 bp, Homo sapien
catttatttaaggtcagggctgtgc

SEQ ID NO: 2068983 - DNA, 25 bp, Homo sapien
cgttgacgatttcagcgcaagagac

SEQ ID NO: 2068984 - DNA, 25 bp, Homo sapien
tcttaatgtcagcttttgcaagttt

SEQ ID NO: 2068985 - DNA, 25 bp, Homo sapien
gtagcttgtcttcaatagctgtagc

SEQ ID NO: 2068986 - DNA, 25 bp, Homo sapien
cctttttgtctccagtaagcaccca

SEQ ID NO: 2068987 - DNA, 25 bp, Homo sapien
agtaagcacccagatcttaatgtca

SEQ ID NO: 2068988 - DNA, 25 bp, Homo sapien
ccagagcttcgtcccggttggtgga

SEQ ID NO: 2068989 - DNA, 25 bp, Homo sapien
ctcatatactttatccagagcttcg

SEQ ID NO: 2068990 - DNA, 25 bp, Homo sapien
tccagagcttcgtcccggttggtgg

SEQ ID NO: 2068991 - DNA, 25 bp, Homo sapien
cctcatatactttatccagagcttc

SEQ ID NO: 2068992 - DNA, 25 bp, Homo sapien
aggcatagggttctaagagtttcat

SEQ ID NO: 2068993 - DNA, 25 bp, Homo sapien
gttctaagagtttcatttgcaaaga

SEQ ID NO: 2068994 - DNA, 25 bp, Homo sapien
cttgtagcaaaggcatagggttcta

SEQ ID NO: 2068995 - DNA, 25 bp, Homo sapien
tagcaaaggcatagggttctaagag

SEQ ID NO: 2068996 - DNA, 25 bp, Homo sapien
tttacagtaaagcttgatattgcct

SEQ ID NO: 2068997 - DNA, 25 bp, Homo sapien
gtgtcagcacctttacagtaaagct

SEQ ID NO: 2068998 - DNA, 25 bp, Homo sapien
ttcgatgtaaccgttcataaataac

SEQ ID NO: 2068999 - DNA, 25 bp, Homo sapien
ctgtgtttcttgcttagtaggattc

SEQ ID NO: 2069000 - DNA, 25 bp, Homo sapien
tggcagcgtttaccagggcaccttc

SEQ ID NO: 2069001 - DNA, 25 bp, Homo sapien
gatagacattcgcttccggtcactg

SEQ ID NO: 2069002 - DNA, 25 bp, Homo sapien
tcctggcgaggaaggcaaagccaaa

SEQ ID NO: 2069003 - DNA, 25 bp, Homo sapien
tgttgaagtccaaaatggcaagaac

SEQ ID NO: 2069004 - DNA, 25 bp, Homo sapien
aacaaggaagcgagagaaatcccag

SEQ ID NO: 2069005 - DNA, 25 bp, Homo sapien
aggaagcgagagaaatcccagaaaa

SEQ ID NO: 2069006 - DNA, 25 bp, Homo sapien
ctaacaaggaagcgagagaaatccc

SEQ ID NO: 2069007 - DNA, 25 bp, Homo sapien
caaggaagcgagagaaatcccagaa

SEQ ID NO: 2069008 - DNA, 25 bp, Homo sapien
tagcatgtagtccagggctcttccc

SEQ ID NO: 2069009 - DNA, 25 bp, Homo sapien
ggctgactcatctctagcatgtagt

SEQ ID NO: 2069010 - DNA, 25 bp, Homo sapien
aacaccgaggaaggtggttctcaga

SEQ ID NO: 2069011 - DNA, 25 bp, Homo sapien
tacaacaccgaggaaggtggttctc

SEQ ID NO: 2069012 - DNA, 25 bp, Homo sapien
gaactgtcgtacttctggctctttc

SEQ ID NO: 2069013 - DNA, 25 bp, Homo sapien
tgactgtgtggcaaactgcgagcaa

SEQ ID NO: 2069014 - DNA, 25 bp, Homo sapien
agtcctatccaccatgactgtgtgg

SEQ ID NO: 2069015 - DNA, 25 bp, Homo sapien
aaactgcgagcaagaagaagaactg

SEQ ID NO: 2069016 - DNA, 25 bp, Homo sapien
aagatagtggtcataaaatgcaagc

SEQ ID NO: 2069017 - DNA, 25 bp, Homo sapien
atgtattccagctaaaatcaacttg

SEQ ID NO: 2069018 - DNA, 25 bp, Homo sapien
gctcaataagatagtggtcataaaa

SEQ ID NO: 2069019 - DNA, 25 bp, Homo sapien
cttcccatcagcatatgtattccag

SEQ ID NO: 2069020 - DNA, 25 bp, Homo sapien
tgttgtggttgtgttgagaggcatc

SEQ ID NO: 2069021 - DNA, 25 bp, Homo sapien
ttgtggttgtgttgagaggcatccc

SEQ ID NO: 2069022 - DNA, 25 bp, Homo sapien
tgtggttgtgttgagaggcatcccg

SEQ ID NO: 2069023 - DNA, 25 bp, Homo sapien
gtggttgtgttgagaggcatcccga

SEQ ID NO: 2069024 - DNA, 25 bp, Homo sapien
aggagacaggctatagtccaagtaa

SEQ ID NO: 2069025 - DNA, 25 bp, Homo sapien
gagacaggctatagtccaagtaatg

SEQ ID NO: 2069026 - DNA, 25 bp, Homo sapien
ggagacaggctatagtccaagtaat

SEQ ID NO: 2069027 - DNA, 25 bp, Homo sapien
caggagacaggctatagtccaagta

SEQ ID NO: 2069028 - DNA, 25 bp, Homo sapien
gaaaatgagtgacggcttccactta

SEQ ID NO: 2069029 - DNA, 25 bp, Homo sapien
cccagaaaatgagtgacggcttcca

SEQ ID NO: 2069030 - DNA, 25 bp, Homo sapien
aaaatgagtgacggcttccacttac

SEQ ID NO: 2069031 - DNA, 25 bp, Homo sapien
cagaaaatgagtgacggcttccact

SEQ ID NO: 2069032 - DNA, 25 bp, Homo sapien
gagtgtccccgtcttatcagagaag

SEQ ID NO: 2069033 - DNA, 25 bp, Homo sapien
tagcttttgcgggtgtgtccttctc

SEQ ID NO: 2069034 - DNA, 25 bp, Homo sapien
gatataatggatctgcccgagctgt

SEQ ID NO: 2069035 - DNA, 25 bp, Homo sapien
tcagcatagtacatttgcaggtccc

SEQ ID NO: 2069036 - DNA, 25 bp, Homo sapien
gcccttattaaagtggctcaaagga

SEQ ID NO: 2069037 - DNA, 25 bp, Homo sapien
gattattttccgtagagagctcgga

SEQ ID NO: 2069038 - DNA, 25 bp, Homo sapien
cattgtacagacgagagcaagctgc

SEQ ID NO: 2069039 - DNA, 25 bp, Homo sapien
gctcggatacgagtggcaagtagta

SEQ ID NO: 2069040 - DNA, 25 bp, Homo sapien
tgagaacaatgatatagccccagaa

SEQ ID NO: 2069041 - DNA, 25 bp, Homo sapien
taagcatggccgatggcaagaccag

SEQ ID NO: 2069042 - DNA, 25 bp, Homo sapien
tctccatcatagaggtaccaagagg

SEQ ID NO: 2069043 - DNA, 25 bp, Homo sapien
tccacggtaggagggtgtatcgtct

SEQ ID NO: 2069044 - DNA, 25 bp, Homo sapien
caaccctacattgacttcaggagtc

SEQ ID NO: 2069045 - DNA, 25 bp, Homo sapien
gcaatctagatgagagatctactga

SEQ ID NO: 2069046 - DNA, 25 bp, Homo sapien
gaaaaacatacgataatattagtgc

SEQ ID NO: 2069047 - DNA, 25 bp, Homo sapien
ctcagggcaccctacaaccgaaatt

SEQ ID NO: 2069048 - DNA, 25 bp, Homo sapien
aaaccatgtagttcatcaagtaatc

SEQ ID NO: 2069049 - DNA, 25 bp, Homo sapien
ttcttcattattttagtgtcagcac

SEQ ID NO: 2069050 - DNA, 25 bp, Homo sapien
aaccatgtagttcatcaagtaatca

SEQ ID NO: 2069051 - DNA, 25 bp, Homo sapien
ctggttttcccactattcttcatta

SEQ ID NO: 2069052 - DNA, 25 bp, Homo sapien
tagtcatcagttgggaaaaatcaat

SEQ ID NO: 2069053 - DNA, 25 bp, Homo sapien
aaaatcaattcactagctcaccaat

SEQ ID NO: 2069054 - DNA, 25 bp, Homo sapien
caataaaattactcttcttggccag

SEQ ID NO: 2069055 - DNA, 25 bp, Homo sapien
gaaaatggaaaattcaatgtagtca

SEQ ID NO: 2069056 - DNA, 25 bp, Homo sapien
tgactaagccgtggcagaaatcggt

SEQ ID NO: 2069057 - DNA, 25 bp, Homo sapien
ctgcaaaaatgactaagccgtggca

SEQ ID NO: 2069058 - DNA, 25 bp, Homo sapien
caaaaatgactaagccgtggcagaa

SEQ ID NO: 2069059 - DNA, 25 bp, Homo sapien
taagccgtggcagaaatcggtgttc

SEQ ID NO: 2069060 - DNA, 25 bp, Homo sapien
ctgttattgggttcttcacattcaa

SEQ ID NO: 2069061 - DNA, 25 bp, Homo sapien
aaatagtgttcctgtaaacttatct

SEQ ID NO: 2069062 - DNA, 25 bp, Homo sapien
cacagccacgtaacaaaattttatc

SEQ ID NO: 2069063 - DNA, 25 bp, Homo sapien
taaacttatctagtctgttattggg

SEQ ID NO: 2069064 - DNA, 25 bp, Homo sapien
tctgtgatttcaagtgacatcttaa

SEQ ID NO: 2069065 - DNA, 25 bp, Homo sapien
ctgtgatttcaagtgacatcttaaa

SEQ ID NO: 2069066 - DNA, 25 bp, Homo sapien
tccacttcacagaggcgcaaaggtg

SEQ ID NO: 2069067 - DNA, 25 bp, Homo sapien
gagaaacgcaggtagtaagagctcc

SEQ ID NO: 2069068 - DNA, 25 bp, Homo sapien
gaggcaaggccagatatcaagccgt

SEQ ID NO: 2069069 - DNA, 25 bp, Homo sapien
caaaggtgagatcagtagggacagc

SEQ ID NO: 2069070 - DNA, 25 bp, Homo sapien
ctggtccacaatgccccgatttcag

SEQ ID NO: 2069071 - DNA, 25 bp, Homo sapien
cacaatgccccgatttcagtggaat

SEQ ID NO: 2069072 - DNA, 25 bp, Homo sapien
tccacaatgccccgatttcagtgga

SEQ ID NO: 2069073 - DNA, 25 bp, Homo sapien
caatgccccgatttcagtggaatga

SEQ ID NO: 2069074 - DNA, 25 bp, Homo sapien
gaggctgttaggctcagagctagac

SEQ ID NO: 2069075 - DNA, 25 bp, Homo sapien
tccacatagcagaggctgttaggct

SEQ ID NO: 2069076 - DNA, 25 bp, Homo sapien
catagcagaggctgttaggctcaga

SEQ ID NO: 2069077 - DNA, 25 bp, Homo sapien
gctgtttccacatagcagaggctgt

SEQ ID NO: 2069078 - DNA, 25 bp, Homo sapien
tccaaaacaaaacacacaaataaca

SEQ ID NO: 2069079 - DNA, 25 bp, Homo sapien
ctgtccaaaacaaaacacacaaata

SEQ ID NO: 2069080 - DNA, 25 bp, Homo sapien
aacaaaacacacaaataacaccgag

SEQ ID NO: 2069081 - DNA, 25 bp, Homo sapien
caaaacacacaaataacaccgagac

SEQ ID NO: 2069082 - DNA, 25 bp, Homo sapien
acgaatgacgtctccaacttgaatt

SEQ ID NO: 2069083 - DNA, 25 bp, Homo sapien
ttttttcagacgaatgacgtctcca

SEQ ID NO: 2069084 - DNA, 25 bp, Homo sapien
tcagacgaatgacgtctccaacttg

SEQ ID NO: 2069085 - DNA, 25 bp, Homo sapien
ttttcagacgaatgacgtctccaac

SEQ ID NO: 2069086 - DNA, 25 bp, Homo sapien
aatgacttcacacgtcctattgttg

SEQ ID NO: 2069087 - DNA, 25 bp, Homo sapien
gacttcacacgtcctattgttgatt

SEQ ID NO: 2069088 - DNA, 25 bp, Homo sapien
tcacacgtcctattgttgatttcct

SEQ ID NO: 2069089 - DNA, 25 bp, Homo sapien
tccttaatgacttcacacgtcctat

SEQ ID NO: 2069090 - DNA, 25 bp, Homo sapien
tcgtccaccaggtctttgattgcag

SEQ ID NO: 2069091 - DNA, 25 bp, Homo sapien
tagtgtggtgtaccaagccagggta

SEQ ID NO: 2069092 - DNA, 25 bp, Homo sapien
ccagggtagagatttgaggaactgc

SEQ ID NO: 2069093 - DNA, 25 bp, Homo sapien
tctttgattgcagtgacgcccagca

SEQ ID NO: 2069094 - DNA, 25 bp, Homo sapien
aatgcgttgtacttgtatgttttaa

SEQ ID NO: 2069095 - DNA, 25 bp, Homo sapien
ggtaaatgcgttgtacttgtatgtt

SEQ ID NO: 2069096 - DNA, 25 bp, Homo sapien
tgctctcttaaactgctcaaacaga

SEQ ID NO: 2069097 - DNA, 25 bp, Homo sapien
ctgctctcttaaactgctcaaacag

SEQ ID NO: 2069098 - DNA, 25 bp, Homo sapien
tgtgttcataaagtgaggttgttcg

SEQ ID NO: 2069099 - DNA, 25 bp, Homo sapien
aggttgttcgtggtacttgcgatcg

SEQ ID NO: 2069100 - DNA, 25 bp, Homo sapien
ttgcgatcgtttgctttgacttgcc

SEQ ID NO: 2069101 - DNA, 25 bp, Homo sapien
tctccttaatacacaagaattttgt

SEQ ID NO: 2069102 - DNA, 25 bp, Homo sapien
gacatgtggcttaaagtcaccctga

SEQ ID NO: 2069103 - DNA, 25 bp, Homo sapien
caagggtgtgccatcagaactatcc

SEQ ID NO: 2069104 - DNA, 25 bp, Homo sapien
aaatatggctacgtgctctccagag

SEQ ID NO: 2069105 - DNA, 25 bp, Homo sapien
aaaaatgcaccttcaccatatggcc

SEQ ID NO: 2069106 - DNA, 25 bp, Homo sapien
aaggtggccaaatagaagctcgcac

SEQ ID NO: 2069107 - DNA, 25 bp, Homo sapien
caccagatgtgtggcatggagagaa

SEQ ID NO: 2069108 - DNA, 25 bp, Homo sapien
aaatctgtacgcttgggagagggac

SEQ ID NO: 2069109 - DNA, 25 bp, Homo sapien
cattctggacccttttctaattgga

SEQ ID NO: 2069110 - DNA, 25 bp, Homo sapien
taagtggaacaaagaattagtgagc

SEQ ID NO: 2069111 - DNA, 25 bp, Homo sapien
gagtcaagctgaaattccggagttg

SEQ ID NO: 2069112 - DNA, 25 bp, Homo sapien
tcaacactagacctgtcctacagga

SEQ ID NO: 2069113 - DNA, 25 bp, Homo sapien
tacaatggcactccaatacgtctgg

SEQ ID NO: 2069114 - DNA, 25 bp, Homo sapien
cactgaccttaactgggaaattgca

SEQ ID NO: 2069115 - DNA, 25 bp, Homo sapien
gttttgagaagcgagaaccacccaa

SEQ ID NO: 2069116 - DNA, 25 bp, Homo sapien
ttttgctagaatgggtgctggtccc

SEQ ID NO: 2069117 - DNA, 25 bp, Homo sapien
tgttagtctggtggtacctcgcagg

SEQ ID NO: 2069118 - DNA, 25 bp, Homo sapien
taggctgagaatcctcgtcaaatgt

SEQ ID NO: 2069119 - DNA, 25 bp, Homo sapien
tcatcatcactgtagggaaccactt

SEQ ID NO: 2069120 - DNA, 25 bp, Homo sapien
gactcggttttgttctggttcaaca

SEQ ID NO: 2069121 - DNA, 25 bp, Homo sapien
gaaccacttcgtcattaggctgaga

SEQ ID NO: 2069122 - DNA, 25 bp, Homo sapien
tgttcaagtgattctcctgcctcaa

SEQ ID NO: 2069123 - DNA, 25 bp, Homo sapien
gtgattctcctgcctcaacctccca

SEQ ID NO: 2069124 - DNA, 25 bp, Homo sapien
tcactgtcacctccgcctcctgtgt

SEQ ID NO: 2069125 - DNA, 25 bp, Homo sapien
atctcactgcattgtccaaactggt

SEQ ID NO: 2069126 - DNA, 25 bp, Homo sapien
ggatctcactgcattgtccaaactg

SEQ ID NO: 2069127 - DNA, 25 bp, Homo sapien
gatctcactgcattgtccaaactgg

SEQ ID NO: 2069128 - DNA, 25 bp, Homo sapien
ttgcatctcagatgacacaaaccac

SEQ ID NO: 2069129 - DNA, 25 bp, Homo sapien
tttgcatctcagatgacacaaacca

SEQ ID NO: 2069130 - DNA, 25 bp, Homo sapien
gtggcatacacatgaggtggtttgc

SEQ ID NO: 2069131 - DNA, 25 bp, Homo sapien
ctggagtacactggggtgatcaagc

SEQ ID NO: 2069132 - DNA, 25 bp, Homo sapien
tgtgagtgtggcatacacatgaggt

SEQ ID NO: 2069133 - DNA, 25 bp, Homo sapien
ttaatttcctgtgagtgtggcatac

SEQ ID NO: 2069134 - DNA, 25 bp, Homo sapien
tggaacaccaagtggttctacctta

SEQ ID NO: 2069135 - DNA, 25 bp, Homo sapien
acactcagcaacaacactcagtgca

SEQ ID NO: 2069136 - DNA, 25 bp, Homo sapien
cacctggaacaccaagtggttctac

SEQ ID NO: 2069137 - DNA, 25 bp, Homo sapien
ttcacctggaacaccaagtggttct

SEQ ID NO: 2069138 - DNA, 25 bp, Homo sapien
tggttatttttacgttcaagcgtca

SEQ ID NO: 2069139 - DNA, 25 bp, Homo sapien
gaagtaatattgctgttcctcagtt

SEQ ID NO: 2069140 - DNA, 25 bp, Homo sapien
ttgctgttcctcagtttatcatctg

SEQ ID NO: 2069141 - DNA, 25 bp, Homo sapien
tgagtaaaaacaatagcagctgcct

SEQ ID NO: 2069142 - DNA, 25 bp, Homo sapien
gagtaaaaacaatagcagctgcctt

SEQ ID NO: 2069143 - DNA, 25 bp, Homo sapien
tccccagccataacataattaacgg

SEQ ID NO: 2069144 - DNA, 25 bp, Homo sapien
tagtctgatttcgtcattgacccaa

SEQ ID NO: 2069145 - DNA, 25 bp, Homo sapien
taattaacggcgcagcactgccagg

SEQ ID NO: 2069146 - DNA, 25 bp, Homo sapien
taaaaagcggttagaggtgatcaat

SEQ ID NO: 2069147 - DNA, 25 bp, Homo sapien
catggtccctggtttggccaatcaa

SEQ ID NO: 2069148 - DNA, 25 bp, Homo sapien
ggtgagcctgagcatgccgctgtaa

SEQ ID NO: 2069149 - DNA, 25 bp, Homo sapien
taaacgtgacactcatggatgattc

SEQ ID NO: 2069150 - DNA, 25 bp, Homo sapien
ggagacacttttaagacatcgcaaa

SEQ ID NO: 2069151 - DNA, 25 bp, Homo sapien
tttgaaaatgatcttggcctgttca

SEQ ID NO: 2069152 - DNA, 25 bp, Homo sapien
tgaaaatgatcttggcctgttcatg

SEQ ID NO: 2069153 - DNA, 25 bp, Homo sapien
ttgaaaatgatcttggcctgttcat

SEQ ID NO: 2069154 - DNA, 25 bp, Homo sapien
catgggacaggtaaagctctgagaa

SEQ ID NO: 2069155 - DNA, 25 bp, Homo sapien
tcatgggacaggtaaagctctgaga

SEQ ID NO: 2069156 - DNA, 25 bp, Homo sapien
ggacaggtaaagctctgagaagcac

SEQ ID NO: 2069157 - DNA, 25 bp, Homo sapien
tgggacaggtaaagctctgagaagc

SEQ ID NO: 2069158 - DNA, 25 bp, Homo sapien
cgaaggccatcgtgaacaaaggagg

SEQ ID NO: 2069159 - DNA, 25 bp, Homo sapien
actgccgaaggccatcgtgaacaaa

SEQ ID NO: 2069160 - DNA, 25 bp, Homo sapien
ggacagatgaacgaacgacggacat

SEQ ID NO: 2069161 - DNA, 25 bp, Homo sapien
gccatcgtgaacaaaggaggttttc

SEQ ID NO: 2069162 - DNA, 25 bp, Homo sapien
ttagtcggcagacatctctataatg

SEQ ID NO: 2069163 - DNA, 25 bp, Homo sapien
aatgtttatactcctaaaaaacatg

SEQ ID NO: 2069164 - DNA, 25 bp, Homo sapien
gttatgttggttaactgaacctata

SEQ ID NO: 2069165 - DNA, 25 bp, Homo sapien
aaaacatgttatgttggttaactga

SEQ ID NO: 2069166 - DNA, 25 bp, Homo sapien
aaaatctcttaacacaggaggcaga

SEQ ID NO: 2069167 - DNA, 25 bp, Homo sapien
agaggacgcagtgagccaagatcac

SEQ ID NO: 2069168 - DNA, 25 bp, Homo sapien
ggcagaggacgcagtgagccaagat

SEQ ID NO: 2069169 - DNA, 25 bp, Homo sapien
gaaaatctcttaacacaggaggcag

SEQ ID NO: 2069170 - DNA, 25 bp, Homo sapien
ctaacacacctttgctgccgtggct

SEQ ID NO: 2069171 - DNA, 25 bp, Homo sapien
ctgctcaaggtgacaggactaagga

SEQ ID NO: 2069172 - DNA, 25 bp, Homo sapien
ctcaaggtgacaggactaaggaatc

SEQ ID NO: 2069173 - DNA, 25 bp, Homo sapien
aggactaaggaatcctaacacacct

SEQ ID NO: 2069174 - DNA, 25 bp, Homo sapien
agtcagtgactctagagtgcagccc

SEQ ID NO: 2069175 - DNA, 25 bp, Homo sapien
tgaaaaccagtgtctaggcaaccac

SEQ ID NO: 2069176 - DNA, 25 bp, Homo sapien
tctccgagatggtaccacctatgct

SEQ ID NO: 2069177 - DNA, 25 bp, Homo sapien
cactgatcaagccacatctgatata

SEQ ID NO: 2069178 - DNA, 25 bp, Homo sapien
gacaaggcgataaaccaggcagagc

SEQ ID NO: 2069179 - DNA, 25 bp, Homo sapien
ggcaacagttgcacagctatgtaaa

SEQ ID NO: 2069180 - DNA, 25 bp, Homo sapien
tctgacgtagattgtggcaacagtt

SEQ ID NO: 2069181 - DNA, 25 bp, Homo sapien
cacacccgaccgtaatatacatgaa

SEQ ID NO: 2069182 - DNA, 25 bp, Homo sapien
gaggaaagagtcacccatagcacag

SEQ ID NO: 2069183 - DNA, 25 bp, Homo sapien
gaatggcatatgactgccagctcag

SEQ ID NO: 2069184 - DNA, 25 bp, Homo sapien
aacaaacagatatgtgtatgcccag

SEQ ID NO: 2069185 - DNA, 25 bp, Homo sapien
aatactataatacgtggccctgccc

SEQ ID NO: 2069186 - DNA, 25 bp, Homo sapien
gaagtgccaggcttctcaatcacgc

SEQ ID NO: 2069187 - DNA, 25 bp, Homo sapien
gacagccctgtcaataaagaccaag

SEQ ID NO: 2069188 - DNA, 25 bp, Homo sapien
caggctccacagtactcattgcaga

SEQ ID NO: 2069189 - DNA, 25 bp, Homo sapien
tccatgcaaagagggacaaggtccc

SEQ ID NO: 2069190 - DNA, 25 bp, Homo sapien
agacttctttttgcgaagccatttg

SEQ ID NO: 2069191 - DNA, 25 bp, Homo sapien
caccgaagacttctttttgcgaagc

SEQ ID NO: 2069192 - DNA, 25 bp, Homo sapien
tctttttgcgaagccatttgctgta

SEQ ID NO: 2069193 - DNA, 25 bp, Homo sapien
ttgcgaagccatttgctgtaccaca

SEQ ID NO: 2069194 - DNA, 25 bp, Homo sapien
gcgttcgctgggccccggctggggc

SEQ ID NO: 2069195 - DNA, 25 bp, Homo sapien
gttcgctgggccccggctggggcat

SEQ ID NO: 2069196 - DNA, 25 bp, Homo sapien
ctggcgttcgctgggccccggctgg

SEQ ID NO: 2069197 - DNA, 25 bp, Homo sapien
tggcgttcgctgggccccggctggg

SEQ ID NO: 2069198 - DNA, 25 bp, Homo sapien
tgcccttggctggcttggccgtcac

SEQ ID NO: 2069199 - DNA, 25 bp, Homo sapien
ccctccgtgcgtcctggagtcaggt

SEQ ID NO: 2069200 - DNA, 25 bp, Homo sapien
gagacccagttgctgcggctgctct

SEQ ID NO: 2069201 - DNA, 25 bp, Homo sapien
gtcaggtgggcacccctttcagtct

SEQ ID NO: 2069202 - DNA, 25 bp, Homo sapien
cagccttgaccatcgtgggcaagtc

SEQ ID NO: 2069203 - DNA, 25 bp, Homo sapien
tgagtctgctagaagagcaagggtc

SEQ ID NO: 2069204 - DNA, 25 bp, Homo sapien
ccatgtcctcgcctgtgaaatgaaa

SEQ ID NO: 2069205 - DNA, 25 bp, Homo sapien
gcagggtggaaacgtgcattcaaat

SEQ ID NO: 2069206 - DNA, 25 bp, Homo sapien
ggtggcttaactctaatagtcaaat

SEQ ID NO: 2069207 - DNA, 25 bp, Homo sapien
tggtctggagaccccaagatagctc

SEQ ID NO: 2069208 - DNA, 25 bp, Homo sapien
caagatagctcatcctgtgtgtctg

SEQ ID NO: 2069209 - DNA, 25 bp, Homo sapien
gagcacccgggctctggtggcttaa

SEQ ID NO: 2069210 - DNA, 25 bp, Homo sapien
cctttgacttgtgagtcacttttcc

SEQ ID NO: 2069211 - DNA, 25 bp, Homo sapien
tcctttgacttgtgagtcacttttc

SEQ ID NO: 2069212 - DNA, 25 bp, Homo sapien
tttctatggattaaagactagaggg

SEQ ID NO: 2069213 - DNA, 25 bp, Homo sapien
gccttggaagttcaggtcctcctct

SEQ ID NO: 2069214 - DNA, 25 bp, Homo sapien
tattaatactttaccaacgtggtga

SEQ ID NO: 2069215 - DNA, 25 bp, Homo sapien
ctagagggtttccagtcaagttggc

SEQ ID NO: 2069216 - DNA, 25 bp, Homo sapien
ataggccagtataaatagcacatac

SEQ ID NO: 2069217 - DNA, 25 bp, Homo sapien
aaaaataggccagtataaatagcac

SEQ ID NO: 2069218 - DNA, 25 bp, Homo sapien
ataaaaataggccagtataaatagc

SEQ ID NO: 2069219 - DNA, 25 bp, Homo sapien
aaataggccagtataaatagcacat

SEQ ID NO: 2069220 - DNA, 25 bp, Homo sapien
ttcctgactgctcttaaatattctc

SEQ ID NO: 2069221 - DNA, 25 bp, Homo sapien
ttctcaacagcattatggggcagta

SEQ ID NO: 2069222 - DNA, 25 bp, Homo sapien
ttgctgcaataaagccaagctacaa

SEQ ID NO: 2069223 - DNA, 25 bp, Homo sapien
gtcctcaatacaagacctgggcctg

SEQ ID NO: 2069224 - DNA, 25 bp, Homo sapien
tgaaaggggagtgaggggaaatgag

SEQ ID NO: 2069225 - DNA, 25 bp, Homo sapien
gtgaaaggggagtgaggggaaatga

SEQ ID NO: 2069226 - DNA, 25 bp, Homo sapien
ctgtgaaaggggagtgaggggaaat

SEQ ID NO: 2069227 - DNA, 25 bp, Homo sapien
gaaaggggagtgaggggaaatgaga

SEQ ID NO: 2069228 - DNA, 25 bp, Homo sapien
aagataagaaaggatgttgtgtata

SEQ ID NO: 2069229 - DNA, 25 bp, Homo sapien
tggaaggtcccacctgaatctgagg

SEQ ID NO: 2069230 - DNA, 25 bp, Homo sapien
ggctcagtggctggccataggcctt

SEQ ID NO: 2069231 - DNA, 25 bp, Homo sapien
tccacgtggtgaacctggaaggtcc

SEQ ID NO: 2069232 - DNA, 25 bp, Homo sapien
ctgaatctgaggctttagggaactg

SEQ ID NO: 2069233 - DNA, 25 bp, Homo sapien
gctttgtctggatctcacctactgc

SEQ ID NO: 2069234 - DNA, 25 bp, Homo sapien
ggatctaaaggctccccttaccatg

SEQ ID NO: 2069235 - DNA, 25 bp, Homo sapien
ccttcatcctcaatggatctaaagg

SEQ ID NO: 2069236 - DNA, 25 bp, Homo sapien
cacacatgccactgatgcgactcta

SEQ ID NO: 2069237 - DNA, 25 bp, Homo sapien
gtctctgcagagtcacccctttttc

SEQ ID NO: 2069238 - DNA, 25 bp, Homo sapien
agtcccactctcactgctgttggtc

SEQ ID NO: 2069239 - DNA, 25 bp, Homo sapien
tgtgattggatagacagcaactgtc

SEQ ID NO: 2069240 - DNA, 25 bp, Homo sapien
gttggtctgaccctgtatgtctgtg

SEQ ID NO: 2069241 - DNA, 25 bp, Homo sapien
tcgggtgacaccagagttggtgtca

SEQ ID NO: 2069242 - DNA, 25 bp, Homo sapien
cactggtgctttcccaatcacaaag

SEQ ID NO: 2069243 - DNA, 25 bp, Homo sapien
tggtgctttcccaatcacaaagaga

SEQ ID NO: 2069244 - DNA, 25 bp, Homo sapien
gctggtcgggtgacaccagagttgg

SEQ ID NO: 2069245 - DNA, 25 bp, Homo sapien
taattctctcattaaccatgcctaa

SEQ ID NO: 2069246 - DNA, 25 bp, Homo sapien
ttttcatctcatgtgctgcattctg

SEQ ID NO: 2069247 - DNA, 25 bp, Homo sapien
ttaaccatgcctaatgcttaatata

SEQ ID NO: 2069248 - DNA, 25 bp, Homo sapien
tctcatgtgctgcattctgcataat

SEQ ID NO: 2069249 - DNA, 25 bp, Homo sapien
tatcaagtactggtatcttcacacg

SEQ ID NO: 2069250 - DNA, 25 bp, Homo sapien
cacatacggccacaactgaatagca

SEQ ID NO: 2069251 - DNA, 25 bp, Homo sapien
tacatacagcccacctgaatagcac

SEQ ID NO: 2069252 - DNA, 25 bp, Homo sapien
tgaatagcacatacggccacaactg

SEQ ID NO: 2069253 - DNA, 25 bp, Homo sapien
aatttgcatttacagaatagctgat

SEQ ID NO: 2069254 - DNA, 25 bp, Homo sapien
tttgcatttacagaatagctgataa

SEQ ID NO: 2069255 - DNA, 25 bp, Homo sapien
aaatttgcatttacagaatagctga

SEQ ID NO: 2069256 - DNA, 25 bp, Homo sapien
aaaaatttgcatttacagaatagct

SEQ ID NO: 2069257 - DNA, 25 bp, Homo sapien
aggctggactctcctcagttttcgt

SEQ ID NO: 2069258 - DNA, 25 bp, Homo sapien
ctctcctcagttttcgtttccccat

SEQ ID NO: 2069259 - DNA, 25 bp, Homo sapien
tggactctcctcagttttcgtttcc

SEQ ID NO: 2069260 - DNA, 25 bp, Homo sapien
gctggactctcctcagttttcgttt

SEQ ID NO: 2069261 - DNA, 25 bp, Homo sapien
tcagtctgttttccctttgctcccc

SEQ ID NO: 2069262 - DNA, 25 bp, Homo sapien
ttcagtctgttttccctttgctccc

SEQ ID NO: 2069263 - DNA, 25 bp, Homo sapien
cttcagtctgttttccctttgctcc

SEQ ID NO: 2069264 - DNA, 25 bp, Homo sapien
cagtctgttttccctttgctcccct

SEQ ID NO: 2069265 - DNA, 25 bp, Homo sapien
aggtttagctgacaaccgtgctgat

SEQ ID NO: 2069266 - DNA, 25 bp, Homo sapien
ttagctgacaaccgtgctgatctcc

SEQ ID NO: 2069267 - DNA, 25 bp, Homo sapien
tttcggctttgcttccacttttgca

SEQ ID NO: 2069268 - DNA, 25 bp, Homo sapien
gtttagctgacaaccgtgctgatct

SEQ ID NO: 2069269 - DNA, 25 bp, Homo sapien
ttgtcagccagccatggcataactg

SEQ ID NO: 2069270 - DNA, 25 bp, Homo sapien
ggcataactgccaatgtgctgtcag

SEQ ID NO: 2069271 - DNA, 25 bp, Homo sapien
ctagtgggataatgcccctgtgctt

SEQ ID NO: 2069272 - DNA, 25 bp, Homo sapien
aactgccaatgtgctgtcagtcaca

SEQ ID NO: 2069273 - DNA, 25 bp, Homo sapien
tgtaaggagagctagaatattctgt

SEQ ID NO: 2069274 - DNA, 25 bp, Homo sapien
actttgggaatgtaaggagagctag

SEQ ID NO: 2069275 - DNA, 25 bp, Homo sapien
ggcagacggagaccaaagatgagga

SEQ ID NO: 2069276 - DNA, 25 bp, Homo sapien
tgttgtccttgagtgcagcgccctg

SEQ ID NO: 2069277 - DNA, 25 bp, Homo sapien
actggatcagaatttcagaatgaca

SEQ ID NO: 2069278 - DNA, 25 bp, Homo sapien
tttggaagcccccttaataaatgca

SEQ ID NO: 2069279 - DNA, 25 bp, Homo sapien
ttttgctgccgagagagtacatcag

SEQ ID NO: 2069280 - DNA, 25 bp, Homo sapien
gagtacatcagaatactgtttggaa

SEQ ID NO: 2069281 - DNA, 25 bp, Homo sapien
tcagggctctcggtaaaaagaccac

SEQ ID NO: 2069282 - DNA, 25 bp, Homo sapien
ttgttcgcaaaatcctctatcgccc

SEQ ID NO: 2069283 - DNA, 25 bp, Homo sapien
cgggaggaagaaacgctcagggcgt

SEQ ID NO: 2069284 - DNA, 25 bp, Homo sapien
ttttgttattgttcgcaaaatcctc

SEQ ID NO: 2069285 - DNA, 25 bp, Homo sapien
ggcagggcgtgcgcagggtagggtg

SEQ ID NO: 2069286 - DNA, 25 bp, Homo sapien
cagggcgtgcgcagggtagggtgcg

SEQ ID NO: 2069287 - DNA, 25 bp, Homo sapien
gcagggcgtgcgcagggtagggtgc

SEQ ID NO: 2069288 - DNA, 25 bp, Homo sapien
cggcagggcgtgcgcagggtagggt

SEQ ID NO: 2069289 - DNA, 25 bp, Homo sapien
agccgctgggagcgcctcagacccc

SEQ ID NO: 2069290 - DNA, 25 bp, Homo sapien
cgctgggagcgcctcagaccccgcg

SEQ ID NO: 2069291 - DNA, 25 bp, Homo sapien
ctgggagcgcctcagaccccgcgcg

SEQ ID NO: 2069292 - DNA, 25 bp, Homo sapien
gcgcggggcgccggctccatggcga

SEQ ID NO: 2069293 - DNA, 25 bp, Homo sapien
tatggactttccgaagacgaggtga

SEQ ID NO: 2069294 - DNA, 25 bp, Homo sapien
tggactttccgaagacgaggtgagt

SEQ ID NO: 2069295 - DNA, 25 bp, Homo sapien
actttccgaagacgaggtgagtggc

SEQ ID NO: 2069296 - DNA, 25 bp, Homo sapien
ttccgaagacgaggtgagtggcacc

SEQ ID NO: 2069297 - DNA, 25 bp, Homo sapien
gtgctcgtgcccagcgtctgcaggg

SEQ ID NO: 2069298 - DNA, 25 bp, Homo sapien
cgggatccaggggagcttgggtcct

SEQ ID NO: 2069299 - DNA, 25 bp, Homo sapien
ctatcccgcgccggcagggggaggg

SEQ ID NO: 2069300 - DNA, 25 bp, Homo sapien
gtctgcaggggagccccaaagcggg

SEQ ID NO: 2069301 - DNA, 25 bp, Homo sapien
gcgctcagaagcctgtgcgtgctta

SEQ ID NO: 2069302 - DNA, 25 bp, Homo sapien
gactgcggagaagccggatcgtttc

SEQ ID NO: 2069303 - DNA, 25 bp, Homo sapien
ctctcatgattgtgtggatcagcag

SEQ ID NO: 2069304 - DNA, 25 bp, Homo sapien
tgtgcgtgcttatcccggcgggaat

SEQ ID NO: 2069305 - DNA, 25 bp, Homo sapien
gggaggaagcttgcagccctgccat

SEQ ID NO: 2069306 - DNA, 25 bp, Homo sapien
ctcctggaaacttggggaggaagct

SEQ ID NO: 2069307 - DNA, 25 bp, Homo sapien
gggaggtgttcaaggctggtggcag

SEQ ID NO: 2069308 - DNA, 25 bp, Homo sapien
acttggggaggaagcttgcagccct

SEQ ID NO: 2069309 - DNA, 25 bp, Homo sapien
cgaggattcaaagcccggcacctcc

SEQ ID NO: 2069310 - DNA, 25 bp, Homo sapien
tcctcccgaggattcaaagcccggc

SEQ ID NO: 2069311 - DNA, 25 bp, Homo sapien
aagcgactgaataagccacgcctcc

SEQ ID NO: 2069312 - DNA, 25 bp, Homo sapien
attaataaagcgactgaataagcca

SEQ ID NO: 2069313 - DNA, 25 bp, Homo sapien
ttggcaggcagacatctaccaagag

SEQ ID NO: 2069314 - DNA, 25 bp, Homo sapien
tcccttgctgtcatcaaattcagtg

SEQ ID NO: 2069315 - DNA, 25 bp, Homo sapien
tggcaggcagacatctaccaagaga

SEQ ID NO: 2069316 - DNA, 25 bp, Homo sapien
gcaggcagacatctaccaagagatt

SEQ ID NO: 2069317 - DNA, 25 bp, Homo sapien
tttaataccacgaagatgtcaccag

SEQ ID NO: 2069318 - DNA, 25 bp, Homo sapien
tggatgcagccgtaattattgtcag

SEQ ID NO: 2069319 - DNA, 25 bp, Homo sapien
tgagaaattggtatgtgccgtgcct

SEQ ID NO: 2069320 - DNA, 25 bp, Homo sapien
tgaactacatctacagggagctgaa

SEQ ID NO: 2069321 - DNA, 25 bp, Homo sapien
actgacttgtaatatccagccactg

SEQ ID NO: 2069322 - DNA, 25 bp, Homo sapien
tgttgggtgtgacctaaagtgtatc

SEQ ID NO: 2069323 - DNA, 25 bp, Homo sapien
cttgtaatatccagccactgttggg

SEQ ID NO: 2069324 - DNA, 25 bp, Homo sapien
ttctttcaactgacttgtaatatcc

SEQ ID NO: 2069325 - DNA, 25 bp, Homo sapien
aatgcccctggcttcgtgaaatgca

SEQ ID NO: 2069326 - DNA, 25 bp, Homo sapien
tttgagccaggggtaaagtcaggca

SEQ ID NO: 2069327 - DNA, 25 bp, Homo sapien
taaagtcaggcacggtgaccctgca

SEQ ID NO: 2069328 - DNA, 25 bp, Homo sapien
ccttggataatccatccaccttcag

SEQ ID NO: 2069329 - DNA, 25 bp, Homo sapien
tattgcaaggatttctgggtaatat

SEQ ID NO: 2069330 - DNA, 25 bp, Homo sapien
ctaagtattgcaaggatttctgggt

SEQ ID NO: 2069331 - DNA, 25 bp, Homo sapien
aagtattgcaaggatttctgggtaa

SEQ ID NO: 2069332 - DNA, 25 bp, Homo sapien
gcaaggatttctgggtaatattaca

SEQ ID NO: 2069333 - DNA, 25 bp, Homo sapien
ttacactcctataacgacatacatg

SEQ ID NO: 2069334 - DNA, 25 bp, Homo sapien
cttacagtcataagggaaggtgaag

SEQ ID NO: 2069335 - DNA, 25 bp, Homo sapien
gacacaaatctaaaccatataaccc

SEQ ID NO: 2069336 - DNA, 25 bp, Homo sapien
tcatacacatgtattgtaattcaga

SEQ ID NO: 2069337 - DNA, 25 bp, Homo sapien
ttattttccgttgattcaaaattgc

SEQ ID NO: 2069338 - DNA, 25 bp, Homo sapien
gggagcagcattggagcatccctca

SEQ ID NO: 2069339 - DNA, 25 bp, Homo sapien
gagcagcattggagcatccctcaat

SEQ ID NO: 2069340 - DNA, 25 bp, Homo sapien
ttgagggagcagcattggagcatcc

SEQ ID NO: 2069341 - DNA, 25 bp, Homo sapien
gcagcattggagcatccctcaattc

SEQ ID NO: 2069342 - DNA, 25 bp, Homo sapien
ctgaatgaggaagttagttaaaagg

SEQ ID NO: 2069343 - DNA, 25 bp, Homo sapien
cgtggtattggtcagtccgtttcct

SEQ ID NO: 2069344 - DNA, 25 bp, Homo sapien
ccgtttcctgcttggttgatttcag

SEQ ID NO: 2069345 - DNA, 25 bp, Homo sapien
atgaaggtgaaacgtggtattggtc

SEQ ID NO: 2069346 - DNA, 25 bp, Homo sapien
gggagccagtaggtgacaggatttg

SEQ ID NO: 2069347 - DNA, 25 bp, Homo sapien
gatgccagacacctggctccggcat

SEQ ID NO: 2069348 - DNA, 25 bp, Homo sapien
tgggtgagatgccagacacctggct

SEQ ID NO: 2069349 - DNA, 25 bp, Homo sapien
tgagatgccagacacctggctccgg

SEQ ID NO: 2069350 - DNA, 25 bp, Homo sapien
ctgggtgagatgccagacacctggc

SEQ ID NO: 2069351 - DNA, 25 bp, Homo sapien
ggatgtgtagcttcacttgactgct

SEQ ID NO: 2069352 - DNA, 25 bp, Homo sapien
gggatgtgtagcttcacttgactgc

SEQ ID NO: 2069353 - DNA, 25 bp, Homo sapien
tattagggacagatgccctcaggcg

SEQ ID NO: 2069354 - DNA, 25 bp, Homo sapien
ctgcaggcttattagggacagatgc

SEQ ID NO: 2069355 - DNA, 25 bp, Homo sapien
gatgcatcggtaaagatgcgcggac

SEQ ID NO: 2069356 - DNA, 25 bp, Homo sapien
gagtgaggactgatatgagtggaga

SEQ ID NO: 2069357 - DNA, 25 bp, Homo sapien
ggactgatatgagtggagatgcatc

SEQ ID NO: 2069358 - DNA, 25 bp, Homo sapien
tgagtggagatgcatcggtaaagat

SEQ ID NO: 2069359 - DNA, 25 bp, Homo sapien
ggacttggtcctctacccagcgtag

SEQ ID NO: 2069360 - DNA, 25 bp, Homo sapien
gctgaaccgagggtgacactgtaaa

SEQ ID NO: 2069361 - DNA, 25 bp, Homo sapien
tgtaaaaccatgcttcaggaaaatt

SEQ ID NO: 2069362 - DNA, 25 bp, Homo sapien
cagatgtgacgcagcaggtgtgcac

SEQ ID NO: 2069363 - DNA, 25 bp, Homo sapien
ggtgttacggtcttgcttactgctt

SEQ ID NO: 2069364 - DNA, 25 bp, Homo sapien
tgtgactagtttagggacccagtag

SEQ ID NO: 2069365 - DNA, 25 bp, Homo sapien
gggaatggatttgttgaaactacat

SEQ ID NO: 2069366 - DNA, 25 bp, Homo sapien
gaaactacatgtgactagtttaggg

SEQ ID NO: 2069367 - DNA, 25 bp, Homo sapien
tcgggcacagtatgccaaggcccag

SEQ ID NO: 2069368 - DNA, 25 bp, Homo sapien
aattgagggtggaagcggttctcgg

SEQ ID NO: 2069369 - DNA, 25 bp, Homo sapien
tatgccaaggcccagggcgtccaag

SEQ ID NO: 2069370 - DNA, 25 bp, Homo sapien
cagggcgtccaagggacagagcaga

SEQ ID NO: 2069371 - DNA, 25 bp, Homo sapien
tggacgactgcacccatttcacccg

SEQ ID NO: 2069372 - DNA, 25 bp, Homo sapien
gctggacgactgcacccatttcacc

SEQ ID NO: 2069373 - DNA, 25 bp, Homo sapien
cgccctggccggctggacgactgca

SEQ ID NO: 2069374 - DNA, 25 bp, Homo sapien
cgactgcacccatttcacccggcat

SEQ ID NO: 2069375 - DNA, 25 bp, Homo sapien
gatggccccaacatcattttgctga

SEQ ID NO: 2069376 - DNA, 25 bp, Homo sapien
gactccacccctgctgtgtagatgg

SEQ ID NO: 2069377 - DNA, 25 bp, Homo sapien
ggcggcaccttgagggccttacaga

SEQ ID NO: 2069378 - DNA, 25 bp, Homo sapien
cctgactgcataggtggcggcacct

SEQ ID NO: 2069379 - DNA, 25 bp, Homo sapien
gcctgaagaattcccagggtgaaca

SEQ ID NO: 2069380 - DNA, 25 bp, Homo sapien
gctgctgcttaaagtcgttgctccc

SEQ ID NO: 2069381 - DNA, 25 bp, Homo sapien
ggtgcaaatgaaatggatgatggct

SEQ ID NO: 2069382 - DNA, 25 bp, Homo sapien
ccaggtgctcgctctgggaaggtgc

SEQ ID NO: 2069383 - DNA, 25 bp, Homo sapien
tctgccagccctgtaatcatttcca

SEQ ID NO: 2069384 - DNA, 25 bp, Homo sapien
ctctgccagccctgtaatcatttcc

SEQ ID NO: 2069385 - DNA, 25 bp, Homo sapien
ctgccagccctgtaatcatttccat

SEQ ID NO: 2069386 - DNA, 25 bp, Homo sapien
agcttacaggctcccccttgttgag

SEQ ID NO: 2069387 - DNA, 25 bp, Homo sapien
tgttgagagtctcccgagtgctagg

SEQ ID NO: 2069388 - DNA, 25 bp, Homo sapien
ccccttgttgagagtctcccgagtg

SEQ ID NO: 2069389 - DNA, 25 bp, Homo sapien
aggctcccccttgttgagagtctcc

SEQ ID NO: 2069390 - DNA, 25 bp, Homo sapien
cctctcttgtgttgcgtggcaatgc

SEQ ID NO: 2069391 - DNA, 25 bp, Homo sapien
cctaaatggagggaatgtgcatcct

SEQ ID NO: 2069392 - DNA, 25 bp, Homo sapien
gttagttctgttgaactgctgccta

SEQ ID NO: 2069393 - DNA, 25 bp, Homo sapien
ggagggaatgtgcatcctctcttgt

SEQ ID NO: 2069394 - DNA, 25 bp, Homo sapien
gatagaacgcagtgaccacctggtc

SEQ ID NO: 2069395 - DNA, 25 bp, Homo sapien
gacatcctgatagaacgcagtgacc

SEQ ID NO: 2069396 - DNA, 25 bp, Homo sapien
gtcatttgattacagcgcttcttcc

SEQ ID NO: 2069397 - DNA, 25 bp, Homo sapien
tcttccagacagcacgctcagaatt

SEQ ID NO: 2069398 - DNA, 25 bp, Homo sapien
tcctgccaacgctggcccttctttc

SEQ ID NO: 2069399 - DNA, 25 bp, Homo sapien
ggcacagccagttctttacccaaac

SEQ ID NO: 2069400 - DNA, 25 bp, Homo sapien
gctgctcttcacactgatggtccat

SEQ ID NO: 2069401 - DNA, 25 bp, Homo sapien
ccttgtgaaggatacaatacagcaa

SEQ ID NO: 2069402 - DNA, 25 bp, Homo sapien
cactctccagtgaaggcccctgtgt

SEQ ID NO: 2069403 - DNA, 25 bp, Homo sapien
actctccagtgaaggcccctgtgtc

SEQ ID NO: 2069404 - DNA, 25 bp, Homo sapien
caaatcactagagcgaagagaagcc

SEQ ID NO: 2069405 - DNA, 25 bp, Homo sapien
cactagagcgaagagaagcccatct

SEQ ID NO: 2069406 - DNA, 25 bp, Homo sapien
ttttgtcagcgaagtaaatccaata

SEQ ID NO: 2069407 - DNA, 25 bp, Homo sapien
tcatcttttgtcagcgaagtaaatc

SEQ ID NO: 2069408 - DNA, 25 bp, Homo sapien
ggctgtgcttgctaatacactgtcc

SEQ ID NO: 2069409 - DNA, 25 bp, Homo sapien
cccaaaggctcttgatagccctgtg

SEQ ID NO: 2069410 - DNA, 25 bp, Homo sapien
ttctcatgggccatggagagtggaa

SEQ ID NO: 2069411 - DNA, 25 bp, Homo sapien
tccagtcattctcatgggccatgga

SEQ ID NO: 2069412 - DNA, 25 bp, Homo sapien
ccttctgttccagtcattctcatgg

SEQ ID NO: 2069413 - DNA, 25 bp, Homo sapien
tctgttccagtcattctcatgggcc

SEQ ID NO: 2069414 - DNA, 25 bp, Homo sapien
tggccctggtgtgttctctctgttc

SEQ ID NO: 2069415 - DNA, 25 bp, Homo sapien
ctgctgtcccggatggccctggtgt

SEQ ID NO: 2069416 - DNA, 25 bp, Homo sapien
ccggatggccctggtgtgttctctc

SEQ ID NO: 2069417 - DNA, 25 bp, Homo sapien
tcccggatggccctggtgtgttctc

SEQ ID NO: 2069418 - DNA, 25 bp, Homo sapien
tttaatctccctctgcagcagattg

SEQ ID NO: 2069419 - DNA, 25 bp, Homo sapien
taatctccctctgcagcagattggc

SEQ ID NO: 2069420 - DNA, 25 bp, Homo sapien
atctccctctgcagcagattggcac

SEQ ID NO: 2069421 - DNA, 25 bp, Homo sapien
aatctccctctgcagcagattggca

SEQ ID NO: 2069422 - DNA, 25 bp, Homo sapien
gcaacttgaagttttgagtcccaaa

SEQ ID NO: 2069423 - DNA, 25 bp, Homo sapien
tagcagggacggatgctggaaatcc

SEQ ID NO: 2069424 - DNA, 25 bp, Homo sapien
tctctggcaactgcctgtagcaggg

SEQ ID NO: 2069425 - DNA, 25 bp, Homo sapien
gtcaattatacaggcatctcggcaa

SEQ ID NO: 2069426 - DNA, 25 bp, Homo sapien
tgcccgtgcttcaagacacaaaggg

SEQ ID NO: 2069427 - DNA, 25 bp, Homo sapien
actgaggcatccgtgcctacccttg

SEQ ID NO: 2069428 - DNA, 25 bp, Homo sapien
agccagttgcccgtgcttcaagaca

SEQ ID NO: 2069429 - DNA, 25 bp, Homo sapien
aggcatccgtgcctacccttggctg

SEQ ID NO: 2069430 - DNA, 25 bp, Homo sapien
tttcttcattggtattcctggtacg

SEQ ID NO: 2069431 - DNA, 25 bp, Homo sapien
tcctggtacgtggactggaatattc

SEQ ID NO: 2069432 - DNA, 25 bp, Homo sapien
tattcttcatcccttgatttgtggg

SEQ ID NO: 2069433 - DNA, 25 bp, Homo sapien
ccacagccgacttctttctagtaaa

SEQ ID NO: 2069434 - DNA, 25 bp, Homo sapien
cactcgtaagtccagaatctcttcc

SEQ ID NO: 2069435 - DNA, 25 bp, Homo sapien
tgttggtcagctccgttttccgtgt

SEQ ID NO: 2069436 - DNA, 25 bp, Homo sapien
taaacactcttgacacgtaagctgg

SEQ ID NO: 2069437 - DNA, 25 bp, Homo sapien
gacctctgatactctgtaaacactc

SEQ ID NO: 2069438 - DNA, 25 bp, Homo sapien
tacaggtctctcatactgttggtca

SEQ ID NO: 2069439 - DNA, 25 bp, Homo sapien
tgttcttcgtccatgtccccagaga

SEQ ID NO: 2069440 - DNA, 25 bp, Homo sapien
cactggcgttcactggtagggaaac

SEQ ID NO: 2069441 - DNA, 25 bp, Homo sapien
tggaatccacctcattagacagagc

SEQ ID NO: 2069442 - DNA, 25 bp, Homo sapien
tatgctgtgttgcaaacccagtgcc

SEQ ID NO: 2069443 - DNA, 25 bp, Homo sapien
atccattcttccagggcaccttact

SEQ ID NO: 2069444 - DNA, 25 bp, Homo sapien
cagtgactgctctgtccacagggct

SEQ ID NO: 2069445 - DNA, 25 bp, Homo sapien
attcttccagggcaccttactgtcc

SEQ ID NO: 2069446 - DNA, 25 bp, Homo sapien
agggcttggtttctgtgctctggct

SEQ ID NO: 2069447 - DNA, 25 bp, Homo sapien
gctctccacatccacccatagtcat

SEQ ID NO: 2069448 - DNA, 25 bp, Homo sapien
tcctgtggcattctgaagctctcca

SEQ ID NO: 2069449 - DNA, 25 bp, Homo sapien
cttcctgtggcattctgaagctctc

SEQ ID NO: 2069450 - DNA, 25 bp, Homo sapien
ctgtggcattctgaagctctccaca

SEQ ID NO: 2069451 - DNA, 25 bp, Homo sapien
ctctcttcttgtggtaggtcccaga

SEQ ID NO: 2069452 - DNA, 25 bp, Homo sapien
caaggaacagtctccatttgatgct

SEQ ID NO: 2069453 - DNA, 25 bp, Homo sapien
actttataccgtacagaaggagcac

SEQ ID NO: 2069454 - DNA, 25 bp, Homo sapien
tcaggagagagccaaggacacgagt

SEQ ID NO: 2069455 - DNA, 25 bp, Homo sapien
caaatatctttcttccacggtggtg

SEQ ID NO: 2069456 - DNA, 25 bp, Homo sapien
gatggcctcgccatctgtacagtca

SEQ ID NO: 2069457 - DNA, 25 bp, Homo sapien
gaatcatctgtctccgtgatggcct

SEQ ID NO: 2069458 - DNA, 25 bp, Homo sapien
cacggtggtgtactggctctctgga

SEQ ID NO: 2069459 - DNA, 25 bp, Homo sapien
ttgattgagtattcacttcgaagct

SEQ ID NO: 2069460 - DNA, 25 bp, Homo sapien
tcatgttgcatcttaccgagttgat

SEQ ID NO: 2069461 - DNA, 25 bp, Homo sapien
cttaccgagttgattgagtattcac

SEQ ID NO: 2069462 - DNA, 25 bp, Homo sapien
tgcatcttaccgagttgattgagta

SEQ ID NO: 2069463 - DNA, 25 bp, Homo sapien
ctttttcgtgcacttgtgggtgtca

SEQ ID NO: 2069464 - DNA, 25 bp, Homo sapien
tttttcgtgcacttgtgggtgtcat

SEQ ID NO: 2069465 - DNA, 25 bp, Homo sapien
tagctttttcgtgcacttgtgggtg

SEQ ID NO: 2069466 - DNA, 25 bp, Homo sapien
gctttttcgtgcacttgtgggtgtc

SEQ ID NO: 2069467 - DNA, 25 bp, Homo sapien
tcctttgtctccgtggcttccagtc

SEQ ID NO: 2069468 - DNA, 25 bp, Homo sapien
cccacggagggtcttcagaaaaatg

SEQ ID NO: 2069469 - DNA, 25 bp, Homo sapien
ctagtgcacaggcttttcaagaccc

SEQ ID NO: 2069470 - DNA, 25 bp, Homo sapien
cttcaaatgagctggctctagaggg

SEQ ID NO: 2069471 - DNA, 25 bp, Homo sapien
cattggctttctgcacttattgctc

SEQ ID NO: 2069472 - DNA, 25 bp, Homo sapien
taatcttctgggcattggctttctg

SEQ ID NO: 2069473 - DNA, 25 bp, Homo sapien
gaaaaactttgtgacaacctgacaa

SEQ ID NO: 2069474 - DNA, 25 bp, Homo sapien
cacttattgctcactgaatcactga

SEQ ID NO: 2069475 - DNA, 25 bp, Homo sapien
agcaggacagtgttccgaatgtgga

SEQ ID NO: 2069476 - DNA, 25 bp, Homo sapien
tccgaatgtggaagcaaagagtcct

SEQ ID NO: 2069477 - DNA, 25 bp, Homo sapien
tcagcgatagtccagctgagaccag

SEQ ID NO: 2069478 - DNA, 25 bp, Homo sapien
ggccaacgcctctgttcagcgatag

SEQ ID NO: 2069479 - DNA, 25 bp, Homo sapien
tttcatcagacacctcttcactggc

SEQ ID NO: 2069480 - DNA, 25 bp, Homo sapien
caccccacaggacggtcctccagca

SEQ ID NO: 2069481 - DNA, 25 bp, Homo sapien
aggacggtcctccagcacctcattt

SEQ ID NO: 2069482 - DNA, 25 bp, Homo sapien
atttctcctttcatcagacacctct

SEQ ID NO: 2069483 - DNA, 25 bp, Homo sapien
tccaaaagcctttatcctcatccaa

SEQ ID NO: 2069484 - DNA, 25 bp, Homo sapien
cacctcctgggaatctttaaaattg

SEQ ID NO: 2069485 - DNA, 25 bp, Homo sapien
gcctttatcctcatccaatatctgg

SEQ ID NO: 2069486 - DNA, 25 bp, Homo sapien
tgggctttgtgatcccctgacagct

SEQ ID NO: 2069487 - DNA, 25 bp, Homo sapien
tattgaagtaggtaaatggaatctc

SEQ ID NO: 2069488 - DNA, 25 bp, Homo sapien
tgaagtaggtaaatggaatctctta

SEQ ID NO: 2069489 - DNA, 25 bp, Homo sapien
atgttattgaagtaggtaaatggaa

SEQ ID NO: 2069490 - DNA, 25 bp, Homo sapien
taggtaaatggaatctcttatgtgg

SEQ ID NO: 2069491 - DNA, 25 bp, Homo sapien
tctgagaccctgctggacctagata

SEQ ID NO: 2069492 - DNA, 25 bp, Homo sapien
ccctgctggacctagatatattcac

SEQ ID NO: 2069493 - DNA, 25 bp, Homo sapien
tcccctcaggttggcatctgcttct

SEQ ID NO: 2069494 - DNA, 25 bp, Homo sapien
tcatctggtaaatattcccctcagg

SEQ ID NO: 2069495 - DNA, 25 bp, Homo sapien
gccacacagctttcctgaacagcta

SEQ ID NO: 2069496 - DNA, 25 bp, Homo sapien
gaagagtgaagtggttaggaacatt

SEQ ID NO: 2069497 - DNA, 25 bp, Homo sapien
tcttccgatatctcctgctcattgt

SEQ ID NO: 2069498 - DNA, 25 bp, Homo sapien
gatttccagtatattctctgctcca

SEQ ID NO: 2069499 - DNA, 25 bp, Homo sapien
ggtcagggaccagctcaaaggctgt

SEQ ID NO: 2069500 - DNA, 25 bp, Homo sapien
agggaccagctcaaaggctgtccct

SEQ ID NO: 2069501 - DNA, 25 bp, Homo sapien
tcagggaccagctcaaaggctgtcc

SEQ ID NO: 2069502 - DNA, 25 bp, Homo sapien
cggtcagggaccagctcaaaggctg

SEQ ID NO: 2069503 - DNA, 25 bp, Homo sapien
gaatttcattctgtgtcaccgcatc

SEQ ID NO: 2069504 - DNA, 25 bp, Homo sapien
aagagaacttttacgctccccgctg

SEQ ID NO: 2069505 - DNA, 25 bp, Homo sapien
tgtcaccgcatcacgcgaggtgggt

SEQ ID NO: 2069506 - DNA, 25 bp, Homo sapien
cccgctgtcgttagtggcctgatta

SEQ ID NO: 2069507 - DNA, 25 bp, Homo sapien
gatttcggataatacttttagagcc

SEQ ID NO: 2069508 - DNA, 25 bp, Homo sapien
cggataatacttttagagccacggg

SEQ ID NO: 2069509 - DNA, 25 bp, Homo sapien
ctattgggtatgcactggatccatt

SEQ ID NO: 2069510 - DNA, 25 bp, Homo sapien
gggtgactggttgatttcggataat

SEQ ID NO: 2069511 - DNA, 25 bp, Homo sapien
tcccgattcgagagaggcaggcatc

SEQ ID NO: 2069512 - DNA, 25 bp, Homo sapien
tctgatgaggcacttccgtgttccc

SEQ ID NO: 2069513 - DNA, 25 bp, Homo sapien
cgaagttcctcctatagtcattggc

SEQ ID NO: 2069514 - DNA, 25 bp, Homo sapien
gttttgttgcaagggcagcattgtg

SEQ ID NO: 2069515 - DNA, 25 bp, Homo sapien
gagaaggttctcttaccgtgaatcc

SEQ ID NO: 2069516 - DNA, 25 bp, Homo sapien
gattagtgcccacagcatcaggaga

SEQ ID NO: 2069517 - DNA, 25 bp, Homo sapien
tctggtaagtgccaccgaaggttcc

SEQ ID NO: 2069518 - DNA, 25 bp, Homo sapien
ggaaacagaccatctgcatctagac

SEQ ID NO: 2069519 - DNA, 25 bp, Homo sapien
acagcacataaacctgactgaatgg

SEQ ID NO: 2069520 - DNA, 25 bp, Homo sapien
taagctgctttgcacgcaaggtgat

SEQ ID NO: 2069521 - DNA, 25 bp, Homo sapien
ggtgatggttctacctcataaggga

SEQ ID NO: 2069522 - DNA, 25 bp, Homo sapien
tgagacacccccgtttgcttctgct

SEQ ID NO: 2069523 - DNA, 25 bp, Homo sapien
ttcgctacaggtgggcagaggagtc

SEQ ID NO: 2069524 - DNA, 25 bp, Homo sapien
cgctacaggtgggcagaggagtcat

SEQ ID NO: 2069525 - DNA, 25 bp, Homo sapien
cttcgctacaggtgggcagaggagt

SEQ ID NO: 2069526 - DNA, 25 bp, Homo sapien
tcgctacaggtgggcagaggagtca

SEQ ID NO: 2069527 - DNA, 25 bp, Homo sapien
ttttcactggaatgtgccaggttga

SEQ ID NO: 2069528 - DNA, 25 bp, Homo sapien
ttgaagcaatatgtagggcccggtg

SEQ ID NO: 2069529 - DNA, 25 bp, Homo sapien
tgcctgcacttcagtcttaggacca

SEQ ID NO: 2069530 - DNA, 25 bp, Homo sapien
tcctgtttgtgcctctcgtttgccc

SEQ ID NO: 2069531 - DNA, 25 bp, Homo sapien
gaatcatcagtataagtagcgagct

SEQ ID NO: 2069532 - DNA, 25 bp, Homo sapien
gctgggcgcattccttctcagttgt

SEQ ID NO: 2069533 - DNA, 25 bp, Homo sapien
tctcagttgtgttaaaacttgctgg

SEQ ID NO: 2069534 - DNA, 25 bp, Homo sapien
ggtattcccccggtatcagcagagg

SEQ ID NO: 2069535 - DNA, 25 bp, Homo sapien
cgctttcagtgatgtaagctgtctt

SEQ ID NO: 2069536 - DNA, 25 bp, Homo sapien
ttcagtgatgtaagctgtcttgttc

SEQ ID NO: 2069537 - DNA, 25 bp, Homo sapien
gttcacttcacgattactcatctgg

SEQ ID NO: 2069538 - DNA, 25 bp, Homo sapien
tgtcttgttcacttcacgattactc

SEQ ID NO: 2069539 - DNA, 25 bp, Homo sapien
aaatagaagaggccaagggcacatt

SEQ ID NO: 2069540 - DNA, 25 bp, Homo sapien
gcacattattaggtccggagccagt

SEQ ID NO: 2069541 - DNA, 25 bp, Homo sapien
gaggccaagggcacattattaggtc

SEQ ID NO: 2069542 - DNA, 25 bp, Homo sapien
attaggtccggagccagtggcctgc

SEQ ID NO: 2069543 - DNA, 25 bp, Homo sapien
tggtggaggagacccataatagcca

SEQ ID NO: 2069544 - DNA, 25 bp, Homo sapien
ttaatatggaagttgcggctgacac

SEQ ID NO: 2069545 - DNA, 25 bp, Homo sapien
gaaatcagggtaaggccatcacaat

SEQ ID NO: 2069546 - DNA, 25 bp, Homo sapien
tctctgcttgcagggaacttcagcc

SEQ ID NO: 2069547 - DNA, 25 bp, Homo sapien
gcagcagccactagaacggtaactt

SEQ ID NO: 2069548 - DNA, 25 bp, Homo sapien
tcatctctacccagatcccgtggga

SEQ ID NO: 2069549 - DNA, 25 bp, Homo sapien
gcttcattgtgagtaagagtcccag

SEQ ID NO: 2069550 - DNA, 25 bp, Homo sapien
ccaagagtgaattctgatgagcttc

SEQ ID NO: 2069551 - DNA, 25 bp, Homo sapien
tttccacggtcgagggagtagctct

SEQ ID NO: 2069552 - DNA, 25 bp, Homo sapien
ttcgtatgcctctgctgcgttcggg

SEQ ID NO: 2069553 - DNA, 25 bp, Homo sapien
cgttcgggtgcgagaactgccgtca

SEQ ID NO: 2069554 - DNA, 25 bp, Homo sapien
tagctctgtagctgggtttgccctc

SEQ ID NO: 2069555 - DNA, 25 bp, Homo sapien
gaaacatggtatccgatgcttggga

SEQ ID NO: 2069556 - DNA, 25 bp, Homo sapien
actggttgtgtagcaagtcgggccc

SEQ ID NO: 2069557 - DNA, 25 bp, Homo sapien
tacttgtcattattccgtgtggcgg

SEQ ID NO: 2069558 - DNA, 25 bp, Homo sapien
ctccgttgggaaagaagtgccctgc

SEQ ID NO: 2069559 - DNA, 25 bp, Homo sapien
tagttcataccaagcagcatgatat

SEQ ID NO: 2069560 - DNA, 25 bp, Homo sapien
gacaggttatcatcctgtctgcaac

SEQ ID NO: 2069561 - DNA, 25 bp, Homo sapien
ctagttctcttagttcataccaagc

SEQ ID NO: 2069562 - DNA, 25 bp, Homo sapien
caggttatcatcctgtctgcaacct

SEQ ID NO: 2069563 - DNA, 25 bp, Homo sapien
ttgggtgtggctgtcatcacaaaca

SEQ ID NO: 2069564 - DNA, 25 bp, Homo sapien
ttgctggcctgccttccacaaagct

SEQ ID NO: 2069565 - DNA, 25 bp, Homo sapien
ggagttggatgaattccttccttgc

SEQ ID NO: 2069566 - DNA, 25 bp, Homo sapien
catgtgaaacgttgctgaagatttc

SEQ ID NO: 2069567 - DNA, 25 bp, Homo sapien
gaactgcccatagtctggccaataa

SEQ ID NO: 2069568 - DNA, 25 bp, Homo sapien
tctcacggtatttaaagcgaagtag

SEQ ID NO: 2069569 - DNA, 25 bp, Homo sapien
gggtcaactcattttttagggcgca

SEQ ID NO: 2069570 - DNA, 25 bp, Homo sapien
gggtcttctgcaaatgaactgccca

SEQ ID NO: 2069571 - DNA, 25 bp, Homo sapien
tctgtctttggtctttctccctcat

SEQ ID NO: 2069572 - DNA, 25 bp, Homo sapien
tgctgattttactctcgtcctcctg

SEQ ID NO: 2069573 - DNA, 25 bp, Homo sapien
ttactctcgtcctcctggaacgtct

SEQ ID NO: 2069574 - DNA, 25 bp, Homo sapien
gtctttctccctcatatctctgctg

SEQ ID NO: 2069575 - DNA, 25 bp, Homo sapien
cttgggtcatttggagagataacac

SEQ ID NO: 2069576 - DNA, 25 bp, Homo sapien
gataacacaggccaggttatatgtc

SEQ ID NO: 2069577 - DNA, 25 bp, Homo sapien
ttcttgggtcatttggagagataac

SEQ ID NO: 2069578 - DNA, 25 bp, Homo sapien
ttggagagataacacaggccaggtt

SEQ ID NO: 2069579 - DNA, 25 bp, Homo sapien
tgctgatgcccaggcttcatggctg

SEQ ID NO: 2069580 - DNA, 25 bp, Homo sapien
cacatcatgggtgctgctgatgccc

SEQ ID NO: 2069581 - DNA, 25 bp, Homo sapien
atgcccaggcttcatggctgagcat

SEQ ID NO: 2069582 - DNA, 25 bp, Homo sapien
ctgcacatcatgggtgctgctgatg

SEQ ID NO: 2069583 - DNA, 25 bp, Homo sapien
tgttctgccaaaaccccatacggtc

SEQ ID NO: 2069584 - DNA, 25 bp, Homo sapien
tacggtcctccattaccaatcaggt

SEQ ID NO: 2069585 - DNA, 25 bp, Homo sapien
ttagacacttaaccacctccagacg

SEQ ID NO: 2069586 - DNA, 25 bp, Homo sapien
cacgtcccacattatagctcaaaag

SEQ ID NO: 2069587 - DNA, 25 bp, Homo sapien
actatctgtgtgttccgtgccactg

SEQ ID NO: 2069588 - DNA, 25 bp, Homo sapien
gggtgtgtggcccatgtcactgtcc

SEQ ID NO: 2069589 - DNA, 25 bp, Homo sapien
tgtccagcgcattccactgtccagc

SEQ ID NO: 2069590 - DNA, 25 bp, Homo sapien
tatctgtgtgttccgtgccactgtc

SEQ ID NO: 2069591 - DNA, 25 bp, Homo sapien
tctctctcatctacgtgctcataaa

SEQ ID NO: 2069592 - DNA, 25 bp, Homo sapien
agatgcttccagcaaaggatttcct

SEQ ID NO: 2069593 - DNA, 25 bp, Homo sapien
gatgcttccagcaaaggatttccta

SEQ ID NO: 2069594 - DNA, 25 bp, Homo sapien
agcagcaagaactgcatgattttta

SEQ ID NO: 2069595 - DNA, 25 bp, Homo sapien
gggcccagcgatttctcatttagga

SEQ ID NO: 2069596 - DNA, 25 bp, Homo sapien
tttacctccatatgtaaatgggccc

SEQ ID NO: 2069597 - DNA, 25 bp, Homo sapien
tacctccatatgtaaatgggcccag

SEQ ID NO: 2069598 - DNA, 25 bp, Homo sapien
tgtaaatgggcccagcgatttctca

SEQ ID NO: 2069599 - DNA, 25 bp, Homo sapien
ctgctggtgttactctgtcataaag

SEQ ID NO: 2069600 - DNA, 25 bp, Homo sapien
ctggtgttactctgtcataaagaga

SEQ ID NO: 2069601 - DNA, 25 bp, Homo sapien
tgctggtgttactctgtcataaaga

SEQ ID NO: 2069602 - DNA, 25 bp, Homo sapien
gctggtgttactctgtcataaagag

SEQ ID NO: 2069603 - DNA, 25 bp, Homo sapien
tcagcacgagtctcaggcagtggtc

SEQ ID NO: 2069604 - DNA, 25 bp, Homo sapien
cattgaagaggcagtcgtttcccct

SEQ ID NO: 2069605 - DNA, 25 bp, Homo sapien
tttcccctagatctgtaaccaagca

SEQ ID NO: 2069606 - DNA, 25 bp, Homo sapien
taaaggcggtgaccatcagggtgac

SEQ ID NO: 2069607 - DNA, 25 bp, Homo sapien
caagtcagtaacgttggtctgcagc

SEQ ID NO: 2069608 - DNA, 25 bp, Homo sapien
cgtcaagtcagtaacgttggtctgc

SEQ ID NO: 2069609 - DNA, 25 bp, Homo sapien
ctgcgtcaagtcagtaacgttggtc

SEQ ID NO: 2069610 - DNA, 25 bp, Homo sapien
tcagtaacgttggtctgcagctccc

SEQ ID NO: 2069611 - DNA, 25 bp, Homo sapien
aggtacacctcatcccctgatgtca

SEQ ID NO: 2069612 - DNA, 25 bp, Homo sapien
ggtggggacatcaggtacacctcat

SEQ ID NO: 2069613 - DNA, 25 bp, Homo sapien
cagagaactgagtgttcttgaacca

SEQ ID NO: 2069614 - DNA, 25 bp, Homo sapien
gagtgttcttgaaccacttccaccc

SEQ ID NO: 2069615 - DNA, 25 bp, Homo sapien
catgacttcccagatgactcccaga

SEQ ID NO: 2069616 - DNA, 25 bp, Homo sapien
ccatatacgtggactctgaagcagt

SEQ ID NO: 2069617 - DNA, 25 bp, Homo sapien
ggactggtgcgtggctccaaatgat

SEQ ID NO: 2069618 - DNA, 25 bp, Homo sapien
ctttgaagtcgggagagatacgtgc

SEQ ID NO: 2069619 - DNA, 25 bp, Homo sapien
tctctgctcaaagtagcggagcagt

SEQ ID NO: 2069620 - DNA, 25 bp, Homo sapien
ggaacacgcactgagttagcatgtg

SEQ ID NO: 2069621 - DNA, 25 bp, Homo sapien
catgtgtggtgctgccatttctctc

SEQ ID NO: 2069622 - DNA, 25 bp, Homo sapien
gcagtcgaggctgttgactagtgac

SEQ ID NO: 2069623 - DNA, 25 bp, Homo sapien
cctggaggccttgagaaaggtggat

SEQ ID NO: 2069624 - DNA, 25 bp, Homo sapien
ccatctcctattccagcttcagttt

SEQ ID NO: 2069625 - DNA, 25 bp, Homo sapien
gggcagacagaatgtgtaggtagga

SEQ ID NO: 2069626 - DNA, 25 bp, Homo sapien
tcagttttccggcttgtcccagcct

SEQ ID NO: 2069627 - DNA, 25 bp, Homo sapien
cacctttgcccagccacaaaatctc

SEQ ID NO: 2069628 - DNA, 25 bp, Homo sapien
cctcttgacttgtcagctctgtctc

SEQ ID NO: 2069629 - DNA, 25 bp, Homo sapien
tgacttgtcagctctgtctcccctt

SEQ ID NO: 2069630 - DNA, 25 bp, Homo sapien
ttgcccagccacaaaatctcttcgt

SEQ ID NO: 2069631 - DNA, 25 bp, Homo sapien
tttccaccaggagcaccctcaaagc

SEQ ID NO: 2069632 - DNA, 25 bp, Homo sapien
tattgtggctaatagcactgtttgc

SEQ ID NO: 2069633 - DNA, 25 bp, Homo sapien
tggctattgtggctaatagcactgt

SEQ ID NO: 2069634 - DNA, 25 bp, Homo sapien
cagcattgtggctattgtggctaat

SEQ ID NO: 2069635 - DNA, 25 bp, Homo sapien
tgacaaatgatatgaacgtgtagaa

SEQ ID NO: 2069636 - DNA, 25 bp, Homo sapien
gagttggcagtactgacaaatgata

SEQ ID NO: 2069637 - DNA, 25 bp, Homo sapien
tactgcttggcattgagttggcagt

SEQ ID NO: 2069638 - DNA, 25 bp, Homo sapien
gaacgtgtagaattggccaatgaac

SEQ ID NO: 2069639 - DNA, 25 bp, Homo sapien
ggaagaactcttctgggcgaccgtc

SEQ ID NO: 2069640 - DNA, 25 bp, Homo sapien
taatgacctgaagtctgaactctac

SEQ ID NO: 2069641 - DNA, 25 bp, Homo sapien
cagactagaactgccctgagagatg

SEQ ID NO: 2069642 - DNA, 25 bp, Homo sapien
gcagctctgctcaccaggaattggc

SEQ ID NO: 2069643 - DNA, 25 bp, Homo sapien
taattgaccaggaacttaggttaca

SEQ ID NO: 2069644 - DNA, 25 bp, Homo sapien
taggttacaacttagctcagcaggg

SEQ ID NO: 2069645 - DNA, 25 bp, Homo sapien
actttgccagagatactaattgacc

SEQ ID NO: 2069646 - DNA, 25 bp, Homo sapien
gagtccattgaagtgcccggatcca

SEQ ID NO: 2069647 - DNA, 25 bp, Homo sapien
ctccaggtgaccaccttcaccaaga

SEQ ID NO: 2069648 - DNA, 25 bp, Homo sapien
taagcctgggaggttaacatactgc

SEQ ID NO: 2069649 - DNA, 25 bp, Homo sapien
ggttttcaaattacccggcagcatc

SEQ ID NO: 2069650 - DNA, 25 bp, Homo sapien
gcttctctgtggatggggttttcaa

SEQ ID NO: 2069651 - DNA, 25 bp, Homo sapien
ctttagattcccctaggagccgtgg

SEQ ID NO: 2069652 - DNA, 25 bp, Homo sapien
cagatattacatgcatcgcctatgc

SEQ ID NO: 2069653 - DNA, 25 bp, Homo sapien
cccacttagagctctttcacaggca

SEQ ID NO: 2069654 - DNA, 25 bp, Homo sapien
tatagctgtggtcggcttctggttt

SEQ ID NO: 2069655 - DNA, 25 bp, Homo sapien
gttagcattgagtgggtagcttttg

SEQ ID NO: 2069656 - DNA, 25 bp, Homo sapien
gagttagcattgagtgggtagcttt

SEQ ID NO: 2069657 - DNA, 25 bp, Homo sapien
tgggtagcttttgagaaattcagtg

SEQ ID NO: 2069658 - DNA, 25 bp, Homo sapien
ttagcattgagtgggtagcttttga

SEQ ID NO: 2069659 - DNA, 25 bp, Homo sapien
ggactctgggtcataatctttgggc

SEQ ID NO: 2069660 - DNA, 25 bp, Homo sapien
gggtcataatctttgggcaacttcc

SEQ ID NO: 2069661 - DNA, 25 bp, Homo sapien
cctggactctgggtcataatctttg

SEQ ID NO: 2069662 - DNA, 25 bp, Homo sapien
ctgttctctctgaaactccatttcc

SEQ ID NO: 2069663 - DNA, 25 bp, Homo sapien
tgcctgatgaaagcgactctccctg

SEQ ID NO: 2069664 - DNA, 25 bp, Homo sapien
ctccctggagtagccacgtgacttc

SEQ ID NO: 2069665 - DNA, 25 bp, Homo sapien
tttgcctgatgaaagcgactctccc

SEQ ID NO: 2069666 - DNA, 25 bp, Homo sapien
agtagccacgtgacttcacagacca

SEQ ID NO: 2069667 - DNA, 25 bp, Homo sapien
tggagagatttcgaaaccgttgtcc

SEQ ID NO: 2069668 - DNA, 25 bp, Homo sapien
gacccatggagagatttcgaaaccg

SEQ ID NO: 2069669 - DNA, 25 bp, Homo sapien
tcgggacccatggagagatttcgaa

SEQ ID NO: 2069670 - DNA, 25 bp, Homo sapien
ttgtgccacattcactggcaccctc

SEQ ID NO: 2069671 - DNA, 25 bp, Homo sapien
gtgacgcccagagaacagttcaggg

SEQ ID NO: 2069672 - DNA, 25 bp, Homo sapien
ggtgagacaattcccagtgacgccc

SEQ ID NO: 2069673 - DNA, 25 bp, Homo sapien
gatgctgccacgttccgagaaacgc

SEQ ID NO: 2069674 - DNA, 25 bp, Homo sapien
cattgctccaaacagctagtgtgcc

SEQ ID NO: 2069675 - DNA, 25 bp, Homo sapien
gggatgctgtccaccctcatgacgg

SEQ ID NO: 2069676 - DNA, 25 bp, Homo sapien
tgttctcccacgagctcttgctgag

SEQ ID NO: 2069677 - DNA, 25 bp, Homo sapien
tggatttctgcctccgggatgctgt

SEQ ID NO: 2069678 - DNA, 25 bp, Homo sapien
tctgcagactgctcaccagggagca

SEQ ID NO: 2069679 - DNA, 25 bp, Homo sapien
gaaccagccacgaactggcagagtt

SEQ ID NO: 2069680 - DNA, 25 bp, Homo sapien
ctgagaaccagccacgaactggcag

SEQ ID NO: 2069681 - DNA, 25 bp, Homo sapien
gaagctgtttggcatcctccatccc

SEQ ID NO: 2069682 - DNA, 25 bp, Homo sapien
ccccaagtggaagctgtttggcatc

SEQ ID NO: 2069683 - DNA, 25 bp, Homo sapien
tgttcataccccatgaacttttccc

SEQ ID NO: 2069684 - DNA, 25 bp, Homo sapien
gtgttcataccccatgaacttttcc

SEQ ID NO: 2069685 - DNA, 25 bp, Homo sapien
gtgtgttcataccccatgaactttt

SEQ ID NO: 2069686 - DNA, 25 bp, Homo sapien
ctgtgtgttcataccccatgaactt

SEQ ID NO: 2069687 - DNA, 25 bp, Homo sapien
taaaaacctggatgtaaagctgagc

SEQ ID NO: 2069688 - DNA, 25 bp, Homo sapien
tgacctgttgcatgcttcaataccg

SEQ ID NO: 2069689 - DNA, 25 bp, Homo sapien
aattacttaacccttcctggcgctg

SEQ ID NO: 2069690 - DNA, 25 bp, Homo sapien
gaatcatgccagagcctgagtcgag

SEQ ID NO: 2069691 - DNA, 25 bp, Homo sapien
tgaagtgaggatttagtatttttta

SEQ ID NO: 2069692 - DNA, 25 bp, Homo sapien
cagttgctgggtcattccttgggcc

SEQ ID NO: 2069693 - DNA, 25 bp, Homo sapien
gaatcgtgatgaccacacccagtca

SEQ ID NO: 2069694 - DNA, 25 bp, Homo sapien
gcctaaaatggtcatagatcttgat

SEQ ID NO: 2069695 - DNA, 25 bp, Homo sapien
gatttctctgaatcgtgatgaccac

SEQ ID NO: 2069696 - DNA, 25 bp, Homo sapien
gcagtgttgcctatcccagaggtcc

SEQ ID NO: 2069697 - DNA, 25 bp, Homo sapien
tattatgggccacttacatgaggct

SEQ ID NO: 2069698 - DNA, 25 bp, Homo sapien
tgggatgaaggtccaacagcctgtg

SEQ ID NO: 2069699 - DNA, 25 bp, Homo sapien
tgagaagtacgtgccggagctcaca

SEQ ID NO: 2069700 - DNA, 25 bp, Homo sapien
taaagagagcctgggttaatcagtt

SEQ ID NO: 2069701 - DNA, 25 bp, Homo sapien
gcctgggttaatcagttctgcagcc

SEQ ID NO: 2069702 - DNA, 25 bp, Homo sapien
gacactgtgctagttctccttcttc

SEQ ID NO: 2069703 - DNA, 25 bp, Homo sapien
gttctgcagcccctacgtgacactg

SEQ ID NO: 2069704 - DNA, 25 bp, Homo sapien
ggtgggaggtgctgtctggtatcat

SEQ ID NO: 2069705 - DNA, 25 bp, Homo sapien
gagaggtgggaggtgctgtctggta

SEQ ID NO: 2069706 - DNA, 25 bp, Homo sapien
gaggtgggaggtgctgtctggtatc

SEQ ID NO: 2069707 - DNA, 25 bp, Homo sapien
ctgtacttaagagggagaggtggga

SEQ ID NO: 2069708 - DNA, 25 bp, Homo sapien
tgaatttcaacccttggagcctaag

SEQ ID NO: 2069709 - DNA, 25 bp, Homo sapien
cgtaccagtgcatcatcagaagcct

SEQ ID NO: 2069710 - DNA, 25 bp, Homo sapien
gagtagcattgctgttggcgcctaa

SEQ ID NO: 2069711 - DNA, 25 bp, Homo sapien
tgtgttcccgtgtaagccagttttc

SEQ ID NO: 2069712 - DNA, 25 bp, Homo sapien
tgctttgtctaaacgctctcctttt

SEQ ID NO: 2069713 - DNA, 25 bp, Homo sapien
tcacgtgatcgcagaatatgtggcc

SEQ ID NO: 2069714 - DNA, 25 bp, Homo sapien
gtgcccaggtgtcagcggctcgaat

SEQ ID NO: 2069715 - DNA, 25 bp, Homo sapien
aaggttctgcgctgcagagtgccca

SEQ ID NO: 2069716 - DNA, 25 bp, Homo sapien
cagctggtcggtcagccctgaggct

SEQ ID NO: 2069717 - DNA, 25 bp, Homo sapien
gagccccagctggtcggtcagccct

SEQ ID NO: 2069718 - DNA, 25 bp, Homo sapien
ctgagccccagctggtcggtcagcc

SEQ ID NO: 2069719 - DNA, 25 bp, Homo sapien
cccagctggtcggtcagccctgagg

SEQ ID NO: 2069720 - DNA, 25 bp, Homo sapien
tgcaaggattctagcaacccaccgg

SEQ ID NO: 2069721 - DNA, 25 bp, Homo sapien
ggtatccaggtgcaacagtgaccag

SEQ ID NO: 2069722 - DNA, 25 bp, Homo sapien
taacagccttactgggtagatggag

SEQ ID NO: 2069723 - DNA, 25 bp, Homo sapien
ggctgatgagccacaacacacaaga

SEQ ID NO: 2069724 - DNA, 25 bp, Homo sapien
tctggattggctggtatacagtgca

SEQ ID NO: 2069725 - DNA, 25 bp, Homo sapien
tgctgatcttcatgcactagtggcc

SEQ ID NO: 2069726 - DNA, 25 bp, Homo sapien
gccataattagttctctccctgcag

SEQ ID NO: 2069727 - DNA, 25 bp, Homo sapien
gcccaaaggcgattaattgccccag

SEQ ID NO: 2069728 - DNA, 25 bp, Homo sapien
ttaatcacgccagtatgcgatcaat

SEQ ID NO: 2069729 - DNA, 25 bp, Homo sapien
ccagtatgcgatcaatatcctcatc

SEQ ID NO: 2069730 - DNA, 25 bp, Homo sapien
tcacgccagtatgcgatcaatatcc

SEQ ID NO: 2069731 - DNA, 25 bp, Homo sapien
cgccagtatgcgatcaatatcctca

SEQ ID NO: 2069732 - DNA, 25 bp, Homo sapien
gctgtttccttcattgctgcctcac

SEQ ID NO: 2069733 - DNA, 25 bp, Homo sapien
caggctgggttaatgctgtttcctt

SEQ ID NO: 2069734 - DNA, 25 bp, Homo sapien
gcctcacaaaaagcctcctccaagg

SEQ ID NO: 2069735 - DNA, 25 bp, Homo sapien
aatgcaggctgggttaatgctgttt

SEQ ID NO: 2069736 - DNA, 25 bp, Homo sapien
tgctcctcagtttcccttcctttgg

SEQ ID NO: 2069737 - DNA, 25 bp, Homo sapien
ctcagtttcccttcctttgggacag

SEQ ID NO: 2069738 - DNA, 25 bp, Homo sapien
tcaggaaagccgctcagtgtaaatc

SEQ ID NO: 2069739 - DNA, 25 bp, Homo sapien
gaaagccgctcagtgtaaatctgtg

SEQ ID NO: 2069740 - DNA, 25 bp, Homo sapien
ggaaagccgctcagtgtaaatctgt

SEQ ID NO: 2069741 - DNA, 25 bp, Homo sapien
gcagaatgggggcatctgctttctt

SEQ ID NO: 2069742 - DNA, 25 bp, Homo sapien
tggaggcatcataaagcatgcccag

SEQ ID NO: 2069743 - DNA, 25 bp, Homo sapien
tggagaccccatgaacggcatggag

SEQ ID NO: 2069744 - DNA, 25 bp, Homo sapien
catgaacggcatggaggcatcataa

SEQ ID NO: 2069745 - DNA, 25 bp, Homo sapien
gcatcataaagcatgcccagggcat

SEQ ID NO: 2069746 - DNA, 25 bp, Homo sapien
tgatggcttggaattgtgttatttg

SEQ ID NO: 2069747 - DNA, 25 bp, Homo sapien
gcttgaggcaagacgatgatggctt

SEQ ID NO: 2069748 - DNA, 25 bp, Homo sapien
caaagcgaaggcagggcattcccgg

SEQ ID NO: 2069749 - DNA, 25 bp, Homo sapien
gatgcaattgcaagagcagggctgt

SEQ ID NO: 2069750 - DNA, 25 bp, Homo sapien
caggcccatggagtgtccaggagac

SEQ ID NO: 2069751 - DNA, 25 bp, Homo sapien
cactgaggggtgatacttccatggc

SEQ ID NO: 2069752 - DNA, 25 bp, Homo sapien
tgtccaggagacgatgtccagacgc

SEQ ID NO: 2069753 - DNA, 25 bp, Homo sapien
aggagacgatgtccagacgccaccc

SEQ ID NO: 2069754 - DNA, 25 bp, Homo sapien
gcctgggcctcttccagtgccacat

SEQ ID NO: 2069755 - DNA, 25 bp, Homo sapien
tgagcctgggcctcttccagtgcca

SEQ ID NO: 2069756 - DNA, 25 bp, Homo sapien
agcctgggcctcttccagtgccaca

SEQ ID NO: 2069757 - DNA, 25 bp, Homo sapien
gctgagcctgggcctcttccagtgc

SEQ ID NO: 2069758 - DNA, 25 bp, Homo sapien
gcccctgccttatgcatgtccccag

SEQ ID NO: 2069759 - DNA, 25 bp, Homo sapien
aaagcccctgccttatgcatgtccc

SEQ ID NO: 2069760 - DNA, 25 bp, Homo sapien
cctgccttatgcatgtccccagcct

SEQ ID NO: 2069761 - DNA, 25 bp, Homo sapien
agcccctgccttatgcatgtcccca

SEQ ID NO: 2069762 - DNA, 25 bp, Homo sapien
tccctggcgagattgtgtgctgcta

SEQ ID NO: 2069763 - DNA, 25 bp, Homo sapien
cagtggccattaggttacccaggga

SEQ ID NO: 2069764 - DNA, 25 bp, Homo sapien
aacctggtcgcaaatcctgttctga

SEQ ID NO: 2069765 - DNA, 25 bp, Homo sapien
ggaacaacttgatccagtgagcgaa

SEQ ID NO: 2069766 - DNA, 25 bp, Homo sapien
gcttttcccaatgctcggctgcttc

SEQ ID NO: 2069767 - DNA, 25 bp, Homo sapien
tgcaatacttgttacactggtgtag

SEQ ID NO: 2069768 - DNA, 25 bp, Homo sapien
aatgaaggtcatggaacagttgcct

SEQ ID NO: 2069769 - DNA, 25 bp, Homo sapien
tttgaagggatttcagtcccagcat

SEQ ID NO: 2069770 - DNA, 25 bp, Homo sapien
tgggtggaaggaaacatagctttta

SEQ ID NO: 2069771 - DNA, 25 bp, Homo sapien
taaaaacaggacactttcatcagtt

SEQ ID NO: 2069772 - DNA, 25 bp, Homo sapien
ctgtgagtttgggtggaaggaaaca

SEQ ID NO: 2069773 - DNA, 25 bp, Homo sapien
catagcttttaaaaacaggacactt

SEQ ID NO: 2069774 - DNA, 25 bp, Homo sapien
tcaggactgcctcgaggcttttcaa

SEQ ID NO: 2069775 - DNA, 25 bp, Homo sapien
tcccggtcatttgcatcaggactgc

SEQ ID NO: 2069776 - DNA, 25 bp, Homo sapien
cattggaaacaagtcccggtcattt

SEQ ID NO: 2069777 - DNA, 25 bp, Homo sapien
aggcttttcaaattcagacaacatc

SEQ ID NO: 2069778 - DNA, 25 bp, Homo sapien
tgggtccgtttttgaggtcgcatga

SEQ ID NO: 2069779 - DNA, 25 bp, Homo sapien
cgtttttgaggtcgcatgagtccca

SEQ ID NO: 2069780 - DNA, 25 bp, Homo sapien
ctatgggtccgtttttgaggtcgca

SEQ ID NO: 2069781 - DNA, 25 bp, Homo sapien
tttgaggtcgcatgagtcccatccc

SEQ ID NO: 2069782 - DNA, 25 bp, Homo sapien
ggcatcttggcagcacattccctct

SEQ ID NO: 2069783 - DNA, 25 bp, Homo sapien
cctgaaggcagtgataacctttttc

SEQ ID NO: 2069784 - DNA, 25 bp, Homo sapien
acattggcttagaccttcctgaagg

SEQ ID NO: 2069785 - DNA, 25 bp, Homo sapien
tcatgaggctcccacctggtgacac

SEQ ID NO: 2069786 - DNA, 25 bp, Homo sapien
ccagcgttgctatgccaacgtcagt

SEQ ID NO: 2069787 - DNA, 25 bp, Homo sapien
gttgctatgccaacgtcagttagct

SEQ ID NO: 2069788 - DNA, 25 bp, Homo sapien
gctatgccaacgtcagttagcttca

SEQ ID NO: 2069789 - DNA, 25 bp, Homo sapien
cctttagccagcgttgctatgccaa

SEQ ID NO: 2069790 - DNA, 25 bp, Homo sapien
acccacaggaacatctctggcccac

SEQ ID NO: 2069791 - DNA, 25 bp, Homo sapien
ctggagcctgggctaagctgctttc

SEQ ID NO: 2069792 - DNA, 25 bp, Homo sapien
tctccacccacaggaacatctctgg

SEQ ID NO: 2069793 - DNA, 25 bp, Homo sapien
tccacccacaggaacatctctggcc

SEQ ID NO: 2069794 - DNA, 25 bp, Homo sapien
catacgggatattgttctcaggccg

SEQ ID NO: 2069795 - DNA, 25 bp, Homo sapien
ttgttttctggtacacccagtgctg

SEQ ID NO: 2069796 - DNA, 25 bp, Homo sapien
tctcaggccgatggataagaaaaat

SEQ ID NO: 2069797 - DNA, 25 bp, Homo sapien
cccatccctgatggaatacttcaca

SEQ ID NO: 2069798 - DNA, 25 bp, Homo sapien
caagagctgggcattattcagggtc

SEQ ID NO: 2069799 - DNA, 25 bp, Homo sapien
ttaggacagtggacctttcccgcag

SEQ ID NO: 2069800 - DNA, 25 bp, Homo sapien
aatttcagccagatgggagtgggca

SEQ ID NO: 2069801 - DNA, 25 bp, Homo sapien
cctgcgggccagctaatttggatga

SEQ ID NO: 2069802 - DNA, 25 bp, Homo sapien
cgtagatcttggcataatacctggc

SEQ ID NO: 2069803 - DNA, 25 bp, Homo sapien
gatcttggcataatacctggcagta

SEQ ID NO: 2069804 - DNA, 25 bp, Homo sapien
tcagcagcgtagatcttggcataat

SEQ ID NO: 2069805 - DNA, 25 bp, Homo sapien
tgtgcttcagcagcgtagatcttgg

SEQ ID NO: 2069806 - DNA, 25 bp, Homo sapien
tgtgcaccttaagcacacaggcatg

SEQ ID NO: 2069807 - DNA, 25 bp, Homo sapien
tgcggaaggctttgcggtgaacccc

SEQ ID NO: 2069808 - DNA, 25 bp, Homo sapien
tatttctggtcccataggcaatggc

SEQ ID NO: 2069809 - DNA, 25 bp, Homo sapien
catgaggccgtgcatcactgtgctg

SEQ ID NO: 2069810 - DNA, 25 bp, Homo sapien
taacaatttggcctctaataccact

SEQ ID NO: 2069811 - DNA, 25 bp, Homo sapien
caccagagcccaataaacatgtatt

SEQ ID NO: 2069812 - DNA, 25 bp, Homo sapien
tggtataattaacaaccctgtctat

SEQ ID NO: 2069813 - DNA, 25 bp, Homo sapien
taccactaacagagtataggaaatg

SEQ ID NO: 2069814 - DNA, 25 bp, Homo sapien
ctgtttctgcagagatttcaggcgt

SEQ ID NO: 2069815 - DNA, 25 bp, Homo sapien
tgtttctgcagagatttcaggcgtt

SEQ ID NO: 2069816 - DNA, 25 bp, Homo sapien
ctttagtatcctggcgacttgacag

SEQ ID NO: 2069817 - DNA, 25 bp, Homo sapien
gtatcctggcgacttgacagctgtt

SEQ ID NO: 2069818 - DNA, 25 bp, Homo sapien
tttagtatcctggcgacttgacagc

SEQ ID NO: 2069819 - DNA, 25 bp, Homo sapien
tagtatcctggcgacttgacagctg

SEQ ID NO: 2069820 - DNA, 25 bp, Homo sapien
tggcttgcacgatggcaaaggaaac

SEQ ID NO: 2069821 - DNA, 25 bp, Homo sapien
aattcagcagtcacttttccgtagc

SEQ ID NO: 2069822 - DNA, 25 bp, Homo sapien
tagagtccctggtccttcggactgg

SEQ ID NO: 2069823 - DNA, 25 bp, Homo sapien
tcagctgtgaggttaaattcagcag

SEQ ID NO: 2069824 - DNA, 25 bp, Homo sapien
caacaactgtgaaaagtaaccaggg

SEQ ID NO: 2069825 - DNA, 25 bp, Homo sapien
aatattgtggatgtggaatctctgc

SEQ ID NO: 2069826 - DNA, 25 bp, Homo sapien
cagacacttgtcttccgatatttag

SEQ ID NO: 2069827 - DNA, 25 bp, Homo sapien
tagtgaaaggttgtgtgacttccca

SEQ ID NO: 2069828 - DNA, 25 bp, Homo sapien
gctatggactttgaatcttttgtcc

SEQ ID NO: 2069829 - DNA, 25 bp, Homo sapien
agcagatagtagaatcttcatgaat

SEQ ID NO: 2069830 - DNA, 25 bp, Homo sapien
ctctgcacttgggctatggactttg

SEQ ID NO: 2069831 - DNA, 25 bp, Homo sapien
tggactttgaatcttttgtccagca

SEQ ID NO: 2069832 - DNA, 25 bp, Homo sapien
gttgggtagcaaatctttcaaccag

SEQ ID NO: 2069833 - DNA, 25 bp, Homo sapien
gagtaaccaagactgctaacagtat

SEQ ID NO: 2069834 - DNA, 25 bp, Homo sapien
cagagagtaaccaagactgctaaca

SEQ ID NO: 2069835 - DNA, 25 bp, Homo sapien
gataatgggcctgttgggtagcaaa

SEQ ID NO: 2069836 - DNA, 25 bp, Homo sapien
caatggcgaggttgtgctgcagctg

SEQ ID NO: 2069837 - DNA, 25 bp, Homo sapien
catgctcggtctttgcagcctttag

SEQ ID NO: 2069838 - DNA, 25 bp, Homo sapien
ctcggtctttgcagcctttagtgca

SEQ ID NO: 2069839 - DNA, 25 bp, Homo sapien
ggcatgctcggtctttgcagccttt

SEQ ID NO: 2069840 - DNA, 25 bp, Homo sapien
cacaggcaagaattccaaaaaggtg

SEQ ID NO: 2069841 - DNA, 25 bp, Homo sapien
cttgaaaagtcacaggcaagaattc

SEQ ID NO: 2069842 - DNA, 25 bp, Homo sapien
tgaaaagtcacaggcaagaattcca

SEQ ID NO: 2069843 - DNA, 25 bp, Homo sapien
caggcaagaattccaaaaaggtggt

SEQ ID NO: 2069844 - DNA, 25 bp, Homo sapien
agtggttctcaatcgtggttctccc

SEQ ID NO: 2069845 - DNA, 25 bp, Homo sapien
tggttctcccgatagatcacctggg

SEQ ID NO: 2069846 - DNA, 25 bp, Homo sapien
tacaggcggcctttatcagtggttc

SEQ ID NO: 2069847 - DNA, 25 bp, Homo sapien
gataatgaaacggaaaagcaccttc

SEQ ID NO: 2069848 - DNA, 25 bp, Homo sapien
cttaattgcaaaggaccctcgagga

SEQ ID NO: 2069849 - DNA, 25 bp, Homo sapien
aggacacaggaactggatacctggt

SEQ ID NO: 2069850 - DNA, 25 bp, Homo sapien
caagcccaaactttaacaatgatgg

SEQ ID NO: 2069851 - DNA, 25 bp, Homo sapien
tggatacctggtctacaagcccaaa

SEQ ID NO: 2069852 - DNA, 25 bp, Homo sapien
ctcagctaaatgtccactgcctggg

SEQ ID NO: 2069853 - DNA, 25 bp, Homo sapien
tttaagaaaggctgagttctttctg

SEQ ID NO: 2069854 - DNA, 25 bp, Homo sapien
cttccagtttcagcctcagtgctgc

SEQ ID NO: 2069855 - DNA, 25 bp, Homo sapien
taatgatgtttcgagtttgggcatc

SEQ ID NO: 2069856 - DNA, 25 bp, Homo sapien
cacacattttccagggtgagggcag

SEQ ID NO: 2069857 - DNA, 25 bp, Homo sapien
gaacttgcaaaatggccggctggat

SEQ ID NO: 2069858 - DNA, 25 bp, Homo sapien
ttcatgggatgcacgagggaacctc

SEQ ID NO: 2069859 - DNA, 25 bp, Homo sapien
tggactttttcgcacagcccagggt

SEQ ID NO: 2069860 - DNA, 25 bp, Homo sapien
tgaagtcagcacgagcatccttggg

SEQ ID NO: 2069861 - DNA, 25 bp, Homo sapien
ctgaagtcagcacgagcatccttgg

SEQ ID NO: 2069862 - DNA, 25 bp, Homo sapien
gaagtcagcacgagcatccttgggg

SEQ ID NO: 2069863 - DNA, 25 bp, Homo sapien
cctgaagtcagcacgagcatccttg

SEQ ID NO: 2069864 - DNA, 25 bp, Homo sapien
tgtggacccctcctaagtttgagaa

SEQ ID NO: 2069865 - DNA, 25 bp, Homo sapien
gggacatagtctcatcattggcttc

SEQ ID NO: 2069866 - DNA, 25 bp, Homo sapien
catctggctgcaagagattgtctct

SEQ ID NO: 2069867 - DNA, 25 bp, Homo sapien
caggtacagggtttgacctccgagt

SEQ ID NO: 2069868 - DNA, 25 bp, Homo sapien
catcagcaaagtaataagcgggtac

SEQ ID NO: 2069869 - DNA, 25 bp, Homo sapien
tcttccgtgattgattactattaca

SEQ ID NO: 2069870 - DNA, 25 bp, Homo sapien
tattcttccgtgattgattactatt

SEQ ID NO: 2069871 - DNA, 25 bp, Homo sapien
ttcttccgtgattgattactattac

SEQ ID NO: 2069872 - DNA, 25 bp, Homo sapien
ttcaagagcaggctcctcggttctc

SEQ ID NO: 2069873 - DNA, 25 bp, Homo sapien
gtttcaagagcaggctcctcggttc

SEQ ID NO: 2069874 - DNA, 25 bp, Homo sapien
tttcaagagcaggctcctcggttct

SEQ ID NO: 2069875 - DNA, 25 bp, Homo sapien
gccaagtggatgaaacttaactaac

SEQ ID NO: 2069876 - DNA, 25 bp, Homo sapien
cagagtgtggaaggtcaccactgta

SEQ ID NO: 2069877 - DNA, 25 bp, Homo sapien
actaacaacgctgctccaggacaga

SEQ ID NO: 2069878 - DNA, 25 bp, Homo sapien
ttgacaagttgtgctaatagccaag

SEQ ID NO: 2069879 - DNA, 25 bp, Homo sapien
gggacagtgtcccgtagagcaaggg

SEQ ID NO: 2069880 - DNA, 25 bp, Homo sapien
cagtgtcccgtagagcaaggggtgt

SEQ ID NO: 2069881 - DNA, 25 bp, Homo sapien
cctggtagggattagctggaagggg

SEQ ID NO: 2069882 - DNA, 25 bp, Homo sapien
aaggggacagtgtcccgtagagcaa

SEQ ID NO: 2069883 - DNA, 25 bp, Homo sapien
ggtggaagggtggctagttcctgtg

SEQ ID NO: 2069884 - DNA, 25 bp, Homo sapien
gtggaagggtggctagttcctgtgt

SEQ ID NO: 2069885 - DNA, 25 bp, Homo sapien
tggaagggtggctagttcctgtgtc

SEQ ID NO: 2069886 - DNA, 25 bp, Homo sapien
gctttcagattgtgcagagataaga

SEQ ID NO: 2069887 - DNA, 25 bp, Homo sapien
tgtttgctttcagattgtgcagaga

SEQ ID NO: 2069888 - DNA, 25 bp, Homo sapien
ttgctttcagattgtgcagagataa

SEQ ID NO: 2069889 - DNA, 25 bp, Homo sapien
gtttgctttcagattgtgcagagat

SEQ ID NO: 2069890 - DNA, 25 bp, Homo sapien
gccaggatgccaactgggacactaa

SEQ ID NO: 2069891 - DNA, 25 bp, Homo sapien
tcctgtagctccacggtaacctgag

SEQ ID NO: 2069892 - DNA, 25 bp, Homo sapien
gatacaagagacacagtggagaccg

SEQ ID NO: 2069893 - DNA, 25 bp, Homo sapien
aacatgtcctctttcgtcctgtagc

SEQ ID NO: 2069894 - DNA, 25 bp, Homo sapien
tagagctgagtacatgcagtcccag

SEQ ID NO: 2069895 - DNA, 25 bp, Homo sapien
gaggcccagggcaatagcttttaaa

SEQ ID NO: 2069896 - DNA, 25 bp, Homo sapien
ttgtcattggatcagctgtaaaaga

SEQ ID NO: 2069897 - DNA, 25 bp, Homo sapien
ttacgtataaactatagtgtgtgtg

SEQ ID NO: 2069898 - DNA, 25 bp, Homo sapien
tggaatttgcacagtctgcgtgagg

SEQ ID NO: 2069899 - DNA, 25 bp, Homo sapien
aagtgtgatactctccacaaagctg

SEQ ID NO: 2069900 - DNA, 25 bp, Homo sapien
ccacgtcagattttctaagccaaag

SEQ ID NO: 2069901 - DNA, 25 bp, Homo sapien
gcttcatgccaggtagattgccatt

SEQ ID NO: 2069902 - DNA, 25 bp, Homo sapien
gggatatccagacttgccttcaagc

SEQ ID NO: 2069903 - DNA, 25 bp, Homo sapien
ccaaccagggatatccagacttgcc

SEQ ID NO: 2069904 - DNA, 25 bp, Homo sapien
ccagggatatccagacttgccttca

SEQ ID NO: 2069905 - DNA, 25 bp, Homo sapien
gatatccagacttgccttcaagcat

SEQ ID NO: 2069906 - DNA, 25 bp, Homo sapien
gaaataagccacattggaacactgg

SEQ ID NO: 2069907 - DNA, 25 bp, Homo sapien
ataagccacattggaacactgggcc

SEQ ID NO: 2069908 - DNA, 25 bp, Homo sapien
tggttatgcgaggatgctgaaatat

SEQ ID NO: 2069909 - DNA, 25 bp, Homo sapien
tcaggaatgggccagaatcctttaa

SEQ ID NO: 2069910 - DNA, 25 bp, Homo sapien
tttaacagcagctttgctggctcag

SEQ ID NO: 2069911 - DNA, 25 bp, Homo sapien
gctcagagacccacttctgtctttg

SEQ ID NO: 2069912 - DNA, 25 bp, Homo sapien
acttctgtctttgaggtctccgcac

SEQ ID NO: 2069913 - DNA, 25 bp, Homo sapien
agcagctttgctggctcagagaccc

SEQ ID NO: 2069914 - DNA, 25 bp, Homo sapien
agcatctccactctgttgtgtgttt

SEQ ID NO: 2069915 - DNA, 25 bp, Homo sapien
tcaagctggctccatctgaaagatc

SEQ ID NO: 2069916 - DNA, 25 bp, Homo sapien
gcatctccactctgttgtgtgtttt

SEQ ID NO: 2069917 - DNA, 25 bp, Homo sapien
tgaagatgattcaagttagcctggg

SEQ ID NO: 2069918 - DNA, 25 bp, Homo sapien
tgtggctgccgagaaacttaagatg

SEQ ID NO: 2069919 - DNA, 25 bp, Homo sapien
cctgggtaggtactatttcaagaca

SEQ ID NO: 2069920 - DNA, 25 bp, Homo sapien
gagttggcagtgtgacccttgaaga

SEQ ID NO: 2069921 - DNA, 25 bp, Homo sapien
tgtcatgcacaagtaccctgatggt

SEQ ID NO: 2069922 - DNA, 25 bp, Homo sapien
aaaaccagatttccttccgagcagc

SEQ ID NO: 2069923 - DNA, 25 bp, Homo sapien
tattacagcgtaagtccaaagctca

SEQ ID NO: 2069924 - DNA, 25 bp, Homo sapien
catcccaccagtgaggcaacagtta

SEQ ID NO: 2069925 - DNA, 25 bp, Homo sapien
gaggatcactccagtctggaacctg

SEQ ID NO: 2069926 - DNA, 25 bp, Homo sapien
gtttcaaatagagtattaacttgca

SEQ ID NO: 2069927 - DNA, 25 bp, Homo sapien
gatcactccagtctggaacctggct

SEQ ID NO: 2069928 - DNA, 25 bp, Homo sapien
gcttgtttcaaatagagtattaact

SEQ ID NO: 2069929 - DNA, 25 bp, Homo sapien
tgggaactccgaccagtcgctgctg

SEQ ID NO: 2069930 - DNA, 25 bp, Homo sapien
cctgggttgaaatagcacattctct

SEQ ID NO: 2069931 - DNA, 25 bp, Homo sapien
tgggttgaaatagcacattctcttg

SEQ ID NO: 2069932 - DNA, 25 bp, Homo sapien
ttgcatcagcatgggaactccgacc

SEQ ID NO: 2069933 - DNA, 25 bp, Homo sapien
gtactttctctcaggttggcattcg

SEQ ID NO: 2069934 - DNA, 25 bp, Homo sapien
gcattcggcttcttgggatttccct

SEQ ID NO: 2069935 - DNA, 25 bp, Homo sapien
gaagtctctcttttatcactctggg

SEQ ID NO: 2069936 - DNA, 25 bp, Homo sapien
agagcagagatgaagggtaccttct

SEQ ID NO: 2069937 - DNA, 25 bp, Homo sapien
gagttttctgactcaccagacaaga

SEQ ID NO: 2069938 - DNA, 25 bp, Homo sapien
ttgtcagctgccgtctcccaacact

SEQ ID NO: 2069939 - DNA, 25 bp, Homo sapien
aacactggctcatccctgagttttc

SEQ ID NO: 2069940 - DNA, 25 bp, Homo sapien
cccactctcttgtcagctgccgtct

SEQ ID NO: 2069941 - DNA, 25 bp, Homo sapien
tcctggtgaggtcccaaaatgagag

SEQ ID NO: 2069942 - DNA, 25 bp, Homo sapien
agtggcaaccataggcccagcgtca

SEQ ID NO: 2069943 - DNA, 25 bp, Homo sapien
ttttcagcagcctcgggagcagtgg

SEQ ID NO: 2069944 - DNA, 25 bp, Homo sapien
cactgaagacgttccatcctggtga

SEQ ID NO: 2069945 - DNA, 25 bp, Homo sapien
tagggttatctctgggcaaagttca

SEQ ID NO: 2069946 - DNA, 25 bp, Homo sapien
cagttgcctcagatagcgggaggct

SEQ ID NO: 2069947 - DNA, 25 bp, Homo sapien
gagtaatccgtcataacatcagaac

SEQ ID NO: 2069948 - DNA, 25 bp, Homo sapien
tcatctgaaaactcctcggtgtagg

SEQ ID NO: 2069949 - DNA, 25 bp, Homo sapien
tagagcgtaagccttcatcatgagg

SEQ ID NO: 2069950 - DNA, 25 bp, Homo sapien
tcattgttcaggtcaccatccgtga

SEQ ID NO: 2069951 - DNA, 25 bp, Homo sapien
catcatgaggaccatcattgttcag

SEQ ID NO: 2069952 - DNA, 25 bp, Homo sapien
ggtcaccatccgtgaactttgatgc

SEQ ID NO: 2069953 - DNA, 25 bp, Homo sapien
ggaatgcactgtcttgtggcaacat

SEQ ID NO: 2069954 - DNA, 25 bp, Homo sapien
actgtcttgtggcaacatctgtctt

SEQ ID NO: 2069955 - DNA, 25 bp, Homo sapien
gcactgtcttgtggcaacatctgtc

SEQ ID NO: 2069956 - DNA, 25 bp, Homo sapien
aatgcactgtcttgtggcaacatct

SEQ ID NO: 2069957 - DNA, 25 bp, Homo sapien
aatgtcaagattgcccaatgactgg

SEQ ID NO: 2069958 - DNA, 25 bp, Homo sapien
cagaactggacacactaatgtcaag

SEQ ID NO: 2069959 - DNA, 25 bp, Homo sapien
tccaggttaggagacaattgtgggt

SEQ ID NO: 2069960 - DNA, 25 bp, Homo sapien
tggatcataagcctctccagtgtgc

SEQ ID NO: 2069961 - DNA, 25 bp, Homo sapien
caacggaagcagaacaacagatcat

SEQ ID NO: 2069962 - DNA, 25 bp, Homo sapien
tcaacggaagcagaacaacagatca

SEQ ID NO: 2069963 - DNA, 25 bp, Homo sapien
ctcaacggaagcagaacaacagatc

SEQ ID NO: 2069964 - DNA, 25 bp, Homo sapien
gagtttttagccgagatttgataga

SEQ ID NO: 2069965 - DNA, 25 bp, Homo sapien
aaagagtttttagccgagatttgat

SEQ ID NO: 2069966 - DNA, 25 bp, Homo sapien
ttagccgagatttgatagacagcag

SEQ ID NO: 2069967 - DNA, 25 bp, Homo sapien
ttttagccgagatttgatagacagc

SEQ ID NO: 2069968 - DNA, 25 bp, Homo sapien
cacccttattaatctcatttgaccg

SEQ ID NO: 2069969 - DNA, 25 bp, Homo sapien
gttgcacccttattaatctcatttg

SEQ ID NO: 2069970 - DNA, 25 bp, Homo sapien
ttgtatgttgcacccttattaatct

SEQ ID NO: 2069971 - DNA, 25 bp, Homo sapien
ccttattaatctcatttgaccgcat

SEQ ID NO: 2069972 - DNA, 25 bp, Homo sapien
tatggcaactaatacggttcgggac

SEQ ID NO: 2069973 - DNA, 25 bp, Homo sapien
ggttcgggaccactgccatgattca

SEQ ID NO: 2069974 - DNA, 25 bp, Homo sapien
tgagtgtacacgtcaacacagtgaa

SEQ ID NO: 2069975 - DNA, 25 bp, Homo sapien
tactgatgcatcaagggcattatta

SEQ ID NO: 2069976 - DNA, 25 bp, Homo sapien
ttccacttggcgcagaagctctgcc

SEQ ID NO: 2069977 - DNA, 25 bp, Homo sapien
gcccttttgacagctttctgagcct

SEQ ID NO: 2069978 - DNA, 25 bp, Homo sapien
ctgagcctctgggagcaacgcagac

SEQ ID NO: 2069979 - DNA, 25 bp, Homo sapien
gatgcatggggagcggtttcctggc

SEQ ID NO: 2069980 - DNA, 25 bp, Homo sapien
tctcccatatgagggggactccact

SEQ ID NO: 2069981 - DNA, 25 bp, Homo sapien
ctgaggtgtagcctggtgtctcatg

SEQ ID NO: 2069982 - DNA, 25 bp, Homo sapien
tcagaaaaagtgaatgggagcatgt

SEQ ID NO: 2069983 - DNA, 25 bp, Homo sapien
gtctcatggaatgtactgagactgg

SEQ ID NO: 2069984 - DNA, 25 bp, Homo sapien
caccttccaggtgtcggaaagttct

SEQ ID NO: 2069985 - DNA, 25 bp, Homo sapien
ccaggtgtcggaaagttctaccagt

SEQ ID NO: 2069986 - DNA, 25 bp, Homo sapien
caggaacacagacaccttccaggtg

SEQ ID NO: 2069987 - DNA, 25 bp, Homo sapien
aggaacacagacaccttccaggtgt

SEQ ID NO: 2069988 - DNA, 25 bp, Homo sapien
gctttccaaccttggatgaaatgca

SEQ ID NO: 2069989 - DNA, 25 bp, Homo sapien
caaaatgctttccaaccttggatga

SEQ ID NO: 2069990 - DNA, 25 bp, Homo sapien
aggaacatgaagttcacaaaatgct

SEQ ID NO: 2069991 - DNA, 25 bp, Homo sapien
aaccttggatgaaatgcatttccat

SEQ ID NO: 2069992 - DNA, 25 bp, Homo sapien
ccaagacatagcaagattcagtcat

SEQ ID NO: 2069993 - DNA, 25 bp, Homo sapien
cttagccaagacatagcaagattca

SEQ ID NO: 2069994 - DNA, 25 bp, Homo sapien
taagctgaatgggataaagacgagg

SEQ ID NO: 2069995 - DNA, 25 bp, Homo sapien
atgccaatccggctgtctcccaagt

SEQ ID NO: 2069996 - DNA, 25 bp, Homo sapien
gagacctcgacaaggttggaatgaa

SEQ ID NO: 2069997 - DNA, 25 bp, Homo sapien
ggtcatggtcaagggccagcaaatg

SEQ ID NO: 2069998 - DNA, 25 bp, Homo sapien
gatggcctgaccattcttataccaa

SEQ ID NO: 2069999 - DNA, 25 bp, Homo sapien
tataccaagttacctctggcttggg

SEQ ID NO: 2070000 - DNA, 25 bp, Homo sapien
acatgaatatactgattctcaaaga

SEQ ID NO: 2070001 - DNA, 25 bp, Homo sapien
agaattcatagttggaaataatgcc

SEQ ID NO: 2070002 - DNA, 25 bp, Homo sapien
cagatattatgcagcgaagcacagc

SEQ ID NO: 2070003 - DNA, 25 bp, Homo sapien
gaagcacagcgtctgacttctcagg

SEQ ID NO: 2070004 - DNA, 25 bp, Homo sapien
tgcagcgaagcacagcgtctgactt

SEQ ID NO: 2070005 - DNA, 25 bp, Homo sapien
cagcgtctgacttctcaggaacctt

SEQ ID NO: 2070006 - DNA, 25 bp, Homo sapien
ataaaaaacacagcgggggcctctg

SEQ ID NO: 2070007 - DNA, 25 bp, Homo sapien
ttcatcctttcatgccgcaccaaat

SEQ ID NO: 2070008 - DNA, 25 bp, Homo sapien
gcccttcggagtctttcatcctttc

SEQ ID NO: 2070009 - DNA, 25 bp, Homo sapien
ccttcggagtctttcatcctttcat

SEQ ID NO: 2070010 - DNA, 25 bp, Homo sapien
ggaaagagccgtaatgttgaagaag

SEQ ID NO: 2070011 - DNA, 25 bp, Homo sapien
tggaaagagccgtaatgttgaagaa

SEQ ID NO: 2070012 - DNA, 25 bp, Homo sapien
gtggaaagagccgtaatgttgaaga

SEQ ID NO: 2070013 - DNA, 25 bp, Homo sapien
gggtggaaagagccgtaatgttgaa

SEQ ID NO: 2070014 - DNA, 25 bp, Homo sapien
ccagatctctatgttggacatcaag

SEQ ID NO: 2070015 - DNA, 25 bp, Homo sapien
gaaggcataccctctcctcattggc

SEQ ID NO: 2070016 - DNA, 25 bp, Homo sapien
gagaagtgtgaaaagcgtagcccaa

SEQ ID NO: 2070017 - DNA, 25 bp, Homo sapien
caagttacaatcaagttaccgacag

SEQ ID NO: 2070018 - DNA, 25 bp, Homo sapien
tcttccatgatcaggtcaaagcata

SEQ ID NO: 2070019 - DNA, 25 bp, Homo sapien
cattgattgggtgtccctgttcccg

SEQ ID NO: 2070020 - DNA, 25 bp, Homo sapien
tcaaaggagtttatagggctcaggg

SEQ ID NO: 2070021 - DNA, 25 bp, Homo sapien
caaagcatagatgggtctgcttcca

SEQ ID NO: 2070022 - DNA, 25 bp, Homo sapien
cagttaccgagttaagtgcttcaca

SEQ ID NO: 2070023 - DNA, 25 bp, Homo sapien
tggagactgtatggcgcacctacct

SEQ ID NO: 2070024 - DNA, 25 bp, Homo sapien
cataattggcacatgcaggtaacag

SEQ ID NO: 2070025 - DNA, 25 bp, Homo sapien
tactgagtcatctacgatgtgccag

SEQ ID NO: 2070026 - DNA, 25 bp, Homo sapien
ggaaaggcatcctctacagggttgc

SEQ ID NO: 2070027 - DNA, 25 bp, Homo sapien
gagctcaggtgtcgtccattccgga

SEQ ID NO: 2070028 - DNA, 25 bp, Homo sapien
tagggaactacctgactggtcacat

SEQ ID NO: 2070029 - DNA, 25 bp, Homo sapien
ccaggaagcctcgtgtagggaacta

SEQ ID NO: 2070030 - DNA, 25 bp, Homo sapien
gccgtgccgcgctgccagatttgtt

SEQ ID NO: 2070031 - DNA, 25 bp, Homo sapien
cagatttgttcttccgcccctgcct

SEQ ID NO: 2070032 - DNA, 25 bp, Homo sapien
ggtcgccggcgagggccatgtcgct

SEQ ID NO: 2070033 - DNA, 25 bp, Homo sapien
ctggaggagactggcggagctggcg

SEQ ID NO: 2070034 - DNA, 25 bp, Homo sapien
gcactattacaggtcacagaacgct

SEQ ID NO: 2070035 - DNA, 25 bp, Homo sapien
taatgtcttggcttaatcacagagc

SEQ ID NO: 2070036 - DNA, 25 bp, Homo sapien
gtctattagagaagtggcattggtt

SEQ ID NO: 2070037 - DNA, 25 bp, Homo sapien
ttcgtttatgtgcttctgcattcag

SEQ ID NO: 2070038 - DNA, 25 bp, Homo sapien
gcagatctccagagtattacggtgc

SEQ ID NO: 2070039 - DNA, 25 bp, Homo sapien
tctccagagtattacggtgctaacg

SEQ ID NO: 2070040 - DNA, 25 bp, Homo sapien
cagagtattacggtgctaacgagta

SEQ ID NO: 2070041 - DNA, 25 bp, Homo sapien
tacggtgctaacgagtactctggtt

SEQ ID NO: 2070042 - DNA, 25 bp, Homo sapien
gaatgagaacgtgtaaaaggctcta

SEQ ID NO: 2070043 - DNA, 25 bp, Homo sapien
gtagaaggtgcacttttagctgcag

SEQ ID NO: 2070044 - DNA, 25 bp, Homo sapien
ctgctgagtagaaggtgcactttta

SEQ ID NO: 2070045 - DNA, 25 bp, Homo sapien
tttattataggaatgagaacgtgta

SEQ ID NO: 2070046 - DNA, 25 bp, Homo sapien
gttagtcccagtaattcagctttct

SEQ ID NO: 2070047 - DNA, 25 bp, Homo sapien
ttagtcccagtaattcagctttctt

SEQ ID NO: 2070048 - DNA, 25 bp, Homo sapien
tagtcccagtaattcagctttcttc

SEQ ID NO: 2070049 - DNA, 25 bp, Homo sapien
cttgactggaagtagcagtagcgtg

SEQ ID NO: 2070050 - DNA, 25 bp, Homo sapien
gtcgcacccgactaggattcatgtt

SEQ ID NO: 2070051 - DNA, 25 bp, Homo sapien
tcttaatacctgtgcttgactggaa

SEQ ID NO: 2070052 - DNA, 25 bp, Homo sapien
aaaacataaacttgcggcttgaagg

SEQ ID NO: 2070053 - DNA, 25 bp, Homo sapien
cttctgtgcaagttgattaactgcc

SEQ ID NO: 2070054 - DNA, 25 bp, Homo sapien
tggtaagcccatcgaatgcactgat

SEQ ID NO: 2070055 - DNA, 25 bp, Homo sapien
ctgctgaaattgtaagttggccacc

SEQ ID NO: 2070056 - DNA, 25 bp, Homo sapien
taattccagaatgtaggtcagctct

SEQ ID NO: 2070057 - DNA, 25 bp, Homo sapien
tttatgctcaggaactagacacacc

SEQ ID NO: 2070058 - DNA, 25 bp, Homo sapien
gacacacccctcgtaatggctacta

SEQ ID NO: 2070059 - DNA, 25 bp, Homo sapien
tacagctctagtgccaaactgcaag

SEQ ID NO: 2070060 - DNA, 25 bp, Homo sapien
gcaggactgaaattgacatatcgag

SEQ ID NO: 2070061 - DNA, 25 bp, Homo sapien
gcacttactgatccaatacagggaa

SEQ ID NO: 2070062 - DNA, 25 bp, Homo sapien
gcaaacaggctctagagattcgaag

SEQ ID NO: 2070063 - DNA, 25 bp, Homo sapien
tcttgtgcggaatctacagtgggcc

SEQ ID NO: 2070064 - DNA, 25 bp, Homo sapien
tgacctgtcgaaaatcatggattgg

SEQ ID NO: 2070065 - DNA, 25 bp, Homo sapien
catagaccatagatatgctgcctta

SEQ ID NO: 2070066 - DNA, 25 bp, Homo sapien
ggaaacttattttggcatagaccat

SEQ ID NO: 2070067 - DNA, 25 bp, Homo sapien
gataaccagtctacagaaggtccta

SEQ ID NO: 2070068 - DNA, 25 bp, Homo sapien
ctgtttccgatggtgaccagaggac

SEQ ID NO: 2070069 - DNA, 25 bp, Homo sapien
ctcagtgcatatgatcctgccacct

SEQ ID NO: 2070070 - DNA, 25 bp, Homo sapien
ctcctcagtgcatatgatcctgcca

SEQ ID NO: 2070071 - DNA, 25 bp, Homo sapien
gaacatgacctactataacctcaaa

SEQ ID NO: 2070072 - DNA, 25 bp, Homo sapien
gcatgaacatgacctactataacct

SEQ ID NO: 2070073 - DNA, 25 bp, Homo sapien
tattaccctgatactagactagaca

SEQ ID NO: 2070074 - DNA, 25 bp, Homo sapien
tcactggcctaatgagataatactc

SEQ ID NO: 2070075 - DNA, 25 bp, Homo sapien
aaaatcccaggcctagatggctgca

SEQ ID NO: 2070076 - DNA, 25 bp, Homo sapien
ggctgcattgttgaattctgccaaa

SEQ ID NO: 2070077 - DNA, 25 bp, Homo sapien
ttccttgaacattcacctgacgctt

SEQ ID NO: 2070078 - DNA, 25 bp, Homo sapien
tgatgtcagctactcaatttacaca

SEQ ID NO: 2070079 - DNA, 25 bp, Homo sapien
aattcagagtttgacactgaaaccc

SEQ ID NO: 2070080 - DNA, 25 bp, Homo sapien
caaacagacgtcctgacaatgttgt

SEQ ID NO: 2070081 - DNA, 25 bp, Homo sapien
caattgtgtaatgtaaatatgctca

SEQ ID NO: 2070082 - DNA, 25 bp, Homo sapien
ccggccggcagtgtatatcttctaa

SEQ ID NO: 2070083 - DNA, 25 bp, Homo sapien
ctatcccgcaaaacagctctaaagg

SEQ ID NO: 2070084 - DNA, 25 bp, Homo sapien
gtttgtgttatgtatctatcccgca

SEQ ID NO: 2070085 - DNA, 25 bp, Homo sapien
cagaaagccacatcatagtccaagg

SEQ ID NO: 2070086 - DNA, 25 bp, Homo sapien
tcttcctggaagtatacgtgcagaa

SEQ ID NO: 2070087 - DNA, 25 bp, Homo sapien
tatgagcacaaaaggaacacggggt

SEQ ID NO: 2070088 - DNA, 25 bp, Homo sapien
tacgtgcagaaagccacatcatagt

SEQ ID NO: 2070089 - DNA, 25 bp, Homo sapien
gtgtcctggccccttgttagcagca

SEQ ID NO: 2070090 - DNA, 25 bp, Homo sapien
cttttccggcattttcgtgtcctgg

SEQ ID NO: 2070091 - DNA, 25 bp, Homo sapien
actggccaccaaggcccaagctaga

SEQ ID NO: 2070092 - DNA, 25 bp, Homo sapien
ggcccaagctagactggccaacaga

SEQ ID NO: 2070093 - DNA, 25 bp, Homo sapien
caaagggtatgtgatccatgcccca

SEQ ID NO: 2070094 - DNA, 25 bp, Homo sapien
aagggtatgtgatccatgccccagg

SEQ ID NO: 2070095 - DNA, 25 bp, Homo sapien
gggtatgtgatccatgccccaggcc

SEQ ID NO: 2070096 - DNA, 25 bp, Homo sapien
aaagggtatgtgatccatgccccag

SEQ ID NO: 2070097 - DNA, 25 bp, Homo sapien
caggaaggctggggacctctggggc

SEQ ID NO: 2070098 - DNA, 25 bp, Homo sapien
tcctcaggagcccaggcacttcagc

SEQ ID NO: 2070099 - DNA, 25 bp, Homo sapien
ggagcccaggcacttcagcaggaag

SEQ ID NO: 2070100 - DNA, 25 bp, Homo sapien
ctcaggagcccaggcacttcagcag

SEQ ID NO: 2070101 - DNA, 25 bp, Homo sapien
tggctctcgcttcagccaaccttgc

SEQ ID NO: 2070102 - DNA, 25 bp, Homo sapien
agccaaccttgcgaagccaacctga

SEQ ID NO: 2070103 - DNA, 25 bp, Homo sapien
accttgcgaagccaacctgagattc

SEQ ID NO: 2070104 - DNA, 25 bp, Homo sapien
gcttcagccaaccttgcgaagccaa

SEQ ID NO: 2070105 - DNA, 25 bp, Homo sapien
gacagagatgcacctgtgtcttcag

SEQ ID NO: 2070106 - DNA, 25 bp, Homo sapien
gtgacagagatgcacctgtgtcttc

SEQ ID NO: 2070107 - DNA, 25 bp, Homo sapien
cccaggtgtttgtgacttggtgggt

SEQ ID NO: 2070108 - DNA, 25 bp, Homo sapien
tgtttgtgacttggtgggtagtggg

SEQ ID NO: 2070109 - DNA, 25 bp, Homo sapien
gactcgggcatgcatcaacaggcca

SEQ ID NO: 2070110 - DNA, 25 bp, Homo sapien
cagccagcgcggctgggatgacagc

SEQ ID NO: 2070111 - DNA, 25 bp, Homo sapien
gccagactcgggcatgcatcaacag

SEQ ID NO: 2070112 - DNA, 25 bp, Homo sapien
ggcatgcatcaacaggccaggacaa

SEQ ID NO: 2070113 - DNA, 25 bp, Homo sapien
ggcagagaaatatcaaaaagctcca

SEQ ID NO: 2070114 - DNA, 25 bp, Homo sapien
tgtacatccgtcatgccaccctcca

SEQ ID NO: 2070115 - DNA, 25 bp, Homo sapien
tccccatacacagcccagacagaac

SEQ ID NO: 2070116 - DNA, 25 bp, Homo sapien
ccactctgtacatccgtcatgccac

SEQ ID NO: 2070117 - DNA, 25 bp, Homo sapien
cctccccatacacagcccagacaga

SEQ ID NO: 2070118 - DNA, 25 bp, Homo sapien
tgtgctgcctatggaagaccttcct

SEQ ID NO: 2070119 - DNA, 25 bp, Homo sapien
tgtccagctctttaagggacttgag

SEQ ID NO: 2070120 - DNA, 25 bp, Homo sapien
tggaagaccttcctttgcctgtccc

SEQ ID NO: 2070121 - DNA, 25 bp, Homo sapien
tcttgggatgtgctgcctatggaag

SEQ ID NO: 2070122 - DNA, 25 bp, Homo sapien
gcagcctattttcgactctaagagc

SEQ ID NO: 2070123 - DNA, 25 bp, Homo sapien
tcccagaagcgtccttctggctggg

SEQ ID NO: 2070124 - DNA, 25 bp, Homo sapien
gatgaacttcccagaagcgtccttc

SEQ ID NO: 2070125 - DNA, 25 bp, Homo sapien
taagagctgcaggtgaagatgaact

SEQ ID NO: 2070126 - DNA, 25 bp, Homo sapien
cacagaaaggtgtgccgcagccacc

SEQ ID NO: 2070127 - DNA, 25 bp, Homo sapien
acagaaaggtgtgccgcagccacca

SEQ ID NO: 2070128 - DNA, 25 bp, Homo sapien
gctaggactggctgcagaagttgat

SEQ ID NO: 2070129 - DNA, 25 bp, Homo sapien
tcctaggctctttggctaggactgg

SEQ ID NO: 2070130 - DNA, 25 bp, Homo sapien
tctttggctaggactggctgcagaa

SEQ ID NO: 2070131 - DNA, 25 bp, Homo sapien
gactggctgcagaagttgatttgca

SEQ ID NO: 2070132 - DNA, 25 bp, Homo sapien
gatctcgtccaatggagaagacgct

SEQ ID NO: 2070133 - DNA, 25 bp, Homo sapien
ggtggaaatggcttaggatctcgtc

SEQ ID NO: 2070134 - DNA, 25 bp, Homo sapien
gcttaggatctcgtccaatggagaa

SEQ ID NO: 2070135 - DNA, 25 bp, Homo sapien
ctctttctctaaggctggtggaaat

SEQ ID NO: 2070136 - DNA, 25 bp, Homo sapien
catcaagagcttggaaagtggacgt

SEQ ID NO: 2070137 - DNA, 25 bp, Homo sapien
tgactgtgaacactgtccaagtcag

SEQ ID NO: 2070138 - DNA, 25 bp, Homo sapien
gaaagtggacgttttgtcaggctca

SEQ ID NO: 2070139 - DNA, 25 bp, Homo sapien
ggctgcgaccaacatcttctgactg

SEQ ID NO: 2070140 - DNA, 25 bp, Homo sapien
agatgtactggcactactgagatgc

SEQ ID NO: 2070141 - DNA, 25 bp, Homo sapien
ggatcccctataactgtcttcttca

SEQ ID NO: 2070142 - DNA, 25 bp, Homo sapien
tgtcttggattccagatgtactggc

SEQ ID NO: 2070143 - DNA, 25 bp, Homo sapien
gagatgctgaaagctcgggatcccc

SEQ ID NO: 2070144 - DNA, 25 bp, Homo sapien
aatcagatatgaacaatcagagttt

SEQ ID NO: 2070145 - DNA, 25 bp, Homo sapien
atcagatatgaacaatcagagtttg

SEQ ID NO: 2070146 - DNA, 25 bp, Homo sapien
cagagacattaatcatggatcatgc

SEQ ID NO: 2070147 - DNA, 25 bp, Homo sapien
aaaactctttgtggcagatcgtcca

SEQ ID NO: 2070148 - DNA, 25 bp, Homo sapien
cagagctctggctcaaacaagagaa

SEQ ID NO: 2070149 - DNA, 25 bp, Homo sapien
gatcgtccacgagcagctctttaag

SEQ ID NO: 2070150 - DNA, 25 bp, Homo sapien
tctttcctgatagggctggttggcg

SEQ ID NO: 2070151 - DNA, 25 bp, Homo sapien
ttaaaatagctgtcaggatgtgctg

SEQ ID NO: 2070152 - DNA, 25 bp, Homo sapien
cagatcttctggcatgacatgtttt

SEQ ID NO: 2070153 - DNA, 25 bp, Homo sapien
tatgtcaaatgagtgttaccatatg

SEQ ID NO: 2070154 - DNA, 25 bp, Homo sapien
gatacatggagatacagagggaaac

SEQ ID NO: 2070155 - DNA, 25 bp, Homo sapien
tgttgtgcagaggtattccaaaccc

SEQ ID NO: 2070156 - DNA, 25 bp, Homo sapien
aaatagctcgggtcagcgttgcctg

SEQ ID NO: 2070157 - DNA, 25 bp, Homo sapien
tcggaactgtccttggctgaactgc

SEQ ID NO: 2070158 - DNA, 25 bp, Homo sapien
cagtcataggctttagtgtcaccag

SEQ ID NO: 2070159 - DNA, 25 bp, Homo sapien
tttaaagaagtgaagaaccagcaaa

SEQ ID NO: 2070160 - DNA, 25 bp, Homo sapien
ctatttgaagagcttgcaatttaaa

SEQ ID NO: 2070161 - DNA, 25 bp, Homo sapien
ttaaagaagtgaagaaccagcaaat

SEQ ID NO: 2070162 - DNA, 25 bp, Homo sapien
cttcctcataccttgcctcacccaa

SEQ ID NO: 2070163 - DNA, 25 bp, Homo sapien
ctcataccttgcctcacccaaatgc

SEQ ID NO: 2070164 - DNA, 25 bp, Homo sapien
cataccttgcctcacccaaatgcat

SEQ ID NO: 2070165 - DNA, 25 bp, Homo sapien
tcctcataccttgcctcacccaaat

SEQ ID NO: 2070166 - DNA, 25 bp, Homo sapien
taccaagagtcccaagcatgctcgt

SEQ ID NO: 2070167 - DNA, 25 bp, Homo sapien
tcccaagcatgctcgtatgggcggg

SEQ ID NO: 2070168 - DNA, 25 bp, Homo sapien
caagagtcccaagcatgctcgtatg

SEQ ID NO: 2070169 - DNA, 25 bp, Homo sapien
caagcatgctcgtatgggcgggaca

SEQ ID NO: 2070170 - DNA, 25 bp, Homo sapien
ccttggacgtgccttctagctctgc

SEQ ID NO: 2070171 - DNA, 25 bp, Homo sapien
gcaatttgaccttggacgtgccttc

SEQ ID NO: 2070172 - DNA, 25 bp, Homo sapien
ttccctttccggtctgcaatttgac

SEQ ID NO: 2070173 - DNA, 25 bp, Homo sapien
ccggtctgcaatttgaccttggacg

SEQ ID NO: 2070174 - DNA, 25 bp, Homo sapien
gaggccgaaatgcaacttaggctgt

SEQ ID NO: 2070175 - DNA, 25 bp, Homo sapien
ccgaaatgcaacttaggctgtaggc

SEQ ID NO: 2070176 - DNA, 25 bp, Homo sapien
tgtgtgaggccgaaatgcaacttag

SEQ ID NO: 2070177 - DNA, 25 bp, Homo sapien
tgcaacttaggctgtaggcaagtgc

SEQ ID NO: 2070178 - DNA, 25 bp, Homo sapien
ggttcagctggcggctgcgtccttc

SEQ ID NO: 2070179 - DNA, 25 bp, Homo sapien
gggtgcagacaaacacaagggagct

SEQ ID NO: 2070180 - DNA, 25 bp, Homo sapien
ggagctattattaggcagtttctgt

SEQ ID NO: 2070181 - DNA, 25 bp, Homo sapien
tttctgtcggcggaagcggaattgc

SEQ ID NO: 2070182 - DNA, 25 bp, Homo sapien
cgacccccccttgtgattgacacat

SEQ ID NO: 2070183 - DNA, 25 bp, Homo sapien
aatttggttgattgatttcagtagc

SEQ ID NO: 2070184 - DNA, 25 bp, Homo sapien
tgccaagcaggtccactaggaatgg

SEQ ID NO: 2070185 - DNA, 25 bp, Homo sapien
cttccaggagtacagctcgaggaaa

SEQ ID NO: 2070186 - DNA, 25 bp, Homo sapien
cagtagctgattagaaagcagaagc

SEQ ID NO: 2070187 - DNA, 25 bp, Homo sapien
gatgagctagggcatgttccttcct

SEQ ID NO: 2070188 - DNA, 25 bp, Homo sapien
ggtataacaatgtagcaggcccagg

SEQ ID NO: 2070189 - DNA, 25 bp, Homo sapien
gagcttgtctcaggtgttgatctca

SEQ ID NO: 2070190 - DNA, 25 bp, Homo sapien
caggtgttgatctcatgctgaggta

SEQ ID NO: 2070191 - DNA, 25 bp, Homo sapien
tcccctccggagcaggaatgtgtgg

SEQ ID NO: 2070192 - DNA, 25 bp, Homo sapien
tctaaagacgacctgcggtccatcc

SEQ ID NO: 2070193 - DNA, 25 bp, Homo sapien
cctgtagcaggctctaaagacgacc

SEQ ID NO: 2070194 - DNA, 25 bp, Homo sapien
cccctggtcggcagtgcctgtagca

SEQ ID NO: 2070195 - DNA, 25 bp, Homo sapien
gagaaaaatctagtggaaggagccc

SEQ ID NO: 2070196 - DNA, 25 bp, Homo sapien
ccaagaagtgggacatgatgttaac

SEQ ID NO: 2070197 - DNA, 25 bp, Homo sapien
tgaataggccgcctcatgccaagcg

SEQ ID NO: 2070198 - DNA, 25 bp, Homo sapien
cttactgagtgtttaagcactgggc

SEQ ID NO: 2070199 - DNA, 25 bp, Homo sapien
ggagagcatctaagtccatgcagca

SEQ ID NO: 2070200 - DNA, 25 bp, Homo sapien
gagcatctaagtccatgcagcacac

SEQ ID NO: 2070201 - DNA, 25 bp, Homo sapien
agagcctgggagagcatctaagtcc

SEQ ID NO: 2070202 - DNA, 25 bp, Homo sapien
ctgggagagcatctaagtccatgca

SEQ ID NO: 2070203 - DNA, 25 bp, Homo sapien
agcttggtgtttcgagtggggtgtg

SEQ ID NO: 2070204 - DNA, 25 bp, Homo sapien
tggtgcagtgccttgaggatggact

SEQ ID NO: 2070205 - DNA, 25 bp, Homo sapien
gatgaggccttttggtgcagtgcct

SEQ ID NO: 2070206 - DNA, 25 bp, Homo sapien
cttggtgtttcgagtggggtgtggg

SEQ ID NO: 2070207 - DNA, 25 bp, Homo sapien
gctgttctgccttgggggagcacag

SEQ ID NO: 2070208 - DNA, 25 bp, Homo sapien
catttgataccgaaatgatgagagg

SEQ ID NO: 2070209 - DNA, 25 bp, Homo sapien
cccagctcgtaagtggaagtggaaa

SEQ ID NO: 2070210 - DNA, 25 bp, Homo sapien
tcgtaagtggaagtggaaacaggat

SEQ ID NO: 2070211 - DNA, 25 bp, Homo sapien
aataggcaaggacgggaacacatac

SEQ ID NO: 2070212 - DNA, 25 bp, Homo sapien
gatgatgggcacaagtccggtgaaa

SEQ ID NO: 2070213 - DNA, 25 bp, Homo sapien
cacaagtccggtgaaataggcaagg

SEQ ID NO: 2070214 - DNA, 25 bp, Homo sapien
tcagaaggccaaagatgatgggcac

SEQ ID NO: 2070215 - DNA, 25 bp, Homo sapien
tacacagtggtctaatttcaggtca

SEQ ID NO: 2070216 - DNA, 25 bp, Homo sapien
ggaagaatctgttctgcatctgttt

SEQ ID NO: 2070217 - DNA, 25 bp, Homo sapien
tgcttttgatttagatggctcagaa

SEQ ID NO: 2070218 - DNA, 25 bp, Homo sapien
aggatattactgacttcacttgaag

SEQ ID NO: 2070219 - DNA, 25 bp, Homo sapien
tccttagttggagatgttctttcat

SEQ ID NO: 2070220 - DNA, 25 bp, Homo sapien
cttgtaatctcagtaggttcctggg

SEQ ID NO: 2070221 - DNA, 25 bp, Homo sapien
tgtaatctcagtaggttcctgggca

SEQ ID NO: 2070222 - DNA, 25 bp, Homo sapien
ctatcctgtagtaatctccttagtt

SEQ ID NO: 2070223 - DNA, 25 bp, Homo sapien
taatttggttattgttcgatgcata

SEQ ID NO: 2070224 - DNA, 25 bp, Homo sapien
ttttgacttttgagcaagaaaagga

SEQ ID NO: 2070225 - DNA, 25 bp, Homo sapien
gtcatgtgaattggctggagttgct

SEQ ID NO: 2070226 - DNA, 25 bp, Homo sapien
gcaagtcagcacaattctgtttttg

SEQ ID NO: 2070227 - DNA, 25 bp, Homo sapien
gaggtgaataaaccctccctgggca

SEQ ID NO: 2070228 - DNA, 25 bp, Homo sapien
tgtctttcttgagccatataacaca

SEQ ID NO: 2070229 - DNA, 25 bp, Homo sapien
taaagagggatgcttgttccaggtg

SEQ ID NO: 2070230 - DNA, 25 bp, Homo sapien
aaaagctctgaagttagctagatag

SEQ ID NO: 2070231 - DNA, 25 bp, Homo sapien
gatgtgtgtgctcttagatatggtc

SEQ ID NO: 2070232 - DNA, 25 bp, Homo sapien
tcagtttgactgaacagttgctctg

SEQ ID NO: 2070233 - DNA, 25 bp, Homo sapien
caaggttcttctaaatgcattgagg

SEQ ID NO: 2070234 - DNA, 25 bp, Homo sapien
tttaacttggactgagcaaggttct

SEQ ID NO: 2070235 - DNA, 25 bp, Homo sapien
ttaaaatagagtccggacacagcga

SEQ ID NO: 2070236 - DNA, 25 bp, Homo sapien
gagaaatgggttgtctaccacgcag

SEQ ID NO: 2070237 - DNA, 25 bp, Homo sapien
tagtctctggctttcagcgctggag

SEQ ID NO: 2070238 - DNA, 25 bp, Homo sapien
ggatccatgcgttcacagcggcaag

SEQ ID NO: 2070239 - DNA, 25 bp, Homo sapien
tccacggctttgatagcccagagat

SEQ ID NO: 2070240 - DNA, 25 bp, Homo sapien
cacggctttgatagcccagagattc

SEQ ID NO: 2070241 - DNA, 25 bp, Homo sapien
gcttccacggctttgatagcccaga

SEQ ID NO: 2070242 - DNA, 25 bp, Homo sapien
gagcttccacggctttgatagccca

SEQ ID NO: 2070243 - DNA, 25 bp, Homo sapien
tagtattgacccatggccgagatgg

SEQ ID NO: 2070244 - DNA, 25 bp, Homo sapien
gtattgacccatggccgagatggga

SEQ ID NO: 2070245 - DNA, 25 bp, Homo sapien
cttcatagtattgacccatggccga

SEQ ID NO: 2070246 - DNA, 25 bp, Homo sapien
tcatagtattgacccatggccgaga

SEQ ID NO: 2070247 - DNA, 25 bp, Homo sapien
gggcgttgtgaagcccacatcagtg

SEQ ID NO: 2070248 - DNA, 25 bp, Homo sapien
agtggccttcgtctcctcttggctt

SEQ ID NO: 2070249 - DNA, 25 bp, Homo sapien
tgggcgttgtgaagcccacatcagt

SEQ ID NO: 2070250 - DNA, 25 bp, Homo sapien
acatcagtggccttcgtctcctctt

SEQ ID NO: 2070251 - DNA, 25 bp, Homo sapien
tgacgatgagtccacctgcaggggt

SEQ ID NO: 2070252 - DNA, 25 bp, Homo sapien
gacgatgagtccacctgcaggggtg

SEQ ID NO: 2070253 - DNA, 25 bp, Homo sapien
caagtgacgatgagtccacctgcag

SEQ ID NO: 2070254 - DNA, 25 bp, Homo sapien
agtgacgatgagtccacctgcaggg

SEQ ID NO: 2070255 - DNA, 25 bp, Homo sapien
gaaaagatggctcacaggtctcacc

SEQ ID NO: 2070256 - DNA, 25 bp, Homo sapien
tggaaaagatggctcacaggtctca

SEQ ID NO: 2070257 - DNA, 25 bp, Homo sapien
aagatggctcacaggtctcacctcc

SEQ ID NO: 2070258 - DNA, 25 bp, Homo sapien
cctggaaaagatggctcacaggtct

SEQ ID NO: 2070259 - DNA, 25 bp, Homo sapien
ttaataaatgagatgaccacagact

SEQ ID NO: 2070260 - DNA, 25 bp, Homo sapien
tgatactggccaaataggtctcctg

SEQ ID NO: 2070261 - DNA, 25 bp, Homo sapien
gaaagccgcagtctgactaggaagg

SEQ ID NO: 2070262 - DNA, 25 bp, Homo sapien
cctggttgtaggtctcttttctgtg

SEQ ID NO: 2070263 - DNA, 25 bp, Homo sapien
tgttgtgaccatgggagttgctgag

SEQ ID NO: 2070264 - DNA, 25 bp, Homo sapien
gatagaaacccgtttgttctgactg

SEQ ID NO: 2070265 - DNA, 25 bp, Homo sapien
caaaggtagataacaaaagagaatc

SEQ ID NO: 2070266 - DNA, 25 bp, Homo sapien
tgttctgactgttgtgaccatggga

SEQ ID NO: 2070267 - DNA, 25 bp, Homo sapien
actcctctatttcccaaggtcgtga

SEQ ID NO: 2070268 - DNA, 25 bp, Homo sapien
tgtggaataactgcagcaaagggct

SEQ ID NO: 2070269 - DNA, 25 bp, Homo sapien
tttataaccttgagggaggagtgtg

SEQ ID NO: 2070270 - DNA, 25 bp, Homo sapien
ctggggctggcttcactcctctatt

SEQ ID NO: 2070271 - DNA, 25 bp, Homo sapien
gtggcattagtatgtgactcctgtg

SEQ ID NO: 2070272 - DNA, 25 bp, Homo sapien
gttgatatttccagaagcagtttga

SEQ ID NO: 2070273 - DNA, 25 bp, Homo sapien
ctggttcgtggcattagtatgtgac

SEQ ID NO: 2070274 - DNA, 25 bp, Homo sapien
tttcagatcaggaaatctgttatat

SEQ ID NO: 2070275 - DNA, 25 bp, Homo sapien
gggaccttcagatggcaagtaatta

SEQ ID NO: 2070276 - DNA, 25 bp, Homo sapien
tcagggtctgattagtgtgaaggct

SEQ ID NO: 2070277 - DNA, 25 bp, Homo sapien
gctgtctcgacttaatcagggtctg

SEQ ID NO: 2070278 - DNA, 25 bp, Homo sapien
tggcatttgtcactggcatgggacc

SEQ ID NO: 2070279 - DNA, 25 bp, Homo sapien
gcactgccgaccactcaagtttggt

SEQ ID NO: 2070280 - DNA, 25 bp, Homo sapien
ggttcataagaatgtcagacagtcg

SEQ ID NO: 2070281 - DNA, 25 bp, Homo sapien
agtcgcactgccgaccactcaagtt

SEQ ID NO: 2070282 - DNA, 25 bp, Homo sapien
cttcccagggttcataagaatgtca

SEQ ID NO: 2070283 - DNA, 25 bp, Homo sapien
cttagccaaaaggccgataaatgat

SEQ ID NO: 2070284 - DNA, 25 bp, Homo sapien
catcatttatttatactgataagaa

SEQ ID NO: 2070285 - DNA, 25 bp, Homo sapien
tcatttatttatactgataagaaca

SEQ ID NO: 2070286 - DNA, 25 bp, Homo sapien
atttatttatactgataagaacaga

SEQ ID NO: 2070287 - DNA, 25 bp, Homo sapien
tacagccggagggaccttaggaatc

SEQ ID NO: 2070288 - DNA, 25 bp, Homo sapien
tgaagcataggctcttacagccgga

SEQ ID NO: 2070289 - DNA, 25 bp, Homo sapien
tgtattctcgtgagcagcctctgct

SEQ ID NO: 2070290 - DNA, 25 bp, Homo sapien
tacttccgagtcaccttcaagagtg

SEQ ID NO: 2070291 - DNA, 25 bp, Homo sapien
gacgggcgtgtcagtgtcacattaa

SEQ ID NO: 2070292 - DNA, 25 bp, Homo sapien
cacacaagttgcagtctaggttcag

SEQ ID NO: 2070293 - DNA, 25 bp, Homo sapien
tctggagtccctgattgaagcagtt

SEQ ID NO: 2070294 - DNA, 25 bp, Homo sapien
caactataaaatcaggaggacgggc

SEQ ID NO: 2070295 - DNA, 25 bp, Homo sapien
atgagggacagagcctcttcctgca

SEQ ID NO: 2070296 - DNA, 25 bp, Homo sapien
gcttgaatttagcagttgcctggga

SEQ ID NO: 2070297 - DNA, 25 bp, Homo sapien
tagcagttgcctgggatgtatctgg

SEQ ID NO: 2070298 - DNA, 25 bp, Homo sapien
ttagagtggcttgaatttagcagtt

SEQ ID NO: 2070299 - DNA, 25 bp, Homo sapien
attactatagatttgcaccttctac

SEQ ID NO: 2070300 - DNA, 25 bp, Homo sapien
ttttattactatagatttgcacctt

SEQ ID NO: 2070301 - DNA, 25 bp, Homo sapien
cacgttttattactatagatttgca

SEQ ID NO: 2070302 - DNA, 25 bp, Homo sapien
cgttttattactatagatttgcacc

SEQ ID NO: 2070303 - DNA, 25 bp, Homo sapien
tttggccagaattgccggccgaaag

SEQ ID NO: 2070304 - DNA, 25 bp, Homo sapien
cttgccgcatggcagttgcaagcct

SEQ ID NO: 2070305 - DNA, 25 bp, Homo sapien
aagggagtggttcagtgcaggctca

SEQ ID NO: 2070306 - DNA, 25 bp, Homo sapien
cagttgcaagcctttggccagaatt

SEQ ID NO: 2070307 - DNA, 25 bp, Homo sapien
gaaggtagaggctcccttgacactg

SEQ ID NO: 2070308 - DNA, 25 bp, Homo sapien
aggaagatatttcctcccctggctt

SEQ ID NO: 2070309 - DNA, 25 bp, Homo sapien
tggcttttcctgtttatctctaagg

SEQ ID NO: 2070310 - DNA, 25 bp, Homo sapien
cagggctgctgttattttggagacc

SEQ ID NO: 2070311 - DNA, 25 bp, Homo sapien
tccttttggcttggagattgggttc

SEQ ID NO: 2070312 - DNA, 25 bp, Homo sapien
gcttggagattgggttctgctgtct

SEQ ID NO: 2070313 - DNA, 25 bp, Homo sapien
ccttttggcttggagattgggttct

SEQ ID NO: 2070314 - DNA, 25 bp, Homo sapien
ggagattgggttctgctgtctcatc

SEQ ID NO: 2070315 - DNA, 25 bp, Homo sapien
ttgtacagtgtcatcagcagaccag

SEQ ID NO: 2070316 - DNA, 25 bp, Homo sapien
ctcggtaatctaggcacgtgacagt

SEQ ID NO: 2070317 - DNA, 25 bp, Homo sapien
gaccagacagtcttataaccagaaa

SEQ ID NO: 2070318 - DNA, 25 bp, Homo sapien
taagcatagtggtaagcacacgttg

SEQ ID NO: 2070319 - DNA, 25 bp, Homo sapien
tccccggatgacgccttggctctgg

SEQ ID NO: 2070320 - DNA, 25 bp, Homo sapien
tcctgtgtctgaatccctgtctccc

SEQ ID NO: 2070321 - DNA, 25 bp, Homo sapien
ctgtccccggatgacgccttggctc

SEQ ID NO: 2070322 - DNA, 25 bp, Homo sapien
cctgtgtctgaatccctgtctccct

SEQ ID NO: 2070323 - DNA, 25 bp, Homo sapien
ttaccaaacgtttgatgctggagaa

SEQ ID NO: 2070324 - DNA, 25 bp, Homo sapien
tttaccaaacgtttgatgctggaga

SEQ ID NO: 2070325 - DNA, 25 bp, Homo sapien
cccagccgtggataaaaactgaagc

SEQ ID NO: 2070326 - DNA, 25 bp, Homo sapien
caggccatgccgaagggtgtttaaa

SEQ ID NO: 2070327 - DNA, 25 bp, Homo sapien
taacgaaagggctggactactataa

SEQ ID NO: 2070328 - DNA, 25 bp, Homo sapien
taagagcacaaggagggaaagtaac

SEQ ID NO: 2070329 - DNA, 25 bp, Homo sapien
tcaatgttcggttcctcaaaaggtc

SEQ ID NO: 2070330 - DNA, 25 bp, Homo sapien
cagcgacaagctacagggtgttgca

SEQ ID NO: 2070331 - DNA, 25 bp, Homo sapien
caatccgagggtgtgaatttcagct

SEQ ID NO: 2070332 - DNA, 25 bp, Homo sapien
tgaaccttgcaataagcctgtgtgg

SEQ ID NO: 2070333 - DNA, 25 bp, Homo sapien
ccaaacacctatgggatgcagcaga

SEQ ID NO: 2070334 - DNA, 25 bp, Homo sapien
caattaaggtcccagcagaatgcag

SEQ ID NO: 2070335 - DNA, 25 bp, Homo sapien
gaaaagtctctcttcatgctactag

SEQ ID NO: 2070336 - DNA, 25 bp, Homo sapien
cacatggtttgagtataaggctgaa

SEQ ID NO: 2070337 - DNA, 25 bp, Homo sapien
tgttttcgaaactcccacatgtgga

SEQ ID NO: 2070338 - DNA, 25 bp, Homo sapien
gggcagttcaacattcccacgctga

SEQ ID NO: 2070339 - DNA, 25 bp, Homo sapien
cgctgataccactctggaagtccag

SEQ ID NO: 2070340 - DNA, 25 bp, Homo sapien
tggtccttcatcagcgtctgacttc

SEQ ID NO: 2070341 - DNA, 25 bp, Homo sapien
ctgcaggcagacactgaatggacca

SEQ ID NO: 2070342 - DNA, 25 bp, Homo sapien
caggcagacactgaatggaccagca

SEQ ID NO: 2070343 - DNA, 25 bp, Homo sapien
cactgaatggaccagcacccatcat

SEQ ID NO: 2070344 - DNA, 25 bp, Homo sapien
acggctgatgccttgtcggaggcag

SEQ ID NO: 2070345 - DNA, 25 bp, Homo sapien
ggtctggtcatcttgattttcagtc

SEQ ID NO: 2070346 - DNA, 25 bp, Homo sapien
cctggccgagcctggttcccctgtc

SEQ ID NO: 2070347 - DNA, 25 bp, Homo sapien
tggccgagcctggttcccctgtcac

SEQ ID NO: 2070348 - DNA, 25 bp, Homo sapien
caggtctggtcatcttgattttcag

SEQ ID NO: 2070349 - DNA, 25 bp, Homo sapien
aattcttgttggataagccgtaaat

SEQ ID NO: 2070350 - DNA, 25 bp, Homo sapien
ttcttgttggataagccgtaaatat

SEQ ID NO: 2070351 - DNA, 25 bp, Homo sapien
tcaattcttgttggataagccgtaa

SEQ ID NO: 2070352 - DNA, 25 bp, Homo sapien
tcttgttggataagccgtaaatatc

SEQ ID NO: 2070353 - DNA, 25 bp, Homo sapien
tctacgtaagtatgcagcggtttgc

SEQ ID NO: 2070354 - DNA, 25 bp, Homo sapien
tttttctacgtaagtatgcagcggt

SEQ ID NO: 2070355 - DNA, 25 bp, Homo sapien
aaggtttttctacgtaagtatgcag

SEQ ID NO: 2070356 - DNA, 25 bp, Homo sapien
tacgtaagtatgcagcggtttgctt

SEQ ID NO: 2070357 - DNA, 25 bp, Homo sapien
tttctcggcgtcttgtttcggtgtc

SEQ ID NO: 2070358 - DNA, 25 bp, Homo sapien
tcacaggcccgttttctcggcgtct

SEQ ID NO: 2070359 - DNA, 25 bp, Homo sapien
caggcccgttttctcggcgtcttgt

SEQ ID NO: 2070360 - DNA, 25 bp, Homo sapien
acaggcccgttttctcggcgtcttg

SEQ ID NO: 2070361 - DNA, 25 bp, Homo sapien
tgggtctcatcctccctccggctgg

SEQ ID NO: 2070362 - DNA, 25 bp, Homo sapien
aggcacagctgttgtgtcttcttcc

SEQ ID NO: 2070363 - DNA, 25 bp, Homo sapien
ggttcatcaccttgctgggtctcat

SEQ ID NO: 2070364 - DNA, 25 bp, Homo sapien
tgagatgagggaaggcacagctgtt

SEQ ID NO: 2070365 - DNA, 25 bp, Homo sapien
gtggcagctagggaatgggggtcag

SEQ ID NO: 2070366 - DNA, 25 bp, Homo sapien
gcgtggcagctagggaatgggggtc

SEQ ID NO: 2070367 - DNA, 25 bp, Homo sapien
ctgcgtggcagctagggaatggggg

SEQ ID NO: 2070368 - DNA, 25 bp, Homo sapien
tggcagctagggaatgggggtcagc

SEQ ID NO: 2070369 - DNA, 25 bp, Homo sapien
gaacctctggccacttacgggagtc

SEQ ID NO: 2070370 - DNA, 25 bp, Homo sapien
gagtctgccactgagcgaggcggag

SEQ ID NO: 2070371 - DNA, 25 bp, Homo sapien
gagcgaggcggagagcaatgaacaa

SEQ ID NO: 2070372 - DNA, 25 bp, Homo sapien
atcgcgggaacacggggaacctctg

SEQ ID NO: 2070373 - DNA, 25 bp, Homo sapien
ctgggttgcagggacatgccacgtc

SEQ ID NO: 2070374 - DNA, 25 bp, Homo sapien
ctgggttgcagggacatgccacgtg

SEQ ID NO: 2070375 - DNA, 25 bp, Homo sapien
gcccacagtcattagaattcaccat

SEQ ID NO: 2070376 - DNA, 25 bp, Homo sapien
ttgcagggacatgccacgtgcttcc

SEQ ID NO: 2070377 - DNA, 25 bp, Homo sapien
cctcagagcccgaccttttaaggct

SEQ ID NO: 2070378 - DNA, 25 bp, Homo sapien
cagagcccgaccttttaaggctgga

SEQ ID NO: 2070379 - DNA, 25 bp, Homo sapien
ttttaaggctggatcacaggattta

SEQ ID NO: 2070380 - DNA, 25 bp, Homo sapien
tcagagcccgaccttttaaggctgg

SEQ ID NO: 2070381 - DNA, 25 bp, Homo sapien
ctcgggaaactgaggaggagcaggt

SEQ ID NO: 2070382 - DNA, 25 bp, Homo sapien
ggtgaatcagctctaggaggctgct

SEQ ID NO: 2070383 - DNA, 25 bp, Homo sapien
tagttgtggccaattcctgagtgaa

SEQ ID NO: 2070384 - DNA, 25 bp, Homo sapien
agagcccgggtcctgtatctctcca

SEQ ID NO: 2070385 - DNA, 25 bp, Homo sapien
tctgcgttctccttccctcaactct

SEQ ID NO: 2070386 - DNA, 25 bp, Homo sapien
tgtctgcgttctccttccctcaact

SEQ ID NO: 2070387 - DNA, 25 bp, Homo sapien
gatgtctgcgttctccttccctcaa

SEQ ID NO: 2070388 - DNA, 25 bp, Homo sapien
tgatgtctgcgttctccttccctca

SEQ ID NO: 2070389 - DNA, 25 bp, Homo sapien
ctggggcctgagcttgggcagcgta

SEQ ID NO: 2070390 - DNA, 25 bp, Homo sapien
ggggcctgagcttgggcagcgtatt

SEQ ID NO: 2070391 - DNA, 25 bp, Homo sapien
ggactggggtcaggggttggcatct

SEQ ID NO: 2070392 - DNA, 25 bp, Homo sapien
caggactggggtcaggggttggcat

SEQ ID NO: 2070393 - DNA, 25 bp, Homo sapien
catgtggggcaccaaactcaggtca

SEQ ID NO: 2070394 - DNA, 25 bp, Homo sapien
gtggggcaccaaactcaggtcaagt

SEQ ID NO: 2070395 - DNA, 25 bp, Homo sapien
aagcatgtggggcaccaaactcagg

SEQ ID NO: 2070396 - DNA, 25 bp, Homo sapien
tgtgcaaagcatgtggggcaccaaa

SEQ ID NO: 2070397 - DNA, 25 bp, Homo sapien
aatggcattcgtgtcttgagtcttc

SEQ ID NO: 2070398 - DNA, 25 bp, Homo sapien
tgaatggcattcgtgtcttgagtct

SEQ ID NO: 2070399 - DNA, 25 bp, Homo sapien
tctgcactgaatggcattcgtgtct

SEQ ID NO: 2070400 - DNA, 25 bp, Homo sapien
cactgaatggcattcgtgtcttgag

SEQ ID NO: 2070401 - DNA, 25 bp, Homo sapien
gactttccaagacggcagcactggg

SEQ ID NO: 2070402 - DNA, 25 bp, Homo sapien
ccattaaggatcgtgctaggaggtg

SEQ ID NO: 2070403 - DNA, 25 bp, Homo sapien
cagcaaacccagcagtgatacagga

SEQ ID NO: 2070404 - DNA, 25 bp, Homo sapien
cagtgatacaggaatccctgggctc

SEQ ID NO: 2070405 - DNA, 25 bp, Homo sapien
ccatcagtgggaatcggagacacca

SEQ ID NO: 2070406 - DNA, 25 bp, Homo sapien
gacactggcgaggacagatcaggat

SEQ ID NO: 2070407 - DNA, 25 bp, Homo sapien
gagaagccacgaggtcagtcctgag

SEQ ID NO: 2070408 - DNA, 25 bp, Homo sapien
ggatgacaggcaccgaagccaaact

SEQ ID NO: 2070409 - DNA, 25 bp, Homo sapien
caggaaaggaacttggttgaagctc

SEQ ID NO: 2070410 - DNA, 25 bp, Homo sapien
ggaacttggttgaagctctgggcca

SEQ ID NO: 2070411 - DNA, 25 bp, Homo sapien
aaaggaacttggttgaagctctggg

SEQ ID NO: 2070412 - DNA, 25 bp, Homo sapien
gaacttggttgaagctctgggccat

SEQ ID NO: 2070413 - DNA, 25 bp, Homo sapien
tttccaagggccaacctgattctgg

SEQ ID NO: 2070414 - DNA, 25 bp, Homo sapien
aaccgtaccaggctatgcagagggc

SEQ ID NO: 2070415 - DNA, 25 bp, Homo sapien
caagcagtgtggtgaactttccaag

SEQ ID NO: 2070416 - DNA, 25 bp, Homo sapien
ccatgcagttggtgtaaccgtacca

SEQ ID NO: 2070417 - DNA, 25 bp, Homo sapien
ccaacaaggggccagtcatcctggc

SEQ ID NO: 2070418 - DNA, 25 bp, Homo sapien
gggagcatagcattggccaacaagg

SEQ ID NO: 2070419 - DNA, 25 bp, Homo sapien
gcagagggaggggagcatagcattg

SEQ ID NO: 2070420 - DNA, 25 bp, Homo sapien
aacaaggggccagtcatcctggcac

SEQ ID NO: 2070421 - DNA, 25 bp, Homo sapien
tgcaaactgatttgggccacttgca

SEQ ID NO: 2070422 - DNA, 25 bp, Homo sapien
cctgcaggtagggcccgcttgtctg

SEQ ID NO: 2070423 - DNA, 25 bp, Homo sapien
tgttttccctgatgcaaactgattt

SEQ ID NO: 2070424 - DNA, 25 bp, Homo sapien
ccgcttgtctgtgatggggtaccca

SEQ ID NO: 2070425 - DNA, 25 bp, Homo sapien
attcccgtaacatgacagagttcat

SEQ ID NO: 2070426 - DNA, 25 bp, Homo sapien
ttcccgtaacatgacagagttcatt

SEQ ID NO: 2070427 - DNA, 25 bp, Homo sapien
tcccgtaacatgacagagttcattt

SEQ ID NO: 2070428 - DNA, 25 bp, Homo sapien
cccgtaacatgacagagttcatttc

SEQ ID NO: 2070429 - DNA, 25 bp, Homo sapien
catgaaagcattctgtatatacacc

SEQ ID NO: 2070430 - DNA, 25 bp, Homo sapien
tttcaatagttttatgacacatgca

SEQ ID NO: 2070431 - DNA, 25 bp, Homo sapien
tcaacctctcgagtaacaggcatgg

SEQ ID NO: 2070432 - DNA, 25 bp, Homo sapien
tatacaccttggtatctttctttca

SEQ ID NO: 2070433 - DNA, 25 bp, Homo sapien
tgtggcttcatgcatcagtgcttgt

SEQ ID NO: 2070434 - DNA, 25 bp, Homo sapien
catcgatgggatgatgggcatcttc

SEQ ID NO: 2070435 - DNA, 25 bp, Homo sapien
catggtgagttagcacgcagctcct

SEQ ID NO: 2070436 - DNA, 25 bp, Homo sapien
gctacttggtgcatccgattctgat

SEQ ID NO: 2070437 - DNA, 25 bp, Homo sapien
tgtgctgaccttcgtcactgggctg

SEQ ID NO: 2070438 - DNA, 25 bp, Homo sapien
agttctatcttttctctggacaccg

SEQ ID NO: 2070439 - DNA, 25 bp, Homo sapien
ccatgtcaggaactgaagcagcacc

SEQ ID NO: 2070440 - DNA, 25 bp, Homo sapien
gaaaccatgtcaggaactgaagcag

SEQ ID NO: 2070441 - DNA, 25 bp, Homo sapien
gatgattggatcactgagtccacac

SEQ ID NO: 2070442 - DNA, 25 bp, Homo sapien
gggccatcctgtgttaaacttggca

SEQ ID NO: 2070443 - DNA, 25 bp, Homo sapien
agggctgtcagcacttagataagta

SEQ ID NO: 2070444 - DNA, 25 bp, Homo sapien
caggaacactcaggtgtgaagggct

SEQ ID NO: 2070445 - DNA, 25 bp, Homo sapien
gcacatgatattgcattggggctgt

SEQ ID NO: 2070446 - DNA, 25 bp, Homo sapien
gtttcttgacttgctcctcttggat

SEQ ID NO: 2070447 - DNA, 25 bp, Homo sapien
gatctttagagaaggctggctggat

SEQ ID NO: 2070448 - DNA, 25 bp, Homo sapien
ttgcttgtctgggattcctgctgtt

SEQ ID NO: 2070449 - DNA, 25 bp, Homo sapien
aaaagctccctgtttcttaagtgtg

SEQ ID NO: 2070450 - DNA, 25 bp, Homo sapien
gaatcagcctaaagcacacattgaa

SEQ ID NO: 2070451 - DNA, 25 bp, Homo sapien
ccatcttggcggagtccaggaaggc

SEQ ID NO: 2070452 - DNA, 25 bp, Homo sapien
ggagatgacaatgaaagaacagcca

SEQ ID NO: 2070453 - DNA, 25 bp, Homo sapien
catcatttccttccgtgattgaagc

SEQ ID NO: 2070454 - DNA, 25 bp, Homo sapien
ccaagggaagaatgccgtggcccat

SEQ ID NO: 2070455 - DNA, 25 bp, Homo sapien
ttccttccgtgattgaagcctgcat

SEQ ID NO: 2070456 - DNA, 25 bp, Homo sapien
ggaagaatgccgtggcccatcattt

SEQ ID NO: 2070457 - DNA, 25 bp, Homo sapien
gcaggacctcaggcacttcaatggg

SEQ ID NO: 2070458 - DNA, 25 bp, Homo sapien
tgcaagtgggtatgaggaccacagc

SEQ ID NO: 2070459 - DNA, 25 bp, Homo sapien
tagccaagaaaggccccaaagagag

SEQ ID NO: 2070460 - DNA, 25 bp, Homo sapien
ggagccaatgactcagagggtgtca

SEQ ID NO: 2070461 - DNA, 25 bp, Homo sapien
cagccacatccgtgctgagggaccg

SEQ ID NO: 2070462 - DNA, 25 bp, Homo sapien
cagcagcatcaagaactgatccaag

SEQ ID NO: 2070463 - DNA, 25 bp, Homo sapien
ccgtatggatgctgagagtgtaccc

SEQ ID NO: 2070464 - DNA, 25 bp, Homo sapien
gagtgtacccttccctgtgaacagg

SEQ ID NO: 2070465 - DNA, 25 bp, Homo sapien
tcagtcacagttccactgaatattc

SEQ ID NO: 2070466 - DNA, 25 bp, Homo sapien
ccaagaacttgcatataaatggata

SEQ ID NO: 2070467 - DNA, 25 bp, Homo sapien
gcagctgtaatatagccctcatttc

SEQ ID NO: 2070468 - DNA, 25 bp, Homo sapien
tgcagtcccagtcattgtatccttg

SEQ ID NO: 2070469 - DNA, 25 bp, Homo sapien
gaaaatgattgcaaggagcataggg

SEQ ID NO: 2070470 - DNA, 25 bp, Homo sapien
cagaaaatgattgcaaggagcatag

SEQ ID NO: 2070471 - DNA, 25 bp, Homo sapien
aatgattgcaaggagcatagggcag

SEQ ID NO: 2070472 - DNA, 25 bp, Homo sapien
aaaatgattgcaaggagcatagggc

SEQ ID NO: 2070473 - DNA, 25 bp, Homo sapien
tactttcctcgctgtggcccttggg

SEQ ID NO: 2070474 - DNA, 25 bp, Homo sapien
ctagcactgccccatgagccttgct

SEQ ID NO: 2070475 - DNA, 25 bp, Homo sapien
ggcagggagagcgtactttcctcgc

SEQ ID NO: 2070476 - DNA, 25 bp, Homo sapien
gccttgcttcatcatggtgctggat

SEQ ID NO: 2070477 - DNA, 25 bp, Homo sapien
tggtggtagcctgtctctgtttcat

SEQ ID NO: 2070478 - DNA, 25 bp, Homo sapien
gtggtggtagcctgtctctgtttca

SEQ ID NO: 2070479 - DNA, 25 bp, Homo sapien
aggtgctccgcagccgtctgtgcca

SEQ ID NO: 2070480 - DNA, 25 bp, Homo sapien
atctccccgcgtccggcttggatat

SEQ ID NO: 2070481 - DNA, 25 bp, Homo sapien
tgaagaagatgaacaagcgccaggt

SEQ ID NO: 2070482 - DNA, 25 bp, Homo sapien
ccggagaccctgctatggtgcgtgc

SEQ ID NO: 2070483 - DNA, 25 bp, Homo sapien
taacttctgagatggctgcactctg

SEQ ID NO: 2070484 - DNA, 25 bp, Homo sapien
gattccagaagccttctctaacttc

SEQ ID NO: 2070485 - DNA, 25 bp, Homo sapien
cattgtggactcaaccagtgttccc

SEQ ID NO: 2070486 - DNA, 25 bp, Homo sapien
aagctgtgcgcaatcattgtggact

SEQ ID NO: 2070487 - DNA, 25 bp, Homo sapien
ctctgggctggtacagatgtgtgtt

SEQ ID NO: 2070488 - DNA, 25 bp, Homo sapien
ctggtacagatgtgtgttatgcata

SEQ ID NO: 2070489 - DNA, 25 bp, Homo sapien
aatagcttttcgtgtcaaatctaca

SEQ ID NO: 2070490 - DNA, 25 bp, Homo sapien
ttttaagtggctacaagctgtttta

SEQ ID NO: 2070491 - DNA, 25 bp, Homo sapien
ttgtatgatggcattcagggtctgg

SEQ ID NO: 2070492 - DNA, 25 bp, Homo sapien
cttgcattgttgtatgatggcattc

SEQ ID NO: 2070493 - DNA, 25 bp, Homo sapien
tcactggatgaagtgttctctttca

SEQ ID NO: 2070494 - DNA, 25 bp, Homo sapien
ttggtgacaactatcataactcccc

SEQ ID NO: 2070495 - DNA, 25 bp, Homo sapien
tgacaagcctgggccgatcagcctg

SEQ ID NO: 2070496 - DNA, 25 bp, Homo sapien
ttccctggtgttcgcacccacaagg

SEQ ID NO: 2070497 - DNA, 25 bp, Homo sapien
tttccctggtgttcgcacccacaag

SEQ ID NO: 2070498 - DNA, 25 bp, Homo sapien
caagcctgggccgatcagcctggag

SEQ ID NO: 2070499 - DNA, 25 bp, Homo sapien
cactgctccacatctgtactgtgtg

SEQ ID NO: 2070500 - DNA, 25 bp, Homo sapien
gccagaggcttcaaacactgggaca

SEQ ID NO: 2070501 - DNA, 25 bp, Homo sapien
tttattcttgaccaggtattcactt

SEQ ID NO: 2070502 - DNA, 25 bp, Homo sapien
caaacactgggacactgctccacat

SEQ ID NO: 2070503 - DNA, 25 bp, Homo sapien
ctcggcattctgctagggctgtggg

SEQ ID NO: 2070504 - DNA, 25 bp, Homo sapien
gttctcggcattctgctagggctgt

SEQ ID NO: 2070505 - DNA, 25 bp, Homo sapien
tctcggcattctgctagggctgtgg

SEQ ID NO: 2070506 - DNA, 25 bp, Homo sapien
ggcattctgctagggctgtggggat

SEQ ID NO: 2070507 - DNA, 25 bp, Homo sapien
cagcagccacggtagatggctgcta

SEQ ID NO: 2070508 - DNA, 25 bp, Homo sapien
cacggtagatggctgctaggacctc

SEQ ID NO: 2070509 - DNA, 25 bp, Homo sapien
tagatggctgctaggacctcgagtg

SEQ ID NO: 2070510 - DNA, 25 bp, Homo sapien
taggacctcgagtggtgcacactcc

SEQ ID NO: 2070511 - DNA, 25 bp, Homo sapien
caagtattgggctaagcagtttacc

SEQ ID NO: 2070512 - DNA, 25 bp, Homo sapien
catgtctgagatcaacaaatccatc

SEQ ID NO: 2070513 - DNA, 25 bp, Homo sapien
tgttccaggagtacctagttcaggt

SEQ ID NO: 2070514 - DNA, 25 bp, Homo sapien
taattacaataacaacggtggctag

SEQ ID NO: 2070515 - DNA, 25 bp, Homo sapien
aattggcatgcgtgggaatcaaacc

SEQ ID NO: 2070516 - DNA, 25 bp, Homo sapien
tagcccatggtcaaaacaactgagc

SEQ ID NO: 2070517 - DNA, 25 bp, Homo sapien
tcatctcagcgcgtaaagggtgcta

SEQ ID NO: 2070518 - DNA, 25 bp, Homo sapien
gccagaggaggtaataatttgccca

SEQ ID NO: 2070519 - DNA, 25 bp, Homo sapien
ctaaagcccccatgccgctgatgat

SEQ ID NO: 2070520 - DNA, 25 bp, Homo sapien
gatgaaggtgtaagccctctcaagg

SEQ ID NO: 2070521 - DNA, 25 bp, Homo sapien
tcctgacctatgtcaactaaagccc

SEQ ID NO: 2070522 - DNA, 25 bp, Homo sapien
aaggacttgatcctgacctatgtca

SEQ ID NO: 2070523 - DNA, 25 bp, Homo sapien
taagaacagctctctcaaatctcct

SEQ ID NO: 2070524 - DNA, 25 bp, Homo sapien
ctctgtgccaaacccggtcaaggtt

SEQ ID NO: 2070525 - DNA, 25 bp, Homo sapien
tccatgagttctgattgcgatgtaa

SEQ ID NO: 2070526 - DNA, 25 bp, Homo sapien
gatcccatgttttggcagccatcac

SEQ ID NO: 2070527 - DNA, 25 bp, Homo sapien
tggtttcttgtagacctgaaccagg

SEQ ID NO: 2070528 - DNA, 25 bp, Homo sapien
gcttgtgccctctcaatgcgttcaa

SEQ ID NO: 2070529 - DNA, 25 bp, Homo sapien
gagatataatattcttccgcttgtg

SEQ ID NO: 2070530 - DNA, 25 bp, Homo sapien
gccagaaggctaacagtcataacaa

SEQ ID NO: 2070531 - DNA, 25 bp, Homo sapien
tccgtgacaatcttggttatttggg

SEQ ID NO: 2070532 - DNA, 25 bp, Homo sapien
tgttcaagtcataactatcttctag

SEQ ID NO: 2070533 - DNA, 25 bp, Homo sapien
ttggggctgcactatatattttcta

SEQ ID NO: 2070534 - DNA, 25 bp, Homo sapien
ttctagtttcactgagattggtgtt

SEQ ID NO: 2070535 - DNA, 25 bp, Homo sapien
ctactattaaagaatgactcctttg

SEQ ID NO: 2070536 - DNA, 25 bp, Homo sapien
gaatgactcctttgggttggtcacc

SEQ ID NO: 2070537 - DNA, 25 bp, Homo sapien
taaaattctactattaaagaatgac

SEQ ID NO: 2070538 - DNA, 25 bp, Homo sapien
aagaatgactcctttgggttggtca

SEQ ID NO: 2070539 - DNA, 25 bp, Homo sapien
agccagggacctggatctcttctat

SEQ ID NO: 2070540 - DNA, 25 bp, Homo sapien
gtggcttcatggcatgggccaagat

SEQ ID NO: 2070541 - DNA, 25 bp, Homo sapien
cctggatctcttctatgctgttgct

SEQ ID NO: 2070542 - DNA, 25 bp, Homo sapien
actgtgtggcttcatggcatgggcc

SEQ ID NO: 2070543 - DNA, 25 bp, Homo sapien
caaccttgggtgttagggactggca

SEQ ID NO: 2070544 - DNA, 25 bp, Homo sapien
taaaaggtgataacacacgggctgc

SEQ ID NO: 2070545 - DNA, 25 bp, Homo sapien
caacggtggatatcgagcacgctca

SEQ ID NO: 2070546 - DNA, 25 bp, Homo sapien
tccatattgcgtcatgccagggtct

SEQ ID NO: 2070547 - DNA, 25 bp, Homo sapien
tctatttttccgcctcccctgcttc

SEQ ID NO: 2070548 - DNA, 25 bp, Homo sapien
ccctgcttccctgttatggttatct

SEQ ID NO: 2070549 - DNA, 25 bp, Homo sapien
ctgttatggttatctgggggtctcc

SEQ ID NO: 2070550 - DNA, 25 bp, Homo sapien
tgcttccctgttatggttatctggg

SEQ ID NO: 2070551 - DNA, 25 bp, Homo sapien
gagcaggcgcgtggccctgaactat

SEQ ID NO: 2070552 - DNA, 25 bp, Homo sapien
cagcgcctgcggtgatgggagcggc

SEQ ID NO: 2070553 - DNA, 25 bp, Homo sapien
cgcgaagtgcgttgaggcggccaga

SEQ ID NO: 2070554 - DNA, 25 bp, Homo sapien
tctccccgtgcatcgggagcaggcg

SEQ ID NO: 2070555 - DNA, 25 bp, Homo sapien
caggcgacagggaaagaggggccga

SEQ ID NO: 2070556 - DNA, 25 bp, Homo sapien
ggcgacagggaaagaggggccgagc

SEQ ID NO: 2070557 - DNA, 25 bp, Homo sapien
aggcgacagggaaagaggggccgag

SEQ ID NO: 2070558 - DNA, 25 bp, Homo sapien
gcgacagggaaagaggggccgagct

SEQ ID NO: 2070559 - DNA, 25 bp, Homo sapien
gatcccaagacgttccccagtgccc

SEQ ID NO: 2070560 - DNA, 25 bp, Homo sapien
cggatcccaagacgttccccagtgc

SEQ ID NO: 2070561 - DNA, 25 bp, Homo sapien
tcggatcccaagacgttccccagtg

SEQ ID NO: 2070562 - DNA, 25 bp, Homo sapien
ggatcccaagacgttccccagtgcc

SEQ ID NO: 2070563 - DNA, 25 bp, Homo sapien
gctttcagacgcagcgccgcgatgc

SEQ ID NO: 2070564 - DNA, 25 bp, Homo sapien
tcgtccagcgggaacttgtccccga

SEQ ID NO: 2070565 - DNA, 25 bp, Homo sapien
acgcagcgccgcgatgctgctgttg

SEQ ID NO: 2070566 - DNA, 25 bp, Homo sapien
cagcgggaacttgtccccgaagccg

SEQ ID NO: 2070567 - DNA, 25 bp, Homo sapien
tgcgccggcggcccgaagcccggca

SEQ ID NO: 2070568 - DNA, 25 bp, Homo sapien
cgccggcggcccgaagcccggcagg

SEQ ID NO: 2070569 - DNA, 25 bp, Homo sapien
ctgcgccggcggcccgaagcccggc

SEQ ID NO: 2070570 - DNA, 25 bp, Homo sapien
gcgccggcggcccgaagcccggcag

SEQ ID NO: 2070571 - DNA, 25 bp, Homo sapien
cttcatggaggacacttccagcttc

SEQ ID NO: 2070572 - DNA, 25 bp, Homo sapien
ggaggggcgagtcctgcagcttcat

SEQ ID NO: 2070573 - DNA, 25 bp, Homo sapien
agccaggactccagcggcagcgcgc

SEQ ID NO: 2070574 - DNA, 25 bp, Homo sapien
agcggcggcccgagccaggactcca

SEQ ID NO: 2070575 - DNA, 25 bp, Homo sapien
tagcccgtcggttctggaaccacac

SEQ ID NO: 2070576 - DNA, 25 bp, Homo sapien
ttagcccgtcggttctggaaccaca

SEQ ID NO: 2070577 - DNA, 25 bp, Homo sapien
agccggttcagctcggcgggctcca

SEQ ID NO: 2070578 - DNA, 25 bp, Homo sapien
gctgcggccgcgtccccaaccctga

SEQ ID NO: 2070579 - DNA, 25 bp, Homo sapien
agagcacaggggccgtcgggcagca

SEQ ID NO: 2070580 - DNA, 25 bp, Homo sapien
gctcggcgggctccactccgtcccc

SEQ ID NO: 2070581 - DNA, 25 bp, Homo sapien
tgtttccaactcctagtgcgtagca

SEQ ID NO: 2070582 - DNA, 25 bp, Homo sapien
gttggcagcccctcctaacagttta

SEQ ID NO: 2070583 - DNA, 25 bp, Homo sapien
tcagctcttttcacggattactggt

SEQ ID NO: 2070584 - DNA, 25 bp, Homo sapien
taactccgcaatcgaatcgtagaac

SEQ ID NO: 2070585 - DNA, 25 bp, Homo sapien
gagtaacgtcgggttcttccaatga

SEQ ID NO: 2070586 - DNA, 25 bp, Homo sapien
cccaagcaccgcagggcaagtgtgt

SEQ ID NO: 2070587 - DNA, 25 bp, Homo sapien
tatctgtacgaagtccttgccaaga

SEQ ID NO: 2070588 - DNA, 25 bp, Homo sapien
gagattgttgcaacctcagaaggga

SEQ ID NO: 2070589 - DNA, 25 bp, Homo sapien
ctgcatatctaaggcctcaagtctc

SEQ ID NO: 2070590 - DNA, 25 bp, Homo sapien
aaacactgatttgggtgagggctcc

SEQ ID NO: 2070591 - DNA, 25 bp, Homo sapien
ctcccttaaatattagatacttgcc

SEQ ID NO: 2070592 - DNA, 25 bp, Homo sapien
tagatacttgccaacagtagagaaa

SEQ ID NO: 2070593 - DNA, 25 bp, Homo sapien
tggttaatcccaagtcacattaggg

SEQ ID NO: 2070594 - DNA, 25 bp, Homo sapien
ttgcaatgctctactgctgccctcg

SEQ ID NO: 2070595 - DNA, 25 bp, Homo sapien
gataaaagctccgaacacttgagtg

SEQ ID NO: 2070596 - DNA, 25 bp, Homo sapien
ctgtagggtactggaaggctttgcc

SEQ ID NO: 2070597 - DNA, 25 bp, Homo sapien
agtttcaactgcgaggtgccaggcc

SEQ ID NO: 2070598 - DNA, 25 bp, Homo sapien
ttcgtttccaactcggtattcgcag

SEQ ID NO: 2070599 - DNA, 25 bp, Homo sapien
tgccaggcccttcgcaaggaaacag

SEQ ID NO: 2070600 - DNA, 25 bp, Homo sapien
tcggtattcgcagctagtgacgagg

SEQ ID NO: 2070601 - DNA, 25 bp, Homo sapien
ctaatgagctgtcggcctcttcatc

SEQ ID NO: 2070602 - DNA, 25 bp, Homo sapien
ctggctatgtctaatgagctgtcgg

SEQ ID NO: 2070603 - DNA, 25 bp, Homo sapien
gctatgtctaatgagctgtcggcct

SEQ ID NO: 2070604 - DNA, 25 bp, Homo sapien
tatgtctaatgagctgtcggcctct

SEQ ID NO: 2070605 - DNA, 25 bp, Homo sapien
tgaattccgagaagcattggctgca

SEQ ID NO: 2070606 - DNA, 25 bp, Homo sapien
cttgaagggcgatgcacagggaaca

SEQ ID NO: 2070607 - DNA, 25 bp, Homo sapien
ggaacatcgaagatctgtgcctctc

SEQ ID NO: 2070608 - DNA, 25 bp, Homo sapien
aatgcatggacacccgtgaattccg

SEQ ID NO: 2070609 - DNA, 25 bp, Homo sapien
tacgtggtgaaagtcgtgcggttcc

SEQ ID NO: 2070610 - DNA, 25 bp, Homo sapien
ctctgacagtttcgcttcgccggtg

SEQ ID NO: 2070611 - DNA, 25 bp, Homo sapien
gtagtgggacttctcgaacgcgcgc

SEQ ID NO: 2070612 - DNA, 25 bp, Homo sapien
tggtaggttgaccttgccggccagc

SEQ ID NO: 2070613 - DNA, 25 bp, Homo sapien
gctccttggggcagtagggtcgagg

SEQ ID NO: 2070614 - DNA, 25 bp, Homo sapien
ctccttggggcagtagggtcgaggg

SEQ ID NO: 2070615 - DNA, 25 bp, Homo sapien
ggctccttggggcagtagggtcgag

SEQ ID NO: 2070616 - DNA, 25 bp, Homo sapien
tctctgaatgcaaattggaagctcc

SEQ ID NO: 2070617 - DNA, 25 bp, Homo sapien
aaattggaagctcccgccatagacg

SEQ ID NO: 2070618 - DNA, 25 bp, Homo sapien
gagggtcagatgcactccccaaaac

SEQ ID NO: 2070619 - DNA, 25 bp, Homo sapien
ggcggcgatgggtcctaagctttct

SEQ ID NO: 2070620 - DNA, 25 bp, Homo sapien
agaagctcccgtcggccatggctgg

SEQ ID NO: 2070621 - DNA, 25 bp, Homo sapien
gccgaggatcccgtcgtccttggta

SEQ ID NO: 2070622 - DNA, 25 bp, Homo sapien
gatggcctcgatgctgtgaagtcgc

SEQ ID NO: 2070623 - DNA, 25 bp, Homo sapien
ctgtgaagtcgcgaggtgctcccgc

SEQ ID NO: 2070624 - DNA, 25 bp, Homo sapien
ctaggtcaagctccgcgggcgaagc

SEQ ID NO: 2070625 - DNA, 25 bp, Homo sapien
ctttggagacggagaggagaggctc

SEQ ID NO: 2070626 - DNA, 25 bp, Homo sapien
gtcttcccgagtgcggcggtgcaac

SEQ ID NO: 2070627 - DNA, 25 bp, Homo sapien
gagaggctcgaagccgggtcttccc

SEQ ID NO: 2070628 - DNA, 25 bp, Homo sapien
tgccccctggaagcgccgagaccca

SEQ ID NO: 2070629 - DNA, 25 bp, Homo sapien
cctgtgccccctggaagcgccgaga

SEQ ID NO: 2070630 - DNA, 25 bp, Homo sapien
tgtgccccctggaagcgccgagacc

SEQ ID NO: 2070631 - DNA, 25 bp, Homo sapien
ggcctgtgccccctggaagcgccga

SEQ ID NO: 2070632 - DNA, 25 bp, Homo sapien
tcccagtcccctcggacttgagcgc

SEQ ID NO: 2070633 - DNA, 25 bp, Homo sapien
tcttggctgggttgtacgaagtccc

SEQ ID NO: 2070634 - DNA, 25 bp, Homo sapien
cctcgcgtttagtttgtccgtctat

SEQ ID NO: 2070635 - DNA, 25 bp, Homo sapien
tcgctggctcccttttcgggaccca

SEQ ID NO: 2070636 - DNA, 25 bp, Homo sapien
catttatgtccgcaagtccggtgac

SEQ ID NO: 2070637 - DNA, 25 bp, Homo sapien
agtccggtgacctctagcgcccgat

SEQ ID NO: 2070638 - DNA, 25 bp, Homo sapien
cccagggccatttatgtccgcaagt

SEQ ID NO: 2070639 - DNA, 25 bp, Homo sapien
tatgtccgcaagtccggtgacctct

SEQ ID NO: 2070640 - DNA, 25 bp, Homo sapien
gggctcaggtcccgcaggagaccca

SEQ ID NO: 2070641 - DNA, 25 bp, Homo sapien
ctgccgggctcaggtcccgcaggag

SEQ ID NO: 2070642 - DNA, 25 bp, Homo sapien
tgccgggctcaggtcccgcaggaga

SEQ ID NO: 2070643 - DNA, 25 bp, Homo sapien
ccgggctcaggtcccgcaggagacc

SEQ ID NO: 2070644 - DNA, 25 bp, Homo sapien
gactgatcggccacttggaaagatg

SEQ ID NO: 2070645 - DNA, 25 bp, Homo sapien
ggacaatggcgctgtgaacgtctca

SEQ ID NO: 2070646 - DNA, 25 bp, Homo sapien
tccagcagcgcggatggacaatggc

SEQ ID NO: 2070647 - DNA, 25 bp, Homo sapien
tactgatgagcagcggtgtcgcact

SEQ ID NO: 2070648 - DNA, 25 bp, Homo sapien
aaatctccttttcagtaggcgctct

SEQ ID NO: 2070649 - DNA, 25 bp, Homo sapien
gggtgtcttctttatcccgcttgcg

SEQ ID NO: 2070650 - DNA, 25 bp, Homo sapien
gttcagacaagcgtttgctgcgtcc

SEQ ID NO: 2070651 - DNA, 25 bp, Homo sapien
gtaggcgctctgatctccacagcag

SEQ ID NO: 2070652 - DNA, 25 bp, Homo sapien
ttggcctggtggagtttaacgtcca

SEQ ID NO: 2070653 - DNA, 25 bp, Homo sapien
catcaaacaaattgggaaaggccag

SEQ ID NO: 2070654 - DNA, 25 bp, Homo sapien
tcgagggccacgtcgtgggcatcaa

SEQ ID NO: 2070655 - DNA, 25 bp, Homo sapien
cgtcgtgggcatcaaacaaattggg

SEQ ID NO: 2070656 - DNA, 25 bp, Homo sapien
gcctcctcctccgcccctcctccac

SEQ ID NO: 2070657 - DNA, 25 bp, Homo sapien
tgcctcctcctccgcccctcctcca

SEQ ID NO: 2070658 - DNA, 25 bp, Homo sapien
tttgcctcctcctccgcccctcctc

SEQ ID NO: 2070659 - DNA, 25 bp, Homo sapien
ttgcctcctcctccgcccctcctcc

SEQ ID NO: 2070660 - DNA, 25 bp, Homo sapien
ccacaaatggcctggtggcacccga

SEQ ID NO: 2070661 - DNA, 25 bp, Homo sapien
gcacccgaaaaggtctgactgccag

SEQ ID NO: 2070662 - DNA, 25 bp, Homo sapien
ctggtggcacccgaaaaggtctgac

SEQ ID NO: 2070663 - DNA, 25 bp, Homo sapien
aaatggcctggtggcacccgaaaag

SEQ ID NO: 2070664 - DNA, 25 bp, Homo sapien
ccaagaactcgattagggaagatga

SEQ ID NO: 2070665 - DNA, 25 bp, Homo sapien
gcagttaggctagctcataatcagc

SEQ ID NO: 2070666 - DNA, 25 bp, Homo sapien
gagctagtcagtaccattgtgggca

SEQ ID NO: 2070667 - DNA, 25 bp, Homo sapien
tggagggtactccaagcaatcagcc

SEQ ID NO: 2070668 - DNA, 25 bp, Homo sapien
cattaaacttcggatggttgggaga

SEQ ID NO: 2070669 - DNA, 25 bp, Homo sapien
aacttcggatggttgggagacacac

SEQ ID NO: 2070670 - DNA, 25 bp, Homo sapien
ctaaagccccattaaacttcggatg

SEQ ID NO: 2070671 - DNA, 25 bp, Homo sapien
agccccattaaacttcggatggttg

SEQ ID NO: 2070672 - DNA, 25 bp, Homo sapien
tataaagcgactccttgatcgtggc

SEQ ID NO: 2070673 - DNA, 25 bp, Homo sapien
tgaggaagttgtagtataaagcgac

SEQ ID NO: 2070674 - DNA, 25 bp, Homo sapien
ccttgatcgtggctgtatggagaag

SEQ ID NO: 2070675 - DNA, 25 bp, Homo sapien
gctgtatggagaaggtccaatttct

SEQ ID NO: 2070676 - DNA, 25 bp, Homo sapien
cacgggggagacatgcatatccctg

SEQ ID NO: 2070677 - DNA, 25 bp, Homo sapien
tacaacacgggggagacatgcatat

SEQ ID NO: 2070678 - DNA, 25 bp, Homo sapien
aacacgggggagacatgcatatccc

SEQ ID NO: 2070679 - DNA, 25 bp, Homo sapien
gggggagacatgcatatccctgtgc

SEQ ID NO: 2070680 - DNA, 25 bp, Homo sapien
catggccactagaacgatgatctcc

SEQ ID NO: 2070681 - DNA, 25 bp, Homo sapien
aaacatgtactgcttgaaacgtccc

SEQ ID NO: 2070682 - DNA, 25 bp, Homo sapien
tgtacaacacatttgagaaccctgg

SEQ ID NO: 2070683 - DNA, 25 bp, Homo sapien
taaggttcccgctgcaaggtgttag

SEQ ID NO: 2070684 - DNA, 25 bp, Homo sapien
taccattttccggagatcttcaggt

SEQ ID NO: 2070685 - DNA, 25 bp, Homo sapien
tcttttatggtatccaagtccatgt

SEQ ID NO: 2070686 - DNA, 25 bp, Homo sapien
gagattctgtatctgcccaagaata

SEQ ID NO: 2070687 - DNA, 25 bp, Homo sapien
ggaacacttctgctccgctgtctgc

SEQ ID NO: 2070688 - DNA, 25 bp, Homo sapien
ctggatttgattctcatccatttca

SEQ ID NO: 2070689 - DNA, 25 bp, Homo sapien
tggatttgattctcatccatttcac

SEQ ID NO: 2070690 - DNA, 25 bp, Homo sapien
ggatttgattctcatccatttcact

SEQ ID NO: 2070691 - DNA, 25 bp, Homo sapien
aggcttggtttttctaacaagccag

SEQ ID NO: 2070692 - DNA, 25 bp, Homo sapien
cttggtttttctaacaagccaggct

SEQ ID NO: 2070693 - DNA, 25 bp, Homo sapien
tttctaacaagccaggcttagtcat

SEQ ID NO: 2070694 - DNA, 25 bp, Homo sapien
tggtttttctaacaagccaggctta

SEQ ID NO: 2070695 - DNA, 25 bp, Homo sapien
ctgtcgtttcagaatctctctgcag

SEQ ID NO: 2070696 - DNA, 25 bp, Homo sapien
gattccaattccttcagcccgccct

SEQ ID NO: 2070697 - DNA, 25 bp, Homo sapien
tgctgtcgtttcagaatctctctgc

SEQ ID NO: 2070698 - DNA, 25 bp, Homo sapien
ctctcaaggccgaagattccaattc

SEQ ID NO: 2070699 - DNA, 25 bp, Homo sapien
ggatctggcttggacgggagcggct

SEQ ID NO: 2070700 - DNA, 25 bp, Homo sapien
tggccgcggcgctaggaacaccagg

SEQ ID NO: 2070701 - DNA, 25 bp, Homo sapien
gcgccggcgtcgaggattcggggcc

SEQ ID NO: 2070702 - DNA, 25 bp, Homo sapien
cctcccgcgggtgccagtggccgcg

SEQ ID NO: 2070703 - DNA, 25 bp, Homo sapien
gcctctttttcgccacatgggccat

SEQ ID NO: 2070704 - DNA, 25 bp, Homo sapien
ctgggcagacgttagcctgggaaac

SEQ ID NO: 2070705 - DNA, 25 bp, Homo sapien
cagacgttagcctgggaaacgtgtc

SEQ ID NO: 2070706 - DNA, 25 bp, Homo sapien
gtctgtcccccgcagcctctttttc

SEQ ID NO: 2070707 - DNA, 25 bp, Homo sapien
taaaaagccctacattctggacgat

SEQ ID NO: 2070708 - DNA, 25 bp, Homo sapien
tagatccctacagaagaataacagt

SEQ ID NO: 2070709 - DNA, 25 bp, Homo sapien
tgatattgcatcacagagctacaac

SEQ ID NO: 2070710 - DNA, 25 bp, Homo sapien
gcttcatcccaacaagttgatgatg

SEQ ID NO: 2070711 - DNA, 25 bp, Homo sapien
gcagtagcatgaatccgactcaatc

SEQ ID NO: 2070712 - DNA, 25 bp, Homo sapien
tcagcgcagtagcatgaatccgact

SEQ ID NO: 2070713 - DNA, 25 bp, Homo sapien
gcatgaatccgactcaatcttcctg

SEQ ID NO: 2070714 - DNA, 25 bp, Homo sapien
cttcagcgcagtagcatgaatccga

SEQ ID NO: 2070715 - DNA, 25 bp, Homo sapien
ggacagtgtttagaagtgcttcact

SEQ ID NO: 2070716 - DNA, 25 bp, Homo sapien
ttgggcaccttagggatcaacctct

SEQ ID NO: 2070717 - DNA, 25 bp, Homo sapien
cgagaccacattgctaaagtgagcc

SEQ ID NO: 2070718 - DNA, 25 bp, Homo sapien
tgacatccagggagtttcaggaaat

SEQ ID NO: 2070719 - DNA, 25 bp, Homo sapien
tgcctttttctgtgtaaatgcagca

SEQ ID NO: 2070720 - DNA, 25 bp, Homo sapien
gagatgaactctgaggcatgccctt

SEQ ID NO: 2070721 - DNA, 25 bp, Homo sapien
tttttctgtgtaaatgcagcatctc

SEQ ID NO: 2070722 - DNA, 25 bp, Homo sapien
gaactctgaggcatgccctttctgc

SEQ ID NO: 2070723 - DNA, 25 bp, Homo sapien
tactcctctctagtcatcccttgag

SEQ ID NO: 2070724 - DNA, 25 bp, Homo sapien
ctctctagtcatcccttgagctgct

SEQ ID NO: 2070725 - DNA, 25 bp, Homo sapien
gctgcaggatcagatgcacctcctt

SEQ ID NO: 2070726 - DNA, 25 bp, Homo sapien
tctttacctggttacttatcatact

SEQ ID NO: 2070727 - DNA, 25 bp, Homo sapien
tctctgccccagaaaaataaaacca

SEQ ID NO: 2070728 - DNA, 25 bp, Homo sapien
catactgatagagaagagtggtttg

SEQ ID NO: 2070729 - DNA, 25 bp, Homo sapien
tcaagggcatactgatagagaagag

SEQ ID NO: 2070730 - DNA, 25 bp, Homo sapien
tgcacaacctcatctattcaagggc

SEQ ID NO: 2070731 - DNA, 25 bp, Homo sapien
catttaagagcaaaggactttgcac

SEQ ID NO: 2070732 - DNA, 25 bp, Homo sapien
gggtaaacagttatccatgaccatt

SEQ ID NO: 2070733 - DNA, 25 bp, Homo sapien
atgcagcaggccacctcgggcagag

SEQ ID NO: 2070734 - DNA, 25 bp, Homo sapien
catttctatgttctcgtggcatgct

SEQ ID NO: 2070735 - DNA, 25 bp, Homo sapien
tcgtggcatgcttccatgtactgcc

SEQ ID NO: 2070736 - DNA, 25 bp, Homo sapien
cacaatacaggttgtgtctgaaaaa

SEQ ID NO: 2070737 - DNA, 25 bp, Homo sapien
atggcaacttattatccaagatcaa

SEQ ID NO: 2070738 - DNA, 25 bp, Homo sapien
aacaaatggcaacttattatccaag

SEQ ID NO: 2070739 - DNA, 25 bp, Homo sapien
cacatggacagggaaagataatcac

SEQ ID NO: 2070740 - DNA, 25 bp, Homo sapien
ttccagctagcatcaaataatcagg

SEQ ID NO: 2070741 - DNA, 25 bp, Homo sapien
tgcaatgcagtgaggcaggcaatcc

SEQ ID NO: 2070742 - DNA, 25 bp, Homo sapien
gaaattgacagtggatagaaaaccc

SEQ ID NO: 2070743 - DNA, 25 bp, Homo sapien
cctgaggtgcctattgaacaatgac

SEQ ID NO: 2070744 - DNA, 25 bp, Homo sapien
aaacattggtgtgctcagaatctcc

SEQ ID NO: 2070745 - DNA, 25 bp, Homo sapien
caggttgtctgaaaccaggcgccat

SEQ ID NO: 2070746 - DNA, 25 bp, Homo sapien
taatattgacctgaccccattggaa

SEQ ID NO: 2070747 - DNA, 25 bp, Homo sapien
tgctttaaggtttattcttaactgc

SEQ ID NO: 2070748 - DNA, 25 bp, Homo sapien
gctttaaggtttattcttaactgca

SEQ ID NO: 2070749 - DNA, 25 bp, Homo sapien
taataatttagactatgaagcaatt

SEQ ID NO: 2070750 - DNA, 25 bp, Homo sapien
taatttagactatgaagcaatttaa

SEQ ID NO: 2070751 - DNA, 25 bp, Homo sapien
aattaataatttagactatgaagca

SEQ ID NO: 2070752 - DNA, 25 bp, Homo sapien
ttaataatttagactatgaagcaat

SEQ ID NO: 2070753 - DNA, 25 bp, Homo sapien
agaattttttggcagctgcttcttg

SEQ ID NO: 2070754 - DNA, 25 bp, Homo sapien
ttttttggcagctgcttcttgctga

SEQ ID NO: 2070755 - DNA, 25 bp, Homo sapien
tttggcagctgcttcttgctgagac

SEQ ID NO: 2070756 - DNA, 25 bp, Homo sapien
gaattttttggcagctgcttcttgc

SEQ ID NO: 2070757 - DNA, 25 bp, Homo sapien
taaacatatattctacacgtgcact

SEQ ID NO: 2070758 - DNA, 25 bp, Homo sapien
aagtatacaacgcattaagataaac

SEQ ID NO: 2070759 - DNA, 25 bp, Homo sapien
aatattgggtcacattttatcaaga

SEQ ID NO: 2070760 - DNA, 25 bp, Homo sapien
agaagttctatacgcttaactttgg

SEQ ID NO: 2070761 - DNA, 25 bp, Homo sapien
gtttgcaccacaacaaatataatga

SEQ ID NO: 2070762 - DNA, 25 bp, Homo sapien
gttctgggcatttcggcttttcatt

SEQ ID NO: 2070763 - DNA, 25 bp, Homo sapien
aacatgatggaaatggtggtagttc

SEQ ID NO: 2070764 - DNA, 25 bp, Homo sapien
taatgaagtggaccgtagacaaaca

SEQ ID NO: 2070765 - DNA, 25 bp, Homo sapien
aatgggacaattctaccttaaacat

SEQ ID NO: 2070766 - DNA, 25 bp, Homo sapien
tcctttcctaaagattataattata

SEQ ID NO: 2070767 - DNA, 25 bp, Homo sapien
aatacttgcagtagagtatgagttc

SEQ ID NO: 2070768 - DNA, 25 bp, Homo sapien
tgggacaattctaccttaaacatta

SEQ ID NO: 2070769 - DNA, 25 bp, Homo sapien
tgcactaagttatctatgtccctct

SEQ ID NO: 2070770 - DNA, 25 bp, Homo sapien
ctctttactatgtgcaggtgctctt

SEQ ID NO: 2070771 - DNA, 25 bp, Homo sapien
cagtctgacggtttcactcatggaa

SEQ ID NO: 2070772 - DNA, 25 bp, Homo sapien
gcattccactgaccagtctgacggt

SEQ ID NO: 2070773 - DNA, 25 bp, Homo sapien
taaaggactagtgccaaacgcaatc

SEQ ID NO: 2070774 - DNA, 25 bp, Homo sapien
gacttgtccgctttgtagctgcaca

SEQ ID NO: 2070775 - DNA, 25 bp, Homo sapien
aacgcaatcatttcctataggcaca

SEQ ID NO: 2070776 - DNA, 25 bp, Homo sapien
taggaggctaatggctttgtgaccc

SEQ ID NO: 2070777 - DNA, 25 bp, Homo sapien
tgggaagaggcatcaactgctacag

SEQ ID NO: 2070778 - DNA, 25 bp, Homo sapien
tatttcataagtgctgtgagccagg

SEQ ID NO: 2070779 - DNA, 25 bp, Homo sapien
tctgccctgtggagatgaattgtct

SEQ ID NO: 2070780 - DNA, 25 bp, Homo sapien
gcaggaaagcaacgtgacagaagca

SEQ ID NO: 2070781 - DNA, 25 bp, Homo sapien
ttgtcaagggttctatcggttggga

SEQ ID NO: 2070782 - DNA, 25 bp, Homo sapien
caagggttctatcggttgggacagt

SEQ ID NO: 2070783 - DNA, 25 bp, Homo sapien
gggttctatcggttgggacagtgct

SEQ ID NO: 2070784 - DNA, 25 bp, Homo sapien
tcaagggttctatcggttgggacag

SEQ ID NO: 2070785 - DNA, 25 bp, Homo sapien
cagaatctcatgctgagttttcaca

SEQ ID NO: 2070786 - DNA, 25 bp, Homo sapien
gagttttcacaacagtatccagttc

SEQ ID NO: 2070787 - DNA, 25 bp, Homo sapien
tcatgctgagttttcacaacagtat

SEQ ID NO: 2070788 - DNA, 25 bp, Homo sapien
cagtatccagttcttgttgagtaat

SEQ ID NO: 2070789 - DNA, 25 bp, Homo sapien
tgatttcaagatgaatacgattctg

SEQ ID NO: 2070790 - DNA, 25 bp, Homo sapien
cgattctgtccttcaaagacttgtc

SEQ ID NO: 2070791 - DNA, 25 bp, Homo sapien
tcaagaatcatatctaactgccggt

SEQ ID NO: 2070792 - DNA, 25 bp, Homo sapien
aagacttgtcttagctctcgatctc

SEQ ID NO: 2070793 - DNA, 25 bp, Homo sapien
aattcttgttgaaagtgctcaaatt

SEQ ID NO: 2070794 - DNA, 25 bp, Homo sapien
tccaattcttgttgaaagtgctcaa

SEQ ID NO: 2070795 - DNA, 25 bp, Homo sapien
cttgttgaaagtgctcaaattcctc

SEQ ID NO: 2070796 - DNA, 25 bp, Homo sapien
gctcaaattcctcctgatacttttc

SEQ ID NO: 2070797 - DNA, 25 bp, Homo sapien
aggttcagtcaactggaaagtcaga

SEQ ID NO: 2070798 - DNA, 25 bp, Homo sapien
ggttcagtcaactggaaagtcagaa

SEQ ID NO: 2070799 - DNA, 25 bp, Homo sapien
ttaatatcatcagactgcaagattt

SEQ ID NO: 2070800 - DNA, 25 bp, Homo sapien
taatatcatcagactgcaagattta

SEQ ID NO: 2070801 - DNA, 25 bp, Homo sapien
aatatcatcagactgcaagatttac

SEQ ID NO: 2070802 - DNA, 25 bp, Homo sapien
aaaatgcccttgtgcagggataatc

SEQ ID NO: 2070803 - DNA, 25 bp, Homo sapien
ctggtgtaaagccattattgatcat

SEQ ID NO: 2070804 - DNA, 25 bp, Homo sapien
tcatttttatctggtgtaaagccat

SEQ ID NO: 2070805 - DNA, 25 bp, Homo sapien
agatattccaaaatgcccttgtgca

SEQ ID NO: 2070806 - DNA, 25 bp, Homo sapien
tcaaattacaatactaaaatcctcc

SEQ ID NO: 2070807 - DNA, 25 bp, Homo sapien
aaaagatcatttagcatttggttca

SEQ ID NO: 2070808 - DNA, 25 bp, Homo sapien
ttaaattagaatcaacaatcaggaa

SEQ ID NO: 2070809 - DNA, 25 bp, Homo sapien
taacaaactgaaaatccagcatgag

SEQ ID NO: 2070810 - DNA, 25 bp, Homo sapien
aataagtagcagtcacgtgtccagc

SEQ ID NO: 2070811 - DNA, 25 bp, Homo sapien
gacccaggagtgtaagtctagctca

SEQ ID NO: 2070812 - DNA, 25 bp, Homo sapien
tgttgggtcacacggacagtctgca

SEQ ID NO: 2070813 - DNA, 25 bp, Homo sapien
catcaattgtggaaccctttctggg

SEQ ID NO: 2070814 - DNA, 25 bp, Homo sapien
tgtcagtgtgttctggtaataggta

SEQ ID NO: 2070815 - DNA, 25 bp, Homo sapien
ataggtaatctttgctcggacagga

SEQ ID NO: 2070816 - DNA, 25 bp, Homo sapien
tgccaaagcttgactagccccgtca

SEQ ID NO: 2070817 - DNA, 25 bp, Homo sapien
gtttgttgcggaagtccctctggca

SEQ ID NO: 2070818 - DNA, 25 bp, Homo sapien
tgcctataattactatagcaggatt

SEQ ID NO: 2070819 - DNA, 25 bp, Homo sapien
cctataattactatagcaggattat

SEQ ID NO: 2070820 - DNA, 25 bp, Homo sapien
ggatttgtccattgttgcctataat

SEQ ID NO: 2070821 - DNA, 25 bp, Homo sapien
gttgcctataattactatagcagga

SEQ ID NO: 2070822 - DNA, 25 bp, Homo sapien
cagatcagctgatccaaacacaggg

SEQ ID NO: 2070823 - DNA, 25 bp, Homo sapien
acaccattccacagatcagctgatc

SEQ ID NO: 2070824 - DNA, 25 bp, Homo sapien
ttccacagatcagctgatccaaaca

SEQ ID NO: 2070825 - DNA, 25 bp, Homo sapien
tcagctgatccaaacacagggccct

SEQ ID NO: 2070826 - DNA, 25 bp, Homo sapien
ttaaagatggtgctactcgaatttg

SEQ ID NO: 2070827 - DNA, 25 bp, Homo sapien
ccagtcactcgaaatgtcacctcaa

SEQ ID NO: 2070828 - DNA, 25 bp, Homo sapien
gaatttgatctgaacttggaatagc

SEQ ID NO: 2070829 - DNA, 25 bp, Homo sapien
tcagctccaattcgacctcttccag

SEQ ID NO: 2070830 - DNA, 25 bp, Homo sapien
gaagctgtatttgtactcgaaacgg

SEQ ID NO: 2070831 - DNA, 25 bp, Homo sapien
cggacgaagcgaccgagtgacagca

SEQ ID NO: 2070832 - DNA, 25 bp, Homo sapien
tcgaaacggcgatgtggcaacgcga

SEQ ID NO: 2070833 - DNA, 25 bp, Homo sapien
caggtgcggccccttgaagctgtat

SEQ ID NO: 2070834 - DNA, 25 bp, Homo sapien
ctggaacgcggaggagggcgggaga

SEQ ID NO: 2070835 - DNA, 25 bp, Homo sapien
ggcgggagagggaggggcgcggatg

SEQ ID NO: 2070836 - DNA, 25 bp, Homo sapien
cgcggaggagggcgggagagggagg

SEQ ID NO: 2070837 - DNA, 25 bp, Homo sapien
gcgggagagggaggggcgcggatgg

SEQ ID NO: 2070838 - DNA, 25 bp, Homo sapien
tctggggcggtgcggtccttcggcc

SEQ ID NO: 2070839 - DNA, 25 bp, Homo sapien
gtctggggcggtgcggtccttcggc

SEQ ID NO: 2070840 - DNA, 25 bp, Homo sapien
cgcgcggcagagtgcgggaagcgcc

SEQ ID NO: 2070841 - DNA, 25 bp, Homo sapien
gcgggaagcgccgatgggtccttac

SEQ ID NO: 2070842 - DNA, 25 bp, Homo sapien
cttcccgcgcggcagagtgcgggaa

SEQ ID NO: 2070843 - DNA, 25 bp, Homo sapien
agagtgcgggaagcgccgatgggtc

SEQ ID NO: 2070844 - DNA, 25 bp, Homo sapien
agctttctccggcttcttagaatac

SEQ ID NO: 2070845 - DNA, 25 bp, Homo sapien
ttagagcgttgcaaactagaaacca

SEQ ID NO: 2070846 - DNA, 25 bp, Homo sapien
aattggctagccctaagacctctgg

SEQ ID NO: 2070847 - DNA, 25 bp, Homo sapien
gatttataagttggtgtcggaaaga

SEQ ID NO: 2070848 - DNA, 25 bp, Homo sapien
tagtatattagaagaaaggtgttcc

SEQ ID NO: 2070849 - DNA, 25 bp, Homo sapien
gtgcctgaggcaatttccaaaaatt

SEQ ID NO: 2070850 - DNA, 25 bp, Homo sapien
tacaacacaatgaggagggatttcc

SEQ ID NO: 2070851 - DNA, 25 bp, Homo sapien
taagtgatgttttaccttcagggca

SEQ ID NO: 2070852 - DNA, 25 bp, Homo sapien
gggatttcctactaccctctagtgc

SEQ ID NO: 2070853 - DNA, 25 bp, Homo sapien
tctagcacatagcacagaatggtgt

SEQ ID NO: 2070854 - DNA, 25 bp, Homo sapien
tgccagaagattgacaggcctgtcc

SEQ ID NO: 2070855 - DNA, 25 bp, Homo sapien
caatatccatgactcattgccagcc

SEQ ID NO: 2070856 - DNA, 25 bp, Homo sapien
tctgtgctagcaaaaagtatcccaa

SEQ ID NO: 2070857 - DNA, 25 bp, Homo sapien
ccaaaaagcagattgggagatatct

SEQ ID NO: 2070858 - DNA, 25 bp, Homo sapien
gagccctgtggattaatgggttgtt

SEQ ID NO: 2070859 - DNA, 25 bp, Homo sapien
tgacccagatacactcccctcatca

SEQ ID NO: 2070860 - DNA, 25 bp, Homo sapien
tttctggtcttcctactcacaggga

SEQ ID NO: 2070861 - DNA, 25 bp, Homo sapien
gaaggggcctcagcggccggcggcg

SEQ ID NO: 2070862 - DNA, 25 bp, Homo sapien
cgccgccggccgctgaggccccttc

SEQ ID NO: 2070863 - DNA, 25 bp, Homo sapien
gtctccaaggcaacccccgatggag

SEQ ID NO: 2070864 - DNA, 25 bp, Homo sapien
tgaactgggaaaggtaactggctcc

SEQ ID NO: 2070865 - DNA, 25 bp, Homo sapien
gctcccaaacctgttagagccaggg

SEQ ID NO: 2070866 - DNA, 25 bp, Homo sapien
gctgttaatgcgaaggccagtcggt

SEQ ID NO: 2070867 - DNA, 25 bp, Homo sapien
cggaatgatttatcgccaaggccaa

SEQ ID NO: 2070868 - DNA, 25 bp, Homo sapien
caaggccaatgtatggctgcccata

SEQ ID NO: 2070869 - DNA, 25 bp, Homo sapien
tggatatcgagcaacaagaaagagg

SEQ ID NO: 2070870 - DNA, 25 bp, Homo sapien
gcagctggacattcatctggtacag

SEQ ID NO: 2070871 - DNA, 25 bp, Homo sapien
ctgtttcaatggtctggaagtcttt

SEQ ID NO: 2070872 - DNA, 25 bp, Homo sapien
caatggtctggaagtctttgggaag

SEQ ID NO: 2070873 - DNA, 25 bp, Homo sapien
gttccatgtctataattctgacaat

SEQ ID NO: 2070874 - DNA, 25 bp, Homo sapien
aatatagtattctctgggtgacatt

SEQ ID NO: 2070875 - DNA, 25 bp, Homo sapien
attgtgcttccaactctggggttta

SEQ ID NO: 2070876 - DNA, 25 bp, Homo sapien
cattctcaaattgtgcttccaactc

SEQ ID NO: 2070877 - DNA, 25 bp, Homo sapien
tgcttccaactctggggtttacacc

SEQ ID NO: 2070878 - DNA, 25 bp, Homo sapien
ctgcattctcaaattgtgcttccaa

SEQ ID NO: 2070879 - DNA, 25 bp, Homo sapien
ggaccgtattcgtctactcggtgct

SEQ ID NO: 2070880 - DNA, 25 bp, Homo sapien
aataggaccgtattcgtctactcgg

SEQ ID NO: 2070881 - DNA, 25 bp, Homo sapien
gtattcgtctactcggtgcttctcc

SEQ ID NO: 2070882 - DNA, 25 bp, Homo sapien
taaataggaccgtattcgtctactc

SEQ ID NO: 2070883 - DNA, 25 bp, Homo sapien
tctttcccccagttcatatcccttg

SEQ ID NO: 2070884 - DNA, 25 bp, Homo sapien
cccagttcatatcccttgaagacat

SEQ ID NO: 2070885 - DNA, 25 bp, Homo sapien
tcccccagttcatatcccttgaaga

SEQ ID NO: 2070886 - DNA, 25 bp, Homo sapien
ctgttggtaagtcaattctgttttc

SEQ ID NO: 2070887 - DNA, 25 bp, Homo sapien
gcggtgaggaccatccagcaggtct

SEQ ID NO: 2070888 - DNA, 25 bp, Homo sapien
gagagggctgatgtgcggattcggc

SEQ ID NO: 2070889 - DNA, 25 bp, Homo sapien
gatgtgcggattcggctaggagagc

SEQ ID NO: 2070890 - DNA, 25 bp, Homo sapien
tcaaatgacacggcggtgaggacca

SEQ ID NO: 2070891 - DNA, 25 bp, Homo sapien
ggtttaattgtcaagcatcccctct

SEQ ID NO: 2070892 - DNA, 25 bp, Homo sapien
tgggcattcacgtgccccagtgcca

SEQ ID NO: 2070893 - DNA, 25 bp, Homo sapien
gaaatccacatttccgacttaacca

SEQ ID NO: 2070894 - DNA, 25 bp, Homo sapien
tataatgccttgctttatgggtggt

SEQ ID NO: 2070895 - DNA, 25 bp, Homo sapien
ttgaaaagcctcagcgagtggtgat

SEQ ID NO: 2070896 - DNA, 25 bp, Homo sapien
agtgagacatggcaacagcgtgtgc

SEQ ID NO: 2070897 - DNA, 25 bp, Homo sapien
ggataatcatttggcatccagggcc

SEQ ID NO: 2070898 - DNA, 25 bp, Homo sapien
tgattgggcaaaacgctggctgtaa

SEQ ID NO: 2070899 - DNA, 25 bp, Homo sapien
gctgggctatgtgtcagagagatga

SEQ ID NO: 2070900 - DNA, 25 bp, Homo sapien
tttactgttggaggaaggttctata

SEQ ID NO: 2070901 - DNA, 25 bp, Homo sapien
ctgttggaggaaggttctataggaa

SEQ ID NO: 2070902 - DNA, 25 bp, Homo sapien
cagagagatgagtggtttactgttg

SEQ ID NO: 2070903 - DNA, 25 bp, Homo sapien
tgatccaccctgggatcacttgagg

SEQ ID NO: 2070904 - DNA, 25 bp, Homo sapien
atgatccaccctgggatcacttgag

SEQ ID NO: 2070905 - DNA, 25 bp, Homo sapien
aatgatccaccctgggatcacttga

SEQ ID NO: 2070906 - DNA, 25 bp, Homo sapien
aaatgatccaccctgggatcacttg

SEQ ID NO: 2070907 - DNA, 25 bp, Homo sapien
cagtccttttctgtaacagaatgca

SEQ ID NO: 2070908 - DNA, 25 bp, Homo sapien
cttcatttttcctcagtccttttct

SEQ ID NO: 2070909 - DNA, 25 bp, Homo sapien
gcatggcctgacagctctcaactct

SEQ ID NO: 2070910 - DNA, 25 bp, Homo sapien
tgtaacagaatgcattgaattccat

SEQ ID NO: 2070911 - DNA, 25 bp, Homo sapien
catctgcttcttcaaagcccctcaa

SEQ ID NO: 2070912 - DNA, 25 bp, Homo sapien
gcatctgcttcttcaaagcccctca

SEQ ID NO: 2070913 - DNA, 25 bp, Homo sapien
ttgcatctgcttcttcaaagcccct

SEQ ID NO: 2070914 - DNA, 25 bp, Homo sapien
gtttgcatctgcttcttcaaagccc

SEQ ID NO: 2070915 - DNA, 25 bp, Homo sapien
gcttaactgcctctgctaattcaag

SEQ ID NO: 2070916 - DNA, 25 bp, Homo sapien
gatttaagaccaagacctgttcatt

SEQ ID NO: 2070917 - DNA, 25 bp, Homo sapien
aggtctggttctgacactcctctac

SEQ ID NO: 2070918 - DNA, 25 bp, Homo sapien
cattattagaacctgagccttgaac

SEQ ID NO: 2070919 - DNA, 25 bp, Homo sapien
aacggtccctggcattgggtccctg

SEQ ID NO: 2070920 - DNA, 25 bp, Homo sapien
acacatcagggagtagatggttgcc

SEQ ID NO: 2070921 - DNA, 25 bp, Homo sapien
gtggctgtgcacacatcagagtaag

SEQ ID NO: 2070922 - DNA, 25 bp, Homo sapien
tcagagtaaggaacggtccctggca

SEQ ID NO: 2070923 - DNA, 25 bp, Homo sapien
gtatgtcccgtcttttcagggcaca

SEQ ID NO: 2070924 - DNA, 25 bp, Homo sapien
tgtgaaagaggctactcccaccagg

SEQ ID NO: 2070925 - DNA, 25 bp, Homo sapien
tatccacaatcccttgaagccctgt

SEQ ID NO: 2070926 - DNA, 25 bp, Homo sapien
tatctctatgaataagtatgtcccg

SEQ ID NO: 2070927 - DNA, 25 bp, Homo sapien
tctgtaaggctgtctacatctccct

SEQ ID NO: 2070928 - DNA, 25 bp, Homo sapien
tagggatgggtacctctcccctagc

SEQ ID NO: 2070929 - DNA, 25 bp, Homo sapien
agtagggacagacttgtcatcaaga

SEQ ID NO: 2070930 - DNA, 25 bp, Homo sapien
tcccctagccacactctaagtaggg

SEQ ID NO: 2070931 - DNA, 25 bp, Homo sapien
gggtcaacgtgctgcatggacgtca

SEQ ID NO: 2070932 - DNA, 25 bp, Homo sapien
ggtcaacgtgctgcatggacgtcat

SEQ ID NO: 2070933 - DNA, 25 bp, Homo sapien
tgggtcaacgtgctgcatggacgtc

SEQ ID NO: 2070934 - DNA, 25 bp, Homo sapien
ctgggtcaacgtgctgcatggacgt

SEQ ID NO: 2070935 - DNA, 25 bp, Homo sapien
gcagctatcaacttgttgcctgcta

SEQ ID NO: 2070936 - DNA, 25 bp, Homo sapien
ttcccagtctccctacccagaatct

SEQ ID NO: 2070937 - DNA, 25 bp, Homo sapien
tgcctgctaacatgttaatggagag

SEQ ID NO: 2070938 - DNA, 25 bp, Homo sapien
gagaggtaaggcttaagatgtgcca

SEQ ID NO: 2070939 - DNA, 25 bp, Homo sapien
ggagttgctacctgaaaacctacag

SEQ ID NO: 2070940 - DNA, 25 bp, Homo sapien
gatttccctagagcagtaacgtttg

SEQ ID NO: 2070941 - DNA, 25 bp, Homo sapien
tgaatccaatggcagatgtcgggca

SEQ ID NO: 2070942 - DNA, 25 bp, Homo sapien
tgtcgggcattaactcagaaggtga

SEQ ID NO: 2070943 - DNA, 25 bp, Homo sapien
tctataaacccgtggttggtgtggc

SEQ ID NO: 2070944 - DNA, 25 bp, Homo sapien
ggtgtggccctctgtcatgaatgtt

SEQ ID NO: 2070945 - DNA, 25 bp, Homo sapien
catatcagtcttgcagtagtccaag

SEQ ID NO: 2070946 - DNA, 25 bp, Homo sapien
tagcctatggccaaacatgcagttt

SEQ ID NO: 2070947 - DNA, 25 bp, Homo sapien
agtagcgcaatctaggctccccccg

SEQ ID NO: 2070948 - DNA, 25 bp, Homo sapien
gttaaatgatgtgggctaaaaggtg

SEQ ID NO: 2070949 - DNA, 25 bp, Homo sapien
tgtgggctaaaaggtggaggcaaaa

SEQ ID NO: 2070950 - DNA, 25 bp, Homo sapien
ttctttaagcaagctttcacagtag

SEQ ID NO: 2070951 - DNA, 25 bp, Homo sapien
tcccgcaaaggtagataaagagcca

SEQ ID NO: 2070952 - DNA, 25 bp, Homo sapien
gaaaaaatttacctaccgctgctga

SEQ ID NO: 2070953 - DNA, 25 bp, Homo sapien
caacaacgttacaaaggagcagatc

SEQ ID NO: 2070954 - DNA, 25 bp, Homo sapien
ggttggctccagacaaaaacttgta

SEQ ID NO: 2070955 - DNA, 25 bp, Homo sapien
gccggcggcggtgaaggaccggccg

SEQ ID NO: 2070956 - DNA, 25 bp, Homo sapien
cggccggtccttcaccgccgccggc

SEQ ID NO: 2070957 - DNA, 25 bp, Homo sapien
taagcatggcatgaaaccttaagca

SEQ ID NO: 2070958 - DNA, 25 bp, Homo sapien
cccaatggactcttagtgagaagca

SEQ ID NO: 2070959 - DNA, 25 bp, Homo sapien
gagccccaattttgatactagagga

SEQ ID NO: 2070960 - DNA, 25 bp, Homo sapien
tatgttttctaggtctccagtggtc

SEQ ID NO: 2070961 - DNA, 25 bp, Homo sapien
agtgagtccggtgcccgaacacctt

SEQ ID NO: 2070962 - DNA, 25 bp, Homo sapien
ggtaaagggaactcctctgctgaag

SEQ ID NO: 2070963 - DNA, 25 bp, Homo sapien
tctgctgaagagtgagtccggtgcc

SEQ ID NO: 2070964 - DNA, 25 bp, Homo sapien
cggatgtcagccagcataagtagca

SEQ ID NO: 2070965 - DNA, 25 bp, Homo sapien
gagaccctctgggcccaggcgctcc

SEQ ID NO: 2070966 - DNA, 25 bp, Homo sapien
cctctgggcccaggcgctcctctct

SEQ ID NO: 2070967 - DNA, 25 bp, Homo sapien
accctctgggcccaggcgctcctct

SEQ ID NO: 2070968 - DNA, 25 bp, Homo sapien
tggagaccctctgggcccaggcgct

SEQ ID NO: 2070969 - DNA, 25 bp, Homo sapien
ccatctcttcctggtgcccctggtg

SEQ ID NO: 2070970 - DNA, 25 bp, Homo sapien
tctcttcctggtgcccctggtggac

SEQ ID NO: 2070971 - DNA, 25 bp, Homo sapien
ttagaaccatctcttcctggtgccc

SEQ ID NO: 2070972 - DNA, 25 bp, Homo sapien
cttagaaccatctcttcctggtgcc

SEQ ID NO: 2070973 - DNA, 25 bp, Homo sapien
ccattgagccccgtgggccgggctg

SEQ ID NO: 2070974 - DNA, 25 bp, Homo sapien
gcttaatgtgggacagatcaggaga

SEQ ID NO: 2070975 - DNA, 25 bp, Homo sapien
cctccggccttgcttaatgtgggac

SEQ ID NO: 2070976 - DNA, 25 bp, Homo sapien
atcaggagatggtcccatgggtccc

SEQ ID NO: 2070977 - DNA, 25 bp, Homo sapien
taaacagccgctttgtattgggttg

SEQ ID NO: 2070978 - DNA, 25 bp, Homo sapien
tattgggttgggttagcggcgcttc

SEQ ID NO: 2070979 - DNA, 25 bp, Homo sapien
cttccccacttgtgtgtggaacaca

SEQ ID NO: 2070980 - DNA, 25 bp, Homo sapien
caacacagagagttgtaaacagccg

SEQ ID NO: 2070981 - DNA, 25 bp, Homo sapien
gactctagcggacaccttgctggct

SEQ ID NO: 2070982 - DNA, 25 bp, Homo sapien
gggactctagcggacaccttgctgg

SEQ ID NO: 2070983 - DNA, 25 bp, Homo sapien
ctctagcggacaccttgctggctca

SEQ ID NO: 2070984 - DNA, 25 bp, Homo sapien
ctagcggacaccttgctggctcaag

SEQ ID NO: 2070985 - DNA, 25 bp, Homo sapien
gggcagcacctgggtacagacatca

SEQ ID NO: 2070986 - DNA, 25 bp, Homo sapien
tgtggggcagcacctgggtacagac

SEQ ID NO: 2070987 - DNA, 25 bp, Homo sapien
tggggcagcacctgggtacagacat

SEQ ID NO: 2070988 - DNA, 25 bp, Homo sapien
gcagcacctgggtacagacatcagc

SEQ ID NO: 2070989 - DNA, 25 bp, Homo sapien
gaatgaacgaggataagccaaatcc

SEQ ID NO: 2070990 - DNA, 25 bp, Homo sapien
cagtttataaggagagaccccagtc

SEQ ID NO: 2070991 - DNA, 25 bp, Homo sapien
cactatgctaggaagcagtttataa

SEQ ID NO: 2070992 - DNA, 25 bp, Homo sapien
tacctcaggccaagggaatgaacga

SEQ ID NO: 2070993 - DNA, 25 bp, Homo sapien
ccagtgatatacttgcccaggtcag

SEQ ID NO: 2070994 - DNA, 25 bp, Homo sapien
ggccagcaccttgtcaccagtgata

SEQ ID NO: 2070995 - DNA, 25 bp, Homo sapien
ccttgtcaccagtgatatacttgcc

SEQ ID NO: 2070996 - DNA, 25 bp, Homo sapien
gaggccagcaccttgtcaccagtga

SEQ ID NO: 2070997 - DNA, 25 bp, Homo sapien
ggcactggcactttagaggcggctg

SEQ ID NO: 2070998 - DNA, 25 bp, Homo sapien
cactggcactttagaggcggctgtc

SEQ ID NO: 2070999 - DNA, 25 bp, Homo sapien
ctggcactttagaggcggctgtcca

SEQ ID NO: 2071000 - DNA, 25 bp, Homo sapien
gcactggcactttagaggcggctgt

SEQ ID NO: 2071001 - DNA, 25 bp, Homo sapien
tagaactccttgcatgtggcacagc

SEQ ID NO: 2071002 - DNA, 25 bp, Homo sapien
tgcatgtggcacagcaagttccggc

SEQ ID NO: 2071003 - DNA, 25 bp, Homo sapien
tgcttcatctggtagaactccttgc

SEQ ID NO: 2071004 - DNA, 25 bp, Homo sapien
gcacagcaagttccggctttcacca

SEQ ID NO: 2071005 - DNA, 25 bp, Homo sapien
aggagataggctcagtcctgtctgg

SEQ ID NO: 2071006 - DNA, 25 bp, Homo sapien
agaaaggagataggctcagtcctgt

SEQ ID NO: 2071007 - DNA, 25 bp, Homo sapien
aaaggagataggctcagtcctgtct

SEQ ID NO: 2071008 - DNA, 25 bp, Homo sapien
tgagaaaggagataggctcagtcct

SEQ ID NO: 2071009 - DNA, 25 bp, Homo sapien
ggccggcggcggtgaaggaccggcc

SEQ ID NO: 2071010 - DNA, 25 bp, Homo sapien
ggccggtccttcaccgccgccggcc

SEQ ID NO: 2071011 - DNA, 25 bp, Homo sapien
acagcgggacatgcgagggctcaac

SEQ ID NO: 2071012 - DNA, 25 bp, Homo sapien
agacagcatcgggaagggcggtccc

SEQ ID NO: 2071013 - DNA, 25 bp, Homo sapien
cggtcccagggacagagtagctgac

SEQ ID NO: 2071014 - DNA, 25 bp, Homo sapien
tgattttacagctctcaggtcctgc

SEQ ID NO: 2071015 - DNA, 25 bp, Homo sapien
tgtagaacactaggtgctccatggg

SEQ ID NO: 2071016 - DNA, 25 bp, Homo sapien
gcactggaaacgcagtcgggcccaa

SEQ ID NO: 2071017 - DNA, 25 bp, Homo sapien
tgggaaatgccccagacacttcgcc

SEQ ID NO: 2071018 - DNA, 25 bp, Homo sapien
taggtgctccatgggctttttgtaa

SEQ ID NO: 2071019 - DNA, 25 bp, Homo sapien
ctggtgacatatgcagtgaccaggg

SEQ ID NO: 2071020 - DNA, 25 bp, Homo sapien
tcctggtgacatatgcagtgaccag

SEQ ID NO: 2071021 - DNA, 25 bp, Homo sapien
cagggcttctgccctttgggaggtg

SEQ ID NO: 2071022 - DNA, 25 bp, Homo sapien
gagctctcagactgtgcaccttcag

SEQ ID NO: 2071023 - DNA, 25 bp, Homo sapien
caccaccatccctgcaccatgggag

SEQ ID NO: 2071024 - DNA, 25 bp, Homo sapien
tgctgcaccaccatccctgcaccat

SEQ ID NO: 2071025 - DNA, 25 bp, Homo sapien
ccaccatccctgcaccatgggagac

SEQ ID NO: 2071026 - DNA, 25 bp, Homo sapien
tgcaccaccatccctgcaccatggg

SEQ ID NO: 2071027 - DNA, 25 bp, Homo sapien
ggttgacacaaatgatgccatgctg

SEQ ID NO: 2071028 - DNA, 25 bp, Homo sapien
gccatgctgtgtagttgcgtttcca

SEQ ID NO: 2071029 - DNA, 25 bp, Homo sapien
ttggcagcacccgagctaggtacac

SEQ ID NO: 2071030 - DNA, 25 bp, Homo sapien
gaatatacagggtcaacatagctct

SEQ ID NO: 2071031 - DNA, 25 bp, Homo sapien
tgccttggggactgaagaggaatgt

SEQ ID NO: 2071032 - DNA, 25 bp, Homo sapien
acagcagggccatacacagggcttg

SEQ ID NO: 2071033 - DNA, 25 bp, Homo sapien
acacagcagggccatacacagggct

SEQ ID NO: 2071034 - DNA, 25 bp, Homo sapien
caccgccagggcaccacacagcagg

SEQ ID NO: 2071035 - DNA, 25 bp, Homo sapien
gagagcttcctccagtacacactag

SEQ ID NO: 2071036 - DNA, 25 bp, Homo sapien
aattgtgaatcttgcctgtccctag

SEQ ID NO: 2071037 - DNA, 25 bp, Homo sapien
cttacaacccttgagctaatgggca

SEQ ID NO: 2071038 - DNA, 25 bp, Homo sapien
ccggtacacgttctcttgcctgcaa

SEQ ID NO: 2071039 - DNA, 25 bp, Homo sapien
ttcccatcatcttcccggatgtagc

SEQ ID NO: 2071040 - DNA, 25 bp, Homo sapien
ggatgtagccttcccggcactcgca

SEQ ID NO: 2071041 - DNA, 25 bp, Homo sapien
ggatatttgtctcccctggtacatg

SEQ ID NO: 2071042 - DNA, 25 bp, Homo sapien
cggtagctgcccaaggtattgatgc

SEQ ID NO: 2071043 - DNA, 25 bp, Homo sapien
ttgggccgaccttgatcagagcagc

SEQ ID NO: 2071044 - DNA, 25 bp, Homo sapien
tctaatacaacagatgacattgggc

SEQ ID NO: 2071045 - DNA, 25 bp, Homo sapien
gttaataacaatgaaggacacttgg

SEQ ID NO: 2071046 - DNA, 25 bp, Homo sapien
tgtagagaatactaagtttctgaga

SEQ ID NO: 2071047 - DNA, 25 bp, Homo sapien
ggtcatatcggtatcccggataaca

SEQ ID NO: 2071048 - DNA, 25 bp, Homo sapien
gataacaagtacacagcactcggcc

SEQ ID NO: 2071049 - DNA, 25 bp, Homo sapien
ggagcctcggcacaaacgtcgtaat

SEQ ID NO: 2071050 - DNA, 25 bp, Homo sapien
tgtccgtgcactgctgttcacaggg

SEQ ID NO: 2071051 - DNA, 25 bp, Homo sapien
tatgaaggtgaacgggtgggctgtc

SEQ ID NO: 2071052 - DNA, 25 bp, Homo sapien
cagggagggtttgtgtgacaagtat

SEQ ID NO: 2071053 - DNA, 25 bp, Homo sapien
gctttgctccaccacatatgaaggt

SEQ ID NO: 2071054 - DNA, 25 bp, Homo sapien
cacagagcgagtctggctttgctcc

SEQ ID NO: 2071055 - DNA, 25 bp, Homo sapien
ctgaccaaccctgcaaactgtctct

SEQ ID NO: 2071056 - DNA, 25 bp, Homo sapien
atgattgtgatttcaggcctgcttt

SEQ ID NO: 2071057 - DNA, 25 bp, Homo sapien
ggctgttgccaccattccgcagcag

SEQ ID NO: 2071058 - DNA, 25 bp, Homo sapien
tctaggcagccaaggttctgtgctc

SEQ ID NO: 2071059 - DNA, 25 bp, Homo sapien
tgatcctggcatgactggctctgag

SEQ ID NO: 2071060 - DNA, 25 bp, Homo sapien
ttttgttggagagcgtgatcctggc

SEQ ID NO: 2071061 - DNA, 25 bp, Homo sapien
tgggatgcattgtccaagaacaaat

SEQ ID NO: 2071062 - DNA, 25 bp, Homo sapien
ctgggatgcattgtccaagaacaaa

SEQ ID NO: 2071063 - DNA, 25 bp, Homo sapien
tctgggatgcattgtccaagaacaa

SEQ ID NO: 2071064 - DNA, 25 bp, Homo sapien
tcttccaaagactgttcctactgct

SEQ ID NO: 2071065 - DNA, 25 bp, Homo sapien
cttccaaagactgttcctactgctg

SEQ ID NO: 2071066 - DNA, 25 bp, Homo sapien
gagccctgtgcgtgtgagggtagct

SEQ ID NO: 2071067 - DNA, 25 bp, Homo sapien
tgttttctatggaatacagacttcc

SEQ ID NO: 2071068 - DNA, 25 bp, Homo sapien
gggtgtttgttttctatggaataca

SEQ ID NO: 2071069 - DNA, 25 bp, Homo sapien
ctggcccagactccgaggttggagc

SEQ ID NO: 2071070 - DNA, 25 bp, Homo sapien
tagcctgtgtacagaaggttgccca

SEQ ID NO: 2071071 - DNA, 25 bp, Homo sapien
tgtacatgatccagaccagtcgcag

SEQ ID NO: 2071072 - DNA, 25 bp, Homo sapien
ccttggaaatcaacagatgggctgc

SEQ ID NO: 2071073 - DNA, 25 bp, Homo sapien
tgttttcagctacccgggtcagcca

SEQ ID NO: 2071074 - DNA, 25 bp, Homo sapien
tactcagaatgtagtcagaccgcag

SEQ ID NO: 2071075 - DNA, 25 bp, Homo sapien
agaatgtagtcagaccgcaggtctc

SEQ ID NO: 2071076 - DNA, 25 bp, Homo sapien
tcagaatgtagtcagaccgcaggtc

SEQ ID NO: 2071077 - DNA, 25 bp, Homo sapien
aatgtactcagaatgtagtcagacc

SEQ ID NO: 2071078 - DNA, 25 bp, Homo sapien
gtttgtgaacaggtgtcatgttcca

SEQ ID NO: 2071079 - DNA, 25 bp, Homo sapien
tgtctcttccagttgtgtttgtgaa

SEQ ID NO: 2071080 - DNA, 25 bp, Homo sapien
cagttgtgtttgtgaacaggtgtca

SEQ ID NO: 2071081 - DNA, 25 bp, Homo sapien
tcttccagttgtgtttgtgaacagg

SEQ ID NO: 2071082 - DNA, 25 bp, Homo sapien
tccagaaatgtaccagagttgttcg

SEQ ID NO: 2071083 - DNA, 25 bp, Homo sapien
cattggtacctcgatgtttagaggg

SEQ ID NO: 2071084 - DNA, 25 bp, Homo sapien
gatttacaagtcagtaaaacatgtg

SEQ ID NO: 2071085 - DNA, 25 bp, Homo sapien
tttagaggggaaacagcattggctg

SEQ ID NO: 2071086 - DNA, 25 bp, Homo sapien
ctggcacagtcttccggacagaggg

SEQ ID NO: 2071087 - DNA, 25 bp, Homo sapien
tggcacagtcttccggacagagggt

SEQ ID NO: 2071088 - DNA, 25 bp, Homo sapien
gtctttgggattcgtgtgaaacatc

SEQ ID NO: 2071089 - DNA, 25 bp, Homo sapien
caactattttatgaagtctttggga

SEQ ID NO: 2071090 - DNA, 25 bp, Homo sapien
tggagacccaaaaggcagtgttaaa

SEQ ID NO: 2071091 - DNA, 25 bp, Homo sapien
agacccaaaaggcagtgttaaagct

SEQ ID NO: 2071092 - DNA, 25 bp, Homo sapien
cttggagacccaaaaggcagtgtta

SEQ ID NO: 2071093 - DNA, 25 bp, Homo sapien
cccaaaaggcagtgttaaagctcac

SEQ ID NO: 2071094 - DNA, 25 bp, Homo sapien
aagaaaaagccatatctggtaactg

SEQ ID NO: 2071095 - DNA, 25 bp, Homo sapien
gagagtgaaatacccaggacacaca

SEQ ID NO: 2071096 - DNA, 25 bp, Homo sapien
tgcagtaggctctattatcttgcat

SEQ ID NO: 2071097 - DNA, 25 bp, Homo sapien
agccatatctggtaactgagagtga

SEQ ID NO: 2071098 - DNA, 25 bp, Homo sapien
caacagcaaccgtggctaccagggt

SEQ ID NO: 2071099 - DNA, 25 bp, Homo sapien
acagcaaccgtggctaccagggtgc

SEQ ID NO: 2071100 - DNA, 25 bp, Homo sapien
aacagcaaccgtggctaccagggtg

SEQ ID NO: 2071101 - DNA, 25 bp, Homo sapien
gcaacagcaaccgtggctaccaggg

SEQ ID NO: 2071102 - DNA, 25 bp, Homo sapien
tccatcacaagagtaagtcgactgc

SEQ ID NO: 2071103 - DNA, 25 bp, Homo sapien
taatagcagtcagtccctaggagtg

SEQ ID NO: 2071104 - DNA, 25 bp, Homo sapien
ccagaattaacgcagcccttttaga

SEQ ID NO: 2071105 - DNA, 25 bp, Homo sapien
ttttgggtcaacagtagagcaagcc

SEQ ID NO: 2071106 - DNA, 25 bp, Homo sapien
tgagtttaatcgagccaaggcagta

SEQ ID NO: 2071107 - DNA, 25 bp, Homo sapien
ccttgccctgtgaagctggaaccaa

SEQ ID NO: 2071108 - DNA, 25 bp, Homo sapien
gcccatgacagtgagtgaacacacg

SEQ ID NO: 2071109 - DNA, 25 bp, Homo sapien
caaagattgacaccaaagtgggttt

SEQ ID NO: 2071110 - DNA, 25 bp, Homo sapien
tctccgaagggtcctcatgtaaact

SEQ ID NO: 2071111 - DNA, 25 bp, Homo sapien
aaaaaccaagtctggcagtgcagcg

SEQ ID NO: 2071112 - DNA, 25 bp, Homo sapien
catgtaaacttgtgttcgtggagac

SEQ ID NO: 2071113 - DNA, 25 bp, Homo sapien
gctcaacctcagaggctgctctagg

SEQ ID NO: 2071114 - DNA, 25 bp, Homo sapien
tgagccaccacctttacccctagaa

SEQ ID NO: 2071115 - DNA, 25 bp, Homo sapien
actgagccaccacctttacccctag

SEQ ID NO: 2071116 - DNA, 25 bp, Homo sapien
ctcgaacatactgagccaccacctt

SEQ ID NO: 2071117 - DNA, 25 bp, Homo sapien
cgaacatactgagccaccaccttta

SEQ ID NO: 2071118 - DNA, 25 bp, Homo sapien
aaggaacttcaaggcacttccccag

SEQ ID NO: 2071119 - DNA, 25 bp, Homo sapien
tccactgatctgaccgtaacttctc

SEQ ID NO: 2071120 - DNA, 25 bp, Homo sapien
gtccatttcaatgcccacgatttca

SEQ ID NO: 2071121 - DNA, 25 bp, Homo sapien
tagagattctcatggatgaaaagga

SEQ ID NO: 2071122 - DNA, 25 bp, Homo sapien
gctgtccgagttggagtcacactgt

SEQ ID NO: 2071123 - DNA, 25 bp, Homo sapien
cagcagcccgccatgttccttccag

SEQ ID NO: 2071124 - DNA, 25 bp, Homo sapien
gccatgttccttccagccaaaaagc

SEQ ID NO: 2071125 - DNA, 25 bp, Homo sapien
tcccagctgtccgagttggagtcac

SEQ ID NO: 2071126 - DNA, 25 bp, Homo sapien
tcattttgccaccagttaagccgtg

SEQ ID NO: 2071127 - DNA, 25 bp, Homo sapien
taggagcatgctctacacctgtgta

SEQ ID NO: 2071128 - DNA, 25 bp, Homo sapien
taagccgtgtcaaggtacaaacagc

SEQ ID NO: 2071129 - DNA, 25 bp, Homo sapien
gcaaagtcctgctcttatcggaagt

SEQ ID NO: 2071130 - DNA, 25 bp, Homo sapien
cattcgcgctgcgtaatttcaccca

SEQ ID NO: 2071131 - DNA, 25 bp, Homo sapien
tgcgtaatttcacccacacaattct

SEQ ID NO: 2071132 - DNA, 25 bp, Homo sapien
taacaccatgctcattcgcgctgcg

SEQ ID NO: 2071133 - DNA, 25 bp, Homo sapien
catctcttaggatctgcaaggctgt

SEQ ID NO: 2071134 - DNA, 25 bp, Homo sapien
ccaatgtcatctgccttttcctggt

SEQ ID NO: 2071135 - DNA, 25 bp, Homo sapien
cttttcctggtcaagcctgtcctga

SEQ ID NO: 2071136 - DNA, 25 bp, Homo sapien
tactcagatgccattcccattccag

SEQ ID NO: 2071137 - DNA, 25 bp, Homo sapien
ttccagagtcatttccaatgtcatc

SEQ ID NO: 2071138 - DNA, 25 bp, Homo sapien
tcacggacatagctagaacagtgca

SEQ ID NO: 2071139 - DNA, 25 bp, Homo sapien
cgttccataaggtatgaggttattt

SEQ ID NO: 2071140 - DNA, 25 bp, Homo sapien
ttgttcacggacatagctagaacag

SEQ ID NO: 2071141 - DNA, 25 bp, Homo sapien
ttttgtctgctctccactaatcccc

SEQ ID NO: 2071142 - DNA, 25 bp, Homo sapien
aatgcaaattcgaaatccttacaaa

SEQ ID NO: 2071143 - DNA, 25 bp, Homo sapien
tgcaaattcgaaatccttacaaatc

SEQ ID NO: 2071144 - DNA, 25 bp, Homo sapien
caaatcctagtcttagattctttgt

SEQ ID NO: 2071145 - DNA, 25 bp, Homo sapien
cctagtcttagattctttgtttact

SEQ ID NO: 2071146 - DNA, 25 bp, Homo sapien
tatactccagggactaagacaacaa

SEQ ID NO: 2071147 - DNA, 25 bp, Homo sapien
tcgttctttgctgcaaggccacaag

SEQ ID NO: 2071148 - DNA, 25 bp, Homo sapien
tggccacaaaacaggatgactaggt

SEQ ID NO: 2071149 - DNA, 25 bp, Homo sapien
tctgacagtatgcttgggactctgc

SEQ ID NO: 2071150 - DNA, 25 bp, Homo sapien
tctgaagaatggacatactgcaggg

SEQ ID NO: 2071151 - DNA, 25 bp, Homo sapien
ttcatcccagttctctgcgtgacca

SEQ ID NO: 2071152 - DNA, 25 bp, Homo sapien
ttagcaaggctctgaagaatggaca

SEQ ID NO: 2071153 - DNA, 25 bp, Homo sapien
tctgcgtgaccatttattagcaagg

SEQ ID NO: 2071154 - DNA, 25 bp, Homo sapien
tgatcacaacccacactccagcaca

SEQ ID NO: 2071155 - DNA, 25 bp, Homo sapien
cagtgggccttgatcacaacccaca

SEQ ID NO: 2071156 - DNA, 25 bp, Homo sapien
ccttgatcacaacccacactccagc

SEQ ID NO: 2071157 - DNA, 25 bp, Homo sapien
gtgggccttgatcacaacccacact

SEQ ID NO: 2071158 - DNA, 25 bp, Homo sapien
tcagaacttgttatatacccaaagg

SEQ ID NO: 2071159 - DNA, 25 bp, Homo sapien
ttcagaacttgttatatacccaaag

SEQ ID NO: 2071160 - DNA, 25 bp, Homo sapien
tataactgctctcatagggaaaagg

SEQ ID NO: 2071161 - DNA, 25 bp, Homo sapien
taaacaattcctgggcaaatccagc

SEQ ID NO: 2071162 - DNA, 25 bp, Homo sapien
tctaagatatcttgtgtaatccaca

SEQ ID NO: 2071163 - DNA, 25 bp, Homo sapien
caggatccaggaaaatttagcaagc

SEQ ID NO: 2071164 - DNA, 25 bp, Homo sapien
cagacacgggtatttagtcgtcgcg

SEQ ID NO: 2071165 - DNA, 25 bp, Homo sapien
tagtcgtcgcgattttgctctctga

SEQ ID NO: 2071166 - DNA, 25 bp, Homo sapien
ctgtagcatgtggtgagctcgcctg

SEQ ID NO: 2071167 - DNA, 25 bp, Homo sapien
gcctgaagacttcagacacgggtat

SEQ ID NO: 2071168 - DNA, 25 bp, Homo sapien
tccttatccccggagaagtgagggc

SEQ ID NO: 2071169 - DNA, 25 bp, Homo sapien
agggtcacgacgaagcgaaccagct

SEQ ID NO: 2071170 - DNA, 25 bp, Homo sapien
atggcagggcgcaaaggctgatacc

SEQ ID NO: 2071171 - DNA, 25 bp, Homo sapien
ggcgaagggtatccctgacgcgacc

SEQ ID NO: 2071172 - DNA, 25 bp, Homo sapien
tgtaggtccacgtgtgtcccaacgc

SEQ ID NO: 2071173 - DNA, 25 bp, Homo sapien
gctcctctctgtaggtccacgtgtg

SEQ ID NO: 2071174 - DNA, 25 bp, Homo sapien
gtccacgtgtgtcccaacgccagga

SEQ ID NO: 2071175 - DNA, 25 bp, Homo sapien
tctctgtaggtccacgtgtgtccca

SEQ ID NO: 2071176 - DNA, 25 bp, Homo sapien
agggaagctcccggcttcttcccag

SEQ ID NO: 2071177 - DNA, 25 bp, Homo sapien
ccgagctccgtccggaccaagcgtc

SEQ ID NO: 2071178 - DNA, 25 bp, Homo sapien
gctccgtccggaccaagcgtcctgc

SEQ ID NO: 2071179 - DNA, 25 bp, Homo sapien
cggagagcaggggcgtttgcaccac

SEQ ID NO: 2071180 - DNA, 25 bp, Homo sapien
gagttggggtatcggatgcaaaccc

SEQ ID NO: 2071181 - DNA, 25 bp, Homo sapien
gcaggggtccggaatattatggggc

SEQ ID NO: 2071182 - DNA, 25 bp, Homo sapien
ttggggtatcggatgcaaacccagc

SEQ ID NO: 2071183 - DNA, 25 bp, Homo sapien
gtatcggatgcaaacccagcagaga

SEQ ID NO: 2071184 - DNA, 25 bp, Homo sapien
tcacgtccgattgacagacttgctg

SEQ ID NO: 2071185 - DNA, 25 bp, Homo sapien
tgcggtgtccggctggcgcgagggc

SEQ ID NO: 2071186 - DNA, 25 bp, Homo sapien
ggcgcgagggccctgaggttcaagt

SEQ ID NO: 2071187 - DNA, 25 bp, Homo sapien
caagttgtctcgtcgggacgttcac

SEQ ID NO: 2071188 - DNA, 25 bp, Homo sapien
cattttgcaccagggtctcacgacc

SEQ ID NO: 2071189 - DNA, 25 bp, Homo sapien
ttgcattttgcaccagggtctcacg

SEQ ID NO: 2071190 - DNA, 25 bp, Homo sapien
caccagggtctcacgaccgggagga

SEQ ID NO: 2071191 - DNA, 25 bp, Homo sapien
ttgcaccagggtctcacgaccggga

SEQ ID NO: 2071192 - DNA, 25 bp, Homo sapien
ttcctgttgtccatgggtttctaaa

SEQ ID NO: 2071193 - DNA, 25 bp, Homo sapien
cctgttgtccatgggtttctaaagc

SEQ ID NO: 2071194 - DNA, 25 bp, Homo sapien
aagcttccttcctgttgtccatggg

SEQ ID NO: 2071195 - DNA, 25 bp, Homo sapien
tccttcctgttgtccatgggtttct

SEQ ID NO: 2071196 - DNA, 25 bp, Homo sapien
tctcttgtccccatgagcatgaaca

SEQ ID NO: 2071197 - DNA, 25 bp, Homo sapien
tggagaagcgtgttctaacaccact

SEQ ID NO: 2071198 - DNA, 25 bp, Homo sapien
caagagctataggatcaaacctggg

SEQ ID NO: 2071199 - DNA, 25 bp, Homo sapien
aacaaatagcgatggcaggagctgc

SEQ ID NO: 2071200 - DNA, 25 bp, Homo sapien
gtagatcagggtaattgttgaccat

SEQ ID NO: 2071201 - DNA, 25 bp, Homo sapien
tgagctgacttggtttagtttcact

SEQ ID NO: 2071202 - DNA, 25 bp, Homo sapien
cacttaattgttttgcatccctttt

SEQ ID NO: 2071203 - DNA, 25 bp, Homo sapien
caaaggaacgccagataaaatgagc

SEQ ID NO: 2071204 - DNA, 25 bp, Homo sapien
tgctttgcctgcaaaagagtcatag

SEQ ID NO: 2071205 - DNA, 25 bp, Homo sapien
gcctgcaaaagagtcatagggttcc

SEQ ID NO: 2071206 - DNA, 25 bp, Homo sapien
cctgtgctttgcctgcaaaagagtc

SEQ ID NO: 2071207 - DNA, 25 bp, Homo sapien
ctttgcctgcaaaagagtcataggg

SEQ ID NO: 2071208 - DNA, 25 bp, Homo sapien
ggatgttgtattcgggttctccaga

SEQ ID NO: 2071209 - DNA, 25 bp, Homo sapien
gcgcctggcccattatatatctttg

SEQ ID NO: 2071210 - DNA, 25 bp, Homo sapien
tatggcattcttgtaggatgttgta

SEQ ID NO: 2071211 - DNA, 25 bp, Homo sapien
gggatctatttagtgcattatggca

SEQ ID NO: 2071212 - DNA, 25 bp, Homo sapien
catcgtcgttgttgtagtaaggaag

SEQ ID NO: 2071213 - DNA, 25 bp, Homo sapien
cgttgttgtagtaaggaagaccagc

SEQ ID NO: 2071214 - DNA, 25 bp, Homo sapien
gttgtagtaaggaagaccagctgct

SEQ ID NO: 2071215 - DNA, 25 bp, Homo sapien
tatcatcatcgtcgttgttgtagta

SEQ ID NO: 2071216 - DNA, 25 bp, Homo sapien
tctgaaatcttcagaagctatagct

SEQ ID NO: 2071217 - DNA, 25 bp, Homo sapien
cttctgaaatcttcagaagctatag

SEQ ID NO: 2071218 - DNA, 25 bp, Homo sapien
tttttgattttctggttctcttcta

SEQ ID NO: 2071219 - DNA, 25 bp, Homo sapien
tgaaatcttcagaagctatagctgg

SEQ ID NO: 2071220 - DNA, 25 bp, Homo sapien
agagtgctaagcagaagcatctgaa

SEQ ID NO: 2071221 - DNA, 25 bp, Homo sapien
tgcagccagcgctaggatgagactc

SEQ ID NO: 2071222 - DNA, 25 bp, Homo sapien
ggctaatggtccagactgcagccag

SEQ ID NO: 2071223 - DNA, 25 bp, Homo sapien
atctgaagataagggctaatggtcc

SEQ ID NO: 2071224 - DNA, 25 bp, Homo sapien
tccatgaatctgggtcagtgctcat

SEQ ID NO: 2071225 - DNA, 25 bp, Homo sapien
ctccatgaatctgggtcagtgctca

SEQ ID NO: 2071226 - DNA, 25 bp, Homo sapien
tttcagtctataccctgccttcagc

SEQ ID NO: 2071227 - DNA, 25 bp, Homo sapien
gcttcaggggatgccaaccctttca

SEQ ID NO: 2071228 - DNA, 25 bp, Homo sapien
gatgccaaccctttcagtctatacc

SEQ ID NO: 2071229 - DNA, 25 bp, Homo sapien
tcagtctataccctgccttcagcag

SEQ ID NO: 2071230 - DNA, 25 bp, Homo sapien
gaacactgcctacatctactgctat

SEQ ID NO: 2071231 - DNA, 25 bp, Homo sapien
actgctatagactttgcatgaccgg

SEQ ID NO: 2071232 - DNA, 25 bp, Homo sapien
catgaccggttttgcagtgagcaca

SEQ ID NO: 2071233 - DNA, 25 bp, Homo sapien
gaccgggtttgcatctctatcttaa

SEQ ID NO: 2071234 - DNA, 25 bp, Homo sapien
gcttctgagcagtgacgtggcctag

SEQ ID NO: 2071235 - DNA, 25 bp, Homo sapien
cggaacaagtgctctctaagtgact

SEQ ID NO: 2071236 - DNA, 25 bp, Homo sapien
gggcagccgggaagtatttctcact

SEQ ID NO: 2071237 - DNA, 25 bp, Homo sapien
gaacttcccaaggtgttgatagcca

SEQ ID NO: 2071238 - DNA, 25 bp, Homo sapien
tcccttctggagtatcaaatgccat

SEQ ID NO: 2071239 - DNA, 25 bp, Homo sapien
ttcccttctggagtatcaaatgcca

SEQ ID NO: 2071240 - DNA, 25 bp, Homo sapien
tgcttcccttctggagtatcaaatg

SEQ ID NO: 2071241 - DNA, 25 bp, Homo sapien
catcttccccactgcttcccttctg

SEQ ID NO: 2071242 - DNA, 25 bp, Homo sapien
aaactccatccctgacatggcactg

SEQ ID NO: 2071243 - DNA, 25 bp, Homo sapien
taatagtgctttacctacaaactcc

SEQ ID NO: 2071244 - DNA, 25 bp, Homo sapien
tcaagagcctttagctcaaagctgg

SEQ ID NO: 2071245 - DNA, 25 bp, Homo sapien
actgaagggacaccaggctagttcc

SEQ ID NO: 2071246 - DNA, 25 bp, Homo sapien
ttagtccgtgttacgcacacgtcca

SEQ ID NO: 2071247 - DNA, 25 bp, Homo sapien
agtccgtgttacgcacacgtccact

SEQ ID NO: 2071248 - DNA, 25 bp, Homo sapien
tagtccgtgttacgcacacgtccac

SEQ ID NO: 2071249 - DNA, 25 bp, Homo sapien
cttaggggagggacaggaagaggca

SEQ ID NO: 2071250 - DNA, 25 bp, Homo sapien
acaggaagaggcaggctgtcagaag

SEQ ID NO: 2071251 - DNA, 25 bp, Homo sapien
caggaagaggcaggctgtcagaagt

SEQ ID NO: 2071252 - DNA, 25 bp, Homo sapien
ttaggggagggacaggaagaggcag

SEQ ID NO: 2071253 - DNA, 25 bp, Homo sapien
aagtgtgagatcatcgctccaggac

SEQ ID NO: 2071254 - DNA, 25 bp, Homo sapien
gagatcatcgctccaggactggaag

SEQ ID NO: 2071255 - DNA, 25 bp, Homo sapien
caattgtagatcaaaaggcagctga

SEQ ID NO: 2071256 - DNA, 25 bp, Homo sapien
caaaaagcctctcatgcaaatgcat

SEQ ID NO: 2071257 - DNA, 25 bp, Homo sapien
actcggcttgaggcaaccccagcaa

SEQ ID NO: 2071258 - DNA, 25 bp, Homo sapien
gcaaccacaagtcttgaggtttggg

SEQ ID NO: 2071259 - DNA, 25 bp, Homo sapien
caaccccagcaaccacaagtcttga

SEQ ID NO: 2071260 - DNA, 25 bp, Homo sapien
tcggcttgaggcaaccccagcaacc

SEQ ID NO: 2071261 - DNA, 25 bp, Homo sapien
cagcctcatccagccaagcaaaatg

SEQ ID NO: 2071262 - DNA, 25 bp, Homo sapien
tcatccagccaagcaaaatgtttaa

SEQ ID NO: 2071263 - DNA, 25 bp, Homo sapien
gcctcatccagccaagcaaaatgtt

SEQ ID NO: 2071264 - DNA, 25 bp, Homo sapien
cctcatccagccaagcaaaatgttt

SEQ ID NO: 2071265 - DNA, 25 bp, Homo sapien
gaaggagtggagctgtcttgagaag

SEQ ID NO: 2071266 - DNA, 25 bp, Homo sapien
ttcctattagttcagtattccaatc

SEQ ID NO: 2071267 - DNA, 25 bp, Homo sapien
tggagggagaacgaagagccctctc

SEQ ID NO: 2071268 - DNA, 25 bp, Homo sapien
ctcatgtggccaccgggcactctgt

SEQ ID NO: 2071269 - DNA, 25 bp, Homo sapien
ttttgacagtagaatctgccagcct

SEQ ID NO: 2071270 - DNA, 25 bp, Homo sapien
tgttcttgcccttcgtcatgacaga

SEQ ID NO: 2071271 - DNA, 25 bp, Homo sapien
gatgacacaggcttctggaccctga

SEQ ID NO: 2071272 - DNA, 25 bp, Homo sapien
tctgggtagatacaggatgacacag

SEQ ID NO: 2071273 - DNA, 25 bp, Homo sapien
aagagctgcccacccttgtttttct

SEQ ID NO: 2071274 - DNA, 25 bp, Homo sapien
accacaacaccaattgcatagtcca

SEQ ID NO: 2071275 - DNA, 25 bp, Homo sapien
ctgtggcaccacaacaccaattgca

SEQ ID NO: 2071276 - DNA, 25 bp, Homo sapien
ggcaccacaacaccaattgcatagt

SEQ ID NO: 2071277 - DNA, 25 bp, Homo sapien
gctgctggccacggatacaattcag

SEQ ID NO: 2071278 - DNA, 25 bp, Homo sapien
ttcaggggagtcacccccatgcctt

SEQ ID NO: 2071279 - DNA, 25 bp, Homo sapien
cggatacaattcaggggagtcaccc

SEQ ID NO: 2071280 - DNA, 25 bp, Homo sapien
tgctggccacggatacaattcaggg

SEQ ID NO: 2071281 - DNA, 25 bp, Homo sapien
caacgcgatggcagaaaccatttct

SEQ ID NO: 2071282 - DNA, 25 bp, Homo sapien
tgaaaccaggaatatagcgtagacc

SEQ ID NO: 2071283 - DNA, 25 bp, Homo sapien
tagcgtagacccctctgtagactcc

SEQ ID NO: 2071284 - DNA, 25 bp, Homo sapien
cccaggtagccacagatgaacatga

SEQ ID NO: 2071285 - DNA, 25 bp, Homo sapien
ggggctgaagctgtccccactttgc

SEQ ID NO: 2071286 - DNA, 25 bp, Homo sapien
cacaggggactgtggcatccgcagg

SEQ ID NO: 2071287 - DNA, 25 bp, Homo sapien
ggactgtggcatccgcagggggtga

SEQ ID NO: 2071288 - DNA, 25 bp, Homo sapien
tggcatccgcagggggtgacagaaa

SEQ ID NO: 2071289 - DNA, 25 bp, Homo sapien
atccgcagggggtgacagaaatccc

SEQ ID NO: 2071290 - DNA, 25 bp, Homo sapien
ttccagcactggctgttttactagg

SEQ ID NO: 2071291 - DNA, 25 bp, Homo sapien
ttactaggtcatgcattgaactgag

SEQ ID NO: 2071292 - DNA, 25 bp, Homo sapien
ggtcatgcattgaactgagttttcc

SEQ ID NO: 2071293 - DNA, 25 bp, Homo sapien
actggctgttttactaggtcatgca

SEQ ID NO: 2071294 - DNA, 25 bp, Homo sapien
taactgtctaaatcagctggaagcg

SEQ ID NO: 2071295 - DNA, 25 bp, Homo sapien
ttgctaactgtctaaatcagctgga

SEQ ID NO: 2071296 - DNA, 25 bp, Homo sapien
agctggaagcgatttacacaaagcc

SEQ ID NO: 2071297 - DNA, 25 bp, Homo sapien
tttctgcatattccagggactcctg

SEQ ID NO: 2071298 - DNA, 25 bp, Homo sapien
aagcttctgggactgtcgttgttct

SEQ ID NO: 2071299 - DNA, 25 bp, Homo sapien
tattcaccttcagttgtatgggaag

SEQ ID NO: 2071300 - DNA, 25 bp, Homo sapien
tcgttgttctgttgtgtattcacct

SEQ ID NO: 2071301 - DNA, 25 bp, Homo sapien
ctacataacaatgcaccaaggcccg

SEQ ID NO: 2071302 - DNA, 25 bp, Homo sapien
aatttgctgttgctggtcacggtca

SEQ ID NO: 2071303 - DNA, 25 bp, Homo sapien
cattacactccaatcaatttgctgt

SEQ ID NO: 2071304 - DNA, 25 bp, Homo sapien
agacatcagccacgaccattacact

SEQ ID NO: 2071305 - DNA, 25 bp, Homo sapien
ctaaggttcaggaataagcaaaaag

SEQ ID NO: 2071306 - DNA, 25 bp, Homo sapien
tacttgtattatctgcagagacagg

SEQ ID NO: 2071307 - DNA, 25 bp, Homo sapien
taaatgatacctcccttttccagag

SEQ ID NO: 2071308 - DNA, 25 bp, Homo sapien
cagggttctccctttgtcgctcaag

SEQ ID NO: 2071309 - DNA, 25 bp, Homo sapien
gccaaagagtttatggaccatctca

SEQ ID NO: 2071310 - DNA, 25 bp, Homo sapien
accagctgaatctgacccatgtcca

SEQ ID NO: 2071311 - DNA, 25 bp, Homo sapien
gctgaatctgacccatgtccaaaac

SEQ ID NO: 2071312 - DNA, 25 bp, Homo sapien
cagctgaatctgacccatgtccaaa

SEQ ID NO: 2071313 - DNA, 25 bp, Homo sapien
ccagctgaatctgacccatgtccaa

SEQ ID NO: 2071314 - DNA, 25 bp, Homo sapien
ctccttgcaagctgaatttgcaatt

SEQ ID NO: 2071315 - DNA, 25 bp, Homo sapien
ccttgcaagctgaatttgcaattcc

SEQ ID NO: 2071316 - DNA, 25 bp, Homo sapien
tccttgcaagctgaatttgcaattc

SEQ ID NO: 2071317 - DNA, 25 bp, Homo sapien
ctcgcccgacttctttccgctcttt

SEQ ID NO: 2071318 - DNA, 25 bp, Homo sapien
gaaactgattgctgggaaggctaca

SEQ ID NO: 2071319 - DNA, 25 bp, Homo sapien
ggttcggaatcagggcagtgctctc

SEQ ID NO: 2071320 - DNA, 25 bp, Homo sapien
tagtagaattactcatggcctcgcc

SEQ ID NO: 2071321 - DNA, 25 bp, Homo sapien
tagggagcccatgcaacgaatttgc

SEQ ID NO: 2071322 - DNA, 25 bp, Homo sapien
tcgcgtcctgcagctgtccgaggtg

SEQ ID NO: 2071323 - DNA, 25 bp, Homo sapien
ttggaggctgaggttcccgggctct

SEQ ID NO: 2071324 - DNA, 25 bp, Homo sapien
tccctgcctgcaggactgttcgtgt

SEQ ID NO: 2071325 - DNA, 25 bp, Homo sapien
tgtgtagttggcatctccgcgcgtc

SEQ ID NO: 2071326 - DNA, 25 bp, Homo sapien
ggcgcgcaagaacgctcaaccgagc

SEQ ID NO: 2071327 - DNA, 25 bp, Homo sapien
gaagaaggcgcgcaagaacgctcaa

SEQ ID NO: 2071328 - DNA, 25 bp, Homo sapien
aaggcgcgcaagaacgctcaaccga

SEQ ID NO: 2071329 - DNA, 25 bp, Homo sapien
agaaggcgcgcaagaacgctcaacc

SEQ ID NO: 2071330 - DNA, 25 bp, Homo sapien
tcagctcgccggggctcaagcacag

SEQ ID NO: 2071331 - DNA, 25 bp, Homo sapien
aagcacagactgcacgggggtcaag

SEQ ID NO: 2071332 - DNA, 25 bp, Homo sapien
ggctggggcgggctcagctcgccgg

SEQ ID NO: 2071333 - DNA, 25 bp, Homo sapien
cttaggggcgcctccagaaagttct

SEQ ID NO: 2071334 - DNA, 25 bp, Homo sapien
caagccggatttgcgattgggatgc

SEQ ID NO: 2071335 - DNA, 25 bp, Homo sapien
caagtgcaagtgtaggcggctgtct

SEQ ID NO: 2071336 - DNA, 25 bp, Homo sapien
gcagctgcgtttcaccaggggcaaa

SEQ ID NO: 2071337 - DNA, 25 bp, Homo sapien
acggcgagggaccaagccggatttg

SEQ ID NO: 2071338 - DNA, 25 bp, Homo sapien
aaatgtcttaatgtaggttgtagtc

SEQ ID NO: 2071339 - DNA, 25 bp, Homo sapien
cagcctagaggcagctattttacca

SEQ ID NO: 2071340 - DNA, 25 bp, Homo sapien
tgcacacatataaaagttgatactg

SEQ ID NO: 2071341 - DNA, 25 bp, Homo sapien
tattttaccatctggtatttatggt

SEQ ID NO: 2071342 - DNA, 25 bp, Homo sapien
cagggagaatcagctccacagagga

SEQ ID NO: 2071343 - DNA, 25 bp, Homo sapien
tgcttcccataccactgtgcattca

SEQ ID NO: 2071344 - DNA, 25 bp, Homo sapien
ctcccttgcttcccataccactgtg

SEQ ID NO: 2071345 - DNA, 25 bp, Homo sapien
gggagaatcagctccacagaggaag

SEQ ID NO: 2071346 - DNA, 25 bp, Homo sapien
gacactgatacacaaaccaaggctg

SEQ ID NO: 2071347 - DNA, 25 bp, Homo sapien
tgatggcccagatacccagaaagac

SEQ ID NO: 2071348 - DNA, 25 bp, Homo sapien
aaaatggccattccacagttgatgg

SEQ ID NO: 2071349 - DNA, 25 bp, Homo sapien
catttgccgtttatctctgcagaca

SEQ ID NO: 2071350 - DNA, 25 bp, Homo sapien
gcttaaaattgccctgccggcagct

SEQ ID NO: 2071351 - DNA, 25 bp, Homo sapien
gggcttaaaattgccctgccggcag

SEQ ID NO: 2071352 - DNA, 25 bp, Homo sapien
cagctggcatgactcagcttgtgtg

SEQ ID NO: 2071353 - DNA, 25 bp, Homo sapien
ggcttaaaattgccctgccggcagc

SEQ ID NO: 2071354 - DNA, 25 bp, Homo sapien
aggagttctgtttcacccgatagcc

SEQ ID NO: 2071355 - DNA, 25 bp, Homo sapien
agtgtctggtaacccacaaaccttg

SEQ ID NO: 2071356 - DNA, 25 bp, Homo sapien
agttctgtttcacccgatagccgca

SEQ ID NO: 2071357 - DNA, 25 bp, Homo sapien
gagaacaccagtgtctggtaaccca

SEQ ID NO: 2071358 - DNA, 25 bp, Homo sapien
tgaaaacccattgtcacaatcacag

SEQ ID NO: 2071359 - DNA, 25 bp, Homo sapien
gtgctcctagacctgcccaaaggga

SEQ ID NO: 2071360 - DNA, 25 bp, Homo sapien
tccagggatggtgttgaaattccgt

SEQ ID NO: 2071361 - DNA, 25 bp, Homo sapien
caatcatcttgctgagtgctcctag

SEQ ID NO: 2071362 - DNA, 25 bp, Homo sapien
tgacctattatgatgaccagacttg

SEQ ID NO: 2071363 - DNA, 25 bp, Homo sapien
taaggtccgcatgcaagtggaatgc

SEQ ID NO: 2071364 - DNA, 25 bp, Homo sapien
catgcaagtggaatgcctcaatatc

SEQ ID NO: 2071365 - DNA, 25 bp, Homo sapien
cagagtgttgaggataaggtccgca

SEQ ID NO: 2071366 - DNA, 25 bp, Homo sapien
tcagaaatctgcgtaaccctactgt

SEQ ID NO: 2071367 - DNA, 25 bp, Homo sapien
tgtatgcatcatgagtgattgtggc

SEQ ID NO: 2071368 - DNA, 25 bp, Homo sapien
agttgtggattggtaagcttctggt

SEQ ID NO: 2071369 - DNA, 25 bp, Homo sapien
cagccagcctttgaaaaaacgatgc

SEQ ID NO: 2071370 - DNA, 25 bp, Homo sapien
ggattggactgtggggggaatgctc

SEQ ID NO: 2071371 - DNA, 25 bp, Homo sapien
cgagcaccaggacagactatggctg

SEQ ID NO: 2071372 - DNA, 25 bp, Homo sapien
aatgctctctcttgtccccctgaag

SEQ ID NO: 2071373 - DNA, 25 bp, Homo sapien
ggccttctgggggattggactgtgg

SEQ ID NO: 2071374 - DNA, 25 bp, Homo sapien
tgtttttatcgccagtcctagggga

SEQ ID NO: 2071375 - DNA, 25 bp, Homo sapien
taggattccacatgaagccagatgc

SEQ ID NO: 2071376 - DNA, 25 bp, Homo sapien
gagtggtgaccacaagtctgttttt

SEQ ID NO: 2071377 - DNA, 25 bp, Homo sapien
ccagagaaaccgagtggtgaccaca

SEQ ID NO: 2071378 - DNA, 25 bp, Homo sapien
tcttgaagcagacgtcttcctgtgc

SEQ ID NO: 2071379 - DNA, 25 bp, Homo sapien
gaattacaggaaccagacttttgca

SEQ ID NO: 2071380 - DNA, 25 bp, Homo sapien
gttgagcctggaaattcacggtcat

SEQ ID NO: 2071381 - DNA, 25 bp, Homo sapien
cttctggatgaaccgagggagatgt

SEQ ID NO: 2071382 - DNA, 25 bp, Homo sapien
cagacatctgccatcacaccagcta

SEQ ID NO: 2071383 - DNA, 25 bp, Homo sapien
ttacagacatctgccatcacaccag

SEQ ID NO: 2071384 - DNA, 25 bp, Homo sapien
cctcaggtgatccaaagtactcggc

SEQ ID NO: 2071385 - DNA, 25 bp, Homo sapien
aggtgatccaaagtactcggcctcc

SEQ ID NO: 2071386 - DNA, 25 bp, Homo sapien
gcaagattcagtatctcagctctgg

SEQ ID NO: 2071387 - DNA, 25 bp, Homo sapien
taagatagcaggaattttgccaaca

SEQ ID NO: 2071388 - DNA, 25 bp, Homo sapien
tttagatcaagcagtggtgatctca

SEQ ID NO: 2071389 - DNA, 25 bp, Homo sapien
cacatttagatcaagcagtggtgat

SEQ ID NO: 2071390 - DNA, 25 bp, Homo sapien
ggccacgtcggcgttctgcttcacc

SEQ ID NO: 2071391 - DNA, 25 bp, Homo sapien
gccacgtcggcgttctgcttcacca

SEQ ID NO: 2071392 - DNA, 25 bp, Homo sapien
ccacgtcggcgttctgcttcaccac

SEQ ID NO: 2071393 - DNA, 25 bp, Homo sapien
ttctaatttccgcacaagcgtcctc

SEQ ID NO: 2071394 - DNA, 25 bp, Homo sapien
tctaatttccgcacaagcgtcctca

SEQ ID NO: 2071395 - DNA, 25 bp, Homo sapien
ttttgcttctaatttccgcacaagc

SEQ ID NO: 2071396 - DNA, 25 bp, Homo sapien
tgcttctaatttccgcacaagcgtc

SEQ ID NO: 2071397 - DNA, 25 bp, Homo sapien
ccacgggagcagagactcgggccct

SEQ ID NO: 2071398 - DNA, 25 bp, Homo sapien
cctttcagtgcttcgtaacttatct

SEQ ID NO: 2071399 - DNA, 25 bp, Homo sapien
gactctccctgagccgcaaaatcgg

SEQ ID NO: 2071400 - DNA, 25 bp, Homo sapien
gcaaaatcggtgctaggactccctg

SEQ ID NO: 2071401 - DNA, 25 bp, Homo sapien
tctgctgaccgggtcctcttttgac

SEQ ID NO: 2071402 - DNA, 25 bp, Homo sapien
tgaatgcctcgacgcttcctttgca

SEQ ID NO: 2071403 - DNA, 25 bp, Homo sapien
gtcgggtcctcgaaaaatggctgcc

SEQ ID NO: 2071404 - DNA, 25 bp, Homo sapien
ctgcagggcgacgtgcaggcaggga

SEQ ID NO: 2071405 - DNA, 25 bp, Homo sapien
catagcccaaatcgtcgggaatggc

SEQ ID NO: 2071406 - DNA, 25 bp, Homo sapien
tctccaaaatgtgtctcgtgggctc

SEQ ID NO: 2071407 - DNA, 25 bp, Homo sapien
cctttccatagcccaaatcgtcggg

SEQ ID NO: 2071408 - DNA, 25 bp, Homo sapien
tcgtgggctcctgacgggctctgct

SEQ ID NO: 2071409 - DNA, 25 bp, Homo sapien
tgggccaggcggggcaggcggggca

SEQ ID NO: 2071410 - DNA, 25 bp, Homo sapien
cgtgggccaggcggggcaggcgggg

SEQ ID NO: 2071411 - DNA, 25 bp, Homo sapien
ggccaggcggggcaggcggggcagg

SEQ ID NO: 2071412 - DNA, 25 bp, Homo sapien
cgccgtgggccaggcggggcaggcg

SEQ ID NO: 2071413 - DNA, 25 bp, Homo sapien
ctataaaactacagggtgcctataa

SEQ ID NO: 2071414 - DNA, 25 bp, Homo sapien
gcactgagtcttgttattacaaggc

SEQ ID NO: 2071415 - DNA, 25 bp, Homo sapien
ggtggcttactccttattgttatta

SEQ ID NO: 2071416 - DNA, 25 bp, Homo sapien
gagtcttgttattacaaggcaggca

SEQ ID NO: 2071417 - DNA, 25 bp, Homo sapien
tgtatctgagccgtcatctgactgg

SEQ ID NO: 2071418 - DNA, 25 bp, Homo sapien
tctgtatctgagccgtcatctgact

SEQ ID NO: 2071419 - DNA, 25 bp, Homo sapien
tatctgagccgtcatctgactggtt

SEQ ID NO: 2071420 - DNA, 25 bp, Homo sapien
ctctgtatctgagccgtcatctgac

SEQ ID NO: 2071421 - DNA, 25 bp, Homo sapien
tatgacgtttaaattccttctgcag

SEQ ID NO: 2071422 - DNA, 25 bp, Homo sapien
cacttgaggtggtattgtgagcatc

SEQ ID NO: 2071423 - DNA, 25 bp, Homo sapien
tctgcagtttactgatctggttgct

SEQ ID NO: 2071424 - DNA, 25 bp, Homo sapien
atggagctggggaggcacttgaggt

SEQ ID NO: 2071425 - DNA, 25 bp, Homo sapien
caatgtagtctttagactgggtcca

SEQ ID NO: 2071426 - DNA, 25 bp, Homo sapien
tggtttcaatgtagtctttagactg

SEQ ID NO: 2071427 - DNA, 25 bp, Homo sapien
ttcaatgtagtctttagactgggtc

SEQ ID NO: 2071428 - DNA, 25 bp, Homo sapien
tttggtttcaatgtagtctttagac

SEQ ID NO: 2071429 - DNA, 25 bp, Homo sapien
ttttttgatcctgctggcaacttct

SEQ ID NO: 2071430 - DNA, 25 bp, Homo sapien
catgattccagtttttttttttgat

SEQ ID NO: 2071431 - DNA, 25 bp, Homo sapien
ttttgatcctgctggcaacttcttc

SEQ ID NO: 2071432 - DNA, 25 bp, Homo sapien
tttttttttgatcctgctggcaact

SEQ ID NO: 2071433 - DNA, 25 bp, Homo sapien
gccctctatacttcggtacatcttt

SEQ ID NO: 2071434 - DNA, 25 bp, Homo sapien
agccctctatacttcggtacatctt

SEQ ID NO: 2071435 - DNA, 25 bp, Homo sapien
ccctctatacttcggtacatctttg

SEQ ID NO: 2071436 - DNA, 25 bp, Homo sapien
ctctatacttcggtacatctttggc

SEQ ID NO: 2071437 - DNA, 25 bp, Homo sapien
tttgttggtaaataagacatctcgc

SEQ ID NO: 2071438 - DNA, 25 bp, Homo sapien
atgctccctggtggatttgttggta

SEQ ID NO: 2071439 - DNA, 25 bp, Homo sapien
ggtaaataagacatctcgcgtcggg

SEQ ID NO: 2071440 - DNA, 25 bp, Homo sapien
gctccctggtggatttgttggtaaa

SEQ ID NO: 2071441 - DNA, 25 bp, Homo sapien
tcatatccaactgaaggaatactct

SEQ ID NO: 2071442 - DNA, 25 bp, Homo sapien
caaacacttcatatccaactgaagg

SEQ ID NO: 2071443 - DNA, 25 bp, Homo sapien
aaggaatactcttcttgctagtcat

SEQ ID NO: 2071444 - DNA, 25 bp, Homo sapien
caactgaaggaatactcttcttgct

SEQ ID NO: 2071445 - DNA, 25 bp, Homo sapien
ctggaactgcttatcatcctcatca

SEQ ID NO: 2071446 - DNA, 25 bp, Homo sapien
gatacctggaactgcttatcatcct

SEQ ID NO: 2071447 - DNA, 25 bp, Homo sapien
tacctggaactgcttatcatcctca

SEQ ID NO: 2071448 - DNA, 25 bp, Homo sapien
tgatacctggaactgcttatcatcc

SEQ ID NO: 2071449 - DNA, 25 bp, Homo sapien
taccacagccatgaatttccgtttc

SEQ ID NO: 2071450 - DNA, 25 bp, Homo sapien
cagccatgaatttccgtttcatgtt

SEQ ID NO: 2071451 - DNA, 25 bp, Homo sapien
ccacagccatgaatttccgtttcat

SEQ ID NO: 2071452 - DNA, 25 bp, Homo sapien
ttaccacagccatgaatttccgttt

SEQ ID NO: 2071453 - DNA, 25 bp, Homo sapien
ttgacttcggtccaggtctgcagta

SEQ ID NO: 2071454 - DNA, 25 bp, Homo sapien
catgctttgacttcggtccaggtct

SEQ ID NO: 2071455 - DNA, 25 bp, Homo sapien
ccactctttgtcttgggtcccgagg

SEQ ID NO: 2071456 - DNA, 25 bp, Homo sapien
gtctgcagtagggttgacgggagct

SEQ ID NO: 2071457 - DNA, 25 bp, Homo sapien
ctgtcatgggaatccatggtgaggt

SEQ ID NO: 2071458 - DNA, 25 bp, Homo sapien
tccatggtgaggtataagcttcagg

SEQ ID NO: 2071459 - DNA, 25 bp, Homo sapien
gaggtataagcttcaggccctggac

SEQ ID NO: 2071460 - DNA, 25 bp, Homo sapien
tggtgaggtataagcttcaggccct

SEQ ID NO: 2071461 - DNA, 25 bp, Homo sapien
gctaatccgccggactcagggatta

SEQ ID NO: 2071462 - DNA, 25 bp, Homo sapien
acagagtgaggctgatgttgtgtgt

SEQ ID NO: 2071463 - DNA, 25 bp, Homo sapien
ttgtgtgtctccacggagagcacgt

SEQ ID NO: 2071464 - DNA, 25 bp, Homo sapien
cagcaaggccacgagtgaatttcag

SEQ ID NO: 2071465 - DNA, 25 bp, Homo sapien
ggcacctgtgactggattcatagac

SEQ ID NO: 2071466 - DNA, 25 bp, Homo sapien
taattcatgttcaaatcttagctgc

SEQ ID NO: 2071467 - DNA, 25 bp, Homo sapien
gcctcttgggccatacttcaaggtt

SEQ ID NO: 2071468 - DNA, 25 bp, Homo sapien
ccaagtcaggagtgcgccttgccat

SEQ ID NO: 2071469 - DNA, 25 bp, Homo sapien
caaaggcagttgtggcctcagaaga

SEQ ID NO: 2071470 - DNA, 25 bp, Homo sapien
cattggcaaaggcagttgtggcctc

SEQ ID NO: 2071471 - DNA, 25 bp, Homo sapien
gcaggaaccttccactggtcaagac

SEQ ID NO: 2071472 - DNA, 25 bp, Homo sapien
gactagattgggtccatttggacaa

SEQ ID NO: 2071473 - DNA, 25 bp, Homo sapien
gcttaactgtgtcaccagatggaca

SEQ ID NO: 2071474 - DNA, 25 bp, Homo sapien
ccacgacatcatcaatgggtcactt

SEQ ID NO: 2071475 - DNA, 25 bp, Homo sapien
cagcttaactgtgtcaccagatgga

SEQ ID NO: 2071476 - DNA, 25 bp, Homo sapien
ccagatggacaccacgacatcatca

SEQ ID NO: 2071477 - DNA, 25 bp, Homo sapien
gaccctaagcatcaatagtaaacct

SEQ ID NO: 2071478 - DNA, 25 bp, Homo sapien
caagtccctagagttcggctgatcg

SEQ ID NO: 2071479 - DNA, 25 bp, Homo sapien
aatttggccgtgtaggtctattggc

SEQ ID NO: 2071480 - DNA, 25 bp, Homo sapien
ttggcagtttcatacagaaaataca

SEQ ID NO: 2071481 - DNA, 25 bp, Homo sapien
agacctttattactgactctcagca

SEQ ID NO: 2071482 - DNA, 25 bp, Homo sapien
aatgaatcttgtgccctggtagcag

SEQ ID NO: 2071483 - DNA, 25 bp, Homo sapien
tttattactgactctcagcaagtga

SEQ ID NO: 2071484 - DNA, 25 bp, Homo sapien
catcttcccataggcattaaatgaa

SEQ ID NO: 2071485 - DNA, 25 bp, Homo sapien
ttccaaaagtcgtgggggctctgga

SEQ ID NO: 2071486 - DNA, 25 bp, Homo sapien
tcttccaaaagtcgtgggggctctg

SEQ ID NO: 2071487 - DNA, 25 bp, Homo sapien
cttccaaaagtcgtgggggctctgg

SEQ ID NO: 2071488 - DNA, 25 bp, Homo sapien
ctcttccaaaagtcgtgggggctct

SEQ ID NO: 2071489 - DNA, 25 bp, Homo sapien
accgttgaccgacatccagattctt

SEQ ID NO: 2071490 - DNA, 25 bp, Homo sapien
catccaaatgaccacacgcatgctg

SEQ ID NO: 2071491 - DNA, 25 bp, Homo sapien
gcctgaggtcttgtctattgcaggt

SEQ ID NO: 2071492 - DNA, 25 bp, Homo sapien
cttagtgccgtccaccgttgaccga

SEQ ID NO: 2071493 - DNA, 25 bp, Homo sapien
ccaaattcctcttaatgtagtgtat

SEQ ID NO: 2071494 - DNA, 25 bp, Homo sapien
ctccaaattcctcttaatgtagtgt

SEQ ID NO: 2071495 - DNA, 25 bp, Homo sapien
cctcttaatgtagtgtattgtacaa

SEQ ID NO: 2071496 - DNA, 25 bp, Homo sapien
ttcctcttaatgtagtgtattgtac

SEQ ID NO: 2071497 - DNA, 25 bp, Homo sapien
tgctctcgggcagttgccccactat

SEQ ID NO: 2071498 - DNA, 25 bp, Homo sapien
gtgtttcccataaggagacccaggc

SEQ ID NO: 2071499 - DNA, 25 bp, Homo sapien
ttagcctgtctctagaatctggccc

SEQ ID NO: 2071500 - DNA, 25 bp, Homo sapien
aatctggcccttcctatacggagga

SEQ ID NO: 2071501 - DNA, 25 bp, Homo sapien
ggtatttgtaaactatgcagttgac

SEQ ID NO: 2071502 - DNA, 25 bp, Homo sapien
tgtaaactatgcagttgacaaaggg

SEQ ID NO: 2071503 - DNA, 25 bp, Homo sapien
actatgcagttgacaaagggttaat

SEQ ID NO: 2071504 - DNA, 25 bp, Homo sapien
tgggagagggtatttgtaaactatg

SEQ ID NO: 2071505 - DNA, 25 bp, Homo sapien
aagggcggccacagtgttgagtact

SEQ ID NO: 2071506 - DNA, 25 bp, Homo sapien
ccagagaattaagagcatgcttccc

SEQ ID NO: 2071507 - DNA, 25 bp, Homo sapien
tacccagagaactaagagcatgctg

SEQ ID NO: 2071508 - DNA, 25 bp, Homo sapien
tctcctctgttgtgattgtacccag

SEQ ID NO: 2071509 - DNA, 25 bp, Homo sapien
gcctcttctccttatgattggtggg

SEQ ID NO: 2071510 - DNA, 25 bp, Homo sapien
tcctaagaaccattagaacgtcacc

SEQ ID NO: 2071511 - DNA, 25 bp, Homo sapien
cacacatgcagatctgtggcctctt

SEQ ID NO: 2071512 - DNA, 25 bp, Homo sapien
caggaagcaggtaggcaccgatctt

SEQ ID NO: 2071513 - DNA, 25 bp, Homo sapien
catgatagtagatccggcacccagt

SEQ ID NO: 2071514 - DNA, 25 bp, Homo sapien
tgccaaaccaccaggtaggccactg

SEQ ID NO: 2071515 - DNA, 25 bp, Homo sapien
gctggccagtacttcccctcttaag

SEQ ID NO: 2071516 - DNA, 25 bp, Homo sapien
ccctcttaaggctgtctgtgggaac

SEQ ID NO: 2071517 - DNA, 25 bp, Homo sapien
ccagaaggtcatttgcccgctcttt

SEQ ID NO: 2071518 - DNA, 25 bp, Homo sapien
agaaggtcatttgcccgctctttcg

SEQ ID NO: 2071519 - DNA, 25 bp, Homo sapien
tcatttgcccgctctttcggctgac

SEQ ID NO: 2071520 - DNA, 25 bp, Homo sapien
tctttcggctgactccacgctgcat

SEQ ID NO: 2071521 - DNA, 25 bp, Homo sapien
catacctgtagtcaaactttaaatt

SEQ ID NO: 2071522 - DNA, 25 bp, Homo sapien
tgcccccgcccaatatccatggtgt

SEQ ID NO: 2071523 - DNA, 25 bp, Homo sapien
tagaaaacttattaccaggcttgcc

SEQ ID NO: 2071524 - DNA, 25 bp, Homo sapien
gagacactgggcctgactaatgccc

SEQ ID NO: 2071525 - DNA, 25 bp, Homo sapien
tctggaacagctagttctggtggac

SEQ ID NO: 2071526 - DNA, 25 bp, Homo sapien
tccaagatgtaggtaaaattccagt

SEQ ID NO: 2071527 - DNA, 25 bp, Homo sapien
catgggcagcagttgttacgatgac

SEQ ID NO: 2071528 - DNA, 25 bp, Homo sapien
tgaaatcaggtaaggctggctggcc

SEQ ID NO: 2071529 - DNA, 25 bp, Homo sapien
ccttggatgccccaaacgaggtggc

SEQ ID NO: 2071530 - DNA, 25 bp, Homo sapien
ggtggctgagcagaccaggttcccc

SEQ ID NO: 2071531 - DNA, 25 bp, Homo sapien
gatgccccaaacgaggtggctgagc

SEQ ID NO: 2071532 - DNA, 25 bp, Homo sapien
gagtgggcagagcactaagtgccgg

SEQ ID NO: 2071533 - DNA, 25 bp, Homo sapien
atggcagcatgaggtggacaagctt

SEQ ID NO: 2071534 - DNA, 25 bp, Homo sapien
ggcagcatgaggtggacaagcttgg

SEQ ID NO: 2071535 - DNA, 25 bp, Homo sapien
aatggcagcatgaggtggacaagct

SEQ ID NO: 2071536 - DNA, 25 bp, Homo sapien
tggcagcatgaggtggacaagcttg

SEQ ID NO: 2071537 - DNA, 25 bp, Homo sapien
ctgcattgttacatgtggtgtcaga

SEQ ID NO: 2071538 - DNA, 25 bp, Homo sapien
tctgcattgttacatgtggtgtcag

SEQ ID NO: 2071539 - DNA, 25 bp, Homo sapien
ttcacttgctccatatagttaacat

SEQ ID NO: 2071540 - DNA, 25 bp, Homo sapien
attcacttgctccatatagttaaca

SEQ ID NO: 2071541 - DNA, 25 bp, Homo sapien
tgctccatatagttaacatcatttc

SEQ ID NO: 2071542 - DNA, 25 bp, Homo sapien
tcctctagctttgatactccctata

SEQ ID NO: 2071543 - DNA, 25 bp, Homo sapien
tggattatcatttgtgactctaaaa

SEQ ID NO: 2071544 - DNA, 25 bp, Homo sapien
caaggatgtgaacacctatatgccc

SEQ ID NO: 2071545 - DNA, 25 bp, Homo sapien
tgatactccctatactttggtcaca

SEQ ID NO: 2071546 - DNA, 25 bp, Homo sapien
tctttactatgagtgctgccttgaa

SEQ ID NO: 2071547 - DNA, 25 bp, Homo sapien
gcattctacaattttccgaacaagt

SEQ ID NO: 2071548 - DNA, 25 bp, Homo sapien
tgttttctttactatgagtgctgcc

SEQ ID NO: 2071549 - DNA, 25 bp, Homo sapien
cagaaagcattctacaattttccga

SEQ ID NO: 2071550 - DNA, 25 bp, Homo sapien
tcttcctgctttcaccactaatctg

SEQ ID NO: 2071551 - DNA, 25 bp, Homo sapien
actaatctggcctcgacctcattca

SEQ ID NO: 2071552 - DNA, 25 bp, Homo sapien
aatctggcctcgacctcattcatca

SEQ ID NO: 2071553 - DNA, 25 bp, Homo sapien
tgttctggtcaaacaatcttcttcc

SEQ ID NO: 2071554 - DNA, 25 bp, Homo sapien
gtccccatagaaatgttgtcagctt

SEQ ID NO: 2071555 - DNA, 25 bp, Homo sapien
gtcagtccccatagaaatgttgtca

SEQ ID NO: 2071556 - DNA, 25 bp, Homo sapien
ccatagaaatgttgtcagcttccat

SEQ ID NO: 2071557 - DNA, 25 bp, Homo sapien
tccccatagaaatgttgtcagcttc

SEQ ID NO: 2071558 - DNA, 25 bp, Homo sapien
ggactggaagttagagcctcagaaa

SEQ ID NO: 2071559 - DNA, 25 bp, Homo sapien
gcctcagaaagcatttgtttcttgg

SEQ ID NO: 2071560 - DNA, 25 bp, Homo sapien
catttctagggctctgtagttgaca

SEQ ID NO: 2071561 - DNA, 25 bp, Homo sapien
tggctacagggaaataagcaggact

SEQ ID NO: 2071562 - DNA, 25 bp, Homo sapien
tcaaagttagcctgagatggattcc

SEQ ID NO: 2071563 - DNA, 25 bp, Homo sapien
tcttcaaagttgtggcagatactgc

SEQ ID NO: 2071564 - DNA, 25 bp, Homo sapien
tgagacaaagccaatagaaattctg

SEQ ID NO: 2071565 - DNA, 25 bp, Homo sapien
gaagagtatgggcatactcaaagtt

SEQ ID NO: 2071566 - DNA, 25 bp, Homo sapien
tctctcatatctatgccaccgaatt

SEQ ID NO: 2071567 - DNA, 25 bp, Homo sapien
tcatatctatgccaccgaattcttg

SEQ ID NO: 2071568 - DNA, 25 bp, Homo sapien
tctatgccaccgaattcttgacttt

SEQ ID NO: 2071569 - DNA, 25 bp, Homo sapien
tgccaccgaattcttgacttttata

SEQ ID NO: 2071570 - DNA, 25 bp, Homo sapien
ttaagaggctagaatggcaaacaca

SEQ ID NO: 2071571 - DNA, 25 bp, Homo sapien
cagagggtccaaacaactgagaatg

SEQ ID NO: 2071572 - DNA, 25 bp, Homo sapien
aagttgccgatattccagagggtcc

SEQ ID NO: 2071573 - DNA, 25 bp, Homo sapien
gcaaacacagaagctaaggtttcag

SEQ ID NO: 2071574 - DNA, 25 bp, Homo sapien
tatcatccagaaggctgcggctgct

SEQ ID NO: 2071575 - DNA, 25 bp, Homo sapien
aattctatcatccagaaggctgcgg

SEQ ID NO: 2071576 - DNA, 25 bp, Homo sapien
ctatcatccagaaggctgcggctgc

SEQ ID NO: 2071577 - DNA, 25 bp, Homo sapien
ctagaattctatcatccagaaggct

SEQ ID NO: 2071578 - DNA, 25 bp, Homo sapien
acccatctttctgttgtaatgttta

SEQ ID NO: 2071579 - DNA, 25 bp, Homo sapien
atttccaccacccatctttctgttg

SEQ ID NO: 2071580 - DNA, 25 bp, Homo sapien
gtaatttggcaattgcatttccacc

SEQ ID NO: 2071581 - DNA, 25 bp, Homo sapien
ttattcaaacataacttctccacaa

SEQ ID NO: 2071582 - DNA, 25 bp, Homo sapien
gctgcagtgtccttgcagtaactgt

SEQ ID NO: 2071583 - DNA, 25 bp, Homo sapien
cttatttccactaaaagtgctttct

SEQ ID NO: 2071584 - DNA, 25 bp, Homo sapien
aagcacttgtctgatgaagtcagat

SEQ ID NO: 2071585 - DNA, 25 bp, Homo sapien
gaagcacttgtctgatgaagtcaga

SEQ ID NO: 2071586 - DNA, 25 bp, Homo sapien
aagaagcacttgtctgatgaagtca

SEQ ID NO: 2071587 - DNA, 25 bp, Homo sapien
agaagcacttgtctgatgaagtcag

SEQ ID NO: 2071588 - DNA, 25 bp, Homo sapien
cataagaaagttctgccccgatctg

SEQ ID NO: 2071589 - DNA, 25 bp, Homo sapien
gacactctaggtagggcgagacaat

SEQ ID NO: 2071590 - DNA, 25 bp, Homo sapien
gcgagacaatgatggctaggcagct

SEQ ID NO: 2071591 - DNA, 25 bp, Homo sapien
gctaggcagctgctacataagaaag

SEQ ID NO: 2071592 - DNA, 25 bp, Homo sapien
tttctctgcatctgctctagcagcc

SEQ ID NO: 2071593 - DNA, 25 bp, Homo sapien
tctctgcatctgctctagcagccat

SEQ ID NO: 2071594 - DNA, 25 bp, Homo sapien
ttggaataaccactttctctgcatc

SEQ ID NO: 2071595 - DNA, 25 bp, Homo sapien
actttctctgcatctgctctagcag

SEQ ID NO: 2071596 - DNA, 25 bp, Homo sapien
tctatgttacgaaagcacgcaaagt

SEQ ID NO: 2071597 - DNA, 25 bp, Homo sapien
tacacggaagagaaagctgttgcag

SEQ ID NO: 2071598 - DNA, 25 bp, Homo sapien
cacgcaaagtgtccaatgcttatga

SEQ ID NO: 2071599 - DNA, 25 bp, Homo sapien
tgcttatgaataacacgaaggagac

SEQ ID NO: 2071600 - DNA, 25 bp, Homo sapien
tcatattggcaccttggcggatggc

SEQ ID NO: 2071601 - DNA, 25 bp, Homo sapien
caggatggtcaaggtaatcgctccc

SEQ ID NO: 2071602 - DNA, 25 bp, Homo sapien
tgactccggagtgcataaatcagag

SEQ ID NO: 2071603 - DNA, 25 bp, Homo sapien
caaatggatgcaagcaaggagctac

SEQ ID NO: 2071604 - DNA, 25 bp, Homo sapien
cttccgtagaaactaacttcagcct

SEQ ID NO: 2071605 - DNA, 25 bp, Homo sapien
gaaactaacttcagccttccctgga

SEQ ID NO: 2071606 - DNA, 25 bp, Homo sapien
agaaactaacttcagccttccctgg

SEQ ID NO: 2071607 - DNA, 25 bp, Homo sapien
aactaacttcagccttccctggatt

SEQ ID NO: 2071608 - DNA, 25 bp, Homo sapien
ggtctgatttgcacatagcttggcg

SEQ ID NO: 2071609 - DNA, 25 bp, Homo sapien
ccagatggagggaaataagtggcct

SEQ ID NO: 2071610 - DNA, 25 bp, Homo sapien
ggctcccagtgtttgaagcttcctg

SEQ ID NO: 2071611 - DNA, 25 bp, Homo sapien
taagtggcctattagtaagctctgg

SEQ ID NO: 2071612 - DNA, 25 bp, Homo sapien
tgccttaaatccataacaaaccaga

SEQ ID NO: 2071613 - DNA, 25 bp, Homo sapien
taaatccataacaaaccagaggcat

SEQ ID NO: 2071614 - DNA, 25 bp, Homo sapien
tctgccttaaatccataacaaacca

SEQ ID NO: 2071615 - DNA, 25 bp, Homo sapien
ccttaaatccataacaaaccagagg

SEQ ID NO: 2071616 - DNA, 25 bp, Homo sapien
ctgggagggggtcacacggtcgaag

SEQ ID NO: 2071617 - DNA, 25 bp, Homo sapien
tcacacggtcgaagttcttccccag

SEQ ID NO: 2071618 - DNA, 25 bp, Homo sapien
gtcacacggtcgaagttcttcccca

SEQ ID NO: 2071619 - DNA, 25 bp, Homo sapien
cacggtcgaagttcttccccagcat

SEQ ID NO: 2071620 - DNA, 25 bp, Homo sapien
gacaagtataaggaacaatctcaga

SEQ ID NO: 2071621 - DNA, 25 bp, Homo sapien
tcttatctcctgatcttgaggcaca

SEQ ID NO: 2071622 - DNA, 25 bp, Homo sapien
tgtggagttagctgataacggaact

SEQ ID NO: 2071623 - DNA, 25 bp, Homo sapien
taacggaactgtatatgccaaggca

SEQ ID NO: 2071624 - DNA, 25 bp, Homo sapien
tggtgactgtaatccactcaagact

SEQ ID NO: 2071625 - DNA, 25 bp, Homo sapien
gagggctcacaacttctctgtctat

SEQ ID NO: 2071626 - DNA, 25 bp, Homo sapien
tcaagactatcatagggcaaacaca

SEQ ID NO: 2071627 - DNA, 25 bp, Homo sapien
gttccaatgatgtaagagggctcac

SEQ ID NO: 2071628 - DNA, 25 bp, Homo sapien
gtgggattgcccacggtacttttga

SEQ ID NO: 2071629 - DNA, 25 bp, Homo sapien
cattcatggtactctgtgccttcca

SEQ ID NO: 2071630 - DNA, 25 bp, Homo sapien
gcccacggtacttttgatgggaata

SEQ ID NO: 2071631 - DNA, 25 bp, Homo sapien
tagggatcgatttcattcatggtac

SEQ ID NO: 2071632 - DNA, 25 bp, Homo sapien
tctccagccgggaaatccatcaaca

SEQ ID NO: 2071633 - DNA, 25 bp, Homo sapien
aaggtctttgggtccgtcagtatgc

SEQ ID NO: 2071634 - DNA, 25 bp, Homo sapien
tgctggctcattggcatcaaagact

SEQ ID NO: 2071635 - DNA, 25 bp, Homo sapien
catcaaagacttgtatgccaaggtc

SEQ ID NO: 2071636 - DNA, 25 bp, Homo sapien
cctggagtggttgcctacccctggg

SEQ ID NO: 2071637 - DNA, 25 bp, Homo sapien
aaaagggcctctacattgtggccct

SEQ ID NO: 2071638 - DNA, 25 bp, Homo sapien
cctctgcctggagtggttgcctacc

SEQ ID NO: 2071639 - DNA, 25 bp, Homo sapien
gggcctctacattgtggccctctgc

SEQ ID NO: 2071640 - DNA, 25 bp, Homo sapien
tatggactcgtccttgactgtcact

SEQ ID NO: 2071641 - DNA, 25 bp, Homo sapien
caaagcacgactggcgtatggactc

SEQ ID NO: 2071642 - DNA, 25 bp, Homo sapien
cttggacacttcacagtgtagttct

SEQ ID NO: 2071643 - DNA, 25 bp, Homo sapien
agtgtagttcttcacaaagcacgac

SEQ ID NO: 2071644 - DNA, 25 bp, Homo sapien
ggcttggcattctgagaagactgaa

SEQ ID NO: 2071645 - DNA, 25 bp, Homo sapien
gtcagggagcaatccaacagttgtt

SEQ ID NO: 2071646 - DNA, 25 bp, Homo sapien
ttcccaactccttatagatgtccac

SEQ ID NO: 2071647 - DNA, 25 bp, Homo sapien
ccaacagttgttcccatagttccca

SEQ ID NO: 2071648 - DNA, 25 bp, Homo sapien
tcaactccttccattctagattcct

SEQ ID NO: 2071649 - DNA, 25 bp, Homo sapien
gcaactccaagtactgaagcagaac

SEQ ID NO: 2071650 - DNA, 25 bp, Homo sapien
aaagagttatagtggtacgttctgc

SEQ ID NO: 2071651 - DNA, 25 bp, Homo sapien
tagattcctttcacgcacagcaggc

SEQ ID NO: 2071652 - DNA, 25 bp, Homo sapien
cttctgggttcacataataagggaa

SEQ ID NO: 2071653 - DNA, 25 bp, Homo sapien
gggaaatacttgcttagccctgaca

SEQ ID NO: 2071654 - DNA, 25 bp, Homo sapien
acttgcttagccctgacaaagcctg

SEQ ID NO: 2071655 - DNA, 25 bp, Homo sapien
taataagggaaatacttgcttagcc

SEQ ID NO: 2071656 - DNA, 25 bp, Homo sapien
gtaagacagtaggtgcagcaggcat

SEQ ID NO: 2071657 - DNA, 25 bp, Homo sapien
ttgtaagacagtaggtgcagcaggc

SEQ ID NO: 2071658 - DNA, 25 bp, Homo sapien
tgtaagacagtaggtgcagcaggca

SEQ ID NO: 2071659 - DNA, 25 bp, Homo sapien
tgttcaagatacctggttcaagtgt

SEQ ID NO: 2071660 - DNA, 25 bp, Homo sapien
gtgatgtctgccacctcaggcacca

SEQ ID NO: 2071661 - DNA, 25 bp, Homo sapien
tccagtttcagtgaggcccatgttc

SEQ ID NO: 2071662 - DNA, 25 bp, Homo sapien
gatacctggttcaagtgtggaagtg

SEQ ID NO: 2071663 - DNA, 25 bp, Homo sapien
tatcatcactattagtgatggcagc

SEQ ID NO: 2071664 - DNA, 25 bp, Homo sapien
tcactattagtgatggcagcagcgg

SEQ ID NO: 2071665 - DNA, 25 bp, Homo sapien
ctaaagattcccagatactgaaaaa

SEQ ID NO: 2071666 - DNA, 25 bp, Homo sapien
taacatctcttttaatatcatcact

SEQ ID NO: 2071667 - DNA, 25 bp, Homo sapien
actggatcatcaatatggagaaaag

SEQ ID NO: 2071668 - DNA, 25 bp, Homo sapien
ttactggatcatcaatatggagaaa

SEQ ID NO: 2071669 - DNA, 25 bp, Homo sapien
tactggatcatcaatatggagaaaa

SEQ ID NO: 2071670 - DNA, 25 bp, Homo sapien
tagtatttagctctatagtaagaag

SEQ ID NO: 2071671 - DNA, 25 bp, Homo sapien
gtaggctacaatgttagtatttagc

SEQ ID NO: 2071672 - DNA, 25 bp, Homo sapien
ttctctgacttgtaggctacaatgt

SEQ ID NO: 2071673 - DNA, 25 bp, Homo sapien
caatgttagtatttagctctatagt

SEQ ID NO: 2071674 - DNA, 25 bp, Homo sapien
catgcagtgtcacttcaatggtgaa

SEQ ID NO: 2071675 - DNA, 25 bp, Homo sapien
gcaacagtatgcacttctataatgg

SEQ ID NO: 2071676 - DNA, 25 bp, Homo sapien
tcacataggtgtaattctaagctcc

SEQ ID NO: 2071677 - DNA, 25 bp, Homo sapien
cattggtttgtgtgtctctgcaaca

SEQ ID NO: 2071678 - DNA, 25 bp, Homo sapien
tttgggactgagaacggtacgtctg

SEQ ID NO: 2071679 - DNA, 25 bp, Homo sapien
tacgtctgggtagtttctgttccta

SEQ ID NO: 2071680 - DNA, 25 bp, Homo sapien
tctgttcctaggtgttggatttgta

SEQ ID NO: 2071681 - DNA, 25 bp, Homo sapien
gatttgtacctcttgagtgtggacc

SEQ ID NO: 2071682 - DNA, 25 bp, Homo sapien
caagatctcagtgatggtgaccaga

SEQ ID NO: 2071683 - DNA, 25 bp, Homo sapien
tttccacccatgaatttggccgggc

SEQ ID NO: 2071684 - DNA, 25 bp, Homo sapien
aaagggacccaactccgatgcagaa

SEQ ID NO: 2071685 - DNA, 25 bp, Homo sapien
gacaaacagttctactctgggagct

SEQ ID NO: 2071686 - DNA, 25 bp, Homo sapien
tcaaggagattagggatggatgttc

SEQ ID NO: 2071687 - DNA, 25 bp, Homo sapien
taccggagtgcccaaatctcccagg

SEQ ID NO: 2071688 - DNA, 25 bp, Homo sapien
ggatgttccagaggttgcacacgta

SEQ ID NO: 2071689 - DNA, 25 bp, Homo sapien
tattgcaaatagacagccgaagtcc

SEQ ID NO: 2071690 - DNA, 25 bp, Homo sapien
cttccttatcgtaatgagagccttg

SEQ ID NO: 2071691 - DNA, 25 bp, Homo sapien
cttgaacttccatgatattaggctt

SEQ ID NO: 2071692 - DNA, 25 bp, Homo sapien
ttccttatcgtaatgagagccttga

SEQ ID NO: 2071693 - DNA, 25 bp, Homo sapien
ttacaccctcaacctcagtcattgc

SEQ ID NO: 2071694 - DNA, 25 bp, Homo sapien
cctgtctggactggctttgacttac

SEQ ID NO: 2071695 - DNA, 25 bp, Homo sapien
gttatgctgactctaaacccaatca

SEQ ID NO: 2071696 - DNA, 25 bp, Homo sapien
tttctttgcccaatgacagttatgc

SEQ ID NO: 2071697 - DNA, 25 bp, Homo sapien
tcatgtcactattttctgcaggtcg

SEQ ID NO: 2071698 - DNA, 25 bp, Homo sapien
ggtttaacagacaaccgcgctgatg

SEQ ID NO: 2071699 - DNA, 25 bp, Homo sapien
cctcttgggcaccttagtgggaggg

SEQ ID NO: 2071700 - DNA, 25 bp, Homo sapien
tctgaagatttattctctcttgttt

SEQ ID NO: 2071701 - DNA, 25 bp, Homo sapien
gaggcctcctttatgtgtagatcgg

SEQ ID NO: 2071702 - DNA, 25 bp, Homo sapien
tagatcggtcatgagactgagcctt

SEQ ID NO: 2071703 - DNA, 25 bp, Homo sapien
cctttatgtgtagatcggtcatgag

SEQ ID NO: 2071704 - DNA, 25 bp, Homo sapien
tgtgtagatcggtcatgagactgag

SEQ ID NO: 2071705 - DNA, 25 bp, Homo sapien
ctcatttgggcttgccccacgttcc

SEQ ID NO: 2071706 - DNA, 25 bp, Homo sapien
tcatttgggcttgccccacgttcca

SEQ ID NO: 2071707 - DNA, 25 bp, Homo sapien
catttgggcttgccccacgttccat

SEQ ID NO: 2071708 - DNA, 25 bp, Homo sapien
ttataactagtatgaacataggtac

SEQ ID NO: 2071709 - DNA, 25 bp, Homo sapien
gatactcaagttcatgtgtaactgg

SEQ ID NO: 2071710 - DNA, 25 bp, Homo sapien
taaaatgaagataaagggtgggcac

SEQ ID NO: 2071711 - DNA, 25 bp, Homo sapien
agaggttccaatgagttgagatctt

SEQ ID NO: 2071712 - DNA, 25 bp, Homo sapien
gaaccttaccatgttcagggtgaag

SEQ ID NO: 2071713 - DNA, 25 bp, Homo sapien
gaaggtttatggtagtcacagacag

SEQ ID NO: 2071714 - DNA, 25 bp, Homo sapien
actgctgaggactttatatggatgc

SEQ ID NO: 2071715 - DNA, 25 bp, Homo sapien
catttctaagtcaggctcacatttc

SEQ ID NO: 2071716 - DNA, 25 bp, Homo sapien
ccatctgttaggctgtggcatatct

SEQ ID NO: 2071717 - DNA, 25 bp, Homo sapien
catctgttaggctgtggcatatcta

SEQ ID NO: 2071718 - DNA, 25 bp, Homo sapien
atctatttgattagcgctttctaag

SEQ ID NO: 2071719 - DNA, 25 bp, Homo sapien
tttgattagcgctttctaagagcac

SEQ ID NO: 2071720 - DNA, 25 bp, Homo sapien
caacataagacagtgatcaaatccc

SEQ ID NO: 2071721 - DNA, 25 bp, Homo sapien
gacctgagttatgtggaaccacaga

SEQ ID NO: 2071722 - DNA, 25 bp, Homo sapien
tagctatgagagtggtattacaaca

SEQ ID NO: 2071723 - DNA, 25 bp, Homo sapien
cagtgtgagcagatacaactataag

SEQ ID NO: 2071724 - DNA, 25 bp, Homo sapien
gattctattgcaatcctagttggtg

SEQ ID NO: 2071725 - DNA, 25 bp, Homo sapien
ttaagaacctggatagcatatcctg

SEQ ID NO: 2071726 - DNA, 25 bp, Homo sapien
gtctctcgcttccattcttaaaata

SEQ ID NO: 2071727 - DNA, 25 bp, Homo sapien
caaagggagacttctagtggtccac

SEQ ID NO: 2071728 - DNA, 25 bp, Homo sapien
tgcacatcatatctctggctgagag

SEQ ID NO: 2071729 - DNA, 25 bp, Homo sapien
ttattggttccacgctggcttgcac

SEQ ID NO: 2071730 - DNA, 25 bp, Homo sapien
ggggcccctgatctgggtcatagaa

SEQ ID NO: 2071731 - DNA, 25 bp, Homo sapien
tctggctgagagctaacgtgttttg

SEQ ID NO: 2071732 - DNA, 25 bp, Homo sapien
tgcaacaaggaagcatggtcagcct

SEQ ID NO: 2071733 - DNA, 25 bp, Homo sapien
aacaaggaagcatggtcagcctgtg

SEQ ID NO: 2071734 - DNA, 25 bp, Homo sapien
tgtgcaacaaggaagcatggtcagc

SEQ ID NO: 2071735 - DNA, 25 bp, Homo sapien
ctgtgtgcaacaaggaagcatggtc

SEQ ID NO: 2071736 - DNA, 25 bp, Homo sapien
tgagagtaagtgaaaggagggcact

SEQ ID NO: 2071737 - DNA, 25 bp, Homo sapien
caggtgagagtaagtgaaaggaggg

SEQ ID NO: 2071738 - DNA, 25 bp, Homo sapien
ggtgagagtaagtgaaaggagggca

SEQ ID NO: 2071739 - DNA, 25 bp, Homo sapien
gagtaagtgaaaggagggcactcca

SEQ ID NO: 2071740 - DNA, 25 bp, Homo sapien
ggagatatttgtctgttgctgaaca

SEQ ID NO: 2071741 - DNA, 25 bp, Homo sapien
gctgaatacccacttagccctggct

SEQ ID NO: 2071742 - DNA, 25 bp, Homo sapien
ggaaactgagactcattctgattgt

SEQ ID NO: 2071743 - DNA, 25 bp, Homo sapien
gattgttcaggtaaggccttatgaa

SEQ ID NO: 2071744 - DNA, 25 bp, Homo sapien
tgaatttccattgcagttggctaat

SEQ ID NO: 2071745 - DNA, 25 bp, Homo sapien
gatttatcctcttgtcctccgttga

SEQ ID NO: 2071746 - DNA, 25 bp, Homo sapien
tcttgcagctgtcattttgcccaac

SEQ ID NO: 2071747 - DNA, 25 bp, Homo sapien
cctccgttgatctctcttccagatt

SEQ ID NO: 2071748 - DNA, 25 bp, Homo sapien
acgcccttacgccaccattctcctg

SEQ ID NO: 2071749 - DNA, 25 bp, Homo sapien
tgggttcacgcccttacgccaccat

SEQ ID NO: 2071750 - DNA, 25 bp, Homo sapien
ttcacgcccttacgccaccattctc

SEQ ID NO: 2071751 - DNA, 25 bp, Homo sapien
ttggtgtgatacccaaaaaaatcat

SEQ ID NO: 2071752 - DNA, 25 bp, Homo sapien
tattttctgtatgcgtccatgtgaa

SEQ ID NO: 2071753 - DNA, 25 bp, Homo sapien
tatgcgtccatgtgaattgggtctc

SEQ ID NO: 2071754 - DNA, 25 bp, Homo sapien
ttctgtatgcgtccatgtgaattgg

SEQ ID NO: 2071755 - DNA, 25 bp, Homo sapien
gtctattttctgtatgcgtccatgt

SEQ ID NO: 2071756 - DNA, 25 bp, Homo sapien
gatttctgattgctcatcatcaccc

SEQ ID NO: 2071757 - DNA, 25 bp, Homo sapien
gcaggatttctgattgctcatcatc

SEQ ID NO: 2071758 - DNA, 25 bp, Homo sapien
tttctgattgctcatcatcacccct

SEQ ID NO: 2071759 - DNA, 25 bp, Homo sapien
agctcttcacccttgtgtgtctcct

SEQ ID NO: 2071760 - DNA, 25 bp, Homo sapien
tgggcatcctcaggtccatctgctg

SEQ ID NO: 2071761 - DNA, 25 bp, Homo sapien
ccaatattgctggtgaaatgtgggc

SEQ ID NO: 2071762 - DNA, 25 bp, Homo sapien
tgccctagttcacattgctgccaat

SEQ ID NO: 2071763 - DNA, 25 bp, Homo sapien
tgctggtgaaatgtgggcatcctca

SEQ ID NO: 2071764 - DNA, 25 bp, Homo sapien
gaaaacagaactctcccactgagct

SEQ ID NO: 2071765 - DNA, 25 bp, Homo sapien
gtctgcccaggcctctgatgatctt

SEQ ID NO: 2071766 - DNA, 25 bp, Homo sapien
ttaagagaaaacagaactctcccac

SEQ ID NO: 2071767 - DNA, 25 bp, Homo sapien
cctctgatgatctttaagagaaaac

SEQ ID NO: 2071768 - DNA, 25 bp, Homo sapien
tgttcaaaactgtctagcttggggg

SEQ ID NO: 2071769 - DNA, 25 bp, Homo sapien
actggagcttaattccttgtatgag

SEQ ID NO: 2071770 - DNA, 25 bp, Homo sapien
tatgagacccatatgttcaaaactg

SEQ ID NO: 2071771 - DNA, 25 bp, Homo sapien
tcttgagggagtaggcttgcatgct

SEQ ID NO: 2071772 - DNA, 25 bp, Homo sapien
aataatttctctttgagccaaacaa

SEQ ID NO: 2071773 - DNA, 25 bp, Homo sapien
ataatttctctttgagccaaacaaa

SEQ ID NO: 2071774 - DNA, 25 bp, Homo sapien
caatggagaatttcgtgcatcagtg

SEQ ID NO: 2071775 - DNA, 25 bp, Homo sapien
gagaatttcgtgcatcagtggtatc

SEQ ID NO: 2071776 - DNA, 25 bp, Homo sapien
cctgagtcaatggagaatttcgtgc

SEQ ID NO: 2071777 - DNA, 25 bp, Homo sapien
aatttcgtgcatcagtggtatcaag

SEQ ID NO: 2071778 - DNA, 25 bp, Homo sapien
caataagctatgtcaaaacctagag

SEQ ID NO: 2071779 - DNA, 25 bp, Homo sapien
gagagaccctcttcacactaaattc

SEQ ID NO: 2071780 - DNA, 25 bp, Homo sapien
gattaaaacctacagattgccaggt

SEQ ID NO: 2071781 - DNA, 25 bp, Homo sapien
tatcaaagagctgaggtcatagggc

SEQ ID NO: 2071782 - DNA, 25 bp, Homo sapien
tgaagtggccatgagatgcggtcac

SEQ ID NO: 2071783 - DNA, 25 bp, Homo sapien
gacaggcccaggtgattactcaaca

SEQ ID NO: 2071784 - DNA, 25 bp, Homo sapien
tctagcagagtgagtaaacaaagtc

SEQ ID NO: 2071785 - DNA, 25 bp, Homo sapien
gaagagccaggtttatccaaggtag

SEQ ID NO: 2071786 - DNA, 25 bp, Homo sapien
gatgaatggattttcgcttggcact

SEQ ID NO: 2071787 - DNA, 25 bp, Homo sapien
gatacagccattgctggatgaatgg

SEQ ID NO: 2071788 - DNA, 25 bp, Homo sapien
gcttggcactttgaggtggagctct

SEQ ID NO: 2071789 - DNA, 25 bp, Homo sapien
gagctctgcgggtatctgggctatt

SEQ ID NO: 2071790 - DNA, 25 bp, Homo sapien
tctctttcacaaaattttccacgca

SEQ ID NO: 2071791 - DNA, 25 bp, Homo sapien
cattgatttcttgagtattgactgt

SEQ ID NO: 2071792 - DNA, 25 bp, Homo sapien
ttccacgcagtcaacagtatcattg

SEQ ID NO: 2071793 - DNA, 25 bp, Homo sapien
ccactgtgaaggtgtaaatgttctc

SEQ ID NO: 2071794 - DNA, 25 bp, Homo sapien
tcaatgcgtgaccatcactgcctgg

SEQ ID NO: 2071795 - DNA, 25 bp, Homo sapien
tcactgcctggataagagaagctag

SEQ ID NO: 2071796 - DNA, 25 bp, Homo sapien
tgtgtcaccgcacccgtcaatgcgt

SEQ ID NO: 2071797 - DNA, 25 bp, Homo sapien
agctagaggacctcttggcttccat

SEQ ID NO: 2071798 - DNA, 25 bp, Homo sapien
caattgtgaagaggaaatgtgtatg

SEQ ID NO: 2071799 - DNA, 25 bp, Homo sapien
gaggaaatgtgtatgatgatatatc

SEQ ID NO: 2071800 - DNA, 25 bp, Homo sapien
acagtgtgcccatatagaaatccca

SEQ ID NO: 2071801 - DNA, 25 bp, Homo sapien
gatttcccacatatagaacaccctc

SEQ ID NO: 2071802 - DNA, 25 bp, Homo sapien
aaggttgtgagctttcagtcttcct

SEQ ID NO: 2071803 - DNA, 25 bp, Homo sapien
catgcttgctgacagattaatttcc

SEQ ID NO: 2071804 - DNA, 25 bp, Homo sapien
ccagatttgggtctacagctccaga

SEQ ID NO: 2071805 - DNA, 25 bp, Homo sapien
gaaggaaggttgtgagctttcagtc

SEQ ID NO: 2071806 - DNA, 25 bp, Homo sapien
ccagccaatgtgttcggcagcagga

SEQ ID NO: 2071807 - DNA, 25 bp, Homo sapien
agccaatgtgttcggcagcaggatc

SEQ ID NO: 2071808 - DNA, 25 bp, Homo sapien
cagccaatgtgttcggcagcaggat

SEQ ID NO: 2071809 - DNA, 25 bp, Homo sapien
tcagctggcaattccttgggtttac

SEQ ID NO: 2071810 - DNA, 25 bp, Homo sapien
gaaggcaaagtttcttgagaggacc

SEQ ID NO: 2071811 - DNA, 25 bp, Homo sapien
agtttcttgagaggacccggatgtc

SEQ ID NO: 2071812 - DNA, 25 bp, Homo sapien
aagcaagtctgtgaaggcaaagttt

SEQ ID NO: 2071813 - DNA, 25 bp, Homo sapien
tttcaacagtcttacagagagctca

SEQ ID NO: 2071814 - DNA, 25 bp, Homo sapien
gagcagagagcgttctcacttctgg

SEQ ID NO: 2071815 - DNA, 25 bp, Homo sapien
tcacttctgggccttacagcacgtg

SEQ ID NO: 2071816 - DNA, 25 bp, Homo sapien
gagctcattgccaagctgacgggca

SEQ ID NO: 2071817 - DNA, 25 bp, Homo sapien
ctctgtgacttttaggtccgcccca

SEQ ID NO: 2071818 - DNA, 25 bp, Homo sapien
atactctgtgacttttaggtccgcc

SEQ ID NO: 2071819 - DNA, 25 bp, Homo sapien
ctgtgacttttaggtccgccccact

SEQ ID NO: 2071820 - DNA, 25 bp, Homo sapien
ctttctgagaaatactctgtgactt

SEQ ID NO: 2071821 - DNA, 25 bp, Homo sapien
atagcgcctggggtatgagagcacc

SEQ ID NO: 2071822 - DNA, 25 bp, Homo sapien
actgctccccaagatagcgcctggg

SEQ ID NO: 2071823 - DNA, 25 bp, Homo sapien
ccactgctccccaagatagcgcctg

SEQ ID NO: 2071824 - DNA, 25 bp, Homo sapien
agcgcctggggtatgagagcaccat

SEQ ID NO: 2071825 - DNA, 25 bp, Homo sapien
tagatctgacactgaatatgggctg

SEQ ID NO: 2071826 - DNA, 25 bp, Homo sapien
gagctctttagagaccttgatgaaa

SEQ ID NO: 2071827 - DNA, 25 bp, Homo sapien
gacagtcctgaaccctttgcgatat

SEQ ID NO: 2071828 - DNA, 25 bp, Homo sapien
taatgtggcatattgtcaacacccc

SEQ ID NO: 2071829 - DNA, 25 bp, Homo sapien
gatgggtgatgataagcctatttgt

SEQ ID NO: 2071830 - DNA, 25 bp, Homo sapien
tcctgagatgggtgatgataagcct

SEQ ID NO: 2071831 - DNA, 25 bp, Homo sapien
ctgagatgggtgatgataagcctat

SEQ ID NO: 2071832 - DNA, 25 bp, Homo sapien
gggtgatgataagcctatttgtaat

SEQ ID NO: 2071833 - DNA, 25 bp, Homo sapien
ttgtaacgcatgatataataacctg

SEQ ID NO: 2071834 - DNA, 25 bp, Homo sapien
cagtctttatagtgacaatgagtac

SEQ ID NO: 2071835 - DNA, 25 bp, Homo sapien
tcttcatctttgtaacgcatgatat

SEQ ID NO: 2071836 - DNA, 25 bp, Homo sapien
gcatgatataataacctgcaccaat

SEQ ID NO: 2071837 - DNA, 25 bp, Homo sapien
ctaatgcgttcagactctgatggcg

SEQ ID NO: 2071838 - DNA, 25 bp, Homo sapien
acttcaagggaggatggtaaagctg

SEQ ID NO: 2071839 - DNA, 25 bp, Homo sapien
ccactagagggacatccagaatact

SEQ ID NO: 2071840 - DNA, 25 bp, Homo sapien
tcttcacctagagcactaatgcgtt

SEQ ID NO: 2071841 - DNA, 25 bp, Homo sapien
gaaaacttgcctctattctcagacc

SEQ ID NO: 2071842 - DNA, 25 bp, Homo sapien
caagggaaaacttgcctctattctc

SEQ ID NO: 2071843 - DNA, 25 bp, Homo sapien
tgtctctaggctcagtcattgaagg

SEQ ID NO: 2071844 - DNA, 25 bp, Homo sapien
gaaggtggaacactcaaagcacaaa

SEQ ID NO: 2071845 - DNA, 25 bp, Homo sapien
ttggtgatacctccaaactcagcat

SEQ ID NO: 2071846 - DNA, 25 bp, Homo sapien
gaggaagagaaagccgttctcccac

SEQ ID NO: 2071847 - DNA, 25 bp, Homo sapien
cagcacatttggtgatacctccaaa

SEQ ID NO: 2071848 - DNA, 25 bp, Homo sapien
gagaaagccgttctcccacagagcc

SEQ ID NO: 2071849 - DNA, 25 bp, Homo sapien
agcattttcaaacttaatttctgca

SEQ ID NO: 2071850 - DNA, 25 bp, Homo sapien
tcctcttaataaatccatttactgg

SEQ ID NO: 2071851 - DNA, 25 bp, Homo sapien
tctgcattaaaattctcctcctcaa

SEQ ID NO: 2071852 - DNA, 25 bp, Homo sapien
cccatttcccaagcattttcaaact

SEQ ID NO: 2071853 - DNA, 25 bp, Homo sapien
tgcaacgttgcatgaacagtaggca

SEQ ID NO: 2071854 - DNA, 25 bp, Homo sapien
aactcaaaatatcatggaccaaggc

SEQ ID NO: 2071855 - DNA, 25 bp, Homo sapien
taaccttaatagaggcagcatatga

SEQ ID NO: 2071856 - DNA, 25 bp, Homo sapien
ggcacacaggtaacttacagcttca

SEQ ID NO: 2071857 - DNA, 25 bp, Homo sapien
tccttcttagagatatgcggcatca

SEQ ID NO: 2071858 - DNA, 25 bp, Homo sapien
tcaatcctccttcttagagatatgc

SEQ ID NO: 2071859 - DNA, 25 bp, Homo sapien
tcctccttcttagagatatgcggca

SEQ ID NO: 2071860 - DNA, 25 bp, Homo sapien
aatcctccttcttagagatatgcgg

SEQ ID NO: 2071861 - DNA, 25 bp, Homo sapien
tcttcataacaaactgccaagcatc

SEQ ID NO: 2071862 - DNA, 25 bp, Homo sapien
ccaagcatcaggcatcaaacatttt

SEQ ID NO: 2071863 - DNA, 25 bp, Homo sapien
tcagacatgaacaactaaggggcag

SEQ ID NO: 2071864 - DNA, 25 bp, Homo sapien
gggcagccccagataataacgagct

SEQ ID NO: 2071865 - DNA, 25 bp, Homo sapien
tactttagcttgtacactcaaaccc

SEQ ID NO: 2071866 - DNA, 25 bp, Homo sapien
gcagaggtagttagagcttccctgt

SEQ ID NO: 2071867 - DNA, 25 bp, Homo sapien
tccctgccacgcagttgcagaggta

SEQ ID NO: 2071868 - DNA, 25 bp, Homo sapien
cactctgcagggatggtagacgcct

SEQ ID NO: 2071869 - DNA, 25 bp, Homo sapien
tgtggtgtccttcacactaatggtg

SEQ ID NO: 2071870 - DNA, 25 bp, Homo sapien
taacaatgccgtgaagtacagtctg

SEQ ID NO: 2071871 - DNA, 25 bp, Homo sapien
gtccaattaaaagaggcacttgcca

SEQ ID NO: 2071872 - DNA, 25 bp, Homo sapien
gacagaaaagtctcacggcagagtc

SEQ ID NO: 2071873 - DNA, 25 bp, Homo sapien
gcttgaagagaaatgtagaaaccac

SEQ ID NO: 2071874 - DNA, 25 bp, Homo sapien
ttgctctattacaatcagtgatggg

SEQ ID NO: 2071875 - DNA, 25 bp, Homo sapien
aatcctccaagcaccttgcttgaag

SEQ ID NO: 2071876 - DNA, 25 bp, Homo sapien
tgaaacccaagttgtcgtcagtaac

SEQ ID NO: 2071877 - DNA, 25 bp, Homo sapien
taacgcagagggctcgggtcgggcc

SEQ ID NO: 2071878 - DNA, 25 bp, Homo sapien
taggaccgaaggtctccggagagtc

SEQ ID NO: 2071879 - DNA, 25 bp, Homo sapien
gggcttgggactccgggcgcgcgga

SEQ ID NO: 2071880 - DNA, 25 bp, Homo sapien
gagtcgccggcggtgccaggtaacg

SEQ ID NO: 2071881 - DNA, 25 bp, Homo sapien
gctccgagttcgacttcctcggact

SEQ ID NO: 2071882 - DNA, 25 bp, Homo sapien
gacttcctcggacttagtgggagaa

SEQ ID NO: 2071883 - DNA, 25 bp, Homo sapien
ctcgcacagagatgtgcgccgggaa

SEQ ID NO: 2071884 - DNA, 25 bp, Homo sapien
gcaggtggaggacgtggcgcgctgg

SEQ ID NO: 2071885 - DNA, 25 bp, Homo sapien
gatccctggtccgtgcctcgcgccg

SEQ ID NO: 2071886 - DNA, 25 bp, Homo sapien
tccctggtccgtgcctcgcgccgcg

SEQ ID NO: 2071887 - DNA, 25 bp, Homo sapien
ggggccgatccctggtccgtgcctc

SEQ ID NO: 2071888 - DNA, 25 bp, Homo sapien
gccgatccctggtccgtgcctcgcg

SEQ ID NO: 2071889 - DNA, 25 bp, Homo sapien
tgtgggaggagaatgtggtgggtac

SEQ ID NO: 2071890 - DNA, 25 bp, Homo sapien
ggagaatgtggtgggtactcgagtc

SEQ ID NO: 2071891 - DNA, 25 bp, Homo sapien
atgtggtgggtactcgagtccccgc

SEQ ID NO: 2071892 - DNA, 25 bp, Homo sapien
tggtgggtactcgagtccccgccac

SEQ ID NO: 2071893 - DNA, 25 bp, Homo sapien
tctgaattgcgctcgctgtttggtt

SEQ ID NO: 2071894 - DNA, 25 bp, Homo sapien
caactccccggatttcctgtcctcg

SEQ ID NO: 2071895 - DNA, 25 bp, Homo sapien
ggaaagctctgaattgcgctcgctg

SEQ ID NO: 2071896 - DNA, 25 bp, Homo sapien
aagctctgaattgcgctcgctgttt

SEQ ID NO: 2071897 - DNA, 25 bp, Homo sapien
agtgtcacccttgcagtctcgttgg

SEQ ID NO: 2071898 - DNA, 25 bp, Homo sapien
cagtctcgttggacatgctgaaagg

SEQ ID NO: 2071899 - DNA, 25 bp, Homo sapien
cacccttgcagtctcgttggacatg

SEQ ID NO: 2071900 - DNA, 25 bp, Homo sapien
ttccctttagtgtcacccttgcagt

SEQ ID NO: 2071901 - DNA, 25 bp, Homo sapien
agaaagctgggcgagggtgtgggag

SEQ ID NO: 2071902 - DNA, 25 bp, Homo sapien
ccctgttcagatgttgcccagggtg

SEQ ID NO: 2071903 - DNA, 25 bp, Homo sapien
aactcttggcttgaccctgttcaga

SEQ ID NO: 2071904 - DNA, 25 bp, Homo sapien
ggttgccaactcttggcttgaccct

SEQ ID NO: 2071905 - DNA, 25 bp, Homo sapien
cggaaaggcgttgtgactgtagtaa

SEQ ID NO: 2071906 - DNA, 25 bp, Homo sapien
gttcagagactggaatcggaaggaa

SEQ ID NO: 2071907 - DNA, 25 bp, Homo sapien
gaactgttacacagggttcagagac

SEQ ID NO: 2071908 - DNA, 25 bp, Homo sapien
gaatcggaaggaagacgccactatc

SEQ ID NO: 2071909 - DNA, 25 bp, Homo sapien
ggtccatcggttctatttttgctct

SEQ ID NO: 2071910 - DNA, 25 bp, Homo sapien
cagataacccaatggtccatcggtt

SEQ ID NO: 2071911 - DNA, 25 bp, Homo sapien
tctgctgggtgtaccagataaccca

SEQ ID NO: 2071912 - DNA, 25 bp, Homo sapien
gccagtgctgggcttatcttctgct

SEQ ID NO: 2071913 - DNA, 25 bp, Homo sapien
taacctgcttcaaagcagactgggt

SEQ ID NO: 2071914 - DNA, 25 bp, Homo sapien
gcagactgggtttctgatttctgat

SEQ ID NO: 2071915 - DNA, 25 bp, Homo sapien
cagctgagtcataacctgcttcaaa

SEQ ID NO: 2071916 - DNA, 25 bp, Homo sapien
gagtcataacctgcttcaaagcaga

SEQ ID NO: 2071917 - DNA, 25 bp, Homo sapien
ggatatagatgctgctggtcccagg

SEQ ID NO: 2071918 - DNA, 25 bp, Homo sapien
ttgagagccactgccataagccttc

SEQ ID NO: 2071919 - DNA, 25 bp, Homo sapien
tcccagggttacttattgagagcca

SEQ ID NO: 2071920 - DNA, 25 bp, Homo sapien
cccatcctctggtaagctcctgtag

SEQ ID NO: 2071921 - DNA, 25 bp, Homo sapien
ctggataaacaggcctctgtctcca

SEQ ID NO: 2071922 - DNA, 25 bp, Homo sapien
aactggataaacaggcctctgtctc

SEQ ID NO: 2071923 - DNA, 25 bp, Homo sapien
ataactggataaacaggcctctgtc

SEQ ID NO: 2071924 - DNA, 25 bp, Homo sapien
catcttaataaaccataatgaactg

SEQ ID NO: 2071925 - DNA, 25 bp, Homo sapien
tatggctagtggaccaaaaaagtcc

SEQ ID NO: 2071926 - DNA, 25 bp, Homo sapien
aaaccacagctgatagtggtcatta

SEQ ID NO: 2071927 - DNA, 25 bp, Homo sapien
tagtggtcattaactattacttgcc

SEQ ID NO: 2071928 - DNA, 25 bp, Homo sapien
attcatctatggctagtggaccaaa

SEQ ID NO: 2071929 - DNA, 25 bp, Homo sapien
gtttgcagaagcaaataccactccc

SEQ ID NO: 2071930 - DNA, 25 bp, Homo sapien
tttgcagaagcaaataccactccct

SEQ ID NO: 2071931 - DNA, 25 bp, Homo sapien
ctgtaggttcgctgcgtggtggtaa

SEQ ID NO: 2071932 - DNA, 25 bp, Homo sapien
ggttcgctgcgtggtggtaacagag

SEQ ID NO: 2071933 - DNA, 25 bp, Homo sapien
tgtaggttcgctgcgtggtggtaac

SEQ ID NO: 2071934 - DNA, 25 bp, Homo sapien
taggttcgctgcgtggtggtaacag

SEQ ID NO: 2071935 - DNA, 25 bp, Homo sapien
tcatagaataaatcaacagtggctt

SEQ ID NO: 2071936 - DNA, 25 bp, Homo sapien
ttggaaaggattccctccatgagga

SEQ ID NO: 2071937 - DNA, 25 bp, Homo sapien
agtggctttgccattactactgcag

SEQ ID NO: 2071938 - DNA, 25 bp, Homo sapien
tgccattactactgcagcatcttgg

SEQ ID NO: 2071939 - DNA, 25 bp, Homo sapien
tcacagagcaggacgtctgagaagt

SEQ ID NO: 2071940 - DNA, 25 bp, Homo sapien
gcaacatgttctatattccactatt

SEQ ID NO: 2071941 - DNA, 25 bp, Homo sapien
tagtgaatgttcctcacagcaacat

SEQ ID NO: 2071942 - DNA, 25 bp, Homo sapien
taattccagaaagtactcgagtagc

SEQ ID NO: 2071943 - DNA, 25 bp, Homo sapien
attgtgttagctgtgtcgaaagtgc

SEQ ID NO: 2071944 - DNA, 25 bp, Homo sapien
cctcctctcgttccataattgtgtt

SEQ ID NO: 2071945 - DNA, 25 bp, Homo sapien
tctcgttccataattgtgttagctg

SEQ ID NO: 2071946 - DNA, 25 bp, Homo sapien
ccataattgtgttagctgtgtcgaa

SEQ ID NO: 2071947 - DNA, 25 bp, Homo sapien
gaagaggcactaatcattctcgtac

SEQ ID NO: 2071948 - DNA, 25 bp, Homo sapien
ttccttgtgcaatgtgctgcaaagc

SEQ ID NO: 2071949 - DNA, 25 bp, Homo sapien
gcatccatgctaatagaggacacta

SEQ ID NO: 2071950 - DNA, 25 bp, Homo sapien
gaggacactatcttggaatgagaag

SEQ ID NO: 2071951 - DNA, 25 bp, Homo sapien
gacccccaggttctgtggaactgga

SEQ ID NO: 2071952 - DNA, 25 bp, Homo sapien
cagaaggcgcagctggatctgaccc

SEQ ID NO: 2071953 - DNA, 25 bp, Homo sapien
tgacttctcagacctagaaacagat

SEQ ID NO: 2071954 - DNA, 25 bp, Homo sapien
gataaatcagaaggcgcagctggat

SEQ ID NO: 2071955 - DNA, 25 bp, Homo sapien
ttgaaagttagacactaaaggtatc

SEQ ID NO: 2071956 - DNA, 25 bp, Homo sapien
agttagacactaaaggtatccccat

SEQ ID NO: 2071957 - DNA, 25 bp, Homo sapien
tgctgatggaacttttgaaagttag

SEQ ID NO: 2071958 - DNA, 25 bp, Homo sapien
ggtgctgatggaacttttgaaagtt

SEQ ID NO: 2071959 - DNA, 25 bp, Homo sapien
tcaaagttggacagttgttacagag

SEQ ID NO: 2071960 - DNA, 25 bp, Homo sapien
gttagagcctagaattgatcaactc

SEQ ID NO: 2071961 - DNA, 25 bp, Homo sapien
taacaagttagagcctagaattgat

SEQ ID NO: 2071962 - DNA, 25 bp, Homo sapien
ttataacaagttagagcctagaatt

SEQ ID NO: 2071963 - DNA, 25 bp, Homo sapien
caagttagagcctagaattgatcaa

SEQ ID NO: 2071964 - DNA, 25 bp, Homo sapien
aagatggaccgggaagtgatgggaa

SEQ ID NO: 2071965 - DNA, 25 bp, Homo sapien
aagtatcctataccctcagagaagc

SEQ ID NO: 2071966 - DNA, 25 bp, Homo sapien
gtgatgggaacttccagtaatgacc

SEQ ID NO: 2071967 - DNA, 25 bp, Homo sapien
aagaaagtatcctataccctcagag

SEQ ID NO: 2071968 - DNA, 25 bp, Homo sapien
tttgacatccctggaacatcatggg

SEQ ID NO: 2071969 - DNA, 25 bp, Homo sapien
tcttctcctttgatctggttcattg

SEQ ID NO: 2071970 - DNA, 25 bp, Homo sapien
tgtgttgacggctcctgcagtgcaa

SEQ ID NO: 2071971 - DNA, 25 bp, Homo sapien
caaaagcggtagcacagccacagat

SEQ ID NO: 2071972 - DNA, 25 bp, Homo sapien
attgccaccatcagcctttgaccag

SEQ ID NO: 2071973 - DNA, 25 bp, Homo sapien
taatgtgcggcaagggcaaacattc

SEQ ID NO: 2071974 - DNA, 25 bp, Homo sapien
caagcagtaaagaataatgtgcggc

SEQ ID NO: 2071975 - DNA, 25 bp, Homo sapien
gaacaaaacataaatggcagatgtc

SEQ ID NO: 2071976 - DNA, 25 bp, Homo sapien
ttataggttcttcccacttgccagg

SEQ ID NO: 2071977 - DNA, 25 bp, Homo sapien
ttcccacttgccaggtagttccctg

SEQ ID NO: 2071978 - DNA, 25 bp, Homo sapien
taggttcttcccacttgccaggtag

SEQ ID NO: 2071979 - DNA, 25 bp, Homo sapien
cccacttgccaggtagttccctggg

SEQ ID NO: 2071980 - DNA, 25 bp, Homo sapien
caagaagggttcatgtccacagtct

SEQ ID NO: 2071981 - DNA, 25 bp, Homo sapien
gctctttgagccaagcaaatgtaat

SEQ ID NO: 2071982 - DNA, 25 bp, Homo sapien
catttatggcccttacaacttcact

SEQ ID NO: 2071983 - DNA, 25 bp, Homo sapien
taatttgtgagctgccatgttcatc

SEQ ID NO: 2071984 - DNA, 25 bp, Homo sapien
ttttgctgtgagtgaaagagcgtac

SEQ ID NO: 2071985 - DNA, 25 bp, Homo sapien
tgagcagcttccacacgataagttg

SEQ ID NO: 2071986 - DNA, 25 bp, Homo sapien
gcttccacacgataagttgtaagta

SEQ ID NO: 2071987 - DNA, 25 bp, Homo sapien
gagcgtacgcatattcatctttccc

SEQ ID NO: 2071988 - DNA, 25 bp, Homo sapien
ctgaacatgaccttctccgccaaga

SEQ ID NO: 2071989 - DNA, 25 bp, Homo sapien
accttctccgccaagaacttgaatc

SEQ ID NO: 2071990 - DNA, 25 bp, Homo sapien
tgaccttctccgccaagaacttgaa

SEQ ID NO: 2071991 - DNA, 25 bp, Homo sapien
tgtcatctctcagtttgggttccat

SEQ ID NO: 2071992 - DNA, 25 bp, Homo sapien
ctgccctttccagtaccttataagt

SEQ ID NO: 2071993 - DNA, 25 bp, Homo sapien
ggctgccctttccagtaccttataa

SEQ ID NO: 2071994 - DNA, 25 bp, Homo sapien
agtttttacaccctcttcattatct

SEQ ID NO: 2071995 - DNA, 25 bp, Homo sapien
ttttacaccctcttcattatctact

SEQ ID NO: 2071996 - DNA, 25 bp, Homo sapien
aattactcagattaggaggttcttc

SEQ ID NO: 2071997 - DNA, 25 bp, Homo sapien
aaattactcagattaggaggttctt

SEQ ID NO: 2071998 - DNA, 25 bp, Homo sapien
tactcagattaggaggttcttctaa

SEQ ID NO: 2071999 - DNA, 25 bp, Homo sapien
cagattaggaggttcttctaatccc

SEQ ID NO: 2072000 - DNA, 25 bp, Homo sapien
agcagctgggtctgagttctgccag

SEQ ID NO: 2072001 - DNA, 25 bp, Homo sapien
tgtgtataacctgtgactccttcag

SEQ ID NO: 2072002 - DNA, 25 bp, Homo sapien
ctttgattctgtaggcagcaataga

SEQ ID NO: 2072003 - DNA, 25 bp, Homo sapien
ggatctgaacagacgctaaagggcc

SEQ ID NO: 2072004 - DNA, 25 bp, Homo sapien
gttcaatgtagataagcctcttccc

SEQ ID NO: 2072005 - DNA, 25 bp, Homo sapien
tcacctctggtaaaattatattctg

SEQ ID NO: 2072006 - DNA, 25 bp, Homo sapien
tagtgctaagtacatagtaaggaca

SEQ ID NO: 2072007 - DNA, 25 bp, Homo sapien
agtaaggacactctatcacctctgg

SEQ ID NO: 2072008 - DNA, 25 bp, Homo sapien
gcaccaataataagggctaataact

SEQ ID NO: 2072009 - DNA, 25 bp, Homo sapien
cagcaccaataataagggctaataa

SEQ ID NO: 2072010 - DNA, 25 bp, Homo sapien
ataataagggctaataactcaagat

SEQ ID NO: 2072011 - DNA, 25 bp, Homo sapien
caccaataataagggctaataactc

SEQ ID NO: 2072012 - DNA, 25 bp, Homo sapien
aagccttagtgcctaaagtcatttg

SEQ ID NO: 2072013 - DNA, 25 bp, Homo sapien
aaaagccttagtgcctaaagtcatt

SEQ ID NO: 2072014 - DNA, 25 bp, Homo sapien
agccttagtgcctaaagtcatttgc

SEQ ID NO: 2072015 - DNA, 25 bp, Homo sapien
taaaagccttagtgcctaaagtcat

SEQ ID NO: 2072016 - DNA, 25 bp, Homo sapien
cttaattgtcttcctggacttagaa

SEQ ID NO: 2072017 - DNA, 25 bp, Homo sapien
ccgacttaattgtcttcctggactt

SEQ ID NO: 2072018 - DNA, 25 bp, Homo sapien
tcttcctggacttagaatttcccat

SEQ ID NO: 2072019 - DNA, 25 bp, Homo sapien
ttgtcttcctggacttagaatttcc

SEQ ID NO: 2072020 - DNA, 25 bp, Homo sapien
tgaaggtaggttcggtcaactccca

SEQ ID NO: 2072021 - DNA, 25 bp, Homo sapien
aggttcggtcaactcccaactctgg

SEQ ID NO: 2072022 - DNA, 25 bp, Homo sapien
taggttcggtcaactcccaactctg

SEQ ID NO: 2072023 - DNA, 25 bp, Homo sapien
catctgaaggtaggttcggtcaact

SEQ ID NO: 2072024 - DNA, 25 bp, Homo sapien
atcgcttccattgcagcaagctggc

SEQ ID NO: 2072025 - DNA, 25 bp, Homo sapien
cgtgtccagggaactcgccttactg

SEQ ID NO: 2072026 - DNA, 25 bp, Homo sapien
cgccttactgtaagcatcgcttcca

SEQ ID NO: 2072027 - DNA, 25 bp, Homo sapien
taagcatcgcttccattgcagcaag

SEQ ID NO: 2072028 - DNA, 25 bp, Homo sapien
ccctgattctaatttaaagactaat

SEQ ID NO: 2072029 - DNA, 25 bp, Homo sapien
tgggctgatgtcctcgcatccgatg

SEQ ID NO: 2072030 - DNA, 25 bp, Homo sapien
tccgatggcctctttcatccctgat

SEQ ID NO: 2072031 - DNA, 25 bp, Homo sapien
aaaccccacggcataggcagcaggg

SEQ ID NO: 2072032 - DNA, 25 bp, Homo sapien
taaccaagagaatgccgcagaagac

SEQ ID NO: 2072033 - DNA, 25 bp, Homo sapien
gaatgccgcagaagacatggcttct

SEQ ID NO: 2072034 - DNA, 25 bp, Homo sapien
ttgattgcaactgccatccccaaag

SEQ ID NO: 2072035 - DNA, 25 bp, Homo sapien
cacaccagagccttgattgcaactg

SEQ ID NO: 2072036 - DNA, 25 bp, Homo sapien
ctttcttataatactgggaacgcag

SEQ ID NO: 2072037 - DNA, 25 bp, Homo sapien
actgggaacgcagtattataaaaat

SEQ ID NO: 2072038 - DNA, 25 bp, Homo sapien
ttataaaaatagtattcacctgcat

SEQ ID NO: 2072039 - DNA, 25 bp, Homo sapien
tcttataatactgggaacgcagtat

SEQ ID NO: 2072040 - DNA, 25 bp, Homo sapien
tgtcacctgggcaagtacctagcct

SEQ ID NO: 2072041 - DNA, 25 bp, Homo sapien
gctaacaagaccatccctttctgga

SEQ ID NO: 2072042 - DNA, 25 bp, Homo sapien
tgcagcggtatgacctttgacagtt

SEQ ID NO: 2072043 - DNA, 25 bp, Homo sapien
cccactgtgcattgaatcctccaga

SEQ ID NO: 2072044 - DNA, 25 bp, Homo sapien
tctccccttggcatcatgcctgcag

SEQ ID NO: 2072045 - DNA, 25 bp, Homo sapien
taggtctgagtatagaaagctgctt

SEQ ID NO: 2072046 - DNA, 25 bp, Homo sapien
cattcactatattgccgtaggtctg

SEQ ID NO: 2072047 - DNA, 25 bp, Homo sapien
tctcccatgcgacattcactatatt

SEQ ID NO: 2072048 - DNA, 25 bp, Homo sapien
taaaccccagcgaacacattctagg

SEQ ID NO: 2072049 - DNA, 25 bp, Homo sapien
gaattatataaaaggccactgctca

SEQ ID NO: 2072050 - DNA, 25 bp, Homo sapien
aattttatccaaacctgcaagggca

SEQ ID NO: 2072051 - DNA, 25 bp, Homo sapien
tgcaagggcacatctaacagtgtgg

SEQ ID NO: 2072052 - DNA, 25 bp, Homo sapien
tggagcaactgtcagccaaaccttg

SEQ ID NO: 2072053 - DNA, 25 bp, Homo sapien
gcattacctctatggcagtcacaag

SEQ ID NO: 2072054 - DNA, 25 bp, Homo sapien
caacaaggatatctaatggagcaac

SEQ ID NO: 2072055 - DNA, 25 bp, Homo sapien
aaccttggtatgtagctgcttgggc

SEQ ID NO: 2072056 - DNA, 25 bp, Homo sapien
aatacaactgtatcaaggatcatcc

SEQ ID NO: 2072057 - DNA, 25 bp, Homo sapien
ctctttttattccagtgccatcctc

SEQ ID NO: 2072058 - DNA, 25 bp, Homo sapien
gaatctcaacgctccaccaaaatac

SEQ ID NO: 2072059 - DNA, 25 bp, Homo sapien
catcctcactgttagagttcactgg

SEQ ID NO: 2072060 - DNA, 25 bp, Homo sapien
taggctctccctagccaaagttaga

SEQ ID NO: 2072061 - DNA, 25 bp, Homo sapien
tagagtgtggaacaatttgctgcaa

SEQ ID NO: 2072062 - DNA, 25 bp, Homo sapien
caaagttagactgttgacggctgct

SEQ ID NO: 2072063 - DNA, 25 bp, Homo sapien
tattttgaaatttaggcgcagggct

SEQ ID NO: 2072064 - DNA, 25 bp, Homo sapien
aatcatgaaggaagggaaacaaaca

SEQ ID NO: 2072065 - DNA, 25 bp, Homo sapien
catgaaggaagggaaacaaacacat

SEQ ID NO: 2072066 - DNA, 25 bp, Homo sapien
tgaaggaagggaaacaaacacatcc

SEQ ID NO: 2072067 - DNA, 25 bp, Homo sapien
ttcttcacatggtggcagtgaggaa

SEQ ID NO: 2072068 - DNA, 25 bp, Homo sapien
gagacagttaccacttcagagttct

SEQ ID NO: 2072069 - DNA, 25 bp, Homo sapien
gcacattcactggtattgtaactat

SEQ ID NO: 2072070 - DNA, 25 bp, Homo sapien
cacaacattttcaggagtcgtagag

SEQ ID NO: 2072071 - DNA, 25 bp, Homo sapien
ttccagctccatctcgtgaagcctt

SEQ ID NO: 2072072 - DNA, 25 bp, Homo sapien
tctctgccctgagttgagcaaaata

SEQ ID NO: 2072073 - DNA, 25 bp, Homo sapien
gatcagaagcaatatcttgttcacc

SEQ ID NO: 2072074 - DNA, 25 bp, Homo sapien
gatatgaggcccgaagtcttctttc

SEQ ID NO: 2072075 - DNA, 25 bp, Homo sapien
tctttctccagataaaaacacatca

SEQ ID NO: 2072076 - DNA, 25 bp, Homo sapien
aagttctatcgctttctgggacaag

SEQ ID NO: 2072077 - DNA, 25 bp, Homo sapien
tcttacaggtctcatgaagacagct

SEQ ID NO: 2072078 - DNA, 25 bp, Homo sapien
ttctgggtactctaatctgcagtga

SEQ ID NO: 2072079 - DNA, 25 bp, Homo sapien
gaaggtcttggctaattctgggtac

SEQ ID NO: 2072080 - DNA, 25 bp, Homo sapien
cttgcaaggtgacttgacagaagaa

SEQ ID NO: 2072081 - DNA, 25 bp, Homo sapien
ccagaaagcatgagacttgcaaggt

SEQ ID NO: 2072082 - DNA, 25 bp, Homo sapien
catgagacttgcaaggtgacttgac

SEQ ID NO: 2072083 - DNA, 25 bp, Homo sapien
gaaagcatgagacttgcaaggtgac

SEQ ID NO: 2072084 - DNA, 25 bp, Homo sapien
acatgacagaaggtaacacatggca

SEQ ID NO: 2072085 - DNA, 25 bp, Homo sapien
tgagggactaccactgattagggcc

SEQ ID NO: 2072086 - DNA, 25 bp, Homo sapien
cagaaggtaacacatggcaaggagg

SEQ ID NO: 2072087 - DNA, 25 bp, Homo sapien
agaagtccaggactgagggactacc

SEQ ID NO: 2072088 - DNA, 25 bp, Homo sapien
ttccacactgtattaccttgaaatg

SEQ ID NO: 2072089 - DNA, 25 bp, Homo sapien
cacactgtattaccttgaaatgaca

SEQ ID NO: 2072090 - DNA, 25 bp, Homo sapien
cactgtattaccttgaaatgacaga

SEQ ID NO: 2072091 - DNA, 25 bp, Homo sapien
acagaagcttaacatacttaaggtt

SEQ ID NO: 2072092 - DNA, 25 bp, Homo sapien
tcatgtccacgtcgtgactcaggaa

SEQ ID NO: 2072093 - DNA, 25 bp, Homo sapien
tcgtgactcaggaacctgggttctt

SEQ ID NO: 2072094 - DNA, 25 bp, Homo sapien
ggtgcctcatgtccacgtcgtgact

SEQ ID NO: 2072095 - DNA, 25 bp, Homo sapien
tcatggggccatcatgtcaggactc

SEQ ID NO: 2072096 - DNA, 25 bp, Homo sapien
ttgtcagttgattttcaatgactct

SEQ ID NO: 2072097 - DNA, 25 bp, Homo sapien
tttgccccccacagtagacacaaag

SEQ ID NO: 2072098 - DNA, 25 bp, Homo sapien
tctcaggacctcagtgataaactgc

SEQ ID NO: 2072099 - DNA, 25 bp, Homo sapien
cacaaagcttagagtatggaccatc

SEQ ID NO: 2072100 - DNA, 25 bp, Homo sapien
gattacactcttggacttacagaga

SEQ ID NO: 2072101 - DNA, 25 bp, Homo sapien
tcagttcagcgtttaaaagcaccac

SEQ ID NO: 2072102 - DNA, 25 bp, Homo sapien
cagaagcttacacaccttcctggtg

SEQ ID NO: 2072103 - DNA, 25 bp, Homo sapien
tcacctagagaatgaacgatgacag

SEQ ID NO: 2072104 - DNA, 25 bp, Homo sapien
taaaaaccattcaaagatacagggc

SEQ ID NO: 2072105 - DNA, 25 bp, Homo sapien
gatacagggcagaaccaattcatct

SEQ ID NO: 2072106 - DNA, 25 bp, Homo sapien
tggttgtttccagagccccgtgttc

SEQ ID NO: 2072107 - DNA, 25 bp, Homo sapien
gctgccacactggacatcagaaaat

SEQ ID NO: 2072108 - DNA, 25 bp, Homo sapien
cagggacgaagagccttcttgtcgt

SEQ ID NO: 2072109 - DNA, 25 bp, Homo sapien
tcttgtcgtcagtcacgggctgata

SEQ ID NO: 2072110 - DNA, 25 bp, Homo sapien
gtcacgggctgataggagtctactt

SEQ ID NO: 2072111 - DNA, 25 bp, Homo sapien
tcaaaaacagggacgaagagccttc

SEQ ID NO: 2072112 - DNA, 25 bp, Homo sapien
tgcagcttgtgaaaccggctctggc

SEQ ID NO: 2072113 - DNA, 25 bp, Homo sapien
ccccagaagggatttatgagcgctt

SEQ ID NO: 2072114 - DNA, 25 bp, Homo sapien
cagcaaccaagtgtagaagggagtc

SEQ ID NO: 2072115 - DNA, 25 bp, Homo sapien
ttcaaggaataccacccaggttggc

SEQ ID NO: 2072116 - DNA, 25 bp, Homo sapien
gataggcgacaatcccagcctcttg

SEQ ID NO: 2072117 - DNA, 25 bp, Homo sapien
tcttgacatctctcgcgctgagcaa

SEQ ID NO: 2072118 - DNA, 25 bp, Homo sapien
ggaggatcccagctgttcgccacct

SEQ ID NO: 2072119 - DNA, 25 bp, Homo sapien
ttttcactggaggatcccagctgtt

SEQ ID NO: 2072120 - DNA, 25 bp, Homo sapien
accaaggggcttttggaggcttgct

SEQ ID NO: 2072121 - DNA, 25 bp, Homo sapien
caaggcagaaggggcgagacacaca

SEQ ID NO: 2072122 - DNA, 25 bp, Homo sapien
cagaaggggcgagacacacagagaa

SEQ ID NO: 2072123 - DNA, 25 bp, Homo sapien
caaggggcttttggaggcttgcttt

SEQ ID NO: 2072124 - DNA, 25 bp, Homo sapien
gctctagagactgtcttttcctgct

SEQ ID NO: 2072125 - DNA, 25 bp, Homo sapien
tgctctagagactgtcttttcctgc

SEQ ID NO: 2072126 - DNA, 25 bp, Homo sapien
ctagagactgtcttttcctgcttca

SEQ ID NO: 2072127 - DNA, 25 bp, Homo sapien
gttgctctagagactgtcttttcct

SEQ ID NO: 2072128 - DNA, 25 bp, Homo sapien
ctttgaaatgggtcattactagtgc

SEQ ID NO: 2072129 - DNA, 25 bp, Homo sapien
aacaggatctgaaaggatgaccctt

SEQ ID NO: 2072130 - DNA, 25 bp, Homo sapien
ggatgaccctttgaaatgggtcatt

SEQ ID NO: 2072131 - DNA, 25 bp, Homo sapien
gggtcattactagtgcaaagaacag

SEQ ID NO: 2072132 - DNA, 25 bp, Homo sapien
tcatgtagccatccaggcaagccag

SEQ ID NO: 2072133 - DNA, 25 bp, Homo sapien
ttttctgccctgtatctcctcaggt

SEQ ID NO: 2072134 - DNA, 25 bp, Homo sapien
tttctgccctgtatctcctcaggtc

SEQ ID NO: 2072135 - DNA, 25 bp, Homo sapien
tttttctgccctgtatctcctcagg

SEQ ID NO: 2072136 - DNA, 25 bp, Homo sapien
ttccacccgccaacggcaggctcgg

SEQ ID NO: 2072137 - DNA, 25 bp, Homo sapien
gcatccatgcgatgtgggatgtgca

SEQ ID NO: 2072138 - DNA, 25 bp, Homo sapien
ggcagcccaggatcattccaccctg

SEQ ID NO: 2072139 - DNA, 25 bp, Homo sapien
tctgtagtgagagtacatttggcat

SEQ ID NO: 2072140 - DNA, 25 bp, Homo sapien
tccccagatgccacacgatgtgcat

SEQ ID NO: 2072141 - DNA, 25 bp, Homo sapien
ctgaatgaagctttgcggaaatctc

SEQ ID NO: 2072142 - DNA, 25 bp, Homo sapien
gaagctttgcggaaatctctaccag

SEQ ID NO: 2072143 - DNA, 25 bp, Homo sapien
gccacacgatgtgcattcccctgtg

SEQ ID NO: 2072144 - DNA, 25 bp, Homo sapien
cacacgtgcccaaaatcctgtttct

SEQ ID NO: 2072145 - DNA, 25 bp, Homo sapien
gcagaagtcagactcagcgatattc

SEQ ID NO: 2072146 - DNA, 25 bp, Homo sapien
gtttctgtttcagccgcagaagtca

SEQ ID NO: 2072147 - DNA, 25 bp, Homo sapien
tcaatggagcacacgtgcccaaaat

SEQ ID NO: 2072148 - DNA, 25 bp, Homo sapien
tcctctacagctctaatcacaggaa

SEQ ID NO: 2072149 - DNA, 25 bp, Homo sapien
ctcctctacagctctaatcacagga

SEQ ID NO: 2072150 - DNA, 25 bp, Homo sapien
cattttccttggtatgacacttcca

SEQ ID NO: 2072151 - DNA, 25 bp, Homo sapien
catcaggatttcctgacaggaacac

SEQ ID NO: 2072152 - DNA, 25 bp, Homo sapien
acaggaacacttggttgatgttggc

SEQ ID NO: 2072153 - DNA, 25 bp, Homo sapien
cacttggttgatgttggcagctgaa

SEQ ID NO: 2072154 - DNA, 25 bp, Homo sapien
tattcccagtgcctttagggaagga

SEQ ID NO: 2072155 - DNA, 25 bp, Homo sapien
ctttgtgatcacaaaagggattcta

SEQ ID NO: 2072156 - DNA, 25 bp, Homo sapien
tgcatcaagggttctctcccatcct

SEQ ID NO: 2072157 - DNA, 25 bp, Homo sapien
gcaatgcagccaagggagatgagtg

SEQ ID NO: 2072158 - DNA, 25 bp, Homo sapien
tgttgctcgtactttccattggctg

SEQ ID NO: 2072159 - DNA, 25 bp, Homo sapien
agtggccagcattgcatcaagggtt

SEQ ID NO: 2072160 - DNA, 25 bp, Homo sapien
taaagaactactaagataagcacat

SEQ ID NO: 2072161 - DNA, 25 bp, Homo sapien
aactactaagataagcacataatgc

SEQ ID NO: 2072162 - DNA, 25 bp, Homo sapien
aggataaagaactactaagataagc

SEQ ID NO: 2072163 - DNA, 25 bp, Homo sapien
ggatagaggataaagaactactaag

SEQ ID NO: 2072164 - DNA, 25 bp, Homo sapien
gatcaaatggttctttaatccattt

SEQ ID NO: 2072165 - DNA, 25 bp, Homo sapien
ttaatcatcaaagcaaccataaacc

SEQ ID NO: 2072166 - DNA, 25 bp, Homo sapien
tcatcaaagcaaccataaacctctt

SEQ ID NO: 2072167 - DNA, 25 bp, Homo sapien
cataaacctctttttgaagatcaaa

SEQ ID NO: 2072168 - DNA, 25 bp, Homo sapien
gagaccatgaaaatgaaagccactt

SEQ ID NO: 2072169 - DNA, 25 bp, Homo sapien
gcagcagccatctggagaccatgaa

SEQ ID NO: 2072170 - DNA, 25 bp, Homo sapien
tcctccatgacacctggggatgcag

SEQ ID NO: 2072171 - DNA, 25 bp, Homo sapien
atgcagcagccatctggagaccatg

SEQ ID NO: 2072172 - DNA, 25 bp, Homo sapien
ggtgcaagagagcagagaacagatg

SEQ ID NO: 2072173 - DNA, 25 bp, Homo sapien
ggagagtgtacatgctccctctggc

SEQ ID NO: 2072174 - DNA, 25 bp, Homo sapien
caccttgattggaagttggtaggaa

SEQ ID NO: 2072175 - DNA, 25 bp, Homo sapien
gaacagatgggaagagtgtgctcca

SEQ ID NO: 2072176 - DNA, 25 bp, Homo sapien
taaacgacacgaatgaaaagcaaga

SEQ ID NO: 2072177 - DNA, 25 bp, Homo sapien
tttcacagcaagagtcctccaacac

SEQ ID NO: 2072178 - DNA, 25 bp, Homo sapien
taagagcaggtccttaaacgacacg

SEQ ID NO: 2072179 - DNA, 25 bp, Homo sapien
gaaaaacctagcattgtataagagc

SEQ ID NO: 2072180 - DNA, 25 bp, Homo sapien
tgcaacagccatcttctgactgatc

SEQ ID NO: 2072181 - DNA, 25 bp, Homo sapien
agtctgctttcctgcaacagccatc

SEQ ID NO: 2072182 - DNA, 25 bp, Homo sapien
ctgcaacagccatcttctgactgat

SEQ ID NO: 2072183 - DNA, 25 bp, Homo sapien
ctgctttcctgcaacagccatcttc

SEQ ID NO: 2072184 - DNA, 25 bp, Homo sapien
tcaggcacgtcacatgcagtatcac

SEQ ID NO: 2072185 - DNA, 25 bp, Homo sapien
cgtcacatgcagtatcacttccggt

SEQ ID NO: 2072186 - DNA, 25 bp, Homo sapien
gtatcacttccggttcctcttggcc

SEQ ID NO: 2072187 - DNA, 25 bp, Homo sapien
ctgtgtgtttcaggcacgtcacatg

SEQ ID NO: 2072188 - DNA, 25 bp, Homo sapien
ccagcttcccacagatatggccaca

SEQ ID NO: 2072189 - DNA, 25 bp, Homo sapien
gccagcttcccacagatatggccac

SEQ ID NO: 2072190 - DNA, 25 bp, Homo sapien
caggtccactggggctttgccagct

SEQ ID NO: 2072191 - DNA, 25 bp, Homo sapien
tgccagcttcccacagatatggcca

SEQ ID NO: 2072192 - DNA, 25 bp, Homo sapien
gggaaataatgagaccaaagacaaa

SEQ ID NO: 2072193 - DNA, 25 bp, Homo sapien
agggttacgggcagagaactcgcca

SEQ ID NO: 2072194 - DNA, 25 bp, Homo sapien
ccagggctgttgatgatattgctgt

SEQ ID NO: 2072195 - DNA, 25 bp, Homo sapien
tgttgttggttggtcttaggattct

SEQ ID NO: 2072196 - DNA, 25 bp, Homo sapien
taaccctacagtgaagggtgcttgg

SEQ ID NO: 2072197 - DNA, 25 bp, Homo sapien
ggactgagggagaagataaccctac

SEQ ID NO: 2072198 - DNA, 25 bp, Homo sapien
tccacttcctgcttgtaaacccatg

SEQ ID NO: 2072199 - DNA, 25 bp, Homo sapien
cattataagctttcttgatgggagg

SEQ ID NO: 2072200 - DNA, 25 bp, Homo sapien
taagaagatgtacactgcctgccca

SEQ ID NO: 2072201 - DNA, 25 bp, Homo sapien
tgaagacccagagcggccttctggt

SEQ ID NO: 2072202 - DNA, 25 bp, Homo sapien
tgcctgcccagggatatatccagtt

SEQ ID NO: 2072203 - DNA, 25 bp, Homo sapien
tcacactgaggtgtaaggctctaag

SEQ ID NO: 2072204 - DNA, 25 bp, Homo sapien
tccttcctcccttacagacagtgac

SEQ ID NO: 2072205 - DNA, 25 bp, Homo sapien
agcccgttctctcagtgtccccatg

SEQ ID NO: 2072206 - DNA, 25 bp, Homo sapien
cttcctcccttacagacagtgacct

SEQ ID NO: 2072207 - DNA, 25 bp, Homo sapien
tttccttagggagcagcccgttctc

SEQ ID NO: 2072208 - DNA, 25 bp, Homo sapien
atattttagagtctgcgtgaaagtc

SEQ ID NO: 2072209 - DNA, 25 bp, Homo sapien
tattttagagtctgcgtgaaagtct

SEQ ID NO: 2072210 - DNA, 25 bp, Homo sapien
tttagagtctgcgtgaaagtcttac

SEQ ID NO: 2072211 - DNA, 25 bp, Homo sapien
aatattttagagtctgcgtgaaagt

SEQ ID NO: 2072212 - DNA, 25 bp, Homo sapien
tcagagaaacgccacagttctggca

SEQ ID NO: 2072213 - DNA, 25 bp, Homo sapien
gaatgaaggcgccatctggcccctc

SEQ ID NO: 2072214 - DNA, 25 bp, Homo sapien
attcagagaaacgccacagttctgg

SEQ ID NO: 2072215 - DNA, 25 bp, Homo sapien
aggaatgaaggcgccatctggcccc

SEQ ID NO: 2072216 - DNA, 25 bp, Homo sapien
accagtgccagggtatgtggaaggt

SEQ ID NO: 2072217 - DNA, 25 bp, Homo sapien
cacagctggacaacaccagtgccag

SEQ ID NO: 2072218 - DNA, 25 bp, Homo sapien
gtggggacatcggaaatctggtcat

SEQ ID NO: 2072219 - DNA, 25 bp, Homo sapien
gaaggtggggacatcggaaatctgg

SEQ ID NO: 2072220 - DNA, 25 bp, Homo sapien
agccagagtggacttgttcctccgt

SEQ ID NO: 2072221 - DNA, 25 bp, Homo sapien
gccagagtggacttgttcctccgtt

SEQ ID NO: 2072222 - DNA, 25 bp, Homo sapien
gaagccagagtggacttgttcctcc

SEQ ID NO: 2072223 - DNA, 25 bp, Homo sapien
cagagtggacttgttcctccgtttt

SEQ ID NO: 2072224 - DNA, 25 bp, Homo sapien
agctgctctgcgcatgaccagtagc

SEQ ID NO: 2072225 - DNA, 25 bp, Homo sapien
gctgctctgcgcatgaccagtagct

SEQ ID NO: 2072226 - DNA, 25 bp, Homo sapien
cagctgctctgcgcatgaccagtag

SEQ ID NO: 2072227 - DNA, 25 bp, Homo sapien
gcagctgctctgcgcatgaccagta

SEQ ID NO: 2072228 - DNA, 25 bp, Homo sapien
ggaaacagaggggacgagacctgac

SEQ ID NO: 2072229 - DNA, 25 bp, Homo sapien
acagaggggacgagacctgacactg

SEQ ID NO: 2072230 - DNA, 25 bp, Homo sapien
aaacagaggggacgagacctgacac

SEQ ID NO: 2072231 - DNA, 25 bp, Homo sapien
ggggacgagacctgacactgggaag

SEQ ID NO: 2072232 - DNA, 25 bp, Homo sapien
attggcaggccactataggattttc

SEQ ID NO: 2072233 - DNA, 25 bp, Homo sapien
taaatactattgataattggcaggc

SEQ ID NO: 2072234 - DNA, 25 bp, Homo sapien
tactattgataattggcaggccact

SEQ ID NO: 2072235 - DNA, 25 bp, Homo sapien
ttggcaggccactataggattttcc

SEQ ID NO: 2072236 - DNA, 25 bp, Homo sapien
aatataaagggccatctgacagatg

SEQ ID NO: 2072237 - DNA, 25 bp, Homo sapien
ctctcctgagaatataaagggccat

SEQ ID NO: 2072238 - DNA, 25 bp, Homo sapien
gtccctggaaatcttcataggagcc

SEQ ID NO: 2072239 - DNA, 25 bp, Homo sapien
gggcacagtagagaagtccctggaa

SEQ ID NO: 2072240 - DNA, 25 bp, Homo sapien
gtggcactcaggcactcaattaaaa

SEQ ID NO: 2072241 - DNA, 25 bp, Homo sapien
catgggcacacaaaagctctgtctc

SEQ ID NO: 2072242 - DNA, 25 bp, Homo sapien
cagaatgggtgactcaatggatcaa

SEQ ID NO: 2072243 - DNA, 25 bp, Homo sapien
tcctactgctatgggctgacagctg

SEQ ID NO: 2072244 - DNA, 25 bp, Homo sapien
ttgctgaattcttatgccctaaatc

SEQ ID NO: 2072245 - DNA, 25 bp, Homo sapien
tgcttcttgctgaattcttatgccc

SEQ ID NO: 2072246 - DNA, 25 bp, Homo sapien
ttcttgctgaattcttatgccctaa

SEQ ID NO: 2072247 - DNA, 25 bp, Homo sapien
ctgcttcttgctgaattcttatgcc

SEQ ID NO: 2072248 - DNA, 25 bp, Homo sapien
tgctaagctggttccattccgactc

SEQ ID NO: 2072249 - DNA, 25 bp, Homo sapien
ctaagctggttccattccgactcac

SEQ ID NO: 2072250 - DNA, 25 bp, Homo sapien
ctctgctaagctggttccattccga

SEQ ID NO: 2072251 - DNA, 25 bp, Homo sapien
tctgctaagctggttccattccgac

SEQ ID NO: 2072252 - DNA, 25 bp, Homo sapien
caatgagtaatgttaattggcctcc

SEQ ID NO: 2072253 - DNA, 25 bp, Homo sapien
gaacagccttatctgtggagcacag

SEQ ID NO: 2072254 - DNA, 25 bp, Homo sapien
tgcatttgcagcgtcagctgggttt

SEQ ID NO: 2072255 - DNA, 25 bp, Homo sapien
tcacacagggccatgtaaacagcct

SEQ ID NO: 2072256 - DNA, 25 bp, Homo sapien
tcctcgatcacagaccatgctgcag

SEQ ID NO: 2072257 - DNA, 25 bp, Homo sapien
gtgacaatgtttatctcgggcctcc

SEQ ID NO: 2072258 - DNA, 25 bp, Homo sapien
tctcggcaacttttgcaatggctgc

SEQ ID NO: 2072259 - DNA, 25 bp, Homo sapien
cagaccatgctgcagtccatttgtt

SEQ ID NO: 2072260 - DNA, 25 bp, Homo sapien
gagctgctactttctcagtgcatgt

SEQ ID NO: 2072261 - DNA, 25 bp, Homo sapien
aaggtcaatggatgccaactgctgc

SEQ ID NO: 2072262 - DNA, 25 bp, Homo sapien
tatgactcgtcatgcagactgcccg

SEQ ID NO: 2072263 - DNA, 25 bp, Homo sapien
tcagtgcatgttgctataccccacc

SEQ ID NO: 2072264 - DNA, 25 bp, Homo sapien
aagagtacgttatggcctgtttaca

SEQ ID NO: 2072265 - DNA, 25 bp, Homo sapien
ggccacctttgatggttgaaactca

SEQ ID NO: 2072266 - DNA, 25 bp, Homo sapien
tgaatatggcttttaacagttggcc

SEQ ID NO: 2072267 - DNA, 25 bp, Homo sapien
gctgcatgctcaaagaagatttacg

SEQ ID NO: 2072268 - DNA, 25 bp, Homo sapien
tcctgtatttgactttactagaaag

SEQ ID NO: 2072269 - DNA, 25 bp, Homo sapien
cttcctgtatttgactttactagaa

SEQ ID NO: 2072270 - DNA, 25 bp, Homo sapien
aaatttctgtttgtcatagcctccc

SEQ ID NO: 2072271 - DNA, 25 bp, Homo sapien
caagacattgaaactcaatttttgc

SEQ ID NO: 2072272 - DNA, 25 bp, Homo sapien
ggtatggtctatgcacttgagggtc

SEQ ID NO: 2072273 - DNA, 25 bp, Homo sapien
tatggaaaatgccttgacttcccga

SEQ ID NO: 2072274 - DNA, 25 bp, Homo sapien
taatcaagccaatccagaagccatg

SEQ ID NO: 2072275 - DNA, 25 bp, Homo sapien
ttatggacaacagctcaatctatgc

SEQ ID NO: 2072276 - DNA, 25 bp, Homo sapien
ttagtgccaagtcagcggcattaag

SEQ ID NO: 2072277 - DNA, 25 bp, Homo sapien
ccatttttgagagttagtgccaagt

SEQ ID NO: 2072278 - DNA, 25 bp, Homo sapien
ttttgagagttagtgccaagtcagc

SEQ ID NO: 2072279 - DNA, 25 bp, Homo sapien
gagagttagtgccaagtcagcggca

SEQ ID NO: 2072280 - DNA, 25 bp, Homo sapien
tgatgaggcaacaatatgggatttt

SEQ ID NO: 2072281 - DNA, 25 bp, Homo sapien
ggttgtctgacataaagctagaaag

SEQ ID NO: 2072282 - DNA, 25 bp, Homo sapien
ccaatgcacattgggatctcatgtg

SEQ ID NO: 2072283 - DNA, 25 bp, Homo sapien
gctggactgaaacttaaggaggtac

SEQ ID NO: 2072284 - DNA, 25 bp, Homo sapien
tccaggcccacatccagaggcataa

SEQ ID NO: 2072285 - DNA, 25 bp, Homo sapien
tggagctggcatggcctcatcctct

SEQ ID NO: 2072286 - DNA, 25 bp, Homo sapien
ccagaggcataaaacctgtgccacc

SEQ ID NO: 2072287 - DNA, 25 bp, Homo sapien
cctctgcagggatcctggagctggc

SEQ ID NO: 2072288 - DNA, 25 bp, Homo sapien
tagagtctgtctgcactgacgtggc

SEQ ID NO: 2072289 - DNA, 25 bp, Homo sapien
taacaatccaaaccacgagcatagg

SEQ ID NO: 2072290 - DNA, 25 bp, Homo sapien
gatagatccacaggaacaggccttg

SEQ ID NO: 2072291 - DNA, 25 bp, Homo sapien
aagactttcacatgggctactagcc

SEQ ID NO: 2072292 - DNA, 25 bp, Homo sapien
tgtgtatcactccttttgcaccgat

SEQ ID NO: 2072293 - DNA, 25 bp, Homo sapien
gggatgacagactgactacctgaca

SEQ ID NO: 2072294 - DNA, 25 bp, Homo sapien
gaacagcttctctatctaagtcagg

SEQ ID NO: 2072295 - DNA, 25 bp, Homo sapien
tacctgacacttcttatgtggaaac

SEQ ID NO: 2072296 - DNA, 25 bp, Homo sapien
tttttggccacaagaccctagacac

SEQ ID NO: 2072297 - DNA, 25 bp, Homo sapien
taagcaacagttccaaagggcaaca

SEQ ID NO: 2072298 - DNA, 25 bp, Homo sapien
caaatacaacgacaagctggccaac

SEQ ID NO: 2072299 - DNA, 25 bp, Homo sapien
catgcagctaatgatcccagaaaag

SEQ ID NO: 2072300 - DNA, 25 bp, Homo sapien
cattttcccagagaggtagatgcta

SEQ ID NO: 2072301 - DNA, 25 bp, Homo sapien
ggacccaatctgtaagccatgcaaa

SEQ ID NO: 2072302 - DNA, 25 bp, Homo sapien
taccagacggcacaggttttcgagc

SEQ ID NO: 2072303 - DNA, 25 bp, Homo sapien
cagaaagccctattgaacagtgcca

SEQ ID NO: 2072304 - DNA, 25 bp, Homo sapien
tgcaagggcaaagtctattcgaaat

SEQ ID NO: 2072305 - DNA, 25 bp, Homo sapien
taatggcaactctagcatgggattg

SEQ ID NO: 2072306 - DNA, 25 bp, Homo sapien
cacgtactatactacagggtcagtc

SEQ ID NO: 2072307 - DNA, 25 bp, Homo sapien
tggcatagcttaaaattgcaagggc

SEQ ID NO: 2072308 - DNA, 25 bp, Homo sapien
taggtcagacatgcattatggcagc

SEQ ID NO: 2072309 - DNA, 25 bp, Homo sapien
gacactaacccaacagtatattatg

SEQ ID NO: 2072310 - DNA, 25 bp, Homo sapien
taatgcaacacttctgtggtgtgtg

SEQ ID NO: 2072311 - DNA, 25 bp, Homo sapien
ggagagtttgagaaattgacactaa

SEQ ID NO: 2072312 - DNA, 25 bp, Homo sapien
taaaatgcccgcctgggttgaccat

SEQ ID NO: 2072313 - DNA, 25 bp, Homo sapien
tgacgtgtaggagaccactcgctgg

SEQ ID NO: 2072314 - DNA, 25 bp, Homo sapien
taatcaagaggcaacccagaggcca

SEQ ID NO: 2072315 - DNA, 25 bp, Homo sapien
cacctggtatcttgttgagaccgca

SEQ ID NO: 2072316 - DNA, 25 bp, Homo sapien
aggtggagcttttcaccacgccccg

SEQ ID NO: 2072317 - DNA, 25 bp, Homo sapien
ttagaaatgcaagacatgttgtgaa

SEQ ID NO: 2072318 - DNA, 25 bp, Homo sapien
caagacatgttgtgaagcacgatgc

SEQ ID NO: 2072319 - DNA, 25 bp, Homo sapien
catgttgtgaagcacgatgccgagg

SEQ ID NO: 2072320 - DNA, 25 bp, Homo sapien
ttgctgggaagtttgatgaagaccg

SEQ ID NO: 2072321 - DNA, 25 bp, Homo sapien
accacggtgacggacttctgctggc

SEQ ID NO: 2072322 - DNA, 25 bp, Homo sapien
gccgggggctgtagtaattgaaaca

SEQ ID NO: 2072323 - DNA, 25 bp, Homo sapien
tgcgacacggagaagccgggaggca

SEQ ID NO: 2072324 - DNA, 25 bp, Homo sapien
tcacaggcatccagtactcacaggt

SEQ ID NO: 2072325 - DNA, 25 bp, Homo sapien
cagtgcaggtaatggcaagctcaca

SEQ ID NO: 2072326 - DNA, 25 bp, Homo sapien
atggcaagctcacaggcatccagta

SEQ ID NO: 2072327 - DNA, 25 bp, Homo sapien
ctttgcagtgcaggtaatggcaagc

SEQ ID NO: 2072328 - DNA, 25 bp, Homo sapien
tctttccccctttcatcatgaagtc

SEQ ID NO: 2072329 - DNA, 25 bp, Homo sapien
ttcatcatgaagtctaaagatgtgc

SEQ ID NO: 2072330 - DNA, 25 bp, Homo sapien
catgaagtctaaagatgtgcatcaa

SEQ ID NO: 2072331 - DNA, 25 bp, Homo sapien
atcatgaagtctaaagatgtgcatc

SEQ ID NO: 2072332 - DNA, 25 bp, Homo sapien
gcttgccagccacttagttatattg

SEQ ID NO: 2072333 - DNA, 25 bp, Homo sapien
caagaatgggaatgcccggtgacag

SEQ ID NO: 2072334 - DNA, 25 bp, Homo sapien
tcttagcaaacactccaattagtgg

SEQ ID NO: 2072335 - DNA, 25 bp, Homo sapien
tgatacaggccatctacttaaatct

SEQ ID NO: 2072336 - DNA, 25 bp, Homo sapien
gatgatcaattaccctgactgccag

SEQ ID NO: 2072337 - DNA, 25 bp, Homo sapien
caggaagccaaggttagcgctggca

SEQ ID NO: 2072338 - DNA, 25 bp, Homo sapien
gctataaaagactgtcaggagatcc

SEQ ID NO: 2072339 - DNA, 25 bp, Homo sapien
gacaggcaggcaggtagagcaaata

SEQ ID NO: 2072340 - DNA, 25 bp, Homo sapien
aacaagagtcctaccctcaaggagc

SEQ ID NO: 2072341 - DNA, 25 bp, Homo sapien
gaacatagcagtgagtaagcagata

SEQ ID NO: 2072342 - DNA, 25 bp, Homo sapien
gcagatatttattgtgaactcacct

SEQ ID NO: 2072343 - DNA, 25 bp, Homo sapien
caaggaaccggcgttgccatggtaa

SEQ ID NO: 2072344 - DNA, 25 bp, Homo sapien
ttaaggagcctacaagctggcccac

SEQ ID NO: 2072345 - DNA, 25 bp, Homo sapien
aatttaaggagcctacaagctggcc

SEQ ID NO: 2072346 - DNA, 25 bp, Homo sapien
aaggagcctacaagctggcccactg

SEQ ID NO: 2072347 - DNA, 25 bp, Homo sapien
tggaatttaaggagcctacaagctg

SEQ ID NO: 2072348 - DNA, 25 bp, Homo sapien
gaactgccataaataccttctttag

SEQ ID NO: 2072349 - DNA, 25 bp, Homo sapien
cataaataccttctttagagcaggt

SEQ ID NO: 2072350 - DNA, 25 bp, Homo sapien
tctcagaaatgagaactgccataaa

SEQ ID NO: 2072351 - DNA, 25 bp, Homo sapien
aatgagaactgccataaataccttc

SEQ ID NO: 2072352 - DNA, 25 bp, Homo sapien
cacgtccatgatactgaacctaagg

SEQ ID NO: 2072353 - DNA, 25 bp, Homo sapien
caggctattatttgttgacctcaga

SEQ ID NO: 2072354 - DNA, 25 bp, Homo sapien
gcttgttgctctaacagtggttacc

SEQ ID NO: 2072355 - DNA, 25 bp, Homo sapien
ggagacacctacctcgaaatcagct

SEQ ID NO: 2072356 - DNA, 25 bp, Homo sapien
attattgtgcattctattttggaga

SEQ ID NO: 2072357 - DNA, 25 bp, Homo sapien
taaggcttacagatgcaactttgtt

SEQ ID NO: 2072358 - DNA, 25 bp, Homo sapien
aagctccagaatgcaaactgttttc

SEQ ID NO: 2072359 - DNA, 25 bp, Homo sapien
actgtttccagacaaccagaaagag

SEQ ID NO: 2072360 - DNA, 25 bp, Homo sapien
ataaacaatggccatcatttaccat

SEQ ID NO: 2072361 - DNA, 25 bp, Homo sapien
caatggccatcatttaccattattg

SEQ ID NO: 2072362 - DNA, 25 bp, Homo sapien
tggccatcatttaccattattgaga

SEQ ID NO: 2072363 - DNA, 25 bp, Homo sapien
tattgagaacatacaggaaggggtc

SEQ ID NO: 2072364 - DNA, 25 bp, Homo sapien
caaagaatccaaatttcaggtgatt

SEQ ID NO: 2072365 - DNA, 25 bp, Homo sapien
taattgtcgaaactcctctgcgttt

SEQ ID NO: 2072366 - DNA, 25 bp, Homo sapien
tgatggttttaattgtcgaaactcc

SEQ ID NO: 2072367 - DNA, 25 bp, Homo sapien
tcaggtgattcacaatgccccactg

SEQ ID NO: 2072368 - DNA, 25 bp, Homo sapien
ttcaccaagggtccacacactcttc

SEQ ID NO: 2072369 - DNA, 25 bp, Homo sapien
cttcaccaagggtccacacactctt

SEQ ID NO: 2072370 - DNA, 25 bp, Homo sapien
tcctggggatctggatccaacaaaa

SEQ ID NO: 2072371 - DNA, 25 bp, Homo sapien
gtccctggagaacctgcttctctgc

SEQ ID NO: 2072372 - DNA, 25 bp, Homo sapien
gaacttggccgtcatcttctacaac

SEQ ID NO: 2072373 - DNA, 25 bp, Homo sapien
tggccgtcatcttctacaacttcag

SEQ ID NO: 2072374 - DNA, 25 bp, Homo sapien
ccaagctgaacttggccgtcatctt

SEQ ID NO: 2072375 - DNA, 25 bp, Homo sapien
ctgaacttggccgtcatcttctaca

SEQ ID NO: 2072376 - DNA, 25 bp, Homo sapien
ttctttctcaatccacctaactgtg

SEQ ID NO: 2072377 - DNA, 25 bp, Homo sapien
cagggacatattggggtgaattagc

SEQ ID NO: 2072378 - DNA, 25 bp, Homo sapien
tcctcttcatccaaacctggcaggg

SEQ ID NO: 2072379 - DNA, 25 bp, Homo sapien
gatgtctaaatatggttcctcttca

SEQ ID NO: 2072380 - DNA, 25 bp, Homo sapien
cccctgaatggctagtgcagctctg

SEQ ID NO: 2072381 - DNA, 25 bp, Homo sapien
gcacccctgaatggctagtgcagct

SEQ ID NO: 2072382 - DNA, 25 bp, Homo sapien
acccctgaatggctagtgcagctct

SEQ ID NO: 2072383 - DNA, 25 bp, Homo sapien
ccctgaatggctagtgcagctctgg

SEQ ID NO: 2072384 - DNA, 25 bp, Homo sapien
gaagtccttcacaagggtgtccact

SEQ ID NO: 2072385 - DNA, 25 bp, Homo sapien
ttcacccagggcaatcttaaaagag

SEQ ID NO: 2072386 - DNA, 25 bp, Homo sapien
gagaaaacacttacccaagcgcctg

SEQ ID NO: 2072387 - DNA, 25 bp, Homo sapien
taagaagttacatggcactagagcc

SEQ ID NO: 2072388 - DNA, 25 bp, Homo sapien
tgtcctgggaacactacaaggctgg

SEQ ID NO: 2072389 - DNA, 25 bp, Homo sapien
ggtgccaccgtgttctcatccagat

SEQ ID NO: 2072390 - DNA, 25 bp, Homo sapien
tattgactccccgtgacaaggtgat

SEQ ID NO: 2072391 - DNA, 25 bp, Homo sapien
caggtcactcagatccaaggatggc

SEQ ID NO: 2072392 - DNA, 25 bp, Homo sapien
tcttccatctcatcgccatgttctg

SEQ ID NO: 2072393 - DNA, 25 bp, Homo sapien
gataacacaagttccatatcctcca

SEQ ID NO: 2072394 - DNA, 25 bp, Homo sapien
cagataacacaagttccatatcctc

SEQ ID NO: 2072395 - DNA, 25 bp, Homo sapien
tctgacgatacagggacacaaaagt

SEQ ID NO: 2072396 - DNA, 25 bp, Homo sapien
gcagtactcattcctaggtctggcc

SEQ ID NO: 2072397 - DNA, 25 bp, Homo sapien
aatcctgcatcctagcctaaaactt

SEQ ID NO: 2072398 - DNA, 25 bp, Homo sapien
tatcaccctgaaggatgccctgggc

SEQ ID NO: 2072399 - DNA, 25 bp, Homo sapien
aggtctggccttgttcttactgaaa

SEQ ID NO: 2072400 - DNA, 25 bp, Homo sapien
gggagagcacccactattgatgaaa

SEQ ID NO: 2072401 - DNA, 25 bp, Homo sapien
ccagtcattttcctcgtagccagca

SEQ ID NO: 2072402 - DNA, 25 bp, Homo sapien
taaaatggccacgaatgtccagtgc

SEQ ID NO: 2072403 - DNA, 25 bp, Homo sapien
cagaacaagttacccactgtagagg

SEQ ID NO: 2072404 - DNA, 25 bp, Homo sapien
tcctgtgtacaaacacggtggcaaa

SEQ ID NO: 2072405 - DNA, 25 bp, Homo sapien
caaacattggtatacgtactgcagc

SEQ ID NO: 2072406 - DNA, 25 bp, Homo sapien
tggaagggtcccattcactggaact

SEQ ID NO: 2072407 - DNA, 25 bp, Homo sapien
cattgtaggctaattgcaggtcaca

SEQ ID NO: 2072408 - DNA, 25 bp, Homo sapien
actcctaggcgatcacaagcagccc

SEQ ID NO: 2072409 - DNA, 25 bp, Homo sapien
cctcacaactccacgaagaacgtag

SEQ ID NO: 2072410 - DNA, 25 bp, Homo sapien
tatgcaggcattagtatatcaaggg

SEQ ID NO: 2072411 - DNA, 25 bp, Homo sapien
tatcaaggggtaaataaggcatcct

SEQ ID NO: 2072412 - DNA, 25 bp, Homo sapien
catgtaacaagcacagacggttccc

SEQ ID NO: 2072413 - DNA, 25 bp, Homo sapien
catgacgtcacaatgggcagtgcca

SEQ ID NO: 2072414 - DNA, 25 bp, Homo sapien
ggacatcaagaaccacccaaaggag

SEQ ID NO: 2072415 - DNA, 25 bp, Homo sapien
acagtgtaactctcgaagccatggg

SEQ ID NO: 2072416 - DNA, 25 bp, Homo sapien
actccatcagtttgagtccttgagt

SEQ ID NO: 2072417 - DNA, 25 bp, Homo sapien
ctctgggtaggatcacataattgct

SEQ ID NO: 2072418 - DNA, 25 bp, Homo sapien
tgactacgatgagcagggtccacct

SEQ ID NO: 2072419 - DNA, 25 bp, Homo sapien
tttccttcccgatgctgcaatgatc

SEQ ID NO: 2072420 - DNA, 25 bp, Homo sapien
ctgtatctgtcaccgagtctctttc

SEQ ID NO: 2072421 - DNA, 25 bp, Homo sapien
tctgcgtgatgacatcaagtggaaa

SEQ ID NO: 2072422 - DNA, 25 bp, Homo sapien
gaaatggtacacgtttaggaggcaa

SEQ ID NO: 2072423 - DNA, 25 bp, Homo sapien
gacaggcaggaaacacaattgagac

SEQ ID NO: 2072424 - DNA, 25 bp, Homo sapien
tggcagagcgcctactagcaacagt

SEQ ID NO: 2072425 - DNA, 25 bp, Homo sapien
acagcgctctctaatcccgggaggg

SEQ ID NO: 2072426 - DNA, 25 bp, Homo sapien
ggtaacccggtcatatgggaatgcg

SEQ ID NO: 2072427 - DNA, 25 bp, Homo sapien
catgcaggaagggttagatacgcgc

SEQ ID NO: 2072428 - DNA, 25 bp, Homo sapien
gcgagagctttttgtgtcactgaga

SEQ ID NO: 2072429 - DNA, 25 bp, Homo sapien
gccctccgcgttcgcggtcggacac

SEQ ID NO: 2072430 - DNA, 25 bp, Homo sapien
gcggcggcgacagcatcgccgggtg

SEQ ID NO: 2072431 - DNA, 25 bp, Homo sapien
gggctcgggtgctcgctacagaggc

SEQ ID NO: 2072432 - DNA, 25 bp, Homo sapien
ctggctgggattttaattcacagag

SEQ ID NO: 2072433 - DNA, 25 bp, Homo sapien
cttccactggctgggattttaattc

SEQ ID NO: 2072434 - DNA, 25 bp, Homo sapien
gcatcatgggtgttctgccttctgt

SEQ ID NO: 2072435 - DNA, 25 bp, Homo sapien
catcatgggtgttctgccttctgtc

SEQ ID NO: 2072436 - DNA, 25 bp, Homo sapien
tcttatcatgtttgtgcagttcggg

SEQ ID NO: 2072437 - DNA, 25 bp, Homo sapien
gatgccaaagtcctctggacaccct

SEQ ID NO: 2072438 - DNA, 25 bp, Homo sapien
ggtatctgctgtgttcttatcatgt

SEQ ID NO: 2072439 - DNA, 25 bp, Homo sapien
ggttgagtaagatcctcacatccac

SEQ ID NO: 2072440 - DNA, 25 bp, Homo sapien
tccattggctatcaggttcctggca

SEQ ID NO: 2072441 - DNA, 25 bp, Homo sapien
caactgtcctccttatctttccttt

SEQ ID NO: 2072442 - DNA, 25 bp, Homo sapien
cattggctatcaggttcctggcatc

SEQ ID NO: 2072443 - DNA, 25 bp, Homo sapien
ttctgtcacccatgcggttccaact

SEQ ID NO: 2072444 - DNA, 25 bp, Homo sapien
gacctagcttcacgcagttcttcct

SEQ ID NO: 2072445 - DNA, 25 bp, Homo sapien
cagacctagcttcacgcagttcttc

SEQ ID NO: 2072446 - DNA, 25 bp, Homo sapien
ccagacctagcttcacgcagttctt

SEQ ID NO: 2072447 - DNA, 25 bp, Homo sapien
ctagcttcacgcagttcttcctccc

SEQ ID NO: 2072448 - DNA, 25 bp, Homo sapien
gtgatatggacaatgcttcccctga

SEQ ID NO: 2072449 - DNA, 25 bp, Homo sapien
aaccctaaaggtagtgatatggaca

SEQ ID NO: 2072450 - DNA, 25 bp, Homo sapien
gtggcaaaccctaaaggtagtgata

SEQ ID NO: 2072451 - DNA, 25 bp, Homo sapien
tggacaatgcttcccctgaagtgtc

SEQ ID NO: 2072452 - DNA, 25 bp, Homo sapien
tctgtccttggaaacattccatgag

SEQ ID NO: 2072453 - DNA, 25 bp, Homo sapien
cacagcagggccgttcttgagattg

SEQ ID NO: 2072454 - DNA, 25 bp, Homo sapien
tctacacccagattcatggcccatg

SEQ ID NO: 2072455 - DNA, 25 bp, Homo sapien
tccatgagattgtttgcctcttgga

SEQ ID NO: 2072456 - DNA, 25 bp, Homo sapien
aaagccagagtttgaggtctcagcc

SEQ ID NO: 2072457 - DNA, 25 bp, Homo sapien
ttccagattcatggagagtggtcct

SEQ ID NO: 2072458 - DNA, 25 bp, Homo sapien
ctctcgccaatcttaacctctctgg

SEQ ID NO: 2072459 - DNA, 25 bp, Homo sapien
tttcctctcgccaatcttaacctct

SEQ ID NO: 2072460 - DNA, 25 bp, Homo sapien
gaagaggaaagcacaatgaagccat

SEQ ID NO: 2072461 - DNA, 25 bp, Homo sapien
aagaagaggaaagcacaatgaagcc

SEQ ID NO: 2072462 - DNA, 25 bp, Homo sapien
gtaagaagaggaaagcacaatgaag

SEQ ID NO: 2072463 - DNA, 25 bp, Homo sapien
ctagggtaagaagaggaaagcacaa

SEQ ID NO: 2072464 - DNA, 25 bp, Homo sapien
cacccacaaagaacctggaagccct

SEQ ID NO: 2072465 - DNA, 25 bp, Homo sapien
tcacccacaaagaacctggaagccc

SEQ ID NO: 2072466 - DNA, 25 bp, Homo sapien
tcactaggaactactttcattttta

SEQ ID NO: 2072467 - DNA, 25 bp, Homo sapien
gttgtggtggactgaacttgcattg

SEQ ID NO: 2072468 - DNA, 25 bp, Homo sapien
ttactgacaacagccaataggcttc

SEQ ID NO: 2072469 - DNA, 25 bp, Homo sapien
ttttatccgcaaacaatgggaacag

SEQ ID NO: 2072470 - DNA, 25 bp, Homo sapien
tgtcttcttttatccgcaaacaatg

SEQ ID NO: 2072471 - DNA, 25 bp, Homo sapien
gcagttgcaagttactgcttgccag

SEQ ID NO: 2072472 - DNA, 25 bp, Homo sapien
gttactgcttgccagaacttatttc

SEQ ID NO: 2072473 - DNA, 25 bp, Homo sapien
tatttctctcatacctgttcaaaca

SEQ ID NO: 2072474 - DNA, 25 bp, Homo sapien
cagaacttatttctctcatacctgt

SEQ ID NO: 2072475 - DNA, 25 bp, Homo sapien
tttctcctttaaaactcattgtctc

SEQ ID NO: 2072476 - DNA, 25 bp, Homo sapien
ctcctttaaaactcattgtctccat

SEQ ID NO: 2072477 - DNA, 25 bp, Homo sapien
tgtaaatgccaccatttctccttta

SEQ ID NO: 2072478 - DNA, 25 bp, Homo sapien
ctgtaaatgccaccatttctccttt

SEQ ID NO: 2072479 - DNA, 25 bp, Homo sapien
acttcttccaggcaacacttatgaa

SEQ ID NO: 2072480 - DNA, 25 bp, Homo sapien
tttatcatcttgcaaatcgtttgtc

SEQ ID NO: 2072481 - DNA, 25 bp, Homo sapien
gcataaggttgctgtcgtcttgaca

SEQ ID NO: 2072482 - DNA, 25 bp, Homo sapien
ttctggtcgctgctaacttcttcca

SEQ ID NO: 2072483 - DNA, 25 bp, Homo sapien
caaaatggaggccttggataatcac

SEQ ID NO: 2072484 - DNA, 25 bp, Homo sapien
ctccattgacagcacctccagccat

SEQ ID NO: 2072485 - DNA, 25 bp, Homo sapien
atggctgaggaccaattagcttttc

SEQ ID NO: 2072486 - DNA, 25 bp, Homo sapien
aaaggagatctgtttctgttacagt

SEQ ID NO: 2072487 - DNA, 25 bp, Homo sapien
ataaaaaggagatctgtttctgtta

SEQ ID NO: 2072488 - DNA, 25 bp, Homo sapien
ggagatctgtttctgttacagttac

SEQ ID NO: 2072489 - DNA, 25 bp, Homo sapien
cacttgcttagttagggacgcggca

SEQ ID NO: 2072490 - DNA, 25 bp, Homo sapien
ccctggaatgtgctaaagcagaaaa

SEQ ID NO: 2072491 - DNA, 25 bp, Homo sapien
cgcggcattgctcattgtgcagcat

SEQ ID NO: 2072492 - DNA, 25 bp, Homo sapien
tgtcccggttatattcaggaagctc

SEQ ID NO: 2072493 - DNA, 25 bp, Homo sapien
cgtccccagcctgatgcagtctgac

SEQ ID NO: 2072494 - DNA, 25 bp, Homo sapien
cttcggaaatacacgtccccagcct

SEQ ID NO: 2072495 - DNA, 25 bp, Homo sapien
ttcggaaatacacgtccccagcctg

SEQ ID NO: 2072496 - DNA, 25 bp, Homo sapien
ggaaatacacgtccccagcctgatg

SEQ ID NO: 2072497 - DNA, 25 bp, Homo sapien
ccctgcttctgactccgcagcaacc

SEQ ID NO: 2072498 - DNA, 25 bp, Homo sapien
ctccctgcttctgactccgcagcaa

SEQ ID NO: 2072499 - DNA, 25 bp, Homo sapien
atttcaacttcaggatgtcgctgag

SEQ ID NO: 2072500 - DNA, 25 bp, Homo sapien
catttgcttggagacacatggacat

SEQ ID NO: 2072501 - DNA, 25 bp, Homo sapien
tcttctgtatggttaaatgtaagag

SEQ ID NO: 2072502 - DNA, 25 bp, Homo sapien
tctgtatggttaaatgtaagagaca

SEQ ID NO: 2072503 - DNA, 25 bp, Homo sapien
gggagcttaagcgagtctccgcaag

SEQ ID NO: 2072504 - DNA, 25 bp, Homo sapien
gcgagtctccgcaagcctcactgga

SEQ ID NO: 2072505 - DNA, 25 bp, Homo sapien
ttaagcgagtctccgcaagcctcac

SEQ ID NO: 2072506 - DNA, 25 bp, Homo sapien
tcctccggggagcttaagcgagtct

SEQ ID NO: 2072507 - DNA, 25 bp, Homo sapien
catttttacccacggatccatgaat

SEQ ID NO: 2072508 - DNA, 25 bp, Homo sapien
ttttacccacggatccatgaatcat

SEQ ID NO: 2072509 - DNA, 25 bp, Homo sapien
tttttacccacggatccatgaatca

SEQ ID NO: 2072510 - DNA, 25 bp, Homo sapien
gcatttttacccacggatccatgaa

SEQ ID NO: 2072511 - DNA, 25 bp, Homo sapien
agaaaggctgttccctcctgttcac

SEQ ID NO: 2072512 - DNA, 25 bp, Homo sapien
acagaaaggctgttccctcctgttc

SEQ ID NO: 2072513 - DNA, 25 bp, Homo sapien
caacagaaaggctgttccctcctgt

SEQ ID NO: 2072514 - DNA, 25 bp, Homo sapien
tcaacagaaaggctgttccctcctg

SEQ ID NO: 2072515 - DNA, 25 bp, Homo sapien
catcctgcatcctgaagtaggctct

SEQ ID NO: 2072516 - DNA, 25 bp, Homo sapien
tctgttcacttcaccccatttatgt

SEQ ID NO: 2072517 - DNA, 25 bp, Homo sapien
agccatcctgcatcctgaagtaggc

SEQ ID NO: 2072518 - DNA, 25 bp, Homo sapien
caccccatttatgtacctggtcaaa

SEQ ID NO: 2072519 - DNA, 25 bp, Homo sapien
actgatccccagggttctttgaatc

SEQ ID NO: 2072520 - DNA, 25 bp, Homo sapien
tgatccccagggttctttgaatctt

SEQ ID NO: 2072521 - DNA, 25 bp, Homo sapien
ctgatccccagggttctttgaatct

SEQ ID NO: 2072522 - DNA, 25 bp, Homo sapien
ctgatgacgggaaagaagctgacag

SEQ ID NO: 2072523 - DNA, 25 bp, Homo sapien
gatgacgggaaagaagctgacaggc

SEQ ID NO: 2072524 - DNA, 25 bp, Homo sapien
tgatgacgggaaagaagctgacagg

SEQ ID NO: 2072525 - DNA, 25 bp, Homo sapien
ccctgagagctgcacgtgggagccc

SEQ ID NO: 2072526 - DNA, 25 bp, Homo sapien
tgttcccacctccgctggaggatgc

SEQ ID NO: 2072527 - DNA, 25 bp, Homo sapien
aggtcctggactgtgtatgccctga

SEQ ID NO: 2072528 - DNA, 25 bp, Homo sapien
ggagttcccatagctggtgcttgtg

SEQ ID NO: 2072529 - DNA, 25 bp, Homo sapien
ttttttctatgaagcgagcaaggct

SEQ ID NO: 2072530 - DNA, 25 bp, Homo sapien
acaattagaagagctgtggtttttt

SEQ ID NO: 2072531 - DNA, 25 bp, Homo sapien
tttttctatgaagcgagcaaggctg

SEQ ID NO: 2072532 - DNA, 25 bp, Homo sapien
gccacaattagaagagctgtggttt

SEQ ID NO: 2072533 - DNA, 25 bp, Homo sapien
agggagaaatgatgtcacctttcta

SEQ ID NO: 2072534 - DNA, 25 bp, Homo sapien
ttctaaatactggtatagatggaag

SEQ ID NO: 2072535 - DNA, 25 bp, Homo sapien
gaagctctgtccaggtgcttggagc

SEQ ID NO: 2072536 - DNA, 25 bp, Homo sapien
gtaaaattcattctcagggagaaat

SEQ ID NO: 2072537 - DNA, 25 bp, Homo sapien
taagtggtcactctgtgtagaggac

SEQ ID NO: 2072538 - DNA, 25 bp, Homo sapien
aggttttctgtaagtggtcactctg

SEQ ID NO: 2072539 - DNA, 25 bp, Homo sapien
tctgtaagtggtcactctgtgtaga

SEQ ID NO: 2072540 - DNA, 25 bp, Homo sapien
cactctgtgtagaggactcacagga

SEQ ID NO: 2072541 - DNA, 25 bp, Homo sapien
ggaatgaataactggatagagacct

SEQ ID NO: 2072542 - DNA, 25 bp, Homo sapien
attagggcccaaatatacttcgttg

SEQ ID NO: 2072543 - DNA, 25 bp, Homo sapien
tcagtgttaacatccgtgatcagca

SEQ ID NO: 2072544 - DNA, 25 bp, Homo sapien
ttcaatgatgatgggttgaatgggc

SEQ ID NO: 2072545 - DNA, 25 bp, Homo sapien
tttccgtcaaacctgagtgatgtgg

SEQ ID NO: 2072546 - DNA, 25 bp, Homo sapien
tgagtgatgtggttgctgaacagca

SEQ ID NO: 2072547 - DNA, 25 bp, Homo sapien
caaacctgagtgatgtggttgctga

SEQ ID NO: 2072548 - DNA, 25 bp, Homo sapien
ttccaaatctttccgtcaaacctga

SEQ ID NO: 2072549 - DNA, 25 bp, Homo sapien
catcttcatcactctcagtgcttct

SEQ ID NO: 2072550 - DNA, 25 bp, Homo sapien
tcacagaggcatatcctgcagctat

SEQ ID NO: 2072551 - DNA, 25 bp, Homo sapien
attcacagaggcatatcctgcagct

SEQ ID NO: 2072552 - DNA, 25 bp, Homo sapien
ttcacagaggcatatcctgcagcta

SEQ ID NO: 2072553 - DNA, 25 bp, Homo sapien
cattcacagaggcatatcctgcagc

SEQ ID NO: 2072554 - DNA, 25 bp, Homo sapien
ggagaactgtatatactgtggtcag

SEQ ID NO: 2072555 - DNA, 25 bp, Homo sapien
gaactgtatatactgtggtcagcac

SEQ ID NO: 2072556 - DNA, 25 bp, Homo sapien
aactgtatatactgtggtcagcact

SEQ ID NO: 2072557 - DNA, 25 bp, Homo sapien
gtttggagaactgtatatactgtgg

SEQ ID NO: 2072558 - DNA, 25 bp, Homo sapien
gccaaatcctagatgctggaagctc

SEQ ID NO: 2072559 - DNA, 25 bp, Homo sapien
tatcttcccaatgggcaactgcacg

SEQ ID NO: 2072560 - DNA, 25 bp, Homo sapien
tcaaagacatgacttggaagtccag

SEQ ID NO: 2072561 - DNA, 25 bp, Homo sapien
taattgtttccacaaggaatgccac

SEQ ID NO: 2072562 - DNA, 25 bp, Homo sapien
ctattagttctgtattcagtaatga

SEQ ID NO: 2072563 - DNA, 25 bp, Homo sapien
aattcatactattagttctgtattc

SEQ ID NO: 2072564 - DNA, 25 bp, Homo sapien
actattagttctgtattcagtaatg

SEQ ID NO: 2072565 - DNA, 25 bp, Homo sapien
catactattagttctgtattcagta

SEQ ID NO: 2072566 - DNA, 25 bp, Homo sapien
ggccagataacaacaactcagggtg

SEQ ID NO: 2072567 - DNA, 25 bp, Homo sapien
aaattgggctatctctctcttctga

SEQ ID NO: 2072568 - DNA, 25 bp, Homo sapien
actcgtctctttgggaaattgggct

SEQ ID NO: 2072569 - DNA, 25 bp, Homo sapien
acagcaggttacttcgggtcagtct

SEQ ID NO: 2072570 - DNA, 25 bp, Homo sapien
ttcttgcaaggaactgattacccat

SEQ ID NO: 2072571 - DNA, 25 bp, Homo sapien
cttcttgcaaggaactgattaccca

SEQ ID NO: 2072572 - DNA, 25 bp, Homo sapien
ctccgaaagaatgaatcaaaccctc

SEQ ID NO: 2072573 - DNA, 25 bp, Homo sapien
gaatgaatcaaaccctcttggcgta

SEQ ID NO: 2072574 - DNA, 25 bp, Homo sapien
gaaagaatgaatcaaaccctcttgg

SEQ ID NO: 2072575 - DNA, 25 bp, Homo sapien
gaatcaaaccctcttggcgtaggct

SEQ ID NO: 2072576 - DNA, 25 bp, Homo sapien
gaataagagacacatctcaaaggtt

SEQ ID NO: 2072577 - DNA, 25 bp, Homo sapien
tgagtttacccaagagtaataataa

SEQ ID NO: 2072578 - DNA, 25 bp, Homo sapien
ttctagattttagccctgtgaggcc

SEQ ID NO: 2072579 - DNA, 25 bp, Homo sapien
aatgctgcagttctgaaggtagaaa

SEQ ID NO: 2072580 - DNA, 25 bp, Homo sapien
ccctctaggccagcttcatcagaaa

SEQ ID NO: 2072581 - DNA, 25 bp, Homo sapien
agcccctagtccaccaaaacaagtg

SEQ ID NO: 2072582 - DNA, 25 bp, Homo sapien
agctacgcctgtcctagagaccata

SEQ ID NO: 2072583 - DNA, 25 bp, Homo sapien
aacaagtgtaaaaaggtcgcaggag

SEQ ID NO: 2072584 - DNA, 25 bp, Homo sapien
gctatgaactgatgcatgagatttc

SEQ ID NO: 2072585 - DNA, 25 bp, Homo sapien
catcactgtttgctaccatagcttc

SEQ ID NO: 2072586 - DNA, 25 bp, Homo sapien
tagttgtccagctagattttatgct

SEQ ID NO: 2072587 - DNA, 25 bp, Homo sapien
cagtgataagtgtttatacagtcag

SEQ ID NO: 2072588 - DNA, 25 bp, Homo sapien
ctactagcacaccacgggcaaaagg

SEQ ID NO: 2072589 - DNA, 25 bp, Homo sapien
aaattacagagggtttcctagtcat

SEQ ID NO: 2072590 - DNA, 25 bp, Homo sapien
aaaatagggcgcataccaggaaagc

SEQ ID NO: 2072591 - DNA, 25 bp, Homo sapien
ttagcatcagccaaagctactagca

SEQ ID NO: 2072592 - DNA, 25 bp, Homo sapien
cacatgcatctagctggttgactga

SEQ ID NO: 2072593 - DNA, 25 bp, Homo sapien
ggtaacagatgttgagcctacaatt

SEQ ID NO: 2072594 - DNA, 25 bp, Homo sapien
ctgagaaaacctgagaaatagcact

SEQ ID NO: 2072595 - DNA, 25 bp, Homo sapien
gaaggatagacatgcatcacatgca

SEQ ID NO: 2072596 - DNA, 25 bp, Homo sapien
caccctgactgtctaacaaaaccag

SEQ ID NO: 2072597 - DNA, 25 bp, Homo sapien
gaagctcttgaaataatacaccctg

SEQ ID NO: 2072598 - DNA, 25 bp, Homo sapien
agctgataaatattgacggtggcac

SEQ ID NO: 2072599 - DNA, 25 bp, Homo sapien
tgaaagctgataaatattgacggtg

SEQ ID NO: 2072600 - DNA, 25 bp, Homo sapien
ggtatgtgggaagttgtgcgactgg

SEQ ID NO: 2072601 - DNA, 25 bp, Homo sapien
cagcaatgactctggatgccatcag

SEQ ID NO: 2072602 - DNA, 25 bp, Homo sapien
agcactgcccccacaggcatatgct

SEQ ID NO: 2072603 - DNA, 25 bp, Homo sapien
ccacagcaatgactctggatgccat

SEQ ID NO: 2072604 - DNA, 25 bp, Homo sapien
ctgtcaattcggaattccaaatacc

SEQ ID NO: 2072605 - DNA, 25 bp, Homo sapien
cagataacctgtcaattcggaattc

SEQ ID NO: 2072606 - DNA, 25 bp, Homo sapien
ttccttacaggagtagaatatacta

SEQ ID NO: 2072607 - DNA, 25 bp, Homo sapien
acaggagtagaatatactatatatc

SEQ ID NO: 2072608 - DNA, 25 bp, Homo sapien
gtttcttcgttgtgagcagctgggc

SEQ ID NO: 2072609 - DNA, 25 bp, Homo sapien
tgggtttgccacatagtctgagttt

SEQ ID NO: 2072610 - DNA, 25 bp, Homo sapien
gacatgacaatcacatagtggctga

SEQ ID NO: 2072611 - DNA, 25 bp, Homo sapien
ggccattgaggaacaccaaaaagat

SEQ ID NO: 2072612 - DNA, 25 bp, Homo sapien
gatattaactgatctacttcagcca

SEQ ID NO: 2072613 - DNA, 25 bp, Homo sapien
gggaagctggtacttctgtccatac

SEQ ID NO: 2072614 - DNA, 25 bp, Homo sapien
cctatgctcgcagctaagggacaga

SEQ ID NO: 2072615 - DNA, 25 bp, Homo sapien
taataccaccaccacaagagcctat

SEQ ID NO: 2072616 - DNA, 25 bp, Homo sapien
ttcatgtcccatgtaagttggattc

SEQ ID NO: 2072617 - DNA, 25 bp, Homo sapien
gaagaggtccttcatgtcccatgta

SEQ ID NO: 2072618 - DNA, 25 bp, Homo sapien
ggtccttcatgtcccatgtaagttg

SEQ ID NO: 2072619 - DNA, 25 bp, Homo sapien
ccttcatgtcccatgtaagttggat

SEQ ID NO: 2072620 - DNA, 25 bp, Homo sapien
gaagtaacgaactactgaaatacgc

SEQ ID NO: 2072621 - DNA, 25 bp, Homo sapien
tggtacaaccactctggtggcagtt

SEQ ID NO: 2072622 - DNA, 25 bp, Homo sapien
ccagagggaaaaaactgttcacaag

SEQ ID NO: 2072623 - DNA, 25 bp, Homo sapien
gaaatacgcaacaatgaatcaccag

SEQ ID NO: 2072624 - DNA, 25 bp, Homo sapien
gatagacgttaaatgcaagcttgca

SEQ ID NO: 2072625 - DNA, 25 bp, Homo sapien
tgctgtttattccatgagggctgtg

SEQ ID NO: 2072626 - DNA, 25 bp, Homo sapien
gagcatcaacactcatgagaggaag

SEQ ID NO: 2072627 - DNA, 25 bp, Homo sapien
gaggtaccacacaaatatcaagagg

SEQ ID NO: 2072628 - DNA, 25 bp, Homo sapien
gcaagctccattcatggtaagtgtc

SEQ ID NO: 2072629 - DNA, 25 bp, Homo sapien
cctgcaagctccattcatggtaagt

SEQ ID NO: 2072630 - DNA, 25 bp, Homo sapien
ccagaacaacttccagtcctgcaag

SEQ ID NO: 2072631 - DNA, 25 bp, Homo sapien
tcctgcaagctccattcatggtaag

SEQ ID NO: 2072632 - DNA, 25 bp, Homo sapien
gctgccataatccttgaccaagaag

SEQ ID NO: 2072633 - DNA, 25 bp, Homo sapien
atatcaagccagctgccataatcct

SEQ ID NO: 2072634 - DNA, 25 bp, Homo sapien
tgtcccaatatcaagccagctgcca

SEQ ID NO: 2072635 - DNA, 25 bp, Homo sapien
cttgtcccaatatcaagccagctgc

SEQ ID NO: 2072636 - DNA, 25 bp, Homo sapien
tgtctgatatgacgagaacaatgag

SEQ ID NO: 2072637 - DNA, 25 bp, Homo sapien
ctgatatgacgagaacaatgagaaa

SEQ ID NO: 2072638 - DNA, 25 bp, Homo sapien
caaagccataatgtctgatatgacg

SEQ ID NO: 2072639 - DNA, 25 bp, Homo sapien
cataatgtctgatatgacgagaaca

SEQ ID NO: 2072640 - DNA, 25 bp, Homo sapien
caaaagagacctttctgagccacct

SEQ ID NO: 2072641 - DNA, 25 bp, Homo sapien
gttatactgaactcgtccttggcat

SEQ ID NO: 2072642 - DNA, 25 bp, Homo sapien
gagtcagtgtgatatccaggaagaa

SEQ ID NO: 2072643 - DNA, 25 bp, Homo sapien
tacaaggttttgctgatgaacccaa

SEQ ID NO: 2072644 - DNA, 25 bp, Homo sapien
ttttgacgataactgagtagtcaac

SEQ ID NO: 2072645 - DNA, 25 bp, Homo sapien
gataactgagtagtcaactgaactg

SEQ ID NO: 2072646 - DNA, 25 bp, Homo sapien
tgacgataactgagtagtcaactga

SEQ ID NO: 2072647 - DNA, 25 bp, Homo sapien
ctttttgacgataactgagtagtca

SEQ ID NO: 2072648 - DNA, 25 bp, Homo sapien
cttcaaaagcacacataacaagaac

SEQ ID NO: 2072649 - DNA, 25 bp, Homo sapien
tcaaaagcacacataacaagaacaa

SEQ ID NO: 2072650 - DNA, 25 bp, Homo sapien
cacacataacaagaacaaaggggat

SEQ ID NO: 2072651 - DNA, 25 bp, Homo sapien
cacataacaagaacaaaggggatta

SEQ ID NO: 2072652 - DNA, 25 bp, Homo sapien
ccagtttagcagtgccaactctgaa

SEQ ID NO: 2072653 - DNA, 25 bp, Homo sapien
gcagtgccaactctgaaaggatatc

SEQ ID NO: 2072654 - DNA, 25 bp, Homo sapien
ctccagtttagcagtgccaactctg

SEQ ID NO: 2072655 - DNA, 25 bp, Homo sapien
ttagcagtgccaactctgaaaggat

SEQ ID NO: 2072656 - DNA, 25 bp, Homo sapien
agggctcccatcataaaaggactga

SEQ ID NO: 2072657 - DNA, 25 bp, Homo sapien
gcaatagacagaggcaagatcaaag

SEQ ID NO: 2072658 - DNA, 25 bp, Homo sapien
aagcaatagacagaggcaagatcaa

SEQ ID NO: 2072659 - DNA, 25 bp, Homo sapien
aaagcaatagacagaggcaagatca

SEQ ID NO: 2072660 - DNA, 25 bp, Homo sapien
tccagttccaaaaaatgctgtcact

SEQ ID NO: 2072661 - DNA, 25 bp, Homo sapien
ctgttaatagaagctatatttccag

SEQ ID NO: 2072662 - DNA, 25 bp, Homo sapien
tagaagctatatttccagttccaaa

SEQ ID NO: 2072663 - DNA, 25 bp, Homo sapien
aaaatgctgtcactaagaagaaaac

SEQ ID NO: 2072664 - DNA, 25 bp, Homo sapien
ctgatgtgatccaaaaacctctgtg

SEQ ID NO: 2072665 - DNA, 25 bp, Homo sapien
cagatgttatgtaatgtgagttcag

SEQ ID NO: 2072666 - DNA, 25 bp, Homo sapien
tcttgcagctagtcagtcagccttt

SEQ ID NO: 2072667 - DNA, 25 bp, Homo sapien
aatacatccctatgatttcttgcag

SEQ ID NO: 2072668 - DNA, 25 bp, Homo sapien
aaaaaggccctacggatgtcatcca

SEQ ID NO: 2072669 - DNA, 25 bp, Homo sapien
tgtcatccagatatagctgtcgaaa

SEQ ID NO: 2072670 - DNA, 25 bp, Homo sapien
tagctgtcgaaactgagttatatca

SEQ ID NO: 2072671 - DNA, 25 bp, Homo sapien
tataagagaactggatactggtgag

SEQ ID NO: 2072672 - DNA, 25 bp, Homo sapien
tcaaacaagacaacactagtggaaa

SEQ ID NO: 2072673 - DNA, 25 bp, Homo sapien
cagattgttgtagagtttcttgttc

SEQ ID NO: 2072674 - DNA, 25 bp, Homo sapien
gttctatgtttatccagacaaacat

SEQ ID NO: 2072675 - DNA, 25 bp, Homo sapien
cagcaaacaccagattgttgtagag

SEQ ID NO: 2072676 - DNA, 25 bp, Homo sapien
gaagtatgctgaacaatcgctgaaa

SEQ ID NO: 2072677 - DNA, 25 bp, Homo sapien
taggtaggttgacatcaatgaaaga

SEQ ID NO: 2072678 - DNA, 25 bp, Homo sapien
tagaagtaggtaggttgacatcaat

SEQ ID NO: 2072679 - DNA, 25 bp, Homo sapien
cagtagtggcacaaccaaggaagag

SEQ ID NO: 2072680 - DNA, 25 bp, Homo sapien
ccttgcttcctgagtagactactct

SEQ ID NO: 2072681 - DNA, 25 bp, Homo sapien
actctgagtgctatacacaacatac

SEQ ID NO: 2072682 - DNA, 25 bp, Homo sapien
tactctgagtgctatacacaacata

SEQ ID NO: 2072683 - DNA, 25 bp, Homo sapien
actactctgagtgctatacacaaca

SEQ ID NO: 2072684 - DNA, 25 bp, Homo sapien
caaagcacgtaagaatgttagcatg

SEQ ID NO: 2072685 - DNA, 25 bp, Homo sapien
tactcaggggtatgtctaacaaagc

SEQ ID NO: 2072686 - DNA, 25 bp, Homo sapien
tgtctaacaaagcacgtaagaatgt

SEQ ID NO: 2072687 - DNA, 25 bp, Homo sapien
gggtatgtctaacaaagcacgtaag

SEQ ID NO: 2072688 - DNA, 25 bp, Homo sapien
ctgtaacagatgtaccaatagctct

SEQ ID NO: 2072689 - DNA, 25 bp, Homo sapien
tgtaacagatgtaccaatagctctt

SEQ ID NO: 2072690 - DNA, 25 bp, Homo sapien
gtaacagatgtaccaatagctcttc

SEQ ID NO: 2072691 - DNA, 25 bp, Homo sapien
gatgttacaacacacagggataaca

SEQ ID NO: 2072692 - DNA, 25 bp, Homo sapien
ttacaacacacagggataacagaag

SEQ ID NO: 2072693 - DNA, 25 bp, Homo sapien
atgagagatgttacaacacacaggg

SEQ ID NO: 2072694 - DNA, 25 bp, Homo sapien
gagatgttacaacacacagggataa

SEQ ID NO: 2072695 - DNA, 25 bp, Homo sapien
gagatgtctggctttcgacctacaa

SEQ ID NO: 2072696 - DNA, 25 bp, Homo sapien
tgggaacactgccaggagcaaagag

SEQ ID NO: 2072697 - DNA, 25 bp, Homo sapien
gcaaagagaagaaagtccaactcag

SEQ ID NO: 2072698 - DNA, 25 bp, Homo sapien
acctacaaccggcatcagtgggaac

SEQ ID NO: 2072699 - DNA, 25 bp, Homo sapien
taagtccagcggtaagcatatagcg

SEQ ID NO: 2072700 - DNA, 25 bp, Homo sapien
tggccaagctgcaaaggcagtaagt

SEQ ID NO: 2072701 - DNA, 25 bp, Homo sapien
catatagcggtagaaaaaactgaga

SEQ ID NO: 2072702 - DNA, 25 bp, Homo sapien
tgctcgagtccacagccgagtgaga

SEQ ID NO: 2072703 - DNA, 25 bp, Homo sapien
tcaattcccagggtaaaggctaaca

SEQ ID NO: 2072704 - DNA, 25 bp, Homo sapien
aaaatggctcagaggataggtcaac

SEQ ID NO: 2072705 - DNA, 25 bp, Homo sapien
cagaggataggtcaacactgataca

SEQ ID NO: 2072706 - DNA, 25 bp, Homo sapien
caattcccagggtaaaggctaacag

SEQ ID NO: 2072707 - DNA, 25 bp, Homo sapien
cagcccggacaacaagagcgaaacg

SEQ ID NO: 2072708 - DNA, 25 bp, Homo sapien
caatgttaacaatacactctatttt

SEQ ID NO: 2072709 - DNA, 25 bp, Homo sapien
acaatgttaacaatacactctattt

SEQ ID NO: 2072710 - DNA, 25 bp, Homo sapien
caaagaagtgaacactgccacttca

SEQ ID NO: 2072711 - DNA, 25 bp, Homo sapien
tatatcctactcaacatttatgcag

SEQ ID NO: 2072712 - DNA, 25 bp, Homo sapien
gacttatggtacagaaatctactgc

SEQ ID NO: 2072713 - DNA, 25 bp, Homo sapien
ggactggaggtttgaaagtacagta

SEQ ID NO: 2072714 - DNA, 25 bp, Homo sapien
tcttagaaccgcataccatattggc

SEQ ID NO: 2072715 - DNA, 25 bp, Homo sapien
tatacataatatgtccagggacagg

SEQ ID NO: 2072716 - DNA, 25 bp, Homo sapien
ggcagtggcaacaaaccatatacat

SEQ ID NO: 2072717 - DNA, 25 bp, Homo sapien
caatagctacaaaactacaaggcag

SEQ ID NO: 2072718 - DNA, 25 bp, Homo sapien
tactagatgattaatcaaagagctg

SEQ ID NO: 2072719 - DNA, 25 bp, Homo sapien
aagagctgcattaagacaaggaaaa

SEQ ID NO: 2072720 - DNA, 25 bp, Homo sapien
ccaaaccaatggtaattgataggtt

SEQ ID NO: 2072721 - DNA, 25 bp, Homo sapien
ctttcaatggttatactactagatg

SEQ ID NO: 2072722 - DNA, 25 bp, Homo sapien
ataaacactaatggccttacttcca

SEQ ID NO: 2072723 - DNA, 25 bp, Homo sapien
ttaaaaatacaccaccaggatatat

SEQ ID NO: 2072724 - DNA, 25 bp, Homo sapien
tacttctagcactgttatgagttct

SEQ ID NO: 2072725 - DNA, 25 bp, Homo sapien
tgcctagatacaattcccattccag

SEQ ID NO: 2072726 - DNA, 25 bp, Homo sapien
tataaactcattacactggattcag

SEQ ID NO: 2072727 - DNA, 25 bp, Homo sapien
ggtcgacaccattgataacatagga

SEQ ID NO: 2072728 - DNA, 25 bp, Homo sapien
gaagtagttttctgaccagttgtac

SEQ ID NO: 2072729 - DNA, 25 bp, Homo sapien
gagttagcttagaacaatgacttgc

SEQ ID NO: 2072730 - DNA, 25 bp, Homo sapien
gaggcataagatatccatcccacaa

SEQ ID NO: 2072731 - DNA, 25 bp, Homo sapien
agatgaattagctccttgcaaaggg

SEQ ID NO: 2072732 - DNA, 25 bp, Homo sapien
cattgacgcccaaaaagaatctgtc

SEQ ID NO: 2072733 - DNA, 25 bp, Homo sapien
taggacaatcctttcaatgcaagat

SEQ ID NO: 2072734 - DNA, 25 bp, Homo sapien
cttaaaatgttgaactgtttggaat

SEQ ID NO: 2072735 - DNA, 25 bp, Homo sapien
cttcttcgttcctctttcatttctc

SEQ ID NO: 2072736 - DNA, 25 bp, Homo sapien
cctctttcatttctctttccaccat

SEQ ID NO: 2072737 - DNA, 25 bp, Homo sapien
gttcctctttcatttctctttccac

SEQ ID NO: 2072738 - DNA, 25 bp, Homo sapien
ttcttcgttcctctttcatttctct

SEQ ID NO: 2072739 - DNA, 25 bp, Homo sapien
aattaaagtttttagctgccaatgc

SEQ ID NO: 2072740 - DNA, 25 bp, Homo sapien
ttggcaatcttggaagactggagag

SEQ ID NO: 2072741 - DNA, 25 bp, Homo sapien
gagaatccaagagtctttggcaatc

SEQ ID NO: 2072742 - DNA, 25 bp, Homo sapien
gctgccaatgcagccagaacttgag

SEQ ID NO: 2072743 - DNA, 25 bp, Homo sapien
ttccatagaccaaatcaggatgatt

SEQ ID NO: 2072744 - DNA, 25 bp, Homo sapien
caattagtgtcaagttaatgaaagc

SEQ ID NO: 2072745 - DNA, 25 bp, Homo sapien
tgaaagctagtatattggctgttac

SEQ ID NO: 2072746 - DNA, 25 bp, Homo sapien
tgttactacctcagaagtgcgttga

SEQ ID NO: 2072747 - DNA, 25 bp, Homo sapien
cactgcagcccatagcaattagtgt

SEQ ID NO: 2072748 - DNA, 25 bp, Homo sapien
tatgtactcacgaatcagttccact

SEQ ID NO: 2072749 - DNA, 25 bp, Homo sapien
taaatctatatgtttggcctgcatc

SEQ ID NO: 2072750 - DNA, 25 bp, Homo sapien
tgaaatgaggttacaagagctagcc

SEQ ID NO: 2072751 - DNA, 25 bp, Homo sapien
cagattgtcccaaacttatgagagt

SEQ ID NO: 2072752 - DNA, 25 bp, Homo sapien
gcctgtgacactactgtacaaataa

SEQ ID NO: 2072753 - DNA, 25 bp, Homo sapien
aaactctatgaatgcaaagcctttg

SEQ ID NO: 2072754 - DNA, 25 bp, Homo sapien
tctaaagtggctggtctaaagtaac

SEQ ID NO: 2072755 - DNA, 25 bp, Homo sapien
ttctcactctcaacagccggtgtat

SEQ ID NO: 2072756 - DNA, 25 bp, Homo sapien
gatgcaagcccacatatgcagtcag

SEQ ID NO: 2072757 - DNA, 25 bp, Homo sapien
ggtcaatagcaaaatccttgctaat

SEQ ID NO: 2072758 - DNA, 25 bp, Homo sapien
ccttgctaattgaatgtgaacctca

SEQ ID NO: 2072759 - DNA, 25 bp, Homo sapien
cttctttgcctactgtgatggttaa

SEQ ID NO: 2072760 - DNA, 25 bp, Homo sapien
aagtaacttctttcttctgagtcat

SEQ ID NO: 2072761 - DNA, 25 bp, Homo sapien
atggtaaagtaacttctttcttctg

SEQ ID NO: 2072762 - DNA, 25 bp, Homo sapien
gtaacttctttcttctgagtcattt

SEQ ID NO: 2072763 - DNA, 25 bp, Homo sapien
taaagtaacttctttcttctgagtc

SEQ ID NO: 2072764 - DNA, 25 bp, Homo sapien
taactctgaaaataaaacaagccaa

SEQ ID NO: 2072765 - DNA, 25 bp, Homo sapien
ttaactctgaaaataaaacaagcca

SEQ ID NO: 2072766 - DNA, 25 bp, Homo sapien
atttgtaaacatgctctctgctttg

SEQ ID NO: 2072767 - DNA, 25 bp, Homo sapien
tgttgttaagataatccacaggaag

SEQ ID NO: 2072768 - DNA, 25 bp, Homo sapien
taagataatccacaggaaggattcc

SEQ ID NO: 2072769 - DNA, 25 bp, Homo sapien
gaactgttcaagaatctgtactgca

SEQ ID NO: 2072770 - DNA, 25 bp, Homo sapien
aaacaccagcttattgatagtattc

SEQ ID NO: 2072771 - DNA, 25 bp, Homo sapien
ccagcttattgatagtattcagaca

SEQ ID NO: 2072772 - DNA, 25 bp, Homo sapien
tattgatagtattcagacagctcag

SEQ ID NO: 2072773 - DNA, 25 bp, Homo sapien
ttattgatagtattcagacagctca

SEQ ID NO: 2072774 - DNA, 25 bp, Homo sapien
agtgccctgagaacagctctgccat

SEQ ID NO: 2072775 - DNA, 25 bp, Homo sapien
tcagtgccctgagaacagctctgcc

SEQ ID NO: 2072776 - DNA, 25 bp, Homo sapien
gtgccctgagaacagctctgccatg

SEQ ID NO: 2072777 - DNA, 25 bp, Homo sapien
gtcagtgccctgagaacagctctgc

SEQ ID NO: 2072778 - DNA, 25 bp, Homo sapien
agggaactccaataagggaagtcat

SEQ ID NO: 2072779 - DNA, 25 bp, Homo sapien
tgagttaagaggaaagggaactcca

SEQ ID NO: 2072780 - DNA, 25 bp, Homo sapien
caataagggaagtcatcaatggtgc

SEQ ID NO: 2072781 - DNA, 25 bp, Homo sapien
actccaataagggaagtcatcaatg

SEQ ID NO: 2072782 - DNA, 25 bp, Homo sapien
tgattgacatctagcctcttccaat

SEQ ID NO: 2072783 - DNA, 25 bp, Homo sapien
ttgacatctagcctcttccaattct

SEQ ID NO: 2072784 - DNA, 25 bp, Homo sapien
gattgacatctagcctcttccaatt

SEQ ID NO: 2072785 - DNA, 25 bp, Homo sapien
ctgattgacatctagcctcttccaa

SEQ ID NO: 2072786 - DNA, 25 bp, Homo sapien
tataaaccagtaaagaaatgcttgt

SEQ ID NO: 2072787 - DNA, 25 bp, Homo sapien
taaaccagtaaagaaatgcttgtac

SEQ ID NO: 2072788 - DNA, 25 bp, Homo sapien
ttataaaccagtaaagaaatgcttg

SEQ ID NO: 2072789 - DNA, 25 bp, Homo sapien
tatttataaaccagtaaagaaatgc

SEQ ID NO: 2072790 - DNA, 25 bp, Homo sapien
gactaaaggagttaaagtctctgaa

SEQ ID NO: 2072791 - DNA, 25 bp, Homo sapien
gagctgatactctttggggatactt

SEQ ID NO: 2072792 - DNA, 25 bp, Homo sapien
tgcatcatcaaattgctgagctgat

SEQ ID NO: 2072793 - DNA, 25 bp, Homo sapien
tttggggatacttgattccagctcc

SEQ ID NO: 2072794 - DNA, 25 bp, Homo sapien
tgtcattccatggtcagaggtaaag

SEQ ID NO: 2072795 - DNA, 25 bp, Homo sapien
agacacgatttctttaactccatca

SEQ ID NO: 2072796 - DNA, 25 bp, Homo sapien
agtggttaaacatagacacgatttc

SEQ ID NO: 2072797 - DNA, 25 bp, Homo sapien
ttcccatcatttccatagaagtggt

SEQ ID NO: 2072798 - DNA, 25 bp, Homo sapien
gatggtcgatgagcatgtccgtttg

SEQ ID NO: 2072799 - DNA, 25 bp, Homo sapien
ctcgaggatggtcgatgagcatgtc

SEQ ID NO: 2072800 - DNA, 25 bp, Homo sapien
tgagcatgtccgtttgtatctattc

SEQ ID NO: 2072801 - DNA, 25 bp, Homo sapien
ggtcgatgagcatgtccgtttgtat

SEQ ID NO: 2072802 - DNA, 25 bp, Homo sapien
gactggttgtttctggcatgatgaa

SEQ ID NO: 2072803 - DNA, 25 bp, Homo sapien
actggttgtttctggcatgatgaaa

SEQ ID NO: 2072804 - DNA, 25 bp, Homo sapien
cagtatctgtgccaacaagacgtat

SEQ ID NO: 2072805 - DNA, 25 bp, Homo sapien
taatatacttattcatgtaccaaac

SEQ ID NO: 2072806 - DNA, 25 bp, Homo sapien
agtcagtatctgtgccaacaagacg

SEQ ID NO: 2072807 - DNA, 25 bp, Homo sapien
gtatctgtgccaacaagacgtatat

SEQ ID NO: 2072808 - DNA, 25 bp, Homo sapien
agattattagctgcataacaacatg

SEQ ID NO: 2072809 - DNA, 25 bp, Homo sapien
gcgcctggccggagttattgtttaa

SEQ ID NO: 2072810 - DNA, 25 bp, Homo sapien
aaatattctagagattattagctgc

SEQ ID NO: 2072811 - DNA, 25 bp, Homo sapien
agcgcctggccggagttattgttta

SEQ ID NO: 2072812 - DNA, 25 bp, Homo sapien
aaagcgccctggctgagaaagtcca

SEQ ID NO: 2072813 - DNA, 25 bp, Homo sapien
tttaaaagcgccctggctgagaaag

SEQ ID NO: 2072814 - DNA, 25 bp, Homo sapien
tggtttacactaccttcaacatgct

SEQ ID NO: 2072815 - DNA, 25 bp, Homo sapien
ttacactaccttcaacatgctcaga

SEQ ID NO: 2072816 - DNA, 25 bp, Homo sapien
ccattatgctggctcttgaccaaga

SEQ ID NO: 2072817 - DNA, 25 bp, Homo sapien
taaacatgagtctctagccaggaca

SEQ ID NO: 2072818 - DNA, 25 bp, Homo sapien
cataatgctgttggcctgcaatacc

SEQ ID NO: 2072819 - DNA, 25 bp, Homo sapien
actgcatggatctggaaactgtttg

SEQ ID NO: 2072820 - DNA, 25 bp, Homo sapien
cagaacagtgtgctacaacatagaa

SEQ ID NO: 2072821 - DNA, 25 bp, Homo sapien
acagaaaaaacgtgggatacagtct

SEQ ID NO: 2072822 - DNA, 25 bp, Homo sapien
tagaattcagaacagtgtgctacaa

SEQ ID NO: 2072823 - DNA, 25 bp, Homo sapien
aacgtgggatacagtctccaatact

SEQ ID NO: 2072824 - DNA, 25 bp, Homo sapien
tgcatcttgagcaccaaaatcctct

SEQ ID NO: 2072825 - DNA, 25 bp, Homo sapien
tatccagttttgttgcatcttgagc

SEQ ID NO: 2072826 - DNA, 25 bp, Homo sapien
gtataaacgtggtctccactagcac

SEQ ID NO: 2072827 - DNA, 25 bp, Homo sapien
tctcttttagcatcataactatatg

SEQ ID NO: 2072828 - DNA, 25 bp, Homo sapien
tagcaccagttcagctctaatgacc

SEQ ID NO: 2072829 - DNA, 25 bp, Homo sapien
catgtgtgccccttagaatgctaca

SEQ ID NO: 2072830 - DNA, 25 bp, Homo sapien
gataggctcttgcaggtaataagaa

SEQ ID NO: 2072831 - DNA, 25 bp, Homo sapien
taagaaagagatatggccagtgtgg

SEQ ID NO: 2072832 - DNA, 25 bp, Homo sapien
caaactctacaggattttccttcca

SEQ ID NO: 2072833 - DNA, 25 bp, Homo sapien
caaacataggcaggatatctgggct

SEQ ID NO: 2072834 - DNA, 25 bp, Homo sapien
atcaaactctacaggattttccttc

SEQ ID NO: 2072835 - DNA, 25 bp, Homo sapien
tttggcaaacataggcaggatatct

SEQ ID NO: 2072836 - DNA, 25 bp, Homo sapien
taaaacccagctatcagagctacat

SEQ ID NO: 2072837 - DNA, 25 bp, Homo sapien
tgagatatgccccagctgccttcat

SEQ ID NO: 2072838 - DNA, 25 bp, Homo sapien
ccgagattctgttggcacacgtgta

SEQ ID NO: 2072839 - DNA, 25 bp, Homo sapien
gcactgacatcttcataaaacccag

SEQ ID NO: 2072840 - DNA, 25 bp, Homo sapien
cattttcatctaattcgtaaagtgc

SEQ ID NO: 2072841 - DNA, 25 bp, Homo sapien
taaagtgcatctgctcgaaggccat

SEQ ID NO: 2072842 - DNA, 25 bp, Homo sapien
taataaacggtgctctagagtttcc

SEQ ID NO: 2072843 - DNA, 25 bp, Homo sapien
tcagcaacaaacaacactaatcttc

SEQ ID NO: 2072844 - DNA, 25 bp, Homo sapien
gaggaggcaatggtgtaaactgagg

SEQ ID NO: 2072845 - DNA, 25 bp, Homo sapien
gcaatggtgtaaactgaggagtcat

SEQ ID NO: 2072846 - DNA, 25 bp, Homo sapien
tggaggaggcaatggtgtaaactga

SEQ ID NO: 2072847 - DNA, 25 bp, Homo sapien
aggcaatggtgtaaactgaggagtc

SEQ ID NO: 2072848 - DNA, 25 bp, Homo sapien
aaatgtataagcaatcccaaagtaa

SEQ ID NO: 2072849 - DNA, 25 bp, Homo sapien
tataagcaatcccaaagtaaagaac

SEQ ID NO: 2072850 - DNA, 25 bp, Homo sapien
gatggaggcgaagaacacaaaatgt

SEQ ID NO: 2072851 - DNA, 25 bp, Homo sapien
ggcgaagaacacaaaatgtataagc

SEQ ID NO: 2072852 - DNA, 25 bp, Homo sapien
gtgtaactaattagtcttcaagaac

SEQ ID NO: 2072853 - DNA, 25 bp, Homo sapien
gtaactaattagtcttcaagaacag

SEQ ID NO: 2072854 - DNA, 25 bp, Homo sapien
tgtaactaattagtcttcaagaaca

SEQ ID NO: 2072855 - DNA, 25 bp, Homo sapien
cattaaattgccaagatcaaacgga

SEQ ID NO: 2072856 - DNA, 25 bp, Homo sapien
gaacatgggagtactttccaagcca

SEQ ID NO: 2072857 - DNA, 25 bp, Homo sapien
acggaacatgggagtactttccaag

SEQ ID NO: 2072858 - DNA, 25 bp, Homo sapien
ttgccaagatcaaacggaacatggg

SEQ ID NO: 2072859 - DNA, 25 bp, Homo sapien
ttagttgtaatgtaacggcattagc

SEQ ID NO: 2072860 - DNA, 25 bp, Homo sapien
accaaggatgaggtaattttagcta

SEQ ID NO: 2072861 - DNA, 25 bp, Homo sapien
tatagtgatcctaggctgaaaaaca

SEQ ID NO: 2072862 - DNA, 25 bp, Homo sapien
cttggcctgaagaatcacatcatgg

SEQ ID NO: 2072863 - DNA, 25 bp, Homo sapien
tgcacaggactgagacataatactg

SEQ ID NO: 2072864 - DNA, 25 bp, Homo sapien
aggctacagctcatctcactttgca

SEQ ID NO: 2072865 - DNA, 25 bp, Homo sapien
tcaaaattataggtctccaaaggct

SEQ ID NO: 2072866 - DNA, 25 bp, Homo sapien
gctcatctcactttgcacaggactg

SEQ ID NO: 2072867 - DNA, 25 bp, Homo sapien
caaatagcgagaaaaagtgcagcgc

SEQ ID NO: 2072868 - DNA, 25 bp, Homo sapien
tgagaagtcgtgctgtcgctaggcc

SEQ ID NO: 2072869 - DNA, 25 bp, Homo sapien
tgtcaccactggcagcaaatagcga

SEQ ID NO: 2072870 - DNA, 25 bp, Homo sapien
gtcacattccgactacaggcctggg

SEQ ID NO: 2072871 - DNA, 25 bp, Homo sapien
gacccagctccattaaagctctcgg

SEQ ID NO: 2072872 - DNA, 25 bp, Homo sapien
tagccgggagggtattcctaagcca

SEQ ID NO: 2072873 - DNA, 25 bp, Homo sapien
ctacccactgaagcgatagccggga

SEQ ID NO: 2072874 - DNA, 25 bp, Homo sapien
ggtcaggcctgatctcgaaaacgag

SEQ ID NO: 2072875 - DNA, 25 bp, Homo sapien
aaagtaagtctgttattagcaatat

SEQ ID NO: 2072876 - DNA, 25 bp, Homo sapien
ttttaaagtaagtctgttattagca

SEQ ID NO: 2072877 - DNA, 25 bp, Homo sapien
taaagtaagtctgttattagcaata

SEQ ID NO: 2072878 - DNA, 25 bp, Homo sapien
ttaaagtaagtctgttattagcaat

SEQ ID NO: 2072879 - DNA, 25 bp, Homo sapien
ggaagaagccatccggcatccttta

SEQ ID NO: 2072880 - DNA, 25 bp, Homo sapien
tgagttgtaactgccatagccataa

SEQ ID NO: 2072881 - DNA, 25 bp, Homo sapien
ctaatcgtgttccttgctggctctg

SEQ ID NO: 2072882 - DNA, 25 bp, Homo sapien
taatatgccaaggtggaccactctc

SEQ ID NO: 2072883 - DNA, 25 bp, Homo sapien
atactgctttgcctttatatgccat

SEQ ID NO: 2072884 - DNA, 25 bp, Homo sapien
tggacttctaattcacatactgctt

SEQ ID NO: 2072885 - DNA, 25 bp, Homo sapien
taattcacatactgctttgccttta

SEQ ID NO: 2072886 - DNA, 25 bp, Homo sapien
ctttggacttctaattcacatactg

SEQ ID NO: 2072887 - DNA, 25 bp, Homo sapien
gcaccttcatggaagtaactcctac

SEQ ID NO: 2072888 - DNA, 25 bp, Homo sapien
cagagacagaaagtgcccttagctt

SEQ ID NO: 2072889 - DNA, 25 bp, Homo sapien
tacattaccagttaaagatgctgtt

SEQ ID NO: 2072890 - DNA, 25 bp, Homo sapien
ttttacacaaaccatcaactctagt

SEQ ID NO: 2072891 - DNA, 25 bp, Homo sapien
tacactaagctattacaatggtact

SEQ ID NO: 2072892 - DNA, 25 bp, Homo sapien
tggacttacctgaggaaagacagca

SEQ ID NO: 2072893 - DNA, 25 bp, Homo sapien
tcctacagtcaatagctaaagacga

SEQ ID NO: 2072894 - DNA, 25 bp, Homo sapien
taaacctccccagcacttagatgca

SEQ ID NO: 2072895 - DNA, 25 bp, Homo sapien
attctcgacggtggcgcatccactt

SEQ ID NO: 2072896 - DNA, 25 bp, Homo sapien
tcgacggtggcgcatccactttcgg

SEQ ID NO: 2072897 - DNA, 25 bp, Homo sapien
tcattctcgacggtggcgcatccac

SEQ ID NO: 2072898 - DNA, 25 bp, Homo sapien
cggtggcgcatccactttcggaagg

SEQ ID NO: 2072899 - DNA, 25 bp, Homo sapien
aggagcaggaccaccccgatgcccc

SEQ ID NO: 2072900 - DNA, 25 bp, Homo sapien
gcaggagccagtgccgtgaagggca

SEQ ID NO: 2072901 - DNA, 25 bp, Homo sapien
cgtgaagggcaacccagggctggtc

SEQ ID NO: 2072902 - DNA, 25 bp, Homo sapien
ctggtctcccgccaacctgtctgca

SEQ ID NO: 2072903 - DNA, 25 bp, Homo sapien
cagccgcgcccgctgggccacagag

SEQ ID NO: 2072904 - DNA, 25 bp, Homo sapien
cggcgcccgccagcctgtcccgcgc

SEQ ID NO: 2072905 - DNA, 25 bp, Homo sapien
acagaggccgctgaggccgcggcgc

SEQ ID NO: 2072906 - DNA, 25 bp, Homo sapien
gctgggccacagaggccgctgaggc

SEQ ID NO: 2072907 - DNA, 25 bp, Homo sapien
gcttgcaggccacagcattcgataa

SEQ ID NO: 2072908 - DNA, 25 bp, Homo sapien
tctttagggccgtgtgatgatgact

SEQ ID NO: 2072909 - DNA, 25 bp, Homo sapien
gactgcaacaaatggagtacccaca

SEQ ID NO: 2072910 - DNA, 25 bp, Homo sapien
gagccaccgtcgactttcagccttt

SEQ ID NO: 2072911 - DNA, 25 bp, Homo sapien
gaaggtcggatgtcccattcttcgt

SEQ ID NO: 2072912 - DNA, 25 bp, Homo sapien
cacatgagatgcctctaggacacag

SEQ ID NO: 2072913 - DNA, 25 bp, Homo sapien
agttccgagtggagaatcgggcagg

SEQ ID NO: 2072914 - DNA, 25 bp, Homo sapien
ttcgttcccacggagccccacagga

SEQ ID NO: 2072915 - DNA, 25 bp, Homo sapien
ccactcctggttatgaatgttttgc

SEQ ID NO: 2072916 - DNA, 25 bp, Homo sapien
catttccactcctggttatgaatgt

SEQ ID NO: 2072917 - DNA, 25 bp, Homo sapien
actcctggttatgaatgttttgctg

SEQ ID NO: 2072918 - DNA, 25 bp, Homo sapien
tttccactcctggttatgaatgttt

SEQ ID NO: 2072919 - DNA, 25 bp, Homo sapien
tgcccgtggtcgacgccagcaagcg

SEQ ID NO: 2072920 - DNA, 25 bp, Homo sapien
cagcaagcgggccaaattaattttc

SEQ ID NO: 2072921 - DNA, 25 bp, Homo sapien
tagccatgcaaaacatccgtagaga

SEQ ID NO: 2072922 - DNA, 25 bp, Homo sapien
catccgtagagagtctgcccgtggt

SEQ ID NO: 2072923 - DNA, 25 bp, Homo sapien
ttattgaaggtccactgagccacag

SEQ ID NO: 2072924 - DNA, 25 bp, Homo sapien
tattgaaggtccactgagccacaga

SEQ ID NO: 2072925 - DNA, 25 bp, Homo sapien
ttgaaggtccactgagccacagagc

SEQ ID NO: 2072926 - DNA, 25 bp, Homo sapien
aaggtccactgagccacagagcctt

SEQ ID NO: 2072927 - DNA, 25 bp, Homo sapien
tttcagctaaatctcgtaagggcag

SEQ ID NO: 2072928 - DNA, 25 bp, Homo sapien
cttcacactcttgttagaatgccgt

SEQ ID NO: 2072929 - DNA, 25 bp, Homo sapien
atctcgtaagggcagatactggttc

SEQ ID NO: 2072930 - DNA, 25 bp, Homo sapien
gttagaatgccgttcaccaccttgc

SEQ ID NO: 2072931 - DNA, 25 bp, Homo sapien
ttggttatctggtgataatattcag

SEQ ID NO: 2072932 - DNA, 25 bp, Homo sapien
gaatcttgaagttaatatagatatt

SEQ ID NO: 2072933 - DNA, 25 bp, Homo sapien
tggttatctggtgataatattcagc

SEQ ID NO: 2072934 - DNA, 25 bp, Homo sapien
tctggtgataatattcagctttcat

SEQ ID NO: 2072935 - DNA, 25 bp, Homo sapien
ttatacagctgccaacatggtgacc

SEQ ID NO: 2072936 - DNA, 25 bp, Homo sapien
tacagctgccaacatggtgacctat

SEQ ID NO: 2072937 - DNA, 25 bp, Homo sapien
gattatacagctgccaacatggtga

SEQ ID NO: 2072938 - DNA, 25 bp, Homo sapien
ctgattatacagctgccaacatggt

SEQ ID NO: 2072939 - DNA, 25 bp, Homo sapien
gaaagggctaaacatgtgaggcctg

SEQ ID NO: 2072940 - DNA, 25 bp, Homo sapien
tgctaggaacatgtggtgggacttt

SEQ ID NO: 2072941 - DNA, 25 bp, Homo sapien
ggcctggagatagttgctaagttgc

SEQ ID NO: 2072942 - DNA, 25 bp, Homo sapien
cccacgctggcctgctttacgtatt

SEQ ID NO: 2072943 - DNA, 25 bp, Homo sapien
taatcgtgcatctgtgggttagcct

SEQ ID NO: 2072944 - DNA, 25 bp, Homo sapien
cttgtgagaagcctagaggacgctc

SEQ ID NO: 2072945 - DNA, 25 bp, Homo sapien
agtgagcactggttccccgcaaata

SEQ ID NO: 2072946 - DNA, 25 bp, Homo sapien
cagctgaagagcatgactgtggatc

SEQ ID NO: 2072947 - DNA, 25 bp, Homo sapien
ccctaaacactctgttggtgaatca

SEQ ID NO: 2072948 - DNA, 25 bp, Homo sapien
tcaaagccctaaacactctgttggt

SEQ ID NO: 2072949 - DNA, 25 bp, Homo sapien
aacactctgttggtgaatcatcatg

SEQ ID NO: 2072950 - DNA, 25 bp, Homo sapien
agtgtgcttttagtggcagggccct

SEQ ID NO: 2072951 - DNA, 25 bp, Homo sapien
tgaggagcgctggagggttcggagc

SEQ ID NO: 2072952 - DNA, 25 bp, Homo sapien
tgctccaagcgccagaggaggcttc

SEQ ID NO: 2072953 - DNA, 25 bp, Homo sapien
gagaagacgagacaatgctctgctc

SEQ ID NO: 2072954 - DNA, 25 bp, Homo sapien
ttcggagcagagaagacgagacaat

SEQ ID NO: 2072955 - DNA, 25 bp, Homo sapien
tttgcaactaggtcggagggacgca

SEQ ID NO: 2072956 - DNA, 25 bp, Homo sapien
tctcagtcatcatgtcggaccacgt

SEQ ID NO: 2072957 - DNA, 25 bp, Homo sapien
ggcagttcctagaagattccagtag

SEQ ID NO: 2072958 - DNA, 25 bp, Homo sapien
gtaactataaccaagctctgctgcc

SEQ ID NO: 2072959 - DNA, 25 bp, Homo sapien
gtttctcacgggcaggggtagccca

SEQ ID NO: 2072960 - DNA, 25 bp, Homo sapien
ctttaagtcgtgagaaaaacgacat

SEQ ID NO: 2072961 - DNA, 25 bp, Homo sapien
ggctgtatagactttaagtcgtgag

SEQ ID NO: 2072962 - DNA, 25 bp, Homo sapien
tttctcacgggcaggggtagcccag

SEQ ID NO: 2072963 - DNA, 25 bp, Homo sapien
cttatggtgaggctcttagagactg

SEQ ID NO: 2072964 - DNA, 25 bp, Homo sapien
tatggtgaggctcttagagactgtc

SEQ ID NO: 2072965 - DNA, 25 bp, Homo sapien
tgaggctcttagagactgtctccat

SEQ ID NO: 2072966 - DNA, 25 bp, Homo sapien
ggtgaggctcttagagactgtctcc

SEQ ID NO: 2072967 - DNA, 25 bp, Homo sapien
ccagttggtttgtgttggtctggta

SEQ ID NO: 2072968 - DNA, 25 bp, Homo sapien
tatctgtttgttgtgaccagagcac

SEQ ID NO: 2072969 - DNA, 25 bp, Homo sapien
cagttgtcccttagtccacagagcc

SEQ ID NO: 2072970 - DNA, 25 bp, Homo sapien
caaacatgcctctgcagttgtccct

SEQ ID NO: 2072971 - DNA, 25 bp, Homo sapien
ggatacccagggtgctaaaggtgca

SEQ ID NO: 2072972 - DNA, 25 bp, Homo sapien
aaggatacccagggtgctaaaggtg

SEQ ID NO: 2072973 - DNA, 25 bp, Homo sapien
aggatacccagggtgctaaaggtgc

SEQ ID NO: 2072974 - DNA, 25 bp, Homo sapien
gatacccagggtgctaaaggtgcac

SEQ ID NO: 2072975 - DNA, 25 bp, Homo sapien
cgtggaaggtttgtgggagagattt

SEQ ID NO: 2072976 - DNA, 25 bp, Homo sapien
tgggctgatggcctgacgtggaagg

SEQ ID NO: 2072977 - DNA, 25 bp, Homo sapien
ggctggacaagtggatgctcctgca

SEQ ID NO: 2072978 - DNA, 25 bp, Homo sapien
acatccagccgcctctgactcagct

SEQ ID NO: 2072979 - DNA, 25 bp, Homo sapien
gtcatctgtttagcatgagctccca

SEQ ID NO: 2072980 - DNA, 25 bp, Homo sapien
tggatttccgtaccccttcagtaga

SEQ ID NO: 2072981 - DNA, 25 bp, Homo sapien
tctggctgtacttgtgtcatctgtt

SEQ ID NO: 2072982 - DNA, 25 bp, Homo sapien
tccagcggggaattaactctctgct

SEQ ID NO: 2072983 - DNA, 25 bp, Homo sapien
tcttctttgactgttgattctcttt

SEQ ID NO: 2072984 - DNA, 25 bp, Homo sapien
ttcttctttgactgttgattctctt

SEQ ID NO: 2072985 - DNA, 25 bp, Homo sapien
cttcttctttgactgttgattctct

SEQ ID NO: 2072986 - DNA, 25 bp, Homo sapien
tcatcgccttgagaatcgcagctgt

SEQ ID NO: 2072987 - DNA, 25 bp, Homo sapien
cgcagttgactgtggaaattatttc

SEQ ID NO: 2072988 - DNA, 25 bp, Homo sapien
taggacgtccaagtcgcatacccat

SEQ ID NO: 2072989 - DNA, 25 bp, Homo sapien
taaaacctcggcagaagtggccgca

SEQ ID NO: 2072990 - DNA, 25 bp, Homo sapien
agcatctgatcccagcgtctgacac

SEQ ID NO: 2072991 - DNA, 25 bp, Homo sapien
gaagacgaggaatggtgtaatccac

SEQ ID NO: 2072992 - DNA, 25 bp, Homo sapien
cacttgtgcctcgtgcatttgcctc

SEQ ID NO: 2072993 - DNA, 25 bp, Homo sapien
ttcgccggggcaaagcccacttgtg

SEQ ID NO: 2072994 - DNA, 25 bp, Homo sapien
aatgggttctagaccgcggagaccg

SEQ ID NO: 2072995 - DNA, 25 bp, Homo sapien
atctgcccggcgagcacagagcctt

SEQ ID NO: 2072996 - DNA, 25 bp, Homo sapien
ttctagaccgcggagaccgcatctg

SEQ ID NO: 2072997 - DNA, 25 bp, Homo sapien
cagctaaaatgggttctagaccgcg

SEQ ID NO: 2072998 - DNA, 25 bp, Homo sapien
catggatgatgatactgtcgccctc

SEQ ID NO: 2072999 - DNA, 25 bp, Homo sapien
gctggcttcgcaggcgacagtgctc

SEQ ID NO: 2073000 - DNA, 25 bp, Homo sapien
gtcgccctcgtcatcgacaatggct

SEQ ID NO: 2073001 - DNA, 25 bp, Homo sapien
ttcgcaggcgacagtgctctccagg

SEQ ID NO: 2073002 - DNA, 25 bp, Homo sapien
cccagagcaagagaggcattctgac

SEQ ID NO: 2073003 - DNA, 25 bp, Homo sapien
ggcccagagcaagagaggcattctg

SEQ ID NO: 2073004 - DNA, 25 bp, Homo sapien
gggcgacaagggcccagagcaagag

SEQ ID NO: 2073005 - DNA, 25 bp, Homo sapien
gtgggcgacaagggcccagagcaag

SEQ ID NO: 2073006 - DNA, 25 bp, Homo sapien
accacgagaaggtaaaccagatcat

SEQ ID NO: 2073007 - DNA, 25 bp, Homo sapien
ggaggatatggaggagatttggctc

SEQ ID NO: 2073008 - DNA, 25 bp, Homo sapien
gagaaggtaaaccagatcatgtttg

SEQ ID NO: 2073009 - DNA, 25 bp, Homo sapien
ttggctccacaccttctacagtgag

SEQ ID NO: 2073010 - DNA, 25 bp, Homo sapien
tgatgggctcacccacactgtgccc

SEQ ID NO: 2073011 - DNA, 25 bp, Homo sapien
atgggctcacccacactgtgcccat

SEQ ID NO: 2073012 - DNA, 25 bp, Homo sapien
ctctggtgatgggctcacccacact

SEQ ID NO: 2073013 - DNA, 25 bp, Homo sapien
ctggtgatgggctcacccacactgt

SEQ ID NO: 2073014 - DNA, 25 bp, Homo sapien
tggccaagtcatctgcaatgagcag

SEQ ID NO: 2073015 - DNA, 25 bp, Homo sapien
ggccaagtcatctgcaatgagcagt

SEQ ID NO: 2073016 - DNA, 25 bp, Homo sapien
caagcgggaaatcgtgcatgacatc

SEQ ID NO: 2073017 - DNA, 25 bp, Homo sapien
cgggaaatcgtgcatgacatcgagg

SEQ ID NO: 2073018 - DNA, 25 bp, Homo sapien
catctgcaaagaccggtacgtcaac

SEQ ID NO: 2073019 - DNA, 25 bp, Homo sapien
gcaaagaccggtacgtcaacagagt

SEQ ID NO: 2073020 - DNA, 25 bp, Homo sapien
tctgcaaagaccggtacgtcaacag

SEQ ID NO: 2073021 - DNA, 25 bp, Homo sapien
tgcaaagaccggtacgtcaacagag

SEQ ID NO: 2073022 - DNA, 25 bp, Homo sapien
gctccttctgagcgcaaatactcca

SEQ ID NO: 2073023 - DNA, 25 bp, Homo sapien
atactccatgtggattggcagctcc

SEQ ID NO: 2073024 - DNA, 25 bp, Homo sapien
tggctccaagcacgatgaagatcaa

SEQ ID NO: 2073025 - DNA, 25 bp, Homo sapien
gatgcaggagatcaccggcctggct

SEQ ID NO: 2073026 - DNA, 25 bp, Homo sapien
tcccagcagatatggatcagcaagc

SEQ ID NO: 2073027 - DNA, 25 bp, Homo sapien
aagcaggagtatgacgagtccagcc

SEQ ID NO: 2073028 - DNA, 25 bp, Homo sapien
gatatggatcagcaagcaggagtat

SEQ ID NO: 2073029 - DNA, 25 bp, Homo sapien
aggagtatgacgagtccagcccctc

SEQ ID NO: 2073030 - DNA, 25 bp, Homo sapien
ttgccgaaacccaggatctaaccag

SEQ ID NO: 2073031 - DNA, 25 bp, Homo sapien
gaaaacggcacgatatccaagaagc

SEQ ID NO: 2073032 - DNA, 25 bp, Homo sapien
gggacggaggcctgattctcccact

SEQ ID NO: 2073033 - DNA, 25 bp, Homo sapien
ccactgggaagaaaggtgctgaagc

SEQ ID NO: 2073034 - DNA, 25 bp, Homo sapien
tagccacgttgggaaggcagcgtct

SEQ ID NO: 2073035 - DNA, 25 bp, Homo sapien
caaaggactttacacgtggtatcct

SEQ ID NO: 2073036 - DNA, 25 bp, Homo sapien
tggtatcctcgcaggaaaccctttc

SEQ ID NO: 2073037 - DNA, 25 bp, Homo sapien
gcttggctgataaggcctttgcact

SEQ ID NO: 2073038 - DNA, 25 bp, Homo sapien
tctgcttggctgataaggcctttgc

SEQ ID NO: 2073039 - DNA, 25 bp, Homo sapien
aacgtgcggtggaacttgcccaaag

SEQ ID NO: 2073040 - DNA, 25 bp, Homo sapien
ctggcccacaaaacgtgcggtggaa

SEQ ID NO: 2073041 - DNA, 25 bp, Homo sapien
cacaaaacgtgcggtggaacttgcc

SEQ ID NO: 2073042 - DNA, 25 bp, Homo sapien
cccacaaaacgtgcggtggaacttg

SEQ ID NO: 2073043 - DNA, 25 bp, Homo sapien
cagtatcacatttgggtgataattc

SEQ ID NO: 2073044 - DNA, 25 bp, Homo sapien
cccctccaaaggatttactgtcatc

SEQ ID NO: 2073045 - DNA, 25 bp, Homo sapien
gccatcccctccaaaggatttactg

SEQ ID NO: 2073046 - DNA, 25 bp, Homo sapien
tgggtgataattcatcagctctcat

SEQ ID NO: 2073047 - DNA, 25 bp, Homo sapien
tgaaacttggcagtggaaggttcgt

SEQ ID NO: 2073048 - DNA, 25 bp, Homo sapien
cagtggaaggttcgtttcccacagt

SEQ ID NO: 2073049 - DNA, 25 bp, Homo sapien
ttggcagtggaaggttcgtttccca

SEQ ID NO: 2073050 - DNA, 25 bp, Homo sapien
ggcagtggaaggttcgtttcccaca

SEQ ID NO: 2073051 - DNA, 25 bp, Homo sapien
tcttgctggcttacaaaaccgtgca

SEQ ID NO: 2073052 - DNA, 25 bp, Homo sapien
tttgcagtgggtagaaacgcagcct

SEQ ID NO: 2073053 - DNA, 25 bp, Homo sapien
gccaagcgctgggataaaatatgca

SEQ ID NO: 2073054 - DNA, 25 bp, Homo sapien
gggtctcgcagataaatataacctt

SEQ ID NO: 2073055 - DNA, 25 bp, Homo sapien
tggtcgtggcagatatgctgcaggc

SEQ ID NO: 2073056 - DNA, 25 bp, Homo sapien
ggtcgtggcagatatgctgcaggct

SEQ ID NO: 2073057 - DNA, 25 bp, Homo sapien
atggtcgtggcagatatgctgcagg

SEQ ID NO: 2073058 - DNA, 25 bp, Homo sapien
catggtcgtggcagatatgctgcag

SEQ ID NO: 2073059 - DNA, 25 bp, Homo sapien
tgagaaacaagaaggtaaatggatg

SEQ ID NO: 2073060 - DNA, 25 bp, Homo sapien
gatgtttgacggacagtgttttgtg

SEQ ID NO: 2073061 - DNA, 25 bp, Homo sapien
cgaatagcgtcaggaatcacacaag

SEQ ID NO: 2073062 - DNA, 25 bp, Homo sapien
acactcttccaacagaatacaggga

SEQ ID NO: 2073063 - DNA, 25 bp, Homo sapien
tatcgttgtgttcccggtgtccaga

SEQ ID NO: 2073064 - DNA, 25 bp, Homo sapien
acacactctccgtattcactaggca

SEQ ID NO: 2073065 - DNA, 25 bp, Homo sapien
cagggagtagggcattgcgacctca

SEQ ID NO: 2073066 - DNA, 25 bp, Homo sapien
cactaggcacttgtctgtgggtatc

SEQ ID NO: 2073067 - DNA, 25 bp, Homo sapien
ggaagtgattcggtctctccacccc

SEQ ID NO: 2073068 - DNA, 25 bp, Homo sapien
cacccactgggtgcatggctgtcct

SEQ ID NO: 2073069 - DNA, 25 bp, Homo sapien
ctgctctcggaagtgattcggtctc

SEQ ID NO: 2073070 - DNA, 25 bp, Homo sapien
acccactgggtgcatggctgtcctc

SEQ ID NO: 2073071 - DNA, 25 bp, Homo sapien
caaactgcgtgaggatctgtggcac

SEQ ID NO: 2073072 - DNA, 25 bp, Homo sapien
cctatctgccagacaaactgcgtga

SEQ ID NO: 2073073 - DNA, 25 bp, Homo sapien
tctgtggcacattttccagtgtcac

SEQ ID NO: 2073074 - DNA, 25 bp, Homo sapien
cgtgaggatctgtggcacattttcc

SEQ ID NO: 2073075 - DNA, 25 bp, Homo sapien
catatatcatataaagggacttgta

SEQ ID NO: 2073076 - DNA, 25 bp, Homo sapien
tcatataaagggacttgtaaccaga

SEQ ID NO: 2073077 - DNA, 25 bp, Homo sapien
tgtcaacaaaagatgacctaaaaca

SEQ ID NO: 2073078 - DNA, 25 bp, Homo sapien
aaaggacactgtcaacaaaagatga

SEQ ID NO: 2073079 - DNA, 25 bp, Homo sapien
gtgcctggccaatttcaacatgagg

SEQ ID NO: 2073080 - DNA, 25 bp, Homo sapien
tgtgcctggccaatttcaacatgag

SEQ ID NO: 2073081 - DNA, 25 bp, Homo sapien
gagaagaaacaacttagccaagcgt

SEQ ID NO: 2073082 - DNA, 25 bp, Homo sapien
ggtgggaggactactggaggttgag

SEQ ID NO: 2073083 - DNA, 25 bp, Homo sapien
tgggaggactactggaggttgaggt

SEQ ID NO: 2073084 - DNA, 25 bp, Homo sapien
gaagagaagaaacaacttagccaag

SEQ ID NO: 2073085 - DNA, 25 bp, Homo sapien
tgtctcatcatgtctcaaattcctg

SEQ ID NO: 2073086 - DNA, 25 bp, Homo sapien
tcttaattgaaaatgcaactatatg

SEQ ID NO: 2073087 - DNA, 25 bp, Homo sapien
taaaactattgttgagcttataaaa

SEQ ID NO: 2073088 - DNA, 25 bp, Homo sapien
ctaggattaagggtgtgaatcattg

SEQ ID NO: 2073089 - DNA, 25 bp, Homo sapien
caaaaggttatttggctctgaatca

SEQ ID NO: 2073090 - DNA, 25 bp, Homo sapien
tgaatcacgatcacagaaagaaagt

SEQ ID NO: 2073091 - DNA, 25 bp, Homo sapien
aatttgcaagggactgatacatcag

SEQ ID NO: 2073092 - DNA, 25 bp, Homo sapien
tgacccctctgactaaatttgcaag

SEQ ID NO: 2073093 - DNA, 25 bp, Homo sapien
tagttaaggtcgtctaccctggcaa

SEQ ID NO: 2073094 - DNA, 25 bp, Homo sapien
gagcccctccaaattgcctcgtgtg

SEQ ID NO: 2073095 - DNA, 25 bp, Homo sapien
tccgaaccaattgcaaaagtacagg

SEQ ID NO: 2073096 - DNA, 25 bp, Homo sapien
ttgcagaggtctcacagaaccccag

SEQ ID NO: 2073097 - DNA, 25 bp, Homo sapien
tttaggaccgcacggaagccgccga

SEQ ID NO: 2073098 - DNA, 25 bp, Homo sapien
gagagcgacgtcaccgtcgattcgc

SEQ ID NO: 2073099 - DNA, 25 bp, Homo sapien
tcctgccgagcaccagcctttagga

SEQ ID NO: 2073100 - DNA, 25 bp, Homo sapien
gattggcggaggtgaggtgcgcgga

SEQ ID NO: 2073101 - DNA, 25 bp, Homo sapien
gagccgccgcccgaggcggaggagc

SEQ ID NO: 2073102 - DNA, 25 bp, Homo sapien
cgctgaagccaacgcaccccgcgga

SEQ ID NO: 2073103 - DNA, 25 bp, Homo sapien
tgaagccaacgcaccccgcggagcc

SEQ ID NO: 2073104 - DNA, 25 bp, Homo sapien
tgccgctgaagccaacgcaccccgc

SEQ ID NO: 2073105 - DNA, 25 bp, Homo sapien
gatgagtagtaacgcaggttgtccg

SEQ ID NO: 2073106 - DNA, 25 bp, Homo sapien
gacatctgacgtagagacctgcgaa

SEQ ID NO: 2073107 - DNA, 25 bp, Homo sapien
agaaaccttttctagcgcggcctgg

SEQ ID NO: 2073108 - DNA, 25 bp, Homo sapien
tgagggcttgtgttcccagcagaca

SEQ ID NO: 2073109 - DNA, 25 bp, Homo sapien
aatgcgtgaccttttctgcaaccag

SEQ ID NO: 2073110 - DNA, 25 bp, Homo sapien
gatgcatgcagaccagagtaatgag

SEQ ID NO: 2073111 - DNA, 25 bp, Homo sapien
gatttttatgttgaccgcaatgcgt

SEQ ID NO: 2073112 - DNA, 25 bp, Homo sapien
gggcatcctgccattaacgtcagca

SEQ ID NO: 2073113 - DNA, 25 bp, Homo sapien
taaagtaagggtatactggcccaga

SEQ ID NO: 2073114 - DNA, 25 bp, Homo sapien
cggactcgagaaccacgtggatgct

SEQ ID NO: 2073115 - DNA, 25 bp, Homo sapien
tgggccgtggcgataaccctggtaa

SEQ ID NO: 2073116 - DNA, 25 bp, Homo sapien
gaatagtgcacctggctctcacagg

SEQ ID NO: 2073117 - DNA, 25 bp, Homo sapien
tgtttcattcagactccaactagcc

SEQ ID NO: 2073118 - DNA, 25 bp, Homo sapien
gaatagaaaccaagtggattgcctg

SEQ ID NO: 2073119 - DNA, 25 bp, Homo sapien
tatctgcgacaaattgaagaacttg

SEQ ID NO: 2073120 - DNA, 25 bp, Homo sapien
tgggttggcagtgcagaatagaaac

SEQ ID NO: 2073121 - DNA, 25 bp, Homo sapien
ccaccgtgttgtgctcaaagagaca

SEQ ID NO: 2073122 - DNA, 25 bp, Homo sapien
cacactggtgtgaatgtcgctctct

SEQ ID NO: 2073123 - DNA, 25 bp, Homo sapien
caccctgatcttatgggaggaatca

SEQ ID NO: 2073124 - DNA, 25 bp, Homo sapien
actgctctgcatataaaccaagggc

SEQ ID NO: 2073125 - DNA, 25 bp, Homo sapien
tcctgccccgtcagaaagtctcgga

SEQ ID NO: 2073126 - DNA, 25 bp, Homo sapien
tcggactcctctctgcttgcatgtg

SEQ ID NO: 2073127 - DNA, 25 bp, Homo sapien
catcagcacgggtctggctgtccct

SEQ ID NO: 2073128 - DNA, 25 bp, Homo sapien
aattaggcgtagctcttgggttggc

SEQ ID NO: 2073129 - DNA, 25 bp, Homo sapien
ccactttctcccattggaagggctg

SEQ ID NO: 2073130 - DNA, 25 bp, Homo sapien
tgttgtgggaggtggtccgtttgca

SEQ ID NO: 2073131 - DNA, 25 bp, Homo sapien
gatgtagcgagtgggctgttgtggg

SEQ ID NO: 2073132 - DNA, 25 bp, Homo sapien
gtccgtttgcaggtcataaggaaat

SEQ ID NO: 2073133 - DNA, 25 bp, Homo sapien
tggggagctgacaccgcgccaggac

SEQ ID NO: 2073134 - DNA, 25 bp, Homo sapien
gtggggagctgacaccgcgccagga

SEQ ID NO: 2073135 - DNA, 25 bp, Homo sapien
ccgcgccaggacagaggcgtcagag

SEQ ID NO: 2073136 - DNA, 25 bp, Homo sapien
ctatagccataacttctagactcaa

SEQ ID NO: 2073137 - DNA, 25 bp, Homo sapien
aacaggtggagctataggcacacca

SEQ ID NO: 2073138 - DNA, 25 bp, Homo sapien
agagcacactatagccataacttct

SEQ ID NO: 2073139 - DNA, 25 bp, Homo sapien
ccaaacaggtggagctataggcaca

SEQ ID NO: 2073140 - DNA, 25 bp, Homo sapien
caaataagcaaaacccactcgagag

SEQ ID NO: 2073141 - DNA, 25 bp, Homo sapien
ggcctgcagttaagcacagccttca

SEQ ID NO: 2073142 - DNA, 25 bp, Homo sapien
tgcaatttgaatcatcagcgccttg

SEQ ID NO: 2073143 - DNA, 25 bp, Homo sapien
gaagcttcttgatgacttgaccaga

SEQ ID NO: 2073144 - DNA, 25 bp, Homo sapien
ctaatcataactgcccatatcctga

SEQ ID NO: 2073145 - DNA, 25 bp, Homo sapien
gttcgtcatttatccacttcccaga

SEQ ID NO: 2073146 - DNA, 25 bp, Homo sapien
gtaagaggatgtacatgaaaacact

SEQ ID NO: 2073147 - DNA, 25 bp, Homo sapien
gcccatatcctgattatgttcgtca

SEQ ID NO: 2073148 - DNA, 25 bp, Homo sapien
ctaggattgccacaagagccacatt

SEQ ID NO: 2073149 - DNA, 25 bp, Homo sapien
cacattcaggggaatctcgggccca

SEQ ID NO: 2073150 - DNA, 25 bp, Homo sapien
caagagccacattcaggggaatctc

SEQ ID NO: 2073151 - DNA, 25 bp, Homo sapien
gagccacattcaggggaatctcggg

SEQ ID NO: 2073152 - DNA, 25 bp, Homo sapien
tgccttcggggggcctccgcgcgcg

SEQ ID NO: 2073153 - DNA, 25 bp, Homo sapien
gtgccttcggggggcctccgcgcgc

SEQ ID NO: 2073154 - DNA, 25 bp, Homo sapien
gtcatccttgcacagggaccatgct

SEQ ID NO: 2073155 - DNA, 25 bp, Homo sapien
gtatcattccactattagtatatat

SEQ ID NO: 2073156 - DNA, 25 bp, Homo sapien
tagggaacgtttcatgaatttgcat

SEQ ID NO: 2073157 - DNA, 25 bp, Homo sapien
aaatagggaacgtttcatgaatttg

SEQ ID NO: 2073158 - DNA, 25 bp, Homo sapien
ttgttttgatagcaagcacagcttg

SEQ ID NO: 2073159 - DNA, 25 bp, Homo sapien
gagctgattgccaaacttggtttta

SEQ ID NO: 2073160 - DNA, 25 bp, Homo sapien
gttttacaggttcggcaatgcttgc

SEQ ID NO: 2073161 - DNA, 25 bp, Homo sapien
caatgcttgcattgggtaggtttgt

SEQ ID NO: 2073162 - DNA, 25 bp, Homo sapien
gcctgaattacttgctcagctgttc

SEQ ID NO: 2073163 - DNA, 25 bp, Homo sapien
cttctccaaggaagttgccattgta

SEQ ID NO: 2073164 - DNA, 25 bp, Homo sapien
agttgtgcctgaattacttgctcag

SEQ ID NO: 2073165 - DNA, 25 bp, Homo sapien
ggaagttgccattgtactttgtctt

SEQ ID NO: 2073166 - DNA, 25 bp, Homo sapien
cacctgtcttgtcagtctggcacac

SEQ ID NO: 2073167 - DNA, 25 bp, Homo sapien
tgtcttgtcagtctggcacactgtg

SEQ ID NO: 2073168 - DNA, 25 bp, Homo sapien
acctgtcttgtcagtctggcacact

SEQ ID NO: 2073169 - DNA, 25 bp, Homo sapien
cctgtcttgtcagtctggcacactg

SEQ ID NO: 2073170 - DNA, 25 bp, Homo sapien
ggactagaaggtgtttgagaaagct

SEQ ID NO: 2073171 - DNA, 25 bp, Homo sapien
cgtgtactttggatccacagtatca

SEQ ID NO: 2073172 - DNA, 25 bp, Homo sapien
tgagaaagcttcgtgtactttggat

SEQ ID NO: 2073173 - DNA, 25 bp, Homo sapien
gtatcaaaagtaggcctctccagac

SEQ ID NO: 2073174 - DNA, 25 bp, Homo sapien
tgctgcggcggttctacataacact

SEQ ID NO: 2073175 - DNA, 25 bp, Homo sapien
tcaggcaggcttcgctcttggccat

SEQ ID NO: 2073176 - DNA, 25 bp, Homo sapien
gacttggcggtttgctctcaggcag

SEQ ID NO: 2073177 - DNA, 25 bp, Homo sapien
ccagaagtggttgggatctagacaa

SEQ ID NO: 2073178 - DNA, 25 bp, Homo sapien
cctgtgtgaacaactcaacctgtga

SEQ ID NO: 2073179 - DNA, 25 bp, Homo sapien
ttttgcggcttgctctttcacctgc

SEQ ID NO: 2073180 - DNA, 25 bp, Homo sapien
tgcagctctttttgcggcttgctct

SEQ ID NO: 2073181 - DNA, 25 bp, Homo sapien
cttgggccacccttgtgctgttttc

SEQ ID NO: 2073182 - DNA, 25 bp, Homo sapien
tgaatttgatacatttctgtaagca

SEQ ID NO: 2073183 - DNA, 25 bp, Homo sapien
gaaatgatggtattagtaatgtaaa

SEQ ID NO: 2073184 - DNA, 25 bp, Homo sapien
gatggtattagtaatgtaaagaaaa

SEQ ID NO: 2073185 - DNA, 25 bp, Homo sapien
ggccttctacaaatttgaagtagag

SEQ ID NO: 2073186 - DNA, 25 bp, Homo sapien
tagcaaagagagttgacgtgaggct

SEQ ID NO: 2073187 - DNA, 25 bp, Homo sapien
caaagagagttgacgtgaggctcaa

SEQ ID NO: 2073188 - DNA, 25 bp, Homo sapien
gcaaagagagttgacgtgaggctca

SEQ ID NO: 2073189 - DNA, 25 bp, Homo sapien
ctgtagcaaagagagttgacgtgag

SEQ ID NO: 2073190 - DNA, 25 bp, Homo sapien
tacagtggagaggatccaaaaacgg

SEQ ID NO: 2073191 - DNA, 25 bp, Homo sapien
gagaaccaaagggattgaatacagt

SEQ ID NO: 2073192 - DNA, 25 bp, Homo sapien
gtcagtagtcaccttgagaaccaaa

SEQ ID NO: 2073193 - DNA, 25 bp, Homo sapien
gattgaatacagtggagaggatcca

SEQ ID NO: 2073194 - DNA, 25 bp, Homo sapien
caactcatagttctgttgaaggagg

SEQ ID NO: 2073195 - DNA, 25 bp, Homo sapien
tcttggacaactcatagttctgttg

SEQ ID NO: 2073196 - DNA, 25 bp, Homo sapien
tgtgaaatcttggacaactcatagt

SEQ ID NO: 2073197 - DNA, 25 bp, Homo sapien
actttgtgaaatcttggacaactca

SEQ ID NO: 2073198 - DNA, 25 bp, Homo sapien
tctccctgagataaagtagtgcatt

SEQ ID NO: 2073199 - DNA, 25 bp, Homo sapien
ctttggctacatggaaagtttcctt

SEQ ID NO: 2073200 - DNA, 25 bp, Homo sapien
catttcagagatgggtgttgtgaga

SEQ ID NO: 2073201 - DNA, 25 bp, Homo sapien
tgagaactttggctacatggaaagt

SEQ ID NO: 2073202 - DNA, 25 bp, Homo sapien
catgccagatttttagggaggttaa

SEQ ID NO: 2073203 - DNA, 25 bp, Homo sapien
ggtagaaaatgacacaaccctgtct

SEQ ID NO: 2073204 - DNA, 25 bp, Homo sapien
tctccaccctaaatgttgaggaagc

SEQ ID NO: 2073205 - DNA, 25 bp, Homo sapien
tgaaaagccattgctgatgttgctg

SEQ ID NO: 2073206 - DNA, 25 bp, Homo sapien
caagttgccggcagattccttgttg

SEQ ID NO: 2073207 - DNA, 25 bp, Homo sapien
aagttgccggcagattccttgttga

SEQ ID NO: 2073208 - DNA, 25 bp, Homo sapien
tcaagttgccggcagattccttgtt

SEQ ID NO: 2073209 - DNA, 25 bp, Homo sapien
gcaggtgtctcctaatcctgatttt

SEQ ID NO: 2073210 - DNA, 25 bp, Homo sapien
gctcctcttgctcaactggaggatg

SEQ ID NO: 2073211 - DNA, 25 bp, Homo sapien
tgctcaactggaggatgtctgccaa

SEQ ID NO: 2073212 - DNA, 25 bp, Homo sapien
caagaggcatgagtctgcctgtgca

SEQ ID NO: 2073213 - DNA, 25 bp, Homo sapien
aggcaagaaaagcgtaacatgaaag

SEQ ID NO: 2073214 - DNA, 25 bp, Homo sapien
caagaaaagcgtaacatgaaagtag

SEQ ID NO: 2073215 - DNA, 25 bp, Homo sapien
gcgtaacatgaaagtagttttccta

SEQ ID NO: 2073216 - DNA, 25 bp, Homo sapien
agcgtaacatgaaagtagttttcct

SEQ ID NO: 2073217 - DNA, 25 bp, Homo sapien
tccttccaagttcttaaggtgcatg

SEQ ID NO: 2073218 - DNA, 25 bp, Homo sapien
gactatcaaaagatacacgagttca

SEQ ID NO: 2073219 - DNA, 25 bp, Homo sapien
cgagcaaattaatgttctaccttct

SEQ ID NO: 2073220 - DNA, 25 bp, Homo sapien
caccaccgctcctagctgtaaggtt

SEQ ID NO: 2073221 - DNA, 25 bp, Homo sapien
tctttgtaattcaaattgggtgatc

SEQ ID NO: 2073222 - DNA, 25 bp, Homo sapien
catatgcaggaacttagttctcatt

SEQ ID NO: 2073223 - DNA, 25 bp, Homo sapien
gtaacatatatagggaaacatgcaa

SEQ ID NO: 2073224 - DNA, 25 bp, Homo sapien
ccctattgtgaggttagaagaataa

SEQ ID NO: 2073225 - DNA, 25 bp, Homo sapien
tgatgaggtattcctcaaaagtgct

SEQ ID NO: 2073226 - DNA, 25 bp, Homo sapien
gggcagagggactttgatttgatta

SEQ ID NO: 2073227 - DNA, 25 bp, Homo sapien
gcttagtatttctaagagggcagag

SEQ ID NO: 2073228 - DNA, 25 bp, Homo sapien
cattttatacttacaataagtggag

SEQ ID NO: 2073229 - DNA, 25 bp, Homo sapien
gctgtgtagctctcagtattaacca

SEQ ID NO: 2073230 - DNA, 25 bp, Homo sapien
aacagcatggtaaattcaggcctcc

SEQ ID NO: 2073231 - DNA, 25 bp, Homo sapien
tcctggagggccatgaacctgtcta

SEQ ID NO: 2073232 - DNA, 25 bp, Homo sapien
tcagtggctgacagttgcaggtgac

SEQ ID NO: 2073233 - DNA, 25 bp, Homo sapien
attgcagtgaacttctggttgccgt

SEQ ID NO: 2073234 - DNA, 25 bp, Homo sapien
taattctaggccattgacttgaggg

SEQ ID NO: 2073235 - DNA, 25 bp, Homo sapien
ttctaggccattgacttgagggaaa

SEQ ID NO: 2073236 - DNA, 25 bp, Homo sapien
ctggttgccgtgatttgagtgcacc

SEQ ID NO: 2073237 - DNA, 25 bp, Homo sapien
gcttgtagcctcgttaatgtggttt

SEQ ID NO: 2073238 - DNA, 25 bp, Homo sapien
gcctcgttaatgtggtttcctcctc

SEQ ID NO: 2073239 - DNA, 25 bp, Homo sapien
aggactgcccttgcttgtagcctcg

SEQ ID NO: 2073240 - DNA, 25 bp, Homo sapien
ctgcccttgcttgtagcctcgttaa

SEQ ID NO: 2073241 - DNA, 25 bp, Homo sapien
ctctcttttaaagttggggtctatg

SEQ ID NO: 2073242 - DNA, 25 bp, Homo sapien
gggtctatggggatgttaactgcca

SEQ ID NO: 2073243 - DNA, 25 bp, Homo sapien
ctgccaaattcagtttaatggttac

SEQ ID NO: 2073244 - DNA, 25 bp, Homo sapien
ctaatgctctcttttaaagttgggg

SEQ ID NO: 2073245 - DNA, 25 bp, Homo sapien
tgctcccatccctctactgcacaca

SEQ ID NO: 2073246 - DNA, 25 bp, Homo sapien
agagtcaccgacttgatcccccatg

SEQ ID NO: 2073247 - DNA, 25 bp, Homo sapien
gacttgatcccccatgtctgttgat

SEQ ID NO: 2073248 - DNA, 25 bp, Homo sapien
tgtgtgatatcttttgagctcatcc

SEQ ID NO: 2073249 - DNA, 25 bp, Homo sapien
tctccccagctgttatagtaaaagt

SEQ ID NO: 2073250 - DNA, 25 bp, Homo sapien
ctctccccagctgttatagtaaaag

SEQ ID NO: 2073251 - DNA, 25 bp, Homo sapien
ggtctgttgcgctacctttgagagc

SEQ ID NO: 2073252 - DNA, 25 bp, Homo sapien
tctgttgcgctacctttgagagctg

SEQ ID NO: 2073253 - DNA, 25 bp, Homo sapien
acctttgagagctgattgtcttgtt

SEQ ID NO: 2073254 - DNA, 25 bp, Homo sapien
ctggtctgttgcgctacctttgaga

SEQ ID NO: 2073255 - DNA, 25 bp, Homo sapien
cattgactcccaactagttttttag

SEQ ID NO: 2073256 - DNA, 25 bp, Homo sapien
caactagttttttagaggccagact

SEQ ID NO: 2073257 - DNA, 25 bp, Homo sapien
ccagactcaaataagcttgttgaac

SEQ ID NO: 2073258 - DNA, 25 bp, Homo sapien
ttttctaatgagcattgactcccaa

SEQ ID NO: 2073259 - DNA, 25 bp, Homo sapien
tctctgtagcacacacgactataat

SEQ ID NO: 2073260 - DNA, 25 bp, Homo sapien
tctaaacagcgatggtaaacaacta

SEQ ID NO: 2073261 - DNA, 25 bp, Homo sapien
tatatagtttcccagccaacactag

SEQ ID NO: 2073262 - DNA, 25 bp, Homo sapien
taaggtggtctaaatgggatctaaa

SEQ ID NO: 2073263 - DNA, 25 bp, Homo sapien
ccggaggaaatggatcttaggccac

SEQ ID NO: 2073264 - DNA, 25 bp, Homo sapien
ctgcagtgtttctgtccggaggaaa

SEQ ID NO: 2073265 - DNA, 25 bp, Homo sapien
ttaggccactggacaagaacctgca

SEQ ID NO: 2073266 - DNA, 25 bp, Homo sapien
gagttatactcaagcagaatgcaca

SEQ ID NO: 2073267 - DNA, 25 bp, Homo sapien
tccacatgcgctgagtgcagacgac

SEQ ID NO: 2073268 - DNA, 25 bp, Homo sapien
taatacttcccatcaccagtgaacg

SEQ ID NO: 2073269 - DNA, 25 bp, Homo sapien
tggagtgcccttagccattgcgctg

SEQ ID NO: 2073270 - DNA, 25 bp, Homo sapien
caaacaggctcgttcttagatggag

SEQ ID NO: 2073271 - DNA, 25 bp, Homo sapien
gctgtgtgctgtgcaccgtcaacac

SEQ ID NO: 2073272 - DNA, 25 bp, Homo sapien
tgctgtgtgctgtgcaccgtcaaca

SEQ ID NO: 2073273 - DNA, 25 bp, Homo sapien
gcaggattcatctcgtttacaaaaa

SEQ ID NO: 2073274 - DNA, 25 bp, Homo sapien
tgtaattagtgcaggattcatctcg

SEQ ID NO: 2073275 - DNA, 25 bp, Homo sapien
gacacttctgcaacctgtaattagt

SEQ ID NO: 2073276 - DNA, 25 bp, Homo sapien
agtgttcatcctctgactacttccc

SEQ ID NO: 2073277 - DNA, 25 bp, Homo sapien
cccacagacactgataccttcaggg

SEQ ID NO: 2073278 - DNA, 25 bp, Homo sapien
catccctcttgtttcgccagctttt

SEQ ID NO: 2073279 - DNA, 25 bp, Homo sapien
cacttcctgctcgtgtccacctgct

SEQ ID NO: 2073280 - DNA, 25 bp, Homo sapien
tttggcagtggcgtgggcctatccc

SEQ ID NO: 2073281 - DNA, 25 bp, Homo sapien
ccaggtaagcactgctgacatctga

SEQ ID NO: 2073282 - DNA, 25 bp, Homo sapien
gaagagccattttgttccaggaaag

SEQ ID NO: 2073283 - DNA, 25 bp, Homo sapien
tgacatctgacacgtactgccctac

SEQ ID NO: 2073284 - DNA, 25 bp, Homo sapien
gccatgaagtaaggtgaatgcacat

SEQ ID NO: 2073285 - DNA, 25 bp, Homo sapien
gaaaaagtgagcaatcttaggcagt

SEQ ID NO: 2073286 - DNA, 25 bp, Homo sapien
tgagcaatcttaggcagtgcccttc

SEQ ID NO: 2073287 - DNA, 25 bp, Homo sapien
caggtgaaaaagtgagcaatcttag

SEQ ID NO: 2073288 - DNA, 25 bp, Homo sapien
aagtgagcaatcttaggcagtgccc

SEQ ID NO: 2073289 - DNA, 25 bp, Homo sapien
tgaagtctacttgaaggcacaaagg

SEQ ID NO: 2073290 - DNA, 25 bp, Homo sapien
tccctttggtgagcgtagcatacat

SEQ ID NO: 2073291 - DNA, 25 bp, Homo sapien
catgaagagcaaggtaacaagagca

SEQ ID NO: 2073292 - DNA, 25 bp, Homo sapien
gcacaaagggcaaggtaacacaaag

SEQ ID NO: 2073293 - DNA, 25 bp, Homo sapien
agctcccagcaccgtttggctggat

SEQ ID NO: 2073294 - DNA, 25 bp, Homo sapien
tgcttgcaggagcatcaagtcctct

SEQ ID NO: 2073295 - DNA, 25 bp, Homo sapien
tgagctcccagcaccgtttggctgg

SEQ ID NO: 2073296 - DNA, 25 bp, Homo sapien
atcaagtcctcttgctcttccatct

SEQ ID NO: 2073297 - DNA, 25 bp, Homo sapien
gccttcctgcctccacctcatcccg

SEQ ID NO: 2073298 - DNA, 25 bp, Homo sapien
ttcctgcctccacctcatcccggca

SEQ ID NO: 2073299 - DNA, 25 bp, Homo sapien
ctgcctccacctcatcccggcacat

SEQ ID NO: 2073300 - DNA, 25 bp, Homo sapien
tctggccttcctgcctccacctcat

SEQ ID NO: 2073301 - DNA, 25 bp, Homo sapien
aatttgttgcaaagctatcaaggtg

SEQ ID NO: 2073302 - DNA, 25 bp, Homo sapien
gtttgtcagtagtaagaactgagtc

SEQ ID NO: 2073303 - DNA, 25 bp, Homo sapien
gagtcaggtcagtttgaacatagag

SEQ ID NO: 2073304 - DNA, 25 bp, Homo sapien
tgagttggacacaatcccaggcact

SEQ ID NO: 2073305 - DNA, 25 bp, Homo sapien
tcccaaggaacctcttgtgtcagac

SEQ ID NO: 2073306 - DNA, 25 bp, Homo sapien
ggaacctcttgtgtcagacctggtg

SEQ ID NO: 2073307 - DNA, 25 bp, Homo sapien
cttcagtcccagctcagatccgcct

SEQ ID NO: 2073308 - DNA, 25 bp, Homo sapien
tcagtcccagctcagatccgcctcc

SEQ ID NO: 2073309 - DNA, 25 bp, Homo sapien
ggttctggagcaaaatctttcggga

SEQ ID NO: 2073310 - DNA, 25 bp, Homo sapien
tggttctggagcaaaatctttcggg

SEQ ID NO: 2073311 - DNA, 25 bp, Homo sapien
ttctggagcaaaatctttcgggaca

SEQ ID NO: 2073312 - DNA, 25 bp, Homo sapien
tctggagcaaaatctttcgggacaa

SEQ ID NO: 2073313 - DNA, 25 bp, Homo sapien
tctcacccgactcctctggttcaga

SEQ ID NO: 2073314 - DNA, 25 bp, Homo sapien
tcctggaccggttcttctcacccga

SEQ ID NO: 2073315 - DNA, 25 bp, Homo sapien
gttcagattcgacttctctatcggg

SEQ ID NO: 2073316 - DNA, 25 bp, Homo sapien
ccctctcctggaccggttcttctca

SEQ ID NO: 2073317 - DNA, 25 bp, Homo sapien
gctctagttctcgtttggaaattcc

SEQ ID NO: 2073318 - DNA, 25 bp, Homo sapien
ctgctctagttctcgtttggaaatt

SEQ ID NO: 2073319 - DNA, 25 bp, Homo sapien
tgctctagttctcgtttggaaattc

SEQ ID NO: 2073320 - DNA, 25 bp, Homo sapien
ccattatagtgtctgtctgaacagc

SEQ ID NO: 2073321 - DNA, 25 bp, Homo sapien
accaaacagcttgccagtcaggtgc

SEQ ID NO: 2073322 - DNA, 25 bp, Homo sapien
gaagctctccccatagaagatcaat

SEQ ID NO: 2073323 - DNA, 25 bp, Homo sapien
aagggatgttctccctgacagctgc

SEQ ID NO: 2073324 - DNA, 25 bp, Homo sapien
catccagggcaggtggcaacaattt

SEQ ID NO: 2073325 - DNA, 25 bp, Homo sapien
aattccaaggtagcttaagccaagc

SEQ ID NO: 2073326 - DNA, 25 bp, Homo sapien
ccacacttgagacactgtagatctc

SEQ ID NO: 2073327 - DNA, 25 bp, Homo sapien
tgtagatctcaaggcaacatcagga

SEQ ID NO: 2073328 - DNA, 25 bp, Homo sapien
catctccagagccatggggtgctgc

SEQ ID NO: 2073329 - DNA, 25 bp, Homo sapien
tctccagagccatggggtgctgcac

SEQ ID NO: 2073330 - DNA, 25 bp, Homo sapien
ggtttgcacaggtgccatctccaga

SEQ ID NO: 2073331 - DNA, 25 bp, Homo sapien
tgccatctccagagccatggggtgc

SEQ ID NO: 2073332 - DNA, 25 bp, Homo sapien
agcagcacaggcagccgatgtgtgg

SEQ ID NO: 2073333 - DNA, 25 bp, Homo sapien
gcacaggcagccgatgtgtggctct

SEQ ID NO: 2073334 - DNA, 25 bp, Homo sapien
aggcagccgatgtgtggctctctcc

SEQ ID NO: 2073335 - DNA, 25 bp, Homo sapien
tgggcacagcggacccgaccctcct

SEQ ID NO: 2073336 - DNA, 25 bp, Homo sapien
cagctgttgagtgcagacacaggct

SEQ ID NO: 2073337 - DNA, 25 bp, Homo sapien
ttcggaggacctgacgcttctggct

SEQ ID NO: 2073338 - DNA, 25 bp, Homo sapien
gacctgacgcttctggctctctgct

SEQ ID NO: 2073339 - DNA, 25 bp, Homo sapien
gggaatatccagttcggaggacctg

SEQ ID NO: 2073340 - DNA, 25 bp, Homo sapien
tgccactgctctctcagacaccacg

SEQ ID NO: 2073341 - DNA, 25 bp, Homo sapien
tcagacaccacgaaggaggctccgc

SEQ ID NO: 2073342 - DNA, 25 bp, Homo sapien
acgaaggaggctccgcaaaacacca

SEQ ID NO: 2073343 - DNA, 25 bp, Homo sapien
ggcctgagcccctggctatctgcca

SEQ ID NO: 2073344 - DNA, 25 bp, Homo sapien
ggcattccaatgtgaagttgtccac

SEQ ID NO: 2073345 - DNA, 25 bp, Homo sapien
ggcgctgatggaccgataggaattc

SEQ ID NO: 2073346 - DNA, 25 bp, Homo sapien
aattcacacccttctttattcggca

SEQ ID NO: 2073347 - DNA, 25 bp, Homo sapien
tagctcagccataatgaagaggcgc

SEQ ID NO: 2073348 - DNA, 25 bp, Homo sapien
ccccagggaagacatcaacagggat

SEQ ID NO: 2073349 - DNA, 25 bp, Homo sapien
gagtagttacaactcagccatcctc

SEQ ID NO: 2073350 - DNA, 25 bp, Homo sapien
tctgtctgaagaacattctgcccca

SEQ ID NO: 2073351 - DNA, 25 bp, Homo sapien
gaccatgatgggcttatcctgcttg

SEQ ID NO: 2073352 - DNA, 25 bp, Homo sapien
ctcacactgtactttatttttcttc

SEQ ID NO: 2073353 - DNA, 25 bp, Homo sapien
tcacactgtactttatttttcttca

SEQ ID NO: 2073354 - DNA, 25 bp, Homo sapien
gacagacaaggaaagtttaatggca

SEQ ID NO: 2073355 - DNA, 25 bp, Homo sapien
cttgataacaaaagctttcaataca

SEQ ID NO: 2073356 - DNA, 25 bp, Homo sapien
ttatagctaatggtggccaactgga

SEQ ID NO: 2073357 - DNA, 25 bp, Homo sapien
tgactttttccaacaacacaaacaa

SEQ ID NO: 2073358 - DNA, 25 bp, Homo sapien
aaatgagctatctggagggcccacg

SEQ ID NO: 2073359 - DNA, 25 bp, Homo sapien
tgcaaattctaccttggagggaaaa

SEQ ID NO: 2073360 - DNA, 25 bp, Homo sapien
ggtttaggtgcatggatttactcag

SEQ ID NO: 2073361 - DNA, 25 bp, Homo sapien
gatttactcagtatctacactacag

SEQ ID NO: 2073362 - DNA, 25 bp, Homo sapien
tcttgattgagcgagcctttccatc

SEQ ID NO: 2073363 - DNA, 25 bp, Homo sapien
gaattttcttgattgagcgagcctt

SEQ ID NO: 2073364 - DNA, 25 bp, Homo sapien
ttttcttgattgagcgagcctttcc

SEQ ID NO: 2073365 - DNA, 25 bp, Homo sapien
gattgagcgagcctttccatcctcc

SEQ ID NO: 2073366 - DNA, 25 bp, Homo sapien
gggcagtccagatgaaccggtacag

SEQ ID NO: 2073367 - DNA, 25 bp, Homo sapien
tgttgataggatgtttgcttgaagt

SEQ ID NO: 2073368 - DNA, 25 bp, Homo sapien
gcatatttcatgattgtccaaggtc

SEQ ID NO: 2073369 - DNA, 25 bp, Homo sapien
ctcagcttggtatgcagaacaacct

SEQ ID NO: 2073370 - DNA, 25 bp, Homo sapien
gattttggcaggatagcagcacagg

SEQ ID NO: 2073371 - DNA, 25 bp, Homo sapien
tatttaactctgaccctggccagtg

SEQ ID NO: 2073372 - DNA, 25 bp, Homo sapien
gatgtccctaccaaccagaaggttg

SEQ ID NO: 2073373 - DNA, 25 bp, Homo sapien
cacaaggttcttcgcagaggcatca

SEQ ID NO: 2073374 - DNA, 25 bp, Homo sapien
gaaacaggccacgtaaagcaactct

SEQ ID NO: 2073375 - DNA, 25 bp, Homo sapien
ttaaatgcggaattgcccagggacg

SEQ ID NO: 2073376 - DNA, 25 bp, Homo sapien
gctttcttggtggagcgtaagcacc

SEQ ID NO: 2073377 - DNA, 25 bp, Homo sapien
gaagaccctgaaggacagccatgag

SEQ ID NO: 2073378 - DNA, 25 bp, Homo sapien
aatgccccaggatgtacagataacc

SEQ ID NO: 2073379 - DNA, 25 bp, Homo sapien
catgctccacgtgaaaacgggccta

SEQ ID NO: 2073380 - DNA, 25 bp, Homo sapien
aacgtgccatgtgctacagccaaaa

SEQ ID NO: 2073381 - DNA, 25 bp, Homo sapien
tcttaagaagggtcgtggctcccat

SEQ ID NO: 2073382 - DNA, 25 bp, Homo sapien
tccagacattcggagaccacactgc

SEQ ID NO: 2073383 - DNA, 25 bp, Homo sapien
attcggagaccacactgccctgttg

SEQ ID NO: 2073384 - DNA, 25 bp, Homo sapien
atcagcttccagacattcggagacc

SEQ ID NO: 2073385 - DNA, 25 bp, Homo sapien
gcttccagacattcggagaccacac

SEQ ID NO: 2073386 - DNA, 25 bp, Homo sapien
gacttcggtctcctaaaagcaggca

SEQ ID NO: 2073387 - DNA, 25 bp, Homo sapien
tggtgatccggccaacaacatggaa

SEQ ID NO: 2073388 - DNA, 25 bp, Homo sapien
tcctgatgcggaagtcaccgaaatg

SEQ ID NO: 2073389 - DNA, 25 bp, Homo sapien
tttacaggcacagaacatccaggtg

SEQ ID NO: 2073390 - DNA, 25 bp, Homo sapien
ggcccagataggcacccagggtgat

SEQ ID NO: 2073391 - DNA, 25 bp, Homo sapien
cacccagggtgatgcaagctcccac

SEQ ID NO: 2073392 - DNA, 25 bp, Homo sapien
gcacccagggtgatgcaagctccca

SEQ ID NO: 2073393 - DNA, 25 bp, Homo sapien
ttgtggcccagataggcacccaggg

SEQ ID NO: 2073394 - DNA, 25 bp, Homo sapien
gagaaatcaaacagaggccgcatgc

SEQ ID NO: 2073395 - DNA, 25 bp, Homo sapien
agggccaaactgagcagagtcttca

SEQ ID NO: 2073396 - DNA, 25 bp, Homo sapien
catgctggggccgtacagttccaca

SEQ ID NO: 2073397 - DNA, 25 bp, Homo sapien
gtcttcagagacagccaggagaaat

SEQ ID NO: 2073398 - DNA, 25 bp, Homo sapien
tattgagaccctctttacgtgccag

SEQ ID NO: 2073399 - DNA, 25 bp, Homo sapien
gatgaccgtcacactcctcgattga

SEQ ID NO: 2073400 - DNA, 25 bp, Homo sapien
caattttagctagcatgcccatcca

SEQ ID NO: 2073401 - DNA, 25 bp, Homo sapien
cattgagtggaacagtatagacagc

SEQ ID NO: 2073402 - DNA, 25 bp, Homo sapien
gggaccagggattctctttgtctcc

SEQ ID NO: 2073403 - DNA, 25 bp, Homo sapien
ctgtagcagtgggaccagggattct

SEQ ID NO: 2073404 - DNA, 25 bp, Homo sapien
ttgggaggggctccaacagtgcaca

SEQ ID NO: 2073405 - DNA, 25 bp, Homo sapien
catgaccctggacatcgctgttggg

SEQ ID NO: 2073406 - DNA, 25 bp, Homo sapien
catcatgaagggcttgccttgagcc

SEQ ID NO: 2073407 - DNA, 25 bp, Homo sapien
tcatgaagggcttgccttgagccat

SEQ ID NO: 2073408 - DNA, 25 bp, Homo sapien
gcttccagacatcatgaagggcttg

SEQ ID NO: 2073409 - DNA, 25 bp, Homo sapien
cagacatcatgaagggcttgccttg

SEQ ID NO: 2073410 - DNA, 25 bp, Homo sapien
tacactctagagagaggtaatgcct

SEQ ID NO: 2073411 - DNA, 25 bp, Homo sapien
catgcagacgttatacaatcgaagg

SEQ ID NO: 2073412 - DNA, 25 bp, Homo sapien
tttgagctgactatgcatgcagacg

SEQ ID NO: 2073413 - DNA, 25 bp, Homo sapien
taaactaaatcaatgggtgccgcca

SEQ ID NO: 2073414 - DNA, 25 bp, Homo sapien
aaagtattaggatcacgcctggtgg

SEQ ID NO: 2073415 - DNA, 25 bp, Homo sapien
taagaaatttttgatccccaggcat

SEQ ID NO: 2073416 - DNA, 25 bp, Homo sapien
gcaatggaacacatcctttggaggg

SEQ ID NO: 2073417 - DNA, 25 bp, Homo sapien
tgaaacaccccgagaaactgtgaaa

SEQ ID NO: 2073418 - DNA, 25 bp, Homo sapien
tctggatctgagaaaacttttacac

SEQ ID NO: 2073419 - DNA, 25 bp, Homo sapien
caatctggatctgagaaaactttta

SEQ ID NO: 2073420 - DNA, 25 bp, Homo sapien
gtttcagagtgatgagggagtttcc

SEQ ID NO: 2073421 - DNA, 25 bp, Homo sapien
tccaatctggatctgagaaaacttt

SEQ ID NO: 2073422 - DNA, 25 bp, Homo sapien
gaaaaagaaactcagctcaagacat

SEQ ID NO: 2073423 - DNA, 25 bp, Homo sapien
gaaaagctccaagtccatctatact

SEQ ID NO: 2073424 - DNA, 25 bp, Homo sapien
caaacatatacagagttcggcgtag

SEQ ID NO: 2073425 - DNA, 25 bp, Homo sapien
gagttcggcgtagcaggaaaaagaa

SEQ ID NO: 2073426 - DNA, 25 bp, Homo sapien
ggctcgggaggcaccactcggtagg

SEQ ID NO: 2073427 - DNA, 25 bp, Homo sapien
ggaggcaccactcggtaggaagacc

SEQ ID NO: 2073428 - DNA, 25 bp, Homo sapien
cacaagctgtaccccagaggctcgg

SEQ ID NO: 2073429 - DNA, 25 bp, Homo sapien
ggcaccactcggtaggaagaccctc

SEQ ID NO: 2073430 - DNA, 25 bp, Homo sapien
taccagggacttcactaattagcat

SEQ ID NO: 2073431 - DNA, 25 bp, Homo sapien
attagcatagtctctcatagcctgg

SEQ ID NO: 2073432 - DNA, 25 bp, Homo sapien
tctgccaaggcagaaataacctggt

SEQ ID NO: 2073433 - DNA, 25 bp, Homo sapien
tactttttacctggtggccgagtga

SEQ ID NO: 2073434 - DNA, 25 bp, Homo sapien
gactgcccacgcgtacgcatttctt

SEQ ID NO: 2073435 - DNA, 25 bp, Homo sapien
ttgcaaagatttccccgcacagtgg

SEQ ID NO: 2073436 - DNA, 25 bp, Homo sapien
tcttagtttctgctggccaactcga

SEQ ID NO: 2073437 - DNA, 25 bp, Homo sapien
gccaactcgaatcgttttcagcggg

SEQ ID NO: 2073438 - DNA, 25 bp, Homo sapien
tggacagcacgcatatcctgactgg

SEQ ID NO: 2073439 - DNA, 25 bp, Homo sapien
cttggaagacgagaggatttggact

SEQ ID NO: 2073440 - DNA, 25 bp, Homo sapien
tggccaagcccatacgatatcatga

SEQ ID NO: 2073441 - DNA, 25 bp, Homo sapien
taaggcgaggagtcaagccagctcc

SEQ ID NO: 2073442 - DNA, 25 bp, Homo sapien
cgtgcccagcgcgttttctttaagg

SEQ ID NO: 2073443 - DNA, 25 bp, Homo sapien
gccggtggccgtcatcaaagtaatt

SEQ ID NO: 2073444 - DNA, 25 bp, Homo sapien
gcttaaaacagtgacgggcacatgg

SEQ ID NO: 2073445 - DNA, 25 bp, Homo sapien
gaagcctaacttggtgactaacagc

SEQ ID NO: 2073446 - DNA, 25 bp, Homo sapien
ggtatattctagacatgactgagct

SEQ ID NO: 2073447 - DNA, 25 bp, Homo sapien
ggctcaccgttaaaatacacacaag

SEQ ID NO: 2073448 - DNA, 25 bp, Homo sapien
caccgactctacctgaacattttgg

SEQ ID NO: 2073449 - DNA, 25 bp, Homo sapien
tatagtcatcagacctggagcagaa

SEQ ID NO: 2073450 - DNA, 25 bp, Homo sapien
tgtcaatttacaacctagtctaatg

SEQ ID NO: 2073451 - DNA, 25 bp, Homo sapien
ggatggctctcctgtcaatttacaa

SEQ ID NO: 2073452 - DNA, 25 bp, Homo sapien
tgttaaacaccaactcatacttgtc

SEQ ID NO: 2073453 - DNA, 25 bp, Homo sapien
tctgagacccaagtaaaaaatggta

SEQ ID NO: 2073454 - DNA, 25 bp, Homo sapien
tctgacaggaggtaccaaatgtgct

SEQ ID NO: 2073455 - DNA, 25 bp, Homo sapien
ggaagagttcactattcagccatac

SEQ ID NO: 2073456 - DNA, 25 bp, Homo sapien
aagtctttagtggattgctgagtcc

SEQ ID NO: 2073457 - DNA, 25 bp, Homo sapien
aattcacttctaccaaggatgcctc

SEQ ID NO: 2073458 - DNA, 25 bp, Homo sapien
gggctgctgagcagcactgcttccc

SEQ ID NO: 2073459 - DNA, 25 bp, Homo sapien
ggggctgctgagcagcactgcttcc

SEQ ID NO: 2073460 - DNA, 25 bp, Homo sapien
ctatgggggctgctgagcagcactg

SEQ ID NO: 2073461 - DNA, 25 bp, Homo sapien
tgggggctgctgagcagcactgctt

SEQ ID NO: 2073462 - DNA, 25 bp, Homo sapien
agaactctgcctcggagaagcaggg

SEQ ID NO: 2073463 - DNA, 25 bp, Homo sapien
cagccagctgagtactgcccttggt

SEQ ID NO: 2073464 - DNA, 25 bp, Homo sapien
ccttggtgagaactctgcctcggag

SEQ ID NO: 2073465 - DNA, 25 bp, Homo sapien
caacgtgaatgcttcgctgccagcc

SEQ ID NO: 2073466 - DNA, 25 bp, Homo sapien
cacagcctgcacaatcaggagattc

SEQ ID NO: 2073467 - DNA, 25 bp, Homo sapien
agcctgcacaatcaggagattcacc

SEQ ID NO: 2073468 - DNA, 25 bp, Homo sapien
accagcccacggtttgaaacagagc

SEQ ID NO: 2073469 - DNA, 25 bp, Homo sapien
ccagcccacggtttgaaacagagcc

SEQ ID NO: 2073470 - DNA, 25 bp, Homo sapien
tctgcaaactgttgaagccacggta

SEQ ID NO: 2073471 - DNA, 25 bp, Homo sapien
gaaatacttgaagggttctgcaaac

SEQ ID NO: 2073472 - DNA, 25 bp, Homo sapien
aagccacggtactgcctggagcact

SEQ ID NO: 2073473 - DNA, 25 bp, Homo sapien
cctgctgtaagacagactgtagccc

SEQ ID NO: 2073474 - DNA, 25 bp, Homo sapien
caagaatttaccctcccattaacag

SEQ ID NO: 2073475 - DNA, 25 bp, Homo sapien
aatttagccagtaccctacacagac

SEQ ID NO: 2073476 - DNA, 25 bp, Homo sapien
taccaagacaaaggctatgtaaact

SEQ ID NO: 2073477 - DNA, 25 bp, Homo sapien
aaattaaggtcaaagcgctctccaa

SEQ ID NO: 2073478 - DNA, 25 bp, Homo sapien
cttgaaagcactgatggcagctggc

SEQ ID NO: 2073479 - DNA, 25 bp, Homo sapien
tgcatcagctccaacctggtcaaga

SEQ ID NO: 2073480 - DNA, 25 bp, Homo sapien
gctccttggaatgacatcaccaggg

SEQ ID NO: 2073481 - DNA, 25 bp, Homo sapien
tggtcaagacctacatcatcaagac

SEQ ID NO: 2073482 - DNA, 25 bp, Homo sapien
ttccctctaaccatgaatatgcatc

SEQ ID NO: 2073483 - DNA, 25 bp, Homo sapien
tagcatctgaactccatcttcctaa

SEQ ID NO: 2073484 - DNA, 25 bp, Homo sapien
ctgcatctcatcatcagaagtagcc

SEQ ID NO: 2073485 - DNA, 25 bp, Homo sapien
gaatatgcatcaatcagaaattcca

SEQ ID NO: 2073486 - DNA, 25 bp, Homo sapien
agaggacggtgtctgtgaggcgcca

SEQ ID NO: 2073487 - DNA, 25 bp, Homo sapien
ctcagaggacggtgtctgtgaggcg

SEQ ID NO: 2073488 - DNA, 25 bp, Homo sapien
gtgaggcgccagtcactcctacagt

SEQ ID NO: 2073489 - DNA, 25 bp, Homo sapien
ggcgccagtcactcctacagttgac

SEQ ID NO: 2073490 - DNA, 25 bp, Homo sapien
caagccccttacgaaaacgtctgag

SEQ ID NO: 2073491 - DNA, 25 bp, Homo sapien
gactggcgacctgcttgaaaatctg

SEQ ID NO: 2073492 - DNA, 25 bp, Homo sapien
tcaatcacgcttcaggaaagtgggt

SEQ ID NO: 2073493 - DNA, 25 bp, Homo sapien
tatgtgaggcccactttgccaggac

SEQ ID NO: 2073494 - DNA, 25 bp, Homo sapien
ggctggttaattactccatgggtag

SEQ ID NO: 2073495 - DNA, 25 bp, Homo sapien
aaagctcctgcacgagtgacagaaa

SEQ ID NO: 2073496 - DNA, 25 bp, Homo sapien
ttaccctgctcacatatgaactgac

SEQ ID NO: 2073497 - DNA, 25 bp, Homo sapien
gagaaggcatctgccctctatccag

SEQ ID NO: 2073498 - DNA, 25 bp, Homo sapien
ccagaacccaactctagaaagcgat

SEQ ID NO: 2073499 - DNA, 25 bp, Homo sapien
tattgtgatggtcatattattgccc

SEQ ID NO: 2073500 - DNA, 25 bp, Homo sapien
tagaggcatcgtcccttggcaagat

SEQ ID NO: 2073501 - DNA, 25 bp, Homo sapien
gtgcctggcctcctaaggctcattt

SEQ ID NO: 2073502 - DNA, 25 bp, Homo sapien
caagtctattggtaggaacagccca

SEQ ID NO: 2073503 - DNA, 25 bp, Homo sapien
gaacagcccaggaaaaatgcccacc

SEQ ID NO: 2073504 - DNA, 25 bp, Homo sapien
tgtctgacaccagcaagttctgatc

SEQ ID NO: 2073505 - DNA, 25 bp, Homo sapien
tggtgtgccacctaactaacatgaa

SEQ ID NO: 2073506 - DNA, 25 bp, Homo sapien
attgtcttccaagtgtgcctccgaa

SEQ ID NO: 2073507 - DNA, 25 bp, Homo sapien
caagggcaagtgagctcaggaacaa

SEQ ID NO: 2073508 - DNA, 25 bp, Homo sapien
caagcattgatgagggcctactatg

SEQ ID NO: 2073509 - DNA, 25 bp, Homo sapien
gcagcactttttaagcgtaagcaga

SEQ ID NO: 2073510 - DNA, 25 bp, Homo sapien
gataaagactaaaagccataaggag

SEQ ID NO: 2073511 - DNA, 25 bp, Homo sapien
gaaaaatatctgaggttgaactgcc

SEQ ID NO: 2073512 - DNA, 25 bp, Homo sapien
atcactcaatggaaaggttagacag

SEQ ID NO: 2073513 - DNA, 25 bp, Homo sapien
ccatgagggacagtgataaagggaa

SEQ ID NO: 2073514 - DNA, 25 bp, Homo sapien
tcttggcctactcctgttcagctaa

SEQ ID NO: 2073515 - DNA, 25 bp, Homo sapien
taacacacatgatctgccagaagca

SEQ ID NO: 2073516 - DNA, 25 bp, Homo sapien
cacatctctatgaaattgacagctc

SEQ ID NO: 2073517 - DNA, 25 bp, Homo sapien
tctccggtgttcctctatggcaatg

SEQ ID NO: 2073518 - DNA, 25 bp, Homo sapien
gaacttgacgcaacttagggcaggc

SEQ ID NO: 2073519 - DNA, 25 bp, Homo sapien
ccacagtttgaggaacacaatgaca

SEQ ID NO: 2073520 - DNA, 25 bp, Homo sapien
tattgtcccataatgtcaacgccct

SEQ ID NO: 2073521 - DNA, 25 bp, Homo sapien
ggaagaaaccagactgctccagtca

SEQ ID NO: 2073522 - DNA, 25 bp, Homo sapien
tatggaggccgagagaggcccattt

SEQ ID NO: 2073523 - DNA, 25 bp, Homo sapien
cccatccaaggagtaaacaggcggg

SEQ ID NO: 2073524 - DNA, 25 bp, Homo sapien
tgggcgtggcctcgatcaatcacct

SEQ ID NO: 2073525 - DNA, 25 bp, Homo sapien
tgcacgtggttttgaggcgcactcc

SEQ ID NO: 2073526 - DNA, 25 bp, Homo sapien
taaagttcgttgacctcacaggcgg

SEQ ID NO: 2073527 - DNA, 25 bp, Homo sapien
gcccagtagaggatgcaatcacttt

SEQ ID NO: 2073528 - DNA, 25 bp, Homo sapien
cgtaatggagggcaacacaacatgt

SEQ ID NO: 2073529 - DNA, 25 bp, Homo sapien
tcagatgatcttgctaaggcctgtg

SEQ ID NO: 2073530 - DNA, 25 bp, Homo sapien
cacgtggtgagcaagatttggccca

SEQ ID NO: 2073531 - DNA, 25 bp, Homo sapien
tgtctgtagtacgtgctgcattctg

SEQ ID NO: 2073532 - DNA, 25 bp, Homo sapien
acattccccagcgtcattaacaggg

SEQ ID NO: 2073533 - DNA, 25 bp, Homo sapien
caggccatagctttctaactcccgg

SEQ ID NO: 2073534 - DNA, 25 bp, Homo sapien
tcagggaacacatgatatagagccc

SEQ ID NO: 2073535 - DNA, 25 bp, Homo sapien
tgccatgaggcagtcaaaagacctg

SEQ ID NO: 2073536 - DNA, 25 bp, Homo sapien
caaggagggcattctcaccgttctc

SEQ ID NO: 2073537 - DNA, 25 bp, Homo sapien
gctgggaagcacacattattgagga

SEQ ID NO: 2073538 - DNA, 25 bp, Homo sapien
cctttgtcaatatgagagctctaga

SEQ ID NO: 2073539 - DNA, 25 bp, Homo sapien
tgagaaagttactgcctataaggca

SEQ ID NO: 2073540 - DNA, 25 bp, Homo sapien
gcccgattgaatttgaagctctaaa

SEQ ID NO: 2073541 - DNA, 25 bp, Homo sapien
tagcttgcccaacttagcccgattg

SEQ ID NO: 2073542 - DNA, 25 bp, Homo sapien
tagggtgggctctaacccaatagga

SEQ ID NO: 2073543 - DNA, 25 bp, Homo sapien
gcttggccctagctgacagaggctc

SEQ ID NO: 2073544 - DNA, 25 bp, Homo sapien
ggaccgatggcacttccaggagctg

SEQ ID NO: 2073545 - DNA, 25 bp, Homo sapien
cacagagggcaagctaaggaccgat

SEQ ID NO: 2073546 - DNA, 25 bp, Homo sapien
gatgttatcagaacaaaacctggcc

SEQ ID NO: 2073547 - DNA, 25 bp, Homo sapien
caaactctgaggattgatagccacc

SEQ ID NO: 2073548 - DNA, 25 bp, Homo sapien
gggcattggcctggacctcaaagta

SEQ ID NO: 2073549 - DNA, 25 bp, Homo sapien
gaatgttcacattgagccctgcagc

SEQ ID NO: 2073550 - DNA, 25 bp, Homo sapien
cacgcagggcttcgctgaggtctat

SEQ ID NO: 2073551 - DNA, 25 bp, Homo sapien
tcatatggatgaacacgcaggaagc

SEQ ID NO: 2073552 - DNA, 25 bp, Homo sapien
tatcagacgtctagactcagccagg

SEQ ID NO: 2073553 - DNA, 25 bp, Homo sapien
gcgtgtaagtgtcccaagcatggcc

SEQ ID NO: 2073554 - DNA, 25 bp, Homo sapien
cagtgccttaatccctaggaataaa

SEQ ID NO: 2073555 - DNA, 25 bp, Homo sapien
caaccaggccagaacagtgccttaa

SEQ ID NO: 2073556 - DNA, 25 bp, Homo sapien
gtcaggttcgttactaatgaggctc

SEQ ID NO: 2073557 - DNA, 25 bp, Homo sapien
tgaggctctgcgttatgaaacaaac

SEQ ID NO: 2073558 - DNA, 25 bp, Homo sapien
tagtagcataccacgggaactcagg

SEQ ID NO: 2073559 - DNA, 25 bp, Homo sapien
gagctgacctatccccagacatgtg

SEQ ID NO: 2073560 - DNA, 25 bp, Homo sapien
ctcagagtttcaggcagtccagtgt

SEQ ID NO: 2073561 - DNA, 25 bp, Homo sapien
gattgggtacctttgctccgaccag

SEQ ID NO: 2073562 - DNA, 25 bp, Homo sapien
tatgacatggaaagttcggtgtgcc

SEQ ID NO: 2073563 - DNA, 25 bp, Homo sapien
ggctcaattaatcctaccacatcgg

SEQ ID NO: 2073564 - DNA, 25 bp, Homo sapien
cacctttctctgttgagggacgtgg

SEQ ID NO: 2073565 - DNA, 25 bp, Homo sapien
tcatgagacttttgtgggacccacc

SEQ ID NO: 2073566 - DNA, 25 bp, Homo sapien
gaatcactgttcatcctgggaaaaa

SEQ ID NO: 2073567 - DNA, 25 bp, Homo sapien
taactgttaacgtctatggagggca

SEQ ID NO: 2073568 - DNA, 25 bp, Homo sapien
taccgataggcagtacattccaaaa

SEQ ID NO: 2073569 - DNA, 25 bp, Homo sapien
gaagaagctcttaacctaccgatag

SEQ ID NO: 2073570 - DNA, 25 bp, Homo sapien
cacaaaggacaccatggggtgcccc

SEQ ID NO: 2073571 - DNA, 25 bp, Homo sapien
cccaccctactcctcattagaggga

SEQ ID NO: 2073572 - DNA, 25 bp, Homo sapien
tttagggcacaaaggacaccatggg

SEQ ID NO: 2073573 - DNA, 25 bp, Homo sapien
ggtttagggcacaaaggacaccatg

SEQ ID NO: 2073574 - DNA, 25 bp, Homo sapien
gctttggagtgagacatacctgtga

SEQ ID NO: 2073575 - DNA, 25 bp, Homo sapien
taagatcactaaacactggctggtg

SEQ ID NO: 2073576 - DNA, 25 bp, Homo sapien
tctaaaagtcacctggaagcccaaa

SEQ ID NO: 2073577 - DNA, 25 bp, Homo sapien
tactcctgtgaacatgccagaatgg

SEQ ID NO: 2073578 - DNA, 25 bp, Homo sapien
tctttggtaatggatgaaaccatga

SEQ ID NO: 2073579 - DNA, 25 bp, Homo sapien
accatgaagtttggttcagaggaag

SEQ ID NO: 2073580 - DNA, 25 bp, Homo sapien
gactcaactgctccccgaggattct

SEQ ID NO: 2073581 - DNA, 25 bp, Homo sapien
cacattcaaatgtgagactcaactg

SEQ ID NO: 2073582 - DNA, 25 bp, Homo sapien
gagcagagacctcacaaccaggctc

SEQ ID NO: 2073583 - DNA, 25 bp, Homo sapien
tcaggcatggaaggtttcagacttg

SEQ ID NO: 2073584 - DNA, 25 bp, Homo sapien
agggagcagagacctcacaaccagg

SEQ ID NO: 2073585 - DNA, 25 bp, Homo sapien
caggcatggaaggtttcagacttgc

SEQ ID NO: 2073586 - DNA, 25 bp, Homo sapien
ctgtccttcagggccgcccacagct

SEQ ID NO: 2073587 - DNA, 25 bp, Homo sapien
tccagcagtttgtgtgtactcagct

SEQ ID NO: 2073588 - DNA, 25 bp, Homo sapien
ctggaataaggattctttctaaacg

SEQ ID NO: 2073589 - DNA, 25 bp, Homo sapien
gggcccgttgttccctgctgaagac

SEQ ID NO: 2073590 - DNA, 25 bp, Homo sapien
gaacttctcgcccatccagcagttt

SEQ ID NO: 2073591 - DNA, 25 bp, Homo sapien
cagaatcctgagtttggtttcacaa

SEQ ID NO: 2073592 - DNA, 25 bp, Homo sapien
gaatgcacgcccttagttggagctg

SEQ ID NO: 2073593 - DNA, 25 bp, Homo sapien
cagccatgtggtacggttcttacac

SEQ ID NO: 2073594 - DNA, 25 bp, Homo sapien
ggtgcaccgtttccatgcagggcaa

SEQ ID NO: 2073595 - DNA, 25 bp, Homo sapien
gataaactggagtgcggagaaactg

SEQ ID NO: 2073596 - DNA, 25 bp, Homo sapien
gaagagaaactgttgagtccaagga

SEQ ID NO: 2073597 - DNA, 25 bp, Homo sapien
caggaagtccagatagaaagggtca

SEQ ID NO: 2073598 - DNA, 25 bp, Homo sapien
actggagcaggtgaatgaattcccc

SEQ ID NO: 2073599 - DNA, 25 bp, Homo sapien
catgtttttcacagcaaaagagaat

SEQ ID NO: 2073600 - DNA, 25 bp, Homo sapien
tttttcacagcaaaagagaattcat

SEQ ID NO: 2073601 - DNA, 25 bp, Homo sapien
tttcacagcaaaagagaattcattc

SEQ ID NO: 2073602 - DNA, 25 bp, Homo sapien
tcccttagaacatgtttttcacagc

SEQ ID NO: 2073603 - DNA, 25 bp, Homo sapien
tttttatctcgagctaaagaaaaca

SEQ ID NO: 2073604 - DNA, 25 bp, Homo sapien
tttatctcgagctaaagaaaacacc

SEQ ID NO: 2073605 - DNA, 25 bp, Homo sapien
actggtttttatctcgagctaaaga

SEQ ID NO: 2073606 - DNA, 25 bp, Homo sapien
ctggtttttatctcgagctaaagaa

SEQ ID NO: 2073607 - DNA, 25 bp, Homo sapien
tctgcaaggcttaaataagtacttc

SEQ ID NO: 2073608 - DNA, 25 bp, Homo sapien
ctgtgtgggccgaatgtttctttcc

SEQ ID NO: 2073609 - DNA, 25 bp, Homo sapien
gagcccttgctttggagagatcacc

SEQ ID NO: 2073610 - DNA, 25 bp, Homo sapien
caaagctcaggataaatgccatggc

SEQ ID NO: 2073611 - DNA, 25 bp, Homo sapien
tccacagaagagtgataggtctcaa

SEQ ID NO: 2073612 - DNA, 25 bp, Homo sapien
cagaagagtgataggtctcaagaac

SEQ ID NO: 2073613 - DNA, 25 bp, Homo sapien
gtgataggtctcaagaacaaacctt

SEQ ID NO: 2073614 - DNA, 25 bp, Homo sapien
taggtctcaagaacaaaccttccta

SEQ ID NO: 2073615 - DNA, 25 bp, Homo sapien
gccaacccaactggctctttgaagg

SEQ ID NO: 2073616 - DNA, 25 bp, Homo sapien
acaaaagcctgacttcaacacccgg

SEQ ID NO: 2073617 - DNA, 25 bp, Homo sapien
gttttccacgaatagaaagaacaca

SEQ ID NO: 2073618 - DNA, 25 bp, Homo sapien
tccacgaatagaaagaacacagcca

SEQ ID NO: 2073619 - DNA, 25 bp, Homo sapien
ggtttgcatgtttctaacgacacag

SEQ ID NO: 2073620 - DNA, 25 bp, Homo sapien
tactggaaggattcatcacaaactc

SEQ ID NO: 2073621 - DNA, 25 bp, Homo sapien
gaaacagttagaagattcccatggg

SEQ ID NO: 2073622 - DNA, 25 bp, Homo sapien
ccaggtaagacctaacgaatgactt

SEQ ID NO: 2073623 - DNA, 25 bp, Homo sapien
ctttatacagcgcactcacacgtac

SEQ ID NO: 2073624 - DNA, 25 bp, Homo sapien
ccagactttatacagcgcactcaca

SEQ ID NO: 2073625 - DNA, 25 bp, Homo sapien
ctaattgtggttccagactttatac

SEQ ID NO: 2073626 - DNA, 25 bp, Homo sapien
tgtggttccagactttatacagcgc

SEQ ID NO: 2073627 - DNA, 25 bp, Homo sapien
gaaagaaccctcttcaccaatgtct

SEQ ID NO: 2073628 - DNA, 25 bp, Homo sapien
gacagcaaataaaccgtcgttgaag

SEQ ID NO: 2073629 - DNA, 25 bp, Homo sapien
gacacatcgtactgaggaatggctt

SEQ ID NO: 2073630 - DNA, 25 bp, Homo sapien
gaaatgggttcatgttggcaccacc

SEQ ID NO: 2073631 - DNA, 25 bp, Homo sapien
tgcaagatgtgcaccaagacgacct

SEQ ID NO: 2073632 - DNA, 25 bp, Homo sapien
tatctggaatactcacatatggtgc

SEQ ID NO: 2073633 - DNA, 25 bp, Homo sapien
cattcctagaagacgggacagcagg

SEQ ID NO: 2073634 - DNA, 25 bp, Homo sapien
ggctctgagcttcatgcaacgtgca

SEQ ID NO: 2073635 - DNA, 25 bp, Homo sapien
gtatccctgcatttacgaaacccaa

SEQ ID NO: 2073636 - DNA, 25 bp, Homo sapien
atgcactatgcttggagctggcaga

SEQ ID NO: 2073637 - DNA, 25 bp, Homo sapien
gaaacgatgccagacttctcggtgc

SEQ ID NO: 2073638 - DNA, 25 bp, Homo sapien
tgctcctgggatgattctctacaaa

SEQ ID NO: 2073639 - DNA, 25 bp, Homo sapien
tgtgaccacatgcttgtctcaccct

SEQ ID NO: 2073640 - DNA, 25 bp, Homo sapien
gactacctgggttggatcccttgcc

SEQ ID NO: 2073641 - DNA, 25 bp, Homo sapien
tagttgactcccaacagaagaaaac

SEQ ID NO: 2073642 - DNA, 25 bp, Homo sapien
tgacaggtgggatccaccaaccttg

SEQ ID NO: 2073643 - DNA, 25 bp, Homo sapien
tcttggctcgcagactgccaaaggg

SEQ ID NO: 2073644 - DNA, 25 bp, Homo sapien
cagaagtcttggctcgcagactgcc

SEQ ID NO: 2073645 - DNA, 25 bp, Homo sapien
gactgccaaagggaaagccgctgct

SEQ ID NO: 2073646 - DNA, 25 bp, Homo sapien
tgccaaagggaaagccgctgctcat

SEQ ID NO: 2073647 - DNA, 25 bp, Homo sapien
caggcgtggcatcggctgatggggt

SEQ ID NO: 2073648 - DNA, 25 bp, Homo sapien
gcgtggcatcggctgatggggtgag

SEQ ID NO: 2073649 - DNA, 25 bp, Homo sapien
ggcatcggctgatggggtgagccat

SEQ ID NO: 2073650 - DNA, 25 bp, Homo sapien
tggcatcggctgatggggtgagcca

SEQ ID NO: 2073651 - DNA, 25 bp, Homo sapien
caaggagctcagattctggcccatg

SEQ ID NO: 2073652 - DNA, 25 bp, Homo sapien
ctgaatgccaaggagctcagattct

SEQ ID NO: 2073653 - DNA, 25 bp, Homo sapien
gagctcagattctggcccatgggcc

SEQ ID NO: 2073654 - DNA, 25 bp, Homo sapien
ggagctcagattctggcccatgggc

SEQ ID NO: 2073655 - DNA, 25 bp, Homo sapien
gatgccctttaagtattccgtacaa

SEQ ID NO: 2073656 - DNA, 25 bp, Homo sapien
tttgccataacaatgagcccactct

SEQ ID NO: 2073657 - DNA, 25 bp, Homo sapien
cagagatgcaagtgaatcctttgcc

SEQ ID NO: 2073658 - DNA, 25 bp, Homo sapien
gttgtgccaaacaggtagagaggtt

SEQ ID NO: 2073659 - DNA, 25 bp, Homo sapien
cctggcaatgggaacataatgcaca

SEQ ID NO: 2073660 - DNA, 25 bp, Homo sapien
gggcctggcaatgggaacataatgc

SEQ ID NO: 2073661 - DNA, 25 bp, Homo sapien
gagggcctggcaatgggaacataat

SEQ ID NO: 2073662 - DNA, 25 bp, Homo sapien
agagggcctggcaatgggaacataa

SEQ ID NO: 2073663 - DNA, 25 bp, Homo sapien
gcaagtctacagattacctttggga

SEQ ID NO: 2073664 - DNA, 25 bp, Homo sapien
tagcatttaggaccacttagggcaa

SEQ ID NO: 2073665 - DNA, 25 bp, Homo sapien
tgtctaaggcttactgggcatttcc

SEQ ID NO: 2073666 - DNA, 25 bp, Homo sapien
cagtcctttgattctacacgtgcag

SEQ ID NO: 2073667 - DNA, 25 bp, Homo sapien
tcatgtaagactggcaatcacatct

SEQ ID NO: 2073668 - DNA, 25 bp, Homo sapien
aataactgtcagtccttggatgatt

SEQ ID NO: 2073669 - DNA, 25 bp, Homo sapien
tctgtggaataactgtcagtccttg

SEQ ID NO: 2073670 - DNA, 25 bp, Homo sapien
atgtaagactggcaatcacatctgt

SEQ ID NO: 2073671 - DNA, 25 bp, Homo sapien
taagcagccaatcctcagacactag

SEQ ID NO: 2073672 - DNA, 25 bp, Homo sapien
cctggtatgctgtgtggcctgatga

SEQ ID NO: 2073673 - DNA, 25 bp, Homo sapien
cagaatgcgcaaaagaaagccatgt

SEQ ID NO: 2073674 - DNA, 25 bp, Homo sapien
tacactggcatgagaatggtattgc

SEQ ID NO: 2073675 - DNA, 25 bp, Homo sapien
tgttgaccacaaagataggtctact

SEQ ID NO: 2073676 - DNA, 25 bp, Homo sapien
tatatagtcaccatctatgcattgt

SEQ ID NO: 2073677 - DNA, 25 bp, Homo sapien
atattttaccatcaaccatctgtgc

SEQ ID NO: 2073678 - DNA, 25 bp, Homo sapien
tagcctctacatttatcaacctcag

SEQ ID NO: 2073679 - DNA, 25 bp, Homo sapien
gaacatggcacacactggagattcc

SEQ ID NO: 2073680 - DNA, 25 bp, Homo sapien
gacagataccagttaccaccttgga

SEQ ID NO: 2073681 - DNA, 25 bp, Homo sapien
tgtcactgacaaggtagcaaagcca

SEQ ID NO: 2073682 - DNA, 25 bp, Homo sapien
gaaagctctatctagcacagtacga

SEQ ID NO: 2073683 - DNA, 25 bp, Homo sapien
tattcttctaatcgggttgttctcc

SEQ ID NO: 2073684 - DNA, 25 bp, Homo sapien
ccgattgatgatgcccttggtcttc

SEQ ID NO: 2073685 - DNA, 25 bp, Homo sapien
tctgtggagtctattcttctaatcg

SEQ ID NO: 2073686 - DNA, 25 bp, Homo sapien
aaaattttaccgattgatgatgccc

SEQ ID NO: 2073687 - DNA, 25 bp, Homo sapien
gggatgcagactgtcaagacccaac

SEQ ID NO: 2073688 - DNA, 25 bp, Homo sapien
ggagcttgtttgggatgcagactgt

SEQ ID NO: 2073689 - DNA, 25 bp, Homo sapien
ctggtatctggttcataagcagtcc

SEQ ID NO: 2073690 - DNA, 25 bp, Homo sapien
taagcagtccctgaaacctccctcc

SEQ ID NO: 2073691 - DNA, 25 bp, Homo sapien
gtatctggttcataagcagtccctg

SEQ ID NO: 2073692 - DNA, 25 bp, Homo sapien
ataagcagtccctgaaacctccctc

SEQ ID NO: 2073693 - DNA, 25 bp, Homo sapien
tgaaggggtaccatttaccaccaca

SEQ ID NO: 2073694 - DNA, 25 bp, Homo sapien
ctcaagccaggaaacggtggtcctg

SEQ ID NO: 2073695 - DNA, 25 bp, Homo sapien
caaacgctagatctttggatctcca

SEQ ID NO: 2073696 - DNA, 25 bp, Homo sapien
catcctactggattacaaacgctag

SEQ ID NO: 2073697 - DNA, 25 bp, Homo sapien
caggcgttatcggtcaggttgggag

SEQ ID NO: 2073698 - DNA, 25 bp, Homo sapien
gttgggagtgaacgctttgtccaga

SEQ ID NO: 2073699 - DNA, 25 bp, Homo sapien
cgccgggaagcaacaactctgattt

SEQ ID NO: 2073700 - DNA, 25 bp, Homo sapien
tctgattttatttcgccggctccac

SEQ ID NO: 2073701 - DNA, 25 bp, Homo sapien
tgaccccaccgaactcaaagaaggc

SEQ ID NO: 2073702 - DNA, 25 bp, Homo sapien
ggtactcagtcatccacagggcgat

SEQ ID NO: 2073703 - DNA, 25 bp, Homo sapien
agctggctggacatctcggcgaagt

SEQ ID NO: 2073704 - DNA, 25 bp, Homo sapien
gcggtgaagggcgtcaggtgcagct

SEQ ID NO: 2073705 - DNA, 25 bp, Homo sapien
gagggtcaggtggaccacaggtggc

SEQ ID NO: 2073706 - DNA, 25 bp, Homo sapien
agcggcgaggtcctggcgaccgggt

SEQ ID NO: 2073707 - DNA, 25 bp, Homo sapien
gggaggagaagatgcccggtgcggg

SEQ ID NO: 2073708 - DNA, 25 bp, Homo sapien
cgggtcccgggatgcggctggatgg

SEQ ID NO: 2073709 - DNA, 25 bp, Homo sapien
gatggggcgtgtgcccgggctggga

SEQ ID NO: 2073710 - DNA, 25 bp, Homo sapien
catcactatctcccggttatcgtac

SEQ ID NO: 2073711 - DNA, 25 bp, Homo sapien
gacagcttataatggatgtacttca

SEQ ID NO: 2073712 - DNA, 25 bp, Homo sapien
gcccctctgcgacagcttataatgg

SEQ ID NO: 2073713 - DNA, 25 bp, Homo sapien
tcgtagcccctctgcgacagcttat

SEQ ID NO: 2073714 - DNA, 25 bp, Homo sapien
ttaatatcagtctacttcctctgtg

SEQ ID NO: 2073715 - DNA, 25 bp, Homo sapien
gggtgtcttcaatcacgcggaacac

SEQ ID NO: 2073716 - DNA, 25 bp, Homo sapien
aaagaagaggagttataatccagct

SEQ ID NO: 2073717 - DNA, 25 bp, Homo sapien
catgagatgcaggaaatttttattc

SEQ ID NO: 2073718 - DNA, 25 bp, Homo sapien
gaaattaaatttactcgaatgcact

SEQ ID NO: 2073719 - DNA, 25 bp, Homo sapien
tcaaaggtttccattgaaagttaca

SEQ ID NO: 2073720 - DNA, 25 bp, Homo sapien
aatcaggtgcgtttccctgtacaca

SEQ ID NO: 2073721 - DNA, 25 bp, Homo sapien
catacacactacaagtaacacggct

SEQ ID NO: 2073722 - DNA, 25 bp, Homo sapien
tggataaatgaaggcaggacgcgcc

SEQ ID NO: 2073723 - DNA, 25 bp, Homo sapien
ttcccaatgaatcaggagtcgcggg

SEQ ID NO: 2073724 - DNA, 25 bp, Homo sapien
gcatgaatctctatccacgggaccg

SEQ ID NO: 2073725 - DNA, 25 bp, Homo sapien
tcagtccggtattcgcagaagtcct

SEQ ID NO: 2073726 - DNA, 25 bp, Homo sapien
cggcggcgctggctacggccgcctc

SEQ ID NO: 2073727 - DNA, 25 bp, Homo sapien
ggcggcgctggctacggccgcctcc

SEQ ID NO: 2073728 - DNA, 25 bp, Homo sapien
gcggcggcgctggctacggccgcct

SEQ ID NO: 2073729 - DNA, 25 bp, Homo sapien
gcagggagggcccggagccccggca

SEQ ID NO: 2073730 - DNA, 25 bp, Homo sapien
tgacggccgccggcagggagggccc

SEQ ID NO: 2073731 - DNA, 25 bp, Homo sapien
gccgccggcagggagggcccggagc

SEQ ID NO: 2073732 - DNA, 25 bp, Homo sapien
ctgacggccgccggcagggagggcc

SEQ ID NO: 2073733 - DNA, 25 bp, Homo sapien
gcggcggggccacggagagcggcgg

SEQ ID NO: 2073734 - DNA, 25 bp, Homo sapien
ggcagcgcggcggggccacggagag

SEQ ID NO: 2073735 - DNA, 25 bp, Homo sapien
cagcgcggcggggccacggagagcg

SEQ ID NO: 2073736 - DNA, 25 bp, Homo sapien
gcgcggcggggccacggagagcggc

SEQ ID NO: 2073737 - DNA, 25 bp, Homo sapien
aatataggtatgtatcggccaggtg

SEQ ID NO: 2073738 - DNA, 25 bp, Homo sapien
tgaacatactaatgtttaatatagg

SEQ ID NO: 2073739 - DNA, 25 bp, Homo sapien
tataggtatgtatcggccaggtgtg

SEQ ID NO: 2073740 - DNA, 25 bp, Homo sapien
ttaatataggtatgtatcggccagg

SEQ ID NO: 2073741 - DNA, 25 bp, Homo sapien
gaaagattaagcttgcaaaccacga

SEQ ID NO: 2073742 - DNA, 25 bp, Homo sapien
cctttctgtttacgaactgataaat

SEQ ID NO: 2073743 - DNA, 25 bp, Homo sapien
tgcaaaccacgatgtccaagaaatc

SEQ ID NO: 2073744 - DNA, 25 bp, Homo sapien
ctgataaatatcgaggcatgttctt

SEQ ID NO: 2073745 - DNA, 25 bp, Homo sapien
tgttttgcccaaatggtctcttaaa

SEQ ID NO: 2073746 - DNA, 25 bp, Homo sapien
cctggtgaaatgcttaggatgcaaa

SEQ ID NO: 2073747 - DNA, 25 bp, Homo sapien
tgcaaagtcaggataacattataga

SEQ ID NO: 2073748 - DNA, 25 bp, Homo sapien
ctagataaataagtttgcaaatctg

SEQ ID NO: 2073749 - DNA, 25 bp, Homo sapien
tgtgtatcaaaatagccatgtgcgc

SEQ ID NO: 2073750 - DNA, 25 bp, Homo sapien
ttagagttatcacatcaagcaagtg

SEQ ID NO: 2073751 - DNA, 25 bp, Homo sapien
tgcactgaagtataatccgaagagc

SEQ ID NO: 2073752 - DNA, 25 bp, Homo sapien
tccgaagagcaagatttagtccaga

SEQ ID NO: 2073753 - DNA, 25 bp, Homo sapien
gaagtaaggattgttttctatatat

SEQ ID NO: 2073754 - DNA, 25 bp, Homo sapien
gcccggcccagagaaagatttataa

SEQ ID NO: 2073755 - DNA, 25 bp, Homo sapien
tcaattatgaagtccttgaacatat

SEQ ID NO: 2073756 - DNA, 25 bp, Homo sapien
gaagtccttgaacatatttggggat

SEQ ID NO: 2073757 - DNA, 25 bp, Homo sapien
gtttccgtaacaatcacactcaggg

SEQ ID NO: 2073758 - DNA, 25 bp, Homo sapien
catctcactggaggcaacaggttct

SEQ ID NO: 2073759 - DNA, 25 bp, Homo sapien
tacagagttagatgagtgggcttcc

SEQ ID NO: 2073760 - DNA, 25 bp, Homo sapien
tagaaggtgccaacattcgaggaac

SEQ ID NO: 2073761 - DNA, 25 bp, Homo sapien
catttgctttaattaattcatgagt

SEQ ID NO: 2073762 - DNA, 25 bp, Homo sapien
aaaatattacagcagtataagcaaa

SEQ ID NO: 2073763 - DNA, 25 bp, Homo sapien
tcaagtcgaaaattttagctggtct

SEQ ID NO: 2073764 - DNA, 25 bp, Homo sapien
gctttaattaattcatgagttaagt

SEQ ID NO: 2073765 - DNA, 25 bp, Homo sapien
gtgagtcctgagcacaacacagggc

SEQ ID NO: 2073766 - DNA, 25 bp, Homo sapien
gagaaatgaaacgttccctaagcat

SEQ ID NO: 2073767 - DNA, 25 bp, Homo sapien
gaagccatgagtttccaccagcagc

SEQ ID NO: 2073768 - DNA, 25 bp, Homo sapien
ccctcgtagctttatgggatcaaag

SEQ ID NO: 2073769 - DNA, 25 bp, Homo sapien
agagagagagaacccgagaaaccga

SEQ ID NO: 2073770 - DNA, 25 bp, Homo sapien
gagagagagaacccgagaaaccgaa

SEQ ID NO: 2073771 - DNA, 25 bp, Homo sapien
ggtccaatctgacgtattcgaaaac

SEQ ID NO: 2073772 - DNA, 25 bp, Homo sapien
tctataggccaaaaattgggtccca

SEQ ID NO: 2073773 - DNA, 25 bp, Homo sapien
tgtcaggaggtgaacttctagcccc

SEQ ID NO: 2073774 - DNA, 25 bp, Homo sapien
gtacatttctggacttaatctctag

SEQ ID NO: 2073775 - DNA, 25 bp, Homo sapien
caatagtgcggaaaaggcccatggt

SEQ ID NO: 2073776 - DNA, 25 bp, Homo sapien
cgaactatgctgtcaaaacttccaa

SEQ ID NO: 2073777 - DNA, 25 bp, Homo sapien
aaacaaagcaatagtgcggaaaagg

SEQ ID NO: 2073778 - DNA, 25 bp, Homo sapien
tctctctgcatcatgcagcgacgaa

SEQ ID NO: 2073779 - DNA, 25 bp, Homo sapien
ctgcaagataaagagagagctttta

SEQ ID NO: 2073780 - DNA, 25 bp, Homo sapien
gaatttttaaagctttatcctgatg

SEQ ID NO: 2073781 - DNA, 25 bp, Homo sapien
tttaaagctttatcctgatggtatc

SEQ ID NO: 2073782 - DNA, 25 bp, Homo sapien
aatttttaaagctttatcctgatgg

SEQ ID NO: 2073783 - DNA, 25 bp, Homo sapien
tttttaaagctttatcctgatggta

SEQ ID NO: 2073784 - DNA, 25 bp, Homo sapien
gagaggtcgccttccatctgattcc

SEQ ID NO: 2073785 - DNA, 25 bp, Homo sapien
cacttgactgtatgcccctgaagct

SEQ ID NO: 2073786 - DNA, 25 bp, Homo sapien
tcaaaacacattggagcagtggttc

SEQ ID NO: 2073787 - DNA, 25 bp, Homo sapien
caaggcccggcactgaagacttctt

SEQ ID NO: 2073788 - DNA, 25 bp, Homo sapien
tggagcccctcagtaatagaagtta

SEQ ID NO: 2073789 - DNA, 25 bp, Homo sapien
atagaagttactggagccatcccac

SEQ ID NO: 2073790 - DNA, 25 bp, Homo sapien
ccatcccacaggtcagggccgagag

SEQ ID NO: 2073791 - DNA, 25 bp, Homo sapien
agagcatgtacccatctgagccaag

SEQ ID NO: 2073792 - DNA, 25 bp, Homo sapien
actcagaaatggacgcacggccttg

SEQ ID NO: 2073793 - DNA, 25 bp, Homo sapien
tgacaaatgagaatgcgcccaacgc

SEQ ID NO: 2073794 - DNA, 25 bp, Homo sapien
tcctgaagtcaagggctaaactgcc

SEQ ID NO: 2073795 - DNA, 25 bp, Homo sapien
tttgttcaatggcaaccctcgagga

SEQ ID NO: 2073796 - DNA, 25 bp, Homo sapien
ctttaacaatttgtttggccacctg

SEQ ID NO: 2073797 - DNA, 25 bp, Homo sapien
acacagatgtggtctctgaaataag

SEQ ID NO: 2073798 - DNA, 25 bp, Homo sapien
tctgaaataagtcgagtctccaaag

SEQ ID NO: 2073799 - DNA, 25 bp, Homo sapien
tgtggtctctgaaataagtcgagtc

SEQ ID NO: 2073800 - DNA, 25 bp, Homo sapien
cctttgccattctcttagaacatac

SEQ ID NO: 2073801 - DNA, 25 bp, Homo sapien
cacaagacaaggaggcctttgccat

SEQ ID NO: 2073802 - DNA, 25 bp, Homo sapien
tacgtaaaattctacccagtagcta

SEQ ID NO: 2073803 - DNA, 25 bp, Homo sapien
cagtagctaacacaagacaaggagg

SEQ ID NO: 2073804 - DNA, 25 bp, Homo sapien
tgctggccggacacctgaatgatgg

SEQ ID NO: 2073805 - DNA, 25 bp, Homo sapien
cactgaggaccatcaaagctagagt

SEQ ID NO: 2073806 - DNA, 25 bp, Homo sapien
gctagagtgagaacacatcactgga

SEQ ID NO: 2073807 - DNA, 25 bp, Homo sapien
gaggctagacctgtgtccagagcaa

SEQ ID NO: 2073808 - DNA, 25 bp, Homo sapien
tcacccaggtcgaaatgcagtacta

SEQ ID NO: 2073809 - DNA, 25 bp, Homo sapien
gctacctctagggagtaggaattgg

SEQ ID NO: 2073810 - DNA, 25 bp, Homo sapien
aaagcagtataaacatgttagttaa

SEQ ID NO: 2073811 - DNA, 25 bp, Homo sapien
tatcttccacggtagaaagtcaata

SEQ ID NO: 2073812 - DNA, 25 bp, Homo sapien
gaggttcaaattgggacatgtagga

SEQ ID NO: 2073813 - DNA, 25 bp, Homo sapien
cattagaggttcaaattgggacatg

SEQ ID NO: 2073814 - DNA, 25 bp, Homo sapien
aacattagaggttcaaattgggaca

SEQ ID NO: 2073815 - DNA, 25 bp, Homo sapien
aaattgggacatgtaggatactgac

SEQ ID NO: 2073816 - DNA, 25 bp, Homo sapien
tgttttcttcggcaaagccaggtgt

SEQ ID NO: 2073817 - DNA, 25 bp, Homo sapien
ttttcttcggcaaagccaggtgtgt

SEQ ID NO: 2073818 - DNA, 25 bp, Homo sapien
tgatgtagacattatatggcttcac

SEQ ID NO: 2073819 - DNA, 25 bp, Homo sapien
tgtgtctggtgggtaagcaactgtg

SEQ ID NO: 2073820 - DNA, 25 bp, Homo sapien
cagtaaacaagacacactgaggtcc

SEQ ID NO: 2073821 - DNA, 25 bp, Homo sapien
gccgtccgacgagggcagtgtttta

SEQ ID NO: 2073822 - DNA, 25 bp, Homo sapien
aaacagctggccctaaagtatggca

SEQ ID NO: 2073823 - DNA, 25 bp, Homo sapien
tatcaaggcaatgggaccagtctgc

SEQ ID NO: 2073824 - DNA, 25 bp, Homo sapien
tctgctgccctatccctttcttgtg

SEQ ID NO: 2073825 - DNA, 25 bp, Homo sapien
ggcctctgcacattaggaggtcaag

SEQ ID NO: 2073826 - DNA, 25 bp, Homo sapien
ggtcattaaaatctgctgccctatc

SEQ ID NO: 2073827 - DNA, 25 bp, Homo sapien
gagctccctgtataaccggcctctg

SEQ ID NO: 2073828 - DNA, 25 bp, Homo sapien
gggttccattccagcacaattaggg

SEQ ID NO: 2073829 - DNA, 25 bp, Homo sapien
tgtgacggcctttaagagtagccca

SEQ ID NO: 2073830 - DNA, 25 bp, Homo sapien
caacgagtggtcattaggcagccca

SEQ ID NO: 2073831 - DNA, 25 bp, Homo sapien
tgctcataaatagctctggatcggg

SEQ ID NO: 2073832 - DNA, 25 bp, Homo sapien
taaaacagagcttttcagaacagct

SEQ ID NO: 2073833 - DNA, 25 bp, Homo sapien
tcaaggttacggctgcattgccaaa

SEQ ID NO: 2073834 - DNA, 25 bp, Homo sapien
tcagaacagcttcctcatgaggaag

SEQ ID NO: 2073835 - DNA, 25 bp, Homo sapien
aaactcaaggttacggctgcattgc

SEQ ID NO: 2073836 - DNA, 25 bp, Homo sapien
tggatgcagagtaggctgtgaaacc

SEQ ID NO: 2073837 - DNA, 25 bp, Homo sapien
gaataatcccaactgtcctgcctgg

SEQ ID NO: 2073838 - DNA, 25 bp, Homo sapien
cccttatggcaaacttggatgcaga

SEQ ID NO: 2073839 - DNA, 25 bp, Homo sapien
aaagcttctgccaatccccttatgg

SEQ ID NO: 2073840 - DNA, 25 bp, Homo sapien
ccggcgctccttcatggtggtgatc

SEQ ID NO: 2073841 - DNA, 25 bp, Homo sapien
ttcatggtggtgatcacggcccggc

SEQ ID NO: 2073842 - DNA, 25 bp, Homo sapien
tcacggcccggctggggtacacgct

SEQ ID NO: 2073843 - DNA, 25 bp, Homo sapien
gggtacacgctgcccaggtaattga

SEQ ID NO: 2073844 - DNA, 25 bp, Homo sapien
tgggtagtactttctgaaagacagt

SEQ ID NO: 2073845 - DNA, 25 bp, Homo sapien
gcatgtttgtgggtagtactttctg

SEQ ID NO: 2073846 - DNA, 25 bp, Homo sapien
tccaagtatttgtagccctattagt

SEQ ID NO: 2073847 - DNA, 25 bp, Homo sapien
tatttgtagccctattagttctaag

SEQ ID NO: 2073848 - DNA, 25 bp, Homo sapien
tatgaccgcatagggctgttgcaaa

SEQ ID NO: 2073849 - DNA, 25 bp, Homo sapien
gaaccactggctctcccattatgat

SEQ ID NO: 2073850 - DNA, 25 bp, Homo sapien
gagaaaacacaagcgctagcacagt

SEQ ID NO: 2073851 - DNA, 25 bp, Homo sapien
caaggtcaacaagggtatgaccgca

SEQ ID NO: 2073852 - DNA, 25 bp, Homo sapien
ttcaaaggtactaacttcaagatct

SEQ ID NO: 2073853 - DNA, 25 bp, Homo sapien
ccattcctgcacaatttaccagcat

SEQ ID NO: 2073854 - DNA, 25 bp, Homo sapien
caaaggtactaacttcaagatcttc

SEQ ID NO: 2073855 - DNA, 25 bp, Homo sapien
aaggtactaacttcaagatcttcaa

SEQ ID NO: 2073856 - DNA, 25 bp, Homo sapien
ttctctacttggttatagtcttgag

SEQ ID NO: 2073857 - DNA, 25 bp, Homo sapien
gacattctctacttggttatagtct

SEQ ID NO: 2073858 - DNA, 25 bp, Homo sapien
catcaactgatatgcaaagcaccac

SEQ ID NO: 2073859 - DNA, 25 bp, Homo sapien
cttgagatacatcaactgatatgca

SEQ ID NO: 2073860 - DNA, 25 bp, Homo sapien
gtgtgtgggagtctattcattttgc

SEQ ID NO: 2073861 - DNA, 25 bp, Homo sapien
gggagtctattcattttgcgtgtgt

SEQ ID NO: 2073862 - DNA, 25 bp, Homo sapien
tcaattaactattcacaggtgaagt

SEQ ID NO: 2073863 - DNA, 25 bp, Homo sapien
tttcctttatacagctgtgctgagt

SEQ ID NO: 2073864 - DNA, 25 bp, Homo sapien
tgtcattaatagagtgcatttcaat

SEQ ID NO: 2073865 - DNA, 25 bp, Homo sapien
taatagagtgcatttcaatttcttt

SEQ ID NO: 2073866 - DNA, 25 bp, Homo sapien
cattaatagagtgcatttcaatttc

SEQ ID NO: 2073867 - DNA, 25 bp, Homo sapien
ctgtttgtcattaatagagtgcatt

SEQ ID NO: 2073868 - DNA, 25 bp, Homo sapien
taaaagctccttgtttatagcactc

SEQ ID NO: 2073869 - DNA, 25 bp, Homo sapien
gatagcaatgcacttcccgatgcca

SEQ ID NO: 2073870 - DNA, 25 bp, Homo sapien
tcatttcgtgcaaccagagttataa

SEQ ID NO: 2073871 - DNA, 25 bp, Homo sapien
gtgcaaccagagttataaaagctcc

SEQ ID NO: 2073872 - DNA, 25 bp, Homo sapien
aagttatgcactctccttgacctcc

SEQ ID NO: 2073873 - DNA, 25 bp, Homo sapien
gtcactgtccctatgcaaattacat

SEQ ID NO: 2073874 - DNA, 25 bp, Homo sapien
actgtacccggccatatcgttctag

SEQ ID NO: 2073875 - DNA, 25 bp, Homo sapien
cataatattgcatagtattgtctcc

SEQ ID NO: 2073876 - DNA, 25 bp, Homo sapien
cctgcgtattaaagcgggatggtaa

SEQ ID NO: 2073877 - DNA, 25 bp, Homo sapien
ttatctcacctatgacctgccgcgg

SEQ ID NO: 2073878 - DNA, 25 bp, Homo sapien
tgggcagacagtttaaccatcagct

SEQ ID NO: 2073879 - DNA, 25 bp, Homo sapien
gactggagtcaaggctcagtgaaac

SEQ ID NO: 2073880 - DNA, 25 bp, Homo sapien
tcagcagatgccacgctgagctcag

SEQ ID NO: 2073881 - DNA, 25 bp, Homo sapien
ggacaggcgtcccaataccgctaag

SEQ ID NO: 2073882 - DNA, 25 bp, Homo sapien
agagacaagcagtgtagacgggaca

SEQ ID NO: 2073883 - DNA, 25 bp, Homo sapien
cagcaaaggattgcattggagcagc

SEQ ID NO: 2073884 - DNA, 25 bp, Homo sapien
ctgatgagcggagacaccatgtaca

SEQ ID NO: 2073885 - DNA, 25 bp, Homo sapien
cttggggctgatgagcggagacacc

SEQ ID NO: 2073886 - DNA, 25 bp, Homo sapien
ggcttggggctgatgagcggagaca

SEQ ID NO: 2073887 - DNA, 25 bp, Homo sapien
gggctgatgagcggagacaccatgt

SEQ ID NO: 2073888 - DNA, 25 bp, Homo sapien
gggctgcggcgaggcgagaatcacg

SEQ ID NO: 2073889 - DNA, 25 bp, Homo sapien
gaggcgagaatcacgcgcggcgggc

SEQ ID NO: 2073890 - DNA, 25 bp, Homo sapien
ctgcggcgaggcgagaatcacgcgc

SEQ ID NO: 2073891 - DNA, 25 bp, Homo sapien
cggcgaggcgagaatcacgcgcggc

SEQ ID NO: 2073892 - DNA, 25 bp, Homo sapien
tttaatctagaagaatagaagaatc

SEQ ID NO: 2073893 - DNA, 25 bp, Homo sapien
agttgtcttgtagaagaccctgcat

SEQ ID NO: 2073894 - DNA, 25 bp, Homo sapien
gactgattgatttcttgtggtgtta

SEQ ID NO: 2073895 - DNA, 25 bp, Homo sapien
tgcattgagttatacatctccaact

SEQ ID NO: 2073896 - DNA, 25 bp, Homo sapien
agaatacagtcaataggttatatca

SEQ ID NO: 2073897 - DNA, 25 bp, Homo sapien
tgtatctaaccaatttaggtaatat

SEQ ID NO: 2073898 - DNA, 25 bp, Homo sapien
tgatttctttgtatctaaccaattt

SEQ ID NO: 2073899 - DNA, 25 bp, Homo sapien
gaatacagtcaataggttatatcaa

SEQ ID NO: 2073900 - DNA, 25 bp, Homo sapien
tattagcaaaggtgcgcattacagt

SEQ ID NO: 2073901 - DNA, 25 bp, Homo sapien
catatgtgtggtcaggacaaactgt

SEQ ID NO: 2073902 - DNA, 25 bp, Homo sapien
tcctcttgagattgcacagtgaaag

SEQ ID NO: 2073903 - DNA, 25 bp, Homo sapien
tgttttattgcccatccctgagtaa

SEQ ID NO: 2073904 - DNA, 25 bp, Homo sapien
taaatgctctttgcaaagaccacca

SEQ ID NO: 2073905 - DNA, 25 bp, Homo sapien
actctgaagtgagatgtgtatttcc

SEQ ID NO: 2073906 - DNA, 25 bp, Homo sapien
agaatacatatggtaagcatcttcc

SEQ ID NO: 2073907 - DNA, 25 bp, Homo sapien
ttactggaaacaattaatgcgatcc

SEQ ID NO: 2073908 - DNA, 25 bp, Homo sapien
tagatagtgaccgcaacatatccga

SEQ ID NO: 2073909 - DNA, 25 bp, Homo sapien
tgtgttagatagtgaccgcaacata

SEQ ID NO: 2073910 - DNA, 25 bp, Homo sapien
ttgtgttagatagtgaccgcaacat

SEQ ID NO: 2073911 - DNA, 25 bp, Homo sapien
tgttagatagtgaccgcaacatatc

SEQ ID NO: 2073912 - DNA, 25 bp, Homo sapien
gggtagggaggatattaataataga

SEQ ID NO: 2073913 - DNA, 25 bp, Homo sapien
tgctatgaactttaacctaagttta

SEQ ID NO: 2073914 - DNA, 25 bp, Homo sapien
gccataagatactaacgataaactc

SEQ ID NO: 2073915 - DNA, 25 bp, Homo sapien
aaaaccgtcatattatcattattgc

SEQ ID NO: 2073916 - DNA, 25 bp, Homo sapien
ttaaaaaatctgagatgcaggggaa

SEQ ID NO: 2073917 - DNA, 25 bp, Homo sapien
aaaaaatctgagatgcaggggaaaa

SEQ ID NO: 2073918 - DNA, 25 bp, Homo sapien
taaaaaatctgagatgcaggggaaa

SEQ ID NO: 2073919 - DNA, 25 bp, Homo sapien
tagttaggtctttacaataattata

SEQ ID NO: 2073920 - DNA, 25 bp, Homo sapien
gcaaggtgttagcagatcatctaca

SEQ ID NO: 2073921 - DNA, 25 bp, Homo sapien
ttaggatcagctcgggaaggtccgc

SEQ ID NO: 2073922 - DNA, 25 bp, Homo sapien
catctacaagatggttaggatcagc

SEQ ID NO: 2073923 - DNA, 25 bp, Homo sapien
ccatgtcatttcaatggcaccaggg

SEQ ID NO: 2073924 - DNA, 25 bp, Homo sapien
aaaatagttacctgtggctttctct

SEQ ID NO: 2073925 - DNA, 25 bp, Homo sapien
taaagaccaaaaacagatatattaa

SEQ ID NO: 2073926 - DNA, 25 bp, Homo sapien
tctcagaagttgctctatagctgag

SEQ ID NO: 2073927 - DNA, 25 bp, Homo sapien
tcagaagttgctctatagctgagaa

SEQ ID NO: 2073928 - DNA, 25 bp, Homo sapien
gaagaaatacatgctctcaccttat

SEQ ID NO: 2073929 - DNA, 25 bp, Homo sapien
cagtattagtgtagatgtgaagaaa

SEQ ID NO: 2073930 - DNA, 25 bp, Homo sapien
gatctaccaccggtcccagattagt

SEQ ID NO: 2073931 - DNA, 25 bp, Homo sapien
tattttagctgcatgaggtcaggga

SEQ ID NO: 2073932 - DNA, 25 bp, Homo sapien
tctagatgtgtcagaagcagcctta

SEQ ID NO: 2073933 - DNA, 25 bp, Homo sapien
tgtgttagcacctacgtccaagact

SEQ ID NO: 2073934 - DNA, 25 bp, Homo sapien
tccaagactaaccaccattaggtgg

SEQ ID NO: 2073935 - DNA, 25 bp, Homo sapien
ggtggctggctacatgtacctctct

SEQ ID NO: 2073936 - DNA, 25 bp, Homo sapien
gaaaggatagataaaaatgacttac

SEQ ID NO: 2073937 - DNA, 25 bp, Homo sapien
gataggaaaggatagataaaaatga

SEQ ID NO: 2073938 - DNA, 25 bp, Homo sapien
ggaaaggatagataaaaatgactta

SEQ ID NO: 2073939 - DNA, 25 bp, Homo sapien
taggaaaggatagataaaaatgact

SEQ ID NO: 2073940 - DNA, 25 bp, Homo sapien
ttaaacattgctgctcgggcatggg

SEQ ID NO: 2073941 - DNA, 25 bp, Homo sapien
caagttcccgaaagtctgcttccgt

SEQ ID NO: 2073942 - DNA, 25 bp, Homo sapien
taacaggctgcataagggcatcacg

SEQ ID NO: 2073943 - DNA, 25 bp, Homo sapien
gtccctaggtgcagtttaaacattg

SEQ ID NO: 2073944 - DNA, 25 bp, Homo sapien
caaaattccatcattgtctacacca

SEQ ID NO: 2073945 - DNA, 25 bp, Homo sapien
gaacccagggtatatttgtagctcc

SEQ ID NO: 2073946 - DNA, 25 bp, Homo sapien
tggcagaatccagaacccagggtat

SEQ ID NO: 2073947 - DNA, 25 bp, Homo sapien
tgtagctcccagaaccaaaattcca

SEQ ID NO: 2073948 - DNA, 25 bp, Homo sapien
gataatggagggcttgttctctctg

SEQ ID NO: 2073949 - DNA, 25 bp, Homo sapien
ctctctggcaagttggaataaattc

SEQ ID NO: 2073950 - DNA, 25 bp, Homo sapien
ttgcatttgcactaggaactccgtc

SEQ ID NO: 2073951 - DNA, 25 bp, Homo sapien
gaactccgtcttaattctacgtgcg

SEQ ID NO: 2073952 - DNA, 25 bp, Homo sapien
ttttcactttcacctagccacttag

SEQ ID NO: 2073953 - DNA, 25 bp, Homo sapien
aataataggattcccctccaaggtg

SEQ ID NO: 2073954 - DNA, 25 bp, Homo sapien
gagttgttggcttctgttgctacag

SEQ ID NO: 2073955 - DNA, 25 bp, Homo sapien
tgctacagctttggctaagtaggac

SEQ ID NO: 2073956 - DNA, 25 bp, Homo sapien
ttcaagtccagcaacgtcactccat

SEQ ID NO: 2073957 - DNA, 25 bp, Homo sapien
gaggaaatttaataggcagtatcac

SEQ ID NO: 2073958 - DNA, 25 bp, Homo sapien
taggcagtatcacagcctctttcag

SEQ ID NO: 2073959 - DNA, 25 bp, Homo sapien
tttggtcgttctataacaatggcac

SEQ ID NO: 2073960 - DNA, 25 bp, Homo sapien
cctactgacaaattttctagttctc

SEQ ID NO: 2073961 - DNA, 25 bp, Homo sapien
atgcagtatattcaaaagccaaagc

SEQ ID NO: 2073962 - DNA, 25 bp, Homo sapien
gtcttttaatatagcctactgacaa

SEQ ID NO: 2073963 - DNA, 25 bp, Homo sapien
tagcttctgaatgcagtatattcaa

SEQ ID NO: 2073964 - DNA, 25 bp, Homo sapien
gccttttaaaggcagatgtgaagcc

SEQ ID NO: 2073965 - DNA, 25 bp, Homo sapien
aagttgactgagagccttttaaagg

SEQ ID NO: 2073966 - DNA, 25 bp, Homo sapien
taaaggcagatgtgaagccaacaaa

SEQ ID NO: 2073967 - DNA, 25 bp, Homo sapien
tctctaaaaggcggcaaataaacaa

SEQ ID NO: 2073968 - DNA, 25 bp, Homo sapien
tttttcaggatcatcagattctcct

SEQ ID NO: 2073969 - DNA, 25 bp, Homo sapien
tttcaggatcatcagattctccttc

SEQ ID NO: 2073970 - DNA, 25 bp, Homo sapien
tcaggatcatcagattctccttccc

SEQ ID NO: 2073971 - DNA, 25 bp, Homo sapien
cttgaagttgattctgtagtttctt

SEQ ID NO: 2073972 - DNA, 25 bp, Homo sapien
gccctgatactttgcttggctttat

SEQ ID NO: 2073973 - DNA, 25 bp, Homo sapien
cactttgccctgatactttgcttgg

SEQ ID NO: 2073974 - DNA, 25 bp, Homo sapien
gcttggctttatcaccctgtgcttc

SEQ ID NO: 2073975 - DNA, 25 bp, Homo sapien
aagatattctgtacactttgccctg

SEQ ID NO: 2073976 - DNA, 25 bp, Homo sapien
ctttgctagccagatctatcgcttt

SEQ ID NO: 2073977 - DNA, 25 bp, Homo sapien
agccttgtcttcttgcgctgctttg

SEQ ID NO: 2073978 - DNA, 25 bp, Homo sapien
catgctgatagagctgaagggcttc

SEQ ID NO: 2073979 - DNA, 25 bp, Homo sapien
gaagggcttcttcgtagttcccagc

SEQ ID NO: 2073980 - DNA, 25 bp, Homo sapien
gggtgacatgcactcgccgttccct

SEQ ID NO: 2073981 - DNA, 25 bp, Homo sapien
actcgccgttccctcagggcatata

SEQ ID NO: 2073982 - DNA, 25 bp, Homo sapien
ctgggtgacatgcactcgccgttcc

SEQ ID NO: 2073983 - DNA, 25 bp, Homo sapien
tccctcagggcatatatgctgcttt

SEQ ID NO: 2073984 - DNA, 25 bp, Homo sapien
cagttccagcacgatgtgcagcact

SEQ ID NO: 2073985 - DNA, 25 bp, Homo sapien
gcctcaaagctgtccagttggttga

SEQ ID NO: 2073986 - DNA, 25 bp, Homo sapien
ccagttggttgagcagttccagcac

SEQ ID NO: 2073987 - DNA, 25 bp, Homo sapien
cacgatgtgcagcacttcactgtcc

SEQ ID NO: 2073988 - DNA, 25 bp, Homo sapien
ctaggcaaacagtgtcttcccagtg

SEQ ID NO: 2073989 - DNA, 25 bp, Homo sapien
taggcaaacagtgtcttcccagtgc

SEQ ID NO: 2073990 - DNA, 25 bp, Homo sapien
tcttcccagtgcctagaggtccgta

SEQ ID NO: 2073991 - DNA, 25 bp, Homo sapien
gtgtcttcccagtgcctagaggtcc

SEQ ID NO: 2073992 - DNA, 25 bp, Homo sapien
ctgtgatgtccttaatctgcttgtc

SEQ ID NO: 2073993 - DNA, 25 bp, Homo sapien
tgtccttaatctgcttgtccagtcc

SEQ ID NO: 2073994 - DNA, 25 bp, Homo sapien
aggctgctcgatcacttctgtgatg

SEQ ID NO: 2073995 - DNA, 25 bp, Homo sapien
gagcttggaatgcttaacaggctgc

SEQ ID NO: 2073996 - DNA, 25 bp, Homo sapien
gtctactttgctgggtatgatattg

SEQ ID NO: 2073997 - DNA, 25 bp, Homo sapien
tgacaccagtgggtctactttgctg

SEQ ID NO: 2073998 - DNA, 25 bp, Homo sapien
tccaccatcactggtgacaccagtg

SEQ ID NO: 2073999 - DNA, 25 bp, Homo sapien
agtgggtctactttgctgggtatga

SEQ ID NO: 2074000 - DNA, 25 bp, Homo sapien
gactacttcccttatacaggagccc

SEQ ID NO: 2074001 - DNA, 25 bp, Homo sapien
tttctccttattcatggcccggact

SEQ ID NO: 2074002 - DNA, 25 bp, Homo sapien
ttcatggcccggactacttccctta

SEQ ID NO: 2074003 - DNA, 25 bp, Homo sapien
tggcccggactacttcccttataca

SEQ ID NO: 2074004 - DNA, 25 bp, Homo sapien
tcctcctgcaataggtgaacttttg

SEQ ID NO: 2074005 - DNA, 25 bp, Homo sapien
agctcctcctgcaataggtgaactt

SEQ ID NO: 2074006 - DNA, 25 bp, Homo sapien
ctcctcctgcaataggtgaactttt

SEQ ID NO: 2074007 - DNA, 25 bp, Homo sapien
gctcctcctgcaataggtgaacttt

SEQ ID NO: 2074008 - DNA, 25 bp, Homo sapien
gcagaaaaatgtgttgtcctatctc

SEQ ID NO: 2074009 - DNA, 25 bp, Homo sapien
tcctctccctacatctcactcatct

SEQ ID NO: 2074010 - DNA, 25 bp, Homo sapien
tatctcagactcacatctgcagaac

SEQ ID NO: 2074011 - DNA, 25 bp, Homo sapien
tcactcatctctttgcctccacagc

SEQ ID NO: 2074012 - DNA, 25 bp, Homo sapien
tgttcagcaggaagttaatcactac

SEQ ID NO: 2074013 - DNA, 25 bp, Homo sapien
tagattataagcatctggccacaga

SEQ ID NO: 2074014 - DNA, 25 bp, Homo sapien
gcctacgtcatgatatgaactgaag

SEQ ID NO: 2074015 - DNA, 25 bp, Homo sapien
accacagggaagtggagaatactgt

SEQ ID NO: 2074016 - DNA, 25 bp, Homo sapien
ctggaggttgggcgaagtggatgac

SEQ ID NO: 2074017 - DNA, 25 bp, Homo sapien
ggaggttgggcgaagtggatgacat

SEQ ID NO: 2074018 - DNA, 25 bp, Homo sapien
tggaggttgggcgaagtggatgaca

SEQ ID NO: 2074019 - DNA, 25 bp, Homo sapien
agccaacagcagcaacgtcgaagcg

SEQ ID NO: 2074020 - DNA, 25 bp, Homo sapien
tcgaagcgcgcacggggtaacagcc

SEQ ID NO: 2074021 - DNA, 25 bp, Homo sapien
gtcgaagcgcgcacggggtaacagc

SEQ ID NO: 2074022 - DNA, 25 bp, Homo sapien
agcagcaacgtcgaagcgcgcacgg

SEQ ID NO: 2074023 - DNA, 25 bp, Homo sapien
gaggccggtggttctcggaccgcga

SEQ ID NO: 2074024 - DNA, 25 bp, Homo sapien
cactctctccaccagagctccgacc

SEQ ID NO: 2074025 - DNA, 25 bp, Homo sapien
agggcagcctcccttccggaacttg

SEQ ID NO: 2074026 - DNA, 25 bp, Homo sapien
tctctccaccagagctccgaccctc

SEQ ID NO: 2074027 - DNA, 25 bp, Homo sapien
aatcccgaggccctctaggttctgg

SEQ ID NO: 2074028 - DNA, 25 bp, Homo sapien
ctccgggcacttccgatttcgtcat

SEQ ID NO: 2074029 - DNA, 25 bp, Homo sapien
caaacttccgcaatcccgaggccct

SEQ ID NO: 2074030 - DNA, 25 bp, Homo sapien
tctaggttctggtcccgcctctgct

SEQ ID NO: 2074031 - DNA, 25 bp, Homo sapien
caaatgactgttgtgttgggaagat

SEQ ID NO: 2074032 - DNA, 25 bp, Homo sapien
ggtcggcgctcgttcccgcttgttc

SEQ ID NO: 2074033 - DNA, 25 bp, Homo sapien
tgtaaataaggcgtggacggccgct

SEQ ID NO: 2074034 - DNA, 25 bp, Homo sapien
acggccgctgtcctcgagtatgtgg

SEQ ID NO: 2074035 - DNA, 25 bp, Homo sapien
tcagccttcctatggtttgcagcca

SEQ ID NO: 2074036 - DNA, 25 bp, Homo sapien
cgtcagggattagaggcagaaccaa

SEQ ID NO: 2074037 - DNA, 25 bp, Homo sapien
ttactcctccctgagcttaagctga

SEQ ID NO: 2074038 - DNA, 25 bp, Homo sapien
gcatctccgaaagaattaaagtcct

SEQ ID NO: 2074039 - DNA, 25 bp, Homo sapien
caaaatttggagtgccaagattgct

SEQ ID NO: 2074040 - DNA, 25 bp, Homo sapien
ccagttgtcttttggattggcaaaa

SEQ ID NO: 2074041 - DNA, 25 bp, Homo sapien
tccagagtaactcattccagttgtc

SEQ ID NO: 2074042 - DNA, 25 bp, Homo sapien
gtgccaagattgctgtcactaaatc

SEQ ID NO: 2074043 - DNA, 25 bp, Homo sapien
tattctaccgattgagtaaagctgc

SEQ ID NO: 2074044 - DNA, 25 bp, Homo sapien
aaggtctctcactcagatcttgcag

SEQ ID NO: 2074045 - DNA, 25 bp, Homo sapien
aattctgacacttaatgcccaaggc

SEQ ID NO: 2074046 - DNA, 25 bp, Homo sapien
ttctccatgtagtcgggtcagctct

SEQ ID NO: 2074047 - DNA, 25 bp, Homo sapien
gatcagcagttatattgatggagat

SEQ ID NO: 2074048 - DNA, 25 bp, Homo sapien
gattgtggcagtgaaatatgagcac

SEQ ID NO: 2074049 - DNA, 25 bp, Homo sapien
gcagtgaaatatgagcacagctctg

SEQ ID NO: 2074050 - DNA, 25 bp, Homo sapien
tatattgatggagattgtggcagtg

SEQ ID NO: 2074051 - DNA, 25 bp, Homo sapien
gcagcacatgtccagtcatccctga

SEQ ID NO: 2074052 - DNA, 25 bp, Homo sapien
cactgacactccttcggactgctgg

SEQ ID NO: 2074053 - DNA, 25 bp, Homo sapien
ccaactctggcaagactgggctctc

SEQ ID NO: 2074054 - DNA, 25 bp, Homo sapien
gactgctggtcacacttttggcttg

SEQ ID NO: 2074055 - DNA, 25 bp, Homo sapien
aaggcaagggactaccctgctggtc

SEQ ID NO: 2074056 - DNA, 25 bp, Homo sapien
ttattaattgttgcttaatcattgc

SEQ ID NO: 2074057 - DNA, 25 bp, Homo sapien
taattgttgcttaatcattgcaata

SEQ ID NO: 2074058 - DNA, 25 bp, Homo sapien
attaattgttgcttaatcattgcaa

SEQ ID NO: 2074059 - DNA, 25 bp, Homo sapien
tattaattgttgcttaatcattgca

SEQ ID NO: 2074060 - DNA, 25 bp, Homo sapien
atgtttgtgtgatgtataatcgcac

SEQ ID NO: 2074061 - DNA, 25 bp, Homo sapien
gtgacagcttcaacaagatggctga

SEQ ID NO: 2074062 - DNA, 25 bp, Homo sapien
tcagttgcatcacctatcaaggcag

SEQ ID NO: 2074063 - DNA, 25 bp, Homo sapien
gcttgctttagcgaagagctgcgct

SEQ ID NO: 2074064 - DNA, 25 bp, Homo sapien
gagatcatggcctgcaactgagtca

SEQ ID NO: 2074065 - DNA, 25 bp, Homo sapien
tggacttagtggaagcaagcttgct

SEQ ID NO: 2074066 - DNA, 25 bp, Homo sapien
ggtggtgtgccaagatgacgtgctc

SEQ ID NO: 2074067 - DNA, 25 bp, Homo sapien
taggggtggtgtgccaagatgacgt

SEQ ID NO: 2074068 - DNA, 25 bp, Homo sapien
tggtgtgccaagatgacgtgctcat

SEQ ID NO: 2074069 - DNA, 25 bp, Homo sapien
ggggtggtgtgccaagatgacgtgc

SEQ ID NO: 2074070 - DNA, 25 bp, Homo sapien
cctttcctgagactgattcggctgg

SEQ ID NO: 2074071 - DNA, 25 bp, Homo sapien
gcaaccagctccgtttcaggtcctt

SEQ ID NO: 2074072 - DNA, 25 bp, Homo sapien
gaagggagtaggtcccgccaaatga

SEQ ID NO: 2074073 - DNA, 25 bp, Homo sapien
tagggaattctagataagcacagca

SEQ ID NO: 2074074 - DNA, 25 bp, Homo sapien
ttgccgtacgcatgtctgtacgtat

SEQ ID NO: 2074075 - DNA, 25 bp, Homo sapien
gtacgtatgcatgtaactcacagcc

SEQ ID NO: 2074076 - DNA, 25 bp, Homo sapien
gccgagaggattgccgtacgcatgt

SEQ ID NO: 2074077 - DNA, 25 bp, Homo sapien
ttccggtcctgcgtgggccgagagg

SEQ ID NO: 2074078 - DNA, 25 bp, Homo sapien
tgaacgatcagacccttccatgggc

SEQ ID NO: 2074079 - DNA, 25 bp, Homo sapien
gctctgatccgctgttgtactaggg

SEQ ID NO: 2074080 - DNA, 25 bp, Homo sapien
tgcttggacataaaagacctgaacg

SEQ ID NO: 2074081 - DNA, 25 bp, Homo sapien
tatcccatgggaggtatatgtcaat

SEQ ID NO: 2074082 - DNA, 25 bp, Homo sapien
tagcccatgttaagtcctccctgac

SEQ ID NO: 2074083 - DNA, 25 bp, Homo sapien
caggcacaacaaaactcgaaacatt

SEQ ID NO: 2074084 - DNA, 25 bp, Homo sapien
tgcagcacaaggatgaattgaatgc

SEQ ID NO: 2074085 - DNA, 25 bp, Homo sapien
tgtggatgccgatttctgtaaactc

SEQ ID NO: 2074086 - DNA, 25 bp, Homo sapien
tgggcacatgctcaggctactatag

SEQ ID NO: 2074087 - DNA, 25 bp, Homo sapien
tttgctgccaaatgcgtatgccacc

SEQ ID NO: 2074088 - DNA, 25 bp, Homo sapien
gctactataggtccagaagtcctta

SEQ ID NO: 2074089 - DNA, 25 bp, Homo sapien
gaagtccttatgttaagccctggca

SEQ ID NO: 2074090 - DNA, 25 bp, Homo sapien
taagctatccgtgttgcaggttcat

SEQ ID NO: 2074091 - DNA, 25 bp, Homo sapien
taaagtgctcacgttaccttgacac

SEQ ID NO: 2074092 - DNA, 25 bp, Homo sapien
tgcacagggattctcacaatagccg

SEQ ID NO: 2074093 - DNA, 25 bp, Homo sapien
catctaatatgatagcgggaaaagg

SEQ ID NO: 2074094 - DNA, 25 bp, Homo sapien
gatttaggtgatgggcgtttccctg

SEQ ID NO: 2074095 - DNA, 25 bp, Homo sapien
caccctacagtcatggaagatttag

SEQ ID NO: 2074096 - DNA, 25 bp, Homo sapien
tctgccagacagtaacagctgcttg

SEQ ID NO: 2074097 - DNA, 25 bp, Homo sapien
gatcaaactgtttcactaacggcaa

SEQ ID NO: 2074098 - DNA, 25 bp, Homo sapien
tggggtccaaaaggagtcgttgcca

SEQ ID NO: 2074099 - DNA, 25 bp, Homo sapien
tattgcaaggagcagtctgatagcc

SEQ ID NO: 2074100 - DNA, 25 bp, Homo sapien
tagccgtgatgacatgctgagacct

SEQ ID NO: 2074101 - DNA, 25 bp, Homo sapien
gactggagtcaacctggggtccaaa

SEQ ID NO: 2074102 - DNA, 25 bp, Homo sapien
gagtctgaacacctccagtaatgga

SEQ ID NO: 2074103 - DNA, 25 bp, Homo sapien
tgtgacccatacatcaggcatgaga

SEQ ID NO: 2074104 - DNA, 25 bp, Homo sapien
ggcttcaggaacagaccagttatcg

SEQ ID NO: 2074105 - DNA, 25 bp, Homo sapien
tctagtgaagttttggtgtgaccca

SEQ ID NO: 2074106 - DNA, 25 bp, Homo sapien
tgtgatgtagccctggactgtatgt

SEQ ID NO: 2074107 - DNA, 25 bp, Homo sapien
ttatgtgatgtagccctggactgta

SEQ ID NO: 2074108 - DNA, 25 bp, Homo sapien
atgtgatgtagccctggactgtatg

SEQ ID NO: 2074109 - DNA, 25 bp, Homo sapien
tatgtgatgtagccctggactgtat

SEQ ID NO: 2074110 - DNA, 25 bp, Homo sapien
taacctctcagggtgtgtccacaga

SEQ ID NO: 2074111 - DNA, 25 bp, Homo sapien
gggttgctaacctctcagggtgtgt

SEQ ID NO: 2074112 - DNA, 25 bp, Homo sapien
gagattaaagaggttgtctctatgg

SEQ ID NO: 2074113 - DNA, 25 bp, Homo sapien
aagagcaggttgtttgagattaaag

SEQ ID NO: 2074114 - DNA, 25 bp, Homo sapien
cccactgttcccctctaaaggagag

SEQ ID NO: 2074115 - DNA, 25 bp, Homo sapien
ttcccctctaaaggagaggccctca

SEQ ID NO: 2074116 - DNA, 25 bp, Homo sapien
tcccctctaaaggagaggccctcat

SEQ ID NO: 2074117 - DNA, 25 bp, Homo sapien
cactgttcccctctaaaggagaggc

SEQ ID NO: 2074118 - DNA, 25 bp, Homo sapien
tcttagctgaatgttctgccatgac

SEQ ID NO: 2074119 - DNA, 25 bp, Homo sapien
ggtttcaggtcttgcttgcggctca

SEQ ID NO: 2074120 - DNA, 25 bp, Homo sapien
tcagtctctttcctatcgaggtggg

SEQ ID NO: 2074121 - DNA, 25 bp, Homo sapien
accagtcgttcagtgtggccacgca

SEQ ID NO: 2074122 - DNA, 25 bp, Homo sapien
catggtgaaggaggtagcaaggaag

SEQ ID NO: 2074123 - DNA, 25 bp, Homo sapien
gtgaaggaggtagcaaggaaggcaa

SEQ ID NO: 2074124 - DNA, 25 bp, Homo sapien
ggtgaaggaggtagcaaggaaggca

SEQ ID NO: 2074125 - DNA, 25 bp, Homo sapien
tggtgaaggaggtagcaaggaaggc

SEQ ID NO: 2074126 - DNA, 25 bp, Homo sapien
ttcccaatcctaggcaccactgagt

SEQ ID NO: 2074127 - DNA, 25 bp, Homo sapien
tctaggttcaccagttgagggacat

SEQ ID NO: 2074128 - DNA, 25 bp, Homo sapien
taaatttctagcgttatgcatcgcc

SEQ ID NO: 2074129 - DNA, 25 bp, Homo sapien
tctggcgtcttgcacttagcatggt

SEQ ID NO: 2074130 - DNA, 25 bp, Homo sapien
cttcacagggtaaatgacgtacgca

SEQ ID NO: 2074131 - DNA, 25 bp, Homo sapien
catataaggtaaggccactgtctcc

SEQ ID NO: 2074132 - DNA, 25 bp, Homo sapien
gggccctgagcctatctgagcattt

SEQ ID NO: 2074133 - DNA, 25 bp, Homo sapien
gacgtacgcagaattgcagggccct

SEQ ID NO: 2074134 - DNA, 25 bp, Homo sapien
tggcctacttccaactcacagaagc

SEQ ID NO: 2074135 - DNA, 25 bp, Homo sapien
gcctacttccaactcacagaagcat

SEQ ID NO: 2074136 - DNA, 25 bp, Homo sapien
ttggcctacttccaactcacagaag

SEQ ID NO: 2074137 - DNA, 25 bp, Homo sapien
cttggcctacttccaactcacagaa

SEQ ID NO: 2074138 - DNA, 25 bp, Homo sapien
ttccaggttccggtccacttgtgct

SEQ ID NO: 2074139 - DNA, 25 bp, Homo sapien
ggttccggtccacttgtgctctgaa

SEQ ID NO: 2074140 - DNA, 25 bp, Homo sapien
ttgactctgctttgaccatttggac

SEQ ID NO: 2074141 - DNA, 25 bp, Homo sapien
tttgactctgctttgaccatttgga

SEQ ID NO: 2074142 - DNA, 25 bp, Homo sapien
cagtttaccagaacacctctaggtg

SEQ ID NO: 2074143 - DNA, 25 bp, Homo sapien
gccagcaatcagtttaccagaacac

SEQ ID NO: 2074144 - DNA, 25 bp, Homo sapien
cacctctaggtgaacattttctaaa

SEQ ID NO: 2074145 - DNA, 25 bp, Homo sapien
taccagaacacctctaggtgaacat

SEQ ID NO: 2074146 - DNA, 25 bp, Homo sapien
ccttgtgtaggactttagatactga

SEQ ID NO: 2074147 - DNA, 25 bp, Homo sapien
gataattcgactactactacagcgg

SEQ ID NO: 2074148 - DNA, 25 bp, Homo sapien
tctgcatccccattgaagatattca

SEQ ID NO: 2074149 - DNA, 25 bp, Homo sapien
tagatactgagagaccgtggctcca

SEQ ID NO: 2074150 - DNA, 25 bp, Homo sapien
gatctttgcctttgtatggtatttc

SEQ ID NO: 2074151 - DNA, 25 bp, Homo sapien
acaatcatgcttagatctttgcctt

SEQ ID NO: 2074152 - DNA, 25 bp, Homo sapien
caatcatgcttagatctttgccttt

SEQ ID NO: 2074153 - DNA, 25 bp, Homo sapien
cacaatcatgcttagatctttgcct

SEQ ID NO: 2074154 - DNA, 25 bp, Homo sapien
ctccagcaaggcaaaattaaaggaa

SEQ ID NO: 2074155 - DNA, 25 bp, Homo sapien
tccagcaaggcaaaattaaaggaat

SEQ ID NO: 2074156 - DNA, 25 bp, Homo sapien
ttttacttatcatgttacattccat

SEQ ID NO: 2074157 - DNA, 25 bp, Homo sapien
atgtattaacatattacactatata

SEQ ID NO: 2074158 - DNA, 25 bp, Homo sapien
tttacttatcatgttacattccatc

SEQ ID NO: 2074159 - DNA, 25 bp, Homo sapien
gtattaacatattacactatataaa

SEQ ID NO: 2074160 - DNA, 25 bp, Homo sapien
aagaaccagtgtcgtatcattgcca

SEQ ID NO: 2074161 - DNA, 25 bp, Homo sapien
acaagaaccagtgtcgtatcattgc

SEQ ID NO: 2074162 - DNA, 25 bp, Homo sapien
aatagattgcgttcacaagaaccag

SEQ ID NO: 2074163 - DNA, 25 bp, Homo sapien
tagattgcgttcacaagaaccagtg

SEQ ID NO: 2074164 - DNA, 25 bp, Homo sapien
gctttgcaaatgttcgtgactgatc

SEQ ID NO: 2074165 - DNA, 25 bp, Homo sapien
gaataaaagagtcttttacacaagc

SEQ ID NO: 2074166 - DNA, 25 bp, Homo sapien
aaaagagtcttttacacaagctaca

SEQ ID NO: 2074167 - DNA, 25 bp, Homo sapien
ataaaagagtcttttacacaagcta

SEQ ID NO: 2074168 - DNA, 25 bp, Homo sapien
tctcatgttgagttgctgtaagttt

SEQ ID NO: 2074169 - DNA, 25 bp, Homo sapien
catgttgagttgctgtaagtttggc

SEQ ID NO: 2074170 - DNA, 25 bp, Homo sapien
ctcatgttgagttgctgtaagtttg

SEQ ID NO: 2074171 - DNA, 25 bp, Homo sapien
tcatgttgagttgctgtaagtttgg

SEQ ID NO: 2074172 - DNA, 25 bp, Homo sapien
tctcaaaggtgtttctataatgggt

SEQ ID NO: 2074173 - DNA, 25 bp, Homo sapien
tttctataatgggtggctctcctac

SEQ ID NO: 2074174 - DNA, 25 bp, Homo sapien
tgtttctataatgggtggctctcct

SEQ ID NO: 2074175 - DNA, 25 bp, Homo sapien
aaggtgtttctataatgggtggctc

SEQ ID NO: 2074176 - DNA, 25 bp, Homo sapien
tgactttccacccaggagttaatct

SEQ ID NO: 2074177 - DNA, 25 bp, Homo sapien
ggtaaaatttcttgatggcatctaa

SEQ ID NO: 2074178 - DNA, 25 bp, Homo sapien
cttctttcgactttcttctggagca

SEQ ID NO: 2074179 - DNA, 25 bp, Homo sapien
cattcgtttgactttccacccagga

SEQ ID NO: 2074180 - DNA, 25 bp, Homo sapien
gaattcagtcagaagcttttgaaac

SEQ ID NO: 2074181 - DNA, 25 bp, Homo sapien
tttgttgaattcagtcagaagcttt

SEQ ID NO: 2074182 - DNA, 25 bp, Homo sapien
tcttcagctcatatgcatcagtgga

SEQ ID NO: 2074183 - DNA, 25 bp, Homo sapien
tcatatgcatcagtggatttgttga

SEQ ID NO: 2074184 - DNA, 25 bp, Homo sapien
gacctgttcagggatctaaagctga

SEQ ID NO: 2074185 - DNA, 25 bp, Homo sapien
taaagctgaaccatagtgctctgtg

SEQ ID NO: 2074186 - DNA, 25 bp, Homo sapien
tatgtgccatgaaatgccaacccac

SEQ ID NO: 2074187 - DNA, 25 bp, Homo sapien
gatccagacctatgctctgaggtac

SEQ ID NO: 2074188 - DNA, 25 bp, Homo sapien
atgatatgttgcagctttttctgtg

SEQ ID NO: 2074189 - DNA, 25 bp, Homo sapien
cgtgctagccgacggaaccagagaa

SEQ ID NO: 2074190 - DNA, 25 bp, Homo sapien
tgcgtgctagccgacggaaccagag

SEQ ID NO: 2074191 - DNA, 25 bp, Homo sapien
atctgcgtgctagccgacggaacca

SEQ ID NO: 2074192 - DNA, 25 bp, Homo sapien
catctgcgtgctagccgacggaacc

SEQ ID NO: 2074193 - DNA, 25 bp, Homo sapien
cttgctaatttgttgtgcagtgttg

SEQ ID NO: 2074194 - DNA, 25 bp, Homo sapien
gtgaactcgatgtgatctggaactc

SEQ ID NO: 2074195 - DNA, 25 bp, Homo sapien
ggtgaactcgatgtgatctggaact

SEQ ID NO: 2074196 - DNA, 25 bp, Homo sapien
tgttcctagaggaagcagaggtggg

SEQ ID NO: 2074197 - DNA, 25 bp, Homo sapien
agaggctgtgtgtgtctgtggaatg

SEQ ID NO: 2074198 - DNA, 25 bp, Homo sapien
gggcagagaggctgtgtgtgtctgt

SEQ ID NO: 2074199 - DNA, 25 bp, Homo sapien
aggctgtgtgtgtctgtggaatgaa

SEQ ID NO: 2074200 - DNA, 25 bp, Homo sapien
caggattacagttctaccattgtac

SEQ ID NO: 2074201 - DNA, 25 bp, Homo sapien
ggattacagttctaccattgtacct

SEQ ID NO: 2074202 - DNA, 25 bp, Homo sapien
gacaggattacagttctaccattgt

SEQ ID NO: 2074203 - DNA, 25 bp, Homo sapien
ttacagttctaccattgtacctcct

SEQ ID NO: 2074204 - DNA, 25 bp, Homo sapien
tttcaaaacttgcaatggcccagta

SEQ ID NO: 2074205 - DNA, 25 bp, Homo sapien
tatataaattagctccactgactca

SEQ ID NO: 2074206 - DNA, 25 bp, Homo sapien
acagacttgcagtgttcttaccgca

SEQ ID NO: 2074207 - DNA, 25 bp, Homo sapien
tggccatcataattggtacaaagtg

SEQ ID NO: 2074208 - DNA, 25 bp, Homo sapien
gcaatcagtttaccagaacatctgc

SEQ ID NO: 2074209 - DNA, 25 bp, Homo sapien
cagtttaccagaacatctgcaggtg

SEQ ID NO: 2074210 - DNA, 25 bp, Homo sapien
gccagcaatcagtttaccagaacat

SEQ ID NO: 2074211 - DNA, 25 bp, Homo sapien
cagaacatctgcaggtgaacatttt

SEQ ID NO: 2074212 - DNA, 25 bp, Homo sapien
gttgaagtaggtgatgatccgaatc

SEQ ID NO: 2074213 - DNA, 25 bp, Homo sapien
gaagtaggtgatgatccgaatccta

SEQ ID NO: 2074214 - DNA, 25 bp, Homo sapien
ggaactcttcattagttgaagtagg

SEQ ID NO: 2074215 - DNA, 25 bp, Homo sapien
aatggaactcttcattagttgaagt

SEQ ID NO: 2074216 - DNA, 25 bp, Homo sapien
ctccagatagcacgagaccgcggct

SEQ ID NO: 2074217 - DNA, 25 bp, Homo sapien
agatagcacgagaccgcggctcccg

SEQ ID NO: 2074218 - DNA, 25 bp, Homo sapien
gtgtaggactccagatagcacgaga

SEQ ID NO: 2074219 - DNA, 25 bp, Homo sapien
catccccattgaagatatccaccat

SEQ ID NO: 2074220 - DNA, 25 bp, Homo sapien
gaaccgaggtaagtgtaaatcgaca

SEQ ID NO: 2074221 - DNA, 25 bp, Homo sapien
gttctcaacgtgtccttgaggtcat

SEQ ID NO: 2074222 - DNA, 25 bp, Homo sapien
tccttgaggtcatagctctcttcca

SEQ ID NO: 2074223 - DNA, 25 bp, Homo sapien
tgcaaacttgtccattccatcaatt

SEQ ID NO: 2074224 - DNA, 25 bp, Homo sapien
acaatcatgcttagatctttgcctt

SEQ ID NO: 2074225 - DNA, 25 bp, Homo sapien
cacaatcatgcttagatctttgcct

SEQ ID NO: 2074226 - DNA, 25 bp, Homo sapien
caatcatgcttagatctttgccttt

SEQ ID NO: 2074227 - DNA, 25 bp, Homo sapien
gatctttgcctttgtatggtatttc

SEQ ID NO: 2074228 - DNA, 25 bp, Homo sapien
tgaaaagatgtgtattgcctcatca

SEQ ID NO: 2074229 - DNA, 25 bp, Homo sapien
atgaaaagatgtgtattgcctcatc

SEQ ID NO: 2074230 - DNA, 25 bp, Homo sapien
ctccagcgaggcaaaatgaaaagat

SEQ ID NO: 2074231 - DNA, 25 bp, Homo sapien
caatgtggtattgctgccaatatta

SEQ ID NO: 2074232 - DNA, 25 bp, Homo sapien
aatagattgcgttcacaagaaccaa

SEQ ID NO: 2074233 - DNA, 25 bp, Homo sapien
agattgcgttcacaagaaccaatgt

SEQ ID NO: 2074234 - DNA, 25 bp, Homo sapien
aatgtggtattgctgccaatattac

SEQ ID NO: 2074235 - DNA, 25 bp, Homo sapien
ttgatctttgaattgttagactcac

SEQ ID NO: 2074236 - DNA, 25 bp, Homo sapien
tgactttgatctttgaattgttaga

SEQ ID NO: 2074237 - DNA, 25 bp, Homo sapien
ctttgatctttgaattgttagactc

SEQ ID NO: 2074238 - DNA, 25 bp, Homo sapien
gactttgatctttgaattgttagac

SEQ ID NO: 2074239 - DNA, 25 bp, Homo sapien
ggttcaccagatgcagctttcttca

SEQ ID NO: 2074240 - DNA, 25 bp, Homo sapien
aaggctccagtcgtataaagttgcc

SEQ ID NO: 2074241 - DNA, 25 bp, Homo sapien
agtggttcaccagatgcagctttct

SEQ ID NO: 2074242 - DNA, 25 bp, Homo sapien
gcagctttcttcaaggctccagtcg

SEQ ID NO: 2074243 - DNA, 25 bp, Homo sapien
gaagtaggccctgactgctttttag

SEQ ID NO: 2074244 - DNA, 25 bp, Homo sapien
tgtaatatgaaacgcatgtcctgtg

SEQ ID NO: 2074245 - DNA, 25 bp, Homo sapien
taatccctgcagaacttgtggctag

SEQ ID NO: 2074246 - DNA, 25 bp, Homo sapien
tccaggcagctctagttcagatggc

SEQ ID NO: 2074247 - DNA, 25 bp, Homo sapien
gtttcaggcatagggctcactcgca

SEQ ID NO: 2074248 - DNA, 25 bp, Homo sapien
tgcagtttcaggcatagggctcact

SEQ ID NO: 2074249 - DNA, 25 bp, Homo sapien
catagggctcactcgcatagatttc

SEQ ID NO: 2074250 - DNA, 25 bp, Homo sapien
ggctcactcgcatagatttctcaaa

SEQ ID NO: 2074251 - DNA, 25 bp, Homo sapien
ttctttcgactttcttctggagcat

SEQ ID NO: 2074252 - DNA, 25 bp, Homo sapien
tgactttccacccaggagttaatct

SEQ ID NO: 2074253 - DNA, 25 bp, Homo sapien
cttctttcgactttcttctggagca

SEQ ID NO: 2074254 - DNA, 25 bp, Homo sapien
cattcgtttgactttccacccagga

SEQ ID NO: 2074255 - DNA, 25 bp, Homo sapien
tttgttgaattcagtcagaagcttt

SEQ ID NO: 2074256 - DNA, 25 bp, Homo sapien
tcttcagctcatatgcatcagtgga

SEQ ID NO: 2074257 - DNA, 25 bp, Homo sapien
gaattcagtcagaagcttttgaaac

SEQ ID NO: 2074258 - DNA, 25 bp, Homo sapien
tcatatgcatcagtggatttgttga

SEQ ID NO: 2074259 - DNA, 25 bp, Homo sapien
gtggtgttctctgtgacttgatcaa

SEQ ID NO: 2074260 - DNA, 25 bp, Homo sapien
gttctctgtgacttgatcaaagtga

SEQ ID NO: 2074261 - DNA, 25 bp, Homo sapien
tgatatgttgcagcttttcctgtgg

SEQ ID NO: 2074262 - DNA, 25 bp, Homo sapien
atgatatgttgcagcttttcctgtg

SEQ ID NO: 2074263 - DNA, 25 bp, Homo sapien
cgtgctagccgacggaaccagagaa

SEQ ID NO: 2074264 - DNA, 25 bp, Homo sapien
tgcgtgctagccgacggaaccagag

SEQ ID NO: 2074265 - DNA, 25 bp, Homo sapien
catctgcgtgctagccgacggaacc

SEQ ID NO: 2074266 - DNA, 25 bp, Homo sapien
atctgcgtgctagccgacggaacca

SEQ ID NO: 2074267 - DNA, 25 bp, Homo sapien
tctgaactgttggaacaggtcgaac

SEQ ID NO: 2074268 - DNA, 25 bp, Homo sapien
ttctgaactgttggaacaggtcgaa

SEQ ID NO: 2074269 - DNA, 25 bp, Homo sapien
ctgaactgttggaacaggtcgaaca

SEQ ID NO: 2074270 - DNA, 25 bp, Homo sapien
ggtgaactcgatgtgatctggaact

SEQ ID NO: 2074271 - DNA, 25 bp, Homo sapien
gtgaactcgatgtgatctggaactc

SEQ ID NO: 2074272 - DNA, 25 bp, Homo sapien
ctgtggaatgaagggtgagatcctg

SEQ ID NO: 2074273 - DNA, 25 bp, Homo sapien
agatcctgaatttatgcctctcctc

SEQ ID NO: 2074274 - DNA, 25 bp, Homo sapien
gaatgaagggtgagatcctgaattt

SEQ ID NO: 2074275 - DNA, 25 bp, Homo sapien
aagggtgagatcctgaatttatgcc

SEQ ID NO: 2074276 - DNA, 25 bp, Homo sapien
ggattacagttctaccattgtacct

SEQ ID NO: 2074277 - DNA, 25 bp, Homo sapien
gacaggattacagttctaccattgt

SEQ ID NO: 2074278 - DNA, 25 bp, Homo sapien
ttacagttctaccattgtacctcct

SEQ ID NO: 2074279 - DNA, 25 bp, Homo sapien
caggattacagttctaccattgtac

SEQ ID NO: 2074280 - DNA, 25 bp, Homo sapien
tctgtattttgttctccggtacatc

SEQ ID NO: 2074281 - DNA, 25 bp, Homo sapien
gacccctcttcctcggaattctgta

SEQ ID NO: 2074282 - DNA, 25 bp, Homo sapien
gaaattttgaacctatttgtctctg

SEQ ID NO: 2074283 - DNA, 25 bp, Homo sapien
tacatctctgacttccggtcttcaa

SEQ ID NO: 2074284 - DNA, 25 bp, Homo sapien
ggtgatctaatggattcaacctgga

SEQ ID NO: 2074285 - DNA, 25 bp, Homo sapien
tctgtgcggtaacccttctctgaca

SEQ ID NO: 2074286 - DNA, 25 bp, Homo sapien
tatcccagacgttcttctctcattc

SEQ ID NO: 2074287 - DNA, 25 bp, Homo sapien
gtttctctcaactttgcgcttttcc

SEQ ID NO: 2074288 - DNA, 25 bp, Homo sapien
ccatcagttacaggtgatgtaagtg

SEQ ID NO: 2074289 - DNA, 25 bp, Homo sapien
cccagattgcctccaagttcttcct

SEQ ID NO: 2074290 - DNA, 25 bp, Homo sapien
tcctcctctaacttgtgacaagggc

SEQ ID NO: 2074291 - DNA, 25 bp, Homo sapien
ttattcccccagattgcctccaagt

SEQ ID NO: 2074292 - DNA, 25 bp, Homo sapien
gatccgagttaacacccatgggacc

SEQ ID NO: 2074293 - DNA, 25 bp, Homo sapien
cagttccagggctttgtgatgatgc

SEQ ID NO: 2074294 - DNA, 25 bp, Homo sapien
aattgacactcaagtgtgatccgag

SEQ ID NO: 2074295 - DNA, 25 bp, Homo sapien
ggtgtgaatgtgcataattgacact

SEQ ID NO: 2074296 - DNA, 25 bp, Homo sapien
tcctctcggtggacagctctgatgc

SEQ ID NO: 2074297 - DNA, 25 bp, Homo sapien
ctcggtggacagctctgatgcacat

SEQ ID NO: 2074298 - DNA, 25 bp, Homo sapien
ctatggggatacaagcctgtagata

SEQ ID NO: 2074299 - DNA, 25 bp, Homo sapien
ttcttcctctcggtggacagctctg

SEQ ID NO: 2074300 - DNA, 25 bp, Homo sapien
gagagcccagaagatcttgggatga

SEQ ID NO: 2074301 - DNA, 25 bp, Homo sapien
tctgccacagctgggatctttccta

SEQ ID NO: 2074302 - DNA, 25 bp, Homo sapien
taaaaacatatgctgcatgcaagag

SEQ ID NO: 2074303 - DNA, 25 bp, Homo sapien
ctagtagtttgctgaaactccacat

SEQ ID NO: 2074304 - DNA, 25 bp, Homo sapien
tgggcacaaagtgggtcacctccca

SEQ ID NO: 2074305 - DNA, 25 bp, Homo sapien
ggcacaaagtgggtcacctcccaag

SEQ ID NO: 2074306 - DNA, 25 bp, Homo sapien
gcacaaagtgggtcacctcccaaga

SEQ ID NO: 2074307 - DNA, 25 bp, Homo sapien
gggcacaaagtgggtcacctcccaa

SEQ ID NO: 2074308 - DNA, 25 bp, Homo sapien
gatgttgccatgtctacaactgctt

SEQ ID NO: 2074309 - DNA, 25 bp, Homo sapien
atgttgccatgtctacaactgcttc

SEQ ID NO: 2074310 - DNA, 25 bp, Homo sapien
tgttgccatgtctacaactgcttct

SEQ ID NO: 2074311 - DNA, 25 bp, Homo sapien
cagaagttctttgaactgttccatg

SEQ ID NO: 2074312 - DNA, 25 bp, Homo sapien
ctgtcattctaatcagggctgactt

SEQ ID NO: 2074313 - DNA, 25 bp, Homo sapien
gaactgttccatggtgccttttctc

SEQ ID NO: 2074314 - DNA, 25 bp, Homo sapien
tcattctaatcagggctgacttgac

SEQ ID NO: 2074315 - DNA, 25 bp, Homo sapien
catgccacccgaattcctgcataat

SEQ ID NO: 2074316 - DNA, 25 bp, Homo sapien
ttcttcatgtgctcccatgccaccc

SEQ ID NO: 2074317 - DNA, 25 bp, Homo sapien
atgtgctcccatgccacccgaattc

SEQ ID NO: 2074318 - DNA, 25 bp, Homo sapien
tgccacccgaattcctgcataatca

SEQ ID NO: 2074319 - DNA, 25 bp, Homo sapien
catatccaccttctaggctttcaat

SEQ ID NO: 2074320 - DNA, 25 bp, Homo sapien
tgattcttcatatccaccttctagg

SEQ ID NO: 2074321 - DNA, 25 bp, Homo sapien
tcttcatatccaccttctaggcttt

SEQ ID NO: 2074322 - DNA, 25 bp, Homo sapien
gattcttcatatccaccttctaggc

SEQ ID NO: 2074323 - DNA, 25 bp, Homo sapien
tccctccatgattttcctctttgtg

SEQ ID NO: 2074324 - DNA, 25 bp, Homo sapien
gcttcctgcagagtcgggagatgac

SEQ ID NO: 2074325 - DNA, 25 bp, Homo sapien
caatggaaggatgagcaacacgaca

SEQ ID NO: 2074326 - DNA, 25 bp, Homo sapien
cctgatgttccctccatgattttcc

SEQ ID NO: 2074327 - DNA, 25 bp, Homo sapien
agtgctgctgctgtcatcaacctct

SEQ ID NO: 2074328 - DNA, 25 bp, Homo sapien
tcattcagtgctgtcaccagtgctg

SEQ ID NO: 2074329 - DNA, 25 bp, Homo sapien
tctcccttgggagttgagccaaagg

SEQ ID NO: 2074330 - DNA, 25 bp, Homo sapien
ttccctgaaccttggtataggtgtg

SEQ ID NO: 2074331 - DNA, 25 bp, Homo sapien
tctggcagacacatacccctttcca

SEQ ID NO: 2074332 - DNA, 25 bp, Homo sapien
tggcagacacatacccctttccagg

SEQ ID NO: 2074333 - DNA, 25 bp, Homo sapien
ggcagacacatacccctttccaggg

SEQ ID NO: 2074334 - DNA, 25 bp, Homo sapien
attctggcagacacatacccctttc

SEQ ID NO: 2074335 - DNA, 25 bp, Homo sapien
ttagaatgacaattgacggccgcat

SEQ ID NO: 2074336 - DNA, 25 bp, Homo sapien
tggggattagaatgacaattgacgg

SEQ ID NO: 2074337 - DNA, 25 bp, Homo sapien
gattagaatgacaattgacggccgc

SEQ ID NO: 2074338 - DNA, 25 bp, Homo sapien
gggattagaatgacaattgacggcc

SEQ ID NO: 2074339 - DNA, 25 bp, Homo sapien
caagagcaatttttggattgcagga

SEQ ID NO: 2074340 - DNA, 25 bp, Homo sapien
attgcaggaggcatgaatagggaca

SEQ ID NO: 2074341 - DNA, 25 bp, Homo sapien
gattcttttcatttcgtgtcctcct

SEQ ID NO: 2074342 - DNA, 25 bp, Homo sapien
gcatgaatagggacaaaaattaaag

SEQ ID NO: 2074343 - DNA, 25 bp, Homo sapien
tcttatccaacagagtgggcccagg

SEQ ID NO: 2074344 - DNA, 25 bp, Homo sapien
gttccagactcatgtgcaggactca

SEQ ID NO: 2074345 - DNA, 25 bp, Homo sapien
tgtccatggaacacggaataccagt

SEQ ID NO: 2074346 - DNA, 25 bp, Homo sapien
gaggacacagcaatgcatcaataag

SEQ ID NO: 2074347 - DNA, 25 bp, Homo sapien
ttctgcctgataggacttcaatttt

SEQ ID NO: 2074348 - DNA, 25 bp, Homo sapien
tttcctcagatgcttgttcactttc

SEQ ID NO: 2074349 - DNA, 25 bp, Homo sapien
gcaatggaacagatatctttttcct

SEQ ID NO: 2074350 - DNA, 25 bp, Homo sapien
tggccagaagcagacatcaacaaca

SEQ ID NO: 2074351 - DNA, 25 bp, Homo sapien
ggacattgccgcttctgcttgtgtt

SEQ ID NO: 2074352 - DNA, 25 bp, Homo sapien
tgcttagtgtagagtgggattgtca

SEQ ID NO: 2074353 - DNA, 25 bp, Homo sapien
gatggaggcaggacattgccgcttc

SEQ ID NO: 2074354 - DNA, 25 bp, Homo sapien
tgtttgcttagtgtagagtgggatt

SEQ ID NO: 2074355 - DNA, 25 bp, Homo sapien
ttctgttgtaggcaagaggtaagtt

SEQ ID NO: 2074356 - DNA, 25 bp, Homo sapien
tatcttctgttgtaggcaagaggta

SEQ ID NO: 2074357 - DNA, 25 bp, Homo sapien
gctcttatcttctgttgtaggcaag

SEQ ID NO: 2074358 - DNA, 25 bp, Homo sapien
cttatcttctgttgtaggcaagagg

SEQ ID NO: 2074359 - DNA, 25 bp, Homo sapien
tgaaatctctccaggtcgcctcctt

SEQ ID NO: 2074360 - DNA, 25 bp, Homo sapien
ctgctggagagaacactgtgacccg

SEQ ID NO: 2074361 - DNA, 25 bp, Homo sapien
ggaagatgtaaatggccaatgatca

SEQ ID NO: 2074362 - DNA, 25 bp, Homo sapien
gatcatgctcagaggcctgaaatct

SEQ ID NO: 2074363 - DNA, 25 bp, Homo sapien
gctgtgtcactatctggtcttttgg

SEQ ID NO: 2074364 - DNA, 25 bp, Homo sapien
tttgttttccattgcaggtgctcca

SEQ ID NO: 2074365 - DNA, 25 bp, Homo sapien
tatgacaagaaaatggcctgctgtg

SEQ ID NO: 2074366 - DNA, 25 bp, Homo sapien
tcaagttcttccaatgaggaggtat

SEQ ID NO: 2074367 - DNA, 25 bp, Homo sapien
tgtgggcttccccagtatcatccat

SEQ ID NO: 2074368 - DNA, 25 bp, Homo sapien
tcatttgtctacagccatctgtcac

SEQ ID NO: 2074369 - DNA, 25 bp, Homo sapien
tcataaaagatgtgggcttccccag

SEQ ID NO: 2074370 - DNA, 25 bp, Homo sapien
tctgtcacttcataaaagatgtggg

SEQ ID NO: 2074371 - DNA, 25 bp, Homo sapien
cacatgacacagcagtcgcgtgatg

SEQ ID NO: 2074372 - DNA, 25 bp, Homo sapien
tgttgcaagaatgcgtgcactgcca

SEQ ID NO: 2074373 - DNA, 25 bp, Homo sapien
aatgagcttccggtctttccccaag

SEQ ID NO: 2074374 - DNA, 25 bp, Homo sapien
cctacatgtgtacttgctgggcctg

SEQ ID NO: 2074375 - DNA, 25 bp, Homo sapien
tcccggaaggtagagggcaagccaa

SEQ ID NO: 2074376 - DNA, 25 bp, Homo sapien
tggcaattattgacgctctgctgct

SEQ ID NO: 2074377 - DNA, 25 bp, Homo sapien
ctctgttttgatgtggcaattattg

SEQ ID NO: 2074378 - DNA, 25 bp, Homo sapien
gcagttgatgccttgagcacagatc

SEQ ID NO: 2074379 - DNA, 25 bp, Homo sapien
catttgttactgaaccttctattcc

SEQ ID NO: 2074380 - DNA, 25 bp, Homo sapien
ggaggagtggggacatttgttactg

SEQ ID NO: 2074381 - DNA, 25 bp, Homo sapien
gagtggggacatttgttactgaacc

SEQ ID NO: 2074382 - DNA, 25 bp, Homo sapien
gggacatttgttactgaaccttcta

SEQ ID NO: 2074383 - DNA, 25 bp, Homo sapien
cattttctaatgacaacgctaggcc

SEQ ID NO: 2074384 - DNA, 25 bp, Homo sapien
gacatgcaatcttgcatgcttttgt

SEQ ID NO: 2074385 - DNA, 25 bp, Homo sapien
ctgctctggacatgcaatcttgcat

SEQ ID NO: 2074386 - DNA, 25 bp, Homo sapien
tctggacatgcaatcttgcatgctt

SEQ ID NO: 2074387 - DNA, 25 bp, Homo sapien
gctctggacatgcaatcttgcatgc

SEQ ID NO: 2074388 - DNA, 25 bp, Homo sapien
gggatcatgcccatttagattttcc

SEQ ID NO: 2074389 - DNA, 25 bp, Homo sapien
accctaaaactaagcgtgctgcttc

SEQ ID NO: 2074390 - DNA, 25 bp, Homo sapien
ggtatccctccatgcccttctgtaa

SEQ ID NO: 2074391 - DNA, 25 bp, Homo sapien
tgaacaacttctgctacccactaaa

SEQ ID NO: 2074392 - DNA, 25 bp, Homo sapien
ttgctttctctagctgcttgtgacc

SEQ ID NO: 2074393 - DNA, 25 bp, Homo sapien
ccttagatattgtccttgagatgaa

SEQ ID NO: 2074394 - DNA, 25 bp, Homo sapien
tgcttgtgaccaagcataaaatgtt

SEQ ID NO: 2074395 - DNA, 25 bp, Homo sapien
caccaggccggaagtagtttgcttt

SEQ ID NO: 2074396 - DNA, 25 bp, Homo sapien
aattgtcttgtgacaatattattac

SEQ ID NO: 2074397 - DNA, 25 bp, Homo sapien
tggccatactgactgtagtctcaat

SEQ ID NO: 2074398 - DNA, 25 bp, Homo sapien
ctgactgtagtctcaattcttctgt

SEQ ID NO: 2074399 - DNA, 25 bp, Homo sapien
ctctgggcaaatcacacaaactacc

SEQ ID NO: 2074400 - DNA, 25 bp, Homo sapien
ggactctgggcaaatcacacaaact

SEQ ID NO: 2074401 - DNA, 25 bp, Homo sapien
gatgccaaatttatgtcctggaaat

SEQ ID NO: 2074402 - DNA, 25 bp, Homo sapien
ggcaatggtaccctcctacaatata

SEQ ID NO: 2074403 - DNA, 25 bp, Homo sapien
catggtccaagaagtgatgccaaat

SEQ ID NO: 2074404 - DNA, 25 bp, Homo sapien
atgctgcgtccttaacgcctcactg

SEQ ID NO: 2074405 - DNA, 25 bp, Homo sapien
cctatagagtaaagctgcagccacc

SEQ ID NO: 2074406 - DNA, 25 bp, Homo sapien
ccattgagaataactgaggccgcag

SEQ ID NO: 2074407 - DNA, 25 bp, Homo sapien
ccgcagatgcatgaaatttgggcct

SEQ ID NO: 2074408 - DNA, 25 bp, Homo sapien
ggatcttatggagcatctcagggct

SEQ ID NO: 2074409 - DNA, 25 bp, Homo sapien
taaggcatgagctccagaaccaagc

SEQ ID NO: 2074410 - DNA, 25 bp, Homo sapien
aaggagcatgttgcaccaggctgag

SEQ ID NO: 2074411 - DNA, 25 bp, Homo sapien
cctcagtgagaaaaggttgtgcacc

SEQ ID NO: 2074412 - DNA, 25 bp, Homo sapien
gttttggagacacaacagatcagcc

SEQ ID NO: 2074413 - DNA, 25 bp, Homo sapien
aatgcttccagttgcggaggcccct

SEQ ID NO: 2074414 - DNA, 25 bp, Homo sapien
ttgtcctggacgtgaaatgcttcca

SEQ ID NO: 2074415 - DNA, 25 bp, Homo sapien
cttcagtaagtcatttgttctgttc

SEQ ID NO: 2074416 - DNA, 25 bp, Homo sapien
gacatcttgtcctggacgtgaaatg

SEQ ID NO: 2074417 - DNA, 25 bp, Homo sapien
ggtgccgactcgtgccccaccgccg

SEQ ID NO: 2074418 - DNA, 25 bp, Homo sapien
tcgccgccgtctgtggtcgccgccg

SEQ ID NO: 2074419 - DNA, 25 bp, Homo sapien
gcagtcgccgccgtctgtggtcgcc

SEQ ID NO: 2074420 - DNA, 25 bp, Homo sapien
cgcgggtccgccctcggtgccgact

SEQ ID NO: 2074421 - DNA, 25 bp, Homo sapien
tcttggccgtctgaccgcatttcca

SEQ ID NO: 2074422 - DNA, 25 bp, Homo sapien
tgggtgtctgcaggcccgaatggaa

SEQ ID NO: 2074423 - DNA, 25 bp, Homo sapien
ccgggataataaggtctgtgggtgt

SEQ ID NO: 2074424 - DNA, 25 bp, Homo sapien
gcccgggagtcctgcgttcttggcc

SEQ ID NO: 2074425 - DNA, 25 bp, Homo sapien
tgtcctataacctgaatgccgtctt

SEQ ID NO: 2074426 - DNA, 25 bp, Homo sapien
aagcaaagttaagcatgtcctataa

SEQ ID NO: 2074427 - DNA, 25 bp, Homo sapien
gaagcaaacgttgcactaagcaaag

SEQ ID NO: 2074428 - DNA, 25 bp, Homo sapien
tgttgaaacccaacatccaatgtat

SEQ ID NO: 2074429 - DNA, 25 bp, Homo sapien
tattgggctctatcagccacattca

SEQ ID NO: 2074430 - DNA, 25 bp, Homo sapien
ttcttctttatgtgtactgagcaag

SEQ ID NO: 2074431 - DNA, 25 bp, Homo sapien
tctgggttgccgattactctgccaa

SEQ ID NO: 2074432 - DNA, 25 bp, Homo sapien
ccattgtggttctgtctctttcttc

SEQ ID NO: 2074433 - DNA, 25 bp, Homo sapien
aagtcattgaaaacgtggtttctat

SEQ ID NO: 2074434 - DNA, 25 bp, Homo sapien
tctgttgcaggttgtataaagtcat

SEQ ID NO: 2074435 - DNA, 25 bp, Homo sapien
attctgttgcaggttgtataaagtc

SEQ ID NO: 2074436 - DNA, 25 bp, Homo sapien
tggtttctatcaagccctccagttt

SEQ ID NO: 2074437 - DNA, 25 bp, Homo sapien
ttccgcttccctcacggcttctctc

SEQ ID NO: 2074438 - DNA, 25 bp, Homo sapien
tccggctccgcttccatctggagga

SEQ ID NO: 2074439 - DNA, 25 bp, Homo sapien
agattccgcttccctcacggcttct

SEQ ID NO: 2074440 - DNA, 25 bp, Homo sapien
tccctcacggcttctctcagaattg

SEQ ID NO: 2074441 - DNA, 25 bp, Homo sapien
gattgcctccgactggtgggtacta

SEQ ID NO: 2074442 - DNA, 25 bp, Homo sapien
tggtgggtactacccggctgtcatg

SEQ ID NO: 2074443 - DNA, 25 bp, Homo sapien
agttcctcctgacgctccggggtgt

SEQ ID NO: 2074444 - DNA, 25 bp, Homo sapien
gggtgtctgattgcctccgactggt

SEQ ID NO: 2074445 - DNA, 25 bp, Homo sapien
gctctggacacaatctgtggctcat

SEQ ID NO: 2074446 - DNA, 25 bp, Homo sapien
ggaaggcttagctctggacacaatc

SEQ ID NO: 2074447 - DNA, 25 bp, Homo sapien
tggtcatagggaaggcttagctctg

SEQ ID NO: 2074448 - DNA, 25 bp, Homo sapien
gcttagctctggacacaatctgtgg

SEQ ID NO: 2074449 - DNA, 25 bp, Homo sapien
aaagctgaacaccaaggatgcctgg

SEQ ID NO: 2074450 - DNA, 25 bp, Homo sapien
tgtcgaggaaatgctagacctggag

SEQ ID NO: 2074451 - DNA, 25 bp, Homo sapien
tgtcctatcctgtcgaggaaatgct

SEQ ID NO: 2074452 - DNA, 25 bp, Homo sapien
gctcatttctgtcctatcctgtcga

SEQ ID NO: 2074453 - DNA, 25 bp, Homo sapien
tgggaaatgaagcatgcgttgagac

SEQ ID NO: 2074454 - DNA, 25 bp, Homo sapien
gaagcatgcgttgagacattatttt

SEQ ID NO: 2074455 - DNA, 25 bp, Homo sapien
gaagctttcatcaggaatctggact

SEQ ID NO: 2074456 - DNA, 25 bp, Homo sapien
cacttcatctgaattaaaaggttga

SEQ ID NO: 2074457 - DNA, 25 bp, Homo sapien
ctgaacgtcaatccaagcccatggg

SEQ ID NO: 2074458 - DNA, 25 bp, Homo sapien
ggtgaatattcagtgcaaggagcag

SEQ ID NO: 2074459 - DNA, 25 bp, Homo sapien
ggaaaagagtctaggtcagcctgaa

SEQ ID NO: 2074460 - DNA, 25 bp, Homo sapien
gcagtgcttgagctggatacgatga

SEQ ID NO: 2074461 - DNA, 25 bp, Homo sapien
tatcttatcactgtacatagataat

SEQ ID NO: 2074462 - DNA, 25 bp, Homo sapien
tatcactgtacatagataattcatg

SEQ ID NO: 2074463 - DNA, 25 bp, Homo sapien
gtacatagataattcatgaaacaga

SEQ ID NO: 2074464 - DNA, 25 bp, Homo sapien
aaacagaagttattatgcatgtgac

SEQ ID NO: 2074465 - DNA, 25 bp, Homo sapien
aaggctctgcccattgtgtttctgg

SEQ ID NO: 2074466 - DNA, 25 bp, Homo sapien
gcggctacccttttctgtagagata

SEQ ID NO: 2074467 - DNA, 25 bp, Homo sapien
gcttttccagtaatgcatgctcctg

SEQ ID NO: 2074468 - DNA, 25 bp, Homo sapien
tattttgtggataggaacaagctct

SEQ ID NO: 2074469 - DNA, 25 bp, Homo sapien
agtccctgccgtttatccaaaggtg

SEQ ID NO: 2074470 - DNA, 25 bp, Homo sapien
aactgcaacattctattgagagata

SEQ ID NO: 2074471 - DNA, 25 bp, Homo sapien
ccaaaggtgcttcacagtatgacct

SEQ ID NO: 2074472 - DNA, 25 bp, Homo sapien
acttccctgcatgagacctttcaat

SEQ ID NO: 2074473 - DNA, 25 bp, Homo sapien
accttttgaaaggttcttcctgcat

SEQ ID NO: 2074474 - DNA, 25 bp, Homo sapien
caggtctctggttgtaaccttttga

SEQ ID NO: 2074475 - DNA, 25 bp, Homo sapien
tcttctctttgacaaccatgtggct

SEQ ID NO: 2074476 - DNA, 25 bp, Homo sapien
ccttcaggtctctggttgtaacctt

SEQ ID NO: 2074477 - DNA, 25 bp, Homo sapien
agaatgtttagccaaagaagtggta

SEQ ID NO: 2074478 - DNA, 25 bp, Homo sapien
gaatgtttagccaaagaagtggtaa

SEQ ID NO: 2074479 - DNA, 25 bp, Homo sapien
gctatggaggagctctcccaccact

SEQ ID NO: 2074480 - DNA, 25 bp, Homo sapien
agacaggagctatggaggagctctc

SEQ ID NO: 2074481 - DNA, 25 bp, Homo sapien
tgctttcccctaatggatttcctgg

SEQ ID NO: 2074482 - DNA, 25 bp, Homo sapien
tcttcaaaaacctcaccgcgatacc

SEQ ID NO: 2074483 - DNA, 25 bp, Homo sapien
gcctgacacttctgatttccgggaa

SEQ ID NO: 2074484 - DNA, 25 bp, Homo sapien
gaaccaagtggtgctgacgtgcaca

SEQ ID NO: 2074485 - DNA, 25 bp, Homo sapien
cttctagtagagcatgagtggatcc

SEQ ID NO: 2074486 - DNA, 25 bp, Homo sapien
tcctaagttctcataccgtgtggtc

SEQ ID NO: 2074487 - DNA, 25 bp, Homo sapien
tagcagtatggcaagtggcatttca

SEQ ID NO: 2074488 - DNA, 25 bp, Homo sapien
tgtgtgcagcaaacgagaggtgact

SEQ ID NO: 2074489 - DNA, 25 bp, Homo sapien
tcttatctataagcagaagctgcct

SEQ ID NO: 2074490 - DNA, 25 bp, Homo sapien
ccatttttgattgtttaggcccatg

SEQ ID NO: 2074491 - DNA, 25 bp, Homo sapien
tcatctgagagaaagtgcaaataat

SEQ ID NO: 2074492 - DNA, 25 bp, Homo sapien
gagagcaattggaggacaattgaag

SEQ ID NO: 2074493 - DNA, 25 bp, Homo sapien
tgaagactgtttcacaaggtcccct

SEQ ID NO: 2074494 - DNA, 25 bp, Homo sapien
gtgcaaataatttctgctggaagag

SEQ ID NO: 2074495 - DNA, 25 bp, Homo sapien
tgtgggcagagagcacaacaccctc

SEQ ID NO: 2074496 - DNA, 25 bp, Homo sapien
tgctggagagtaaggatcagcccag

SEQ ID NO: 2074497 - DNA, 25 bp, Homo sapien
ctgctggagagtaaggatcagccca

SEQ ID NO: 2074498 - DNA, 25 bp, Homo sapien
ggaggggtgagggtcgactgtgggc

SEQ ID NO: 2074499 - DNA, 25 bp, Homo sapien
gctgataaaccagaaggctgctgac

SEQ ID NO: 2074500 - DNA, 25 bp, Homo sapien
tcatctttgcaggtcgcagagatgg

SEQ ID NO: 2074501 - DNA, 25 bp, Homo sapien
tgacgctttgcacatttgacctttg

SEQ ID NO: 2074502 - DNA, 25 bp, Homo sapien
tcattgagagcatgtagaatctcac

SEQ ID NO: 2074503 - DNA, 25 bp, Homo sapien
ctgagataagggacaggagagtgga

SEQ ID NO: 2074504 - DNA, 25 bp, Homo sapien
acaggagagtggagagcaaggtggc

SEQ ID NO: 2074505 - DNA, 25 bp, Homo sapien
aggagagtggagagcaaggtggcaa

SEQ ID NO: 2074506 - DNA, 25 bp, Homo sapien
agagtggagagcaaggtggcaacaa

SEQ ID NO: 2074507 - DNA, 25 bp, Homo sapien
atgcacagtctatgaaggttgatca

SEQ ID NO: 2074508 - DNA, 25 bp, Homo sapien
tgcacagtctatgaaggttgatcat

SEQ ID NO: 2074509 - DNA, 25 bp, Homo sapien
atccaggggtggaaccagataattt

SEQ ID NO: 2074510 - DNA, 25 bp, Homo sapien
tccaggggtggaaccagataatttc

SEQ ID NO: 2074511 - DNA, 25 bp, Homo sapien
caggggtggaaccagataatttcca

SEQ ID NO: 2074512 - DNA, 25 bp, Homo sapien
ggggtggaaccagataatttccatc

SEQ ID NO: 2074513 - DNA, 25 bp, Homo sapien
gaacagccttagacgtgtcctctat

SEQ ID NO: 2074514 - DNA, 25 bp, Homo sapien
cctctttctgaagttatgtgtgcgg

SEQ ID NO: 2074515 - DNA, 25 bp, Homo sapien
acccagcctggtttagatgacccca

SEQ ID NO: 2074516 - DNA, 25 bp, Homo sapien
tagggtcaaggcactaagccaagtg

SEQ ID NO: 2074517 - DNA, 25 bp, Homo sapien
cttatgtccgtttctcctgaaatct

SEQ ID NO: 2074518 - DNA, 25 bp, Homo sapien
atgtccgtttctcctgaaatctgcc

SEQ ID NO: 2074519 - DNA, 25 bp, Homo sapien
ttatgtccgtttctcctgaaatctg

SEQ ID NO: 2074520 - DNA, 25 bp, Homo sapien
tatgtccgtttctcctgaaatctgc

SEQ ID NO: 2074521 - DNA, 25 bp, Homo sapien
aggccatgtgctacgaaacactggg

SEQ ID NO: 2074522 - DNA, 25 bp, Homo sapien
ttggtagaggccatgtgctacgaaa

SEQ ID NO: 2074523 - DNA, 25 bp, Homo sapien
tctgggctcatattctgggtcagag

SEQ ID NO: 2074524 - DNA, 25 bp, Homo sapien
cagacaagtaatagaatgcttggta

SEQ ID NO: 2074525 - DNA, 25 bp, Homo sapien
taagttagttacactgcccatgaga

SEQ ID NO: 2074526 - DNA, 25 bp, Homo sapien
gcgtaagtgctgtatttgggctata

SEQ ID NO: 2074527 - DNA, 25 bp, Homo sapien
tgaggagacacgctttctgctgtct

SEQ ID NO: 2074528 - DNA, 25 bp, Homo sapien
cagtttcagggaaaggcgtaagtgc

SEQ ID NO: 2074529 - DNA, 25 bp, Homo sapien
ttaccacgggccttccatggaaatg

SEQ ID NO: 2074530 - DNA, 25 bp, Homo sapien
accacgggccttccatggaaatgag

SEQ ID NO: 2074531 - DNA, 25 bp, Homo sapien
taccacgggccttccatggaaatga

SEQ ID NO: 2074532 - DNA, 25 bp, Homo sapien
tcactcaagtgcatgtaacggtaca

SEQ ID NO: 2074533 - DNA, 25 bp, Homo sapien
ggtccaactagagaacaactctccg

SEQ ID NO: 2074534 - DNA, 25 bp, Homo sapien
taacggtacagatcacttggtccaa

SEQ ID NO: 2074535 - DNA, 25 bp, Homo sapien
cagtgagcagatccaggctttgcct

SEQ ID NO: 2074536 - DNA, 25 bp, Homo sapien
aagacctctatggtctcctcttgca

SEQ ID NO: 2074537 - DNA, 25 bp, Homo sapien
caaagacctctatggtctcctcttg

SEQ ID NO: 2074538 - DNA, 25 bp, Homo sapien
tctttggcagttggcaagaaaccga

SEQ ID NO: 2074539 - DNA, 25 bp, Homo sapien
aattctttggcagttggcaagaaac

SEQ ID NO: 2074540 - DNA, 25 bp, Homo sapien
gaccgatctgctcagatcttctttt

SEQ ID NO: 2074541 - DNA, 25 bp, Homo sapien
aagaccgatctgctcagatcttctt

SEQ ID NO: 2074542 - DNA, 25 bp, Homo sapien
caaagaccgatctgctcagatcttc

SEQ ID NO: 2074543 - DNA, 25 bp, Homo sapien
cgatctgctcagatcttcttttctc

SEQ ID NO: 2074544 - DNA, 25 bp, Homo sapien
ggttgcataggagatgaggtgccag

SEQ ID NO: 2074545 - DNA, 25 bp, Homo sapien
tcagagcagtctcagaggttggcac

SEQ ID NO: 2074546 - DNA, 25 bp, Homo sapien
gatgaggtgccagtggaggatttta

SEQ ID NO: 2074547 - DNA, 25 bp, Homo sapien
ttaagccatctgctaacatttctgg

SEQ ID NO: 2074548 - DNA, 25 bp, Homo sapien
ttctcaggaggatggtgttttagga

SEQ ID NO: 2074549 - DNA, 25 bp, Homo sapien
aagaatgtggcagtggtgcctccac

SEQ ID NO: 2074550 - DNA, 25 bp, Homo sapien
gttttaggaggtaggcagttccata

SEQ ID NO: 2074551 - DNA, 25 bp, Homo sapien
cagttccataggctttaactgtagt

SEQ ID NO: 2074552 - DNA, 25 bp, Homo sapien
tcataatagaacttttgcagggaac

SEQ ID NO: 2074553 - DNA, 25 bp, Homo sapien
cagtttctttccaatgacaatgctt

SEQ ID NO: 2074554 - DNA, 25 bp, Homo sapien
ttttgcagggaacagtttctttcca

SEQ ID NO: 2074555 - DNA, 25 bp, Homo sapien
tccaatgacaatgcttttaacagcc

SEQ ID NO: 2074556 - DNA, 25 bp, Homo sapien
acacatcagtccagcattgtctgaa

SEQ ID NO: 2074557 - DNA, 25 bp, Homo sapien
aacacatcagtccagcattgtctga

SEQ ID NO: 2074558 - DNA, 25 bp, Homo sapien
agcattgtctgaagcgtacatcata

SEQ ID NO: 2074559 - DNA, 25 bp, Homo sapien
tctgaagcgtacatcatatctttgg

SEQ ID NO: 2074560 - DNA, 25 bp, Homo sapien
gatttgtacttgtgccactctgtga

SEQ ID NO: 2074561 - DNA, 25 bp, Homo sapien
tcctggaatctgtgttggatgcaag

SEQ ID NO: 2074562 - DNA, 25 bp, Homo sapien
ggaccttgacagactaaattggaga

SEQ ID NO: 2074563 - DNA, 25 bp, Homo sapien
ggtgtggtcaatcttaggctttcag

SEQ ID NO: 2074564 - DNA, 25 bp, Homo sapien
caccatggtatggaaagagccatcc

SEQ ID NO: 2074565 - DNA, 25 bp, Homo sapien
tggaaggaatccatgagttgagtgc

SEQ ID NO: 2074566 - DNA, 25 bp, Homo sapien
gaatccatgagttgagtgccttgta

SEQ ID NO: 2074567 - DNA, 25 bp, Homo sapien
atttctcaccatggtatggaaagag

SEQ ID NO: 2074568 - DNA, 25 bp, Homo sapien
ggagctcgcacaattgatggtgtaa

SEQ ID NO: 2074569 - DNA, 25 bp, Homo sapien
tagtggcaataagtgggagctcgca

SEQ ID NO: 2074570 - DNA, 25 bp, Homo sapien
tctgaaatgcttcaccgagcagagc

SEQ ID NO: 2074571 - DNA, 25 bp, Homo sapien
tctgccgtggtcagcatcgttctct

SEQ ID NO: 2074572 - DNA, 25 bp, Homo sapien
ttttccaggttgcacagaatacaaa

SEQ ID NO: 2074573 - DNA, 25 bp, Homo sapien
tctccatcctggtttcggtgcatct

SEQ ID NO: 2074574 - DNA, 25 bp, Homo sapien
tggtttcggtgcatctcagatttgc

SEQ ID NO: 2074575 - DNA, 25 bp, Homo sapien
gctctgccttttaggtgtccgagtg

SEQ ID NO: 2074576 - DNA, 25 bp, Homo sapien
tcaggataatgcgtttttgactgcc

SEQ ID NO: 2074577 - DNA, 25 bp, Homo sapien
gcgtttttgactgccaggtgtaatc

SEQ ID NO: 2074578 - DNA, 25 bp, Homo sapien
gctctgtttcaggataatgcgtttt

SEQ ID NO: 2074579 - DNA, 25 bp, Homo sapien
cacagagttcatgcgctctgtttca

SEQ ID NO: 2074580 - DNA, 25 bp, Homo sapien
cttgatcagttcttgcatatagttg

SEQ ID NO: 2074581 - DNA, 25 bp, Homo sapien
gctccaagttgcactttatggcgtc

SEQ ID NO: 2074582 - DNA, 25 bp, Homo sapien
aaatattcgatttcatggtctgcag

SEQ ID NO: 2074583 - DNA, 25 bp, Homo sapien
gaaatactgaagcatcctccatcag

SEQ ID NO: 2074584 - DNA, 25 bp, Homo sapien
tcttcatttctcgtggtcccttgcc

SEQ ID NO: 2074585 - DNA, 25 bp, Homo sapien
atgtcttcatttctcgtggtccctt

SEQ ID NO: 2074586 - DNA, 25 bp, Homo sapien
tcatttctcgtggtcccttgccctg

SEQ ID NO: 2074587 - DNA, 25 bp, Homo sapien
ccttgccctgaggtcgctctgtttc

SEQ ID NO: 2074588 - DNA, 25 bp, Homo sapien
gaattcagttgtgcaccgagtctga

SEQ ID NO: 2074589 - DNA, 25 bp, Homo sapien
tgtgcaccgagtctgaaaagtcgta

SEQ ID NO: 2074590 - DNA, 25 bp, Homo sapien
gcctctgtgcagaattcagttgtgc

SEQ ID NO: 2074591 - DNA, 25 bp, Homo sapien
gcaacatgcctctgtgcagaattca

SEQ ID NO: 2074592 - DNA, 25 bp, Homo sapien
ggaaccttccgatctgctttatgga

SEQ ID NO: 2074593 - DNA, 25 bp, Homo sapien
cctggggaaccttccgatctgcttt

SEQ ID NO: 2074594 - DNA, 25 bp, Homo sapien
aaccttccgatctgctttatggata

SEQ ID NO: 2074595 - DNA, 25 bp, Homo sapien
ggggaaccttccgatctgctttatg

SEQ ID NO: 2074596 - DNA, 25 bp, Homo sapien
gcaaacttgctctcaggcctttgaa

SEQ ID NO: 2074597 - DNA, 25 bp, Homo sapien
ttgctctcaggcctttgaaatcatc

SEQ ID NO: 2074598 - DNA, 25 bp, Homo sapien
gaattctagaactatcttttctcca

SEQ ID NO: 2074599 - DNA, 25 bp, Homo sapien
cctttgaaatcatcctgaattctag

SEQ ID NO: 2074600 - DNA, 25 bp, Homo sapien
actttctttgtcaaataatgtgaag

SEQ ID NO: 2074601 - DNA, 25 bp, Homo sapien
gtcaaataatgtgaagcagcccaat

SEQ ID NO: 2074602 - DNA, 25 bp, Homo sapien
ctgactttctttgtcaaataatgtg

SEQ ID NO: 2074603 - DNA, 25 bp, Homo sapien
ctttgtcaaataatgtgaagcagcc

SEQ ID NO: 2074604 - DNA, 25 bp, Homo sapien
gcatctagattggagcatgtgctct

SEQ ID NO: 2074605 - DNA, 25 bp, Homo sapien
tctgtgactcacaattttcaggcaa

SEQ ID NO: 2074606 - DNA, 25 bp, Homo sapien
cctcactccctgatgcatctagatt

SEQ ID NO: 2074607 - DNA, 25 bp, Homo sapien
tgctctgccggttctgtgactcaca

SEQ ID NO: 2074608 - DNA, 25 bp, Homo sapien
gaccctgtgaagaggctgtcctgca

SEQ ID NO: 2074609 - DNA, 25 bp, Homo sapien
ttaggtagaaagtgctgcctgggac

SEQ ID NO: 2074610 - DNA, 25 bp, Homo sapien
tggagtacgtgaagtctgaagaccc

SEQ ID NO: 2074611 - DNA, 25 bp, Homo sapien
tgcctgggaccgaaactacctgaaa

SEQ ID NO: 2074612 - DNA, 25 bp, Homo sapien
gttgattggaagacatcttcttgtg

SEQ ID NO: 2074613 - DNA, 25 bp, Homo sapien
tgtccagggaccactttgctagcca

SEQ ID NO: 2074614 - DNA, 25 bp, Homo sapien
tctccacagttgattggaagacatc

SEQ ID NO: 2074615 - DNA, 25 bp, Homo sapien
tcttcttgtgcaggcctctgtccag

SEQ ID NO: 2074616 - DNA, 25 bp, Homo sapien
cagctctgtcccctttcacagggaa

SEQ ID NO: 2074617 - DNA, 25 bp, Homo sapien
agctctgtcccctttcacagggaag

SEQ ID NO: 2074618 - DNA, 25 bp, Homo sapien
gtggctagttatgcagaataaatta

SEQ ID NO: 2074619 - DNA, 25 bp, Homo sapien
aaagtggctagttatgcagaataaa

SEQ ID NO: 2074620 - DNA, 25 bp, Homo sapien
aagtggctagttatgcagaataaat

SEQ ID NO: 2074621 - DNA, 25 bp, Homo sapien
agtggctagttatgcagaataaatt

SEQ ID NO: 2074622 - DNA, 25 bp, Homo sapien
ccaggaattgcgctctgcagtggca

SEQ ID NO: 2074623 - DNA, 25 bp, Homo sapien
tatttactgaatgtccgacgtgccc

SEQ ID NO: 2074624 - DNA, 25 bp, Homo sapien
caaagagaacatggtcacgtgagga

SEQ ID NO: 2074625 - DNA, 25 bp, Homo sapien
gaaaatatatgatgtgggagctcca

SEQ ID NO: 2074626 - DNA, 25 bp, Homo sapien
aaagtgggcaggaaaatgtgatgag

SEQ ID NO: 2074627 - DNA, 25 bp, Homo sapien
gaaagtgggcaggaaaatgtgatga

SEQ ID NO: 2074628 - DNA, 25 bp, Homo sapien
tgaaagtgggcaggaaaatgtgatg

SEQ ID NO: 2074629 - DNA, 25 bp, Homo sapien
ctgaaagtgggcaggaaaatgtgat

SEQ ID NO: 2074630 - DNA, 25 bp, Homo sapien
tagggtgaccaacaatcttagtgtg

SEQ ID NO: 2074631 - DNA, 25 bp, Homo sapien
cctgatcagtgttgtcttgggaagc

SEQ ID NO: 2074632 - DNA, 25 bp, Homo sapien
tgaaggttttcgacatcagccccac

SEQ ID NO: 2074633 - DNA, 25 bp, Homo sapien
gagtatatgtgagtggtagccgcca

SEQ ID NO: 2074634 - DNA, 25 bp, Homo sapien
tgatgcactgaagttctcctggtgg

SEQ ID NO: 2074635 - DNA, 25 bp, Homo sapien
gtgaaaccgcacatttccagggaag

SEQ ID NO: 2074636 - DNA, 25 bp, Homo sapien
gatgtttaccatcctgtgaaaccgc

SEQ ID NO: 2074637 - DNA, 25 bp, Homo sapien
tgagcaatagcaggacccatgatgc

SEQ ID NO: 2074638 - DNA, 25 bp, Homo sapien
cataaacagtaggaggtctcatagc

SEQ ID NO: 2074639 - DNA, 25 bp, Homo sapien
taatctgttactagttacaaagtcc

SEQ ID NO: 2074640 - DNA, 25 bp, Homo sapien
tagcctgtacattgttgtgaacaca

SEQ ID NO: 2074641 - DNA, 25 bp, Homo sapien
taaggaacttcatgggctttgcaag

SEQ ID NO: 2074642 - DNA, 25 bp, Homo sapien
ttttccacaggcactacctaagggc

SEQ ID NO: 2074643 - DNA, 25 bp, Homo sapien
caagaattggaatgtgaaccgggaa

SEQ ID NO: 2074644 - DNA, 25 bp, Homo sapien
gatctatatgccctctgccagagag

SEQ ID NO: 2074645 - DNA, 25 bp, Homo sapien
caagaagccccgcaatattaaatgt

SEQ ID NO: 2074646 - DNA, 25 bp, Homo sapien
ggggccagctgagaattctgtcacc

SEQ ID NO: 2074647 - DNA, 25 bp, Homo sapien
ccatatggggccagctgagaattct

SEQ ID NO: 2074648 - DNA, 25 bp, Homo sapien
ctgaagtggttagaagacggacatg

SEQ ID NO: 2074649 - DNA, 25 bp, Homo sapien
ggaagttcatcccagtaccatatgg

SEQ ID NO: 2074650 - DNA, 25 bp, Homo sapien
tctccaaaagggttgctgtcacaac

SEQ ID NO: 2074651 - DNA, 25 bp, Homo sapien
catgcagtgttgaccagagtgctca

SEQ ID NO: 2074652 - DNA, 25 bp, Homo sapien
tctagcagggttaggtctccaaaag

SEQ ID NO: 2074653 - DNA, 25 bp, Homo sapien
gaccagagtgctcatatctagcagg

SEQ ID NO: 2074654 - DNA, 25 bp, Homo sapien
cactgaatgtgaaagtcatccccag

SEQ ID NO: 2074655 - DNA, 25 bp, Homo sapien
tcatccccagttgaggaaggctggg

SEQ ID NO: 2074656 - DNA, 25 bp, Homo sapien
gaaggctggggcactaggaaataac

SEQ ID NO: 2074657 - DNA, 25 bp, Homo sapien
ggtctctgagttcctctcaaagcct

SEQ ID NO: 2074658 - DNA, 25 bp, Homo sapien
acaagaacttaatcaagtagtcata

SEQ ID NO: 2074659 - DNA, 25 bp, Homo sapien
gatttctacatccttaggatctcca

SEQ ID NO: 2074660 - DNA, 25 bp, Homo sapien
ctttgtatcaataactctccagttt

SEQ ID NO: 2074661 - DNA, 25 bp, Homo sapien
catatagagtatgatcagatctttg

SEQ ID NO: 2074662 - DNA, 25 bp, Homo sapien
gaacatccacagtagaggcagaggc

SEQ ID NO: 2074663 - DNA, 25 bp, Homo sapien
ggtagaaggacgacagagcaacaac

SEQ ID NO: 2074664 - DNA, 25 bp, Homo sapien
caaattgcttgtgcttagacggtag

SEQ ID NO: 2074665 - DNA, 25 bp, Homo sapien
gacggtagaccacaagatagacaac

SEQ ID NO: 2074666 - DNA, 25 bp, Homo sapien
ccaccaccacaaatttgcagtggag

SEQ ID NO: 2074667 - DNA, 25 bp, Homo sapien
accacaaatttgcagtggagcttcc

SEQ ID NO: 2074668 - DNA, 25 bp, Homo sapien
tcagagggctaatcctcgtcctggg

SEQ ID NO: 2074669 - DNA, 25 bp, Homo sapien
agagggctaatcctcgtcctgggaa

SEQ ID NO: 2074670 - DNA, 25 bp, Homo sapien
gcctgaagttctgtcacatccacat

SEQ ID NO: 2074671 - DNA, 25 bp, Homo sapien
catccacatacatttcatctagaaa

SEQ ID NO: 2074672 - DNA, 25 bp, Homo sapien
tcacatccacatacatttcatctag

SEQ ID NO: 2074673 - DNA, 25 bp, Homo sapien
gcctgcctgaagttctgtcacatcc

SEQ ID NO: 2074674 - DNA, 25 bp, Homo sapien
tcatcttgttcacctttaggaggga

SEQ ID NO: 2074675 - DNA, 25 bp, Homo sapien
tcaccaagtgactcttttgccaaag

SEQ ID NO: 2074676 - DNA, 25 bp, Homo sapien
ggatataggaagtagtcaagtagcc

SEQ ID NO: 2074677 - DNA, 25 bp, Homo sapien
cagctgcaagattcgtttttggtga

SEQ ID NO: 2074678 - DNA, 25 bp, Homo sapien
aaaaatgaaaggcacttggagtctt

SEQ ID NO: 2074679 - DNA, 25 bp, Homo sapien
gaagttgttactcctcaggctactg

SEQ ID NO: 2074680 - DNA, 25 bp, Homo sapien
gcagaagttgttactcctcaggcta

SEQ ID NO: 2074681 - DNA, 25 bp, Homo sapien
tgttactcctcaggctactgagaga

SEQ ID NO: 2074682 - DNA, 25 bp, Homo sapien
ggcaatagtggatagaacatctgaa

SEQ ID NO: 2074683 - DNA, 25 bp, Homo sapien
tagtggatagaacatctgaacaagt

SEQ ID NO: 2074684 - DNA, 25 bp, Homo sapien
ggttgaaggcaatagtggatagaac

SEQ ID NO: 2074685 - DNA, 25 bp, Homo sapien
tggatagaacatctgaacaagtttg

SEQ ID NO: 2074686 - DNA, 25 bp, Homo sapien
cgagggcaacgacaggatttgtgct

SEQ ID NO: 2074687 - DNA, 25 bp, Homo sapien
atcactgagtttaacacgcctccag

SEQ ID NO: 2074688 - DNA, 25 bp, Homo sapien
gagtcaaccagccagtgaatcctgg

SEQ ID NO: 2074689 - DNA, 25 bp, Homo sapien
taaacacagataagatgagtcaacc

SEQ ID NO: 2074690 - DNA, 25 bp, Homo sapien
gtacttagaaaagcacctgtgcata

SEQ ID NO: 2074691 - DNA, 25 bp, Homo sapien
ctcttctatcttggtacaccaagta

SEQ ID NO: 2074692 - DNA, 25 bp, Homo sapien
tactttgttgatggcgagccccaaa

SEQ ID NO: 2074693 - DNA, 25 bp, Homo sapien
tattactttgttgatggcgagcccc

SEQ ID NO: 2074694 - DNA, 25 bp, Homo sapien
agcatctgaacgtacatttcctgat

SEQ ID NO: 2074695 - DNA, 25 bp, Homo sapien
ccatcagcatctgaacgtacatttc

SEQ ID NO: 2074696 - DNA, 25 bp, Homo sapien
ttccatcagcatctgaacgtacatt

SEQ ID NO: 2074697 - DNA, 25 bp, Homo sapien
tcagcatctgaacgtacatttcctg

SEQ ID NO: 2074698 - DNA, 25 bp, Homo sapien
taatagtctccttcagagagatgtc

SEQ ID NO: 2074699 - DNA, 25 bp, Homo sapien
ctgtagaggatgtaatagtctcctt

SEQ ID NO: 2074700 - DNA, 25 bp, Homo sapien
tagtctccttcagagagatgtccac

SEQ ID NO: 2074701 - DNA, 25 bp, Homo sapien
ctccttcagagagatgtccactggg

SEQ ID NO: 2074702 - DNA, 25 bp, Homo sapien
ggtaatgccatgtaggaagaagtgt

SEQ ID NO: 2074703 - DNA, 25 bp, Homo sapien
gtaatgccatgtaggaagaagtgtt

SEQ ID NO: 2074704 - DNA, 25 bp, Homo sapien
gaagtgttatctggcgaaattggca

SEQ ID NO: 2074705 - DNA, 25 bp, Homo sapien
taggaagaagtgttatctggcgaaa

SEQ ID NO: 2074706 - DNA, 25 bp, Homo sapien
cagtgtcatagatctctttagtatc

SEQ ID NO: 2074707 - DNA, 25 bp, Homo sapien
ctctggtgagaattccccagtattc

SEQ ID NO: 2074708 - DNA, 25 bp, Homo sapien
ttagctttcttatcctctggtgaga

SEQ ID NO: 2074709 - DNA, 25 bp, Homo sapien
tttgggattcagtgtcatagatctc

SEQ ID NO: 2074710 - DNA, 25 bp, Homo sapien
cttgaagcaaggtcagtttaactga

SEQ ID NO: 2074711 - DNA, 25 bp, Homo sapien
tacttgaagcaaggtcagtttaact

SEQ ID NO: 2074712 - DNA, 25 bp, Homo sapien
tgaagcaaggtcagtttaactgaaa

SEQ ID NO: 2074713 - DNA, 25 bp, Homo sapien
agcaaggtcagtttaactgaaatgg

SEQ ID NO: 2074714 - DNA, 25 bp, Homo sapien
gaaacaaaattaagggagcatgtct

SEQ ID NO: 2074715 - DNA, 25 bp, Homo sapien
gcaacatttactgctactctaactt

SEQ ID NO: 2074716 - DNA, 25 bp, Homo sapien
ttaatatcaatccagcatggaccat

SEQ ID NO: 2074717 - DNA, 25 bp, Homo sapien
ttgaaaagaggtgagccttaatatc

SEQ ID NO: 2074718 - DNA, 25 bp, Homo sapien
gtgcacttgtccaagcacagcttct

SEQ ID NO: 2074719 - DNA, 25 bp, Homo sapien
gcacttgtccaagcacagcttcttc

SEQ ID NO: 2074720 - DNA, 25 bp, Homo sapien
tgtgcacttgtccaagcacagcttc

SEQ ID NO: 2074721 - DNA, 25 bp, Homo sapien
tgcacttgtccaagcacagcttctt

SEQ ID NO: 2074722 - DNA, 25 bp, Homo sapien
ctgggcttctctgaataacccagtg

SEQ ID NO: 2074723 - DNA, 25 bp, Homo sapien
gggcttctctgaataacccagtgtt

SEQ ID NO: 2074724 - DNA, 25 bp, Homo sapien
cttctctgaataacccagtgttcat

SEQ ID NO: 2074725 - DNA, 25 bp, Homo sapien
ggcctgggcttctctgaataaccca

SEQ ID NO: 2074726 - DNA, 25 bp, Homo sapien
caatgggtaagtgtgcttgttgtga

SEQ ID NO: 2074727 - DNA, 25 bp, Homo sapien
tgaattatacctgccgtgtcagcag

SEQ ID NO: 2074728 - DNA, 25 bp, Homo sapien
gtgtcagcagtacccagactcacct

SEQ ID NO: 2074729 - DNA, 25 bp, Homo sapien
ttgttgtgaagcgttttttactggc

SEQ ID NO: 2074730 - DNA, 25 bp, Homo sapien
gttttctgtggttttaggatctgga

SEQ ID NO: 2074731 - DNA, 25 bp, Homo sapien
tctgtggttttaggatctggattta

SEQ ID NO: 2074732 - DNA, 25 bp, Homo sapien
ctgtggttttaggatctggatttag

SEQ ID NO: 2074733 - DNA, 25 bp, Homo sapien
tttctgtggttttaggatctggatt

SEQ ID NO: 2074734 - DNA, 25 bp, Homo sapien
gtaaccaccaaattatggacggctg

SEQ ID NO: 2074735 - DNA, 25 bp, Homo sapien
taccacttcaggtgcatgacgtaac

SEQ ID NO: 2074736 - DNA, 25 bp, Homo sapien
ccaaattatggacggctgtgggatg

SEQ ID NO: 2074737 - DNA, 25 bp, Homo sapien
gcatgacgtaaccaccaaattatgg

SEQ ID NO: 2074738 - DNA, 25 bp, Homo sapien
cagtcatcggcaataactagagatt

SEQ ID NO: 2074739 - DNA, 25 bp, Homo sapien
gacttctcagattatgatgccagtc

SEQ ID NO: 2074740 - DNA, 25 bp, Homo sapien
ctttgatctctgaagcattttttcc

SEQ ID NO: 2074741 - DNA, 25 bp, Homo sapien
gcacaatatgttcctcctcaggact

SEQ ID NO: 2074742 - DNA, 25 bp, Homo sapien
gcgtgctcttcggcacttgaggcca

SEQ ID NO: 2074743 - DNA, 25 bp, Homo sapien
cctgcgtgctcttcggcacttgagg

SEQ ID NO: 2074744 - DNA, 25 bp, Homo sapien
gtgctcttcggcacttgaggccagc

SEQ ID NO: 2074745 - DNA, 25 bp, Homo sapien
ctgcgtgctcttcggcacttgaggc

SEQ ID NO: 2074746 - DNA, 25 bp, Homo sapien
agaccttgacgttgaccacacgtag

SEQ ID NO: 2074747 - DNA, 25 bp, Homo sapien
acccgaagcagaaccaagaccttga

SEQ ID NO: 2074748 - DNA, 25 bp, Homo sapien
aaccaagaccttgacgttgaccaca

SEQ ID NO: 2074749 - DNA, 25 bp, Homo sapien
tggaggtcaagagaacccgaagcag

SEQ ID NO: 2074750 - DNA, 25 bp, Homo sapien
cctggcaaggagactgcaaattcct

SEQ ID NO: 2074751 - DNA, 25 bp, Homo sapien
taggcagctgtagaaagcggtaccc

SEQ ID NO: 2074752 - DNA, 25 bp, Homo sapien
tgtcattcaaacagtctatgtgccc

SEQ ID NO: 2074753 - DNA, 25 bp, Homo sapien
ccaaatccaaactgactgtcattca

SEQ ID NO: 2074754 - DNA, 25 bp, Homo sapien
agcttctttcattattcctttatcc

SEQ ID NO: 2074755 - DNA, 25 bp, Homo sapien
tcccatgataaatctggcaattaag

SEQ ID NO: 2074756 - DNA, 25 bp, Homo sapien
catgataaatctggcaattaagaac

SEQ ID NO: 2074757 - DNA, 25 bp, Homo sapien
aaatctggcaattaagaactttatc

SEQ ID NO: 2074758 - DNA, 25 bp, Homo sapien
gttcagaatacttacacagctgctc

SEQ ID NO: 2074759 - DNA, 25 bp, Homo sapien
caacagcaaagtcaatgttcagaat

SEQ ID NO: 2074760 - DNA, 25 bp, Homo sapien
aaacataaccatccatcaacagcaa

SEQ ID NO: 2074761 - DNA, 25 bp, Homo sapien
ccatcaacagcaaagtcaatgttca

SEQ ID NO: 2074762 - DNA, 25 bp, Homo sapien
taaaaccacacccattcatgcccat

SEQ ID NO: 2074763 - DNA, 25 bp, Homo sapien
tactgtgactcttcatcaaataaac

SEQ ID NO: 2074764 - DNA, 25 bp, Homo sapien
cacactcacataaaaccacacccat

SEQ ID NO: 2074765 - DNA, 25 bp, Homo sapien
acctccttctccaacacactcacat

SEQ ID NO: 2074766 - DNA, 25 bp, Homo sapien
agcagcagcagataaaattcgccgg

SEQ ID NO: 2074767 - DNA, 25 bp, Homo sapien
tacaaagtatgctgctatggtgcat

SEQ ID NO: 2074768 - DNA, 25 bp, Homo sapien
accaccgactggtacaaagtatgct

SEQ ID NO: 2074769 - DNA, 25 bp, Homo sapien
aaattcgccggcataaaatgaggta

SEQ ID NO: 2074770 - DNA, 25 bp, Homo sapien
caacaaagaggccgttccccagcac

SEQ ID NO: 2074771 - DNA, 25 bp, Homo sapien
gtcaacaaagaggccgttccccagc

SEQ ID NO: 2074772 - DNA, 25 bp, Homo sapien
acaaagaggccgttccccagcacca

SEQ ID NO: 2074773 - DNA, 25 bp, Homo sapien
caaagaggccgttccccagcaccat

SEQ ID NO: 2074774 - DNA, 25 bp, Homo sapien
ccaaagggtagtgttgttttgagag

SEQ ID NO: 2074775 - DNA, 25 bp, Homo sapien
cacagtctgatatcaagcagtttag

SEQ ID NO: 2074776 - DNA, 25 bp, Homo sapien
ctttcacagtctgatatcaagcagt

SEQ ID NO: 2074777 - DNA, 25 bp, Homo sapien
cagtctgatatcaagcagtttagta

SEQ ID NO: 2074778 - DNA, 25 bp, Homo sapien
catgttgatatgtacagatattctc

SEQ ID NO: 2074779 - DNA, 25 bp, Homo sapien
tccaacattctttaccatccaggtg

SEQ ID NO: 2074780 - DNA, 25 bp, Homo sapien
attctttaccatccaggtgaatgct

SEQ ID NO: 2074781 - DNA, 25 bp, Homo sapien
gcggtaatacctgatcttaaaattc

SEQ ID NO: 2074782 - DNA, 25 bp, Homo sapien
gtgtaggccattctgctctttaagg

SEQ ID NO: 2074783 - DNA, 25 bp, Homo sapien
taggccattctgctctttaaggcta

SEQ ID NO: 2074784 - DNA, 25 bp, Homo sapien
aggccattctgctctttaaggctaa

SEQ ID NO: 2074785 - DNA, 25 bp, Homo sapien
tgtaggccattctgctctttaaggc

SEQ ID NO: 2074786 - DNA, 25 bp, Homo sapien
cttagaaatttcccaaggcagtaag

SEQ ID NO: 2074787 - DNA, 25 bp, Homo sapien
tactggtgtttcacaaaaaattgat

SEQ ID NO: 2074788 - DNA, 25 bp, Homo sapien
ctgtgtcattgtctgtccagtgtga

SEQ ID NO: 2074789 - DNA, 25 bp, Homo sapien
cagtgtgattcaaaaccaccttctt

SEQ ID NO: 2074790 - DNA, 25 bp, Homo sapien
gtctgtccagtgtgattcaaaacca

SEQ ID NO: 2074791 - DNA, 25 bp, Homo sapien
tacttgtaattcaatgtctgcagag

SEQ ID NO: 2074792 - DNA, 25 bp, Homo sapien
gacatctgggacatttaattctact

SEQ ID NO: 2074793 - DNA, 25 bp, Homo sapien
tctgcagagtcgcattcatgaatgt

SEQ ID NO: 2074794 - DNA, 25 bp, Homo sapien
ggattttggcaaggaactggtagta

SEQ ID NO: 2074795 - DNA, 25 bp, Homo sapien
cagtcttccttggtgcagctgtgtt

SEQ ID NO: 2074796 - DNA, 25 bp, Homo sapien
aaacttgttagagagggaagaactg

SEQ ID NO: 2074797 - DNA, 25 bp, Homo sapien
tcaaaacttgttagagagggaagaa

SEQ ID NO: 2074798 - DNA, 25 bp, Homo sapien
tttgtggagtcccatggtcatccat

SEQ ID NO: 2074799 - DNA, 25 bp, Homo sapien
ctgatgaaccacatgtttgtggagt

SEQ ID NO: 2074800 - DNA, 25 bp, Homo sapien
gatgaaccacatgtttgtggagtcc

SEQ ID NO: 2074801 - DNA, 25 bp, Homo sapien
atgaaccacatgtttgtggagtccc

SEQ ID NO: 2074802 - DNA, 25 bp, Homo sapien
ctttgcgttcagtggtaactgaagc

SEQ ID NO: 2074803 - DNA, 25 bp, Homo sapien
gcgttcagtggtaactgaagcagct

SEQ ID NO: 2074804 - DNA, 25 bp, Homo sapien
tgcgttcagtggtaactgaagcagc

SEQ ID NO: 2074805 - DNA, 25 bp, Homo sapien
tttgcgttcagtggtaactgaagca

SEQ ID NO: 2074806 - DNA, 25 bp, Homo sapien
tccagaacggagagtgaaacactga

SEQ ID NO: 2074807 - DNA, 25 bp, Homo sapien
ttgataggtccagaacggagagtga

SEQ ID NO: 2074808 - DNA, 25 bp, Homo sapien
gagtgaaacactgatttgatgcttt

SEQ ID NO: 2074809 - DNA, 25 bp, Homo sapien
gaaacactgatttgatgctttcaaa

SEQ ID NO: 2074810 - DNA, 25 bp, Homo sapien
tggcttttcgttgaatctgggtcct

SEQ ID NO: 2074811 - DNA, 25 bp, Homo sapien
tgtctctggcttttcgttgaatctg

SEQ ID NO: 2074812 - DNA, 25 bp, Homo sapien
tcagattccagagtgggatgtctct

SEQ ID NO: 2074813 - DNA, 25 bp, Homo sapien
cagattccagagtgggatgtctctg

SEQ ID NO: 2074814 - DNA, 25 bp, Homo sapien
gaccgaacatgtgtggtcatagaat

SEQ ID NO: 2074815 - DNA, 25 bp, Homo sapien
cagggctgaccgaacatgtgtggtc

SEQ ID NO: 2074816 - DNA, 25 bp, Homo sapien
ggctgaccgaacatgtgtggtcata

SEQ ID NO: 2074817 - DNA, 25 bp, Homo sapien
acatgtgtggtcatagaattttcat

SEQ ID NO: 2074818 - DNA, 25 bp, Homo sapien
gtagtcattataggaattttgcatc

SEQ ID NO: 2074819 - DNA, 25 bp, Homo sapien
aatatgaatacttcttgggggcata

SEQ ID NO: 2074820 - DNA, 25 bp, Homo sapien
tgaatacttcttgggggcatagaga

SEQ ID NO: 2074821 - DNA, 25 bp, Homo sapien
tagtcattataggaattttgcatca

SEQ ID NO: 2074822 - DNA, 25 bp, Homo sapien
tcaggaagggtttgcaggagcaagc

SEQ ID NO: 2074823 - DNA, 25 bp, Homo sapien
ggagcaagctcttccgtggacacat

SEQ ID NO: 2074824 - DNA, 25 bp, Homo sapien
cattgacctggcacaccagagaaac

SEQ ID NO: 2074825 - DNA, 25 bp, Homo sapien
ccagagaaaccacggcccgaggctg

SEQ ID NO: 2074826 - DNA, 25 bp, Homo sapien
ttctgggtcattgagggaatgttta

SEQ ID NO: 2074827 - DNA, 25 bp, Homo sapien
ggtcattgagggaatgtttatattc

SEQ ID NO: 2074828 - DNA, 25 bp, Homo sapien
ctgggtcattgagggaatgtttata

SEQ ID NO: 2074829 - DNA, 25 bp, Homo sapien
gttttctgggtcattgagggaatgt

SEQ ID NO: 2074830 - DNA, 25 bp, Homo sapien
cacggtcctctctgggagatgtcat

SEQ ID NO: 2074831 - DNA, 25 bp, Homo sapien
gatgtagacaccttagtgaaagcgt

SEQ ID NO: 2074832 - DNA, 25 bp, Homo sapien
aaatcagaagctggagacacctctc

SEQ ID NO: 2074833 - DNA, 25 bp, Homo sapien
gcgtctctgacctggacactttcag

SEQ ID NO: 2074834 - DNA, 25 bp, Homo sapien
tctctcccaaaagcaacactcccca

SEQ ID NO: 2074835 - DNA, 25 bp, Homo sapien
taataacctcatttccacactctct

SEQ ID NO: 2074836 - DNA, 25 bp, Homo sapien
cacactctctcccaaaagcaacact

SEQ ID NO: 2074837 - DNA, 25 bp, Homo sapien
tcatttccacactctctcccaaaag

SEQ ID NO: 2074838 - DNA, 25 bp, Homo sapien
aactttgagggcgaacatatcgcag

SEQ ID NO: 2074839 - DNA, 25 bp, Homo sapien
gaagctgagcttaagagggccacaa

SEQ ID NO: 2074840 - DNA, 25 bp, Homo sapien
actgctaaagaggtagaagctgagc

SEQ ID NO: 2074841 - DNA, 25 bp, Homo sapien
gaagtttcgtatgttgctaaaatgg

SEQ ID NO: 2074842 - DNA, 25 bp, Homo sapien
cgtatggtacatatggtttgataga

SEQ ID NO: 2074843 - DNA, 25 bp, Homo sapien
acaggacagtcctctttccgaaatg

SEQ ID NO: 2074844 - DNA, 25 bp, Homo sapien
tccaaaacgtatggtacatatggtt

SEQ ID NO: 2074845 - DNA, 25 bp, Homo sapien
ccacaggacagtcctctttccgaaa

SEQ ID NO: 2074846 - DNA, 25 bp, Homo sapien
tatttaaagcagtttgatttatttc

SEQ ID NO: 2074847 - DNA, 25 bp, Homo sapien
taaagcagtttgatttatttcatgc

SEQ ID NO: 2074848 - DNA, 25 bp, Homo sapien
ttaatttcaacattatttaaagcag

SEQ ID NO: 2074849 - DNA, 25 bp, Homo sapien
taatttcaacattatttaaagcagt

SEQ ID NO: 2074850 - DNA, 25 bp, Homo sapien
tatctggtaaaatcaggtcacctcg

SEQ ID NO: 2074851 - DNA, 25 bp, Homo sapien
gaggcaggcactgtagagtctatct

SEQ ID NO: 2074852 - DNA, 25 bp, Homo sapien
gccaagcttgatgatataggccaag

SEQ ID NO: 2074853 - DNA, 25 bp, Homo sapien
gctggacgtatttctgcatgcaaga

SEQ ID NO: 2074854 - DNA, 25 bp, Homo sapien
tttgattgaggaaagattgattctc

SEQ ID NO: 2074855 - DNA, 25 bp, Homo sapien
gattgattctctaaagtttgagtgg

SEQ ID NO: 2074856 - DNA, 25 bp, Homo sapien
gaatttgctgcggttcattgctata

SEQ ID NO: 2074857 - DNA, 25 bp, Homo sapien
agtggtcagacatgcactgaatttg

SEQ ID NO: 2074858 - DNA, 25 bp, Homo sapien
tctttccactgacagtgaacgaaac

SEQ ID NO: 2074859 - DNA, 25 bp, Homo sapien
tttccactgacagtgaacgaaacca

SEQ ID NO: 2074860 - DNA, 25 bp, Homo sapien
gctctttccactgacagtgaacgaa

SEQ ID NO: 2074861 - DNA, 25 bp, Homo sapien
ttccactgacagtgaacgaaaccat

SEQ ID NO: 2074862 - DNA, 25 bp, Homo sapien
ctgaagtgtgccctaccaagtgtgg

SEQ ID NO: 2074863 - DNA, 25 bp, Homo sapien
tagatccaggtttcaatacatgcat

SEQ ID NO: 2074864 - DNA, 25 bp, Homo sapien
tcttcacgatcgcattagatccagg

SEQ ID NO: 2074865 - DNA, 25 bp, Homo sapien
gattagtaaaacgatatcttcacga

SEQ ID NO: 2074866 - DNA, 25 bp, Homo sapien
tcacaacatagatgacaccactgaa

SEQ ID NO: 2074867 - DNA, 25 bp, Homo sapien
caatatcatgggagagtcgaatgat

SEQ ID NO: 2074868 - DNA, 25 bp, Homo sapien
caccactgaaggttgtttaggaaca

SEQ ID NO: 2074869 - DNA, 25 bp, Homo sapien
caaattcaatatcatgggagagtcg

SEQ ID NO: 2074870 - DNA, 25 bp, Homo sapien
aggaaaatatgttcagcagctttac

SEQ ID NO: 2074871 - DNA, 25 bp, Homo sapien
gagaaaggaaaatatgttcagcagc

SEQ ID NO: 2074872 - DNA, 25 bp, Homo sapien
aaaggaaaatatgttcagcagcttt

SEQ ID NO: 2074873 - DNA, 25 bp, Homo sapien
ctgagaaaggaaaatatgttcagca

SEQ ID NO: 2074874 - DNA, 25 bp, Homo sapien
tcatgtgcatccgaaggtcttttat

SEQ ID NO: 2074875 - DNA, 25 bp, Homo sapien
tgtgcatccgaaggtcttttattaa

SEQ ID NO: 2074876 - DNA, 25 bp, Homo sapien
gcatccgaaggtcttttattaatcc

SEQ ID NO: 2074877 - DNA, 25 bp, Homo sapien
attcatgtgcatccgaaggtctttt

SEQ ID NO: 2074878 - DNA, 25 bp, Homo sapien
gttatattaaattcacctcctggaa

SEQ ID NO: 2074879 - DNA, 25 bp, Homo sapien
ccctagatgctctgaaaagaaaggc

SEQ ID NO: 2074880 - DNA, 25 bp, Homo sapien
ttggtgtctcaagtaaagcatctag

SEQ ID NO: 2074881 - DNA, 25 bp, Homo sapien
gtgtttcaaaagagcctaactaggc

SEQ ID NO: 2074882 - DNA, 25 bp, Homo sapien
tatgtatgtacgtagactggccttg

SEQ ID NO: 2074883 - DNA, 25 bp, Homo sapien
ccttatcaagctggagctagtggtc

SEQ ID NO: 2074884 - DNA, 25 bp, Homo sapien
catctttaaggcatctgatacacca

SEQ ID NO: 2074885 - DNA, 25 bp, Homo sapien
tctgatacaccagtcaagtcaccat

SEQ ID NO: 2074886 - DNA, 25 bp, Homo sapien
gtcaagtcaccatgcccttatcaag

SEQ ID NO: 2074887 - DNA, 25 bp, Homo sapien
gctcagattctcagctgaggctgta

SEQ ID NO: 2074888 - DNA, 25 bp, Homo sapien
taatggtaggaagccatagctcaac

SEQ ID NO: 2074889 - DNA, 25 bp, Homo sapien
gctcaacatcaggtcagtatctcca

SEQ ID NO: 2074890 - DNA, 25 bp, Homo sapien
ggatggacttccaaggtgtctcact

SEQ ID NO: 2074891 - DNA, 25 bp, Homo sapien
aggggctgctttgtgaaggcatcag

SEQ ID NO: 2074892 - DNA, 25 bp, Homo sapien
ttgtgaaggcatcagtagtgtactc

SEQ ID NO: 2074893 - DNA, 25 bp, Homo sapien
aaggcatcagtagtgtactccttct

SEQ ID NO: 2074894 - DNA, 25 bp, Homo sapien
taagtatcagtaccacacaggggct

SEQ ID NO: 2074895 - DNA, 25 bp, Homo sapien
gctccattagtcacactggtctggc

SEQ ID NO: 2074896 - DNA, 25 bp, Homo sapien
agcttcttgctccattagtcacact

SEQ ID NO: 2074897 - DNA, 25 bp, Homo sapien
tcttgctccattagtcacactggtc

SEQ ID NO: 2074898 - DNA, 25 bp, Homo sapien
ccattagtcacactggtctggcatt

SEQ ID NO: 2074899 - DNA, 25 bp, Homo sapien
tttcattgttccagtagggtcctta

SEQ ID NO: 2074900 - DNA, 25 bp, Homo sapien
ttcattgttccagtagggtccttac

SEQ ID NO: 2074901 - DNA, 25 bp, Homo sapien
catgttttcattgttccagtagggt

SEQ ID NO: 2074902 - DNA, 25 bp, Homo sapien
tgttttcattgttccagtagggtcc

SEQ ID NO: 2074903 - DNA, 25 bp, Homo sapien
cacccttgaaggtagtcttatattt

SEQ ID NO: 2074904 - DNA, 25 bp, Homo sapien
cttcacccttgaaggtagtcttata

SEQ ID NO: 2074905 - DNA, 25 bp, Homo sapien
tctaattcttcacccttgaaggtag

SEQ ID NO: 2074906 - DNA, 25 bp, Homo sapien
ttctaattcttcacccttgaaggta

SEQ ID NO: 2074907 - DNA, 25 bp, Homo sapien
ttcccctgagattccccacaccaat

SEQ ID NO: 2074908 - DNA, 25 bp, Homo sapien
tgcggtccacttcccctgagattcc

SEQ ID NO: 2074909 - DNA, 25 bp, Homo sapien
gcctgcagttgcctgcggtccactt

SEQ ID NO: 2074910 - DNA, 25 bp, Homo sapien
tgactggcctgcagttgcctgcggt

SEQ ID NO: 2074911 - DNA, 25 bp, Homo sapien
cagacaacagctggagttcatggca

SEQ ID NO: 2074912 - DNA, 25 bp, Homo sapien
actgatgccttcagcggttacatga

SEQ ID NO: 2074913 - DNA, 25 bp, Homo sapien
gttcatggcagttttgtgacaccaa

SEQ ID NO: 2074914 - DNA, 25 bp, Homo sapien
gatcttttgtatctgggtcatcgca

SEQ ID NO: 2074915 - DNA, 25 bp, Homo sapien
cagtactggcaaagttatcagtagc

SEQ ID NO: 2074916 - DNA, 25 bp, Homo sapien
tcactaatgcccacagtactggcaa

SEQ ID NO: 2074917 - DNA, 25 bp, Homo sapien
gcccagggcggtcctcactaatgcc

SEQ ID NO: 2074918 - DNA, 25 bp, Homo sapien
tacctcctcaaccatcccagtttgc

SEQ ID NO: 2074919 - DNA, 25 bp, Homo sapien
ctttcacttttgccccttttctcat

SEQ ID NO: 2074920 - DNA, 25 bp, Homo sapien
ctgaagtcactattttctttcactt

SEQ ID NO: 2074921 - DNA, 25 bp, Homo sapien
tctttcacttttgccccttttctca

SEQ ID NO: 2074922 - DNA, 25 bp, Homo sapien
tcactattttctttcacttttgccc

SEQ ID NO: 2074923 - DNA, 25 bp, Homo sapien
aaccaaatgtggagtgtgcagagca

SEQ ID NO: 2074924 - DNA, 25 bp, Homo sapien
gcactgagtcctgcaagctgtgaac

SEQ ID NO: 2074925 - DNA, 25 bp, Homo sapien
tgtgcgcatacatacagcgttggac

SEQ ID NO: 2074926 - DNA, 25 bp, Homo sapien
gagattgatcttgggcagcactgag

SEQ ID NO: 2074927 - DNA, 25 bp, Homo sapien
tattccacaacgtttctggtttctg

SEQ ID NO: 2074928 - DNA, 25 bp, Homo sapien
aaaagtgtgggaaaatagtgcaact

SEQ ID NO: 2074929 - DNA, 25 bp, Homo sapien
ggcacgggtaaatacaagttctcca

SEQ ID NO: 2074930 - DNA, 25 bp, Homo sapien
aaatagtgcaactgggccactgggt

SEQ ID NO: 2074931 - DNA, 25 bp, Homo sapien
tcttggccatggacgttacaatcag

SEQ ID NO: 2074932 - DNA, 25 bp, Homo sapien
actggaacttcggacaaatctttgt

SEQ ID NO: 2074933 - DNA, 25 bp, Homo sapien
tacaatcagtcagaaatgccgatgc

SEQ ID NO: 2074934 - DNA, 25 bp, Homo sapien
gataacaccagctgaaccaactgga

SEQ ID NO: 2074935 - DNA, 25 bp, Homo sapien
gaaaaacccatccacgatcacacga

SEQ ID NO: 2074936 - DNA, 25 bp, Homo sapien
gatcacacgagtggactgcgtaagg

SEQ ID NO: 2074937 - DNA, 25 bp, Homo sapien
acatcagaggtcttcttcaagtcta

SEQ ID NO: 2074938 - DNA, 25 bp, Homo sapien
ctgaggcatgagaacaagcttcaga

SEQ ID NO: 2074939 - DNA, 25 bp, Homo sapien
ggagaggcctcaataagtagcagga

SEQ ID NO: 2074940 - DNA, 25 bp, Homo sapien
gagaggcctcaataagtagcaggat

SEQ ID NO: 2074941 - DNA, 25 bp, Homo sapien
ctgtagattcaatgagagtgttgcc

SEQ ID NO: 2074942 - DNA, 25 bp, Homo sapien
tgtagattcaatgagagtgttgcct

SEQ ID NO: 2074943 - DNA, 25 bp, Homo sapien
agattcaatgagagtgttgcctttt

SEQ ID NO: 2074944 - DNA, 25 bp, Homo sapien
tagattcaatgagagtgttgccttt

SEQ ID NO: 2074945 - DNA, 25 bp, Homo sapien
tcataagaacgctggccagccttga

SEQ ID NO: 2074946 - DNA, 25 bp, Homo sapien
catagggcacttttggcagccagag

SEQ ID NO: 2074947 - DNA, 25 bp, Homo sapien
cctttttgatccattccagttcggg

SEQ ID NO: 2074948 - DNA, 25 bp, Homo sapien
agccgttactcccacacatagggca

SEQ ID NO: 2074949 - DNA, 25 bp, Homo sapien
gatgggaatcggagagtccatttga

SEQ ID NO: 2074950 - DNA, 25 bp, Homo sapien
ggaatcggagagtccatttgagttt

SEQ ID NO: 2074951 - DNA, 25 bp, Homo sapien
gcagatgggaatcggagagtccatt

SEQ ID NO: 2074952 - DNA, 25 bp, Homo sapien
tgagcagatgggaatcggagagtcc

SEQ ID NO: 2074953 - DNA, 25 bp, Homo sapien
cctgaaatccgactgtgggcctgat

SEQ ID NO: 2074954 - DNA, 25 bp, Homo sapien
agcatttaacttgggctgcaattct

SEQ ID NO: 2074955 - DNA, 25 bp, Homo sapien
cttcctcatagaggttttcagactt

SEQ ID NO: 2074956 - DNA, 25 bp, Homo sapien
ggctgcaattctgcaacccctgaaa

SEQ ID NO: 2074957 - DNA, 25 bp, Homo sapien
atctcctttgtcttgctcattctgt

SEQ ID NO: 2074958 - DNA, 25 bp, Homo sapien
gctcattctgtttccaatcaaagac

SEQ ID NO: 2074959 - DNA, 25 bp, Homo sapien
tgatctcctttgtcttgctcattct

SEQ ID NO: 2074960 - DNA, 25 bp, Homo sapien
ttgctcattctgtttccaatcaaag

SEQ ID NO: 2074961 - DNA, 25 bp, Homo sapien
aaaacttggcacatgacacgtctat

SEQ ID NO: 2074962 - DNA, 25 bp, Homo sapien
acaaaaacttggcacatgacacgtc

SEQ ID NO: 2074963 - DNA, 25 bp, Homo sapien
aaaacaaaaacttggcacatgacac

SEQ ID NO: 2074964 - DNA, 25 bp, Homo sapien
acttggcacatgacacgtctatttc

SEQ ID NO: 2074965 - DNA, 25 bp, Homo sapien
ttatgataatgatttctaacaaaga

SEQ ID NO: 2074966 - DNA, 25 bp, Homo sapien
atgataatgatttctaacaaagaaa

SEQ ID NO: 2074967 - DNA, 25 bp, Homo sapien
tattatgataatgatttctaacaaa

SEQ ID NO: 2074968 - DNA, 25 bp, Homo sapien
tatgataatgatttctaacaaagaa

SEQ ID NO: 2074969 - DNA, 25 bp, Homo sapien
gatgtgggttgcatttagctataac

SEQ ID NO: 2074970 - DNA, 25 bp, Homo sapien
ttgatgtgggttgcatttagctata

SEQ ID NO: 2074971 - DNA, 25 bp, Homo sapien
tgatgtgggttgcatttagctataa

SEQ ID NO: 2074972 - DNA, 25 bp, Homo sapien
gcagcaggccttcttttggaatcaa

SEQ ID NO: 2074973 - DNA, 25 bp, Homo sapien
ggccttcttttggaatcaaggacat

SEQ ID NO: 2074974 - DNA, 25 bp, Homo sapien
gcaggccttcttttggaatcaagga

SEQ ID NO: 2074975 - DNA, 25 bp, Homo sapien
ctgcagcaggccttcttttggaatc

SEQ ID NO: 2074976 - DNA, 25 bp, Homo sapien
tagtcagactatatacttaaggtgc

SEQ ID NO: 2074977 - DNA, 25 bp, Homo sapien
tatccttcgtatgtaaagacactcc

SEQ ID NO: 2074978 - DNA, 25 bp, Homo sapien
tgtatgcatatcatgtcctagatgc

SEQ ID NO: 2074979 - DNA, 25 bp, Homo sapien
cctctgtcttttcgttggaaaactg

SEQ ID NO: 2074980 - DNA, 25 bp, Homo sapien
ctgacactgagaaagccttgtccat

SEQ ID NO: 2074981 - DNA, 25 bp, Homo sapien
gctatgtctgttctcaacaatgcaa

SEQ ID NO: 2074982 - DNA, 25 bp, Homo sapien
cctgggccacttcttaatgaagaca

SEQ ID NO: 2074983 - DNA, 25 bp, Homo sapien
tgttgataaagggattcaccaggaa

SEQ ID NO: 2074984 - DNA, 25 bp, Homo sapien
aacaatgccctcttgatgctgccgg

SEQ ID NO: 2074985 - DNA, 25 bp, Homo sapien
ctcttcaaatctcagtagtgttctg

SEQ ID NO: 2074986 - DNA, 25 bp, Homo sapien
ttttaaccattgactcttcaaatct

SEQ ID NO: 2074987 - DNA, 25 bp, Homo sapien
cttcaaatctcagtagtgttctgca

SEQ ID NO: 2074988 - DNA, 25 bp, Homo sapien
actcttcaaatctcagtagtgttct

SEQ ID NO: 2074989 - DNA, 25 bp, Homo sapien
gcatcttcatacatccagtatttcc

SEQ ID NO: 2074990 - DNA, 25 bp, Homo sapien
caatgcatcttcatacatccagtat

SEQ ID NO: 2074991 - DNA, 25 bp, Homo sapien
cactcaatgcatcttcatacatcca

SEQ ID NO: 2074992 - DNA, 25 bp, Homo sapien
tcaatgcatcttcatacatccagta

SEQ ID NO: 2074993 - DNA, 25 bp, Homo sapien
tgtgatgggacagcagatccttctg

SEQ ID NO: 2074994 - DNA, 25 bp, Homo sapien
cactgcagtgaacgctgtaggcata

SEQ ID NO: 2074995 - DNA, 25 bp, Homo sapien
tgcatttgtcagctacagtcccagg

SEQ ID NO: 2074996 - DNA, 25 bp, Homo sapien
tccctggagttggtgccgatgaaca

SEQ ID NO: 2074997 - DNA, 25 bp, Homo sapien
ggtgctccactgcatctggaaaatg

SEQ ID NO: 2074998 - DNA, 25 bp, Homo sapien
gattcttattatccctcgtctccat

SEQ ID NO: 2074999 - DNA, 25 bp, Homo sapien
gcatctggaaaatgcaactgattct

SEQ ID NO: 2075000 - DNA, 25 bp, Homo sapien
tgcaactgattcttattatccctcg

SEQ ID NO: 2075001 - DNA, 25 bp, Homo sapien
tgaagtcacataaatcacacgtggc

SEQ ID NO: 2075002 - DNA, 25 bp, Homo sapien
cacacgtggcccaaggtaaatacaa

SEQ ID NO: 2075003 - DNA, 25 bp, Homo sapien
tttgataaccagatgcacactacag

SEQ ID NO: 2075004 - DNA, 25 bp, Homo sapien
tttcacccatggcagaagttgtgct

SEQ ID NO: 2075005 - DNA, 25 bp, Homo sapien
tttccatatggtactgaatctgttg

SEQ ID NO: 2075006 - DNA, 25 bp, Homo sapien
ccatatggtactgaatctgttgtac

SEQ ID NO: 2075007 - DNA, 25 bp, Homo sapien
caatgatagcctattgcagtggtaa

SEQ ID NO: 2075008 - DNA, 25 bp, Homo sapien
gcagtggtaatacattgcacagctg

SEQ ID NO: 2075009 - DNA, 25 bp, Homo sapien
ggccgtcattgggagtgtctacagc

SEQ ID NO: 2075010 - DNA, 25 bp, Homo sapien
tgagtcagcacgatttcctcggggc

SEQ ID NO: 2075011 - DNA, 25 bp, Homo sapien
tcattgggagtgtctacagctactc

SEQ ID NO: 2075012 - DNA, 25 bp, Homo sapien
ccgtcattgggagtgtctacagcta

SEQ ID NO: 2075013 - DNA, 25 bp, Homo sapien
ttgaaacacttagtctctagacagt

SEQ ID NO: 2075014 - DNA, 25 bp, Homo sapien
cagggtctttaaaagctgtcaggca

SEQ ID NO: 2075015 - DNA, 25 bp, Homo sapien
gattctccagaaactattcacctga

SEQ ID NO: 2075016 - DNA, 25 bp, Homo sapien
gtttttcaatgagacgtcaacagtt

SEQ ID NO: 2075017 - DNA, 25 bp, Homo sapien
ggtcccatcttcacttgagtcgcat

SEQ ID NO: 2075018 - DNA, 25 bp, Homo sapien
tatttgcactagctatggtcccatc

SEQ ID NO: 2075019 - DNA, 25 bp, Homo sapien
tcttcatcaatactcttcggaagtc

SEQ ID NO: 2075020 - DNA, 25 bp, Homo sapien
cttgagtcgcatatgttcttcatca

SEQ ID NO: 2075021 - DNA, 25 bp, Homo sapien
ccatttgccattaagatggacaaga

SEQ ID NO: 2075022 - DNA, 25 bp, Homo sapien
gcatacatatgttaggccctctttc

SEQ ID NO: 2075023 - DNA, 25 bp, Homo sapien
ctccaggttgcaagtggtactcatc

SEQ ID NO: 2075024 - DNA, 25 bp, Homo sapien
cttcatgtggtaagttcaggaaaca

SEQ ID NO: 2075025 - DNA, 25 bp, Homo sapien
tctagttagtaagtttaagagttga

SEQ ID NO: 2075026 - DNA, 25 bp, Homo sapien
ctccttttcagtttgccctccttgt

SEQ ID NO: 2075027 - DNA, 25 bp, Homo sapien
ccctccttgttctgtgttatcgctg

SEQ ID NO: 2075028 - DNA, 25 bp, Homo sapien
ggctaagtcaccatctgtcctcttc

SEQ ID NO: 2075029 - DNA, 25 bp, Homo sapien
ggaaccttgagagatgtatctgaag

SEQ ID NO: 2075030 - DNA, 25 bp, Homo sapien
taatgctggcgtattgttgtcacct

SEQ ID NO: 2075031 - DNA, 25 bp, Homo sapien
gtctcataattcctggttaatgctg

SEQ ID NO: 2075032 - DNA, 25 bp, Homo sapien
gcgtattgttgtcacctgccaagtg

SEQ ID NO: 2075033 - DNA, 25 bp, Homo sapien
ggacaaatacctaaggacattgcaa

SEQ ID NO: 2075034 - DNA, 25 bp, Homo sapien
aagaacccgatttgatatagtgtaa

SEQ ID NO: 2075035 - DNA, 25 bp, Homo sapien
acttaggacatagttgaaacagttc

SEQ ID NO: 2075036 - DNA, 25 bp, Homo sapien
tgacagtgacatacctacattattc

SEQ ID NO: 2075037 - DNA, 25 bp, Homo sapien
catctttcaatacactgagaagtga

SEQ ID NO: 2075038 - DNA, 25 bp, Homo sapien
tagcatctttcaatacactgagaag

SEQ ID NO: 2075039 - DNA, 25 bp, Homo sapien
ttagcatctttcaatacactgagaa

SEQ ID NO: 2075040 - DNA, 25 bp, Homo sapien
ctttcaatacactgagaagtgatag

SEQ ID NO: 2075041 - DNA, 25 bp, Homo sapien
ggctctgaacagtccatcagagtat

SEQ ID NO: 2075042 - DNA, 25 bp, Homo sapien
ccctcttgatacttggcacgagcgt

SEQ ID NO: 2075043 - DNA, 25 bp, Homo sapien
aacagtccatcagagtatccctctt

SEQ ID NO: 2075044 - DNA, 25 bp, Homo sapien
cttgatacttggcacgagcgtgaat

SEQ ID NO: 2075045 - DNA, 25 bp, Homo sapien
ctttaactagccagaccaaatgttc

SEQ ID NO: 2075046 - DNA, 25 bp, Homo sapien
gccttgtcacaaaccctggattcag

SEQ ID NO: 2075047 - DNA, 25 bp, Homo sapien
ctctttccacactttaactagccag

SEQ ID NO: 2075048 - DNA, 25 bp, Homo sapien
ccacactttaactagccagaccaaa

SEQ ID NO: 2075049 - DNA, 25 bp, Homo sapien
ctattgggcagatgggaaaggtctt

SEQ ID NO: 2075050 - DNA, 25 bp, Homo sapien
tgggaaaggtctttgtaggcgttca

SEQ ID NO: 2075051 - DNA, 25 bp, Homo sapien
agatgggaaaggtctttgtaggcgt

SEQ ID NO: 2075052 - DNA, 25 bp, Homo sapien
gggcagatgggaaaggtctttgtag

SEQ ID NO: 2075053 - DNA, 25 bp, Homo sapien
cttctgaatccaacctctgacactt

SEQ ID NO: 2075054 - DNA, 25 bp, Homo sapien
gaatccaacctctgacacttctttg

SEQ ID NO: 2075055 - DNA, 25 bp, Homo sapien
ctgacacttctttgcaatccgaaat

SEQ ID NO: 2075056 - DNA, 25 bp, Homo sapien
acttctttgcaatccgaaatctgac

SEQ ID NO: 2075057 - DNA, 25 bp, Homo sapien
tcatttggccgcattctgcttccat

SEQ ID NO: 2075058 - DNA, 25 bp, Homo sapien
gtactagagtagtgacccagtgtcc

SEQ ID NO: 2075059 - DNA, 25 bp, Homo sapien
ttgcttcaactgtactagagtagtg

SEQ ID NO: 2075060 - DNA, 25 bp, Homo sapien
cttctgcccctcatttggccgcatt

SEQ ID NO: 2075061 - DNA, 25 bp, Homo sapien
tgttcagtggcggtgatacctgaca

SEQ ID NO: 2075062 - DNA, 25 bp, Homo sapien
gttcagtggcggtgatacctgacag

SEQ ID NO: 2075063 - DNA, 25 bp, Homo sapien
ctgttcagtggcggtgatacctgac

SEQ ID NO: 2075064 - DNA, 25 bp, Homo sapien
ttagttgttattcttattgtcccac

SEQ ID NO: 2075065 - DNA, 25 bp, Homo sapien
taaaatagtggcatttggtatcctg

SEQ ID NO: 2075066 - DNA, 25 bp, Homo sapien
tcctgtctttggcattgacactgcc

SEQ ID NO: 2075067 - DNA, 25 bp, Homo sapien
tgacactgccttctttgctctcaca

SEQ ID NO: 2075068 - DNA, 25 bp, Homo sapien
ctgcataaaatagtggcatttggta

SEQ ID NO: 2075069 - DNA, 25 bp, Homo sapien
tctcttgccctgtgccaagatacat

SEQ ID NO: 2075070 - DNA, 25 bp, Homo sapien
tcaagtggcgaatctcttgccctgt

SEQ ID NO: 2075071 - DNA, 25 bp, Homo sapien
caaaactcaagtggcgaatctcttg

SEQ ID NO: 2075072 - DNA, 25 bp, Homo sapien
cttgccctgtgccaagatacatcat

SEQ ID NO: 2075073 - DNA, 25 bp, Homo sapien
cattctgtgtttctcgaatttttac

SEQ ID NO: 2075074 - DNA, 25 bp, Homo sapien
tgtttctcgaatttttaccaaagca

SEQ ID NO: 2075075 - DNA, 25 bp, Homo sapien
cacgtagggagcctgacatgcagaa

SEQ ID NO: 2075076 - DNA, 25 bp, Homo sapien
caagctattgattggataaagagcc

SEQ ID NO: 2075077 - DNA, 25 bp, Homo sapien
ttcaatggtgtactgaagcaacagc

SEQ ID NO: 2075078 - DNA, 25 bp, Homo sapien
cagcttcaatggtgtactgaagcaa

SEQ ID NO: 2075079 - DNA, 25 bp, Homo sapien
aacatcatcagtatgcctttctcat

SEQ ID NO: 2075080 - DNA, 25 bp, Homo sapien
tcatcagtatgcctttctcatacat

SEQ ID NO: 2075081 - DNA, 25 bp, Homo sapien
ggaatgagcgcccaagtagaatgtc

SEQ ID NO: 2075082 - DNA, 25 bp, Homo sapien
ctgtgggaatgagcgcccaagtaga

SEQ ID NO: 2075083 - DNA, 25 bp, Homo sapien
actgtgggaatgagcgcccaagtag

SEQ ID NO: 2075084 - DNA, 25 bp, Homo sapien
gagcgcccaagtagaatgtctgcca

SEQ ID NO: 2075085 - DNA, 25 bp, Homo sapien
ttcgaagtgttcgccttatatgtac

SEQ ID NO: 2075086 - DNA, 25 bp, Homo sapien
agatgagaagtaatttgcagaagac

SEQ ID NO: 2075087 - DNA, 25 bp, Homo sapien
tatatgtacaaaatcatgagagatg

SEQ ID NO: 2075088 - DNA, 25 bp, Homo sapien
atcatgagagatgagaagtaatttg

SEQ ID NO: 2075089 - DNA, 25 bp, Homo sapien
gcaatgctcacttgcaattgtctcc

SEQ ID NO: 2075090 - DNA, 25 bp, Homo sapien
ctgcaatgctcacttgcaattgtct

SEQ ID NO: 2075091 - DNA, 25 bp, Homo sapien
caatgctcacttgcaattgtctcca

SEQ ID NO: 2075092 - DNA, 25 bp, Homo sapien
tgcaatgctcacttgcaattgtctc

SEQ ID NO: 2075093 - DNA, 25 bp, Homo sapien
ttaatggtacacagctatgctagaa

SEQ ID NO: 2075094 - DNA, 25 bp, Homo sapien
ggtacacagctatgctagaagaaca

SEQ ID NO: 2075095 - DNA, 25 bp, Homo sapien
agaacagaagccacggtaagaaacg

SEQ ID NO: 2075096 - DNA, 25 bp, Homo sapien
ctagaagaacagaagccacggtaag

SEQ ID NO: 2075097 - DNA, 25 bp, Homo sapien
cctggacaaatttactctcttgtaa

SEQ ID NO: 2075098 - DNA, 25 bp, Homo sapien
atcctggacaaatttactctcttgt

SEQ ID NO: 2075099 - DNA, 25 bp, Homo sapien
ccttgaattgttgtgcctgtatact

SEQ ID NO: 2075100 - DNA, 25 bp, Homo sapien
acccttgaattgttgtgcctgtata

SEQ ID NO: 2075101 - DNA, 25 bp, Homo sapien
actttatggtataaggtcttagact

SEQ ID NO: 2075102 - DNA, 25 bp, Homo sapien
tatggtataaggtcttagacttaag

SEQ ID NO: 2075103 - DNA, 25 bp, Homo sapien
acaactttatggtataaggtcttag

SEQ ID NO: 2075104 - DNA, 25 bp, Homo sapien
cttctacaactttatggtataaggt

SEQ ID NO: 2075105 - DNA, 25 bp, Homo sapien
ggttctggatgatctttggagtcat

SEQ ID NO: 2075106 - DNA, 25 bp, Homo sapien
cagcttacccaaatacaacactggt

SEQ ID NO: 2075107 - DNA, 25 bp, Homo sapien
ttggagtcattgtcaccagcttacc

SEQ ID NO: 2075108 - DNA, 25 bp, Homo sapien
tgtccccttctttcagtccatggtt

SEQ ID NO: 2075109 - DNA, 25 bp, Homo sapien
aaacccatggattttgatttgttca

SEQ ID NO: 2075110 - DNA, 25 bp, Homo sapien
gacggttgctaagtaaacccatgga

SEQ ID NO: 2075111 - DNA, 25 bp, Homo sapien
agaggcagaaccttgtaagcaggac

SEQ ID NO: 2075112 - DNA, 25 bp, Homo sapien
gaaccttgtaagcaggacggttgct

SEQ ID NO: 2075113 - DNA, 25 bp, Homo sapien
tggacctccacaaaaagctggattt

SEQ ID NO: 2075114 - DNA, 25 bp, Homo sapien
ttccacaccaacatatccatctttg

SEQ ID NO: 2075115 - DNA, 25 bp, Homo sapien
tcatccatggtggaccaattgcttt

SEQ ID NO: 2075116 - DNA, 25 bp, Homo sapien
tgatcttagaactgaagatgtcctg

SEQ ID NO: 2075117 - DNA, 25 bp, Homo sapien
gggaaagcatgctctttgcatccac

SEQ ID NO: 2075118 - DNA, 25 bp, Homo sapien
ctaacgtggatttgatggggaaagc

SEQ ID NO: 2075119 - DNA, 25 bp, Homo sapien
tattgcttgaagttgtctttctctt

SEQ ID NO: 2075120 - DNA, 25 bp, Homo sapien
ttattgcttgaagttgtctttctct

SEQ ID NO: 2075121 - DNA, 25 bp, Homo sapien
tgcttgaagttgtctttctctttaa

SEQ ID NO: 2075122 - DNA, 25 bp, Homo sapien
ttgcttgaagttgtctttctcttta

SEQ ID NO: 2075123 - DNA, 25 bp, Homo sapien
tctgcttctttaagccttgtctgtt

SEQ ID NO: 2075124 - DNA, 25 bp, Homo sapien
ctgtttttgatttcaaagtcacaca

SEQ ID NO: 2075125 - DNA, 25 bp, Homo sapien
cctggctccttttgatcgtttttct

SEQ ID NO: 2075126 - DNA, 25 bp, Homo sapien
ctgtttttcaaaagtcctggctcct

SEQ ID NO: 2075127 - DNA, 25 bp, Homo sapien
ttcaatactctaggttcttgtttct

SEQ ID NO: 2075128 - DNA, 25 bp, Homo sapien
tttcaatactctaggttcttgtttc

SEQ ID NO: 2075129 - DNA, 25 bp, Homo sapien
gagaacatgttcaataacataacgt

SEQ ID NO: 2075130 - DNA, 25 bp, Homo sapien
tcataacagagaacatgttcaataa

SEQ ID NO: 2075131 - DNA, 25 bp, Homo sapien
gacagctcagggataacaccctgca

SEQ ID NO: 2075132 - DNA, 25 bp, Homo sapien
gacatattaaattcttggttaagat

SEQ ID NO: 2075133 - DNA, 25 bp, Homo sapien
tgtcagtttgaagtgtccatttaga

SEQ ID NO: 2075134 - DNA, 25 bp, Homo sapien
tcagggataacaccctgcagaacac

SEQ ID NO: 2075135 - DNA, 25 bp, Homo sapien
cagtgaatacaggagtcctatatcc

SEQ ID NO: 2075136 - DNA, 25 bp, Homo sapien
tcctatatccacaatagctagaatg

SEQ ID NO: 2075137 - DNA, 25 bp, Homo sapien
tgaatacaggagtcctatatccaca

SEQ ID NO: 2075138 - DNA, 25 bp, Homo sapien
tatccacaatagctagaatgtgggt

SEQ ID NO: 2075139 - DNA, 25 bp, Homo sapien
cagtgatgtcagttttggctccatc

SEQ ID NO: 2075140 - DNA, 25 bp, Homo sapien
ttctcaaacttgtaagtatacacca

SEQ ID NO: 2075141 - DNA, 25 bp, Homo sapien
tctcaaacttgtaagtatacaccat

SEQ ID NO: 2075142 - DNA, 25 bp, Homo sapien
gcagatgactaatcatcatcaggat

SEQ ID NO: 2075143 - DNA, 25 bp, Homo sapien
actgcagatgactaatcatcatcag

SEQ ID NO: 2075144 - DNA, 25 bp, Homo sapien
tgcagatgactaatcatcatcagga

SEQ ID NO: 2075145 - DNA, 25 bp, Homo sapien
ctgcagatgactaatcatcatcagg

SEQ ID NO: 2075146 - DNA, 25 bp, Homo sapien
tgcaagaagcatatacaccatcaat

SEQ ID NO: 2075147 - DNA, 25 bp, Homo sapien
actaggtgttcactggtcttgacag

SEQ ID NO: 2075148 - DNA, 25 bp, Homo sapien
ttcaagttctgcaagagccgtggtt

SEQ ID NO: 2075149 - DNA, 25 bp, Homo sapien
gccgtggttactattcttggtgcaa

SEQ ID NO: 2075150 - DNA, 25 bp, Homo sapien
ctgaagtttattactgccagagact

SEQ ID NO: 2075151 - DNA, 25 bp, Homo sapien
tgactgaagtttattactgccagag

SEQ ID NO: 2075152 - DNA, 25 bp, Homo sapien
tacaatgaccagaggtgactgaagt

SEQ ID NO: 2075153 - DNA, 25 bp, Homo sapien
tggaaggaatacaatgaccagaggt

SEQ ID NO: 2075154 - DNA, 25 bp, Homo sapien
tacttcatagaggaattgaccacaa

SEQ ID NO: 2075155 - DNA, 25 bp, Homo sapien
ataatgcagttgctgtacttcatag

SEQ ID NO: 2075156 - DNA, 25 bp, Homo sapien
gttgctgtacttcatagaggaattg

SEQ ID NO: 2075157 - DNA, 25 bp, Homo sapien
aatgcagttgctgtacttcatagag

SEQ ID NO: 2075158 - DNA, 25 bp, Homo sapien
tctgagtcaacagtacttgcaattt

SEQ ID NO: 2075159 - DNA, 25 bp, Homo sapien
gattcctttgtaggcaacgtagcag

SEQ ID NO: 2075160 - DNA, 25 bp, Homo sapien
gcagtgataatgtgaacctctcagt

SEQ ID NO: 2075161 - DNA, 25 bp, Homo sapien
cttgcaatttttatgacacttacag

SEQ ID NO: 2075162 - DNA, 25 bp, Homo sapien
cccgtgtccgcttaagtcgtgccaa

SEQ ID NO: 2075163 - DNA, 25 bp, Homo sapien
aaagcctgacaagttttggatgaca

SEQ ID NO: 2075164 - DNA, 25 bp, Homo sapien
gaaggaagccaactacaagacccac

SEQ ID NO: 2075165 - DNA, 25 bp, Homo sapien
ccaatgggagatcatggaaaaggcc

SEQ ID NO: 2075166 - DNA, 25 bp, Homo sapien
gccttggtatttgacaactccagcc

SEQ ID NO: 2075167 - DNA, 25 bp, Homo sapien
tggtatttgacaactccagccaatt

SEQ ID NO: 2075168 - DNA, 25 bp, Homo sapien
ctgccttggtatttgacaactccag

SEQ ID NO: 2075169 - DNA, 25 bp, Homo sapien
ccttggtatttgacaactccagcca

SEQ ID NO: 2075170 - DNA, 25 bp, Homo sapien
cttttgccaggtactcattccacca

SEQ ID NO: 2075171 - DNA, 25 bp, Homo sapien
ttttgccaggtactcattccaccag

SEQ ID NO: 2075172 - DNA, 25 bp, Homo sapien
tccttttgccaggtactcattccac

SEQ ID NO: 2075173 - DNA, 25 bp, Homo sapien
ttgccaggtactcattccaccagtt

SEQ ID NO: 2075174 - DNA, 25 bp, Homo sapien
ttccattagtaacagctgataatat

SEQ ID NO: 2075175 - DNA, 25 bp, Homo sapien
atttccattagtaacagctgataat

SEQ ID NO: 2075176 - DNA, 25 bp, Homo sapien
tttccattagtaacagctgataata

SEQ ID NO: 2075177 - DNA, 25 bp, Homo sapien
ctaagactgctttcctcgtttttgc

SEQ ID NO: 2075178 - DNA, 25 bp, Homo sapien
gactgctttcctcgtttttgcaaaa

SEQ ID NO: 2075179 - DNA, 25 bp, Homo sapien
aagactgctttcctcgtttttgcaa

SEQ ID NO: 2075180 - DNA, 25 bp, Homo sapien
tgctttcctcgtttttgcaaaattc

SEQ ID NO: 2075181 - DNA, 25 bp, Homo sapien
ctgctgtctttctaggacctcataa

SEQ ID NO: 2075182 - DNA, 25 bp, Homo sapien
tgctgtctttctaggacctcataac

SEQ ID NO: 2075183 - DNA, 25 bp, Homo sapien
tatgattcccttctaaacctccgtg

SEQ ID NO: 2075184 - DNA, 25 bp, Homo sapien
ttctaaacctccgtgataatcaggc

SEQ ID NO: 2075185 - DNA, 25 bp, Homo sapien
tggtctcatcttccgtccattatga

SEQ ID NO: 2075186 - DNA, 25 bp, Homo sapien
ccgtgataatcaggctggacttcct

SEQ ID NO: 2075187 - DNA, 25 bp, Homo sapien
gaagtatatgcagatacggcagaac

SEQ ID NO: 2075188 - DNA, 25 bp, Homo sapien
catgaagtatatgcagatacggcag

SEQ ID NO: 2075189 - DNA, 25 bp, Homo sapien
ttcatgaagtatatgcagatacggc

SEQ ID NO: 2075190 - DNA, 25 bp, Homo sapien
tcattcatgaagtatatgcagatac

SEQ ID NO: 2075191 - DNA, 25 bp, Homo sapien
tctgaagagtcttctaaaagcctga

SEQ ID NO: 2075192 - DNA, 25 bp, Homo sapien
tgttttcaaattctgaagagtcttc

SEQ ID NO: 2075193 - DNA, 25 bp, Homo sapien
ctaaaagcctgaagcttggcttttc

SEQ ID NO: 2075194 - DNA, 25 bp, Homo sapien
gagtcttctaaaagcctgaagcttg

SEQ ID NO: 2075195 - DNA, 25 bp, Homo sapien
tcctaggttgggctgaagatcagac

SEQ ID NO: 2075196 - DNA, 25 bp, Homo sapien
ctgttccagctctcctaggttgggc

SEQ ID NO: 2075197 - DNA, 25 bp, Homo sapien
gctgaagatcagacaatcgaatacc

SEQ ID NO: 2075198 - DNA, 25 bp, Homo sapien
gagacttccttttatctgttccagc

SEQ ID NO: 2075199 - DNA, 25 bp, Homo sapien
gatgtttgcctcaggtagttagaaa

SEQ ID NO: 2075200 - DNA, 25 bp, Homo sapien
tgtttgcctcaggtagttagaaata

SEQ ID NO: 2075201 - DNA, 25 bp, Homo sapien
acagcagtcgtgatgtttgcctcag

SEQ ID NO: 2075202 - DNA, 25 bp, Homo sapien
atgtttgcctcaggtagttagaaat

SEQ ID NO: 2075203 - DNA, 25 bp, Homo sapien
ggcacaggtgtatggagaatgatac

SEQ ID NO: 2075204 - DNA, 25 bp, Homo sapien
cacaggtgtatggagaatgatacat

SEQ ID NO: 2075205 - DNA, 25 bp, Homo sapien
gcacaggtgtatggagaatgataca

SEQ ID NO: 2075206 - DNA, 25 bp, Homo sapien
aaggcacaggtgtatggagaatgat

SEQ ID NO: 2075207 - DNA, 25 bp, Homo sapien
tagttatcctaggacatgtctctga

SEQ ID NO: 2075208 - DNA, 25 bp, Homo sapien
caaagattgaagcaaggacactggt

SEQ ID NO: 2075209 - DNA, 25 bp, Homo sapien
cacagagctcttgcacttgacacac

SEQ ID NO: 2075210 - DNA, 25 bp, Homo sapien
gacacactggaagcagtaactgatc

SEQ ID NO: 2075211 - DNA, 25 bp, Homo sapien
ttctaaaaataacactgctatttcc

SEQ ID NO: 2075212 - DNA, 25 bp, Homo sapien
ctttctaaaaataacactgctattt

SEQ ID NO: 2075213 - DNA, 25 bp, Homo sapien
taaaaataacactgctatttcccat

SEQ ID NO: 2075214 - DNA, 25 bp, Homo sapien
tctaaaaataacactgctatttccc

SEQ ID NO: 2075215 - DNA, 25 bp, Homo sapien
caatagaacacattacatctgtaat

SEQ ID NO: 2075216 - DNA, 25 bp, Homo sapien
caggaactggatgtcctcaaattct

SEQ ID NO: 2075217 - DNA, 25 bp, Homo sapien
ctaaaaggttacaatagaacacatt

SEQ ID NO: 2075218 - DNA, 25 bp, Homo sapien
ccatccaggaactggatgtcctcaa

SEQ ID NO: 2075219 - DNA, 25 bp, Homo sapien
ctggatatgcagattctttaggtgt

SEQ ID NO: 2075220 - DNA, 25 bp, Homo sapien
gattctttaggtgtcccgtcacaat

SEQ ID NO: 2075221 - DNA, 25 bp, Homo sapien
tatgcagattctttaggtgtcccgt

SEQ ID NO: 2075222 - DNA, 25 bp, Homo sapien
aggtgtcccgtcacaattaattagc

SEQ ID NO: 2075223 - DNA, 25 bp, Homo sapien
gtggtgagtcatgcgactctgctgc

SEQ ID NO: 2075224 - DNA, 25 bp, Homo sapien
agtgtggtgagtcatgcgactctgc

SEQ ID NO: 2075225 - DNA, 25 bp, Homo sapien
ttcagtgtggtgagtcatgcgactc

SEQ ID NO: 2075226 - DNA, 25 bp, Homo sapien
ctttcagtgtggtgagtcatgcgac

SEQ ID NO: 2075227 - DNA, 25 bp, Homo sapien
gcagtactaagagataccctaaggg

SEQ ID NO: 2075228 - DNA, 25 bp, Homo sapien
tagtactagcagataccctaaggga

SEQ ID NO: 2075229 - DNA, 25 bp, Homo sapien
taatttagatgaatgaggaggccag

SEQ ID NO: 2075230 - DNA, 25 bp, Homo sapien
taaatgcagtgcatcagtggacaca

SEQ ID NO: 2075231 - DNA, 25 bp, Homo sapien
cattgtggcacaagggcataatctg

SEQ ID NO: 2075232 - DNA, 25 bp, Homo sapien
tcaattacgtcaaggtggttagcac

SEQ ID NO: 2075233 - DNA, 25 bp, Homo sapien
gaattaaggacaggtatcattagcc

SEQ ID NO: 2075234 - DNA, 25 bp, Homo sapien
cagactagcccaagtatttttgacc

SEQ ID NO: 2075235 - DNA, 25 bp, Homo sapien
gctgccgtaacaaaacattataaac

SEQ ID NO: 2075236 - DNA, 25 bp, Homo sapien
cacggcaataagtcagtttcaagaa

SEQ ID NO: 2075237 - DNA, 25 bp, Homo sapien
tatctcgtttagagcatttgggctg

SEQ ID NO: 2075238 - DNA, 25 bp, Homo sapien
tattaacacatcagccgaaatttct

SEQ ID NO: 2075239 - DNA, 25 bp, Homo sapien
gggcaaaaactcatgaggactctgc

SEQ ID NO: 2075240 - DNA, 25 bp, Homo sapien
tctgcctcttaataccctcctaata

SEQ ID NO: 2075241 - DNA, 25 bp, Homo sapien
tgagcacaagtgttgtgctcctggg

SEQ ID NO: 2075242 - DNA, 25 bp, Homo sapien
aaaatgggcaaaaactcatgaggac

SEQ ID NO: 2075243 - DNA, 25 bp, Homo sapien
ctgactccacctccaagtgtttctc

SEQ ID NO: 2075244 - DNA, 25 bp, Homo sapien
tcactaagtaaaatagattggattc

SEQ ID NO: 2075245 - DNA, 25 bp, Homo sapien
ctaagtaaaatagattggattcatt

SEQ ID NO: 2075246 - DNA, 25 bp, Homo sapien
caaaagaatttctacaagtcactaa

SEQ ID NO: 2075247 - DNA, 25 bp, Homo sapien
accaaaagaatttctacaagtcact

SEQ ID NO: 2075248 - DNA, 25 bp, Homo sapien
gagccagggcacaaaactctttaag

SEQ ID NO: 2075249 - DNA, 25 bp, Homo sapien
agactagggctttccccgccataga

SEQ ID NO: 2075250 - DNA, 25 bp, Homo sapien
caagcacatgcactgagggaacaac

SEQ ID NO: 2075251 - DNA, 25 bp, Homo sapien
tattttagtcatatgccagagctgg

SEQ ID NO: 2075252 - DNA, 25 bp, Homo sapien
tcagctctgctatatcaaaggcctc

SEQ ID NO: 2075253 - DNA, 25 bp, Homo sapien
tgttccctcaaaagcgtaggtctgg

SEQ ID NO: 2075254 - DNA, 25 bp, Homo sapien
gggcacacggatcagtattagcttc

SEQ ID NO: 2075255 - DNA, 25 bp, Homo sapien
gattctaaggagctcagggatccag

SEQ ID NO: 2075256 - DNA, 25 bp, Homo sapien
tcacagacatggatggtaagggtgt

SEQ ID NO: 2075257 - DNA, 25 bp, Homo sapien
tcccatggaaagcacaagctcctgg

SEQ ID NO: 2075258 - DNA, 25 bp, Homo sapien
ccattgtcggcaattaagatggaga

SEQ ID NO: 2075259 - DNA, 25 bp, Homo sapien
tgtacttgtaagtgacgggattcca

SEQ ID NO: 2075260 - DNA, 25 bp, Homo sapien
tatggattcatctctatccactgca

SEQ ID NO: 2075261 - DNA, 25 bp, Homo sapien
gattatctatgattgtaaaacttga

SEQ ID NO: 2075262 - DNA, 25 bp, Homo sapien
aaaatggtgctcttctatggattca

SEQ ID NO: 2075263 - DNA, 25 bp, Homo sapien
tacagatagattaaagtaaaaatgg

SEQ ID NO: 2075264 - DNA, 25 bp, Homo sapien
gctggttgccaagtgcctgtacatt

SEQ ID NO: 2075265 - DNA, 25 bp, Homo sapien
ggagtgggtctcaaggcggttgtca

SEQ ID NO: 2075266 - DNA, 25 bp, Homo sapien
ttgtcatgagcccaggcggcagttg

SEQ ID NO: 2075267 - DNA, 25 bp, Homo sapien
ggtacattagggtctgtatgtgcgt

SEQ ID NO: 2075268 - DNA, 25 bp, Homo sapien
tattaaacagaaacggccaagtgtg

SEQ ID NO: 2075269 - DNA, 25 bp, Homo sapien
aattaacatacttaccacatgggac

SEQ ID NO: 2075270 - DNA, 25 bp, Homo sapien
gaatctctgctgtcataaatctagt

SEQ ID NO: 2075271 - DNA, 25 bp, Homo sapien
aagtgtggtcgcttacgcctgcaat

SEQ ID NO: 2075272 - DNA, 25 bp, Homo sapien
cagtgggatcgaagagatctgttct

SEQ ID NO: 2075273 - DNA, 25 bp, Homo sapien
cacaaacataagtctcatagtattg

SEQ ID NO: 2075274 - DNA, 25 bp, Homo sapien
ctcaggagcatgatcattgatgtta

SEQ ID NO: 2075275 - DNA, 25 bp, Homo sapien
gttaagaacttgcacatacagtggg

SEQ ID NO: 2075276 - DNA, 25 bp, Homo sapien
aaataagggtatacggagagcttgc

SEQ ID NO: 2075277 - DNA, 25 bp, Homo sapien
tacttgtgtaaggttatagctgcag

SEQ ID NO: 2075278 - DNA, 25 bp, Homo sapien
gagagcttgcaagagtccaggaacc

SEQ ID NO: 2075279 - DNA, 25 bp, Homo sapien
tgagtgcattgtatttgccatgggc

SEQ ID NO: 2075280 - DNA, 25 bp, Homo sapien
tatcttatagcagactttctcactg

SEQ ID NO: 2075281 - DNA, 25 bp, Homo sapien
ttttgggagattctcctgtgcattg

SEQ ID NO: 2075282 - DNA, 25 bp, Homo sapien
gatgcttagtggcatccctgacttc

SEQ ID NO: 2075283 - DNA, 25 bp, Homo sapien
tcccatcccagtgtgtcaatccaaa

SEQ ID NO: 2075284 - DNA, 25 bp, Homo sapien
cctttgaagcgtatggaaatctttc

SEQ ID NO: 2075285 - DNA, 25 bp, Homo sapien
taatggtgaccatctctttgaaatg

SEQ ID NO: 2075286 - DNA, 25 bp, Homo sapien
aatcttcaaggaatacagcatccct

SEQ ID NO: 2075287 - DNA, 25 bp, Homo sapien
tcaaaagttcaacaagtttcttgga

SEQ ID NO: 2075288 - DNA, 25 bp, Homo sapien
aatacttaggttgtaccaagcactg

SEQ ID NO: 2075289 - DNA, 25 bp, Homo sapien
cactttgctcctagtaatagaatac

SEQ ID NO: 2075290 - DNA, 25 bp, Homo sapien
caagcactgatttcacgatccagtg

SEQ ID NO: 2075291 - DNA, 25 bp, Homo sapien
tttttctgtggctgtaatacttagg

SEQ ID NO: 2075292 - DNA, 25 bp, Homo sapien
agtgtggtacttcatgagctgctca

SEQ ID NO: 2075293 - DNA, 25 bp, Homo sapien
gagctgctcaggaacatgatggttt

SEQ ID NO: 2075294 - DNA, 25 bp, Homo sapien
cacgcctacaaatgatccctgtggg

SEQ ID NO: 2075295 - DNA, 25 bp, Homo sapien
tctaataccgtagtggttctggtgc

SEQ ID NO: 2075296 - DNA, 25 bp, Homo sapien
cctatgtcattatcatatgccatga

SEQ ID NO: 2075297 - DNA, 25 bp, Homo sapien
gagtttcatgattagtaataatgtc

SEQ ID NO: 2075298 - DNA, 25 bp, Homo sapien
taatgtcaaatgtttgcgaatcatc

SEQ ID NO: 2075299 - DNA, 25 bp, Homo sapien
aatgtttgcgaatcatcctcttcaa

SEQ ID NO: 2075300 - DNA, 25 bp, Homo sapien
cagattcagagacagtcaagcggta

SEQ ID NO: 2075301 - DNA, 25 bp, Homo sapien
agtcccagtgggtgcagattcagag

SEQ ID NO: 2075302 - DNA, 25 bp, Homo sapien
tcagagacagtcaagcggtataaac

SEQ ID NO: 2075303 - DNA, 25 bp, Homo sapien
tcccagtgggtgcagattcagagac

SEQ ID NO: 2075304 - DNA, 25 bp, Homo sapien
taattaatacacttgttgttccaga

SEQ ID NO: 2075305 - DNA, 25 bp, Homo sapien
tgattacccaatactcatcttgcag

SEQ ID NO: 2075306 - DNA, 25 bp, Homo sapien
aaatataggcttattgtcattaaca

SEQ ID NO: 2075307 - DNA, 25 bp, Homo sapien
gctcctggctgaccaatcatgtcct

SEQ ID NO: 2075308 - DNA, 25 bp, Homo sapien
cagcaatgcaagtaatagtttagct

SEQ ID NO: 2075309 - DNA, 25 bp, Homo sapien
gttgtccataccaacgcttctccag

SEQ ID NO: 2075310 - DNA, 25 bp, Homo sapien
agtttagctaacctgctcagtatag

SEQ ID NO: 2075311 - DNA, 25 bp, Homo sapien
tcagtaatttaatccatgtttgtcg

SEQ ID NO: 2075312 - DNA, 25 bp, Homo sapien
gcatcacttgctgtcacctggataa

SEQ ID NO: 2075313 - DNA, 25 bp, Homo sapien
taccacttgagggatcgtcagcatc

SEQ ID NO: 2075314 - DNA, 25 bp, Homo sapien
tagaggagacgagcattattaccac

SEQ ID NO: 2075315 - DNA, 25 bp, Homo sapien
tgttggttcaacagaaaaatatggc

SEQ ID NO: 2075316 - DNA, 25 bp, Homo sapien
gaattcagttctgtgaagcggtctt

SEQ ID NO: 2075317 - DNA, 25 bp, Homo sapien
caggaaattaagattgtggttttat

SEQ ID NO: 2075318 - DNA, 25 bp, Homo sapien
cataatacaggaaattaagattgtg

SEQ ID NO: 2075319 - DNA, 25 bp, Homo sapien
ttaagattgtggttttattcaggat

SEQ ID NO: 2075320 - DNA, 25 bp, Homo sapien
tgaaagctcaattcacctccttgtt

SEQ ID NO: 2075321 - DNA, 25 bp, Homo sapien
caaaaattatagtgtagcctgtacc

SEQ ID NO: 2075322 - DNA, 25 bp, Homo sapien
catgtagattgatggcctaataaga

SEQ ID NO: 2075323 - DNA, 25 bp, Homo sapien
gcctgtaccttaaacaaagtggaga

SEQ ID NO: 2075324 - DNA, 25 bp, Homo sapien
attactctacaacctaaagtctcga

SEQ ID NO: 2075325 - DNA, 25 bp, Homo sapien
cgaagtgaaactcaggaaacagata

SEQ ID NO: 2075326 - DNA, 25 bp, Homo sapien
tacttgagctgcaattactctacaa

SEQ ID NO: 2075327 - DNA, 25 bp, Homo sapien
taaagtctcgaagtgaaactcagga

SEQ ID NO: 2075328 - DNA, 25 bp, Homo sapien
tgtccatagtcacctaaaaactagg

SEQ ID NO: 2075329 - DNA, 25 bp, Homo sapien
gattttccatacaaagcttaaggtg

SEQ ID NO: 2075330 - DNA, 25 bp, Homo sapien
tcatgttcccaaaggcaagagattt

SEQ ID NO: 2075331 - DNA, 25 bp, Homo sapien
catcccagtctcagtcatgttcaac

SEQ ID NO: 2075332 - DNA, 25 bp, Homo sapien
taacagtcaagtcagcctggatgct

SEQ ID NO: 2075333 - DNA, 25 bp, Homo sapien
cctagaatgtggtatggatggcctc

SEQ ID NO: 2075334 - DNA, 25 bp, Homo sapien
gctacgttctctgccaaagggatct

SEQ ID NO: 2075335 - DNA, 25 bp, Homo sapien
cacagcagcattacacacggttgag

SEQ ID NO: 2075336 - DNA, 25 bp, Homo sapien
gatgtctattacctgggctcttaag

SEQ ID NO: 2075337 - DNA, 25 bp, Homo sapien
tcttaagatgtagagggatcgctcc

SEQ ID NO: 2075338 - DNA, 25 bp, Homo sapien
caatgataaaagtacttccagctcc

SEQ ID NO: 2075339 - DNA, 25 bp, Homo sapien
gacatctctggtacaatggcctcat

SEQ ID NO: 2075340 - DNA, 25 bp, Homo sapien
gaaagagggatcatttagtttccaa

SEQ ID NO: 2075341 - DNA, 25 bp, Homo sapien
aatggaaagagggatcatttagttt

SEQ ID NO: 2075342 - DNA, 25 bp, Homo sapien
tggaaagagggatcatttagtttcc

SEQ ID NO: 2075343 - DNA, 25 bp, Homo sapien
agagggatcatttagtttccaaaca

SEQ ID NO: 2075344 - DNA, 25 bp, Homo sapien
ctggccgatgtgatgactagtcgta

SEQ ID NO: 2075345 - DNA, 25 bp, Homo sapien
cgatgtgatgactagtcgtattcat

SEQ ID NO: 2075346 - DNA, 25 bp, Homo sapien
gccgatgtgatgactagtcgtattc

SEQ ID NO: 2075347 - DNA, 25 bp, Homo sapien
tggccgatgtgatgactagtcgtat

SEQ ID NO: 2075348 - DNA, 25 bp, Homo sapien
aaatgagatcgcactggctgcttga

SEQ ID NO: 2075349 - DNA, 25 bp, Homo sapien
cacgcttcactctcaaatgagatcg

SEQ ID NO: 2075350 - DNA, 25 bp, Homo sapien
gctccaagacaaggccataggagag

SEQ ID NO: 2075351 - DNA, 25 bp, Homo sapien
gagttttctgttgctccaagacaag

SEQ ID NO: 2075352 - DNA, 25 bp, Homo sapien
aacgcagcagtaaataacagttcat

SEQ ID NO: 2075353 - DNA, 25 bp, Homo sapien
taaaacgcagcagtaaataacagtt

SEQ ID NO: 2075354 - DNA, 25 bp, Homo sapien
ccaacataaaacgcagcagtaaata

SEQ ID NO: 2075355 - DNA, 25 bp, Homo sapien
acataaaacgcagcagtaaataaca

SEQ ID NO: 2075356 - DNA, 25 bp, Homo sapien
ttttctgattctgtgtaccttctat

SEQ ID NO: 2075357 - DNA, 25 bp, Homo sapien
ctgattctgtgtaccttctatatac

SEQ ID NO: 2075358 - DNA, 25 bp, Homo sapien
tcagaggaaacaggacgtcactaac

SEQ ID NO: 2075359 - DNA, 25 bp, Homo sapien
agaggaaacaggacgtcactaacaa

SEQ ID NO: 2075360 - DNA, 25 bp, Homo sapien
tcagtacaagtacacatcatggttt

SEQ ID NO: 2075361 - DNA, 25 bp, Homo sapien
caacaccaacaatctgtattacaga

SEQ ID NO: 2075362 - DNA, 25 bp, Homo sapien
ggagaactgttctcacaaatacgtg

SEQ ID NO: 2075363 - DNA, 25 bp, Homo sapien
catgtactttttgacctattgactc

SEQ ID NO: 2075364 - DNA, 25 bp, Homo sapien
ccagagttacagacgcttgtgcttt

SEQ ID NO: 2075365 - DNA, 25 bp, Homo sapien
tgttggacacataaggaagagtagg

SEQ ID NO: 2075366 - DNA, 25 bp, Homo sapien
gaacagcaaacttcgtgttggacac

SEQ ID NO: 2075367 - DNA, 25 bp, Homo sapien
gatgtgccccattgcccagagttac

SEQ ID NO: 2075368 - DNA, 25 bp, Homo sapien
ccaatttgccagcactgactctgca

SEQ ID NO: 2075369 - DNA, 25 bp, Homo sapien
tgtacacaataggaggctatgctaa

SEQ ID NO: 2075370 - DNA, 25 bp, Homo sapien
tgactctgcactgaatttttgcaca

SEQ ID NO: 2075371 - DNA, 25 bp, Homo sapien
ggaatatctatcagtaattgtacac

SEQ ID NO: 2075372 - DNA, 25 bp, Homo sapien
gacagagttgcagttagcctcattt

SEQ ID NO: 2075373 - DNA, 25 bp, Homo sapien
tggtgactgaaaccccactaggata

SEQ ID NO: 2075374 - DNA, 25 bp, Homo sapien
caaaaggcagtgctaaatgatttcc

SEQ ID NO: 2075375 - DNA, 25 bp, Homo sapien
gagtcaaaatggttgccaaaaggca

SEQ ID NO: 2075376 - DNA, 25 bp, Homo sapien
cagtaacaagcaggtttttaatttg

SEQ ID NO: 2075377 - DNA, 25 bp, Homo sapien
tgttggtttccagtaacaagcaggt

SEQ ID NO: 2075378 - DNA, 25 bp, Homo sapien
gcttgttggtttccagtaacaagca

SEQ ID NO: 2075379 - DNA, 25 bp, Homo sapien
tcatgcttgttggtttccagtaaca

SEQ ID NO: 2075380 - DNA, 25 bp, Homo sapien
gactcagttgctttatccgtcattg

SEQ ID NO: 2075381 - DNA, 25 bp, Homo sapien
cgaatagtaaacgtgttaacaacat

SEQ ID NO: 2075382 - DNA, 25 bp, Homo sapien
aacatatgactcagttgctttatcc

SEQ ID NO: 2075383 - DNA, 25 bp, Homo sapien
gatattatcgtcactagcatttctt

SEQ ID NO: 2075384 - DNA, 25 bp, Homo sapien
tgctgatgacacactgataaacatt

SEQ ID NO: 2075385 - DNA, 25 bp, Homo sapien
gctgatgacacactgataaacattc

SEQ ID NO: 2075386 - DNA, 25 bp, Homo sapien
tgatgacacactgataaacattctg

SEQ ID NO: 2075387 - DNA, 25 bp, Homo sapien
gatgacacactgataaacattctgg

SEQ ID NO: 2075388 - DNA, 25 bp, Homo sapien
gctgtactcagacatctgagctggt

SEQ ID NO: 2075389 - DNA, 25 bp, Homo sapien
tgagctggtaattcttctatctttg

SEQ ID NO: 2075390 - DNA, 25 bp, Homo sapien
gaccaaatggtgttcagttgtctta

SEQ ID NO: 2075391 - DNA, 25 bp, Homo sapien
gagtttagggtagcatattcaaaga

SEQ ID NO: 2075392 - DNA, 25 bp, Homo sapien
gggcacagtctcacagtcagtctgg

SEQ ID NO: 2075393 - DNA, 25 bp, Homo sapien
ggcacagtctcacagtcagtctggg

SEQ ID NO: 2075394 - DNA, 25 bp, Homo sapien
cacagtctcacagtcagtctgggct

SEQ ID NO: 2075395 - DNA, 25 bp, Homo sapien
tgggcacagtctcacagtcagtctg

SEQ ID NO: 2075396 - DNA, 25 bp, Homo sapien
gggacaggtgtatgcaatgagttca

SEQ ID NO: 2075397 - DNA, 25 bp, Homo sapien
agttttcagcgggacaggtgtatgc

SEQ ID NO: 2075398 - DNA, 25 bp, Homo sapien
tccaggcatgtgcatgcagttttca

SEQ ID NO: 2075399 - DNA, 25 bp, Homo sapien
gttctccaggcatgtgcatgcagtt

SEQ ID NO: 2075400 - DNA, 25 bp, Homo sapien
gccagctatgctcactttactaaag

SEQ ID NO: 2075401 - DNA, 25 bp, Homo sapien
tctgtccagaataaatcctcacatc

SEQ ID NO: 2075402 - DNA, 25 bp, Homo sapien
ggcttacagggatccaaagctggac

SEQ ID NO: 2075403 - DNA, 25 bp, Homo sapien
tttttatggcgataacagcaacggg

SEQ ID NO: 2075404 - DNA, 25 bp, Homo sapien
caaaggctttaccaaccaattctga

SEQ ID NO: 2075405 - DNA, 25 bp, Homo sapien
acaaaggctttaccaaccaattctg

SEQ ID NO: 2075406 - DNA, 25 bp, Homo sapien
cattatgtggatatactgggaagct

SEQ ID NO: 2075407 - DNA, 25 bp, Homo sapien
tcattcattatgtggatatactggg

SEQ ID NO: 2075408 - DNA, 25 bp, Homo sapien
tcattatgtggatatactgggaagc

SEQ ID NO: 2075409 - DNA, 25 bp, Homo sapien
tatgtggatatactgggaagcttgt

SEQ ID NO: 2075410 - DNA, 25 bp, Homo sapien
tagacttgaagatggatctactaga

SEQ ID NO: 2075411 - DNA, 25 bp, Homo sapien
cttagacttgaagatggatctacta

SEQ ID NO: 2075412 - DNA, 25 bp, Homo sapien
gatctactagaaatatgtaatgcca

SEQ ID NO: 2075413 - DNA, 25 bp, Homo sapien
tgaagatggatctactagaaatatg

SEQ ID NO: 2075414 - DNA, 25 bp, Homo sapien
gggaattttggcatcattctgctta

SEQ ID NO: 2075415 - DNA, 25 bp, Homo sapien
tgggaattttggcatcattctgctt

SEQ ID NO: 2075416 - DNA, 25 bp, Homo sapien
ctgggaattttggcatcattctgct

SEQ ID NO: 2075417 - DNA, 25 bp, Homo sapien
ggaattttggcatcattctgcttac

SEQ ID NO: 2075418 - DNA, 25 bp, Homo sapien
tgcattcagacacggttcactactc

SEQ ID NO: 2075419 - DNA, 25 bp, Homo sapien
tttgcattcagacacggttcactac

SEQ ID NO: 2075420 - DNA, 25 bp, Homo sapien
tcctgacccttgatctttgcattca

SEQ ID NO: 2075421 - DNA, 25 bp, Homo sapien
tttttctgtagttcctgacccttga

SEQ ID NO: 2075422 - DNA, 25 bp, Homo sapien
tccacatcaaaatcagtgaagcctg

SEQ ID NO: 2075423 - DNA, 25 bp, Homo sapien
ttttcagacaggcattccacatcaa

SEQ ID NO: 2075424 - DNA, 25 bp, Homo sapien
tcattgaaacgttgacatgtagaaa

SEQ ID NO: 2075425 - DNA, 25 bp, Homo sapien
tgtgtgataaccatagaagaagtga

SEQ ID NO: 2075426 - DNA, 25 bp, Homo sapien
caatgataaatatgggcacagtgcc

SEQ ID NO: 2075427 - DNA, 25 bp, Homo sapien
gagcacagtatcgacatttttcaag

SEQ ID NO: 2075428 - DNA, 25 bp, Homo sapien
tctcaatgatacttgtggcagacaa

SEQ ID NO: 2075429 - DNA, 25 bp, Homo sapien
gacaatgttgatactgtgcccataa

SEQ ID NO: 2075430 - DNA, 25 bp, Homo sapien
tgagtatcattgagaggggagaagt

SEQ ID NO: 2075431 - DNA, 25 bp, Homo sapien
ctgagtatcattgagaggggagaag

SEQ ID NO: 2075432 - DNA, 25 bp, Homo sapien
gagtatcattgagaggggagaagtt

SEQ ID NO: 2075433 - DNA, 25 bp, Homo sapien
gaatattgctaccagagctgagagc

SEQ ID NO: 2075434 - DNA, 25 bp, Homo sapien
agagcgataatcttcacaatgaata

SEQ ID NO: 2075435 - DNA, 25 bp, Homo sapien
agttctccaaaaagagcgataatct

SEQ ID NO: 2075436 - DNA, 25 bp, Homo sapien
gccattcaaaaagccaggggccaga

SEQ ID NO: 2075437 - DNA, 25 bp, Homo sapien
ttgaatcaagcagatcacacaagat

SEQ ID NO: 2075438 - DNA, 25 bp, Homo sapien
taagtagagacaactgctgctttca

SEQ ID NO: 2075439 - DNA, 25 bp, Homo sapien
ctaatataatctacccactggccca

SEQ ID NO: 2075440 - DNA, 25 bp, Homo sapien
gattcaagatgtatattccatcctg

SEQ ID NO: 2075441 - DNA, 25 bp, Homo sapien
tgccatcatcatacagttcaggtat

SEQ ID NO: 2075442 - DNA, 25 bp, Homo sapien
aatctgtagggaaccagatctgctt

SEQ ID NO: 2075443 - DNA, 25 bp, Homo sapien
tgggggtctgtgatcctttgaaatc

SEQ ID NO: 2075444 - DNA, 25 bp, Homo sapien
tgtttagtctcctctcttatctggg

SEQ ID NO: 2075445 - DNA, 25 bp, Homo sapien
cgtcctgtaagtggcatttcaccag

SEQ ID NO: 2075446 - DNA, 25 bp, Homo sapien
tttcgtcctgtaagtggcatttcac

SEQ ID NO: 2075447 - DNA, 25 bp, Homo sapien
cctttcgtcctgtaagtggcatttc

SEQ ID NO: 2075448 - DNA, 25 bp, Homo sapien
ggcatttcaccaggtatttctcttc

SEQ ID NO: 2075449 - DNA, 25 bp, Homo sapien
cttgaatcaaatccttgtagtttga

SEQ ID NO: 2075450 - DNA, 25 bp, Homo sapien
tgtgtaagattgatcatcaggcagt

SEQ ID NO: 2075451 - DNA, 25 bp, Homo sapien
cagtactcagcagatgacaccagac

SEQ ID NO: 2075452 - DNA, 25 bp, Homo sapien
tatgaatgaggaagcatcccagtac

SEQ ID NO: 2075453 - DNA, 25 bp, Homo sapien
agtgttgccaagtggctaaattgac

SEQ ID NO: 2075454 - DNA, 25 bp, Homo sapien
tgcggttggcttagtgttgccaagt

SEQ ID NO: 2075455 - DNA, 25 bp, Homo sapien
gccaagtggctaaattgacgcatat

SEQ ID NO: 2075456 - DNA, 25 bp, Homo sapien
gtggctaaattgacgcatattccat

SEQ ID NO: 2075457 - DNA, 25 bp, Homo sapien
gacagtgaaactagacaattctgat

SEQ ID NO: 2075458 - DNA, 25 bp, Homo sapien
caaaatggaagtatgattgttcaga

SEQ ID NO: 2075459 - DNA, 25 bp, Homo sapien
catctatggttcttactgaagacag

SEQ ID NO: 2075460 - DNA, 25 bp, Homo sapien
cctagttggcaatatgaacctgcat

SEQ ID NO: 2075461 - DNA, 25 bp, Homo sapien
ccagaaatatctaccatacttgtgg

SEQ ID NO: 2075462 - DNA, 25 bp, Homo sapien
gacttaggaccatgacgctctatgt

SEQ ID NO: 2075463 - DNA, 25 bp, Homo sapien
tgaaatgggaaacttggacttagga

SEQ ID NO: 2075464 - DNA, 25 bp, Homo sapien
ttttggcgtaaagacattgctgtga

SEQ ID NO: 2075465 - DNA, 25 bp, Homo sapien
catgtttgaaggatacaaattggca

SEQ ID NO: 2075466 - DNA, 25 bp, Homo sapien
ggcagactttatccccatgtccaca

SEQ ID NO: 2075467 - DNA, 25 bp, Homo sapien
ggtggtagtgccacactcctcatgt

SEQ ID NO: 2075468 - DNA, 25 bp, Homo sapien
ggtagtgccacactcctcatgtttg

SEQ ID NO: 2075469 - DNA, 25 bp, Homo sapien
cccaaaaccctttggcaaaatgcat

SEQ ID NO: 2075470 - DNA, 25 bp, Homo sapien
agctcttgcccagaagatatcaaaa

SEQ ID NO: 2075471 - DNA, 25 bp, Homo sapien
tgacatcatgtttcttcgcaacagg

SEQ ID NO: 2075472 - DNA, 25 bp, Homo sapien
atttccaattacagcagctcttgcc

SEQ ID NO: 2075473 - DNA, 25 bp, Homo sapien
tcaaacgatgaggatcataaagtaa

SEQ ID NO: 2075474 - DNA, 25 bp, Homo sapien
gacttgtatagtaaagccaacagtt

SEQ ID NO: 2075475 - DNA, 25 bp, Homo sapien
tgtcatcgtcagaaaagttgattcc

SEQ ID NO: 2075476 - DNA, 25 bp, Homo sapien
gtatagtaaagccaacagttgtttg

SEQ ID NO: 2075477 - DNA, 25 bp, Homo sapien
cagttgtttgttgtcatcgtcagaa

SEQ ID NO: 2075478 - DNA, 25 bp, Homo sapien
gatctgagcgttgacagtgaaacaa

SEQ ID NO: 2075479 - DNA, 25 bp, Homo sapien
aggtaaactggagcatgtcagaact

SEQ ID NO: 2075480 - DNA, 25 bp, Homo sapien
tgaaacaaatagaggtaaactggag

SEQ ID NO: 2075481 - DNA, 25 bp, Homo sapien
tcagcagtagatcttggcccttgga

SEQ ID NO: 2075482 - DNA, 25 bp, Homo sapien
tgtatgcgtttgctggacatcaagt

SEQ ID NO: 2075483 - DNA, 25 bp, Homo sapien
gagtggctctacttaaagctaaagc

SEQ ID NO: 2075484 - DNA, 25 bp, Homo sapien
acatcaagtgactggtggcgagccg

SEQ ID NO: 2075485 - DNA, 25 bp, Homo sapien
gctcctttctgtgtgttgaacttag

SEQ ID NO: 2075486 - DNA, 25 bp, Homo sapien
tgcacatggacacgatatgggacat

SEQ ID NO: 2075487 - DNA, 25 bp, Homo sapien
gcacatggacacgatatgggacatg

SEQ ID NO: 2075488 - DNA, 25 bp, Homo sapien
cacatggacacgatatgggacatgc

SEQ ID NO: 2075489 - DNA, 25 bp, Homo sapien
ttcaatgttattacaccagatttgg

SEQ ID NO: 2075490 - DNA, 25 bp, Homo sapien
taactgcggcttgttcttgttggtg

SEQ ID NO: 2075491 - DNA, 25 bp, Homo sapien
gcttcaaggggagcggagtccttct

SEQ ID NO: 2075492 - DNA, 25 bp, Homo sapien
ctcgctccgtctacctgttttatgg

SEQ ID NO: 2075493 - DNA, 25 bp, Homo sapien
tgcagacccagaatgcgcacacaag

SEQ ID NO: 2075494 - DNA, 25 bp, Homo sapien
acccagaatgcgcacacaagttttt

SEQ ID NO: 2075495 - DNA, 25 bp, Homo sapien
cagacccagaatgcgcacacaagtt

SEQ ID NO: 2075496 - DNA, 25 bp, Homo sapien
actgcagacccagaatgcgcacaca

SEQ ID NO: 2075497 - DNA, 25 bp, Homo sapien
gagctagttatacgggtagggtcaa

SEQ ID NO: 2075498 - DNA, 25 bp, Homo sapien
tcaaccatgcagatagagcacgagt

SEQ ID NO: 2075499 - DNA, 25 bp, Homo sapien
gcaccttttatctgctgaggcttca

SEQ ID NO: 2075500 - DNA, 25 bp, Homo sapien
cacgagttagccacaagcacctttt

SEQ ID NO: 2075501 - DNA, 25 bp, Homo sapien
ttgatgcattaagccctgtgattcc

SEQ ID NO: 2075502 - DNA, 25 bp, Homo sapien
tagcagtgtacttagaaaccaccgt

SEQ ID NO: 2075503 - DNA, 25 bp, Homo sapien
tgactccctgcaggctagcagtgta

SEQ ID NO: 2075504 - DNA, 25 bp, Homo sapien
aactcaatgagatctgagcccttct

SEQ ID NO: 2075505 - DNA, 25 bp, Homo sapien
caagttttgcacatgcatagaattt

SEQ ID NO: 2075506 - DNA, 25 bp, Homo sapien
tccataccatctttcaggtaaagtg

SEQ ID NO: 2075507 - DNA, 25 bp, Homo sapien
taaagtgaaaagtccaacatcactg

SEQ ID NO: 2075508 - DNA, 25 bp, Homo sapien
aagtgaaaagtccaacatcactgtt

SEQ ID NO: 2075509 - DNA, 25 bp, Homo sapien
tattccaagggtgcatttatgtccc

SEQ ID NO: 2075510 - DNA, 25 bp, Homo sapien
ctattccaagggtgcatttatgtcc

SEQ ID NO: 2075511 - DNA, 25 bp, Homo sapien
gcggagtccttgattgttacaacaa

SEQ ID NO: 2075512 - DNA, 25 bp, Homo sapien
actccttctcttgaagtgcatatcc

SEQ ID NO: 2075513 - DNA, 25 bp, Homo sapien
aaacacccatacttctatgaactcc

SEQ ID NO: 2075514 - DNA, 25 bp, Homo sapien
ccctgattacatgcggagtccttga

SEQ ID NO: 2075515 - DNA, 25 bp, Homo sapien
tgtcttcactgacaggtgaactgaa

SEQ ID NO: 2075516 - DNA, 25 bp, Homo sapien
tgtgtgaattgaaccggtttgatat

SEQ ID NO: 2075517 - DNA, 25 bp, Homo sapien
gactggtattttccggttgtcttca

SEQ ID NO: 2075518 - DNA, 25 bp, Homo sapien
ctgtgactggtattttccggttgtc

SEQ ID NO: 2075519 - DNA, 25 bp, Homo sapien
tttgtattgcatggtagatttgaac

SEQ ID NO: 2075520 - DNA, 25 bp, Homo sapien
tttgaacgatgagtcttttggccat

SEQ ID NO: 2075521 - DNA, 25 bp, Homo sapien
catcgtggggtgtttttgtattgca

SEQ ID NO: 2075522 - DNA, 25 bp, Homo sapien
aaaaatctgatgaaacatcgtgggg

SEQ ID NO: 2075523 - DNA, 25 bp, Homo sapien
tgtgggtgcttggaaagtaggagtc

SEQ ID NO: 2075524 - DNA, 25 bp, Homo sapien
agagtgctgagttcatagcccttca

SEQ ID NO: 2075525 - DNA, 25 bp, Homo sapien
tgttttatctcccacatccagcaga

SEQ ID NO: 2075526 - DNA, 25 bp, Homo sapien
tttatctcccacatccagcagagtg

SEQ ID NO: 2075527 - DNA, 25 bp, Homo sapien
ctcatctactctgaagctgacagct

SEQ ID NO: 2075528 - DNA, 25 bp, Homo sapien
ggctgcctctgcaagtcttactgac

SEQ ID NO: 2075529 - DNA, 25 bp, Homo sapien
aagctgacagctgccattacggctg

SEQ ID NO: 2075530 - DNA, 25 bp, Homo sapien
gcttttaatatactggtcatggctg

SEQ ID NO: 2075531 - DNA, 25 bp, Homo sapien
ctttcacaaagacagcatgaaatgt

SEQ ID NO: 2075532 - DNA, 25 bp, Homo sapien
gaaatgtgatattcttgaatgactt

SEQ ID NO: 2075533 - DNA, 25 bp, Homo sapien
ttaccagtagtatcaaagactttca

SEQ ID NO: 2075534 - DNA, 25 bp, Homo sapien
ttagttaccagtagtatcaaagact

SEQ ID NO: 2075535 - DNA, 25 bp, Homo sapien
gcttgattgggtttctgatggagaa

SEQ ID NO: 2075536 - DNA, 25 bp, Homo sapien
catttagcatcctgagctcccttaa

SEQ ID NO: 2075537 - DNA, 25 bp, Homo sapien
tgtgacagatccagatgccagcctc

SEQ ID NO: 2075538 - DNA, 25 bp, Homo sapien
ctctgagcttttgtgctaaatgatg

SEQ ID NO: 2075539 - DNA, 25 bp, Homo sapien
aactacactgtcttccgtggagtgc

SEQ ID NO: 2075540 - DNA, 25 bp, Homo sapien
ccgtggagtgccgaatttttgacag

SEQ ID NO: 2075541 - DNA, 25 bp, Homo sapien
tgccgaatttttgacaggtctctgt

SEQ ID NO: 2075542 - DNA, 25 bp, Homo sapien
ctctgtcctttgttcgctgttgtat

SEQ ID NO: 2075543 - DNA, 25 bp, Homo sapien
gttcccagcaagttgagctgaacca

SEQ ID NO: 2075544 - DNA, 25 bp, Homo sapien
caagttgagctgaaccacctgtcat

SEQ ID NO: 2075545 - DNA, 25 bp, Homo sapien
gcaagttgagctgaaccacctgtca

SEQ ID NO: 2075546 - DNA, 25 bp, Homo sapien
ctggcagttcccagcaagttgagct

SEQ ID NO: 2075547 - DNA, 25 bp, Homo sapien
tctcacatggaatgcgaagcagcat

SEQ ID NO: 2075548 - DNA, 25 bp, Homo sapien
tatagaatcaccagatagcagtaga

SEQ ID NO: 2075549 - DNA, 25 bp, Homo sapien
ctatagaatcaccagatagcagtag

SEQ ID NO: 2075550 - DNA, 25 bp, Homo sapien
tacttgatgaaacatagcaatgagg

SEQ ID NO: 2075551 - DNA, 25 bp, Homo sapien
cagagtacttgatgaaacatagcaa

SEQ ID NO: 2075552 - DNA, 25 bp, Homo sapien
aatgaacagagtacttgatgaaaca

SEQ ID NO: 2075553 - DNA, 25 bp, Homo sapien
tgatgaaacatagcaatgagggctc

SEQ ID NO: 2075554 - DNA, 25 bp, Homo sapien
tctgtgtatgatgttcaatctgagc

SEQ ID NO: 2075555 - DNA, 25 bp, Homo sapien
ctgtgtatgatgttcaatctgagcc

SEQ ID NO: 2075556 - DNA, 25 bp, Homo sapien
ctctgtgtatgatgttcaatctgag

SEQ ID NO: 2075557 - DNA, 25 bp, Homo sapien
tggtgtccttgcgttttggaaatgc

SEQ ID NO: 2075558 - DNA, 25 bp, Homo sapien
tggaaatgcataactagcctatgct

SEQ ID NO: 2075559 - DNA, 25 bp, Homo sapien
gcgttttggaaatgcataactagcc

SEQ ID NO: 2075560 - DNA, 25 bp, Homo sapien
ctagcctatgctcattgtgaggcgc

SEQ ID NO: 2075561 - DNA, 25 bp, Homo sapien
tctgtgggattccatcaaggatgag

SEQ ID NO: 2075562 - DNA, 25 bp, Homo sapien
cagatgtcatctgtgggattccatc

SEQ ID NO: 2075563 - DNA, 25 bp, Homo sapien
cagtaatctcaaagtccacagatgt

SEQ ID NO: 2075564 - DNA, 25 bp, Homo sapien
tccatcaaggatgagctcctcctca

SEQ ID NO: 2075565 - DNA, 25 bp, Homo sapien
attccttgagaatgccgccatccga

SEQ ID NO: 2075566 - DNA, 25 bp, Homo sapien
tcctcaattacaaagctgataatac

SEQ ID NO: 2075567 - DNA, 25 bp, Homo sapien
gaagaaattggctgtatattcctca

SEQ ID NO: 2075568 - DNA, 25 bp, Homo sapien
caggtaacagcaaggccaggaatga

SEQ ID NO: 2075569 - DNA, 25 bp, Homo sapien
tccctaatgatcggtgatgttgacc

SEQ ID NO: 2075570 - DNA, 25 bp, Homo sapien
cctaatgatcggtgatgttgaccat

SEQ ID NO: 2075571 - DNA, 25 bp, Homo sapien
gatcggtgatgttgaccatttttca

SEQ ID NO: 2075572 - DNA, 25 bp, Homo sapien
atgatcggtgatgttgaccattttt

SEQ ID NO: 2075573 - DNA, 25 bp, Homo sapien
gggcagttccagcttactcagattt

SEQ ID NO: 2075574 - DNA, 25 bp, Homo sapien
cccaagagccgatgttttagttcat

SEQ ID NO: 2075575 - DNA, 25 bp, Homo sapien
gaaaagatcaaagtcccagctcaaa

SEQ ID NO: 2075576 - DNA, 25 bp, Homo sapien
gaacattcgagtccgaaagctggca

SEQ ID NO: 2075577 - DNA, 25 bp, Homo sapien
tgcatccgctgctgaccactttagg

SEQ ID NO: 2075578 - DNA, 25 bp, Homo sapien
aaagcacaacggtaccctggacaga

SEQ ID NO: 2075579 - DNA, 25 bp, Homo sapien
tcttcagaggtactccatggcccaa

SEQ ID NO: 2075580 - DNA, 25 bp, Homo sapien
tccaagtaatgtgcctgatgcctcc

SEQ ID NO: 2075581 - DNA, 25 bp, Homo sapien
ttgtttggcttactccacactggat

SEQ ID NO: 2075582 - DNA, 25 bp, Homo sapien
gaacactttacgtacatgggagcaa

SEQ ID NO: 2075583 - DNA, 25 bp, Homo sapien
ctggatattcaaacccaaatttggg

SEQ ID NO: 2075584 - DNA, 25 bp, Homo sapien
ccagaagaccgtgtaatatttcaaa

SEQ ID NO: 2075585 - DNA, 25 bp, Homo sapien
tctgtatactaggaagagttagaac

SEQ ID NO: 2075586 - DNA, 25 bp, Homo sapien
taaagtgctctgacttaaatctacc

SEQ ID NO: 2075587 - DNA, 25 bp, Homo sapien
tctaccaaaggactaccaagtatta

SEQ ID NO: 2075588 - DNA, 25 bp, Homo sapien
aaaggagatgcataccatgcccatg

SEQ ID NO: 2075589 - DNA, 25 bp, Homo sapien
ggtatggcatgttcctacaacggca

SEQ ID NO: 2075590 - DNA, 25 bp, Homo sapien
tcttttatcccaccagacacggaaa

SEQ ID NO: 2075591 - DNA, 25 bp, Homo sapien
gcagctaaaagataaggtatggcat

SEQ ID NO: 2075592 - DNA, 25 bp, Homo sapien
tataatagttgaggatgtacagatc

SEQ ID NO: 2075593 - DNA, 25 bp, Homo sapien
gtttccagtgctgcataactagata

SEQ ID NO: 2075594 - DNA, 25 bp, Homo sapien
tatgaaggaaaaacgacgacgaaca

SEQ ID NO: 2075595 - DNA, 25 bp, Homo sapien
tacacataggtctgataaaactggt

SEQ ID NO: 2075596 - DNA, 25 bp, Homo sapien
ggtagctcaaacatctcaagtgttt

SEQ ID NO: 2075597 - DNA, 25 bp, Homo sapien
caatctgtgagtggacgctttctcc

SEQ ID NO: 2075598 - DNA, 25 bp, Homo sapien
gaacatgctgggagagtcaatcccc

SEQ ID NO: 2075599 - DNA, 25 bp, Homo sapien
tgtgatggcgaacagctgtagctcc

SEQ ID NO: 2075600 - DNA, 25 bp, Homo sapien
gaatgtcaggtacccttgccaggtg

SEQ ID NO: 2075601 - DNA, 25 bp, Homo sapien
gatatcctaggcgatccatcagagt

SEQ ID NO: 2075602 - DNA, 25 bp, Homo sapien
actttggatatcctaggcgatccat

SEQ ID NO: 2075603 - DNA, 25 bp, Homo sapien
tcctaggcgatccatcagagtccag

SEQ ID NO: 2075604 - DNA, 25 bp, Homo sapien
ttagtccataaactttggatatcct

SEQ ID NO: 2075605 - DNA, 25 bp, Homo sapien
ttcaattagtttaatttcatctcta

SEQ ID NO: 2075606 - DNA, 25 bp, Homo sapien
tgcttaaactgagcacaggacgtgc

SEQ ID NO: 2075607 - DNA, 25 bp, Homo sapien
taaagactgcaaccagcctcggagt

SEQ ID NO: 2075608 - DNA, 25 bp, Homo sapien
gagtaaacgaaaatgcccactgcgg

SEQ ID NO: 2075609 - DNA, 25 bp, Homo sapien
tgaataaatccatgcccgagggtct

SEQ ID NO: 2075610 - DNA, 25 bp, Homo sapien
caaatgggctgactacaagtgctcc

SEQ ID NO: 2075611 - DNA, 25 bp, Homo sapien
gagaagctgtttgccccatgagcgg

SEQ ID NO: 2075612 - DNA, 25 bp, Homo sapien
gcttgagtgcccaaaccaaatcggg

SEQ ID NO: 2075613 - DNA, 25 bp, Homo sapien
tgttaaggtggctcaacttgggtcc

SEQ ID NO: 2075614 - DNA, 25 bp, Homo sapien
caaacagtacaatgctaaaggaggc

SEQ ID NO: 2075615 - DNA, 25 bp, Homo sapien
caaaacctgttaaggaatggccaat

SEQ ID NO: 2075616 - DNA, 25 bp, Homo sapien
tagccagtctttgtagccaaccatc

SEQ ID NO: 2075617 - DNA, 25 bp, Homo sapien
aaatggcttgcacgagacttttgtc

SEQ ID NO: 2075618 - DNA, 25 bp, Homo sapien
gaaagcaaacatcaataatgctaag

SEQ ID NO: 2075619 - DNA, 25 bp, Homo sapien
aaacattaacgccatgatccatggg

SEQ ID NO: 2075620 - DNA, 25 bp, Homo sapien
tttaaactgatctatatcatctgtg

SEQ ID NO: 2075621 - DNA, 25 bp, Homo sapien
actgcccattcggaataattgctca

SEQ ID NO: 2075622 - DNA, 25 bp, Homo sapien
cgatcatgaagtaaccgccaacggg

SEQ ID NO: 2075623 - DNA, 25 bp, Homo sapien
ctgacattcttcgagtgagtggact

SEQ ID NO: 2075624 - DNA, 25 bp, Homo sapien
tgataagctcaccacacatgtatga

SEQ ID NO: 2075625 - DNA, 25 bp, Homo sapien
ttctagcacagaaaaccatcactgg

SEQ ID NO: 2075626 - DNA, 25 bp, Homo sapien
cggtgtcgaaagacgcctctccgtg

SEQ ID NO: 2075627 - DNA, 25 bp, Homo sapien
tcccctctgtaggaaacattcaggc

SEQ ID NO: 2075628 - DNA, 25 bp, Homo sapien
aggatggcgagagacccctgagcca

SEQ ID NO: 2075629 - DNA, 25 bp, Homo sapien
gcggctggaagaacctaagcaagtt

SEQ ID NO: 2075630 - DNA, 25 bp, Homo sapien
cggccgaggatcctctgtgccagct

SEQ ID NO: 2075631 - DNA, 25 bp, Homo sapien
ggttctctcggtggcgccgtatcca

SEQ ID NO: 2075632 - DNA, 25 bp, Homo sapien
gccctcaggaaacgccggacgcttg

SEQ ID NO: 2075633 - DNA, 25 bp, Homo sapien
tccagaaaactgctctgcacggcgg

SEQ ID NO: 2075634 - DNA, 25 bp, Homo sapien
ggctggattctaagtttaccaatat

SEQ ID NO: 2075635 - DNA, 25 bp, Homo sapien
ccacgctgctaagatttagataaac

SEQ ID NO: 2075636 - DNA, 25 bp, Homo sapien
aacttagcagcaagtcttcctagta

SEQ ID NO: 2075637 - DNA, 25 bp, Homo sapien
aagtttttcatcaatccacgctgct

SEQ ID NO: 2075638 - DNA, 25 bp, Homo sapien
tattcaaggccaatattaacttgtt

SEQ ID NO: 2075639 - DNA, 25 bp, Homo sapien
ttcacaaagatttccttctgagtcc

SEQ ID NO: 2075640 - DNA, 25 bp, Homo sapien
ggtattcaaggccaatattaacttg

SEQ ID NO: 2075641 - DNA, 25 bp, Homo sapien
acttcatattctctactctaaaata

SEQ ID NO: 2075642 - DNA, 25 bp, Homo sapien
gacctgtacttagtaaaagtccaga

SEQ ID NO: 2075643 - DNA, 25 bp, Homo sapien
aagtccagaccattaagtctttaag

SEQ ID NO: 2075644 - DNA, 25 bp, Homo sapien
agtccagaccattaagtctttaagg

SEQ ID NO: 2075645 - DNA, 25 bp, Homo sapien
gttgatggagacctgtacttagtaa

SEQ ID NO: 2075646 - DNA, 25 bp, Homo sapien
gaagagctagatttgcagttgatac

SEQ ID NO: 2075647 - DNA, 25 bp, Homo sapien
gcatattactatgaaaagtcagctg

SEQ ID NO: 2075648 - DNA, 25 bp, Homo sapien
cagctgtggtgataagtgttttctc

SEQ ID NO: 2075649 - DNA, 25 bp, Homo sapien
tctcgttgaaacaggtgagttgtcg

SEQ ID NO: 2075650 - DNA, 25 bp, Homo sapien
tcccagaatccacatgtaacatcag

SEQ ID NO: 2075651 - DNA, 25 bp, Homo sapien
gctttgttgcgaccacttcagttga

SEQ ID NO: 2075652 - DNA, 25 bp, Homo sapien
ccgtttgttgcccactggttattag

SEQ ID NO: 2075653 - DNA, 25 bp, Homo sapien
taacatcagagggatgtgggaccgt

SEQ ID NO: 2075654 - DNA, 25 bp, Homo sapien
aattgtaaacctgaattgccaattg

SEQ ID NO: 2075655 - DNA, 25 bp, Homo sapien
gtaaacctgaattgccaattgccat

SEQ ID NO: 2075656 - DNA, 25 bp, Homo sapien
ggaattgtaaacctgaattgccaat

SEQ ID NO: 2075657 - DNA, 25 bp, Homo sapien
ttgtaaacctgaattgccaattgcc

SEQ ID NO: 2075658 - DNA, 25 bp, Homo sapien
gaacttcggcatgggtctccccagc

SEQ ID NO: 2075659 - DNA, 25 bp, Homo sapien
aacttcggcatgggtctccccagca

SEQ ID NO: 2075660 - DNA, 25 bp, Homo sapien
ctctgcaattgtagtggctgcctca

SEQ ID NO: 2075661 - DNA, 25 bp, Homo sapien
ggcctctgcaattgtagtggctgcc

SEQ ID NO: 2075662 - DNA, 25 bp, Homo sapien
tcaagctaactaaagccagtattgc

SEQ ID NO: 2075663 - DNA, 25 bp, Homo sapien
ccagtagatataacacctattcaag

SEQ ID NO: 2075664 - DNA, 25 bp, Homo sapien
tattgcagaagcaggtttcaattgc

SEQ ID NO: 2075665 - DNA, 25 bp, Homo sapien
taacacctattcaagctaactaaag

SEQ ID NO: 2075666 - DNA, 25 bp, Homo sapien
tcctcataactctaaagacacattc

SEQ ID NO: 2075667 - DNA, 25 bp, Homo sapien
tcatccatcagtaatacgtcccttc

SEQ ID NO: 2075668 - DNA, 25 bp, Homo sapien
gacacattcttttgccgtcagtaga

SEQ ID NO: 2075669 - DNA, 25 bp, Homo sapien
tacgtcccttcctcataactctaaa

SEQ ID NO: 2075670 - DNA, 25 bp, Homo sapien
aagaaagcctattgaagcagtgggc

SEQ ID NO: 2075671 - DNA, 25 bp, Homo sapien
gattggagctaaatccaagaaagcc

SEQ ID NO: 2075672 - DNA, 25 bp, Homo sapien
ggtgtgctcgtgcaccactgctcag

SEQ ID NO: 2075673 - DNA, 25 bp, Homo sapien
tcctggctaggaatggttcccgaac

SEQ ID NO: 2075674 - DNA, 25 bp, Homo sapien
tagagtaaaatcgttcagaaaggaa

SEQ ID NO: 2075675 - DNA, 25 bp, Homo sapien
tgagaactggcaggatttcatagga

SEQ ID NO: 2075676 - DNA, 25 bp, Homo sapien
gcttccgtagaagtaagtaatccaa

SEQ ID NO: 2075677 - DNA, 25 bp, Homo sapien
cgttcagataggaaagcagtggagt

SEQ ID NO: 2075678 - DNA, 25 bp, Homo sapien
taacactgttggaagttgggtcatc

SEQ ID NO: 2075679 - DNA, 25 bp, Homo sapien
gactactccattgattaacactgtt

SEQ ID NO: 2075680 - DNA, 25 bp, Homo sapien
tcttgcatttcgcagatcctgtggt

SEQ ID NO: 2075681 - DNA, 25 bp, Homo sapien
gcaacaaagtttaattgagtacata

SEQ ID NO: 2075682 - DNA, 25 bp, Homo sapien
cacaaatcataaatgttagtagagt

SEQ ID NO: 2075683 - DNA, 25 bp, Homo sapien
ttatagttcaagaactggtgtcagg

SEQ ID NO: 2075684 - DNA, 25 bp, Homo sapien
tgttagtagagtgtaaaaacctctg

SEQ ID NO: 2075685 - DNA, 25 bp, Homo sapien
aaaacctctgggaatccaaacacat

SEQ ID NO: 2075686 - DNA, 25 bp, Homo sapien
cttcactttgccagtaatgtgggat

SEQ ID NO: 2075687 - DNA, 25 bp, Homo sapien
tgaatcctcttcactttgccagtaa

SEQ ID NO: 2075688 - DNA, 25 bp, Homo sapien
actttgccagtaatgtgggatgtgg

SEQ ID NO: 2075689 - DNA, 25 bp, Homo sapien
tgctgagggtgagagggcaatctga

SEQ ID NO: 2075690 - DNA, 25 bp, Homo sapien
ctgcagagtgaggagatgtatgaac

SEQ ID NO: 2075691 - DNA, 25 bp, Homo sapien
gagtgaggagatgtatgaaccagat

SEQ ID NO: 2075692 - DNA, 25 bp, Homo sapien
gaggagatgtatgaaccagattaag

SEQ ID NO: 2075693 - DNA, 25 bp, Homo sapien
cagagtgaggagatgtatgaaccag

SEQ ID NO: 2075694 - DNA, 25 bp, Homo sapien
tctgttaccgtgattaataaaacca

SEQ ID NO: 2075695 - DNA, 25 bp, Homo sapien
aataaaaccaatgaaagatttgaag

SEQ ID NO: 2075696 - DNA, 25 bp, Homo sapien
aaaaccaatgaaagatttgaagatg

SEQ ID NO: 2075697 - DNA, 25 bp, Homo sapien
cttcatctgttaccgtgattaataa

SEQ ID NO: 2075698 - DNA, 25 bp, Homo sapien
gagtgtatccagctgtgtgttgaag

SEQ ID NO: 2075699 - DNA, 25 bp, Homo sapien
cacactctgctggtgcatggtggat

SEQ ID NO: 2075700 - DNA, 25 bp, Homo sapien
cactctgctggtgcatggtggatgc

SEQ ID NO: 2075701 - DNA, 25 bp, Homo sapien
tcaaatgacttggatacgctccctg

SEQ ID NO: 2075702 - DNA, 25 bp, Homo sapien
tcagggatacctttggatctgcttg

SEQ ID NO: 2075703 - DNA, 25 bp, Homo sapien
gtgagctctgcaacgtctttcagtt

SEQ ID NO: 2075704 - DNA, 25 bp, Homo sapien
tggatctgcttgtgggctaccctgg

SEQ ID NO: 2075705 - DNA, 25 bp, Homo sapien
caacgtctttcagtttcagggatac

SEQ ID NO: 2075706 - DNA, 25 bp, Homo sapien
tttcccttcacgtcgccgataccca

SEQ ID NO: 2075707 - DNA, 25 bp, Homo sapien
catctttcccttcacgtcgccgata

SEQ ID NO: 2075708 - DNA, 25 bp, Homo sapien
tctttcccttcacgtcgccgatacc

SEQ ID NO: 2075709 - DNA, 25 bp, Homo sapien
ctcatctttcccttcacgtcgccga

SEQ ID NO: 2075710 - DNA, 25 bp, Homo sapien
ttagctaatggtgtcatgctgttga

SEQ ID NO: 2075711 - DNA, 25 bp, Homo sapien
tagctaatggtgtcatgctgttgac

SEQ ID NO: 2075712 - DNA, 25 bp, Homo sapien
ctgaacatgtgaaagcagtagattt

SEQ ID NO: 2075713 - DNA, 25 bp, Homo sapien
taaaggcaggttacgggctggcact

SEQ ID NO: 2075714 - DNA, 25 bp, Homo sapien
ctaaaggcaggttacgggctggcac

SEQ ID NO: 2075715 - DNA, 25 bp, Homo sapien
gtagattttcggtatatgcagtggt

SEQ ID NO: 2075716 - DNA, 25 bp, Homo sapien
tgcaagctggcacaatagcctggag

SEQ ID NO: 2075717 - DNA, 25 bp, Homo sapien
gagaggtgactgctattactgcggc

SEQ ID NO: 2075718 - DNA, 25 bp, Homo sapien
taagacaactgatttcccggtggga

SEQ ID NO: 2075719 - DNA, 25 bp, Homo sapien
aagactcactggcttggaatccctg

SEQ ID NO: 2075720 - DNA, 25 bp, Homo sapien
agggagcatctcagataggagctgc

SEQ ID NO: 2075721 - DNA, 25 bp, Homo sapien
cagaactaagtctgaataaaacgct

SEQ ID NO: 2075722 - DNA, 25 bp, Homo sapien
taggagctgcttttcagcatagccc

SEQ ID NO: 2075723 - DNA, 25 bp, Homo sapien
tcagcatagcccaaaagctccacag

SEQ ID NO: 2075724 - DNA, 25 bp, Homo sapien
gtacagaaacaactgtattgggtat

SEQ ID NO: 2075725 - DNA, 25 bp, Homo sapien
ctgtattgggtatagctcggcgttt

SEQ ID NO: 2075726 - DNA, 25 bp, Homo sapien
tattgggtatagctcggcgtttgcc

SEQ ID NO: 2075727 - DNA, 25 bp, Homo sapien
aacaactgtattgggtatagctcgg

SEQ ID NO: 2075728 - DNA, 25 bp, Homo sapien
tcaggccgatgaagaaccgaaaaga

SEQ ID NO: 2075729 - DNA, 25 bp, Homo sapien
caatgattcttgtagctttaggaca

SEQ ID NO: 2075730 - DNA, 25 bp, Homo sapien
aggatccatcctcagctcttgtgaa

SEQ ID NO: 2075731 - DNA, 25 bp, Homo sapien
gagaggttgaggtccccttgcacat

SEQ ID NO: 2075732 - DNA, 25 bp, Homo sapien
caggcgcagttacacaggcttccat

SEQ ID NO: 2075733 - DNA, 25 bp, Homo sapien
tgcaccttctcacaactgggataaa

SEQ ID NO: 2075734 - DNA, 25 bp, Homo sapien
gatgtttgaaaacgtcactcagtcc

SEQ ID NO: 2075735 - DNA, 25 bp, Homo sapien
gaccagttattgaagcaggcgcagt

SEQ ID NO: 2075736 - DNA, 25 bp, Homo sapien
ctgcggctgtgaatcttagcaaagg

SEQ ID NO: 2075737 - DNA, 25 bp, Homo sapien
tggagtcctgtgtcccgcggctctt

SEQ ID NO: 2075738 - DNA, 25 bp, Homo sapien
aatcttagcaaaggcagagtggttg

SEQ ID NO: 2075739 - DNA, 25 bp, Homo sapien
tctggagtcctgtgtcccgcggctc

SEQ ID NO: 2075740 - DNA, 25 bp, Homo sapien
gacagggaagtccatccccctggat

SEQ ID NO: 2075741 - DNA, 25 bp, Homo sapien
tgggccacaggaatgcaggggacag

SEQ ID NO: 2075742 - DNA, 25 bp, Homo sapien
gcaggggacagggaagtccatcccc

SEQ ID NO: 2075743 - DNA, 25 bp, Homo sapien
cccctggatctgaggggtccacctc

SEQ ID NO: 2075744 - DNA, 25 bp, Homo sapien
tgggtttgtgcattatcactggcaa

SEQ ID NO: 2075745 - DNA, 25 bp, Homo sapien
ctgggtttgtgcattatcactggca

SEQ ID NO: 2075746 - DNA, 25 bp, Homo sapien
gaagggcttgtgcggggagcctcct

SEQ ID NO: 2075747 - DNA, 25 bp, Homo sapien
gggtttgtgcattatcactggcaaa

SEQ ID NO: 2075748 - DNA, 25 bp, Homo sapien
ccggctgagaacaccactggtctgc

SEQ ID NO: 2075749 - DNA, 25 bp, Homo sapien
tggtctgcacactgcgagtgctgct

SEQ ID NO: 2075750 - DNA, 25 bp, Homo sapien
aaagggctcatagggctccggctga

SEQ ID NO: 2075751 - DNA, 25 bp, Homo sapien
tgacccacgcggcttctctggaaag

SEQ ID NO: 2075752 - DNA, 25 bp, Homo sapien
tgtccaggataactcttgtacagga

SEQ ID NO: 2075753 - DNA, 25 bp, Homo sapien
gaacatgtcagctgaattcaccact

SEQ ID NO: 2075754 - DNA, 25 bp, Homo sapien
tcttagaagacaaacgttggtccac

SEQ ID NO: 2075755 - DNA, 25 bp, Homo sapien
ttggtccacgtggagtagcccgatc

SEQ ID NO: 2075756 - DNA, 25 bp, Homo sapien
tttggtggaagacctactttttgca

SEQ ID NO: 2075757 - DNA, 25 bp, Homo sapien
ggtggaagacctactttttgcagtg

SEQ ID NO: 2075758 - DNA, 25 bp, Homo sapien
tggaagacctactttttgcagtggt

SEQ ID NO: 2075759 - DNA, 25 bp, Homo sapien
tggtggaagacctactttttgcagt

SEQ ID NO: 2075760 - DNA, 25 bp, Homo sapien
gcagagcacccaacaatgacgatga

SEQ ID NO: 2075761 - DNA, 25 bp, Homo sapien
cattggttgtgctacatgcggtcac

SEQ ID NO: 2075762 - DNA, 25 bp, Homo sapien
tttctgtggaccagtgtcggctgca

SEQ ID NO: 2075763 - DNA, 25 bp, Homo sapien
tcaggtgaataaagtggacgaggca

SEQ ID NO: 2075764 - DNA, 25 bp, Homo sapien
tactgaaggcaacacgagccatgtg

SEQ ID NO: 2075765 - DNA, 25 bp, Homo sapien
taatggtgcttaagccatcagctct

SEQ ID NO: 2075766 - DNA, 25 bp, Homo sapien
gatgaacaaagatagtgtagaccct

SEQ ID NO: 2075767 - DNA, 25 bp, Homo sapien
taaatgttccataccctttggcaga

SEQ ID NO: 2075768 - DNA, 25 bp, Homo sapien
cagttgcagtttgatgagaggtttc

SEQ ID NO: 2075769 - DNA, 25 bp, Homo sapien
tggttggacaacagaaaatgctctc

SEQ ID NO: 2075770 - DNA, 25 bp, Homo sapien
aaataattcctctcgcagttgcagt

SEQ ID NO: 2075771 - DNA, 25 bp, Homo sapien
tgtaagcactgctggcaatagaaaa

SEQ ID NO: 2075772 - DNA, 25 bp, Homo sapien
cagtgctgcaggattgagttgcacc

SEQ ID NO: 2075773 - DNA, 25 bp, Homo sapien
agccagtgctgcaggattgagttgc

SEQ ID NO: 2075774 - DNA, 25 bp, Homo sapien
ctgtgccctgaatacgaatactcca

SEQ ID NO: 2075775 - DNA, 25 bp, Homo sapien
tgccctgaatacgaatactccacat

SEQ ID NO: 2075776 - DNA, 25 bp, Homo sapien
ggatacttaacgtattgctcaagca

SEQ ID NO: 2075777 - DNA, 25 bp, Homo sapien
caggagtaatcgctttctagacaat

SEQ ID NO: 2075778 - DNA, 25 bp, Homo sapien
gataacaggcaagtacttagtcaaa

SEQ ID NO: 2075779 - DNA, 25 bp, Homo sapien
tcaaatgagtcaccaatacggatca

SEQ ID NO: 2075780 - DNA, 25 bp, Homo sapien
tctccagcagtgctcaagccttgga

SEQ ID NO: 2075781 - DNA, 25 bp, Homo sapien
gccagtttttgacttcaggcacagg

SEQ ID NO: 2075782 - DNA, 25 bp, Homo sapien
tactgtcgcctagtttgcagtgcaa

SEQ ID NO: 2075783 - DNA, 25 bp, Homo sapien
tcgggtcatcgttatttggagggtc

SEQ ID NO: 2075784 - DNA, 25 bp, Homo sapien
ttgggaagaaccagtgctctgagaa

SEQ ID NO: 2075785 - DNA, 25 bp, Homo sapien
caaggctaacttaatgatctctaca

SEQ ID NO: 2075786 - DNA, 25 bp, Homo sapien
tccagaatccttggcattgttggga

SEQ ID NO: 2075787 - DNA, 25 bp, Homo sapien
tatgcggggatatcactgctaaatc

SEQ ID NO: 2075788 - DNA, 25 bp, Homo sapien
cacgattagtaacaaaggacatttt

SEQ ID NO: 2075789 - DNA, 25 bp, Homo sapien
gcagctgcattctaagactcagtaa

SEQ ID NO: 2075790 - DNA, 25 bp, Homo sapien
acagaagccgctaatctgcaagagc

SEQ ID NO: 2075791 - DNA, 25 bp, Homo sapien
gattcaagaatgcatgatcgctgac

SEQ ID NO: 2075792 - DNA, 25 bp, Homo sapien
tctcttgcacactggacctgtgagc

SEQ ID NO: 2075793 - DNA, 25 bp, Homo sapien
agggctcagtatgtcctggctccat

SEQ ID NO: 2075794 - DNA, 25 bp, Homo sapien
ccacagggctcagtatgtcctggct

SEQ ID NO: 2075795 - DNA, 25 bp, Homo sapien
tgagcgctccggaaccacatggttt

SEQ ID NO: 2075796 - DNA, 25 bp, Homo sapien
ccacccggcacatggttccaaaggt

SEQ ID NO: 2075797 - DNA, 25 bp, Homo sapien
gtggtatgcctgaaatttcttcacc

SEQ ID NO: 2075798 - DNA, 25 bp, Homo sapien
aaaagcttcccacccggcacatggt

SEQ ID NO: 2075799 - DNA, 25 bp, Homo sapien
cacatggttccaaaggtggtatgcc

SEQ ID NO: 2075800 - DNA, 25 bp, Homo sapien
ctttctcgttattcttcaatgtcag

SEQ ID NO: 2075801 - DNA, 25 bp, Homo sapien
tacttttgcacctaatgttatagct

SEQ ID NO: 2075802 - DNA, 25 bp, Homo sapien
tcacaaggcccatgcattacttttg

SEQ ID NO: 2075803 - DNA, 25 bp, Homo sapien
tatagctctaaacaaagttattagt

SEQ ID NO: 2075804 - DNA, 25 bp, Homo sapien
ttgtgttctacctcaaaaacttcca

SEQ ID NO: 2075805 - DNA, 25 bp, Homo sapien
tgtgttctacctcaaaaacttccat

SEQ ID NO: 2075806 - DNA, 25 bp, Homo sapien
agcagcattggtggtgttgttagat

SEQ ID NO: 2075807 - DNA, 25 bp, Homo sapien
agcattggtggtgttgttagattta

SEQ ID NO: 2075808 - DNA, 25 bp, Homo sapien
tgttagatttaacaacagaaggctt

SEQ ID NO: 2075809 - DNA, 25 bp, Homo sapien
gcagcattggtggtgttgttagatt

SEQ ID NO: 2075810 - DNA, 25 bp, Homo sapien
taagtttaaccagtgcagcccatat

SEQ ID NO: 2075811 - DNA, 25 bp, Homo sapien
tactttggctggtagcatgatctcc

SEQ ID NO: 2075812 - DNA, 25 bp, Homo sapien
cacacgtaatgcttggattccctca

SEQ ID NO: 2075813 - DNA, 25 bp, Homo sapien
gataaagacccaaggaagactctgc

SEQ ID NO: 2075814 - DNA, 25 bp, Homo sapien
tgcccctcatgtgtgtcttcgccag

SEQ ID NO: 2075815 - DNA, 25 bp, Homo sapien
gatctccgtcttgtgactagctctg

SEQ ID NO: 2075816 - DNA, 25 bp, Homo sapien
cttcgccagcactgtgtattccaaa

SEQ ID NO: 2075817 - DNA, 25 bp, Homo sapien
cacacactggtatcacgtaacgctt

SEQ ID NO: 2075818 - DNA, 25 bp, Homo sapien
gaggacatgtcctcgactaagtaat

SEQ ID NO: 2075819 - DNA, 25 bp, Homo sapien
caagcgatgccgtcactggaaaagg

SEQ ID NO: 2075820 - DNA, 25 bp, Homo sapien
caatacattgtgagattttctttga

SEQ ID NO: 2075821 - DNA, 25 bp, Homo sapien
ctttgagaaattctggtgtctgtcc

SEQ ID NO: 2075822 - DNA, 25 bp, Homo sapien
ccgcgcctggcgtgaattgttgtca

SEQ ID NO: 2075823 - DNA, 25 bp, Homo sapien
aacaatgggttgacactagaatact

SEQ ID NO: 2075824 - DNA, 25 bp, Homo sapien
ctagaatactttgaactggaggaga

SEQ ID NO: 2075825 - DNA, 25 bp, Homo sapien
gatatatgtttgaagaagaccactg

SEQ ID NO: 2075826 - DNA, 25 bp, Homo sapien
tacttcataggagtgactggcagtt

SEQ ID NO: 2075827 - DNA, 25 bp, Homo sapien
gtttgggagcacaccaaccgggcca

SEQ ID NO: 2075828 - DNA, 25 bp, Homo sapien
aaggcccaaggcgagtgaaagagtt

SEQ ID NO: 2075829 - DNA, 25 bp, Homo sapien
ccgggccacagagttatgaagactg

SEQ ID NO: 2075830 - DNA, 25 bp, Homo sapien
agaggtgcaatgtcaataggacaca

SEQ ID NO: 2075831 - DNA, 25 bp, Homo sapien
aaaaagattgtggtgttgaggctga

SEQ ID NO: 2075832 - DNA, 25 bp, Homo sapien
aaaattacctgcgtgtggtgacatc

SEQ ID NO: 2075833 - DNA, 25 bp, Homo sapien
cctgcgtgtggtgacatctgcctgt

SEQ ID NO: 2075834 - DNA, 25 bp, Homo sapien
gaatctcacccaataaatggctttc

SEQ ID NO: 2075835 - DNA, 25 bp, Homo sapien
tctcacccaataaatggctttcttg

SEQ ID NO: 2075836 - DNA, 25 bp, Homo sapien
tacaccacctttggtaccacaagtc

SEQ ID NO: 2075837 - DNA, 25 bp, Homo sapien
tttggtaccacaagtcaattgtctt

SEQ ID NO: 2075838 - DNA, 25 bp, Homo sapien
ccaaaatacaagaggatgatgctaa

SEQ ID NO: 2075839 - DNA, 25 bp, Homo sapien
tttttacaaactgcagaaatccctg

SEQ ID NO: 2075840 - DNA, 25 bp, Homo sapien
gttcttgctgtgcaaagacgacaca

SEQ ID NO: 2075841 - DNA, 25 bp, Homo sapien
gacgacacagtaatatactacaggg

SEQ ID NO: 2075842 - DNA, 25 bp, Homo sapien
atcacgtgttcttgttcctttcaac

SEQ ID NO: 2075843 - DNA, 25 bp, Homo sapien
caatttatcacgtgttcttgttcct

SEQ ID NO: 2075844 - DNA, 25 bp, Homo sapien
tgcttctccacccaatttatcacgt

SEQ ID NO: 2075845 - DNA, 25 bp, Homo sapien
ccacccaatttatcacgtgttcttg

SEQ ID NO: 2075846 - DNA, 25 bp, Homo sapien
ttacacctagtactgatagggcagt

SEQ ID NO: 2075847 - DNA, 25 bp, Homo sapien
tctatacagtcgttcccggtaagta

SEQ ID NO: 2075848 - DNA, 25 bp, Homo sapien
atatactctatacagtcgttcccgg

SEQ ID NO: 2075849 - DNA, 25 bp, Homo sapien
ttccatagaccattacacctagtac

SEQ ID NO: 2075850 - DNA, 25 bp, Homo sapien
agctcccggcagaggacgtgggcag

SEQ ID NO: 2075851 - DNA, 25 bp, Homo sapien
cccagctcccggcagaggacgtggg

SEQ ID NO: 2075852 - DNA, 25 bp, Homo sapien
ggtccagcctgtggcctctgtgaag

SEQ ID NO: 2075853 - DNA, 25 bp, Homo sapien
tgtgggtccagcctgtggcctctgt

SEQ ID NO: 2075854 - DNA, 25 bp, Homo sapien
caaaccagtcctgagaatactccaa

SEQ ID NO: 2075855 - DNA, 25 bp, Homo sapien
tcctgagaatactccaagggcttcc

SEQ ID NO: 2075856 - DNA, 25 bp, Homo sapien
agaatactccaagggcttccgtttg

SEQ ID NO: 2075857 - DNA, 25 bp, Homo sapien
cagtcctgagaatactccaagggct

SEQ ID NO: 2075858 - DNA, 25 bp, Homo sapien
acacttttgctgattaagagtattt

SEQ ID NO: 2075859 - DNA, 25 bp, Homo sapien
cagtagacagtgattattaaggtag

SEQ ID NO: 2075860 - DNA, 25 bp, Homo sapien
caatgattttgacaacgcgtctgac

SEQ ID NO: 2075861 - DNA, 25 bp, Homo sapien
taaggtagccaggatcagttttatt

SEQ ID NO: 2075862 - DNA, 25 bp, Homo sapien
gacttgatagtcagtagacagtgat

SEQ ID NO: 2075863 - DNA, 25 bp, Homo sapien
gacaaaggctttaagtacagatcac

SEQ ID NO: 2075864 - DNA, 25 bp, Homo sapien
aaggacaaaggctttaagtacagat

SEQ ID NO: 2075865 - DNA, 25 bp, Homo sapien
aggacaaaggctttaagtacagatc

SEQ ID NO: 2075866 - DNA, 25 bp, Homo sapien
ggacaaaggctttaagtacagatca

SEQ ID NO: 2075867 - DNA, 25 bp, Homo sapien
gctccaaagatgagcggtctgtgag

SEQ ID NO: 2075868 - DNA, 25 bp, Homo sapien
gtccgaaccttctggatcacagtct

SEQ ID NO: 2075869 - DNA, 25 bp, Homo sapien
gagagccgtccagcatcttgcagtt

SEQ ID NO: 2075870 - DNA, 25 bp, Homo sapien
gatgagcggtctgtgagtccgaacc

SEQ ID NO: 2075871 - DNA, 25 bp, Homo sapien
aaagcttgacaatgtaaccaaacca

SEQ ID NO: 2075872 - DNA, 25 bp, Homo sapien
taaagcttgacaatgtaaccaaacc

SEQ ID NO: 2075873 - DNA, 25 bp, Homo sapien
aagcttgacaatgtaaccaaaccaa

SEQ ID NO: 2075874 - DNA, 25 bp, Homo sapien
ggtaaagcttgacaatgtaaccaaa

SEQ ID NO: 2075875 - DNA, 25 bp, Homo sapien
gacaaagtaagatcagacaagagaa

SEQ ID NO: 2075876 - DNA, 25 bp, Homo sapien
atacttagcgatgatgctttcagac

SEQ ID NO: 2075877 - DNA, 25 bp, Homo sapien
cagactcatcactaaactgaaggtc

SEQ ID NO: 2075878 - DNA, 25 bp, Homo sapien
caaacgaagacaaagtaagatcaga

SEQ ID NO: 2075879 - DNA, 25 bp, Homo sapien
caatgataaatggttgtacatacag

SEQ ID NO: 2075880 - DNA, 25 bp, Homo sapien
taaatggttgtacatacagttttga

SEQ ID NO: 2075881 - DNA, 25 bp, Homo sapien
ggcaatgataaatggttgtacatac

SEQ ID NO: 2075882 - DNA, 25 bp, Homo sapien
tgtacatacagttttgaagttgtac

SEQ ID NO: 2075883 - DNA, 25 bp, Homo sapien
tacagacttctggatatcggcgcac

SEQ ID NO: 2075884 - DNA, 25 bp, Homo sapien
tcaatgacacaaaggaatttgttac

SEQ ID NO: 2075885 - DNA, 25 bp, Homo sapien
ccatttactatgcagggagagtgta

SEQ ID NO: 2075886 - DNA, 25 bp, Homo sapien
taattgcaaaaagggagccagctgg

SEQ ID NO: 2075887 - DNA, 25 bp, Homo sapien
cagatgcatctggagctcttaaacc

SEQ ID NO: 2075888 - DNA, 25 bp, Homo sapien
gtcacatttacgtttgagctgacat

SEQ ID NO: 2075889 - DNA, 25 bp, Homo sapien
taaacctgatatgctgtgtgccagc

SEQ ID NO: 2075890 - DNA, 25 bp, Homo sapien
cacatttacgtttgagctgacattc

SEQ ID NO: 2075891 - DNA, 25 bp, Homo sapien
taaggaggcctgtcagaagatccac

SEQ ID NO: 2075892 - DNA, 25 bp, Homo sapien
gactgtcaaacaggagtaccgcttt

SEQ ID NO: 2075893 - DNA, 25 bp, Homo sapien
ggcagtagtttctccccaaagatga

SEQ ID NO: 2075894 - DNA, 25 bp, Homo sapien
tttattcgctggacacagggattcc

SEQ ID NO: 2075895 - DNA, 25 bp, Homo sapien
ggaacatactgaaggatgaacactt

SEQ ID NO: 2075896 - DNA, 25 bp, Homo sapien
tgctttatagagttgacctccccta

SEQ ID NO: 2075897 - DNA, 25 bp, Homo sapien
gctcctcttcgggaccagcaatgga

SEQ ID NO: 2075898 - DNA, 25 bp, Homo sapien
catggtgggtggcttctagcagcca

SEQ ID NO: 2075899 - DNA, 25 bp, Homo sapien
tcaagtttcagggccatcaccttat

SEQ ID NO: 2075900 - DNA, 25 bp, Homo sapien
cacaattagactctgaccattttct

SEQ ID NO: 2075901 - DNA, 25 bp, Homo sapien
ctttactgtcacaattagactctga

SEQ ID NO: 2075902 - DNA, 25 bp, Homo sapien
gcttggctgcggctgagatttcaac

SEQ ID NO: 2075903 - DNA, 25 bp, Homo sapien
atctggacctggtgccaagaatgct

SEQ ID NO: 2075904 - DNA, 25 bp, Homo sapien
tggacctggtgccaagaatgcttgt

SEQ ID NO: 2075905 - DNA, 25 bp, Homo sapien
acctggtgccaagaatgcttgttgg

SEQ ID NO: 2075906 - DNA, 25 bp, Homo sapien
caaggtatggatggagcccctgagg

SEQ ID NO: 2075907 - DNA, 25 bp, Homo sapien
tctccgtcctcccaaaatccaagac

SEQ ID NO: 2075908 - DNA, 25 bp, Homo sapien
ctctccgtcctcccaaaatccaaga

SEQ ID NO: 2075909 - DNA, 25 bp, Homo sapien
cgtcctcccaaaatccaagacccat

SEQ ID NO: 2075910 - DNA, 25 bp, Homo sapien
gaaagacatttggatgttacaaatc

SEQ ID NO: 2075911 - DNA, 25 bp, Homo sapien
agacatttggatgttacaaatcact

SEQ ID NO: 2075912 - DNA, 25 bp, Homo sapien
aagacatttggatgttacaaatcac

SEQ ID NO: 2075913 - DNA, 25 bp, Homo sapien
aaagacatttggatgttacaaatca

SEQ ID NO: 2075914 - DNA, 25 bp, Homo sapien
ccacgggtgcctgggccgggacaag

SEQ ID NO: 2075915 - DNA, 25 bp, Homo sapien
aaggagatggcaatccagttgatgg

SEQ ID NO: 2075916 - DNA, 25 bp, Homo sapien
aatccagttgatggaggggatgctc

SEQ ID NO: 2075917 - DNA, 25 bp, Homo sapien
tccacgggtgcctgggccgggacaa

SEQ ID NO: 2075918 - DNA, 25 bp, Homo sapien
tcagaaagatctttgcgaacattct

SEQ ID NO: 2075919 - DNA, 25 bp, Homo sapien
tgtgatgcctgagacactagcctcc

SEQ ID NO: 2075920 - DNA, 25 bp, Homo sapien
cactgtcacgacacccagcaaaatt

SEQ ID NO: 2075921 - DNA, 25 bp, Homo sapien
gatctttgcgaacattctcataaga

SEQ ID NO: 2075922 - DNA, 25 bp, Homo sapien
tcagaaagatctttgcgaacattct

SEQ ID NO: 2075923 - DNA, 25 bp, Homo sapien
tgtgatgcctgagacactagcctcc

SEQ ID NO: 2075924 - DNA, 25 bp, Homo sapien
cactgtcacgacacccagcaaaatt

SEQ ID NO: 2075925 - DNA, 25 bp, Homo sapien
gatctttgcgaacattctcataaga

SEQ ID NO: 2075926 - DNA, 25 bp, Homo sapien
agaatggacttggatgactgtagct

SEQ ID NO: 2075927 - DNA, 25 bp, Homo sapien
aatggacttggatgactgtagctga

SEQ ID NO: 2075928 - DNA, 25 bp, Homo sapien
ttgtaaggagaatggacttggatga

SEQ ID NO: 2075929 - DNA, 25 bp, Homo sapien
taaggagaatggacttggatgactg

SEQ ID NO: 2075930 - DNA, 25 bp, Homo sapien
gggtttgagacaatctacttgtcgg

SEQ ID NO: 2075931 - DNA, 25 bp, Homo sapien
aatggggtttgagacaatctacttg

SEQ ID NO: 2075932 - DNA, 25 bp, Homo sapien
gacaatctacttgtcggtcgctggg

SEQ ID NO: 2075933 - DNA, 25 bp, Homo sapien
tttgagacaatctacttgtcggtcg

SEQ ID NO: 2075934 - DNA, 25 bp, Homo sapien
tgaattgaaactgtggtcaggtctg

SEQ ID NO: 2075935 - DNA, 25 bp, Homo sapien
taatggtgtgcatgaattgaaactg

SEQ ID NO: 2075936 - DNA, 25 bp, Homo sapien
gacacccggtaatggtgtgcatgaa

SEQ ID NO: 2075937 - DNA, 25 bp, Homo sapien
gtgtgcatgaattgaaactgtggtc

SEQ ID NO: 2075938 - DNA, 25 bp, Homo sapien
ttcactgagagttcttccctgactt

SEQ ID NO: 2075939 - DNA, 25 bp, Homo sapien
ctttggacttgggaatgattcttat

SEQ ID NO: 2075940 - DNA, 25 bp, Homo sapien
acattccctcttctgggtttgttcg

SEQ ID NO: 2075941 - DNA, 25 bp, Homo sapien
ggacttgggaatgattcttatgcat

SEQ ID NO: 2075942 - DNA, 25 bp, Homo sapien
gcgaatcagagatggaccatggcct

SEQ ID NO: 2075943 - DNA, 25 bp, Homo sapien
cacaggtagtgatgctgcgaatcag

SEQ ID NO: 2075944 - DNA, 25 bp, Homo sapien
gagatggaccatggcctgtcacggt

SEQ ID NO: 2075945 - DNA, 25 bp, Homo sapien
tgatgacccgagcagctgcatgaca

SEQ ID NO: 2075946 - DNA, 25 bp, Homo sapien
attttttactaggagaaggcatgac

SEQ ID NO: 2075947 - DNA, 25 bp, Homo sapien
tgtcatctaattggctctggaggac

SEQ ID NO: 2075948 - DNA, 25 bp, Homo sapien
catgactgtgtcatctaattggctc

SEQ ID NO: 2075949 - DNA, 25 bp, Homo sapien
actaggagaaggcatgactgtgtca

SEQ ID NO: 2075950 - DNA, 25 bp, Homo sapien
aacatttgtttgctccaccactggc

SEQ ID NO: 2075951 - DNA, 25 bp, Homo sapien
gaacatttgtttgctccaccactgg

SEQ ID NO: 2075952 - DNA, 25 bp, Homo sapien
ctctaaataaccacccaataatgtg

SEQ ID NO: 2075953 - DNA, 25 bp, Homo sapien
taatgtgtggttagagatgagtgac

SEQ ID NO: 2075954 - DNA, 25 bp, Homo sapien
acacagactgtgcactggctcttca

SEQ ID NO: 2075955 - DNA, 25 bp, Homo sapien
tgtgcactggctcttcatattacac

SEQ ID NO: 2075956 - DNA, 25 bp, Homo sapien
tttctgtgcattatcataggcatag

SEQ ID NO: 2075957 - DNA, 25 bp, Homo sapien
tatcataggcatagccaaaaacaca

SEQ ID NO: 2075958 - DNA, 25 bp, Homo sapien
tcaattccgtactcatcctaacctg

SEQ ID NO: 2075959 - DNA, 25 bp, Homo sapien
ttcctcaattccgtactcatcctaa

SEQ ID NO: 2075960 - DNA, 25 bp, Homo sapien
aattcctcaattccgtactcatcct

SEQ ID NO: 2075961 - DNA, 25 bp, Homo sapien
ttccgtactcatcctaacctgattc

SEQ ID NO: 2075962 - DNA, 25 bp, Homo sapien
tatgaaaatttacgtgtgaccagtg

SEQ ID NO: 2075963 - DNA, 25 bp, Homo sapien
caacaggccccaatttatgaaaatt

SEQ ID NO: 2075964 - DNA, 25 bp, Homo sapien
caatttatgaaaatttacgtgtgac

SEQ ID NO: 2075965 - DNA, 25 bp, Homo sapien
tacgtgtgaccagtgaggaggtata

SEQ ID NO: 2075966 - DNA, 25 bp, Homo sapien
ggtgcacagggtactcgataaaaac

SEQ ID NO: 2075967 - DNA, 25 bp, Homo sapien
cattgaagggaacagcatacgagca

SEQ ID NO: 2075968 - DNA, 25 bp, Homo sapien
cagataccaggaagcaactatgtga

SEQ ID NO: 2075969 - DNA, 25 bp, Homo sapien
taactccatgtcgtatgaagcaatg

SEQ ID NO: 2075970 - DNA, 25 bp, Homo sapien
cattagaaacaacagagggctgtcc

SEQ ID NO: 2075971 - DNA, 25 bp, Homo sapien
taaacaacgtcagtgtccagaccat

SEQ ID NO: 2075972 - DNA, 25 bp, Homo sapien
tactccttatgaagcagacacggac

SEQ ID NO: 2075973 - DNA, 25 bp, Homo sapien
caatggagaaggtaactggctgatc

SEQ ID NO: 2075974 - DNA, 25 bp, Homo sapien
ggcagcaggagaggcattatttttc

SEQ ID NO: 2075975 - DNA, 25 bp, Homo sapien
tatatgagggaaacggatggcagca

SEQ ID NO: 2075976 - DNA, 25 bp, Homo sapien
cccatgtatggagggactactttaa

SEQ ID NO: 2075977 - DNA, 25 bp, Homo sapien
ttattttgcgaaagtcaatcacaag

SEQ ID NO: 2075978 - DNA, 25 bp, Homo sapien
tgaagtcctaacaaatattttatag

SEQ ID NO: 2075979 - DNA, 25 bp, Homo sapien
ataatttgaagtcctaacaaatatt

SEQ ID NO: 2075980 - DNA, 25 bp, Homo sapien
tctttaataatttgaagtcctaaca

SEQ ID NO: 2075981 - DNA, 25 bp, Homo sapien
ttgaagtcctaacaaatattttata

SEQ ID NO: 2075982 - DNA, 25 bp, Homo sapien
tgcactgtaggcactacagatcctc

SEQ ID NO: 2075983 - DNA, 25 bp, Homo sapien
tatataacctccatctgtgtcggct

SEQ ID NO: 2075984 - DNA, 25 bp, Homo sapien
gagaaagcagcccatcagtggtgag

SEQ ID NO: 2075985 - DNA, 25 bp, Homo sapien
tagcacatgatactgatgacaccca

SEQ ID NO: 2075986 - DNA, 25 bp, Homo sapien
tatgggacaagtgagcaccaggcaa

SEQ ID NO: 2075987 - DNA, 25 bp, Homo sapien
gaaaatgcccatgtaagagctcgag

SEQ ID NO: 2075988 - DNA, 25 bp, Homo sapien
tgctcgtggcaacaggaaagtaaag

SEQ ID NO: 2075989 - DNA, 25 bp, Homo sapien
attagggcctaatccatgctcgtgg

SEQ ID NO: 2075990 - DNA, 25 bp, Homo sapien
tgcaaaatgctatcacctccttggg

SEQ ID NO: 2075991 - DNA, 25 bp, Homo sapien
cacaatagtagatttggcatcaaat

SEQ ID NO: 2075992 - DNA, 25 bp, Homo sapien
caatagtagatttggcatcaaatac

SEQ ID NO: 2075993 - DNA, 25 bp, Homo sapien
aatagtagatttggcatcaaatact

SEQ ID NO: 2075994 - DNA, 25 bp, Homo sapien
gaggacagcctaaccagcttttgag

SEQ ID NO: 2075995 - DNA, 25 bp, Homo sapien
taacccacacagcttggctgaagct

SEQ ID NO: 2075996 - DNA, 25 bp, Homo sapien
tacataaccttacaattgcaggcca

SEQ ID NO: 2075997 - DNA, 25 bp, Homo sapien
tgcaggccaaatggttgactccaaa

SEQ ID NO: 2075998 - DNA, 25 bp, Homo sapien
acaacctgattgtgacttgcggtgg

SEQ ID NO: 2075999 - DNA, 25 bp, Homo sapien
tatattcggccatacctgcaatctg

SEQ ID NO: 2076000 - DNA, 25 bp, Homo sapien
gaattaagatgcatgctggtcacaa

SEQ ID NO: 2076001 - DNA, 25 bp, Homo sapien
tcaccttgaccgaaagtagttatgt

SEQ ID NO: 2076002 - DNA, 25 bp, Homo sapien
tactccgggtgatggccaactattc

SEQ ID NO: 2076003 - DNA, 25 bp, Homo sapien
tctgtatctgggagaatgtacctct

SEQ ID NO: 2076004 - DNA, 25 bp, Homo sapien
catactaagagacaggcaagttcac

SEQ ID NO: 2076005 - DNA, 25 bp, Homo sapien
gattaagtctagaactctccacggg

SEQ ID NO: 2076006 - DNA, 25 bp, Homo sapien
tctactgtgccatccaaaatgttat

SEQ ID NO: 2076007 - DNA, 25 bp, Homo sapien
tacaactacagttgggactgtcaat

SEQ ID NO: 2076008 - DNA, 25 bp, Homo sapien
tgttattaataaactggaccatgtc

SEQ ID NO: 2076009 - DNA, 25 bp, Homo sapien
caagaaatattgctggtttgaagta

SEQ ID NO: 2076010 - DNA, 25 bp, Homo sapien
tttatgtagtcatttccatccatgt

SEQ ID NO: 2076011 - DNA, 25 bp, Homo sapien
catcagcaaggtatttatgtagtca

SEQ ID NO: 2076012 - DNA, 25 bp, Homo sapien
tccatcagcaaggtatttatgtagt

SEQ ID NO: 2076013 - DNA, 25 bp, Homo sapien
gtagtcatttccatccatgtggcca

SEQ ID NO: 2076014 - DNA, 25 bp, Homo sapien
agaggtctctgtaatctcttgcaac

SEQ ID NO: 2076015 - DNA, 25 bp, Homo sapien
caacttcctgaataattgacttcaa

SEQ ID NO: 2076016 - DNA, 25 bp, Homo sapien
tgcaacttcctgaataattgacttc

SEQ ID NO: 2076017 - DNA, 25 bp, Homo sapien
ggaagaggtctctgtaatctcttgc

SEQ ID NO: 2076018 - DNA, 25 bp, Homo sapien
ctggtatgttcaactgatgtatttt

SEQ ID NO: 2076019 - DNA, 25 bp, Homo sapien
ttctcatcaataactgcaagagcca

SEQ ID NO: 2076020 - DNA, 25 bp, Homo sapien
tcaataactgcaagagccacaagct

SEQ ID NO: 2076021 - DNA, 25 bp, Homo sapien
ataactgcaagagccacaagctttc

SEQ ID NO: 2076022 - DNA, 25 bp, Homo sapien
tcaaataatgtaccacacactgggc

SEQ ID NO: 2076023 - DNA, 25 bp, Homo sapien
tacatggccgttgactttggtacca

SEQ ID NO: 2076024 - DNA, 25 bp, Homo sapien
gagcattctcccatagaccaacagg

SEQ ID NO: 2076025 - DNA, 25 bp, Homo sapien
tccgaggacatggtgatgagcaaac

SEQ ID NO: 2076026 - DNA, 25 bp, Homo sapien
tctcgtaaagaactggcattcagat

SEQ ID NO: 2076027 - DNA, 25 bp, Homo sapien
ggtaatatcagtttacattctcgta

SEQ ID NO: 2076028 - DNA, 25 bp, Homo sapien
tcagtttacattctcgtaaagaact

SEQ ID NO: 2076029 - DNA, 25 bp, Homo sapien
cattctcgtaaagaactggcattca

SEQ ID NO: 2076030 - DNA, 25 bp, Homo sapien
catccatagcaaggtaattctgaaa

SEQ ID NO: 2076031 - DNA, 25 bp, Homo sapien
tccatagcaaggtaattctgaaacc

SEQ ID NO: 2076032 - DNA, 25 bp, Homo sapien
tagcaaggtaattctgaaacctttc

SEQ ID NO: 2076033 - DNA, 25 bp, Homo sapien
agccatccatagcaaggtaattctg

SEQ ID NO: 2076034 - DNA, 25 bp, Homo sapien
gcaaatgtctataaaagcctaccaa

SEQ ID NO: 2076035 - DNA, 25 bp, Homo sapien
tatacttgggtcatggcactacagg

SEQ ID NO: 2076036 - DNA, 25 bp, Homo sapien
aaactagaaattgattactgggcca

SEQ ID NO: 2076037 - DNA, 25 bp, Homo sapien
tctacgagattgcatacagtgatca

SEQ ID NO: 2076038 - DNA, 25 bp, Homo sapien
caaagtgcctctctgaattgctaag

SEQ ID NO: 2076039 - DNA, 25 bp, Homo sapien
tattatatgaggagtactgcaagca

SEQ ID NO: 2076040 - DNA, 25 bp, Homo sapien
tataagcccaacgtctaatacagac

SEQ ID NO: 2076041 - DNA, 25 bp, Homo sapien
taggtgtggctacaaattattttcc

SEQ ID NO: 2076042 - DNA, 25 bp, Homo sapien
ctcattgaacagtagaagcatttac

SEQ ID NO: 2076043 - DNA, 25 bp, Homo sapien
tacacctaagttgtataacagacat

SEQ ID NO: 2076044 - DNA, 25 bp, Homo sapien
caaaacatcaggcattcaagtcatg

SEQ ID NO: 2076045 - DNA, 25 bp, Homo sapien
tgtgtaggtaaagctcagaataaaa

SEQ ID NO: 2076046 - DNA, 25 bp, Homo sapien
catcataaacaaagtaagtttcatc

SEQ ID NO: 2076047 - DNA, 25 bp, Homo sapien
taaacaaagtaagtttcatctttga

SEQ ID NO: 2076048 - DNA, 25 bp, Homo sapien
taagtttcatctttgaaaacaagca

SEQ ID NO: 2076049 - DNA, 25 bp, Homo sapien
gtaagtttcatctttgaaaacaagc

SEQ ID NO: 2076050 - DNA, 25 bp, Homo sapien
tttttccaaacatatcacagtaaat

SEQ ID NO: 2076051 - DNA, 25 bp, Homo sapien
tgaggtatcacttgtcatcactact

SEQ ID NO: 2076052 - DNA, 25 bp, Homo sapien
gcaatctaataccagtagtaaagaa

SEQ ID NO: 2076053 - DNA, 25 bp, Homo sapien
tccctaaatgctacgaatctgatgg

SEQ ID NO: 2076054 - DNA, 25 bp, Homo sapien
cacaatttagtttattaaatcaagt

SEQ ID NO: 2076055 - DNA, 25 bp, Homo sapien
atcacaatttagtttattaaatcaa

SEQ ID NO: 2076056 - DNA, 25 bp, Homo sapien
tcacaatttagtttattaaatcaag

SEQ ID NO: 2076057 - DNA, 25 bp, Homo sapien
gtatgtatatacaatcaattctgaa

SEQ ID NO: 2076058 - DNA, 25 bp, Homo sapien
atgtatatacaatcaattctgaagc

SEQ ID NO: 2076059 - DNA, 25 bp, Homo sapien
atcaattctgaagcagcatctatgt

SEQ ID NO: 2076060 - DNA, 25 bp, Homo sapien
caattctgaagcagcatctatgtat

SEQ ID NO: 2076061 - DNA, 25 bp, Homo sapien
taagttctgcgtttctagtgaagtc

SEQ ID NO: 2076062 - DNA, 25 bp, Homo sapien
gaaaatatttccagtaagtgcagag

SEQ ID NO: 2076063 - DNA, 25 bp, Homo sapien
gctaaggcaggcaacatttactcac

SEQ ID NO: 2076064 - DNA, 25 bp, Homo sapien
gcaaaggccaacgtaattaagagct

SEQ ID NO: 2076065 - DNA, 25 bp, Homo sapien
tgacttggaagtggccgaattagag

SEQ ID NO: 2076066 - DNA, 25 bp, Homo sapien
tccacctacataaacgaaaaataca

SEQ ID NO: 2076067 - DNA, 25 bp, Homo sapien
gaaaaatacacggtgtctcttctgc

SEQ ID NO: 2076068 - DNA, 25 bp, Homo sapien
ggtgattctccacctacataaacga

SEQ ID NO: 2076069 - DNA, 25 bp, Homo sapien
ctctgtgagcaaactcaataatatc

SEQ ID NO: 2076070 - DNA, 25 bp, Homo sapien
ttttgttcgtggtcctctataatta

SEQ ID NO: 2076071 - DNA, 25 bp, Homo sapien
taattatatgccaagtcccctttta

SEQ ID NO: 2076072 - DNA, 25 bp, Homo sapien
gtgagcaaactcaataatatcatct

SEQ ID NO: 2076073 - DNA, 25 bp, Homo sapien
ttcacctatgaagaatggccaaacc

SEQ ID NO: 2076074 - DNA, 25 bp, Homo sapien
accccaatcttcaatcctccaggga

SEQ ID NO: 2076075 - DNA, 25 bp, Homo sapien
agaatggccaaaccccaatcttcaa

SEQ ID NO: 2076076 - DNA, 25 bp, Homo sapien
cccaatcttcaatcctccagggaat

SEQ ID NO: 2076077 - DNA, 25 bp, Homo sapien
aattgttggataacctcgaactcca

SEQ ID NO: 2076078 - DNA, 25 bp, Homo sapien
tgttggataacctcgaactccaaac

SEQ ID NO: 2076079 - DNA, 25 bp, Homo sapien
taattgttggataacctcgaactcc

SEQ ID NO: 2076080 - DNA, 25 bp, Homo sapien
ttgttggataacctcgaactccaaa

SEQ ID NO: 2076081 - DNA, 25 bp, Homo sapien
taacattaaccttcgcttctgacat

SEQ ID NO: 2076082 - DNA, 25 bp, Homo sapien
tcccttggcttcttgacagttaaca

SEQ ID NO: 2076083 - DNA, 25 bp, Homo sapien
gacaatggagatctatcacccaacc

SEQ ID NO: 2076084 - DNA, 25 bp, Homo sapien
cagtattcacatcgagacaatggag

SEQ ID NO: 2076085 - DNA, 25 bp, Homo sapien
tttacaatggccacaccatggcgca

SEQ ID NO: 2076086 - DNA, 25 bp, Homo sapien
tagaataggaagtagcatccatctt

SEQ ID NO: 2076087 - DNA, 25 bp, Homo sapien
cagctttttacaatggccacaccat

SEQ ID NO: 2076088 - DNA, 25 bp, Homo sapien
attggttccagctttttacaatggc

SEQ ID NO: 2076089 - DNA, 25 bp, Homo sapien
caagccaaatgtcatcatttcgatt

SEQ ID NO: 2076090 - DNA, 25 bp, Homo sapien
aaatgtcatcatttcgattttcttt

SEQ ID NO: 2076091 - DNA, 25 bp, Homo sapien
atctacaagccaaatgtcatcattt

SEQ ID NO: 2076092 - DNA, 25 bp, Homo sapien
atgtcatcatttcgattttctttaa

SEQ ID NO: 2076093 - DNA, 25 bp, Homo sapien
tacagacgaccatatcaagtacaac

SEQ ID NO: 2076094 - DNA, 25 bp, Homo sapien
atcctttacagacgaccatatcaag

SEQ ID NO: 2076095 - DNA, 25 bp, Homo sapien
tttacagacgaccatatcaagtaca

SEQ ID NO: 2076096 - DNA, 25 bp, Homo sapien
cagacgaccatatcaagtacaacaa

SEQ ID NO: 2076097 - DNA, 25 bp, Homo sapien
gagccgcagggccgtccaactcttc

SEQ ID NO: 2076098 - DNA, 25 bp, Homo sapien
agccgcagggccgtccaactcttcc

SEQ ID NO: 2076099 - DNA, 25 bp, Homo sapien
gctgactgtgcaaaagagggataaa

SEQ ID NO: 2076100 - DNA, 25 bp, Homo sapien
ctgactgtgcaaaagagggataaag

SEQ ID NO: 2076101 - DNA, 25 bp, Homo sapien
agctgactgtgcaaaagagggataa

SEQ ID NO: 2076102 - DNA, 25 bp, Homo sapien
gactgtgcaaaagagggataaagac

SEQ ID NO: 2076103 - DNA, 25 bp, Homo sapien
aagcaccgcgctaactacgggggcg

SEQ ID NO: 2076104 - DNA, 25 bp, Homo sapien
agagaagcaccgcgctaactacggg

SEQ ID NO: 2076105 - DNA, 25 bp, Homo sapien
cggaagagaagcaccgcgctaacta

SEQ ID NO: 2076106 - DNA, 25 bp, Homo sapien
ggaagagaagcaccgcgctaactac

SEQ ID NO: 2076107 - DNA, 25 bp, Homo sapien
ggaatgtttgcactcatcccgcatc

SEQ ID NO: 2076108 - DNA, 25 bp, Homo sapien
ctttgcggggattgttcaaggagaa

SEQ ID NO: 2076109 - DNA, 25 bp, Homo sapien
ttagatccgtagtattgtctctggc

SEQ ID NO: 2076110 - DNA, 25 bp, Homo sapien
tctggctttgaacgctgttgaggga

SEQ ID NO: 2076111 - DNA, 25 bp, Homo sapien
tgctttgcccatatccaggactctt

SEQ ID NO: 2076112 - DNA, 25 bp, Homo sapien
caggtgtcctcatcacactgctttg

SEQ ID NO: 2076113 - DNA, 25 bp, Homo sapien
ggtgtcctcatcacactgctttgcc

SEQ ID NO: 2076114 - DNA, 25 bp, Homo sapien
ccaggactctttaaccagaggtgca

SEQ ID NO: 2076115 - DNA, 25 bp, Homo sapien
aattcttacacttttcgtgcttgag

SEQ ID NO: 2076116 - DNA, 25 bp, Homo sapien
tatgtcaattcttacacttttcgtg

SEQ ID NO: 2076117 - DNA, 25 bp, Homo sapien
tcaccaggtattctttggaattttg

SEQ ID NO: 2076118 - DNA, 25 bp, Homo sapien
tttgtggatgcgttttctcagctga

SEQ ID NO: 2076119 - DNA, 25 bp, Homo sapien
tgtgttgtgattccaccgctgtact

SEQ ID NO: 2076120 - DNA, 25 bp, Homo sapien
tgttgtgattccaccgctgtactcc

SEQ ID NO: 2076121 - DNA, 25 bp, Homo sapien
gtgttgtgattccaccgctgtactc

SEQ ID NO: 2076122 - DNA, 25 bp, Homo sapien
ctgcaggcagctccatagttttgat

SEQ ID NO: 2076123 - DNA, 25 bp, Homo sapien
gcaggcagctccatagttttgatac

SEQ ID NO: 2076124 - DNA, 25 bp, Homo sapien
caggcagctccatagttttgataca

SEQ ID NO: 2076125 - DNA, 25 bp, Homo sapien
gcagctccatagttttgatacactc

SEQ ID NO: 2076126 - DNA, 25 bp, Homo sapien
gaggagcggtaagggctagagagca

SEQ ID NO: 2076127 - DNA, 25 bp, Homo sapien
cacttctctgtaagcgaggagcggt

SEQ ID NO: 2076128 - DNA, 25 bp, Homo sapien
tggagaaatcttgggaccacttctc

SEQ ID NO: 2076129 - DNA, 25 bp, Homo sapien
tcttgggaccacttctctgtaagcg

SEQ ID NO: 2076130 - DNA, 25 bp, Homo sapien
ggccttgaaattgtgcagacatgtg

SEQ ID NO: 2076131 - DNA, 25 bp, Homo sapien
gccttgaaattgtgcagacatgtgg

SEQ ID NO: 2076132 - DNA, 25 bp, Homo sapien
gggccttgaaattgtgcagacatgt

SEQ ID NO: 2076133 - DNA, 25 bp, Homo sapien
gaagtttcacttttgacatccgtga

SEQ ID NO: 2076134 - DNA, 25 bp, Homo sapien
gctgtcctccaagaattaatgggag

SEQ ID NO: 2076135 - DNA, 25 bp, Homo sapien
tccaagggccattgttggaggaaat

SEQ ID NO: 2076136 - DNA, 25 bp, Homo sapien
aagagagtttccaagtgggcaggta

SEQ ID NO: 2076137 - DNA, 25 bp, Homo sapien
ccagcattagactctgccgtccaag

SEQ ID NO: 2076138 - DNA, 25 bp, Homo sapien
gccttctctttcagatattgggtga

SEQ ID NO: 2076139 - DNA, 25 bp, Homo sapien
agccttctctttcagatattgggtg

SEQ ID NO: 2076140 - DNA, 25 bp, Homo sapien
tgttcacacgaaaagacacaaagtc

SEQ ID NO: 2076141 - DNA, 25 bp, Homo sapien
tagtaagaagtgatcagcagatgct

SEQ ID NO: 2076142 - DNA, 25 bp, Homo sapien
gaaaatatttgcacaggtcagactc

SEQ ID NO: 2076143 - DNA, 25 bp, Homo sapien
tgctacctcgggatctgactcttag

SEQ ID NO: 2076144 - DNA, 25 bp, Homo sapien
tggtcccgtggcatcagcataattg

SEQ ID NO: 2076145 - DNA, 25 bp, Homo sapien
tgttgctcttggaaatagtggcact

SEQ ID NO: 2076146 - DNA, 25 bp, Homo sapien
cataaatccccattgagtagttgct

SEQ ID NO: 2076147 - DNA, 25 bp, Homo sapien
gaaacagagcttcggtggcagtgtc

SEQ ID NO: 2076148 - DNA, 25 bp, Homo sapien
cattataaatgatggcaaagatgtt

SEQ ID NO: 2076149 - DNA, 25 bp, Homo sapien
ataaatgatggcaaagatgtttaag

SEQ ID NO: 2076150 - DNA, 25 bp, Homo sapien
ctgcattataaatgatggcaaagat

SEQ ID NO: 2076151 - DNA, 25 bp, Homo sapien
aaatgatggcaaagatgtttaagac

SEQ ID NO: 2076152 - DNA, 25 bp, Homo sapien
gtcatttgaattacttcatgctttc

SEQ ID NO: 2076153 - DNA, 25 bp, Homo sapien
aattacttcatgctttcttccagca

SEQ ID NO: 2076154 - DNA, 25 bp, Homo sapien
tgaattacttcatgctttcttccag

SEQ ID NO: 2076155 - DNA, 25 bp, Homo sapien
cttttagtcatttgaattacttcat

SEQ ID NO: 2076156 - DNA, 25 bp, Homo sapien
actagagtgagtcggtgagcacaga

SEQ ID NO: 2076157 - DNA, 25 bp, Homo sapien
gaagtgtgtttcaacctcccattgt

SEQ ID NO: 2076158 - DNA, 25 bp, Homo sapien
gggctccccggtctgtgttgacaga

SEQ ID NO: 2076159 - DNA, 25 bp, Homo sapien
tgcttggaaggtcaatgaggttctg

SEQ ID NO: 2076160 - DNA, 25 bp, Homo sapien
tgtgctcagcatagctacacgtact

SEQ ID NO: 2076161 - DNA, 25 bp, Homo sapien
agcatagctacacgtactgtggaaa

SEQ ID NO: 2076162 - DNA, 25 bp, Homo sapien
tgctcagcatagctacacgtactgt

SEQ ID NO: 2076163 - DNA, 25 bp, Homo sapien
gatgagcctggggagtagctgtgct

SEQ ID NO: 2076164 - DNA, 25 bp, Homo sapien
gtccaggtgagtccggtttcatgga

SEQ ID NO: 2076165 - DNA, 25 bp, Homo sapien
caggtgagtccggtttcatggagca

SEQ ID NO: 2076166 - DNA, 25 bp, Homo sapien
ttgtccaggtgagtccggtttcatg

SEQ ID NO: 2076167 - DNA, 25 bp, Homo sapien
ccaggtgagtccggtttcatggagc

SEQ ID NO: 2076168 - DNA, 25 bp, Homo sapien
tgcagaatgtgacacttcagagtgt

SEQ ID NO: 2076169 - DNA, 25 bp, Homo sapien
tttattgcagaatgtgacacttcag

SEQ ID NO: 2076170 - DNA, 25 bp, Homo sapien
cagggcagttgaaacagtggccact

SEQ ID NO: 2076171 - DNA, 25 bp, Homo sapien
tgtccagggcagttgaaacagtggc

SEQ ID NO: 2076172 - DNA, 25 bp, Homo sapien
cctggtttgatgtagggagtagaac

SEQ ID NO: 2076173 - DNA, 25 bp, Homo sapien
ccggttgtatctaaactgctccata

SEQ ID NO: 2076174 - DNA, 25 bp, Homo sapien
gagtagaacccttgtgagttctgca

SEQ ID NO: 2076175 - DNA, 25 bp, Homo sapien
tcttagtggtccaagatagaaccct

SEQ ID NO: 2076176 - DNA, 25 bp, Homo sapien
gataagtggttatcagccaccatct

SEQ ID NO: 2076177 - DNA, 25 bp, Homo sapien
ccattacatagaatagggccctgag

SEQ ID NO: 2076178 - DNA, 25 bp, Homo sapien
taaccaacaatcactacgtagggac

SEQ ID NO: 2076179 - DNA, 25 bp, Homo sapien
cttaagtgatctccgttgtctctgg

SEQ ID NO: 2076180 - DNA, 25 bp, Homo sapien
cctctagcttactcaggttcacgga

SEQ ID NO: 2076181 - DNA, 25 bp, Homo sapien
gtcacagccccaccctttagatagg

SEQ ID NO: 2076182 - DNA, 25 bp, Homo sapien
gcttactcaggttcacggaggtcac

SEQ ID NO: 2076183 - DNA, 25 bp, Homo sapien
tactcaggttcacggaggtcacagc

SEQ ID NO: 2076184 - DNA, 25 bp, Homo sapien
cattatcagtatgacataaactcac

SEQ ID NO: 2076185 - DNA, 25 bp, Homo sapien
gcatctgatacttggtctagagaat

SEQ ID NO: 2076186 - DNA, 25 bp, Homo sapien
tctagagaatagaaatagtgacact

SEQ ID NO: 2076187 - DNA, 25 bp, Homo sapien
gaatgactatagcaggtagacttgc

SEQ ID NO: 2076188 - DNA, 25 bp, Homo sapien
ctcgagtaagtcaactccatgtcat

SEQ ID NO: 2076189 - DNA, 25 bp, Homo sapien
atacccttctccctcgagtaagtca

SEQ ID NO: 2076190 - DNA, 25 bp, Homo sapien
ttcactttctaacggaagtctgtcc

SEQ ID NO: 2076191 - DNA, 25 bp, Homo sapien
ttctccctcgagtaagtcaactcca

SEQ ID NO: 2076192 - DNA, 25 bp, Homo sapien
tacacaaattaatgggcttcttcac

SEQ ID NO: 2076193 - DNA, 25 bp, Homo sapien
tatgctgaattaaagattagggcct

SEQ ID NO: 2076194 - DNA, 25 bp, Homo sapien
tagagactgaactcaggcacttgca

SEQ ID NO: 2076195 - DNA, 25 bp, Homo sapien
tcacttcttctaatttttgcctaac

SEQ ID NO: 2076196 - DNA, 25 bp, Homo sapien
caggctgtaagcatcgctgagaaac

SEQ ID NO: 2076197 - DNA, 25 bp, Homo sapien
taaaatcatggaaaggcatcagcat

SEQ ID NO: 2076198 - DNA, 25 bp, Homo sapien
caggccaaaattaagctgtggtttc

SEQ ID NO: 2076199 - DNA, 25 bp, Homo sapien
tcagcattgcaaagtagcatctagg

SEQ ID NO: 2076200 - DNA, 25 bp, Homo sapien
tttgctctctatccctttctgccaa

SEQ ID NO: 2076201 - DNA, 25 bp, Homo sapien
atgtcactacatgaatggtttccat

SEQ ID NO: 2076202 - DNA, 25 bp, Homo sapien
ttatgtcactacatgaatggtttcc

SEQ ID NO: 2076203 - DNA, 25 bp, Homo sapien
tatgtcactacatgaatggtttcca

SEQ ID NO: 2076204 - DNA, 25 bp, Homo sapien
cactaagacatgcttttacttgtag

SEQ ID NO: 2076205 - DNA, 25 bp, Homo sapien
ctaagacatgcttttacttgtagga

SEQ ID NO: 2076206 - DNA, 25 bp, Homo sapien
actaagacatgcttttacttgtagg

SEQ ID NO: 2076207 - DNA, 25 bp, Homo sapien
taagacatgcttttacttgtaggaa

SEQ ID NO: 2076208 - DNA, 25 bp, Homo sapien
tacacttgatcttagcaaaaaggct

SEQ ID NO: 2076209 - DNA, 25 bp, Homo sapien
gatcttagcaaaaaggctgagaagc

SEQ ID NO: 2076210 - DNA, 25 bp, Homo sapien
gttttaagctgataagaacagatac

SEQ ID NO: 2076211 - DNA, 25 bp, Homo sapien
cttagcaaaaaggctgagaagcaat

SEQ ID NO: 2076212 - DNA, 25 bp, Homo sapien
gaaagcagttattcactgagctaca

SEQ ID NO: 2076213 - DNA, 25 bp, Homo sapien
tcagaaatgttgacgcagcagtaat

SEQ ID NO: 2076214 - DNA, 25 bp, Homo sapien
cattgcattaaatccgcttgagctc

SEQ ID NO: 2076215 - DNA, 25 bp, Homo sapien
tggagaagcttaacctatacaggga

SEQ ID NO: 2076216 - DNA, 25 bp, Homo sapien
ccttacaaatcactcttggcttttg

SEQ ID NO: 2076217 - DNA, 25 bp, Homo sapien
ttccttgactccagaaataaccaga

SEQ ID NO: 2076218 - DNA, 25 bp, Homo sapien
cagacactccaagcccttacaaatc

SEQ ID NO: 2076219 - DNA, 25 bp, Homo sapien
tcagctcaagtaatattccttgact

SEQ ID NO: 2076220 - DNA, 25 bp, Homo sapien
tgttcgtttcatggggtcataacag

SEQ ID NO: 2076221 - DNA, 25 bp, Homo sapien
cgtttcatggggtcataacagatca

SEQ ID NO: 2076222 - DNA, 25 bp, Homo sapien
ctgccatctgttcgtttcatggggt

SEQ ID NO: 2076223 - DNA, 25 bp, Homo sapien
catctgttcgtttcatggggtcata

SEQ ID NO: 2076224 - DNA, 25 bp, Homo sapien
agagtaagtgacctttagtagagtc

SEQ ID NO: 2076225 - DNA, 25 bp, Homo sapien
tggaaacgttttactacataggaga

SEQ ID NO: 2076226 - DNA, 25 bp, Homo sapien
gacctttagtagagtcttgaaaatg

SEQ ID NO: 2076227 - DNA, 25 bp, Homo sapien
tacataggagatcaaggtgaacttc

SEQ ID NO: 2076228 - DNA, 25 bp, Homo sapien
tgcttttggtagttaacttcagagt

SEQ ID NO: 2076229 - DNA, 25 bp, Homo sapien
aggtgcttttggtagttaacttcag

SEQ ID NO: 2076230 - DNA, 25 bp, Homo sapien
ggtgcttttggtagttaacttcaga

SEQ ID NO: 2076231 - DNA, 25 bp, Homo sapien
gtgcttttggtagttaacttcagag

SEQ ID NO: 2076232 - DNA, 25 bp, Homo sapien
tattagagaactacctcttaccagg

SEQ ID NO: 2076233 - DNA, 25 bp, Homo sapien
tttattagagaactacctcttacca

SEQ ID NO: 2076234 - DNA, 25 bp, Homo sapien
ttagagaactacctcttaccaggct

SEQ ID NO: 2076235 - DNA, 25 bp, Homo sapien
cctcttttattagagaactacctct

SEQ ID NO: 2076236 - DNA, 25 bp, Homo sapien
taaagagtaagagagttttcagtgc

SEQ ID NO: 2076237 - DNA, 25 bp, Homo sapien
acttgcagcgtatagagagagatca

SEQ ID NO: 2076238 - DNA, 25 bp, Homo sapien
tggcccctggtgactacttgcagcg

SEQ ID NO: 2076239 - DNA, 25 bp, Homo sapien
gagagatcatcacccagagagatga

SEQ ID NO: 2076240 - DNA, 25 bp, Homo sapien
cacgaagtaattaaagtttcagtca

SEQ ID NO: 2076241 - DNA, 25 bp, Homo sapien
taaactacagtaatacacgaagtaa

SEQ ID NO: 2076242 - DNA, 25 bp, Homo sapien
aatgtgtgctcagttttctcaatag

SEQ ID NO: 2076243 - DNA, 25 bp, Homo sapien
gaatcagcattcatgcaataaatgt

SEQ ID NO: 2076244 - DNA, 25 bp, Homo sapien
cctctgttgctatgcttcgtaggag

SEQ ID NO: 2076245 - DNA, 25 bp, Homo sapien
tgaaaacactgtataacatcttcct

SEQ ID NO: 2076246 - DNA, 25 bp, Homo sapien
tcgtaggagataacttttcctggtc

SEQ ID NO: 2076247 - DNA, 25 bp, Homo sapien
cagcatgatgttattcatgaagctc

SEQ ID NO: 2076248 - DNA, 25 bp, Homo sapien
gtctcctcacggtccatatctaagt

SEQ ID NO: 2076249 - DNA, 25 bp, Homo sapien
tgcatctgccacaagagtcactgaa

SEQ ID NO: 2076250 - DNA, 25 bp, Homo sapien
tcacacaccatcgagtctgcatctg

SEQ ID NO: 2076251 - DNA, 25 bp, Homo sapien
catttactgaagaaaggacaggcac

SEQ ID NO: 2076252 - DNA, 25 bp, Homo sapien
ttgaaatcatataaatgccagtcat

SEQ ID NO: 2076253 - DNA, 25 bp, Homo sapien
ctgcctaaggattctttatctttat

SEQ ID NO: 2076254 - DNA, 25 bp, Homo sapien
tttatttgaaatcatataaatgcca

SEQ ID NO: 2076255 - DNA, 25 bp, Homo sapien
atttgaaatcatataaatgccagtc

SEQ ID NO: 2076256 - DNA, 25 bp, Homo sapien
ctgtcttgtggagaagattggcgcc

SEQ ID NO: 2076257 - DNA, 25 bp, Homo sapien
gaagattggcgccttcatttatttc

SEQ ID NO: 2076258 - DNA, 25 bp, Homo sapien
tgtggagaagattggcgccttcatt

SEQ ID NO: 2076259 - DNA, 25 bp, Homo sapien
tcttgtggagaagattggcgccttc

SEQ ID NO: 2076260 - DNA, 25 bp, Homo sapien
tgaagtcctttcaggactacaaggg

SEQ ID NO: 2076261 - DNA, 25 bp, Homo sapien
gtatcttggtaagtttcatggtggt

SEQ ID NO: 2076262 - DNA, 25 bp, Homo sapien
acaggagccctgttagtatcttggt

SEQ ID NO: 2076263 - DNA, 25 bp, Homo sapien
tggtccatggaagtgcacatgaggg

SEQ ID NO: 2076264 - DNA, 25 bp, Homo sapien
gcagatatagggagatttaaattct

SEQ ID NO: 2076265 - DNA, 25 bp, Homo sapien
tgcagatatagggagatttaaattc

SEQ ID NO: 2076266 - DNA, 25 bp, Homo sapien
ttccatgatggagtagatagacgaa

SEQ ID NO: 2076267 - DNA, 25 bp, Homo sapien
gagaagctattccatgatggagtag

SEQ ID NO: 2076268 - DNA, 25 bp, Homo sapien
ccatgatggagtagatagacgaatt

SEQ ID NO: 2076269 - DNA, 25 bp, Homo sapien
gacgaattggggagtagggctgaga

SEQ ID NO: 2076270 - DNA, 25 bp, Homo sapien
tcatacttcttacggcagtacccca

SEQ ID NO: 2076271 - DNA, 25 bp, Homo sapien
tccctcatacttcttacggcagtac

SEQ ID NO: 2076272 - DNA, 25 bp, Homo sapien
tttccctcatacttcttacggcagt

SEQ ID NO: 2076273 - DNA, 25 bp, Homo sapien
cgtttccctcatacttcttacggca

SEQ ID NO: 2076274 - DNA, 25 bp, Homo sapien
ttctaatagtcctccagtagccagg

SEQ ID NO: 2076275 - DNA, 25 bp, Homo sapien
ggtaaactgcgcttcttttctgatg

SEQ ID NO: 2076276 - DNA, 25 bp, Homo sapien
gctgctgacttgatccccaagtatt

SEQ ID NO: 2076277 - DNA, 25 bp, Homo sapien
ttcctcctcagatatgctgctgact

SEQ ID NO: 2076278 - DNA, 25 bp, Homo sapien
tgtcctgagcctagcatcttcatgt

SEQ ID NO: 2076279 - DNA, 25 bp, Homo sapien
caaatccaacaaggctcacagcggg

SEQ ID NO: 2076280 - DNA, 25 bp, Homo sapien
ttgagtttagtgatggcccattgcc

SEQ ID NO: 2076281 - DNA, 25 bp, Homo sapien
gccagtgccctttgaattgagttta

SEQ ID NO: 2076282 - DNA, 25 bp, Homo sapien
ccttctgtagttaagagatccaacg

SEQ ID NO: 2076283 - DNA, 25 bp, Homo sapien
tgtctctgatgggaagcttcactct

SEQ ID NO: 2076284 - DNA, 25 bp, Homo sapien
tttgccgttgacctgaatgctccag

SEQ ID NO: 2076285 - DNA, 25 bp, Homo sapien
ttagaaacggccaacactgtgtgac

SEQ ID NO: 2076286 - DNA, 25 bp, Homo sapien
tgcaattcttcagggcatggctgca

SEQ ID NO: 2076287 - DNA, 25 bp, Homo sapien
cttgcaattcttcagggcatggctg

SEQ ID NO: 2076288 - DNA, 25 bp, Homo sapien
gcaattcttcagggcatggctgcat

SEQ ID NO: 2076289 - DNA, 25 bp, Homo sapien
ttgcaattcttcagggcatggctgc

SEQ ID NO: 2076290 - DNA, 25 bp, Homo sapien
gagactctagcaagtggcatttgtg

SEQ ID NO: 2076291 - DNA, 25 bp, Homo sapien
gaagcttggtgagattggtccccag

SEQ ID NO: 2076292 - DNA, 25 bp, Homo sapien
gagaggacagttgcagatctttaga

SEQ ID NO: 2076293 - DNA, 25 bp, Homo sapien
gtccccagggatccatagacaccat

SEQ ID NO: 2076294 - DNA, 25 bp, Homo sapien
gatagtcacaatagtgaagagagct

SEQ ID NO: 2076295 - DNA, 25 bp, Homo sapien
ttagaggtagatagtcacaatagtg

SEQ ID NO: 2076296 - DNA, 25 bp, Homo sapien
gggagccatcaagagatgttatctg

SEQ ID NO: 2076297 - DNA, 25 bp, Homo sapien
catcaagagatgttatctgagcacc

SEQ ID NO: 2076298 - DNA, 25 bp, Homo sapien
gaagcagactcataatctaaatagg

SEQ ID NO: 2076299 - DNA, 25 bp, Homo sapien
cacattgttccagaagttatatcca

SEQ ID NO: 2076300 - DNA, 25 bp, Homo sapien
tgggaaaggaacttgcagtgacaga

SEQ ID NO: 2076301 - DNA, 25 bp, Homo sapien
aaatagtaggagctttccatcagac

SEQ ID NO: 2076302 - DNA, 25 bp, Homo sapien
catgaatgtaggcacagtgatcaca

SEQ ID NO: 2076303 - DNA, 25 bp, Homo sapien
tgctatgcaaccaaatccagaactg

SEQ ID NO: 2076304 - DNA, 25 bp, Homo sapien
tggctctgcaactgaatgtctgtga

SEQ ID NO: 2076305 - DNA, 25 bp, Homo sapien
catgctagggtgttacaaagacgtt

SEQ ID NO: 2076306 - DNA, 25 bp, Homo sapien
caggagccactttcagtcctagtta

SEQ ID NO: 2076307 - DNA, 25 bp, Homo sapien
aaaatccatatgttgcctccggcca

SEQ ID NO: 2076308 - DNA, 25 bp, Homo sapien
gtcctagttaacgaaaacgcatgca

SEQ ID NO: 2076309 - DNA, 25 bp, Homo sapien
tgcataaatcaaccactcgggtcgg

SEQ ID NO: 2076310 - DNA, 25 bp, Homo sapien
gaaaatccgcagcaggaagcttggg

SEQ ID NO: 2076311 - DNA, 25 bp, Homo sapien
tctcgactccggagagcggatcgcg

SEQ ID NO: 2076312 - DNA, 25 bp, Homo sapien
tggcctccaactttaacgacatagt

SEQ ID NO: 2076313 - DNA, 25 bp, Homo sapien
caagcagggctacgtgaaaatccgc

SEQ ID NO: 2076314 - DNA, 25 bp, Homo sapien
tccacgatggtctgttctcaaaagt

SEQ ID NO: 2076315 - DNA, 25 bp, Homo sapien
gaggaggtttctttgcggtgctatc

SEQ ID NO: 2076316 - DNA, 25 bp, Homo sapien
ccaacgaggaacgtgccttggagga

SEQ ID NO: 2076317 - DNA, 25 bp, Homo sapien
agtgcaccgggctgtcttcgaccgt

SEQ ID NO: 2076318 - DNA, 25 bp, Homo sapien
gcctctgctgggtttcgcattaaag

SEQ ID NO: 2076319 - DNA, 25 bp, Homo sapien
ttgtcgggagttggcggcgccaggt

SEQ ID NO: 2076320 - DNA, 25 bp, Homo sapien
ggacgggaaaggcagacttgactct

SEQ ID NO: 2076321 - DNA, 25 bp, Homo sapien
tcagcagctctgtagtaggctggga

SEQ ID NO: 2076322 - DNA, 25 bp, Homo sapien
ctgggtgacagcaacgccccccttc

SEQ ID NO: 2076323 - DNA, 25 bp, Homo sapien
ctggagccaacgtgcgctgccgtga

SEQ ID NO: 2076324 - DNA, 25 bp, Homo sapien
ccagcctggagccaacgtgcgctgc

SEQ ID NO: 2076325 - DNA, 25 bp, Homo sapien
gcctggagccaacgtgcgctgccgt

SEQ ID NO: 2076326 - DNA, 25 bp, Homo sapien
acagctgtcagccaagggaggtgca

SEQ ID NO: 2076327 - DNA, 25 bp, Homo sapien
gaaaagctgcggttctccaggagtc

SEQ ID NO: 2076328 - DNA, 25 bp, Homo sapien
tcttgggtagaagaaagcgcctcat

SEQ ID NO: 2076329 - DNA, 25 bp, Homo sapien
ccaggcatataaggacgaacccacg

SEQ ID NO: 2076330 - DNA, 25 bp, Homo sapien
tccatcatgtgtaccctaacggttt

SEQ ID NO: 2076331 - DNA, 25 bp, Homo sapien
aaccttccatcatgtgtaccctaac

SEQ ID NO: 2076332 - DNA, 25 bp, Homo sapien
catccaccagaagtccagctagaat

SEQ ID NO: 2076333 - DNA, 25 bp, Homo sapien
caccagaagtccagctagaatcact

SEQ ID NO: 2076334 - DNA, 25 bp, Homo sapien
taggcacctacgtgatacgtggaaa

SEQ ID NO: 2076335 - DNA, 25 bp, Homo sapien
tctgcaaaatcaaagggtagcttta

SEQ ID NO: 2076336 - DNA, 25 bp, Homo sapien
tagtgtttccttataggcacctacg

SEQ ID NO: 2076337 - DNA, 25 bp, Homo sapien
gaaaggcctaacattgcttggacta

SEQ ID NO: 2076338 - DNA, 25 bp, Homo sapien
tcctcattaggattagtatcattat

SEQ ID NO: 2076339 - DNA, 25 bp, Homo sapien
gcttcctcattaggattagtatcat

SEQ ID NO: 2076340 - DNA, 25 bp, Homo sapien
ccgcttcctcattaggattagtatc

SEQ ID NO: 2076341 - DNA, 25 bp, Homo sapien
caaaatctcccccgcttcctcatta

SEQ ID NO: 2076342 - DNA, 25 bp, Homo sapien
aaatgttattggttcagttctagac

SEQ ID NO: 2076343 - DNA, 25 bp, Homo sapien
tggattttatcatatcttggaaata

SEQ ID NO: 2076344 - DNA, 25 bp, Homo sapien
tggaaatattgttcattcaggcata

SEQ ID NO: 2076345 - DNA, 25 bp, Homo sapien
tataaaagtcatgttcacactctgc

SEQ ID NO: 2076346 - DNA, 25 bp, Homo sapien
gagatgtgccactctttgtttcact

SEQ ID NO: 2076347 - DNA, 25 bp, Homo sapien
tatatgggcatggtttatggtgcca

SEQ ID NO: 2076348 - DNA, 25 bp, Homo sapien
tccatatcagcaacccaggctattt

SEQ ID NO: 2076349 - DNA, 25 bp, Homo sapien
tgggctatctctgctttcagcatgc

SEQ ID NO: 2076350 - DNA, 25 bp, Homo sapien
tctaggacagagatgttcagtgaag

SEQ ID NO: 2076351 - DNA, 25 bp, Homo sapien
atcttcagtctaggacagagatgtt

SEQ ID NO: 2076352 - DNA, 25 bp, Homo sapien
gagatgttcagtgaagacttttgcc

SEQ ID NO: 2076353 - DNA, 25 bp, Homo sapien
tcagtctaggacagagatgttcagt

SEQ ID NO: 2076354 - DNA, 25 bp, Homo sapien
ccgtgaacttcgtggccaagaacat

SEQ ID NO: 2076355 - DNA, 25 bp, Homo sapien
tgctgtggggatgccgtgaacttcg

SEQ ID NO: 2076356 - DNA, 25 bp, Homo sapien
actgccgccccggagatacgctgct

SEQ ID NO: 2076357 - DNA, 25 bp, Homo sapien
ccgccccggagatacgctgctgtgg

SEQ ID NO: 2076358 - DNA, 25 bp, Homo sapien
tcagagttcccggaggaaatcgatg

SEQ ID NO: 2076359 - DNA, 25 bp, Homo sapien
tcattggagttgaccttgagaaagg

SEQ ID NO: 2076360 - DNA, 25 bp, Homo sapien
ggaggaaatcgatggcattctcaga

SEQ ID NO: 2076361 - DNA, 25 bp, Homo sapien
ctctggacaaggcagttaatagaca

SEQ ID NO: 2076362 - DNA, 25 bp, Homo sapien
cttctgccgtcaggcacttggaaga

SEQ ID NO: 2076363 - DNA, 25 bp, Homo sapien
aaggacagaaatggccaagcctttt

SEQ ID NO: 2076364 - DNA, 25 bp, Homo sapien
ggccaagccttttctcgttcacatc

SEQ ID NO: 2076365 - DNA, 25 bp, Homo sapien
cgttcacatcccttgaggttcatat

SEQ ID NO: 2076366 - DNA, 25 bp, Homo sapien
taagtttgcaggatagacttgctta

SEQ ID NO: 2076367 - DNA, 25 bp, Homo sapien
cagtgccttagcaggcatgcaggct

SEQ ID NO: 2076368 - DNA, 25 bp, Homo sapien
gacttgcttaattacaacagtgcct

SEQ ID NO: 2076369 - DNA, 25 bp, Homo sapien
cctccagattgtgatagtaagtttg

SEQ ID NO: 2076370 - DNA, 25 bp, Homo sapien
gctcattaggccatagtgctgctgc

SEQ ID NO: 2076371 - DNA, 25 bp, Homo sapien
cattaggccatagtgctgctgcctc

SEQ ID NO: 2076372 - DNA, 25 bp, Homo sapien
agctcattaggccatagtgctgctg

SEQ ID NO: 2076373 - DNA, 25 bp, Homo sapien
aggccatagtgctgctgcctcaacg

SEQ ID NO: 2076374 - DNA, 25 bp, Homo sapien
tccacttccaagtactgaaggtcca

SEQ ID NO: 2076375 - DNA, 25 bp, Homo sapien
cacttccaagtactgaaggtccatc

SEQ ID NO: 2076376 - DNA, 25 bp, Homo sapien
tagggataaacagtccacttccaag

SEQ ID NO: 2076377 - DNA, 25 bp, Homo sapien
cttccaagtactgaaggtccatcat

SEQ ID NO: 2076378 - DNA, 25 bp, Homo sapien
ggagggtagtgtgggagaattgctt

SEQ ID NO: 2076379 - DNA, 25 bp, Homo sapien
tcctcaggagggtagtgtgggagaa

SEQ ID NO: 2076380 - DNA, 25 bp, Homo sapien
cagctcctcaggagggtagtgtggg

SEQ ID NO: 2076381 - DNA, 25 bp, Homo sapien
caggagggtagtgtgggagaattgc

SEQ ID NO: 2076382 - DNA, 25 bp, Homo sapien
gatgcccttgaaagccaagtagtac

SEQ ID NO: 2076383 - DNA, 25 bp, Homo sapien
gtagtacccgaagagactgccccat

SEQ ID NO: 2076384 - DNA, 25 bp, Homo sapien
cttgagatgcccttgaaagccaagt

SEQ ID NO: 2076385 - DNA, 25 bp, Homo sapien
gaaagccaagtagtacccgaagaga

SEQ ID NO: 2076386 - DNA, 25 bp, Homo sapien
cgtattgatttggatgtgaacaacc

SEQ ID NO: 2076387 - DNA, 25 bp, Homo sapien
ggcattagtcttgtcatttatcaga

SEQ ID NO: 2076388 - DNA, 25 bp, Homo sapien
tagcagtgttgtcatttaggtaaat

SEQ ID NO: 2076389 - DNA, 25 bp, Homo sapien
gtctctactagcaccgtgaattgct

SEQ ID NO: 2076390 - DNA, 25 bp, Homo sapien
tgtgtctggatttggctcccaggtg

SEQ ID NO: 2076391 - DNA, 25 bp, Homo sapien
ttaagtaaacaatacctggcaggtg

SEQ ID NO: 2076392 - DNA, 25 bp, Homo sapien
tgagtgcatgaccaatattctggtt

SEQ ID NO: 2076393 - DNA, 25 bp, Homo sapien
tgaggtttccgttcaagctttgaga

SEQ ID NO: 2076394 - DNA, 25 bp, Homo sapien
actttgaaataattatcgaggccct

SEQ ID NO: 2076395 - DNA, 25 bp, Homo sapien
ctttgaaataattatcgaggccctg

SEQ ID NO: 2076396 - DNA, 25 bp, Homo sapien
tgtaaaacctataccagaatctgct

SEQ ID NO: 2076397 - DNA, 25 bp, Homo sapien
tagcgcaaaaacctacccttgtagc

SEQ ID NO: 2076398 - DNA, 25 bp, Homo sapien
acatttgttaccagtctatagatca

SEQ ID NO: 2076399 - DNA, 25 bp, Homo sapien
ttcagccggcctaccttacagagtg

SEQ ID NO: 2076400 - DNA, 25 bp, Homo sapien
cagacagcgaaaggcacattttaca

SEQ ID NO: 2076401 - DNA, 25 bp, Homo sapien
cagcagacgagagaatgagggccaa

SEQ ID NO: 2076402 - DNA, 25 bp, Homo sapien
gagaatgagggccaagcgaaacggg

SEQ ID NO: 2076403 - DNA, 25 bp, Homo sapien
tggcagacagcgaaaggcacatttt

SEQ ID NO: 2076404 - DNA, 25 bp, Homo sapien
tttgtgccgtcataccaccttcatg

SEQ ID NO: 2076405 - DNA, 25 bp, Homo sapien
catgatcgtgggtgtccagaaccat

SEQ ID NO: 2076406 - DNA, 25 bp, Homo sapien
taccaccttcatgatcgtgggtgtc

SEQ ID NO: 2076407 - DNA, 25 bp, Homo sapien
catttttgtgccgtcataccacctt

SEQ ID NO: 2076408 - DNA, 25 bp, Homo sapien
cttagtccctttttgcatgctggca

SEQ ID NO: 2076409 - DNA, 25 bp, Homo sapien
gaaaaactaccctgcttgtagcaga

SEQ ID NO: 2076410 - DNA, 25 bp, Homo sapien
gcaacaagtgaaaaactaccctgct

SEQ ID NO: 2076411 - DNA, 25 bp, Homo sapien
gcttgtagcagaagcttaaactcct

SEQ ID NO: 2076412 - DNA, 25 bp, Homo sapien
agtgatataggatctacatttccca

SEQ ID NO: 2076413 - DNA, 25 bp, Homo sapien
gctccttagtgataacagtgtctag

SEQ ID NO: 2076414 - DNA, 25 bp, Homo sapien
aacatccaactgctaccacagccat

SEQ ID NO: 2076415 - DNA, 25 bp, Homo sapien
tgaattttcaactagctccttagtg

SEQ ID NO: 2076416 - DNA, 25 bp, Homo sapien
tctgtggatatgtccattcccaaga

SEQ ID NO: 2076417 - DNA, 25 bp, Homo sapien
gagaagtctgtggatatgtccattc

SEQ ID NO: 2076418 - DNA, 25 bp, Homo sapien
aagtctgtggatatgtccattccca

SEQ ID NO: 2076419 - DNA, 25 bp, Homo sapien
gtccattcccaagaacacacgcaaa

SEQ ID NO: 2076420 - DNA, 25 bp, Homo sapien
acagctggactttttggttcctcct

SEQ ID NO: 2076421 - DNA, 25 bp, Homo sapien
ttcacagctggactttttggttcct

SEQ ID NO: 2076422 - DNA, 25 bp, Homo sapien
tccttagggaatccaatccttgccc

SEQ ID NO: 2076423 - DNA, 25 bp, Homo sapien
cacagctggactttttggttcctcc

SEQ ID NO: 2076424 - DNA, 25 bp, Homo sapien
atcacaaacctagtcactctactga

SEQ ID NO: 2076425 - DNA, 25 bp, Homo sapien
aagaaaatcacaaacctagtcactc

SEQ ID NO: 2076426 - DNA, 25 bp, Homo sapien
gaggagggacctctgctgcaccctc

SEQ ID NO: 2076427 - DNA, 25 bp, Homo sapien
gaaaatcacaaacctagtcactcta

SEQ ID NO: 2076428 - DNA, 25 bp, Homo sapien
ggacgctaaattccattcctgctgg

SEQ ID NO: 2076429 - DNA, 25 bp, Homo sapien
tagaagggacatgtcaaaactcagc

SEQ ID NO: 2076430 - DNA, 25 bp, Homo sapien
gctgcaaagggcaagggatctctct

SEQ ID NO: 2076431 - DNA, 25 bp, Homo sapien
ccagtccccgaagctaggatgtcca

SEQ ID NO: 2076432 - DNA, 25 bp, Homo sapien
tattatacagatctaaggatgggtc

SEQ ID NO: 2076433 - DNA, 25 bp, Homo sapien
cagtgatcttcgacactgagcagat

SEQ ID NO: 2076434 - DNA, 25 bp, Homo sapien
gagcagatggcacctagcaactaaa

SEQ ID NO: 2076435 - DNA, 25 bp, Homo sapien
gagtgaccactgcaataatcgtcta

SEQ ID NO: 2076436 - DNA, 25 bp, Homo sapien
gatgcgctgtcacgctccactgaaa

SEQ ID NO: 2076437 - DNA, 25 bp, Homo sapien
gatcctagatttctcacaccctgct

SEQ ID NO: 2076438 - DNA, 25 bp, Homo sapien
gctttgcagggatgcgctgtcacgc

SEQ ID NO: 2076439 - DNA, 25 bp, Homo sapien
gaaacccctgatcctgaccagtttc

SEQ ID NO: 2076440 - DNA, 25 bp, Homo sapien
tgtctgcagctgtttgtggaagaga

SEQ ID NO: 2076441 - DNA, 25 bp, Homo sapien
tctgcagctgtttgtggaagagaaa

SEQ ID NO: 2076442 - DNA, 25 bp, Homo sapien
gtctgcagctgtttgtggaagagaa

SEQ ID NO: 2076443 - DNA, 25 bp, Homo sapien
aaaatccgtctctctacacctgctg

SEQ ID NO: 2076444 - DNA, 25 bp, Homo sapien
tgctgccttctctccggttagttca

SEQ ID NO: 2076445 - DNA, 25 bp, Homo sapien
ggactgtgaaatgctagatctgccc

SEQ ID NO: 2076446 - DNA, 25 bp, Homo sapien
ttaacatgatggctcaaaatccgtc

SEQ ID NO: 2076447 - DNA, 25 bp, Homo sapien
cctaactgcccagaagcctttcaga

SEQ ID NO: 2076448 - DNA, 25 bp, Homo sapien
ctgcccagaagcctttcagagacct

SEQ ID NO: 2076449 - DNA, 25 bp, Homo sapien
taactgcccagaagcctttcagaga

SEQ ID NO: 2076450 - DNA, 25 bp, Homo sapien
gcccagaagcctttcagagaccttt

SEQ ID NO: 2076451 - DNA, 25 bp, Homo sapien
aaattgttatacttgttgggaccag

SEQ ID NO: 2076452 - DNA, 25 bp, Homo sapien
ttcagaggaagacctttgcaggcgt

SEQ ID NO: 2076453 - DNA, 25 bp, Homo sapien
tgcaaaagactcacggagaacagtc

SEQ ID NO: 2076454 - DNA, 25 bp, Homo sapien
gcttgtatcacaggagggaaactac

SEQ ID NO: 2076455 - DNA, 25 bp, Homo sapien
gcccaggcgatcagatgacacacaa

SEQ ID NO: 2076456 - DNA, 25 bp, Homo sapien
agatggtcggtgctcggcgttaaca

SEQ ID NO: 2076457 - DNA, 25 bp, Homo sapien
gctgaaagcgagtgacattgccaag

SEQ ID NO: 2076458 - DNA, 25 bp, Homo sapien
gagagagtattttccacgtcgccaa

SEQ ID NO: 2076459 - DNA, 25 bp, Homo sapien
gaacacactattaagcagggccctg

SEQ ID NO: 2076460 - DNA, 25 bp, Homo sapien
gctctgcaaatgacatcgtagctgc

SEQ ID NO: 2076461 - DNA, 25 bp, Homo sapien
taatggtgaccctccacaagctctg

SEQ ID NO: 2076462 - DNA, 25 bp, Homo sapien
ggtctgacagtaacagaaacctcag

SEQ ID NO: 2076463 - DNA, 25 bp, Homo sapien
gacaccacaagtttctacaagggac

SEQ ID NO: 2076464 - DNA, 25 bp, Homo sapien
cgagtccagggagggattctgctaa

SEQ ID NO: 2076465 - DNA, 25 bp, Homo sapien
gaaggagcaccaaagatcaggcata

SEQ ID NO: 2076466 - DNA, 25 bp, Homo sapien
taacctcgggccagttcattctgaa

SEQ ID NO: 2076467 - DNA, 25 bp, Homo sapien
tattgaacaaacaataagcactcag

SEQ ID NO: 2076468 - DNA, 25 bp, Homo sapien
cttaaaatgcaggagagtacaaaac

SEQ ID NO: 2076469 - DNA, 25 bp, Homo sapien
tgatccaatagtttcctattctggg

SEQ ID NO: 2076470 - DNA, 25 bp, Homo sapien
gaactagtcctagtatcttgcgtaa

SEQ ID NO: 2076471 - DNA, 25 bp, Homo sapien
tccatttgatatgcatcaatgacag

SEQ ID NO: 2076472 - DNA, 25 bp, Homo sapien
caatcactactttttgcgtaactgc

SEQ ID NO: 2076473 - DNA, 25 bp, Homo sapien
catgagtggaggacaaacaatatct

SEQ ID NO: 2076474 - DNA, 25 bp, Homo sapien
gcgtaactgctacctccaaaacatg

SEQ ID NO: 2076475 - DNA, 25 bp, Homo sapien
caaacgttgcataaaaggcctcagg

SEQ ID NO: 2076476 - DNA, 25 bp, Homo sapien
tagtgcagtatcagaaagtcagggc

SEQ ID NO: 2076477 - DNA, 25 bp, Homo sapien
taaggcctgatgttgatccaagcac

SEQ ID NO: 2076478 - DNA, 25 bp, Homo sapien
caaagagcagcctagacgagagcaa

SEQ ID NO: 2076479 - DNA, 25 bp, Homo sapien
tgtcaaagaacgtcaaaaggcaaga

SEQ ID NO: 2076480 - DNA, 25 bp, Homo sapien
taacacaccagatctggcttgcaac

SEQ ID NO: 2076481 - DNA, 25 bp, Homo sapien
taaagcaatcattggaaccagatag

SEQ ID NO: 2076482 - DNA, 25 bp, Homo sapien
cagatagagacatgacacgtgtcag

SEQ ID NO: 2076483 - DNA, 25 bp, Homo sapien
caatccacgaatgcctactaaaagt

SEQ ID NO: 2076484 - DNA, 25 bp, Homo sapien
tgtactcacaatttagcgtctccac

SEQ ID NO: 2076485 - DNA, 25 bp, Homo sapien
tctaattacaatgtggactctctca

SEQ ID NO: 2076486 - DNA, 25 bp, Homo sapien
gaaggtggagatcagtactttctag

SEQ ID NO: 2076487 - DNA, 25 bp, Homo sapien
gagggtataacaggagcatcagaag

SEQ ID NO: 2076488 - DNA, 25 bp, Homo sapien
gaaacatacactagggagagtccca

SEQ ID NO: 2076489 - DNA, 25 bp, Homo sapien
ttcacaagcattacccctgagggta

SEQ ID NO: 2076490 - DNA, 25 bp, Homo sapien
cagagaatttttgggaggacttcag

SEQ ID NO: 2076491 - DNA, 25 bp, Homo sapien
catgacagttttattcagtttggca

SEQ ID NO: 2076492 - DNA, 25 bp, Homo sapien
ggctgtctttgtctgaatagtgaag

SEQ ID NO: 2076493 - DNA, 25 bp, Homo sapien
ctaggtgcctgacccttttgagaga

SEQ ID NO: 2076494 - DNA, 25 bp, Homo sapien
tcattgttagcctacatctagaatt

SEQ ID NO: 2076495 - DNA, 25 bp, Homo sapien
gaatagtaaaggattgccctctcgc

SEQ ID NO: 2076496 - DNA, 25 bp, Homo sapien
atttgctcctaaggctagacctggg

SEQ ID NO: 2076497 - DNA, 25 bp, Homo sapien
tctagacacaacatttaagccctgg

SEQ ID NO: 2076498 - DNA, 25 bp, Homo sapien
tgggatggcggcaagaattctatac

SEQ ID NO: 2076499 - DNA, 25 bp, Homo sapien
cgagagaaggttggatagttgacat

SEQ ID NO: 2076500 - DNA, 25 bp, Homo sapien
aactctagtctttggtctgcgagag

SEQ ID NO: 2076501 - DNA, 25 bp, Homo sapien
tatcctctcttgtatcatccatgga

SEQ ID NO: 2076502 - DNA, 25 bp, Homo sapien
ccatggattgattggtaggttgact

SEQ ID NO: 2076503 - DNA, 25 bp, Homo sapien
ccaggactctgtaaatagatctctt

SEQ ID NO: 2076504 - DNA, 25 bp, Homo sapien
ggactctgtaaatagatctcttctc

SEQ ID NO: 2076505 - DNA, 25 bp, Homo sapien
gtgtatcccaggactctgtaaatag

SEQ ID NO: 2076506 - DNA, 25 bp, Homo sapien
ttctgtgtatcccaggactctgtaa

SEQ ID NO: 2076507 - DNA, 25 bp, Homo sapien
caaagagggtatattggttatcggt

SEQ ID NO: 2076508 - DNA, 25 bp, Homo sapien
gatggtggtaattgagataacaaac

SEQ ID NO: 2076509 - DNA, 25 bp, Homo sapien
ccagccacaaagagggtatattggt

SEQ ID NO: 2076510 - DNA, 25 bp, Homo sapien
aaatgacaatgatggtggtaattga

SEQ ID NO: 2076511 - DNA, 25 bp, Homo sapien
ccacatagagcaaagcgcaagactt

SEQ ID NO: 2076512 - DNA, 25 bp, Homo sapien
catgctatccagcttcgaattcttt

SEQ ID NO: 2076513 - DNA, 25 bp, Homo sapien
tagtaaggcaaagaaacatgctatc

SEQ ID NO: 2076514 - DNA, 25 bp, Homo sapien
caggatggttatatctattgtcctc

SEQ ID NO: 2076515 - DNA, 25 bp, Homo sapien
agctgttcaagggagtggactttcc

SEQ ID NO: 2076516 - DNA, 25 bp, Homo sapien
ttagcagattcctggaaagctgttc

SEQ ID NO: 2076517 - DNA, 25 bp, Homo sapien
ggcgtgcttgggaacttttagcaga

SEQ ID NO: 2076518 - DNA, 25 bp, Homo sapien
agggagtggactttcccacacagga

SEQ ID NO: 2076519 - DNA, 25 bp, Homo sapien
gtctcctttgcgcagaggctactcc

SEQ ID NO: 2076520 - DNA, 25 bp, Homo sapien
ctggtgaggccatgagaacaggtgc

SEQ ID NO: 2076521 - DNA, 25 bp, Homo sapien
gaacaggtgctttgtagtggccaga

SEQ ID NO: 2076522 - DNA, 25 bp, Homo sapien
tagtggccagaagctgtgcctatga

SEQ ID NO: 2076523 - DNA, 25 bp, Homo sapien
cctgtccctcatggcactgtgtgga

SEQ ID NO: 2076524 - DNA, 25 bp, Homo sapien
gtgcctgtccctcatggcactgtgt

SEQ ID NO: 2076525 - DNA, 25 bp, Homo sapien
cctgcctcacgtgactccatgatgt

SEQ ID NO: 2076526 - DNA, 25 bp, Homo sapien
acgtgactccatgatgtgcacaagc

SEQ ID NO: 2076527 - DNA, 25 bp, Homo sapien
accaatcaaggcctggatacttgac

SEQ ID NO: 2076528 - DNA, 25 bp, Homo sapien
caaaaccaatcaaggcctggatact

SEQ ID NO: 2076529 - DNA, 25 bp, Homo sapien
aaaccaatcaaggcctggatacttg

SEQ ID NO: 2076530 - DNA, 25 bp, Homo sapien
tcaaaaccaatcaaggcctggatac

SEQ ID NO: 2076531 - DNA, 25 bp, Homo sapien
tgctggttggcaggggtcctctgtt

SEQ ID NO: 2076532 - DNA, 25 bp, Homo sapien
gggtcctctgttgagtgacctggta

SEQ ID NO: 2076533 - DNA, 25 bp, Homo sapien
gtcctctgttgagtgacctggtact

SEQ ID NO: 2076534 - DNA, 25 bp, Homo sapien
ctctgttgagtgacctggtacttgt

SEQ ID NO: 2076535 - DNA, 25 bp, Homo sapien
cagaagatgtctggtgctcactcac

SEQ ID NO: 2076536 - DNA, 25 bp, Homo sapien
cttccgtggctgcagttgctcacta

SEQ ID NO: 2076537 - DNA, 25 bp, Homo sapien
ttcgttttctcctgcgctggcctgc

SEQ ID NO: 2076538 - DNA, 25 bp, Homo sapien
cactatttgtcttgggaacttggag

SEQ ID NO: 2076539 - DNA, 25 bp, Homo sapien
gctggcctgcaagtagcagcggtaa

SEQ ID NO: 2076540 - DNA, 25 bp, Homo sapien
ccaagttgcagtaagttaagaggtc

SEQ ID NO: 2076541 - DNA, 25 bp, Homo sapien
taagttaagaggtcgatctgacggg

SEQ ID NO: 2076542 - DNA, 25 bp, Homo sapien
ttgcagtaagttaagaggtcgatct

SEQ ID NO: 2076543 - DNA, 25 bp, Homo sapien
ctgccatggaccaagttgcagtaag

SEQ ID NO: 2076544 - DNA, 25 bp, Homo sapien
caatgtggctatttgatggcacagc

SEQ ID NO: 2076545 - DNA, 25 bp, Homo sapien
tctttccaggttccgaaacaatgtg

SEQ ID NO: 2076546 - DNA, 25 bp, Homo sapien
tgcctgcacaggccacgtcatctga

SEQ ID NO: 2076547 - DNA, 25 bp, Homo sapien
aagtgagtgtgacattctttccagg

SEQ ID NO: 2076548 - DNA, 25 bp, Homo sapien
aggcctgggcagtaatgatgtcaca

SEQ ID NO: 2076549 - DNA, 25 bp, Homo sapien
tgaggcctgggcagtaatgatgtca

SEQ ID NO: 2076550 - DNA, 25 bp, Homo sapien
ggcctgggcagtaatgatgtcacaa

SEQ ID NO: 2076551 - DNA, 25 bp, Homo sapien
gcctgggcagtaatgatgtcacaaa

SEQ ID NO: 2076552 - DNA, 25 bp, Homo sapien
ctactcatagccgtgtctgcatttt

SEQ ID NO: 2076553 - DNA, 25 bp, Homo sapien
gaaacaggggtctactcatagccgt

SEQ ID NO: 2076554 - DNA, 25 bp, Homo sapien
gggtctactcatagccgtgtctgca

SEQ ID NO: 2076555 - DNA, 25 bp, Homo sapien
actcatagccgtgtctgcattttca

SEQ ID NO: 2076556 - DNA, 25 bp, Homo sapien
cgacacaatcgagcatccatttcca

SEQ ID NO: 2076557 - DNA, 25 bp, Homo sapien
cccttctaccaagactgcaaatgtc

SEQ ID NO: 2076558 - DNA, 25 bp, Homo sapien
cctttcccatgtgtgcttcgacaca

SEQ ID NO: 2076559 - DNA, 25 bp, Homo sapien
cacccttctaccaagactgcaaatg

SEQ ID NO: 2076560 - DNA, 25 bp, Homo sapien
tcttgataacatgacctgagtcaat

SEQ ID NO: 2076561 - DNA, 25 bp, Homo sapien
catgacctgagtcaatgaaatctct

SEQ ID NO: 2076562 - DNA, 25 bp, Homo sapien
atgacctgagtcaatgaaatctctc

SEQ ID NO: 2076563 - DNA, 25 bp, Homo sapien
ctgccagcccagcaaccacagccat

SEQ ID NO: 2076564 - DNA, 25 bp, Homo sapien
tggactgttgcccaatacgcatctg

SEQ ID NO: 2076565 - DNA, 25 bp, Homo sapien
ggcatccagggcacttatagacacc

SEQ ID NO: 2076566 - DNA, 25 bp, Homo sapien
taatacctcaggcatggtctcggtc

SEQ ID NO: 2076567 - DNA, 25 bp, Homo sapien
ggcaggctagtgatacttcaggaag

SEQ ID NO: 2076568 - DNA, 25 bp, Homo sapien
ttctaagaatgagcatggatggcat

SEQ ID NO: 2076569 - DNA, 25 bp, Homo sapien
tggcatataaggagcctcatcccac

SEQ ID NO: 2076570 - DNA, 25 bp, Homo sapien
ctggacagagaacacttgtccctga

SEQ ID NO: 2076571 - DNA, 25 bp, Homo sapien
tccctgaagggtgtagagataagag

SEQ ID NO: 2076572 - DNA, 25 bp, Homo sapien
aatgactgccctacaggatttcaga

SEQ ID NO: 2076573 - DNA, 25 bp, Homo sapien
aatgtacagaaacacctgggtgtcc

SEQ ID NO: 2076574 - DNA, 25 bp, Homo sapien
tcgggactgcatatggtgccctatg

SEQ ID NO: 2076575 - DNA, 25 bp, Homo sapien
gaatctgatccacagacggcttgca

SEQ ID NO: 2076576 - DNA, 25 bp, Homo sapien
ccagagacacgtaggtgacagtagt

SEQ ID NO: 2076577 - DNA, 25 bp, Homo sapien
tgctagaaagggctatctggaaaat

SEQ ID NO: 2076578 - DNA, 25 bp, Homo sapien
gtcccccaagtcatctctgcatatt

SEQ ID NO: 2076579 - DNA, 25 bp, Homo sapien
ccatgacctcacaaactctgctaga

SEQ ID NO: 2076580 - DNA, 25 bp, Homo sapien
ggacagccggtattccttcctctga

SEQ ID NO: 2076581 - DNA, 25 bp, Homo sapien
gaattcaaactagacggacagccgg

SEQ ID NO: 2076582 - DNA, 25 bp, Homo sapien
tctcaaaatagggtagaatgccctc

SEQ ID NO: 2076583 - DNA, 25 bp, Homo sapien
caaaacaagagcaatggatcatggc

SEQ ID NO: 2076584 - DNA, 25 bp, Homo sapien
tgcataacaaccatcatttagttct

SEQ ID NO: 2076585 - DNA, 25 bp, Homo sapien
ctttgcataacaaccatcatttagt

SEQ ID NO: 2076586 - DNA, 25 bp, Homo sapien
caaccatcatttagttctctacagg

SEQ ID NO: 2076587 - DNA, 25 bp, Homo sapien
taacaaccatcatttagttctctac

SEQ ID NO: 2076588 - DNA, 25 bp, Homo sapien
tagctccatcctctatcctgaaagg

SEQ ID NO: 2076589 - DNA, 25 bp, Homo sapien
ttagctccatcctctatcctgaaag

SEQ ID NO: 2076590 - DNA, 25 bp, Homo sapien
tctatcctgaaaggttgagctgttt

SEQ ID NO: 2076591 - DNA, 25 bp, Homo sapien
tcctctatcctgaaaggttgagctg

SEQ ID NO: 2076592 - DNA, 25 bp, Homo sapien
ttccaagcaggatttaacaggtgtc

SEQ ID NO: 2076593 - DNA, 25 bp, Homo sapien
cctagctacacctaaagagaaaggg

SEQ ID NO: 2076594 - DNA, 25 bp, Homo sapien
ttaaaggcataccacacaaggcagc

SEQ ID NO: 2076595 - DNA, 25 bp, Homo sapien
taaattgacactctataagcctcag

SEQ ID NO: 2076596 - DNA, 25 bp, Homo sapien
ctgactgaaccacctgtatcacctt

SEQ ID NO: 2076597 - DNA, 25 bp, Homo sapien
tgctgggtcccgatcttgaaccact

SEQ ID NO: 2076598 - DNA, 25 bp, Homo sapien
ggcttccttatgaccatgccatgag

SEQ ID NO: 2076599 - DNA, 25 bp, Homo sapien
gagagcaggaatagtagccaacatc

SEQ ID NO: 2076600 - DNA, 25 bp, Homo sapien
tgaaaatggctatggaatcctgctg

SEQ ID NO: 2076601 - DNA, 25 bp, Homo sapien
tcggcaaagggaactgatgtatgcc

SEQ ID NO: 2076602 - DNA, 25 bp, Homo sapien
tctcggcaaagggaactgatgtatg

SEQ ID NO: 2076603 - DNA, 25 bp, Homo sapien
gttctcggcaaagggaactgatgta

SEQ ID NO: 2076604 - DNA, 25 bp, Homo sapien
ggcaaagggaactgatgtatgccaa

SEQ ID NO: 2076605 - DNA, 25 bp, Homo sapien
gaagagccaaaagtaaagtaggata

SEQ ID NO: 2076606 - DNA, 25 bp, Homo sapien
tctggaaactgtttgaaaggctggt

SEQ ID NO: 2076607 - DNA, 25 bp, Homo sapien
ctctcgggcagtgaagtgtgttctg

SEQ ID NO: 2076608 - DNA, 25 bp, Homo sapien
aaggctctcgggcagtgaagtgtgt

SEQ ID NO: 2076609 - DNA, 25 bp, Homo sapien
gtcgggaaaggctctcgggcagtga

SEQ ID NO: 2076610 - DNA, 25 bp, Homo sapien
tcaggttggtggtcgggaaaggctc

SEQ ID NO: 2076611 - DNA, 25 bp, Homo sapien
tgtgagtgctgctcgctctaacgct

SEQ ID NO: 2076612 - DNA, 25 bp, Homo sapien
ttatcgtatcctgtttatcgtggcc

SEQ ID NO: 2076613 - DNA, 25 bp, Homo sapien
ccatctgcgtcttggttaaggactt

SEQ ID NO: 2076614 - DNA, 25 bp, Homo sapien
ccttaattagcactgcaggagctga

SEQ ID NO: 2076615 - DNA, 25 bp, Homo sapien
ctggttttagcattgccaagggccc

SEQ ID NO: 2076616 - DNA, 25 bp, Homo sapien
tctcttgagggtctcaaggtttcaa

SEQ ID NO: 2076617 - DNA, 25 bp, Homo sapien
ttcaaggaaataagtacttacacac

SEQ ID NO: 2076618 - DNA, 25 bp, Homo sapien
tacacacacaccttaaggactccag

SEQ ID NO: 2076619 - DNA, 25 bp, Homo sapien
cagtcaacagtggttccgaaaacca

SEQ ID NO: 2076620 - DNA, 25 bp, Homo sapien
gcttgaggcagtcaacagtggttcc

SEQ ID NO: 2076621 - DNA, 25 bp, Homo sapien
gaggcagtcaacagtggttccgaaa

SEQ ID NO: 2076622 - DNA, 25 bp, Homo sapien
tgcacctgcttgaggcagtcaacag

SEQ ID NO: 2076623 - DNA, 25 bp, Homo sapien
tttggatgacaaactctacggccac

SEQ ID NO: 2076624 - DNA, 25 bp, Homo sapien
tacggccaccctaagagccctgtat

SEQ ID NO: 2076625 - DNA, 25 bp, Homo sapien
caaacgtgtcttgatttggatgaca

SEQ ID NO: 2076626 - DNA, 25 bp, Homo sapien
tgctttctgcatcacatcgcttggg

SEQ ID NO: 2076627 - DNA, 25 bp, Homo sapien
cgggattccaaatgagattctgtca

SEQ ID NO: 2076628 - DNA, 25 bp, Homo sapien
gcagcgggattccaaatgagattct

SEQ ID NO: 2076629 - DNA, 25 bp, Homo sapien
agaaaccctggcagcgggattccaa

SEQ ID NO: 2076630 - DNA, 25 bp, Homo sapien
ccctggcagcgggattccaaatgag

SEQ ID NO: 2076631 - DNA, 25 bp, Homo sapien
tcatttctgtcaaactgacagtcac

SEQ ID NO: 2076632 - DNA, 25 bp, Homo sapien
aactgacagtcacaattgtcacaat

SEQ ID NO: 2076633 - DNA, 25 bp, Homo sapien
agaagagaagtaggatttcatttct

SEQ ID NO: 2076634 - DNA, 25 bp, Homo sapien
tcccgactagcctttaactgatacc

SEQ ID NO: 2076635 - DNA, 25 bp, Homo sapien
gcctttaactgatacctcaggtcta

SEQ ID NO: 2076636 - DNA, 25 bp, Homo sapien
cgactagcctttaactgatacctca

SEQ ID NO: 2076637 - DNA, 25 bp, Homo sapien
cttcttcccgactagcctttaactg

SEQ ID NO: 2076638 - DNA, 25 bp, Homo sapien
cggctctgacagagcatcctcaggg

SEQ ID NO: 2076639 - DNA, 25 bp, Homo sapien
tgtccctccaggacgatgctgcggc

SEQ ID NO: 2076640 - DNA, 25 bp, Homo sapien
gcacaacccgttccttcctgtgagg

SEQ ID NO: 2076641 - DNA, 25 bp, Homo sapien
tgcagacgctttcgtgcctccttgg

SEQ ID NO: 2076642 - DNA, 25 bp, Homo sapien
gatatttgcactcttatgttcggtg

SEQ ID NO: 2076643 - DNA, 25 bp, Homo sapien
caggctgggtgaccataatggagta

SEQ ID NO: 2076644 - DNA, 25 bp, Homo sapien
gccacgcatggtgccacagctactt

SEQ ID NO: 2076645 - DNA, 25 bp, Homo sapien
gcaacaggacgaagctctgtctcca

SEQ ID NO: 2076646 - DNA, 25 bp, Homo sapien
tgttttgagactgtagtgcctatgt

SEQ ID NO: 2076647 - DNA, 25 bp, Homo sapien
ccccaatgagaagcattaggaagaa

SEQ ID NO: 2076648 - DNA, 25 bp, Homo sapien
tctgtcaggtcctcgccctttgctc

SEQ ID NO: 2076649 - DNA, 25 bp, Homo sapien
agtcactcccgactcccaaagcacc

SEQ ID NO: 2076650 - DNA, 25 bp, Homo sapien
actcagttggtttcttacaattctc

SEQ ID NO: 2076651 - DNA, 25 bp, Homo sapien
tgtctgcagcccccgaacaaaagat

SEQ ID NO: 2076652 - DNA, 25 bp, Homo sapien
tcagttggtttcttacaattctctc

SEQ ID NO: 2076653 - DNA, 25 bp, Homo sapien
gcagcccccgaacaaaagatacatc

SEQ ID NO: 2076654 - DNA, 25 bp, Homo sapien
aattgcctgcttctgttttcccaca

SEQ ID NO: 2076655 - DNA, 25 bp, Homo sapien
acacagcatgggtaatgcaaattgc

SEQ ID NO: 2076656 - DNA, 25 bp, Homo sapien
gctggagtcgcagcttacacatttt

SEQ ID NO: 2076657 - DNA, 25 bp, Homo sapien
tgtttcaaaaagctgatgcctacac

SEQ ID NO: 2076658 - DNA, 25 bp, Homo sapien
agcaggcagttgagtccctgaggac

SEQ ID NO: 2076659 - DNA, 25 bp, Homo sapien
ccctgaggacactgttagctataga

SEQ ID NO: 2076660 - DNA, 25 bp, Homo sapien
tagctatagactgcccatgtgtgca

SEQ ID NO: 2076661 - DNA, 25 bp, Homo sapien
gaaaagcaggcagttgagtccctga

SEQ ID NO: 2076662 - DNA, 25 bp, Homo sapien
gtcctcaaccccagttagcttgagc

SEQ ID NO: 2076663 - DNA, 25 bp, Homo sapien
acaaggtaggtgtcctcaaccccag

SEQ ID NO: 2076664 - DNA, 25 bp, Homo sapien
gcacaaggtaggtgtcctcaacccc

SEQ ID NO: 2076665 - DNA, 25 bp, Homo sapien
cacaaggtaggtgtcctcaacccca

SEQ ID NO: 2076666 - DNA, 25 bp, Homo sapien
atcactctggcaaatccgaggaaca

SEQ ID NO: 2076667 - DNA, 25 bp, Homo sapien
gaaatggggaatacacaaggtgcag

SEQ ID NO: 2076668 - DNA, 25 bp, Homo sapien
catcacgggtcaagaagcagacctg

SEQ ID NO: 2076669 - DNA, 25 bp, Homo sapien
caaatccgaggaacatcacgggtca

SEQ ID NO: 2076670 - DNA, 25 bp, Homo sapien
ttccccactggctgacggtgcataa

SEQ ID NO: 2076671 - DNA, 25 bp, Homo sapien
atctggaccacagcgtgcacccgag

SEQ ID NO: 2076672 - DNA, 25 bp, Homo sapien
gagacccagttgcaaggactgtccc

SEQ ID NO: 2076673 - DNA, 25 bp, Homo sapien
tgacggtgcataatcccaggagacc

SEQ ID NO: 2076674 - DNA, 25 bp, Homo sapien
ctggacaccaagagaggcaaacgca

SEQ ID NO: 2076675 - DNA, 25 bp, Homo sapien
caccaagagaggcaaacgcaagttc

SEQ ID NO: 2076676 - DNA, 25 bp, Homo sapien
aagagaggcaaacgcaagttcccct

SEQ ID NO: 2076677 - DNA, 25 bp, Homo sapien
gacaccaagagaggcaaacgcaagt

SEQ ID NO: 2076678 - DNA, 25 bp, Homo sapien
tcctttctccaaggtctgcagtcct

SEQ ID NO: 2076679 - DNA, 25 bp, Homo sapien
tttctccaaggtctgcagtcctcct

SEQ ID NO: 2076680 - DNA, 25 bp, Homo sapien
tctcctttctccaaggtctgcagtc

SEQ ID NO: 2076681 - DNA, 25 bp, Homo sapien
ctttctccaaggtctgcagtcctcc

SEQ ID NO: 2076682 - DNA, 25 bp, Homo sapien
cagccttgcagaagacaacggtgaa

SEQ ID NO: 2076683 - DNA, 25 bp, Homo sapien
tatagacgctcaagaccaggaatgg

SEQ ID NO: 2076684 - DNA, 25 bp, Homo sapien
tgaacccaggcttatacagccccaa

SEQ ID NO: 2076685 - DNA, 25 bp, Homo sapien
tttgggctgagctaaatttgaaccc

SEQ ID NO: 2076686 - DNA, 25 bp, Homo sapien
atggcatagaaaagggtaaaaatgt

SEQ ID NO: 2076687 - DNA, 25 bp, Homo sapien
aatggcatagaaaagggtaaaaatg

SEQ ID NO: 2076688 - DNA, 25 bp, Homo sapien
tttacaaaataaatggcatagaaaa

SEQ ID NO: 2076689 - DNA, 25 bp, Homo sapien
caaaataaatggcatagaaaagggt

SEQ ID NO: 2076690 - DNA, 25 bp, Homo sapien
ttctggagagctgccacaactggac

SEQ ID NO: 2076691 - DNA, 25 bp, Homo sapien
gagctgccacaactggacggtgttg

SEQ ID NO: 2076692 - DNA, 25 bp, Homo sapien
tcagctgctattacttctggagagc

SEQ ID NO: 2076693 - DNA, 25 bp, Homo sapien
tgttggagtatcaccagttctctct

SEQ ID NO: 2076694 - DNA, 25 bp, Homo sapien
tagagaggtagcacgtcttcaggta

SEQ ID NO: 2076695 - DNA, 25 bp, Homo sapien
gaggtagcacgtcttcaggtaacag

SEQ ID NO: 2076696 - DNA, 25 bp, Homo sapien
ctttgtagagaggtagcacgtcttc

SEQ ID NO: 2076697 - DNA, 25 bp, Homo sapien
tttgtagagaggtagcacgtcttca

SEQ ID NO: 2076698 - DNA, 25 bp, Homo sapien
agcttcaaggtgtagcatcccatgg

SEQ ID NO: 2076699 - DNA, 25 bp, Homo sapien
cacacagctggcttcaactttagct

SEQ ID NO: 2076700 - DNA, 25 bp, Homo sapien
ttcaaggtgtagcatcccatggcac

SEQ ID NO: 2076701 - DNA, 25 bp, Homo sapien
tagctcccctgttgatgactgtcag

SEQ ID NO: 2076702 - DNA, 25 bp, Homo sapien
aataggcatttagagggtttgcttc

SEQ ID NO: 2076703 - DNA, 25 bp, Homo sapien
tttagagggtttgcttctgagtttg

SEQ ID NO: 2076704 - DNA, 25 bp, Homo sapien
ggcatttagagggtttgcttctgag

SEQ ID NO: 2076705 - DNA, 25 bp, Homo sapien
ctgcacgaggttttcaagacatttc

SEQ ID NO: 2076706 - DNA, 25 bp, Homo sapien
taatagcattccagaatattttgca

SEQ ID NO: 2076707 - DNA, 25 bp, Homo sapien
tgtaatagcattccagaatattttg

SEQ ID NO: 2076708 - DNA, 25 bp, Homo sapien
tactatacttaggaggcacacacat

SEQ ID NO: 2076709 - DNA, 25 bp, Homo sapien
agtttatgaaacttggtactatact

SEQ ID NO: 2076710 - DNA, 25 bp, Homo sapien
ttctttttactgatgggcttttcaa

SEQ ID NO: 2076711 - DNA, 25 bp, Homo sapien
ctttgctaaggagtatgcttcatcc

SEQ ID NO: 2076712 - DNA, 25 bp, Homo sapien
gctttgggctgcagtcgtacaagaa

SEQ ID NO: 2076713 - DNA, 25 bp, Homo sapien
tacaagaactgagctagataaaggg

SEQ ID NO: 2076714 - DNA, 25 bp, Homo sapien
ctcagttttactttaagatgtgttt

SEQ ID NO: 2076715 - DNA, 25 bp, Homo sapien
tagaacacaaatctccacgttgcct

SEQ ID NO: 2076716 - DNA, 25 bp, Homo sapien
tactaattgtatgaatcagcaaagg

SEQ ID NO: 2076717 - DNA, 25 bp, Homo sapien
cctgggttataccttgttgtttgct

SEQ ID NO: 2076718 - DNA, 25 bp, Homo sapien
tgtatcctaagagtttatacctggg

SEQ ID NO: 2076719 - DNA, 25 bp, Homo sapien
tcttgacacctttggatgtatccta

SEQ ID NO: 2076720 - DNA, 25 bp, Homo sapien
acaggcagcaagcacagtaatgact

SEQ ID NO: 2076721 - DNA, 25 bp, Homo sapien
aggcagcaagcacagtaatgacttt

SEQ ID NO: 2076722 - DNA, 25 bp, Homo sapien
caggcagcaagcacagtaatgactt

SEQ ID NO: 2076723 - DNA, 25 bp, Homo sapien
gacaggcagcaagcacagtaatgac

SEQ ID NO: 2076724 - DNA, 25 bp, Homo sapien
gtgagagccactgcgtatggcccaa

SEQ ID NO: 2076725 - DNA, 25 bp, Homo sapien
ctgcgtatggcccaagaaaataatt

SEQ ID NO: 2076726 - DNA, 25 bp, Homo sapien
tgaagcgtcaagacccatcggtgtg

SEQ ID NO: 2076727 - DNA, 25 bp, Homo sapien
agactctggatctcatggtccgccc

SEQ ID NO: 2076728 - DNA, 25 bp, Homo sapien
gcagcgtctgctcactggtgttaga

SEQ ID NO: 2076729 - DNA, 25 bp, Homo sapien
tcctggtattggttagaaggcagcg

SEQ ID NO: 2076730 - DNA, 25 bp, Homo sapien
tgtagcatctgctcactggtactgg

SEQ ID NO: 2076731 - DNA, 25 bp, Homo sapien
tagatagagggtagcgtctgctcct

SEQ ID NO: 2076732 - DNA, 25 bp, Homo sapien
gctcatctctgttagtaagtctaga

SEQ ID NO: 2076733 - DNA, 25 bp, Homo sapien
gtaacttcaaccaaagaatagtcag

SEQ ID NO: 2076734 - DNA, 25 bp, Homo sapien
tccagatgatatattcaggagtaac

SEQ ID NO: 2076735 - DNA, 25 bp, Homo sapien
taagtctagacagccatcaagcctc

SEQ ID NO: 2076736 - DNA, 25 bp, Homo sapien
ctagagagaggaagttctgtaagaa

SEQ ID NO: 2076737 - DNA, 25 bp, Homo sapien
gagagaggaagttctgtaagaagtt

SEQ ID NO: 2076738 - DNA, 25 bp, Homo sapien
gagaggaagttctgtaagaagttac

SEQ ID NO: 2076739 - DNA, 25 bp, Homo sapien
agaggaagttctgtaagaagttact

SEQ ID NO: 2076740 - DNA, 25 bp, Homo sapien
ggatgaagtatactatagttaactc

SEQ ID NO: 2076741 - DNA, 25 bp, Homo sapien
taattatttcctcatgatggatgaa

SEQ ID NO: 2076742 - DNA, 25 bp, Homo sapien
gaacaaaatagtgctcaagttttaa

SEQ ID NO: 2076743 - DNA, 25 bp, Homo sapien
ctcaagttttaattcctgctaatta

SEQ ID NO: 2076744 - DNA, 25 bp, Homo sapien
gagttgtacaataccacctgctgca

SEQ ID NO: 2076745 - DNA, 25 bp, Homo sapien
caggcatttcctaattagagcagag

SEQ ID NO: 2076746 - DNA, 25 bp, Homo sapien
tccgtccctggaaagagagtctgat

SEQ ID NO: 2076747 - DNA, 25 bp, Homo sapien
caagcaggatatttcggagcctgag

SEQ ID NO: 2076748 - DNA, 25 bp, Homo sapien
ccacttagcttcccaccaacatgct

SEQ ID NO: 2076749 - DNA, 25 bp, Homo sapien
taatcacatatatccagttcaagag

SEQ ID NO: 2076750 - DNA, 25 bp, Homo sapien
ctgaattacgtggtgtgatatgccc

SEQ ID NO: 2076751 - DNA, 25 bp, Homo sapien
tcctgcaaatttaagatgacactca

SEQ ID NO: 2076752 - DNA, 25 bp, Homo sapien
ggctggctccaacgtgccactgaaa

SEQ ID NO: 2076753 - DNA, 25 bp, Homo sapien
cagtcatgcgacaaggccaggtttg

SEQ ID NO: 2076754 - DNA, 25 bp, Homo sapien
gaagccaactttaggatacacagca

SEQ ID NO: 2076755 - DNA, 25 bp, Homo sapien
catcagagagttgctcacggctcct

SEQ ID NO: 2076756 - DNA, 25 bp, Homo sapien
aaaaaccatctgctgaaccgtggtg

SEQ ID NO: 2076757 - DNA, 25 bp, Homo sapien
acagggtgttgtccacaacttgacc

SEQ ID NO: 2076758 - DNA, 25 bp, Homo sapien
cagggtgttgtccacaacttgacca

SEQ ID NO: 2076759 - DNA, 25 bp, Homo sapien
gactaggccattaacctgtgaactg

SEQ ID NO: 2076760 - DNA, 25 bp, Homo sapien
gaactgcaaattagcaatggaggct

SEQ ID NO: 2076761 - DNA, 25 bp, Homo sapien
taagtggcaaagcatatctgtctaa

SEQ ID NO: 2076762 - DNA, 25 bp, Homo sapien
tagatatactgtcctcactgagggc

SEQ ID NO: 2076763 - DNA, 25 bp, Homo sapien
ttggaaaatttgcagtatagacaca

SEQ ID NO: 2076764 - DNA, 25 bp, Homo sapien
tggaaaatttgcagtatagacacaa

SEQ ID NO: 2076765 - DNA, 25 bp, Homo sapien
gagctgcatggcaatgcttaactct

SEQ ID NO: 2076766 - DNA, 25 bp, Homo sapien
gctgcatggcaatgcttaactcttt

SEQ ID NO: 2076767 - DNA, 25 bp, Homo sapien
cagtttcttaggagctgcatggcaa

SEQ ID NO: 2076768 - DNA, 25 bp, Homo sapien
acagtttcttaggagctgcatggca

SEQ ID NO: 2076769 - DNA, 25 bp, Homo sapien
tgaggaataccagctctgcaaccac

SEQ ID NO: 2076770 - DNA, 25 bp, Homo sapien
gagtgctgctataacggccttacct

SEQ ID NO: 2076771 - DNA, 25 bp, Homo sapien
gaggagatattcagaaggcacagga

SEQ ID NO: 2076772 - DNA, 25 bp, Homo sapien
tggcagatcttgttaaccacagtag

SEQ ID NO: 2076773 - DNA, 25 bp, Homo sapien
tcagagaatctaggttcagttgtgc

SEQ ID NO: 2076774 - DNA, 25 bp, Homo sapien
tccatgcaattgtctataagattgg

SEQ ID NO: 2076775 - DNA, 25 bp, Homo sapien
ctgctccatgcaattgtctataaga

SEQ ID NO: 2076776 - DNA, 25 bp, Homo sapien
gaatctaggttcagttgtgcattta

SEQ ID NO: 2076777 - DNA, 25 bp, Homo sapien
actgacagccagcagtgacatcaat

SEQ ID NO: 2076778 - DNA, 25 bp, Homo sapien
gacatcaatgcatttgcagctactc

SEQ ID NO: 2076779 - DNA, 25 bp, Homo sapien
tcaggatatctttggaggatttccc

SEQ ID NO: 2076780 - DNA, 25 bp, Homo sapien
gcatttgcagctactcttttcagga

SEQ ID NO: 2076781 - DNA, 25 bp, Homo sapien
tgtaaaactgctgaacaggagaact

SEQ ID NO: 2076782 - DNA, 25 bp, Homo sapien
aaaatgggtccttgtaaaactgctg

SEQ ID NO: 2076783 - DNA, 25 bp, Homo sapien
ctgaacaggagaactgtcatcaatt

SEQ ID NO: 2076784 - DNA, 25 bp, Homo sapien
actgctgaacaggagaactgtcatc

SEQ ID NO: 2076785 - DNA, 25 bp, Homo sapien
cagactgaaaagcagtctgagcatc

SEQ ID NO: 2076786 - DNA, 25 bp, Homo sapien
tgaaaagcagtctgagcatcactgc

SEQ ID NO: 2076787 - DNA, 25 bp, Homo sapien
actgaaaagcagtctgagcatcact

SEQ ID NO: 2076788 - DNA, 25 bp, Homo sapien
gactgaaaagcagtctgagcatcac

SEQ ID NO: 2076789 - DNA, 25 bp, Homo sapien
caaattctaagcaacaaagggacta

SEQ ID NO: 2076790 - DNA, 25 bp, Homo sapien
tttgaggaacgcttctcccctagag

SEQ ID NO: 2076791 - DNA, 25 bp, Homo sapien
tctatctttgccaaacgtggctggc

SEQ ID NO: 2076792 - DNA, 25 bp, Homo sapien
ttaaagtgcaaaactggagactcag

SEQ ID NO: 2076793 - DNA, 25 bp, Homo sapien
tgcttcttcggtcaagagaacagaa

SEQ ID NO: 2076794 - DNA, 25 bp, Homo sapien
tgcaagctggcagtatacagggcag

SEQ ID NO: 2076795 - DNA, 25 bp, Homo sapien
gaagccactgttggactacagcata

SEQ ID NO: 2076796 - DNA, 25 bp, Homo sapien
aatgtgttttgctcttagcctggag

SEQ ID NO: 2076797 - DNA, 25 bp, Homo sapien
aggagcatggccagaagattaaata

SEQ ID NO: 2076798 - DNA, 25 bp, Homo sapien
gccacggtaacaaacgggagtgtga

SEQ ID NO: 2076799 - DNA, 25 bp, Homo sapien
ggagcatggccagaagattaaataa

SEQ ID NO: 2076800 - DNA, 25 bp, Homo sapien
acaaacgggagtgtgatggcaccag

SEQ ID NO: 2076801 - DNA, 25 bp, Homo sapien
taagcttagttagggtatcactgcc

SEQ ID NO: 2076802 - DNA, 25 bp, Homo sapien
ggctttgctgggtatcataacacac

SEQ ID NO: 2076803 - DNA, 25 bp, Homo sapien
taacactgatgagatgctgagaact

SEQ ID NO: 2076804 - DNA, 25 bp, Homo sapien
caatgttcactccttagagactggg

SEQ ID NO: 2076805 - DNA, 25 bp, Homo sapien
tgataagaggtttcacaagctcatc

SEQ ID NO: 2076806 - DNA, 25 bp, Homo sapien
ccaatgatattggtgataagaggtt

SEQ ID NO: 2076807 - DNA, 25 bp, Homo sapien
tgagaattccaatgatattggtgat

SEQ ID NO: 2076808 - DNA, 25 bp, Homo sapien
ctttggtacatatggtgagaattcc

SEQ ID NO: 2076809 - DNA, 25 bp, Homo sapien
cctggacaaagaggataggtattcc

SEQ ID NO: 2076810 - DNA, 25 bp, Homo sapien
taaacatgactgcagaagcctggac

SEQ ID NO: 2076811 - DNA, 25 bp, Homo sapien
aggataggtattccaggagaaagga

SEQ ID NO: 2076812 - DNA, 25 bp, Homo sapien
aaggtcaggctccaccaataaacat

SEQ ID NO: 2076813 - DNA, 25 bp, Homo sapien
ctgtatgagggtagcatctgcaatg

SEQ ID NO: 2076814 - DNA, 25 bp, Homo sapien
catgtctgtatgagggtagcatctg

SEQ ID NO: 2076815 - DNA, 25 bp, Homo sapien
ctgagttcctggacacatgtctgta

SEQ ID NO: 2076816 - DNA, 25 bp, Homo sapien
ctctgagttcctggacacatgtctg

SEQ ID NO: 2076817 - DNA, 25 bp, Homo sapien
ctacagagaagttctatgagatgag

SEQ ID NO: 2076818 - DNA, 25 bp, Homo sapien
tgggagcaatcgtcaagaggttgtc

SEQ ID NO: 2076819 - DNA, 25 bp, Homo sapien
tgagcttgtcgaaaagcctttgcag

SEQ ID NO: 2076820 - DNA, 25 bp, Homo sapien
tctatgagatgagcttgtcgaaaag

SEQ ID NO: 2076821 - DNA, 25 bp, Homo sapien
gagatggagtaacaaaaacacacag

SEQ ID NO: 2076822 - DNA, 25 bp, Homo sapien
gccgtggtgatgtactttcctggtg

SEQ ID NO: 2076823 - DNA, 25 bp, Homo sapien
cgtggtgatgtactttcctggtgac

SEQ ID NO: 2076824 - DNA, 25 bp, Homo sapien
ccgtggtgatgtactttcctggtga

SEQ ID NO: 2076825 - DNA, 25 bp, Homo sapien
gatgtgtacacacggacattgtcgt

SEQ ID NO: 2076826 - DNA, 25 bp, Homo sapien
tcatgccccacgtattcagacactg

SEQ ID NO: 2076827 - DNA, 25 bp, Homo sapien
cagaagagacaggtcagaaagggca

SEQ ID NO: 2076828 - DNA, 25 bp, Homo sapien
caatgctcaaatcaaggtaactggg

SEQ ID NO: 2076829 - DNA, 25 bp, Homo sapien
atatttgttccaaagtgtcgattcc

SEQ ID NO: 2076830 - DNA, 25 bp, Homo sapien
tcctcgtccaagctctaaaattgga

SEQ ID NO: 2076831 - DNA, 25 bp, Homo sapien
gttctttcctcgtccaagctctaaa

SEQ ID NO: 2076832 - DNA, 25 bp, Homo sapien
atcttgttctttcctcgtccaagct

SEQ ID NO: 2076833 - DNA, 25 bp, Homo sapien
ctctaacaatgtatgaaagtgctta

SEQ ID NO: 2076834 - DNA, 25 bp, Homo sapien
ttcccctcaaatattacgcctgtaa

SEQ ID NO: 2076835 - DNA, 25 bp, Homo sapien
tatctattgccaaattcccttccaa

SEQ ID NO: 2076836 - DNA, 25 bp, Homo sapien
ccttctacttacaggcatttgtgtt

SEQ ID NO: 2076837 - DNA, 25 bp, Homo sapien
tagtgattccgtagagtgccaagaa

SEQ ID NO: 2076838 - DNA, 25 bp, Homo sapien
tcctaaaattgatcgtggtgacggt

SEQ ID NO: 2076839 - DNA, 25 bp, Homo sapien
catacaaaatgtccaaaacgggcaa

SEQ ID NO: 2076840 - DNA, 25 bp, Homo sapien
cagtcacacaagaccatgttatatg

SEQ ID NO: 2076841 - DNA, 25 bp, Homo sapien
tgcacaagtggctgaaattcagtac

SEQ ID NO: 2076842 - DNA, 25 bp, Homo sapien
cagtactccccaatgaaggtgccac

SEQ ID NO: 2076843 - DNA, 25 bp, Homo sapien
caggtagaagtgttgttgactgcac

SEQ ID NO: 2076844 - DNA, 25 bp, Homo sapien
cacaaactggtcatgggaggcttca

SEQ ID NO: 2076845 - DNA, 25 bp, Homo sapien
cagactcagattagtgtaatggatg

SEQ ID NO: 2076846 - DNA, 25 bp, Homo sapien
ttacagatattacaaaagacaatac

SEQ ID NO: 2076847 - DNA, 25 bp, Homo sapien
aagagtgcaaactttcagataagat

SEQ ID NO: 2076848 - DNA, 25 bp, Homo sapien
tatggttaatatggtctaatgtgta

SEQ ID NO: 2076849 - DNA, 25 bp, Homo sapien
tattgagttcgatagaggccactcc

SEQ ID NO: 2076850 - DNA, 25 bp, Homo sapien
cacaggtgtgtaagaggcacaaaca

SEQ ID NO: 2076851 - DNA, 25 bp, Homo sapien
tggtcataaagctgttgctgcacac

SEQ ID NO: 2076852 - DNA, 25 bp, Homo sapien
gaaaaacaccacctaatggctgcat

SEQ ID NO: 2076853 - DNA, 25 bp, Homo sapien
ggatctcgatcctgacttgtcctag

SEQ ID NO: 2076854 - DNA, 25 bp, Homo sapien
gagagagaacttggatctcgatcct

SEQ ID NO: 2076855 - DNA, 25 bp, Homo sapien
tccaaaacttgaatgagtcatctaa

SEQ ID NO: 2076856 - DNA, 25 bp, Homo sapien
gacttgtcctagatggagccctcca

SEQ ID NO: 2076857 - DNA, 25 bp, Homo sapien
tgaagggcaggttttccaatgagcg

SEQ ID NO: 2076858 - DNA, 25 bp, Homo sapien
gtaacaatgctttaccatctgattc

SEQ ID NO: 2076859 - DNA, 25 bp, Homo sapien
caaatcaaacatacaccgtcctagg

SEQ ID NO: 2076860 - DNA, 25 bp, Homo sapien
taggccagagtcctcatcatgaaca

SEQ ID NO: 2076861 - DNA, 25 bp, Homo sapien
ctgccaagtataatcctttataatt

SEQ ID NO: 2076862 - DNA, 25 bp, Homo sapien
tgccaagtataatcctttataattt

SEQ ID NO: 2076863 - DNA, 25 bp, Homo sapien
tataatttctgtaggcattggaatt

SEQ ID NO: 2076864 - DNA, 25 bp, Homo sapien
tttctgtaggcattggaattacaag

SEQ ID NO: 2076865 - DNA, 25 bp, Homo sapien
caccggaaatgttctgacaactgtt

SEQ ID NO: 2076866 - DNA, 25 bp, Homo sapien
tcctaatcccagtgaagtgaatctc

SEQ ID NO: 2076867 - DNA, 25 bp, Homo sapien
caagggtggtcagtgctgatcctaa

SEQ ID NO: 2076868 - DNA, 25 bp, Homo sapien
gactggtccagaagaatgttcacca

SEQ ID NO: 2076869 - DNA, 25 bp, Homo sapien
gagaaaagaagtgtctgttgtctaa

SEQ ID NO: 2076870 - DNA, 25 bp, Homo sapien
aaaagaagtgtctgttgtctaagcc

SEQ ID NO: 2076871 - DNA, 25 bp, Homo sapien
tatggcagcctaagctaaaacaggg

SEQ ID NO: 2076872 - DNA, 25 bp, Homo sapien
gaaaagaagtgtctgttgtctaagc

SEQ ID NO: 2076873 - DNA, 25 bp, Homo sapien
caaccaagccaatccttgttgagta

SEQ ID NO: 2076874 - DNA, 25 bp, Homo sapien
ggtcccgatcaacccataatggaat

SEQ ID NO: 2076875 - DNA, 25 bp, Homo sapien
gttcttcactatgactacccaaagg

SEQ ID NO: 2076876 - DNA, 25 bp, Homo sapien
cttgttgagtaggaatatgttcttc

SEQ ID NO: 2076877 - DNA, 25 bp, Homo sapien
ccatcatctcatgggataagtgaag

SEQ ID NO: 2076878 - DNA, 25 bp, Homo sapien
gggccatcatctcatgggataagtg

SEQ ID NO: 2076879 - DNA, 25 bp, Homo sapien
gctctttgtaacaccttttcccatg

SEQ ID NO: 2076880 - DNA, 25 bp, Homo sapien
agaattgtgctctttgtaacacctt

SEQ ID NO: 2076881 - DNA, 25 bp, Homo sapien
aactcattttctagaggagactgac

SEQ ID NO: 2076882 - DNA, 25 bp, Homo sapien
gaaacgtaggtgtgatctaaagtct

SEQ ID NO: 2076883 - DNA, 25 bp, Homo sapien
agttaccgctgtggcaggtcctcac

SEQ ID NO: 2076884 - DNA, 25 bp, Homo sapien
cataaatgaggcaacacttcacttc

SEQ ID NO: 2076885 - DNA, 25 bp, Homo sapien
aaagtctgttttatcggagagagga

SEQ ID NO: 2076886 - DNA, 25 bp, Homo sapien
gtctgttttatcggagagaggattg

SEQ ID NO: 2076887 - DNA, 25 bp, Homo sapien
aagtctgttttatcggagagaggat

SEQ ID NO: 2076888 - DNA, 25 bp, Homo sapien
agtctgttttatcggagagaggatt

SEQ ID NO: 2076889 - DNA, 25 bp, Homo sapien
tcgtaaggtccgctcaagggacggc

SEQ ID NO: 2076890 - DNA, 25 bp, Homo sapien
tcagagccagctgcgtttgaaaaac

SEQ ID NO: 2076891 - DNA, 25 bp, Homo sapien
gaaacgcagtgaggttagccatccc

SEQ ID NO: 2076892 - DNA, 25 bp, Homo sapien
gaggcgcatccgtcactttcagaca

SEQ ID NO: 2076893 - DNA, 25 bp, Homo sapien
aattgagcagcaaggtatcaaaaag

SEQ ID NO: 2076894 - DNA, 25 bp, Homo sapien
cagcagtccggatatcatctgtttc

SEQ ID NO: 2076895 - DNA, 25 bp, Homo sapien
tgcctgacagcagtccggatatcat

SEQ ID NO: 2076896 - DNA, 25 bp, Homo sapien
ggtatcaaaaagagcaatcagttct

SEQ ID NO: 2076897 - DNA, 25 bp, Homo sapien
ctgtcagaaccaagaggtctaacag

SEQ ID NO: 2076898 - DNA, 25 bp, Homo sapien
gtcagaaccaagaggtctaacagtg

SEQ ID NO: 2076899 - DNA, 25 bp, Homo sapien
tgtcagaaccaagaggtctaacagt

SEQ ID NO: 2076900 - DNA, 25 bp, Homo sapien
caaactgtttataccaagacgcaaa

SEQ ID NO: 2076901 - DNA, 25 bp, Homo sapien
ctgtttataccaagacgcaaactcc

SEQ ID NO: 2076902 - DNA, 25 bp, Homo sapien
tgaacaaactgtttataccaagacg

SEQ ID NO: 2076903 - DNA, 25 bp, Homo sapien
gtttataccaagacgcaaactccat

SEQ ID NO: 2076904 - DNA, 25 bp, Homo sapien
tgtctaagaagtaattcgagaatcc

SEQ ID NO: 2076905 - DNA, 25 bp, Homo sapien
tatgatatctattagcagtttctca

SEQ ID NO: 2076906 - DNA, 25 bp, Homo sapien
gaagtaattcgagaatccagtttag

SEQ ID NO: 2076907 - DNA, 25 bp, Homo sapien
tccagtttagaagttctagtgaaga

SEQ ID NO: 2076908 - DNA, 25 bp, Homo sapien
catggaccagggcaaccctttaaag

SEQ ID NO: 2076909 - DNA, 25 bp, Homo sapien
ggacttcaaggtaaccccacatgga

SEQ ID NO: 2076910 - DNA, 25 bp, Homo sapien
tgtttagtgcggtgtgccaagccaa

SEQ ID NO: 2076911 - DNA, 25 bp, Homo sapien
acttccctgtgggttgcagcctgaa

SEQ ID NO: 2076912 - DNA, 25 bp, Homo sapien
tattctcagcatatctgacaccggc

SEQ ID NO: 2076913 - DNA, 25 bp, Homo sapien
cttcaaggccaaacaatcagcagat

SEQ ID NO: 2076914 - DNA, 25 bp, Homo sapien
tatggagtaaggactcacagcatgg

SEQ ID NO: 2076915 - DNA, 25 bp, Homo sapien
taccatgacaggttccaagctattc

SEQ ID NO: 2076916 - DNA, 25 bp, Homo sapien
tggcaaagaaggtttattggaagga

SEQ ID NO: 2076917 - DNA, 25 bp, Homo sapien
gaccgatggcaaagaaggtttattg

SEQ ID NO: 2076918 - DNA, 25 bp, Homo sapien
gaagaccgatggcaaagaaggttta

SEQ ID NO: 2076919 - DNA, 25 bp, Homo sapien
ccgatggcaaagaaggtttattgga

SEQ ID NO: 2076920 - DNA, 25 bp, Homo sapien
gacaaaatagtgctccaacttcagt

SEQ ID NO: 2076921 - DNA, 25 bp, Homo sapien
tcgatacttcatcaaataatagaag

SEQ ID NO: 2076922 - DNA, 25 bp, Homo sapien
tcagtcacgacactacaatcttcat

SEQ ID NO: 2076923 - DNA, 25 bp, Homo sapien
cacatatccattctcgatacttcat

SEQ ID NO: 2076924 - DNA, 25 bp, Homo sapien
gagcgaaacacgcatgactggatca

SEQ ID NO: 2076925 - DNA, 25 bp, Homo sapien
gactggatcaccacataaaaccttc

SEQ ID NO: 2076926 - DNA, 25 bp, Homo sapien
tgaggcatggttgtaccaaacattc

SEQ ID NO: 2076927 - DNA, 25 bp, Homo sapien
gagaagactgttgcgagagcgaaac

SEQ ID NO: 2076928 - DNA, 25 bp, Homo sapien
caattaagcataactttttcaccac

SEQ ID NO: 2076929 - DNA, 25 bp, Homo sapien
tattttgtcaattaagcataacttt

SEQ ID NO: 2076930 - DNA, 25 bp, Homo sapien
aactttttcaccacagcatgcattt

SEQ ID NO: 2076931 - DNA, 25 bp, Homo sapien
ctttttcaccacagcatgcatttta

SEQ ID NO: 2076932 - DNA, 25 bp, Homo sapien
ttctcaaaacgagatcaacatcatc

SEQ ID NO: 2076933 - DNA, 25 bp, Homo sapien
aaaacgagatcaacatcatctgagg

SEQ ID NO: 2076934 - DNA, 25 bp, Homo sapien
gactttctcaaaacgagatcaacat

SEQ ID NO: 2076935 - DNA, 25 bp, Homo sapien
gctgactttctcaaaacgagatcaa

SEQ ID NO: 2076936 - DNA, 25 bp, Homo sapien
taactctggagagaactctggcgtc

SEQ ID NO: 2076937 - DNA, 25 bp, Homo sapien
ggtttcttcccaatgaataaatcag

SEQ ID NO: 2076938 - DNA, 25 bp, Homo sapien
agtctgagttcaataggtttcttcc

SEQ ID NO: 2076939 - DNA, 25 bp, Homo sapien
attagaggacgctttgtatcagccc

SEQ ID NO: 2076940 - DNA, 25 bp, Homo sapien
aagctttaatgctagcgaacggacc

SEQ ID NO: 2076941 - DNA, 25 bp, Homo sapien
aaagctttaatgctagcgaacggac

SEQ ID NO: 2076942 - DNA, 25 bp, Homo sapien
cgcagcatggactttaatcgggtag

SEQ ID NO: 2076943 - DNA, 25 bp, Homo sapien
tcgggtagtacacggaagcatctct

SEQ ID NO: 2076944 - DNA, 25 bp, Homo sapien
gcttagaaggagaatgcagttaccc

SEQ ID NO: 2076945 - DNA, 25 bp, Homo sapien
ttcactagcaaaagtcgcagcatgg

SEQ ID NO: 2076946 - DNA, 25 bp, Homo sapien
aggtcaatgctgtcatcatcaatcg

SEQ ID NO: 2076947 - DNA, 25 bp, Homo sapien
tgaagcaggtataacagaatggcct

SEQ ID NO: 2076948 - DNA, 25 bp, Homo sapien
tgctgtcatcatcaatcgtccctga

SEQ ID NO: 2076949 - DNA, 25 bp, Homo sapien
caatcgtccctgaagcaggtataac

SEQ ID NO: 2076950 - DNA, 25 bp, Homo sapien
gacacgggtttagtgacattatgga

SEQ ID NO: 2076951 - DNA, 25 bp, Homo sapien
ctttcgggctcttgaatgccaaata

SEQ ID NO: 2076952 - DNA, 25 bp, Homo sapien
tccattgcaaagtgaagacacgggt

SEQ ID NO: 2076953 - DNA, 25 bp, Homo sapien
gccaaatacagagatttcatacaga

SEQ ID NO: 2076954 - DNA, 25 bp, Homo sapien
ggcagatggagtgttcaaagcgaaa

SEQ ID NO: 2076955 - DNA, 25 bp, Homo sapien
tattttaatgaaaccgcagggcacc

SEQ ID NO: 2076956 - DNA, 25 bp, Homo sapien
tcaacaatgatagaagccgaataag

SEQ ID NO: 2076957 - DNA, 25 bp, Homo sapien
tcaaacgtatgcacacagtcacaga

SEQ ID NO: 2076958 - DNA, 25 bp, Homo sapien
tttctccttgtagtaatggactggc

SEQ ID NO: 2076959 - DNA, 25 bp, Homo sapien
gtaagtttcagctttcactcgtggc

SEQ ID NO: 2076960 - DNA, 25 bp, Homo sapien
actttctccttgtagtaatggactg

SEQ ID NO: 2076961 - DNA, 25 bp, Homo sapien
tttcactcgtggcaatgggtgagac

SEQ ID NO: 2076962 - DNA, 25 bp, Homo sapien
acagttaagtatcctaatgcagctg

SEQ ID NO: 2076963 - DNA, 25 bp, Homo sapien
aacaaagatatacagtcagtttcac

SEQ ID NO: 2076964 - DNA, 25 bp, Homo sapien
tgtgtgaatagtctggatggatacc

SEQ ID NO: 2076965 - DNA, 25 bp, Homo sapien
caccctaagtgtccaataataacgt

SEQ ID NO: 2076966 - DNA, 25 bp, Homo sapien
tagcgggaaatgctgatgataggaa

SEQ ID NO: 2076967 - DNA, 25 bp, Homo sapien
atgataggaaaagctacgcaaggct

SEQ ID NO: 2076968 - DNA, 25 bp, Homo sapien
tttcctttattagcgggaaatgctg

SEQ ID NO: 2076969 - DNA, 25 bp, Homo sapien
tacgcaaggcttggtctgccagctc

SEQ ID NO: 2076970 - DNA, 25 bp, Homo sapien
tatcagacaggaagttacaggtgca

SEQ ID NO: 2076971 - DNA, 25 bp, Homo sapien
tcagctgttccaaataggccacaac

SEQ ID NO: 2076972 - DNA, 25 bp, Homo sapien
tcaattgaataaacggcctctgcag

SEQ ID NO: 2076973 - DNA, 25 bp, Homo sapien
aggccacaacagcttcatgaatatt

SEQ ID NO: 2076974 - DNA, 25 bp, Homo sapien
tgctgttgacataggctctgataaa

SEQ ID NO: 2076975 - DNA, 25 bp, Homo sapien
taggctctgataaaaactcgcttgc

SEQ ID NO: 2076976 - DNA, 25 bp, Homo sapien
tgacataggctctgataaaaactcg

SEQ ID NO: 2076977 - DNA, 25 bp, Homo sapien
gaaaggagaaataatgctgttgaca

SEQ ID NO: 2076978 - DNA, 25 bp, Homo sapien
gagccacgtggctatctgagggaaa

SEQ ID NO: 2076979 - DNA, 25 bp, Homo sapien
ggaaggcctcgctaataagatgaca

SEQ ID NO: 2076980 - DNA, 25 bp, Homo sapien
ggcagggaactgctacttctccaaa

SEQ ID NO: 2076981 - DNA, 25 bp, Homo sapien
tctccaaagtagtagaggaaggcct

SEQ ID NO: 2076982 - DNA, 25 bp, Homo sapien
tgtggtgcacaagcatcacctctgg

SEQ ID NO: 2076983 - DNA, 25 bp, Homo sapien
tagcagtcgaactgcaaacagggaa

SEQ ID NO: 2076984 - DNA, 25 bp, Homo sapien
ttcaacagggagaagcgtttgtagc

SEQ ID NO: 2076985 - DNA, 25 bp, Homo sapien
gaaatgctgataaaggccattctgt

SEQ ID NO: 2076986 - DNA, 25 bp, Homo sapien
cagttacatggagacatactctggt

SEQ ID NO: 2076987 - DNA, 25 bp, Homo sapien
cgtaaaacttccaattctggccatg

SEQ ID NO: 2076988 - DNA, 25 bp, Homo sapien
gaaagtggcatagtgtcattgcagg

SEQ ID NO: 2076989 - DNA, 25 bp, Homo sapien
taaggctactactgtacacatgttg

SEQ ID NO: 2076990 - DNA, 25 bp, Homo sapien
gttgaaattgcttcaccaataagtg

SEQ ID NO: 2076991 - DNA, 25 bp, Homo sapien
cagatatctgttgaaattgcttcac

SEQ ID NO: 2076992 - DNA, 25 bp, Homo sapien
attccagaactcttattatcacttg

SEQ ID NO: 2076993 - DNA, 25 bp, Homo sapien
caccaataagtgtcatatcctctgt

SEQ ID NO: 2076994 - DNA, 25 bp, Homo sapien
gaagactgagctgctggaattgtag

SEQ ID NO: 2076995 - DNA, 25 bp, Homo sapien
tatgtgtcccatatccaaaggtgaa

SEQ ID NO: 2076996 - DNA, 25 bp, Homo sapien
gaattgtagttccaatgtgtcttca

SEQ ID NO: 2076997 - DNA, 25 bp, Homo sapien
tccagaatggagacacaaaactggg

SEQ ID NO: 2076998 - DNA, 25 bp, Homo sapien
gagtttacatgagcatgactactac

SEQ ID NO: 2076999 - DNA, 25 bp, Homo sapien
ctggagtttacatgagcatgactac

SEQ ID NO: 2077000 - DNA, 25 bp, Homo sapien
ggagtttacatgagcatgactacta

SEQ ID NO: 2077001 - DNA, 25 bp, Homo sapien
tttacatgagcatgactactacttc

SEQ ID NO: 2077002 - DNA, 25 bp, Homo sapien
taaagtgctggagtaaggatttaaa

SEQ ID NO: 2077003 - DNA, 25 bp, Homo sapien
aaaagtgtagaaaggctagagcctc

SEQ ID NO: 2077004 - DNA, 25 bp, Homo sapien
tagaaaggctagagcctcacactta

SEQ ID NO: 2077005 - DNA, 25 bp, Homo sapien
ttaaaaagtgtagaaaggctagagc

SEQ ID NO: 2077006 - DNA, 25 bp, Homo sapien
tgcttcatgacaataagacaaagaa

SEQ ID NO: 2077007 - DNA, 25 bp, Homo sapien
tgggtcgctggcctgtgcgcccaac

SEQ ID NO: 2077008 - DNA, 25 bp, Homo sapien
tctgggaatgatgagtacctcttgc

SEQ ID NO: 2077009 - DNA, 25 bp, Homo sapien
gcccaaccacagaaggccgagggct

SEQ ID NO: 2077010 - DNA, 25 bp, Homo sapien
tgcaggcaggacaccgactgtaatg

SEQ ID NO: 2077011 - DNA, 25 bp, Homo sapien
ggacaccgactgtaatgccaggcga

SEQ ID NO: 2077012 - DNA, 25 bp, Homo sapien
actgtaatgccaggcgatgctttcc

SEQ ID NO: 2077013 - DNA, 25 bp, Homo sapien
tgctgcaggcaggacaccgactgta

SEQ ID NO: 2077014 - DNA, 25 bp, Homo sapien
agtgtggttactacttcttaaagag

SEQ ID NO: 2077015 - DNA, 25 bp, Homo sapien
ctcagcaggaaaatcttgcatgata

SEQ ID NO: 2077016 - DNA, 25 bp, Homo sapien
tctcagcaggaaaatcttgcatgat

SEQ ID NO: 2077017 - DNA, 25 bp, Homo sapien
tctgtggtggtcaggggtagccaag

SEQ ID NO: 2077018 - DNA, 25 bp, Homo sapien
tagccaaggaaatgtagaaaacttc

SEQ ID NO: 2077019 - DNA, 25 bp, Homo sapien
ttcaagcacttcacagtctgattta

SEQ ID NO: 2077020 - DNA, 25 bp, Homo sapien
ctttcattagaggagaggacatgtc

SEQ ID NO: 2077021 - DNA, 25 bp, Homo sapien
actggtcgtggcggcacttccatct

SEQ ID NO: 2077022 - DNA, 25 bp, Homo sapien
ccactggtcgtggcggcacttccat

SEQ ID NO: 2077023 - DNA, 25 bp, Homo sapien
tggtcgtggcggcacttccatctgc

SEQ ID NO: 2077024 - DNA, 25 bp, Homo sapien
ctggtcgtggcggcacttccatctg

SEQ ID NO: 2077025 - DNA, 25 bp, Homo sapien
tgtatttaacagattccaaagagtt

SEQ ID NO: 2077026 - DNA, 25 bp, Homo sapien
atttgtatttaacagattccaaaga

SEQ ID NO: 2077027 - DNA, 25 bp, Homo sapien
ttgtatttaacagattccaaagagt

SEQ ID NO: 2077028 - DNA, 25 bp, Homo sapien
tatttaacagattccaaagagttac

SEQ ID NO: 2077029 - DNA, 25 bp, Homo sapien
ttggtatgaggcagaagatagtgca

SEQ ID NO: 2077030 - DNA, 25 bp, Homo sapien
gatagtgcaggaacttccgaaggaa

SEQ ID NO: 2077031 - DNA, 25 bp, Homo sapien
gatttggctccacattagaccgaag

SEQ ID NO: 2077032 - DNA, 25 bp, Homo sapien
gataagaactctactgcaccaacgt

SEQ ID NO: 2077033 - DNA, 25 bp, Homo sapien
cccgaagtaaggcacttccatgagg

SEQ ID NO: 2077034 - DNA, 25 bp, Homo sapien
tctgccccgaagtaaggcacttcca

SEQ ID NO: 2077035 - DNA, 25 bp, Homo sapien
ttcatggctctgccccgaagtaagg

SEQ ID NO: 2077036 - DNA, 25 bp, Homo sapien
tggctctgccccgaagtaaggcact

SEQ ID NO: 2077037 - DNA, 25 bp, Homo sapien
taactaactactcttgaggtaggca

SEQ ID NO: 2077038 - DNA, 25 bp, Homo sapien
actttgatatctgaccccgataact

SEQ ID NO: 2077039 - DNA, 25 bp, Homo sapien
tctgaccccgataactaactactct

SEQ ID NO: 2077040 - DNA, 25 bp, Homo sapien
taactactcttgaggtaggcataag

SEQ ID NO: 2077041 - DNA, 25 bp, Homo sapien
gaatactcttgagagcgcgctccct

SEQ ID NO: 2077042 - DNA, 25 bp, Homo sapien
gaacctcttccttcatcggaacgga

SEQ ID NO: 2077043 - DNA, 25 bp, Homo sapien
taagttgtgctcaatcttgcagaga

SEQ ID NO: 2077044 - DNA, 25 bp, Homo sapien
gaaaaagttgcctctcctgaatgag

SEQ ID NO: 2077045 - DNA, 25 bp, Homo sapien
gacgcgaaccgcgaagtttacacaa

SEQ ID NO: 2077046 - DNA, 25 bp, Homo sapien
tttacacaaagtccgagatgggtcc

SEQ ID NO: 2077047 - DNA, 25 bp, Homo sapien
gactacgttatttatgctgtgggca

SEQ ID NO: 2077048 - DNA, 25 bp, Homo sapien
tttcccgactgcaaagagactacgt

SEQ ID NO: 2077049 - DNA, 25 bp, Homo sapien
gccagagcgcggggggtgccttggg

SEQ ID NO: 2077050 - DNA, 25 bp, Homo sapien
tgccttgggcgaggggcaagctgac

SEQ ID NO: 2077051 - DNA, 25 bp, Homo sapien
ggccagagcgcggggggtgccttgg

SEQ ID NO: 2077052 - DNA, 25 bp, Homo sapien
gggtgccttgggcgaggggcaagct

SEQ ID NO: 2077053 - DNA, 25 bp, Homo sapien
cgagtttcctgatgagccctgccag

SEQ ID NO: 2077054 - DNA, 25 bp, Homo sapien
gagtttcctgatgagccctgccagg

SEQ ID NO: 2077055 - DNA, 25 bp, Homo sapien
gtttcctgatgagccctgccaggac

SEQ ID NO: 2077056 - DNA, 25 bp, Homo sapien
tcctgatgagccctgccaggaccat

SEQ ID NO: 2077057 - DNA, 25 bp, Homo sapien
gcagccgccggagaattaaactgcc

SEQ ID NO: 2077058 - DNA, 25 bp, Homo sapien
cagccacaattaatgtacccccgga

SEQ ID NO: 2077059 - DNA, 25 bp, Homo sapien
gtgagttccgcaacgcctgcgctca

SEQ ID NO: 2077060 - DNA, 25 bp, Homo sapien
aaacacgtcctgtgggacggtgagt

SEQ ID NO: 2077061 - DNA, 25 bp, Homo sapien
actactgcgcacttcctggacagca

SEQ ID NO: 2077062 - DNA, 25 bp, Homo sapien
gagtcattacgtgagcccttcgcgg

SEQ ID NO: 2077063 - DNA, 25 bp, Homo sapien
gcctctctagaatcactactgcgca

SEQ ID NO: 2077064 - DNA, 25 bp, Homo sapien
tggacagcagtctccgtcgcaagaa

SEQ ID NO: 2077065 - DNA, 25 bp, Homo sapien
aatgaggcacgagggactcatcggt

SEQ ID NO: 2077066 - DNA, 25 bp, Homo sapien
gggactcatcggtgctgaggacttt

SEQ ID NO: 2077067 - DNA, 25 bp, Homo sapien
aaacactttgacgatgtcacaggaa

SEQ ID NO: 2077068 - DNA, 25 bp, Homo sapien
gctgaggactttctgagtcaggtca

SEQ ID NO: 2077069 - DNA, 25 bp, Homo sapien
tggcatcaaagctccagtatgaacc

SEQ ID NO: 2077070 - DNA, 25 bp, Homo sapien
cagggatcacaggattagtaacttc

SEQ ID NO: 2077071 - DNA, 25 bp, Homo sapien
ggcactcatctggttttagctataa

SEQ ID NO: 2077072 - DNA, 25 bp, Homo sapien
gcttgagaatcacatagccagggat

SEQ ID NO: 2077073 - DNA, 25 bp, Homo sapien
ccttgctcagggactgaaactgcct

SEQ ID NO: 2077074 - DNA, 25 bp, Homo sapien
aatagtcattgtgttgaggtggtta

SEQ ID NO: 2077075 - DNA, 25 bp, Homo sapien
gtgaaatgtattactagttttcaga

SEQ ID NO: 2077076 - DNA, 25 bp, Homo sapien
aatttacttacatgaacaatagaag

SEQ ID NO: 2077077 - DNA, 25 bp, Homo sapien
taatactactcttttatttaatgga

SEQ ID NO: 2077078 - DNA, 25 bp, Homo sapien
cacccatgttcccacaacctcatac

SEQ ID NO: 2077079 - DNA, 25 bp, Homo sapien
ggccattcagtcttcgctatcattt

SEQ ID NO: 2077080 - DNA, 25 bp, Homo sapien
tcagtcttcgctatcattttaattc

SEQ ID NO: 2077081 - DNA, 25 bp, Homo sapien
tacaggaagacttctgtagaattcc

SEQ ID NO: 2077082 - DNA, 25 bp, Homo sapien
tgccaattcgtaacttctttagcgg

SEQ ID NO: 2077083 - DNA, 25 bp, Homo sapien
ctttagcggcagaatggtatttgag

SEQ ID NO: 2077084 - DNA, 25 bp, Homo sapien
gtgtatgtggttgccaattcgtaac

SEQ ID NO: 2077085 - DNA, 25 bp, Homo sapien
cgtaacttctttagcggcagaatgg

SEQ ID NO: 2077086 - DNA, 25 bp, Homo sapien
tagtagtatgttcagccagtttcca

SEQ ID NO: 2077087 - DNA, 25 bp, Homo sapien
gaaattagtcaagatcccaacatgc

SEQ ID NO: 2077088 - DNA, 25 bp, Homo sapien
aacttgtataccacactaccttgga

SEQ ID NO: 2077089 - DNA, 25 bp, Homo sapien
taattcgggtaccaactcatacctg

SEQ ID NO: 2077090 - DNA, 25 bp, Homo sapien
gggacagggaccgcagccgccaaat

SEQ ID NO: 2077091 - DNA, 25 bp, Homo sapien
ccgaccgcccgccacagggggacag

SEQ ID NO: 2077092 - DNA, 25 bp, Homo sapien
cgcagccgccaaatccgcggggccg

SEQ ID NO: 2077093 - DNA, 25 bp, Homo sapien
ctgggcagtgcgggggtccgaccgc

SEQ ID NO: 2077094 - DNA, 25 bp, Homo sapien
cctggttcgtggacagtggatttga

SEQ ID NO: 2077095 - DNA, 25 bp, Homo sapien
gataaggattcctagaagaacttct

SEQ ID NO: 2077096 - DNA, 25 bp, Homo sapien
tggaggaacctggttcgtggacagt

SEQ ID NO: 2077097 - DNA, 25 bp, Homo sapien
aagaacttctatctggagtttggcc

SEQ ID NO: 2077098 - DNA, 25 bp, Homo sapien
tgggtgtatctgcaggtcgcacgct

SEQ ID NO: 2077099 - DNA, 25 bp, Homo sapien
tccccatggcggatgtgggtgtatc

SEQ ID NO: 2077100 - DNA, 25 bp, Homo sapien
aggtcgcacgctggtcaccataggc

SEQ ID NO: 2077101 - DNA, 25 bp, Homo sapien
tgttgtccccatggcggatgtgggt

SEQ ID NO: 2077102 - DNA, 25 bp, Homo sapien
acttgaaactgagagacagaggttt

SEQ ID NO: 2077103 - DNA, 25 bp, Homo sapien
aatcacttgaaactgagagacagag

SEQ ID NO: 2077104 - DNA, 25 bp, Homo sapien
tcacttgaaactgagagacagaggt

SEQ ID NO: 2077105 - DNA, 25 bp, Homo sapien
ttgaaactgagagacagaggtttca

SEQ ID NO: 2077106 - DNA, 25 bp, Homo sapien
gaatggcgtccggaaggatttccac

SEQ ID NO: 2077107 - DNA, 25 bp, Homo sapien
gaagagctcggcttctcataatgga

SEQ ID NO: 2077108 - DNA, 25 bp, Homo sapien
gtctgagaccacgtgccaggagcaa

SEQ ID NO: 2077109 - DNA, 25 bp, Homo sapien
ggatttccacgacctccagtctgag

SEQ ID NO: 2077110 - DNA, 25 bp, Homo sapien
ttaaactcgggtacaaattggcata

SEQ ID NO: 2077111 - DNA, 25 bp, Homo sapien
taaatggactggattctcttgcaac

SEQ ID NO: 2077112 - DNA, 25 bp, Homo sapien
tcttgggtgaacttgattgtcaact

SEQ ID NO: 2077113 - DNA, 25 bp, Homo sapien
cttgggtaatggaacggagatctgc

SEQ ID NO: 2077114 - DNA, 25 bp, Homo sapien
tgaaatggcttctccgtgtctccag

SEQ ID NO: 2077115 - DNA, 25 bp, Homo sapien
cagaggtctttggactgccctgaac

SEQ ID NO: 2077116 - DNA, 25 bp, Homo sapien
gatggcaggttttgtcacagagtca

SEQ ID NO: 2077117 - DNA, 25 bp, Homo sapien
catgccatgtgtttaagatctaccc

SEQ ID NO: 2077118 - DNA, 25 bp, Homo sapien
ttctctccttatcccaaatcaaatt

SEQ ID NO: 2077119 - DNA, 25 bp, Homo sapien
aattcaagccttatctcacaatgtc

SEQ ID NO: 2077120 - DNA, 25 bp, Homo sapien
ccaaaggtaattcaagccttatctc

SEQ ID NO: 2077121 - DNA, 25 bp, Homo sapien
aatcaaattgattaaccgctcctcc

SEQ ID NO: 2077122 - DNA, 25 bp, Homo sapien
gatgtaaccaggcagtgcatagagc

SEQ ID NO: 2077123 - DNA, 25 bp, Homo sapien
gagccttggagtcatgatgtaacca

SEQ ID NO: 2077124 - DNA, 25 bp, Homo sapien
tgttgcctatgacgccatcaagagt

SEQ ID NO: 2077125 - DNA, 25 bp, Homo sapien
aagttcctgggataagagccttgga

SEQ ID NO: 2077126 - DNA, 25 bp, Homo sapien
taaatagatctgtcccaaccatgca

SEQ ID NO: 2077127 - DNA, 25 bp, Homo sapien
tgaatgccagctgtcaatgaaccta

SEQ ID NO: 2077128 - DNA, 25 bp, Homo sapien
tgcctatttgcagtgtcatcccatg

SEQ ID NO: 2077129 - DNA, 25 bp, Homo sapien
caaccatgcaattacaggagctgat

SEQ ID NO: 2077130 - DNA, 25 bp, Homo sapien
aaatgtagccccatgtagacagcca

SEQ ID NO: 2077131 - DNA, 25 bp, Homo sapien
aagacagcagaggtaagattccaga

SEQ ID NO: 2077132 - DNA, 25 bp, Homo sapien
gtagccccatgtagacagccagtaa

SEQ ID NO: 2077133 - DNA, 25 bp, Homo sapien
agtaagacagcagaggtaagattcc

SEQ ID NO: 2077134 - DNA, 25 bp, Homo sapien
tgggtaatggagctttctgattggc

SEQ ID NO: 2077135 - DNA, 25 bp, Homo sapien
tgttcaaagtcttcgattggctcac

SEQ ID NO: 2077136 - DNA, 25 bp, Homo sapien
tggtatgccctcttcgggtaggact

SEQ ID NO: 2077137 - DNA, 25 bp, Homo sapien
tcagtgttctattgggtggtatgcc

SEQ ID NO: 2077138 - DNA, 25 bp, Homo sapien
agagagtgcggtgcgtgtggccacc

SEQ ID NO: 2077139 - DNA, 25 bp, Homo sapien
ccctcacagagagtgcggtgcgtgt

SEQ ID NO: 2077140 - DNA, 25 bp, Homo sapien
gccctcacagagagtgcggtgcgtg

SEQ ID NO: 2077141 - DNA, 25 bp, Homo sapien
gtgcggtgcgtgtggccacctctcc

SEQ ID NO: 2077142 - DNA, 25 bp, Homo sapien
agatgtaagtacattccagctgcca

SEQ ID NO: 2077143 - DNA, 25 bp, Homo sapien
gatgtaagtacattccagctgccat

SEQ ID NO: 2077144 - DNA, 25 bp, Homo sapien
caaaatgtaatcattagaggaagat

SEQ ID NO: 2077145 - DNA, 25 bp, Homo sapien
tcattagaggaagattgagattctg

SEQ ID NO: 2077146 - DNA, 25 bp, Homo sapien
tgagattctgagtaccacttggaaa

SEQ ID NO: 2077147 - DNA, 25 bp, Homo sapien
gtaccacttggaaatttgatagact

SEQ ID NO: 2077148 - DNA, 25 bp, Homo sapien
tctgggtcaaagtacttgtctggat

SEQ ID NO: 2077149 - DNA, 25 bp, Homo sapien
tctctgggtcaaagtacttgtctgg

SEQ ID NO: 2077150 - DNA, 25 bp, Homo sapien
tcatctctgggtcaaagtacttgtc

SEQ ID NO: 2077151 - DNA, 25 bp, Homo sapien
catctctgggtcaaagtacttgtct

SEQ ID NO: 2077152 - DNA, 25 bp, Homo sapien
tcttttattcagtgtcagctggtgg

SEQ ID NO: 2077153 - DNA, 25 bp, Homo sapien
gagggacagtaactgaaagggctct

SEQ ID NO: 2077154 - DNA, 25 bp, Homo sapien
ggtggatacatctgcctacaaaaaa

SEQ ID NO: 2077155 - DNA, 25 bp, Homo sapien
gaatctctttgaggtgactagagca

SEQ ID NO: 2077156 - DNA, 25 bp, Homo sapien
ttacagctctccgaagactctgggc

SEQ ID NO: 2077157 - DNA, 25 bp, Homo sapien
gagattcccattgtcggtagcataa

SEQ ID NO: 2077158 - DNA, 25 bp, Homo sapien
tccccagctctttttgtgtgctaca

SEQ ID NO: 2077159 - DNA, 25 bp, Homo sapien
agcgctgacggcttcctcttcactg

SEQ ID NO: 2077160 - DNA, 25 bp, Homo sapien
ggcaacaccccagcataatcagcag

SEQ ID NO: 2077161 - DNA, 25 bp, Homo sapien
agtctctgggccgatgcatgtaaag

SEQ ID NO: 2077162 - DNA, 25 bp, Homo sapien
agtggatgccggtaaccctggctcc

SEQ ID NO: 2077163 - DNA, 25 bp, Homo sapien
ctctgggccgatgcatgtaaagcac

SEQ ID NO: 2077164 - DNA, 25 bp, Homo sapien
tgccatactgaatgagaagtaatcc

SEQ ID NO: 2077165 - DNA, 25 bp, Homo sapien
gaaccccaatgtgatcagggccttt

SEQ ID NO: 2077166 - DNA, 25 bp, Homo sapien
ttttttcctatccatggccaggctc

SEQ ID NO: 2077167 - DNA, 25 bp, Homo sapien
gtcctggtgagtctaagtcagctgt

SEQ ID NO: 2077168 - DNA, 25 bp, Homo sapien
tggtgacttaaggtcagtccccagg

SEQ ID NO: 2077169 - DNA, 25 bp, Homo sapien
ttgattgcatccacttttctactga

SEQ ID NO: 2077170 - DNA, 25 bp, Homo sapien
ttcagaatttgccaatttgattgca

SEQ ID NO: 2077171 - DNA, 25 bp, Homo sapien
ttgcagcattccccgtagtgatcat

SEQ ID NO: 2077172 - DNA, 25 bp, Homo sapien
aagctgggttaaactcaagccaaag

SEQ ID NO: 2077173 - DNA, 25 bp, Homo sapien
aggtgagtactgatggacagctgca

SEQ ID NO: 2077174 - DNA, 25 bp, Homo sapien
tgcagcaaggagcttaacgctttct

SEQ ID NO: 2077175 - DNA, 25 bp, Homo sapien
ggcctggaggtgagtactgatggac

SEQ ID NO: 2077176 - DNA, 25 bp, Homo sapien
tgtggattgcactgaagaacgaggc

SEQ ID NO: 2077177 - DNA, 25 bp, Homo sapien
ggctgggatagtagagatgcccaaa

SEQ ID NO: 2077178 - DNA, 25 bp, Homo sapien
gcttgaggatcgcacagccgtgtga

SEQ ID NO: 2077179 - DNA, 25 bp, Homo sapien
ccgtgtgaagctgactgtggattgc

SEQ ID NO: 2077180 - DNA, 25 bp, Homo sapien
cagctggactggcttttgaaaattc

SEQ ID NO: 2077181 - DNA, 25 bp, Homo sapien
tcatggcagctttgctgtcaggcca

SEQ ID NO: 2077182 - DNA, 25 bp, Homo sapien
cacaaaatttgacatggtcacactg

SEQ ID NO: 2077183 - DNA, 25 bp, Homo sapien
tgctcctcaacactgaatgcgttca

SEQ ID NO: 2077184 - DNA, 25 bp, Homo sapien
ggaaaagagtgacagtcgctgccat

SEQ ID NO: 2077185 - DNA, 25 bp, Homo sapien
tctaggtggataccaacactcaagc

SEQ ID NO: 2077186 - DNA, 25 bp, Homo sapien
gaagacacattcaatttgccagcgg

SEQ ID NO: 2077187 - DNA, 25 bp, Homo sapien
taatttgcttttcgaagagtacagc

SEQ ID NO: 2077188 - DNA, 25 bp, Homo sapien
tggtgaggaggatgttttctttaca

SEQ ID NO: 2077189 - DNA, 25 bp, Homo sapien
ggtgtgagtggtgaggaggatgttt

SEQ ID NO: 2077190 - DNA, 25 bp, Homo sapien
agtggtgaggaggatgttttcttta

SEQ ID NO: 2077191 - DNA, 25 bp, Homo sapien
tgagtggtgaggaggatgttttctt

SEQ ID NO: 2077192 - DNA, 25 bp, Homo sapien
tgtccgtgccatctggtagagactg

SEQ ID NO: 2077193 - DNA, 25 bp, Homo sapien
tgccatctggtagagactgtatatg

SEQ ID NO: 2077194 - DNA, 25 bp, Homo sapien
ctccataaactgtccgtgccatctg

SEQ ID NO: 2077195 - DNA, 25 bp, Homo sapien
taaactgtccgtgccatctggtaga

SEQ ID NO: 2077196 - DNA, 25 bp, Homo sapien
tgcttcttcctgtccgcagcccctt

SEQ ID NO: 2077197 - DNA, 25 bp, Homo sapien
gcttcttcctgtccgcagccccttg

SEQ ID NO: 2077198 - DNA, 25 bp, Homo sapien
cttcttcctgtccgcagccccttgc

SEQ ID NO: 2077199 - DNA, 25 bp, Homo sapien
cagacttgcccctgcgtgcattgcc

SEQ ID NO: 2077200 - DNA, 25 bp, Homo sapien
agacttgcccctgcgtgcattgcca

SEQ ID NO: 2077201 - DNA, 25 bp, Homo sapien
gacttgcccctgcgtgcattgccat

SEQ ID NO: 2077202 - DNA, 25 bp, Homo sapien
acaggaaacgaaggatgttacgtcg

SEQ ID NO: 2077203 - DNA, 25 bp, Homo sapien
tctctgaaagccattaagaacagga

SEQ ID NO: 2077204 - DNA, 25 bp, Homo sapien
tcgtgatgacgaacctagaacagct

SEQ ID NO: 2077205 - DNA, 25 bp, Homo sapien
ccgcaagtggatgccggcgtgcttc

SEQ ID NO: 2077206 - DNA, 25 bp, Homo sapien
tatgggaccagatccaggtaagtgt

SEQ ID NO: 2077207 - DNA, 25 bp, Homo sapien
gagactgctcagtgccttgtttgct

SEQ ID NO: 2077208 - DNA, 25 bp, Homo sapien
ggttctaaacgcacccctggcattc

SEQ ID NO: 2077209 - DNA, 25 bp, Homo sapien
ttatagttaactgccttgttatcct

SEQ ID NO: 2077210 - DNA, 25 bp, Homo sapien
gtatgcggttatttcttccatttgg

SEQ ID NO: 2077211 - DNA, 25 bp, Homo sapien
ttcactctaagtatgcggttatttc

SEQ ID NO: 2077212 - DNA, 25 bp, Homo sapien
taagaccccgaagtccagaagatac

SEQ ID NO: 2077213 - DNA, 25 bp, Homo sapien
gggtggaaatgcaacccgatgttgt

SEQ ID NO: 2077214 - DNA, 25 bp, Homo sapien
tccagggcctttgcttaggtggaga

SEQ ID NO: 2077215 - DNA, 25 bp, Homo sapien
cccagatgccgatccctctctgtga

SEQ ID NO: 2077216 - DNA, 25 bp, Homo sapien
atgcatgcacacagcgtctcccact

SEQ ID NO: 2077217 - DNA, 25 bp, Homo sapien
aggtggagaggtccgcgcatgcatg

SEQ ID NO: 2077218 - DNA, 25 bp, Homo sapien
cggtcagctcagttcccacggtggt

SEQ ID NO: 2077219 - DNA, 25 bp, Homo sapien
tccggtcagctcagttcccacggtg

SEQ ID NO: 2077220 - DNA, 25 bp, Homo sapien
gtcagctcagttcccacggtggtca

SEQ ID NO: 2077221 - DNA, 25 bp, Homo sapien
ttccggtcagctcagttcccacggt

SEQ ID NO: 2077222 - DNA, 25 bp, Homo sapien
tttctggtaacatattctctgggtc

SEQ ID NO: 2077223 - DNA, 25 bp, Homo sapien
aggctcttcgcctgtgctctggcgt

SEQ ID NO: 2077224 - DNA, 25 bp, Homo sapien
tccattcaacgttgccgggtctcca

SEQ ID NO: 2077225 - DNA, 25 bp, Homo sapien
ggcgtcagcagcactctttctggta

SEQ ID NO: 2077226 - DNA, 25 bp, Homo sapien
cattgtcatcggagagctgcaactc

SEQ ID NO: 2077227 - DNA, 25 bp, Homo sapien
tcctctcctgctcatgactgaaatg

SEQ ID NO: 2077228 - DNA, 25 bp, Homo sapien
gtggctgcatagtgtcattgtcatc

SEQ ID NO: 2077229 - DNA, 25 bp, Homo sapien
gcaactctccctgcgccttaacggt

SEQ ID NO: 2077230 - DNA, 25 bp, Homo sapien
tgatgagcaatatcagagttaggga

SEQ ID NO: 2077231 - DNA, 25 bp, Homo sapien
catgttttcgactcagagttaccga

SEQ ID NO: 2077232 - DNA, 25 bp, Homo sapien
gcactgcattctggttgatgagcaa

SEQ ID NO: 2077233 - DNA, 25 bp, Homo sapien
gagttaccgatgaaatactagcttg

SEQ ID NO: 2077234 - DNA, 25 bp, Homo sapien
ctggtcacaggtatccacaggtgac

SEQ ID NO: 2077235 - DNA, 25 bp, Homo sapien
ggtcacaggtatccacaggtgacca

SEQ ID NO: 2077236 - DNA, 25 bp, Homo sapien
tggtcacaggtatccacaggtgacc

SEQ ID NO: 2077237 - DNA, 25 bp, Homo sapien
gctggtcacaggtatccacaggtga

SEQ ID NO: 2077238 - DNA, 25 bp, Homo sapien
gaaacactctcattctcaggaggat

SEQ ID NO: 2077239 - DNA, 25 bp, Homo sapien
agcagtggcctcacgggctttcagg

SEQ ID NO: 2077240 - DNA, 25 bp, Homo sapien
ccagcagtggcctcacgggctttca

SEQ ID NO: 2077241 - DNA, 25 bp, Homo sapien
ggatcctgggcgtttgctgagtgta

SEQ ID NO: 2077242 - DNA, 25 bp, Homo sapien
atacaagctgaaagattgcagcaga

SEQ ID NO: 2077243 - DNA, 25 bp, Homo sapien
ggatgtttctttgtaccaggtagct

SEQ ID NO: 2077244 - DNA, 25 bp, Homo sapien
gctttgcgcttgttttgttccataa

SEQ ID NO: 2077245 - DNA, 25 bp, Homo sapien
ctctattccattcttggcaggggat

SEQ ID NO: 2077246 - DNA, 25 bp, Homo sapien
ccaggtagctttgcgcttgttttgt

SEQ ID NO: 2077247 - DNA, 25 bp, Homo sapien
gcagtgccctcttgtggccatgcat

SEQ ID NO: 2077248 - DNA, 25 bp, Homo sapien
tgggcatctgcattccacattgtgt

SEQ ID NO: 2077249 - DNA, 25 bp, Homo sapien
tgcagtgccctcttgtggccatgca

SEQ ID NO: 2077250 - DNA, 25 bp, Homo sapien
ctgtgggcatctgcattccacattg

SEQ ID NO: 2077251 - DNA, 25 bp, Homo sapien
ctctactactatcttttggggcttc

SEQ ID NO: 2077252 - DNA, 25 bp, Homo sapien
cctctactactatcttttggggctt

SEQ ID NO: 2077253 - DNA, 25 bp, Homo sapien
taggacttacttgagcccggttcat

SEQ ID NO: 2077254 - DNA, 25 bp, Homo sapien
ttcgctttgcattggtgaggctact

SEQ ID NO: 2077255 - DNA, 25 bp, Homo sapien
gctttgcattggtgaggctactgga

SEQ ID NO: 2077256 - DNA, 25 bp, Homo sapien
tgaggctactggaataggacttact

SEQ ID NO: 2077257 - DNA, 25 bp, Homo sapien
aaatacagaagagttcctatataac

SEQ ID NO: 2077258 - DNA, 25 bp, Homo sapien
catgtgttataattcatgaaactat

SEQ ID NO: 2077259 - DNA, 25 bp, Homo sapien
taattcatgaaactatattgacaca

SEQ ID NO: 2077260 - DNA, 25 bp, Homo sapien
gagttcctatataactcctgaccac

SEQ ID NO: 2077261 - DNA, 25 bp, Homo sapien
ttctggtgcccaggcgttgttcctg

SEQ ID NO: 2077262 - DNA, 25 bp, Homo sapien
ttgaggcccacggtctggaaggcat

SEQ ID NO: 2077263 - DNA, 25 bp, Homo sapien
ccttcaggattgaggcccacggtct

SEQ ID NO: 2077264 - DNA, 25 bp, Homo sapien
ggttccgatgataccaaagattcct

SEQ ID NO: 2077265 - DNA, 25 bp, Homo sapien
ggttccctgcgtgcctggacccaga

SEQ ID NO: 2077266 - DNA, 25 bp, Homo sapien
gtgccggttccctgcgtgcctggac

SEQ ID NO: 2077267 - DNA, 25 bp, Homo sapien
tgcgtgcctggacccagaatggacc

SEQ ID NO: 2077268 - DNA, 25 bp, Homo sapien
gtgcgtgccggttccctgcgtgcct

SEQ ID NO: 2077269 - DNA, 25 bp, Homo sapien
tttttctgggactgtggataggaac

SEQ ID NO: 2077270 - DNA, 25 bp, Homo sapien
taggaacggtcacatgcaagctgtg

SEQ ID NO: 2077271 - DNA, 25 bp, Homo sapien
gtcattgatgtctgagatttttctg

SEQ ID NO: 2077272 - DNA, 25 bp, Homo sapien
agaggctgttttgccggacatcctg

SEQ ID NO: 2077273 - DNA, 25 bp, Homo sapien
ttctctgttgtgttagctactctca

SEQ ID NO: 2077274 - DNA, 25 bp, Homo sapien
cttctctgttgtgttagctactctc

SEQ ID NO: 2077275 - DNA, 25 bp, Homo sapien
tctctgttgtgttagctactctcac

SEQ ID NO: 2077276 - DNA, 25 bp, Homo sapien
ggtttcacgttcacatcttctccat

SEQ ID NO: 2077277 - DNA, 25 bp, Homo sapien
tggtttcacgttcacatcttctcca

SEQ ID NO: 2077278 - DNA, 25 bp, Homo sapien
atcttctccatgatactgtgaactt

SEQ ID NO: 2077279 - DNA, 25 bp, Homo sapien
ggtggtttcacgttcacatcttctc

SEQ ID NO: 2077280 - DNA, 25 bp, Homo sapien
ggtagccaaccttgacagcacatga

SEQ ID NO: 2077281 - DNA, 25 bp, Homo sapien
acatgatgattctccctgaaaggca

SEQ ID NO: 2077282 - DNA, 25 bp, Homo sapien
acccatggtggctgtaggtagccaa

SEQ ID NO: 2077283 - DNA, 25 bp, Homo sapien
cccagagctccatagatgtcagtgc

SEQ ID NO: 2077284 - DNA, 25 bp, Homo sapien
caattgagcttatggctggttctcc

SEQ ID NO: 2077285 - DNA, 25 bp, Homo sapien
gcagggacctcaggcctttcaaaaa

SEQ ID NO: 2077286 - DNA, 25 bp, Homo sapien
ccagcaccagttgtggctcatccag

SEQ ID NO: 2077287 - DNA, 25 bp, Homo sapien
caaggagggcctgcattttctgtct

SEQ ID NO: 2077288 - DNA, 25 bp, Homo sapien
caagttcttgggttcttactgtgcc

SEQ ID NO: 2077289 - DNA, 25 bp, Homo sapien
ccttcatcaagcagtacagatcaag

SEQ ID NO: 2077290 - DNA, 25 bp, Homo sapien
tgctgcttgtaggaagatggtagcc

SEQ ID NO: 2077291 - DNA, 25 bp, Homo sapien
ggtagccacttgtccccttcatcaa

SEQ ID NO: 2077292 - DNA, 25 bp, Homo sapien
acgctgcctctatatggcatcctgc

SEQ ID NO: 2077293 - DNA, 25 bp, Homo sapien
gtggggcccacgctgcctctatatg

SEQ ID NO: 2077294 - DNA, 25 bp, Homo sapien
ggcccacgctgcctctatatggcat

SEQ ID NO: 2077295 - DNA, 25 bp, Homo sapien
cacgctgcctctatatggcatcctg

SEQ ID NO: 2077296 - DNA, 25 bp, Homo sapien
ctttgtcgctgtctttcctttttca

SEQ ID NO: 2077297 - DNA, 25 bp, Homo sapien
ttcctttttcatatatcagctgcat

SEQ ID NO: 2077298 - DNA, 25 bp, Homo sapien
gtctttcctttttcatatatcagct

SEQ ID NO: 2077299 - DNA, 25 bp, Homo sapien
ctttcctttttcatatatcagctgc

SEQ ID NO: 2077300 - DNA, 25 bp, Homo sapien
tatttgctttagactgacagtatgc

SEQ ID NO: 2077301 - DNA, 25 bp, Homo sapien
caacagcaagtttttagatttgtag

SEQ ID NO: 2077302 - DNA, 25 bp, Homo sapien
tttgctttagactgacagtatgcat

SEQ ID NO: 2077303 - DNA, 25 bp, Homo sapien
cagcaagtttttagatttgtaggat

SEQ ID NO: 2077304 - DNA, 25 bp, Homo sapien
caactgtgtcgccaaaaaagggata

SEQ ID NO: 2077305 - DNA, 25 bp, Homo sapien
gaagtgtcgtgtttctcgtgctctc

SEQ ID NO: 2077306 - DNA, 25 bp, Homo sapien
tgcgttgctctggttctagctcagg

SEQ ID NO: 2077307 - DNA, 25 bp, Homo sapien
tctctgagctatgctgtcctctgcg

SEQ ID NO: 2077308 - DNA, 25 bp, Homo sapien
tcttagtgtcagtgtaatcatcaat

SEQ ID NO: 2077309 - DNA, 25 bp, Homo sapien
gtcagtgtaatcatcaatgcctaaa

SEQ ID NO: 2077310 - DNA, 25 bp, Homo sapien
tagtgtcagtgtaatcatcaatgcc

SEQ ID NO: 2077311 - DNA, 25 bp, Homo sapien
gtgtaatcatcaatgcctaaatttg

SEQ ID NO: 2077312 - DNA, 25 bp, Homo sapien
ttatcacagacattggtttgtagtt

SEQ ID NO: 2077313 - DNA, 25 bp, Homo sapien
tttatcacagacattggtttgtagt

SEQ ID NO: 2077314 - DNA, 25 bp, Homo sapien
tatcacagacattggtttgtagttt

SEQ ID NO: 2077315 - DNA, 25 bp, Homo sapien
cttggttttgcaaaagctggcaggc

SEQ ID NO: 2077316 - DNA, 25 bp, Homo sapien
tcttggttttgcaaaagctggcagg

SEQ ID NO: 2077317 - DNA, 25 bp, Homo sapien
ctcttggttttgcaaaagctggcag

SEQ ID NO: 2077318 - DNA, 25 bp, Homo sapien
gagctctcatcggattaagtaagac

SEQ ID NO: 2077319 - DNA, 25 bp, Homo sapien
acaggactgagctctcatcggatta

SEQ ID NO: 2077320 - DNA, 25 bp, Homo sapien
ctctcatcggattaagtaagacctt

SEQ ID NO: 2077321 - DNA, 25 bp, Homo sapien
gactgagctctcatcggattaagta

SEQ ID NO: 2077322 - DNA, 25 bp, Homo sapien
gatctcatgaggacaatgagacttc

SEQ ID NO: 2077323 - DNA, 25 bp, Homo sapien
cacaggagtgtttagtggctgcatt

SEQ ID NO: 2077324 - DNA, 25 bp, Homo sapien
ttgcttactgctcggcccaaggttt

SEQ ID NO: 2077325 - DNA, 25 bp, Homo sapien
ggctctcttagtgcacaggagtgtt

SEQ ID NO: 2077326 - DNA, 25 bp, Homo sapien
taggagcagatggtgtgtttgctta

SEQ ID NO: 2077327 - DNA, 25 bp, Homo sapien
tctctgctccaatacaatgacttgg

SEQ ID NO: 2077328 - DNA, 25 bp, Homo sapien
ttaaagttccactgatctctgctcc

SEQ ID NO: 2077329 - DNA, 25 bp, Homo sapien
actgatctctgctccaatacaatga

SEQ ID NO: 2077330 - DNA, 25 bp, Homo sapien
aagttccactgatctctgctccaat

SEQ ID NO: 2077331 - DNA, 25 bp, Homo sapien
tttgtctccccctactccaccctca

SEQ ID NO: 2077332 - DNA, 25 bp, Homo sapien
gtctccccctactccaccctcaatc

SEQ ID NO: 2077333 - DNA, 25 bp, Homo sapien
ctccccctactccaccctcaatcat

SEQ ID NO: 2077334 - DNA, 25 bp, Homo sapien
ttgtctccccctactccaccctcaa

SEQ ID NO: 2077335 - DNA, 25 bp, Homo sapien
gcaaggctatcaggtttctcaggct

SEQ ID NO: 2077336 - DNA, 25 bp, Homo sapien
gctgtgcacagaaggcgatgcctcc

SEQ ID NO: 2077337 - DNA, 25 bp, Homo sapien
gatctgaaacttcatcagggctgtg

SEQ ID NO: 2077338 - DNA, 25 bp, Homo sapien
tctctggtggagatctgaaacttca

SEQ ID NO: 2077339 - DNA, 25 bp, Homo sapien
gggagtcatgaaccagagtcacagg

SEQ ID NO: 2077340 - DNA, 25 bp, Homo sapien
gcgtgagctatagcccttcaggacc

SEQ ID NO: 2077341 - DNA, 25 bp, Homo sapien
ggttagcactaaaaggcatctccgt

SEQ ID NO: 2077342 - DNA, 25 bp, Homo sapien
ggagcctaagttctgacctcgctgg

SEQ ID NO: 2077343 - DNA, 25 bp, Homo sapien
aacggtagagcgcactgccttccat

SEQ ID NO: 2077344 - DNA, 25 bp, Homo sapien
tcatcgacaaggcaccccggagctg

SEQ ID NO: 2077345 - DNA, 25 bp, Homo sapien
aggagttggcatttagggtcctgaa

SEQ ID NO: 2077346 - DNA, 25 bp, Homo sapien
ggtcctgaatagcatggcacgtagc

SEQ ID NO: 2077347 - DNA, 25 bp, Homo sapien
ccctgtttatgtcagcgccaaagag

SEQ ID NO: 2077348 - DNA, 25 bp, Homo sapien
tgttgtaatattgttgcctgttgca

SEQ ID NO: 2077349 - DNA, 25 bp, Homo sapien
ggtggttgtgctcttgtcatgttac

SEQ ID NO: 2077350 - DNA, 25 bp, Homo sapien
tgttgcaatgtgcattttcagtatg

SEQ ID NO: 2077351 - DNA, 25 bp, Homo sapien
cctggacacatagtattggtctgaa

SEQ ID NO: 2077352 - DNA, 25 bp, Homo sapien
gctccaacactaatccttgttggtg

SEQ ID NO: 2077353 - DNA, 25 bp, Homo sapien
ttctggcgacctggacacatagtat

SEQ ID NO: 2077354 - DNA, 25 bp, Homo sapien
agagaaaggctccaacactaatcct

SEQ ID NO: 2077355 - DNA, 25 bp, Homo sapien
actactgtagacattctttgatttt

SEQ ID NO: 2077356 - DNA, 25 bp, Homo sapien
cactactgtagacattctttgattt

SEQ ID NO: 2077357 - DNA, 25 bp, Homo sapien
tttctttccctgtatcttgagtgca

SEQ ID NO: 2077358 - DNA, 25 bp, Homo sapien
cttgaactgagagtttaacctctga

SEQ ID NO: 2077359 - DNA, 25 bp, Homo sapien
taacctctgagtgtatccttttctt

SEQ ID NO: 2077360 - DNA, 25 bp, Homo sapien
cacactgtagccctttgaatcatca

SEQ ID NO: 2077361 - DNA, 25 bp, Homo sapien
ctacgttcatgtcccagatcacaga

SEQ ID NO: 2077362 - DNA, 25 bp, Homo sapien
gacaatctcgtggtgtacacatcag

SEQ ID NO: 2077363 - DNA, 25 bp, Homo sapien
gggagctgttaaagagactacgttc

SEQ ID NO: 2077364 - DNA, 25 bp, Homo sapien
tcacagaatgagagcatcgggtatt

SEQ ID NO: 2077365 - DNA, 25 bp, Homo sapien
gactgaatagtacatcgtattaact

SEQ ID NO: 2077366 - DNA, 25 bp, Homo sapien
gaatagtacatcgtattaacttttc

SEQ ID NO: 2077367 - DNA, 25 bp, Homo sapien
gagactgaatagtacatcgtattaa

SEQ ID NO: 2077368 - DNA, 25 bp, Homo sapien
ctgaatagtacatcgtattaacttt

SEQ ID NO: 2077369 - DNA, 25 bp, Homo sapien
tctgttcattgcacctgaattttcc

SEQ ID NO: 2077370 - DNA, 25 bp, Homo sapien
cagccccggagcttgctttgaagga

SEQ ID NO: 2077371 - DNA, 25 bp, Homo sapien
tatcctcttggctaacaagtgaagt

SEQ ID NO: 2077372 - DNA, 25 bp, Homo sapien
acaagtgaagtggtttctgttcatt

SEQ ID NO: 2077373 - DNA, 25 bp, Homo sapien
gatgggagatttcattgggtcgctc

SEQ ID NO: 2077374 - DNA, 25 bp, Homo sapien
aatagtaaggcaagagcagactgtg

SEQ ID NO: 2077375 - DNA, 25 bp, Homo sapien
gctcatttacttgttctgtacagtt

SEQ ID NO: 2077376 - DNA, 25 bp, Homo sapien
tgcggatgaagagagatgaattgaa

SEQ ID NO: 2077377 - DNA, 25 bp, Homo sapien
gcagttatttttattcattagtcca

SEQ ID NO: 2077378 - DNA, 25 bp, Homo sapien
tatttttattcattagtccataata

SEQ ID NO: 2077379 - DNA, 25 bp, Homo sapien
agcagttatttttattcattagtcc

SEQ ID NO: 2077380 - DNA, 25 bp, Homo sapien
agttatttttattcattagtccata

SEQ ID NO: 2077381 - DNA, 25 bp, Homo sapien
tactgatggatggggccaagcttgc

SEQ ID NO: 2077382 - DNA, 25 bp, Homo sapien
gatttgtctctcttcactggtactg

SEQ ID NO: 2077383 - DNA, 25 bp, Homo sapien
gcagtagatgagttcttcactgtgt

SEQ ID NO: 2077384 - DNA, 25 bp, Homo sapien
gaccatagagatggtagtgatgtct

SEQ ID NO: 2077385 - DNA, 25 bp, Homo sapien
ctgaaatacagaaatattgtttaga

SEQ ID NO: 2077386 - DNA, 25 bp, Homo sapien
gaaatacagaaatattgtttagaaa

SEQ ID NO: 2077387 - DNA, 25 bp, Homo sapien
tacagaaatattgtttagaaacaat

SEQ ID NO: 2077388 - DNA, 25 bp, Homo sapien
aatacagaaatattgtttagaaaca

SEQ ID NO: 2077389 - DNA, 25 bp, Homo sapien
tgaggggaagttattgccagtcctg

SEQ ID NO: 2077390 - DNA, 25 bp, Homo sapien
atcactgaggggaagttattgccag

SEQ ID NO: 2077391 - DNA, 25 bp, Homo sapien
gggaagttattgccagtcctgaaca

SEQ ID NO: 2077392 - DNA, 25 bp, Homo sapien
gaagttattgccagtcctgaacatt

SEQ ID NO: 2077393 - DNA, 25 bp, Homo sapien
ttgtgaattgtggcagagctgtttc

SEQ ID NO: 2077394 - DNA, 25 bp, Homo sapien
gggtccctgtccccacgagaatgca

SEQ ID NO: 2077395 - DNA, 25 bp, Homo sapien
ctgtccccacgagaatgcagggcat

SEQ ID NO: 2077396 - DNA, 25 bp, Homo sapien
tgtgaattgtggcagagctgtttct

SEQ ID NO: 2077397 - DNA, 25 bp, Homo sapien
tgcaggtctccattttgatgagttt

SEQ ID NO: 2077398 - DNA, 25 bp, Homo sapien
ctgcacacgcatgcataaataggag

SEQ ID NO: 2077399 - DNA, 25 bp, Homo sapien
cacacgcatgcataaataggagcaa

SEQ ID NO: 2077400 - DNA, 25 bp, Homo sapien
cttatttgcaggtctccattttgat

SEQ ID NO: 2077401 - DNA, 25 bp, Homo sapien
gaatagatgacgatgtccttcacag

SEQ ID NO: 2077402 - DNA, 25 bp, Homo sapien
tatttgacagcgtacactacttgct

SEQ ID NO: 2077403 - DNA, 25 bp, Homo sapien
ctgaattatatttgacagcgtacac

SEQ ID NO: 2077404 - DNA, 25 bp, Homo sapien
cacagtcactattgagtcataaggc

SEQ ID NO: 2077405 - DNA, 25 bp, Homo sapien
ggctcatgggaagtgctctctctta

SEQ ID NO: 2077406 - DNA, 25 bp, Homo sapien
tctggctcatgggaagtgctctctc

SEQ ID NO: 2077407 - DNA, 25 bp, Homo sapien
catgggaagtgctctctcttacggg

SEQ ID NO: 2077408 - DNA, 25 bp, Homo sapien
agtctggctcatgggaagtgctctc

SEQ ID NO: 2077409 - DNA, 25 bp, Homo sapien
atgtccctcatggccacatgagtgc

SEQ ID NO: 2077410 - DNA, 25 bp, Homo sapien
tctgagatgtccctcatggccacat

SEQ ID NO: 2077411 - DNA, 25 bp, Homo sapien
ctctctgagatgtccctcatggcca

SEQ ID NO: 2077412 - DNA, 25 bp, Homo sapien
tgtccctcatggccacatgagtgca

SEQ ID NO: 2077413 - DNA, 25 bp, Homo sapien
tggccaggatggtatatgtcacttt

SEQ ID NO: 2077414 - DNA, 25 bp, Homo sapien
ctgtggccaggatggtatatgtcac

SEQ ID NO: 2077415 - DNA, 25 bp, Homo sapien
ccaggatggtatatgtcactttgca

SEQ ID NO: 2077416 - DNA, 25 bp, Homo sapien
gccaggatggtatatgtcactttgc

SEQ ID NO: 2077417 - DNA, 25 bp, Homo sapien
tcatccttccctccgtagctgtttt

SEQ ID NO: 2077418 - DNA, 25 bp, Homo sapien
tgcacgtccttaaacaaaataggag

SEQ ID NO: 2077419 - DNA, 25 bp, Homo sapien
ggctttttagggaacctgagctcag

SEQ ID NO: 2077420 - DNA, 25 bp, Homo sapien
ccttcttgccatgagtttgcacgtc

SEQ ID NO: 2077421 - DNA, 25 bp, Homo sapien
caaaactctcagatggcatcatatt

SEQ ID NO: 2077422 - DNA, 25 bp, Homo sapien
gtatatgccaccagcaaagtgcagc

SEQ ID NO: 2077423 - DNA, 25 bp, Homo sapien
gcctcgtagtatatgccaccagcaa

SEQ ID NO: 2077424 - DNA, 25 bp, Homo sapien
cacagacatgactgggcctcgtagt

SEQ ID NO: 2077425 - DNA, 25 bp, Homo sapien
gcattttcaacctgtgggctgtcac

SEQ ID NO: 2077426 - DNA, 25 bp, Homo sapien
tgtttcaggaacattggggccgtat

SEQ ID NO: 2077427 - DNA, 25 bp, Homo sapien
tagcacatctgccagcgttgtctat

SEQ ID NO: 2077428 - DNA, 25 bp, Homo sapien
ttggggccgtatgtgaagactcttc

SEQ ID NO: 2077429 - DNA, 25 bp, Homo sapien
gccagcgttgtctatactggtgttt

SEQ ID NO: 2077430 - DNA, 25 bp, Homo sapien
cacaatatctttgacacctggcttc

SEQ ID NO: 2077431 - DNA, 25 bp, Homo sapien
tggacttctcacaatatctttgaca

SEQ ID NO: 2077432 - DNA, 25 bp, Homo sapien
cctggacttctcacaatatctttga

SEQ ID NO: 2077433 - DNA, 25 bp, Homo sapien
ttctcacaatatctttgacacctgg

SEQ ID NO: 2077434 - DNA, 25 bp, Homo sapien
ttgggacccatgtctccagatggtt

SEQ ID NO: 2077435 - DNA, 25 bp, Homo sapien
caactgccagatgtacgatgatgac

SEQ ID NO: 2077436 - DNA, 25 bp, Homo sapien
cagatggttccatgaggataaccag

SEQ ID NO: 2077437 - DNA, 25 bp, Homo sapien
accagataggtctcattctcaaaat

SEQ ID NO: 2077438 - DNA, 25 bp, Homo sapien
aaaccaggtttatgtggctgcagag

SEQ ID NO: 2077439 - DNA, 25 bp, Homo sapien
agaggatctagttcccatgtagtgc

SEQ ID NO: 2077440 - DNA, 25 bp, Homo sapien
gagaaaccaggtttatgtggctgca

SEQ ID NO: 2077441 - DNA, 25 bp, Homo sapien
tttttgaacacatccgagaaaccag

SEQ ID NO: 2077442 - DNA, 25 bp, Homo sapien
tggataactatgcttcagattcctt

SEQ ID NO: 2077443 - DNA, 25 bp, Homo sapien
agttcttgggcaagcattctggctt

SEQ ID NO: 2077444 - DNA, 25 bp, Homo sapien
tttctccacaagttactggcagcaa

SEQ ID NO: 2077445 - DNA, 25 bp, Homo sapien
gaaacagtgctctcaacatttctcc

SEQ ID NO: 2077446 - DNA, 25 bp, Homo sapien
tggccaatcataccgtgaatttgca

SEQ ID NO: 2077447 - DNA, 25 bp, Homo sapien
tgggccgtgcttggctggccaatca

SEQ ID NO: 2077448 - DNA, 25 bp, Homo sapien
tccttttgtacattggtgccttttg

SEQ ID NO: 2077449 - DNA, 25 bp, Homo sapien
tacattggtgccttttgggccgtgc

SEQ ID NO: 2077450 - DNA, 25 bp, Homo sapien
tttaaggtatgattatggtctccac

SEQ ID NO: 2077451 - DNA, 25 bp, Homo sapien
gctcttgagggttcgttattctgga

SEQ ID NO: 2077452 - DNA, 25 bp, Homo sapien
tagaagagatggttctgctgtgcag

SEQ ID NO: 2077453 - DNA, 25 bp, Homo sapien
ccatcaccaatattctggacacgaa

SEQ ID NO: 2077454 - DNA, 25 bp, Homo sapien
aggtcagcaaggtatccctcttcac

SEQ ID NO: 2077455 - DNA, 25 bp, Homo sapien
gtgggagtagaggatgctaccaatt

SEQ ID NO: 2077456 - DNA, 25 bp, Homo sapien
ggtgggagtagaggatgctaccaat

SEQ ID NO: 2077457 - DNA, 25 bp, Homo sapien
taggtcagcaaggtatccctcttca

SEQ ID NO: 2077458 - DNA, 25 bp, Homo sapien
cagtccacagttgtcgaggaaggag

SEQ ID NO: 2077459 - DNA, 25 bp, Homo sapien
tgcagcattaaggtcagtcccgtta

SEQ ID NO: 2077460 - DNA, 25 bp, Homo sapien
gaaggtgcagcattaaggtcagtcc

SEQ ID NO: 2077461 - DNA, 25 bp, Homo sapien
aagtttgtgcagcagtccacagttg

SEQ ID NO: 2077462 - DNA, 25 bp, Homo sapien
tccaacaacaccggctggggaagct

SEQ ID NO: 2077463 - DNA, 25 bp, Homo sapien
cactccctccaacaacaccggctgg

SEQ ID NO: 2077464 - DNA, 25 bp, Homo sapien
cctccaacaacaccggctggggaag

SEQ ID NO: 2077465 - DNA, 25 bp, Homo sapien
tccctccaacaacaccggctgggga

SEQ ID NO: 2077466 - DNA, 25 bp, Homo sapien
tgccttcacttctgcgataccacaa

SEQ ID NO: 2077467 - DNA, 25 bp, Homo sapien
ggaaaaacacatgccttcacttctg

SEQ ID NO: 2077468 - DNA, 25 bp, Homo sapien
tctgcgataccacaaccctcttggg

SEQ ID NO: 2077469 - DNA, 25 bp, Homo sapien
aaccctcttgggcatacttatgatc

SEQ ID NO: 2077470 - DNA, 25 bp, Homo sapien
ctggcggtgctctggttggttgtgg

SEQ ID NO: 2077471 - DNA, 25 bp, Homo sapien
tgctctggttggttgtggacttttc

SEQ ID NO: 2077472 - DNA, 25 bp, Homo sapien
gcttcacctttttaagccgagactg

SEQ ID NO: 2077473 - DNA, 25 bp, Homo sapien
ttttaagccgagactgttcagatat

SEQ ID NO: 2077474 - DNA, 25 bp, Homo sapien
cttgacttccaggccctatgggttt

SEQ ID NO: 2077475 - DNA, 25 bp, Homo sapien
ttgacttccaggccctatgggtttc

SEQ ID NO: 2077476 - DNA, 25 bp, Homo sapien
cttcagtgttttgcaaccttccgtt

SEQ ID NO: 2077477 - DNA, 25 bp, Homo sapien
tgcaaccttccgtttgcagcaaggg

SEQ ID NO: 2077478 - DNA, 25 bp, Homo sapien
cacagcccataccactctgattaaa

SEQ ID NO: 2077479 - DNA, 25 bp, Homo sapien
ccactctgattaaagcttggcattt

SEQ ID NO: 2077480 - DNA, 25 bp, Homo sapien
tcttctggcacgatcccttccttta

SEQ ID NO: 2077481 - DNA, 25 bp, Homo sapien
tgcctgttccacgttcatctgccat

SEQ ID NO: 2077482 - DNA, 25 bp, Homo sapien
acgatcccttcctttaagctcctgt

SEQ ID NO: 2077483 - DNA, 25 bp, Homo sapien
gataaattataatgcacagggcctt

SEQ ID NO: 2077484 - DNA, 25 bp, Homo sapien
tttacagaagacattgtcactttac

SEQ ID NO: 2077485 - DNA, 25 bp, Homo sapien
gaagacattgtcactttacacttgg

SEQ ID NO: 2077486 - DNA, 25 bp, Homo sapien
cactttacacttggtacttgtctct

SEQ ID NO: 2077487 - DNA, 25 bp, Homo sapien
cacttggtacttgtctcttcagatt

SEQ ID NO: 2077488 - DNA, 25 bp, Homo sapien
gactgaaggcaatgtcagaacaatg

SEQ ID NO: 2077489 - DNA, 25 bp, Homo sapien
tcatgatggtgatagtaatggcaag

SEQ ID NO: 2077490 - DNA, 25 bp, Homo sapien
gagagtgaccctctatgccgtaggg

SEQ ID NO: 2077491 - DNA, 25 bp, Homo sapien
aaactggcgctgatgtgcgtgcacc

SEQ ID NO: 2077492 - DNA, 25 bp, Homo sapien
ggttgagaacaattagaatgaactc

SEQ ID NO: 2077493 - DNA, 25 bp, Homo sapien
ttcaggttcctcactgaatacagtg

SEQ ID NO: 2077494 - DNA, 25 bp, Homo sapien
actctggctttgtcccatagatccc

SEQ ID NO: 2077495 - DNA, 25 bp, Homo sapien
ggtgtttcatatgaggtgcttttcc

SEQ ID NO: 2077496 - DNA, 25 bp, Homo sapien
gcaagactcacattgctgagttcgt

SEQ ID NO: 2077497 - DNA, 25 bp, Homo sapien
tgctgagttcgttcaataaatccca

SEQ ID NO: 2077498 - DNA, 25 bp, Homo sapien
ctcttcctgcagttcgtgcaagact

SEQ ID NO: 2077499 - DNA, 25 bp, Homo sapien
cctgcagttcgtgcaagactcacat

SEQ ID NO: 2077500 - DNA, 25 bp, Homo sapien
tccttatactctcttcttgctctga

SEQ ID NO: 2077501 - DNA, 25 bp, Homo sapien
tcttcttgctctgatacatcaggaa

SEQ ID NO: 2077502 - DNA, 25 bp, Homo sapien
tgctctgatacatcaggaaaactct

SEQ ID NO: 2077503 - DNA, 25 bp, Homo sapien
tctcttcttgctctgatacatcagg

SEQ ID NO: 2077504 - DNA, 25 bp, Homo sapien
caacagatattttagtaggacgaag

SEQ ID NO: 2077505 - DNA, 25 bp, Homo sapien
ccccttccataagagcagaaacatt

SEQ ID NO: 2077506 - DNA, 25 bp, Homo sapien
cttcctggtaagttgtaggtgctca

SEQ ID NO: 2077507 - DNA, 25 bp, Homo sapien
ggcctaaggtcttttgtactgatca

SEQ ID NO: 2077508 - DNA, 25 bp, Homo sapien
gaagagccaattaaatcgtcaaacc

SEQ ID NO: 2077509 - DNA, 25 bp, Homo sapien
tcaaaccccacacttgcggagagaa

SEQ ID NO: 2077510 - DNA, 25 bp, Homo sapien
aaccaagaacctgagtataagggtg

SEQ ID NO: 2077511 - DNA, 25 bp, Homo sapien
ctgagtataagggtggaagagccaa

SEQ ID NO: 2077512 - DNA, 25 bp, Homo sapien
gattctttatatggggtgcctggta

SEQ ID NO: 2077513 - DNA, 25 bp, Homo sapien
cttctactacttgtcattgccacca

SEQ ID NO: 2077514 - DNA, 25 bp, Homo sapien
ctgggtcagattctttatatggggt

SEQ ID NO: 2077515 - DNA, 25 bp, Homo sapien
ctacttgtcattgccaccaggttca

SEQ ID NO: 2077516 - DNA, 25 bp, Homo sapien
gaaagttgaaacttctccctggcca

SEQ ID NO: 2077517 - DNA, 25 bp, Homo sapien
tgagctccttatgtgcttgaacacc

SEQ ID NO: 2077518 - DNA, 25 bp, Homo sapien
catgttcccatttacccaggagcag

SEQ ID NO: 2077519 - DNA, 25 bp, Homo sapien
tgtcagcttggagacgaaactgtgt

SEQ ID NO: 2077520 - DNA, 25 bp, Homo sapien
ggatttatttcaggcttaaagtagc

SEQ ID NO: 2077521 - DNA, 25 bp, Homo sapien
gccgacctcctccaaggtgagagga

SEQ ID NO: 2077522 - DNA, 25 bp, Homo sapien
tgagtaacaaatggctgccgacctc

SEQ ID NO: 2077523 - DNA, 25 bp, Homo sapien
ggtgagaggatttatttcaggctta

SEQ ID NO: 2077524 - DNA, 25 bp, Homo sapien
cagggtggcactatggttgggttcg

SEQ ID NO: 2077525 - DNA, 25 bp, Homo sapien
ggagctctcctcctggtatgcagac

SEQ ID NO: 2077526 - DNA, 25 bp, Homo sapien
ccctatggattcacatggcttttct

SEQ ID NO: 2077527 - DNA, 25 bp, Homo sapien
tgccttctccctatggattcacatg

SEQ ID NO: 2077528 - DNA, 25 bp, Homo sapien
atttgcattcatcaaaaagggtctt

SEQ ID NO: 2077529 - DNA, 25 bp, Homo sapien
ttgatgctaagagcagagatcccat

SEQ ID NO: 2077530 - DNA, 25 bp, Homo sapien
gactcaggagagttaaatgtgctgt

SEQ ID NO: 2077531 - DNA, 25 bp, Homo sapien
aggagactgatgtagactgtcagtc

SEQ ID NO: 2077532 - DNA, 25 bp, Homo sapien
gggtctctctttttatgccaatctc

SEQ ID NO: 2077533 - DNA, 25 bp, Homo sapien
ggtctctctttttatgccaatctcc

SEQ ID NO: 2077534 - DNA, 25 bp, Homo sapien
agatggggactcatgaatctagcag

SEQ ID NO: 2077535 - DNA, 25 bp, Homo sapien
gagcagatggggactcatgaatcta

SEQ ID NO: 2077536 - DNA, 25 bp, Homo sapien
gcagatggggactcatgaatctagc

SEQ ID NO: 2077537 - DNA, 25 bp, Homo sapien
tgagcagatggggactcatgaatct

SEQ ID NO: 2077538 - DNA, 25 bp, Homo sapien
ggtaatttagagtcccacttcagtg

SEQ ID NO: 2077539 - DNA, 25 bp, Homo sapien
tggtatcaatctcaagacctgtggg

SEQ ID NO: 2077540 - DNA, 25 bp, Homo sapien
ggtctacccaatatcctcacatgct

SEQ ID NO: 2077541 - DNA, 25 bp, Homo sapien
gggcagggccactgatcctttgcag

SEQ ID NO: 2077542 - DNA, 25 bp, Homo sapien
tagaacagaggtgagtccaaggtac

SEQ ID NO: 2077543 - DNA, 25 bp, Homo sapien
tggaggagatcagcatatgagaaca

SEQ ID NO: 2077544 - DNA, 25 bp, Homo sapien
ttaaggtgtccagccgtttactcta

SEQ ID NO: 2077545 - DNA, 25 bp, Homo sapien
taacagaccatagatgagaagctgg

SEQ ID NO: 2077546 - DNA, 25 bp, Homo sapien
ttcctgagcataaatcgccaatccc

SEQ ID NO: 2077547 - DNA, 25 bp, Homo sapien
ttccccatcctgtgcggctttcctg

SEQ ID NO: 2077548 - DNA, 25 bp, Homo sapien
tcctgtgcggctttcctgagcataa

SEQ ID NO: 2077549 - DNA, 25 bp, Homo sapien
ataaatcgccaatcccctgacttgc

SEQ ID NO: 2077550 - DNA, 25 bp, Homo sapien
aatggataaattcccaagtaactga

SEQ ID NO: 2077551 - DNA, 25 bp, Homo sapien
tcaggacaggggcttgcatatttta

SEQ ID NO: 2077552 - DNA, 25 bp, Homo sapien
caggacaggggcttgcatattttat

SEQ ID NO: 2077553 - DNA, 25 bp, Homo sapien
ggacaggggcttgcatattttatac

SEQ ID NO: 2077554 - DNA, 25 bp, Homo sapien
aggacaggggcttgcatattttata

SEQ ID NO: 2077555 - DNA, 25 bp, Homo sapien
tggctggtacagcatcatgaaccat

SEQ ID NO: 2077556 - DNA, 25 bp, Homo sapien
caggcttcaattagtgcatgcaggc

SEQ ID NO: 2077557 - DNA, 25 bp, Homo sapien
caggagcttgtcgttctatgccatg

SEQ ID NO: 2077558 - DNA, 25 bp, Homo sapien
tgcagagctccaggaattgtcaagc

SEQ ID NO: 2077559 - DNA, 25 bp, Homo sapien
cattgtacagaaattaacagccata

SEQ ID NO: 2077560 - DNA, 25 bp, Homo sapien
gcattgtacagaaattaacagccat

SEQ ID NO: 2077561 - DNA, 25 bp, Homo sapien
ttaaaaacaagtgagacagcagctg

SEQ ID NO: 2077562 - DNA, 25 bp, Homo sapien
tcaagagacgtaaacaaagatactg

SEQ ID NO: 2077563 - DNA, 25 bp, Homo sapien
tcccaagcagtatcatcaagagacg

SEQ ID NO: 2077564 - DNA, 25 bp, Homo sapien
aaaacatctgccattagtggtgcct

SEQ ID NO: 2077565 - DNA, 25 bp, Homo sapien
gtaattgttatgtgtcgtatctgaa

SEQ ID NO: 2077566 - DNA, 25 bp, Homo sapien
cactttgttgtcagtaattgttatg

SEQ ID NO: 2077567 - DNA, 25 bp, Homo sapien
tagtctgaaaataattagttctgtc

SEQ ID NO: 2077568 - DNA, 25 bp, Homo sapien
gtcgtatctgaatagtctgaaaata

SEQ ID NO: 2077569 - DNA, 25 bp, Homo sapien
gctgaatcagttcctaggcagaggc

SEQ ID NO: 2077570 - DNA, 25 bp, Homo sapien
ttcaagaataatttggtgtataggg

SEQ ID NO: 2077571 - DNA, 25 bp, Homo sapien
taaaacattgcaacatgaaacacat

SEQ ID NO: 2077572 - DNA, 25 bp, Homo sapien
taacccagtgggttaatcttgccca

SEQ ID NO: 2077573 - DNA, 25 bp, Homo sapien
tcaccatccatggaggactggttct

SEQ ID NO: 2077574 - DNA, 25 bp, Homo sapien
tatgtttagaatagtctcacgcctg

SEQ ID NO: 2077575 - DNA, 25 bp, Homo sapien
gaagaaagtccagggtacccagagc

SEQ ID NO: 2077576 - DNA, 25 bp, Homo sapien
taatgagtgcaagggaggtcttctg

SEQ ID NO: 2077577 - DNA, 25 bp, Homo sapien
ctgcttcttcattgaatgctgggct

SEQ ID NO: 2077578 - DNA, 25 bp, Homo sapien
tttcccgtatctcttgacagcaccg

SEQ ID NO: 2077579 - DNA, 25 bp, Homo sapien
gacagcaccgatgttttcgacagtc

SEQ ID NO: 2077580 - DNA, 25 bp, Homo sapien
attcctataggccacagacacttct

SEQ ID NO: 2077581 - DNA, 25 bp, Homo sapien
tcaggaccgaaagtaagctttacat

SEQ ID NO: 2077582 - DNA, 25 bp, Homo sapien
tactccttgagtaccctggacctgg

SEQ ID NO: 2077583 - DNA, 25 bp, Homo sapien
aacggtgcccttctgtactccttga

SEQ ID NO: 2077584 - DNA, 25 bp, Homo sapien
caacatagtttgtgaaacggtgccc

SEQ ID NO: 2077585 - DNA, 25 bp, Homo sapien
gagccaggtaggatgtgatacgcca

SEQ ID NO: 2077586 - DNA, 25 bp, Homo sapien
tacgccaacgttcaactaagttgcc

SEQ ID NO: 2077587 - DNA, 25 bp, Homo sapien
aagttgccaaatccatatagaacag

SEQ ID NO: 2077588 - DNA, 25 bp, Homo sapien
cgtattatgccccaattcacccagt

SEQ ID NO: 2077589 - DNA, 25 bp, Homo sapien
gaaataataagccagtctggaatat

SEQ ID NO: 2077590 - DNA, 25 bp, Homo sapien
taagccagtctggaatattcatgac

SEQ ID NO: 2077591 - DNA, 25 bp, Homo sapien
cagtctggaatattcatgaccagtt

SEQ ID NO: 2077592 - DNA, 25 bp, Homo sapien
tggaatattcatgaccagttgcaac

SEQ ID NO: 2077593 - DNA, 25 bp, Homo sapien
cacttgtgctttactctccaagtaa

SEQ ID NO: 2077594 - DNA, 25 bp, Homo sapien
caggtttaatgcatgtagctgctca

SEQ ID NO: 2077595 - DNA, 25 bp, Homo sapien
ccttcaggtttaatgcatgtagctg

SEQ ID NO: 2077596 - DNA, 25 bp, Homo sapien
cttcacttgtgctttactctccaag

SEQ ID NO: 2077597 - DNA, 25 bp, Homo sapien
tttgggctcgtattacaggttcact

SEQ ID NO: 2077598 - DNA, 25 bp, Homo sapien
gcgtcttttgggctcgtattacagg

SEQ ID NO: 2077599 - DNA, 25 bp, Homo sapien
gggctcgtattacaggttcactgaa

SEQ ID NO: 2077600 - DNA, 25 bp, Homo sapien
ccctttgcgtcttttgggctcgtat

SEQ ID NO: 2077601 - DNA, 25 bp, Homo sapien
atcatatattgcctagttctttcca

SEQ ID NO: 2077602 - DNA, 25 bp, Homo sapien
ctgccagtaattcagagtctgcttc

SEQ ID NO: 2077603 - DNA, 25 bp, Homo sapien
aatttgcaagattaactgccagtaa

SEQ ID NO: 2077604 - DNA, 25 bp, Homo sapien
tcttatcatatattgcctagttctt

SEQ ID NO: 2077605 - DNA, 25 bp, Homo sapien
aatggtttcgtaaggctgctgtcac

SEQ ID NO: 2077606 - DNA, 25 bp, Homo sapien
taacctttgtacagagctattatcc

SEQ ID NO: 2077607 - DNA, 25 bp, Homo sapien
tactttaccatagatcaatagcccc

SEQ ID NO: 2077608 - DNA, 25 bp, Homo sapien
gccacatagtcacattcgattaaat

SEQ ID NO: 2077609 - DNA, 25 bp, Homo sapien
ggctgttttatggtgactattgttt

SEQ ID NO: 2077610 - DNA, 25 bp, Homo sapien
tgggctgttttatggtgactattgt

SEQ ID NO: 2077611 - DNA, 25 bp, Homo sapien
actgggctgttttatggtgactatt

SEQ ID NO: 2077612 - DNA, 25 bp, Homo sapien
cactgggctgttttatggtgactat

SEQ ID NO: 2077613 - DNA, 25 bp, Homo sapien
gctgctgtaaagtcattctctttgt

SEQ ID NO: 2077614 - DNA, 25 bp, Homo sapien
tacggaccatttgaataactgctgt

SEQ ID NO: 2077615 - DNA, 25 bp, Homo sapien
tgttaattttatacggaccatttga

SEQ ID NO: 2077616 - DNA, 25 bp, Homo sapien
cacaccttttatatgctgctgctgt

SEQ ID NO: 2077617 - DNA, 25 bp, Homo sapien
cgggagggagtcctgtcctccacca

SEQ ID NO: 2077618 - DNA, 25 bp, Homo sapien
gggagggagtcctgtcctccaccat

SEQ ID NO: 2077619 - DNA, 25 bp, Homo sapien
tcatcatcatcaaggctttctatcc

SEQ ID NO: 2077620 - DNA, 25 bp, Homo sapien
tcaggaatagataccaacaacttca

SEQ ID NO: 2077621 - DNA, 25 bp, Homo sapien
ttctatccagcatgcctgtttctct

SEQ ID NO: 2077622 - DNA, 25 bp, Homo sapien
atcaaggctttctatccagcatgcc

SEQ ID NO: 2077623 - DNA, 25 bp, Homo sapien
tagtagaataactccaagcagatgg

SEQ ID NO: 2077624 - DNA, 25 bp, Homo sapien
gatggtagagtccagttccttaaaa

SEQ ID NO: 2077625 - DNA, 25 bp, Homo sapien
gatggaggttctgctttgaatctct

SEQ ID NO: 2077626 - DNA, 25 bp, Homo sapien
tctcaggtagagcaaaatagacagt

SEQ ID NO: 2077627 - DNA, 25 bp, Homo sapien
tcaggctgcattgtgacattttggc

SEQ ID NO: 2077628 - DNA, 25 bp, Homo sapien
tctgcagaccgtgagcctttgtggg

SEQ ID NO: 2077629 - DNA, 25 bp, Homo sapien
ctttgtgggcctgatagtcctttgc

SEQ ID NO: 2077630 - DNA, 25 bp, Homo sapien
cagtggagtcttagagtttattgaa

SEQ ID NO: 2077631 - DNA, 25 bp, Homo sapien
cattgttagaacacctggagacaac

SEQ ID NO: 2077632 - DNA, 25 bp, Homo sapien
tatatggatattggcattctccaaa

SEQ ID NO: 2077633 - DNA, 25 bp, Homo sapien
tctccaaatagatgcgggaacacat

SEQ ID NO: 2077634 - DNA, 25 bp, Homo sapien
caggtcttctctggcaccattgtta

SEQ ID NO: 2077635 - DNA, 25 bp, Homo sapien
taccacatgatctttcactgataca

SEQ ID NO: 2077636 - DNA, 25 bp, Homo sapien
cctaaaggtccatcagtgggtgacg

SEQ ID NO: 2077637 - DNA, 25 bp, Homo sapien
caaggtgactatagataatgacaat

SEQ ID NO: 2077638 - DNA, 25 bp, Homo sapien
gaatacataggtacagttagacaga

SEQ ID NO: 2077639 - DNA, 25 bp, Homo sapien
gatataactggtgtaatggactgaa

SEQ ID NO: 2077640 - DNA, 25 bp, Homo sapien
ctagaagatataactggtgtaatgg

SEQ ID NO: 2077641 - DNA, 25 bp, Homo sapien
taattgtgttcctttcctttatatc

SEQ ID NO: 2077642 - DNA, 25 bp, Homo sapien
tttgattctagaagatataactggt

SEQ ID NO: 2077643 - DNA, 25 bp, Homo sapien
tcggaagatacaccatgcctgcttt

SEQ ID NO: 2077644 - DNA, 25 bp, Homo sapien
ctttgtcggaagatacaccatgcct

SEQ ID NO: 2077645 - DNA, 25 bp, Homo sapien
gaagatacaccatgcctgctttacc

SEQ ID NO: 2077646 - DNA, 25 bp, Homo sapien
tgtcggaagatacaccatgcctgct

SEQ ID NO: 2077647 - DNA, 25 bp, Homo sapien
aagaaaatgccagaatatccacgac

SEQ ID NO: 2077648 - DNA, 25 bp, Homo sapien
aggaagaactatgagcagtttccca

SEQ ID NO: 2077649 - DNA, 25 bp, Homo sapien
gaatatccacgactgggaaaggaag

SEQ ID NO: 2077650 - DNA, 25 bp, Homo sapien
cagtgaggtcctgaccagcaaccag

SEQ ID NO: 2077651 - DNA, 25 bp, Homo sapien
cagtaggaagtatggaaagagagac

SEQ ID NO: 2077652 - DNA, 25 bp, Homo sapien
cacaacatcaatgaaggcagtagga

SEQ ID NO: 2077653 - DNA, 25 bp, Homo sapien
cacttgtagatctggttcaaccaaa

SEQ ID NO: 2077654 - DNA, 25 bp, Homo sapien
agtccaccaagcaataatccagatg

SEQ ID NO: 2077655 - DNA, 25 bp, Homo sapien
gacactcatcattgaacctttagtt

SEQ ID NO: 2077656 - DNA, 25 bp, Homo sapien
tctggtagacactcatcattgaacc

SEQ ID NO: 2077657 - DNA, 25 bp, Homo sapien
tagacactcatcattgaacctttag

SEQ ID NO: 2077658 - DNA, 25 bp, Homo sapien
tggtagacactcatcattgaacctt

SEQ ID NO: 2077659 - DNA, 25 bp, Homo sapien
tatgagacctcacacaagtttctag

SEQ ID NO: 2077660 - DNA, 25 bp, Homo sapien
cataaagtcctgtaagttcacccca

SEQ ID NO: 2077661 - DNA, 25 bp, Homo sapien
aaatgtcaccactctaattcaggcc

SEQ ID NO: 2077662 - DNA, 25 bp, Homo sapien
ttcaggaaagcagataggtggcatt

SEQ ID NO: 2077663 - DNA, 25 bp, Homo sapien
ttgtgcgttcccttgtagctcctca

SEQ ID NO: 2077664 - DNA, 25 bp, Homo sapien
cttgtgcgttcccttgtagctcctc

SEQ ID NO: 2077665 - DNA, 25 bp, Homo sapien
tgtgcgttcccttgtagctcctcat

SEQ ID NO: 2077666 - DNA, 25 bp, Homo sapien
gacagtgcatgtatcacaagatggc

SEQ ID NO: 2077667 - DNA, 25 bp, Homo sapien
caggagatgaaacgtcagagtcaca

SEQ ID NO: 2077668 - DNA, 25 bp, Homo sapien
tatacaaggaaaacgcagagtcatc

SEQ ID NO: 2077669 - DNA, 25 bp, Homo sapien
gaagccctggcttgacttttcctgg

SEQ ID NO: 2077670 - DNA, 25 bp, Homo sapien
caaacgctgttggagtcaggaggct

SEQ ID NO: 2077671 - DNA, 25 bp, Homo sapien
tccatggtaggtctgcaaacgctgt

SEQ ID NO: 2077672 - DNA, 25 bp, Homo sapien
ccactttgggagtctatttcacaga

SEQ ID NO: 2077673 - DNA, 25 bp, Homo sapien
tgttttctaaagtaccctggcacgc

SEQ ID NO: 2077674 - DNA, 25 bp, Homo sapien
tttgtagaacgtgtctcaattagaa

SEQ ID NO: 2077675 - DNA, 25 bp, Homo sapien
ttctgtatcccatacggtataccac

SEQ ID NO: 2077676 - DNA, 25 bp, Homo sapien
tgactgtttcaggagtagtggtcag

SEQ ID NO: 2077677 - DNA, 25 bp, Homo sapien
catttagttgccgtgtatcttgact

SEQ ID NO: 2077678 - DNA, 25 bp, Homo sapien
atataacgatctaccactacagcgg

SEQ ID NO: 2077679 - DNA, 25 bp, Homo sapien
taattccatggttgattcattttac

SEQ ID NO: 2077680 - DNA, 25 bp, Homo sapien
gagaggcatctaatttgctcatcat

SEQ ID NO: 2077681 - DNA, 25 bp, Homo sapien
cagcggtagctattagtgcattggg

SEQ ID NO: 2077682 - DNA, 25 bp, Homo sapien
tggtacaaacactttcacctatgtc

SEQ ID NO: 2077683 - DNA, 25 bp, Homo sapien
ttatgcctttaaatgaatggtacaa

SEQ ID NO: 2077684 - DNA, 25 bp, Homo sapien
tgtatcttccaagctacaggcttca

SEQ ID NO: 2077685 - DNA, 25 bp, Homo sapien
tatgcctttaaatgaatggtacaaa

SEQ ID NO: 2077686 - DNA, 25 bp, Homo sapien
gccatctgcaaatcaggaacagccc

SEQ ID NO: 2077687 - DNA, 25 bp, Homo sapien
aggcgccatctgcaaatcaggaaca

SEQ ID NO: 2077688 - DNA, 25 bp, Homo sapien
gacataaagagaaggcgccatctgc

SEQ ID NO: 2077689 - DNA, 25 bp, Homo sapien
atctgcaaatcaggaacagccctcc

SEQ ID NO: 2077690 - DNA, 25 bp, Homo sapien
tggccaggcttttctcacacccctg

SEQ ID NO: 2077691 - DNA, 25 bp, Homo sapien
gccaggcttttctcacacccctgac

SEQ ID NO: 2077692 - DNA, 25 bp, Homo sapien
ccccaggagcctggactacaggcag

SEQ ID NO: 2077693 - DNA, 25 bp, Homo sapien
gcttttctcacacccctgacctcag

SEQ ID NO: 2077694 - DNA, 25 bp, Homo sapien
ttggagcaccttgacatttttcctc

SEQ ID NO: 2077695 - DNA, 25 bp, Homo sapien
agttaacttctaattgccctaatca

SEQ ID NO: 2077696 - DNA, 25 bp, Homo sapien
taatcatcccccaagtataagtata

SEQ ID NO: 2077697 - DNA, 25 bp, Homo sapien
tcttactctcaataattgcccttgg

SEQ ID NO: 2077698 - DNA, 25 bp, Homo sapien
ggctccagagtcggctggacactct

SEQ ID NO: 2077699 - DNA, 25 bp, Homo sapien
ctccagagtcggctggacactctgt

SEQ ID NO: 2077700 - DNA, 25 bp, Homo sapien
cggctcctctttcgtgcacagacga

SEQ ID NO: 2077701 - DNA, 25 bp, Homo sapien
ccggctcctctttcgtgcacagacg

SEQ ID NO: 2077702 - DNA, 25 bp, Homo sapien
acacatagcaagcatgcttttaagg

SEQ ID NO: 2077703 - DNA, 25 bp, Homo sapien
tttctgaaatcacttcaagactctt

SEQ ID NO: 2077704 - DNA, 25 bp, Homo sapien
cttcaagactcttcttgatgcccaa

SEQ ID NO: 2077705 - DNA, 25 bp, Homo sapien
agcaagcatgcttttaagggctatt

SEQ ID NO: 2077706 - DNA, 25 bp, Homo sapien
taccaattggaaactatagttgact

SEQ ID NO: 2077707 - DNA, 25 bp, Homo sapien
ttctagtaagtatacggaatagcct

SEQ ID NO: 2077708 - DNA, 25 bp, Homo sapien
ctccagatgtgtcaatatcaatgcc

SEQ ID NO: 2077709 - DNA, 25 bp, Homo sapien
taagttttaggtgagcagcatcttc

SEQ ID NO: 2077710 - DNA, 25 bp, Homo sapien
aactgcaagctataatttcataggc

SEQ ID NO: 2077711 - DNA, 25 bp, Homo sapien
aaactgcaagctataatttcatagg

SEQ ID NO: 2077712 - DNA, 25 bp, Homo sapien
ggcaaaactgcaagctataatttca

SEQ ID NO: 2077713 - DNA, 25 bp, Homo sapien
caaaactgcaagctataatttcata

SEQ ID NO: 2077714 - DNA, 25 bp, Homo sapien
ttttgcttgtggatccactagaaga

SEQ ID NO: 2077715 - DNA, 25 bp, Homo sapien
cttttgcttgtggatccactagaag

SEQ ID NO: 2077716 - DNA, 25 bp, Homo sapien
tttgcttgtggatccactagaagag

SEQ ID NO: 2077717 - DNA, 25 bp, Homo sapien
ccttttgcttgtggatccactagaa

SEQ ID NO: 2077718 - DNA, 25 bp, Homo sapien
gaaactggaacataattgatacact

SEQ ID NO: 2077719 - DNA, 25 bp, Homo sapien
cattaaaagttcaagaatcgggtct

SEQ ID NO: 2077720 - DNA, 25 bp, Homo sapien
aatcgggtctctggtggagtcagct

SEQ ID NO: 2077721 - DNA, 25 bp, Homo sapien
taatctaagccaactaaacacggga

SEQ ID NO: 2077722 - DNA, 25 bp, Homo sapien
catgcctgtctaaggaggatgagga

SEQ ID NO: 2077723 - DNA, 25 bp, Homo sapien
tctgggagaaatacatgccatgcct

SEQ ID NO: 2077724 - DNA, 25 bp, Homo sapien
ggtagaaagtctctccaaggtaata

SEQ ID NO: 2077725 - DNA, 25 bp, Homo sapien
aaacgaggacaactgatgaagctac

SEQ ID NO: 2077726 - DNA, 25 bp, Homo sapien
ttcccaaaaggtctgattcaacgaa

SEQ ID NO: 2077727 - DNA, 25 bp, Homo sapien
tgctgttgaaaaaatcctctcatgg

SEQ ID NO: 2077728 - DNA, 25 bp, Homo sapien
taatgccataggactcatgactaag

SEQ ID NO: 2077729 - DNA, 25 bp, Homo sapien
gcaacaatgatacggataactgact

SEQ ID NO: 2077730 - DNA, 25 bp, Homo sapien
gatctgaagcaggttgacacgacac

SEQ ID NO: 2077731 - DNA, 25 bp, Homo sapien
tatttagcctgtagaagatctgaag

SEQ ID NO: 2077732 - DNA, 25 bp, Homo sapien
catccactacaggtaaaagttctac

SEQ ID NO: 2077733 - DNA, 25 bp, Homo sapien
gacacgacacactctttgaattatg

SEQ ID NO: 2077734 - DNA, 25 bp, Homo sapien
agaaaatgcaacagagctaacagtt

SEQ ID NO: 2077735 - DNA, 25 bp, Homo sapien
ttcataggaaagttgcccaagtctc

SEQ ID NO: 2077736 - DNA, 25 bp, Homo sapien
aattggcagatttcataggaaagtt

SEQ ID NO: 2077737 - DNA, 25 bp, Homo sapien
gaaaatgcaacagagctaacagttc

SEQ ID NO: 2077738 - DNA, 25 bp, Homo sapien
catctcgccccagaaaagttaattt

SEQ ID NO: 2077739 - DNA, 25 bp, Homo sapien
ttgcacattcgtctgtcatctcgcc

SEQ ID NO: 2077740 - DNA, 25 bp, Homo sapien
gtcatctcgccccagaaaagttaat

SEQ ID NO: 2077741 - DNA, 25 bp, Homo sapien
caggaaagcctttgcacattcgtct

SEQ ID NO: 2077742 - DNA, 25 bp, Homo sapien
gcatcctgatgatgaaggagtctca

SEQ ID NO: 2077743 - DNA, 25 bp, Homo sapien
tctggcatcctgatgatgaaggagt

SEQ ID NO: 2077744 - DNA, 25 bp, Homo sapien
aatattatctggcatcctgatgatg

SEQ ID NO: 2077745 - DNA, 25 bp, Homo sapien
tatctggcatcctgatgatgaagga

SEQ ID NO: 2077746 - DNA, 25 bp, Homo sapien
gagattcttttcatcaaggctttgg

SEQ ID NO: 2077747 - DNA, 25 bp, Homo sapien
caggagagattcttttcatcaaggc

SEQ ID NO: 2077748 - DNA, 25 bp, Homo sapien
gattcttttcatcaaggctttggga

SEQ ID NO: 2077749 - DNA, 25 bp, Homo sapien
tcttttcatcaaggctttgggagat

SEQ ID NO: 2077750 - DNA, 25 bp, Homo sapien
acacgggacaccgtgggaaggatgt

SEQ ID NO: 2077751 - DNA, 25 bp, Homo sapien
cacgggacaccgtgggaaggatgta

SEQ ID NO: 2077752 - DNA, 25 bp, Homo sapien
tagacacgggacaccgtgggaagga

SEQ ID NO: 2077753 - DNA, 25 bp, Homo sapien
agacacgggacaccgtgggaaggat

SEQ ID NO: 2077754 - DNA, 25 bp, Homo sapien
tttaaggaagccactggaatacgaa

SEQ ID NO: 2077755 - DNA, 25 bp, Homo sapien
gaatacgaatgggaagccctgcagc

SEQ ID NO: 2077756 - DNA, 25 bp, Homo sapien
gccctgcagcagttttggtcaactc

SEQ ID NO: 2077757 - DNA, 25 bp, Homo sapien
gcagcagttttggtcaactctaact

SEQ ID NO: 2077758 - DNA, 25 bp, Homo sapien
gtccacttcttgattattgtacacc

SEQ ID NO: 2077759 - DNA, 25 bp, Homo sapien
ccacttcttgattattgtacaccat

SEQ ID NO: 2077760 - DNA, 25 bp, Homo sapien
ggccttgtccacttcttgattattg

SEQ ID NO: 2077761 - DNA, 25 bp, Homo sapien
aaagggccttgtccacttcttgatt

SEQ ID NO: 2077762 - DNA, 25 bp, Homo sapien
taatcctgccagaagcgtgaagcaa

SEQ ID NO: 2077763 - DNA, 25 bp, Homo sapien
ccagtgttcccacccgagatggaga

SEQ ID NO: 2077764 - DNA, 25 bp, Homo sapien
ggagacgtgaataatcttcctaagc

SEQ ID NO: 2077765 - DNA, 25 bp, Homo sapien
ggtcctcatcaagaacccagtgttc

SEQ ID NO: 2077766 - DNA, 25 bp, Homo sapien
tatcgggcctgttggaatttgctca

SEQ ID NO: 2077767 - DNA, 25 bp, Homo sapien
tcatcgtgggccagtgtgaaatggt

SEQ ID NO: 2077768 - DNA, 25 bp, Homo sapien
cgagaatccgtggatgagtacctat

SEQ ID NO: 2077769 - DNA, 25 bp, Homo sapien
gaattgaacagcgtcacgagaatcc

SEQ ID NO: 2077770 - DNA, 25 bp, Homo sapien
gcactccttggtcgttatgagaaca

SEQ ID NO: 2077771 - DNA, 25 bp, Homo sapien
gaaggatatcacaaacccacaaggg

SEQ ID NO: 2077772 - DNA, 25 bp, Homo sapien
aatggagcgttgtggagtagcactc

SEQ ID NO: 2077773 - DNA, 25 bp, Homo sapien
gctcttgaacggttgctgctgctca

SEQ ID NO: 2077774 - DNA, 25 bp, Homo sapien
caggatgtgggttatggtatgacac

SEQ ID NO: 2077775 - DNA, 25 bp, Homo sapien
tgtgggttatggtatgacactaacc

SEQ ID NO: 2077776 - DNA, 25 bp, Homo sapien
atcaggatgtgggttatggtatgac

SEQ ID NO: 2077777 - DNA, 25 bp, Homo sapien
gggttatggtatgacactaaccaaa

SEQ ID NO: 2077778 - DNA, 25 bp, Homo sapien
tttgcatcgtggttgaacatggcat

SEQ ID NO: 2077779 - DNA, 25 bp, Homo sapien
tgcttgttgtctcccggactcttgt

SEQ ID NO: 2077780 - DNA, 25 bp, Homo sapien
tctggactttcactggggtgctgct

SEQ ID NO: 2077781 - DNA, 25 bp, Homo sapien
cggactcttgttggtttccactgtg

SEQ ID NO: 2077782 - DNA, 25 bp, Homo sapien
ttccgaggagggtaagcactgtgtt

SEQ ID NO: 2077783 - DNA, 25 bp, Homo sapien
agcactgtgttgcatcagatgaggc

SEQ ID NO: 2077784 - DNA, 25 bp, Homo sapien
atcgattccgaggagggtaagcact

SEQ ID NO: 2077785 - DNA, 25 bp, Homo sapien
cactgtgttgcatcagatgaggcct

SEQ ID NO: 2077786 - DNA, 25 bp, Homo sapien
tactcttaatcaatctacctcttgc

SEQ ID NO: 2077787 - DNA, 25 bp, Homo sapien
cccatttactctatgaggttgtata

SEQ ID NO: 2077788 - DNA, 25 bp, Homo sapien
ttcagagtcagagggtatttcatcc

SEQ ID NO: 2077789 - DNA, 25 bp, Homo sapien
ttcttattccacagattaatacatt

SEQ ID NO: 2077790 - DNA, 25 bp, Homo sapien
agaaacagggatcgccttttgtaca

SEQ ID NO: 2077791 - DNA, 25 bp, Homo sapien
tttgtacaactatactctctcctct

SEQ ID NO: 2077792 - DNA, 25 bp, Homo sapien
tagcctatctatgtgtatctttcgc

SEQ ID NO: 2077793 - DNA, 25 bp, Homo sapien
tttccaagtctgtagttagcctatc

SEQ ID NO: 2077794 - DNA, 25 bp, Homo sapien
tgacattcctgtggaattttgcatc

SEQ ID NO: 2077795 - DNA, 25 bp, Homo sapien
acattcctgtggaattttgcatcct

SEQ ID NO: 2077796 - DNA, 25 bp, Homo sapien
gacattcctgtggaattttgcatcc

SEQ ID NO: 2077797 - DNA, 25 bp, Homo sapien
tgcacgagtccagtgcatccccaga

SEQ ID NO: 2077798 - DNA, 25 bp, Homo sapien
tgctccaattacacccctggattcg

SEQ ID NO: 2077799 - DNA, 25 bp, Homo sapien
cgaaccatttagtgatcagccactg

SEQ ID NO: 2077800 - DNA, 25 bp, Homo sapien
tgttttacggatttggctgcacgag

SEQ ID NO: 2077801 - DNA, 25 bp, Homo sapien
catcgctgagtgttgagatattaca

SEQ ID NO: 2077802 - DNA, 25 bp, Homo sapien
taatgtataaccttgatcacagtca

SEQ ID NO: 2077803 - DNA, 25 bp, Homo sapien
gtcactctcatctttctcatcgctg

SEQ ID NO: 2077804 - DNA, 25 bp, Homo sapien
tctttctcatcgctgagtgttgaga

SEQ ID NO: 2077805 - DNA, 25 bp, Homo sapien
gagggtgactctcaaggctatgacc

SEQ ID NO: 2077806 - DNA, 25 bp, Homo sapien
catgctgcaggattgcacgtttttc

SEQ ID NO: 2077807 - DNA, 25 bp, Homo sapien
tatgacctggcctcctgatcgtcag

SEQ ID NO: 2077808 - DNA, 25 bp, Homo sapien
cacgtttttcatcggattggttgga

SEQ ID NO: 2077809 - DNA, 25 bp, Homo sapien
cagtccgcaggtgagaattgttctc

SEQ ID NO: 2077810 - DNA, 25 bp, Homo sapien
ttttccaccaacatagcaattctca

SEQ ID NO: 2077811 - DNA, 25 bp, Homo sapien
taccttttttcaggtcacagaagta

SEQ ID NO: 2077812 - DNA, 25 bp, Homo sapien
ggatccagatggacatgtaaaaata

SEQ ID NO: 2077813 - DNA, 25 bp, Homo sapien
gccttttcatgccacagtgagtcag

SEQ ID NO: 2077814 - DNA, 25 bp, Homo sapien
gggatgcttgtgctgagatgttgca

SEQ ID NO: 2077815 - DNA, 25 bp, Homo sapien
cttttcatgccacagtgagtcagtt

SEQ ID NO: 2077816 - DNA, 25 bp, Homo sapien
ccgaaaaccttttgacagtcacagg

SEQ ID NO: 2077817 - DNA, 25 bp, Homo sapien
cactgacacaatcctttggcgaata

SEQ ID NO: 2077818 - DNA, 25 bp, Homo sapien
tcactgacacaatcctttggcgaat

SEQ ID NO: 2077819 - DNA, 25 bp, Homo sapien
attcactgacacaatcctttggcga

SEQ ID NO: 2077820 - DNA, 25 bp, Homo sapien
ctgacacaatcctttggcgaatagt

SEQ ID NO: 2077821 - DNA, 25 bp, Homo sapien
tgctaagaacaatcactctggtaat

SEQ ID NO: 2077822 - DNA, 25 bp, Homo sapien
caatcactctggtaattacaaggag

SEQ ID NO: 2077823 - DNA, 25 bp, Homo sapien
atcattgctaagaacaatcactctg

SEQ ID NO: 2077824 - DNA, 25 bp, Homo sapien
gaacaatcactctggtaattacaag

SEQ ID NO: 2077825 - DNA, 25 bp, Homo sapien
accatgcactgggaaagggttttat

SEQ ID NO: 2077826 - DNA, 25 bp, Homo sapien
cattgtcatcaattccaaggagatt

SEQ ID NO: 2077827 - DNA, 25 bp, Homo sapien
caaaagtaacacatgtatattgtaa

SEQ ID NO: 2077828 - DNA, 25 bp, Homo sapien
ggagattcaaatcctcaatatcaaa

SEQ ID NO: 2077829 - DNA, 25 bp, Homo sapien
acgtgcgaggggtactcctgatttt

SEQ ID NO: 2077830 - DNA, 25 bp, Homo sapien
tcttgtaatttgccttgctgtttct

SEQ ID NO: 2077831 - DNA, 25 bp, Homo sapien
gaggggtactcctgattttttatga

SEQ ID NO: 2077832 - DNA, 25 bp, Homo sapien
tgcgaggggtactcctgatttttta

SEQ ID NO: 2077833 - DNA, 25 bp, Homo sapien
tcagttctagtagccttttgccaga

SEQ ID NO: 2077834 - DNA, 25 bp, Homo sapien
ggagaatgctttcagccattgacca

SEQ ID NO: 2077835 - DNA, 25 bp, Homo sapien
gctaggaatccagtactatgtcgaa

SEQ ID NO: 2077836 - DNA, 25 bp, Homo sapien
tccatatgatgttgcctgcgggttt

SEQ ID NO: 2077837 - DNA, 25 bp, Homo sapien
ggaacacgacaatctcagaacagtg

SEQ ID NO: 2077838 - DNA, 25 bp, Homo sapien
gattattgcattcttgcttggatgg

SEQ ID NO: 2077839 - DNA, 25 bp, Homo sapien
ctcgatggagttgttgattattgca

SEQ ID NO: 2077840 - DNA, 25 bp, Homo sapien
catgcatatccagtgctattcacac

SEQ ID NO: 2077841 - DNA, 25 bp, Homo sapien
taatgcagttagtggtgaagtgtgc

SEQ ID NO: 2077842 - DNA, 25 bp, Homo sapien
tcagctctgtaatgcagttagtggt

SEQ ID NO: 2077843 - DNA, 25 bp, Homo sapien
cccagtatgattgatgagcaacgac

SEQ ID NO: 2077844 - DNA, 25 bp, Homo sapien
cagcttcccagtatgattgatgagc

SEQ ID NO: 2077845 - DNA, 25 bp, Homo sapien
ttgtgcctaccttctgcactatgat

SEQ ID NO: 2077846 - DNA, 25 bp, Homo sapien
ttttgtgcctaccttctgcactatg

SEQ ID NO: 2077847 - DNA, 25 bp, Homo sapien
tttgtgcctaccttctgcactatga

SEQ ID NO: 2077848 - DNA, 25 bp, Homo sapien
tgtggcaactcatgaaacaacactg

SEQ ID NO: 2077849 - DNA, 25 bp, Homo sapien
tacacaatggccgaacttctaggtc

SEQ ID NO: 2077850 - DNA, 25 bp, Homo sapien
gaaccttgatggcatatttgtggca

SEQ ID NO: 2077851 - DNA, 25 bp, Homo sapien
gatgcatgattttatactcccagaa

SEQ ID NO: 2077852 - DNA, 25 bp, Homo sapien
ggtgggcatagaagctttctccagc

SEQ ID NO: 2077853 - DNA, 25 bp, Homo sapien
cactgtgttggtgggcatagaagct

SEQ ID NO: 2077854 - DNA, 25 bp, Homo sapien
ggcatttctgggcatgatatcaaat

SEQ ID NO: 2077855 - DNA, 25 bp, Homo sapien
tgttctagtgcttgaagagagacat

SEQ ID NO: 2077856 - DNA, 25 bp, Homo sapien
agacgagcatttgggaagctgacac

SEQ ID NO: 2077857 - DNA, 25 bp, Homo sapien
gaatacgtgctaggcccaacactga

SEQ ID NO: 2077858 - DNA, 25 bp, Homo sapien
ctgaagctggagtacgaagacgagc

SEQ ID NO: 2077859 - DNA, 25 bp, Homo sapien
atgggcaggaatacgtgctaggccc

SEQ ID NO: 2077860 - DNA, 25 bp, Homo sapien
cccaccggcgctgcaatggatttct

SEQ ID NO: 2077861 - DNA, 25 bp, Homo sapien
gggccctgcactctgagcggacggc

SEQ ID NO: 2077862 - DNA, 25 bp, Homo sapien
aggctcgggcgggaacacgggctgc

SEQ ID NO: 2077863 - DNA, 25 bp, Homo sapien
ttctccgcggcgcagggtcccatca

SEQ ID NO: 2077864 - DNA, 25 bp, Homo sapien
taacaacttaggtgaatcggtgggc

SEQ ID NO: 2077865 - DNA, 25 bp, Homo sapien
ctttagtaagacatcccaactggga

SEQ ID NO: 2077866 - DNA, 25 bp, Homo sapien
tatgtgaccactgagcaggcgtctg

SEQ ID NO: 2077867 - DNA, 25 bp, Homo sapien
caaaggcagacggagaaaatggagc

SEQ ID NO: 2077868 - DNA, 25 bp, Homo sapien
caggccccatgaaatccgtaaggtt

SEQ ID NO: 2077869 - DNA, 25 bp, Homo sapien
gtttttacatgcaccagactcctga

SEQ ID NO: 2077870 - DNA, 25 bp, Homo sapien
tgtgagatcttctagtggactcccc

SEQ ID NO: 2077871 - DNA, 25 bp, Homo sapien
ggagctcgtttgttgtttcaaagcc

SEQ ID NO: 2077872 - DNA, 25 bp, Homo sapien
tcttcccaacgctttattggtctgt

SEQ ID NO: 2077873 - DNA, 25 bp, Homo sapien
gaagaaagttctcggtaggtcctga

SEQ ID NO: 2077874 - DNA, 25 bp, Homo sapien
ttggctaggtcctgaagcttcgtca

SEQ ID NO: 2077875 - DNA, 25 bp, Homo sapien
tcctgagtgggacacagatggtctt

SEQ ID NO: 2077876 - DNA, 25 bp, Homo sapien
tcctggacttgctccggaataagtg

SEQ ID NO: 2077877 - DNA, 25 bp, Homo sapien
cctggacttgctccggaataagtgg

SEQ ID NO: 2077878 - DNA, 25 bp, Homo sapien
gtgaagaaaaatgggggtggccaca

SEQ ID NO: 2077879 - DNA, 25 bp, Homo sapien
gggtggccacaggcagggaaattct

SEQ ID NO: 2077880 - DNA, 25 bp, Homo sapien
aatgggggtggccacaggcagggaa

SEQ ID NO: 2077881 - DNA, 25 bp, Homo sapien
tgggggtggccacaggcagggaaat

SEQ ID NO: 2077882 - DNA, 25 bp, Homo sapien
ctatgccaaggtgctcttgtgatgc

SEQ ID NO: 2077883 - DNA, 25 bp, Homo sapien
gtgtctttggaaaattttgaacatg

SEQ ID NO: 2077884 - DNA, 25 bp, Homo sapien
ttttgatctgcactgttttttccac

SEQ ID NO: 2077885 - DNA, 25 bp, Homo sapien
caggaagtctgtgtctttggaaaat

SEQ ID NO: 2077886 - DNA, 25 bp, Homo sapien
gatgccttttcatgtttcatcccca

SEQ ID NO: 2077887 - DNA, 25 bp, Homo sapien
tcactttccaaacgtatacctggat

SEQ ID NO: 2077888 - DNA, 25 bp, Homo sapien
cgtatacctggatcggcataaatgg

SEQ ID NO: 2077889 - DNA, 25 bp, Homo sapien
caaacgtatacctggatcggcataa

SEQ ID NO: 2077890 - DNA, 25 bp, Homo sapien
tttccaaacgtatacctggatcggc

SEQ ID NO: 2077891 - DNA, 25 bp, Homo sapien
accatatgggattagagatttctgc

SEQ ID NO: 2077892 - DNA, 25 bp, Homo sapien
tcctcatagtaataggcatcagtgg

SEQ ID NO: 2077893 - DNA, 25 bp, Homo sapien
tctgctgactcaggcattgtgcttt

SEQ ID NO: 2077894 - DNA, 25 bp, Homo sapien
cttgcatgccatgataggaactttg

SEQ ID NO: 2077895 - DNA, 25 bp, Homo sapien
ccttgacaactgagtgatggttaag

SEQ ID NO: 2077896 - DNA, 25 bp, Homo sapien
tctaattccacagacggctttagca

SEQ ID NO: 2077897 - DNA, 25 bp, Homo sapien
gatctgcacatgaaatttgaggtga

SEQ ID NO: 2077898 - DNA, 25 bp, Homo sapien
gaaggtcgaggccactctaattcca

SEQ ID NO: 2077899 - DNA, 25 bp, Homo sapien
gctgctgagcttgtgtttcatcatg

SEQ ID NO: 2077900 - DNA, 25 bp, Homo sapien
tgctgagcttgtgtttcatcatgaa

SEQ ID NO: 2077901 - DNA, 25 bp, Homo sapien
cttctccagttgctgctgagcttgt

SEQ ID NO: 2077902 - DNA, 25 bp, Homo sapien
ctccagttgctgctgagcttgtgtt

SEQ ID NO: 2077903 - DNA, 25 bp, Homo sapien
agttgggttatgtccagataaatct

SEQ ID NO: 2077904 - DNA, 25 bp, Homo sapien
gggttatgtccagataaatctgtca

SEQ ID NO: 2077905 - DNA, 25 bp, Homo sapien
ttatgtccagataaatctgtcatac

SEQ ID NO: 2077906 - DNA, 25 bp, Homo sapien
tgggttatgtccagataaatctgtc

SEQ ID NO: 2077907 - DNA, 25 bp, Homo sapien
tgtgtttaaggatttgatttgttct

SEQ ID NO: 2077908 - DNA, 25 bp, Homo sapien
ttgcacaacacttggtcaactgcat

SEQ ID NO: 2077909 - DNA, 25 bp, Homo sapien
tttgcacaacacttggtcaactgca

SEQ ID NO: 2077910 - DNA, 25 bp, Homo sapien
tggtaactcgtctttgcacaacact

SEQ ID NO: 2077911 - DNA, 25 bp, Homo sapien
tatttttggtaactcgtctttgcac

SEQ ID NO: 2077912 - DNA, 25 bp, Homo sapien
gaactagtaaaacgcttcacctggc

SEQ ID NO: 2077913 - DNA, 25 bp, Homo sapien
tctgaactagtaaaacgcttcacct

SEQ ID NO: 2077914 - DNA, 25 bp, Homo sapien
gttgtctgaactagtaaaacgcttc

SEQ ID NO: 2077915 - DNA, 25 bp, Homo sapien
ctgcaggttgtctgaactagtaaaa

SEQ ID NO: 2077916 - DNA, 25 bp, Homo sapien
ttcatcatcataagactaactacct

SEQ ID NO: 2077917 - DNA, 25 bp, Homo sapien
tccatcatcatgagaccatctacct

SEQ ID NO: 2077918 - DNA, 25 bp, Homo sapien
cttcaacatcatgggatcaactact

SEQ ID NO: 2077919 - DNA, 25 bp, Homo sapien
tacttccatcgtctttggaccatct

SEQ ID NO: 2077920 - DNA, 25 bp, Homo sapien
agaaagaatcaagccggacattgcc

SEQ ID NO: 2077921 - DNA, 25 bp, Homo sapien
cagagattcaagatctttgagcaaa

SEQ ID NO: 2077922 - DNA, 25 bp, Homo sapien
caagccggacattgccagagattca

SEQ ID NO: 2077923 - DNA, 25 bp, Homo sapien
gaatcaagccggacattgccagaga

SEQ ID NO: 2077924 - DNA, 25 bp, Homo sapien
gaggctgtcaggctgtgatgaattc

SEQ ID NO: 2077925 - DNA, 25 bp, Homo sapien
gagagccagcgtgccacaggtgctc

SEQ ID NO: 2077926 - DNA, 25 bp, Homo sapien
ggctgtcaggctgtgatgaattcct

SEQ ID NO: 2077927 - DNA, 25 bp, Homo sapien
gctctccacatgagcaggtgagcaa

SEQ ID NO: 2077928 - DNA, 25 bp, Homo sapien
taatctgccttaccattctgttctg

SEQ ID NO: 2077929 - DNA, 25 bp, Homo sapien
catattcctcctctgtacacaatat

SEQ ID NO: 2077930 - DNA, 25 bp, Homo sapien
tattcctcctctgtacacaatattc

SEQ ID NO: 2077931 - DNA, 25 bp, Homo sapien
tctgccttaccattctgttctgtgc

SEQ ID NO: 2077932 - DNA, 25 bp, Homo sapien
tgaattgtggtgttgaggttgtaac

SEQ ID NO: 2077933 - DNA, 25 bp, Homo sapien
tgtcatccccttgatcagcatctga

SEQ ID NO: 2077934 - DNA, 25 bp, Homo sapien
tgaccttctgcagattcgtacaatg

SEQ ID NO: 2077935 - DNA, 25 bp, Homo sapien
aaatgccgcatgcactgaccttctg

SEQ ID NO: 2077936 - DNA, 25 bp, Homo sapien
tgtgcctctccctgttctaactgtg

SEQ ID NO: 2077937 - DNA, 25 bp, Homo sapien
ttagagggctgcatagaggttttac

SEQ ID NO: 2077938 - DNA, 25 bp, Homo sapien
ggtggattcagcttctctatcttca

SEQ ID NO: 2077939 - DNA, 25 bp, Homo sapien
gctgcatagaggttttacacttttg

SEQ ID NO: 2077940 - DNA, 25 bp, Homo sapien
taagaaatcatgtggatgattttta

SEQ ID NO: 2077941 - DNA, 25 bp, Homo sapien
aataagaaatcatgtggatgatttt

SEQ ID NO: 2077942 - DNA, 25 bp, Homo sapien
aaataagaaatcatgtggatgattt

SEQ ID NO: 2077943 - DNA, 25 bp, Homo sapien
taaataagaaatcatgtggatgatt

SEQ ID NO: 2077944 - DNA, 25 bp, Homo sapien
ggcctctcattggagagactaggac

SEQ ID NO: 2077945 - DNA, 25 bp, Homo sapien
gccaaaaggcctctcattggagaga

SEQ ID NO: 2077946 - DNA, 25 bp, Homo sapien
caaaaggcctctcattggagagact

SEQ ID NO: 2077947 - DNA, 25 bp, Homo sapien
ctctcattggagagactaggaccat

SEQ ID NO: 2077948 - DNA, 25 bp, Homo sapien
gacattgccaggaactccctctgtg

SEQ ID NO: 2077949 - DNA, 25 bp, Homo sapien
ggtgacattgccaggaactccctct

SEQ ID NO: 2077950 - DNA, 25 bp, Homo sapien
ttgccaggaactccctctgtggcct

SEQ ID NO: 2077951 - DNA, 25 bp, Homo sapien
ggcagaggtgacattgccaggaact

SEQ ID NO: 2077952 - DNA, 25 bp, Homo sapien
tcttggtgaatatgaccactgtctc

SEQ ID NO: 2077953 - DNA, 25 bp, Homo sapien
tctgtaatgctcgtctctcctccat

SEQ ID NO: 2077954 - DNA, 25 bp, Homo sapien
ctctctgtgactgtatagccagtta

SEQ ID NO: 2077955 - DNA, 25 bp, Homo sapien
ttatgcgaaccctctgtaatgctcg

SEQ ID NO: 2077956 - DNA, 25 bp, Homo sapien
agcagagaatatttgtagatgttgg

SEQ ID NO: 2077957 - DNA, 25 bp, Homo sapien
agaatatttgtagatgttggactgg

SEQ ID NO: 2077958 - DNA, 25 bp, Homo sapien
atttgtagatgttggactggaagct

SEQ ID NO: 2077959 - DNA, 25 bp, Homo sapien
tttgtagatgttggactggaagctt

SEQ ID NO: 2077960 - DNA, 25 bp, Homo sapien
acggcagcggctccacacacaaaga

SEQ ID NO: 2077961 - DNA, 25 bp, Homo sapien
ggcagcggctccacacacaaagatc

SEQ ID NO: 2077962 - DNA, 25 bp, Homo sapien
agcggctccacacacaaagatcttc

SEQ ID NO: 2077963 - DNA, 25 bp, Homo sapien
cagcggctccacacacaaagatctt

SEQ ID NO: 2077964 - DNA, 25 bp, Homo sapien
aaaatactggattggaacttgcacc

SEQ ID NO: 2077965 - DNA, 25 bp, Homo sapien
gcagactgcctagccctaaaagctt

SEQ ID NO: 2077966 - DNA, 25 bp, Homo sapien
ctcgtatacgcttcaatctgtggca

SEQ ID NO: 2077967 - DNA, 25 bp, Homo sapien
tgacatgtgataaaagcagactgcc

SEQ ID NO: 2077968 - DNA, 25 bp, Homo sapien
ggttacattgttacacaaagaacaa

SEQ ID NO: 2077969 - DNA, 25 bp, Homo sapien
cctttttgattgctttgggattagt

SEQ ID NO: 2077970 - DNA, 25 bp, Homo sapien
tttgattgctttgggattagtgaca

SEQ ID NO: 2077971 - DNA, 25 bp, Homo sapien
tctcctttttgattgctttgggatt

SEQ ID NO: 2077972 - DNA, 25 bp, Homo sapien
aaggatttgtaacagtgctcctggg

SEQ ID NO: 2077973 - DNA, 25 bp, Homo sapien
taatgttgtacgagatgccaaaaca

SEQ ID NO: 2077974 - DNA, 25 bp, Homo sapien
tcttaataatgttgtacgagatgcc

SEQ ID NO: 2077975 - DNA, 25 bp, Homo sapien
tgccaaaacaagaaggatttgtaac

SEQ ID NO: 2077976 - DNA, 25 bp, Homo sapien
caggagagtgtcaatgcatcccttt

SEQ ID NO: 2077977 - DNA, 25 bp, Homo sapien
gtggcttctcgccaggtgcatgcag

SEQ ID NO: 2077978 - DNA, 25 bp, Homo sapien
gtgcatgcaggagagtgtcaatgca

SEQ ID NO: 2077979 - DNA, 25 bp, Homo sapien
caccaatatctttaaccacagtgac

SEQ ID NO: 2077980 - DNA, 25 bp, Homo sapien
tagaggccaggttcccgaggaattg

SEQ ID NO: 2077981 - DNA, 25 bp, Homo sapien
cactgtgcgctcactcagaggtgga

SEQ ID NO: 2077982 - DNA, 25 bp, Homo sapien
aggagctctccttccgttgggacga

SEQ ID NO: 2077983 - DNA, 25 bp, Homo sapien
ggctttgaagcacctgatcactgtg

SEQ ID NO: 2077984 - DNA, 25 bp, Homo sapien
caccaagaagcccgagaatgtggag

SEQ ID NO: 2077985 - DNA, 25 bp, Homo sapien
tggagtatttccagccccccatgag

SEQ ID NO: 2077986 - DNA, 25 bp, Homo sapien
aatgtggagtatttccagcccccca

SEQ ID NO: 2077987 - DNA, 25 bp, Homo sapien
aacaccaagaagcccgagaatgtgg

SEQ ID NO: 2077988 - DNA, 25 bp, Homo sapien
gagatcactgggtagccattctgca

SEQ ID NO: 2077989 - DNA, 25 bp, Homo sapien
tggtctcctgcaaaggccgagatca

SEQ ID NO: 2077990 - DNA, 25 bp, Homo sapien
tctctggtgacatcctggtctcctg

SEQ ID NO: 2077991 - DNA, 25 bp, Homo sapien
catgagcagcagcacgccattgcta

SEQ ID NO: 2077992 - DNA, 25 bp, Homo sapien
tatactggaagcaagatcaaagtgg

SEQ ID NO: 2077993 - DNA, 25 bp, Homo sapien
tctcggtgctacaaatatactggaa

SEQ ID NO: 2077994 - DNA, 25 bp, Homo sapien
tatacactttgaccacgtggaagct

SEQ ID NO: 2077995 - DNA, 25 bp, Homo sapien
ttgtctgttatacactttgaccacg

SEQ ID NO: 2077996 - DNA, 25 bp, Homo sapien
gaaaaagaagagggaacacagcaca

SEQ ID NO: 2077997 - DNA, 25 bp, Homo sapien
ctgaaaaagaagagggaacacagca

SEQ ID NO: 2077998 - DNA, 25 bp, Homo sapien
aaaaagaagagggaacacagcacac

SEQ ID NO: 2077999 - DNA, 25 bp, Homo sapien
tgaaaaagaagagggaacacagcac

SEQ ID NO: 2078000 - DNA, 25 bp, Homo sapien
ccctcctcggtgtatgttttcatca

SEQ ID NO: 2078001 - DNA, 25 bp, Homo sapien
ttcatcagcggctgggaacacaaat

SEQ ID NO: 2078002 - DNA, 25 bp, Homo sapien
ggcaagcccctcctcggtgtatgtt

SEQ ID NO: 2078003 - DNA, 25 bp, Homo sapien
tcatccttggataaccagcaacact

SEQ ID NO: 2078004 - DNA, 25 bp, Homo sapien
tggaatgtgcgcatgaccctgcaga

SEQ ID NO: 2078005 - DNA, 25 bp, Homo sapien
cagaatttcaagagtggcgggaccc

SEQ ID NO: 2078006 - DNA, 25 bp, Homo sapien
gaataacatgcagttcccagcgcaa

SEQ ID NO: 2078007 - DNA, 25 bp, Homo sapien
gaataaatagagaaccggcagcttg

SEQ ID NO: 2078008 - DNA, 25 bp, Homo sapien
tggtgctccgcgtggcggagaaggc

SEQ ID NO: 2078009 - DNA, 25 bp, Homo sapien
agcgcacggagatgcctagggagga

SEQ ID NO: 2078010 - DNA, 25 bp, Homo sapien
gtcatggtgcggttgctcatctcgg

SEQ ID NO: 2078011 - DNA, 25 bp, Homo sapien
tccgccgacgggctggagtcgcaca

SEQ ID NO: 2078012 - DNA, 25 bp, Homo sapien
ggcgcccgggcatcatcagccgcag

SEQ ID NO: 2078013 - DNA, 25 bp, Homo sapien
ccgggcatcatcagccgcagcccga

SEQ ID NO: 2078014 - DNA, 25 bp, Homo sapien
cccaggcaggatccgcagccgcccg

SEQ ID NO: 2078015 - DNA, 25 bp, Homo sapien
atcatcagccgcagcccgagtggcc

SEQ ID NO: 2078016 - DNA, 25 bp, Homo sapien
cccggctctgacgttcaaggccagg

SEQ ID NO: 2078017 - DNA, 25 bp, Homo sapien
aaggaacgcgcggagctcgcagcag

SEQ ID NO: 2078018 - DNA, 25 bp, Homo sapien
gctctgacgttcaaggccagggtcg

SEQ ID NO: 2078019 - DNA, 25 bp, Homo sapien
gaacgcgcggagctcgcagcagcct

SEQ ID NO: 2078020 - DNA, 25 bp, Homo sapien
cagggcacagaacccaaagccttac

SEQ ID NO: 2078021 - DNA, 25 bp, Homo sapien
tgtcagggcacagaacccaaagcct

SEQ ID NO: 2078022 - DNA, 25 bp, Homo sapien
ctgtcagggcacagaacccaaagcc

SEQ ID NO: 2078023 - DNA, 25 bp, Homo sapien
tcagggcacagaacccaaagcctta

SEQ ID NO: 2078024 - DNA, 25 bp, Homo sapien
cgatctggcacaacaggtccggaga

SEQ ID NO: 2078025 - DNA, 25 bp, Homo sapien
acagccaacccgctttccgatctgg

SEQ ID NO: 2078026 - DNA, 25 bp, Homo sapien
ccgctttccgatctggcacaacagg

SEQ ID NO: 2078027 - DNA, 25 bp, Homo sapien
ggcacaacaggtccggagaaacgcc

SEQ ID NO: 2078028 - DNA, 25 bp, Homo sapien
agggggccgcgcttctgcaggtcct

SEQ ID NO: 2078029 - DNA, 25 bp, Homo sapien
ggagggggccgcgcttctgcaggtc

SEQ ID NO: 2078030 - DNA, 25 bp, Homo sapien
agggagggggccgcgcttctgcagg

SEQ ID NO: 2078031 - DNA, 25 bp, Homo sapien
gggggccgcgcttctgcaggtcctc

SEQ ID NO: 2078032 - DNA, 25 bp, Homo sapien
gtccctgcagccactagcgagcccc

SEQ ID NO: 2078033 - DNA, 25 bp, Homo sapien
cactagcgagcccccttgggtgaaa

SEQ ID NO: 2078034 - DNA, 25 bp, Homo sapien
ctgcagccactagcgagcccccttg

SEQ ID NO: 2078035 - DNA, 25 bp, Homo sapien
agccactagcgagcccccttgggtg

SEQ ID NO: 2078036 - DNA, 25 bp, Homo sapien
gataaatatccgctgtccgcagccc

SEQ ID NO: 2078037 - DNA, 25 bp, Homo sapien
gcgcccgtctgcacttttgccccgt

SEQ ID NO: 2078038 - DNA, 25 bp, Homo sapien
agcagacaggccatttcaataccag

SEQ ID NO: 2078039 - DNA, 25 bp, Homo sapien
cgatcctacatgatttcccttctct

SEQ ID NO: 2078040 - DNA, 25 bp, Homo sapien
ctggaccagggagagtcttcgttaa

SEQ ID NO: 2078041 - DNA, 25 bp, Homo sapien
cttcgttaaaatccacgcagaaggc

SEQ ID NO: 2078042 - DNA, 25 bp, Homo sapien
ggagagtcttcgttaaaatccacgc

SEQ ID NO: 2078043 - DNA, 25 bp, Homo sapien
cagggagagtcttcgttaaaatcca

SEQ ID NO: 2078044 - DNA, 25 bp, Homo sapien
gagctccgctgtccgcgaagttgct

SEQ ID NO: 2078045 - DNA, 25 bp, Homo sapien
atgctgggcgagctccgctgtccgc

SEQ ID NO: 2078046 - DNA, 25 bp, Homo sapien
ggcgagctccgctgtccgcgaagtt

SEQ ID NO: 2078047 - DNA, 25 bp, Homo sapien
gaacatccatgctgggcgagctccg

SEQ ID NO: 2078048 - DNA, 25 bp, Homo sapien
cttagagaaaatgaggcgagtggga

SEQ ID NO: 2078049 - DNA, 25 bp, Homo sapien
gaggaggacacggagcgcgaccctg

SEQ ID NO: 2078050 - DNA, 25 bp, Homo sapien
gcgcgaccctgctcccagcgcgtgg

SEQ ID NO: 2078051 - DNA, 25 bp, Homo sapien
agcgcgtggccaataaccgcgccgc

SEQ ID NO: 2078052 - DNA, 25 bp, Homo sapien
tcttaatattgaatggcgtgaccac

SEQ ID NO: 2078053 - DNA, 25 bp, Homo sapien
cctccggcccgggtctgtgtgtctg

SEQ ID NO: 2078054 - DNA, 25 bp, Homo sapien
tactcccagacgtctcttttgaaaa

SEQ ID NO: 2078055 - DNA, 25 bp, Homo sapien
gcgtgaccactttcataatgacagg

SEQ ID NO: 2078056 - DNA, 25 bp, Homo sapien
gccacctgcgggtgcccgggcctcc

SEQ ID NO: 2078057 - DNA, 25 bp, Homo sapien
ggcgccacctgcgggtgcccgggcc

SEQ ID NO: 2078058 - DNA, 25 bp, Homo sapien
gtggggcgccacctgcgggtgcccg

SEQ ID NO: 2078059 - DNA, 25 bp, Homo sapien
tggggcgccacctgcgggtgcccgg

SEQ ID NO: 2078060 - DNA, 25 bp, Homo sapien
agtcctggccgcaaggctgaggttt

SEQ ID NO: 2078061 - DNA, 25 bp, Homo sapien
tctttcaccccaaaagcagcgctga

SEQ ID NO: 2078062 - DNA, 25 bp, Homo sapien
gaccggcggactccgacagaagacg

SEQ ID NO: 2078063 - DNA, 25 bp, Homo sapien
tgcggaccggcggactccgacagaa

SEQ ID NO: 2078064 - DNA, 25 bp, Homo sapien
tttcacaaaagatgttgagatgctc

SEQ ID NO: 2078065 - DNA, 25 bp, Homo sapien
aagtgaaagccagtgacatccacgt

SEQ ID NO: 2078066 - DNA, 25 bp, Homo sapien
gccagtgacatccacgttctccttt

SEQ ID NO: 2078067 - DNA, 25 bp, Homo sapien
gacatccacgttctcctttttcaca

SEQ ID NO: 2078068 - DNA, 25 bp, Homo sapien
caaatgtccatttatctctcctgtt

SEQ ID NO: 2078069 - DNA, 25 bp, Homo sapien
aagttttcaaatgtccatttatctc

SEQ ID NO: 2078070 - DNA, 25 bp, Homo sapien
ctgaatgattgtcaaatttgtccat

SEQ ID NO: 2078071 - DNA, 25 bp, Homo sapien
cataatgtgattgttaaaagttttc

SEQ ID NO: 2078072 - DNA, 25 bp, Homo sapien
gagccagtgcgtgcaaagtttccca

SEQ ID NO: 2078073 - DNA, 25 bp, Homo sapien
tatttctaacgtgctttggtgccat

SEQ ID NO: 2078074 - DNA, 25 bp, Homo sapien
tctggcctggtgctaattggtgtcc

SEQ ID NO: 2078075 - DNA, 25 bp, Homo sapien
tggtgccataacacagacggatcca

SEQ ID NO: 2078076 - DNA, 25 bp, Homo sapien
tttcaattcttctaaacagtgacac

SEQ ID NO: 2078077 - DNA, 25 bp, Homo sapien
tcaattcttctaaacagtgacactg

SEQ ID NO: 2078078 - DNA, 25 bp, Homo sapien
caattcttctaaacagtgacactgt

SEQ ID NO: 2078079 - DNA, 25 bp, Homo sapien
ctttcaattcttctaaacagtgaca

SEQ ID NO: 2078080 - DNA, 25 bp, Homo sapien
agaaaactccttcgtaagaatccat

SEQ ID NO: 2078081 - DNA, 25 bp, Homo sapien
tccttgtaaacaaatcctagaaaga

SEQ ID NO: 2078082 - DNA, 25 bp, Homo sapien
ctacttttcatacgacagctgcttt

SEQ ID NO: 2078083 - DNA, 25 bp, Homo sapien
catacgacagctgctttattccttg

SEQ ID NO: 2078084 - DNA, 25 bp, Homo sapien
tgagaagctgtaaaacagcaagttt

SEQ ID NO: 2078085 - DNA, 25 bp, Homo sapien
atgagaagctgtaaaacagcaagtt

SEQ ID NO: 2078086 - DNA, 25 bp, Homo sapien
gagaagctgtaaaacagcaagtttc

SEQ ID NO: 2078087 - DNA, 25 bp, Homo sapien
tctctggggtcttatcttgctctgt

SEQ ID NO: 2078088 - DNA, 25 bp, Homo sapien
taggcggtcttgagagatccaaaca

SEQ ID NO: 2078089 - DNA, 25 bp, Homo sapien
tggaatactcacagactaggcggtc

SEQ ID NO: 2078090 - DNA, 25 bp, Homo sapien
cctaaagagcccgattagctgcggg

SEQ ID NO: 2078091 - DNA, 25 bp, Homo sapien
gagcccgattagctgcgggagctct

SEQ ID NO: 2078092 - DNA, 25 bp, Homo sapien
ttgaactcatgaccgactgaggcag

SEQ ID NO: 2078093 - DNA, 25 bp, Homo sapien
attgaactcatgaccgactgaggca

SEQ ID NO: 2078094 - DNA, 25 bp, Homo sapien
tgtgattaattgtagaacaggttgt

SEQ ID NO: 2078095 - DNA, 25 bp, Homo sapien
tgattaattgtagaacaggttgttt

SEQ ID NO: 2078096 - DNA, 25 bp, Homo sapien
ttgtgattaattgtagaacaggttg

SEQ ID NO: 2078097 - DNA, 25 bp, Homo sapien
gtgattaattgtagaacaggttgtt

SEQ ID NO: 2078098 - DNA, 25 bp, Homo sapien
tctgaagtcaagtttcttctttcag

SEQ ID NO: 2078099 - DNA, 25 bp, Homo sapien
cttctttcagaagtccagctgcttc

SEQ ID NO: 2078100 - DNA, 25 bp, Homo sapien
ggtcttcataggcacaggatgaggg

SEQ ID NO: 2078101 - DNA, 25 bp, Homo sapien
tccctttctctctgactgagtctgg

SEQ ID NO: 2078102 - DNA, 25 bp, Homo sapien
ctggaaaataacagccaggagtctg

SEQ ID NO: 2078103 - DNA, 25 bp, Homo sapien
gaaaaacaaccgccggctgagccat

SEQ ID NO: 2078104 - DNA, 25 bp, Homo sapien
ctgaaaaacaaccgccggctgagcc

SEQ ID NO: 2078105 - DNA, 25 bp, Homo sapien
tgaaaaacaaccgccggctgagcca

SEQ ID NO: 2078106 - DNA, 25 bp, Homo sapien
tgtctaataataggatgcttgcctc

SEQ ID NO: 2078107 - DNA, 25 bp, Homo sapien
taataataggatgcttgcctctctc

SEQ ID NO: 2078108 - DNA, 25 bp, Homo sapien
tctaataataggatgcttgcctctc

SEQ ID NO: 2078109 - DNA, 25 bp, Homo sapien
ctgtctaataataggatgcttgcct

SEQ ID NO: 2078110 - DNA, 25 bp, Homo sapien
ggaaaatccagtgcagtcaaacagg

SEQ ID NO: 2078111 - DNA, 25 bp, Homo sapien
tacagattttgcaagtccctaagcg

SEQ ID NO: 2078112 - DNA, 25 bp, Homo sapien
cctaagcgtaagaagagtgacaagt

SEQ ID NO: 2078113 - DNA, 25 bp, Homo sapien
gacaagttgtccagataaacactct

SEQ ID NO: 2078114 - DNA, 25 bp, Homo sapien
gtcccagcagatctgaagaatgttg

SEQ ID NO: 2078115 - DNA, 25 bp, Homo sapien
aatgaaaatatgtcccagcagatct

SEQ ID NO: 2078116 - DNA, 25 bp, Homo sapien
aatgttgtccagtaaattcaattca

SEQ ID NO: 2078117 - DNA, 25 bp, Homo sapien
tgaagaatgttgtccagtaaattca

SEQ ID NO: 2078118 - DNA, 25 bp, Homo sapien
cagggccttctatcaagccaggaga

SEQ ID NO: 2078119 - DNA, 25 bp, Homo sapien
gggccttctatcaagccaggagacg

SEQ ID NO: 2078120 - DNA, 25 bp, Homo sapien
ggccttctatcaagccaggagacgc

SEQ ID NO: 2078121 - DNA, 25 bp, Homo sapien
gccttctatcaagccaggagacgct

SEQ ID NO: 2078122 - DNA, 25 bp, Homo sapien
ctggcaaattgatgtgctgacgtgc

SEQ ID NO: 2078123 - DNA, 25 bp, Homo sapien
gctgacgtgctgtgaattagcatcc

SEQ ID NO: 2078124 - DNA, 25 bp, Homo sapien
ttccttacacaaacaaacttctggc

SEQ ID NO: 2078125 - DNA, 25 bp, Homo sapien
tagttagcgtgatgggtaccttaaa

SEQ ID NO: 2078126 - DNA, 25 bp, Homo sapien
gttccatgtcgatcataaaatgaag

SEQ ID NO: 2078127 - DNA, 25 bp, Homo sapien
tctacattgttactctttatagatg

SEQ ID NO: 2078128 - DNA, 25 bp, Homo sapien
tgaggggggttactctacattgtta

SEQ ID NO: 2078129 - DNA, 25 bp, Homo sapien
catatattttatggtggacaagttc

SEQ ID NO: 2078130 - DNA, 25 bp, Homo sapien
tctttcagcagtacgtactatgttg

SEQ ID NO: 2078131 - DNA, 25 bp, Homo sapien
gaacctcacacgctgtaaggtggag

SEQ ID NO: 2078132 - DNA, 25 bp, Homo sapien
tccaatgaatggtcatttgaacctc

SEQ ID NO: 2078133 - DNA, 25 bp, Homo sapien
gaggttggcttcaaagcttgattca

SEQ ID NO: 2078134 - DNA, 25 bp, Homo sapien
taaaacactcaaaatggtgtttggc

SEQ ID NO: 2078135 - DNA, 25 bp, Homo sapien
gtgtttggcatgtgaccctcagtat

SEQ ID NO: 2078136 - DNA, 25 bp, Homo sapien
gaattgctaagatgaccaaggaaaa

SEQ ID NO: 2078137 - DNA, 25 bp, Homo sapien
cctcagtatgttcgctagtcaacca

SEQ ID NO: 2078138 - DNA, 25 bp, Homo sapien
tgtaaattaacaaagggcctcagat

SEQ ID NO: 2078139 - DNA, 25 bp, Homo sapien
tatctgtgactattaagagagggca

SEQ ID NO: 2078140 - DNA, 25 bp, Homo sapien
tagacagactgtgcaagctcaaaac

SEQ ID NO: 2078141 - DNA, 25 bp, Homo sapien
tatacagctcctgtaagcagtctgc

SEQ ID NO: 2078142 - DNA, 25 bp, Homo sapien
taattgccgccactttaatcaaggt

SEQ ID NO: 2078143 - DNA, 25 bp, Homo sapien
gagggaatctgacatgactcatttt

SEQ ID NO: 2078144 - DNA, 25 bp, Homo sapien
tattatgatattctgaggttgagga

SEQ ID NO: 2078145 - DNA, 25 bp, Homo sapien
gcaattagacaaaaccctaactcac

SEQ ID NO: 2078146 - DNA, 25 bp, Homo sapien
tatgaaattaacacagcaggctaac

SEQ ID NO: 2078147 - DNA, 25 bp, Homo sapien
gagaaaaggctacctccagacactg

SEQ ID NO: 2078148 - DNA, 25 bp, Homo sapien
agagcgctgcactcccaagtttgag

SEQ ID NO: 2078149 - DNA, 25 bp, Homo sapien
catttggacagaagtacgaagctta

SEQ ID NO: 2078150 - DNA, 25 bp, Homo sapien
aattcatctagtttgcaaagcctgc

SEQ ID NO: 2078151 - DNA, 25 bp, Homo sapien
aaatatccagtactgacatgcaggg

SEQ ID NO: 2078152 - DNA, 25 bp, Homo sapien
cagactgctctgttagtggaaggac

SEQ ID NO: 2078153 - DNA, 25 bp, Homo sapien
tgtatagtccataacctctagctgg

SEQ ID NO: 2078154 - DNA, 25 bp, Homo sapien
aatgaacatatcagtgtgcagcggg

SEQ ID NO: 2078155 - DNA, 25 bp, Homo sapien
ggccagcaaccaaattacgaaatga

SEQ ID NO: 2078156 - DNA, 25 bp, Homo sapien
taaggagcacttggtggccagcaac

SEQ ID NO: 2078157 - DNA, 25 bp, Homo sapien
tgtcttgccgaaggaataacaaatg

SEQ ID NO: 2078158 - DNA, 25 bp, Homo sapien
tacacgtagacaactgggattaatg

SEQ ID NO: 2078159 - DNA, 25 bp, Homo sapien
taaaggtatgtatcccgagaatcat

SEQ ID NO: 2078160 - DNA, 25 bp, Homo sapien
tacaagacagttgcaacaaaacaga

SEQ ID NO: 2078161 - DNA, 25 bp, Homo sapien
gaacccatcgtatttctaattgtga

SEQ ID NO: 2078162 - DNA, 25 bp, Homo sapien
tattcagattcatgtttgcttagag

SEQ ID NO: 2078163 - DNA, 25 bp, Homo sapien
tgcttagagacccaatgaggcagaa

SEQ ID NO: 2078164 - DNA, 25 bp, Homo sapien
ctagaccctagttgtgttgtattca

SEQ ID NO: 2078165 - DNA, 25 bp, Homo sapien
gaccctagttgtgttgtattcagat

SEQ ID NO: 2078166 - DNA, 25 bp, Homo sapien
catcaaaaaatctattgatactgac

SEQ ID NO: 2078167 - DNA, 25 bp, Homo sapien
tcaggttatagttgtcatcaaaaaa

SEQ ID NO: 2078168 - DNA, 25 bp, Homo sapien
ttgtcatcaaaaaatctattgatac

SEQ ID NO: 2078169 - DNA, 25 bp, Homo sapien
gtcatcaaaaaatctattgatactg

SEQ ID NO: 2078170 - DNA, 25 bp, Homo sapien
tctcttgtgctgaggttactgcggc

SEQ ID NO: 2078171 - DNA, 25 bp, Homo sapien
cagcctgtgactggtggtcggcacc

SEQ ID NO: 2078172 - DNA, 25 bp, Homo sapien
tgatcacgatgcaggaagtcacgcc

SEQ ID NO: 2078173 - DNA, 25 bp, Homo sapien
gacggctttatcgtgtctggacagc

SEQ ID NO: 2078174 - DNA, 25 bp, Homo sapien
ggcagaagaatgtgttgccttcaca

SEQ ID NO: 2078175 - DNA, 25 bp, Homo sapien
ctggagtccattgcagaccaaagta

SEQ ID NO: 2078176 - DNA, 25 bp, Homo sapien
tacacatgttactatggcagaagaa

SEQ ID NO: 2078177 - DNA, 25 bp, Homo sapien
ttttcatcccaaggatacacacagt

SEQ ID NO: 2078178 - DNA, 25 bp, Homo sapien
cctgaagcatctaccatgggcataa

SEQ ID NO: 2078179 - DNA, 25 bp, Homo sapien
ctgagataaatgatctgccgtgcga

SEQ ID NO: 2078180 - DNA, 25 bp, Homo sapien
cgattttcagaaacggtgccgtagt

SEQ ID NO: 2078181 - DNA, 25 bp, Homo sapien
gagtgctggcattcctctagagagg

SEQ ID NO: 2078182 - DNA, 25 bp, Homo sapien
cccaaacagttccctctctgttcat

SEQ ID NO: 2078183 - DNA, 25 bp, Homo sapien
caacccaaacagttccctctctgtt

SEQ ID NO: 2078184 - DNA, 25 bp, Homo sapien
acccaaacagttccctctctgttca

SEQ ID NO: 2078185 - DNA, 25 bp, Homo sapien
cccaacccaaacagttccctctctg

SEQ ID NO: 2078186 - DNA, 25 bp, Homo sapien
tggtcttccaatcaaggccacggtc

SEQ ID NO: 2078187 - DNA, 25 bp, Homo sapien
atcaaggccacggtctccaacgcag

SEQ ID NO: 2078188 - DNA, 25 bp, Homo sapien
agcatgtagtggctatgggcagcat

SEQ ID NO: 2078189 - DNA, 25 bp, Homo sapien
tctccaacgcagcatgtagtggcta

SEQ ID NO: 2078190 - DNA, 25 bp, Homo sapien
gacactgatgtttcaactatccatg

SEQ ID NO: 2078191 - DNA, 25 bp, Homo sapien
gatccttgatcatattctcctaaag

SEQ ID NO: 2078192 - DNA, 25 bp, Homo sapien
tatagatgtacctccgattttagtg

SEQ ID NO: 2078193 - DNA, 25 bp, Homo sapien
taatagctactttaatgcagaatcc

SEQ ID NO: 2078194 - DNA, 25 bp, Homo sapien
cttgtccctgggtttcaaaattgct

SEQ ID NO: 2078195 - DNA, 25 bp, Homo sapien
taaatcagggcagcaatctttgaca

SEQ ID NO: 2078196 - DNA, 25 bp, Homo sapien
ttgtgatgccataaatcagggcagc

SEQ ID NO: 2078197 - DNA, 25 bp, Homo sapien
accaacagccttgtgatgccataaa

SEQ ID NO: 2078198 - DNA, 25 bp, Homo sapien
ccagcaagcccaaaaccttgaggct

SEQ ID NO: 2078199 - DNA, 25 bp, Homo sapien
cagtcatgcccagtccaacagggag

SEQ ID NO: 2078200 - DNA, 25 bp, Homo sapien
tcatgcccagtccaacagggagaca

SEQ ID NO: 2078201 - DNA, 25 bp, Homo sapien
ataggacagtcatgcccagtccaac

SEQ ID NO: 2078202 - DNA, 25 bp, Homo sapien
tttaaacccaaacttcatcagaagc

SEQ ID NO: 2078203 - DNA, 25 bp, Homo sapien
agatttaaacccaaacttcatcaga

SEQ ID NO: 2078204 - DNA, 25 bp, Homo sapien
tgcatcagttccacaggcttcctaa

SEQ ID NO: 2078205 - DNA, 25 bp, Homo sapien
tcagaagctgctgcatcagttccac

SEQ ID NO: 2078206 - DNA, 25 bp, Homo sapien
tttcaaatcctccacggaactgctt

SEQ ID NO: 2078207 - DNA, 25 bp, Homo sapien
gccacagtgctacagaacttagctt

SEQ ID NO: 2078208 - DNA, 25 bp, Homo sapien
caagacccgtgcgtagcatgacatc

SEQ ID NO: 2078209 - DNA, 25 bp, Homo sapien
aaatcggctgtttcgactgccctca

SEQ ID NO: 2078210 - DNA, 25 bp, Homo sapien
ctcatagtccaagaatcgtaagtaa

SEQ ID NO: 2078211 - DNA, 25 bp, Homo sapien
tcatagtccaagaatcgtaagtaaa

SEQ ID NO: 2078212 - DNA, 25 bp, Homo sapien
catagtccaagaatcgtaagtaaat

SEQ ID NO: 2078213 - DNA, 25 bp, Homo sapien
ttacaatagagccatctttgtccag

SEQ ID NO: 2078214 - DNA, 25 bp, Homo sapien
tgttacaatagagccatctttgtcc

SEQ ID NO: 2078215 - DNA, 25 bp, Homo sapien
gcctgttacaatagagccatctttg

SEQ ID NO: 2078216 - DNA, 25 bp, Homo sapien
aagcctgttacaatagagccatctt

SEQ ID NO: 2078217 - DNA, 25 bp, Homo sapien
cacttgcaatcaacagcctcgctag

SEQ ID NO: 2078218 - DNA, 25 bp, Homo sapien
tgtatagactccacaattccttcgg

SEQ ID NO: 2078219 - DNA, 25 bp, Homo sapien
gccttccttcataatttgtatagac

SEQ ID NO: 2078220 - DNA, 25 bp, Homo sapien
ggtgctcggatgtaccacttgcaat

SEQ ID NO: 2078221 - DNA, 25 bp, Homo sapien
tggtaatggtttcaaagctccaagg

SEQ ID NO: 2078222 - DNA, 25 bp, Homo sapien
gtaatggtttcaaagctccaaggtc

SEQ ID NO: 2078223 - DNA, 25 bp, Homo sapien
caagtatttgtgtaggcttcgtggg

SEQ ID NO: 2078224 - DNA, 25 bp, Homo sapien
ggtgtactaaatgctgccccaggaa

SEQ ID NO: 2078225 - DNA, 25 bp, Homo sapien
tggtagacgacattacctacgacgt

SEQ ID NO: 2078226 - DNA, 25 bp, Homo sapien
gagatcaagatccacgtaagtaaat

SEQ ID NO: 2078227 - DNA, 25 bp, Homo sapien
gtgagctgaatgtgagactgtccag

SEQ ID NO: 2078228 - DNA, 25 bp, Homo sapien
gagactgtccagctccttctctact

SEQ ID NO: 2078229 - DNA, 25 bp, Homo sapien
tgtccagctccttctctactgaagg

SEQ ID NO: 2078230 - DNA, 25 bp, Homo sapien
tccagctccttctctactgaagggg

SEQ ID NO: 2078231 - DNA, 25 bp, Homo sapien
taggcatggtgctaacaaaattggc

SEQ ID NO: 2078232 - DNA, 25 bp, Homo sapien
tgtaagccgtccacagcatagagga

SEQ ID NO: 2078233 - DNA, 25 bp, Homo sapien
catagaggatcatgcatgtaagccg

SEQ ID NO: 2078234 - DNA, 25 bp, Homo sapien
caacttcagagacatcagtagcgcc

SEQ ID NO: 2078235 - DNA, 25 bp, Homo sapien
tccttctcgatatttcttagctgag

SEQ ID NO: 2078236 - DNA, 25 bp, Homo sapien
gatggtctgtcttcgtccttctcga

SEQ ID NO: 2078237 - DNA, 25 bp, Homo sapien
tccataccagtgactaacacatctg

SEQ ID NO: 2078238 - DNA, 25 bp, Homo sapien
gagcaataccatccacatccatgat

SEQ ID NO: 2078239 - DNA, 25 bp, Homo sapien
tacttgtattattgtcttggcagac

SEQ ID NO: 2078240 - DNA, 25 bp, Homo sapien
tctggtatttagagcttcggacaat

SEQ ID NO: 2078241 - DNA, 25 bp, Homo sapien
gaaaggcttagttgtgttacttgta

SEQ ID NO: 2078242 - DNA, 25 bp, Homo sapien
gactttaaaatcaatactctggtat

SEQ ID NO: 2078243 - DNA, 25 bp, Homo sapien
tcaactttctctcggaatgggcgaa

SEQ ID NO: 2078244 - DNA, 25 bp, Homo sapien
caaagtcatgttggagctacaggaa

SEQ ID NO: 2078245 - DNA, 25 bp, Homo sapien
tagatcaacgttctgggcaccacag

SEQ ID NO: 2078246 - DNA, 25 bp, Homo sapien
gaaacactctgtagatcctgctaag

SEQ ID NO: 2078247 - DNA, 25 bp, Homo sapien
tcccctatgacaggtatctctatga

SEQ ID NO: 2078248 - DNA, 25 bp, Homo sapien
catcccctatgacaggtatctctat

SEQ ID NO: 2078249 - DNA, 25 bp, Homo sapien
tatgacaggtatctctatgagagac

SEQ ID NO: 2078250 - DNA, 25 bp, Homo sapien
cctatgacaggtatctctatgagag

SEQ ID NO: 2078251 - DNA, 25 bp, Homo sapien
ctcttcttctagctgctgttttggt

SEQ ID NO: 2078252 - DNA, 25 bp, Homo sapien
ctactcttcttctagctgctgtttt

SEQ ID NO: 2078253 - DNA, 25 bp, Homo sapien
actcttcttctagctgctgttttgg

SEQ ID NO: 2078254 - DNA, 25 bp, Homo sapien
tactcttcttctagctgctgttttg

SEQ ID NO: 2078255 - DNA, 25 bp, Homo sapien
cttgcaattgcaattagtgtaaatc

SEQ ID NO: 2078256 - DNA, 25 bp, Homo sapien
tcaacggtcattaatattgttaact

SEQ ID NO: 2078257 - DNA, 25 bp, Homo sapien
gttcttatgccgatcacttaaattg

SEQ ID NO: 2078258 - DNA, 25 bp, Homo sapien
ttaactttactgtgctatggcttgc

SEQ ID NO: 2078259 - DNA, 25 bp, Homo sapien
tgaggtgtctgaaggtagctggaaa

SEQ ID NO: 2078260 - DNA, 25 bp, Homo sapien
tggaatggtgggaagcgagccagct

SEQ ID NO: 2078261 - DNA, 25 bp, Homo sapien
aaggcatcaggcaaatatgccatga

SEQ ID NO: 2078262 - DNA, 25 bp, Homo sapien
aagaggcagagccttaaagagtgcc

SEQ ID NO: 2078263 - DNA, 25 bp, Homo sapien
tccttcgttacatactgagaaagcc

SEQ ID NO: 2078264 - DNA, 25 bp, Homo sapien
cagctggagtgtttcttacatccca

SEQ ID NO: 2078265 - DNA, 25 bp, Homo sapien
tcaaagcccacaatagcagctggag

SEQ ID NO: 2078266 - DNA, 25 bp, Homo sapien
tgtccttgtgccagagtcagtaaga

SEQ ID NO: 2078267 - DNA, 25 bp, Homo sapien
tactcaagtagttgtaatggcatgc

SEQ ID NO: 2078268 - DNA, 25 bp, Homo sapien
gactatgaactcactgtatgaaagc

SEQ ID NO: 2078269 - DNA, 25 bp, Homo sapien
gaaagctagggtcttgcagatacta

SEQ ID NO: 2078270 - DNA, 25 bp, Homo sapien
tctacagtgttagcatagtggatca

SEQ ID NO: 2078271 - DNA, 25 bp, Homo sapien
gactcgtcaatattttcttaggaaa

SEQ ID NO: 2078272 - DNA, 25 bp, Homo sapien
gtttaggagaataaatagactcgtc

SEQ ID NO: 2078273 - DNA, 25 bp, Homo sapien
taagcctcaaattgtctgcaaattg

SEQ ID NO: 2078274 - DNA, 25 bp, Homo sapien
cagaagattttaccaagaagcccag

SEQ ID NO: 2078275 - DNA, 25 bp, Homo sapien
aacagtcccacttctggatggagcc

SEQ ID NO: 2078276 - DNA, 25 bp, Homo sapien
gatgggattcgacatagaggtaacc

SEQ ID NO: 2078277 - DNA, 25 bp, Homo sapien
taaccttaggactgacccaagcaag

SEQ ID NO: 2078278 - DNA, 25 bp, Homo sapien
catggaacgagctcatttctgtgct

SEQ ID NO: 2078279 - DNA, 25 bp, Homo sapien
ttttccatttaagagcctctgctag

SEQ ID NO: 2078280 - DNA, 25 bp, Homo sapien
tttccatttaagagcctctgctagg

SEQ ID NO: 2078281 - DNA, 25 bp, Homo sapien
cttttccatttaagagcctctgcta

SEQ ID NO: 2078282 - DNA, 25 bp, Homo sapien
ttccatttaagagcctctgctaggg

SEQ ID NO: 2078283 - DNA, 25 bp, Homo sapien
gttccgttctgattcagttgttcgc

SEQ ID NO: 2078284 - DNA, 25 bp, Homo sapien
atggaaaaatctccaagagttccgt

SEQ ID NO: 2078285 - DNA, 25 bp, Homo sapien
tcagttgttcgcagcagtgaaatct

SEQ ID NO: 2078286 - DNA, 25 bp, Homo sapien
tgattcagttgttcgcagcagtgaa

SEQ ID NO: 2078287 - DNA, 25 bp, Homo sapien
agttcaatgcactgtcttggagcgg

SEQ ID NO: 2078288 - DNA, 25 bp, Homo sapien
gaaaagccaaaaggtccatctcgaa

SEQ ID NO: 2078289 - DNA, 25 bp, Homo sapien
gatcaaatttgcactcccaagacgg

SEQ ID NO: 2078290 - DNA, 25 bp, Homo sapien
ttgtatcgagctgaaaatcccatag

SEQ ID NO: 2078291 - DNA, 25 bp, Homo sapien
caagttccacactgcactgacttct

SEQ ID NO: 2078292 - DNA, 25 bp, Homo sapien
gatgtagatgcattcccggtcaggg

SEQ ID NO: 2078293 - DNA, 25 bp, Homo sapien
gatagttgggagaggtaaagatacc

SEQ ID NO: 2078294 - DNA, 25 bp, Homo sapien
ctctgcatgttttgtccaagttcca

SEQ ID NO: 2078295 - DNA, 25 bp, Homo sapien
tcctttcttggttgccccagacaaa

SEQ ID NO: 2078296 - DNA, 25 bp, Homo sapien
cctttcttggttgccccagacaaat

SEQ ID NO: 2078297 - DNA, 25 bp, Homo sapien
tggaggatgattaaacttgctacaa

SEQ ID NO: 2078298 - DNA, 25 bp, Homo sapien
cagacaaatggaggatgattaaact

SEQ ID NO: 2078299 - DNA, 25 bp, Homo sapien
ccttagggaatggctctgccagcat

SEQ ID NO: 2078300 - DNA, 25 bp, Homo sapien
tcctgacatactgcagtgtggctgt

SEQ ID NO: 2078301 - DNA, 25 bp, Homo sapien
ttcctgacatactgcagtgtggctg

SEQ ID NO: 2078302 - DNA, 25 bp, Homo sapien
gctacctcctgtactgcgaacaggg

SEQ ID NO: 2078303 - DNA, 25 bp, Homo sapien
aaagcgacatcagcggtctccaggg

SEQ ID NO: 2078304 - DNA, 25 bp, Homo sapien
gggtggaagctgaccctcgcccttc

SEQ ID NO: 2078305 - DNA, 25 bp, Homo sapien
ggtgtgccttctgctacctcctgta

SEQ ID NO: 2078306 - DNA, 25 bp, Homo sapien
cacctgcgccctcgcttgggccaat

SEQ ID NO: 2078307 - DNA, 25 bp, Homo sapien
tcgcttgggccaatctctgccgcac

SEQ ID NO: 2078308 - DNA, 25 bp, Homo sapien
gctttccacctgcgccctcgcttgg

SEQ ID NO: 2078309 - DNA, 25 bp, Homo sapien
tgcgccctcgcttgggccaatctct

SEQ ID NO: 2078310 - DNA, 25 bp, Homo sapien
cgcactgaaagaccgttctccggca

SEQ ID NO: 2078311 - DNA, 25 bp, Homo sapien
gggttcctgcgcactgaaagaccgt

SEQ ID NO: 2078312 - DNA, 25 bp, Homo sapien
ctgaactgcacgctatcctccaccc

SEQ ID NO: 2078313 - DNA, 25 bp, Homo sapien
caggttttgggatccggcgacggct

SEQ ID NO: 2078314 - DNA, 25 bp, Homo sapien
ccggagcgcggcgcagaggcttttc

SEQ ID NO: 2078315 - DNA, 25 bp, Homo sapien
ctgcaatacagaaagtttacgtcgg

SEQ ID NO: 2078316 - DNA, 25 bp, Homo sapien
gacccgcgcgggactgcagggtccg

SEQ ID NO: 2078317 - DNA, 25 bp, Homo sapien
gcaatacagaaagtttacgtcggcc

SEQ ID NO: 2078318 - DNA, 25 bp, Homo sapien
gtgaagcacgctgcgcccatggatc

SEQ ID NO: 2078319 - DNA, 25 bp, Homo sapien
tgaagcacgctgcgcccatggatca

SEQ ID NO: 2078320 - DNA, 25 bp, Homo sapien
tgtgaagcacgctgcgcccatggat

SEQ ID NO: 2078321 - DNA, 25 bp, Homo sapien
gaagcacgctgcgcccatggatcat

SEQ ID NO: 2078322 - DNA, 25 bp, Homo sapien
tccatttagagacgggaagacttcc

SEQ ID NO: 2078323 - DNA, 25 bp, Homo sapien
tcgagaggtgttaaagacgcaaagc

SEQ ID NO: 2078324 - DNA, 25 bp, Homo sapien
gctgcagccagatccggatgagtcc

SEQ ID NO: 2078325 - DNA, 25 bp, Homo sapien
tctgtgcgttacaccagaggctccg

SEQ ID NO: 2078326 - DNA, 25 bp, Homo sapien
ccgggcgccggccgccaccatccgc

SEQ ID NO: 2078327 - DNA, 25 bp, Homo sapien
ccgcgccgccgccgtcaggaccctc

SEQ ID NO: 2078328 - DNA, 25 bp, Homo sapien
tccgcgccgccgccgtcaggaccct

SEQ ID NO: 2078329 - DNA, 25 bp, Homo sapien
ggcgccggccgccaccatccgcgcc

SEQ ID NO: 2078330 - DNA, 25 bp, Homo sapien
agtccagaccgacggcagcgacgga

SEQ ID NO: 2078331 - DNA, 25 bp, Homo sapien
ctcccgggcatcgtcgccgccgcgg

SEQ ID NO: 2078332 - DNA, 25 bp, Homo sapien
gcgcagcgaggtgggggccagtcca

SEQ ID NO: 2078333 - DNA, 25 bp, Homo sapien
cggtcgcagggcgagccccgggacg

SEQ ID NO: 2078334 - DNA, 25 bp, Homo sapien
gggatcttccgctgaggcattgaag

SEQ ID NO: 2078335 - DNA, 25 bp, Homo sapien
tccgtcatcggctcgccgggctgcg

SEQ ID NO: 2078336 - DNA, 25 bp, Homo sapien
agcctccccgggaggatgtccagcg

SEQ ID NO: 2078337 - DNA, 25 bp, Homo sapien
agaaggggtccgtcatcggctcgcc

SEQ ID NO: 2078338 - DNA, 25 bp, Homo sapien
ctgctatcttgcggaaagaggagcg

SEQ ID NO: 2078339 - DNA, 25 bp, Homo sapien
aatgggctccttagtcatggcttgg

SEQ ID NO: 2078340 - DNA, 25 bp, Homo sapien
tagtcatggcttggggctccacgac

SEQ ID NO: 2078341 - DNA, 25 bp, Homo sapien
gagttaccaaatgggctccttagtc

SEQ ID NO: 2078342 - DNA, 25 bp, Homo sapien
ccagtgctttctcgggcaatgcgtg

SEQ ID NO: 2078343 - DNA, 25 bp, Homo sapien
tgtggcctcccgctgatctttaatg

SEQ ID NO: 2078344 - DNA, 25 bp, Homo sapien
gagtgtgcacgttctggacctagga

SEQ ID NO: 2078345 - DNA, 25 bp, Homo sapien
taatcaaccaagagactgggccaac

SEQ ID NO: 2078346 - DNA, 25 bp, Homo sapien
ggctggctgttcttgtggtgttttc

SEQ ID NO: 2078347 - DNA, 25 bp, Homo sapien
gctggctgttcttgtggtgttttct

SEQ ID NO: 2078348 - DNA, 25 bp, Homo sapien
acaggctcttgcctctcaagcttat

SEQ ID NO: 2078349 - DNA, 25 bp, Homo sapien
ttgcctctcaagcttatcttcactg

SEQ ID NO: 2078350 - DNA, 25 bp, Homo sapien
ctctcaagcttatcttcactgagct

SEQ ID NO: 2078351 - DNA, 25 bp, Homo sapien
ggctcttgcctctcaagcttatctt

SEQ ID NO: 2078352 - DNA, 25 bp, Homo sapien
cttcccttcctatttagatgacctt

SEQ ID NO: 2078353 - DNA, 25 bp, Homo sapien
ccttcctatttagatgacctttatt

SEQ ID NO: 2078354 - DNA, 25 bp, Homo sapien
tcccttcctatttagatgaccttta

SEQ ID NO: 2078355 - DNA, 25 bp, Homo sapien
tcttcccttcctatttagatgacct

SEQ ID NO: 2078356 - DNA, 25 bp, Homo sapien
catatttagatctccgctggctgct

SEQ ID NO: 2078357 - DNA, 25 bp, Homo sapien
gtggcatatttagatctccgctggc

SEQ ID NO: 2078358 - DNA, 25 bp, Homo sapien
actcagtggcatatttagatctccg

SEQ ID NO: 2078359 - DNA, 25 bp, Homo sapien
tagatctccgctggctgctagatgt

SEQ ID NO: 2078360 - DNA, 25 bp, Homo sapien
gtggcatatttagatctctgctggc

SEQ ID NO: 2078361 - DNA, 25 bp, Homo sapien
cagtggcatatttagatctctgctg

SEQ ID NO: 2078362 - DNA, 25 bp, Homo sapien
tggcatatttagatctctgctggct

SEQ ID NO: 2078363 - DNA, 25 bp, Homo sapien
actcagtggcatatttagatctctg

SEQ ID NO: 2078364 - DNA, 25 bp, Homo sapien
tttccagagtaaaatagtagattca

SEQ ID NO: 2078365 - DNA, 25 bp, Homo sapien
ctttccagagtaaaatagtagattc

SEQ ID NO: 2078366 - DNA, 25 bp, Homo sapien
ttccagagtaaaatagtagattcat

SEQ ID NO: 2078367 - DNA, 25 bp, Homo sapien
agagtcagaggtcccagcacgagca

SEQ ID NO: 2078368 - DNA, 25 bp, Homo sapien
tgttggacataaggaagtccagcct

SEQ ID NO: 2078369 - DNA, 25 bp, Homo sapien
ctgccgggagcctaggacagaagac

SEQ ID NO: 2078370 - DNA, 25 bp, Homo sapien
agagaggagggaccttcacgccctg

SEQ ID NO: 2078371 - DNA, 25 bp, Homo sapien
gaagttcttgttggttaactgcaat

SEQ ID NO: 2078372 - DNA, 25 bp, Homo sapien
tgcaatattgtgaagtcctgtggct

SEQ ID NO: 2078373 - DNA, 25 bp, Homo sapien
taatgcatacccttttctgattaaa

SEQ ID NO: 2078374 - DNA, 25 bp, Homo sapien
taatcttttgaattcggtcaatgcc

SEQ ID NO: 2078375 - DNA, 25 bp, Homo sapien
cagctgcttgttaggatgggcaaat

SEQ ID NO: 2078376 - DNA, 25 bp, Homo sapien
ttccagctgcttgttaggatgggca

SEQ ID NO: 2078377 - DNA, 25 bp, Homo sapien
ctgcttgttaggatgggcaaatgcc

SEQ ID NO: 2078378 - DNA, 25 bp, Homo sapien
aattccagctgcttgttaggatggg

SEQ ID NO: 2078379 - DNA, 25 bp, Homo sapien
ccataacgatgggtcctattgtcat

SEQ ID NO: 2078380 - DNA, 25 bp, Homo sapien
aggacgcccctctgtggacttcctt

SEQ ID NO: 2078381 - DNA, 25 bp, Homo sapien
cttccctccataacgatgggtccta

SEQ ID NO: 2078382 - DNA, 25 bp, Homo sapien
gttgccaaggtcaggacgcccctct

SEQ ID NO: 2078383 - DNA, 25 bp, Homo sapien
aatatactgctgggcaattgactga

SEQ ID NO: 2078384 - DNA, 25 bp, Homo sapien
atatactgctgggcaattgactgac

SEQ ID NO: 2078385 - DNA, 25 bp, Homo sapien
ttaatatactgctgggcaattgact

SEQ ID NO: 2078386 - DNA, 25 bp, Homo sapien
taatatactgctgggcaattgactg

SEQ ID NO: 2078387 - DNA, 25 bp, Homo sapien
tgtgcgaatagcatccatcagcaaa

SEQ ID NO: 2078388 - DNA, 25 bp, Homo sapien
gctgtgggcttccagttccagaaat

SEQ ID NO: 2078389 - DNA, 25 bp, Homo sapien
aacaacataataaacaggtgcagaa

SEQ ID NO: 2078390 - DNA, 25 bp, Homo sapien
atatgcagttgctgcaatggtggcc

SEQ ID NO: 2078391 - DNA, 25 bp, Homo sapien
cgcggttacgatgtataaggtgctc

SEQ ID NO: 2078392 - DNA, 25 bp, Homo sapien
atgagcactgctttcgcggttacga

SEQ ID NO: 2078393 - DNA, 25 bp, Homo sapien
gatgtataaggtgctcattcactcc

SEQ ID NO: 2078394 - DNA, 25 bp, Homo sapien
tccactgatgtgtattacataagtc

SEQ ID NO: 2078395 - DNA, 25 bp, Homo sapien
agttgttgttagatccaattttctc

SEQ ID NO: 2078396 - DNA, 25 bp, Homo sapien
gttgttgttagatccaattttctca

SEQ ID NO: 2078397 - DNA, 25 bp, Homo sapien
ttagttgttgttagatccaattttc

SEQ ID NO: 2078398 - DNA, 25 bp, Homo sapien
ttgttgttagatccaattttctcat

SEQ ID NO: 2078399 - DNA, 25 bp, Homo sapien
caggaaccagtcaccacttttgctc

SEQ ID NO: 2078400 - DNA, 25 bp, Homo sapien
gctatccacctcctcttgccgacat

SEQ ID NO: 2078401 - DNA, 25 bp, Homo sapien
gacttttgaccaggaaccagtcacc

SEQ ID NO: 2078402 - DNA, 25 bp, Homo sapien
ctttgtggatatttggacttttgac

SEQ ID NO: 2078403 - DNA, 25 bp, Homo sapien
ggcgacaacatcctgagccagtcct

SEQ ID NO: 2078404 - DNA, 25 bp, Homo sapien
catgctctgccacagtaggcgacaa

SEQ ID NO: 2078405 - DNA, 25 bp, Homo sapien
aagcgaccgtcatcagcaacagcat

SEQ ID NO: 2078406 - DNA, 25 bp, Homo sapien
cctggtgaagcgaccgtcatcagca

SEQ ID NO: 2078407 - DNA, 25 bp, Homo sapien
caagcaggctataatgaacgcagtg

SEQ ID NO: 2078408 - DNA, 25 bp, Homo sapien
agattacctctataattgttaagga

SEQ ID NO: 2078409 - DNA, 25 bp, Homo sapien
gcaggctataatgaacgcagtgcat

SEQ ID NO: 2078410 - DNA, 25 bp, Homo sapien
gttaaggatgttatacacaagcagg

SEQ ID NO: 2078411 - DNA, 25 bp, Homo sapien
ctcaccacggattttggcacctgtg

SEQ ID NO: 2078412 - DNA, 25 bp, Homo sapien
tggttcgtcagaacaccaaacccac

SEQ ID NO: 2078413 - DNA, 25 bp, Homo sapien
ttaatttctatggccttttcccatg

SEQ ID NO: 2078414 - DNA, 25 bp, Homo sapien
cggattttggcacctgtgaagttaa

SEQ ID NO: 2078415 - DNA, 25 bp, Homo sapien
attgtttgtcgtaaattgaactcct

SEQ ID NO: 2078416 - DNA, 25 bp, Homo sapien
aaacagttgtgatgaggagataaag

SEQ ID NO: 2078417 - DNA, 25 bp, Homo sapien
tgaaaaattgtttgtcgtaaattga

SEQ ID NO: 2078418 - DNA, 25 bp, Homo sapien
ttagacgatgaaaaattgtttgtcg

SEQ ID NO: 2078419 - DNA, 25 bp, Homo sapien
gcttttgcaggacattaaagttccc

SEQ ID NO: 2078420 - DNA, 25 bp, Homo sapien
gtgcttttgcaggacattaaagttc

SEQ ID NO: 2078421 - DNA, 25 bp, Homo sapien
tttgcaggacattaaagttcccagc

SEQ ID NO: 2078422 - DNA, 25 bp, Homo sapien
caggacattaaagttcccagctcca

SEQ ID NO: 2078423 - DNA, 25 bp, Homo sapien
caactggcagtttgaccagacttca

SEQ ID NO: 2078424 - DNA, 25 bp, Homo sapien
ctgttggatatgagcaaataaggca

SEQ ID NO: 2078425 - DNA, 25 bp, Homo sapien
ggccacaaattatataaacccagga

SEQ ID NO: 2078426 - DNA, 25 bp, Homo sapien
tatcccctggatttgctgtaaaacc

SEQ ID NO: 2078427 - DNA, 25 bp, Homo sapien
ttagctattcggtgactgcccctga

SEQ ID NO: 2078428 - DNA, 25 bp, Homo sapien
taatggtgatggacactcaagggct

SEQ ID NO: 2078429 - DNA, 25 bp, Homo sapien
tctgtgaggaatatcgcctacggtc

SEQ ID NO: 2078430 - DNA, 25 bp, Homo sapien
cattggcaagttctggagtcgctga

SEQ ID NO: 2078431 - DNA, 25 bp, Homo sapien
tgtccatgattttcccgtactttta

SEQ ID NO: 2078432 - DNA, 25 bp, Homo sapien
gccgttgagggtctccctggtaaca

SEQ ID NO: 2078433 - DNA, 25 bp, Homo sapien
taaatccgagtacaacaattgggac

SEQ ID NO: 2078434 - DNA, 25 bp, Homo sapien
ttgggactctcggtcacctctgctt

SEQ ID NO: 2078435 - DNA, 25 bp, Homo sapien
tacaaaactcatggtgtaaatccga

SEQ ID NO: 2078436 - DNA, 25 bp, Homo sapien
ctcttcgaatagctgagccaaatgt

SEQ ID NO: 2078437 - DNA, 25 bp, Homo sapien
tctcatgacagctgatcggctctca

SEQ ID NO: 2078438 - DNA, 25 bp, Homo sapien
gaatagctgagccaaatgttaattt

SEQ ID NO: 2078439 - DNA, 25 bp, Homo sapien
catgacagctgatcggctctcatct

SEQ ID NO: 2078440 - DNA, 25 bp, Homo sapien
aaagcgaaagccacatctcatgtgg

SEQ ID NO: 2078441 - DNA, 25 bp, Homo sapien
aagcgaaagccacatctcatgtggc

SEQ ID NO: 2078442 - DNA, 25 bp, Homo sapien
tagaggcattgtcatcatagagcag

SEQ ID NO: 2078443 - DNA, 25 bp, Homo sapien
cattagtgcttgctcaaaatgctgg

SEQ ID NO: 2078444 - DNA, 25 bp, Homo sapien
tgatcaattagtaccatcagctgtg

SEQ ID NO: 2078445 - DNA, 25 bp, Homo sapien
tgttgaaaccccaatccctgtatga

SEQ ID NO: 2078446 - DNA, 25 bp, Homo sapien
aaactacattcttggtggtactaga

SEQ ID NO: 2078447 - DNA, 25 bp, Homo sapien
ttatgccccgaggtccaaagcctga

SEQ ID NO: 2078448 - DNA, 25 bp, Homo sapien
tggcatttgcaactggaaataacga

SEQ ID NO: 2078449 - DNA, 25 bp, Homo sapien
caaagcctgagttaatctaatgacc

SEQ ID NO: 2078450 - DNA, 25 bp, Homo sapien
cagggaaatacctcattactcagca

SEQ ID NO: 2078451 - DNA, 25 bp, Homo sapien
aaaggatgagattgactccaagtgt

SEQ ID NO: 2078452 - DNA, 25 bp, Homo sapien
ctcagcactgcatcaaaaggatgag

SEQ ID NO: 2078453 - DNA, 25 bp, Homo sapien
gcatcaaaaggatgagattgactcc

SEQ ID NO: 2078454 - DNA, 25 bp, Homo sapien
aagtcagagccttctaggagcccgc

SEQ ID NO: 2078455 - DNA, 25 bp, Homo sapien
tagactgtggtggatccctgaggaa

SEQ ID NO: 2078456 - DNA, 25 bp, Homo sapien
tagctgcgacgagactacaaagttg

SEQ ID NO: 2078457 - DNA, 25 bp, Homo sapien
tacagggagcagtggtacatttacc

SEQ ID NO: 2078458 - DNA, 25 bp, Homo sapien
ctcctccaatgggaacggtggctct

SEQ ID NO: 2078459 - DNA, 25 bp, Homo sapien
caatgggaacggtggctctcatcag

SEQ ID NO: 2078460 - DNA, 25 bp, Homo sapien
ttgccctcctccaatgggaacggtg

SEQ ID NO: 2078461 - DNA, 25 bp, Homo sapien
aacggtggctctcatcagtccccat

SEQ ID NO: 2078462 - DNA, 25 bp, Homo sapien
gacatcatgtacaaacccagaggcc

SEQ ID NO: 2078463 - DNA, 25 bp, Homo sapien
taatccagtgattagggcttgaact

SEQ ID NO: 2078464 - DNA, 25 bp, Homo sapien
ttagtgatgatacagccacccctgg

SEQ ID NO: 2078465 - DNA, 25 bp, Homo sapien
cctgaacaggctgataggatcttca

SEQ ID NO: 2078466 - DNA, 25 bp, Homo sapien
caaggttgctggcttgaatcgcagg

SEQ ID NO: 2078467 - DNA, 25 bp, Homo sapien
tgctggcttgaatcgcaggtagtat

SEQ ID NO: 2078468 - DNA, 25 bp, Homo sapien
gaatcgcaggtagtatgggctccac

SEQ ID NO: 2078469 - DNA, 25 bp, Homo sapien
tcagggagattccaaggttgctggc

SEQ ID NO: 2078470 - DNA, 25 bp, Homo sapien
ggatctataggattctctttgttcc

SEQ ID NO: 2078471 - DNA, 25 bp, Homo sapien
ttaggatctataggattctctttgt

SEQ ID NO: 2078472 - DNA, 25 bp, Homo sapien
gatctataggattctctttgttcct

SEQ ID NO: 2078473 - DNA, 25 bp, Homo sapien
aggatctataggattctctttgttc

SEQ ID NO: 2078474 - DNA, 25 bp, Homo sapien
caggttcaccggaaaaaccatgtgg

SEQ ID NO: 2078475 - DNA, 25 bp, Homo sapien
catcgctgaagaattttacatcggc

SEQ ID NO: 2078476 - DNA, 25 bp, Homo sapien
tccccaggctcaaggctattcggca

SEQ ID NO: 2078477 - DNA, 25 bp, Homo sapien
ttacatcggctgtgataattcccca

SEQ ID NO: 2078478 - DNA, 25 bp, Homo sapien
tgaagtcactgttgacctcattggg

SEQ ID NO: 2078479 - DNA, 25 bp, Homo sapien
gcttgtgaaatcaggaaaactgtga

SEQ ID NO: 2078480 - DNA, 25 bp, Homo sapien
ggaagtcacatacacaaccattttg

SEQ ID NO: 2078481 - DNA, 25 bp, Homo sapien
cctgagcagctgagtattttattca

SEQ ID NO: 2078482 - DNA, 25 bp, Homo sapien
tgattcagagctgggtccggttctt

SEQ ID NO: 2078483 - DNA, 25 bp, Homo sapien
tattagagactacaaaatatggtgt

SEQ ID NO: 2078484 - DNA, 25 bp, Homo sapien
gactacaaaatatggtgttcatggg

SEQ ID NO: 2078485 - DNA, 25 bp, Homo sapien
taagagatattagagactacaaaat

SEQ ID NO: 2078486 - DNA, 25 bp, Homo sapien
ggtgttcatggggtaaagatgacaa

SEQ ID NO: 2078487 - DNA, 25 bp, Homo sapien
ttcagctggcacttgttgcagaaat

SEQ ID NO: 2078488 - DNA, 25 bp, Homo sapien
atttcagctggcacttgttgcagaa

SEQ ID NO: 2078489 - DNA, 25 bp, Homo sapien
acagctctttgcaatcatctggaaa

SEQ ID NO: 2078490 - DNA, 25 bp, Homo sapien
aaacagctctttgcaatcatctgga

SEQ ID NO: 2078491 - DNA, 25 bp, Homo sapien
tctgggaaaactgaattgtcgcaca

SEQ ID NO: 2078492 - DNA, 25 bp, Homo sapien
tcttcgaccctaagaaacattgagg

SEQ ID NO: 2078493 - DNA, 25 bp, Homo sapien
tctgtaccaagtctgagtgtgtgct

SEQ ID NO: 2078494 - DNA, 25 bp, Homo sapien
ttatacatgcatatttacggtggcc

SEQ ID NO: 2078495 - DNA, 25 bp, Homo sapien
caaattcagcaaacacaatctgcca

SEQ ID NO: 2078496 - DNA, 25 bp, Homo sapien
gcctgagagcatgactaactattat

SEQ ID NO: 2078497 - DNA, 25 bp, Homo sapien
catggtgacttcttcgtcaatcaaa

SEQ ID NO: 2078498 - DNA, 25 bp, Homo sapien
tgctttccaaatggttcactgtgat

SEQ ID NO: 2078499 - DNA, 25 bp, Homo sapien
taatcctcatggcaaacttattagt

SEQ ID NO: 2078500 - DNA, 25 bp, Homo sapien
cattatgatccatatttttgcaggt

SEQ ID NO: 2078501 - DNA, 25 bp, Homo sapien
aacaactcgtgatgatacagctaag

SEQ ID NO: 2078502 - DNA, 25 bp, Homo sapien
agataacattgaatccaggcagcct

SEQ ID NO: 2078503 - DNA, 25 bp, Homo sapien
cactgctggtctgcagctacctgct

SEQ ID NO: 2078504 - DNA, 25 bp, Homo sapien
tctttagcaagtcctccttgcactg

SEQ ID NO: 2078505 - DNA, 25 bp, Homo sapien
tccttgcactgctggtctgcagcta

SEQ ID NO: 2078506 - DNA, 25 bp, Homo sapien
tcttctttagcaagtcctccttgca

SEQ ID NO: 2078507 - DNA, 25 bp, Homo sapien
tctgctcatctactctgagtgggaa

SEQ ID NO: 2078508 - DNA, 25 bp, Homo sapien
tgctcatctactctgagtgggaaca

SEQ ID NO: 2078509 - DNA, 25 bp, Homo sapien
gctcatctactctgagtgggaacag

SEQ ID NO: 2078510 - DNA, 25 bp, Homo sapien
ggaacagagagctcaaatacctgac

SEQ ID NO: 2078511 - DNA, 25 bp, Homo sapien
gtgtctatctgcttccacacatcta

SEQ ID NO: 2078512 - DNA, 25 bp, Homo sapien
tgctttctgtcctcacggattatca

SEQ ID NO: 2078513 - DNA, 25 bp, Homo sapien
tcactgttttcgtactttgttctct

SEQ ID NO: 2078514 - DNA, 25 bp, Homo sapien
tcctcacggattatcaaggtgtttt

SEQ ID NO: 2078515 - DNA, 25 bp, Homo sapien
caaaatctagtagatgagaacactt

SEQ ID NO: 2078516 - DNA, 25 bp, Homo sapien
attgggatcatcaaaatctagtaga

SEQ ID NO: 2078517 - DNA, 25 bp, Homo sapien
gattggtaactacaattgggatcat

SEQ ID NO: 2078518 - DNA, 25 bp, Homo sapien
tcatcaagtcctcctgaatttactt

SEQ ID NO: 2078519 - DNA, 25 bp, Homo sapien
tcttccttccttttcaatgctcctc

SEQ ID NO: 2078520 - DNA, 25 bp, Homo sapien
cttccttttcaatgctcctctccat

SEQ ID NO: 2078521 - DNA, 25 bp, Homo sapien
ccttccttttcaatgctcctctcca

SEQ ID NO: 2078522 - DNA, 25 bp, Homo sapien
ttccttccttttcaatgctcctctc

SEQ ID NO: 2078523 - DNA, 25 bp, Homo sapien
taaaggacaatttattcgacattac

SEQ ID NO: 2078524 - DNA, 25 bp, Homo sapien
tcgacattactttgttgttggtgaa

SEQ ID NO: 2078525 - DNA, 25 bp, Homo sapien
tctcaaacaaaatgatgtaagtgca

SEQ ID NO: 2078526 - DNA, 25 bp, Homo sapien
tttaatgttactcagcactaggatt

SEQ ID NO: 2078527 - DNA, 25 bp, Homo sapien
atgccagacacaagcggcagctcca

SEQ ID NO: 2078528 - DNA, 25 bp, Homo sapien
tcctctaccatttgcatgtgcaatc

SEQ ID NO: 2078529 - DNA, 25 bp, Homo sapien
tggaccaaggttagaaagctaatta

SEQ ID NO: 2078530 - DNA, 25 bp, Homo sapien
caagcgggggtgttgcatcctctac

SEQ ID NO: 2078531 - DNA, 25 bp, Homo sapien
ttaaagctgtcaccgtggaactgag

SEQ ID NO: 2078532 - DNA, 25 bp, Homo sapien
cattcaggtagatgacagcgggagc

SEQ ID NO: 2078533 - DNA, 25 bp, Homo sapien
tttaagagaatcctgcaacatcaga

SEQ ID NO: 2078534 - DNA, 25 bp, Homo sapien
cagcgggagcaagatgaaatgacaa

SEQ ID NO: 2078535 - DNA, 25 bp, Homo sapien
tgtgcaaaccaggtggctccagaac

SEQ ID NO: 2078536 - DNA, 25 bp, Homo sapien
catcctagcttggattgggaggcac

SEQ ID NO: 2078537 - DNA, 25 bp, Homo sapien
tattcatgaggtttgacaggctcgg

SEQ ID NO: 2078538 - DNA, 25 bp, Homo sapien
tgttaaaagacgaagcaggcaagtg

SEQ ID NO: 2078539 - DNA, 25 bp, Homo sapien
gctgaaaactttggccatgtagtgc

SEQ ID NO: 2078540 - DNA, 25 bp, Homo sapien
agggccacgtaaggagacaggtctc

SEQ ID NO: 2078541 - DNA, 25 bp, Homo sapien
tgctctcttgccaaagggccaaagg

SEQ ID NO: 2078542 - DNA, 25 bp, Homo sapien
agacagaagactttcggcaacccca

SEQ ID NO: 2078543 - DNA, 25 bp, Homo sapien
gcctagaggtgattcagaacttgca

SEQ ID NO: 2078544 - DNA, 25 bp, Homo sapien
gaacttgcatctctgtcacgcagta

SEQ ID NO: 2078545 - DNA, 25 bp, Homo sapien
tactcaaaatggactacacctaggc

SEQ ID NO: 2078546 - DNA, 25 bp, Homo sapien
taggcatgtcataagcgaaccagag

SEQ ID NO: 2078547 - DNA, 25 bp, Homo sapien
gagggactggcatctactgatggcc

SEQ ID NO: 2078548 - DNA, 25 bp, Homo sapien
gcatctactgatggccttcttactg

SEQ ID NO: 2078549 - DNA, 25 bp, Homo sapien
tactgatggccttcttactgcgtca

SEQ ID NO: 2078550 - DNA, 25 bp, Homo sapien
agttctgcgtctggaaagttcaagg

SEQ ID NO: 2078551 - DNA, 25 bp, Homo sapien
ttagaacttcataactgctgtcggg

SEQ ID NO: 2078552 - DNA, 25 bp, Homo sapien
gccgttggtgatcaaggacacttcc

SEQ ID NO: 2078553 - DNA, 25 bp, Homo sapien
ttcataactgctgtcgggcgcggtg

SEQ ID NO: 2078554 - DNA, 25 bp, Homo sapien
ggacacttcctgattaagacttgct

SEQ ID NO: 2078555 - DNA, 25 bp, Homo sapien
tctgatggattacaacatgagacac

SEQ ID NO: 2078556 - DNA, 25 bp, Homo sapien
tttcctagagcctgctgaacaaaca

SEQ ID NO: 2078557 - DNA, 25 bp, Homo sapien
catctccatgatgggtgttctctga

SEQ ID NO: 2078558 - DNA, 25 bp, Homo sapien
ttcacaaatccacccacatagtatt

SEQ ID NO: 2078559 - DNA, 25 bp, Homo sapien
aaggaaaggaatgccttctgagcgg

SEQ ID NO: 2078560 - DNA, 25 bp, Homo sapien
tcgggacgtggccacaaatgggcca

SEQ ID NO: 2078561 - DNA, 25 bp, Homo sapien
agcagctccattgactgcgagccag

SEQ ID NO: 2078562 - DNA, 25 bp, Homo sapien
actgcgagccagttaaaggaaagga

SEQ ID NO: 2078563 - DNA, 25 bp, Homo sapien
gaagcatggctgaaacagggtcact

SEQ ID NO: 2078564 - DNA, 25 bp, Homo sapien
tcgagtttctaaggctccagcgaga

SEQ ID NO: 2078565 - DNA, 25 bp, Homo sapien
gatgtctgccgatcttcatggtggg

SEQ ID NO: 2078566 - DNA, 25 bp, Homo sapien
caaagcattcgggataaacataggc

SEQ ID NO: 2078567 - DNA, 25 bp, Homo sapien
agcttccaggagttagcaaagtctt

SEQ ID NO: 2078568 - DNA, 25 bp, Homo sapien
tcgatgagcttccaggagttagcaa

SEQ ID NO: 2078569 - DNA, 25 bp, Homo sapien
atgagcttccaggagttagcaaagt

SEQ ID NO: 2078570 - DNA, 25 bp, Homo sapien
gctctcgatgagcttccaggagtta

SEQ ID NO: 2078571 - DNA, 25 bp, Homo sapien
tgtcccgtaaactgcctcttttgat

SEQ ID NO: 2078572 - DNA, 25 bp, Homo sapien
taaactgcctcttttgatcccactg

SEQ ID NO: 2078573 - DNA, 25 bp, Homo sapien
cctgattggtcagcttggcacccat

SEQ ID NO: 2078574 - DNA, 25 bp, Homo sapien
tgatcccactgcctgattggtcagc

SEQ ID NO: 2078575 - DNA, 25 bp, Homo sapien
gatcttacatgttaggtcaaggcca

SEQ ID NO: 2078576 - DNA, 25 bp, Homo sapien
cttccatagaatggattgatcttac

SEQ ID NO: 2078577 - DNA, 25 bp, Homo sapien
tccatagaatggattgatcttacat

SEQ ID NO: 2078578 - DNA, 25 bp, Homo sapien
gattgatcttacatgttaggtcaag

SEQ ID NO: 2078579 - DNA, 25 bp, Homo sapien
ttctcaaatccacagtaagaatctc

SEQ ID NO: 2078580 - DNA, 25 bp, Homo sapien
tccatgtagcccttgtacatttcct

SEQ ID NO: 2078581 - DNA, 25 bp, Homo sapien
cacagtagcttttgatggcttccat

SEQ ID NO: 2078582 - DNA, 25 bp, Homo sapien
caaatccacagtaagaatctcttta

SEQ ID NO: 2078583 - DNA, 25 bp, Homo sapien
accacatcttgccatcagttcatac

SEQ ID NO: 2078584 - DNA, 25 bp, Homo sapien
tcttgccatcagttcatacacagtc

SEQ ID NO: 2078585 - DNA, 25 bp, Homo sapien
aaagaccacatcttgccatcagttc

SEQ ID NO: 2078586 - DNA, 25 bp, Homo sapien
catcttgccatcagttcatacacag

SEQ ID NO: 2078587 - DNA, 25 bp, Homo sapien
tcctgaacaccagcaagcccagagg

SEQ ID NO: 2078588 - DNA, 25 bp, Homo sapien
atcctgaacaccagcaagcccagag

SEQ ID NO: 2078589 - DNA, 25 bp, Homo sapien
ctgaacaccagcaagcccagaggat

SEQ ID NO: 2078590 - DNA, 25 bp, Homo sapien
gaacaccagcaagcccagaggatgc

SEQ ID NO: 2078591 - DNA, 25 bp, Homo sapien
aactttcggatgactttgaccgttg

SEQ ID NO: 2078592 - DNA, 25 bp, Homo sapien
cggatgactttgaccgttgtaacaa

SEQ ID NO: 2078593 - DNA, 25 bp, Homo sapien
tacttcagaaactttcggatgactt

SEQ ID NO: 2078594 - DNA, 25 bp, Homo sapien
cagaaactttcggatgactttgacc

SEQ ID NO: 2078595 - DNA, 25 bp, Homo sapien
tcaaagcgagagatgagggccgtca

SEQ ID NO: 2078596 - DNA, 25 bp, Homo sapien
agacaacaggtcaaagcgagagatg

SEQ ID NO: 2078597 - DNA, 25 bp, Homo sapien
gggacagtagcaacaaaagtcagtt

SEQ ID NO: 2078598 - DNA, 25 bp, Homo sapien
acagtggccagtccgggacagagga

SEQ ID NO: 2078599 - DNA, 25 bp, Homo sapien
ccaaaggaaccgttctgattttcat

SEQ ID NO: 2078600 - DNA, 25 bp, Homo sapien
agaacaccaaaggaaccgttctgat

SEQ ID NO: 2078601 - DNA, 25 bp, Homo sapien
caaaggaaccgttctgattttcatt

SEQ ID NO: 2078602 - DNA, 25 bp, Homo sapien
tcatgggctagtatgggttaaggaa

SEQ ID NO: 2078603 - DNA, 25 bp, Homo sapien
ttgagtaagagccatgctgccttca

SEQ ID NO: 2078604 - DNA, 25 bp, Homo sapien
cataacaccctcttttatatgacgg

SEQ ID NO: 2078605 - DNA, 25 bp, Homo sapien
tcaaaagtgaatatgtagtaagtgg

SEQ ID NO: 2078606 - DNA, 25 bp, Homo sapien
ttacttaagaccagacttcctccaa

SEQ ID NO: 2078607 - DNA, 25 bp, Homo sapien
cacaataacagaggcagtaggaaga

SEQ ID NO: 2078608 - DNA, 25 bp, Homo sapien
gaaccgaactcgcacaataacagag

SEQ ID NO: 2078609 - DNA, 25 bp, Homo sapien
tattttcatgaaggaaccgaactcg

SEQ ID NO: 2078610 - DNA, 25 bp, Homo sapien
cagtaggaagatagatgctcacggt

SEQ ID NO: 2078611 - DNA, 25 bp, Homo sapien
tcagccaggtcttcatggccgacac

SEQ ID NO: 2078612 - DNA, 25 bp, Homo sapien
gacttttcagccaggtcttcatggc

SEQ ID NO: 2078613 - DNA, 25 bp, Homo sapien
agacttttcagccaggtcttcatgg

SEQ ID NO: 2078614 - DNA, 25 bp, Homo sapien
gccaggtcttcatggccgacaccat

SEQ ID NO: 2078615 - DNA, 25 bp, Homo sapien
gccagatgacacattcatccggagt

SEQ ID NO: 2078616 - DNA, 25 bp, Homo sapien
cagatgacacattcatccggagtgg

SEQ ID NO: 2078617 - DNA, 25 bp, Homo sapien
ccagatgacacattcatccggagtg

SEQ ID NO: 2078618 - DNA, 25 bp, Homo sapien
gcagtaaagcatccctgcgcttagg

SEQ ID NO: 2078619 - DNA, 25 bp, Homo sapien
tagtgtcactgatgctggcagaaga

SEQ ID NO: 2078620 - DNA, 25 bp, Homo sapien
tgtggagacggccagatgacacatt

SEQ ID NO: 2078621 - DNA, 25 bp, Homo sapien
tgctctaatccccacagagtggtgt

SEQ ID NO: 2078622 - DNA, 25 bp, Homo sapien
ccacttttgagagtaatcctgtacc

SEQ ID NO: 2078623 - DNA, 25 bp, Homo sapien
tcagggctgttctatctaaatcctc

SEQ ID NO: 2078624 - DNA, 25 bp, Homo sapien
ttcccagctgagatagaatgattct

SEQ ID NO: 2078625 - DNA, 25 bp, Homo sapien
catatttcgttatctgtttcttgat

SEQ ID NO: 2078626 - DNA, 25 bp, Homo sapien
tttccaactccataatcgttagtac

SEQ ID NO: 2078627 - DNA, 25 bp, Homo sapien
tctggtccttcgcaatttccaactc

SEQ ID NO: 2078628 - DNA, 25 bp, Homo sapien
gttagtactactctcaaacctgttg

SEQ ID NO: 2078629 - DNA, 25 bp, Homo sapien
tactctcaaacctgttgttattcca

SEQ ID NO: 2078630 - DNA, 25 bp, Homo sapien
gttgacaggagctatgttaaaacct

SEQ ID NO: 2078631 - DNA, 25 bp, Homo sapien
tgttgacaggagctatgttaaaacc

SEQ ID NO: 2078632 - DNA, 25 bp, Homo sapien
attgttgacaggagctatgttaaaa

SEQ ID NO: 2078633 - DNA, 25 bp, Homo sapien
ttgacaggagctatgttaaaacctt

SEQ ID NO: 2078634 - DNA, 25 bp, Homo sapien
ttggcaagaatgcaagcatcatggg

SEQ ID NO: 2078635 - DNA, 25 bp, Homo sapien
catctggaaaggcagacgtcgcttt

SEQ ID NO: 2078636 - DNA, 25 bp, Homo sapien
gagttatccagcgtcttttcactgc

SEQ ID NO: 2078637 - DNA, 25 bp, Homo sapien
cgtcgctttccatctcagttcattg

SEQ ID NO: 2078638 - DNA, 25 bp, Homo sapien
gtgtcatgtgtagccccttcagtgt

SEQ ID NO: 2078639 - DNA, 25 bp, Homo sapien
ttcctgcgccgggaagatcccttgc

SEQ ID NO: 2078640 - DNA, 25 bp, Homo sapien
cgccgggaagatcccttgctggctg

SEQ ID NO: 2078641 - DNA, 25 bp, Homo sapien
gtcctcataggatggaggttcctgc

SEQ ID NO: 2078642 - DNA, 25 bp, Homo sapien
catttaggcaggccgcgtctgcacg

SEQ ID NO: 2078643 - DNA, 25 bp, Homo sapien
tcatttaggcaggccgcgtctgcac

SEQ ID NO: 2078644 - DNA, 25 bp, Homo sapien
catgaggaatgtaggtggcaggtcc

SEQ ID NO: 2078645 - DNA, 25 bp, Homo sapien
taagactgagaggatgggcctgaca

SEQ ID NO: 2078646 - DNA, 25 bp, Homo sapien
aactggtggaatccacggcttccca

SEQ ID NO: 2078647 - DNA, 25 bp, Homo sapien
tggctgcagcactaaacctttgatg

SEQ ID NO: 2078648 - DNA, 25 bp, Homo sapien
aagtctgtgtctcctttggattttc

SEQ ID NO: 2078649 - DNA, 25 bp, Homo sapien
tgtgtctcctttggattttcctcac

SEQ ID NO: 2078650 - DNA, 25 bp, Homo sapien
gtctgtgtctcctttggattttcct

SEQ ID NO: 2078651 - DNA, 25 bp, Homo sapien
ttatctaagtcccaaagtctgtgtc

SEQ ID NO: 2078652 - DNA, 25 bp, Homo sapien
tagaagatattccaccattgaggta

SEQ ID NO: 2078653 - DNA, 25 bp, Homo sapien
gatccctcgggtctatagaagatat

SEQ ID NO: 2078654 - DNA, 25 bp, Homo sapien
caccattccaagtccgattcctggt

SEQ ID NO: 2078655 - DNA, 25 bp, Homo sapien
gaagaagtacaacaaccaccattcc

SEQ ID NO: 2078656 - DNA, 25 bp, Homo sapien
agaggaattcttgtggaaaggcctg

SEQ ID NO: 2078657 - DNA, 25 bp, Homo sapien
ggatggtataaaattgagctgtcat

SEQ ID NO: 2078658 - DNA, 25 bp, Homo sapien
aatggaggatggtataaaattgagc

SEQ ID NO: 2078659 - DNA, 25 bp, Homo sapien
tggaggatggtataaaattgagctg

SEQ ID NO: 2078660 - DNA, 25 bp, Homo sapien
gaggatggtataaaattgagctgtc

SEQ ID NO: 2078661 - DNA, 25 bp, Homo sapien
tcttccaatggctgaaagagtttta

SEQ ID NO: 2078662 - DNA, 25 bp, Homo sapien
aatcttccaatggctgaaagagttt

SEQ ID NO: 2078663 - DNA, 25 bp, Homo sapien
ttccaatggctgaaagagttttata

SEQ ID NO: 2078664 - DNA, 25 bp, Homo sapien
ttttataagagtcatttgggagagg

SEQ ID NO: 2078665 - DNA, 25 bp, Homo sapien
gggcagtgccagctagcctgatatc

SEQ ID NO: 2078666 - DNA, 25 bp, Homo sapien
agggccagcattcccctgaacctcc

SEQ ID NO: 2078667 - DNA, 25 bp, Homo sapien
agctagcctgatatccctgggacct

SEQ ID NO: 2078668 - DNA, 25 bp, Homo sapien
tcatcacccgtcctattctcagtgg

SEQ ID NO: 2078669 - DNA, 25 bp, Homo sapien
gcactcaaaagggataaagccttca

SEQ ID NO: 2078670 - DNA, 25 bp, Homo sapien
aattgcactcaaaagggataaagcc

SEQ ID NO: 2078671 - DNA, 25 bp, Homo sapien
gacaataattgcactcaaaagggat

SEQ ID NO: 2078672 - DNA, 25 bp, Homo sapien
aagggataaagccttcaggagaagg

SEQ ID NO: 2078673 - DNA, 25 bp, Homo sapien
ccaaatctctcaaagcgaaaccaag

SEQ ID NO: 2078674 - DNA, 25 bp, Homo sapien
agcgaaaccaagtagaccacagctg

SEQ ID NO: 2078675 - DNA, 25 bp, Homo sapien
tccacgaatgacactgttctttgcc

SEQ ID NO: 2078676 - DNA, 25 bp, Homo sapien
cgttccacgaatgacactgttcttt

SEQ ID NO: 2078677 - DNA, 25 bp, Homo sapien
accagtttacctggtgattcctcca

SEQ ID NO: 2078678 - DNA, 25 bp, Homo sapien
ccagtttacctggtgattcctccat

SEQ ID NO: 2078679 - DNA, 25 bp, Homo sapien
taaccagtttacctggtgattcctc

SEQ ID NO: 2078680 - DNA, 25 bp, Homo sapien
gttttgggtgagtcacattgagaag

SEQ ID NO: 2078681 - DNA, 25 bp, Homo sapien
ttcatgttctcagttgtatcaggca

SEQ ID NO: 2078682 - DNA, 25 bp, Homo sapien
cctgccagtcctgccacttttctct

SEQ ID NO: 2078683 - DNA, 25 bp, Homo sapien
ttttctctgagatctccctccatct

SEQ ID NO: 2078684 - DNA, 25 bp, Homo sapien
tctttcatgttctcagttgtatcag

SEQ ID NO: 2078685 - DNA, 25 bp, Homo sapien
gccgtattgtgggatgtggtgtggt

SEQ ID NO: 2078686 - DNA, 25 bp, Homo sapien
gggtcatagctacagctatggacat

SEQ ID NO: 2078687 - DNA, 25 bp, Homo sapien
tgtggctattagtgagggtcatagc

SEQ ID NO: 2078688 - DNA, 25 bp, Homo sapien
ggcttggctgtagtgaagggtgtgg

SEQ ID NO: 2078689 - DNA, 25 bp, Homo sapien
cccttatctaaattccgcatcgtca

SEQ ID NO: 2078690 - DNA, 25 bp, Homo sapien
cctgaaaactgtatttgcattaccc

SEQ ID NO: 2078691 - DNA, 25 bp, Homo sapien
tcatcaaccttgcacaactcagaaa

SEQ ID NO: 2078692 - DNA, 25 bp, Homo sapien
tccgcatcgtcaagctgcgaatcat

SEQ ID NO: 2078693 - DNA, 25 bp, Homo sapien
cagctccgaggttgagacaggatct

SEQ ID NO: 2078694 - DNA, 25 bp, Homo sapien
actagcagctggaagtgaccataac

SEQ ID NO: 2078695 - DNA, 25 bp, Homo sapien
tcttcctgtatgtgaactccaaagg

SEQ ID NO: 2078696 - DNA, 25 bp, Homo sapien
tttattgagcagagcgtcagctccg

SEQ ID NO: 2078697 - DNA, 25 bp, Homo sapien
cttttaaccaaggtagatgatgatg

SEQ ID NO: 2078698 - DNA, 25 bp, Homo sapien
ttctccatgggtcgttcttctttta

SEQ ID NO: 2078699 - DNA, 25 bp, Homo sapien
ttcttcttttaaccaaggtagatga

SEQ ID NO: 2078700 - DNA, 25 bp, Homo sapien
ttcttttaaccaaggtagatgatga

SEQ ID NO: 2078701 - DNA, 25 bp, Homo sapien
agcagggcagctgccggagttttac

SEQ ID NO: 2078702 - DNA, 25 bp, Homo sapien
cacaggcaaaagacgaaagcggagg

SEQ ID NO: 2078703 - DNA, 25 bp, Homo sapien
tacgccacaggcaaaagacgaaagc

SEQ ID NO: 2078704 - DNA, 25 bp, Homo sapien
gctgccggagttttacgccacaggc

SEQ ID NO: 2078705 - DNA, 25 bp, Homo sapien
ttaatccttatacagtaacagatac

SEQ ID NO: 2078706 - DNA, 25 bp, Homo sapien
ttgagtctgcgcagctgtttaaggt

SEQ ID NO: 2078707 - DNA, 25 bp, Homo sapien
tcttgactgctgaataccgcatgcc

SEQ ID NO: 2078708 - DNA, 25 bp, Homo sapien
gggccttcggtagagacatttcatt

SEQ ID NO: 2078709 - DNA, 25 bp, Homo sapien
cttttgggccttcggtagagacatt

SEQ ID NO: 2078710 - DNA, 25 bp, Homo sapien
caaaatcctgcatcaagggtctctg

SEQ ID NO: 2078711 - DNA, 25 bp, Homo sapien
cacaaaatcctgcatcaagggtctc

SEQ ID NO: 2078712 - DNA, 25 bp, Homo sapien
accacaaaatcctgcatcaagggtc

SEQ ID NO: 2078713 - DNA, 25 bp, Homo sapien
gaccacaaaatcctgcatcaagggt

SEQ ID NO: 2078714 - DNA, 25 bp, Homo sapien
cttcggcaagcctgctatgtcctct

SEQ ID NO: 2078715 - DNA, 25 bp, Homo sapien
cggcaagcctgctatgtcctcttct

SEQ ID NO: 2078716 - DNA, 25 bp, Homo sapien
gatgatggacactttgcatgctggg

SEQ ID NO: 2078717 - DNA, 25 bp, Homo sapien
tcccttcggcaagcctgctatgtcc

SEQ ID NO: 2078718 - DNA, 25 bp, Homo sapien
aaatcaactgacatatttgccgaag

SEQ ID NO: 2078719 - DNA, 25 bp, Homo sapien
tgaatatgattccagagggtcaaca

SEQ ID NO: 2078720 - DNA, 25 bp, Homo sapien
ccgaagtaatatgtttggcagtcct

SEQ ID NO: 2078721 - DNA, 25 bp, Homo sapien
tgttgactccataagtaaaccttga

SEQ ID NO: 2078722 - DNA, 25 bp, Homo sapien
ttttcccatactcccttgcacttag

SEQ ID NO: 2078723 - DNA, 25 bp, Homo sapien
tacaggtacaggaaaatgcgcgtgc

SEQ ID NO: 2078724 - DNA, 25 bp, Homo sapien
taatcttgggatctacaatgctgca

SEQ ID NO: 2078725 - DNA, 25 bp, Homo sapien
tatggttaccaaaatctatgatcaa

SEQ ID NO: 2078726 - DNA, 25 bp, Homo sapien
tttgtcagttatccattccattctt

SEQ ID NO: 2078727 - DNA, 25 bp, Homo sapien
accagaaagcagagattattacact

SEQ ID NO: 2078728 - DNA, 25 bp, Homo sapien
tgtgatttcctgatcatattccctt

SEQ ID NO: 2078729 - DNA, 25 bp, Homo sapien
attcccttttactcaacaacaggag

SEQ ID NO: 2078730 - DNA, 25 bp, Homo sapien
tggagggaaggagccttcgggccat

SEQ ID NO: 2078731 - DNA, 25 bp, Homo sapien
gtggagggaaggagccttcgggcca

SEQ ID NO: 2078732 - DNA, 25 bp, Homo sapien
ggagcagaatcccgtggagggaagg

SEQ ID NO: 2078733 - DNA, 25 bp, Homo sapien
ggctggagcagaatcccgtggaggg

SEQ ID NO: 2078734 - DNA, 25 bp, Homo sapien
gaaccgtccaaatcaaatacaggcc

SEQ ID NO: 2078735 - DNA, 25 bp, Homo sapien
cttgtgcttttgacagcctcagaaa

SEQ ID NO: 2078736 - DNA, 25 bp, Homo sapien
tcaagtctctaattagggctggcat

SEQ ID NO: 2078737 - DNA, 25 bp, Homo sapien
aatacaggccttgttattacagagc

SEQ ID NO: 2078738 - DNA, 25 bp, Homo sapien
ggattgggataggatggtatatata

SEQ ID NO: 2078739 - DNA, 25 bp, Homo sapien
gagaagcttctcttgattcatgtat

SEQ ID NO: 2078740 - DNA, 25 bp, Homo sapien
tatatttactctgagatctataact

SEQ ID NO: 2078741 - DNA, 25 bp, Homo sapien
gcttctcttgattcatgtatcagta

SEQ ID NO: 2078742 - DNA, 25 bp, Homo sapien
gccaacggagacatgcctgtttcaa

SEQ ID NO: 2078743 - DNA, 25 bp, Homo sapien
tcacttcgtctttcttatctgccaa

SEQ ID NO: 2078744 - DNA, 25 bp, Homo sapien
taatagacaagagcttgacggagca

SEQ ID NO: 2078745 - DNA, 25 bp, Homo sapien
tgtgctggtgcctcacttcacttcg

SEQ ID NO: 2078746 - DNA, 25 bp, Homo sapien
cttgtcggtcaagagtcatttgtga

SEQ ID NO: 2078747 - DNA, 25 bp, Homo sapien
atcaaacgcggaggcgctgccattg

SEQ ID NO: 2078748 - DNA, 25 bp, Homo sapien
gaaacgctgtaatgccaaggacgag

SEQ ID NO: 2078749 - DNA, 25 bp, Homo sapien
agccagccgcacaccgaactgtgat

SEQ ID NO: 2078750 - DNA, 25 bp, Homo sapien
caaatgcccacatttccgttggatg

SEQ ID NO: 2078751 - DNA, 25 bp, Homo sapien
aatgcccacatttccgttggatgag

SEQ ID NO: 2078752 - DNA, 25 bp, Homo sapien
catttccgttggatgaggtggtatg

SEQ ID NO: 2078753 - DNA, 25 bp, Homo sapien
gcccacatttccgttggatgaggtg

SEQ ID NO: 2078754 - DNA, 25 bp, Homo sapien
gtaaaaatatgcttcgtccatttcc

SEQ ID NO: 2078755 - DNA, 25 bp, Homo sapien
aaaggcaactgggagaagcgcattt

SEQ ID NO: 2078756 - DNA, 25 bp, Homo sapien
tgtactggacccccaaaggcaactg

SEQ ID NO: 2078757 - DNA, 25 bp, Homo sapien
gagaagcgcatttgagagattccat

SEQ ID NO: 2078758 - DNA, 25 bp, Homo sapien
aaatggccacagatacgtgtgttcc

SEQ ID NO: 2078759 - DNA, 25 bp, Homo sapien
cagaaaatggccacagatacgtgtg

SEQ ID NO: 2078760 - DNA, 25 bp, Homo sapien
agatacgtgtgttccagaggctgcc

SEQ ID NO: 2078761 - DNA, 25 bp, Homo sapien
gccacagatacgtgtgttccagagg

SEQ ID NO: 2078762 - DNA, 25 bp, Homo sapien
tactgcttttaggacagctgctgtg

SEQ ID NO: 2078763 - DNA, 25 bp, Homo sapien
ttctgctgatcagaggccagcttcc

SEQ ID NO: 2078764 - DNA, 25 bp, Homo sapien
tggatggattccgaaaattttctgc

SEQ ID NO: 2078765 - DNA, 25 bp, Homo sapien
cactcttgatctctgcatagggcca

SEQ ID NO: 2078766 - DNA, 25 bp, Homo sapien
gatatcagcaccaaacctaggttct

SEQ ID NO: 2078767 - DNA, 25 bp, Homo sapien
tatggatatcagcaccaaacctagg

SEQ ID NO: 2078768 - DNA, 25 bp, Homo sapien
ggatatcagcaccaaacctaggttc

SEQ ID NO: 2078769 - DNA, 25 bp, Homo sapien
tggatatcagcaccaaacctaggtt

SEQ ID NO: 2078770 - DNA, 25 bp, Homo sapien
tctgaatcagcactctggaataaat

SEQ ID NO: 2078771 - DNA, 25 bp, Homo sapien
tatctaccatctgtgtcttaatcgc

SEQ ID NO: 2078772 - DNA, 25 bp, Homo sapien
ggaataaatccacctggttcattgt

SEQ ID NO: 2078773 - DNA, 25 bp, Homo sapien
cagtaagactgaactttctactgaa

SEQ ID NO: 2078774 - DNA, 25 bp, Homo sapien
ggtgatctgcttgcctcagcctccc

SEQ ID NO: 2078775 - DNA, 25 bp, Homo sapien
atggggattccccatattggtcagg

SEQ ID NO: 2078776 - DNA, 25 bp, Homo sapien
agagatggggattccccatattggt

SEQ ID NO: 2078777 - DNA, 25 bp, Homo sapien
gtgatctgcttgcctcagcctcccc

SEQ ID NO: 2078778 - DNA, 25 bp, Homo sapien
cttccattttcatgtgtcgatctgg

SEQ ID NO: 2078779 - DNA, 25 bp, Homo sapien
catgtgtcgatctggctgaaaatct

SEQ ID NO: 2078780 - DNA, 25 bp, Homo sapien
aaatcttttcctatgagctgtgtat

SEQ ID NO: 2078781 - DNA, 25 bp, Homo sapien
cattttcatgtgtcgatctggctga

SEQ ID NO: 2078782 - DNA, 25 bp, Homo sapien
agagcagaataaagaccagtgtagc

SEQ ID NO: 2078783 - DNA, 25 bp, Homo sapien
gcagaggaggtccttcgaagctctc

SEQ ID NO: 2078784 - DNA, 25 bp, Homo sapien
cagaagtgggattgaagggctccaa

SEQ ID NO: 2078785 - DNA, 25 bp, Homo sapien
ctctgggagcacaagcctctgagca

SEQ ID NO: 2078786 - DNA, 25 bp, Homo sapien
tcaagtgtttcgtgccttgcagtca

SEQ ID NO: 2078787 - DNA, 25 bp, Homo sapien
gtgtttcgtgccttgcagtcagaga

SEQ ID NO: 2078788 - DNA, 25 bp, Homo sapien
agtgtttcgtgccttgcagtcagag

SEQ ID NO: 2078789 - DNA, 25 bp, Homo sapien
caagtgtttcgtgccttgcagtcag

SEQ ID NO: 2078790 - DNA, 25 bp, Homo sapien
tcaactgggtaaaggggatctcctg

SEQ ID NO: 2078791 - DNA, 25 bp, Homo sapien
gctggtggtcgagagaaggtgccgt

SEQ ID NO: 2078792 - DNA, 25 bp, Homo sapien
ggatggctggtggtcgagagaaggt

SEQ ID NO: 2078793 - DNA, 25 bp, Homo sapien
cctgcacactccggtgccagtggat

SEQ ID NO: 2078794 - DNA, 25 bp, Homo sapien
tgcggtctcacagccgtggtgctca

SEQ ID NO: 2078795 - DNA, 25 bp, Homo sapien
tgacaggctggtcttctagccatgg

SEQ ID NO: 2078796 - DNA, 25 bp, Homo sapien
tgctcactgaattgatgacaggctg

SEQ ID NO: 2078797 - DNA, 25 bp, Homo sapien
atgacagtgcggtctcacagccgtg

SEQ ID NO: 2078798 - DNA, 25 bp, Homo sapien
cccagaacagaggctggtgacaccc

SEQ ID NO: 2078799 - DNA, 25 bp, Homo sapien
gggtccactgctcaagcactgggag

SEQ ID NO: 2078800 - DNA, 25 bp, Homo sapien
gcccagaacagaggctggtgacacc

SEQ ID NO: 2078801 - DNA, 25 bp, Homo sapien
tggccactccatccatgggtccact

SEQ ID NO: 2078802 - DNA, 25 bp, Homo sapien
tctggcagctttagcatttcatgaa

SEQ ID NO: 2078803 - DNA, 25 bp, Homo sapien
gcatttcatgaagatgctcacgtgt

SEQ ID NO: 2078804 - DNA, 25 bp, Homo sapien
gaagatgctcacgtgttcccgctac

SEQ ID NO: 2078805 - DNA, 25 bp, Homo sapien
ctctctggcagctttagcatttcat

SEQ ID NO: 2078806 - DNA, 25 bp, Homo sapien
cctctgagagccgtggaaaccattt

SEQ ID NO: 2078807 - DNA, 25 bp, Homo sapien
tggcgagcgaggcatccatcatgtt

SEQ ID NO: 2078808 - DNA, 25 bp, Homo sapien
tgaagttagcgatgcgtcctcctgg

SEQ ID NO: 2078809 - DNA, 25 bp, Homo sapien
ttcagcctgttccaaggagagagcc

SEQ ID NO: 2078810 - DNA, 25 bp, Homo sapien
gggaagaagaactcagttatcaagg

SEQ ID NO: 2078811 - DNA, 25 bp, Homo sapien
agctctcaggcttcctgttttgtga

SEQ ID NO: 2078812 - DNA, 25 bp, Homo sapien
gatcaagtgtctaagacaacagaag

SEQ ID NO: 2078813 - DNA, 25 bp, Homo sapien
atgttcctacaacacaatgtccttg

SEQ ID NO: 2078814 - DNA, 25 bp, Homo sapien
ctcctagggttaagcagttcgaata

SEQ ID NO: 2078815 - DNA, 25 bp, Homo sapien
tagggttaagcagttcgaatattgt

SEQ ID NO: 2078816 - DNA, 25 bp, Homo sapien
tggacatctcctagggttaagcagt

SEQ ID NO: 2078817 - DNA, 25 bp, Homo sapien
ttggacatctcctagggttaagcag

SEQ ID NO: 2078818 - DNA, 25 bp, Homo sapien
tgtgtcagggtttcagacagaaaat

SEQ ID NO: 2078819 - DNA, 25 bp, Homo sapien
gtctgtgtcagggtttcagacagaa

SEQ ID NO: 2078820 - DNA, 25 bp, Homo sapien
gtcagggtttcagacagaaaattta

SEQ ID NO: 2078821 - DNA, 25 bp, Homo sapien
tctgtgtcagggtttcagacagaaa

SEQ ID NO: 2078822 - DNA, 25 bp, Homo sapien
ggatggccagccattgtgaggtcgt

SEQ ID NO: 2078823 - DNA, 25 bp, Homo sapien
gtcgttgggacataatgaaatccag

SEQ ID NO: 2078824 - DNA, 25 bp, Homo sapien
tcaaagtggtctttcagtggatggc

SEQ ID NO: 2078825 - DNA, 25 bp, Homo sapien
agccattgtgaggtcgttgggacat

SEQ ID NO: 2078826 - DNA, 25 bp, Homo sapien
agtttctgacattgcctaactcgag

SEQ ID NO: 2078827 - DNA, 25 bp, Homo sapien
agtgcctcggatcccggtcttttga

SEQ ID NO: 2078828 - DNA, 25 bp, Homo sapien
gatcccggtcttttgagacaatcaa

SEQ ID NO: 2078829 - DNA, 25 bp, Homo sapien
cctaactcgagagccttgcaggagc

SEQ ID NO: 2078830 - DNA, 25 bp, Homo sapien
cttcaacctaacttgattttcagat

SEQ ID NO: 2078831 - DNA, 25 bp, Homo sapien
caaaaagatttttagcgatgtgctc

SEQ ID NO: 2078832 - DNA, 25 bp, Homo sapien
ttcagattcacagtactcctggatc

SEQ ID NO: 2078833 - DNA, 25 bp, Homo sapien
ggatcaatttgcaagatcttctacc

SEQ ID NO: 2078834 - DNA, 25 bp, Homo sapien
ccaaaagtgcccgtgccacatagag

SEQ ID NO: 2078835 - DNA, 25 bp, Homo sapien
ccccaaaagtgcccgtgccacatag

SEQ ID NO: 2078836 - DNA, 25 bp, Homo sapien
aagtgcccgtgccacatagagcatc

SEQ ID NO: 2078837 - DNA, 25 bp, Homo sapien
aaaagtgcccgtgccacatagagca

SEQ ID NO: 2078838 - DNA, 25 bp, Homo sapien
tctggattgcttctagggtccgtag

SEQ ID NO: 2078839 - DNA, 25 bp, Homo sapien
ggcttgtggaaactagactctttaa

SEQ ID NO: 2078840 - DNA, 25 bp, Homo sapien
tccagggatgtgaaacccagttttc

SEQ ID NO: 2078841 - DNA, 25 bp, Homo sapien
ggatggctattattccaggcttaca

SEQ ID NO: 2078842 - DNA, 25 bp, Homo sapien
gggcgccgtgagccagtctttgagg

SEQ ID NO: 2078843 - DNA, 25 bp, Homo sapien
gggtgcctggagtggtgtggcctgt

SEQ ID NO: 2078844 - DNA, 25 bp, Homo sapien
gccacttgctttcagcatcaatgcg

SEQ ID NO: 2078845 - DNA, 25 bp, Homo sapien
caaggctggctttctcggggggcgc

SEQ ID NO: 2078846 - DNA, 25 bp, Homo sapien
ttggaggtctactcctgtgagctcc

SEQ ID NO: 2078847 - DNA, 25 bp, Homo sapien
ctggcagggcccacggcagggttgc

SEQ ID NO: 2078848 - DNA, 25 bp, Homo sapien
ggttgctgccagctacagacccagg

SEQ ID NO: 2078849 - DNA, 25 bp, Homo sapien
cacggcagggttgctgccagctaca

SEQ ID NO: 2078850 - DNA, 25 bp, Homo sapien
gcagggcccacggcagggttgctgc

SEQ ID NO: 2078851 - DNA, 25 bp, Homo sapien
gtccctttgtcctgtgatgcatgta

SEQ ID NO: 2078852 - DNA, 25 bp, Homo sapien
tcagcaggcttgaataaaagataca

SEQ ID NO: 2078853 - DNA, 25 bp, Homo sapien
catgtatgtgcaagccagaagcccc

SEQ ID NO: 2078854 - DNA, 25 bp, Homo sapien
gccgttcctgcgatttgtccctttg

SEQ ID NO: 2078855 - DNA, 25 bp, Homo sapien
caaccttcaacccacttgtaggcgt

SEQ ID NO: 2078856 - DNA, 25 bp, Homo sapien
accttcaacccacttgtaggcgtag

SEQ ID NO: 2078857 - DNA, 25 bp, Homo sapien
cttcaacccacttgtaggcgtaggt

SEQ ID NO: 2078858 - DNA, 25 bp, Homo sapien
tcaacccacttgtaggcgtaggtac

SEQ ID NO: 2078859 - DNA, 25 bp, Homo sapien
ctgtccaattccaactcatgctctg

SEQ ID NO: 2078860 - DNA, 25 bp, Homo sapien
tctgtccaattccaactcatgctct

SEQ ID NO: 2078861 - DNA, 25 bp, Homo sapien
gtgacccactcgtaggtgtaggtac

SEQ ID NO: 2078862 - DNA, 25 bp, Homo sapien
ctgtgacccactcgtaggtgtaggt

SEQ ID NO: 2078863 - DNA, 25 bp, Homo sapien
tgtgacccactcgtaggtgtaggta

SEQ ID NO: 2078864 - DNA, 25 bp, Homo sapien
cattgttgtttgtctctttagcctc

SEQ ID NO: 2078865 - DNA, 25 bp, Homo sapien
ggccattgttgtttgtctctttagc

SEQ ID NO: 2078866 - DNA, 25 bp, Homo sapien
gccattgttgtttgtctctttagcc

SEQ ID NO: 2078867 - DNA, 25 bp, Homo sapien
gaggccattgttgtttgtctcttta

SEQ ID NO: 2078868 - DNA, 25 bp, Homo sapien
gggcatacactcaagcaagtcaact

SEQ ID NO: 2078869 - DNA, 25 bp, Homo sapien
aatttagacccctctgtggtgtggc

SEQ ID NO: 2078870 - DNA, 25 bp, Homo sapien
caggctgaacactgaccgcaatgcg

SEQ ID NO: 2078871 - DNA, 25 bp, Homo sapien
gcatcacacgggataaaattggttc

SEQ ID NO: 2078872 - DNA, 25 bp, Homo sapien
ccgaaacgccccatttgtggtatat

SEQ ID NO: 2078873 - DNA, 25 bp, Homo sapien
ctccgaaacgccccatttgtggtat

SEQ ID NO: 2078874 - DNA, 25 bp, Homo sapien
tggatgcatcgtgttcttcatttct

SEQ ID NO: 2078875 - DNA, 25 bp, Homo sapien
ggatgcatcgtgttcttcatttctt

SEQ ID NO: 2078876 - DNA, 25 bp, Homo sapien
cctcagcactttcaggtgctcagcg

SEQ ID NO: 2078877 - DNA, 25 bp, Homo sapien
tcagcactttcaggtgctcagcgca

SEQ ID NO: 2078878 - DNA, 25 bp, Homo sapien
tattgggcctcagcactttcaggtg

SEQ ID NO: 2078879 - DNA, 25 bp, Homo sapien
gggcctcagcactttcaggtgctca

SEQ ID NO: 2078880 - DNA, 25 bp, Homo sapien
gtttagaatctgtagcccaatcctc

SEQ ID NO: 2078881 - DNA, 25 bp, Homo sapien
gagaatgacgtgctccagaagggca

SEQ ID NO: 2078882 - DNA, 25 bp, Homo sapien
tggcctgaaacatatgcccactatg

SEQ ID NO: 2078883 - DNA, 25 bp, Homo sapien
tgtgaactctgagcatagcacctgg

SEQ ID NO: 2078884 - DNA, 25 bp, Homo sapien
tagaaccacgtcaagtgcacatggg

SEQ ID NO: 2078885 - DNA, 25 bp, Homo sapien
cagcatgcgcgaccttgaagttgac

SEQ ID NO: 2078886 - DNA, 25 bp, Homo sapien
tacttattggaaaccccgcactcag

SEQ ID NO: 2078887 - DNA, 25 bp, Homo sapien
caaaaaatgcatcagacagtggcct

SEQ ID NO: 2078888 - DNA, 25 bp, Homo sapien
ctcaaagtccctcgtgatgacaacc

SEQ ID NO: 2078889 - DNA, 25 bp, Homo sapien
tgatgacaaccactgggtatctggg

SEQ ID NO: 2078890 - DNA, 25 bp, Homo sapien
tttcccgggtcagcctttgagtctc

SEQ ID NO: 2078891 - DNA, 25 bp, Homo sapien
tccctcgtgatgacaaccactgggt

SEQ ID NO: 2078892 - DNA, 25 bp, Homo sapien
gcagcatgtgtcctatctgtgaggc

SEQ ID NO: 2078893 - DNA, 25 bp, Homo sapien
tccacggcagcatgtgtcctatctg

SEQ ID NO: 2078894 - DNA, 25 bp, Homo sapien
acggcagcatgtgtcctatctgtga

SEQ ID NO: 2078895 - DNA, 25 bp, Homo sapien
cttccacggcagcatgtgtcctatc

SEQ ID NO: 2078896 - DNA, 25 bp, Homo sapien
ccacatctaaacattggcaggtagt

SEQ ID NO: 2078897 - DNA, 25 bp, Homo sapien
gcacggcgcatattttcaatagcac

SEQ ID NO: 2078898 - DNA, 25 bp, Homo sapien
tgggatttacaagcacggcgcatat

SEQ ID NO: 2078899 - DNA, 25 bp, Homo sapien
caatagcaccacatctaaacattgg

SEQ ID NO: 2078900 - DNA, 25 bp, Homo sapien
caggattaggattgagggtgtgctc

SEQ ID NO: 2078901 - DNA, 25 bp, Homo sapien
gttccatgattgcagggcactgagc

SEQ ID NO: 2078902 - DNA, 25 bp, Homo sapien
ttctttcccagtgagaagatcagga

SEQ ID NO: 2078903 - DNA, 25 bp, Homo sapien
cccaggtgtcctcgttccccactgc

SEQ ID NO: 2078904 - DNA, 25 bp, Homo sapien
ctgagtggaagattctttccacgac

SEQ ID NO: 2078905 - DNA, 25 bp, Homo sapien
tggaagattctttccacgacctgca

SEQ ID NO: 2078906 - DNA, 25 bp, Homo sapien
gaagattctttccacgacctgcact

SEQ ID NO: 2078907 - DNA, 25 bp, Homo sapien
ttctttccacgacctgcactcagaa

SEQ ID NO: 2078908 - DNA, 25 bp, Homo sapien
ggaccacccataacctgatgccact

SEQ ID NO: 2078909 - DNA, 25 bp, Homo sapien
tctcagccctcacaagaagaatgcc

SEQ ID NO: 2078910 - DNA, 25 bp, Homo sapien
atcctcagcgccgtctggatccggg

SEQ ID NO: 2078911 - DNA, 25 bp, Homo sapien
ggagaagcaggtccaagtgaccccg

SEQ ID NO: 2078912 - DNA, 25 bp, Homo sapien
cctctggacactgagggtatcgcat

SEQ ID NO: 2078913 - DNA, 25 bp, Homo sapien
gatgcccgcagctgtcagtctcagt

SEQ ID NO: 2078914 - DNA, 25 bp, Homo sapien
agttgttaagcccaagaacttcagt

SEQ ID NO: 2078915 - DNA, 25 bp, Homo sapien
gtatcgcatcacttgatgcccgcag

SEQ ID NO: 2078916 - DNA, 25 bp, Homo sapien
tgatactgagtggcggctcggttac

SEQ ID NO: 2078917 - DNA, 25 bp, Homo sapien
ctgatactgagtggcggctcggtta

SEQ ID NO: 2078918 - DNA, 25 bp, Homo sapien
ggaagtcgtccaaggtcaggctgaa

SEQ ID NO: 2078919 - DNA, 25 bp, Homo sapien
gaacactttgcaagccatgctggga

SEQ ID NO: 2078920 - DNA, 25 bp, Homo sapien
gcaatgatctcatgtcctccagaag

SEQ ID NO: 2078921 - DNA, 25 bp, Homo sapien
tccagaagcagtatccagcaggcac

SEQ ID NO: 2078922 - DNA, 25 bp, Homo sapien
tccgtctgaccgctaagagatccat

SEQ ID NO: 2078923 - DNA, 25 bp, Homo sapien
agcatattcccaagtccaaggcagg

SEQ ID NO: 2078924 - DNA, 25 bp, Homo sapien
atattcccaagtccaaggcaggatg

SEQ ID NO: 2078925 - DNA, 25 bp, Homo sapien
tgctccgtctgaccgctaagagatc

SEQ ID NO: 2078926 - DNA, 25 bp, Homo sapien
ccccatcttcacttgattgctgtct

SEQ ID NO: 2078927 - DNA, 25 bp, Homo sapien
gggcaagaacataatatctgtcccc

SEQ ID NO: 2078928 - DNA, 25 bp, Homo sapien
ctctctcattttttggggcaagaac

SEQ ID NO: 2078929 - DNA, 25 bp, Homo sapien
tcacaacatctgaccgcatttcaaa

SEQ ID NO: 2078930 - DNA, 25 bp, Homo sapien
atcataatttctaatgtgagatgaa

SEQ ID NO: 2078931 - DNA, 25 bp, Homo sapien
gaacaaagccagtcaaaaataaaca

SEQ ID NO: 2078932 - DNA, 25 bp, Homo sapien
aacaacaataatttgccacctactg

SEQ ID NO: 2078933 - DNA, 25 bp, Homo sapien
caccaagaacaaagccagtcaaaaa

SEQ ID NO: 2078934 - DNA, 25 bp, Homo sapien
ataacaacaataatttgccacctac

SEQ ID NO: 2078935 - DNA, 25 bp, Homo sapien
caatggttgatttttgcgatactaa

SEQ ID NO: 2078936 - DNA, 25 bp, Homo sapien
gataaaggaccaggttgacaataag

SEQ ID NO: 2078937 - DNA, 25 bp, Homo sapien
aataaggtattcttcggtctctctg

SEQ ID NO: 2078938 - DNA, 25 bp, Homo sapien
gatttttgcgatactaagataaagg

SEQ ID NO: 2078939 - DNA, 25 bp, Homo sapien
tgtctgtcccaagaagctagagctg

SEQ ID NO: 2078940 - DNA, 25 bp, Homo sapien
cttccgcatcaacgtagtccacgtt

SEQ ID NO: 2078941 - DNA, 25 bp, Homo sapien
caccaaaagggtttcccatgttcat

SEQ ID NO: 2078942 - DNA, 25 bp, Homo sapien
caaaagagttacgtccatcatggaa

SEQ ID NO: 2078943 - DNA, 25 bp, Homo sapien
gataaggccactaaatccagtgacc

SEQ ID NO: 2078944 - DNA, 25 bp, Homo sapien
gaacagtgaagagtaattctacctc

SEQ ID NO: 2078945 - DNA, 25 bp, Homo sapien
tccaaatgcatccagaacccacaag

SEQ ID NO: 2078946 - DNA, 25 bp, Homo sapien
cagtgaccatctgtcagtctgcttc

SEQ ID NO: 2078947 - DNA, 25 bp, Homo sapien
cactccttttaccaggtgaggacac

SEQ ID NO: 2078948 - DNA, 25 bp, Homo sapien
cagtgcggcctctaggaggtgatta

SEQ ID NO: 2078949 - DNA, 25 bp, Homo sapien
tgatcaccaatgtgactgtttaggc

SEQ ID NO: 2078950 - DNA, 25 bp, Homo sapien
ccaaaatccgtgtcttaaaatctga

SEQ ID NO: 2078951 - DNA, 25 bp, Homo sapien
cctgatgcctttcccaggcaatcgg

SEQ ID NO: 2078952 - DNA, 25 bp, Homo sapien
ccaggcaatcggctgcagtggtcct

SEQ ID NO: 2078953 - DNA, 25 bp, Homo sapien
cctttcccaggcaatcggctgcagt

SEQ ID NO: 2078954 - DNA, 25 bp, Homo sapien
tggaacagcagcgaccagccccaca

SEQ ID NO: 2078955 - DNA, 25 bp, Homo sapien
tgacagggaccaccacacacagagc

SEQ ID NO: 2078956 - DNA, 25 bp, Homo sapien
tgcatgacagggaccaccacacaca

SEQ ID NO: 2078957 - DNA, 25 bp, Homo sapien
catgacagggaccaccacacacaga

SEQ ID NO: 2078958 - DNA, 25 bp, Homo sapien
ctgcatgacagggaccaccacacac

SEQ ID NO: 2078959 - DNA, 25 bp, Homo sapien
tctagaagctcgctccttatttccc

SEQ ID NO: 2078960 - DNA, 25 bp, Homo sapien
tatttcccatcctgtccgaagcatc

SEQ ID NO: 2078961 - DNA, 25 bp, Homo sapien
gcatgtcagaacctctcatgagcct

SEQ ID NO: 2078962 - DNA, 25 bp, Homo sapien
tgtcagaacctctcatgagccttcc

SEQ ID NO: 2078963 - DNA, 25 bp, Homo sapien
tcgcacgtgtgggactgttctgttc

SEQ ID NO: 2078964 - DNA, 25 bp, Homo sapien
gattttcggttgtatcagcaccagc

SEQ ID NO: 2078965 - DNA, 25 bp, Homo sapien
accagtgaactacgccaggctcaaa

SEQ ID NO: 2078966 - DNA, 25 bp, Homo sapien
cagtgcttgtcaagtgaagtggcca

SEQ ID NO: 2078967 - DNA, 25 bp, Homo sapien
atatcagttttccacgagaggccaa

SEQ ID NO: 2078968 - DNA, 25 bp, Homo sapien
taacaatgagcttcacatgtccatt

SEQ ID NO: 2078969 - DNA, 25 bp, Homo sapien
gagcttcacatgtccattttcaata

SEQ ID NO: 2078970 - DNA, 25 bp, Homo sapien
cagttttccacgagaggccaacttt

SEQ ID NO: 2078971 - DNA, 25 bp, Homo sapien
tgagatgggtgtcccgaagacagca

SEQ ID NO: 2078972 - DNA, 25 bp, Homo sapien
ccttgagtctataggtgtcactgca

SEQ ID NO: 2078973 - DNA, 25 bp, Homo sapien
ccactgttagtttgatgaagctccc

SEQ ID NO: 2078974 - DNA, 25 bp, Homo sapien
catgtttacaactaccttgaggacc

SEQ ID NO: 2078975 - DNA, 25 bp, Homo sapien
aggatccttggggagggttgccaga

SEQ ID NO: 2078976 - DNA, 25 bp, Homo sapien
agagagccgagtgaaatactggggc

SEQ ID NO: 2078977 - DNA, 25 bp, Homo sapien
gctctctggatccacaaggaagcca

SEQ ID NO: 2078978 - DNA, 25 bp, Homo sapien
cttgcctaggaaggatccttgggga

SEQ ID NO: 2078979 - DNA, 25 bp, Homo sapien
cctccagctaaactttgtaacaact

SEQ ID NO: 2078980 - DNA, 25 bp, Homo sapien
ctccagctaaactttgtaacaactc

SEQ ID NO: 2078981 - DNA, 25 bp, Homo sapien
tgagctcagatacgcctagccctgt

SEQ ID NO: 2078982 - DNA, 25 bp, Homo sapien
gaacacctgggagattcatcacaaa

SEQ ID NO: 2078983 - DNA, 25 bp, Homo sapien
gaataatccgggaaacttcactggc

SEQ ID NO: 2078984 - DNA, 25 bp, Homo sapien
cagctccattgatgtgggaaccaca

SEQ ID NO: 2078985 - DNA, 25 bp, Homo sapien
gacatcatgtccagctatcaagaaa

SEQ ID NO: 2078986 - DNA, 25 bp, Homo sapien
gacagcatgcaagaataggtaagca

SEQ ID NO: 2078987 - DNA, 25 bp, Homo sapien
gacagagcaagcgtcagaaccagac

SEQ ID NO: 2078988 - DNA, 25 bp, Homo sapien
gactgagatctaaccaaaggactag

SEQ ID NO: 2078989 - DNA, 25 bp, Homo sapien
tgtaccatgcaaaacatttttcctt

SEQ ID NO: 2078990 - DNA, 25 bp, Homo sapien
cttctgaaaattggtaatcattagc

SEQ ID NO: 2078991 - DNA, 25 bp, Homo sapien
ttcagcttctgaaaattggtaatca

SEQ ID NO: 2078992 - DNA, 25 bp, Homo sapien
cagcttctgaaaattggtaatcatt

SEQ ID NO: 2078993 - DNA, 25 bp, Homo sapien
acgccaaaatagaacatcctcagat

SEQ ID NO: 2078994 - DNA, 25 bp, Homo sapien
cacgccaaaatagaacatcctcaga

SEQ ID NO: 2078995 - DNA, 25 bp, Homo sapien
gaaactccaagtttacaggctacag

SEQ ID NO: 2078996 - DNA, 25 bp, Homo sapien
taatgaagatatctagtggtcacca

SEQ ID NO: 2078997 - DNA, 25 bp, Homo sapien
caaacagtgatgcagtacgtagagg

SEQ ID NO: 2078998 - DNA, 25 bp, Homo sapien
tgcttggcgtaagctccctcctttc

SEQ ID NO: 2078999 - DNA, 25 bp, Homo sapien
gctggcaaatttaccacattccttt

SEQ ID NO: 2079000 - DNA, 25 bp, Homo sapien
tggcaaatttaccacattcctttaa

SEQ ID NO: 2079001 - DNA, 25 bp, Homo sapien
gcaaatttaccacattcctttaaga

SEQ ID NO: 2079002 - DNA, 25 bp, Homo sapien
agcggcacgggccctgctggcaaat

SEQ ID NO: 2079003 - DNA, 25 bp, Homo sapien
gattataaagtgaccagtgagggca

SEQ ID NO: 2079004 - DNA, 25 bp, Homo sapien
tgacacacgggtctgggaggatact

SEQ ID NO: 2079005 - DNA, 25 bp, Homo sapien
tgagggcaattcttaactcggacat

SEQ ID NO: 2079006 - DNA, 25 bp, Homo sapien
tgaagagactcggtccagtgaggac

SEQ ID NO: 2079007 - DNA, 25 bp, Homo sapien
ctctcttggtgaagagattgcgaaa

SEQ ID NO: 2079008 - DNA, 25 bp, Homo sapien
gcgaaatgtaccacataggtagaaa

SEQ ID NO: 2079009 - DNA, 25 bp, Homo sapien
gagattgcgaaatgtaccacatagg

SEQ ID NO: 2079010 - DNA, 25 bp, Homo sapien
tggtgaagagattgcgaaatgtacc

SEQ ID NO: 2079011 - DNA, 25 bp, Homo sapien
tgcagatcaacatggagttggtagc

SEQ ID NO: 2079012 - DNA, 25 bp, Homo sapien
tatcatccaaaaaggggctatgtgg

SEQ ID NO: 2079013 - DNA, 25 bp, Homo sapien
ccatactcggggctatcatccaaaa

SEQ ID NO: 2079014 - DNA, 25 bp, Homo sapien
tggtagccgtgcagtccatactcgg

SEQ ID NO: 2079015 - DNA, 25 bp, Homo sapien
atagtagccgagcctaatgtgctcc

SEQ ID NO: 2079016 - DNA, 25 bp, Homo sapien
gaagatccgaatgagtctgtcacag

SEQ ID NO: 2079017 - DNA, 25 bp, Homo sapien
gcaggcagaagatccgaatgagtct

SEQ ID NO: 2079018 - DNA, 25 bp, Homo sapien
gcagaagatccgaatgagtctgtca

SEQ ID NO: 2079019 - DNA, 25 bp, Homo sapien
tccgaatgagtctgtcacagccaat

SEQ ID NO: 2079020 - DNA, 25 bp, Homo sapien
tgcaattaaagaatgccatcggagt

SEQ ID NO: 2079021 - DNA, 25 bp, Homo sapien
caaatgactcagattgtactttgca

SEQ ID NO: 2079022 - DNA, 25 bp, Homo sapien
tactttgcaattaaagaatgccatc

SEQ ID NO: 2079023 - DNA, 25 bp, Homo sapien
aaatgactcagattgtactttgcaa

SEQ ID NO: 2079024 - DNA, 25 bp, Homo sapien
aaactggtgtcatgccacataaatc

SEQ ID NO: 2079025 - DNA, 25 bp, Homo sapien
tatgtttggtgggagttttatacca

SEQ ID NO: 2079026 - DNA, 25 bp, Homo sapien
taccagtcggtaaaaactggtgtca

SEQ ID NO: 2079027 - DNA, 25 bp, Homo sapien
taaatctaaggttgacaatgatgct

SEQ ID NO: 2079028 - DNA, 25 bp, Homo sapien
ggaaagatcaacatgctccatgata

SEQ ID NO: 2079029 - DNA, 25 bp, Homo sapien
caacatgctccatgatatattcttt

SEQ ID NO: 2079030 - DNA, 25 bp, Homo sapien
cagtaactgatgtgtcatttatgga

SEQ ID NO: 2079031 - DNA, 25 bp, Homo sapien
tgtgtcatttatggaaagatcaaca

SEQ ID NO: 2079032 - DNA, 25 bp, Homo sapien
aagcagttgagtagattccgatcca

SEQ ID NO: 2079033 - DNA, 25 bp, Homo sapien
gtttgagaatgtcagctagtgcggc

SEQ ID NO: 2079034 - DNA, 25 bp, Homo sapien
tcttaactggaaggcctgtgtaagg

SEQ ID NO: 2079035 - DNA, 25 bp, Homo sapien
tatcctgaactgacagaaagctcat

SEQ ID NO: 2079036 - DNA, 25 bp, Homo sapien
ataatccaattccatgaataagcca

SEQ ID NO: 2079037 - DNA, 25 bp, Homo sapien
gggaatacagcgaagacctcctggc

SEQ ID NO: 2079038 - DNA, 25 bp, Homo sapien
cacggctagggtcaaagccagcagg

SEQ ID NO: 2079039 - DNA, 25 bp, Homo sapien
attctgctctgcgaatgcacggcta

SEQ ID NO: 2079040 - DNA, 25 bp, Homo sapien
gctgcttgagactctgtggttaggt

SEQ ID NO: 2079041 - DNA, 25 bp, Homo sapien
atccaagtaggaaaatatcttcagc

SEQ ID NO: 2079042 - DNA, 25 bp, Homo sapien
acagaaggctcacagcatccaagta

SEQ ID NO: 2079043 - DNA, 25 bp, Homo sapien
ctagatgataaaagcgcctgctcac

SEQ ID NO: 2079044 - DNA, 25 bp, Homo sapien
gataaaagcgcctgctcacacatcc

SEQ ID NO: 2079045 - DNA, 25 bp, Homo sapien
tcagtcaacagcacctcaacctgtg

SEQ ID NO: 2079046 - DNA, 25 bp, Homo sapien
tcagctgtaaccagtccaaagtcat

SEQ ID NO: 2079047 - DNA, 25 bp, Homo sapien
caacctgtgctactgcttcagccaa

SEQ ID NO: 2079048 - DNA, 25 bp, Homo sapien
tcatcctgagccagactgacacatc

SEQ ID NO: 2079049 - DNA, 25 bp, Homo sapien
gagaaagagctctcccagtgctgtc

SEQ ID NO: 2079050 - DNA, 25 bp, Homo sapien
agtgctgtccacctccggcatggca

SEQ ID NO: 2079051 - DNA, 25 bp, Homo sapien
gcagagcctgcagaaagcttgaccc

SEQ ID NO: 2079052 - DNA, 25 bp, Homo sapien
caggaacccagaacagcaggagaaa

SEQ ID NO: 2079053 - DNA, 25 bp, Homo sapien
ggtttagaaatatacactctcactg

SEQ ID NO: 2079054 - DNA, 25 bp, Homo sapien
ccaaaggtttagaaatatacactct

SEQ ID NO: 2079055 - DNA, 25 bp, Homo sapien
ttagaaatatacactctcactgtag

SEQ ID NO: 2079056 - DNA, 25 bp, Homo sapien
aaggtttagaaatatacactctcac

SEQ ID NO: 2079057 - DNA, 25 bp, Homo sapien
cagaaaatcatacagctcacagcct

SEQ ID NO: 2079058 - DNA, 25 bp, Homo sapien
cacacaggtattggatattggcgca

SEQ ID NO: 2079059 - DNA, 25 bp, Homo sapien
ggaagcttctgctttaagcaacata

SEQ ID NO: 2079060 - DNA, 25 bp, Homo sapien
gcacacccggagagccatgaatggt

SEQ ID NO: 2079061 - DNA, 25 bp, Homo sapien
tatgcctggcatgcgagcagcattc

SEQ ID NO: 2079062 - DNA, 25 bp, Homo sapien
gagatctagagacaccaaggtttaa

SEQ ID NO: 2079063 - DNA, 25 bp, Homo sapien
taatttcaaacctaagagtcacatg

SEQ ID NO: 2079064 - DNA, 25 bp, Homo sapien
ctgatcgttcagcacccacaatatg

SEQ ID NO: 2079065 - DNA, 25 bp, Homo sapien
ttatgtttttatgcgaatctatacg

SEQ ID NO: 2079066 - DNA, 25 bp, Homo sapien
atgtttttatgcgaatctatacgtc

SEQ ID NO: 2079067 - DNA, 25 bp, Homo sapien
ccaattgcacatttttaaggtccac

SEQ ID NO: 2079068 - DNA, 25 bp, Homo sapien
tgcacatttttaaggtccacataat

SEQ ID NO: 2079069 - DNA, 25 bp, Homo sapien
ttttacttcttcacgctgaagatgc

SEQ ID NO: 2079070 - DNA, 25 bp, Homo sapien
ttacttcttcacgctgaagatgctt

SEQ ID NO: 2079071 - DNA, 25 bp, Homo sapien
cattttacttcttcacgctgaagat

SEQ ID NO: 2079072 - DNA, 25 bp, Homo sapien
tcattttacttcttcacgctgaaga

SEQ ID NO: 2079073 - DNA, 25 bp, Homo sapien
ccacgttgcagggtagaaaggattt

SEQ ID NO: 2079074 - DNA, 25 bp, Homo sapien
cgttgcagggtagaaaggatttcct

SEQ ID NO: 2079075 - DNA, 25 bp, Homo sapien
tgcagggtagaaaggatttcctccg

SEQ ID NO: 2079076 - DNA, 25 bp, Homo sapien
gatttcctccggtcgttcttccata

SEQ ID NO: 2079077 - DNA, 25 bp, Homo sapien
ttctcacgttgaagacggccacggg

SEQ ID NO: 2079078 - DNA, 25 bp, Homo sapien
ccttctcacgttgaagacggccacg

SEQ ID NO: 2079079 - DNA, 25 bp, Homo sapien
ctcacgttgaagacggccacgggcc

SEQ ID NO: 2079080 - DNA, 25 bp, Homo sapien
cttctcacgttgaagacggccacgg

SEQ ID NO: 2079081 - DNA, 25 bp, Homo sapien
cgcagtgacgggcttcccgccaggg

SEQ ID NO: 2079082 - DNA, 25 bp, Homo sapien
ctggacgaataaaatacacggtgaa

SEQ ID NO: 2079083 - DNA, 25 bp, Homo sapien
gacgaataaaatacacggtgaagag

SEQ ID NO: 2079084 - DNA, 25 bp, Homo sapien
taaaatacacggtgaagagagcggg

SEQ ID NO: 2079085 - DNA, 25 bp, Homo sapien
ggccgagccagtgctgctgcaagat

SEQ ID NO: 2079086 - DNA, 25 bp, Homo sapien
cgcgcagcgtctggaggccgagcca

SEQ ID NO: 2079087 - DNA, 25 bp, Homo sapien
ggcccgcgcagcgtctggaggccga

SEQ ID NO: 2079088 - DNA, 25 bp, Homo sapien
agccagtgctgctgcaagatccgac

SEQ ID NO: 2079089 - DNA, 25 bp, Homo sapien
acaaggagttcaccacaggaccgcg

SEQ ID NO: 2079090 - DNA, 25 bp, Homo sapien
aggagttcaccacaggaccgcgcca

SEQ ID NO: 2079091 - DNA, 25 bp, Homo sapien
agttcaccacaggaccgcgccaggg

SEQ ID NO: 2079092 - DNA, 25 bp, Homo sapien
agagacaaggagttcaccacaggac

SEQ ID NO: 2079093 - DNA, 25 bp, Homo sapien
caaagcgtgcttgaagactgagccc

SEQ ID NO: 2079094 - DNA, 25 bp, Homo sapien
tgcacaggtcctcggcaaagcgatt

SEQ ID NO: 2079095 - DNA, 25 bp, Homo sapien
tgtccggccgcatgtgtagtgaacc

SEQ ID NO: 2079096 - DNA, 25 bp, Homo sapien
tgtagttagcatcgtccctaagcgg

SEQ ID NO: 2079097 - DNA, 25 bp, Homo sapien
tgttgaatggcgtggactcgctact

SEQ ID NO: 2079098 - DNA, 25 bp, Homo sapien
gaaagacaagaaggagtgtatggct

SEQ ID NO: 2079099 - DNA, 25 bp, Homo sapien
ttatgttctcccattgactcaatca

SEQ ID NO: 2079100 - DNA, 25 bp, Homo sapien
gactcaatcatgacaatatttctgc

SEQ ID NO: 2079101 - DNA, 25 bp, Homo sapien
cactgatacttctgactgccaaaag

SEQ ID NO: 2079102 - DNA, 25 bp, Homo sapien
acattcaaatacgtgtgtgaggccc

SEQ ID NO: 2079103 - DNA, 25 bp, Homo sapien
ttgcactgatacttctgactgccaa

SEQ ID NO: 2079104 - DNA, 25 bp, Homo sapien
gatacttctgactgccaaaagaaca

SEQ ID NO: 2079105 - DNA, 25 bp, Homo sapien
caggcccttttctacccttgaaatg

SEQ ID NO: 2079106 - DNA, 25 bp, Homo sapien
agctgcaggcctgacagatctggag

SEQ ID NO: 2079107 - DNA, 25 bp, Homo sapien
tacccttgaaatgaggggtggagct

SEQ ID NO: 2079108 - DNA, 25 bp, Homo sapien
gagctgcaggcctgacagatctgga

SEQ ID NO: 2079109 - DNA, 25 bp, Homo sapien
ctgctacattgtcaccattgccttc

SEQ ID NO: 2079110 - DNA, 25 bp, Homo sapien
tggagaaccgcagcactcaatgctg

SEQ ID NO: 2079111 - DNA, 25 bp, Homo sapien
gagaaccgcagcactcaatgctgcc

SEQ ID NO: 2079112 - DNA, 25 bp, Homo sapien
gaaccgcagcactcaatgctgcctg

SEQ ID NO: 2079113 - DNA, 25 bp, Homo sapien
ctggagaaccgcagcactcaatgct

SEQ ID NO: 2079114 - DNA, 25 bp, Homo sapien
tcactaagacccatgcagaagtttc

SEQ ID NO: 2079115 - DNA, 25 bp, Homo sapien
tggcccctgtggttgcaactctgag

SEQ ID NO: 2079116 - DNA, 25 bp, Homo sapien
tatggtagcacatgggagatctggc

SEQ ID NO: 2079117 - DNA, 25 bp, Homo sapien
gctctgatgagcagttaaacgacac

SEQ ID NO: 2079118 - DNA, 25 bp, Homo sapien
aaaggggctctaagccatcgctgca

SEQ ID NO: 2079119 - DNA, 25 bp, Homo sapien
tggctccgtggcgagctcccatggg

SEQ ID NO: 2079120 - DNA, 25 bp, Homo sapien
aagagggagctattcattctaaggg

SEQ ID NO: 2079121 - DNA, 25 bp, Homo sapien
catgccaaaaacaaggcgagtgccg

SEQ ID NO: 2079122 - DNA, 25 bp, Homo sapien
aaggatgctcctctaggtaacactg

SEQ ID NO: 2079123 - DNA, 25 bp, Homo sapien
tggtcccaaggatgctcctctaggt

SEQ ID NO: 2079124 - DNA, 25 bp, Homo sapien
gcctgtaactccaccggcttcctgc

SEQ ID NO: 2079125 - DNA, 25 bp, Homo sapien
tcatctctcttctccgccagctctg

SEQ ID NO: 2079126 - DNA, 25 bp, Homo sapien
caccggcagccgacaatactgggtt

SEQ ID NO: 2079127 - DNA, 25 bp, Homo sapien
agcagttcaggactggagactgaga

SEQ ID NO: 2079128 - DNA, 25 bp, Homo sapien
gagactgagaactgtgtgtcattca

SEQ ID NO: 2079129 - DNA, 25 bp, Homo sapien
gacatgctggattccagggtcaggt

SEQ ID NO: 2079130 - DNA, 25 bp, Homo sapien
tgtagcttacggtccctttcaggcc

SEQ ID NO: 2079131 - DNA, 25 bp, Homo sapien
aaaactctccaagggcctcaaagtg

SEQ ID NO: 2079132 - DNA, 25 bp, Homo sapien
agtggggctgtagcttacggtccct

SEQ ID NO: 2079133 - DNA, 25 bp, Homo sapien
gcttacggtccctttcaggcccatg

SEQ ID NO: 2079134 - DNA, 25 bp, Homo sapien
tggggtgggaaaggtgaaaaatgca

SEQ ID NO: 2079135 - DNA, 25 bp, Homo sapien
gcagaagggcacgaggttggaacag

SEQ ID NO: 2079136 - DNA, 25 bp, Homo sapien
acacagtgcgctgggacaatgccag

SEQ ID NO: 2079137 - DNA, 25 bp, Homo sapien
aacaggagctgttgatgggactcag

SEQ ID NO: 2079138 - DNA, 25 bp, Homo sapien
aaagagagcaatcaggttgtgggtg

SEQ ID NO: 2079139 - DNA, 25 bp, Homo sapien
ggaggatgcattggcgcttccattc

SEQ ID NO: 2079140 - DNA, 25 bp, Homo sapien
caggattcccactcgggcattgctc

SEQ ID NO: 2079141 - DNA, 25 bp, Homo sapien
gcttccattccaacactgcgggtgc

SEQ ID NO: 2079142 - DNA, 25 bp, Homo sapien
ccgcctgggagggactttgactcac

SEQ ID NO: 2079143 - DNA, 25 bp, Homo sapien
tctgcacgactaaaggtgaatgaca

SEQ ID NO: 2079144 - DNA, 25 bp, Homo sapien
gctctgcacgactaaaggtgaatga

SEQ ID NO: 2079145 - DNA, 25 bp, Homo sapien
tgcacgactaaaggtgaatgacagt

SEQ ID NO: 2079146 - DNA, 25 bp, Homo sapien
ctctgcacgactaaaggtgaatgac

SEQ ID NO: 2079147 - DNA, 25 bp, Homo sapien
gccagtggccccaggtgggctgcat

SEQ ID NO: 2079148 - DNA, 25 bp, Homo sapien
gtggccccaggtgggctgcatagcc

SEQ ID NO: 2079149 - DNA, 25 bp, Homo sapien
ccagtggccccaggtgggctgcata

SEQ ID NO: 2079150 - DNA, 25 bp, Homo sapien
cagtggccccaggtgggctgcatag

SEQ ID NO: 2079151 - DNA, 25 bp, Homo sapien
agattagttggcctcgaggctctgg

SEQ ID NO: 2079152 - DNA, 25 bp, Homo sapien
ctcgaggctctggtctagtagaaga

SEQ ID NO: 2079153 - DNA, 25 bp, Homo sapien
gaagtccagcgtttgaatcagatca

SEQ ID NO: 2079154 - DNA, 25 bp, Homo sapien
tcagatcatggaagatggctctaga

SEQ ID NO: 2079155 - DNA, 25 bp, Homo sapien
ggcccacagagtacggtcttcccat

SEQ ID NO: 2079156 - DNA, 25 bp, Homo sapien
gggtcaccagcccagtcacagcacg

SEQ ID NO: 2079157 - DNA, 25 bp, Homo sapien
cacggcccacagagtacggtcttcc

SEQ ID NO: 2079158 - DNA, 25 bp, Homo sapien
agccacggcccacgagggtcaccag

SEQ ID NO: 2079159 - DNA, 25 bp, Homo sapien
cccttatgagacagggtaagtgatg

SEQ ID NO: 2079160 - DNA, 25 bp, Homo sapien
acagggtaagtgatgttgaaggctt

SEQ ID NO: 2079161 - DNA, 25 bp, Homo sapien
caggtttcccttatgagacagggta

SEQ ID NO: 2079162 - DNA, 25 bp, Homo sapien
tatgagacagggtaagtgatgttga

SEQ ID NO: 2079163 - DNA, 25 bp, Homo sapien
gactggttcggttcaaggcgtacat

SEQ ID NO: 2079164 - DNA, 25 bp, Homo sapien
ttcttctgactggttcggttcaagg

SEQ ID NO: 2079165 - DNA, 25 bp, Homo sapien
ggttcggttcaaggcgtacatcatt

SEQ ID NO: 2079166 - DNA, 25 bp, Homo sapien
ttctgactggttcggttcaaggcgt

SEQ ID NO: 2079167 - DNA, 25 bp, Homo sapien
taataacgttactgtcaaaagaagc

SEQ ID NO: 2079168 - DNA, 25 bp, Homo sapien
cgttactgtcaaaagaagcaagagg

SEQ ID NO: 2079169 - DNA, 25 bp, Homo sapien
aagaagcaagaggagtagcatttgc

SEQ ID NO: 2079170 - DNA, 25 bp, Homo sapien
cagtcataataacgttactgtcaaa

SEQ ID NO: 2079171 - DNA, 25 bp, Homo sapien
tttcaactcaggaagtgattccatc

SEQ ID NO: 2079172 - DNA, 25 bp, Homo sapien
gctagcttttactgataaagaggga

SEQ ID NO: 2079173 - DNA, 25 bp, Homo sapien
cattcccctctacgtgattgtttta

SEQ ID NO: 2079174 - DNA, 25 bp, Homo sapien
agagggatgtgtctacaatttgcct

SEQ ID NO: 2079175 - DNA, 25 bp, Homo sapien
gtggccccgtgacacagccgagctg

SEQ ID NO: 2079176 - DNA, 25 bp, Homo sapien
ggtggccccgtgacacagccgagct

SEQ ID NO: 2079177 - DNA, 25 bp, Homo sapien
aggtggccccgtgacacagccgagc

SEQ ID NO: 2079178 - DNA, 25 bp, Homo sapien
acatagctcccatcgccacaacatg

SEQ ID NO: 2079179 - DNA, 25 bp, Homo sapien
ctggcgacccaatcaactcctagga

SEQ ID NO: 2079180 - DNA, 25 bp, Homo sapien
aactcctaggatccaattcactctc

SEQ ID NO: 2079181 - DNA, 25 bp, Homo sapien
catcgccacaacatggcgggctgcc

SEQ ID NO: 2079182 - DNA, 25 bp, Homo sapien
acgtgaggaccagtgccagtccctt

SEQ ID NO: 2079183 - DNA, 25 bp, Homo sapien
gtgaggaccagtgccagtccctttc

SEQ ID NO: 2079184 - DNA, 25 bp, Homo sapien
gaggaccagtgccagtccctttcca

SEQ ID NO: 2079185 - DNA, 25 bp, Homo sapien
tcacgtgaggaccagtgccagtccc

SEQ ID NO: 2079186 - DNA, 25 bp, Homo sapien
cctgctttacggacagctttcagtt

SEQ ID NO: 2079187 - DNA, 25 bp, Homo sapien
gtttcctgctttacggacagctttc

SEQ ID NO: 2079188 - DNA, 25 bp, Homo sapien
tcctgctttacggacagctttcagt

SEQ ID NO: 2079189 - DNA, 25 bp, Homo sapien
tgctttacggacagctttcagtttg

SEQ ID NO: 2079190 - DNA, 25 bp, Homo sapien
tacgaaacaagagtatgttctctct

SEQ ID NO: 2079191 - DNA, 25 bp, Homo sapien
ctacgaaacaagagtatgttctctc

SEQ ID NO: 2079192 - DNA, 25 bp, Homo sapien
acaagagtatgttctctcttgggaa

SEQ ID NO: 2079193 - DNA, 25 bp, Homo sapien
gaaacaagagtatgttctctcttgg

SEQ ID NO: 2079194 - DNA, 25 bp, Homo sapien
aggttgggagaacagtagaaagttg

SEQ ID NO: 2079195 - DNA, 25 bp, Homo sapien
ttttggacagaaagccaccaggttg

SEQ ID NO: 2079196 - DNA, 25 bp, Homo sapien
aagaactgttccctagctctgccca

SEQ ID NO: 2079197 - DNA, 25 bp, Homo sapien
aagcgcatggcctccgtggaggaaa

SEQ ID NO: 2079198 - DNA, 25 bp, Homo sapien
gcagtgcactttctgggacactagt

SEQ ID NO: 2079199 - DNA, 25 bp, Homo sapien
tgtatcaacatatgacccgtgttca

SEQ ID NO: 2079200 - DNA, 25 bp, Homo sapien
catattcagcaggatataggaagag

SEQ ID NO: 2079201 - DNA, 25 bp, Homo sapien
tgggctggagattaacgttcacatt

SEQ ID NO: 2079202 - DNA, 25 bp, Homo sapien
ctcatgaaggcggtcctgacacgtg

SEQ ID NO: 2079203 - DNA, 25 bp, Homo sapien
gggagaggcagactgcatttctgac

SEQ ID NO: 2079204 - DNA, 25 bp, Homo sapien
catatataagggatgtttaggtcag

SEQ ID NO: 2079205 - DNA, 25 bp, Homo sapien
aaattgtccagaggcgaacccgaat

SEQ ID NO: 2079206 - DNA, 25 bp, Homo sapien
gtgatgcggcgacaagaagcatggt

SEQ ID NO: 2079207 - DNA, 25 bp, Homo sapien
aaagctggtagctgatggccaggca

SEQ ID NO: 2079208 - DNA, 25 bp, Homo sapien
gaaccatgacaccagggtctgctga

SEQ ID NO: 2079209 - DNA, 25 bp, Homo sapien
gagctggcgcacattgattacaaga

SEQ ID NO: 2079210 - DNA, 25 bp, Homo sapien
ggtctgctgaaagaaagctggtagc

SEQ ID NO: 2079211 - DNA, 25 bp, Homo sapien
gatatggtatgaggccaagatccac

SEQ ID NO: 2079212 - DNA, 25 bp, Homo sapien
atccacgagaacaggcacaatgtgg

SEQ ID NO: 2079213 - DNA, 25 bp, Homo sapien
tatgaggccaagatccacgagaaca

SEQ ID NO: 2079214 - DNA, 25 bp, Homo sapien
gtatctggatatggtatgaggccaa

SEQ ID NO: 2079215 - DNA, 25 bp, Homo sapien
tgaccatgcaggacgataaggacaa

SEQ ID NO: 2079216 - DNA, 25 bp, Homo sapien
gtgaccatgcaggacgataaggaca

SEQ ID NO: 2079217 - DNA, 25 bp, Homo sapien
agtgaccatgcaggacgataaggac

SEQ ID NO: 2079218 - DNA, 25 bp, Homo sapien
gaccatgcaggacgataaggacaat

SEQ ID NO: 2079219 - DNA, 25 bp, Homo sapien
tccctgggtgaatgtctactcccct

SEQ ID NO: 2079220 - DNA, 25 bp, Homo sapien
ggatggttggaacccgatccacagg

SEQ ID NO: 2079221 - DNA, 25 bp, Homo sapien
tagagacaagcttagcagagatgct

SEQ ID NO: 2079222 - DNA, 25 bp, Homo sapien
tggtgagtgcacactagagacaagc

SEQ ID NO: 2079223 - DNA, 25 bp, Homo sapien
acagccagggtgagatcatcagcca

SEQ ID NO: 2079224 - DNA, 25 bp, Homo sapien
ggagcaacgaccagaggacatacgt

SEQ ID NO: 2079225 - DNA, 25 bp, Homo sapien
ggacatacgtgtggcattcacagcc

SEQ ID NO: 2079226 - DNA, 25 bp, Homo sapien
ccaactgtggatgtaaactctgctc

SEQ ID NO: 2079227 - DNA, 25 bp, Homo sapien
cagacagaactcaaggagctggtgg

SEQ ID NO: 2079228 - DNA, 25 bp, Homo sapien
tgaggacaacactgtagggccagac

SEQ ID NO: 2079229 - DNA, 25 bp, Homo sapien
atgtgggtgccactcgggccgcacc

SEQ ID NO: 2079230 - DNA, 25 bp, Homo sapien
cctccagggcaaccaggatgtgggt

SEQ ID NO: 2079231 - DNA, 25 bp, Homo sapien
gcaacttgaagtcccttcaatctat

SEQ ID NO: 2079232 - DNA, 25 bp, Homo sapien
atctctttgcaacttgaagtccctt

SEQ ID NO: 2079233 - DNA, 25 bp, Homo sapien
tccttgctggcggtttccaaatact

SEQ ID NO: 2079234 - DNA, 25 bp, Homo sapien
ttgctggcggtttccaaatactggc

SEQ ID NO: 2079235 - DNA, 25 bp, Homo sapien
tctggagcaaccagttcccgggaca

SEQ ID NO: 2079236 - DNA, 25 bp, Homo sapien
ctggagcaaccagttcccgggacat

SEQ ID NO: 2079237 - DNA, 25 bp, Homo sapien
gtgggcacttgtttagggctgtacc

SEQ ID NO: 2079238 - DNA, 25 bp, Homo sapien
taaagacatctttcgctgagatcac

SEQ ID NO: 2079239 - DNA, 25 bp, Homo sapien
gatgtccccgtggaatgcagcttcc

SEQ ID NO: 2079240 - DNA, 25 bp, Homo sapien
ggctgagaacggctctcggcacatg

SEQ ID NO: 2079241 - DNA, 25 bp, Homo sapien
ttcatggcctactggactctgtgcc

SEQ ID NO: 2079242 - DNA, 25 bp, Homo sapien
aggctgtggtccatgtccaacttca

SEQ ID NO: 2079243 - DNA, 25 bp, Homo sapien
tctgtgccttcagtaggaaggagga

SEQ ID NO: 2079244 - DNA, 25 bp, Homo sapien
atgtccaacttcatggcctactgga

SEQ ID NO: 2079245 - DNA, 25 bp, Homo sapien
gacaccccatccctattggacaaac

SEQ ID NO: 2079246 - DNA, 25 bp, Homo sapien
ccctttgacaccccatccctattgg

SEQ ID NO: 2079247 - DNA, 25 bp, Homo sapien
tttgacaccccatccctattggaca

SEQ ID NO: 2079248 - DNA, 25 bp, Homo sapien
ttgacaccccatccctattggacaa

SEQ ID NO: 2079249 - DNA, 25 bp, Homo sapien
gcagctgagcatcagacttgacatc

SEQ ID NO: 2079250 - DNA, 25 bp, Homo sapien
tcgtgcccttttcgattgcttctga

SEQ ID NO: 2079251 - DNA, 25 bp, Homo sapien
tcagacttgacatcaatccgtgccc

SEQ ID NO: 2079252 - DNA, 25 bp, Homo sapien
acacctccgctaagcagctgagcat

SEQ ID NO: 2079253 - DNA, 25 bp, Homo sapien
ttgagcgcagaaaggacagttcttt

SEQ ID NO: 2079254 - DNA, 25 bp, Homo sapien
tcttcctgcgctgacttctgaggag

SEQ ID NO: 2079255 - DNA, 25 bp, Homo sapien
gcacactcgaaaaatttgagcgcag

SEQ ID NO: 2079256 - DNA, 25 bp, Homo sapien
cgaaaaatttgagcgcagaaaggac

SEQ ID NO: 2079257 - DNA, 25 bp, Homo sapien
cctctgccatgtataggcgatacat

SEQ ID NO: 2079258 - DNA, 25 bp, Homo sapien
tcagtcctctgccatgtataggcga

SEQ ID NO: 2079259 - DNA, 25 bp, Homo sapien
taggcgatacatcaaggcgacggcc

SEQ ID NO: 2079260 - DNA, 25 bp, Homo sapien
agtcctctgccatgtataggcgata

SEQ ID NO: 2079261 - DNA, 25 bp, Homo sapien
tgacatgagtgtaacacatgccctg

SEQ ID NO: 2079262 - DNA, 25 bp, Homo sapien
tgccctgctggctttatgagaaaac

SEQ ID NO: 2079263 - DNA, 25 bp, Homo sapien
caacgtggatttgctaaaagtgaca

SEQ ID NO: 2079264 - DNA, 25 bp, Homo sapien
tgatgtgcactgtggtggactcaaa

SEQ ID NO: 2079265 - DNA, 25 bp, Homo sapien
gaaatagacttggtatacatatgtg

SEQ ID NO: 2079266 - DNA, 25 bp, Homo sapien
acatatgtgtttcatagggactaca

SEQ ID NO: 2079267 - DNA, 25 bp, Homo sapien
taggctttagaaatagacttggtat

SEQ ID NO: 2079268 - DNA, 25 bp, Homo sapien
gtgtttcatagggactacaagtata

SEQ ID NO: 2079269 - DNA, 25 bp, Homo sapien
tcagaagatgtcgaaagggaaaatt

SEQ ID NO: 2079270 - DNA, 25 bp, Homo sapien
aaacagacattcatgttcacataca

SEQ ID NO: 2079271 - DNA, 25 bp, Homo sapien
caagggaatgctgaacttatttcat

SEQ ID NO: 2079272 - DNA, 25 bp, Homo sapien
cataaaatatcttgcacacgctagg

SEQ ID NO: 2079273 - DNA, 25 bp, Homo sapien
cattagcaaaacaatcagcggcctg

SEQ ID NO: 2079274 - DNA, 25 bp, Homo sapien
taattctgaccagacggaaccagca

SEQ ID NO: 2079275 - DNA, 25 bp, Homo sapien
gagaaactcccgtgaaaagacagac

SEQ ID NO: 2079276 - DNA, 25 bp, Homo sapien
gcaaagcagttatgagacccaccaa

SEQ ID NO: 2079277 - DNA, 25 bp, Homo sapien
attagttagctattagaggacacaa

SEQ ID NO: 2079278 - DNA, 25 bp, Homo sapien
gttagctattagaggacacaatcag

SEQ ID NO: 2079279 - DNA, 25 bp, Homo sapien
tagttagctattagaggacacaatc

SEQ ID NO: 2079280 - DNA, 25 bp, Homo sapien
agttagctattagaggacacaatca

SEQ ID NO: 2079281 - DNA, 25 bp, Homo sapien
cagtgagtccagatccatgccgctg

SEQ ID NO: 2079282 - DNA, 25 bp, Homo sapien
catgtgaatcagtgtaaattacagt

SEQ ID NO: 2079283 - DNA, 25 bp, Homo sapien
tgttcactccatgacttcgaggttc

SEQ ID NO: 2079284 - DNA, 25 bp, Homo sapien
tatgattggctctgccacctgttca

SEQ ID NO: 2079285 - DNA, 25 bp, Homo sapien
gaccagcctgagatgggtgctagat

SEQ ID NO: 2079286 - DNA, 25 bp, Homo sapien
gagccgggtgcttaacacttcccag

SEQ ID NO: 2079287 - DNA, 25 bp, Homo sapien
caactgaccagcctgagatgggtgc

SEQ ID NO: 2079288 - DNA, 25 bp, Homo sapien
atggttctggagcacgtctgtgagc

SEQ ID NO: 2079289 - DNA, 25 bp, Homo sapien
gtctaacatggagacactgtgagga

SEQ ID NO: 2079290 - DNA, 25 bp, Homo sapien
caagaaggggtattgctacgactaa

SEQ ID NO: 2079291 - DNA, 25 bp, Homo sapien
tcccttggcaggtctaacatggaga

SEQ ID NO: 2079292 - DNA, 25 bp, Homo sapien
taacttctacaagaatgctttcaaa

SEQ ID NO: 2079293 - DNA, 25 bp, Homo sapien
catgtcttaacgcacaaagggctgt

SEQ ID NO: 2079294 - DNA, 25 bp, Homo sapien
ccgatggttatacagacacatgaca

SEQ ID NO: 2079295 - DNA, 25 bp, Homo sapien
tttccttagggcaggttcaagctaa

SEQ ID NO: 2079296 - DNA, 25 bp, Homo sapien
ttcaacctggagatcggccgatggt

SEQ ID NO: 2079297 - DNA, 25 bp, Homo sapien
tcaccagttctcgacacaagctcag

SEQ ID NO: 2079298 - DNA, 25 bp, Homo sapien
gattaaagatgatgtcttggcagca

SEQ ID NO: 2079299 - DNA, 25 bp, Homo sapien
ttagatcagaagcacgtgctaccat

SEQ ID NO: 2079300 - DNA, 25 bp, Homo sapien
gaacacctactatgcccaagagact

SEQ ID NO: 2079301 - DNA, 25 bp, Homo sapien
taaaaaccctctgccttcagtttga

SEQ ID NO: 2079302 - DNA, 25 bp, Homo sapien
ccttcagtttgacaagtattaaata

SEQ ID NO: 2079303 - DNA, 25 bp, Homo sapien
agtattaaatacaacgagaacatcc

SEQ ID NO: 2079304 - DNA, 25 bp, Homo sapien
acatccagagatacttgagatggtc

SEQ ID NO: 2079305 - DNA, 25 bp, Homo sapien
gcttgtttaactttggtctgtcatc

SEQ ID NO: 2079306 - DNA, 25 bp, Homo sapien
ggcttgtttaactttggtctgtcat

SEQ ID NO: 2079307 - DNA, 25 bp, Homo sapien
gaggcttgtttaactttggtctgtc

SEQ ID NO: 2079308 - DNA, 25 bp, Homo sapien
aggcttgtttaactttggtctgtca

SEQ ID NO: 2079309 - DNA, 25 bp, Homo sapien
tttattagactcagattgcgacacg

SEQ ID NO: 2079310 - DNA, 25 bp, Homo sapien
tccaaagtttcgaacagcacccatg

SEQ ID NO: 2079311 - DNA, 25 bp, Homo sapien
gaaagtaccacttccaaaatgctga

SEQ ID NO: 2079312 - DNA, 25 bp, Homo sapien
tgcgacacgtaattcagggaggagc

SEQ ID NO: 2079313 - DNA, 25 bp, Homo sapien
gtgtatgatatcttcagttaagccc

SEQ ID NO: 2079314 - DNA, 25 bp, Homo sapien
cccagttttagagtcataaactatt

SEQ ID NO: 2079315 - DNA, 25 bp, Homo sapien
gatatcttcagttaagccctgcagt

SEQ ID NO: 2079316 - DNA, 25 bp, Homo sapien
tatgatatcttcagttaagccctgc

SEQ ID NO: 2079317 - DNA, 25 bp, Homo sapien
gatcaggcatgtgtaacggcaggcc

SEQ ID NO: 2079318 - DNA, 25 bp, Homo sapien
gatgaatgaagcttactccctcaaa

SEQ ID NO: 2079319 - DNA, 25 bp, Homo sapien
tgatgaccctaagacactttgcctt

SEQ ID NO: 2079320 - DNA, 25 bp, Homo sapien
tggaaacaaggatgggatcaggcat

SEQ ID NO: 2079321 - DNA, 25 bp, Homo sapien
cagagcgggctcctagcaggtcttt

SEQ ID NO: 2079322 - DNA, 25 bp, Homo sapien
gagcgctcggcaacttctttccaag

SEQ ID NO: 2079323 - DNA, 25 bp, Homo sapien
cactccagaagctcagagcgctcgg

SEQ ID NO: 2079324 - DNA, 25 bp, Homo sapien
gctaaccatgcaccacaagtgggaa

SEQ ID NO: 2079325 - DNA, 25 bp, Homo sapien
aaagttctcagtagcgtcacctcca

SEQ ID NO: 2079326 - DNA, 25 bp, Homo sapien
gcatctgtagagtgcccgacatcct

SEQ ID NO: 2079327 - DNA, 25 bp, Homo sapien
gatggagctccccaatgatgaatgt

SEQ ID NO: 2079328 - DNA, 25 bp, Homo sapien
ggacatttccctggcatctgtagag

SEQ ID NO: 2079329 - DNA, 25 bp, Homo sapien
tactgtgaggacgacacaaagccat

SEQ ID NO: 2079330 - DNA, 25 bp, Homo sapien
ggagcccacacatctcatggcgaga

SEQ ID NO: 2079331 - DNA, 25 bp, Homo sapien
cttttacgcacagtggaaggcccgg

SEQ ID NO: 2079332 - DNA, 25 bp, Homo sapien
tgaacttgggaaaacacgcatgtag

SEQ ID NO: 2079333 - DNA, 25 bp, Homo sapien
tcaaagccaacccgaaacttctgga

SEQ ID NO: 2079334 - DNA, 25 bp, Homo sapien
caaagccaacccgaaacttctggat

SEQ ID NO: 2079335 - DNA, 25 bp, Homo sapien
ctcaaagccaacccgaaacttctgg

SEQ ID NO: 2079336 - DNA, 25 bp, Homo sapien
tagaagctgattatggtaccctggg

SEQ ID NO: 2079337 - DNA, 25 bp, Homo sapien
taccacccagggacaacagcaattg

SEQ ID NO: 2079338 - DNA, 25 bp, Homo sapien
caattgtcactgagctggtctccca

SEQ ID NO: 2079339 - DNA, 25 bp, Homo sapien
taccctgggaaaggatcatgcttgc

SEQ ID NO: 2079340 - DNA, 25 bp, Homo sapien
acactcacagctcccccggggatca

SEQ ID NO: 2079341 - DNA, 25 bp, Homo sapien
cccggggatcacaacaggcttcctt

SEQ ID NO: 2079342 - DNA, 25 bp, Homo sapien
ttcagagccagctctacactcacag

SEQ ID NO: 2079343 - DNA, 25 bp, Homo sapien
gctttcagagccagctctacactca

SEQ ID NO: 2079344 - DNA, 25 bp, Homo sapien
aagacacgtggcccacttaatacca

SEQ ID NO: 2079345 - DNA, 25 bp, Homo sapien
agacacgtggcccacttaataccat

SEQ ID NO: 2079346 - DNA, 25 bp, Homo sapien
gagaagacacgtggcccacttaata

SEQ ID NO: 2079347 - DNA, 25 bp, Homo sapien
gaagacacgtggcccacttaatacc

SEQ ID NO: 2079348 - DNA, 25 bp, Homo sapien
cttattcagaagctggtcactgggt

SEQ ID NO: 2079349 - DNA, 25 bp, Homo sapien
tagttccttagatactctacccaga

SEQ ID NO: 2079350 - DNA, 25 bp, Homo sapien
taaaagtggatctataaaaactggc

SEQ ID NO: 2079351 - DNA, 25 bp, Homo sapien
cagtcactctaggtttaaatttgca

SEQ ID NO: 2079352 - DNA, 25 bp, Homo sapien
acagcctgaacaaatgccttcaatt

SEQ ID NO: 2079353 - DNA, 25 bp, Homo sapien
cttccatccccggaagagtgacttc

SEQ ID NO: 2079354 - DNA, 25 bp, Homo sapien
tcctggcaccggacatgggccaggt

SEQ ID NO: 2079355 - DNA, 25 bp, Homo sapien
gcaggggctcgtatctgttcctcca

SEQ ID NO: 2079356 - DNA, 25 bp, Homo sapien
tccccggaagagtgacttcctggca

SEQ ID NO: 2079357 - DNA, 25 bp, Homo sapien
cgtcagctctaagccaacaggcagc

SEQ ID NO: 2079358 - DNA, 25 bp, Homo sapien
gacagaattctacggatgtaagaaa

SEQ ID NO: 2079359 - DNA, 25 bp, Homo sapien
gccatcatccacagagccgtcagct

SEQ ID NO: 2079360 - DNA, 25 bp, Homo sapien
ccatcattttggcatgggcctgcta

SEQ ID NO: 2079361 - DNA, 25 bp, Homo sapien
gcggtctcaggagtcaagcacggca

SEQ ID NO: 2079362 - DNA, 25 bp, Homo sapien
gggcgagtcccacgcagaacgtccg

SEQ ID NO: 2079363 - DNA, 25 bp, Homo sapien
tgctccagccacacaccgcggtctc

SEQ ID NO: 2079364 - DNA, 25 bp, Homo sapien
tccaaagctgttaggggcgagtccc

SEQ ID NO: 2079365 - DNA, 25 bp, Homo sapien
ggctgccaaggcgtgactggaaaag

SEQ ID NO: 2079366 - DNA, 25 bp, Homo sapien
ctggctgccaaggcgtgactggaaa

SEQ ID NO: 2079367 - DNA, 25 bp, Homo sapien
tggctgccaaggcgtgactggaaaa

SEQ ID NO: 2079368 - DNA, 25 bp, Homo sapien
gctgccaaggcgtgactggaaaagg

SEQ ID NO: 2079369 - DNA, 25 bp, Homo sapien
tggaccgcaaggtcggccagtggct

SEQ ID NO: 2079370 - DNA, 25 bp, Homo sapien
cttccaggtgaacgcgaacgcgagt

SEQ ID NO: 2079371 - DNA, 25 bp, Homo sapien
ctctcggggtgggtggtctccagcc

SEQ ID NO: 2079372 - DNA, 25 bp, Homo sapien
gaacgcgagtgggtgtggaccgcaa

SEQ ID NO: 2079373 - DNA, 25 bp, Homo sapien
caaatcgtacaccttgtggtgcagg

SEQ ID NO: 2079374 - DNA, 25 bp, Homo sapien
ttcacggcctcgtccgactgctctg

SEQ ID NO: 2079375 - DNA, 25 bp, Homo sapien
gtcaaatcgtacaccttgtggtgca

SEQ ID NO: 2079376 - DNA, 25 bp, Homo sapien
cggcctcgtccgactgctctgccat

SEQ ID NO: 2079377 - DNA, 25 bp, Homo sapien
cagccccgtcgggtggagcagagcg

SEQ ID NO: 2079378 - DNA, 25 bp, Homo sapien
agcagagcgcgcgactcagccagct

SEQ ID NO: 2079379 - DNA, 25 bp, Homo sapien
gggtggagcagagcgcgcgactcag

SEQ ID NO: 2079380 - DNA, 25 bp, Homo sapien
ccgtcgggtggagcagagcgcgcga

SEQ ID NO: 2079381 - DNA, 25 bp, Homo sapien
gctgatttgtctcaacaacgttgtg

SEQ ID NO: 2079382 - DNA, 25 bp, Homo sapien
cacttactataatctcacatctggg

SEQ ID NO: 2079383 - DNA, 25 bp, Homo sapien
tgaacacattcttattgctaggaag

SEQ ID NO: 2079384 - DNA, 25 bp, Homo sapien
cagaccgcaggtgttaaatttgaga

SEQ ID NO: 2079385 - DNA, 25 bp, Homo sapien
gaccagctttggtcggttcctgcct

SEQ ID NO: 2079386 - DNA, 25 bp, Homo sapien
tcctgccttggcgggaaaagttgac

SEQ ID NO: 2079387 - DNA, 25 bp, Homo sapien
tcactgggtcatccgtgaccagctt

SEQ ID NO: 2079388 - DNA, 25 bp, Homo sapien
ctttggtcggttcctgccttggcgg

SEQ ID NO: 2079389 - DNA, 25 bp, Homo sapien
tgggagagcgcagggaacgctggga

SEQ ID NO: 2079390 - DNA, 25 bp, Homo sapien
gcgcaaggcttgcagggcatgctgg

SEQ ID NO: 2079391 - DNA, 25 bp, Homo sapien
aaatactgggattggctcccgaggg

SEQ ID NO: 2079392 - DNA, 25 bp, Homo sapien
aacgctgggagagcgcgggaaatac

SEQ ID NO: 2079393 - DNA, 25 bp, Homo sapien
tgaggagggcacgaggggacactcc

SEQ ID NO: 2079394 - DNA, 25 bp, Homo sapien
cacgaggggacactccgatgaaggc

SEQ ID NO: 2079395 - DNA, 25 bp, Homo sapien
ctgtgaggagggcacgaggggacac

SEQ ID NO: 2079396 - DNA, 25 bp, Homo sapien
ggacactccgatgaaggcagggcac

SEQ ID NO: 2079397 - DNA, 25 bp, Homo sapien
tgcttttccagtttgtaagaccatt

SEQ ID NO: 2079398 - DNA, 25 bp, Homo sapien
tgaggagacgcctgacgcatctgca

SEQ ID NO: 2079399 - DNA, 25 bp, Homo sapien
cttccccacggttgcggaggagcag

SEQ ID NO: 2079400 - DNA, 25 bp, Homo sapien
ccgtgggcgttagaagtgttgcttt

SEQ ID NO: 2079401 - DNA, 25 bp, Homo sapien
cagggtcagcaggtagtatttggcc

SEQ ID NO: 2079402 - DNA, 25 bp, Homo sapien
tggccagggtcagcaggtagtattt

SEQ ID NO: 2079403 - DNA, 25 bp, Homo sapien
gggtcagcaggtagtatttggccat

SEQ ID NO: 2079404 - DNA, 25 bp, Homo sapien
ccagggtcagcaggtagtatttggc

SEQ ID NO: 2079405 - DNA, 25 bp, Homo sapien
caacatgcatgaactgggatatata

SEQ ID NO: 2079406 - DNA, 25 bp, Homo sapien
taacctgatgagatactggcccaac

SEQ ID NO: 2079407 - DNA, 25 bp, Homo sapien
tcaaaataggatgcttctgagagtg

SEQ ID NO: 2079408 - DNA, 25 bp, Homo sapien
caggagagttgctagaactgagacc

SEQ ID NO: 2079409 - DNA, 25 bp, Homo sapien
cgttctgatatgacaaacagaatgc

SEQ ID NO: 2079410 - DNA, 25 bp, Homo sapien
agaatgcagaacaccactctctgcc

SEQ ID NO: 2079411 - DNA, 25 bp, Homo sapien
agcaggccaactcccaagaggaagg

SEQ ID NO: 2079412 - DNA, 25 bp, Homo sapien
ggagaccaggcactcgttctgatat

SEQ ID NO: 2079413 - DNA, 25 bp, Homo sapien
cctggagctgatctatttgaaaagc

SEQ ID NO: 2079414 - DNA, 25 bp, Homo sapien
gccgctcctgaagttagctgtatag

SEQ ID NO: 2079415 - DNA, 25 bp, Homo sapien
tgtatagtcagggagtgccttcccc

SEQ ID NO: 2079416 - DNA, 25 bp, Homo sapien
tcctctgttgtcctcgggaatcact

SEQ ID NO: 2079417 - DNA, 25 bp, Homo sapien
tttcctttacaatgatctctccccc

SEQ ID NO: 2079418 - DNA, 25 bp, Homo sapien
ttcctttacaatgatctctccccca

SEQ ID NO: 2079419 - DNA, 25 bp, Homo sapien
agctgtcagggtttcctacagcatg

SEQ ID NO: 2079420 - DNA, 25 bp, Homo sapien
tacagcatggggaacttctctaggg

SEQ ID NO: 2079421 - DNA, 25 bp, Homo sapien
agcatggggaacttctctagggacc

SEQ ID NO: 2079422 - DNA, 25 bp, Homo sapien
aggccaagctgtcagggtttcctac

SEQ ID NO: 2079423 - DNA, 25 bp, Homo sapien
tttcaagctgtgtctggcagtggcg

SEQ ID NO: 2079424 - DNA, 25 bp, Homo sapien
agtggcggtgggattgtcttgcttc

SEQ ID NO: 2079425 - DNA, 25 bp, Homo sapien
ctgtactgagcaggcctgtagccag

SEQ ID NO: 2079426 - DNA, 25 bp, Homo sapien
gcggtgggattgtcttgcttcacat

SEQ ID NO: 2079427 - DNA, 25 bp, Homo sapien
ggaccagggcctccatccgcacggg

SEQ ID NO: 2079428 - DNA, 25 bp, Homo sapien
tgttaatggcctgtggaccagggcc

SEQ ID NO: 2079429 - DNA, 25 bp, Homo sapien
tatgaacatctgagccccatgccat

SEQ ID NO: 2079430 - DNA, 25 bp, Homo sapien
aactgctaacagtgccccgtccaac

SEQ ID NO: 2079431 - DNA, 25 bp, Homo sapien
gagctgtgggcaggtcagcttcccc

SEQ ID NO: 2079432 - DNA, 25 bp, Homo sapien
ggagctgtgggcaggtcagcttccc

SEQ ID NO: 2079433 - DNA, 25 bp, Homo sapien
gctgtgggcaggtcagcttccccat

SEQ ID NO: 2079434 - DNA, 25 bp, Homo sapien
caggagctgtgggcaggtcagcttc

SEQ ID NO: 2079435 - DNA, 25 bp, Homo sapien
ctcgaggacgcctgggacatgatga

SEQ ID NO: 2079436 - DNA, 25 bp, Homo sapien
acatgatgaggggttcccttgggcc

SEQ ID NO: 2079437 - DNA, 25 bp, Homo sapien
ctgggaaggacatgaggtgcccttt

SEQ ID NO: 2079438 - DNA, 25 bp, Homo sapien
ctgagcagatgcctcgctgggaagg

SEQ ID NO: 2079439 - DNA, 25 bp, Homo sapien
tcaatgacagtggttcctaaatcca

SEQ ID NO: 2079440 - DNA, 25 bp, Homo sapien
agcccggttgatggtccccaaagca

SEQ ID NO: 2079441 - DNA, 25 bp, Homo sapien
gcagaataggcctgaaaatgccatt

SEQ ID NO: 2079442 - DNA, 25 bp, Homo sapien
aaagcacagtgcatcttcaatgaca

SEQ ID NO: 2079443 - DNA, 25 bp, Homo sapien
tttattagagaaagctagaattaca

SEQ ID NO: 2079444 - DNA, 25 bp, Homo sapien
ttagagaaagctagaattacaaagg

SEQ ID NO: 2079445 - DNA, 25 bp, Homo sapien
agagaaagctagaattacaaaggac

SEQ ID NO: 2079446 - DNA, 25 bp, Homo sapien
tttttattagagaaagctagaatta

SEQ ID NO: 2079447 - DNA, 25 bp, Homo sapien
gacattgacaaagcgccggttgtac

SEQ ID NO: 2079448 - DNA, 25 bp, Homo sapien
taagagttggcattgggtcccttct

SEQ ID NO: 2079449 - DNA, 25 bp, Homo sapien
ttcttgctaaaggtgggcacgacat

SEQ ID NO: 2079450 - DNA, 25 bp, Homo sapien
ctaaaggtgggcacgacattgacaa

SEQ ID NO: 2079451 - DNA, 25 bp, Homo sapien
tcttccggggcaatgccctccagtg

SEQ ID NO: 2079452 - DNA, 25 bp, Homo sapien
caggagcacgacttgatcttccggg

SEQ ID NO: 2079453 - DNA, 25 bp, Homo sapien
gccaggagcacgacttgatcttccg

SEQ ID NO: 2079454 - DNA, 25 bp, Homo sapien
atgccctccagtgaggctacatgag

SEQ ID NO: 2079455 - DNA, 25 bp, Homo sapien
attggtgactgaaccgcggtcccag

SEQ ID NO: 2079456 - DNA, 25 bp, Homo sapien
ttggtgactgaaccgcggtcccagc

SEQ ID NO: 2079457 - DNA, 25 bp, Homo sapien
tggtgactgaaccgcggtcccagct

SEQ ID NO: 2079458 - DNA, 25 bp, Homo sapien
gtgactgaaccgcggtcccagctgc

SEQ ID NO: 2079459 - DNA, 25 bp, Homo sapien
cgtccgtacagaccgcgggctgcat

SEQ ID NO: 2079460 - DNA, 25 bp, Homo sapien
gcgtccgtacagaccgcgggctgca

SEQ ID NO: 2079461 - DNA, 25 bp, Homo sapien
gccaaacagattgcattacagcaga

SEQ ID NO: 2079462 - DNA, 25 bp, Homo sapien
gaaggttcaaaacgctgtacacaca

SEQ ID NO: 2079463 - DNA, 25 bp, Homo sapien
tccagaaagaaaagcgtaagtgaca

SEQ ID NO: 2079464 - DNA, 25 bp, Homo sapien
caaaagtagatcgttccagaaagcc

SEQ ID NO: 2079465 - DNA, 25 bp, Homo sapien
ctgcaagtggctctcggaagtcacc

SEQ ID NO: 2079466 - DNA, 25 bp, Homo sapien
gattaagcctgcatgccatcctctg

SEQ ID NO: 2079467 - DNA, 25 bp, Homo sapien
tcggaagtcaccagcagcctgctta

SEQ ID NO: 2079468 - DNA, 25 bp, Homo sapien
gcttatctccaaagcccgagaccaa

SEQ ID NO: 2079469 - DNA, 25 bp, Homo sapien
cgcgtcctgtcccatgttcctggta

SEQ ID NO: 2079470 - DNA, 25 bp, Homo sapien
gaagttttcctttcgtgtcccatgc

SEQ ID NO: 2079471 - DNA, 25 bp, Homo sapien
tgggcatgtgttggaagttttcctt

SEQ ID NO: 2079472 - DNA, 25 bp, Homo sapien
atgctgttctgtgtccctcctgcgg

SEQ ID NO: 2079473 - DNA, 25 bp, Homo sapien
agatgcccgctgatcttcccaggac

SEQ ID NO: 2079474 - DNA, 25 bp, Homo sapien
tgaaggacaaagagcaacaactctg

SEQ ID NO: 2079475 - DNA, 25 bp, Homo sapien
ctgaggcgccttcgcactgagatgc

SEQ ID NO: 2079476 - DNA, 25 bp, Homo sapien
ggaccctcatctccgtggctctaag

SEQ ID NO: 2079477 - DNA, 25 bp, Homo sapien
gggcctcggtgctccacagacgctg

SEQ ID NO: 2079478 - DNA, 25 bp, Homo sapien
ggctctgcgtgttgtttgacgcaag

SEQ ID NO: 2079479 - DNA, 25 bp, Homo sapien
tgcgtgttgtttgacgcaagtccac

SEQ ID NO: 2079480 - DNA, 25 bp, Homo sapien
ggtgctccacagacgctgagaaaca

SEQ ID NO: 2079481 - DNA, 25 bp, Homo sapien
gaaggacatgcgctgattgtgtcca

SEQ ID NO: 2079482 - DNA, 25 bp, Homo sapien
acaatgacggagctatgtgccaagg

SEQ ID NO: 2079483 - DNA, 25 bp, Homo sapien
gattgtgtccacaatgacggagcta

SEQ ID NO: 2079484 - DNA, 25 bp, Homo sapien
gacatgcgctgattgtgtccacaat

SEQ ID NO: 2079485 - DNA, 25 bp, Homo sapien
gactttgacattgagctattaataa

SEQ ID NO: 2079486 - DNA, 25 bp, Homo sapien
tccaaagctggtagcaattgagaaa

SEQ ID NO: 2079487 - DNA, 25 bp, Homo sapien
aatttcaatctccaaagctggtagc

SEQ ID NO: 2079488 - DNA, 25 bp, Homo sapien
caatctccaaagctggtagcaattg

SEQ ID NO: 2079489 - DNA, 25 bp, Homo sapien
aacgcggttcccactagcagtacct

SEQ ID NO: 2079490 - DNA, 25 bp, Homo sapien
agttgccccagagacaacgcggttc

SEQ ID NO: 2079491 - DNA, 25 bp, Homo sapien
actagcagtaccttcccctgctggg

SEQ ID NO: 2079492 - DNA, 25 bp, Homo sapien
gatttcccgtttaggatgtgcctct

SEQ ID NO: 2079493 - DNA, 25 bp, Homo sapien
aaaaagaactgcttacaaaagcctg

SEQ ID NO: 2079494 - DNA, 25 bp, Homo sapien
aaagaactgcttacaaaagcctgga

SEQ ID NO: 2079495 - DNA, 25 bp, Homo sapien
tcacaaagacccaggtacaacttta

SEQ ID NO: 2079496 - DNA, 25 bp, Homo sapien
ttctctagcttcacaaagacccagg

SEQ ID NO: 2079497 - DNA, 25 bp, Homo sapien
ggtaggctgctgattgctgtcgatt

SEQ ID NO: 2079498 - DNA, 25 bp, Homo sapien
cccctgttgagggacagttaacaag

SEQ ID NO: 2079499 - DNA, 25 bp, Homo sapien
cctcagtaagggacaggatgagcgt

SEQ ID NO: 2079500 - DNA, 25 bp, Homo sapien
tgtgcgtgcggctttcctgacttgg

SEQ ID NO: 2079501 - DNA, 25 bp, Homo sapien
caagggcttggtactcatcatctcc

SEQ ID NO: 2079502 - DNA, 25 bp, Homo sapien
ggcatttgtccactgctaccgagga

SEQ ID NO: 2079503 - DNA, 25 bp, Homo sapien
gatgaaccgtttagccaagaccagc

SEQ ID NO: 2079504 - DNA, 25 bp, Homo sapien
tcatgcaaagctaaaacccactggg

SEQ ID NO: 2079505 - DNA, 25 bp, Homo sapien
gagctcaggccactaatgaatggct

SEQ ID NO: 2079506 - DNA, 25 bp, Homo sapien
ggaagagataaaacagctccctttc

SEQ ID NO: 2079507 - DNA, 25 bp, Homo sapien
attatatattgcacagtctccatcg

SEQ ID NO: 2079508 - DNA, 25 bp, Homo sapien
aactgagcttcaccacaatttgaga

SEQ ID NO: 2079509 - DNA, 25 bp, Homo sapien
gaggaggccctctatggaactctgt

SEQ ID NO: 2079510 - DNA, 25 bp, Homo sapien
tgtcatttggaagatccccagtggt

SEQ ID NO: 2079511 - DNA, 25 bp, Homo sapien
tggaatccactagtcctaggcctgg

SEQ ID NO: 2079512 - DNA, 25 bp, Homo sapien
taatttgctcgtgccacagggtgac

SEQ ID NO: 2079513 - DNA, 25 bp, Homo sapien
tccggaggacacactagagaaagca

SEQ ID NO: 2079514 - DNA, 25 bp, Homo sapien
tatatacacatgctgacacccgtgc

SEQ ID NO: 2079515 - DNA, 25 bp, Homo sapien
cattttacacaaggcgacaggtcag

SEQ ID NO: 2079516 - DNA, 25 bp, Homo sapien
ggataaccaggtacaagtgctctct

SEQ ID NO: 2079517 - DNA, 25 bp, Homo sapien
ggaggctgctctccgggtgttccca

SEQ ID NO: 2079518 - DNA, 25 bp, Homo sapien
tgaagctggaaagagaccgcagagc

SEQ ID NO: 2079519 - DNA, 25 bp, Homo sapien
ggagttggcgaagcttccagaacac

SEQ ID NO: 2079520 - DNA, 25 bp, Homo sapien
ttgagaggcgcggaaaaccaatggc

SEQ ID NO: 2079521 - DNA, 25 bp, Homo sapien
ggtggacagttaatttagggcagca

SEQ ID NO: 2079522 - DNA, 25 bp, Homo sapien
cccaagcccaggattggttctgaaa

SEQ ID NO: 2079523 - DNA, 25 bp, Homo sapien
agcccaggattggttctgaaacaga

SEQ ID NO: 2079524 - DNA, 25 bp, Homo sapien
agcaaatcctcctaaaagcttccca

SEQ ID NO: 2079525 - DNA, 25 bp, Homo sapien
ttaaccaatcactagatgctgcccc

SEQ ID NO: 2079526 - DNA, 25 bp, Homo sapien
tgggcccaccctctttaaccaatca

SEQ ID NO: 2079527 - DNA, 25 bp, Homo sapien
tctttaaccaatcactagatgctgc

SEQ ID NO: 2079528 - DNA, 25 bp, Homo sapien
caccctctttaaccaatcactagat

SEQ ID NO: 2079529 - DNA, 25 bp, Homo sapien
ttacattgcaaagagcaggcgtttg

SEQ ID NO: 2079530 - DNA, 25 bp, Homo sapien
gaaccccatcaagggtgtgagtcca

SEQ ID NO: 2079531 - DNA, 25 bp, Homo sapien
gaagaatgatttcatgacgaacccc

SEQ ID NO: 2079532 - DNA, 25 bp, Homo sapien
tgtgagtccacattaaagaggctgg

SEQ ID NO: 2079533 - DNA, 25 bp, Homo sapien
ggtccagagcctctgtaagccatcg

SEQ ID NO: 2079534 - DNA, 25 bp, Homo sapien
gagcgggttggatagtgtgggtcca

SEQ ID NO: 2079535 - DNA, 25 bp, Homo sapien
tgtaagccatcgcatgcaaccaggc

SEQ ID NO: 2079536 - DNA, 25 bp, Homo sapien
gagcctctgtaagccatcgcatgca

SEQ ID NO: 2079537 - DNA, 25 bp, Homo sapien
aggttgttgtttacgcgctgcgctc

SEQ ID NO: 2079538 - DNA, 25 bp, Homo sapien
gcgctccgcatttgttgactcgtaa

SEQ ID NO: 2079539 - DNA, 25 bp, Homo sapien
taggttcaaaaaaggccatgtccac

SEQ ID NO: 2079540 - DNA, 25 bp, Homo sapien
cagttttgctcaaggatttccctca

SEQ ID NO: 2079541 - DNA, 25 bp, Homo sapien
ctgggtcccactcattgatgcccac

SEQ ID NO: 2079542 - DNA, 25 bp, Homo sapien
tcccactcattgatgcccactgata

SEQ ID NO: 2079543 - DNA, 25 bp, Homo sapien
ggtcccactcattgatgcccactga

SEQ ID NO: 2079544 - DNA, 25 bp, Homo sapien
gggtcccactcattgatgcccactg

SEQ ID NO: 2079545 - DNA, 25 bp, Homo sapien
cttttatgttgcaaccatgctgaag

SEQ ID NO: 2079546 - DNA, 25 bp, Homo sapien
cgagctaagctggtctggccgttca

SEQ ID NO: 2079547 - DNA, 25 bp, Homo sapien
cagtcacagtgcctgctttttgtcc

SEQ ID NO: 2079548 - DNA, 25 bp, Homo sapien
tggccgttcagctgccggcactggc

SEQ ID NO: 2079549 - DNA, 25 bp, Homo sapien
gcagcatgaatctgacccatcagtg

SEQ ID NO: 2079550 - DNA, 25 bp, Homo sapien
gacatgcctgccagtcttattacta

SEQ ID NO: 2079551 - DNA, 25 bp, Homo sapien
gcactgggatgatcgcagcagcatg

SEQ ID NO: 2079552 - DNA, 25 bp, Homo sapien
gttggatggtcccagcgactggcac

SEQ ID NO: 2079553 - DNA, 25 bp, Homo sapien
tgtgaagtcgctccggatggcaaag

SEQ ID NO: 2079554 - DNA, 25 bp, Homo sapien
gaactccaccgcgtagaagtggccg

SEQ ID NO: 2079555 - DNA, 25 bp, Homo sapien
aaagttttccggcttgatgtcgcag

SEQ ID NO: 2079556 - DNA, 25 bp, Homo sapien
tccaagaagctgagtgcgatgtcac

SEQ ID NO: 2079557 - DNA, 25 bp, Homo sapien
ggaagggaacagtcggtcaccatgg

SEQ ID NO: 2079558 - DNA, 25 bp, Homo sapien
aaggaagggaacagtcggtcaccat

SEQ ID NO: 2079559 - DNA, 25 bp, Homo sapien
gaaggaagggaacagtcggtcacca

SEQ ID NO: 2079560 - DNA, 25 bp, Homo sapien
aagggaacagtcggtcaccatgggg

SEQ ID NO: 2079561 - DNA, 25 bp, Homo sapien
atgaaatggagtgccctataaagct

SEQ ID NO: 2079562 - DNA, 25 bp, Homo sapien
acatgaaatggagtgccctataaag

SEQ ID NO: 2079563 - DNA, 25 bp, Homo sapien
aaatggagtgccctataaagcttgc

SEQ ID NO: 2079564 - DNA, 25 bp, Homo sapien
atggagtgccctataaagcttgcag

SEQ ID NO: 2079565 - DNA, 25 bp, Homo sapien
cacaaattccctgagaagcccgtcc

SEQ ID NO: 2079566 - DNA, 25 bp, Homo sapien
caaattccctgagaagcccgtccag

SEQ ID NO: 2079567 - DNA, 25 bp, Homo sapien
aattccctgagaagcccgtccagcc

SEQ ID NO: 2079568 - DNA, 25 bp, Homo sapien
acaaattccctgagaagcccgtcca

SEQ ID NO: 2079569 - DNA, 25 bp, Homo sapien
aactccttccttgcgtcacactccc

SEQ ID NO: 2079570 - DNA, 25 bp, Homo sapien
aaactccttccttgcgtcacactcc

SEQ ID NO: 2079571 - DNA, 25 bp, Homo sapien
tcaaactccttccttgcgtcacact

SEQ ID NO: 2079572 - DNA, 25 bp, Homo sapien
ctccttccttgcgtcacactccctg

SEQ ID NO: 2079573 - DNA, 25 bp, Homo sapien
accacagtgtatgcacgagcaccag

SEQ ID NO: 2079574 - DNA, 25 bp, Homo sapien
gatgattgtactggccaagagggaa

SEQ ID NO: 2079575 - DNA, 25 bp, Homo sapien
cagtgtatgcacgagcaccaggcat

SEQ ID NO: 2079576 - DNA, 25 bp, Homo sapien
acagtgtatgcacgagcaccaggca

SEQ ID NO: 2079577 - DNA, 25 bp, Homo sapien
tcgcaggtggctaggtagatcagct

SEQ ID NO: 2079578 - DNA, 25 bp, Homo sapien
ggttcataatcagatactgcccagc

SEQ ID NO: 2079579 - DNA, 25 bp, Homo sapien
ggctaggtagatcagctttacccat

SEQ ID NO: 2079580 - DNA, 25 bp, Homo sapien
cagcctcgcaggtggctaggtagat

SEQ ID NO: 2079581 - DNA, 25 bp, Homo sapien
caggttccggagttcacggagcaga

SEQ ID NO: 2079582 - DNA, 25 bp, Homo sapien
gactgggccactcccaaatcaacag

SEQ ID NO: 2079583 - DNA, 25 bp, Homo sapien
cctcactgggattgggactgggcca

SEQ ID NO: 2079584 - DNA, 25 bp, Homo sapien
tagccactagccatgagagacacct

SEQ ID NO: 2079585 - DNA, 25 bp, Homo sapien
tgttaaagtaagtctgcagcattgt

SEQ ID NO: 2079586 - DNA, 25 bp, Homo sapien
gttaaagtaagtctgcagcattgtt

SEQ ID NO: 2079587 - DNA, 25 bp, Homo sapien
gtgttaaagtaagtctgcagcattg

SEQ ID NO: 2079588 - DNA, 25 bp, Homo sapien
cagtgttaaagtaagtctgcagcat

SEQ ID NO: 2079589 - DNA, 25 bp, Homo sapien
cagggcactgtgtggatctcgcatc

SEQ ID NO: 2079590 - DNA, 25 bp, Homo sapien
taaaccctgtcctgagagtgtcctg

SEQ ID NO: 2079591 - DNA, 25 bp, Homo sapien
tacttggcaactcagcccagcagag

SEQ ID NO: 2079592 - DNA, 25 bp, Homo sapien
gagtaaggaactcaaacagggcctg

SEQ ID NO: 2079593 - DNA, 25 bp, Homo sapien
cagttcgtggagacagcgtcacatc

SEQ ID NO: 2079594 - DNA, 25 bp, Homo sapien
gactgccaaaccttcgatcttcagg

SEQ ID NO: 2079595 - DNA, 25 bp, Homo sapien
gcgtcacatcgacacctagggagat

SEQ ID NO: 2079596 - DNA, 25 bp, Homo sapien
gatggatgtggcctccgacatcgtt

SEQ ID NO: 2079597 - DNA, 25 bp, Homo sapien
tatggctgccattgaagatatattg

SEQ ID NO: 2079598 - DNA, 25 bp, Homo sapien
ccatatggctgccattgaagatata

SEQ ID NO: 2079599 - DNA, 25 bp, Homo sapien
gctgccattgaagatatattggtaa

SEQ ID NO: 2079600 - DNA, 25 bp, Homo sapien
cattgaagatatattggtaaagcct

SEQ ID NO: 2079601 - DNA, 25 bp, Homo sapien
tggagcgctgcggacccgagagaca

SEQ ID NO: 2079602 - DNA, 25 bp, Homo sapien
cctccgcatgggctcggtgagatag

SEQ ID NO: 2079603 - DNA, 25 bp, Homo sapien
agacagaggcgtggcaccccggatc

SEQ ID NO: 2079604 - DNA, 25 bp, Homo sapien
ggaatcacagaacgcgggctgggct

SEQ ID NO: 2079605 - DNA, 25 bp, Homo sapien
tgcgcctctggcactccacgcaggt

SEQ ID NO: 2079606 - DNA, 25 bp, Homo sapien
tggacactcggatcagacccgcaaa

SEQ ID NO: 2079607 - DNA, 25 bp, Homo sapien
caaagggcgaattctggcgaaaagg

SEQ ID NO: 2079608 - DNA, 25 bp, Homo sapien
aactttcttccggagctcgggctca

SEQ ID NO: 2079609 - DNA, 25 bp, Homo sapien
ggggcagagcggcggcgggacctac

SEQ ID NO: 2079610 - DNA, 25 bp, Homo sapien
gcgcggggcagagcggcggcgggac

SEQ ID NO: 2079611 - DNA, 25 bp, Homo sapien
gcggggcagagcggcggcgggacct

SEQ ID NO: 2079612 - DNA, 25 bp, Homo sapien
gcgcggcgcggggcagagcggcggc

SEQ ID NO: 2079613 - DNA, 25 bp, Homo sapien
agcgcggccaggatgcgccggctct

SEQ ID NO: 2079614 - DNA, 25 bp, Homo sapien
gatgcgccggctcttctcgtcggtg

SEQ ID NO: 2079615 - DNA, 25 bp, Homo sapien
gccggctcttctcgtcggtgcagcg

SEQ ID NO: 2079616 - DNA, 25 bp, Homo sapien
aggatgcgccggctcttctcgtcgg

SEQ ID NO: 2079617 - DNA, 25 bp, Homo sapien
ctcggagaggacacccgggtgcgcg

SEQ ID NO: 2079618 - DNA, 25 bp, Homo sapien
agcacccagcccgcggtccacgcgg

SEQ ID NO: 2079619 - DNA, 25 bp, Homo sapien
tccacgcggcgaaggcgaggagcgt

SEQ ID NO: 2079620 - DNA, 25 bp, Homo sapien
tgcaccacccggcagggccccgcgc

SEQ ID NO: 2079621 - DNA, 25 bp, Homo sapien
cctcccgggagtgagatccggagca

SEQ ID NO: 2079622 - DNA, 25 bp, Homo sapien
tcagtaggttctgggacgacccagc

SEQ ID NO: 2079623 - DNA, 25 bp, Homo sapien
ttcccacgggcacccctgaatcaaa

SEQ ID NO: 2079624 - DNA, 25 bp, Homo sapien
gggtcgaggacagtcagtaggttct

SEQ ID NO: 2079625 - DNA, 25 bp, Homo sapien
ggagatgctgcgtgtccgtcactgt

SEQ ID NO: 2079626 - DNA, 25 bp, Homo sapien
cacgggtgaggtcttgcactccaaa

SEQ ID NO: 2079627 - DNA, 25 bp, Homo sapien
tgctgctgccctcacgaaggccagt

SEQ ID NO: 2079628 - DNA, 25 bp, Homo sapien
ggtgagggagaccatcaagcagctc

SEQ ID NO: 2079629 - DNA, 25 bp, Homo sapien
ctcgggtgagagccatagcagagga

SEQ ID NO: 2079630 - DNA, 25 bp, Homo sapien
tcgggtgagagccatagcagaggaa

SEQ ID NO: 2079631 - DNA, 25 bp, Homo sapien
tctttttctcctgatgacttttcat

SEQ ID NO: 2079632 - DNA, 25 bp, Homo sapien
ctggagtgggccaaggcacaggatc

SEQ ID NO: 2079633 - DNA, 25 bp, Homo sapien
ggagtgggccaaggcacaggatcct

SEQ ID NO: 2079634 - DNA, 25 bp, Homo sapien
acaggatcctgtcatttttcttttt

SEQ ID NO: 2079635 - DNA, 25 bp, Homo sapien
tactcaggcgaaagcacaacgcagg

SEQ ID NO: 2079636 - DNA, 25 bp, Homo sapien
tgaagattcctgtcaagcccactct

SEQ ID NO: 2079637 - DNA, 25 bp, Homo sapien
gctttggaactctcacaccagggtc

SEQ ID NO: 2079638 - DNA, 25 bp, Homo sapien
gggaaaacatatcgtgctgtttggc

SEQ ID NO: 2079639 - DNA, 25 bp, Homo sapien
aatctcagctctccggatgctggtg

SEQ ID NO: 2079640 - DNA, 25 bp, Homo sapien
ccctttaatctcagctctccggatg

SEQ ID NO: 2079641 - DNA, 25 bp, Homo sapien
cagctctccggatgctggtgtaaga

SEQ ID NO: 2079642 - DNA, 25 bp, Homo sapien
tctccggatgctggtgtaagacagc

SEQ ID NO: 2079643 - DNA, 25 bp, Homo sapien
ttgcataggagagttggtggcagct

SEQ ID NO: 2079644 - DNA, 25 bp, Homo sapien
cataggagagttggtggcagctggc

SEQ ID NO: 2079645 - DNA, 25 bp, Homo sapien
ctattgcataggagagttggtggca

SEQ ID NO: 2079646 - DNA, 25 bp, Homo sapien
ataggagagttggtggcagctggcc

SEQ ID NO: 2079647 - DNA, 25 bp, Homo sapien
tgccatttgctcagctcccttgtaa

SEQ ID NO: 2079648 - DNA, 25 bp, Homo sapien
taatctctgtagacgtgggccgcag

SEQ ID NO: 2079649 - DNA, 25 bp, Homo sapien
gccgcagactctaggctggcctctt

SEQ ID NO: 2079650 - DNA, 25 bp, Homo sapien
gttaactgctcccagccggtgcaat

SEQ ID NO: 2079651 - DNA, 25 bp, Homo sapien
actggcatcagccatgagcttcaca

SEQ ID NO: 2079652 - DNA, 25 bp, Homo sapien
gcactggcatcagccatgagcttca

SEQ ID NO: 2079653 - DNA, 25 bp, Homo sapien
cactggcatcagccatgagcttcac

SEQ ID NO: 2079654 - DNA, 25 bp, Homo sapien
tgttgtgtgcacatcctgagctgcg

SEQ ID NO: 2079655 - DNA, 25 bp, Homo sapien
ctgagctgcgctcacacaaacctgg

SEQ ID NO: 2079656 - DNA, 25 bp, Homo sapien
ccgtacatgtacctttactggatgc

SEQ ID NO: 2079657 - DNA, 25 bp, Homo sapien
tggatgagtgattaacaggagttgc

SEQ ID NO: 2079658 - DNA, 25 bp, Homo sapien
gagcctggaatgtggcaacgttacg

SEQ ID NO: 2079659 - DNA, 25 bp, Homo sapien
gacaccttttcagaatccctcgttg

SEQ ID NO: 2079660 - DNA, 25 bp, Homo sapien
cacgtgatgggtctgtcctatttcc

SEQ ID NO: 2079661 - DNA, 25 bp, Homo sapien
ctttaacccaaagcacacgtgatgg

SEQ ID NO: 2079662 - DNA, 25 bp, Homo sapien
gggttccctgggaccagagcagaga

SEQ ID NO: 2079663 - DNA, 25 bp, Homo sapien
atacagccacagtgacgctgggaca

SEQ ID NO: 2079664 - DNA, 25 bp, Homo sapien
tacagccacagtgacgctgggacaa

SEQ ID NO: 2079665 - DNA, 25 bp, Homo sapien
tgcatttacgggcacctggatgtgc

SEQ ID NO: 2079666 - DNA, 25 bp, Homo sapien
cccacagaagaagaccgtgtgcatt

SEQ ID NO: 2079667 - DNA, 25 bp, Homo sapien
gctccctgatggctcggagatcccg

SEQ ID NO: 2079668 - DNA, 25 bp, Homo sapien
cttcaccctggtggagcgagacggt

SEQ ID NO: 2079669 - DNA, 25 bp, Homo sapien
tttgaggcccgtgctatgagggacc

SEQ ID NO: 2079670 - DNA, 25 bp, Homo sapien
tctggtgtaaaggccttctgctttc

SEQ ID NO: 2079671 - DNA, 25 bp, Homo sapien
cggtatatgttagtggcctccttca

SEQ ID NO: 2079672 - DNA, 25 bp, Homo sapien
ggcgatgtccctgttattcaccaag

SEQ ID NO: 2079673 - DNA, 25 bp, Homo sapien
agtgacctcaacatgccacttctct

SEQ ID NO: 2079674 - DNA, 25 bp, Homo sapien
cttctgggccttcacggtgccactc

SEQ ID NO: 2079675 - DNA, 25 bp, Homo sapien
tgggccttcacggtgccactccttt

SEQ ID NO: 2079676 - DNA, 25 bp, Homo sapien
gtgacctcaacatgccacttctctt

SEQ ID NO: 2079677 - DNA, 25 bp, Homo sapien
gggaccacgtgcagcccccaggagc

SEQ ID NO: 2079678 - DNA, 25 bp, Homo sapien
ctgtgctgctcaaaactgcacctgg

SEQ ID NO: 2079679 - DNA, 25 bp, Homo sapien
ccaggagcctgtgctgctcaaaact

SEQ ID NO: 2079680 - DNA, 25 bp, Homo sapien
cccacctgtacccagccacacggga

SEQ ID NO: 2079681 - DNA, 25 bp, Homo sapien
gtcagccccatcaccgctgcctcgt

SEQ ID NO: 2079682 - DNA, 25 bp, Homo sapien
agccatcctcttagccctccctgtc

SEQ ID NO: 2079683 - DNA, 25 bp, Homo sapien
agtctcagtaggctcctgactgtca

SEQ ID NO: 2079684 - DNA, 25 bp, Homo sapien
agtaggctcctgactgtcaaggaac

SEQ ID NO: 2079685 - DNA, 25 bp, Homo sapien
aggtcaggagactggccacgcagac

SEQ ID NO: 2079686 - DNA, 25 bp, Homo sapien
cccgggaggtcaggagactggccac

SEQ ID NO: 2079687 - DNA, 25 bp, Homo sapien
ggggcctgctgaggctgcgggacct

SEQ ID NO: 2079688 - DNA, 25 bp, Homo sapien
ctgggaagcaggctgagccccggga

SEQ ID NO: 2079689 - DNA, 25 bp, Homo sapien
tgttgtcagcttccccagaagcaat

SEQ ID NO: 2079690 - DNA, 25 bp, Homo sapien
ccgctgtgactgatgacgctgatta

SEQ ID NO: 2079691 - DNA, 25 bp, Homo sapien
tctggttccatgaggccgggactgc

SEQ ID NO: 2079692 - DNA, 25 bp, Homo sapien
tcaagttgtcgcttgtgttgtcagc

SEQ ID NO: 2079693 - DNA, 25 bp, Homo sapien
tgaaatatctgttcgttgttcaaag

SEQ ID NO: 2079694 - DNA, 25 bp, Homo sapien
atatctgttcgttgttcaaagtttg

SEQ ID NO: 2079695 - DNA, 25 bp, Homo sapien
aaatatctgttcgttgttcaaagtt

SEQ ID NO: 2079696 - DNA, 25 bp, Homo sapien
tgtgaaatatctgttcgttgttcaa

SEQ ID NO: 2079697 - DNA, 25 bp, Homo sapien
cctcagcctcagctgcagtggaggc

SEQ ID NO: 2079698 - DNA, 25 bp, Homo sapien
ctggccccgtggagccctcagcctc

SEQ ID NO: 2079699 - DNA, 25 bp, Homo sapien
tcagcctcagctgcagtggaggcac

SEQ ID NO: 2079700 - DNA, 25 bp, Homo sapien
ctctggccccgtggagccctcagcc

SEQ ID NO: 2079701 - DNA, 25 bp, Homo sapien
cctgggtggtcgtgaaataggactc

SEQ ID NO: 2079702 - DNA, 25 bp, Homo sapien
agcctgcctggcctttggcaaatcg

SEQ ID NO: 2079703 - DNA, 25 bp, Homo sapien
gaagatttcatgtgacgggcagaag

SEQ ID NO: 2079704 - DNA, 25 bp, Homo sapien
aagcacatccatgaacagggctgtc

SEQ ID NO: 2079705 - DNA, 25 bp, Homo sapien
aaagccacaatgatccagacacacg

SEQ ID NO: 2079706 - DNA, 25 bp, Homo sapien
tgatccagacacacggcaaggtggg

SEQ ID NO: 2079707 - DNA, 25 bp, Homo sapien
caatgatccagacacacggcaaggt

SEQ ID NO: 2079708 - DNA, 25 bp, Homo sapien
ggcaaggtgggcacattcccatcag

SEQ ID NO: 2079709 - DNA, 25 bp, Homo sapien
tggcccttattgcagagggagcagc

SEQ ID NO: 2079710 - DNA, 25 bp, Homo sapien
tttcctggaagctcccctcggtcat

SEQ ID NO: 2079711 - DNA, 25 bp, Homo sapien
ggcccttattgcagagggagcagca

SEQ ID NO: 2079712 - DNA, 25 bp, Homo sapien
gggataaacagagagcttgatgctt

SEQ ID NO: 2079713 - DNA, 25 bp, Homo sapien
tgcgatgagccatgaatgccccact

SEQ ID NO: 2079714 - DNA, 25 bp, Homo sapien
aaaaataagttctggttgtcattga

SEQ ID NO: 2079715 - DNA, 25 bp, Homo sapien
aggctgcgatgagccatgaatgccc

SEQ ID NO: 2079716 - DNA, 25 bp, Homo sapien
agggcaatctcgacagctccacgtt

SEQ ID NO: 2079717 - DNA, 25 bp, Homo sapien
cgtggaatttccaggagcacaaggg

SEQ ID NO: 2079718 - DNA, 25 bp, Homo sapien
tctctgcaagctcagtccctcgtgg

SEQ ID NO: 2079719 - DNA, 25 bp, Homo sapien
gagcacaagggcaatctcgacagct

SEQ ID NO: 2079720 - DNA, 25 bp, Homo sapien
agacagaacttgttgtgccacattc

SEQ ID NO: 2079721 - DNA, 25 bp, Homo sapien
gagccttttctctatggccaaaagc

SEQ ID NO: 2079722 - DNA, 25 bp, Homo sapien
gcaaaagcctgtcctgtatcaagtt

SEQ ID NO: 2079723 - DNA, 25 bp, Homo sapien
ttggccagtgagaaaaacaccgtaa

SEQ ID NO: 2079724 - DNA, 25 bp, Homo sapien
ctgagatgttcgcatgagatggtcc

SEQ ID NO: 2079725 - DNA, 25 bp, Homo sapien
ttcgcatgagatggtcctgtggcct

SEQ ID NO: 2079726 - DNA, 25 bp, Homo sapien
cagagtgggctttgactgagatgtt

SEQ ID NO: 2079727 - DNA, 25 bp, Homo sapien
tggtcctgtggcctgaacccctggg

SEQ ID NO: 2079728 - DNA, 25 bp, Homo sapien
taccgctgaggtagcagatctttcc

SEQ ID NO: 2079729 - DNA, 25 bp, Homo sapien
cagggcgctacgtgcttgtgctaca

SEQ ID NO: 2079730 - DNA, 25 bp, Homo sapien
gcatcgtggtgcgtcattacacaga

SEQ ID NO: 2079731 - DNA, 25 bp, Homo sapien
gctacaccagatacagaaagatgcc

SEQ ID NO: 2079732 - DNA, 25 bp, Homo sapien
ttctgagtatgatcccagcaacttg

SEQ ID NO: 2079733 - DNA, 25 bp, Homo sapien
tccagccctcggaattctgagtatg

SEQ ID NO: 2079734 - DNA, 25 bp, Homo sapien
cggaattctgagtatgatcccagca

SEQ ID NO: 2079735 - DNA, 25 bp, Homo sapien
cctcggaattctgagtatgatccca

SEQ ID NO: 2079736 - DNA, 25 bp, Homo sapien
tgagctgaatgaatacctccgaagc

SEQ ID NO: 2079737 - DNA, 25 bp, Homo sapien
agaagaacccgaggagtcgcaggct

SEQ ID NO: 2079738 - DNA, 25 bp, Homo sapien
gccgctttgttctccagatgtgaat

SEQ ID NO: 2079739 - DNA, 25 bp, Homo sapien
ccgtatctgcgcgtatgagatgcat

SEQ ID NO: 2079740 - DNA, 25 bp, Homo sapien
gaattccatttgtcccgggagcatg

SEQ ID NO: 2079741 - DNA, 25 bp, Homo sapien
tcctccatcagagtccgtgcattgg

SEQ ID NO: 2079742 - DNA, 25 bp, Homo sapien
catgtgcgttaagcccagttgggca

SEQ ID NO: 2079743 - DNA, 25 bp, Homo sapien
cgtgcattgggtgccagaattccat

SEQ ID NO: 2079744 - DNA, 25 bp, Homo sapien
ccttgtttctttccacataaagcgg

SEQ ID NO: 2079745 - DNA, 25 bp, Homo sapien
tacactttgtccacactccttgttt

SEQ ID NO: 2079746 - DNA, 25 bp, Homo sapien
gcggcattcttgttaaaaccataga

SEQ ID NO: 2079747 - DNA, 25 bp, Homo sapien
aaccatagagtagaacttctagctg

SEQ ID NO: 2079748 - DNA, 25 bp, Homo sapien
tctcacgaagggtctgaggatgcag

SEQ ID NO: 2079749 - DNA, 25 bp, Homo sapien
cagcaaatgccggagggagctatcc

SEQ ID NO: 2079750 - DNA, 25 bp, Homo sapien
gctatcctgcgcatgaggcattcgg

SEQ ID NO: 2079751 - DNA, 25 bp, Homo sapien
cctggatttctaagtaggcacgtgc

SEQ ID NO: 2079752 - DNA, 25 bp, Homo sapien
gggcccccaagcaccaccacctgct

SEQ ID NO: 2079753 - DNA, 25 bp, Homo sapien
ggcccccaagcaccaccacctgctc

SEQ ID NO: 2079754 - DNA, 25 bp, Homo sapien
tcagtggcgttattgcaagcgcggt

SEQ ID NO: 2079755 - DNA, 25 bp, Homo sapien
ctgggatcagtggcgttattgcaag

SEQ ID NO: 2079756 - DNA, 25 bp, Homo sapien
ggatcagtggcgttattgcaagcgc

SEQ ID NO: 2079757 - DNA, 25 bp, Homo sapien
gcgttattgcaagcgcggtggccat

SEQ ID NO: 2079758 - DNA, 25 bp, Homo sapien
ttctgtggttcacaccggaaacttg

SEQ ID NO: 2079759 - DNA, 25 bp, Homo sapien
agaggcctgcgagttgttgggcact

SEQ ID NO: 2079760 - DNA, 25 bp, Homo sapien
tgggcactggaacacacttttctgt

SEQ ID NO: 2079761 - DNA, 25 bp, Homo sapien
ctgtggttcacaccggaaacttgta

SEQ ID NO: 2079762 - DNA, 25 bp, Homo sapien
gagtgcagcctcggtcatgggctct

SEQ ID NO: 2079763 - DNA, 25 bp, Homo sapien
cctcggtcatgggctctgctgacgc

SEQ ID NO: 2079764 - DNA, 25 bp, Homo sapien
cagcctcggtcatgggctctgctga

SEQ ID NO: 2079765 - DNA, 25 bp, Homo sapien
tcggtcatgggctctgctgacgcac

SEQ ID NO: 2079766 - DNA, 25 bp, Homo sapien
gaccctggcaggttcaggagctgat

SEQ ID NO: 2079767 - DNA, 25 bp, Homo sapien
tgctggctcgggaccctggcaggtt

SEQ ID NO: 2079768 - DNA, 25 bp, Homo sapien
gccctggtgactgccactctgctgg

SEQ ID NO: 2079769 - DNA, 25 bp, Homo sapien
ggcatttgttggctggagctgagag

SEQ ID NO: 2079770 - DNA, 25 bp, Homo sapien
gtgttatttggtgctgtctgcattt

SEQ ID NO: 2079771 - DNA, 25 bp, Homo sapien
tggtgctgtctgcattttggtgtct

SEQ ID NO: 2079772 - DNA, 25 bp, Homo sapien
gctgtctgcattttggtgtctccac

SEQ ID NO: 2079773 - DNA, 25 bp, Homo sapien
tttggtgctgtctgcattttggtgt

SEQ ID NO: 2079774 - DNA, 25 bp, Homo sapien
cccagtccacgtctctctcaactcc

SEQ ID NO: 2079775 - DNA, 25 bp, Homo sapien
ctctgtccccagtccacgtctctct

SEQ ID NO: 2079776 - DNA, 25 bp, Homo sapien
tccccagtccacgtctctctcaact

SEQ ID NO: 2079777 - DNA, 25 bp, Homo sapien
tgtccccagtccacgtctctctcaa

SEQ ID NO: 2079778 - DNA, 25 bp, Homo sapien
acgtgctgccccctgagattgtaca

SEQ ID NO: 2079779 - DNA, 25 bp, Homo sapien
gattgtacagtctcccctgcaggta

SEQ ID NO: 2079780 - DNA, 25 bp, Homo sapien
ccctgagattgtacagtctcccctg

SEQ ID NO: 2079781 - DNA, 25 bp, Homo sapien
aacatcttaatttcacgtgctgccc

SEQ ID NO: 2079782 - DNA, 25 bp, Homo sapien
tgtctggcgaggctcagatccctgt

SEQ ID NO: 2079783 - DNA, 25 bp, Homo sapien
gtgctgtgctgtctctctggctgat

SEQ ID NO: 2079784 - DNA, 25 bp, Homo sapien
tctggctgatgtctggcgaggctca

SEQ ID NO: 2079785 - DNA, 25 bp, Homo sapien
ttccggaagtagtgcaaagtggtgc

SEQ ID NO: 2079786 - DNA, 25 bp, Homo sapien
ccagatgcggtactgtctcgtgcca

SEQ ID NO: 2079787 - DNA, 25 bp, Homo sapien
gagccagccagttcctaagtgctag

SEQ ID NO: 2079788 - DNA, 25 bp, Homo sapien
gagaagacgctgtacagtgccttgg

SEQ ID NO: 2079789 - DNA, 25 bp, Homo sapien
ccttaaggtgcttggtaggtgccac

SEQ ID NO: 2079790 - DNA, 25 bp, Homo sapien
tccatggggacttgccgccacagtg

SEQ ID NO: 2079791 - DNA, 25 bp, Homo sapien
cttgagactttctggggaattttgc

SEQ ID NO: 2079792 - DNA, 25 bp, Homo sapien
ttgccgccacagtgagttaatcaat

SEQ ID NO: 2079793 - DNA, 25 bp, Homo sapien
gggacttgccgccacagtgagttaa

SEQ ID NO: 2079794 - DNA, 25 bp, Homo sapien
agacctccatcagctaagcccacag

SEQ ID NO: 2079795 - DNA, 25 bp, Homo sapien
gcaactctccagttgttagcaagag

SEQ ID NO: 2079796 - DNA, 25 bp, Homo sapien
ccacagggcatgcaactctccagtt

SEQ ID NO: 2079797 - DNA, 25 bp, Homo sapien
gtccttcattaaagtatcccaggcc

SEQ ID NO: 2079798 - DNA, 25 bp, Homo sapien
aaagccaggaataacctttcgacat

SEQ ID NO: 2079799 - DNA, 25 bp, Homo sapien
gccgaaaagactctctcagtccagg

SEQ ID NO: 2079800 - DNA, 25 bp, Homo sapien
aggactcaccctgcgcatccctaac

SEQ ID NO: 2079801 - DNA, 25 bp, Homo sapien
agtccaggactcaccctgcgcatcc

SEQ ID NO: 2079802 - DNA, 25 bp, Homo sapien
cctggacagcaaattgactatagca

SEQ ID NO: 2079803 - DNA, 25 bp, Homo sapien
tcagatggtgaaggcgggattcatg

SEQ ID NO: 2079804 - DNA, 25 bp, Homo sapien
aaggcgggattcatgtccaaagtca

SEQ ID NO: 2079805 - DNA, 25 bp, Homo sapien
tcaatgtccatgaacctggacagca

SEQ ID NO: 2079806 - DNA, 25 bp, Homo sapien
ttccttcccatcagtgttcagcacc

SEQ ID NO: 2079807 - DNA, 25 bp, Homo sapien
agtgttcagcaccagtttcctccaa

SEQ ID NO: 2079808 - DNA, 25 bp, Homo sapien
ccatcagtgttcagcaccagtttcc

SEQ ID NO: 2079809 - DNA, 25 bp, Homo sapien
agatgctgctgttgaccatccccac

SEQ ID NO: 2079810 - DNA, 25 bp, Homo sapien
ttcctgacagctggtgagctctctg

SEQ ID NO: 2079811 - DNA, 25 bp, Homo sapien
ggtctgcgtttcatggcacatctta

SEQ ID NO: 2079812 - DNA, 25 bp, Homo sapien
tcatggcacatcttactgctttcct

SEQ ID NO: 2079813 - DNA, 25 bp, Homo sapien
tgggacatggtctgcgtttcatggc

SEQ ID NO: 2079814 - DNA, 25 bp, Homo sapien
tgtgggaccccaatgctaatggcct

SEQ ID NO: 2079815 - DNA, 25 bp, Homo sapien
gctcttcagaatgatggccgtggct

SEQ ID NO: 2079816 - DNA, 25 bp, Homo sapien
ttcagtcacggcttggaggcttcca

SEQ ID NO: 2079817 - DNA, 25 bp, Homo sapien
tgtacagccctggtgaacgcagtga

SEQ ID NO: 2079818 - DNA, 25 bp, Homo sapien
aagaagcactttacttttgattagg

SEQ ID NO: 2079819 - DNA, 25 bp, Homo sapien
gaagaggacattcagctaatgatgc

SEQ ID NO: 2079820 - DNA, 25 bp, Homo sapien
tcttaattaaaagtgtcttggctgg

SEQ ID NO: 2079821 - DNA, 25 bp, Homo sapien
tgtcagtgtggatctaaagaagcac

SEQ ID NO: 2079822 - DNA, 25 bp, Homo sapien
gaaaacagttgtctaggccacacac

SEQ ID NO: 2079823 - DNA, 25 bp, Homo sapien
tgtccctggatggaggttcttgagt

SEQ ID NO: 2079824 - DNA, 25 bp, Homo sapien
taccgatcggttcactgaggctggt

SEQ ID NO: 2079825 - DNA, 25 bp, Homo sapien
ggccacacactttcgttttgaacag

SEQ ID NO: 2079826 - DNA, 25 bp, Homo sapien
ttatggacgaggagcgaccgacaac

SEQ ID NO: 2079827 - DNA, 25 bp, Homo sapien
tggacgaggagcgaccgacaacaaa

SEQ ID NO: 2079828 - DNA, 25 bp, Homo sapien
tatggacgaggagcgaccgacaaca

SEQ ID NO: 2079829 - DNA, 25 bp, Homo sapien
gacgaggagcgaccgacaacaaagg

SEQ ID NO: 2079830 - DNA, 25 bp, Homo sapien
ttcccatggtctcgggtggctctgc

SEQ ID NO: 2079831 - DNA, 25 bp, Homo sapien
ggttcccatggtctcgggtggctct

SEQ ID NO: 2079832 - DNA, 25 bp, Homo sapien
catgtgggggttccaacgccacatt

SEQ ID NO: 2079833 - DNA, 25 bp, Homo sapien
ctagggagtgccccactagggactt

SEQ ID NO: 2079834 - DNA, 25 bp, Homo sapien
tcaattattacgttgctgccaggag

SEQ ID NO: 2079835 - DNA, 25 bp, Homo sapien
caattctaagccctgtggtgatcca

SEQ ID NO: 2079836 - DNA, 25 bp, Homo sapien
tcagaaaggagtatcttccaagctc

SEQ ID NO: 2079837 - DNA, 25 bp, Homo sapien
tgttgaacctacctgatgcatttgg

SEQ ID NO: 2079838 - DNA, 25 bp, Homo sapien
ttgcagagtcgttggcagcacaatg

SEQ ID NO: 2079839 - DNA, 25 bp, Homo sapien
tcgttggcagcacaatgacaatata

SEQ ID NO: 2079840 - DNA, 25 bp, Homo sapien
ggcagcacaatgacaatatatgcag

SEQ ID NO: 2079841 - DNA, 25 bp, Homo sapien
cagagtcgttggcagcacaatgaca

SEQ ID NO: 2079842 - DNA, 25 bp, Homo sapien
aagtctcttgctagaagtgtccagg

SEQ ID NO: 2079843 - DNA, 25 bp, Homo sapien
tctgcagtgcttagctcagggtaca

SEQ ID NO: 2079844 - DNA, 25 bp, Homo sapien
taaactattggcttcataccctgga

SEQ ID NO: 2079845 - DNA, 25 bp, Homo sapien
tccaggtacaggaagacagtagcag

SEQ ID NO: 2079846 - DNA, 25 bp, Homo sapien
tgtgttatccttccaattattctac

SEQ ID NO: 2079847 - DNA, 25 bp, Homo sapien
tatctgcagctaaaagcctcctggt

SEQ ID NO: 2079848 - DNA, 25 bp, Homo sapien
gctttgtgttatccttccaattatt

SEQ ID NO: 2079849 - DNA, 25 bp, Homo sapien
tctaatttgcataacttactagttt

SEQ ID NO: 2079850 - DNA, 25 bp, Homo sapien
tgataattgccctggcccaatgcaa

SEQ ID NO: 2079851 - DNA, 25 bp, Homo sapien
taagcataacctagccactgctgac

SEQ ID NO: 2079852 - DNA, 25 bp, Homo sapien
gagtgtagcatccagcaatgtcgtt

SEQ ID NO: 2079853 - DNA, 25 bp, Homo sapien
ggtcccacaaagagacatggagtgt

SEQ ID NO: 2079854 - DNA, 25 bp, Homo sapien
gctaatttgctagccctaaaaaggc

SEQ ID NO: 2079855 - DNA, 25 bp, Homo sapien
gaattgatggctctggtgtgacatg

SEQ ID NO: 2079856 - DNA, 25 bp, Homo sapien
cccagacagtggattcatcaagaca

SEQ ID NO: 2079857 - DNA, 25 bp, Homo sapien
gctggcttcgagcaagtcttgatcc

SEQ ID NO: 2079858 - DNA, 25 bp, Homo sapien
gaatgacatctatggactctctcag

SEQ ID NO: 2079859 - DNA, 25 bp, Homo sapien
gcaaaggtggtttcatcactaggac

SEQ ID NO: 2079860 - DNA, 25 bp, Homo sapien
ccatgtcaagcattattcattcaaa

SEQ ID NO: 2079861 - DNA, 25 bp, Homo sapien
gaaatgaggtcaaactgacttcctt

SEQ ID NO: 2079862 - DNA, 25 bp, Homo sapien
gcagctggtcacttgtgaggaaatt

SEQ ID NO: 2079863 - DNA, 25 bp, Homo sapien
catgatggaaaagcttgactctgga

SEQ ID NO: 2079864 - DNA, 25 bp, Homo sapien
gagtgacgatttggcctagaaagcc

SEQ ID NO: 2079865 - DNA, 25 bp, Homo sapien
tgtgttcgaattggccttgagtgac

SEQ ID NO: 2079866 - DNA, 25 bp, Homo sapien
cctgtggcctcttaaacaaggacct

SEQ ID NO: 2079867 - DNA, 25 bp, Homo sapien
tggtatcagagttcggctagcggct

SEQ ID NO: 2079868 - DNA, 25 bp, Homo sapien
gttcatgaatggacctgcacaaggg

SEQ ID NO: 2079869 - DNA, 25 bp, Homo sapien
tccaaaaaacccgtatgctgtgccg

SEQ ID NO: 2079870 - DNA, 25 bp, Homo sapien
tattttatctcttagcggcttccgg

SEQ ID NO: 2079871 - DNA, 25 bp, Homo sapien
tgcgtttgccaacgtaggcctctcg

SEQ ID NO: 2079872 - DNA, 25 bp, Homo sapien
gcccgacgcgctcatcgaatttaga

SEQ ID NO: 2079873 - DNA, 25 bp, Homo sapien
ttagattgactccttcggctctccg

SEQ ID NO: 2079874 - DNA, 25 bp, Homo sapien
ccactacggagtcgccttggaagcc

SEQ ID NO: 2079875 - DNA, 25 bp, Homo sapien
ccttcgacggagaaacaggatgtcc

SEQ ID NO: 2079876 - DNA, 25 bp, Homo sapien
tttttcggctgtggcgtccggcgct

SEQ ID NO: 2079877 - DNA, 25 bp, Homo sapien
cgattccgtcgccaaacaggtaagt

SEQ ID NO: 2079878 - DNA, 25 bp, Homo sapien
gagcggagctcttgtggacacctcg

SEQ ID NO: 2079879 - DNA, 25 bp, Homo sapien
tgcggacctagcgtggcctcggttt

SEQ ID NO: 2079880 - DNA, 25 bp, Homo sapien
gaaaacagatgctcccctagctgca

SEQ ID NO: 2079881 - DNA, 25 bp, Homo sapien
cgtgcccgggttgctctcaagtgga

SEQ ID NO: 2079882 - DNA, 25 bp, Homo sapien
tgcttgtctgctatgtccaccaggg

SEQ ID NO: 2079883 - DNA, 25 bp, Homo sapien
tatcccagaagcttcctcatgtgca

SEQ ID NO: 2079884 - DNA, 25 bp, Homo sapien
tcttaggtttaactcacacttccca

SEQ ID NO: 2079885 - DNA, 25 bp, Homo sapien
cagacctccataggccacacttgaa

SEQ ID NO: 2079886 - DNA, 25 bp, Homo sapien
catgtgtaagagtccttgcatccca

SEQ ID NO: 2079887 - DNA, 25 bp, Homo sapien
tgtaagagtccttgcatcccaaggg

SEQ ID NO: 2079888 - DNA, 25 bp, Homo sapien
agagtccttgcatcccaagggcacc

SEQ ID NO: 2079889 - DNA, 25 bp, Homo sapien
taagagtccttgcatcccaagggca

SEQ ID NO: 2079890 - DNA, 25 bp, Homo sapien
ccatgagaactgtcaagcatttgta

SEQ ID NO: 2079891 - DNA, 25 bp, Homo sapien
gtagaatcggcacctcacttagaag

SEQ ID NO: 2079892 - DNA, 25 bp, Homo sapien
cacatgtagtacttgtaggagatcc

SEQ ID NO: 2079893 - DNA, 25 bp, Homo sapien
cacttagaagttgacagcccatgag

SEQ ID NO: 2079894 - DNA, 25 bp, Homo sapien
tccagttctgctggagggcggtcat

SEQ ID NO: 2079895 - DNA, 25 bp, Homo sapien
cgaggagcagggaatccagttctgc

SEQ ID NO: 2079896 - DNA, 25 bp, Homo sapien
cattgcccttgcagctcgcaggggg

SEQ ID NO: 2079897 - DNA, 25 bp, Homo sapien
ccggccttgccctgcgaggagcagg

SEQ ID NO: 2079898 - DNA, 25 bp, Homo sapien
caagttcattatgtctgggatggca

SEQ ID NO: 2079899 - DNA, 25 bp, Homo sapien
cagcttcgtagtagtgccatgtcca

SEQ ID NO: 2079900 - DNA, 25 bp, Homo sapien
aaaatcaagggagtggtgagtcctc

SEQ ID NO: 2079901 - DNA, 25 bp, Homo sapien
taccaagcatgtaactacctgaagg

SEQ ID NO: 2079902 - DNA, 25 bp, Homo sapien
ttttgtagtgaaaatcatagaactg

SEQ ID NO: 2079903 - DNA, 25 bp, Homo sapien
agaactgtggttgttagtgctataa

SEQ ID NO: 2079904 - DNA, 25 bp, Homo sapien
tttatgcctttgacagctattttgc

SEQ ID NO: 2079905 - DNA, 25 bp, Homo sapien
ttaagatcactccaaatcagtgcct

SEQ ID NO: 2079906 - DNA, 25 bp, Homo sapien
tcagttataagcacaattcagtggg

SEQ ID NO: 2079907 - DNA, 25 bp, Homo sapien
cgcaccgagtcacgttcagttataa

SEQ ID NO: 2079908 - DNA, 25 bp, Homo sapien
tactgtccggtattcccaaacgcac

SEQ ID NO: 2079909 - DNA, 25 bp, Homo sapien
taaactgagtatcgtactgtaaacc

SEQ ID NO: 2079910 - DNA, 25 bp, Homo sapien
gacaggttcaggcataagtgggccc

SEQ ID NO: 2079911 - DNA, 25 bp, Homo sapien
cagagatgcggtatttgtaggttgt

SEQ ID NO: 2079912 - DNA, 25 bp, Homo sapien
gccatggtgggaacctcatccagat

SEQ ID NO: 2079913 - DNA, 25 bp, Homo sapien
tccagatgtcattgtgaggacactg

SEQ ID NO: 2079914 - DNA, 25 bp, Homo sapien
gaataaatgattggctgtttgctgc

SEQ ID NO: 2079915 - DNA, 25 bp, Homo sapien
tacatgtgtgctaattagagtggaa

SEQ ID NO: 2079916 - DNA, 25 bp, Homo sapien
ctgcattgccataaagggtgcccag

SEQ ID NO: 2079917 - DNA, 25 bp, Homo sapien
ccccgcacgcggcttgattggtgag

SEQ ID NO: 2079918 - DNA, 25 bp, Homo sapien
atcaaagtaatgaggcgaagagagc

SEQ ID NO: 2079919 - DNA, 25 bp, Homo sapien
ctcagcaccaaggagtgtgaactgg

SEQ ID NO: 2079920 - DNA, 25 bp, Homo sapien
gaggcgaagagagcgcttggtgctc

SEQ ID NO: 2079921 - DNA, 25 bp, Homo sapien
gctcagcaccaaggagtgtgaactg

SEQ ID NO: 2079922 - DNA, 25 bp, Homo sapien
cttttctaatgtggctacgcacgtc

SEQ ID NO: 2079923 - DNA, 25 bp, Homo sapien
tacgcacgtctcaataccatttgtt

SEQ ID NO: 2079924 - DNA, 25 bp, Homo sapien
tgtggctacgcacgtctcaatacca

SEQ ID NO: 2079925 - DNA, 25 bp, Homo sapien
tctaatgtggctacgcacgtctcaa

SEQ ID NO: 2079926 - DNA, 25 bp, Homo sapien
cagtgaacatcttataacaatctag

SEQ ID NO: 2079927 - DNA, 25 bp, Homo sapien
tcttaattcttaacctagggatgac

SEQ ID NO: 2079928 - DNA, 25 bp, Homo sapien
tactgtataaaagctcctacataca

SEQ ID NO: 2079929 - DNA, 25 bp, Homo sapien
taatttcaatactgtataaaagctc

SEQ ID NO: 2079930 - DNA, 25 bp, Homo sapien
gtttctcagactggatcagaaagac

SEQ ID NO: 2079931 - DNA, 25 bp, Homo sapien
tgtttctcagactggatcagaaaga

SEQ ID NO: 2079932 - DNA, 25 bp, Homo sapien
tttctcagactggatcagaaagacc

SEQ ID NO: 2079933 - DNA, 25 bp, Homo sapien
ggattgcaggcagatacttatggct

SEQ ID NO: 2079934 - DNA, 25 bp, Homo sapien
cacatgtggagataggagatacacc

SEQ ID NO: 2079935 - DNA, 25 bp, Homo sapien
tcttaggaagcaatgtcaccggtac

SEQ ID NO: 2079936 - DNA, 25 bp, Homo sapien
tgtgatccatctctagtcagcagga

SEQ ID NO: 2079937 - DNA, 25 bp, Homo sapien
gagaatgctttacaacgtgccttga

SEQ ID NO: 2079938 - DNA, 25 bp, Homo sapien
taaaggttgcatatcgaaagatcgg

SEQ ID NO: 2079939 - DNA, 25 bp, Homo sapien
caggaatacagaacaacaggaacgc

SEQ ID NO: 2079940 - DNA, 25 bp, Homo sapien
gaaagatcgggacgttgccaggaat

SEQ ID NO: 2079941 - DNA, 25 bp, Homo sapien
ttcagctaccgttgtttcagtgacc

SEQ ID NO: 2079942 - DNA, 25 bp, Homo sapien
gggctgccaggtcacatctgaattc

SEQ ID NO: 2079943 - DNA, 25 bp, Homo sapien
acagcacttttcctgaacacctggg

SEQ ID NO: 2079944 - DNA, 25 bp, Homo sapien
gacgtgcattcaccatagcaattga

SEQ ID NO: 2079945 - DNA, 25 bp, Homo sapien
gaaacattgtcagccggcctatgtc

SEQ ID NO: 2079946 - DNA, 25 bp, Homo sapien
ctgctcctctacatgcttgctgaca

SEQ ID NO: 2079947 - DNA, 25 bp, Homo sapien
tggctgagccgtgcttttccttccc

SEQ ID NO: 2079948 - DNA, 25 bp, Homo sapien
aagcactgccacgaaacattgtcag

SEQ ID NO: 2079949 - DNA, 25 bp, Homo sapien
atgtagattgcaccttctctaagtg

SEQ ID NO: 2079950 - DNA, 25 bp, Homo sapien
tcttaaataattgccacttaaggga

SEQ ID NO: 2079951 - DNA, 25 bp, Homo sapien
taagtgtgtcttaaataattgccac

SEQ ID NO: 2079952 - DNA, 25 bp, Homo sapien
taattgccacttaagggaattaaga

SEQ ID NO: 2079953 - DNA, 25 bp, Homo sapien
cagctgttactttatgtgtgaagca

SEQ ID NO: 2079954 - DNA, 25 bp, Homo sapien
tgttggaagaacgaagtcatggact

SEQ ID NO: 2079955 - DNA, 25 bp, Homo sapien
tacagcccagagagatataactaat

SEQ ID NO: 2079956 - DNA, 25 bp, Homo sapien
cagtttgtttgtcacccataaggcg

SEQ ID NO: 2079957 - DNA, 25 bp, Homo sapien
tgctgccgatccaaacgcttcaata

SEQ ID NO: 2079958 - DNA, 25 bp, Homo sapien
taagacatccactgaatgccagctg

SEQ ID NO: 2079959 - DNA, 25 bp, Homo sapien
cccagcagcagtagaagagtgtttg

SEQ ID NO: 2079960 - DNA, 25 bp, Homo sapien
tggaagcactgaatggccataagac

SEQ ID NO: 2079961 - DNA, 25 bp, Homo sapien
ttgtttttgataggcttcaccacac

SEQ ID NO: 2079962 - DNA, 25 bp, Homo sapien
tccgatgtcattgtgtagacgggaa

SEQ ID NO: 2079963 - DNA, 25 bp, Homo sapien
tgcagacagccccttactccgatgt

SEQ ID NO: 2079964 - DNA, 25 bp, Homo sapien
tctggtccattagggaactgtggct

SEQ ID NO: 2079965 - DNA, 25 bp, Homo sapien
cattgccatcctttcgagtgaccat

SEQ ID NO: 2079966 - DNA, 25 bp, Homo sapien
caccagtgaacttcatcaacaccat

SEQ ID NO: 2079967 - DNA, 25 bp, Homo sapien
tcattgccatcctttcgagtgacca

SEQ ID NO: 2079968 - DNA, 25 bp, Homo sapien
ccatcattgccatcctttcgagtga

SEQ ID NO: 2079969 - DNA, 25 bp, Homo sapien
tattgtgaagtgaaatgagatgaca

SEQ ID NO: 2079970 - DNA, 25 bp, Homo sapien
cgtgttcatttaggtaaaagtgcct

SEQ ID NO: 2079971 - DNA, 25 bp, Homo sapien
tgttcatttaggtaaaagtgcctct

SEQ ID NO: 2079972 - DNA, 25 bp, Homo sapien
tggcacttttaggattattgtgaag

SEQ ID NO: 2079973 - DNA, 25 bp, Homo sapien
taggagaaagtcctgagtcagtgct

SEQ ID NO: 2079974 - DNA, 25 bp, Homo sapien
ataggagaaggtcccgactgagtgc

SEQ ID NO: 2079975 - DNA, 25 bp, Homo sapien
taggagaaggtcttgagtcagtgct

SEQ ID NO: 2079976 - DNA, 25 bp, Homo sapien
tgaggactgcatggagggataggag

SEQ ID NO: 2079977 - DNA, 25 bp, Homo sapien
aaactctttgaaggcctgagactcg

SEQ ID NO: 2079978 - DNA, 25 bp, Homo sapien
gtgctctgttgaaatcacctggttg

SEQ ID NO: 2079979 - DNA, 25 bp, Homo sapien
ctgtccagctctcctactgtaaact

SEQ ID NO: 2079980 - DNA, 25 bp, Homo sapien
gttgaaatcacctggttggctgtcc

SEQ ID NO: 2079981 - DNA, 25 bp, Homo sapien
atggcggcagcaagataaaacaagg

SEQ ID NO: 2079982 - DNA, 25 bp, Homo sapien
ctcagaatcttataaaactggcggg

SEQ ID NO: 2079983 - DNA, 25 bp, Homo sapien
ggttacagggcccattccaattcaa

SEQ ID NO: 2079984 - DNA, 25 bp, Homo sapien
caatggtcccgaaagtcttatttca

SEQ ID NO: 2079985 - DNA, 25 bp, Homo sapien
gagttgtaggctggcattattaaaa

SEQ ID NO: 2079986 - DNA, 25 bp, Homo sapien
tgtaggctggcattattaaaatgca

SEQ ID NO: 2079987 - DNA, 25 bp, Homo sapien
atttagcataagcagagttgtaggc

SEQ ID NO: 2079988 - DNA, 25 bp, Homo sapien
cataagcagagttgtaggctggcat

SEQ ID NO: 2079989 - DNA, 25 bp, Homo sapien
ctgtttacaaagtccagatttcctg

SEQ ID NO: 2079990 - DNA, 25 bp, Homo sapien
ggcacaaagaccgagagcttttgga

SEQ ID NO: 2079991 - DNA, 25 bp, Homo sapien
tagagctgggccctgtttacaaagt

SEQ ID NO: 2079992 - DNA, 25 bp, Homo sapien
cctgtgctgtcagttagggcaattg

SEQ ID NO: 2079993 - DNA, 25 bp, Homo sapien
gagcctaagtggtcctgttaagaca

SEQ ID NO: 2079994 - DNA, 25 bp, Homo sapien
gcattctgtcacatgttcgtgtcat

SEQ ID NO: 2079995 - DNA, 25 bp, Homo sapien
cggagcactgtgctttcacgtggag

SEQ ID NO: 2079996 - DNA, 25 bp, Homo sapien
tgttaagacagacatccacacctgc

SEQ ID NO: 2079997 - DNA, 25 bp, Homo sapien
ctacttggtgcaatagcttcgtggc

SEQ ID NO: 2079998 - DNA, 25 bp, Homo sapien
ggtgcaatagcttcgtggcccttat

SEQ ID NO: 2079999 - DNA, 25 bp, Homo sapien
cttggtgcaatagcttcgtggccct

SEQ ID NO: 2080000 - DNA, 25 bp, Homo sapien
caatagcttcgtggcccttatacat

SEQ ID NO: 2080001 - DNA, 25 bp, Homo sapien
gcagtgttactaatgccgggaagca

SEQ ID NO: 2080002 - DNA, 25 bp, Homo sapien
cagaacagccacctagtgcagaggc

SEQ ID NO: 2080003 - DNA, 25 bp, Homo sapien
aatatcactctgctcgagacccgag

SEQ ID NO: 2080004 - DNA, 25 bp, Homo sapien
gaaagtgcgtctaggagtgagtccc

SEQ ID NO: 2080005 - DNA, 25 bp, Homo sapien
caaatgctggtatgaggcttgtagg

SEQ ID NO: 2080006 - DNA, 25 bp, Homo sapien
tttagtggctttgtaactgaactct

SEQ ID NO: 2080007 - DNA, 25 bp, Homo sapien
agtggctttgtaactgaactctgaa

SEQ ID NO: 2080008 - DNA, 25 bp, Homo sapien
tatgaggcttgtaggatttagtggc

SEQ ID NO: 2080009 - DNA, 25 bp, Homo sapien
tgtggtgtccgtgttcatctcctcc

SEQ ID NO: 2080010 - DNA, 25 bp, Homo sapien
gtgtggtgtccgtgttcatctcctc

SEQ ID NO: 2080011 - DNA, 25 bp, Homo sapien
tcacaggcttctctattgatcgggc

SEQ ID NO: 2080012 - DNA, 25 bp, Homo sapien
cacaggcttctctattgatcgggct

SEQ ID NO: 2080013 - DNA, 25 bp, Homo sapien
cagagaggatttacgggcagtacag

SEQ ID NO: 2080014 - DNA, 25 bp, Homo sapien
cccttggcagttcgatgagttgtag

SEQ ID NO: 2080015 - DNA, 25 bp, Homo sapien
ttcgatgagttgtagatgcacagct

SEQ ID NO: 2080016 - DNA, 25 bp, Homo sapien
gaaatgcatagttcctctacctgaa

SEQ ID NO: 2080017 - DNA, 25 bp, Homo sapien
tccatttgttgaatctccgttaaaa

SEQ ID NO: 2080018 - DNA, 25 bp, Homo sapien
cctggatccaaacaaactgcggtga

SEQ ID NO: 2080019 - DNA, 25 bp, Homo sapien
ggatttccatttgttgaatctccgt

SEQ ID NO: 2080020 - DNA, 25 bp, Homo sapien
gcggtgaaatcagacactgagagag

SEQ ID NO: 2080021 - DNA, 25 bp, Homo sapien
tatcttggattggaaagggtgtgaa

SEQ ID NO: 2080022 - DNA, 25 bp, Homo sapien
cctagacttaaggaaacagagtaag

SEQ ID NO: 2080023 - DNA, 25 bp, Homo sapien
tgctaaaagtcacaaagtgggaaaa

SEQ ID NO: 2080024 - DNA, 25 bp, Homo sapien
tgcattttacaagcagtgctgtcct

SEQ ID NO: 2080025 - DNA, 25 bp, Homo sapien
aaagttacgtataccaccagcctgc

SEQ ID NO: 2080026 - DNA, 25 bp, Homo sapien
aaaaacatgtggcttggttaccaga

SEQ ID NO: 2080027 - DNA, 25 bp, Homo sapien
cagattttgcccatgaagcaaggtc

SEQ ID NO: 2080028 - DNA, 25 bp, Homo sapien
gggaccaccatggtacccctgaaga

SEQ ID NO: 2080029 - DNA, 25 bp, Homo sapien
tgattttcaagtcgtaacttcttaa

SEQ ID NO: 2080030 - DNA, 25 bp, Homo sapien
aacttcttaacttctggcaggaata

SEQ ID NO: 2080031 - DNA, 25 bp, Homo sapien
ggcaggaatatggagcattttcata

SEQ ID NO: 2080032 - DNA, 25 bp, Homo sapien
cagtgattttcaagtcgtaacttct

SEQ ID NO: 2080033 - DNA, 25 bp, Homo sapien
tgttattgacaacaagcgacttttc

SEQ ID NO: 2080034 - DNA, 25 bp, Homo sapien
aataacattgatacttaggcatgca

SEQ ID NO: 2080035 - DNA, 25 bp, Homo sapien
ttacagacataagaaaccctgcaat

SEQ ID NO: 2080036 - DNA, 25 bp, Homo sapien
agtgaaagctttaatcccgtgattc

SEQ ID NO: 2080037 - DNA, 25 bp, Homo sapien
ccctttttggtagcaaagattgtgt

SEQ ID NO: 2080038 - DNA, 25 bp, Homo sapien
ggacagtgatgtgccgatgatgctt

SEQ ID NO: 2080039 - DNA, 25 bp, Homo sapien
tactgagtgctcaagaaaagtctat

SEQ ID NO: 2080040 - DNA, 25 bp, Homo sapien
aagcctcccactatggtactgagtg

SEQ ID NO: 2080041 - DNA, 25 bp, Homo sapien
tactcgcagtatcccgcaaggtgtc

SEQ ID NO: 2080042 - DNA, 25 bp, Homo sapien
cctgtgcaatggacgtagaaactga

SEQ ID NO: 2080043 - DNA, 25 bp, Homo sapien
cttagagaggtggacaagctgccca

SEQ ID NO: 2080044 - DNA, 25 bp, Homo sapien
caaagcacatggagaacggtagagc

SEQ ID NO: 2080045 - DNA, 25 bp, Homo sapien
tactgtcattctgattgtctggctg

SEQ ID NO: 2080046 - DNA, 25 bp, Homo sapien
gaggaattaattcggtactgtcatt

SEQ ID NO: 2080047 - DNA, 25 bp, Homo sapien
tgttttgccctttggcaattctgct

SEQ ID NO: 2080048 - DNA, 25 bp, Homo sapien
ctgctttgagtttctttcagccagc

SEQ ID NO: 2080049 - DNA, 25 bp, Homo sapien
tatgtcggtggagatagccagtgct

SEQ ID NO: 2080050 - DNA, 25 bp, Homo sapien
tgtgaaacgcacacgctggaagata

SEQ ID NO: 2080051 - DNA, 25 bp, Homo sapien
gattcactgcagctgtcggatgcga

SEQ ID NO: 2080052 - DNA, 25 bp, Homo sapien
tccttgtggattcacctgtggccct

SEQ ID NO: 2080053 - DNA, 25 bp, Homo sapien
aggaagccgtcagggagccccagtt

SEQ ID NO: 2080054 - DNA, 25 bp, Homo sapien
ccccagttaggaagggatctcccag

SEQ ID NO: 2080055 - DNA, 25 bp, Homo sapien
gttaggaagggatctcccagagcag

SEQ ID NO: 2080056 - DNA, 25 bp, Homo sapien
tttccaaggctgatctgggctccct

SEQ ID NO: 2080057 - DNA, 25 bp, Homo sapien
tgtaaatagggccataacccacgaa

SEQ ID NO: 2080058 - DNA, 25 bp, Homo sapien
acgaatacagtctacccccagtctg

SEQ ID NO: 2080059 - DNA, 25 bp, Homo sapien
tcatgactgatctgtaaatagggcc

SEQ ID NO: 2080060 - DNA, 25 bp, Homo sapien
gggccataacccacgaatacagtct

SEQ ID NO: 2080061 - DNA, 25 bp, Homo sapien
tttctggtaagggtcgggactcaca

SEQ ID NO: 2080062 - DNA, 25 bp, Homo sapien
tatcaggattgcaacatacggcccg

SEQ ID NO: 2080063 - DNA, 25 bp, Homo sapien
tcacagtgattgtccaacgcgcagt

SEQ ID NO: 2080064 - DNA, 25 bp, Homo sapien
taacctatgcctggaaacgacgctg

SEQ ID NO: 2080065 - DNA, 25 bp, Homo sapien
ggtaggcgctcagcaagttacttta

SEQ ID NO: 2080066 - DNA, 25 bp, Homo sapien
cttcttgtgcagctaggtaggcgct

SEQ ID NO: 2080067 - DNA, 25 bp, Homo sapien
taattccagctgtaagctcatgccc

SEQ ID NO: 2080068 - DNA, 25 bp, Homo sapien
tgcgtgttcatcttcaggccctgag

SEQ ID NO: 2080069 - DNA, 25 bp, Homo sapien
gatgaatgcaccgtgaacacactgt

SEQ ID NO: 2080070 - DNA, 25 bp, Homo sapien
acttcacggcagacgctggatctga

SEQ ID NO: 2080071 - DNA, 25 bp, Homo sapien
aacacactgtcttttggtcacgctg

SEQ ID NO: 2080072 - DNA, 25 bp, Homo sapien
agggccctgagaccaaacttcacgg

SEQ ID NO: 2080073 - DNA, 25 bp, Homo sapien
tcagatgtaacgaataccataaatc

SEQ ID NO: 2080074 - DNA, 25 bp, Homo sapien
tgtaacgaataccataaatctgtgt

SEQ ID NO: 2080075 - DNA, 25 bp, Homo sapien
cgaataccataaatctgtgtaaagc

SEQ ID NO: 2080076 - DNA, 25 bp, Homo sapien
accataaatctgtgtaaagcaagtc

SEQ ID NO: 2080077 - DNA, 25 bp, Homo sapien
gcaaagtgtccccaaagaagctgaa

SEQ ID NO: 2080078 - DNA, 25 bp, Homo sapien
cgagcgtggactgtaacctgactga

SEQ ID NO: 2080079 - DNA, 25 bp, Homo sapien
gaacaagtctcagcgagtgtccgtg

SEQ ID NO: 2080080 - DNA, 25 bp, Homo sapien
ccttctgacaggtgcgtagcgagtc

SEQ ID NO: 2080081 - DNA, 25 bp, Homo sapien
ggcctgagcatctttggaggtctcc

SEQ ID NO: 2080082 - DNA, 25 bp, Homo sapien
tgctctgaggacagcgtccactgga

SEQ ID NO: 2080083 - DNA, 25 bp, Homo sapien
tgaatgtggaacaacgtgcccaggg

SEQ ID NO: 2080084 - DNA, 25 bp, Homo sapien
tggtttggttttgggctcagccgcc

SEQ ID NO: 2080085 - DNA, 25 bp, Homo sapien
ttgggcaagggaccataccagagcc

SEQ ID NO: 2080086 - DNA, 25 bp, Homo sapien
tctgtgcacagatcgtcctgcgttg

SEQ ID NO: 2080087 - DNA, 25 bp, Homo sapien
ggcctttgtactcgctgttctggaa

SEQ ID NO: 2080088 - DNA, 25 bp, Homo sapien
caaacgcgctgcctcaagtgagtgt

SEQ ID NO: 2080089 - DNA, 25 bp, Homo sapien
tttatcacaggatcacaaccaggtc

SEQ ID NO: 2080090 - DNA, 25 bp, Homo sapien
gccgcctggagcctgtttatcacag

SEQ ID NO: 2080091 - DNA, 25 bp, Homo sapien
aggagccgagtgcaggccctggaac

SEQ ID NO: 2080092 - DNA, 25 bp, Homo sapien
gccctggaactggagaggccgcctg

SEQ ID NO: 2080093 - DNA, 25 bp, Homo sapien
tcccaggtgctgctttcggaagcaa

SEQ ID NO: 2080094 - DNA, 25 bp, Homo sapien
tcttcccgggctttgctatcagcgc

SEQ ID NO: 2080095 - DNA, 25 bp, Homo sapien
tcaaactgcgatgttcccggaagca

SEQ ID NO: 2080096 - DNA, 25 bp, Homo sapien
gagagaactccatttgaaagcgtgg

SEQ ID NO: 2080097 - DNA, 25 bp, Homo sapien
tgtatttactccgtggcaagcacag

SEQ ID NO: 2080098 - DNA, 25 bp, Homo sapien
taaaactgcagaacttggaggtcct

SEQ ID NO: 2080099 - DNA, 25 bp, Homo sapien
aaaatcagacattcccgcagctggg

SEQ ID NO: 2080100 - DNA, 25 bp, Homo sapien
caaaacaagcggttggagtcctact

SEQ ID NO: 2080101 - DNA, 25 bp, Homo sapien
ttcacagttcgaggcagcgtgaggt

SEQ ID NO: 2080102 - DNA, 25 bp, Homo sapien
tactgccagagttagcatccacgtg

SEQ ID NO: 2080103 - DNA, 25 bp, Homo sapien
catccacgtgctctcagatgattgc

SEQ ID NO: 2080104 - DNA, 25 bp, Homo sapien
gctcggtgtgcatggagcatgttca

SEQ ID NO: 2080105 - DNA, 25 bp, Homo sapien
gaacagcgtccaaggtggcatcagc

SEQ ID NO: 2080106 - DNA, 25 bp, Homo sapien
tgggatgactccactcagtccccga

SEQ ID NO: 2080107 - DNA, 25 bp, Homo sapien
gggagccagcatttccattcgaatt

SEQ ID NO: 2080108 - DNA, 25 bp, Homo sapien
tgtaaagacgtaaatttaagtgtgc

SEQ ID NO: 2080109 - DNA, 25 bp, Homo sapien
tgcttctgcgatgcaaacactcctg

SEQ ID NO: 2080110 - DNA, 25 bp, Homo sapien
agctggagcctgaccttttactctt

SEQ ID NO: 2080111 - DNA, 25 bp, Homo sapien
gctcttgaagcagcaaacgtctttc

SEQ ID NO: 2080112 - DNA, 25 bp, Homo sapien
gcagcaaacgtctttccatcctgac

SEQ ID NO: 2080113 - DNA, 25 bp, Homo sapien
tcagcccttgcaggcgactggaaaa

SEQ ID NO: 2080114 - DNA, 25 bp, Homo sapien
cttgcaggcgactggaaaagctggt

SEQ ID NO: 2080115 - DNA, 25 bp, Homo sapien
ttgcgggtctgggtcggaccccagc

SEQ ID NO: 2080116 - DNA, 25 bp, Homo sapien
ggtaaaggtgcggctgggcacctgc

SEQ ID NO: 2080117 - DNA, 25 bp, Homo sapien
aatgagtgtgggtgcctaccacagg

SEQ ID NO: 2080118 - DNA, 25 bp, Homo sapien
gaaaccgagaatagcatgtctccaa

SEQ ID NO: 2080119 - DNA, 25 bp, Homo sapien
gaattggcgcctctttggacccatg

SEQ ID NO: 2080120 - DNA, 25 bp, Homo sapien
catcagttttgccaggaattggcgc

SEQ ID NO: 2080121 - DNA, 25 bp, Homo sapien
agttgctccagccaatctatggacc

SEQ ID NO: 2080122 - DNA, 25 bp, Homo sapien
gctccagccaatctatggaccaccc

SEQ ID NO: 2080123 - DNA, 25 bp, Homo sapien
ccagccaatctatggaccaccccat

SEQ ID NO: 2080124 - DNA, 25 bp, Homo sapien
ttgctccagccaatctatggaccac

SEQ ID NO: 2080125 - DNA, 25 bp, Homo sapien
gagtcctgggccattagcagggccc

SEQ ID NO: 2080126 - DNA, 25 bp, Homo sapien
gagccagggcggagcgtaaatccct

SEQ ID NO: 2080127 - DNA, 25 bp, Homo sapien
tgagatggtcaagggtgaaacccga

SEQ ID NO: 2080128 - DNA, 25 bp, Homo sapien
acgctggaccaacgtccctgctggg

SEQ ID NO: 2080129 - DNA, 25 bp, Homo sapien
tgtgcttgcctgtgtaggctgtgtg

SEQ ID NO: 2080130 - DNA, 25 bp, Homo sapien
gctcacggctggcagagtctcagtt

SEQ ID NO: 2080131 - DNA, 25 bp, Homo sapien
acggctggcagagtctcagttacca

SEQ ID NO: 2080132 - DNA, 25 bp, Homo sapien
agtctcagttaccaggtgacctgga

SEQ ID NO: 2080133 - DNA, 25 bp, Homo sapien
tgctttggctcagcccgtgggttca

SEQ ID NO: 2080134 - DNA, 25 bp, Homo sapien
ttggctcagcccgtgggttcaggat

SEQ ID NO: 2080135 - DNA, 25 bp, Homo sapien
aggggctgcacaggacattggcagc

SEQ ID NO: 2080136 - DNA, 25 bp, Homo sapien
gcagtcccgcatcgccagctccctt

SEQ ID NO: 2080137 - DNA, 25 bp, Homo sapien
ccggctggtgaccttgttcgtccat

SEQ ID NO: 2080138 - DNA, 25 bp, Homo sapien
gaccttgttcgtccatgggtctggg

SEQ ID NO: 2080139 - DNA, 25 bp, Homo sapien
tcctgagcttgagctgctgatcccg

SEQ ID NO: 2080140 - DNA, 25 bp, Homo sapien
caaagtcgtacaggaagagcctgga

SEQ ID NO: 2080141 - DNA, 25 bp, Homo sapien
gcgtcctgctaggtgcacagcttta

SEQ ID NO: 2080142 - DNA, 25 bp, Homo sapien
tgctgctgcgatgaagtcaattctg

SEQ ID NO: 2080143 - DNA, 25 bp, Homo sapien
cagaacaaggcgtcttacagccata

SEQ ID NO: 2080144 - DNA, 25 bp, Homo sapien
tctgtttcgggtggaaatgatacac

SEQ ID NO: 2080145 - DNA, 25 bp, Homo sapien
gggcttcacttggcttggactccac

SEQ ID NO: 2080146 - DNA, 25 bp, Homo sapien
tggcaccgcatcagggcacacagcg

SEQ ID NO: 2080147 - DNA, 25 bp, Homo sapien
tcttccgacagccagaggatgctgc

SEQ ID NO: 2080148 - DNA, 25 bp, Homo sapien
cacgtgctctggaacagtcgtctca

SEQ ID NO: 2080149 - DNA, 25 bp, Homo sapien
gagtgccgaggaccccgtattcctg

SEQ ID NO: 2080150 - DNA, 25 bp, Homo sapien
agcgggatgtgcacagccacaaggc

SEQ ID NO: 2080151 - DNA, 25 bp, Homo sapien
tggaacccctcaggagtcagggtgg

SEQ ID NO: 2080152 - DNA, 25 bp, Homo sapien
gaattgcaccaacccagcgggatgt

SEQ ID NO: 2080153 - DNA, 25 bp, Homo sapien
tttcatgagaggcggtatttctctg

SEQ ID NO: 2080154 - DNA, 25 bp, Homo sapien
tttttcatgagaggcggtatttctc

SEQ ID NO: 2080155 - DNA, 25 bp, Homo sapien
gactttttcatgagaggcggtattt

SEQ ID NO: 2080156 - DNA, 25 bp, Homo sapien
actttttcatgagaggcggtatttc

SEQ ID NO: 2080157 - DNA, 25 bp, Homo sapien
gaatggtcccagaacggatgtgcct

SEQ ID NO: 2080158 - DNA, 25 bp, Homo sapien
tccattgatgcccaacgccgggtgt

SEQ ID NO: 2080159 - DNA, 25 bp, Homo sapien
tgggagccacttcccggaacagaag

SEQ ID NO: 2080160 - DNA, 25 bp, Homo sapien
gctacaccggaaagctgcggctgct

SEQ ID NO: 2080161 - DNA, 25 bp, Homo sapien
cgatgtctgtcctgggtcggtcaca

SEQ ID NO: 2080162 - DNA, 25 bp, Homo sapien
gagacccagaaataattggacctaa

SEQ ID NO: 2080163 - DNA, 25 bp, Homo sapien
cccatctggaatgttgagagaccca

SEQ ID NO: 2080164 - DNA, 25 bp, Homo sapien
ggtcacaccaacacagcgggaaaac

SEQ ID NO: 2080165 - DNA, 25 bp, Homo sapien
cagcaaaggcggcacatgcaggttc

SEQ ID NO: 2080166 - DNA, 25 bp, Homo sapien
cactggaacatatgacttggtcttc

SEQ ID NO: 2080167 - DNA, 25 bp, Homo sapien
gcctgccacgcatgcagagtcactg

SEQ ID NO: 2080168 - DNA, 25 bp, Homo sapien
tcccttggatcacaggccccgggaa

SEQ ID NO: 2080169 - DNA, 25 bp, Homo sapien
atctatcactggcatgataagcctc

SEQ ID NO: 2080170 - DNA, 25 bp, Homo sapien
tcctttaaagacagcgcgggatcta

SEQ ID NO: 2080171 - DNA, 25 bp, Homo sapien
ctatcactggcatgataagcctcac

SEQ ID NO: 2080172 - DNA, 25 bp, Homo sapien
agacagcgcgggatctatcactggc

SEQ ID NO: 2080173 - DNA, 25 bp, Homo sapien
ctgcatatagccgtgtaacacagca

SEQ ID NO: 2080174 - DNA, 25 bp, Homo sapien
catatagccgtgtaacacagcaata

SEQ ID NO: 2080175 - DNA, 25 bp, Homo sapien
tctatctgcatatagccgtgtaaca

SEQ ID NO: 2080176 - DNA, 25 bp, Homo sapien
cgtgtcctctatctgcatatagccg

SEQ ID NO: 2080177 - DNA, 25 bp, Homo sapien
tccttgcccaggttctcagatattg

SEQ ID NO: 2080178 - DNA, 25 bp, Homo sapien
gcccaggttctcagatattgtttta

SEQ ID NO: 2080179 - DNA, 25 bp, Homo sapien
ttttgtctctctagccctgtgaaat

SEQ ID NO: 2080180 - DNA, 25 bp, Homo sapien
gaaattaccagaagctctgatggct

SEQ ID NO: 2080181 - DNA, 25 bp, Homo sapien
tccccatctcctgctatagaatagt

SEQ ID NO: 2080182 - DNA, 25 bp, Homo sapien
tggatgtctcaaattggcctctctt

SEQ ID NO: 2080183 - DNA, 25 bp, Homo sapien
ccccatctcctgctatagaatagtc

SEQ ID NO: 2080184 - DNA, 25 bp, Homo sapien
ctggatgtctcaaattggcctctct

SEQ ID NO: 2080185 - DNA, 25 bp, Homo sapien
cagtcatggtctatgtgcagcgggc

SEQ ID NO: 2080186 - DNA, 25 bp, Homo sapien
gggccttcccatgccttgtgtcgca

SEQ ID NO: 2080187 - DNA, 25 bp, Homo sapien
gtgtcgcatggtcctgcacagtcat

SEQ ID NO: 2080188 - DNA, 25 bp, Homo sapien
agtctccctgaaactcggtccatgg

SEQ ID NO: 2080189 - DNA, 25 bp, Homo sapien
cattcgagacagaacaaaaggacga

SEQ ID NO: 2080190 - DNA, 25 bp, Homo sapien
caaagattaggaagccttgccggag

SEQ ID NO: 2080191 - DNA, 25 bp, Homo sapien
tagggaaaggcgaatagtctccaaa

SEQ ID NO: 2080192 - DNA, 25 bp, Homo sapien
tgcagcggcttagaagaagcaagaa

SEQ ID NO: 2080193 - DNA, 25 bp, Homo sapien
tcagaactgccaagaagtgaacgtt

SEQ ID NO: 2080194 - DNA, 25 bp, Homo sapien
tgcagacggtaggaggttgacaact

SEQ ID NO: 2080195 - DNA, 25 bp, Homo sapien
ccctgctgtttgcaaggtggacaca

SEQ ID NO: 2080196 - DNA, 25 bp, Homo sapien
gtcaacaactcgctgctcaagaaag

SEQ ID NO: 2080197 - DNA, 25 bp, Homo sapien
gaacacttgaacacggacagagaaa

SEQ ID NO: 2080198 - DNA, 25 bp, Homo sapien
aacagcctgtctgcggctggccagg

SEQ ID NO: 2080199 - DNA, 25 bp, Homo sapien
accaacagcctgtctgcggctggcc

SEQ ID NO: 2080200 - DNA, 25 bp, Homo sapien
tcacagatcacagtcaatgccagga

SEQ ID NO: 2080201 - DNA, 25 bp, Homo sapien
agttatgaatcctaatttgtgccat

SEQ ID NO: 2080202 - DNA, 25 bp, Homo sapien
taaagttatgaatcctaatttgtgc

SEQ ID NO: 2080203 - DNA, 25 bp, Homo sapien
tcagcattaaagttatgaatcctaa

SEQ ID NO: 2080204 - DNA, 25 bp, Homo sapien
atcagcattaaagttatgaatccta

SEQ ID NO: 2080205 - DNA, 25 bp, Homo sapien
ccgcagtgccagacagactcttcat

SEQ ID NO: 2080206 - DNA, 25 bp, Homo sapien
gtgcagatcatgaaccgtcgccgca

SEQ ID NO: 2080207 - DNA, 25 bp, Homo sapien
gagctttgcctctaaatggtctttg

SEQ ID NO: 2080208 - DNA, 25 bp, Homo sapien
ttgtttgcagacgatctgctgtgca

SEQ ID NO: 2080209 - DNA, 25 bp, Homo sapien
taatgctgcctatatgccaatgagc

SEQ ID NO: 2080210 - DNA, 25 bp, Homo sapien
caatttacagttatgaggctggagg

SEQ ID NO: 2080211 - DNA, 25 bp, Homo sapien
tatttcagagctgtcagcgctggga

SEQ ID NO: 2080212 - DNA, 25 bp, Homo sapien
gccctcaataaagccaactcgctgg

SEQ ID NO: 2080213 - DNA, 25 bp, Homo sapien
caaaggttttcaccgactctctggt

SEQ ID NO: 2080214 - DNA, 25 bp, Homo sapien
ctctctggtccgacgaggaacgctg

SEQ ID NO: 2080215 - DNA, 25 bp, Homo sapien
agactttcccgcaggtcattgcaga

SEQ ID NO: 2080216 - DNA, 25 bp, Homo sapien
ccaacatgttccagccgtgacgtaa

SEQ ID NO: 2080217 - DNA, 25 bp, Homo sapien
tccctgtcggattctgggcgaagga

SEQ ID NO: 2080218 - DNA, 25 bp, Homo sapien
agacggtccctgtcggattctgggc

SEQ ID NO: 2080219 - DNA, 25 bp, Homo sapien
ctttttactgccagtggggagacca

SEQ ID NO: 2080220 - DNA, 25 bp, Homo sapien
ccttccagacggtccctgtcggatt

SEQ ID NO: 2080221 - DNA, 25 bp, Homo sapien
gtgtcgccgcatcgcttgttccaag

SEQ ID NO: 2080222 - DNA, 25 bp, Homo sapien
tgttccaagtgacccgattcaaagg

SEQ ID NO: 2080223 - DNA, 25 bp, Homo sapien
ggcctgctaggagttttactgacca

SEQ ID NO: 2080224 - DNA, 25 bp, Homo sapien
acgacataagcccagtgacagcgga

SEQ ID NO: 2080225 - DNA, 25 bp, Homo sapien
ccagggtttcggcatctagggcaac

SEQ ID NO: 2080226 - DNA, 25 bp, Homo sapien
tcacttctgagtccaacgggctctg

SEQ ID NO: 2080227 - DNA, 25 bp, Homo sapien
gaacacactttcatggtcagaaccg

SEQ ID NO: 2080228 - DNA, 25 bp, Homo sapien
gggctctgtaaccttggaccgggca

SEQ ID NO: 2080229 - DNA, 25 bp, Homo sapien
tcagatagatagtgctcctcaaggg

SEQ ID NO: 2080230 - DNA, 25 bp, Homo sapien
cctgggctacatagtagaacctcat

SEQ ID NO: 2080231 - DNA, 25 bp, Homo sapien
tttctgcacttaggccagtatggtg

SEQ ID NO: 2080232 - DNA, 25 bp, Homo sapien
gacatcatcagatagatagtgctcc

SEQ ID NO: 2080233 - DNA, 25 bp, Homo sapien
acatacatgaagacgtattggtttt

SEQ ID NO: 2080234 - DNA, 25 bp, Homo sapien
caacatacatgaagacgtattggtt

SEQ ID NO: 2080235 - DNA, 25 bp, Homo sapien
tcaacatacatgaagacgtattggt

SEQ ID NO: 2080236 - DNA, 25 bp, Homo sapien
aacatacatgaagacgtattggttt

SEQ ID NO: 2080237 - DNA, 25 bp, Homo sapien
catgcttcctgaggacagtcaagcc

SEQ ID NO: 2080238 - DNA, 25 bp, Homo sapien
ttaagggcaccccaacatgcttcct

SEQ ID NO: 2080239 - DNA, 25 bp, Homo sapien
ggcaccccaacatgcttcctgagga

SEQ ID NO: 2080240 - DNA, 25 bp, Homo sapien
tgcttcctgaggacagtcaagcctc

SEQ ID NO: 2080241 - DNA, 25 bp, Homo sapien
tgagtgagcaccaatgggcaggtct

SEQ ID NO: 2080242 - DNA, 25 bp, Homo sapien
tagactcgaggacaatgtggaccac

SEQ ID NO: 2080243 - DNA, 25 bp, Homo sapien
tgtcacactagctactcagccaggg

SEQ ID NO: 2080244 - DNA, 25 bp, Homo sapien
tcagccagggaaacaattaaacagg

SEQ ID NO: 2080245 - DNA, 25 bp, Homo sapien
gccaagcattcctccttttacaagg

SEQ ID NO: 2080246 - DNA, 25 bp, Homo sapien
gcaaacagggtgactataagcaata

SEQ ID NO: 2080247 - DNA, 25 bp, Homo sapien
gtaacagcagtaaggttctcatgcc

SEQ ID NO: 2080248 - DNA, 25 bp, Homo sapien
gcatgatgctataagcctaggaaaa

SEQ ID NO: 2080249 - DNA, 25 bp, Homo sapien
ccaggtacaagtcgggtggccatta

SEQ ID NO: 2080250 - DNA, 25 bp, Homo sapien
tggtgaccttaagcccgacatgcag

SEQ ID NO: 2080251 - DNA, 25 bp, Homo sapien
caggccgttttgcatccagattgta

SEQ ID NO: 2080252 - DNA, 25 bp, Homo sapien
gataatcccgcttaaagtgaccacg

SEQ ID NO: 2080253 - DNA, 25 bp, Homo sapien
gcatttagtatattccctcaaaaca

SEQ ID NO: 2080254 - DNA, 25 bp, Homo sapien
gactcacttcagtttcgaagaagca

SEQ ID NO: 2080255 - DNA, 25 bp, Homo sapien
tattctgtagcttaagggatccatc

SEQ ID NO: 2080256 - DNA, 25 bp, Homo sapien
ggatccatcagttaaaatgttggtc

SEQ ID NO: 2080257 - DNA, 25 bp, Homo sapien
gacatagactatgttaaatttaata

SEQ ID NO: 2080258 - DNA, 25 bp, Homo sapien
acatagactatgttaaatttaataa

SEQ ID NO: 2080259 - DNA, 25 bp, Homo sapien
catagactatgttaaatttaataat

SEQ ID NO: 2080260 - DNA, 25 bp, Homo sapien
aagtctctttccgtgtggctgtggc

SEQ ID NO: 2080261 - DNA, 25 bp, Homo sapien
cagttgtgacacttcggcatgatcc

SEQ ID NO: 2080262 - DNA, 25 bp, Homo sapien
gaataactaagcaccacactggacg

SEQ ID NO: 2080263 - DNA, 25 bp, Homo sapien
tcataactcaaaagcgtcacagtgg

SEQ ID NO: 2080264 - DNA, 25 bp, Homo sapien
ttccttgctcctcagatggaaggaa

SEQ ID NO: 2080265 - DNA, 25 bp, Homo sapien
tccttgctcctcagatggaaggaaa

SEQ ID NO: 2080266 - DNA, 25 bp, Homo sapien
cctagagcatctttaattgcgtcca

SEQ ID NO: 2080267 - DNA, 25 bp, Homo sapien
taattgcgtccatatttactgagca

SEQ ID NO: 2080268 - DNA, 25 bp, Homo sapien
tttactgagcaggttagatacaccg

SEQ ID NO: 2080269 - DNA, 25 bp, Homo sapien
gatacaccgaaacctaagactttga

SEQ ID NO: 2080270 - DNA, 25 bp, Homo sapien
tcagggcactaaaggttaagaggga

SEQ ID NO: 2080271 - DNA, 25 bp, Homo sapien
gtttcagcgcaacggtgacagcggc

SEQ ID NO: 2080272 - DNA, 25 bp, Homo sapien
acagcggcagcagtcttcagggcac

SEQ ID NO: 2080273 - DNA, 25 bp, Homo sapien
cttcaatcagaacgggcccatgggg

SEQ ID NO: 2080274 - DNA, 25 bp, Homo sapien
gagggtgcaggtttcgctgcttttc

SEQ ID NO: 2080275 - DNA, 25 bp, Homo sapien
agagggtgcaggtttcgctgctttt

SEQ ID NO: 2080276 - DNA, 25 bp, Homo sapien
tcagaagagagggtgcaggtttcgc

SEQ ID NO: 2080277 - DNA, 25 bp, Homo sapien
aagagagggtgcaggtttcgctgct

SEQ ID NO: 2080278 - DNA, 25 bp, Homo sapien
ctgtgtggtcagtgggtcaatgtgg

SEQ ID NO: 2080279 - DNA, 25 bp, Homo sapien
tggtcagtgggtcaatgtgggacat

SEQ ID NO: 2080280 - DNA, 25 bp, Homo sapien
tgtgtggtcagtgggtcaatgtggg

SEQ ID NO: 2080281 - DNA, 25 bp, Homo sapien
tgtggtcagtgggtcaatgtgggac

SEQ ID NO: 2080282 - DNA, 25 bp, Homo sapien
tgggacataccgtacctcgagcagt

SEQ ID NO: 2080283 - DNA, 25 bp, Homo sapien
gttcgaacgcctctaaggagaagca

SEQ ID NO: 2080284 - DNA, 25 bp, Homo sapien
gactgaggtctctacggtgcacagg

SEQ ID NO: 2080285 - DNA, 25 bp, Homo sapien
tccagaatcagaggtaacgcatagc

SEQ ID NO: 2080286 - DNA, 25 bp, Homo sapien
tatcaagcgccctttcgtagccagg

SEQ ID NO: 2080287 - DNA, 25 bp, Homo sapien
tactcgggtttcactgagggcactg

SEQ ID NO: 2080288 - DNA, 25 bp, Homo sapien
gaagaagccctgtacgctggcagat

SEQ ID NO: 2080289 - DNA, 25 bp, Homo sapien
tgaaagctgcatggcaaactggccc

SEQ ID NO: 2080290 - DNA, 25 bp, Homo sapien
aatttgagaaaattagtcctgctgc

SEQ ID NO: 2080291 - DNA, 25 bp, Homo sapien
gagaaattcctctagttctggcgac

SEQ ID NO: 2080292 - DNA, 25 bp, Homo sapien
gctatacaatctgatcgaatttgag

SEQ ID NO: 2080293 - DNA, 25 bp, Homo sapien
taaatggcaagttgtttgtttcaca

SEQ ID NO: 2080294 - DNA, 25 bp, Homo sapien
cggtgatataggtaatactctgcgc

SEQ ID NO: 2080295 - DNA, 25 bp, Homo sapien
tgtatgcgatacactttcacggtga

SEQ ID NO: 2080296 - DNA, 25 bp, Homo sapien
gaggaaagccgttaagcaggtcatt

SEQ ID NO: 2080297 - DNA, 25 bp, Homo sapien
catacccgtggaagatacacaatca

SEQ ID NO: 2080298 - DNA, 25 bp, Homo sapien
gatccctgctttgacgcggcttcgc

SEQ ID NO: 2080299 - DNA, 25 bp, Homo sapien
cgggatccctgctttgacgcggctt

SEQ ID NO: 2080300 - DNA, 25 bp, Homo sapien
gggatccctgctttgacgcggcttc

SEQ ID NO: 2080301 - DNA, 25 bp, Homo sapien
accgggatccctgctttgacgcggc

SEQ ID NO: 2080302 - DNA, 25 bp, Homo sapien
tgagggtccgcagctcgcgccttcc

SEQ ID NO: 2080303 - DNA, 25 bp, Homo sapien
gaaacaagttcaagcgcagcaggcg

SEQ ID NO: 2080304 - DNA, 25 bp, Homo sapien
gcagcaggcgcaaagcgaatgcggg

SEQ ID NO: 2080305 - DNA, 25 bp, Homo sapien
gggtccgcagctcgcgccttccgct

SEQ ID NO: 2080306 - DNA, 25 bp, Homo sapien
gacacactgggaaggattcgcgcat

SEQ ID NO: 2080307 - DNA, 25 bp, Homo sapien
aaaagaataggaccggcgcaggcat

SEQ ID NO: 2080308 - DNA, 25 bp, Homo sapien
aaactgtgtgcatgcagtgagcgca

SEQ ID NO: 2080309 - DNA, 25 bp, Homo sapien
tctagtaatccgacgggaggatcca

SEQ ID NO: 2080310 - DNA, 25 bp, Homo sapien
tcctccctttcgatattattattca

SEQ ID NO: 2080311 - DNA, 25 bp, Homo sapien
tattattcaacttgacacatgcagc

SEQ ID NO: 2080312 - DNA, 25 bp, Homo sapien
gcagcaccgtaaacatttcgatggg

SEQ ID NO: 2080313 - DNA, 25 bp, Homo sapien
catttcgatgggactttgcaggcct

SEQ ID NO: 2080314 - DNA, 25 bp, Homo sapien
atagaggagcgccttgccagtcaag

SEQ ID NO: 2080315 - DNA, 25 bp, Homo sapien
gagcgccttgccagtcaagtcgggc

SEQ ID NO: 2080316 - DNA, 25 bp, Homo sapien
ttgccagtcaagtcgggcagccagg

SEQ ID NO: 2080317 - DNA, 25 bp, Homo sapien
cagagggcatagaggagcgccttgc

SEQ ID NO: 2080318 - DNA, 25 bp, Homo sapien
cactcaggggacagacaacagtcac

SEQ ID NO: 2080319 - DNA, 25 bp, Homo sapien
tgaatgtctgcaaaacgtgccggca

SEQ ID NO: 2080320 - DNA, 25 bp, Homo sapien
acgcagacaacaccggcgaggtgca

SEQ ID NO: 2080321 - DNA, 25 bp, Homo sapien
acgcggcggtcgttaacactcaggg

SEQ ID NO: 2080322 - DNA, 25 bp, Homo sapien
tacgacatgtccacgatggcccggg

SEQ ID NO: 2080323 - DNA, 25 bp, Homo sapien
gaatggcggagccctggaagtccag

SEQ ID NO: 2080324 - DNA, 25 bp, Homo sapien
gcgggcgtacgacatgtccacgatg

SEQ ID NO: 2080325 - DNA, 25 bp, Homo sapien
aagtggcgggcgtacgacatgtcca

SEQ ID NO: 2080326 - DNA, 25 bp, Homo sapien
ctcggctgtgctctgctcggctagg

SEQ ID NO: 2080327 - DNA, 25 bp, Homo sapien
tcggctcggctgtgctctgctcggc

SEQ ID NO: 2080328 - DNA, 25 bp, Homo sapien
ggctcggctgtgctctgctcggcta

SEQ ID NO: 2080329 - DNA, 25 bp, Homo sapien
tgctctgctcggctagggcgggcgg

SEQ ID NO: 2080330 - DNA, 25 bp, Homo sapien
tatataagttcccaaaccactagaa

SEQ ID NO: 2080331 - DNA, 25 bp, Homo sapien
cattcccgcctgcataaagacagtg

SEQ ID NO: 2080332 - DNA, 25 bp, Homo sapien
gatgaggttcgagtctaaaagttgc

SEQ ID NO: 2080333 - DNA, 25 bp, Homo sapien
tctgttgcctagaatttgtaacccc

SEQ ID NO: 2080334 - DNA, 25 bp, Homo sapien
tgctgcggcgttgacactgtcttca

SEQ ID NO: 2080335 - DNA, 25 bp, Homo sapien
ttcccacgagccatcacaggaggga

SEQ ID NO: 2080336 - DNA, 25 bp, Homo sapien
ttgcgtgataggaagcatgcgtgac

SEQ ID NO: 2080337 - DNA, 25 bp, Homo sapien
gagatggcgttctttgggcagaccc

SEQ ID NO: 2080338 - DNA, 25 bp, Homo sapien
ccatctgggtggctacttgctgcat

SEQ ID NO: 2080339 - DNA, 25 bp, Homo sapien
ctccgcataaggagtcacgggccgg

SEQ ID NO: 2080340 - DNA, 25 bp, Homo sapien
gggttggcgggatgtgcgtctgtgc

SEQ ID NO: 2080341 - DNA, 25 bp, Homo sapien
tcagatggcaccataggactggcta

SEQ ID NO: 2080342 - DNA, 25 bp, Homo sapien
tgctggcataaagcgctttgggtat

SEQ ID NO: 2080343 - DNA, 25 bp, Homo sapien
ttctccagtgcggttgggccggaac

SEQ ID NO: 2080344 - DNA, 25 bp, Homo sapien
tggtcgttgctctgccaatcttgag

SEQ ID NO: 2080345 - DNA, 25 bp, Homo sapien
tcttgagtccgtccttgctttttgc

SEQ ID NO: 2080346 - DNA, 25 bp, Homo sapien
ttccgtcccgctctgtagctggcag

SEQ ID NO: 2080347 - DNA, 25 bp, Homo sapien
agtcgcaagggtactctcccagcct

SEQ ID NO: 2080348 - DNA, 25 bp, Homo sapien
tgccctccccgcgtggacgtggacg

SEQ ID NO: 2080349 - DNA, 25 bp, Homo sapien
gccaggcggtagagggtcggctcag

SEQ ID NO: 2080350 - DNA, 25 bp, Homo sapien
gcccggggaaagcagggctgagtgc

SEQ ID NO: 2080351 - DNA, 25 bp, Homo sapien
cttggcccggggaaagcagggctga

SEQ ID NO: 2080352 - DNA, 25 bp, Homo sapien
ccggggaaagcagggctgagtgcat

SEQ ID NO: 2080353 - DNA, 25 bp, Homo sapien
tggcccggggaaagcagggctgagt

SEQ ID NO: 2080354 - DNA, 25 bp, Homo sapien
gccagtacagggacccttcctctgt

SEQ ID NO: 2080355 - DNA, 25 bp, Homo sapien
agcgtgactcggtgtctgcagcgtc

SEQ ID NO: 2080356 - DNA, 25 bp, Homo sapien
tgactcggtgtctgcagcgtcactg

SEQ ID NO: 2080357 - DNA, 25 bp, Homo sapien
tgtgtgaaggccagtacagggaccc

SEQ ID NO: 2080358 - DNA, 25 bp, Homo sapien
ccgatgatgaatttactatttcccc

SEQ ID NO: 2080359 - DNA, 25 bp, Homo sapien
ccccttactcgaatctcatgaattc

SEQ ID NO: 2080360 - DNA, 25 bp, Homo sapien
ttactcgaatctcatgaattcccac

SEQ ID NO: 2080361 - DNA, 25 bp, Homo sapien
gtcattttcttgtccgatgatgaat

SEQ ID NO: 2080362 - DNA, 25 bp, Homo sapien
tgtcctgagcctagaccgcagaggt

SEQ ID NO: 2080363 - DNA, 25 bp, Homo sapien
gatgctgtcccgttggacaaggttt

SEQ ID NO: 2080364 - DNA, 25 bp, Homo sapien
tccccgggtgagtgatcgatgctgt

SEQ ID NO: 2080365 - DNA, 25 bp, Homo sapien
cagaggtccccatccccgggtgagt

SEQ ID NO: 2080366 - DNA, 25 bp, Homo sapien
cgctgctccagaaagattgctgtat

SEQ ID NO: 2080367 - DNA, 25 bp, Homo sapien
catgccgtgcattaccataattggc

SEQ ID NO: 2080368 - DNA, 25 bp, Homo sapien
ggagagttgcagcactgatgcctgc

SEQ ID NO: 2080369 - DNA, 25 bp, Homo sapien
tattaaccgtctttaagacatctat

SEQ ID NO: 2080370 - DNA, 25 bp, Homo sapien
cattaaactgcctgctaaacagcgc

SEQ ID NO: 2080371 - DNA, 25 bp, Homo sapien
aaccatgcgagttacagtgagactg

SEQ ID NO: 2080372 - DNA, 25 bp, Homo sapien
caaatgactgcggtgattgccacga

SEQ ID NO: 2080373 - DNA, 25 bp, Homo sapien
cgtgtcggctacaaaaccactctga

SEQ ID NO: 2080374 - DNA, 25 bp, Homo sapien
catccctggtgtgctcaataatgca

SEQ ID NO: 2080375 - DNA, 25 bp, Homo sapien
tccctggtgtgctcaataatgcagc

SEQ ID NO: 2080376 - DNA, 25 bp, Homo sapien
gctcaataatgcagcaggattttgc

SEQ ID NO: 2080377 - DNA, 25 bp, Homo sapien
tggtgtgctcaataatgcagcagga

SEQ ID NO: 2080378 - DNA, 25 bp, Homo sapien
gagttgtgcccgtgcctatctgaag

SEQ ID NO: 2080379 - DNA, 25 bp, Homo sapien
tgtgcccgtgcctatctgaagtgac

SEQ ID NO: 2080380 - DNA, 25 bp, Homo sapien
cccgtgcctatctgaagtgacagcc

SEQ ID NO: 2080381 - DNA, 25 bp, Homo sapien
ctaggtgagttgtgcccgtgcctat

SEQ ID NO: 2080382 - DNA, 25 bp, Homo sapien
tacagggatgttccatagtgcgtgt

SEQ ID NO: 2080383 - DNA, 25 bp, Homo sapien
ttccatagtgcgtgtgggtatttgg

SEQ ID NO: 2080384 - DNA, 25 bp, Homo sapien
tttggggtgtctgctagatttttca

SEQ ID NO: 2080385 - DNA, 25 bp, Homo sapien
gatattttgccaccgaggaggaaga

SEQ ID NO: 2080386 - DNA, 25 bp, Homo sapien
gtgaagtcgctgtcttccgccgagc

SEQ ID NO: 2080387 - DNA, 25 bp, Homo sapien
cgcacaagagcaacgtgtctgccat

SEQ ID NO: 2080388 - DNA, 25 bp, Homo sapien
aaggtcacgggcaaggtcaacatca

SEQ ID NO: 2080389 - DNA, 25 bp, Homo sapien
tgcagccgtcctatgctggcggcgt

SEQ ID NO: 2080390 - DNA, 25 bp, Homo sapien
tagcgtccaggtatgcaagagaccg

SEQ ID NO: 2080391 - DNA, 25 bp, Homo sapien
taaacgtcgtcgagctgcactaggc

SEQ ID NO: 2080392 - DNA, 25 bp, Homo sapien
caagagaccgcggaacattgcacta

SEQ ID NO: 2080393 - DNA, 25 bp, Homo sapien
tagaaagctgtctaggactcacggg

SEQ ID NO: 2080394 - DNA, 25 bp, Homo sapien
ggttcacacaattaaatccactgtt

SEQ ID NO: 2080395 - DNA, 25 bp, Homo sapien
tctccagatgcatgtactcagaggg

SEQ ID NO: 2080396 - DNA, 25 bp, Homo sapien
tgtacagtacattttggttcacaca

SEQ ID NO: 2080397 - DNA, 25 bp, Homo sapien
aaatagaggacttttactggcacct

SEQ ID NO: 2080398 - DNA, 25 bp, Homo sapien
tggccatggaaaaacgcagctcttt

SEQ ID NO: 2080399 - DNA, 25 bp, Homo sapien
ggagccttgcccatcgctcgctgtg

SEQ ID NO: 2080400 - DNA, 25 bp, Homo sapien
gtataattttctgcagccggcccag

SEQ ID NO: 2080401 - DNA, 25 bp, Homo sapien
tcgctgtgcctcttttaagatctga

SEQ ID NO: 2080402 - DNA, 25 bp, Homo sapien
tgctaagcttttgccagacagttgg

SEQ ID NO: 2080403 - DNA, 25 bp, Homo sapien
ctgaggacctgatgcctccagatgc

SEQ ID NO: 2080404 - DNA, 25 bp, Homo sapien
cagttggccacggattagcgttacc

SEQ ID NO: 2080405 - DNA, 25 bp, Homo sapien
ccctgcgatgatgtgaagagccagg

SEQ ID NO: 2080406 - DNA, 25 bp, Homo sapien
tcacacaggacccaggcttttagga

SEQ ID NO: 2080407 - DNA, 25 bp, Homo sapien
aaatgtgactcagtcgctggcggaa

SEQ ID NO: 2080408 - DNA, 25 bp, Homo sapien
cccaggcttttaggatgatgaatag

SEQ ID NO: 2080409 - DNA, 25 bp, Homo sapien
cataggaaatgtgactcagtcgctg

SEQ ID NO: 2080410 - DNA, 25 bp, Homo sapien
tcctgggaattcacgagccgctttg

SEQ ID NO: 2080411 - DNA, 25 bp, Homo sapien
tgagaacaccgtggcttgggctgct

SEQ ID NO: 2080412 - DNA, 25 bp, Homo sapien
gctgctgctccggagtgaaccgtga

SEQ ID NO: 2080413 - DNA, 25 bp, Homo sapien
tgaaccgtgaggaatagtcctggga

SEQ ID NO: 2080414 - DNA, 25 bp, Homo sapien
ccttcacactagatggcttaaaaca

SEQ ID NO: 2080415 - DNA, 25 bp, Homo sapien
ccgtgtccggcctcaactattctta

SEQ ID NO: 2080416 - DNA, 25 bp, Homo sapien
agaagtccattctcttacggtctgg

SEQ ID NO: 2080417 - DNA, 25 bp, Homo sapien
aaatgctaggtgtcgacagggccct

SEQ ID NO: 2080418 - DNA, 25 bp, Homo sapien
ttcgggaagcgctgacagtgactgc

SEQ ID NO: 2080419 - DNA, 25 bp, Homo sapien
gcgtatttctcagctgccacacgtg

SEQ ID NO: 2080420 - DNA, 25 bp, Homo sapien
gctgacagtgactgcgtatttctca

SEQ ID NO: 2080421 - DNA, 25 bp, Homo sapien
gctgccacacgtgtcatatgcagtg

SEQ ID NO: 2080422 - DNA, 25 bp, Homo sapien
cttggttggtggatctacagtgcac

SEQ ID NO: 2080423 - DNA, 25 bp, Homo sapien
catgtggtgccgtgcaggcacctcc

SEQ ID NO: 2080424 - DNA, 25 bp, Homo sapien
gccctgcgttcccatcgctgttgtt

SEQ ID NO: 2080425 - DNA, 25 bp, Homo sapien
ctgttgttgagacccgcggtcatga

SEQ ID NO: 2080426 - DNA, 25 bp, Homo sapien
gtttcccacaaatgtctgcggtcca

SEQ ID NO: 2080427 - DNA, 25 bp, Homo sapien
aaatgtctgcggtccagatcctgcc

SEQ ID NO: 2080428 - DNA, 25 bp, Homo sapien
cccacaaatgtctgcggtccagatc

SEQ ID NO: 2080429 - DNA, 25 bp, Homo sapien
ctgtctgcatcttgggtgtcctctg

SEQ ID NO: 2080430 - DNA, 25 bp, Homo sapien
aagtacagaccaacagcgacatcag

SEQ ID NO: 2080431 - DNA, 25 bp, Homo sapien
gagaaccttggttttaggcactaga

SEQ ID NO: 2080432 - DNA, 25 bp, Homo sapien
tctgagcataagtggcaaagtcgct

SEQ ID NO: 2080433 - DNA, 25 bp, Homo sapien
catcaaataacctccaagtacagac

SEQ ID NO: 2080434 - DNA, 25 bp, Homo sapien
cgtttcacagtgaggattttaacac

SEQ ID NO: 2080435 - DNA, 25 bp, Homo sapien
cattggttcagaggcggaggcgagc

SEQ ID NO: 2080436 - DNA, 25 bp, Homo sapien
ggcgagcaggatgcggctttctttc

SEQ ID NO: 2080437 - DNA, 25 bp, Homo sapien
ttacaggtcccgcattggttcagag

SEQ ID NO: 2080438 - DNA, 25 bp, Homo sapien
caacaaagactcaggttagtgagcg

SEQ ID NO: 2080439 - DNA, 25 bp, Homo sapien
tattaaatccaatgaatcacgcagc

SEQ ID NO: 2080440 - DNA, 25 bp, Homo sapien
tcagttctgcaaggagcctagtgaa

SEQ ID NO: 2080441 - DNA, 25 bp, Homo sapien
cagaattccctggagtgagactcag

SEQ ID NO: 2080442 - DNA, 25 bp, Homo sapien
ttattggcttgctcgtgtgagggcc

SEQ ID NO: 2080443 - DNA, 25 bp, Homo sapien
agtgggccttgaagactgggctggc

SEQ ID NO: 2080444 - DNA, 25 bp, Homo sapien
tggcttgctcgtgtgagggccttaa

SEQ ID NO: 2080445 - DNA, 25 bp, Homo sapien
cttgctcgtgtgagggccttaaagg

SEQ ID NO: 2080446 - DNA, 25 bp, Homo sapien
cctcctttggagtggtaagttgctc

SEQ ID NO: 2080447 - DNA, 25 bp, Homo sapien
gattgtgctcataggatgtagttag

SEQ ID NO: 2080448 - DNA, 25 bp, Homo sapien
ctcataggacttatgattgtgctca

SEQ ID NO: 2080449 - DNA, 25 bp, Homo sapien
tatgtctgcccaactggataaggac

SEQ ID NO: 2080450 - DNA, 25 bp, Homo sapien
cagagccttaggtggtcccgaaata

SEQ ID NO: 2080451 - DNA, 25 bp, Homo sapien
gacagactgttccatcggtgacaag

SEQ ID NO: 2080452 - DNA, 25 bp, Homo sapien
ggatctgtttcgacacgcagggcag

SEQ ID NO: 2080453 - DNA, 25 bp, Homo sapien
gagtgcccctcaagaacaaagcaga

SEQ ID NO: 2080454 - DNA, 25 bp, Homo sapien
gctggatttctgtgatcagtatccg

SEQ ID NO: 2080455 - DNA, 25 bp, Homo sapien
tatttgaatccaatgcagtctcacc

SEQ ID NO: 2080456 - DNA, 25 bp, Homo sapien
tttggtacaaatgcatcgtctcctc

SEQ ID NO: 2080457 - DNA, 25 bp, Homo sapien
cagtctcattgctgttcgttgtacc

SEQ ID NO: 2080458 - DNA, 25 bp, Homo sapien
tggatatagggatctcaaggcagag

SEQ ID NO: 2080459 - DNA, 25 bp, Homo sapien
ccaagcggtgatcagcagtggcaga

SEQ ID NO: 2080460 - DNA, 25 bp, Homo sapien
cagagcttcccatagccaagcggtg

SEQ ID NO: 2080461 - DNA, 25 bp, Homo sapien
tgaccccgacgtgtgacaacatctg

SEQ ID NO: 2080462 - DNA, 25 bp, Homo sapien
tccgtaaaagtgaaatggcatggcc

SEQ ID NO: 2080463 - DNA, 25 bp, Homo sapien
tcctgggaggtagaaacgacatgtt

SEQ ID NO: 2080464 - DNA, 25 bp, Homo sapien
gggcagctcccgctaaatcttcaga

SEQ ID NO: 2080465 - DNA, 25 bp, Homo sapien
tagtttttcacagcctcgacagcaa

SEQ ID NO: 2080466 - DNA, 25 bp, Homo sapien
agtcttcagaaaccccttgtatcct

SEQ ID NO: 2080467 - DNA, 25 bp, Homo sapien
aaatatgctgttggcccttttccag

SEQ ID NO: 2080468 - DNA, 25 bp, Homo sapien
tcagcaacaccatcacatggaaaag

SEQ ID NO: 2080469 - DNA, 25 bp, Homo sapien
ttgtatcctgctatgattcctcagc

SEQ ID NO: 2080470 - DNA, 25 bp, Homo sapien
gatatctggatttaatgaacaccca

SEQ ID NO: 2080471 - DNA, 25 bp, Homo sapien
ggattttcgtcgtctgtgcatgaga

SEQ ID NO: 2080472 - DNA, 25 bp, Homo sapien
caactccagtggaacaggctgtctg

SEQ ID NO: 2080473 - DNA, 25 bp, Homo sapien
gtttccagtacataagaactcctag

SEQ ID NO: 2080474 - DNA, 25 bp, Homo sapien
tgtgttaccattgcctcttttgatt

SEQ ID NO: 2080475 - DNA, 25 bp, Homo sapien
gctgccctgaaatgtttgaggtgct

SEQ ID NO: 2080476 - DNA, 25 bp, Homo sapien
ttttgattgcccaccgagtgcctcc

SEQ ID NO: 2080477 - DNA, 25 bp, Homo sapien
agctgccctgaaatgtttgaggtgc

SEQ ID NO: 2080478 - DNA, 25 bp, Homo sapien
cttcacagtcagaaacactaagagg

SEQ ID NO: 2080479 - DNA, 25 bp, Homo sapien
agtcagaaacactaagaggaaccct

SEQ ID NO: 2080480 - DNA, 25 bp, Homo sapien
cacagtcagaaacactaagaggaac

SEQ ID NO: 2080481 - DNA, 25 bp, Homo sapien
cagtcagaaacactaagaggaaccc

SEQ ID NO: 2080482 - DNA, 25 bp, Homo sapien
gctgcggcggtgaccagtgagaggt

SEQ ID NO: 2080483 - DNA, 25 bp, Homo sapien
gagctgtggacacatactggtccat

SEQ ID NO: 2080484 - DNA, 25 bp, Homo sapien
tccgtcccattcctgcagagtcttg

SEQ ID NO: 2080485 - DNA, 25 bp, Homo sapien
tcttgtttaaatgttcccagctgtg

SEQ ID NO: 2080486 - DNA, 25 bp, Homo sapien
gctataagacctggtaactaagttc

SEQ ID NO: 2080487 - DNA, 25 bp, Homo sapien
ctggtaactaagttcccaaggagct

SEQ ID NO: 2080488 - DNA, 25 bp, Homo sapien
ttctcttctttgccaaccttgaaga

SEQ ID NO: 2080489 - DNA, 25 bp, Homo sapien
tgctataagacctggtaactaagtt

SEQ ID NO: 2080490 - DNA, 25 bp, Homo sapien
ctgtctgcatacaccgcatctggaa

SEQ ID NO: 2080491 - DNA, 25 bp, Homo sapien
aggagttcaggacaccggttcgatg

SEQ ID NO: 2080492 - DNA, 25 bp, Homo sapien
ttcgatgcctctgaaggaacagcca

SEQ ID NO: 2080493 - DNA, 25 bp, Homo sapien
tctggaatgaataggcacgattcct

SEQ ID NO: 2080494 - DNA, 25 bp, Homo sapien
gggtggcaacagcatgttcatggaa

SEQ ID NO: 2080495 - DNA, 25 bp, Homo sapien
ccttggatatgttcaagaaagccct

SEQ ID NO: 2080496 - DNA, 25 bp, Homo sapien
ccagcatttggaggactattcaccc

SEQ ID NO: 2080497 - DNA, 25 bp, Homo sapien
tcctttcagatatgagaagtgcctg

SEQ ID NO: 2080498 - DNA, 25 bp, Homo sapien
aggcttcagggattcagcagacaac

SEQ ID NO: 2080499 - DNA, 25 bp, Homo sapien
cagggattcagcagacaacggaaaa

SEQ ID NO: 2080500 - DNA, 25 bp, Homo sapien
cttcagggattcagcagacaacgga

SEQ ID NO: 2080501 - DNA, 25 bp, Homo sapien
gctaggcttcagggattcagcagac

SEQ ID NO: 2080502 - DNA, 25 bp, Homo sapien
agctctcccactgccacgatggcct

SEQ ID NO: 2080503 - DNA, 25 bp, Homo sapien
tccagaattaagaattgtgtctgta

SEQ ID NO: 2080504 - DNA, 25 bp, Homo sapien
ctgaggagttgcagaagcctccaga

SEQ ID NO: 2080505 - DNA, 25 bp, Homo sapien
tttgtgtggaatgttcctacatttc

SEQ ID NO: 2080506 - DNA, 25 bp, Homo sapien
cgatataatgccagttgccttttgc

SEQ ID NO: 2080507 - DNA, 25 bp, Homo sapien
tctcccacatgaacccgatataatg

SEQ ID NO: 2080508 - DNA, 25 bp, Homo sapien
tctggactttcctcatattaagagg

SEQ ID NO: 2080509 - DNA, 25 bp, Homo sapien
tattaagaggtaaccagcagcttcc

SEQ ID NO: 2080510 - DNA, 25 bp, Homo sapien
gtatctctgctaaggctcgtgtgtt

SEQ ID NO: 2080511 - DNA, 25 bp, Homo sapien
gaatgaaatcgtatctctgctaagg

SEQ ID NO: 2080512 - DNA, 25 bp, Homo sapien
gcctctggtgaggaatgaaatcgta

SEQ ID NO: 2080513 - DNA, 25 bp, Homo sapien
cctaaaatctcaagggcctctggtg

SEQ ID NO: 2080514 - DNA, 25 bp, Homo sapien
gttgatgggtccaggcaatgccatg

SEQ ID NO: 2080515 - DNA, 25 bp, Homo sapien
ggtccaggcaatgccatggtcagca

SEQ ID NO: 2080516 - DNA, 25 bp, Homo sapien
ggcaatgccatggtcagcaccacgg

SEQ ID NO: 2080517 - DNA, 25 bp, Homo sapien
cagttgatgggtccaggcaatgcca

SEQ ID NO: 2080518 - DNA, 25 bp, Homo sapien
gactgttgaaagtcggacagcaccc

SEQ ID NO: 2080519 - DNA, 25 bp, Homo sapien
ggtgcccttccggtcagtcctccag

SEQ ID NO: 2080520 - DNA, 25 bp, Homo sapien
gtttcctaggacattctcgctgcga

SEQ ID NO: 2080521 - DNA, 25 bp, Homo sapien
agtcggacagcacccgccttgtgct

SEQ ID NO: 2080522 - DNA, 25 bp, Homo sapien
gctaagtgagcggtaatgaccacgc

SEQ ID NO: 2080523 - DNA, 25 bp, Homo sapien
ttggttattgatcggcccaagcgca

SEQ ID NO: 2080524 - DNA, 25 bp, Homo sapien
cgcctgaccaggaaaagtgtttgct

SEQ ID NO: 2080525 - DNA, 25 bp, Homo sapien
cccaagcgcaggagaactgactcta

SEQ ID NO: 2080526 - DNA, 25 bp, Homo sapien
cattgtttttccatgcttcggtggt

SEQ ID NO: 2080527 - DNA, 25 bp, Homo sapien
tgtttttccatgcttcggtggtaga

SEQ ID NO: 2080528 - DNA, 25 bp, Homo sapien
ccagtgggccagtgttgttgttctt

SEQ ID NO: 2080529 - DNA, 25 bp, Homo sapien
cgtcacttttcccattgagggtgat

SEQ ID NO: 2080530 - DNA, 25 bp, Homo sapien
ggggaagcccagtgtgcttagacat

SEQ ID NO: 2080531 - DNA, 25 bp, Homo sapien
gatgaagttccaagtgggatctgtg

SEQ ID NO: 2080532 - DNA, 25 bp, Homo sapien
gaagatgaagttccaagtgggatct

SEQ ID NO: 2080533 - DNA, 25 bp, Homo sapien
aagatgaagttccaagtgggatctg

SEQ ID NO: 2080534 - DNA, 25 bp, Homo sapien
gaagttccaagtgggatctgtgttg

SEQ ID NO: 2080535 - DNA, 25 bp, Homo sapien
cacggcccatcttttgtctaccagg

SEQ ID NO: 2080536 - DNA, 25 bp, Homo sapien
tctcgtcatcctcacgtgggacccg

SEQ ID NO: 2080537 - DNA, 25 bp, Homo sapien
aaggacgtaggattctgcactggca

SEQ ID NO: 2080538 - DNA, 25 bp, Homo sapien
cagcccgcacaaaggacgtaggatt

SEQ ID NO: 2080539 - DNA, 25 bp, Homo sapien
gggacgggagtcacatccatacttg

SEQ ID NO: 2080540 - DNA, 25 bp, Homo sapien
ctggaggctgccactaccaggagca

SEQ ID NO: 2080541 - DNA, 25 bp, Homo sapien
gccttgggcaagcgacttgtcctgg

SEQ ID NO: 2080542 - DNA, 25 bp, Homo sapien
gcttttgtgtttccgcttgctgtcc

SEQ ID NO: 2080543 - DNA, 25 bp, Homo sapien
tccgcgtcctaaagcatggtgtggg

SEQ ID NO: 2080544 - DNA, 25 bp, Homo sapien
gaagacaggcatctgtgctaaggac

SEQ ID NO: 2080545 - DNA, 25 bp, Homo sapien
ttgtggacaggacacaccggcagtg

SEQ ID NO: 2080546 - DNA, 25 bp, Homo sapien
agtggaaccccgtgcaagcggcctc

SEQ ID NO: 2080547 - DNA, 25 bp, Homo sapien
gaaagtgatgtaagatatggtccac

SEQ ID NO: 2080548 - DNA, 25 bp, Homo sapien
ttactctccttctgcactggtccag

SEQ ID NO: 2080549 - DNA, 25 bp, Homo sapien
cggttcttctggctaaactgtgtct

SEQ ID NO: 2080550 - DNA, 25 bp, Homo sapien
taaccacaaagcgttcatgtctgtg

SEQ ID NO: 2080551 - DNA, 25 bp, Homo sapien
cttcttccagcttatggaaaccatt

SEQ ID NO: 2080552 - DNA, 25 bp, Homo sapien
tccagcttatggaaaccattcctac

SEQ ID NO: 2080553 - DNA, 25 bp, Homo sapien
tcttccagcttatggaaaccattcc

SEQ ID NO: 2080554 - DNA, 25 bp, Homo sapien
gcttatggaaaccattcctaccaca

SEQ ID NO: 2080555 - DNA, 25 bp, Homo sapien
gctggttctcaaatagacgactgtt

SEQ ID NO: 2080556 - DNA, 25 bp, Homo sapien
atgcagccaggcttttattgacttg

SEQ ID NO: 2080557 - DNA, 25 bp, Homo sapien
cctggaaggtggttacaaagccttg

SEQ ID NO: 2080558 - DNA, 25 bp, Homo sapien
tattgacttgacttttaactgaggt

SEQ ID NO: 2080559 - DNA, 25 bp, Homo sapien
tgaaggaattttctcgtcccactct

SEQ ID NO: 2080560 - DNA, 25 bp, Homo sapien
tctcgtcccactctgtttgtctgtc

SEQ ID NO: 2080561 - DNA, 25 bp, Homo sapien
cttgagatccacaacaactgtgatt

SEQ ID NO: 2080562 - DNA, 25 bp, Homo sapien
tctgtttgtctgtcctatttctata

SEQ ID NO: 2080563 - DNA, 25 bp, Homo sapien
tatctaaagtccaaacgaaggaatc

SEQ ID NO: 2080564 - DNA, 25 bp, Homo sapien
agtccaaacgaaggaatcttaagag

SEQ ID NO: 2080565 - DNA, 25 bp, Homo sapien
atctaaagtccaaacgaaggaatct

SEQ ID NO: 2080566 - DNA, 25 bp, Homo sapien
ccaaacgaaggaatcttaagagctg

SEQ ID NO: 2080567 - DNA, 25 bp, Homo sapien
gctttcccggttggtgtgcgagcct

SEQ ID NO: 2080568 - DNA, 25 bp, Homo sapien
tgctgctttcccggttggtgtgcga

SEQ ID NO: 2080569 - DNA, 25 bp, Homo sapien
ctcatggtaccatgggatggcttcc

SEQ ID NO: 2080570 - DNA, 25 bp, Homo sapien
tgtgcgagcctctgtcctccgggct

SEQ ID NO: 2080571 - DNA, 25 bp, Homo sapien
tgcggcaagcaccttgaggagcctg

SEQ ID NO: 2080572 - DNA, 25 bp, Homo sapien
tgtcctgctgagtacactgtctcca

SEQ ID NO: 2080573 - DNA, 25 bp, Homo sapien
gctgagtacactgtctccacgatct

SEQ ID NO: 2080574 - DNA, 25 bp, Homo sapien
tgccttcgctttctcctgtgcggca

SEQ ID NO: 2080575 - DNA, 25 bp, Homo sapien
ttgagcatctcaaccctccctccag

SEQ ID NO: 2080576 - DNA, 25 bp, Homo sapien
cttgagcatctcaaccctccctcca

SEQ ID NO: 2080577 - DNA, 25 bp, Homo sapien
ccaggcacataaatccccgactctg

SEQ ID NO: 2080578 - DNA, 25 bp, Homo sapien
ctccctccaggcacataaatccccg

SEQ ID NO: 2080579 - DNA, 25 bp, Homo sapien
tctgttcatctactcgcttccacag

SEQ ID NO: 2080580 - DNA, 25 bp, Homo sapien
tgcactctgttcatctactcgcttc

SEQ ID NO: 2080581 - DNA, 25 bp, Homo sapien
cacatgtctgctgaaccagggattg

SEQ ID NO: 2080582 - DNA, 25 bp, Homo sapien
ttccacagtcgctccacacatgtct

SEQ ID NO: 2080583 - DNA, 25 bp, Homo sapien
gacaccatgaggagcatgcagacac

SEQ ID NO: 2080584 - DNA, 25 bp, Homo sapien
ctagtgacgctcacagaagattggc

SEQ ID NO: 2080585 - DNA, 25 bp, Homo sapien
tgagggattactgggctgtcctccg

SEQ ID NO: 2080586 - DNA, 25 bp, Homo sapien
tttctgtcccggtgcagcaaagagg

SEQ ID NO: 2080587 - DNA, 25 bp, Homo sapien
taggaaactttgcacccaaagcctg

SEQ ID NO: 2080588 - DNA, 25 bp, Homo sapien
gacaacgatatggtgccaaagacag

SEQ ID NO: 2080589 - DNA, 25 bp, Homo sapien
tcaagggaatgagcactcgctgtgg

SEQ ID NO: 2080590 - DNA, 25 bp, Homo sapien
ggagaaggacgctctatgctgacga

SEQ ID NO: 2080591 - DNA, 25 bp, Homo sapien
gagaaacacagatgatggtgggccc

SEQ ID NO: 2080592 - DNA, 25 bp, Homo sapien
aggtgacacccaacagagaaacaca

SEQ ID NO: 2080593 - DNA, 25 bp, Homo sapien
acacagatgatggtgggcccagtga

SEQ ID NO: 2080594 - DNA, 25 bp, Homo sapien
gtgggcccagtgaagatgaaggtga

SEQ ID NO: 2080595 - DNA, 25 bp, Homo sapien
caaccagcgcatctgcattctggca

SEQ ID NO: 2080596 - DNA, 25 bp, Homo sapien
ggccctggtgacatgatcccccatt

SEQ ID NO: 2080597 - DNA, 25 bp, Homo sapien
ttgctccactggaccaagagaggcc

SEQ ID NO: 2080598 - DNA, 25 bp, Homo sapien
tcaggagcgggctctgtcttgttgc

SEQ ID NO: 2080599 - DNA, 25 bp, Homo sapien
tcttcttctacagttcttgatggat

SEQ ID NO: 2080600 - DNA, 25 bp, Homo sapien
gtagagctggctctgcaattgcccc

SEQ ID NO: 2080601 - DNA, 25 bp, Homo sapien
tgatggattccgtggcccaccagtg

SEQ ID NO: 2080602 - DNA, 25 bp, Homo sapien
cagtgccaagatcttctattcccca

SEQ ID NO: 2080603 - DNA, 25 bp, Homo sapien
cttttgtactataagcaatgtcaaa

SEQ ID NO: 2080604 - DNA, 25 bp, Homo sapien
tctccctctcacagatctgtgcttt

SEQ ID NO: 2080605 - DNA, 25 bp, Homo sapien
gaattcttccccttgggtgaagagc

SEQ ID NO: 2080606 - DNA, 25 bp, Homo sapien
tttgtactataagcaatgtcaaaac

SEQ ID NO: 2080607 - DNA, 25 bp, Homo sapien
atgcgagtgactggtggctgttttt

SEQ ID NO: 2080608 - DNA, 25 bp, Homo sapien
gtctgttgggcaatgacttggcttc

SEQ ID NO: 2080609 - DNA, 25 bp, Homo sapien
tttttggacggcagcatagccttgt

SEQ ID NO: 2080610 - DNA, 25 bp, Homo sapien
catggctgatgatgcgagtgactgg

SEQ ID NO: 2080611 - DNA, 25 bp, Homo sapien
ggctctgcgggctgaggctggcgag

SEQ ID NO: 2080612 - DNA, 25 bp, Homo sapien
tggcgagtcccggggccgtgtctca

SEQ ID NO: 2080613 - DNA, 25 bp, Homo sapien
ggcgagtcccggggccgtgtctcac

SEQ ID NO: 2080614 - DNA, 25 bp, Homo sapien
tctgcgggctgaggctggcgagtcc

SEQ ID NO: 2080615 - DNA, 25 bp, Homo sapien
catggacggcgttctgagcagatgc

SEQ ID NO: 2080616 - DNA, 25 bp, Homo sapien
gatgtccatgaacattgtgcacggg

SEQ ID NO: 2080617 - DNA, 25 bp, Homo sapien
tcaatgcgatcctcatggtcagcct

SEQ ID NO: 2080618 - DNA, 25 bp, Homo sapien
tgtgcacgggagcaagaaaaacctg

SEQ ID NO: 2080619 - DNA, 25 bp, Homo sapien
ccccagcgttttcctaactgcttga

SEQ ID NO: 2080620 - DNA, 25 bp, Homo sapien
cagcgttttcctaactgcttgataa

SEQ ID NO: 2080621 - DNA, 25 bp, Homo sapien
tgtccccagcgttttcctaactgct

SEQ ID NO: 2080622 - DNA, 25 bp, Homo sapien
attgtccccagcgttttcctaactg

SEQ ID NO: 2080623 - DNA, 25 bp, Homo sapien
acagcagctgttgaggaatgaggca

SEQ ID NO: 2080624 - DNA, 25 bp, Homo sapien
catgcaacttagctgaggtgacagc

SEQ ID NO: 2080625 - DNA, 25 bp, Homo sapien
gtttcagtagtcagaggaccgatga

SEQ ID NO: 2080626 - DNA, 25 bp, Homo sapien
ggaccgatgagtaagagtaattctc

SEQ ID NO: 2080627 - DNA, 25 bp, Homo sapien
cagtcatatcactgggcagagcccg

SEQ ID NO: 2080628 - DNA, 25 bp, Homo sapien
tgggcagagcccgtttgctttcccg

SEQ ID NO: 2080629 - DNA, 25 bp, Homo sapien
tcactgggcagagcccgtttgcttt

SEQ ID NO: 2080630 - DNA, 25 bp, Homo sapien
agtcatatcactgggcagagcccgt

SEQ ID NO: 2080631 - DNA, 25 bp, Homo sapien
tggagccgtcgctgtgttgcagaaa

SEQ ID NO: 2080632 - DNA, 25 bp, Homo sapien
ctgctatgcatccagtagttgacgt

SEQ ID NO: 2080633 - DNA, 25 bp, Homo sapien
cagtagttgacgtgaatggtaagat

SEQ ID NO: 2080634 - DNA, 25 bp, Homo sapien
tcattatccatggagccgtcgctgt

SEQ ID NO: 2080635 - DNA, 25 bp, Homo sapien
cctgcaccttgtagaaaagctagag

SEQ ID NO: 2080636 - DNA, 25 bp, Homo sapien
tctgtccctgaggaaatcttgctgt

SEQ ID NO: 2080637 - DNA, 25 bp, Homo sapien
tgcaccttgtagaaaagctagaggc

SEQ ID NO: 2080638 - DNA, 25 bp, Homo sapien
ccttgtagaaaagctagaggcaaat

SEQ ID NO: 2080639 - DNA, 25 bp, Homo sapien
ctgtgtatcttgtaggagtttgtca

SEQ ID NO: 2080640 - DNA, 25 bp, Homo sapien
taccctagatctttctgagccaatt

SEQ ID NO: 2080641 - DNA, 25 bp, Homo sapien
atgtgttacactacattcatttaat

SEQ ID NO: 2080642 - DNA, 25 bp, Homo sapien
tgcaatgttttagttcattgcgctt

SEQ ID NO: 2080643 - DNA, 25 bp, Homo sapien
gttttagttcattgcgctttttgga

SEQ ID NO: 2080644 - DNA, 25 bp, Homo sapien
gctgttatcttcagagttgaatgga

SEQ ID NO: 2080645 - DNA, 25 bp, Homo sapien
ctgaatagctgttatcttcagagtt

SEQ ID NO: 2080646 - DNA, 25 bp, Homo sapien
aatggattgggagagacgtagccat

SEQ ID NO: 2080647 - DNA, 25 bp, Homo sapien
tgaatggattgggagagacgtagcc

SEQ ID NO: 2080648 - DNA, 25 bp, Homo sapien
ctctgctcggaaaatatgtttggct

SEQ ID NO: 2080649 - DNA, 25 bp, Homo sapien
tgaaacagggcaagtttcttgtccc

SEQ ID NO: 2080650 - DNA, 25 bp, Homo sapien
tcaaagaagtggaccagatttcgcc

SEQ ID NO: 2080651 - DNA, 25 bp, Homo sapien
ggatcctctaccaagaagcaactcc

SEQ ID NO: 2080652 - DNA, 25 bp, Homo sapien
gaagctgctcatcagccgtcaggag

SEQ ID NO: 2080653 - DNA, 25 bp, Homo sapien
tgggttttcatcaaacccggctgta

SEQ ID NO: 2080654 - DNA, 25 bp, Homo sapien
caactatttgctttacaaatgcagc

SEQ ID NO: 2080655 - DNA, 25 bp, Homo sapien
ggctgtaactctccaactatttgct

SEQ ID NO: 2080656 - DNA, 25 bp, Homo sapien
gtattgtccggcctgcaaggataac

SEQ ID NO: 2080657 - DNA, 25 bp, Homo sapien
ctggtgtattgtccggcctgcaagg

SEQ ID NO: 2080658 - DNA, 25 bp, Homo sapien
ggcctgcaaggataacaagctgcct

SEQ ID NO: 2080659 - DNA, 25 bp, Homo sapien
tgtccggcctgcaaggataacaagc

SEQ ID NO: 2080660 - DNA, 25 bp, Homo sapien
tgtcattaacaaatgcttgtgctgc

SEQ ID NO: 2080661 - DNA, 25 bp, Homo sapien
gtatgatgatgtcattaacaaatgc

SEQ ID NO: 2080662 - DNA, 25 bp, Homo sapien
caaatgcttgtgctgcattatgggc

SEQ ID NO: 2080663 - DNA, 25 bp, Homo sapien
tgtgctgcattatgggcaattgaca

SEQ ID NO: 2080664 - DNA, 25 bp, Homo sapien
cataactaagcagggtctcaggatc

SEQ ID NO: 2080665 - DNA, 25 bp, Homo sapien
ttagcatctgcataactaagcaggg

SEQ ID NO: 2080666 - DNA, 25 bp, Homo sapien
ttcctgtgttagcatctgcataact

SEQ ID NO: 2080667 - DNA, 25 bp, Homo sapien
aggatccttagggagattctcccca

SEQ ID NO: 2080668 - DNA, 25 bp, Homo sapien
ctctcagggcgtaggaagctgttat

SEQ ID NO: 2080669 - DNA, 25 bp, Homo sapien
agcacacttgcttatcaccatgctg

SEQ ID NO: 2080670 - DNA, 25 bp, Homo sapien
tagagtgtaaacatctgcattgcac

SEQ ID NO: 2080671 - DNA, 25 bp, Homo sapien
cctgactccaggacggccggttaag

SEQ ID NO: 2080672 - DNA, 25 bp, Homo sapien
tgtgcttaaagcgaacactgtgggt

SEQ ID NO: 2080673 - DNA, 25 bp, Homo sapien
aaggctctgatacgtggatgccaca

SEQ ID NO: 2080674 - DNA, 25 bp, Homo sapien
tccatagcagaggacaatattgtgc

SEQ ID NO: 2080675 - DNA, 25 bp, Homo sapien
cactgtgggtgtagtatgacagcaa

SEQ ID NO: 2080676 - DNA, 25 bp, Homo sapien
ctctagggcagagtcacgggactga

SEQ ID NO: 2080677 - DNA, 25 bp, Homo sapien
agcagacccaatccaggaaggaggc

SEQ ID NO: 2080678 - DNA, 25 bp, Homo sapien
ctgaaccatttgcactgaccagtgg

SEQ ID NO: 2080679 - DNA, 25 bp, Homo sapien
tgaccagtggggaatgaagcagacc

SEQ ID NO: 2080680 - DNA, 25 bp, Homo sapien
cctctagaatgtggtcgtcttgaga

SEQ ID NO: 2080681 - DNA, 25 bp, Homo sapien
tagaatgtggtcgtcttgagagcca

SEQ ID NO: 2080682 - DNA, 25 bp, Homo sapien
tttcctctagaatgtggtcgtcttg

SEQ ID NO: 2080683 - DNA, 25 bp, Homo sapien
tctagaatgtggtcgtcttgagagc

SEQ ID NO: 2080684 - DNA, 25 bp, Homo sapien
gccggctcctgattcacgtaggagc

SEQ ID NO: 2080685 - DNA, 25 bp, Homo sapien
gcttttggggatgcacttccctgct

SEQ ID NO: 2080686 - DNA, 25 bp, Homo sapien
cctgattcacgtaggagcttttggg

SEQ ID NO: 2080687 - DNA, 25 bp, Homo sapien
ggctcctgattcacgtaggagcttt

SEQ ID NO: 2080688 - DNA, 25 bp, Homo sapien
gtccctcttgatggttcccagaaca

SEQ ID NO: 2080689 - DNA, 25 bp, Homo sapien
aatgtggagcatggggacctcacta

SEQ ID NO: 2080690 - DNA, 25 bp, Homo sapien
tccctcttgatggttcccagaacag

SEQ ID NO: 2080691 - DNA, 25 bp, Homo sapien
cagaacaggaatgtggagcatgggg

SEQ ID NO: 2080692 - DNA, 25 bp, Homo sapien
agagaaccccgctgctctgtgggcc

SEQ ID NO: 2080693 - DNA, 25 bp, Homo sapien
gctttgattcccatagctctgcctt

SEQ ID NO: 2080694 - DNA, 25 bp, Homo sapien
gagagaaccccgctgctctgtgggc

SEQ ID NO: 2080695 - DNA, 25 bp, Homo sapien
caggggccctgctttgattcccata

SEQ ID NO: 2080696 - DNA, 25 bp, Homo sapien
tgcggtcttaaccagtcttaaccca

SEQ ID NO: 2080697 - DNA, 25 bp, Homo sapien
ctaaatttcatagaggctaagggac

SEQ ID NO: 2080698 - DNA, 25 bp, Homo sapien
ggattcaactccaagcggtctgact

SEQ ID NO: 2080699 - DNA, 25 bp, Homo sapien
cacagctagaatgcggtggtgtcag

SEQ ID NO: 2080700 - DNA, 25 bp, Homo sapien
ggtgtatcgtttccatccaagagag

SEQ ID NO: 2080701 - DNA, 25 bp, Homo sapien
gatcacatgtacagccaaggcagac

SEQ ID NO: 2080702 - DNA, 25 bp, Homo sapien
caatagataagcaatgtggccaggt

SEQ ID NO: 2080703 - DNA, 25 bp, Homo sapien
tactatagatgagaggctgctacca

SEQ ID NO: 2080704 - DNA, 25 bp, Homo sapien
gaagggaagcatgcacaaatggctg

SEQ ID NO: 2080705 - DNA, 25 bp, Homo sapien
tctctcagatccgaaatggctgcta

SEQ ID NO: 2080706 - DNA, 25 bp, Homo sapien
aactgttggcacaggatgcatttga

SEQ ID NO: 2080707 - DNA, 25 bp, Homo sapien
gctacatgaccgactcttggatcct

SEQ ID NO: 2080708 - DNA, 25 bp, Homo sapien
catatctgtaggctctagatgggta

SEQ ID NO: 2080709 - DNA, 25 bp, Homo sapien
gatgatcctatctgtcagcttcaca

SEQ ID NO: 2080710 - DNA, 25 bp, Homo sapien
ctgtcttcttatagggtccataagc

SEQ ID NO: 2080711 - DNA, 25 bp, Homo sapien
cataagcattccaatagatgatcct

SEQ ID NO: 2080712 - DNA, 25 bp, Homo sapien
aaggcattcccaggtcttgtgataa

SEQ ID NO: 2080713 - DNA, 25 bp, Homo sapien
atggtcaagtgtgggccccaggtct

SEQ ID NO: 2080714 - DNA, 25 bp, Homo sapien
cccaggtcttgtgataaattaagaa

SEQ ID NO: 2080715 - DNA, 25 bp, Homo sapien
cccaggtctgtataaggcattccca

SEQ ID NO: 2080716 - DNA, 25 bp, Homo sapien
gcatcttacagtgcctggaaatctc

SEQ ID NO: 2080717 - DNA, 25 bp, Homo sapien
ggcttccaccgagaacgcacaaaat

SEQ ID NO: 2080718 - DNA, 25 bp, Homo sapien
tgtctgacaacaggacagaattgcc

SEQ ID NO: 2080719 - DNA, 25 bp, Homo sapien
actgtggccctgaattctatcgtgg

SEQ ID NO: 2080720 - DNA, 25 bp, Homo sapien
agtttcctcctcatcccccacatgt

SEQ ID NO: 2080721 - DNA, 25 bp, Homo sapien
ttcctcctcatcccccacatgtggc

SEQ ID NO: 2080722 - DNA, 25 bp, Homo sapien
ctcctcatcccccacatgtggccat

SEQ ID NO: 2080723 - DNA, 25 bp, Homo sapien
cctcatcccccacatgtggccatag

SEQ ID NO: 2080724 - DNA, 25 bp, Homo sapien
tcatctgccttggaaagccagcaca

SEQ ID NO: 2080725 - DNA, 25 bp, Homo sapien
atctgccttggaaagccagcacagc

SEQ ID NO: 2080726 - DNA, 25 bp, Homo sapien
ccttggaaagccagcacagcagctc

SEQ ID NO: 2080727 - DNA, 25 bp, Homo sapien
ctgccttggaaagccagcacagcag

SEQ ID NO: 2080728 - DNA, 25 bp, Homo sapien
caccggctgccaatatgttatgaga

SEQ ID NO: 2080729 - DNA, 25 bp, Homo sapien
gccaggacgcatcactgggtgtcca

SEQ ID NO: 2080730 - DNA, 25 bp, Homo sapien
tagtgccgcttgagtgacaggtgta

SEQ ID NO: 2080731 - DNA, 25 bp, Homo sapien
ggtaacaatcgctcatctccaggga

SEQ ID NO: 2080732 - DNA, 25 bp, Homo sapien
gataaaagaaaacatttcagctttc

SEQ ID NO: 2080733 - DNA, 25 bp, Homo sapien
taaaagaaaacatttcagctttcat

SEQ ID NO: 2080734 - DNA, 25 bp, Homo sapien
ctgataaaagaaaacatttcagctt

SEQ ID NO: 2080735 - DNA, 25 bp, Homo sapien
tgataaaagaaaacatttcagcttt

SEQ ID NO: 2080736 - DNA, 25 bp, Homo sapien
tgccaagatccacttgggaaatttc

SEQ ID NO: 2080737 - DNA, 25 bp, Homo sapien
cctcttgccaagatccacttgggaa

SEQ ID NO: 2080738 - DNA, 25 bp, Homo sapien
tcttgccaagatccacttgggaaat

SEQ ID NO: 2080739 - DNA, 25 bp, Homo sapien
caagatccacttgggaaatttccat

SEQ ID NO: 2080740 - DNA, 25 bp, Homo sapien
agggctgtcacttctcgtcaaccag

SEQ ID NO: 2080741 - DNA, 25 bp, Homo sapien
gagagtaatgctggcgaagcgtcct

SEQ ID NO: 2080742 - DNA, 25 bp, Homo sapien
actgtggccccatgaacggagagta

SEQ ID NO: 2080743 - DNA, 25 bp, Homo sapien
caatgccagtgagagatatacaggg

SEQ ID NO: 2080744 - DNA, 25 bp, Homo sapien
ggatgctactcaacatcatgttggc

SEQ ID NO: 2080745 - DNA, 25 bp, Homo sapien
cctctaatgacccatggacttgaat

SEQ ID NO: 2080746 - DNA, 25 bp, Homo sapien
actcggagagaagcatttctcttct

SEQ ID NO: 2080747 - DNA, 25 bp, Homo sapien
cctgtgggcttgatcctctaatgac

SEQ ID NO: 2080748 - DNA, 25 bp, Homo sapien
tgcttgcctcatcagtccaggagac

SEQ ID NO: 2080749 - DNA, 25 bp, Homo sapien
actggaactgggacttccaggtctg

SEQ ID NO: 2080750 - DNA, 25 bp, Homo sapien
ccaggtctgggagccttgctacaca

SEQ ID NO: 2080751 - DNA, 25 bp, Homo sapien
acttccaggtctgggagccttgcta

SEQ ID NO: 2080752 - DNA, 25 bp, Homo sapien
gggtctcctattgatcggcatttca

SEQ ID NO: 2080753 - DNA, 25 bp, Homo sapien
gctgccagggatagctggttcccag

SEQ ID NO: 2080754 - DNA, 25 bp, Homo sapien
catttcactgttcctgaagtagcac

SEQ ID NO: 2080755 - DNA, 25 bp, Homo sapien
tccaaggatgctggcgaatctgaca

SEQ ID NO: 2080756 - DNA, 25 bp, Homo sapien
gcttcatagttgatgtggctatcac

SEQ ID NO: 2080757 - DNA, 25 bp, Homo sapien
gggtcctgcggatcccagttcatgt

SEQ ID NO: 2080758 - DNA, 25 bp, Homo sapien
gaacctccggtcacgctcatgacaa

SEQ ID NO: 2080759 - DNA, 25 bp, Homo sapien
tgtggctatcactccggtttataaa

SEQ ID NO: 2080760 - DNA, 25 bp, Homo sapien
cacagggttgaggcttttgggtgat

SEQ ID NO: 2080761 - DNA, 25 bp, Homo sapien
aggaatatgattggcagtggtcatt

SEQ ID NO: 2080762 - DNA, 25 bp, Homo sapien
aaggaatatgattggcagtggtcat

SEQ ID NO: 2080763 - DNA, 25 bp, Homo sapien
tatttatgaagacacttagccagga

SEQ ID NO: 2080764 - DNA, 25 bp, Homo sapien
tccaagcaacgatacagagataaaa

SEQ ID NO: 2080765 - DNA, 25 bp, Homo sapien
gccaggatttagtaagttcactgca

SEQ ID NO: 2080766 - DNA, 25 bp, Homo sapien
cccctctagcatatgcacgtctatt

SEQ ID NO: 2080767 - DNA, 25 bp, Homo sapien
catccacattaaagaagtatgacaa

SEQ ID NO: 2080768 - DNA, 25 bp, Homo sapien
atccacattaaagaagtatgacaaa

SEQ ID NO: 2080769 - DNA, 25 bp, Homo sapien
ctgagtctctatagagagtaacttt

SEQ ID NO: 2080770 - DNA, 25 bp, Homo sapien
gggaatccctttctgcctgaactct

SEQ ID NO: 2080771 - DNA, 25 bp, Homo sapien
ttccttctgggaatccctttctgcc

SEQ ID NO: 2080772 - DNA, 25 bp, Homo sapien
tatagagagtaacttttgcttttcc

SEQ ID NO: 2080773 - DNA, 25 bp, Homo sapien
ggcacatgacttcaggtgactgcct

SEQ ID NO: 2080774 - DNA, 25 bp, Homo sapien
aggcacatgacttcaggtgactgcc

SEQ ID NO: 2080775 - DNA, 25 bp, Homo sapien
tcaggtgactgcctccaggcgctcg

SEQ ID NO: 2080776 - DNA, 25 bp, Homo sapien
acttcaggtgactgcctccaggcgc

SEQ ID NO: 2080777 - DNA, 25 bp, Homo sapien
tagtactggtaagggccaacccatc

SEQ ID NO: 2080778 - DNA, 25 bp, Homo sapien
tgagtagaaagcaaaacgggtaggc

SEQ ID NO: 2080779 - DNA, 25 bp, Homo sapien
tattgatgacctctcttgaggatgg

SEQ ID NO: 2080780 - DNA, 25 bp, Homo sapien
ggtaggccgaggtcaccatttcact

SEQ ID NO: 2080781 - DNA, 25 bp, Homo sapien
taacacagctggttacagagtggac

SEQ ID NO: 2080782 - DNA, 25 bp, Homo sapien
tgagtgttacaggaagaatccgcat

SEQ ID NO: 2080783 - DNA, 25 bp, Homo sapien
gagtcctaatccacagagtaatgag

SEQ ID NO: 2080784 - DNA, 25 bp, Homo sapien
tggtcaagtaccactctgttgagtg

SEQ ID NO: 2080785 - DNA, 25 bp, Homo sapien
aattggccgtggcaaagacactcat

SEQ ID NO: 2080786 - DNA, 25 bp, Homo sapien
catgaaagtgaccagaattggccgt

SEQ ID NO: 2080787 - DNA, 25 bp, Homo sapien
tacttcttggtggaagcaagcactg

SEQ ID NO: 2080788 - DNA, 25 bp, Homo sapien
cagctccgagaaggtcattatccaa

SEQ ID NO: 2080789 - DNA, 25 bp, Homo sapien
taacccttaggactgacttccgtca

SEQ ID NO: 2080790 - DNA, 25 bp, Homo sapien
tgagtgatctccaccgtaaacaaga

SEQ ID NO: 2080791 - DNA, 25 bp, Homo sapien
gaaggacattttgctcgtctccaga

SEQ ID NO: 2080792 - DNA, 25 bp, Homo sapien
gaagatctttacaggcacatccacc

SEQ ID NO: 2080793 - DNA, 25 bp, Homo sapien
tggctccttctcttcgtgtcttatc

SEQ ID NO: 2080794 - DNA, 25 bp, Homo sapien
cgtagcctttcagacgaacacttct

SEQ ID NO: 2080795 - DNA, 25 bp, Homo sapien
ggctccttctcttcgtgtcttatct

SEQ ID NO: 2080796 - DNA, 25 bp, Homo sapien
ttactcatcacggtcatcgtagcct

SEQ ID NO: 2080797 - DNA, 25 bp, Homo sapien
tggcgccggctgtctgcaacgcagc

SEQ ID NO: 2080798 - DNA, 25 bp, Homo sapien
tgcacatcataatcgaacccagatt

SEQ ID NO: 2080799 - DNA, 25 bp, Homo sapien
agaaataactcttggtggcgccggc

SEQ ID NO: 2080800 - DNA, 25 bp, Homo sapien
tgtctgcaacgcagcccatttcctg

SEQ ID NO: 2080801 - DNA, 25 bp, Homo sapien
agcttagctagagggaccaaccgga

SEQ ID NO: 2080802 - DNA, 25 bp, Homo sapien
gttcccatacactcgccgtgcggaa

SEQ ID NO: 2080803 - DNA, 25 bp, Homo sapien
cagagcgttggcaaagttagctcaa

SEQ ID NO: 2080804 - DNA, 25 bp, Homo sapien
gtctgaccttcccttgcacgacagg

SEQ ID NO: 2080805 - DNA, 25 bp, Homo sapien
ctctgtcgctgacactggatgtgca

SEQ ID NO: 2080806 - DNA, 25 bp, Homo sapien
tcgctgacactggatgtgcatgtct

SEQ ID NO: 2080807 - DNA, 25 bp, Homo sapien
tgtcgctgacactggatgtgcatgt

SEQ ID NO: 2080808 - DNA, 25 bp, Homo sapien
gggctctgtcgctgacactggatgt

SEQ ID NO: 2080809 - DNA, 25 bp, Homo sapien
cgaacggatcaaactgatgaccacc

SEQ ID NO: 2080810 - DNA, 25 bp, Homo sapien
acggatcaaactgatgaccaccagg

SEQ ID NO: 2080811 - DNA, 25 bp, Homo sapien
ccgggctgccgcgctctcctttttt

SEQ ID NO: 2080812 - DNA, 25 bp, Homo sapien
gatgcacacggattagaagacagca

SEQ ID NO: 2080813 - DNA, 25 bp, Homo sapien
ctttttcgcctacagagagtttcag

SEQ ID NO: 2080814 - DNA, 25 bp, Homo sapien
caggaaggcactcaaaacgtatagg

SEQ ID NO: 2080815 - DNA, 25 bp, Homo sapien
tgtcccagggttcacacgaacagga

SEQ ID NO: 2080816 - DNA, 25 bp, Homo sapien
tagaaaatgccgcacaaaggtgtgg

SEQ ID NO: 2080817 - DNA, 25 bp, Homo sapien
gagaaggccctttggtatgacacga

SEQ ID NO: 2080818 - DNA, 25 bp, Homo sapien
ggccctttggtatgacacgatgcag

SEQ ID NO: 2080819 - DNA, 25 bp, Homo sapien
ccctttggtatgacacgatgcaggc

SEQ ID NO: 2080820 - DNA, 25 bp, Homo sapien
tcagggcgagaaggccctttggtat

SEQ ID NO: 2080821 - DNA, 25 bp, Homo sapien
cagatacacatgtacgtacagcccc

SEQ ID NO: 2080822 - DNA, 25 bp, Homo sapien
ggtgtgttacaatccgcagtcccaa

SEQ ID NO: 2080823 - DNA, 25 bp, Homo sapien
cttgcagtcacttggtgtgttacaa

SEQ ID NO: 2080824 - DNA, 25 bp, Homo sapien
ccgcagtcccaagtgtaggcagaca

SEQ ID NO: 2080825 - DNA, 25 bp, Homo sapien
gaattaaagcgtgaaccccacaggc

SEQ ID NO: 2080826 - DNA, 25 bp, Homo sapien
agacattaatggtggcccggagcct

SEQ ID NO: 2080827 - DNA, 25 bp, Homo sapien
tagtttacctcgatcaggcgccatg

SEQ ID NO: 2080828 - DNA, 25 bp, Homo sapien
gaacgccattggtgtgcaacgagac

SEQ ID NO: 2080829 - DNA, 25 bp, Homo sapien
tcttatgccattatgagagttcccc

SEQ ID NO: 2080830 - DNA, 25 bp, Homo sapien
gacatgactatctcctttgactaag

SEQ ID NO: 2080831 - DNA, 25 bp, Homo sapien
taagatcccgtcagagacattggcc

SEQ ID NO: 2080832 - DNA, 25 bp, Homo sapien
tctgtagctacgtacacttgctgct

SEQ ID NO: 2080833 - DNA, 25 bp, Homo sapien
gaaagcttgaacgaggattcccatg

SEQ ID NO: 2080834 - DNA, 25 bp, Homo sapien
tggcagccgcacacagaatatactg

SEQ ID NO: 2080835 - DNA, 25 bp, Homo sapien
ggtgacatgagatccttgaattcca

SEQ ID NO: 2080836 - DNA, 25 bp, Homo sapien
ggaaatctgaaccaagcactgcttc

SEQ ID NO: 2080837 - DNA, 25 bp, Homo sapien
atgacaggcactcaacacagggttt

SEQ ID NO: 2080838 - DNA, 25 bp, Homo sapien
tacaaatagcctcgtgtccactctg

SEQ ID NO: 2080839 - DNA, 25 bp, Homo sapien
actgagaagaatggacctcctgcct

SEQ ID NO: 2080840 - DNA, 25 bp, Homo sapien
taacattaaaggtagacaaactgag

SEQ ID NO: 2080841 - DNA, 25 bp, Homo sapien
cagaggacctggctattaagctgtc

SEQ ID NO: 2080842 - DNA, 25 bp, Homo sapien
agaaggaaggatcctcacccaggca

SEQ ID NO: 2080843 - DNA, 25 bp, Homo sapien
tgaaatgtttgacagcgcagggaca

SEQ ID NO: 2080844 - DNA, 25 bp, Homo sapien
caatggctggaaggatactgtcata

SEQ ID NO: 2080845 - DNA, 25 bp, Homo sapien
tctctgtggccgaggtaaagacacc

SEQ ID NO: 2080846 - DNA, 25 bp, Homo sapien
tccgtggagcaacggtgaacagctc

SEQ ID NO: 2080847 - DNA, 25 bp, Homo sapien
tgaccgcttcactagctgcactgtg

SEQ ID NO: 2080848 - DNA, 25 bp, Homo sapien
gacaaacacaggtccttccatggag

SEQ ID NO: 2080849 - DNA, 25 bp, Homo sapien
gagaaaggatccatgagatggaaaa

SEQ ID NO: 2080850 - DNA, 25 bp, Homo sapien
agaagtcacctatttgcagattttt

SEQ ID NO: 2080851 - DNA, 25 bp, Homo sapien
ctgcggtaggtgagttgtaaatgct

SEQ ID NO: 2080852 - DNA, 25 bp, Homo sapien
tcttacatacacaaagttaatgctg

SEQ ID NO: 2080853 - DNA, 25 bp, Homo sapien
tgttcttgggcacatctctgtgaca

SEQ ID NO: 2080854 - DNA, 25 bp, Homo sapien
tacataaacaaggaacgaagacgtc

SEQ ID NO: 2080855 - DNA, 25 bp, Homo sapien
ctatgtgttcttgggcacatctctg

SEQ ID NO: 2080856 - DNA, 25 bp, Homo sapien
cataaacaaggaacgaagacgtcca

SEQ ID NO: 2080857 - DNA, 25 bp, Homo sapien
ttggatcgcctcaccaaaaagtgaa

SEQ ID NO: 2080858 - DNA, 25 bp, Homo sapien
gtttggccacaaagctcaccactgg

SEQ ID NO: 2080859 - DNA, 25 bp, Homo sapien
gggcacatgtaagacgggagactca

SEQ ID NO: 2080860 - DNA, 25 bp, Homo sapien
caaagagtctatggtgaagcctagg

SEQ ID NO: 2080861 - DNA, 25 bp, Homo sapien
tgctaatccttgaactgaaacatca

SEQ ID NO: 2080862 - DNA, 25 bp, Homo sapien
ggttttataggtaggatagaactca

SEQ ID NO: 2080863 - DNA, 25 bp, Homo sapien
tgcatccccttgatagtttaaaatt

SEQ ID NO: 2080864 - DNA, 25 bp, Homo sapien
tagaactcagtatcgtacatgctaa

SEQ ID NO: 2080865 - DNA, 25 bp, Homo sapien
tggactgtccaatgccctgaggatt

SEQ ID NO: 2080866 - DNA, 25 bp, Homo sapien
tgcaccccaatatgaggaagagttt

SEQ ID NO: 2080867 - DNA, 25 bp, Homo sapien
gaaacaggcctcgtgattcaggaga

SEQ ID NO: 2080868 - DNA, 25 bp, Homo sapien
ctgctaaagaggcatgtgaggtcct

SEQ ID NO: 2080869 - DNA, 25 bp, Homo sapien
ccataccagacatctgaggctcttc

SEQ ID NO: 2080870 - DNA, 25 bp, Homo sapien
cacccataccagacatctgaggctc

SEQ ID NO: 2080871 - DNA, 25 bp, Homo sapien
cccataccagacatctgaggctctt

SEQ ID NO: 2080872 - DNA, 25 bp, Homo sapien
cccacccataccagacatctgaggc

SEQ ID NO: 2080873 - DNA, 25 bp, Homo sapien
ataaccctcttatccgtagatgtgg

SEQ ID NO: 2080874 - DNA, 25 bp, Homo sapien
tcttatccgtagatgtggagaaggc

SEQ ID NO: 2080875 - DNA, 25 bp, Homo sapien
catggatgatgccagaattgaaagt

SEQ ID NO: 2080876 - DNA, 25 bp, Homo sapien
tggatgatgccagaattgaaagttc

SEQ ID NO: 2080877 - DNA, 25 bp, Homo sapien
aacaatttggtaatgaaatattgat

SEQ ID NO: 2080878 - DNA, 25 bp, Homo sapien
gatgctattaggtttgcattgataa

SEQ ID NO: 2080879 - DNA, 25 bp, Homo sapien
ctctgactccggcaatttttcttca

SEQ ID NO: 2080880 - DNA, 25 bp, Homo sapien
tttttagttagattcatattgatgc

SEQ ID NO: 2080881 - DNA, 25 bp, Homo sapien
gatttgacttcaaggacccacttac

SEQ ID NO: 2080882 - DNA, 25 bp, Homo sapien
tcttctaagacaaacggctctggtg

SEQ ID NO: 2080883 - DNA, 25 bp, Homo sapien
gagaacaacaatggtggatttgact

SEQ ID NO: 2080884 - DNA, 25 bp, Homo sapien
tgagaatctgaaaattggcgaacct

SEQ ID NO: 2080885 - DNA, 25 bp, Homo sapien
tttattggaaattgtgagcagagca

SEQ ID NO: 2080886 - DNA, 25 bp, Homo sapien
gtagaactccattagattatccaag

SEQ ID NO: 2080887 - DNA, 25 bp, Homo sapien
gccttatagtacctattgtgatgga

SEQ ID NO: 2080888 - DNA, 25 bp, Homo sapien
gtaaactttataatccactagctgt

SEQ ID NO: 2080889 - DNA, 25 bp, Homo sapien
tatctatttggggagtggaaaaaga

SEQ ID NO: 2080890 - DNA, 25 bp, Homo sapien
gtggagagacgaacaggcagcgcat

SEQ ID NO: 2080891 - DNA, 25 bp, Homo sapien
tagtcgcagcaaattagaacccatt

SEQ ID NO: 2080892 - DNA, 25 bp, Homo sapien
ccacgctggttttctgcacgagcag

SEQ ID NO: 2080893 - DNA, 25 bp, Homo sapien
ccattatgatgggtgccacgctggt

SEQ ID NO: 2080894 - DNA, 25 bp, Homo sapien
ggatcgccccttcatgtgcctggtg

SEQ ID NO: 2080895 - DNA, 25 bp, Homo sapien
cacctggagatgtcacgattgcttc

SEQ ID NO: 2080896 - DNA, 25 bp, Homo sapien
tcaagacacgcgcatgagtcggaag

SEQ ID NO: 2080897 - DNA, 25 bp, Homo sapien
acgtccccgcagaatggtgtggtca

SEQ ID NO: 2080898 - DNA, 25 bp, Homo sapien
tgaatagcgattgaacatgccacct

SEQ ID NO: 2080899 - DNA, 25 bp, Homo sapien
ggaacttagcatgcctttacccaga

SEQ ID NO: 2080900 - DNA, 25 bp, Homo sapien
gcttaaagtcgtacagacctggcct

SEQ ID NO: 2080901 - DNA, 25 bp, Homo sapien
taagcatttgccatagagcagcact

SEQ ID NO: 2080902 - DNA, 25 bp, Homo sapien
gtatgaaagcatcgacttcttgtgc

SEQ ID NO: 2080903 - DNA, 25 bp, Homo sapien
gttctgacatcttggaaagtgtatg

SEQ ID NO: 2080904 - DNA, 25 bp, Homo sapien
gcttgcagttcagatgcctatggca

SEQ ID NO: 2080905 - DNA, 25 bp, Homo sapien
catcgacttcttgtgctggcttgca

SEQ ID NO: 2080906 - DNA, 25 bp, Homo sapien
acagttccggtacctcatgccatga

SEQ ID NO: 2080907 - DNA, 25 bp, Homo sapien
gaagggttcagcttacaagatcctc

SEQ ID NO: 2080908 - DNA, 25 bp, Homo sapien
tattctcttgtggtatggttggtcc

SEQ ID NO: 2080909 - DNA, 25 bp, Homo sapien
catgcagtggagcattcgtgacccc

SEQ ID NO: 2080910 - DNA, 25 bp, Homo sapien
tgttggatcacgagccgtggaaccc

SEQ ID NO: 2080911 - DNA, 25 bp, Homo sapien
tccttcagggcctataaagtggccg

SEQ ID NO: 2080912 - DNA, 25 bp, Homo sapien
tctccaagtacagctaggccaggtg

SEQ ID NO: 2080913 - DNA, 25 bp, Homo sapien
caacagtgctgaccgatggtgggac

SEQ ID NO: 2080914 - DNA, 25 bp, Homo sapien
attctttaagactgctggtcaactc

SEQ ID NO: 2080915 - DNA, 25 bp, Homo sapien
caactccagacaagctgtattaaat

SEQ ID NO: 2080916 - DNA, 25 bp, Homo sapien
tatagcatatggtaattcttgttag

SEQ ID NO: 2080917 - DNA, 25 bp, Homo sapien
gtaattcttgttagatggaaaacag

SEQ ID NO: 2080918 - DNA, 25 bp, Homo sapien
cctgtgtcgtcgccttcaatgaaga

SEQ ID NO: 2080919 - DNA, 25 bp, Homo sapien
ctgtgtcgtcgccttcaatgaagat

SEQ ID NO: 2080920 - DNA, 25 bp, Homo sapien
ttatgtgtcattggacttggtttcc

SEQ ID NO: 2080921 - DNA, 25 bp, Homo sapien
tgtttctgaactttgggaaaaagca

SEQ ID NO: 2080922 - DNA, 25 bp, Homo sapien
ccagtgccatgatgaataagaggta

SEQ ID NO: 2080923 - DNA, 25 bp, Homo sapien
gcataaatgccctctatcaggttga

SEQ ID NO: 2080924 - DNA, 25 bp, Homo sapien
gatttccacgcagctagcaatgcag

SEQ ID NO: 2080925 - DNA, 25 bp, Homo sapien
tatgtggaaccaacaactgcttggc

SEQ ID NO: 2080926 - DNA, 25 bp, Homo sapien
cactggtgcaggttttagcaggtcc

SEQ ID NO: 2080927 - DNA, 25 bp, Homo sapien
tctactggtcaaggagccgagctgt

SEQ ID NO: 2080928 - DNA, 25 bp, Homo sapien
agaacaccaggacatcacggagcct

SEQ ID NO: 2080929 - DNA, 25 bp, Homo sapien
cctccacagaagtcgaattgttggt

SEQ ID NO: 2080930 - DNA, 25 bp, Homo sapien
ttgacggagatcctgccttgtgcca

SEQ ID NO: 2080931 - DNA, 25 bp, Homo sapien
gctgatgccggcacctgatatgtga

SEQ ID NO: 2080932 - DNA, 25 bp, Homo sapien
gctggtcactaaacccctccaggga

SEQ ID NO: 2080933 - DNA, 25 bp, Homo sapien
gaaatcattggaggcttccatagcc

SEQ ID NO: 2080934 - DNA, 25 bp, Homo sapien
ggaagcccatgattgattgtgactg

SEQ ID NO: 2080935 - DNA, 25 bp, Homo sapien
tgtgactggaagctatgatactggg

SEQ ID NO: 2080936 - DNA, 25 bp, Homo sapien
gcaatagcacgccaggatgtccaga

SEQ ID NO: 2080937 - DNA, 25 bp, Homo sapien
cagtgcggtgtgtctgcctcaagca

SEQ ID NO: 2080938 - DNA, 25 bp, Homo sapien
gacttgtgggcgtcaaatcacgaaa

SEQ ID NO: 2080939 - DNA, 25 bp, Homo sapien
gcaattgttgcatctggcgagtgaa

SEQ ID NO: 2080940 - DNA, 25 bp, Homo sapien
gaccaaagcgggctgtcaaacgatt

SEQ ID NO: 2080941 - DNA, 25 bp, Homo sapien
taaaaaactgtatgtcctcgagtcc

SEQ ID NO: 2080942 - DNA, 25 bp, Homo sapien
gatgaacgatcttgtgaattaccct

SEQ ID NO: 2080943 - DNA, 25 bp, Homo sapien
ctgagtcagaattccgtccgcgtcc

SEQ ID NO: 2080944 - DNA, 25 bp, Homo sapien
cttggtcactcccacaggcacgtta

SEQ ID NO: 2080945 - DNA, 25 bp, Homo sapien
tagttaaatacatcaatctagttac

SEQ ID NO: 2080946 - DNA, 25 bp, Homo sapien
caaccacggcaaacaaaggcgtcct

SEQ ID NO: 2080947 - DNA, 25 bp, Homo sapien
ggtcttttgcattttactgcctcaa

SEQ ID NO: 2080948 - DNA, 25 bp, Homo sapien
aagtaaagctatgtgaatgccgtcc

SEQ ID NO: 2080949 - DNA, 25 bp, Homo sapien
gaaagcatccctactgaccctgtaa

SEQ ID NO: 2080950 - DNA, 25 bp, Homo sapien
tgtccaaagaacagaggccgaccag

SEQ ID NO: 2080951 - DNA, 25 bp, Homo sapien
gaaggagtgtgagacgatgaaaccc

SEQ ID NO: 2080952 - DNA, 25 bp, Homo sapien
gatgacaataagaccttccagggaa

SEQ ID NO: 2080953 - DNA, 25 bp, Homo sapien
ggtacagtggccaatttcccagaga

SEQ ID NO: 2080954 - DNA, 25 bp, Homo sapien
gaatgaaatctgtccgtctaagatg

SEQ ID NO: 2080955 - DNA, 25 bp, Homo sapien
taaggaatacaagtgaacaacctga

SEQ ID NO: 2080956 - DNA, 25 bp, Homo sapien
ggagaaaagacacccacttgctggg

SEQ ID NO: 2080957 - DNA, 25 bp, Homo sapien
tccgaatcgggaggactcagtggct

SEQ ID NO: 2080958 - DNA, 25 bp, Homo sapien
tagtgttgcgctagctctcttccga

SEQ ID NO: 2080959 - DNA, 25 bp, Homo sapien
tatgggactatggacgatgagcacg

SEQ ID NO: 2080960 - DNA, 25 bp, Homo sapien
tgctcaggagttccccggctgttct

SEQ ID NO: 2080961 - DNA, 25 bp, Homo sapien
tctgaacgtttaacaaggagaggca

SEQ ID NO: 2080962 - DNA, 25 bp, Homo sapien
tgttcttccatggagcggccaggtc

SEQ ID NO: 2080963 - DNA, 25 bp, Homo sapien
gagggtactgctaatggccgttacg

SEQ ID NO: 2080964 - DNA, 25 bp, Homo sapien
tcagaggcactgtctggacggtacc

SEQ ID NO: 2080965 - DNA, 25 bp, Homo sapien
ggtacctgtgttagaatggtctctc

SEQ ID NO: 2080966 - DNA, 25 bp, Homo sapien
actgtctggacggtacctgtgttag

SEQ ID NO: 2080967 - DNA, 25 bp, Homo sapien
ttctcagaggcactgtctggacggt

SEQ ID NO: 2080968 - DNA, 25 bp, Homo sapien
ttttctaatcaacatccaagaacac

SEQ ID NO: 2080969 - DNA, 25 bp, Homo sapien
tttctaatcaacatccaagaacaca

SEQ ID NO: 2080970 - DNA, 25 bp, Homo sapien
ctaaagtgaactgcgagagaaaacc

SEQ ID NO: 2080971 - DNA, 25 bp, Homo sapien
cagaacttcagagcgtgttcaccca

SEQ ID NO: 2080972 - DNA, 25 bp, Homo sapien
cggctctcacgtaggtctgtcagaa

SEQ ID NO: 2080973 - DNA, 25 bp, Homo sapien
gatgatagtgtctgaaccagctctg

SEQ ID NO: 2080974 - DNA, 25 bp, Homo sapien
gcacgcccaccatcgccttgtcttc

SEQ ID NO: 2080975 - DNA, 25 bp, Homo sapien
ctataatcttttgagcacgcccacc

SEQ ID NO: 2080976 - DNA, 25 bp, Homo sapien
agcacgcccaccatcgccttgtctt

SEQ ID NO: 2080977 - DNA, 25 bp, Homo sapien
tgagcacgcccaccatcgccttgtc

SEQ ID NO: 2080978 - DNA, 25 bp, Homo sapien
gaaacccagacatccaattcatcat

SEQ ID NO: 2080979 - DNA, 25 bp, Homo sapien
acctttcccagctaccgcatcgaaa

SEQ ID NO: 2080980 - DNA, 25 bp, Homo sapien
tcgaaacccagacatccaattcatc

SEQ ID NO: 2080981 - DNA, 25 bp, Homo sapien
tgcttcagtgatgagcatcatggtg

SEQ ID NO: 2080982 - DNA, 25 bp, Homo sapien
gtatgaacttcagaaccccgaggcc

SEQ ID NO: 2080983 - DNA, 25 bp, Homo sapien
cgaggcccatcggactcaaacacca

SEQ ID NO: 2080984 - DNA, 25 bp, Homo sapien
ggcgtctgcggaggtggtatgaact

SEQ ID NO: 2080985 - DNA, 25 bp, Homo sapien
ggtggtatgaacttcagaaccccga

SEQ ID NO: 2080986 - DNA, 25 bp, Homo sapien
atgcagacgaactctcctggccggg

SEQ ID NO: 2080987 - DNA, 25 bp, Homo sapien
tccgcactcgatgcagacgaactct

SEQ ID NO: 2080988 - DNA, 25 bp, Homo sapien
agctctttccgcactcgatgcagac

SEQ ID NO: 2080989 - DNA, 25 bp, Homo sapien
cgggctggtggaagctctttccgca

SEQ ID NO: 2080990 - DNA, 25 bp, Homo sapien
gcctggccacgacaaacaattctat

SEQ ID NO: 2080991 - DNA, 25 bp, Homo sapien
tctatcgaagaacggttaggacttc

SEQ ID NO: 2080992 - DNA, 25 bp, Homo sapien
caaacaattctatcgaagaacggtt

SEQ ID NO: 2080993 - DNA, 25 bp, Homo sapien
tgcctggccacgacaaacaattcta

SEQ ID NO: 2080994 - DNA, 25 bp, Homo sapien
tgaagtgcaatcacgtcggcctgct

SEQ ID NO: 2080995 - DNA, 25 bp, Homo sapien
cctgctcctgcggaatgtcggtgtg

SEQ ID NO: 2080996 - DNA, 25 bp, Homo sapien
tcttttgagagacaggacaatgaac

SEQ ID NO: 2080997 - DNA, 25 bp, Homo sapien
tgtcggtgtggaggaaacgtcctct

SEQ ID NO: 2080998 - DNA, 25 bp, Homo sapien
aggcgcttctcatgcccctcggcca

SEQ ID NO: 2080999 - DNA, 25 bp, Homo sapien
ccctggtagagggtcgcaaagtcct

SEQ ID NO: 2081000 - DNA, 25 bp, Homo sapien
tcctttggaatgtacgtcttaaaga

SEQ ID NO: 2081001 - DNA, 25 bp, Homo sapien
gtagagggtcgcaaagtcctttgga

SEQ ID NO: 2081002 - DNA, 25 bp, Homo sapien
ctgtttgatggagtgtaggacgggg

SEQ ID NO: 2081003 - DNA, 25 bp, Homo sapien
tgtttgatggagtgtaggacggggg

SEQ ID NO: 2081004 - DNA, 25 bp, Homo sapien
ttgatggagtgtaggacgggggggc

SEQ ID NO: 2081005 - DNA, 25 bp, Homo sapien
gatggagtgtaggacgggggggcgc

SEQ ID NO: 2081006 - DNA, 25 bp, Homo sapien
ccttcgccctttgcaggaggtggac

SEQ ID NO: 2081007 - DNA, 25 bp, Homo sapien
aggctgagcactgaatttggctttc

SEQ ID NO: 2081008 - DNA, 25 bp, Homo sapien
gggcaggcaccggtttggagctagc

SEQ ID NO: 2081009 - DNA, 25 bp, Homo sapien
cacaggcttgctattggccgagggc

SEQ ID NO: 2081010 - DNA, 25 bp, Homo sapien
agagccacttttggaccccggcatc

SEQ ID NO: 2081011 - DNA, 25 bp, Homo sapien
tattcttaggcatgctagcggcttt

SEQ ID NO: 2081012 - DNA, 25 bp, Homo sapien
tagcggcttttgtgaccactcccag

SEQ ID NO: 2081013 - DNA, 25 bp, Homo sapien
tttggtctgtcgatacccgtcaggg

SEQ ID NO: 2081014 - DNA, 25 bp, Homo sapien
taaatctagcggcatgaggtctggg

SEQ ID NO: 2081015 - DNA, 25 bp, Homo sapien
tcttgtggctgcagtaaggacacgg

SEQ ID NO: 2081016 - DNA, 25 bp, Homo sapien
tatggacacagaagctgcgatccct

SEQ ID NO: 2081017 - DNA, 25 bp, Homo sapien
tgaaccgagcaaggagcaaaggctg

SEQ ID NO: 2081018 - DNA, 25 bp, Homo sapien
tctgcaactgtttcgcaggagctcg

SEQ ID NO: 2081019 - DNA, 25 bp, Homo sapien
taagctgttttccatcaagtactac

SEQ ID NO: 2081020 - DNA, 25 bp, Homo sapien
caagtactacatcaaaaagctggtc

SEQ ID NO: 2081021 - DNA, 25 bp, Homo sapien
aaagctggtcacaagaggccaagcc

SEQ ID NO: 2081022 - DNA, 25 bp, Homo sapien
tcctctctgaactagaagcgagctc

SEQ ID NO: 2081023 - DNA, 25 bp, Homo sapien
ctctctgaactagaagcgagctcca

SEQ ID NO: 2081024 - DNA, 25 bp, Homo sapien
ctcctctctgaactagaagcgagct

SEQ ID NO: 2081025 - DNA, 25 bp, Homo sapien
tctctgaactagaagcgagctccat

SEQ ID NO: 2081026 - DNA, 25 bp, Homo sapien
tagtcgaagctacagggctgagagc

SEQ ID NO: 2081027 - DNA, 25 bp, Homo sapien
tgcgctcgcaggacaacaagtgatc

SEQ ID NO: 2081028 - DNA, 25 bp, Homo sapien
ggttgtgccacagagtcgaagctag

SEQ ID NO: 2081029 - DNA, 25 bp, Homo sapien
cacctgcaaagggagactgtgctca

SEQ ID NO: 2081030 - DNA, 25 bp, Homo sapien
cacttgtgggagacttgagagtcgg

SEQ ID NO: 2081031 - DNA, 25 bp, Homo sapien
tcacttgtgggagacttgagagtcg

SEQ ID NO: 2081032 - DNA, 25 bp, Homo sapien
gctgcacttccaggggagaacaccc

SEQ ID NO: 2081033 - DNA, 25 bp, Homo sapien
ctaagtccgggaccaagaccagcga

SEQ ID NO: 2081034 - DNA, 25 bp, Homo sapien
gaaggtcgccgtgctgactgctgct

SEQ ID NO: 2081035 - DNA, 25 bp, Homo sapien
ggggagaacaccctggcgatgctct

SEQ ID NO: 2081036 - DNA, 25 bp, Homo sapien
tggcgatcagcagggccagccttag

SEQ ID NO: 2081037 - DNA, 25 bp, Homo sapien
agccttaggaagacaatggccatgg

SEQ ID NO: 2081038 - DNA, 25 bp, Homo sapien
gccttaggaagacaatggccatgga

SEQ ID NO: 2081039 - DNA, 25 bp, Homo sapien
acacgcaggtgaaaaggttccatga

SEQ ID NO: 2081040 - DNA, 25 bp, Homo sapien
cacacgcaggtgaaaaggttccatg

SEQ ID NO: 2081041 - DNA, 25 bp, Homo sapien
cacgcaggtgaaaaggttccatgaa

SEQ ID NO: 2081042 - DNA, 25 bp, Homo sapien
aaagtcacggaggatgtcttctctc

SEQ ID NO: 2081043 - DNA, 25 bp, Homo sapien
tactcccaacgaaaggaactcctca

SEQ ID NO: 2081044 - DNA, 25 bp, Homo sapien
tgacctcggtctccgttcttctgaa

SEQ ID NO: 2081045 - DNA, 25 bp, Homo sapien
actcctcagaactccgtacagggta

SEQ ID NO: 2081046 - DNA, 25 bp, Homo sapien
aacactgtgtgaggacaagcgctcc

SEQ ID NO: 2081047 - DNA, 25 bp, Homo sapien
agagctttgcccgtgttgcgtccaa

SEQ ID NO: 2081048 - DNA, 25 bp, Homo sapien
gattcagctgcaaggtcagtgcgcg

SEQ ID NO: 2081049 - DNA, 25 bp, Homo sapien
cgttttgagcctctcgtgggaccca

SEQ ID NO: 2081050 - DNA, 25 bp, Homo sapien
tacagcaaaagcctcagtgcgcctg

SEQ ID NO: 2081051 - DNA, 25 bp, Homo sapien
aaaagcctcagtgcgcctggtgaca

SEQ ID NO: 2081052 - DNA, 25 bp, Homo sapien
ctcagcaaacaccttacagcaaaag

SEQ ID NO: 2081053 - DNA, 25 bp, Homo sapien
ccttacagcaaaagcctcagtgcgc

SEQ ID NO: 2081054 - DNA, 25 bp, Homo sapien
tggaatccacggatacacagggcca

SEQ ID NO: 2081055 - DNA, 25 bp, Homo sapien
cacagggccaactgtacttgtaact

SEQ ID NO: 2081056 - DNA, 25 bp, Homo sapien
caagtccctggtgtaaatgcctgcg

SEQ ID NO: 2081057 - DNA, 25 bp, Homo sapien
cccatctattgagtcgcagtgagta

SEQ ID NO: 2081058 - DNA, 25 bp, Homo sapien
gtcatttatctatgtatacactcat

SEQ ID NO: 2081059 - DNA, 25 bp, Homo sapien
tacatctttgttgactcaatatgca

SEQ ID NO: 2081060 - DNA, 25 bp, Homo sapien
cataacctgtgcgtggattcaacac

SEQ ID NO: 2081061 - DNA, 25 bp, Homo sapien
caacacaagttttgctacaggagaa

SEQ ID NO: 2081062 - DNA, 25 bp, Homo sapien
gcaggaaccccctgagcctgggatc

SEQ ID NO: 2081063 - DNA, 25 bp, Homo sapien
aaccccctgagcctgggatcccagg

SEQ ID NO: 2081064 - DNA, 25 bp, Homo sapien
ggaaccccctgagcctgggatccca

SEQ ID NO: 2081065 - DNA, 25 bp, Homo sapien
gaagcaggaaccccctgagcctggg

SEQ ID NO: 2081066 - DNA, 25 bp, Homo sapien
gtacttgaggtactcggccggctcg

SEQ ID NO: 2081067 - DNA, 25 bp, Homo sapien
gcattgtgggcgttcaagctgtcca

SEQ ID NO: 2081068 - DNA, 25 bp, Homo sapien
tactcgcgcctgtccttgtcgaagg

SEQ ID NO: 2081069 - DNA, 25 bp, Homo sapien
tgtaaacaggttcccgcacttggcg

SEQ ID NO: 2081070 - DNA, 25 bp, Homo sapien
gccttcaggaaccaggtctggctga

SEQ ID NO: 2081071 - DNA, 25 bp, Homo sapien
ggctccttgaacctacggccgcaga

SEQ ID NO: 2081072 - DNA, 25 bp, Homo sapien
tgtgcgccttcaggaaccaggtctg

SEQ ID NO: 2081073 - DNA, 25 bp, Homo sapien
aacctacggccgcagatgtggcagc

SEQ ID NO: 2081074 - DNA, 25 bp, Homo sapien
gatgtggtccctctcgatgtggctc

SEQ ID NO: 2081075 - DNA, 25 bp, Homo sapien
gctcgaactggctcttgcagaagga

SEQ ID NO: 2081076 - DNA, 25 bp, Homo sapien
tagctgcacagcctgcacttgaacg

SEQ ID NO: 2081077 - DNA, 25 bp, Homo sapien
acttgaacggcttgtgcgcctggtg

SEQ ID NO: 2081078 - DNA, 25 bp, Homo sapien
tccggctcgtgtccctgaatcagag

SEQ ID NO: 2081079 - DNA, 25 bp, Homo sapien
cggtggctccggatgtgaatcttca

SEQ ID NO: 2081080 - DNA, 25 bp, Homo sapien
gccccgttcagcagccggttgcagg

SEQ ID NO: 2081081 - DNA, 25 bp, Homo sapien
actctgccgctgtcggcctgcgagg

SEQ ID NO: 2081082 - DNA, 25 bp, Homo sapien
tgtgctgcgaaagcgagctctggaa

SEQ ID NO: 2081083 - DNA, 25 bp, Homo sapien
ttgcgcatgtgctgcgaaagcgagc

SEQ ID NO: 2081084 - DNA, 25 bp, Homo sapien
tctcggcctctctgttgcgatccat

SEQ ID NO: 2081085 - DNA, 25 bp, Homo sapien
caggtgtggcaggtagccttgtccc

SEQ ID NO: 2081086 - DNA, 25 bp, Homo sapien
tcagaagagccaaaagacgtgcctg

SEQ ID NO: 2081087 - DNA, 25 bp, Homo sapien
tatctctccatggtcagaagagcca

SEQ ID NO: 2081088 - DNA, 25 bp, Homo sapien
acagctttctgtcgcgcgggctgca

SEQ ID NO: 2081089 - DNA, 25 bp, Homo sapien
gcgggctgcagggaccgtcctatct

SEQ ID NO: 2081090 - DNA, 25 bp, Homo sapien
gggggcgcagcagctggcagccagc

SEQ ID NO: 2081091 - DNA, 25 bp, Homo sapien
gggcgcagcagctggcagccagcac

SEQ ID NO: 2081092 - DNA, 25 bp, Homo sapien
ctacatggggggcgcagcagctggc

SEQ ID NO: 2081093 - DNA, 25 bp, Homo sapien
acatggggggcgcagcagctggcag

SEQ ID NO: 2081094 - DNA, 25 bp, Homo sapien
caatcgaacgcttaaagttgcggaa

SEQ ID NO: 2081095 - DNA, 25 bp, Homo sapien
agtcatttcctcaacaatcgaacgc

SEQ ID NO: 2081096 - DNA, 25 bp, Homo sapien
caaatatgctctcgtatttagagtc

SEQ ID NO: 2081097 - DNA, 25 bp, Homo sapien
ggcaccggaaggctaaccaaatatg

SEQ ID NO: 2081098 - DNA, 25 bp, Homo sapien
gctggtgcgtttctgaaggacgact

SEQ ID NO: 2081099 - DNA, 25 bp, Homo sapien
tgttctccgggaaacaatgagacgg

SEQ ID NO: 2081100 - DNA, 25 bp, Homo sapien
gactctcagacacggttggtcccgg

SEQ ID NO: 2081101 - DNA, 25 bp, Homo sapien
aggcccagttggtgtttgagtatac

SEQ ID NO: 2081102 - DNA, 25 bp, Homo sapien
gcgtgcctcaccgtcgtgtgtgcgt

SEQ ID NO: 2081103 - DNA, 25 bp, Homo sapien
gtgcgtgcctcaccgtcgtgtgtgc

SEQ ID NO: 2081104 - DNA, 25 bp, Homo sapien
ctcaccgtcgtgtgtgcgtgcctca

SEQ ID NO: 2081105 - DNA, 25 bp, Homo sapien
gtgcctcaccgtcgtgtgtgcgtgc

SEQ ID NO: 2081106 - DNA, 25 bp, Homo sapien
gaaatgcaatgacaacgctcccagt

SEQ ID NO: 2081107 - DNA, 25 bp, Homo sapien
agtgttcagagaaggaccgaactcc

SEQ ID NO: 2081108 - DNA, 25 bp, Homo sapien
cgctcccagttggatgctggtactc

SEQ ID NO: 2081109 - DNA, 25 bp, Homo sapien
ctggtactctcagctaaaagtgttc

SEQ ID NO: 2081110 - DNA, 25 bp, Homo sapien
gggagcaaacatgggaagggatgcc

SEQ ID NO: 2081111 - DNA, 25 bp, Homo sapien
tggtggtgatgccacgggcggtgaa

SEQ ID NO: 2081112 - DNA, 25 bp, Homo sapien
gaggcaaaacccaggagacgctggc

SEQ ID NO: 2081113 - DNA, 25 bp, Homo sapien
ggcggtgaacgtggggagcaaacat

SEQ ID NO: 2081114 - DNA, 25 bp, Homo sapien
gtgtctctcggaacctgcagctgac

SEQ ID NO: 2081115 - DNA, 25 bp, Homo sapien
gtctctcggaacctgcagctcacag

SEQ ID NO: 2081116 - DNA, 25 bp, Homo sapien
gtctctcggaacctgcagctgacag

SEQ ID NO: 2081117 - DNA, 25 bp, Homo sapien
gtgtctctcggaacctgcagctcac

SEQ ID NO: 2081118 - DNA, 25 bp, Homo sapien
tgtcacatcgctgaacgggagatcc

SEQ ID NO: 2081119 - DNA, 25 bp, Homo sapien
tggaagctgttctgggactccggcc

SEQ ID NO: 2081120 - DNA, 25 bp, Homo sapien
gaagttctctgacctgcggtgggcc

SEQ ID NO: 2081121 - DNA, 25 bp, Homo sapien
cagacacggactgattcctgggcca

SEQ ID NO: 2081122 - DNA, 25 bp, Homo sapien
gaaacaactcatatataggctacct

SEQ ID NO: 2081123 - DNA, 25 bp, Homo sapien
taaataactagctggcctaatcaag

SEQ ID NO: 2081124 - DNA, 25 bp, Homo sapien
cagtaattggctctatgataacccc

SEQ ID NO: 2081125 - DNA, 25 bp, Homo sapien
catatgtgacggaagatacaaaaca

SEQ ID NO: 2081126 - DNA, 25 bp, Homo sapien
tccattggtgcgatcttaagagtca

SEQ ID NO: 2081127 - DNA, 25 bp, Homo sapien
agtctgtccaccaagtccattggtg

SEQ ID NO: 2081128 - DNA, 25 bp, Homo sapien
tcatcatcaggatacctcagtctgt

SEQ ID NO: 2081129 - DNA, 25 bp, Homo sapien
gagtcacatgacttcgggatgtttg

SEQ ID NO: 2081130 - DNA, 25 bp, Homo sapien
gaacatgggaaataccaatacaggg

SEQ ID NO: 2081131 - DNA, 25 bp, Homo sapien
ttcgtaacgggccagaagtcacacc

SEQ ID NO: 2081132 - DNA, 25 bp, Homo sapien
tcctgcagacccacaatgctgaagc

SEQ ID NO: 2081133 - DNA, 25 bp, Homo sapien
gccctctgttgcaagagtgtgcaga

SEQ ID NO: 2081134 - DNA, 25 bp, Homo sapien
tctaaatggagttttcgtgggtcca

SEQ ID NO: 2081135 - DNA, 25 bp, Homo sapien
cctggacgggatttaaggattgcct

SEQ ID NO: 2081136 - DNA, 25 bp, Homo sapien
aatggtctactattcccctggacgg

SEQ ID NO: 2081137 - DNA, 25 bp, Homo sapien
tcacagctaagcaaaaaacctggtt

SEQ ID NO: 2081138 - DNA, 25 bp, Homo sapien
ccagatgcagagcataaggaatgca

SEQ ID NO: 2081139 - DNA, 25 bp, Homo sapien
tataccatcggaaaacatctcaggc

SEQ ID NO: 2081140 - DNA, 25 bp, Homo sapien
cataaatacgatgatggctctagct

SEQ ID NO: 2081141 - DNA, 25 bp, Homo sapien
cagctgttcaagtcacgtgtggcca

SEQ ID NO: 2081142 - DNA, 25 bp, Homo sapien
ccacagcttctagaacttttgaggg

SEQ ID NO: 2081143 - DNA, 25 bp, Homo sapien
ctttttgcgggatgctagttaggca

SEQ ID NO: 2081144 - DNA, 25 bp, Homo sapien
cattaacagcatgaaagatgtctgc

SEQ ID NO: 2081145 - DNA, 25 bp, Homo sapien
gagtgtgtcagaatagctttatcca

SEQ ID NO: 2081146 - DNA, 25 bp, Homo sapien
tggttaagtcacacgacgagcggac

SEQ ID NO: 2081147 - DNA, 25 bp, Homo sapien
gagggctccgtcctttgttacgcag

SEQ ID NO: 2081148 - DNA, 25 bp, Homo sapien
tcaagattcgaaactgcatggcagg

SEQ ID NO: 2081149 - DNA, 25 bp, Homo sapien
ttttgggaggctagccaccgttgca

SEQ ID NO: 2081150 - DNA, 25 bp, Homo sapien
taaccgagttagatttctgcagaag

SEQ ID NO: 2081151 - DNA, 25 bp, Homo sapien
ggcacacccgcgcatggacgaggtc

SEQ ID NO: 2081152 - DNA, 25 bp, Homo sapien
tgggcacgtgggtccttaacctctc

SEQ ID NO: 2081153 - DNA, 25 bp, Homo sapien
aagaggaggacgaaggtcgcccacg

SEQ ID NO: 2081154 - DNA, 25 bp, Homo sapien
ccttctttaaggagggaggcgtcag

SEQ ID NO: 2081155 - DNA, 25 bp, Homo sapien
gagttgctctctacaccgaaaaggg

SEQ ID NO: 2081156 - DNA, 25 bp, Homo sapien
taagcatgcgccagcaatcgtgttt

SEQ ID NO: 2081157 - DNA, 25 bp, Homo sapien
gcactttacctagccgggtttcaga

SEQ ID NO: 2081158 - DNA, 25 bp, Homo sapien
ggagccgagcgctgcactagaccga

SEQ ID NO: 2081159 - DNA, 25 bp, Homo sapien
cccgcgcatctgaaggtgaagccga

SEQ ID NO: 2081160 - DNA, 25 bp, Homo sapien
atctgaaggtgaagccgagcgcccg

SEQ ID NO: 2081161 - DNA, 25 bp, Homo sapien
acgccccgcgcatctgaaggtgaag

SEQ ID NO: 2081162 - DNA, 25 bp, Homo sapien
gaatggttttgaatccatacatgtt

SEQ ID NO: 2081163 - DNA, 25 bp, Homo sapien
tacatgtcacagtcaattggttttg

SEQ ID NO: 2081164 - DNA, 25 bp, Homo sapien
cccctccatgtactataaggagctt

SEQ ID NO: 2081165 - DNA, 25 bp, Homo sapien
tttcctgcaggctttatgagtttca

SEQ ID NO: 2081166 - DNA, 25 bp, Homo sapien
tgtcagatgccaccgaagcggcagt

SEQ ID NO: 2081167 - DNA, 25 bp, Homo sapien
ttcaccaacaaggacatggcagagg

SEQ ID NO: 2081168 - DNA, 25 bp, Homo sapien
ttcaaggggcaaacagagcagtcac

SEQ ID NO: 2081169 - DNA, 25 bp, Homo sapien
tcaaagaccttggaagacgtggcca

SEQ ID NO: 2081170 - DNA, 25 bp, Homo sapien
gaacttgcccttgctctgctgcagg

SEQ ID NO: 2081171 - DNA, 25 bp, Homo sapien
gcaggtgtctcctccgttcatagga

SEQ ID NO: 2081172 - DNA, 25 bp, Homo sapien
gaaaggcccgttctgagcactgtgg

SEQ ID NO: 2081173 - DNA, 25 bp, Homo sapien
gagccgacgtcgctcccatgagtga

SEQ ID NO: 2081174 - DNA, 25 bp, Homo sapien
taaaatcttgtcttgcacggtcaga

SEQ ID NO: 2081175 - DNA, 25 bp, Homo sapien
gatgtcctctgtctattccctggtg

SEQ ID NO: 2081176 - DNA, 25 bp, Homo sapien
tattctccggttaatcacgggcgct

SEQ ID NO: 2081177 - DNA, 25 bp, Homo sapien
gcagcgccgcataaatattctccgg

SEQ ID NO: 2081178 - DNA, 25 bp, Homo sapien
ttttgaaagcaagcaaggcagccat

SEQ ID NO: 2081179 - DNA, 25 bp, Homo sapien
ttcccgtttgttttgaaagcaagca

SEQ ID NO: 2081180 - DNA, 25 bp, Homo sapien
ttgttttgaaagcaagcaaggcagc

SEQ ID NO: 2081181 - DNA, 25 bp, Homo sapien
cccgtttgttttgaaagcaagcaag

SEQ ID NO: 2081182 - DNA, 25 bp, Homo sapien
cttcattcttcgttattttccactc

SEQ ID NO: 2081183 - DNA, 25 bp, Homo sapien
atcaatcaggtcaacctcttcctgt

SEQ ID NO: 2081184 - DNA, 25 bp, Homo sapien
atcaggtcaacctcttcctgtttcc

SEQ ID NO: 2081185 - DNA, 25 bp, Homo sapien
ttccatcaatcaggtcaacctcttc

SEQ ID NO: 2081186 - DNA, 25 bp, Homo sapien
tgtctagggatgactttgggctgca

SEQ ID NO: 2081187 - DNA, 25 bp, Homo sapien
gctgggagtgctggctctttcacac

SEQ ID NO: 2081188 - DNA, 25 bp, Homo sapien
cttgggagttgtctagggatgactt

SEQ ID NO: 2081189 - DNA, 25 bp, Homo sapien
gctcttccagatttggtgtgggtga

SEQ ID NO: 2081190 - DNA, 25 bp, Homo sapien
gagttcagagcaattttttaacgca

SEQ ID NO: 2081191 - DNA, 25 bp, Homo sapien
tcctcttgccgagtgcctctgtttt

SEQ ID NO: 2081192 - DNA, 25 bp, Homo sapien
ttctcgcagaatgaggttgtcctca

SEQ ID NO: 2081193 - DNA, 25 bp, Homo sapien
gaagcaaaatctcctcttgccgagt

SEQ ID NO: 2081194 - DNA, 25 bp, Homo sapien
tgaagaccttggttccagggacact

SEQ ID NO: 2081195 - DNA, 25 bp, Homo sapien
tccctggtatttactccgatcccag

SEQ ID NO: 2081196 - DNA, 25 bp, Homo sapien
cgttccatgtgggagacaccgtcag

SEQ ID NO: 2081197 - DNA, 25 bp, Homo sapien
gaaggtatgattgtgtcttcttcca

SEQ ID NO: 2081198 - DNA, 25 bp, Homo sapien
ctggcatggcttttgaaatgtagca

SEQ ID NO: 2081199 - DNA, 25 bp, Homo sapien
tggcatggcttttgaaatgtagcac

SEQ ID NO: 2081200 - DNA, 25 bp, Homo sapien
tcattcatctggttggatgaaaggc

SEQ ID NO: 2081201 - DNA, 25 bp, Homo sapien
ttgaagaatcctgaagacgaccctg

SEQ ID NO: 2081202 - DNA, 25 bp, Homo sapien
gacgaccctgatggcctttcgcggt

SEQ ID NO: 2081203 - DNA, 25 bp, Homo sapien
ggctcccagcttatgatccatgaag

SEQ ID NO: 2081204 - DNA, 25 bp, Homo sapien
tgatggtcctatccacggacgcctt

SEQ ID NO: 2081205 - DNA, 25 bp, Homo sapien
gagaaacgtccttgccgaataaatg

SEQ ID NO: 2081206 - DNA, 25 bp, Homo sapien
gcgctggccttgcataaatgtctca

SEQ ID NO: 2081207 - DNA, 25 bp, Homo sapien
tgcagtcagtgggaagggactctcc

SEQ ID NO: 2081208 - DNA, 25 bp, Homo sapien
tggagaacgctttcctgactgcggt

SEQ ID NO: 2081209 - DNA, 25 bp, Homo sapien
ttctgtggcccatcttgggatgtgg

SEQ ID NO: 2081210 - DNA, 25 bp, Homo sapien
cagctagtgactcttctgtggccca

SEQ ID NO: 2081211 - DNA, 25 bp, Homo sapien
ccgtttgtcgttggtgtcgtcatca

SEQ ID NO: 2081212 - DNA, 25 bp, Homo sapien
ggagaatcccatagctgcacagctg

SEQ ID NO: 2081213 - DNA, 25 bp, Homo sapien
caatgccattggtaaatcccttcgc

SEQ ID NO: 2081214 - DNA, 25 bp, Homo sapien
cacagctgatttattccgtttgtcg

SEQ ID NO: 2081215 - DNA, 25 bp, Homo sapien
gagctcatcctaagaaacctgaggt

SEQ ID NO: 2081216 - DNA, 25 bp, Homo sapien
ccatcctgtgagtaatcagagctca

SEQ ID NO: 2081217 - DNA, 25 bp, Homo sapien
catttctgccatcgggggtgacact

SEQ ID NO: 2081218 - DNA, 25 bp, Homo sapien
atgaatgaccatctccaggacgcca

SEQ ID NO: 2081219 - DNA, 25 bp, Homo sapien
tatcctcatgctccctgaaaggcac

SEQ ID NO: 2081220 - DNA, 25 bp, Homo sapien
cttggcatccagtgtgcagctccca

SEQ ID NO: 2081221 - DNA, 25 bp, Homo sapien
gtccgggtatcctcatgctccctga

SEQ ID NO: 2081222 - DNA, 25 bp, Homo sapien
tgccttggcatccagtgtgcagctc

SEQ ID NO: 2081223 - DNA, 25 bp, Homo sapien
cattgctcggaaaagcagggatcct

SEQ ID NO: 2081224 - DNA, 25 bp, Homo sapien
ttattacacctagacggcgactcct

SEQ ID NO: 2081225 - DNA, 25 bp, Homo sapien
gcagtctctgcagaacgtctgtctg

SEQ ID NO: 2081226 - DNA, 25 bp, Homo sapien
aaaatagctgcgcttctggtcgctt

SEQ ID NO: 2081227 - DNA, 25 bp, Homo sapien
gctaagactccatcatagataaact

SEQ ID NO: 2081228 - DNA, 25 bp, Homo sapien
tagttagcttcattaagcgtttgcg

SEQ ID NO: 2081229 - DNA, 25 bp, Homo sapien
cgtttgcgtcagtgctaagactcca

SEQ ID NO: 2081230 - DNA, 25 bp, Homo sapien
gcttcattaagcgtttgcgtcagtg

SEQ ID NO: 2081231 - DNA, 25 bp, Homo sapien
tggccggtaaatgaggacttgttcc

SEQ ID NO: 2081232 - DNA, 25 bp, Homo sapien
gaagctctgttccgctggctgtggc

SEQ ID NO: 2081233 - DNA, 25 bp, Homo sapien
aattcctccaagctagccctgctgt

SEQ ID NO: 2081234 - DNA, 25 bp, Homo sapien
tccagtttggcccaattcctccaag

SEQ ID NO: 2081235 - DNA, 25 bp, Homo sapien
cctgcgggctgaagtcttcgtcctc

SEQ ID NO: 2081236 - DNA, 25 bp, Homo sapien
caacgaagcgcccaggtggaaatgc

SEQ ID NO: 2081237 - DNA, 25 bp, Homo sapien
aaaatgtcttgaaaggctgcggcca

SEQ ID NO: 2081238 - DNA, 25 bp, Homo sapien
gtggaaatgcatgtacccgcggcag

SEQ ID NO: 2081239 - DNA, 25 bp, Homo sapien
ggccttcttcacacgcaacgaagcg

SEQ ID NO: 2081240 - DNA, 25 bp, Homo sapien
ctcgtgattgaattggaaatagttc

SEQ ID NO: 2081241 - DNA, 25 bp, Homo sapien
tctgtcttcagtggtgcgtagacat

SEQ ID NO: 2081242 - DNA, 25 bp, Homo sapien
ttcagaataacagagtacaccagtc

SEQ ID NO: 2081243 - DNA, 25 bp, Homo sapien
gcaacaggacaaaggtctgtcttca

SEQ ID NO: 2081244 - DNA, 25 bp, Homo sapien
agccagaacacgcaccccggctttt

SEQ ID NO: 2081245 - DNA, 25 bp, Homo sapien
cacttggttagaatcaaaggaaaag

SEQ ID NO: 2081246 - DNA, 25 bp, Homo sapien
ggcttttgcagggccggctcacttg

SEQ ID NO: 2081247 - DNA, 25 bp, Homo sapien
gcagggccggctcacttggttagaa

SEQ ID NO: 2081248 - DNA, 25 bp, Homo sapien
atgaaaagcatcatctgatctgaaa

SEQ ID NO: 2081249 - DNA, 25 bp, Homo sapien
aagatgaactaaaatctgctctgag

SEQ ID NO: 2081250 - DNA, 25 bp, Homo sapien
tctaaggagtgctttgaaatgaaag

SEQ ID NO: 2081251 - DNA, 25 bp, Homo sapien
catcatctgatctgaaacgcaagtc

SEQ ID NO: 2081252 - DNA, 25 bp, Homo sapien
ctgtggctcatccagtgttctacct

SEQ ID NO: 2081253 - DNA, 25 bp, Homo sapien
cctacgggatgctcccacgtggatc

SEQ ID NO: 2081254 - DNA, 25 bp, Homo sapien
tctgtggctcatccagtgttctacc

SEQ ID NO: 2081255 - DNA, 25 bp, Homo sapien
ctacgggatgctcccacgtggatct

SEQ ID NO: 2081256 - DNA, 25 bp, Homo sapien
caatagtgtgtatcgaaggagagga

SEQ ID NO: 2081257 - DNA, 25 bp, Homo sapien
gatctctagacttggtgtatgcact

SEQ ID NO: 2081258 - DNA, 25 bp, Homo sapien
tctaggaaagtcgtatgaaggcgga

SEQ ID NO: 2081259 - DNA, 25 bp, Homo sapien
gaggcttagactctgttggcactaa

SEQ ID NO: 2081260 - DNA, 25 bp, Homo sapien
atagcgatggccagcacaggatgag

SEQ ID NO: 2081261 - DNA, 25 bp, Homo sapien
aggccatgggaggatcttaatgaca

SEQ ID NO: 2081262 - DNA, 25 bp, Homo sapien
ccatgggaggatcttaatgacacag

SEQ ID NO: 2081263 - DNA, 25 bp, Homo sapien
cttactggacgcatagcgatggcca

SEQ ID NO: 2081264 - DNA, 25 bp, Homo sapien
tagctcgagacaccccagttattgg

SEQ ID NO: 2081265 - DNA, 25 bp, Homo sapien
catgatgtgtccactagctcgagac

SEQ ID NO: 2081266 - DNA, 25 bp, Homo sapien
ccaacagtagggaggactgcggcga

SEQ ID NO: 2081267 - DNA, 25 bp, Homo sapien
gtagggaggactgcggcgagggcag

SEQ ID NO: 2081268 - DNA, 25 bp, Homo sapien
cctgaatatctcagcaaggcattaa

SEQ ID NO: 2081269 - DNA, 25 bp, Homo sapien
tcttcgaagggtaatctggatgctg

SEQ ID NO: 2081270 - DNA, 25 bp, Homo sapien
tgaggcagcccgagcctgaatatct

SEQ ID NO: 2081271 - DNA, 25 bp, Homo sapien
gaaccagctcctatgcgttgagtga

SEQ ID NO: 2081272 - DNA, 25 bp, Homo sapien
tgctttagctaggactttcaaggac

SEQ ID NO: 2081273 - DNA, 25 bp, Homo sapien
gactgtgttgaataacatagtgctg

SEQ ID NO: 2081274 - DNA, 25 bp, Homo sapien
ttcatatcatccacaaacgaggata

SEQ ID NO: 2081275 - DNA, 25 bp, Homo sapien
aacatagtgatgaaagttggcatcc

SEQ ID NO: 2081276 - DNA, 25 bp, Homo sapien
tctggagttttatcagcgtccttct

SEQ ID NO: 2081277 - DNA, 25 bp, Homo sapien
gagaaatgtgtggagtagacgtgga

SEQ ID NO: 2081278 - DNA, 25 bp, Homo sapien
atctggagttttatcagcgtccttc

SEQ ID NO: 2081279 - DNA, 25 bp, Homo sapien
aatgtgtggagtagacgtggatgag

SEQ ID NO: 2081280 - DNA, 25 bp, Homo sapien
catgatgaagagctcgaggaaacct

SEQ ID NO: 2081281 - DNA, 25 bp, Homo sapien
ggtcaactcaccaaagctttcagct

SEQ ID NO: 2081282 - DNA, 25 bp, Homo sapien
gattaagatcgagggcgacatcgca

SEQ ID NO: 2081283 - DNA, 25 bp, Homo sapien
tagactgtgcaaggcggattaagat

SEQ ID NO: 2081284 - DNA, 25 bp, Homo sapien
attagagctgttttcataggagaga

SEQ ID NO: 2081285 - DNA, 25 bp, Homo sapien
tgattagagctgttttcataggaga

SEQ ID NO: 2081286 - DNA, 25 bp, Homo sapien
agtgattagagctgttttcatagga

SEQ ID NO: 2081287 - DNA, 25 bp, Homo sapien
gattagagctgttttcataggagag

SEQ ID NO: 2081288 - DNA, 25 bp, Homo sapien
ccccaccccctgacaggcccttgtg

SEQ ID NO: 2081289 - DNA, 25 bp, Homo sapien
cccaccccctgacaggcccttgtgt

SEQ ID NO: 2081290 - DNA, 25 bp, Homo sapien
tgcaataaacgtatgagtgcatgtg

SEQ ID NO: 2081291 - DNA, 25 bp, Homo sapien
agtgctgcaataaacgtatgagtgc

SEQ ID NO: 2081292 - DNA, 25 bp, Homo sapien
taaacggcttgggaggaacagcatt

SEQ ID NO: 2081293 - DNA, 25 bp, Homo sapien
aacggcttgggaggaacagcatttc

SEQ ID NO: 2081294 - DNA, 25 bp, Homo sapien
tgtaaacggcttgggaggaacagca

SEQ ID NO: 2081295 - DNA, 25 bp, Homo sapien
gtgtaaacggcttgggaggaacagc

SEQ ID NO: 2081296 - DNA, 25 bp, Homo sapien
catgctgcgcgtctgtgggctcttg

SEQ ID NO: 2081297 - DNA, 25 bp, Homo sapien
caggtgattgactccgtgcagcgat

SEQ ID NO: 2081298 - DNA, 25 bp, Homo sapien
tctgtgggttccacggcagccagtt

SEQ ID NO: 2081299 - DNA, 25 bp, Homo sapien
gaggatgatgccgagaatctctgtt

SEQ ID NO: 2081300 - DNA, 25 bp, Homo sapien
ccatgtctaggtatagattaggatc

SEQ ID NO: 2081301 - DNA, 25 bp, Homo sapien
ggatctttgtataaattccaggctc

SEQ ID NO: 2081302 - DNA, 25 bp, Homo sapien
ctcagacatggtcttttcattacaa

SEQ ID NO: 2081303 - DNA, 25 bp, Homo sapien
tttagctagaataccagtgaattcc

SEQ ID NO: 2081304 - DNA, 25 bp, Homo sapien
tgttgatgtggctgtttggaaaatc

SEQ ID NO: 2081305 - DNA, 25 bp, Homo sapien
ttgatgtggctgtttggaaaatcat

SEQ ID NO: 2081306 - DNA, 25 bp, Homo sapien
gctttggtatcatgttgatgtggct

SEQ ID NO: 2081307 - DNA, 25 bp, Homo sapien
aacaattgctttggtatcatgttga

SEQ ID NO: 2081308 - DNA, 25 bp, Homo sapien
cagacaaaacgctcaggattccaga

SEQ ID NO: 2081309 - DNA, 25 bp, Homo sapien
cagagtgaaaatccacgaggcggag

SEQ ID NO: 2081310 - DNA, 25 bp, Homo sapien
ttgtagacgtctggggcacactggc

SEQ ID NO: 2081311 - DNA, 25 bp, Homo sapien
tctgcatccacagctggattctcca

SEQ ID NO: 2081312 - DNA, 25 bp, Homo sapien
aataatcagagatgcacaagacaga

SEQ ID NO: 2081313 - DNA, 25 bp, Homo sapien
tttgcagccgcaatgtttaggagta

SEQ ID NO: 2081314 - DNA, 25 bp, Homo sapien
tcataaccaaatagccgtttcggga

SEQ ID NO: 2081315 - DNA, 25 bp, Homo sapien
tgaggtagggcgaattttaatttgc

SEQ ID NO: 2081316 - DNA, 25 bp, Homo sapien
tgttggcacaccaacatgcatgctg

SEQ ID NO: 2081317 - DNA, 25 bp, Homo sapien
tgctcccaagaagtctgcctcggaa

SEQ ID NO: 2081318 - DNA, 25 bp, Homo sapien
tggtggagggttgttccacactgtt

SEQ ID NO: 2081319 - DNA, 25 bp, Homo sapien
tcccaagaagtctgcctcggaagca

SEQ ID NO: 2081320 - DNA, 25 bp, Homo sapien
tgatagcgtcctccaaatatcccac

SEQ ID NO: 2081321 - DNA, 25 bp, Homo sapien
aatagcatgtaggtgaacttatccg

SEQ ID NO: 2081322 - DNA, 25 bp, Homo sapien
ggtagtacctgtccatgaaacgtct

SEQ ID NO: 2081323 - DNA, 25 bp, Homo sapien
gaaacgtctctgtagtagctggaac

SEQ ID NO: 2081324 - DNA, 25 bp, Homo sapien
catcagaggcggaggagagagacag

SEQ ID NO: 2081325 - DNA, 25 bp, Homo sapien
cagaggcggaggagagagacagcat

SEQ ID NO: 2081326 - DNA, 25 bp, Homo sapien
ctgcatcagaggcggaggagagaga

SEQ ID NO: 2081327 - DNA, 25 bp, Homo sapien
gcatcagaggcggaggagagagaca

SEQ ID NO: 2081328 - DNA, 25 bp, Homo sapien
ctaaggctcctagcccgcttgcgga

SEQ ID NO: 2081329 - DNA, 25 bp, Homo sapien
aggccagcagccctaaggctcctag

SEQ ID NO: 2081330 - DNA, 25 bp, Homo sapien
agagtaggccagcagccctaaggct

SEQ ID NO: 2081331 - DNA, 25 bp, Homo sapien
cctaaggctcctagcccgcttgcgg

SEQ ID NO: 2081332 - DNA, 25 bp, Homo sapien
cagtggggaggaggcctcgcttccc

SEQ ID NO: 2081333 - DNA, 25 bp, Homo sapien
gaggaggcctcgcttcccaggccat

SEQ ID NO: 2081334 - DNA, 25 bp, Homo sapien
ggggaggaggcctcgcttcccaggc

SEQ ID NO: 2081335 - DNA, 25 bp, Homo sapien
gtggggaggaggcctcgcttcccag

SEQ ID NO: 2081336 - DNA, 25 bp, Homo sapien
tgcggctcccatgtcagttgaatac

SEQ ID NO: 2081337 - DNA, 25 bp, Homo sapien
ggtgcacccctattagactttcaga

SEQ ID NO: 2081338 - DNA, 25 bp, Homo sapien
tttcagaaagcacccgccaagtaag

SEQ ID NO: 2081339 - DNA, 25 bp, Homo sapien
cagcaagactgaatatgcggctccc

SEQ ID NO: 2081340 - DNA, 25 bp, Homo sapien
tcttgcagaaatctcggtctccctt

SEQ ID NO: 2081341 - DNA, 25 bp, Homo sapien
tcaggaagcggctgtgaacccgctg

SEQ ID NO: 2081342 - DNA, 25 bp, Homo sapien
taataccggacatttacggccctga

SEQ ID NO: 2081343 - DNA, 25 bp, Homo sapien
agcagtgcctcacacgagtgcctga

SEQ ID NO: 2081344 - DNA, 25 bp, Homo sapien
ggtaccctcctagatccacggagtc

SEQ ID NO: 2081345 - DNA, 25 bp, Homo sapien
gtctctgcccaggtaccctcctaga

SEQ ID NO: 2081346 - DNA, 25 bp, Homo sapien
cagggccttgttacaccaagtttag

SEQ ID NO: 2081347 - DNA, 25 bp, Homo sapien
actgaggccttggcgcccaggccat

SEQ ID NO: 2081348 - DNA, 25 bp, Homo sapien
tccctgagactagcgagcatgtggc

SEQ ID NO: 2081349 - DNA, 25 bp, Homo sapien
tgtagaggcatttccaaggacagcg

SEQ ID NO: 2081350 - DNA, 25 bp, Homo sapien
cacggcaggatctagcaaggcgctt

SEQ ID NO: 2081351 - DNA, 25 bp, Homo sapien
tatacccgcgtgtatagactccggg

SEQ ID NO: 2081352 - DNA, 25 bp, Homo sapien
ccctccagactgcccaagacagagg

SEQ ID NO: 2081353 - DNA, 25 bp, Homo sapien
ctggtggtggagaacccggcagcat

SEQ ID NO: 2081354 - DNA, 25 bp, Homo sapien
tggacttgcgaaggcctgaatgagc

SEQ ID NO: 2081355 - DNA, 25 bp, Homo sapien
tctgctgtccggaggccgtggactt

SEQ ID NO: 2081356 - DNA, 25 bp, Homo sapien
ggaaaatagggagagcctgatggga

SEQ ID NO: 2081357 - DNA, 25 bp, Homo sapien
cagtgctgcaagcttgtgccttttc

SEQ ID NO: 2081358 - DNA, 25 bp, Homo sapien
accgcccagtgctgcaagcttgtgc

SEQ ID NO: 2081359 - DNA, 25 bp, Homo sapien
gcctgatgggataggaccgcccagt

SEQ ID NO: 2081360 - DNA, 25 bp, Homo sapien
catgcatgggtgttcccagacttgc

SEQ ID NO: 2081361 - DNA, 25 bp, Homo sapien
acatgcatgggtgttcccagacttg

SEQ ID NO: 2081362 - DNA, 25 bp, Homo sapien
ttcccagacttgcaggcaatcggcc

SEQ ID NO: 2081363 - DNA, 25 bp, Homo sapien
cccagacttgcaggcaatcggccac

SEQ ID NO: 2081364 - DNA, 25 bp, Homo sapien
cagcaagaacgtggcaaaggaatcc

SEQ ID NO: 2081365 - DNA, 25 bp, Homo sapien
ttgagaggcagcaagaacgtggcaa

SEQ ID NO: 2081366 - DNA, 25 bp, Homo sapien
aagcagttctattttgagaggcagc

SEQ ID NO: 2081367 - DNA, 25 bp, Homo sapien
ttaaagcagttctattttgagaggc

SEQ ID NO: 2081368 - DNA, 25 bp, Homo sapien
gaattgttttgaggcagcagcaaac

SEQ ID NO: 2081369 - DNA, 25 bp, Homo sapien
tttgcagaattgttttgaggcagca

SEQ ID NO: 2081370 - DNA, 25 bp, Homo sapien
cagaaaagccttttatccgccttca

SEQ ID NO: 2081371 - DNA, 25 bp, Homo sapien
gccttcatcccggagatgaaatgaa

SEQ ID NO: 2081372 - DNA, 25 bp, Homo sapien
ctgtggaggaatacgctgcgtggcc

SEQ ID NO: 2081373 - DNA, 25 bp, Homo sapien
acccacatcttcctgacgcttaaat

SEQ ID NO: 2081374 - DNA, 25 bp, Homo sapien
cagctcctcggaggcatcggatcca

SEQ ID NO: 2081375 - DNA, 25 bp, Homo sapien
ggcatcggatccaaactgctggcag

SEQ ID NO: 2081376 - DNA, 25 bp, Homo sapien
atgttctcgaaaggccagctcctcg

SEQ ID NO: 2081377 - DNA, 25 bp, Homo sapien
caggggtcacatgggtcactgaagt

SEQ ID NO: 2081378 - DNA, 25 bp, Homo sapien
gggtgactgctccacaccaaggatg

SEQ ID NO: 2081379 - DNA, 25 bp, Homo sapien
acatgggtcactgaagtgggctgcc

SEQ ID NO: 2081380 - DNA, 25 bp, Homo sapien
gtcacatgggtcactgaagtgggct

SEQ ID NO: 2081381 - DNA, 25 bp, Homo sapien
gcacggtgataggtgcgtgtcacct

SEQ ID NO: 2081382 - DNA, 25 bp, Homo sapien
gcgtgtcaccttctgcaggaccaca

SEQ ID NO: 2081383 - DNA, 25 bp, Homo sapien
agccaagggcttgtgcacggtgata

SEQ ID NO: 2081384 - DNA, 25 bp, Homo sapien
cctccataggcaccatagccaaggg

SEQ ID NO: 2081385 - DNA, 25 bp, Homo sapien
tcaaagagggccttactgcccgaca

SEQ ID NO: 2081386 - DNA, 25 bp, Homo sapien
gacaactggtcaacctcattaaatg

SEQ ID NO: 2081387 - DNA, 25 bp, Homo sapien
cctcattaaatgacccataacacaa

SEQ ID NO: 2081388 - DNA, 25 bp, Homo sapien
acccataacacaaaccctccaggag

SEQ ID NO: 2081389 - DNA, 25 bp, Homo sapien
gatgtgtccttgcttcctgacgggc

SEQ ID NO: 2081390 - DNA, 25 bp, Homo sapien
cagtgcagcactgtctttccaggtc

SEQ ID NO: 2081391 - DNA, 25 bp, Homo sapien
caatgtctttgtcgaaggctgtggc

SEQ ID NO: 2081392 - DNA, 25 bp, Homo sapien
tgtccgtgctggaagtctcccgtgg

SEQ ID NO: 2081393 - DNA, 25 bp, Homo sapien
tgggactagcccagcagtgtgacgc

SEQ ID NO: 2081394 - DNA, 25 bp, Homo sapien
gcagtgtgacgcttgcggcaaaact

SEQ ID NO: 2081395 - DNA, 25 bp, Homo sapien
ggactagcccagcagtgtgacgctt

SEQ ID NO: 2081396 - DNA, 25 bp, Homo sapien
aggtggtgggactagcccagcagtg

SEQ ID NO: 2081397 - DNA, 25 bp, Homo sapien
tgcagaatcgcctgggtagcaccaa

SEQ ID NO: 2081398 - DNA, 25 bp, Homo sapien
gaaactgggctgaagctcctgaacg

SEQ ID NO: 2081399 - DNA, 25 bp, Homo sapien
gactcgagcttccaatggcaggagt

SEQ ID NO: 2081400 - DNA, 25 bp, Homo sapien
tgaacgttgttcctgcccgggagga

SEQ ID NO: 2081401 - DNA, 25 bp, Homo sapien
ggctgagccttccacttgcaacaca

SEQ ID NO: 2081402 - DNA, 25 bp, Homo sapien
ttagggccagtcttgccagctgggc

SEQ ID NO: 2081403 - DNA, 25 bp, Homo sapien
cagttgccaaggagaccctgttagc

SEQ ID NO: 2081404 - DNA, 25 bp, Homo sapien
taaaggtctttacagagcaacaccc

SEQ ID NO: 2081405 - DNA, 25 bp, Homo sapien
ccaaggagaccctgttagctgtggg

SEQ ID NO: 2081406 - DNA, 25 bp, Homo sapien
attcagaacctgacagtatggagga

SEQ ID NO: 2081407 - DNA, 25 bp, Homo sapien
caaatgtagtccattcagaacctga

SEQ ID NO: 2081408 - DNA, 25 bp, Homo sapien
tgagctaacctcaaatgtagtccat

SEQ ID NO: 2081409 - DNA, 25 bp, Homo sapien
ttacagttgagctaacctcaaatgt

SEQ ID NO: 2081410 - DNA, 25 bp, Homo sapien
gccagaaggtcggaaacaggactcc

SEQ ID NO: 2081411 - DNA, 25 bp, Homo sapien
tcaagccagaaggtcggaaacagga

SEQ ID NO: 2081412 - DNA, 25 bp, Homo sapien
aagccagaaggtcggaaacaggact

SEQ ID NO: 2081413 - DNA, 25 bp, Homo sapien
caagccagaaggtcggaaacaggac

SEQ ID NO: 2081414 - DNA, 25 bp, Homo sapien
gatggtggcagagagccccgcaccc

SEQ ID NO: 2081415 - DNA, 25 bp, Homo sapien
ccgacattggtgatggtggcagaga

SEQ ID NO: 2081416 - DNA, 25 bp, Homo sapien
ccgcacccctggaggtgtttgtagt

SEQ ID NO: 2081417 - DNA, 25 bp, Homo sapien
agccccgcacccctggaggtgtttg

SEQ ID NO: 2081418 - DNA, 25 bp, Homo sapien
gaaatttgtcagtcccgaaatgcag

SEQ ID NO: 2081419 - DNA, 25 bp, Homo sapien
tatttggaattacaaaggctacaga

SEQ ID NO: 2081420 - DNA, 25 bp, Homo sapien
tgtcagtcccgaaatgcagcaggtc

SEQ ID NO: 2081421 - DNA, 25 bp, Homo sapien
tttgcctccagggaaatttgtcagt

SEQ ID NO: 2081422 - DNA, 25 bp, Homo sapien
gagggctatcttctctttcgaggtg

SEQ ID NO: 2081423 - DNA, 25 bp, Homo sapien
gggacagttctgtgctatcagtgat

SEQ ID NO: 2081424 - DNA, 25 bp, Homo sapien
tctctttcgaggtggctgccctctc

SEQ ID NO: 2081425 - DNA, 25 bp, Homo sapien
tctgtaccctatctccccggagagg

SEQ ID NO: 2081426 - DNA, 25 bp, Homo sapien
gctgtgatcaaatgagcagacagga

SEQ ID NO: 2081427 - DNA, 25 bp, Homo sapien
ggctccagggccattgacttctaac

SEQ ID NO: 2081428 - DNA, 25 bp, Homo sapien
tttattatagcccagtgcgctctca

SEQ ID NO: 2081429 - DNA, 25 bp, Homo sapien
tgaactctagaaatggatgggctcc

SEQ ID NO: 2081430 - DNA, 25 bp, Homo sapien
taaaattggactaacaccgctcgta

SEQ ID NO: 2081431 - DNA, 25 bp, Homo sapien
gagataacgccactgttgtcctgta

SEQ ID NO: 2081432 - DNA, 25 bp, Homo sapien
aatgaagatgtgttgcctctcccca

SEQ ID NO: 2081433 - DNA, 25 bp, Homo sapien
tgctgatccgtgtaagaagtgtgct

SEQ ID NO: 2081434 - DNA, 25 bp, Homo sapien
aggctggggtgtagtggcgcgtgat

SEQ ID NO: 2081435 - DNA, 25 bp, Homo sapien
ctggggtgtagtggcgcgtgatctt

SEQ ID NO: 2081436 - DNA, 25 bp, Homo sapien
ggctcactgcaacttctgcctccca

SEQ ID NO: 2081437 - DNA, 25 bp, Homo sapien
aggttcaagcaattctgctgcctca

SEQ ID NO: 2081438 - DNA, 25 bp, Homo sapien
cacttcatgctggtgacgaggtcca

SEQ ID NO: 2081439 - DNA, 25 bp, Homo sapien
tacactcgggcttccagatcatgaa

SEQ ID NO: 2081440 - DNA, 25 bp, Homo sapien
tcagagacagctagaggagcaggca

SEQ ID NO: 2081441 - DNA, 25 bp, Homo sapien
aaaccctggcttacacactcgtgag

SEQ ID NO: 2081442 - DNA, 25 bp, Homo sapien
aaatagtaatctcctgggtagccgg

SEQ ID NO: 2081443 - DNA, 25 bp, Homo sapien
ggcatgcgcaggaccctctttaagg

SEQ ID NO: 2081444 - DNA, 25 bp, Homo sapien
gctcctacatcttccaccgggtttg

SEQ ID NO: 2081445 - DNA, 25 bp, Homo sapien
tgttttctctgttggaggcccgccc

SEQ ID NO: 2081446 - DNA, 25 bp, Homo sapien
aagagcaacaggtcagcccgatcac

SEQ ID NO: 2081447 - DNA, 25 bp, Homo sapien
cacactcctccaggtatctttgagt

SEQ ID NO: 2081448 - DNA, 25 bp, Homo sapien
ctttgagtctcagggcggtggttgc

SEQ ID NO: 2081449 - DNA, 25 bp, Homo sapien
agcaacaggtcagcccgatcacact

SEQ ID NO: 2081450 - DNA, 25 bp, Homo sapien
ccctcgtatcgtagtatttgctgcc

SEQ ID NO: 2081451 - DNA, 25 bp, Homo sapien
cattgtatcccattcccactgcatg

SEQ ID NO: 2081452 - DNA, 25 bp, Homo sapien
ccacaaaacctgcaagtttcttaag

SEQ ID NO: 2081453 - DNA, 25 bp, Homo sapien
cactgcatggcattccacggtatgt

SEQ ID NO: 2081454 - DNA, 25 bp, Homo sapien
caggacatcaatatctaaaagtcat

SEQ ID NO: 2081455 - DNA, 25 bp, Homo sapien
aggacatcaatatctaaaagtcatc

SEQ ID NO: 2081456 - DNA, 25 bp, Homo sapien
caaataccggtccagcgcagcggct

SEQ ID NO: 2081457 - DNA, 25 bp, Homo sapien
gaaaaccaaataccggtccagcgca

SEQ ID NO: 2081458 - DNA, 25 bp, Homo sapien
aaccaaataccggtccagcgcagcg

SEQ ID NO: 2081459 - DNA, 25 bp, Homo sapien
accaaataccggtccagcgcagcgg

SEQ ID NO: 2081460 - DNA, 25 bp, Homo sapien
cctgcactgggctatggccatcctt

SEQ ID NO: 2081461 - DNA, 25 bp, Homo sapien
gcactgggctatggccatccttgaa

SEQ ID NO: 2081462 - DNA, 25 bp, Homo sapien
aaactggaagcaaatctgctcctgc

SEQ ID NO: 2081463 - DNA, 25 bp, Homo sapien
gcaaatctgctcctgcactgggcta

SEQ ID NO: 2081464 - DNA, 25 bp, Homo sapien
catggggtggtgccggctgtccagt

SEQ ID NO: 2081465 - DNA, 25 bp, Homo sapien
tcatggggtggtgccggctgtccag

SEQ ID NO: 2081466 - DNA, 25 bp, Homo sapien
gacaacctagaattccatactcaga

SEQ ID NO: 2081467 - DNA, 25 bp, Homo sapien
tgaaagaaacgagctgacaacctag

SEQ ID NO: 2081468 - DNA, 25 bp, Homo sapien
tgatcagcagacctcctctaaagga

SEQ ID NO: 2081469 - DNA, 25 bp, Homo sapien
gacattgataagtcaagaacgcatg

SEQ ID NO: 2081470 - DNA, 25 bp, Homo sapien
actgattggaggatgaccaggtact

SEQ ID NO: 2081471 - DNA, 25 bp, Homo sapien
catagagagaagactcgcatggctg

SEQ ID NO: 2081472 - DNA, 25 bp, Homo sapien
cgcatggctgtagacaaaactgatt

SEQ ID NO: 2081473 - DNA, 25 bp, Homo sapien
tgaggcaaagttgacaatagcaagc

SEQ ID NO: 2081474 - DNA, 25 bp, Homo sapien
ggtttgggctccgaggcccttcgca

SEQ ID NO: 2081475 - DNA, 25 bp, Homo sapien
gcttctggccatgtcgtcttcccag

SEQ ID NO: 2081476 - DNA, 25 bp, Homo sapien
tttgggctccgaggcccttcgcagc

SEQ ID NO: 2081477 - DNA, 25 bp, Homo sapien
ccagtcccagatggcggttccgggt

SEQ ID NO: 2081478 - DNA, 25 bp, Homo sapien
agacgcccgggccacggaggcgcgg

SEQ ID NO: 2081479 - DNA, 25 bp, Homo sapien
tccgagccatgctgcggtccgaggt

SEQ ID NO: 2081480 - DNA, 25 bp, Homo sapien
gagttcgcggacacgcacgagacgc

SEQ ID NO: 2081481 - DNA, 25 bp, Homo sapien
ggtccgaggtgacgcgcgcacgcga

SEQ ID NO: 2081482 - DNA, 25 bp, Homo sapien
aagcgcagggtcgtgcacacagtgt

SEQ ID NO: 2081483 - DNA, 25 bp, Homo sapien
cacagtaggcgccagcgttgtccgg

SEQ ID NO: 2081484 - DNA, 25 bp, Homo sapien
acagtgtgctccagtgttatctggg

SEQ ID NO: 2081485 - DNA, 25 bp, Homo sapien
ggtcgtgcacacagtaggcgccagc

SEQ ID NO: 2081486 - DNA, 25 bp, Homo sapien
ttttaatgaaagcttgtatataaga

SEQ ID NO: 2081487 - DNA, 25 bp, Homo sapien
tgtatataagattactttattcctg

SEQ ID NO: 2081488 - DNA, 25 bp, Homo sapien
taagattactttattcctgcatctg

SEQ ID NO: 2081489 - DNA, 25 bp, Homo sapien
ttactttattcctgcatctgctcaa

SEQ ID NO: 2081490 - DNA, 25 bp, Homo sapien
ggctttccgttcaaggagcattttg

SEQ ID NO: 2081491 - DNA, 25 bp, Homo sapien
tccgttcaaggagcattttgcggtc

SEQ ID NO: 2081492 - DNA, 25 bp, Homo sapien
tttccgttcaaggagcattttgcgg

SEQ ID NO: 2081493 - DNA, 25 bp, Homo sapien
ccgttcaaggagcattttgcggtct

SEQ ID NO: 2081494 - DNA, 25 bp, Homo sapien
gaatgcctgtgtgcacagttggggt

SEQ ID NO: 2081495 - DNA, 25 bp, Homo sapien
ctgtgtgcacagttggggtgaatgc

SEQ ID NO: 2081496 - DNA, 25 bp, Homo sapien
tgcctgtgtgcacagttggggtgaa

SEQ ID NO: 2081497 - DNA, 25 bp, Homo sapien
tgaatgcctgtgtgcacagttgggg

SEQ ID NO: 2081498 - DNA, 25 bp, Homo sapien
acattgtacttgtctcttagctctt

SEQ ID NO: 2081499 - DNA, 25 bp, Homo sapien
gaacattgtacttgtctcttagctc

SEQ ID NO: 2081500 - DNA, 25 bp, Homo sapien
cgaacattgtacttgtctcttagct

SEQ ID NO: 2081501 - DNA, 25 bp, Homo sapien
tcgaacattgtacttgtctcttagc

SEQ ID NO: 2081502 - DNA, 25 bp, Homo sapien
gagaactacatatacgccgcttccg

SEQ ID NO: 2081503 - DNA, 25 bp, Homo sapien
atatacgccgcttccggttctgtac

SEQ ID NO: 2081504 - DNA, 25 bp, Homo sapien
acatatacgccgcttccggttctgt

SEQ ID NO: 2081505 - DNA, 25 bp, Homo sapien
gaactacatatacgccgcttccggt

SEQ ID NO: 2081506 - DNA, 25 bp, Homo sapien
gaaatttcagggattgcagtcgtga

SEQ ID NO: 2081507 - DNA, 25 bp, Homo sapien
ttcagggattgcagtcgtgatggct

SEQ ID NO: 2081508 - DNA, 25 bp, Homo sapien
agtcgtggaaatttcagggattgca

SEQ ID NO: 2081509 - DNA, 25 bp, Homo sapien
ctgtggaaagtcgtggaaatttcag

SEQ ID NO: 2081510 - DNA, 25 bp, Homo sapien
tcatttccatttgagtacccactta

SEQ ID NO: 2081511 - DNA, 25 bp, Homo sapien
cccaacttctcagtgcaggtgcttt

SEQ ID NO: 2081512 - DNA, 25 bp, Homo sapien
tgagtacccacttatgagtaaatac

SEQ ID NO: 2081513 - DNA, 25 bp, Homo sapien
tacaggttagggatgaattttccat

SEQ ID NO: 2081514 - DNA, 25 bp, Homo sapien
tagcagaataccttccattatggga

SEQ ID NO: 2081515 - DNA, 25 bp, Homo sapien
tatgcaccagtattattttctcagg

SEQ ID NO: 2081516 - DNA, 25 bp, Homo sapien
ttagacctagataagcaaactctgt

SEQ ID NO: 2081517 - DNA, 25 bp, Homo sapien
tcaggcttgactttcagcacaaatg

SEQ ID NO: 2081518 - DNA, 25 bp, Homo sapien
ccatctacaggggtcaccagcacag

SEQ ID NO: 2081519 - DNA, 25 bp, Homo sapien
ctctaaggctacacccatctacagg

SEQ ID NO: 2081520 - DNA, 25 bp, Homo sapien
gtgagctttaccgttttccattctg

SEQ ID NO: 2081521 - DNA, 25 bp, Homo sapien
tcaccagcacagtgagctttaccgt

SEQ ID NO: 2081522 - DNA, 25 bp, Homo sapien
agatgcactgttctcagtgtcactg

SEQ ID NO: 2081523 - DNA, 25 bp, Homo sapien
cataaggcagtactgtttgtgcatc

SEQ ID NO: 2081524 - DNA, 25 bp, Homo sapien
actgtgtaaccacataaggcagtac

SEQ ID NO: 2081525 - DNA, 25 bp, Homo sapien
tgggctgcatcggagatgcactgtt

SEQ ID NO: 2081526 - DNA, 25 bp, Homo sapien
gtgtcttaggcttggctgtaatctg

SEQ ID NO: 2081527 - DNA, 25 bp, Homo sapien
tggctgtaatctgcttgataaaagg

SEQ ID NO: 2081528 - DNA, 25 bp, Homo sapien
tccttcatagtctttgagcacatgt

SEQ ID NO: 2081529 - DNA, 25 bp, Homo sapien
ggcttggctgtaatctgcttgataa

SEQ ID NO: 2081530 - DNA, 25 bp, Homo sapien
acatggcttcatcgttactctcgtt

SEQ ID NO: 2081531 - DNA, 25 bp, Homo sapien
actgacatgattgccgctgcaccgg

SEQ ID NO: 2081532 - DNA, 25 bp, Homo sapien
aagcttgagctagccggtccaacag

SEQ ID NO: 2081533 - DNA, 25 bp, Homo sapien
tactctcgttttcaaagatagggtc

SEQ ID NO: 2081534 - DNA, 25 bp, Homo sapien
agggccaccttatttctgcagaagt

SEQ ID NO: 2081535 - DNA, 25 bp, Homo sapien
aagtttctgagcctcctcctatgga

SEQ ID NO: 2081536 - DNA, 25 bp, Homo sapien
catacatgcttggttacgccataca

SEQ ID NO: 2081537 - DNA, 25 bp, Homo sapien
ggaagtaatcagcattgtctttgca

SEQ ID NO: 2081538 - DNA, 25 bp, Homo sapien
gatactggacttcttaccaatccgg

SEQ ID NO: 2081539 - DNA, 25 bp, Homo sapien
cagtgtgtaaacctggctgtagccg

SEQ ID NO: 2081540 - DNA, 25 bp, Homo sapien
ccttaacaggtgaatctagagccta

SEQ ID NO: 2081541 - DNA, 25 bp, Homo sapien
tcatctcaggacatctctaaaaggg

SEQ ID NO: 2081542 - DNA, 25 bp, Homo sapien
acagagcttttcgtgggccagatgc

SEQ ID NO: 2081543 - DNA, 25 bp, Homo sapien
aacatgtcctgtttggtggctggcc

SEQ ID NO: 2081544 - DNA, 25 bp, Homo sapien
gatgcccacatattcctagcagaga

SEQ ID NO: 2081545 - DNA, 25 bp, Homo sapien
gaaaagatcgtacgccaaaggccac

SEQ ID NO: 2081546 - DNA, 25 bp, Homo sapien
agttggtaattgagagagtcatcat

SEQ ID NO: 2081547 - DNA, 25 bp, Homo sapien
gttggtaattgagagagtcatcatc

SEQ ID NO: 2081548 - DNA, 25 bp, Homo sapien
aagttggtaattgagagagtcatca

SEQ ID NO: 2081549 - DNA, 25 bp, Homo sapien
gctggataaacaagccatttcccgg

SEQ ID NO: 2081550 - DNA, 25 bp, Homo sapien
tgaagtttgcttgccacggtacaga

SEQ ID NO: 2081551 - DNA, 25 bp, Homo sapien
tcactgttttatggatgccctcgag

SEQ ID NO: 2081552 - DNA, 25 bp, Homo sapien
cctggccaccacgttggaaggtaga

SEQ ID NO: 2081553 - DNA, 25 bp, Homo sapien
tggaaggcctatcaatcacaggtgc

SEQ ID NO: 2081554 - DNA, 25 bp, Homo sapien
tcacaggtgcgctaaaatcaaaagg

SEQ ID NO: 2081555 - DNA, 25 bp, Homo sapien
taagaagacgcgttttggcatcacg

SEQ ID NO: 2081556 - DNA, 25 bp, Homo sapien
tattaagcccacacgaaacattcag

SEQ ID NO: 2081557 - DNA, 25 bp, Homo sapien
agtaattcgggagcaggtgcacgcc

SEQ ID NO: 2081558 - DNA, 25 bp, Homo sapien
tactcgctaccacgcgtcttctggg

SEQ ID NO: 2081559 - DNA, 25 bp, Homo sapien
tcagcccgtgtgtctcggtgagtaa

SEQ ID NO: 2081560 - DNA, 25 bp, Homo sapien
taagaaggatatggtcagaagagct

SEQ ID NO: 2081561 - DNA, 25 bp, Homo sapien
aagaccctgtttcctatgtgaggcc

SEQ ID NO: 2081562 - DNA, 25 bp, Homo sapien
aaacgaggttgttcatagaggctgc

SEQ ID NO: 2081563 - DNA, 25 bp, Homo sapien
gctctgagtgcgcaagtcttcctgg

SEQ ID NO: 2081564 - DNA, 25 bp, Homo sapien
tgcgaggctgtctagaggactccta

SEQ ID NO: 2081565 - DNA, 25 bp, Homo sapien
gcgaattcagctaattggggtgtgt

SEQ ID NO: 2081566 - DNA, 25 bp, Homo sapien
ccacacgcgaattcagctaattggg

SEQ ID NO: 2081567 - DNA, 25 bp, Homo sapien
ctgccacacgcgaattcagctaatt

SEQ ID NO: 2081568 - DNA, 25 bp, Homo sapien
cgaattcagctaattggggtgtgtg

SEQ ID NO: 2081569 - DNA, 25 bp, Homo sapien
cagccacggcgaaaagaaagtccaa

SEQ ID NO: 2081570 - DNA, 25 bp, Homo sapien
tgaccagcaaaagcgcaagggtgcc

SEQ ID NO: 2081571 - DNA, 25 bp, Homo sapien
tgaggacaggattccggaaccaggt

SEQ ID NO: 2081572 - DNA, 25 bp, Homo sapien
aaattgccggtaggctgccgtggcc

SEQ ID NO: 2081573 - DNA, 25 bp, Homo sapien
catgggtgatccagagcgactatct

SEQ ID NO: 2081574 - DNA, 25 bp, Homo sapien
cagcgtctagccatgggtgatccag

SEQ ID NO: 2081575 - DNA, 25 bp, Homo sapien
tcagcgtctagccatgggtgatcca

SEQ ID NO: 2081576 - DNA, 25 bp, Homo sapien
gtaacgcagctaacagaccaaggtg

SEQ ID NO: 2081577 - DNA, 25 bp, Homo sapien
catcccaggcgattcagaggcaggt

SEQ ID NO: 2081578 - DNA, 25 bp, Homo sapien
tatgaaatgctagcctgcgaagccg

SEQ ID NO: 2081579 - DNA, 25 bp, Homo sapien
tgagatttccctcccaagacaggca

SEQ ID NO: 2081580 - DNA, 25 bp, Homo sapien
gccctgggcatcgactcccttgaat

SEQ ID NO: 2081581 - DNA, 25 bp, Homo sapien
tctgcctccgtagccaaatcctggt

SEQ ID NO: 2081582 - DNA, 25 bp, Homo sapien
gaatcccttgtgagccgatttatag

SEQ ID NO: 2081583 - DNA, 25 bp, Homo sapien
gatttatagtcggacgctctgcctc

SEQ ID NO: 2081584 - DNA, 25 bp, Homo sapien
cacgctgcttgagccactgggagct

SEQ ID NO: 2081585 - DNA, 25 bp, Homo sapien
tttgggcggaggctctctcatgaga

SEQ ID NO: 2081586 - DNA, 25 bp, Homo sapien
ccaggtctaccagggtgttggccgc

SEQ ID NO: 2081587 - DNA, 25 bp, Homo sapien
tctcatgagatatgcggcccaacca

SEQ ID NO: 2081588 - DNA, 25 bp, Homo sapien
gagagcattgcagtttcggagacag

SEQ ID NO: 2081589 - DNA, 25 bp, Homo sapien
gccttagtaaaatgtcgagcctcgt

SEQ ID NO: 2081590 - DNA, 25 bp, Homo sapien
tctgggcgcggtggacgttaacaat

SEQ ID NO: 2081591 - DNA, 25 bp, Homo sapien
gggcttcctgacacacatgggtgcg

SEQ ID NO: 2081592 - DNA, 25 bp, Homo sapien
tctcggacgtggtgttgctccctcc

SEQ ID NO: 2081593 - DNA, 25 bp, Homo sapien
ccacttccacatgcgggttcctggg

SEQ ID NO: 2081594 - DNA, 25 bp, Homo sapien
agcagaatcattttcccagtgtcag

SEQ ID NO: 2081595 - DNA, 25 bp, Homo sapien
ggcttctcgcactggttgtgttgga

SEQ ID NO: 2081596 - DNA, 25 bp, Homo sapien
gaagccgatggaagtgcgttcgtca

SEQ ID NO: 2081597 - DNA, 25 bp, Homo sapien
aggccaggaagcaaccgaaacagag

SEQ ID NO: 2081598 - DNA, 25 bp, Homo sapien
agtggaagacaaggcggcccgatcc

SEQ ID NO: 2081599 - DNA, 25 bp, Homo sapien
ggagaccagtcacgtcgcctgggaa

SEQ ID NO: 2081600 - DNA, 25 bp, Homo sapien
taaatctgctcagggacagtcctct

SEQ ID NO: 2081601 - DNA, 25 bp, Homo sapien
ccagctaaatctgctcagggacagt

SEQ ID NO: 2081602 - DNA, 25 bp, Homo sapien
gctaaatctgctcagggacagtcct

SEQ ID NO: 2081603 - DNA, 25 bp, Homo sapien
cagctaaatctgctcagggacagtc

SEQ ID NO: 2081604 - DNA, 25 bp, Homo sapien
ctttccctgcgacgggggtggtgtg

SEQ ID NO: 2081605 - DNA, 25 bp, Homo sapien
cctgcgacgggggtggtgtgcgagg

SEQ ID NO: 2081606 - DNA, 25 bp, Homo sapien
gcgacgggggtggtgtgcgaggcgt

SEQ ID NO: 2081607 - DNA, 25 bp, Homo sapien
acgggggtggtgtgcgaggcgtcac

SEQ ID NO: 2081608 - DNA, 25 bp, Homo sapien
cctgatgatgaccccggtgccaccc

SEQ ID NO: 2081609 - DNA, 25 bp, Homo sapien
tgatgatgaccccggtgccaccccc

SEQ ID NO: 2081610 - DNA, 25 bp, Homo sapien
tgccacccccgagcgtacgaacgtc

SEQ ID NO: 2081611 - DNA, 25 bp, Homo sapien
atgatgaccccggtgccacccccga

SEQ ID NO: 2081612 - DNA, 25 bp, Homo sapien
gggagccgtagtgagcagttcttgc

SEQ ID NO: 2081613 - DNA, 25 bp, Homo sapien
ttcatcttgggtccggccgtgtgac

SEQ ID NO: 2081614 - DNA, 25 bp, Homo sapien
gggcagggagccgtagtgagcagtt

SEQ ID NO: 2081615 - DNA, 25 bp, Homo sapien
agtggactacggggttttcatcttg

SEQ ID NO: 2081616 - DNA, 25 bp, Homo sapien
tgggccagcctcgcaacctccgctt

SEQ ID NO: 2081617 - DNA, 25 bp, Homo sapien
ttcccggaggagaccgctgagggcc

SEQ ID NO: 2081618 - DNA, 25 bp, Homo sapien
tcccggaggagaccgctgagggcct

SEQ ID NO: 2081619 - DNA, 25 bp, Homo sapien
gagatacgttgatggagtcactccc

SEQ ID NO: 2081620 - DNA, 25 bp, Homo sapien
ctgggcgttctgaaactgggaagca

SEQ ID NO: 2081621 - DNA, 25 bp, Homo sapien
aaagattaatattcacgggtgcctg

SEQ ID NO: 2081622 - DNA, 25 bp, Homo sapien
cagtaacagatgagttgccgcccga

SEQ ID NO: 2081623 - DNA, 25 bp, Homo sapien
gcagtccacggcagctaatgagcct

SEQ ID NO: 2081624 - DNA, 25 bp, Homo sapien
tagatacacctacccagaagatcgg

SEQ ID NO: 2081625 - DNA, 25 bp, Homo sapien
ccagggtacccacgctgcagtttta

SEQ ID NO: 2081626 - DNA, 25 bp, Homo sapien
taaatcactagatacacgggtgtag

SEQ ID NO: 2081627 - DNA, 25 bp, Homo sapien
agatggcatcgtctggactgtccta

SEQ ID NO: 2081628 - DNA, 25 bp, Homo sapien
taacagtgtgctcacagacgagaaa

SEQ ID NO: 2081629 - DNA, 25 bp, Homo sapien
cctttcagtggagagtgatgcctca

SEQ ID NO: 2081630 - DNA, 25 bp, Homo sapien
catatgccagttagtgtctagggaa

SEQ ID NO: 2081631 - DNA, 25 bp, Homo sapien
acacatccacaaagcggcattcggg

SEQ ID NO: 2081632 - DNA, 25 bp, Homo sapien
cggcattcgggacctctgctgttca

SEQ ID NO: 2081633 - DNA, 25 bp, Homo sapien
acatggcgggtttttgcacacatcc

SEQ ID NO: 2081634 - DNA, 25 bp, Homo sapien
catttcgacggtttcagcagtggcc

SEQ ID NO: 2081635 - DNA, 25 bp, Homo sapien
tcgcacgagttaatgaaagtcacgg

SEQ ID NO: 2081636 - DNA, 25 bp, Homo sapien
acatccgactgtaaatggtgggcca

SEQ ID NO: 2081637 - DNA, 25 bp, Homo sapien
tgtgcaccatccagaatagcgggct

SEQ ID NO: 2081638 - DNA, 25 bp, Homo sapien
tattcctgaatcatcggctcgcacg

SEQ ID NO: 2081639 - DNA, 25 bp, Homo sapien
cagaggatgcagctccttgcagata

SEQ ID NO: 2081640 - DNA, 25 bp, Homo sapien
gctccttgcagaggatgcagctcct

SEQ ID NO: 2081641 - DNA, 25 bp, Homo sapien
ctcagctccttgcagaggatgcagc

SEQ ID NO: 2081642 - DNA, 25 bp, Homo sapien
gcagaggatgcagctccttgcagat

SEQ ID NO: 2081643 - DNA, 25 bp, Homo sapien
ccatgacaggaaggatcagcgtttc

SEQ ID NO: 2081644 - DNA, 25 bp, Homo sapien
gagacctcttggcacgaaaccttgt

SEQ ID NO: 2081645 - DNA, 25 bp, Homo sapien
caaatcaaagttcggcagcctgtgc

SEQ ID NO: 2081646 - DNA, 25 bp, Homo sapien
ggttgttgctttgccccatgacagg

SEQ ID NO: 2081647 - DNA, 25 bp, Homo sapien
aaatggttgtgtgctttccgccggg

SEQ ID NO: 2081648 - DNA, 25 bp, Homo sapien
tgtcagaggcgaaagctgctgtcag

SEQ ID NO: 2081649 - DNA, 25 bp, Homo sapien
tgctgtcagattggcgaggaagtcc

SEQ ID NO: 2081650 - DNA, 25 bp, Homo sapien
tcagattggcgaggaagtccttaaa

SEQ ID NO: 2081651 - DNA, 25 bp, Homo sapien
gcgtctccatgcaggagcacaccct

SEQ ID NO: 2081652 - DNA, 25 bp, Homo sapien
gctttgcttcctaaacgccagtgtg

SEQ ID NO: 2081653 - DNA, 25 bp, Homo sapien
gattgatatgaggttcaccgctcgg

SEQ ID NO: 2081654 - DNA, 25 bp, Homo sapien
catctgcaggacaggtgacgctttt

SEQ ID NO: 2081655 - DNA, 25 bp, Homo sapien
ggacagtgtcctccaagtcaggcca

SEQ ID NO: 2081656 - DNA, 25 bp, Homo sapien
tggctgcgggcatgagagggcagag

SEQ ID NO: 2081657 - DNA, 25 bp, Homo sapien
ctccagcaaatctcctctagagctg

SEQ ID NO: 2081658 - DNA, 25 bp, Homo sapien
acagagtgggctgcgtgagtccggg

SEQ ID NO: 2081659 - DNA, 25 bp, Homo sapien
ggcgccgccggcaatgccccaaagt

SEQ ID NO: 2081660 - DNA, 25 bp, Homo sapien
ggatgaaggacgacagggagagaag

SEQ ID NO: 2081661 - DNA, 25 bp, Homo sapien
tccatacagtcgcaattagaggcat

SEQ ID NO: 2081662 - DNA, 25 bp, Homo sapien
cctaaaagtacacggcacggagaag

SEQ ID NO: 2081663 - DNA, 25 bp, Homo sapien
ggatcagttaccatgcaagctcacg

SEQ ID NO: 2081664 - DNA, 25 bp, Homo sapien
tccaacatgtggtaccagcggccat

SEQ ID NO: 2081665 - DNA, 25 bp, Homo sapien
gcaacgctttattgggcaacccgaa

SEQ ID NO: 2081666 - DNA, 25 bp, Homo sapien
gatgtgctttcacgcccacaggaaa

SEQ ID NO: 2081667 - DNA, 25 bp, Homo sapien
cagagaacgtttgctcaaggcggat

SEQ ID NO: 2081668 - DNA, 25 bp, Homo sapien
tatgcattctccagcacggaacgag

SEQ ID NO: 2081669 - DNA, 25 bp, Homo sapien
aagcgcccgatggagtcaaggatgc

SEQ ID NO: 2081670 - DNA, 25 bp, Homo sapien
gtacttggatccgtgcctctgggag

SEQ ID NO: 2081671 - DNA, 25 bp, Homo sapien
tgggagggtctcttctgtgacgcca

SEQ ID NO: 2081672 - DNA, 25 bp, Homo sapien
catggtccatggtacttgctgtggc

SEQ ID NO: 2081673 - DNA, 25 bp, Homo sapien
gatggtctggagctcgtcggactca

SEQ ID NO: 2081674 - DNA, 25 bp, Homo sapien
tcctgagaggaggtcccattgttct

SEQ ID NO: 2081675 - DNA, 25 bp, Homo sapien
tcagtcaccgctgtgtcctgagagg

SEQ ID NO: 2081676 - DNA, 25 bp, Homo sapien
catctcgggaaaagaggcggatcaa

SEQ ID NO: 2081677 - DNA, 25 bp, Homo sapien
cagttactcgagatttggcacccag

SEQ ID NO: 2081678 - DNA, 25 bp, Homo sapien
gaagtcatctgagcatgcagagcag

SEQ ID NO: 2081679 - DNA, 25 bp, Homo sapien
cattgactgtttaaaaggccactgg

SEQ ID NO: 2081680 - DNA, 25 bp, Homo sapien
cacatcagcgtttcttcccgggtgc

SEQ ID NO: 2081681 - DNA, 25 bp, Homo sapien
tcggctcccggtggcggaagcagca

SEQ ID NO: 2081682 - DNA, 25 bp, Homo sapien
aatcggctcccggtggcggaagcag

SEQ ID NO: 2081683 - DNA, 25 bp, Homo sapien
aagcctgcgcggaatcggctcccgg

SEQ ID NO: 2081684 - DNA, 25 bp, Homo sapien
tggaagcctgcgcggaatcggctcc

SEQ ID NO: 2081685 - DNA, 25 bp, Homo sapien
gcaacagcaggggtatcacagcctt

SEQ ID NO: 2081686 - DNA, 25 bp, Homo sapien
agcaacagcaggggtatcacagcct

SEQ ID NO: 2081687 - DNA, 25 bp, Homo sapien
caacagcaggggtatcacagccttg

SEQ ID NO: 2081688 - DNA, 25 bp, Homo sapien
aacagcaggggtatcacagccttga

SEQ ID NO: 2081689 - DNA, 25 bp, Homo sapien
tgtggcgagaagacagggcttggtt

SEQ ID NO: 2081690 - DNA, 25 bp, Homo sapien
gctatgtggcgagaagacagggctt

SEQ ID NO: 2081691 - DNA, 25 bp, Homo sapien
agagcaggcagctatgtggcgagaa

SEQ ID NO: 2081692 - DNA, 25 bp, Homo sapien
caggcagctatgtggcgagaagaca

SEQ ID NO: 2081693 - DNA, 25 bp, Homo sapien
agattctacgtctcttggcagcagc

SEQ ID NO: 2081694 - DNA, 25 bp, Homo sapien
tctcgggtggaagattctacgtctc

SEQ ID NO: 2081695 - DNA, 25 bp, Homo sapien
cgtaggagcagcctctcgggtggaa

SEQ ID NO: 2081696 - DNA, 25 bp, Homo sapien
tctcagggagagtgggactgacaca

SEQ ID NO: 2081697 - DNA, 25 bp, Homo sapien
tggaacccagggtcgcggtggtctc

SEQ ID NO: 2081698 - DNA, 25 bp, Homo sapien
cccagggtcgcggtggtctcgtcca

SEQ ID NO: 2081699 - DNA, 25 bp, Homo sapien
ccagggtcgcggtggtctcgtccat

SEQ ID NO: 2081700 - DNA, 25 bp, Homo sapien
gcagttggaacccagggtcgcggtg

SEQ ID NO: 2081701 - DNA, 25 bp, Homo sapien
ctgacgcatctgtggctagcagctg

SEQ ID NO: 2081702 - DNA, 25 bp, Homo sapien
tcagggtaaaattgaactgcagata

SEQ ID NO: 2081703 - DNA, 25 bp, Homo sapien
taatcgatggctgacgcatctgtgg

SEQ ID NO: 2081704 - DNA, 25 bp, Homo sapien
ttgaactgcagataatcgatggctg

SEQ ID NO: 2081705 - DNA, 25 bp, Homo sapien
aggagagacccagaggctttctgat

SEQ ID NO: 2081706 - DNA, 25 bp, Homo sapien
ccaggagagacccagaggctttctg

SEQ ID NO: 2081707 - DNA, 25 bp, Homo sapien
ctgaccaggagagacccagaggctt

SEQ ID NO: 2081708 - DNA, 25 bp, Homo sapien
tgaccaggagagacccagaggcttt

SEQ ID NO: 2081709 - DNA, 25 bp, Homo sapien
cgtgcaacggctccaggcttgttta

SEQ ID NO: 2081710 - DNA, 25 bp, Homo sapien
gcaacggctccaggcttgtttagga

SEQ ID NO: 2081711 - DNA, 25 bp, Homo sapien
gcttgtttaggaaactgtcccactc

SEQ ID NO: 2081712 - DNA, 25 bp, Homo sapien
gtttaggaaactgtcccactctcat

SEQ ID NO: 2081713 - DNA, 25 bp, Homo sapien
cattcccctgcatccgtggaaatca

SEQ ID NO: 2081714 - DNA, 25 bp, Homo sapien
atgtttctcgtgctccattcccctg

SEQ ID NO: 2081715 - DNA, 25 bp, Homo sapien
cacgtgtgagagacaaacatctggg

SEQ ID NO: 2081716 - DNA, 25 bp, Homo sapien
tggaaatcacatcgcacaagtaact

SEQ ID NO: 2081717 - DNA, 25 bp, Homo sapien
ctgagtaaaccaggacggacaggcc

SEQ ID NO: 2081718 - DNA, 25 bp, Homo sapien
cctttctggcacacgcaggggagca

SEQ ID NO: 2081719 - DNA, 25 bp, Homo sapien
agtgggcagcgggttactccctctc

SEQ ID NO: 2081720 - DNA, 25 bp, Homo sapien
gcggcaccgtgagtgcatcgctcat

SEQ ID NO: 2081721 - DNA, 25 bp, Homo sapien
ttagtaatccagagcatgccatagg

SEQ ID NO: 2081722 - DNA, 25 bp, Homo sapien
tgtgccatggaacctgctcaactgc

SEQ ID NO: 2081723 - DNA, 25 bp, Homo sapien
gatgaggctcgctggtgataccttc

SEQ ID NO: 2081724 - DNA, 25 bp, Homo sapien
ttttcacgctggcttgacccacgga

SEQ ID NO: 2081725 - DNA, 25 bp, Homo sapien
tctcaatttgcttctaatggtggtg

SEQ ID NO: 2081726 - DNA, 25 bp, Homo sapien
tggtggtgagacgttttggagttgt

SEQ ID NO: 2081727 - DNA, 25 bp, Homo sapien
tggagttgttacaattggcttttta

SEQ ID NO: 2081728 - DNA, 25 bp, Homo sapien
tcaatttgcttctaatggtggtgag

SEQ ID NO: 2081729 - DNA, 25 bp, Homo sapien
ggagccagggcttttgtcgagcact

SEQ ID NO: 2081730 - DNA, 25 bp, Homo sapien
gaaactttgagcgatggcaacgaca

SEQ ID NO: 2081731 - DNA, 25 bp, Homo sapien
gaagaaacaatgcaccagggcctat

SEQ ID NO: 2081732 - DNA, 25 bp, Homo sapien
gatagatagtctgctccctgcctgt

SEQ ID NO: 2081733 - DNA, 25 bp, Homo sapien
acttcagcttcggtgggcgacgtcc

SEQ ID NO: 2081734 - DNA, 25 bp, Homo sapien
ctcctgggacttcagcttcggtggg

SEQ ID NO: 2081735 - DNA, 25 bp, Homo sapien
ggtgggcgacgtcctctttgtacca

SEQ ID NO: 2081736 - DNA, 25 bp, Homo sapien
gcttcggtgggcgacgtcctctttg

SEQ ID NO: 2081737 - DNA, 25 bp, Homo sapien
tgtgtttcctgaagcccgggtgtgc

SEQ ID NO: 2081738 - DNA, 25 bp, Homo sapien
ggtggctgcttcttacgcattccgt

SEQ ID NO: 2081739 - DNA, 25 bp, Homo sapien
tccaggtggctgcttcttacgcatt

SEQ ID NO: 2081740 - DNA, 25 bp, Homo sapien
caggtggctgcttcttacgcattcc

SEQ ID NO: 2081741 - DNA, 25 bp, Homo sapien
tgcttcttacgcattccgtactcat

SEQ ID NO: 2081742 - DNA, 25 bp, Homo sapien
tgatcaccatgtaaatgttacagcc

SEQ ID NO: 2081743 - DNA, 25 bp, Homo sapien
cccgttaatgcacaactgggtgtta

SEQ ID NO: 2081744 - DNA, 25 bp, Homo sapien
tagctgctgacaacagcaagtggac

SEQ ID NO: 2081745 - DNA, 25 bp, Homo sapien
tgttaaaccaactgacctgctgccg

SEQ ID NO: 2081746 - DNA, 25 bp, Homo sapien
cttgcatgcatctccgaattgaccc

SEQ ID NO: 2081747 - DNA, 25 bp, Homo sapien
tctggagcccggctgccagtaaaga

SEQ ID NO: 2081748 - DNA, 25 bp, Homo sapien
gtaaagacacttgcatgcatctccg

SEQ ID NO: 2081749 - DNA, 25 bp, Homo sapien
gcccggctgccagtaaagacacttg

SEQ ID NO: 2081750 - DNA, 25 bp, Homo sapien
gcagagacatttgcatgcatctctg

SEQ ID NO: 2081751 - DNA, 25 bp, Homo sapien
atgtcctaaggaaggcacctgcact

SEQ ID NO: 2081752 - DNA, 25 bp, Homo sapien
atctctgaactgacccgctgcagcg

SEQ ID NO: 2081753 - DNA, 25 bp, Homo sapien
catgtgtctccgacaatgtcctaag

SEQ ID NO: 2081754 - DNA, 25 bp, Homo sapien
cgcaactgacatcctggaaagtgga

SEQ ID NO: 2081755 - DNA, 25 bp, Homo sapien
agtgtttcctagcacagccgcgagg

SEQ ID NO: 2081756 - DNA, 25 bp, Homo sapien
tagaaatccagctacaagactgtgg

SEQ ID NO: 2081757 - DNA, 25 bp, Homo sapien
ccgcgaggtgagtattgggcactaa

SEQ ID NO: 2081758 - DNA, 25 bp, Homo sapien
cagcaggaagacagctgtaggcagc

SEQ ID NO: 2081759 - DNA, 25 bp, Homo sapien
ggaagacagctgtaggcagcaggtg

SEQ ID NO: 2081760 - DNA, 25 bp, Homo sapien
cccagcaggaagacagctgtaggca

SEQ ID NO: 2081761 - DNA, 25 bp, Homo sapien
ggcagcaggtgggcagtcgtggtac

SEQ ID NO: 2081762 - DNA, 25 bp, Homo sapien
actgtgcagaggtagaaggaaagct

SEQ ID NO: 2081763 - DNA, 25 bp, Homo sapien
cctagcagcgttctgaggactgtgc

SEQ ID NO: 2081764 - DNA, 25 bp, Homo sapien
gcttccagccctagcagcgttctga

SEQ ID NO: 2081765 - DNA, 25 bp, Homo sapien
catctttacccgaaagaggaccttg

SEQ ID NO: 2081766 - DNA, 25 bp, Homo sapien
tggaacactgccatgtgcaaatgaa

SEQ ID NO: 2081767 - DNA, 25 bp, Homo sapien
attttatgtggaacactgccatgtg

SEQ ID NO: 2081768 - DNA, 25 bp, Homo sapien
tatgtggaacactgccatgtgcaaa

SEQ ID NO: 2081769 - DNA, 25 bp, Homo sapien
tttatgtggaacactgccatgtgca

SEQ ID NO: 2081770 - DNA, 25 bp, Homo sapien
aagacatagaaatagtgctcctcat

SEQ ID NO: 2081771 - DNA, 25 bp, Homo sapien
tcagccatcagtgctctcagcaaag

SEQ ID NO: 2081772 - DNA, 25 bp, Homo sapien
aaagacatagaaatagtgctcctca

SEQ ID NO: 2081773 - DNA, 25 bp, Homo sapien
cagccatcagtgctctcagcaaaga

SEQ ID NO: 2081774 - DNA, 25 bp, Homo sapien
gtggctccgctctggcttcgactct

SEQ ID NO: 2081775 - DNA, 25 bp, Homo sapien
tccgctctggcttcgactctcagga

SEQ ID NO: 2081776 - DNA, 25 bp, Homo sapien
ggatgcggggatgccgagcgctccc

SEQ ID NO: 2081777 - DNA, 25 bp, Homo sapien
gcaggcagtggctccgctctggctt

SEQ ID NO: 2081778 - DNA, 25 bp, Homo sapien
ggaacacggccgcagtgactggaat

SEQ ID NO: 2081779 - DNA, 25 bp, Homo sapien
aacacggccgcagtgactggaatgg

SEQ ID NO: 2081780 - DNA, 25 bp, Homo sapien
gaacacggccgcagtgactggaatg

SEQ ID NO: 2081781 - DNA, 25 bp, Homo sapien
ttggaacacggccgcagtgactgga

SEQ ID NO: 2081782 - DNA, 25 bp, Homo sapien
gatgaagtcgcacccccagttgcat

SEQ ID NO: 2081783 - DNA, 25 bp, Homo sapien
atacccggccaaattgttctctcaa

SEQ ID NO: 2081784 - DNA, 25 bp, Homo sapien
tgggcccttgcaacaattcttgagg

SEQ ID NO: 2081785 - DNA, 25 bp, Homo sapien
tgttctctcaatgggcccttgcaac

SEQ ID NO: 2081786 - DNA, 25 bp, Homo sapien
attgcctgcctttagtttagcccca

SEQ ID NO: 2081787 - DNA, 25 bp, Homo sapien
tagtttagccccacgattagtcaac

SEQ ID NO: 2081788 - DNA, 25 bp, Homo sapien
tgcctttagtttagccccacgatta

SEQ ID NO: 2081789 - DNA, 25 bp, Homo sapien
gcctgcctttagtttagccccacga

SEQ ID NO: 2081790 - DNA, 25 bp, Homo sapien
gcataaccagaaagctgtcgaaaaa

SEQ ID NO: 2081791 - DNA, 25 bp, Homo sapien
cgtgccttagagtgttttcttcctc

SEQ ID NO: 2081792 - DNA, 25 bp, Homo sapien
caaagcttggacaacgcccagttct

SEQ ID NO: 2081793 - DNA, 25 bp, Homo sapien
cagttctctaggttgtcgtgcctta

SEQ ID NO: 2081794 - DNA, 25 bp, Homo sapien
gttatgctcagacatgcctccaaga

SEQ ID NO: 2081795 - DNA, 25 bp, Homo sapien
gatggaaaccccagtacctgaaggc

SEQ ID NO: 2081796 - DNA, 25 bp, Homo sapien
tgtctattctacgaaaccctaagtg

SEQ ID NO: 2081797 - DNA, 25 bp, Homo sapien
gagtgcacgctgctgctcctagtca

SEQ ID NO: 2081798 - DNA, 25 bp, Homo sapien
ggcataaattatcttgtctaacagc

SEQ ID NO: 2081799 - DNA, 25 bp, Homo sapien
gaaacagtcggtagcactaaatctg

SEQ ID NO: 2081800 - DNA, 25 bp, Homo sapien
tgttgattttcatggacgcttaaga

SEQ ID NO: 2081801 - DNA, 25 bp, Homo sapien
cctttctagtaaaggagtcctcatt

SEQ ID NO: 2081802 - DNA, 25 bp, Homo sapien
tatgtgtgcaacaaggcatgcgagc

SEQ ID NO: 2081803 - DNA, 25 bp, Homo sapien
ccatgttgccgatatctgcgtcacc

SEQ ID NO: 2081804 - DNA, 25 bp, Homo sapien
tagaccccatgaagtgtgcgattac

SEQ ID NO: 2081805 - DNA, 25 bp, Homo sapien
tatctgccacgtatctacacagccg

SEQ ID NO: 2081806 - DNA, 25 bp, Homo sapien
ctctgaggttgtccgtgaaagttca

SEQ ID NO: 2081807 - DNA, 25 bp, Homo sapien
cgtgaaagttcacccaggtttctct

SEQ ID NO: 2081808 - DNA, 25 bp, Homo sapien
tgtcctctgaggttgtccgtgaaag

SEQ ID NO: 2081809 - DNA, 25 bp, Homo sapien
gttgtcctctgaggttgtccgtgaa

SEQ ID NO: 2081810 - DNA, 25 bp, Homo sapien
caaaataattgtaatgcatttgtct

SEQ ID NO: 2081811 - DNA, 25 bp, Homo sapien
acaaaataattgtaatgcatttgtc

SEQ ID NO: 2081812 - DNA, 25 bp, Homo sapien
tctcagaatgcacatggccaaggag

SEQ ID NO: 2081813 - DNA, 25 bp, Homo sapien
gttcacttctcagaatgcacatggc

SEQ ID NO: 2081814 - DNA, 25 bp, Homo sapien
ttgcactaatttcctgttcacttct

SEQ ID NO: 2081815 - DNA, 25 bp, Homo sapien
tcaaccctaaccgtgttgcactaat

SEQ ID NO: 2081816 - DNA, 25 bp, Homo sapien
ttctgcaaagcagtcgcgcagcgct

SEQ ID NO: 2081817 - DNA, 25 bp, Homo sapien
gggtcgcacttcattcctgcacagg

SEQ ID NO: 2081818 - DNA, 25 bp, Homo sapien
aaggctggaggcaaacaccgcagga

SEQ ID NO: 2081819 - DNA, 25 bp, Homo sapien
tttttctgctttggccacccgcggc

SEQ ID NO: 2081820 - DNA, 25 bp, Homo sapien
gttttccaagtatcaaaggctgcag

SEQ ID NO: 2081821 - DNA, 25 bp, Homo sapien
gatcatacagtgaggttgcacacac

SEQ ID NO: 2081822 - DNA, 25 bp, Homo sapien
ggaagagttcccgtgctggcacaga

SEQ ID NO: 2081823 - DNA, 25 bp, Homo sapien
tacaagctagccctttacgtgaaca

SEQ ID NO: 2081824 - DNA, 25 bp, Homo sapien
ctgggccggctctccgggagcatca

SEQ ID NO: 2081825 - DNA, 25 bp, Homo sapien
cacctcgagggggttgaccggagct

SEQ ID NO: 2081826 - DNA, 25 bp, Homo sapien
ctccgggagcatcagggatccggtt

SEQ ID NO: 2081827 - DNA, 25 bp, Homo sapien
agagaggctcatacggcggtcccag

SEQ ID NO: 2081828 - DNA, 25 bp, Homo sapien
ttgccagcacactgcagtcagatca

SEQ ID NO: 2081829 - DNA, 25 bp, Homo sapien
tgacagccgtgtcacagcaatccag

SEQ ID NO: 2081830 - DNA, 25 bp, Homo sapien
ttggcgctcaatggcatgacagccg

SEQ ID NO: 2081831 - DNA, 25 bp, Homo sapien
tagaaattttacacgtacagatctg

SEQ ID NO: 2081832 - DNA, 25 bp, Homo sapien
ttcctgttgtggacaactttctcct

SEQ ID NO: 2081833 - DNA, 25 bp, Homo sapien
tcctgttgtggacaactttctcctc

SEQ ID NO: 2081834 - DNA, 25 bp, Homo sapien
cttcctgttgtggacaactttctcc

SEQ ID NO: 2081835 - DNA, 25 bp, Homo sapien
gccactgacactcttttccgcagga

SEQ ID NO: 2081836 - DNA, 25 bp, Homo sapien
cataacaaaagatgccactgacact

SEQ ID NO: 2081837 - DNA, 25 bp, Homo sapien
ctcttttccgcaggatgttgctgct

SEQ ID NO: 2081838 - DNA, 25 bp, Homo sapien
tgcataacaaaagatgccactgaca

SEQ ID NO: 2081839 - DNA, 25 bp, Homo sapien
tgcttgtctcaaccctgggaagtgg

SEQ ID NO: 2081840 - DNA, 25 bp, Homo sapien
tatgtgagccctccccgtagcttct

SEQ ID NO: 2081841 - DNA, 25 bp, Homo sapien
ttagactgtgaggtattctgaggac

SEQ ID NO: 2081842 - DNA, 25 bp, Homo sapien
gctcttcatacccatcactgctctg

SEQ ID NO: 2081843 - DNA, 25 bp, Homo sapien
cagagaaaattcgtggcaagacagc

SEQ ID NO: 2081844 - DNA, 25 bp, Homo sapien
gtcccaggtctgagcctttaccgta

SEQ ID NO: 2081845 - DNA, 25 bp, Homo sapien
taaatgtcatgacacctgcagggct

SEQ ID NO: 2081846 - DNA, 25 bp, Homo sapien
tcagaagctgtgctaaggtcccagg

SEQ ID NO: 2081847 - DNA, 25 bp, Homo sapien
aactgcatgacgtacactatacggg

SEQ ID NO: 2081848 - DNA, 25 bp, Homo sapien
tatacggggggtctcagtgtgttct

SEQ ID NO: 2081849 - DNA, 25 bp, Homo sapien
ggtgaactgcatgacgtacactata

SEQ ID NO: 2081850 - DNA, 25 bp, Homo sapien
ggatggtgaactgcatgacgtacac

SEQ ID NO: 2081851 - DNA, 25 bp, Homo sapien
agaagggaaaccaggtctgctgtct

SEQ ID NO: 2081852 - DNA, 25 bp, Homo sapien
gaagaaggaaccttgcacaggaagg

SEQ ID NO: 2081853 - DNA, 25 bp, Homo sapien
acagagagacgaccactggaggaca

SEQ ID NO: 2081854 - DNA, 25 bp, Homo sapien
tatacgtggatgtcctaaacctcac

SEQ ID NO: 2081855 - DNA, 25 bp, Homo sapien
tggccctgagccaacgtgatgctgt

SEQ ID NO: 2081856 - DNA, 25 bp, Homo sapien
taatacagtgttagcgctggcctag

SEQ ID NO: 2081857 - DNA, 25 bp, Homo sapien
catgtagtgaatcatccccaggagg

SEQ ID NO: 2081858 - DNA, 25 bp, Homo sapien
cagtagccagtgaagccaagtgtct

SEQ ID NO: 2081859 - DNA, 25 bp, Homo sapien
gcacatgggcacgttctgagcgctt

SEQ ID NO: 2081860 - DNA, 25 bp, Homo sapien
ggaagttacactccatccgcatgag

SEQ ID NO: 2081861 - DNA, 25 bp, Homo sapien
ccaggcttagagacggaggcatcag

SEQ ID NO: 2081862 - DNA, 25 bp, Homo sapien
taggtgacacggctggagctcatgt

SEQ ID NO: 2081863 - DNA, 25 bp, Homo sapien
tctgtatcagagcactcagccgcag

SEQ ID NO: 2081864 - DNA, 25 bp, Homo sapien
tcagccgcaggctctatgacagcag

SEQ ID NO: 2081865 - DNA, 25 bp, Homo sapien
atttaattctcgtttgcctgcgtgg

SEQ ID NO: 2081866 - DNA, 25 bp, Homo sapien
ggccttctcggcatttaattctcgt

SEQ ID NO: 2081867 - DNA, 25 bp, Homo sapien
tctcgtttgcctgcgtggtttccca

SEQ ID NO: 2081868 - DNA, 25 bp, Homo sapien
cgtactggccttctcggcatttaat

SEQ ID NO: 2081869 - DNA, 25 bp, Homo sapien
cctgaatggattggctcttcagagg

SEQ ID NO: 2081870 - DNA, 25 bp, Homo sapien
gaaacacacattcttgggccctgaa

SEQ ID NO: 2081871 - DNA, 25 bp, Homo sapien
tagatccgatttccagccactggga

SEQ ID NO: 2081872 - DNA, 25 bp, Homo sapien
tatctgtgcagggaaatagctccca

SEQ ID NO: 2081873 - DNA, 25 bp, Homo sapien
tcgagggttaacattgggcacaggc

SEQ ID NO: 2081874 - DNA, 25 bp, Homo sapien
gtaagagctgtagacaccgcccacc

SEQ ID NO: 2081875 - DNA, 25 bp, Homo sapien
tcagtaagagctgtagacaccgccc

SEQ ID NO: 2081876 - DNA, 25 bp, Homo sapien
agagctgtagacaccgcccaccctc

SEQ ID NO: 2081877 - DNA, 25 bp, Homo sapien
cagtaagagctgtagacaccgccca

SEQ ID NO: 2081878 - DNA, 25 bp, Homo sapien
agaagacgcgtttggtttcacccag

SEQ ID NO: 2081879 - DNA, 25 bp, Homo sapien
aaacccgtagaatgaacaccgtgca

SEQ ID NO: 2081880 - DNA, 25 bp, Homo sapien
tgttcggagcatagtacacagctac

SEQ ID NO: 2081881 - DNA, 25 bp, Homo sapien
aaagctgtgggatgcgcgctgcaca

SEQ ID NO: 2081882 - DNA, 25 bp, Homo sapien
acatgaggagaacgccactgacgct

SEQ ID NO: 2081883 - DNA, 25 bp, Homo sapien
tcatcacgatggcaaaccgaacatg

SEQ ID NO: 2081884 - DNA, 25 bp, Homo sapien
actgacgctgggtgcgccggctttc

SEQ ID NO: 2081885 - DNA, 25 bp, Homo sapien
tgtcctgattgcgtgttcatcacga

SEQ ID NO: 2081886 - DNA, 25 bp, Homo sapien
tgccacatggaaggccgggagagag

SEQ ID NO: 2081887 - DNA, 25 bp, Homo sapien
gcatgtgtgtggagaacgcctagga

SEQ ID NO: 2081888 - DNA, 25 bp, Homo sapien
acgcctaggagcacgtgggtggcca

SEQ ID NO: 2081889 - DNA, 25 bp, Homo sapien
tatggaggagggtcagatccctctc

SEQ ID NO: 2081890 - DNA, 25 bp, Homo sapien
tgaacagtgagtcaattctgcccat

SEQ ID NO: 2081891 - DNA, 25 bp, Homo sapien
gaacgacctgcaagccgggaattct

SEQ ID NO: 2081892 - DNA, 25 bp, Homo sapien
gccctagacgaagaacgacctgcaa

SEQ ID NO: 2081893 - DNA, 25 bp, Homo sapien
caagtcttccagactgttgggccct

SEQ ID NO: 2081894 - DNA, 25 bp, Homo sapien
gaatcaagcagcaaattactggccc

SEQ ID NO: 2081895 - DNA, 25 bp, Homo sapien
tgaagttactgcttacaggatcagc

SEQ ID NO: 2081896 - DNA, 25 bp, Homo sapien
gatcaaagagtagctcatccacgtg

SEQ ID NO: 2081897 - DNA, 25 bp, Homo sapien
caggatcagctgactttggagagaa

SEQ ID NO: 2081898 - DNA, 25 bp, Homo sapien
gaggaaaccactcttgctgtgtaag

SEQ ID NO: 2081899 - DNA, 25 bp, Homo sapien
tgaggaaaccactcttgctgtgtaa

SEQ ID NO: 2081900 - DNA, 25 bp, Homo sapien
gaaaccactcttgctgtgtaagtcc

SEQ ID NO: 2081901 - DNA, 25 bp, Homo sapien
ccactcttgctgtgtaagtcctgac

SEQ ID NO: 2081902 - DNA, 25 bp, Homo sapien
cggtgggatccctggtagcttcgca

SEQ ID NO: 2081903 - DNA, 25 bp, Homo sapien
tccaagtgtgcggtgcgcaagccgc

SEQ ID NO: 2081904 - DNA, 25 bp, Homo sapien
gtcacgctgggactggccttcggat

SEQ ID NO: 2081905 - DNA, 25 bp, Homo sapien
ggcttagtcacaggagcataggtca

SEQ ID NO: 2081906 - DNA, 25 bp, Homo sapien
tcacctgccgaggaactcacacatt

SEQ ID NO: 2081907 - DNA, 25 bp, Homo sapien
cagcaggcacaatggctcttgatag

SEQ ID NO: 2081908 - DNA, 25 bp, Homo sapien
tgaagaatgttttaattcacctgcc

SEQ ID NO: 2081909 - DNA, 25 bp, Homo sapien
tgttttaattcacctgccgaggaac

SEQ ID NO: 2081910 - DNA, 25 bp, Homo sapien
tgaatcttcccgaaaacacaggttc

SEQ ID NO: 2081911 - DNA, 25 bp, Homo sapien
cacataagagctgtcgtctgggtct

SEQ ID NO: 2081912 - DNA, 25 bp, Homo sapien
ggaacaaatgtgttggccccatgct

SEQ ID NO: 2081913 - DNA, 25 bp, Homo sapien
tgctcaggccatgcgtacacataag

SEQ ID NO: 2081914 - DNA, 25 bp, Homo sapien
tgagctgatctcctaaagggcccca

SEQ ID NO: 2081915 - DNA, 25 bp, Homo sapien
catggtctcacgaaagacctggctc

SEQ ID NO: 2081916 - DNA, 25 bp, Homo sapien
gacctggctctgagctgatctccta

SEQ ID NO: 2081917 - DNA, 25 bp, Homo sapien
ggtctcacgaaagacctggctctga

SEQ ID NO: 2081918 - DNA, 25 bp, Homo sapien
taggtttcttaatcaggctccaggt

SEQ ID NO: 2081919 - DNA, 25 bp, Homo sapien
tgctaggactctaaactgatccagg

SEQ ID NO: 2081920 - DNA, 25 bp, Homo sapien
ctagggcacctgcacggagtctgcg

SEQ ID NO: 2081921 - DNA, 25 bp, Homo sapien
tgaaaagcagatctgagtagagcat

SEQ ID NO: 2081922 - DNA, 25 bp, Homo sapien
caggtgtaaaacaagcgacgtgtct

SEQ ID NO: 2081923 - DNA, 25 bp, Homo sapien
acttctggaggattttcaaagagga

SEQ ID NO: 2081924 - DNA, 25 bp, Homo sapien
tttaatcagcgcacacagctaggac

SEQ ID NO: 2081925 - DNA, 25 bp, Homo sapien
ggagccatgagctaccaggtgtaaa

SEQ ID NO: 2081926 - DNA, 25 bp, Homo sapien
aaacggaacaaggaaccagagctcg

SEQ ID NO: 2081927 - DNA, 25 bp, Homo sapien
gttgttgcaattggaaaacggaaca

SEQ ID NO: 2081928 - DNA, 25 bp, Homo sapien
gccagagtcgcacgggggtccccaa

SEQ ID NO: 2081929 - DNA, 25 bp, Homo sapien
caaggaaccagagctcgcctgtttc

SEQ ID NO: 2081930 - DNA, 25 bp, Homo sapien
aggctggtctcggcttcaagcgccc

SEQ ID NO: 2081931 - DNA, 25 bp, Homo sapien
agcctgcttcgccttccggggtcgg

SEQ ID NO: 2081932 - DNA, 25 bp, Homo sapien
ctgcgctcgttgctccgaggccgag

SEQ ID NO: 2081933 - DNA, 25 bp, Homo sapien
gggtccccgggcagcctgcttcgcc

SEQ ID NO: 2081934 - DNA, 25 bp, Homo sapien
aaaagacagcaaaacacgcgcaggt

SEQ ID NO: 2081935 - DNA, 25 bp, Homo sapien
tgcagcccagagacatcgtggtctt

SEQ ID NO: 2081936 - DNA, 25 bp, Homo sapien
tgcgaggaagcagcctggtcctgca

SEQ ID NO: 2081937 - DNA, 25 bp, Homo sapien
ttctcctgcaggaccggcgcaggaa

SEQ ID NO: 2081938 - DNA, 25 bp, Homo sapien
tccacaacgacgcaaaagcattcag

SEQ ID NO: 2081939 - DNA, 25 bp, Homo sapien
aaagccccggaggatttagcaactg

SEQ ID NO: 2081940 - DNA, 25 bp, Homo sapien
tgggacccacacagtttgttaggaa

SEQ ID NO: 2081941 - DNA, 25 bp, Homo sapien
cacacagatttagtggtcagagatc

SEQ ID NO: 2081942 - DNA, 25 bp, Homo sapien
gagcgtccactcagggacaagaacc

SEQ ID NO: 2081943 - DNA, 25 bp, Homo sapien
gacatctgaaaagacgcgagcttga

SEQ ID NO: 2081944 - DNA, 25 bp, Homo sapien
gaggaaagtggatgctgttagttcc

SEQ ID NO: 2081945 - DNA, 25 bp, Homo sapien
cacaggattcagaactggtgacatc

SEQ ID NO: 2081946 - DNA, 25 bp, Homo sapien
gatgctgttagttcctgacagctgg

SEQ ID NO: 2081947 - DNA, 25 bp, Homo sapien
tgagccgggatgtagatgggacctg

SEQ ID NO: 2081948 - DNA, 25 bp, Homo sapien
ggagcccacttcccctgagccggga

SEQ ID NO: 2081949 - DNA, 25 bp, Homo sapien
ctgagccgggatgtagatgggacct

SEQ ID NO: 2081950 - DNA, 25 bp, Homo sapien
ccacttcccctgagccgggatgtag

SEQ ID NO: 2081951 - DNA, 25 bp, Homo sapien
acgtatgctagacggcgctggtttg

SEQ ID NO: 2081952 - DNA, 25 bp, Homo sapien
ggaaagtcctgggtctctcatattg

SEQ ID NO: 2081953 - DNA, 25 bp, Homo sapien
tctggtttcatggtgttctgaacgt

SEQ ID NO: 2081954 - DNA, 25 bp, Homo sapien
ggtctctcatattgctggtccctcc

SEQ ID NO: 2081955 - DNA, 25 bp, Homo sapien
tcagaaggcccagtgacttgtcaca

SEQ ID NO: 2081956 - DNA, 25 bp, Homo sapien
cacagatatcaggtatttggctcag

SEQ ID NO: 2081957 - DNA, 25 bp, Homo sapien
cgtatgcaggacagaagatgggcac

SEQ ID NO: 2081958 - DNA, 25 bp, Homo sapien
cttgtcacatgccatcgtatgcagg

SEQ ID NO: 2081959 - DNA, 25 bp, Homo sapien
gcatgcgatgcttgagttcccttct

SEQ ID NO: 2081960 - DNA, 25 bp, Homo sapien
ccctcgggtaccttgggtcttgcag

SEQ ID NO: 2081961 - DNA, 25 bp, Homo sapien
ggtcttgcagcagatgtcggttgat

SEQ ID NO: 2081962 - DNA, 25 bp, Homo sapien
ctattgaagcaaaaaccaacttctg

SEQ ID NO: 2081963 - DNA, 25 bp, Homo sapien
ggaatatagcggtgtctgagcttgc

SEQ ID NO: 2081964 - DNA, 25 bp, Homo sapien
cacctggaatatagcggtgtctgag

SEQ ID NO: 2081965 - DNA, 25 bp, Homo sapien
tcacacctggaatatagcggtgtct

SEQ ID NO: 2081966 - DNA, 25 bp, Homo sapien
acctggaatatagcggtgtctgagc

SEQ ID NO: 2081967 - DNA, 25 bp, Homo sapien
aaggtgggagaggcggggcactgac

SEQ ID NO: 2081968 - DNA, 25 bp, Homo sapien
cagaaggtgggagaggcggggcact

SEQ ID NO: 2081969 - DNA, 25 bp, Homo sapien
ttagccagaaggtgggagaggcggg

SEQ ID NO: 2081970 - DNA, 25 bp, Homo sapien
cttagccagaaggtgggagaggcgg

SEQ ID NO: 2081971 - DNA, 25 bp, Homo sapien
ccctttgacggcagtcgcatgatga

SEQ ID NO: 2081972 - DNA, 25 bp, Homo sapien
tgtagggcacccaacgtctaggtgg

SEQ ID NO: 2081973 - DNA, 25 bp, Homo sapien
gctgtatggaggtagcaccacactg

SEQ ID NO: 2081974 - DNA, 25 bp, Homo sapien
ttaagaaccggcagagaaagccgct

SEQ ID NO: 2081975 - DNA, 25 bp, Homo sapien
acccagcggcactggagctaatttg

SEQ ID NO: 2081976 - DNA, 25 bp, Homo sapien
gatgtgttcaggaacccagcggcac

SEQ ID NO: 2081977 - DNA, 25 bp, Homo sapien
tcgatgtgttcaggaacccagcggc

SEQ ID NO: 2081978 - DNA, 25 bp, Homo sapien
ctctcgatgtgttcaggaacccagc

SEQ ID NO: 2081979 - DNA, 25 bp, Homo sapien
tcttccttcgccgccatccttcaca

SEQ ID NO: 2081980 - DNA, 25 bp, Homo sapien
tgattcttccttcgccgccatcctt

SEQ ID NO: 2081981 - DNA, 25 bp, Homo sapien
ttccttcgccgccatccttcacaag

SEQ ID NO: 2081982 - DNA, 25 bp, Homo sapien
tctgattcttccttcgccgccatcc

SEQ ID NO: 2081983 - DNA, 25 bp, Homo sapien
tggagagcccgcctttctgatgaga

SEQ ID NO: 2081984 - DNA, 25 bp, Homo sapien
tctggttggcgtgttgtgcacagaa

SEQ ID NO: 2081985 - DNA, 25 bp, Homo sapien
ccctctctgccggaggaagggcatc

SEQ ID NO: 2081986 - DNA, 25 bp, Homo sapien
gggcatcaaggttaactcatccaga

SEQ ID NO: 2081987 - DNA, 25 bp, Homo sapien
taaagctgtttccccgtctggtgga

SEQ ID NO: 2081988 - DNA, 25 bp, Homo sapien
tggaaggcgcccgtcaacaagtggc

SEQ ID NO: 2081989 - DNA, 25 bp, Homo sapien
cgtctggtggaaggcgcccgtcaac

SEQ ID NO: 2081990 - DNA, 25 bp, Homo sapien
tcaacaagtggccacaacgcggcat

SEQ ID NO: 2081991 - DNA, 25 bp, Homo sapien
tatgaccaggactatgtcttgtttg

SEQ ID NO: 2081992 - DNA, 25 bp, Homo sapien
gaccaggactatgtcttgtttggtg

SEQ ID NO: 2081993 - DNA, 25 bp, Homo sapien
tgaccaggactatgtcttgtttggt

SEQ ID NO: 2081994 - DNA, 25 bp, Homo sapien
atatgaccaggactatgtcttgttt

SEQ ID NO: 2081995 - DNA, 25 bp, Homo sapien
gttccctgttgaagttaattgcatt

SEQ ID NO: 2081996 - DNA, 25 bp, Homo sapien
ttccctgttgaagttaattgcattt

SEQ ID NO: 2081997 - DNA, 25 bp, Homo sapien
tccctgttgaagttaattgcatttg

SEQ ID NO: 2081998 - DNA, 25 bp, Homo sapien
tatggtattgcttgacatccctcat

SEQ ID NO: 2081999 - DNA, 25 bp, Homo sapien
ctatggtattgcttgacatccctca

SEQ ID NO: 2082000 - DNA, 25 bp, Homo sapien
tctatggtattgcttgacatccctc

SEQ ID NO: 2082001 - DNA, 25 bp, Homo sapien
caatcttacaagagttgtcatcttt

SEQ ID NO: 2082002 - DNA, 25 bp, Homo sapien
ctttctagatgtttctggccttctc

SEQ ID NO: 2082003 - DNA, 25 bp, Homo sapien
gctgtcgtccctgcggctggttgct

SEQ ID NO: 2082004 - DNA, 25 bp, Homo sapien
tggatctttctagatgtttctggcc

SEQ ID NO: 2082005 - DNA, 25 bp, Homo sapien
gccacaggggctttgcccgggacac

SEQ ID NO: 2082006 - DNA, 25 bp, Homo sapien
agccacaggggctttgcccgggaca

SEQ ID NO: 2082007 - DNA, 25 bp, Homo sapien
tttgcccgggacacttttggatgct

SEQ ID NO: 2082008 - DNA, 25 bp, Homo sapien
agagccacaggggctttgcccggga

SEQ ID NO: 2082009 - DNA, 25 bp, Homo sapien
gcctttttggttgacagcttgcacc

SEQ ID NO: 2082010 - DNA, 25 bp, Homo sapien
gaggcctttttggttgacagcttgc

SEQ ID NO: 2082011 - DNA, 25 bp, Homo sapien
ggcctttttggttgacagcttgcac

SEQ ID NO: 2082012 - DNA, 25 bp, Homo sapien
cagaggcctttttggttgacagctt

SEQ ID NO: 2082013 - DNA, 25 bp, Homo sapien
gaggcgtcttcttctccccggaagc

SEQ ID NO: 2082014 - DNA, 25 bp, Homo sapien
tcttcttctccccggaagctgccat

SEQ ID NO: 2082015 - DNA, 25 bp, Homo sapien
ggcgtcttcttctccccggaagctg

SEQ ID NO: 2082016 - DNA, 25 bp, Homo sapien
cgtcttcttctccccggaagctgcc

SEQ ID NO: 2082017 - DNA, 25 bp, Homo sapien
taagttattatactggaatttgttc

SEQ ID NO: 2082018 - DNA, 25 bp, Homo sapien
tctaagttattatactggaatttgt

SEQ ID NO: 2082019 - DNA, 25 bp, Homo sapien
ttattcatctaagttattatactgg

SEQ ID NO: 2082020 - DNA, 25 bp, Homo sapien
tcatctaagttattatactggaatt

SEQ ID NO: 2082021 - DNA, 25 bp, Homo sapien
aatgctgctgcaaatccgctctgtg

SEQ ID NO: 2082022 - DNA, 25 bp, Homo sapien
tcttgcgggcgttgctcctgctgct

SEQ ID NO: 2082023 - DNA, 25 bp, Homo sapien
tgccctcacactcttgcgggcgttg

SEQ ID NO: 2082024 - DNA, 25 bp, Homo sapien
gctccccctgtgctaaatgctgctg

SEQ ID NO: 2082025 - DNA, 25 bp, Homo sapien
gagacctctggggaccgttgactat

SEQ ID NO: 2082026 - DNA, 25 bp, Homo sapien
ggttcactgccttgtttgaggaatc

SEQ ID NO: 2082027 - DNA, 25 bp, Homo sapien
tgtaccactgggacttctggagacc

SEQ ID NO: 2082028 - DNA, 25 bp, Homo sapien
tgaggaatcgcagagcatcatttct

SEQ ID NO: 2082029 - DNA, 25 bp, Homo sapien
cttggccttgcacaaagtccctcca

SEQ ID NO: 2082030 - DNA, 25 bp, Homo sapien
tgggctcttctgatccgttgccctc

SEQ ID NO: 2082031 - DNA, 25 bp, Homo sapien
tccctccaccgtctgtgtctttgag

SEQ ID NO: 2082032 - DNA, 25 bp, Homo sapien
tggcctctcaccagacaggcttctc

SEQ ID NO: 2082033 - DNA, 25 bp, Homo sapien
cacagacaatcacacgggacttgag

SEQ ID NO: 2082034 - DNA, 25 bp, Homo sapien
aatcacacgggacttgagcatgtac

SEQ ID NO: 2082035 - DNA, 25 bp, Homo sapien
cttgagcatgtactgtgggaacaga

SEQ ID NO: 2082036 - DNA, 25 bp, Homo sapien
cagacaatcacacgggacttgagca

SEQ ID NO: 2082037 - DNA, 25 bp, Homo sapien
gaggcttggataatgatttgataac

SEQ ID NO: 2082038 - DNA, 25 bp, Homo sapien
gagaggcttggataatgatttgata

SEQ ID NO: 2082039 - DNA, 25 bp, Homo sapien
ggagaggcttggataatgatttgat

SEQ ID NO: 2082040 - DNA, 25 bp, Homo sapien
agaggcttggataatgatttgataa

SEQ ID NO: 2082041 - DNA, 25 bp, Homo sapien
tcagtcctcggcttatacttccaaa

SEQ ID NO: 2082042 - DNA, 25 bp, Homo sapien
tccgttttagcacaagttcagaggg

SEQ ID NO: 2082043 - DNA, 25 bp, Homo sapien
gaattccttactggccctgccatcg

SEQ ID NO: 2082044 - DNA, 25 bp, Homo sapien
gaaaggtcccatagacgacgcagag

SEQ ID NO: 2082045 - DNA, 25 bp, Homo sapien
aggcagaaaagtcacggccctcacg

SEQ ID NO: 2082046 - DNA, 25 bp, Homo sapien
gcaggcccacgaagaaggcagaaaa

SEQ ID NO: 2082047 - DNA, 25 bp, Homo sapien
cctcacggatcttacctcgcacagc

SEQ ID NO: 2082048 - DNA, 25 bp, Homo sapien
ggcaggcccacgaagaaggcagaaa

SEQ ID NO: 2082049 - DNA, 25 bp, Homo sapien
tctcagccagctgattggcattgga

SEQ ID NO: 2082050 - DNA, 25 bp, Homo sapien
ttcttcatgcaccacaggtctgctc

SEQ ID NO: 2082051 - DNA, 25 bp, Homo sapien
catgcactggcgtctgctcagggtg

SEQ ID NO: 2082052 - DNA, 25 bp, Homo sapien
taggatgcccagtctatcctctctt

SEQ ID NO: 2082053 - DNA, 25 bp, Homo sapien
tatgattcccctagagacacatgct

SEQ ID NO: 2082054 - DNA, 25 bp, Homo sapien
taaaggctgcttgaaaagcctggca

SEQ ID NO: 2082055 - DNA, 25 bp, Homo sapien
tgaagaagattgtactaaaggctgc

SEQ ID NO: 2082056 - DNA, 25 bp, Homo sapien
gcctggcacggcaggacgcaatctt

SEQ ID NO: 2082057 - DNA, 25 bp, Homo sapien
tcaataaacacttgccaagggagca

SEQ ID NO: 2082058 - DNA, 25 bp, Homo sapien
caataaacacttgccaagggagcac

SEQ ID NO: 2082059 - DNA, 25 bp, Homo sapien
gcttgctgcaatgacatccggtgtg

SEQ ID NO: 2082060 - DNA, 25 bp, Homo sapien
gcttaggagctgtgcgaacagcatg

SEQ ID NO: 2082061 - DNA, 25 bp, Homo sapien
tcctcggcaggttggatgaaggtgg

SEQ ID NO: 2082062 - DNA, 25 bp, Homo sapien
cagcatggtgacagcaagctggctt

SEQ ID NO: 2082063 - DNA, 25 bp, Homo sapien
ctggagttgaaatcgtctctggcag

SEQ ID NO: 2082064 - DNA, 25 bp, Homo sapien
tggagttgaaatcgtctctggcagc

SEQ ID NO: 2082065 - DNA, 25 bp, Homo sapien
ggagttgaaatcgtctctggcagca

SEQ ID NO: 2082066 - DNA, 25 bp, Homo sapien
ttgccaacagtgctacccacattta

SEQ ID NO: 2082067 - DNA, 25 bp, Homo sapien
actgcacagaaccaaccttgtaatg

SEQ ID NO: 2082068 - DNA, 25 bp, Homo sapien
tcttcagcagttcgaccatagtcat

SEQ ID NO: 2082069 - DNA, 25 bp, Homo sapien
cctgggccaggacgttgcagtccac

SEQ ID NO: 2082070 - DNA, 25 bp, Homo sapien
gggcctctagttgtaggaatcttgg

SEQ ID NO: 2082071 - DNA, 25 bp, Homo sapien
aagcggtcttgtgggggaatcctcg

SEQ ID NO: 2082072 - DNA, 25 bp, Homo sapien
agggtccgcattccagggaggacca

SEQ ID NO: 2082073 - DNA, 25 bp, Homo sapien
gatgtcggtccctcctgttgaggaa

SEQ ID NO: 2082074 - DNA, 25 bp, Homo sapien
cagggtcgggcgagcagaaccaaca

SEQ ID NO: 2082075 - DNA, 25 bp, Homo sapien
gcgagcagaaccaacaccagcgctg

SEQ ID NO: 2082076 - DNA, 25 bp, Homo sapien
agcagaagcaacaccggtgctgcga

SEQ ID NO: 2082077 - DNA, 25 bp, Homo sapien
gaaccaacacaagctctgtgagggt

SEQ ID NO: 2082078 - DNA, 25 bp, Homo sapien
tgcatctgtgcatactccccacttc

SEQ ID NO: 2082079 - DNA, 25 bp, Homo sapien
tttccatcccgtctctagccatccc

SEQ ID NO: 2082080 - DNA, 25 bp, Homo sapien
tctttccatcccgtctctagccatc

SEQ ID NO: 2082081 - DNA, 25 bp, Homo sapien
gtgcatactccccacttctttccat

SEQ ID NO: 2082082 - DNA, 25 bp, Homo sapien
acatttgtgccgttggatgttccca

SEQ ID NO: 2082083 - DNA, 25 bp, Homo sapien
ggctctcacaactttcccatgagtg

SEQ ID NO: 2082084 - DNA, 25 bp, Homo sapien
gatgttcccattcatagctcgaggg

SEQ ID NO: 2082085 - DNA, 25 bp, Homo sapien
cagaatccagtgtcccatcagaaga

SEQ ID NO: 2082086 - DNA, 25 bp, Homo sapien
gagatgagaaaacggcatcctccgt

SEQ ID NO: 2082087 - DNA, 25 bp, Homo sapien
tgagaaaacggcatcctccgtgtgc

SEQ ID NO: 2082088 - DNA, 25 bp, Homo sapien
aaacggcatcctccgtgtgcagtca

SEQ ID NO: 2082089 - DNA, 25 bp, Homo sapien
ccgctggagatgagaaaacggcatc

SEQ ID NO: 2082090 - DNA, 25 bp, Homo sapien
tcagcaatgactgagcacccggcag

SEQ ID NO: 2082091 - DNA, 25 bp, Homo sapien
cacccggcagggagccagagtggag

SEQ ID NO: 2082092 - DNA, 25 bp, Homo sapien
ctgagaaatcagcaatgactgagca

SEQ ID NO: 2082093 - DNA, 25 bp, Homo sapien
cagagtggaggaagacccagtccat

SEQ ID NO: 2082094 - DNA, 25 bp, Homo sapien
tctccacctcacaccgcagttgcag

SEQ ID NO: 2082095 - DNA, 25 bp, Homo sapien
ccaggacccatgctcatggccccgc

SEQ ID NO: 2082096 - DNA, 25 bp, Homo sapien
ctccacctcacaccgcagttgcagc

SEQ ID NO: 2082097 - DNA, 25 bp, Homo sapien
ggacccatgctcatggccccgctct

SEQ ID NO: 2082098 - DNA, 25 bp, Homo sapien
cagtcaggatccgtagctccaagac

SEQ ID NO: 2082099 - DNA, 25 bp, Homo sapien
cctttccattaaccttggacttgca

SEQ ID NO: 2082100 - DNA, 25 bp, Homo sapien
ccacagtcaggatccgtagctccaa

SEQ ID NO: 2082101 - DNA, 25 bp, Homo sapien
caggatccgtagctccaagactggc

SEQ ID NO: 2082102 - DNA, 25 bp, Homo sapien
tctgtgcgaagacaaatgttatttt

SEQ ID NO: 2082103 - DNA, 25 bp, Homo sapien
ttctgtcttctgtgcgaagacaaat

SEQ ID NO: 2082104 - DNA, 25 bp, Homo sapien
cttctgtgcgaagacaaatgttatt

SEQ ID NO: 2082105 - DNA, 25 bp, Homo sapien
tgtcttctgtgcgaagacaaatgtt

SEQ ID NO: 2082106 - DNA, 25 bp, Homo sapien
caagtcacttcacttggaataggga

SEQ ID NO: 2082107 - DNA, 25 bp, Homo sapien
tcaagtcacttcacttggaataggg

SEQ ID NO: 2082108 - DNA, 25 bp, Homo sapien
ttcttcctgagtgcgtggcccgcac

SEQ ID NO: 2082109 - DNA, 25 bp, Homo sapien
accccacttcacttttacgcagagc

SEQ ID NO: 2082110 - DNA, 25 bp, Homo sapien
cccgcacctgccatcgggctgcctt

SEQ ID NO: 2082111 - DNA, 25 bp, Homo sapien
cgcagagctcgtgctcttcatttct

SEQ ID NO: 2082112 - DNA, 25 bp, Homo sapien
ccagcgccttgttccaagaaaattg

SEQ ID NO: 2082113 - DNA, 25 bp, Homo sapien
gtcaccagcgccttgttccaagaaa

SEQ ID NO: 2082114 - DNA, 25 bp, Homo sapien
caccagcgccttgttccaagaaaat

SEQ ID NO: 2082115 - DNA, 25 bp, Homo sapien
gtcattttgctgagtcaccagcgcc

SEQ ID NO: 2082116 - DNA, 25 bp, Homo sapien
gggccgctggagtgacggtcattct

SEQ ID NO: 2082117 - DNA, 25 bp, Homo sapien
tggcttccaagagggccgctggagt

SEQ ID NO: 2082118 - DNA, 25 bp, Homo sapien
gctggagtgacggtcattctcttct

SEQ ID NO: 2082119 - DNA, 25 bp, Homo sapien
gccgctggagtgacggtcattctct

SEQ ID NO: 2082120 - DNA, 25 bp, Homo sapien
ccaggaatcacagcgttcagaaccc

SEQ ID NO: 2082121 - DNA, 25 bp, Homo sapien
cgggctcacgaacccctttggtctg

SEQ ID NO: 2082122 - DNA, 25 bp, Homo sapien
tgtccaggaatcacagcgttcagaa

SEQ ID NO: 2082123 - DNA, 25 bp, Homo sapien
cttcacgggctcacgaacccctttg

SEQ ID NO: 2082124 - DNA, 25 bp, Homo sapien
aggccaccctgccgagcagaggttg

SEQ ID NO: 2082125 - DNA, 25 bp, Homo sapien
caggccaccctgccgagcagaggtt

SEQ ID NO: 2082126 - DNA, 25 bp, Homo sapien
ccgacatgggggcatctttaatatt

SEQ ID NO: 2082127 - DNA, 25 bp, Homo sapien
gaagaataagcctgcatgtggcatg

SEQ ID NO: 2082128 - DNA, 25 bp, Homo sapien
ttgtctaataatgtataaaaactcc

SEQ ID NO: 2082129 - DNA, 25 bp, Homo sapien
tgcatgtggcatgccgccgacatgg

SEQ ID NO: 2082130 - DNA, 25 bp, Homo sapien
tgctgacgactagcacggtgaatgt

SEQ ID NO: 2082131 - DNA, 25 bp, Homo sapien
ggctcctcagtccatgaagctggca

SEQ ID NO: 2082132 - DNA, 25 bp, Homo sapien
ttcgtggagagactatcagagctgg

SEQ ID NO: 2082133 - DNA, 25 bp, Homo sapien
gccgtgaaataatatggctcctcag

SEQ ID NO: 2082134 - DNA, 25 bp, Homo sapien
aggcaaggaagacactaagccttga

SEQ ID NO: 2082135 - DNA, 25 bp, Homo sapien
taggctcggaaaagtccgggcaaga

SEQ ID NO: 2082136 - DNA, 25 bp, Homo sapien
gccttgaatgtttacttgcatgcta

SEQ ID NO: 2082137 - DNA, 25 bp, Homo sapien
ctgaaataggctcggaaaagtccgg

SEQ ID NO: 2082138 - DNA, 25 bp, Homo sapien
aaggtcaggggcatccagaggcctg

SEQ ID NO: 2082139 - DNA, 25 bp, Homo sapien
caaggtcaggggcatccagaggcct

SEQ ID NO: 2082140 - DNA, 25 bp, Homo sapien
gcaaggtcaggggcatccagaggcc

SEQ ID NO: 2082141 - DNA, 25 bp, Homo sapien
ctgcaaggtcaggggcatccagagg

SEQ ID NO: 2082142 - DNA, 25 bp, Homo sapien
ttgtcccaccagagctgaaaccctt

SEQ ID NO: 2082143 - DNA, 25 bp, Homo sapien
tgtcccaccagagctgaaacccttc

SEQ ID NO: 2082144 - DNA, 25 bp, Homo sapien
gtcccaccagagctgaaacccttcc

SEQ ID NO: 2082145 - DNA, 25 bp, Homo sapien
tttgtcccaccagagctgaaaccct

SEQ ID NO: 2082146 - DNA, 25 bp, Homo sapien
ccttggtcatagtgttaatagctct

SEQ ID NO: 2082147 - DNA, 25 bp, Homo sapien
cactattcagtgctacggatcctat

SEQ ID NO: 2082148 - DNA, 25 bp, Homo sapien
tacttcctccggaaaatatagcact

SEQ ID NO: 2082149 - DNA, 25 bp, Homo sapien
gccccatgagcccgcattgaaatgt

SEQ ID NO: 2082150 - DNA, 25 bp, Homo sapien
cacttttatgtcctttcagcaaggg

SEQ ID NO: 2082151 - DNA, 25 bp, Homo sapien
ccacttttatgtcctttcagcaagg

SEQ ID NO: 2082152 - DNA, 25 bp, Homo sapien
tatggacctgagtaggtctgtcaga

SEQ ID NO: 2082153 - DNA, 25 bp, Homo sapien
catgtatcgggagatctagatcctg

SEQ ID NO: 2082154 - DNA, 25 bp, Homo sapien
caggtctggatagtgggcttttgaa

SEQ ID NO: 2082155 - DNA, 25 bp, Homo sapien
agatcctgtactctgaaaagttggt

SEQ ID NO: 2082156 - DNA, 25 bp, Homo sapien
gtttaggcttggcaaatctacttct

SEQ ID NO: 2082157 - DNA, 25 bp, Homo sapien
tggtttaggcttggcaaatctactt

SEQ ID NO: 2082158 - DNA, 25 bp, Homo sapien
ttggtttaggcttggcaaatctact

SEQ ID NO: 2082159 - DNA, 25 bp, Homo sapien
atttggtttaggcttggcaaatcta

SEQ ID NO: 2082160 - DNA, 25 bp, Homo sapien
tcctgacattcatgaacaattttgt

SEQ ID NO: 2082161 - DNA, 25 bp, Homo sapien
actttgttcctccaatacaatcttg

SEQ ID NO: 2082162 - DNA, 25 bp, Homo sapien
cctgacattcatgaacaattttgtg

SEQ ID NO: 2082163 - DNA, 25 bp, Homo sapien
ctcatgatcaaacctggcaacagag

SEQ ID NO: 2082164 - DNA, 25 bp, Homo sapien
aaacctggcaacagagagcctagcc

SEQ ID NO: 2082165 - DNA, 25 bp, Homo sapien
catgatcaaacctggcaacagagag

SEQ ID NO: 2082166 - DNA, 25 bp, Homo sapien
tcaaacctggcaacagagagcctag

SEQ ID NO: 2082167 - DNA, 25 bp, Homo sapien
ccttatatttggtggacactggcac

SEQ ID NO: 2082168 - DNA, 25 bp, Homo sapien
gctgctggagccgagattaaacaca

SEQ ID NO: 2082169 - DNA, 25 bp, Homo sapien
ggaatccaatggcagtgctcacagt

SEQ ID NO: 2082170 - DNA, 25 bp, Homo sapien
taccctgcacagtatagccatcgcg

SEQ ID NO: 2082171 - DNA, 25 bp, Homo sapien
cggtaatgaccgtttctaccacgtg

SEQ ID NO: 2082172 - DNA, 25 bp, Homo sapien
tgggcctcggtaatgaccgtttcta

SEQ ID NO: 2082173 - DNA, 25 bp, Homo sapien
taatgaccgtttctaccacgtgggc

SEQ ID NO: 2082174 - DNA, 25 bp, Homo sapien
aggtgactgggcctcggtaatgacc

SEQ ID NO: 2082175 - DNA, 25 bp, Homo sapien
ctgttagaacgtcctgggctcccat

SEQ ID NO: 2082176 - DNA, 25 bp, Homo sapien
ttgtgcccgtctaagctgatgctgt

SEQ ID NO: 2082177 - DNA, 25 bp, Homo sapien
tcttcattgggtccttctcgggtgg

SEQ ID NO: 2082178 - DNA, 25 bp, Homo sapien
tgtcagaaatccctgcacccctttt

SEQ ID NO: 2082179 - DNA, 25 bp, Homo sapien
tccacatcgggttggtgactcagtc

SEQ ID NO: 2082180 - DNA, 25 bp, Homo sapien
gctcttcgttgatgtaccagtaggg

SEQ ID NO: 2082181 - DNA, 25 bp, Homo sapien
tctggctgtaagtcaacaacatggg

SEQ ID NO: 2082182 - DNA, 25 bp, Homo sapien
catgaggctttccattagcacgtga

SEQ ID NO: 2082183 - DNA, 25 bp, Homo sapien
gctgattcacatccgaagcttattt

SEQ ID NO: 2082184 - DNA, 25 bp, Homo sapien
cagctgattcacatccgaagcttat

SEQ ID NO: 2082185 - DNA, 25 bp, Homo sapien
attcacatccgaagcttatttttac

SEQ ID NO: 2082186 - DNA, 25 bp, Homo sapien
tgattcacatccgaagcttattttt

SEQ ID NO: 2082187 - DNA, 25 bp, Homo sapien
ccatgtgctgatagttccaggttct

SEQ ID NO: 2082188 - DNA, 25 bp, Homo sapien
cagttccacgttttggtgctgccag

SEQ ID NO: 2082189 - DNA, 25 bp, Homo sapien
tcttgtggttccaggtactgatggt

SEQ ID NO: 2082190 - DNA, 25 bp, Homo sapien
ctctgatgttccaggtgctgatagt

SEQ ID NO: 2082191 - DNA, 25 bp, Homo sapien
cgccatagccacgtccctttttggt

SEQ ID NO: 2082192 - DNA, 25 bp, Homo sapien
ttgctactacatcgccatagccacg

SEQ ID NO: 2082193 - DNA, 25 bp, Homo sapien
ccttgctactacatcgccatagcca

SEQ ID NO: 2082194 - DNA, 25 bp, Homo sapien
catcgccatagccacgtcccttttt

SEQ ID NO: 2082195 - DNA, 25 bp, Homo sapien
ggctggcttgaaggtaaacttagac

SEQ ID NO: 2082196 - DNA, 25 bp, Homo sapien
ggctggcttgaaggtaaccttagac

SEQ ID NO: 2082197 - DNA, 25 bp, Homo sapien
agactcttgcagtacgtcgtatgga

SEQ ID NO: 2082198 - DNA, 25 bp, Homo sapien
cttagactcttgcagtacgttgtat

SEQ ID NO: 2082199 - DNA, 25 bp, Homo sapien
gaagaccttaatcagcacgtcggga

SEQ ID NO: 2082200 - DNA, 25 bp, Homo sapien
gaccttaatcagcacgtcgggaagt

SEQ ID NO: 2082201 - DNA, 25 bp, Homo sapien
ttagaagaccttaatcagcacgtcg

SEQ ID NO: 2082202 - DNA, 25 bp, Homo sapien
tagaagaccttaatcagcacgtcgg

SEQ ID NO: 2082203 - DNA, 25 bp, Homo sapien
agggccatcaccgtcttcataaaga

SEQ ID NO: 2082204 - DNA, 25 bp, Homo sapien
tgcctttaacctcttgccttctgca

SEQ ID NO: 2082205 - DNA, 25 bp, Homo sapien
tcctctcctctctgacaagggccat

SEQ ID NO: 2082206 - DNA, 25 bp, Homo sapien
gagccagtgacaagtcctgccctgg

SEQ ID NO: 2082207 - DNA, 25 bp, Homo sapien
agttctcagtgaccgaattctctcc

SEQ ID NO: 2082208 - DNA, 25 bp, Homo sapien
aagtcagttctcagtgaccgaattc

SEQ ID NO: 2082209 - DNA, 25 bp, Homo sapien
tcagttctcagtgaccgaattctct

SEQ ID NO: 2082210 - DNA, 25 bp, Homo sapien
tctcagtgaccgaattctctcctca

SEQ ID NO: 2082211 - DNA, 25 bp, Homo sapien
gctgtaagcactcgaggacgtttct

SEQ ID NO: 2082212 - DNA, 25 bp, Homo sapien
tccttctttgcagggcggtcatact

SEQ ID NO: 2082213 - DNA, 25 bp, Homo sapien
agcactcgaggacgtttctctgtgg

SEQ ID NO: 2082214 - DNA, 25 bp, Homo sapien
tgcagggcggtcatacttccctttc

SEQ ID NO: 2082215 - DNA, 25 bp, Homo sapien
gggaactgagctccacgggtctgcc

SEQ ID NO: 2082216 - DNA, 25 bp, Homo sapien
ggcagagaagagccgctcgttcctt

SEQ ID NO: 2082217 - DNA, 25 bp, Homo sapien
aagagccgctcgttccttgtgggaa

SEQ ID NO: 2082218 - DNA, 25 bp, Homo sapien
cacgggtctgcccgagtgctgcaac

SEQ ID NO: 2082219 - DNA, 25 bp, Homo sapien
ctgagagtgtgtggccaagaaggtg

SEQ ID NO: 2082220 - DNA, 25 bp, Homo sapien
gaaggtgagtgagcacgggggtccg

SEQ ID NO: 2082221 - DNA, 25 bp, Homo sapien
agagtgtgtggccaagaaggtgagt

SEQ ID NO: 2082222 - DNA, 25 bp, Homo sapien
ggtgagtgagcacgggggtccgctg

SEQ ID NO: 2082223 - DNA, 25 bp, Homo sapien
aggggacacggtgctgggaagagct

SEQ ID NO: 2082224 - DNA, 25 bp, Homo sapien
ccaatcgtgatactaaggcccgaca

SEQ ID NO: 2082225 - DNA, 25 bp, Homo sapien
acatgtaggctttagcattccctcc

SEQ ID NO: 2082226 - DNA, 25 bp, Homo sapien
gcagccgaaagataccaatcgtgat

SEQ ID NO: 2082227 - DNA, 25 bp, Homo sapien
atggttctaaacaagatagcagatt

SEQ ID NO: 2082228 - DNA, 25 bp, Homo sapien
atggcaccagcgcatccctgttcct

SEQ ID NO: 2082229 - DNA, 25 bp, Homo sapien
ttgatggggtgctagcgttgacaca

SEQ ID NO: 2082230 - DNA, 25 bp, Homo sapien
ctgttcctcaggctcgtgtgtgagt

SEQ ID NO: 2082231 - DNA, 25 bp, Homo sapien
tcctcaggctcgtgtgtgagttgat

SEQ ID NO: 2082232 - DNA, 25 bp, Homo sapien
agcccagtgtccaagtctgagtttt

SEQ ID NO: 2082233 - DNA, 25 bp, Homo sapien
ccagtgtccaagtctgagttttgcc

SEQ ID NO: 2082234 - DNA, 25 bp, Homo sapien
cagtggtgcagcaggactaccaccg

SEQ ID NO: 2082235 - DNA, 25 bp, Homo sapien
accgccccaatccagaagcccagtg

SEQ ID NO: 2082236 - DNA, 25 bp, Homo sapien
agtacccttgagtggtccagagtgc

SEQ ID NO: 2082237 - DNA, 25 bp, Homo sapien
gaagtgctgtgaccgagtacccttg

SEQ ID NO: 2082238 - DNA, 25 bp, Homo sapien
tccagagtgctagtccaaggcatag

SEQ ID NO: 2082239 - DNA, 25 bp, Homo sapien
caaggcatagctcccggttcattgt

SEQ ID NO: 2082240 - DNA, 25 bp, Homo sapien
ctgtccacaacgcaggaagccagcc

SEQ ID NO: 2082241 - DNA, 25 bp, Homo sapien
tgtccacaacgcaggaagccagcca

SEQ ID NO: 2082242 - DNA, 25 bp, Homo sapien
tactgactgttccttagggtggacg

SEQ ID NO: 2082243 - DNA, 25 bp, Homo sapien
ctgactgttccttagggtggacgga

SEQ ID NO: 2082244 - DNA, 25 bp, Homo sapien
cttcatgcgggtcatggaacaccac

SEQ ID NO: 2082245 - DNA, 25 bp, Homo sapien
ctccttcttcatgcgggtcatggaa

SEQ ID NO: 2082246 - DNA, 25 bp, Homo sapien
tcatggggtggcgtctcctctctgt

SEQ ID NO: 2082247 - DNA, 25 bp, Homo sapien
ggtcttcatggggtggcgtctcctc

SEQ ID NO: 2082248 - DNA, 25 bp, Homo sapien
tggtcttcatggggtggcgtctcct

SEQ ID NO: 2082249 - DNA, 25 bp, Homo sapien
tcttcatggggtggcgtctcctctc

SEQ ID NO: 2082250 - DNA, 25 bp, Homo sapien
gtcagtgcttaacccgtcgaagagg

SEQ ID NO: 2082251 - DNA, 25 bp, Homo sapien
aaaggtccagtcagtgcttaacccg

SEQ ID NO: 2082252 - DNA, 25 bp, Homo sapien
aacccgtcgaagaggttgactgcca

SEQ ID NO: 2082253 - DNA, 25 bp, Homo sapien
tctgatttcaaaggtccagtcagtg

SEQ ID NO: 2082254 - DNA, 25 bp, Homo sapien
accacagagcgtgccggatgctgga

SEQ ID NO: 2082255 - DNA, 25 bp, Homo sapien
ttgactgagttctgcctttgtgctt

SEQ ID NO: 2082256 - DNA, 25 bp, Homo sapien
tgcccacgtggcaatccgagtttgg

SEQ ID NO: 2082257 - DNA, 25 bp, Homo sapien
tccgctgcagtccacaatttgactg

SEQ ID NO: 2082258 - DNA, 25 bp, Homo sapien
aacatcaagttcttggacaggaaca

SEQ ID NO: 2082259 - DNA, 25 bp, Homo sapien
tcatcgataatcagtaacatcaagt

SEQ ID NO: 2082260 - DNA, 25 bp, Homo sapien
ttcctcttgattaagcacgatgtgc

SEQ ID NO: 2082261 - DNA, 25 bp, Homo sapien
ggacaggaacatgaccgctgctgcg

SEQ ID NO: 2082262 - DNA, 25 bp, Homo sapien
tggtctgggaccaggaccccaactc

SEQ ID NO: 2082263 - DNA, 25 bp, Homo sapien
gctctggtctgggaccaggacccca

SEQ ID NO: 2082264 - DNA, 25 bp, Homo sapien
gctgctctggtctgggaccaggacc

SEQ ID NO: 2082265 - DNA, 25 bp, Homo sapien
tctggtctgggaccaggaccccaac

SEQ ID NO: 2082266 - DNA, 25 bp, Homo sapien
ggaatgtgagcacctccacccagct

SEQ ID NO: 2082267 - DNA, 25 bp, Homo sapien
gcatcctggtcagcagacgcactca

SEQ ID NO: 2082268 - DNA, 25 bp, Homo sapien
ccctcgatccaattcagcaaagctg

SEQ ID NO: 2082269 - DNA, 25 bp, Homo sapien
gggtggccgagaagctgtcatattc

SEQ ID NO: 2082270 - DNA, 25 bp, Homo sapien
gtgcaatgccgtggccactgtccct

SEQ ID NO: 2082271 - DNA, 25 bp, Homo sapien
gccactgtccctggacaggagttca

SEQ ID NO: 2082272 - DNA, 25 bp, Homo sapien
ttcctgagggcacactggctgcacg

SEQ ID NO: 2082273 - DNA, 25 bp, Homo sapien
acgcccagcaggtgcaatgccgtgg

SEQ ID NO: 2082274 - DNA, 25 bp, Homo sapien
agggtaagggcccttcaaagcatgg

SEQ ID NO: 2082275 - DNA, 25 bp, Homo sapien
ttgcaccatcagagggtaagggccc

SEQ ID NO: 2082276 - DNA, 25 bp, Homo sapien
ctcccagcattgcaccatcagaggg

SEQ ID NO: 2082277 - DNA, 25 bp, Homo sapien
ccttcaaagcatggggtctggcaca

SEQ ID NO: 2082278 - DNA, 25 bp, Homo sapien
gcatccctactgcagtgatctcctt

SEQ ID NO: 2082279 - DNA, 25 bp, Homo sapien
cgggctgggtgggagctttcccctg

SEQ ID NO: 2082280 - DNA, 25 bp, Homo sapien
tacagcatccctactgcagtgatct

SEQ ID NO: 2082281 - DNA, 25 bp, Homo sapien
gcacctacagcatccctactgcagt

SEQ ID NO: 2082282 - DNA, 25 bp, Homo sapien
agtggggtggggcagcatccaggag

SEQ ID NO: 2082283 - DNA, 25 bp, Homo sapien
ctagtggggtggggcagcatccagg

SEQ ID NO: 2082284 - DNA, 25 bp, Homo sapien
gtggggtggggcagcatccaggaga

SEQ ID NO: 2082285 - DNA, 25 bp, Homo sapien
tggggtggggcagcatccaggagac

SEQ ID NO: 2082286 - DNA, 25 bp, Homo sapien
cctttggaaacctgcacacctaggt

SEQ ID NO: 2082287 - DNA, 25 bp, Homo sapien
ctctttggagggtctacagtgcctc

SEQ ID NO: 2082288 - DNA, 25 bp, Homo sapien
ctacagtgcctcctttggaaacctg

SEQ ID NO: 2082289 - DNA, 25 bp, Homo sapien
ggaaacctgcacacctaggtcttta

SEQ ID NO: 2082290 - DNA, 25 bp, Homo sapien
cttcaactccgtctactgaactgta

SEQ ID NO: 2082291 - DNA, 25 bp, Homo sapien
tcaactccgtctactgaactgtatc

SEQ ID NO: 2082292 - DNA, 25 bp, Homo sapien
ttcaactccgtctactgaactgtat

SEQ ID NO: 2082293 - DNA, 25 bp, Homo sapien
aaatagcataggatgcaccagtcat

SEQ ID NO: 2082294 - DNA, 25 bp, Homo sapien
agacaggatcagcaaggacaaaggc

SEQ ID NO: 2082295 - DNA, 25 bp, Homo sapien
cagaagggtcacaggttcccctgaa

SEQ ID NO: 2082296 - DNA, 25 bp, Homo sapien
ctttggtggaactgcaagtttcttc

SEQ ID NO: 2082297 - DNA, 25 bp, Homo sapien
taaattaaggggagacaggatcagc

SEQ ID NO: 2082298 - DNA, 25 bp, Homo sapien
ctggctattctcatcgacctgcctg

SEQ ID NO: 2082299 - DNA, 25 bp, Homo sapien
gacctgcctgacatttcccacaggg

SEQ ID NO: 2082300 - DNA, 25 bp, Homo sapien
tcagggagtgaatctacttccacct

SEQ ID NO: 2082301 - DNA, 25 bp, Homo sapien
agggagtgaatctacttccacctgc

SEQ ID NO: 2082302 - DNA, 25 bp, Homo sapien
tggagcattgggtggagcaggagag

SEQ ID NO: 2082303 - DNA, 25 bp, Homo sapien
gatgggtggagcattgggtggagca

SEQ ID NO: 2082304 - DNA, 25 bp, Homo sapien
ctgcagtgagggatgggtggagcat

SEQ ID NO: 2082305 - DNA, 25 bp, Homo sapien
agtgagggatgggtggagcattggg

SEQ ID NO: 2082306 - DNA, 25 bp, Homo sapien
tgtgctcccgtcaaagccctggttt

SEQ ID NO: 2082307 - DNA, 25 bp, Homo sapien
tgctcccgtcaaagccctggtttcc

SEQ ID NO: 2082308 - DNA, 25 bp, Homo sapien
gtgctcccgtcaaagccctggtttc

SEQ ID NO: 2082309 - DNA, 25 bp, Homo sapien
atgcgcggagcagacttggacttca

SEQ ID NO: 2082310 - DNA, 25 bp, Homo sapien
gatgggtgctcctgcggtcagaatc

SEQ ID NO: 2082311 - DNA, 25 bp, Homo sapien
cagctctctgaaaatcgccgggaaa

SEQ ID NO: 2082312 - DNA, 25 bp, Homo sapien
tcagagcaccttcgctgaagccgag

SEQ ID NO: 2082313 - DNA, 25 bp, Homo sapien
gactgtttgcgcctgggttctgtct

SEQ ID NO: 2082314 - DNA, 25 bp, Homo sapien
tattcctgtcgtgtggaccaggctg

SEQ ID NO: 2082315 - DNA, 25 bp, Homo sapien
aagctttcacgtccaccttcaggag

SEQ ID NO: 2082316 - DNA, 25 bp, Homo sapien
cacaaacagctttgtccaagctttc

SEQ ID NO: 2082317 - DNA, 25 bp, Homo sapien
cttattgactgagttgctttccctg

SEQ ID NO: 2082318 - DNA, 25 bp, Homo sapien
tattgactgagttgctttccctgat

SEQ ID NO: 2082319 - DNA, 25 bp, Homo sapien
ttattgactgagttgctttccctga

SEQ ID NO: 2082320 - DNA, 25 bp, Homo sapien
tctggcaagatgtcgtggtggtcta

SEQ ID NO: 2082321 - DNA, 25 bp, Homo sapien
gccaattttgcaagcacctctggca

SEQ ID NO: 2082322 - DNA, 25 bp, Homo sapien
gcacctctggcaagatgtcgtggtg

SEQ ID NO: 2082323 - DNA, 25 bp, Homo sapien
gagccaattttgcaagcacctctgg

SEQ ID NO: 2082324 - DNA, 25 bp, Homo sapien
ccgaatattggtaaacgaagaggtg

SEQ ID NO: 2082325 - DNA, 25 bp, Homo sapien
gctgtagtaacagtacaggtccctc

SEQ ID NO: 2082326 - DNA, 25 bp, Homo sapien
cgtcctcatcgtccctccttctttc

SEQ ID NO: 2082327 - DNA, 25 bp, Homo sapien
ctggtgcccagggattgctgtagta

SEQ ID NO: 2082328 - DNA, 25 bp, Homo sapien
atggagatggcataacacaagcccc

SEQ ID NO: 2082329 - DNA, 25 bp, Homo sapien
agatggcataacacaagccccatgg

SEQ ID NO: 2082330 - DNA, 25 bp, Homo sapien
tggagaagaggatatggagatggca

SEQ ID NO: 2082331 - DNA, 25 bp, Homo sapien
ctggtggagaagaggatatggagat

SEQ ID NO: 2082332 - DNA, 25 bp, Homo sapien
atactttgaaaagcaccatattccc

SEQ ID NO: 2082333 - DNA, 25 bp, Homo sapien
ttcccctttgtgctgcttggaagtt

SEQ ID NO: 2082334 - DNA, 25 bp, Homo sapien
tctttctggcttaacgttcccttca

SEQ ID NO: 2082335 - DNA, 25 bp, Homo sapien
tggcttaacgttcccttcagcttcg

SEQ ID NO: 2082336 - DNA, 25 bp, Homo sapien
ccttcagcttcgatctgttcttcct

SEQ ID NO: 2082337 - DNA, 25 bp, Homo sapien
taacgttcccttcagcttcgatctg

SEQ ID NO: 2082338 - DNA, 25 bp, Homo sapien
gactggcaatgctaggaaaaaactg

SEQ ID NO: 2082339 - DNA, 25 bp, Homo sapien
attgtaaagactggcaatgctagga

SEQ ID NO: 2082340 - DNA, 25 bp, Homo sapien
gggggtcaatactcaacattcataa

SEQ ID NO: 2082341 - DNA, 25 bp, Homo sapien
gtgggggtcaatactcaacattcat

SEQ ID NO: 2082342 - DNA, 25 bp, Homo sapien
tgttggaactcgtcgagcttaaggc

SEQ ID NO: 2082343 - DNA, 25 bp, Homo sapien
tggtggttgttggaactcgtcgagc

SEQ ID NO: 2082344 - DNA, 25 bp, Homo sapien
tggttgttggaactcgtcgagctta

SEQ ID NO: 2082345 - DNA, 25 bp, Homo sapien
ttggaactcgtcgagcttaaggcgg

SEQ ID NO: 2082346 - DNA, 25 bp, Homo sapien
gcccacagtcatggtagtctggatg

SEQ ID NO: 2082347 - DNA, 25 bp, Homo sapien
tgtggaggcacacggcccacagtca

SEQ ID NO: 2082348 - DNA, 25 bp, Homo sapien
ccacagtcatggtagtctggatgcc

SEQ ID NO: 2082349 - DNA, 25 bp, Homo sapien
agtcatggtagtctggatgcctgcc

SEQ ID NO: 2082350 - DNA, 25 bp, Homo sapien
cgcagacgccgggaggccgacggac

SEQ ID NO: 2082351 - DNA, 25 bp, Homo sapien
cgccgggaggccgacggacaggctt

SEQ ID NO: 2082352 - DNA, 25 bp, Homo sapien
aggccgacggacaggcttatcctga

SEQ ID NO: 2082353 - DNA, 25 bp, Homo sapien
ggaggccgacggacaggcttatcct

SEQ ID NO: 2082354 - DNA, 25 bp, Homo sapien
ccattgctgttgagggccattctgc

SEQ ID NO: 2082355 - DNA, 25 bp, Homo sapien
cctggtcatatgatgtggagacacc

SEQ ID NO: 2082356 - DNA, 25 bp, Homo sapien
ggttcccattgctgttgagggccat

SEQ ID NO: 2082357 - DNA, 25 bp, Homo sapien
ggaacatcctgatcagtcaactggg

SEQ ID NO: 2082358 - DNA, 25 bp, Homo sapien
cttacaatcatctttctgtgcaagt

SEQ ID NO: 2082359 - DNA, 25 bp, Homo sapien
gggtggagatgtcttccttacaatc

SEQ ID NO: 2082360 - DNA, 25 bp, Homo sapien
tttctaagtcatggggtggagatgt

SEQ ID NO: 2082361 - DNA, 25 bp, Homo sapien
tcagtgccccttgatttctaagtca

SEQ ID NO: 2082362 - DNA, 25 bp, Homo sapien
ctggaagtgttgatgtctactcttc

SEQ ID NO: 2082363 - DNA, 25 bp, Homo sapien
ggtgaatccttgattgagtctatca

SEQ ID NO: 2082364 - DNA, 25 bp, Homo sapien
gtctatcagtcagggccttgctctc

SEQ ID NO: 2082365 - DNA, 25 bp, Homo sapien
tactcttcaccatcgcccaggtgaa

SEQ ID NO: 2082366 - DNA, 25 bp, Homo sapien
gaactgtcgttcttcttaagcacca

SEQ ID NO: 2082367 - DNA, 25 bp, Homo sapien
gaggaatgagctgtaggagccaaca

SEQ ID NO: 2082368 - DNA, 25 bp, Homo sapien
ttaagcaccaaacgcttggcgtctg

SEQ ID NO: 2082369 - DNA, 25 bp, Homo sapien
tgctagagcatgcaccagctttgtg

SEQ ID NO: 2082370 - DNA, 25 bp, Homo sapien
ctgacaagtgaatccttgaattctt

SEQ ID NO: 2082371 - DNA, 25 bp, Homo sapien
aactgacaagtgaatccttgaattc

SEQ ID NO: 2082372 - DNA, 25 bp, Homo sapien
actgacaagtgaatccttgaattct

SEQ ID NO: 2082373 - DNA, 25 bp, Homo sapien
aaactgacaagtgaatccttgaatt

SEQ ID NO: 2082374 - DNA, 25 bp, Homo sapien
ttgctgccaacttcgggtaaatagt

SEQ ID NO: 2082375 - DNA, 25 bp, Homo sapien
tgccaacttcgggtaaatagtgtga

SEQ ID NO: 2082376 - DNA, 25 bp, Homo sapien
caacttcgggtaaatagtgtgatgt

SEQ ID NO: 2082377 - DNA, 25 bp, Homo sapien
tttgctgccaacttcgggtaaatag

SEQ ID NO: 2082378 - DNA, 25 bp, Homo sapien
tactgcctttgtgccggaggctctt

SEQ ID NO: 2082379 - DNA, 25 bp, Homo sapien
ggctgtgcattcgttcacctcccct

SEQ ID NO: 2082380 - DNA, 25 bp, Homo sapien
tttggcacctctcctgaaggctgtg

SEQ ID NO: 2082381 - DNA, 25 bp, Homo sapien
tgctggtgtcatgctactgcctttg

SEQ ID NO: 2082382 - DNA, 25 bp, Homo sapien
gatgtcagtcagggtatgtggaggg

SEQ ID NO: 2082383 - DNA, 25 bp, Homo sapien
cggatgtcagtcagggtatgtggag

SEQ ID NO: 2082384 - DNA, 25 bp, Homo sapien
accacagggtatggtgcagggcacc

SEQ ID NO: 2082385 - DNA, 25 bp, Homo sapien
ccacagggtatggtgcagggcacca

SEQ ID NO: 2082386 - DNA, 25 bp, Homo sapien
tgttccggagcgatgcacagagctt

SEQ ID NO: 2082387 - DNA, 25 bp, Homo sapien
cccagatgacggtgtgttccggagc

SEQ ID NO: 2082388 - DNA, 25 bp, Homo sapien
gagcttctgccggtgtctcctggtg

SEQ ID NO: 2082389 - DNA, 25 bp, Homo sapien
aacaataacccaggacctcccagat

SEQ ID NO: 2082390 - DNA, 25 bp, Homo sapien
cacccttggttgttcatccaggagc

SEQ ID NO: 2082391 - DNA, 25 bp, Homo sapien
tcatccaggagccaaagcgacattc

SEQ ID NO: 2082392 - DNA, 25 bp, Homo sapien
agcgacattcttcaaaagcacctct

SEQ ID NO: 2082393 - DNA, 25 bp, Homo sapien
gccaaagcgacattcttcaaaagca

SEQ ID NO: 2082394 - DNA, 25 bp, Homo sapien
gctgccctcagggtgaatgcccagg

SEQ ID NO: 2082395 - DNA, 25 bp, Homo sapien
ctgctgtccccactgaaaagtgctg

SEQ ID NO: 2082396 - DNA, 25 bp, Homo sapien
tgctttctgctgtccccactgaaaa

SEQ ID NO: 2082397 - DNA, 25 bp, Homo sapien
gggtgaatgcccaggtcctgtccat

SEQ ID NO: 2082398 - DNA, 25 bp, Homo sapien
gcttggtcttggtggcatcactgtg

SEQ ID NO: 2082399 - DNA, 25 bp, Homo sapien
tcctgatggcatcagtgtggtggca

SEQ ID NO: 2082400 - DNA, 25 bp, Homo sapien
actgtggttgatccctgtgatgtca

SEQ ID NO: 2082401 - DNA, 25 bp, Homo sapien
gcttggtcctggtggcatcactgtg

SEQ ID NO: 2082402 - DNA, 25 bp, Homo sapien
agatcagcaaggcgaagccgtcttc

SEQ ID NO: 2082403 - DNA, 25 bp, Homo sapien
gatcagcaaggcgaagccgtcttcc

SEQ ID NO: 2082404 - DNA, 25 bp, Homo sapien
cagcaaggcgaagccgtcttcctct

SEQ ID NO: 2082405 - DNA, 25 bp, Homo sapien
tcagcaaggcgaagccgtcttcctc

SEQ ID NO: 2082406 - DNA, 25 bp, Homo sapien
tgtggcccaggttatgcagggaaaa

SEQ ID NO: 2082407 - DNA, 25 bp, Homo sapien
ggcccaggttatgcagggaaaagag

SEQ ID NO: 2082408 - DNA, 25 bp, Homo sapien
tggcccaggttatgcagggaaaaga

SEQ ID NO: 2082409 - DNA, 25 bp, Homo sapien
ctgtggcccaggttatgcagggaaa

SEQ ID NO: 2082410 - DNA, 25 bp, Homo sapien
atatttgctttcagaccagcagtgt

SEQ ID NO: 2082411 - DNA, 25 bp, Homo sapien
catatttgctttcagaccagcagtg

SEQ ID NO: 2082412 - DNA, 25 bp, Homo sapien
atttgctttcagaccagcagtgtgc

SEQ ID NO: 2082413 - DNA, 25 bp, Homo sapien
tatttgctttcagaccagcagtgtg

SEQ ID NO: 2082414 - DNA, 25 bp, Homo sapien
ccccaaaacgatgtcattttgttat

SEQ ID NO: 2082415 - DNA, 25 bp, Homo sapien
tgttgtagacattatccagcggtgt

SEQ ID NO: 2082416 - DNA, 25 bp, Homo sapien
cattatccagcggtgtctcgctcat

SEQ ID NO: 2082417 - DNA, 25 bp, Homo sapien
cttccatgttgtagacattatccag

SEQ ID NO: 2082418 - DNA, 25 bp, Homo sapien
caatctccctggtcggtggatagag

SEQ ID NO: 2082419 - DNA, 25 bp, Homo sapien
accggtctcttcactgcacaatcaa

SEQ ID NO: 2082420 - DNA, 25 bp, Homo sapien
gacaagcacaagtaatttcctgctg

SEQ ID NO: 2082421 - DNA, 25 bp, Homo sapien
agggagcggccgtgcccgttccatc

SEQ ID NO: 2082422 - DNA, 25 bp, Homo sapien
taaacgagtcaacaatcttcccttg

SEQ ID NO: 2082423 - DNA, 25 bp, Homo sapien
ttttgccttcataaacgagtcaaca

SEQ ID NO: 2082424 - DNA, 25 bp, Homo sapien
gactaaaccagatccttgactgaca

SEQ ID NO: 2082425 - DNA, 25 bp, Homo sapien
tgactaaaccagatccttgactgac

SEQ ID NO: 2082426 - DNA, 25 bp, Homo sapien
actctggcaacaccgaagaccctgg

SEQ ID NO: 2082427 - DNA, 25 bp, Homo sapien
cataagggcactctggcaacaccga

SEQ ID NO: 2082428 - DNA, 25 bp, Homo sapien
agggcactctggcaacaccgaagac

SEQ ID NO: 2082429 - DNA, 25 bp, Homo sapien
ctggcaacaccgaagaccctggctg

SEQ ID NO: 2082430 - DNA, 25 bp, Homo sapien
cgccgatcatagcagacctgcacag

SEQ ID NO: 2082431 - DNA, 25 bp, Homo sapien
gcttgtttgtaggacccacgcagct

SEQ ID NO: 2082432 - DNA, 25 bp, Homo sapien
ctctctggtaagcttttaccaggtc

SEQ ID NO: 2082433 - DNA, 25 bp, Homo sapien
gaaagaggctccctagactctgcat

SEQ ID NO: 2082434 - DNA, 25 bp, Homo sapien
gccagcggtgttggatacagtagcc

SEQ ID NO: 2082435 - DNA, 25 bp, Homo sapien
caggcacagtaacaagtggctcagc

SEQ ID NO: 2082436 - DNA, 25 bp, Homo sapien
tgggagccaggtcaaatgcgtcagc

SEQ ID NO: 2082437 - DNA, 25 bp, Homo sapien
gctgtcagtgcagagtgccagcggt

SEQ ID NO: 2082438 - DNA, 25 bp, Homo sapien
tacacaagtgcccttgatgagaaca

SEQ ID NO: 2082439 - DNA, 25 bp, Homo sapien
gccttccagcaaagggccatcatga

SEQ ID NO: 2082440 - DNA, 25 bp, Homo sapien
catgaacagaatttgtacacaagtg

SEQ ID NO: 2082441 - DNA, 25 bp, Homo sapien
tcagctaagggccttccagcaaagg

SEQ ID NO: 2082442 - DNA, 25 bp, Homo sapien
aatccaagcagaggtggacggctgt

SEQ ID NO: 2082443 - DNA, 25 bp, Homo sapien
tgggtggcaggacaacagcccagac

SEQ ID NO: 2082444 - DNA, 25 bp, Homo sapien
gattgggtggcaggacaacagccca

SEQ ID NO: 2082445 - DNA, 25 bp, Homo sapien
accccgggtgtggactcctgcagga

SEQ ID NO: 2082446 - DNA, 25 bp, Homo sapien
agaagaaggcagaaattccgcggct

SEQ ID NO: 2082447 - DNA, 25 bp, Homo sapien
gcaggcaagcgcttgaaggataaga

SEQ ID NO: 2082448 - DNA, 25 bp, Homo sapien
tgcaggcaggcaagcgcttgaagga

SEQ ID NO: 2082449 - DNA, 25 bp, Homo sapien
agaaggcagaaattccgcggctcgg

SEQ ID NO: 2082450 - DNA, 25 bp, Homo sapien
gaacagggggcgatggcgtgcttaa

SEQ ID NO: 2082451 - DNA, 25 bp, Homo sapien
tggcgtgcttaagggataagaagaa

SEQ ID NO: 2082452 - DNA, 25 bp, Homo sapien
aagaaggcagaaattccggggctcg

SEQ ID NO: 2082453 - DNA, 25 bp, Homo sapien
agaagaaggcagaaattccggggct

SEQ ID NO: 2082454 - DNA, 25 bp, Homo sapien
tacaaacgatagctgaagttgacca

SEQ ID NO: 2082455 - DNA, 25 bp, Homo sapien
cccaagaaccgaggaggagctcgat

SEQ ID NO: 2082456 - DNA, 25 bp, Homo sapien
tacgcatgggaaatacgcagagggt

SEQ ID NO: 2082457 - DNA, 25 bp, Homo sapien
gtctgaagggtcttcatgagccttg

SEQ ID NO: 2082458 - DNA, 25 bp, Homo sapien
ctttctagccgacttccctgtggca

SEQ ID NO: 2082459 - DNA, 25 bp, Homo sapien
agatgcgatgttgccctgcggagca

SEQ ID NO: 2082460 - DNA, 25 bp, Homo sapien
agcccagccgatggcttcccatccc

SEQ ID NO: 2082461 - DNA, 25 bp, Homo sapien
ctgcggagcaagctgatgccctgat

SEQ ID NO: 2082462 - DNA, 25 bp, Homo sapien
agaaggcgggaacaaggctctggac

SEQ ID NO: 2082463 - DNA, 25 bp, Homo sapien
ccacagaaggcgggaacaaggctct

SEQ ID NO: 2082464 - DNA, 25 bp, Homo sapien
aaggcgggaacaaggctctggacca

SEQ ID NO: 2082465 - DNA, 25 bp, Homo sapien
cacagaaggcgggaacaaggctctg

SEQ ID NO: 2082466 - DNA, 25 bp, Homo sapien
ttctgactttggtggattggctgca

SEQ ID NO: 2082467 - DNA, 25 bp, Homo sapien
ctgactttggtggattggctgcacc

SEQ ID NO: 2082468 - DNA, 25 bp, Homo sapien
tctgactttggtggattggctgcac

SEQ ID NO: 2082469 - DNA, 25 bp, Homo sapien
ggagccgccgtttagaatgcttgac

SEQ ID NO: 2082470 - DNA, 25 bp, Homo sapien
ttcacgtccaacgagggcacactct

SEQ ID NO: 2082471 - DNA, 25 bp, Homo sapien
gaatagcattgcagttcctttgatg

SEQ ID NO: 2082472 - DNA, 25 bp, Homo sapien
tggctggttcttcacgtccaacgag

SEQ ID NO: 2082473 - DNA, 25 bp, Homo sapien
gggcagccaaagacgtagcaggtat

SEQ ID NO: 2082474 - DNA, 25 bp, Homo sapien
caggtatgtctccagtgacaggcaa

SEQ ID NO: 2082475 - DNA, 25 bp, Homo sapien
aaatggctgtgaaagccgctcctct

SEQ ID NO: 2082476 - DNA, 25 bp, Homo sapien
tgacaggcaaattcggccccacagt

SEQ ID NO: 2082477 - DNA, 25 bp, Homo sapien
gagacggtgcattgcgggctaaacc

SEQ ID NO: 2082478 - DNA, 25 bp, Homo sapien
gacgccacttccgacggcgtaaggc

SEQ ID NO: 2082479 - DNA, 25 bp, Homo sapien
ggctaaacccgcagacactgagcgg

SEQ ID NO: 2082480 - DNA, 25 bp, Homo sapien
ccagtgccgacacctgctaagagac

SEQ ID NO: 2082481 - DNA, 25 bp, Homo sapien
tcatagcatttggtctttccacacc

SEQ ID NO: 2082482 - DNA, 25 bp, Homo sapien
caattcaacctgaggcagtccagtg

SEQ ID NO: 2082483 - DNA, 25 bp, Homo sapien
gcagtccagtggtcatagcatttgg

SEQ ID NO: 2082484 - DNA, 25 bp, Homo sapien
aacctgaggcagtccagtggtcata

SEQ ID NO: 2082485 - DNA, 25 bp, Homo sapien
gcacatcaccgggaagcagtaattt

SEQ ID NO: 2082486 - DNA, 25 bp, Homo sapien
cacatcaccgggaagcagtaatttc

SEQ ID NO: 2082487 - DNA, 25 bp, Homo sapien
tgcgcagacatctcatcgctggtgt

SEQ ID NO: 2082488 - DNA, 25 bp, Homo sapien
ggaggtcctccatgtgcgcagacat

SEQ ID NO: 2082489 - DNA, 25 bp, Homo sapien
agaggcacccaggtaagaccaccag

SEQ ID NO: 2082490 - DNA, 25 bp, Homo sapien
aagaccaccagagccgcgaacagtg

SEQ ID NO: 2082491 - DNA, 25 bp, Homo sapien
cgtttcagaccaggccacgcctgtt

SEQ ID NO: 2082492 - DNA, 25 bp, Homo sapien
cattccagcgaaatcaggtccttca

SEQ ID NO: 2082493 - DNA, 25 bp, Homo sapien
tcctggtcagcactatgtgccattg

SEQ ID NO: 2082494 - DNA, 25 bp, Homo sapien
tttcttggcttgatcgtttcagacc

SEQ ID NO: 2082495 - DNA, 25 bp, Homo sapien
gcttgtgctgtaaatccaggttcag

SEQ ID NO: 2082496 - DNA, 25 bp, Homo sapien
cagctgagattgcagcgctgtccgg

SEQ ID NO: 2082497 - DNA, 25 bp, Homo sapien
gagcctttcagaggccgctgtgtgc

SEQ ID NO: 2082498 - DNA, 25 bp, Homo sapien
cacttagtccccgtgagagttccca

SEQ ID NO: 2082499 - DNA, 25 bp, Homo sapien
ctttatgccaagtgcggctggacgg

SEQ ID NO: 2082500 - DNA, 25 bp, Homo sapien
gaagacagaacaagtaagggacagg

SEQ ID NO: 2082501 - DNA, 25 bp, Homo sapien
tttctctgggttttgctcttccgga

SEQ ID NO: 2082502 - DNA, 25 bp, Homo sapien
gatattaagagccaagttcaaggca

SEQ ID NO: 2082503 - DNA, 25 bp, Homo sapien
gctgctctcaagctattgacagtta

SEQ ID NO: 2082504 - DNA, 25 bp, Homo sapien
gagctcttcagcgtaggtgtcaata

SEQ ID NO: 2082505 - DNA, 25 bp, Homo sapien
tccgtttcccagtggatcggtgctc

SEQ ID NO: 2082506 - DNA, 25 bp, Homo sapien
tcaataaaactgacggctgctctca

SEQ ID NO: 2082507 - DNA, 25 bp, Homo sapien
cctgtgttttgcaaagggctgccgt

SEQ ID NO: 2082508 - DNA, 25 bp, Homo sapien
ttttgcaaagggctgccgtagcaca

SEQ ID NO: 2082509 - DNA, 25 bp, Homo sapien
tttgcaaagggctgccgtagcacac

SEQ ID NO: 2082510 - DNA, 25 bp, Homo sapien
gtgttttgcaaagggctgccgtagc

SEQ ID NO: 2082511 - DNA, 25 bp, Homo sapien
ggctgatcaatacgtcctggtggac

SEQ ID NO: 2082512 - DNA, 25 bp, Homo sapien
tttgaatccatacggcacggctgat

SEQ ID NO: 2082513 - DNA, 25 bp, Homo sapien
tctggccggtgtgtaaaagcctgct

SEQ ID NO: 2082514 - DNA, 25 bp, Homo sapien
tgtaaaatatcataagcgccgctga

SEQ ID NO: 2082515 - DNA, 25 bp, Homo sapien
tattaataattgtaagtaacgctct

SEQ ID NO: 2082516 - DNA, 25 bp, Homo sapien
tgaaatgcccccgtctctctgtatg

SEQ ID NO: 2082517 - DNA, 25 bp, Homo sapien
gagttgaaaagctacacagtgtgaa

SEQ ID NO: 2082518 - DNA, 25 bp, Homo sapien
tgcacagaacaattgtgttgagcaa

SEQ ID NO: 2082519 - DNA, 25 bp, Homo sapien
ctgctggggattggggcattgacca

SEQ ID NO: 2082520 - DNA, 25 bp, Homo sapien
ctggctgctggggattggggcattg

SEQ ID NO: 2082521 - DNA, 25 bp, Homo sapien
ggctgctggggattggggcattgac

SEQ ID NO: 2082522 - DNA, 25 bp, Homo sapien
tgctggggattggggcattgaccat

SEQ ID NO: 2082523 - DNA, 25 bp, Homo sapien
tattaaaagaggacttgcttcatgt

SEQ ID NO: 2082524 - DNA, 25 bp, Homo sapien
gcttcatgtttacacggagttcttg

SEQ ID NO: 2082525 - DNA, 25 bp, Homo sapien
cattgactcccaaaacccaggcttt

SEQ ID NO: 2082526 - DNA, 25 bp, Homo sapien
gttattcccattatcttatctccag

SEQ ID NO: 2082527 - DNA, 25 bp, Homo sapien
ttctgccctgcctctaactgattgg

SEQ ID NO: 2082528 - DNA, 25 bp, Homo sapien
ttttgttcatctgcctgagccacag

SEQ ID NO: 2082529 - DNA, 25 bp, Homo sapien
tccgtgtggtattgcctgtgttcca

SEQ ID NO: 2082530 - DNA, 25 bp, Homo sapien
taaatgtgcacgctctgccggttgc

SEQ ID NO: 2082531 - DNA, 25 bp, Homo sapien
aaggctctcagaaactcttgatggg

SEQ ID NO: 2082532 - DNA, 25 bp, Homo sapien
tggcggccacggcaacgcaaaggct

SEQ ID NO: 2082533 - DNA, 25 bp, Homo sapien
gatcggcgttcacagctggcggcca

SEQ ID NO: 2082534 - DNA, 25 bp, Homo sapien
tcttgtgacagcttagaacaccgac

SEQ ID NO: 2082535 - DNA, 25 bp, Homo sapien
attgctcatggtacaaagcagggaa

SEQ ID NO: 2082536 - DNA, 25 bp, Homo sapien
taattattgctcatggtacaaagca

SEQ ID NO: 2082537 - DNA, 25 bp, Homo sapien
ttaattattgctcatggtacaaagc

SEQ ID NO: 2082538 - DNA, 25 bp, Homo sapien
gctcatggtacaaagcagggaaggc

SEQ ID NO: 2082539 - DNA, 25 bp, Homo sapien
ggatcgatattgaaaagggattggt

SEQ ID NO: 2082540 - DNA, 25 bp, Homo sapien
ttggtagacggcagagcagtacatc

SEQ ID NO: 2082541 - DNA, 25 bp, Homo sapien
catttaggaatggatcgatattgaa

SEQ ID NO: 2082542 - DNA, 25 bp, Homo sapien
cagagcagtacatcaggcggcttga

SEQ ID NO: 2082543 - DNA, 25 bp, Homo sapien
aaaccagtgctccttgctgggatgc

SEQ ID NO: 2082544 - DNA, 25 bp, Homo sapien
ggcgacgtaataggcaaaccttcca

SEQ ID NO: 2082545 - DNA, 25 bp, Homo sapien
cagagttatccgtctggttagcccc

SEQ ID NO: 2082546 - DNA, 25 bp, Homo sapien
ggtggttcagagttatccgtctggt

SEQ ID NO: 2082547 - DNA, 25 bp, Homo sapien
ctgaatgctgcgtgagtgtgaagat

SEQ ID NO: 2082548 - DNA, 25 bp, Homo sapien
agatgtgtaacatgtcttcagcaga

SEQ ID NO: 2082549 - DNA, 25 bp, Homo sapien
ctattctgaatgctgcgtgagtgtg

SEQ ID NO: 2082550 - DNA, 25 bp, Homo sapien
gtgaagatgtgtaacatgtcttcag

SEQ ID NO: 2082551 - DNA, 25 bp, Homo sapien
tcctgggcatattctcactaatacc

SEQ ID NO: 2082552 - DNA, 25 bp, Homo sapien
taataccagatgtcacattggcatc

SEQ ID NO: 2082553 - DNA, 25 bp, Homo sapien
gacactttccgctgtccctttcctg

SEQ ID NO: 2082554 - DNA, 25 bp, Homo sapien
ggcatattctcactaataccagatg

SEQ ID NO: 2082555 - DNA, 25 bp, Homo sapien
tgccctgctgactgtgaactgactt

SEQ ID NO: 2082556 - DNA, 25 bp, Homo sapien
ctccctgcgcggctgggttccagtg

SEQ ID NO: 2082557 - DNA, 25 bp, Homo sapien
tcctgtgatgtgacccgggaaccta

SEQ ID NO: 2082558 - DNA, 25 bp, Homo sapien
gattcaggtctcttattgcaatgca

SEQ ID NO: 2082559 - DNA, 25 bp, Homo sapien
tctgcttagtagttttaacaatggc

SEQ ID NO: 2082560 - DNA, 25 bp, Homo sapien
acaatggcaaagtaaattctgaaat

SEQ ID NO: 2082561 - DNA, 25 bp, Homo sapien
cctggtggacaccttctataccagc

SEQ ID NO: 2082562 - DNA, 25 bp, Homo sapien
tggcaaagtaaattctgaaatttgg

SEQ ID NO: 2082563 - DNA, 25 bp, Homo sapien
aggcagaaatgatcgttttgtcact

SEQ ID NO: 2082564 - DNA, 25 bp, Homo sapien
gagtcggtcccaggcagaaatgatc

SEQ ID NO: 2082565 - DNA, 25 bp, Homo sapien
cacaaagcgagtcggtcccaggcag

SEQ ID NO: 2082566 - DNA, 25 bp, Homo sapien
gtgaagccacaaagcgagtcggtcc

SEQ ID NO: 2082567 - DNA, 25 bp, Homo sapien
tgtaatctctcttcacacgcaccat

SEQ ID NO: 2082568 - DNA, 25 bp, Homo sapien
tggcttttctactgagagcaccgcc

SEQ ID NO: 2082569 - DNA, 25 bp, Homo sapien
ccagttgtccacgattaagtctgta

SEQ ID NO: 2082570 - DNA, 25 bp, Homo sapien
tgtcccttctgtccgttcctctgag

SEQ ID NO: 2082571 - DNA, 25 bp, Homo sapien
ataaattttgcacgtgtgagtggag

SEQ ID NO: 2082572 - DNA, 25 bp, Homo sapien
tcacttgatcccacataaattttgc

SEQ ID NO: 2082573 - DNA, 25 bp, Homo sapien
ggcatggtcgttttcacttgatccc

SEQ ID NO: 2082574 - DNA, 25 bp, Homo sapien
ttaatcatgcttggcatggtcgttt

SEQ ID NO: 2082575 - DNA, 25 bp, Homo sapien
ccctgaacaggatcacgtaaagcat

SEQ ID NO: 2082576 - DNA, 25 bp, Homo sapien
agccctgaacaggatcacgtaaagc

SEQ ID NO: 2082577 - DNA, 25 bp, Homo sapien
gagccctgaacaggatcacgtaaag

SEQ ID NO: 2082578 - DNA, 25 bp, Homo sapien
gccctgaacaggatcacgtaaagca

SEQ ID NO: 2082579 - DNA, 25 bp, Homo sapien
tctgagctggccaaagtgctcgcca

SEQ ID NO: 2082580 - DNA, 25 bp, Homo sapien
cattgataagtgacacctgtgtgcc

SEQ ID NO: 2082581 - DNA, 25 bp, Homo sapien
cctgtgtgcccgagggaagtgacct

SEQ ID NO: 2082582 - DNA, 25 bp, Homo sapien
gatgagaggcacagcgtctttgccc

SEQ ID NO: 2082583 - DNA, 25 bp, Homo sapien
aggggcagatgtcgatgactgtgtt

SEQ ID NO: 2082584 - DNA, 25 bp, Homo sapien
gggaggggcagatgtcgatgactgt

SEQ ID NO: 2082585 - DNA, 25 bp, Homo sapien
ctgggaggggcagatgtcgatgact

SEQ ID NO: 2082586 - DNA, 25 bp, Homo sapien
gggcagatgtcgatgactgtgttcc

SEQ ID NO: 2082587 - DNA, 25 bp, Homo sapien
tggtcaccaggtacaacaggaggga

SEQ ID NO: 2082588 - DNA, 25 bp, Homo sapien
ttagaacagcaagtaacatcgcggg

SEQ ID NO: 2082589 - DNA, 25 bp, Homo sapien
caacgtggccagtttagggtgcgct

SEQ ID NO: 2082590 - DNA, 25 bp, Homo sapien
ggattgcaaaacatgggcaccctca

SEQ ID NO: 2082591 - DNA, 25 bp, Homo sapien
ccagtctttgggcagatatattacg

SEQ ID NO: 2082592 - DNA, 25 bp, Homo sapien
tgagtgaccgatcccggccctaagt

SEQ ID NO: 2082593 - DNA, 25 bp, Homo sapien
tgtggcccctcatgcgttgttctgt

SEQ ID NO: 2082594 - DNA, 25 bp, Homo sapien
gggaccgccatcctgggtgcctctg

SEQ ID NO: 2082595 - DNA, 25 bp, Homo sapien
catttctctggtgcgggaggagctg

SEQ ID NO: 2082596 - DNA, 25 bp, Homo sapien
cttctctgagtctttatataatctc

SEQ ID NO: 2082597 - DNA, 25 bp, Homo sapien
gcacccagcagcatgctggctccat

SEQ ID NO: 2082598 - DNA, 25 bp, Homo sapien
gtgcgggaggagctgtatctcttct

SEQ ID NO: 2082599 - DNA, 25 bp, Homo sapien
gaggaaaatgtccacttcaaagagg

SEQ ID NO: 2082600 - DNA, 25 bp, Homo sapien
tctatttggcaaatgagtccctcca

SEQ ID NO: 2082601 - DNA, 25 bp, Homo sapien
gacagcacggtgtgatgcgattaat

SEQ ID NO: 2082602 - DNA, 25 bp, Homo sapien
tttggcgccttcatggagagtcacc

SEQ ID NO: 2082603 - DNA, 25 bp, Homo sapien
tgtcagcgcggagtgaatctcgccg

SEQ ID NO: 2082604 - DNA, 25 bp, Homo sapien
taccattaatacgtgtgtcagcgcg

SEQ ID NO: 2082605 - DNA, 25 bp, Homo sapien
gagaactgagtcacagctgcacggg

SEQ ID NO: 2082606 - DNA, 25 bp, Homo sapien
tccgggagttgacacgaggcagtaa

SEQ ID NO: 2082607 - DNA, 25 bp, Homo sapien
gtaaagattaaattgcacatgattt

SEQ ID NO: 2082608 - DNA, 25 bp, Homo sapien
tcatgcacgcgagataatagataca

SEQ ID NO: 2082609 - DNA, 25 bp, Homo sapien
taggtcgacgaccttcatgcacgcg

SEQ ID NO: 2082610 - DNA, 25 bp, Homo sapien
actccaactgtcataggtcgacgac

SEQ ID NO: 2082611 - DNA, 25 bp, Homo sapien
ggtggcatctctagtttgctcagct

SEQ ID NO: 2082612 - DNA, 25 bp, Homo sapien
tttccatcaagagacttccgatgaa

SEQ ID NO: 2082613 - DNA, 25 bp, Homo sapien
gaaccccactgtattggtggcatct

SEQ ID NO: 2082614 - DNA, 25 bp, Homo sapien
ggtgggcaaactccccacgtctgaa

SEQ ID NO: 2082615 - DNA, 25 bp, Homo sapien
gcctggtccaggtcgcagcgattct

SEQ ID NO: 2082616 - DNA, 25 bp, Homo sapien
gagatttcggaaacattcgacgttc

SEQ ID NO: 2082617 - DNA, 25 bp, Homo sapien
aatccctgtcggctaatgccagctg

SEQ ID NO: 2082618 - DNA, 25 bp, Homo sapien
taggttggcgtccagacaagatgcc

SEQ ID NO: 2082619 - DNA, 25 bp, Homo sapien
tcgccatgaacttcctcccgtgttg

SEQ ID NO: 2082620 - DNA, 25 bp, Homo sapien
taatatgcgtggagtcgccatgaac

SEQ ID NO: 2082621 - DNA, 25 bp, Homo sapien
tataatatgcgtggagtcgccatga

SEQ ID NO: 2082622 - DNA, 25 bp, Homo sapien
tcccgtgttgcttccataatatgcg

SEQ ID NO: 2082623 - DNA, 25 bp, Homo sapien
catgaacttcctcccgtattgcttc

SEQ ID NO: 2082624 - DNA, 25 bp, Homo sapien
catgaacttcctcccgtgttgcttc

SEQ ID NO: 2082625 - DNA, 25 bp, Homo sapien
ccatgaacttcctcccgtattgctt

SEQ ID NO: 2082626 - DNA, 25 bp, Homo sapien
tatgcgtggggtcgccatgaacttc

SEQ ID NO: 2082627 - DNA, 25 bp, Homo sapien
acagccgcttctcgggatgctggga

SEQ ID NO: 2082628 - DNA, 25 bp, Homo sapien
accaaatgctctgttaggatgcagg

SEQ ID NO: 2082629 - DNA, 25 bp, Homo sapien
cagttgctcactgaggtcctctggc

SEQ ID NO: 2082630 - DNA, 25 bp, Homo sapien
tggaaggaccctctgtgggacagcc

SEQ ID NO: 2082631 - DNA, 25 bp, Homo sapien
tgcgcccccgtctaagcgtcgttta

SEQ ID NO: 2082632 - DNA, 25 bp, Homo sapien
caggttcccaccgatgctgatgtgg

SEQ ID NO: 2082633 - DNA, 25 bp, Homo sapien
tgccggggccgcatctgtcaccgtg

SEQ ID NO: 2082634 - DNA, 25 bp, Homo sapien
gatgtggaatctcaacgccagtgcc

SEQ ID NO: 2082635 - DNA, 25 bp, Homo sapien
tatagcagtaggagtgccggataca

SEQ ID NO: 2082636 - DNA, 25 bp, Homo sapien
gcgaacaaggatgcgtcagggtgcg

SEQ ID NO: 2082637 - DNA, 25 bp, Homo sapien
cagctgcagtcccacatagggcttc

SEQ ID NO: 2082638 - DNA, 25 bp, Homo sapien
ggccccggggtcaatggcattgaca

SEQ ID NO: 2082639 - DNA, 25 bp, Homo sapien
tgagctcacttggtctttcggtcac

SEQ ID NO: 2082640 - DNA, 25 bp, Homo sapien
ctttcggtcactctgagacagttgc

SEQ ID NO: 2082641 - DNA, 25 bp, Homo sapien
tgcttttacgtccccgttttgcaga

SEQ ID NO: 2082642 - DNA, 25 bp, Homo sapien
cacttggtctttcggtcactctgag

SEQ ID NO: 2082643 - DNA, 25 bp, Homo sapien
gtccaaagctcatgtctcaaaatta

SEQ ID NO: 2082644 - DNA, 25 bp, Homo sapien
ccaagcccacgcagctcggtgaagt

SEQ ID NO: 2082645 - DNA, 25 bp, Homo sapien
cccacgcagctcggtgaagtgaagt

SEQ ID NO: 2082646 - DNA, 25 bp, Homo sapien
tgggtccaaagctcatgtctcaaaa

SEQ ID NO: 2082647 - DNA, 25 bp, Homo sapien
tggacttcaactgagccctgtgatc

SEQ ID NO: 2082648 - DNA, 25 bp, Homo sapien
tattttaactttatccacacctctg

SEQ ID NO: 2082649 - DNA, 25 bp, Homo sapien
atgtttacatgagaaggttaaatat

SEQ ID NO: 2082650 - DNA, 25 bp, Homo sapien
cacctctgacagtcttggacttcaa

SEQ ID NO: 2082651 - DNA, 25 bp, Homo sapien
caaatcataccttacgtggatggcg

SEQ ID NO: 2082652 - DNA, 25 bp, Homo sapien
caaggaggggcaaatcataccttac

SEQ ID NO: 2082653 - DNA, 25 bp, Homo sapien
gggcaaatcataccttacgtggatg

SEQ ID NO: 2082654 - DNA, 25 bp, Homo sapien
aatcataccttacgtggatggcggc

SEQ ID NO: 2082655 - DNA, 25 bp, Homo sapien
ggacagttctggagacgaggacagt

SEQ ID NO: 2082656 - DNA, 25 bp, Homo sapien
ctgaaacagttctggaaagcagaac

SEQ ID NO: 2082657 - DNA, 25 bp, Homo sapien
tgaaacagttctggaaagcagaaca

SEQ ID NO: 2082658 - DNA, 25 bp, Homo sapien
gagaggaggatagttggggagagaa

SEQ ID NO: 2082659 - DNA, 25 bp, Homo sapien
acagttctgaacagaggaacagttc

SEQ ID NO: 2082660 - DNA, 25 bp, Homo sapien
agagaagtagttctggagaggggac

SEQ ID NO: 2082661 - DNA, 25 bp, Homo sapien
aacagttctggagagggggacaatc

SEQ ID NO: 2082662 - DNA, 25 bp, Homo sapien
tatattggtcattgtcacttcctga

SEQ ID NO: 2082663 - DNA, 25 bp, Homo sapien
tcttgcttagccacatctcgaatat

SEQ ID NO: 2082664 - DNA, 25 bp, Homo sapien
tctgctaatccacagacaattcttg

SEQ ID NO: 2082665 - DNA, 25 bp, Homo sapien
tgtcttcattctgggccacatacga

SEQ ID NO: 2082666 - DNA, 25 bp, Homo sapien
caaccctttcggtatcactaagaag

SEQ ID NO: 2082667 - DNA, 25 bp, Homo sapien
ctttcggtatcactaagaagcatct

SEQ ID NO: 2082668 - DNA, 25 bp, Homo sapien
agacaaccctttcggtatcactaag

SEQ ID NO: 2082669 - DNA, 25 bp, Homo sapien
gctaagacaaccctttcggtatcac

SEQ ID NO: 2082670 - DNA, 25 bp, Homo sapien
tgaaggtttccacaaccgggaggca

SEQ ID NO: 2082671 - DNA, 25 bp, Homo sapien
ggcgtggccagcgttccacatggca

SEQ ID NO: 2082672 - DNA, 25 bp, Homo sapien
gacggatgccatgaatgaggttttg

SEQ ID NO: 2082673 - DNA, 25 bp, Homo sapien
gatctaccttggcaatgacggatgc

SEQ ID NO: 2082674 - DNA, 25 bp, Homo sapien
tgcgggaagcagaagaactcacaac

SEQ ID NO: 2082675 - DNA, 25 bp, Homo sapien
agcagaagaactcacaactaggcat

SEQ ID NO: 2082676 - DNA, 25 bp, Homo sapien
gaagcagaagaactcacaactaggc

SEQ ID NO: 2082677 - DNA, 25 bp, Homo sapien
cgggaagcagaagaactcacaacta

SEQ ID NO: 2082678 - DNA, 25 bp, Homo sapien
aacctcaaaggtgcagtctctgagg

SEQ ID NO: 2082679 - DNA, 25 bp, Homo sapien
ttcacctccggaacctcaaaggtgc

SEQ ID NO: 2082680 - DNA, 25 bp, Homo sapien
ttgagtccacgagtggtcatgccct

SEQ ID NO: 2082681 - DNA, 25 bp, Homo sapien
tgtcgagtggatgaagagatgcccc

SEQ ID NO: 2082682 - DNA, 25 bp, Homo sapien
aacagcacaggcgtcgtggccacgc

SEQ ID NO: 2082683 - DNA, 25 bp, Homo sapien
tcagggcctggtcctcatggcccag

SEQ ID NO: 2082684 - DNA, 25 bp, Homo sapien
tcatgcacgcggcttggccgtgtcc

SEQ ID NO: 2082685 - DNA, 25 bp, Homo sapien
ggcagaagcgcagacggagacacag

SEQ ID NO: 2082686 - DNA, 25 bp, Homo sapien
gaggtctggtaaggatctcgttgtg

SEQ ID NO: 2082687 - DNA, 25 bp, Homo sapien
ggtctggtaaggatctcgttgtgga

SEQ ID NO: 2082688 - DNA, 25 bp, Homo sapien
tctggtaaggatctcgttgtggagc

SEQ ID NO: 2082689 - DNA, 25 bp, Homo sapien
taaggatctcgttgtggagcgtgaa

SEQ ID NO: 2082690 - DNA, 25 bp, Homo sapien
gggcaacctgcacccacatggaagc

SEQ ID NO: 2082691 - DNA, 25 bp, Homo sapien
gcaacctgcacccacatggaagcta

SEQ ID NO: 2082692 - DNA, 25 bp, Homo sapien
tgacttcgtgactgggccatgtgaa

SEQ ID NO: 2082693 - DNA, 25 bp, Homo sapien
tggaagctatttgacttcgtgactg

SEQ ID NO: 2082694 - DNA, 25 bp, Homo sapien
gcctctggcacacactaggatgtac

SEQ ID NO: 2082695 - DNA, 25 bp, Homo sapien
cttctgctccccttgtcggtacgtg

SEQ ID NO: 2082696 - DNA, 25 bp, Homo sapien
tccccttgtcggtacgtgggctcca

SEQ ID NO: 2082697 - DNA, 25 bp, Homo sapien
tgctccccttgtcggtacgtgggct

SEQ ID NO: 2082698 - DNA, 25 bp, Homo sapien
cttgtcggtacgtgggctccatgca

SEQ ID NO: 2082699 - DNA, 25 bp, Homo sapien
ggtttcctgcacgtctatccacaca

SEQ ID NO: 2082700 - DNA, 25 bp, Homo sapien
ctccactgggtttcctgcacgtcta

SEQ ID NO: 2082701 - DNA, 25 bp, Homo sapien
tatccacacagtgtaatttatcttc

SEQ ID NO: 2082702 - DNA, 25 bp, Homo sapien
tgcacgtctatccacacagtgtaat

SEQ ID NO: 2082703 - DNA, 25 bp, Homo sapien
acaaatatgtatctggacgtgggta

SEQ ID NO: 2082704 - DNA, 25 bp, Homo sapien
gacgtgggtatgtggtgaggccgca

SEQ ID NO: 2082705 - DNA, 25 bp, Homo sapien
cgtaccgtgtattgaagtgacacac

SEQ ID NO: 2082706 - DNA, 25 bp, Homo sapien
tgaggccgcagttgtgggaaaggtg

SEQ ID NO: 2082707 - DNA, 25 bp, Homo sapien
agtttctgccatgtcgtgaccctgc

SEQ ID NO: 2082708 - DNA, 25 bp, Homo sapien
cttgtacatcggaggcatctctccc

SEQ ID NO: 2082709 - DNA, 25 bp, Homo sapien
aggtgcctgcacctctccgtggggc

SEQ ID NO: 2082710 - DNA, 25 bp, Homo sapien
tgtctgcactgccttgtacatcgga

SEQ ID NO: 2082711 - DNA, 25 bp, Homo sapien
atctttgtttcgactcctctctcct

SEQ ID NO: 2082712 - DNA, 25 bp, Homo sapien
caggaaacccagagaccggccctgt

SEQ ID NO: 2082713 - DNA, 25 bp, Homo sapien
tgttccccgtgaggattcaggcacc

SEQ ID NO: 2082714 - DNA, 25 bp, Homo sapien
gggctggaaagcacactccctcgga

SEQ ID NO: 2082715 - DNA, 25 bp, Homo sapien
atgccgaagaggaaggacgtgcacg

SEQ ID NO: 2082716 - DNA, 25 bp, Homo sapien
gaaggacgtgcacgaaaacgcagac

SEQ ID NO: 2082717 - DNA, 25 bp, Homo sapien
cgtgcacgaaaacgcagaccaccag

SEQ ID NO: 2082718 - DNA, 25 bp, Homo sapien
tccctggcacgaaggccggacggat

SEQ ID NO: 2082719 - DNA, 25 bp, Homo sapien
ctgggtgagcaaaggactgatgctc

SEQ ID NO: 2082720 - DNA, 25 bp, Homo sapien
gatgccagtatgcatttgctgtgaa

SEQ ID NO: 2082721 - DNA, 25 bp, Homo sapien
tgatgctcttctgccctaaccatac

SEQ ID NO: 2082722 - DNA, 25 bp, Homo sapien
taagggaaatatggctccaaggcag

SEQ ID NO: 2082723 - DNA, 25 bp, Homo sapien
agtttatgacaaacacttagcccag

SEQ ID NO: 2082724 - DNA, 25 bp, Homo sapien
ctgaaggtttcgatgaaggtaaaag

SEQ ID NO: 2082725 - DNA, 25 bp, Homo sapien
tatgacaaacacttagcccagtgtc

SEQ ID NO: 2082726 - DNA, 25 bp, Homo sapien
aaacacttagcccagtgtcagacat

SEQ ID NO: 2082727 - DNA, 25 bp, Homo sapien
caaccatgatggtatgtccagggcc

SEQ ID NO: 2082728 - DNA, 25 bp, Homo sapien
gacacatgtcctccaatgccctggg

SEQ ID NO: 2082729 - DNA, 25 bp, Homo sapien
tggacatatgtcctctgatgcactg

SEQ ID NO: 2082730 - DNA, 25 bp, Homo sapien
gaagatgtaagagctctgcccgaca

SEQ ID NO: 2082731 - DNA, 25 bp, Homo sapien
ttacttcgtggaaacatatggctga

SEQ ID NO: 2082732 - DNA, 25 bp, Homo sapien
acttcgtggaaacatatggctgatg

SEQ ID NO: 2082733 - DNA, 25 bp, Homo sapien
tacttcgtggaaacatatggctgat

SEQ ID NO: 2082734 - DNA, 25 bp, Homo sapien
tttgtaagtaacgttttgattgtca

SEQ ID NO: 2082735 - DNA, 25 bp, Homo sapien
tcccctgacatttgttgtacagcag

SEQ ID NO: 2082736 - DNA, 25 bp, Homo sapien
tgtacagcaggattgatttttgtgc

SEQ ID NO: 2082737 - DNA, 25 bp, Homo sapien
tgtgctccagtatgaaaaggtcact

SEQ ID NO: 2082738 - DNA, 25 bp, Homo sapien
tccagcagcactgagctgtcccaga

SEQ ID NO: 2082739 - DNA, 25 bp, Homo sapien
cagcactgagctgtcccagagctcc

SEQ ID NO: 2082740 - DNA, 25 bp, Homo sapien
gcactgagctgtcccagagctccat

SEQ ID NO: 2082741 - DNA, 25 bp, Homo sapien
cctccagcagcactgagctgtccca

SEQ ID NO: 2082742 - DNA, 25 bp, Homo sapien
cactgtggagtgaaattgaggaaat

SEQ ID NO: 2082743 - DNA, 25 bp, Homo sapien
gtttcagcagatgaatcaatactcg

SEQ ID NO: 2082744 - DNA, 25 bp, Homo sapien
cacgttctaccactgtggagtgaaa

SEQ ID NO: 2082745 - DNA, 25 bp, Homo sapien
tcaatactcgcacgttctaccactg

SEQ ID NO: 2082746 - DNA, 25 bp, Homo sapien
aattttcctggaggtaagcagtcca

SEQ ID NO: 2082747 - DNA, 25 bp, Homo sapien
gcagtccagccgtttatttaataaa

SEQ ID NO: 2082748 - DNA, 25 bp, Homo sapien
aggtaagcagtccagccgtttattt

SEQ ID NO: 2082749 - DNA, 25 bp, Homo sapien
caattttcctggaggtaagcagtcc

SEQ ID NO: 2082750 - DNA, 25 bp, Homo sapien
ttttacatttcagaggcgatttgct

SEQ ID NO: 2082751 - DNA, 25 bp, Homo sapien
aatatgggtctgattataggattcc

SEQ ID NO: 2082752 - DNA, 25 bp, Homo sapien
cgcggcactacctcgacagtgatgg

SEQ ID NO: 2082753 - DNA, 25 bp, Homo sapien
cagtgatggaagatatgatgtaaac

SEQ ID NO: 2082754 - DNA, 25 bp, Homo sapien
gacaatagtactgcccttaaatgaa

SEQ ID NO: 2082755 - DNA, 25 bp, Homo sapien
tctgttgcatgaaaactatgaccct

SEQ ID NO: 2082756 - DNA, 25 bp, Homo sapien
cagtatatactagctccgcttggtg

SEQ ID NO: 2082757 - DNA, 25 bp, Homo sapien
tctaaagatcccaatggtcatcact

SEQ ID NO: 2082758 - DNA, 25 bp, Homo sapien
caagaggcttccgatagcatctgcg

SEQ ID NO: 2082759 - DNA, 25 bp, Homo sapien
gagaaccaatccctctttaagagct

SEQ ID NO: 2082760 - DNA, 25 bp, Homo sapien
tgcatgttgtcacccacgaaggagg

SEQ ID NO: 2082761 - DNA, 25 bp, Homo sapien
taagggcaacctgtcccaagaggct

SEQ ID NO: 2082762 - DNA, 25 bp, Homo sapien
tccctgaggtgaccgtagggcttgc

SEQ ID NO: 2082763 - DNA, 25 bp, Homo sapien
acacgatggcaggtgggcggcagct

SEQ ID NO: 2082764 - DNA, 25 bp, Homo sapien
ccctgcgaggaactcgagtccctga

SEQ ID NO: 2082765 - DNA, 25 bp, Homo sapien
gccttggtgcccacacgatggcagg

SEQ ID NO: 2082766 - DNA, 25 bp, Homo sapien
ccatttgcatggctctctcctcaat

SEQ ID NO: 2082767 - DNA, 25 bp, Homo sapien
gaaggctctccatttgcatggctct

SEQ ID NO: 2082768 - DNA, 25 bp, Homo sapien
ggctctccatttgcatggctctctc

SEQ ID NO: 2082769 - DNA, 25 bp, Homo sapien
tgcatggctctctcctcaatgactt

SEQ ID NO: 2082770 - DNA, 25 bp, Homo sapien
tatttccaatttctccgctgcctct

SEQ ID NO: 2082771 - DNA, 25 bp, Homo sapien
cattggaggacgctcggtgtctccc

SEQ ID NO: 2082772 - DNA, 25 bp, Homo sapien
gcttttgaatgcacccccattggag

SEQ ID NO: 2082773 - DNA, 25 bp, Homo sapien
gcctctccagtgactatcatcacag

SEQ ID NO: 2082774 - DNA, 25 bp, Homo sapien
tctttcaagagcatgaactggtttc

SEQ ID NO: 2082775 - DNA, 25 bp, Homo sapien
tcagtggactcctcaagttggctct

SEQ ID NO: 2082776 - DNA, 25 bp, Homo sapien
tctggcttcagctgagtgtgacatc

SEQ ID NO: 2082777 - DNA, 25 bp, Homo sapien
cgcccttcatgtccgtgcttggctg

SEQ ID NO: 2082778 - DNA, 25 bp, Homo sapien
tgcctgctcttctccatcctccagg

SEQ ID NO: 2082779 - DNA, 25 bp, Homo sapien
ctgcctgctcttctccatcctccag

SEQ ID NO: 2082780 - DNA, 25 bp, Homo sapien
gcctgctcttctccatcctccaggg

SEQ ID NO: 2082781 - DNA, 25 bp, Homo sapien
cttgggtagcccaagagaggatctg

SEQ ID NO: 2082782 - DNA, 25 bp, Homo sapien
tggcgacacccctgccaaaggaagc

SEQ ID NO: 2082783 - DNA, 25 bp, Homo sapien
aactgagaggaaccacttctcctgg

SEQ ID NO: 2082784 - DNA, 25 bp, Homo sapien
ttgggtagcccaagagaggatctgc

SEQ ID NO: 2082785 - DNA, 25 bp, Homo sapien
tgttgactgacggtcctctgacctc

SEQ ID NO: 2082786 - DNA, 25 bp, Homo sapien
aatacgtgtgttcgcggcgttcccg

SEQ ID NO: 2082787 - DNA, 25 bp, Homo sapien
ctgtggtgctgctgttggtgaaatc

SEQ ID NO: 2082788 - DNA, 25 bp, Homo sapien
gaaatccagcaccaagtgaggaccc

SEQ ID NO: 2082789 - DNA, 25 bp, Homo sapien
ttagtagcaaacctcacactctgaa

SEQ ID NO: 2082790 - DNA, 25 bp, Homo sapien
tggactcctcccacgtagtaaaatc

SEQ ID NO: 2082791 - DNA, 25 bp, Homo sapien
gagagctctgaacacgtcagtcttc

SEQ ID NO: 2082792 - DNA, 25 bp, Homo sapien
taatctcatcaagagctggactcct

SEQ ID NO: 2082793 - DNA, 25 bp, Homo sapien
cgctgagcacagagcgtggagccct

SEQ ID NO: 2082794 - DNA, 25 bp, Homo sapien
tcagggagaaagctcggtgacattc

SEQ ID NO: 2082795 - DNA, 25 bp, Homo sapien
gacccatgacgcagagaggcaggtc

SEQ ID NO: 2082796 - DNA, 25 bp, Homo sapien
ggcccaagagctccctgtctgcggg

SEQ ID NO: 2082797 - DNA, 25 bp, Homo sapien
cattgttcggcagtgataaggtgac

SEQ ID NO: 2082798 - DNA, 25 bp, Homo sapien
gaagattacattaagacctgggata

SEQ ID NO: 2082799 - DNA, 25 bp, Homo sapien
cagctggtgtctcttacagttgaca

SEQ ID NO: 2082800 - DNA, 25 bp, Homo sapien
cacagagagtcatcataatcggttc

SEQ ID NO: 2082801 - DNA, 25 bp, Homo sapien
gcttgcggcagtgtcggccactgaa

SEQ ID NO: 2082802 - DNA, 25 bp, Homo sapien
ggcagtgtcggccactgaaatgatt

SEQ ID NO: 2082803 - DNA, 25 bp, Homo sapien
cagtgtcggccactgaaatgattgt

SEQ ID NO: 2082804 - DNA, 25 bp, Homo sapien
ttgcggcagtgtcggccactgaaat

SEQ ID NO: 2082805 - DNA, 25 bp, Homo sapien
agatgaaagtcctgtgctgaaaaca

SEQ ID NO: 2082806 - DNA, 25 bp, Homo sapien
gcagatgaaagtcctgtgctgaaaa

SEQ ID NO: 2082807 - DNA, 25 bp, Homo sapien
cagatgaaagtcctgtgctgaaaac

SEQ ID NO: 2082808 - DNA, 25 bp, Homo sapien
gatgaaagtcctgtgctgaaaacat

SEQ ID NO: 2082809 - DNA, 25 bp, Homo sapien
tggaagaccatcacgaacattacat

SEQ ID NO: 2082810 - DNA, 25 bp, Homo sapien
tctgtcatcagaatggtgccatggc

SEQ ID NO: 2082811 - DNA, 25 bp, Homo sapien
tgtcctctcagacagaacacgtgtg

SEQ ID NO: 2082812 - DNA, 25 bp, Homo sapien
cagagccacatagtgtccccagaga

SEQ ID NO: 2082813 - DNA, 25 bp, Homo sapien
tgctggaaaatacccgtggccgatt

SEQ ID NO: 2082814 - DNA, 25 bp, Homo sapien
gaattctcacaatgtaggatgcgcc

SEQ ID NO: 2082815 - DNA, 25 bp, Homo sapien
tcaccggctctcatatgctggaaaa

SEQ ID NO: 2082816 - DNA, 25 bp, Homo sapien
caagcagcatcgttagactctggat

SEQ ID NO: 2082817 - DNA, 25 bp, Homo sapien
ttaatcagttctgataaccactaca

SEQ ID NO: 2082818 - DNA, 25 bp, Homo sapien
gttaatcagttctgataaccactac

SEQ ID NO: 2082819 - DNA, 25 bp, Homo sapien
tgttaatcagttctgataaccacta

SEQ ID NO: 2082820 - DNA, 25 bp, Homo sapien
taatcagttctgataaccactacat

SEQ ID NO: 2082821 - DNA, 25 bp, Homo sapien
ctgcggaccgggagagcgtcacagc

SEQ ID NO: 2082822 - DNA, 25 bp, Homo sapien
tcagcaccggaacacatatgcacca

SEQ ID NO: 2082823 - DNA, 25 bp, Homo sapien
aatggcaaagtgagtgaacctgcgg

SEQ ID NO: 2082824 - DNA, 25 bp, Homo sapien
tcccactactcttaggtatttcatg

SEQ ID NO: 2082825 - DNA, 25 bp, Homo sapien
gtaactcgcgcgtcctgagcccgaa

SEQ ID NO: 2082826 - DNA, 25 bp, Homo sapien
caggtgctccgggatgaccggccca

SEQ ID NO: 2082827 - DNA, 25 bp, Homo sapien
aaccccattgagcacaggcccaggt

SEQ ID NO: 2082828 - DNA, 25 bp, Homo sapien
caaagacggtgttctcactggacag

SEQ ID NO: 2082829 - DNA, 25 bp, Homo sapien
tgctctcgttgaaggaagccgtgct

SEQ ID NO: 2082830 - DNA, 25 bp, Homo sapien
tgttcttggaagctctcggcagccc

SEQ ID NO: 2082831 - DNA, 25 bp, Homo sapien
tttaagaacctgctgaactcggcgg

SEQ ID NO: 2082832 - DNA, 25 bp, Homo sapien
aaatcccgcctgttcttagactgtg

SEQ ID NO: 2082833 - DNA, 25 bp, Homo sapien
gagtcagcattcaaggagggagaat

SEQ ID NO: 2082834 - DNA, 25 bp, Homo sapien
ggccgttggaccaaagtgccaggct

SEQ ID NO: 2082835 - DNA, 25 bp, Homo sapien
tttactttccagtcccatggcgagg

SEQ ID NO: 2082836 - DNA, 25 bp, Homo sapien
ggctctccagcctttactttccagt

SEQ ID NO: 2082837 - DNA, 25 bp, Homo sapien
gtcctggcgaccagcgctgctaatg

SEQ ID NO: 2082838 - DNA, 25 bp, Homo sapien
ggcaacgccgcagttcacattcgac

SEQ ID NO: 2082839 - DNA, 25 bp, Homo sapien
tcggcaatgattgaagaggccgcgt

SEQ ID NO: 2082840 - DNA, 25 bp, Homo sapien
gcgtctgtctccgtgcatggcagcc

SEQ ID NO: 2082841 - DNA, 25 bp, Homo sapien
gatgaatgcgcttctccctcacaaa

SEQ ID NO: 2082842 - DNA, 25 bp, Homo sapien
agatggccctgaagtgcacaatggg

SEQ ID NO: 2082843 - DNA, 25 bp, Homo sapien
tttgaaggagcagtgagttcgagcc

SEQ ID NO: 2082844 - DNA, 25 bp, Homo sapien
caggcggcccgatgaagtatgtcca

SEQ ID NO: 2082845 - DNA, 25 bp, Homo sapien
gcccatgagtggttgcaggacccat

SEQ ID NO: 2082846 - DNA, 25 bp, Homo sapien
cgcctgtgagtgtggacccgtaaga

SEQ ID NO: 2082847 - DNA, 25 bp, Homo sapien
gcaacagcatcaggaagtggcgcct

SEQ ID NO: 2082848 - DNA, 25 bp, Homo sapien
taagaggtggcggaacccatgagta

SEQ ID NO: 2082849 - DNA, 25 bp, Homo sapien
agagtcctgagcttcatgagcacag

SEQ ID NO: 2082850 - DNA, 25 bp, Homo sapien
gatagatgtctccatgggacccagg

SEQ ID NO: 2082851 - DNA, 25 bp, Homo sapien
cacaaggtgcagaaaacgcagagtc

SEQ ID NO: 2082852 - DNA, 25 bp, Homo sapien
ttcagacccaaacccagcaaagctg

SEQ ID NO: 2082853 - DNA, 25 bp, Homo sapien
cttggcctgagacccgcatcttttc

SEQ ID NO: 2082854 - DNA, 25 bp, Homo sapien
tcatctcagagggtgaagcatgcat

SEQ ID NO: 2082855 - DNA, 25 bp, Homo sapien
tactctcctcaagaagaatttcggg

SEQ ID NO: 2082856 - DNA, 25 bp, Homo sapien
gaatttcgggaagactttgcactgt

SEQ ID NO: 2082857 - DNA, 25 bp, Homo sapien
gggccacaccctgcaacacggtgac

SEQ ID NO: 2082858 - DNA, 25 bp, Homo sapien
ggtaatgagcacctcccctgaatta

SEQ ID NO: 2082859 - DNA, 25 bp, Homo sapien
ctcggtaatgagcacctcccctgaa

SEQ ID NO: 2082860 - DNA, 25 bp, Homo sapien
taatgagcacctcccctgaattaag

SEQ ID NO: 2082861 - DNA, 25 bp, Homo sapien
atctttgtgctccctcagaggcagc

SEQ ID NO: 2082862 - DNA, 25 bp, Homo sapien
gcatctttgtgctccctcagaggca

SEQ ID NO: 2082863 - DNA, 25 bp, Homo sapien
cgtgcatctttgtgctccctcagag

SEQ ID NO: 2082864 - DNA, 25 bp, Homo sapien
gtgcatctttgtgctccctcagagg

SEQ ID NO: 2082865 - DNA, 25 bp, Homo sapien
ttctccagatacagattcagcgatc

SEQ ID NO: 2082866 - DNA, 25 bp, Homo sapien
gcgatccatacaccacactgcttag

SEQ ID NO: 2082867 - DNA, 25 bp, Homo sapien
cttgactgaattccatctggatcca

SEQ ID NO: 2082868 - DNA, 25 bp, Homo sapien
tattttgctcctgtccgtattccca

SEQ ID NO: 2082869 - DNA, 25 bp, Homo sapien
cgcccgagtccgtgaggtcaggacc

SEQ ID NO: 2082870 - DNA, 25 bp, Homo sapien
cttgacgacggcacgaagagcatgg

SEQ ID NO: 2082871 - DNA, 25 bp, Homo sapien
gactctgagctgtcgagaggtgaac

SEQ ID NO: 2082872 - DNA, 25 bp, Homo sapien
cagttggaatccacacaggtcccag

SEQ ID NO: 2082873 - DNA, 25 bp, Homo sapien
gatcccaatttcagtggccaccatg

SEQ ID NO: 2082874 - DNA, 25 bp, Homo sapien
ggcctgaactgcagatcccaatttc

SEQ ID NO: 2082875 - DNA, 25 bp, Homo sapien
caccatgcctgtctcagtttcagca

SEQ ID NO: 2082876 - DNA, 25 bp, Homo sapien
caggcccctggcctgaactgcagat

SEQ ID NO: 2082877 - DNA, 25 bp, Homo sapien
ctctcctcggccgggcggcctgttc

SEQ ID NO: 2082878 - DNA, 25 bp, Homo sapien
gggcggcctgttctcctcagatcag

SEQ ID NO: 2082879 - DNA, 25 bp, Homo sapien
tctcctcggccgggcggcctgttct

SEQ ID NO: 2082880 - DNA, 25 bp, Homo sapien
ggcggcctgttctcctcagatcagt

SEQ ID NO: 2082881 - DNA, 25 bp, Homo sapien
gaagcatattgatccacgcatctgg

SEQ ID NO: 2082882 - DNA, 25 bp, Homo sapien
gagcacacgctgagatgcatttgga

SEQ ID NO: 2082883 - DNA, 25 bp, Homo sapien
tgtgacctagtgtggactcctcgca

SEQ ID NO: 2082884 - DNA, 25 bp, Homo sapien
tcccctgtgcggtgatgcttctgat

SEQ ID NO: 2082885 - DNA, 25 bp, Homo sapien
tccccagtgccaagattctgccgaa

SEQ ID NO: 2082886 - DNA, 25 bp, Homo sapien
gaggctctgacgctgctgccccggg

SEQ ID NO: 2082887 - DNA, 25 bp, Homo sapien
ggaagggcttgtttctcccgatctc

SEQ ID NO: 2082888 - DNA, 25 bp, Homo sapien
accccagaggctcgaggctctgacg

SEQ ID NO: 2082889 - DNA, 25 bp, Homo sapien
tccaaggtcagatgaaaaggcacaa

SEQ ID NO: 2082890 - DNA, 25 bp, Homo sapien
tcatggctacatggcggcttctcca

SEQ ID NO: 2082891 - DNA, 25 bp, Homo sapien
ggccctacggctttgctcttcatgg

SEQ ID NO: 2082892 - DNA, 25 bp, Homo sapien
tcagagtctgctcccgaagacagga

SEQ ID NO: 2082893 - DNA, 25 bp, Homo sapien
tgttgggtggacacctgcgcaaacc

SEQ ID NO: 2082894 - DNA, 25 bp, Homo sapien
aaccacttccgatggctgttgggtg

SEQ ID NO: 2082895 - DNA, 25 bp, Homo sapien
cacaccaaactggtccatcatggaa

SEQ ID NO: 2082896 - DNA, 25 bp, Homo sapien
gaatacacggcctgttcccagatga

SEQ ID NO: 2082897 - DNA, 25 bp, Homo sapien
gcacagtgggccatgtcagcgccat

SEQ ID NO: 2082898 - DNA, 25 bp, Homo sapien
gtgcccacggattgaccaaggcgct

SEQ ID NO: 2082899 - DNA, 25 bp, Homo sapien
tgaaggtgccgctgtctgaagccat

SEQ ID NO: 2082900 - DNA, 25 bp, Homo sapien
atcccaggtgctcgtgccatcgtgg

SEQ ID NO: 2082901 - DNA, 25 bp, Homo sapien
gccatcgtgggcattggcctctgct

SEQ ID NO: 2082902 - DNA, 25 bp, Homo sapien
tctttgcagtgctcaagagcgctgt

SEQ ID NO: 2082903 - DNA, 25 bp, Homo sapien
aattatccctgtcagttggaagaac

SEQ ID NO: 2082904 - DNA, 25 bp, Homo sapien
ctctcaattaattccggcatacaaa

SEQ ID NO: 2082905 - DNA, 25 bp, Homo sapien
caaatatgactaattgtctttgcag

SEQ ID NO: 2082906 - DNA, 25 bp, Homo sapien
catatctgctttgtgacaataactc

SEQ ID NO: 2082907 - DNA, 25 bp, Homo sapien
tcatatctgctttgtgacaataact

SEQ ID NO: 2082908 - DNA, 25 bp, Homo sapien
ttctttgatgtcttggatgattcac

SEQ ID NO: 2082909 - DNA, 25 bp, Homo sapien
gctccctgcgcctgatttctttgat

SEQ ID NO: 2082910 - DNA, 25 bp, Homo sapien
gctttagcgagctctgcctgtgcag

SEQ ID NO: 2082911 - DNA, 25 bp, Homo sapien
ctgctttagcgagctctgcctgtgc

SEQ ID NO: 2082912 - DNA, 25 bp, Homo sapien
tagagcaatgcccatgaccgacacc

SEQ ID NO: 2082913 - DNA, 25 bp, Homo sapien
tgcccatgaccgacaccatgggtct

SEQ ID NO: 2082914 - DNA, 25 bp, Homo sapien
caggtagagcaatgcccatgaccga

SEQ ID NO: 2082915 - DNA, 25 bp, Homo sapien
agcaatgcccatgaccgacaccatg

SEQ ID NO: 2082916 - DNA, 25 bp, Homo sapien
ggggcgggtgcattgcatgtcctcc

SEQ ID NO: 2082917 - DNA, 25 bp, Homo sapien
gggggggcgggtgcattgcatgtcc

SEQ ID NO: 2082918 - DNA, 25 bp, Homo sapien
gcgggtgcattgcatgtcctcctgc

SEQ ID NO: 2082919 - DNA, 25 bp, Homo sapien
gtcctcctgctgtttgtgggagacc

SEQ ID NO: 2082920 - DNA, 25 bp, Homo sapien
gaagggtatattcacagagcgcaga

SEQ ID NO: 2082921 - DNA, 25 bp, Homo sapien
tggagatcaaggctgggcccacata

SEQ ID NO: 2082922 - DNA, 25 bp, Homo sapien
aaggctgtgtccatgtagaacaaga

SEQ ID NO: 2082923 - DNA, 25 bp, Homo sapien
tcatgcagatcaaggctgtgcccgt

SEQ ID NO: 2082924 - DNA, 25 bp, Homo sapien
aagagctattcgtatgcggcctgca

SEQ ID NO: 2082925 - DNA, 25 bp, Homo sapien
aatcaggcctgtattgcgttttgca

SEQ ID NO: 2082926 - DNA, 25 bp, Homo sapien
ttttcaagtaagtgtctgctttcat

SEQ ID NO: 2082927 - DNA, 25 bp, Homo sapien
ccaggatgttggtttagagtgtttc

SEQ ID NO: 2082928 - DNA, 25 bp, Homo sapien
caggtccatgctctgccgggcacct

SEQ ID NO: 2082929 - DNA, 25 bp, Homo sapien
ggtccatgctctgccgggcacctgg

SEQ ID NO: 2082930 - DNA, 25 bp, Homo sapien
catcacaggtccatgctctgccggg

SEQ ID NO: 2082931 - DNA, 25 bp, Homo sapien
tcacaggtccatgctctgccgggca

SEQ ID NO: 2082932 - DNA, 25 bp, Homo sapien
ggcacccagcagtcataacctggca

SEQ ID NO: 2082933 - DNA, 25 bp, Homo sapien
tccagtggtcattacctgatacccg

SEQ ID NO: 2082934 - DNA, 25 bp, Homo sapien
gatacccggtggtcattacctggtc

SEQ ID NO: 2082935 - DNA, 25 bp, Homo sapien
tggcacccagcagtcataacctggc

SEQ ID NO: 2082936 - DNA, 25 bp, Homo sapien
cattacctggtgtccagtggtcatt

SEQ ID NO: 2082937 - DNA, 25 bp, Homo sapien
gtgtccagtggtcattacctggtgc

SEQ ID NO: 2082938 - DNA, 25 bp, Homo sapien
gtccagtggtcattacctggtgccc

SEQ ID NO: 2082939 - DNA, 25 bp, Homo sapien
cctggtgtccagtggtcattacctg

SEQ ID NO: 2082940 - DNA, 25 bp, Homo sapien
agtcatcacttagtgtccagtggtc

SEQ ID NO: 2082941 - DNA, 25 bp, Homo sapien
tccagaagtcattacctgatgtcca

SEQ ID NO: 2082942 - DNA, 25 bp, Homo sapien
tcatcacttagtgtccagtggtcat

SEQ ID NO: 2082943 - DNA, 25 bp, Homo sapien
agaagtcattacctgatgtccagcg

SEQ ID NO: 2082944 - DNA, 25 bp, Homo sapien
agcacattccgaggcgttcccgtgg

SEQ ID NO: 2082945 - DNA, 25 bp, Homo sapien
tggctggatgtttctcacgcggtga

SEQ ID NO: 2082946 - DNA, 25 bp, Homo sapien
tcaccaaaatcacggatgccagcca

SEQ ID NO: 2082947 - DNA, 25 bp, Homo sapien
gaagaacgagtcacctgtttagctc

SEQ ID NO: 2082948 - DNA, 25 bp, Homo sapien
gatccgatccagttcaaagcgcagg

SEQ ID NO: 2082949 - DNA, 25 bp, Homo sapien
gggtgaggcggagccgctcctgaag

SEQ ID NO: 2082950 - DNA, 25 bp, Homo sapien
ctgctctccgctggactccacgtgg

SEQ ID NO: 2082951 - DNA, 25 bp, Homo sapien
cgcaggccgtggaacaggacggcag

SEQ ID NO: 2082952 - DNA, 25 bp, Homo sapien
gaggaccggcgactccgtccgtcag

SEQ ID NO: 2082953 - DNA, 25 bp, Homo sapien
tcagcgagtcctgtgggtacacgga

SEQ ID NO: 2082954 - DNA, 25 bp, Homo sapien
tcgggaggcctatccgaggtattgc

SEQ ID NO: 2082955 - DNA, 25 bp, Homo sapien
tccgctcatcacagaggtgtccggg

SEQ ID NO: 2082956 - DNA, 25 bp, Homo sapien
gaggagcagattgtcatttgttcgt

SEQ ID NO: 2082957 - DNA, 25 bp, Homo sapien
gagcagattgtcatttgttcgttgt

SEQ ID NO: 2082958 - DNA, 25 bp, Homo sapien
cagattgtcatttgttcgttgtttc

SEQ ID NO: 2082959 - DNA, 25 bp, Homo sapien
ggagcagattgtcatttgttcgttg

SEQ ID NO: 2082960 - DNA, 25 bp, Homo sapien
gagccaaaagcatataggccgtgct

SEQ ID NO: 2082961 - DNA, 25 bp, Homo sapien
tgggatattcagaaagccggatctt

SEQ ID NO: 2082962 - DNA, 25 bp, Homo sapien
actacatgcaggatatgagcgagtg

SEQ ID NO: 2082963 - DNA, 25 bp, Homo sapien
gatatgagcgagtggagactggccc

SEQ ID NO: 2082964 - DNA, 25 bp, Homo sapien
actgtcacgccatggagacggtggt

SEQ ID NO: 2082965 - DNA, 25 bp, Homo sapien
aggtgaaggtcatgaacaacaaaga

SEQ ID NO: 2082966 - DNA, 25 bp, Homo sapien
tgcatcactttaatcaggagaaaac

SEQ ID NO: 2082967 - DNA, 25 bp, Homo sapien
aaactgaggaactgtcacgccatgg

SEQ ID NO: 2082968 - DNA, 25 bp, Homo sapien
tggtgaaatcagagtaaagcttgcc

SEQ ID NO: 2082969 - DNA, 25 bp, Homo sapien
ccatggccatgcaggatgctgacac

SEQ ID NO: 2082970 - DNA, 25 bp, Homo sapien
aagggcacatgggaactgtctgtac

SEQ ID NO: 2082971 - DNA, 25 bp, Homo sapien
actgtccaaaaacctcccgctgtag

SEQ ID NO: 2082972 - DNA, 25 bp, Homo sapien
catctggcgggctgaggatatcttt

SEQ ID NO: 2082973 - DNA, 25 bp, Homo sapien
gcgtgtcgtcactcaaatgcaggag

SEQ ID NO: 2082974 - DNA, 25 bp, Homo sapien
ccagcaagtattgaacaagaagtcc

SEQ ID NO: 2082975 - DNA, 25 bp, Homo sapien
agacatagtcctttctaaaactggg

SEQ ID NO: 2082976 - DNA, 25 bp, Homo sapien
ctggcgctgtgttattgcccacagc

SEQ ID NO: 2082977 - DNA, 25 bp, Homo sapien
tcgctgcacatggaccgtcggccga

SEQ ID NO: 2082978 - DNA, 25 bp, Homo sapien
gcacaacgacctccttgtcctctgg

SEQ ID NO: 2082979 - DNA, 25 bp, Homo sapien
cctctgggttgatatcctcggattc

SEQ ID NO: 2082980 - DNA, 25 bp, Homo sapien
tgaggaaaattaaccagggagcaat

SEQ ID NO: 2082981 - DNA, 25 bp, Homo sapien
aactgcttgtaattacactgcatgc

SEQ ID NO: 2082982 - DNA, 25 bp, Homo sapien
ttctccagaccatattttacaacag

SEQ ID NO: 2082983 - DNA, 25 bp, Homo sapien
taattacactgcatgccaggacaaa

SEQ ID NO: 2082984 - DNA, 25 bp, Homo sapien
gcttgtaattacactgcatgccagg

SEQ ID NO: 2082985 - DNA, 25 bp, Homo sapien
cactaacggtttgagccaccaggta

SEQ ID NO: 2082986 - DNA, 25 bp, Homo sapien
cacagcagcgcgtgttacgggaagc

SEQ ID NO: 2082987 - DNA, 25 bp, Homo sapien
gcttggtgaccgtgatccagtcccg

SEQ ID NO: 2082988 - DNA, 25 bp, Homo sapien
cgggcagcgtcctgacatagtcgta

SEQ ID NO: 2082989 - DNA, 25 bp, Homo sapien
ctgccgggcctgcgacccctctgct

SEQ ID NO: 2082990 - DNA, 25 bp, Homo sapien
ctcccgacccctgggccagcgtggc

SEQ ID NO: 2082991 - DNA, 25 bp, Homo sapien
cgggcctgcgacccctctgctgcag

SEQ ID NO: 2082992 - DNA, 25 bp, Homo sapien
cccgacccctgggccagcgtggcca

SEQ ID NO: 2082993 - DNA, 25 bp, Homo sapien
aaagaagactcagctcctcatccac

SEQ ID NO: 2082994 - DNA, 25 bp, Homo sapien
ggtaaaagaagactcagctcctcat

SEQ ID NO: 2082995 - DNA, 25 bp, Homo sapien
aggggtaaaagaagactcagctcct

SEQ ID NO: 2082996 - DNA, 25 bp, Homo sapien
aaaagaagactcagctcctcatcca

SEQ ID NO: 2082997 - DNA, 25 bp, Homo sapien
tcatccacatcatgaccacgagcag

SEQ ID NO: 2082998 - DNA, 25 bp, Homo sapien
cctcatccacatcatgaccacgagc

SEQ ID NO: 2082999 - DNA, 25 bp, Homo sapien
ctcatccacatcatgaccacgagca

SEQ ID NO: 2083000 - DNA, 25 bp, Homo sapien
atgtcctggcgcccacagcgatggc

SEQ ID NO: 2083001 - DNA, 25 bp, Homo sapien
gacagatgtcctggcgcccacagcg

SEQ ID NO: 2083002 - DNA, 25 bp, Homo sapien
cagagaagcctcaacatgcccacaa

SEQ ID NO: 2083003 - DNA, 25 bp, Homo sapien
aggacagatgtcctggcgcccacag

SEQ ID NO: 2083004 - DNA, 25 bp, Homo sapien
gggaagcacgatctactgggctgcc

SEQ ID NO: 2083005 - DNA, 25 bp, Homo sapien
gtcattggcagcagcgagtctccct

SEQ ID NO: 2083006 - DNA, 25 bp, Homo sapien
gagtctccctcacgggaagcacgat

SEQ ID NO: 2083007 - DNA, 25 bp, Homo sapien
tcctgtggccgggtcacgatgtttt

SEQ ID NO: 2083008 - DNA, 25 bp, Homo sapien
tgccggctcccagctcggacaggct

SEQ ID NO: 2083009 - DNA, 25 bp, Homo sapien
tcgcaccaccccactgtaattataa

SEQ ID NO: 2083010 - DNA, 25 bp, Homo sapien
agctgatgacaattaaatctatggg

SEQ ID NO: 2083011 - DNA, 25 bp, Homo sapien
gggggaaggaatccacctcgcacca

SEQ ID NO: 2083012 - DNA, 25 bp, Homo sapien
gagatgcccataaccaaccggaagt

SEQ ID NO: 2083013 - DNA, 25 bp, Homo sapien
caaggagagtgtgagatgcccataa

SEQ ID NO: 2083014 - DNA, 25 bp, Homo sapien
gccagcaaatgatgagcacacaaat

SEQ ID NO: 2083015 - DNA, 25 bp, Homo sapien
ccctggttcagccgtggcttggcag

SEQ ID NO: 2083016 - DNA, 25 bp, Homo sapien
tgcgcgttcatacacgatgctagac

SEQ ID NO: 2083017 - DNA, 25 bp, Homo sapien
ccacacaactgacaatgcagggcca

SEQ ID NO: 2083018 - DNA, 25 bp, Homo sapien
gctagagaataatccagagtaatcc

SEQ ID NO: 2083019 - DNA, 25 bp, Homo sapien
agagtaatccagagctgcgcgttca

SEQ ID NO: 2083020 - DNA, 25 bp, Homo sapien
tgggatggccacctgaaaggcaggc

SEQ ID NO: 2083021 - DNA, 25 bp, Homo sapien
catctcggctggcagcgctcacctc

SEQ ID NO: 2083022 - DNA, 25 bp, Homo sapien
ctcacctccaactccgaaagccttt

SEQ ID NO: 2083023 - DNA, 25 bp, Homo sapien
cctccatctcggctggcagcgctca

SEQ ID NO: 2083024 - DNA, 25 bp, Homo sapien
accatatcacatggtttgcagacac

SEQ ID NO: 2083025 - DNA, 25 bp, Homo sapien
gctgcacagaggcttttgggtttga

SEQ ID NO: 2083026 - DNA, 25 bp, Homo sapien
tctgctcgttgcctcctttgctgca

SEQ ID NO: 2083027 - DNA, 25 bp, Homo sapien
tctccaagtccataggtcacctttt

SEQ ID NO: 2083028 - DNA, 25 bp, Homo sapien
ctggtgatcctccatggagaatgcg

SEQ ID NO: 2083029 - DNA, 25 bp, Homo sapien
cctccatggagaatgcgtaggagcc

SEQ ID NO: 2083030 - DNA, 25 bp, Homo sapien
cgtaggagccggatattggcactgc

SEQ ID NO: 2083031 - DNA, 25 bp, Homo sapien
gagccggatattggcactgccaggt

SEQ ID NO: 2083032 - DNA, 25 bp, Homo sapien
gcaacatgttccgagacacgcagga

SEQ ID NO: 2083033 - DNA, 25 bp, Homo sapien
agcgaatcttctgccggactgatca

SEQ ID NO: 2083034 - DNA, 25 bp, Homo sapien
gacatgaagtcgctacagctttgca

SEQ ID NO: 2083035 - DNA, 25 bp, Homo sapien
gactgatcaaggcacagcgcttctg

SEQ ID NO: 2083036 - DNA, 25 bp, Homo sapien
tgacacaggccacggagcgagccgc

SEQ ID NO: 2083037 - DNA, 25 bp, Homo sapien
cttcatcccatatgtggtgtggctg

SEQ ID NO: 2083038 - DNA, 25 bp, Homo sapien
tcatcccatatgtggtgtggctggg

SEQ ID NO: 2083039 - DNA, 25 bp, Homo sapien
caggatgatggacggtgacacaggc

SEQ ID NO: 2083040 - DNA, 25 bp, Homo sapien
tacccacaatgcaaagtcgatgtga

SEQ ID NO: 2083041 - DNA, 25 bp, Homo sapien
gttctttcctcgatgtcgtcataca

SEQ ID NO: 2083042 - DNA, 25 bp, Homo sapien
aaagtcgatgtgagttctttcctcg

SEQ ID NO: 2083043 - DNA, 25 bp, Homo sapien
ttctgctccaagtacccacaatgca

SEQ ID NO: 2083044 - DNA, 25 bp, Homo sapien
gcaagctgccacaatttagaacctg

SEQ ID NO: 2083045 - DNA, 25 bp, Homo sapien
gttttaacagctaaagtccaggaga

SEQ ID NO: 2083046 - DNA, 25 bp, Homo sapien
tgtgatgggcctgagcattcaacag

SEQ ID NO: 2083047 - DNA, 25 bp, Homo sapien
tcaacagagacattcaaagccacgg

SEQ ID NO: 2083048 - DNA, 25 bp, Homo sapien
tagaccttggagttccgacgcatgt

SEQ ID NO: 2083049 - DNA, 25 bp, Homo sapien
gagctaaaggtgcaccttgaagaca

SEQ ID NO: 2083050 - DNA, 25 bp, Homo sapien
gagttccgacgcatgtcagagctaa

SEQ ID NO: 2083051 - DNA, 25 bp, Homo sapien
tcacagcacagcgtagaccttggag

SEQ ID NO: 2083052 - DNA, 25 bp, Homo sapien
caaaatgcgtttcttatgattctca

SEQ ID NO: 2083053 - DNA, 25 bp, Homo sapien
ctgtaaagtgggtgatcgtaatgcc

SEQ ID NO: 2083054 - DNA, 25 bp, Homo sapien
cacaatttgcacgaaccacagtcaa

SEQ ID NO: 2083055 - DNA, 25 bp, Homo sapien
aagcaataaaaaagcagagtccatt

SEQ ID NO: 2083056 - DNA, 25 bp, Homo sapien
cacatcccaagaattccacgtcgtg

SEQ ID NO: 2083057 - DNA, 25 bp, Homo sapien
tccgcagagattctaatgactccca

SEQ ID NO: 2083058 - DNA, 25 bp, Homo sapien
acatcagacactccgcagagattct

SEQ ID NO: 2083059 - DNA, 25 bp, Homo sapien
tgaggaacagccctcgatgccttca

SEQ ID NO: 2083060 - DNA, 25 bp, Homo sapien
ccaggtcctgtcctcgtcttcgtgg

SEQ ID NO: 2083061 - DNA, 25 bp, Homo sapien
cgtcttcgtggttgaagctgttgca

SEQ ID NO: 2083062 - DNA, 25 bp, Homo sapien
tttggtcccaggtcctgtcctcgtc

SEQ ID NO: 2083063 - DNA, 25 bp, Homo sapien
tcctgtcctcgtcttcgtggttgaa

SEQ ID NO: 2083064 - DNA, 25 bp, Homo sapien
ccacagggttagcaaagacgcaaga

SEQ ID NO: 2083065 - DNA, 25 bp, Homo sapien
ttcctggaattggaagcagccggtg

SEQ ID NO: 2083066 - DNA, 25 bp, Homo sapien
aagatgctggagacgccctgagacg

SEQ ID NO: 2083067 - DNA, 25 bp, Homo sapien
tttgctcctggctcgatgctcatgt

SEQ ID NO: 2083068 - DNA, 25 bp, Homo sapien
tgctgaatggctgtctatggcagtt

SEQ ID NO: 2083069 - DNA, 25 bp, Homo sapien
ctgtgtggcactgctagcactattg

SEQ ID NO: 2083070 - DNA, 25 bp, Homo sapien
agcactattgatttgaaggttctta

SEQ ID NO: 2083071 - DNA, 25 bp, Homo sapien
gataatcggatatagatttgccaac

SEQ ID NO: 2083072 - DNA, 25 bp, Homo sapien
catgtgtagcggaacaggcgatgct

SEQ ID NO: 2083073 - DNA, 25 bp, Homo sapien
gggctgcatgtgtagcggaacaggc

SEQ ID NO: 2083074 - DNA, 25 bp, Homo sapien
cttggatcgacgtctttgaagcctc

SEQ ID NO: 2083075 - DNA, 25 bp, Homo sapien
gatcgacgtctttgaagcctccggg

SEQ ID NO: 2083076 - DNA, 25 bp, Homo sapien
ggatctcggctttggaacgtgctca

SEQ ID NO: 2083077 - DNA, 25 bp, Homo sapien
ctgagagtggaacgtccatcgcccg

SEQ ID NO: 2083078 - DNA, 25 bp, Homo sapien
cgcatgtttactcctggacgtccag

SEQ ID NO: 2083079 - DNA, 25 bp, Homo sapien
gctttggaacgtgctcatccacctg

SEQ ID NO: 2083080 - DNA, 25 bp, Homo sapien
gcagcccggacgtactggccatcat

SEQ ID NO: 2083081 - DNA, 25 bp, Homo sapien
attgctgcgggcagcccggacgtac

SEQ ID NO: 2083082 - DNA, 25 bp, Homo sapien
ttattcagcctgctcattgctgcgg

SEQ ID NO: 2083083 - DNA, 25 bp, Homo sapien
cgggcagcccggacgtactggccat

SEQ ID NO: 2083084 - DNA, 25 bp, Homo sapien
cttgataaaagtgccggctgagtac

SEQ ID NO: 2083085 - DNA, 25 bp, Homo sapien
cagcaggcatgctggatatagtaaa

SEQ ID NO: 2083086 - DNA, 25 bp, Homo sapien
tagcccacataaactaacagccctg

SEQ ID NO: 2083087 - DNA, 25 bp, Homo sapien
taacagccctgtctgtcggatgccc

SEQ ID NO: 2083088 - DNA, 25 bp, Homo sapien
tgaaaggcagcctgagcgtccatgg

SEQ ID NO: 2083089 - DNA, 25 bp, Homo sapien
gggtgtccaacaattagaagtcgct

SEQ ID NO: 2083090 - DNA, 25 bp, Homo sapien
gagcgtccatggacctggtcttcat

SEQ ID NO: 2083091 - DNA, 25 bp, Homo sapien
gatgtagaattctccggggtgtcca

SEQ ID NO: 2083092 - DNA, 25 bp, Homo sapien
gcacatggcccagcgtcgctttaat

SEQ ID NO: 2083093 - DNA, 25 bp, Homo sapien
atattaatagacagtggtcatgtgg

SEQ ID NO: 2083094 - DNA, 25 bp, Homo sapien
cgagtgtttaggtatgacaatatta

SEQ ID NO: 2083095 - DNA, 25 bp, Homo sapien
gagtctgcactacacaggcacatgg

SEQ ID NO: 2083096 - DNA, 25 bp, Homo sapien
aacaagccagtcaagaagtcgcacg

SEQ ID NO: 2083097 - DNA, 25 bp, Homo sapien
aagggtgcaccgcagaaattactcg

SEQ ID NO: 2083098 - DNA, 25 bp, Homo sapien
cacacttgccttcgttggagggact

SEQ ID NO: 2083099 - DNA, 25 bp, Homo sapien
tcacttgcgtccacgaaagcagcgt

SEQ ID NO: 2083100 - DNA, 25 bp, Homo sapien
cagcgcgctcaaaatgacccagtga

SEQ ID NO: 2083101 - DNA, 25 bp, Homo sapien
cgtcagacgccgtgggaacctgtgt

SEQ ID NO: 2083102 - DNA, 25 bp, Homo sapien
taaaagctagggcaccttcgaccag

SEQ ID NO: 2083103 - DNA, 25 bp, Homo sapien
ggccctccagcgatcgttttgcgtt

SEQ ID NO: 2083104 - DNA, 25 bp, Homo sapien
tatgaccctcctgcgcttttcctgg

SEQ ID NO: 2083105 - DNA, 25 bp, Homo sapien
tgtttggacctgactccaacctgcg

SEQ ID NO: 2083106 - DNA, 25 bp, Homo sapien
gcgatagggactgtttggacctgac

SEQ ID NO: 2083107 - DNA, 25 bp, Homo sapien
tagggactgtttggacctgactcca

SEQ ID NO: 2083108 - DNA, 25 bp, Homo sapien
ggaagcaagcgggaagattctagaa

SEQ ID NO: 2083109 - DNA, 25 bp, Homo sapien
caggcggaagaacgcgggctgggaa

SEQ ID NO: 2083110 - DNA, 25 bp, Homo sapien
caggaggccatctgtgctgacggtt

SEQ ID NO: 2083111 - DNA, 25 bp, Homo sapien
tgacggttcacaccagacaggacca

SEQ ID NO: 2083112 - DNA, 25 bp, Homo sapien
cttgcaaggacaaaaataagaaatt

SEQ ID NO: 2083113 - DNA, 25 bp, Homo sapien
tgcaaggacaaaaataagaaattta

SEQ ID NO: 2083114 - DNA, 25 bp, Homo sapien
gcgcgggcgcggcgacgacggggcc

SEQ ID NO: 2083115 - DNA, 25 bp, Homo sapien
tggtcgtgacttaacaaatttgagg

SEQ ID NO: 2083116 - DNA, 25 bp, Homo sapien
ccacaggtggtcgtgacttaacaaa

SEQ ID NO: 2083117 - DNA, 25 bp, Homo sapien
gactgtgccacaggtggtcgtgact

SEQ ID NO: 2083118 - DNA, 25 bp, Homo sapien
cttaacaaatttgaggtgtgggcca

SEQ ID NO: 2083119 - DNA, 25 bp, Homo sapien
aactgtgcgcgtttaacaaagagct

SEQ ID NO: 2083120 - DNA, 25 bp, Homo sapien
gaactgatttgttgccatcactcca

SEQ ID NO: 2083121 - DNA, 25 bp, Homo sapien
catcaacaacaaatgtggagctttt

SEQ ID NO: 2083122 - DNA, 25 bp, Homo sapien
cagctgtcattgtgtctgttggaac

SEQ ID NO: 2083123 - DNA, 25 bp, Homo sapien
gagaccagcgtgtgcgagaaatgct

SEQ ID NO: 2083124 - DNA, 25 bp, Homo sapien
tcaagtgggcggacttcctggagca

SEQ ID NO: 2083125 - DNA, 25 bp, Homo sapien
agcaccagcggagctgcaccaagct

SEQ ID NO: 2083126 - DNA, 25 bp, Homo sapien
tgctgcgccgagttcttcaagtggg

SEQ ID NO: 2083127 - DNA, 25 bp, Homo sapien
gatcgactcggtcatgagctgccag

SEQ ID NO: 2083128 - DNA, 25 bp, Homo sapien
ctcaagtccgtggagaacgggtccg

SEQ ID NO: 2083129 - DNA, 25 bp, Homo sapien
gagaccctgagcagctacgatgacg

SEQ ID NO: 2083130 - DNA, 25 bp, Homo sapien
tacgatgacgacatggacgagaact

SEQ ID NO: 2083131 - DNA, 25 bp, Homo sapien
gaaaacactttgtgcggctgccgag

SEQ ID NO: 2083132 - DNA, 25 bp, Homo sapien
taacgggctcgccatgaagaacaac

SEQ ID NO: 2083133 - DNA, 25 bp, Homo sapien
tttttggaaccagtatgctgcagcc

SEQ ID NO: 2083134 - DNA, 25 bp, Homo sapien
ttttgaagttggagcatcaggcctc

SEQ ID NO: 2083135 - DNA, 25 bp, Homo sapien
gggaacgagttacagacaaacatca

SEQ ID NO: 2083136 - DNA, 25 bp, Homo sapien
gaaatctctgccacttgaaaagcca

SEQ ID NO: 2083137 - DNA, 25 bp, Homo sapien
gtgtggtctgtagcccaataactgg

SEQ ID NO: 2083138 - DNA, 25 bp, Homo sapien
tttgtagctgctatgtggacagttg

SEQ ID NO: 2083139 - DNA, 25 bp, Homo sapien
gaaaactgaggtggcttaaggtcac

SEQ ID NO: 2083140 - DNA, 25 bp, Homo sapien
taggccatccctctgcatggtgaag

SEQ ID NO: 2083141 - DNA, 25 bp, Homo sapien
cagtgaagtcttctcggtcgagaca

SEQ ID NO: 2083142 - DNA, 25 bp, Homo sapien
tgatgagatgtaacttcgccccacc

SEQ ID NO: 2083143 - DNA, 25 bp, Homo sapien
caggccaaccttccagcagatatta

SEQ ID NO: 2083144 - DNA, 25 bp, Homo sapien
taatataaactaacatgcaggagag

SEQ ID NO: 2083145 - DNA, 25 bp, Homo sapien
tcatgccaactgtggtgatgtagac

SEQ ID NO: 2083146 - DNA, 25 bp, Homo sapien
taagatcagaggtgtttggcttggc

SEQ ID NO: 2083147 - DNA, 25 bp, Homo sapien
taggccacgccctgcagtgaaagat

SEQ ID NO: 2083148 - DNA, 25 bp, Homo sapien
tcatttggacagaccattcctagcg

SEQ ID NO: 2083149 - DNA, 25 bp, Homo sapien
tcgcggagcttggaaaaccctgtgg

SEQ ID NO: 2083150 - DNA, 25 bp, Homo sapien
gtcctgatttctaccaccgtctgca

SEQ ID NO: 2083151 - DNA, 25 bp, Homo sapien
tgcagagacacttctggaatactca

SEQ ID NO: 2083152 - DNA, 25 bp, Homo sapien
cactgatgcgaatataacccgttac

SEQ ID NO: 2083153 - DNA, 25 bp, Homo sapien
gatgtgttggaattccatccgcaga

SEQ ID NO: 2083154 - DNA, 25 bp, Homo sapien
cagaaggctacgtgttgcagagaca

SEQ ID NO: 2083155 - DNA, 25 bp, Homo sapien
cccgggcatagcacacgcagaggca

SEQ ID NO: 2083156 - DNA, 25 bp, Homo sapien
cacagtgttgatgtttttagtacgt

SEQ ID NO: 2083157 - DNA, 25 bp, Homo sapien
atgcactgctctgcggatgtctgtc

SEQ ID NO: 2083158 - DNA, 25 bp, Homo sapien
tgtttttagtacgtcagtagctttg

SEQ ID NO: 2083159 - DNA, 25 bp, Homo sapien
aatgcactgctctgcggatgtctgt

SEQ ID NO: 2083160 - DNA, 25 bp, Homo sapien
aatgagagcctaatccacaagcggg

SEQ ID NO: 2083161 - DNA, 25 bp, Homo sapien
acaagcgggcggcaatctggtgact

SEQ ID NO: 2083162 - DNA, 25 bp, Homo sapien
tatacgcattcacaggcacaaccag

SEQ ID NO: 2083163 - DNA, 25 bp, Homo sapien
tgaccccgattagagggactgctgt

SEQ ID NO: 2083164 - DNA, 25 bp, Homo sapien
caagcctggatttcagcggtgacca

SEQ ID NO: 2083165 - DNA, 25 bp, Homo sapien
tcaagcctggatttcagcggtgacc

SEQ ID NO: 2083166 - DNA, 25 bp, Homo sapien
aagcctggatttcagcggtgaccat

SEQ ID NO: 2083167 - DNA, 25 bp, Homo sapien
tagtagctcatagttcactgggaac

SEQ ID NO: 2083168 - DNA, 25 bp, Homo sapien
ttaagtaaacaaaatgacgtgtgcc

SEQ ID NO: 2083169 - DNA, 25 bp, Homo sapien
gacgtgtgccacacatagtagctca

SEQ ID NO: 2083170 - DNA, 25 bp, Homo sapien
tctacaaagtcatgtgagatactga

SEQ ID NO: 2083171 - DNA, 25 bp, Homo sapien
tattgacgtctggtgaggccttctt

SEQ ID NO: 2083172 - DNA, 25 bp, Homo sapien
aagatcaaggtattgacgtctggtg

SEQ ID NO: 2083173 - DNA, 25 bp, Homo sapien
caaggtattgacgtctggtgaggcc

SEQ ID NO: 2083174 - DNA, 25 bp, Homo sapien
ggtattgacgtctggtgaggccttc

SEQ ID NO: 2083175 - DNA, 25 bp, Homo sapien
caaaggtccaacgtggagattgtca

SEQ ID NO: 2083176 - DNA, 25 bp, Homo sapien
aaggtccaacgtggagattgtcagg

SEQ ID NO: 2083177 - DNA, 25 bp, Homo sapien
catcaaaggtccaacgtggagattg

SEQ ID NO: 2083178 - DNA, 25 bp, Homo sapien
aaaacatcaaaggtccaacgtggag

SEQ ID NO: 2083179 - DNA, 25 bp, Homo sapien
cagagctgcaaaatacggtcatgag

SEQ ID NO: 2083180 - DNA, 25 bp, Homo sapien
ccgtaccaacactaatcaaagctgg

SEQ ID NO: 2083181 - DNA, 25 bp, Homo sapien
cccaattaaatggacaggagtgtca

SEQ ID NO: 2083182 - DNA, 25 bp, Homo sapien
tttatgcactaataacagagctgca

SEQ ID NO: 2083183 - DNA, 25 bp, Homo sapien
ctgccttgctatcatcgggtccagc

SEQ ID NO: 2083184 - DNA, 25 bp, Homo sapien
gagttgtacgtgcagtgctcagtgt

SEQ ID NO: 2083185 - DNA, 25 bp, Homo sapien
tcctgcacttggtgcgtggttggag

SEQ ID NO: 2083186 - DNA, 25 bp, Homo sapien
tgccttgctatcatcgggtccagcc

SEQ ID NO: 2083187 - DNA, 25 bp, Homo sapien
tccttgtgttccttgtctgatgcag

SEQ ID NO: 2083188 - DNA, 25 bp, Homo sapien
ctcgtgttccgtgtccggcacaggc

SEQ ID NO: 2083189 - DNA, 25 bp, Homo sapien
ttttcttcgtattctgggtccagcg

SEQ ID NO: 2083190 - DNA, 25 bp, Homo sapien
tcgtgttccgggtccggcactgact

SEQ ID NO: 2083191 - DNA, 25 bp, Homo sapien
ttcgaaaccatgttttggccccgca

SEQ ID NO: 2083192 - DNA, 25 bp, Homo sapien
tcatggggacgtcctttcgaaacca

SEQ ID NO: 2083193 - DNA, 25 bp, Homo sapien
taggcttcctctaccatgtcttcat

SEQ ID NO: 2083194 - DNA, 25 bp, Homo sapien
ccccgcagttgtaggacggccactg

SEQ ID NO: 2083195 - DNA, 25 bp, Homo sapien
gtgcacgagtcagtgtccacacctg

SEQ ID NO: 2083196 - DNA, 25 bp, Homo sapien
gcacggtccgtgcacgagtcagtgt

SEQ ID NO: 2083197 - DNA, 25 bp, Homo sapien
tccgtgcacgagtcagtgtccacac

SEQ ID NO: 2083198 - DNA, 25 bp, Homo sapien
tgtacacggtccgtgcacgagtcag

SEQ ID NO: 2083199 - DNA, 25 bp, Homo sapien
gtccgtgcacgagtcagtgtccact

SEQ ID NO: 2083200 - DNA, 25 bp, Homo sapien
tccgtgcacgagtcagtgtccactc

SEQ ID NO: 2083201 - DNA, 25 bp, Homo sapien
ttccggccgggctgtagctggactc

SEQ ID NO: 2083202 - DNA, 25 bp, Homo sapien
ctgctgctgttccggccgggctgta

SEQ ID NO: 2083203 - DNA, 25 bp, Homo sapien
tcacgtctccggtgcaggccaggaa

SEQ ID NO: 2083204 - DNA, 25 bp, Homo sapien
gattgtgggcatcacgtctccggtg

SEQ ID NO: 2083205 - DNA, 25 bp, Homo sapien
gttgatggctcccagtgacccttcg

SEQ ID NO: 2083206 - DNA, 25 bp, Homo sapien
catctggcacagattcaagggctgc

SEQ ID NO: 2083207 - DNA, 25 bp, Homo sapien
gatagtcgccaaacacaagggcttc

SEQ ID NO: 2083208 - DNA, 25 bp, Homo sapien
ctgctggctgaataattagtttgtt

SEQ ID NO: 2083209 - DNA, 25 bp, Homo sapien
gattggagtgcacatttccggtaag

SEQ ID NO: 2083210 - DNA, 25 bp, Homo sapien
gtggccaccagtgcatgaaacataa

SEQ ID NO: 2083211 - DNA, 25 bp, Homo sapien
ttgctatagtgacacatctgtggcc

SEQ ID NO: 2083212 - DNA, 25 bp, Homo sapien
cattcgacaagcgtagacatctgtg

SEQ ID NO: 2083213 - DNA, 25 bp, Homo sapien
ttaaaacttaactcagggtgcagcc

SEQ ID NO: 2083214 - DNA, 25 bp, Homo sapien
aaacaggaggacagccaatttgtac

SEQ ID NO: 2083215 - DNA, 25 bp, Homo sapien
caatttgtacttaatctgctgggag

SEQ ID NO: 2083216 - DNA, 25 bp, Homo sapien
cagaaatactcgacgccggctgata

SEQ ID NO: 2083217 - DNA, 25 bp, Homo sapien
ggacgttgcagagagcgtgctctcc

SEQ ID NO: 2083218 - DNA, 25 bp, Homo sapien
gctctctccatggttagcgtgctcg

SEQ ID NO: 2083219 - DNA, 25 bp, Homo sapien
agtgtgctccccatggttagcgtgt

SEQ ID NO: 2083220 - DNA, 25 bp, Homo sapien
gtgtgccctccctggttagcatgct

SEQ ID NO: 2083221 - DNA, 25 bp, Homo sapien
gttctccgtggttagcatgttcccc

SEQ ID NO: 2083222 - DNA, 25 bp, Homo sapien
gtgttctccgtggttagcatgttcc

SEQ ID NO: 2083223 - DNA, 25 bp, Homo sapien
tctccgtggttagcatgttccccat

SEQ ID NO: 2083224 - DNA, 25 bp, Homo sapien
tgttctccgtggttagcatgttccc

SEQ ID NO: 2083225 - DNA, 25 bp, Homo sapien
ctgccatatgccagagaatcactca

SEQ ID NO: 2083226 - DNA, 25 bp, Homo sapien
tgccatatgccagagaatcactcat

SEQ ID NO: 2083227 - DNA, 25 bp, Homo sapien
tgttcctctgaaactcgaaggtgat

SEQ ID NO: 2083228 - DNA, 25 bp, Homo sapien
tcaggttgccgcagtgctagttctt

SEQ ID NO: 2083229 - DNA, 25 bp, Homo sapien
gcgggacctcactgcgtttcctgaa

SEQ ID NO: 2083230 - DNA, 25 bp, Homo sapien
cgaaggtgattttcagcgggacctc

SEQ ID NO: 2083231 - DNA, 25 bp, Homo sapien
tctgttaaataatcacctcgtggga

SEQ ID NO: 2083232 - DNA, 25 bp, Homo sapien
tcgttctgcagagccgtgtccgtaa

SEQ ID NO: 2083233 - DNA, 25 bp, Homo sapien
tctgttgggtgcaagcctcgttctg

SEQ ID NO: 2083234 - DNA, 25 bp, Homo sapien
tgtccgtaacgctgcgagtcagtga

SEQ ID NO: 2083235 - DNA, 25 bp, Homo sapien
tactataactagaagcaagaccgct

SEQ ID NO: 2083236 - DNA, 25 bp, Homo sapien
tcatcgtgactactgggaagcatcg

SEQ ID NO: 2083237 - DNA, 25 bp, Homo sapien
tataaccactcattagccagagagg

SEQ ID NO: 2083238 - DNA, 25 bp, Homo sapien
catcttgaccggctattggagtggg

SEQ ID NO: 2083239 - DNA, 25 bp, Homo sapien
caggcatcaggactagtaaggtgac

SEQ ID NO: 2083240 - DNA, 25 bp, Homo sapien
tctggatgccagtaagacgggaaac

SEQ ID NO: 2083241 - DNA, 25 bp, Homo sapien
gaagctagttactccaagatccagg

SEQ ID NO: 2083242 - DNA, 25 bp, Homo sapien
taaggtgaccctggttaagtgagcc

SEQ ID NO: 2083243 - DNA, 25 bp, Homo sapien
tctctgaatgatactgttaatgaaa

SEQ ID NO: 2083244 - DNA, 25 bp, Homo sapien
ttctctctgaatgatactgttaatg

SEQ ID NO: 2083245 - DNA, 25 bp, Homo sapien
ctctctgaatgatactgttaatgaa

SEQ ID NO: 2083246 - DNA, 25 bp, Homo sapien
tctctctgaatgatactgttaatga

SEQ ID NO: 2083247 - DNA, 25 bp, Homo sapien
gaccggtctgagtatttgtgttgca

SEQ ID NO: 2083248 - DNA, 25 bp, Homo sapien
cattagcagtacagcttggtcctgg

SEQ ID NO: 2083249 - DNA, 25 bp, Homo sapien
tgcctcttttcatgcggaattcaag

SEQ ID NO: 2083250 - DNA, 25 bp, Homo sapien
tcagagcctctaagagcagaccggt

SEQ ID NO: 2083251 - DNA, 25 bp, Homo sapien
gtgacattagtcatctgcaaccatt

SEQ ID NO: 2083252 - DNA, 25 bp, Homo sapien
aagcaccacaactagtacttcagtg

SEQ ID NO: 2083253 - DNA, 25 bp, Homo sapien
tgttgtccacccattcagtggtgtt

SEQ ID NO: 2083254 - DNA, 25 bp, Homo sapien
aacaaatcccacaggttaggtgagc

SEQ ID NO: 2083255 - DNA, 25 bp, Homo sapien
ttgagggccgcactgcgttcctgga

SEQ ID NO: 2083256 - DNA, 25 bp, Homo sapien
tcctggagcccataagtctgtaccc

SEQ ID NO: 2083257 - DNA, 25 bp, Homo sapien
gattccagttcagtgacggccaggc

SEQ ID NO: 2083258 - DNA, 25 bp, Homo sapien
gaggattcgctactgctttccatag

SEQ ID NO: 2083259 - DNA, 25 bp, Homo sapien
tggctgtgacccaagatgcgaacag

SEQ ID NO: 2083260 - DNA, 25 bp, Homo sapien
cagaagtctccaggcgctgagctcg

SEQ ID NO: 2083261 - DNA, 25 bp, Homo sapien
tgggggtggacgtcgccctggctgt

SEQ ID NO: 2083262 - DNA, 25 bp, Homo sapien
tctccaggcgctgagctcgtcggcg

SEQ ID NO: 2083263 - DNA, 25 bp, Homo sapien
gtttctaggaaccacctggactgat

SEQ ID NO: 2083264 - DNA, 25 bp, Homo sapien
gaaccacctggactgatgccagcca

SEQ ID NO: 2083265 - DNA, 25 bp, Homo sapien
tctaggaaccacctggactgatgcc

SEQ ID NO: 2083266 - DNA, 25 bp, Homo sapien
tggctgtttctaggaaccacctgga

SEQ ID NO: 2083267 - DNA, 25 bp, Homo sapien
gccacaccgccacggcaggccacac

SEQ ID NO: 2083268 - DNA, 25 bp, Homo sapien
gccacaccgccggggcctgcctcat

SEQ ID NO: 2083269 - DNA, 25 bp, Homo sapien
ccacaccgccacggcaggccacacc

SEQ ID NO: 2083270 - DNA, 25 bp, Homo sapien
caccgccacggcaggccacaccgcc

SEQ ID NO: 2083271 - DNA, 25 bp, Homo sapien
tcagaggaagagaacgccattccct

SEQ ID NO: 2083272 - DNA, 25 bp, Homo sapien
ctcaagcagggcatggaatcggcct

SEQ ID NO: 2083273 - DNA, 25 bp, Homo sapien
taaactcgattgagcagaaaaggga

SEQ ID NO: 2083274 - DNA, 25 bp, Homo sapien
catggaggaagcgaggaccctgttc

SEQ ID NO: 2083275 - DNA, 25 bp, Homo sapien
tctctgtacctgaagagccggtggc

SEQ ID NO: 2083276 - DNA, 25 bp, Homo sapien
aataagctcgaaaaggtccctgctg

SEQ ID NO: 2083277 - DNA, 25 bp, Homo sapien
gtttaaaccatgtcccgtgtcagtg

SEQ ID NO: 2083278 - DNA, 25 bp, Homo sapien
gaaaactcgctggtcttagcagagc

SEQ ID NO: 2083279 - DNA, 25 bp, Homo sapien
tcagaagtcgctccagacacaatgc

SEQ ID NO: 2083280 - DNA, 25 bp, Homo sapien
ctgggaggatgcgtccaagctaaac

SEQ ID NO: 2083281 - DNA, 25 bp, Homo sapien
tgcttcctcatggagaacgcagaga

SEQ ID NO: 2083282 - DNA, 25 bp, Homo sapien
tctgggtggaagctcattaggcgtc

SEQ ID NO: 2083283 - DNA, 25 bp, Homo sapien
gagataacctcgtgcttgggcctgt

SEQ ID NO: 2083284 - DNA, 25 bp, Homo sapien
gtggaagacgtcctccctagctcca

SEQ ID NO: 2083285 - DNA, 25 bp, Homo sapien
ggcctgtaccacaacaataaccagt

SEQ ID NO: 2083286 - DNA, 25 bp, Homo sapien
tgccctggagagtcctcgcatcgag

SEQ ID NO: 2083287 - DNA, 25 bp, Homo sapien
cagcctggacctgggagatggcgtc

SEQ ID NO: 2083288 - DNA, 25 bp, Homo sapien
gacgactcgtggttgggcaacacca

SEQ ID NO: 2083289 - DNA, 25 bp, Homo sapien
agtacaccagctcggccatcgtggc

SEQ ID NO: 2083290 - DNA, 25 bp, Homo sapien
atggcgtccctgtcaagtcccgcaa

SEQ ID NO: 2083291 - DNA, 25 bp, Homo sapien
tcccagggcacctttccgtgtgctg

SEQ ID NO: 2083292 - DNA, 25 bp, Homo sapien
tgacggtgatcatagcaagtggcct

SEQ ID NO: 2083293 - DNA, 25 bp, Homo sapien
ctttccaggggtaatgacggtgatc

SEQ ID NO: 2083294 - DNA, 25 bp, Homo sapien
tgagggtgcaacaggaggcgttgcc

SEQ ID NO: 2083295 - DNA, 25 bp, Homo sapien
cttctctttcgcagacacgagtcct

SEQ ID NO: 2083296 - DNA, 25 bp, Homo sapien
tctgccaggctcagtagcgattcct

SEQ ID NO: 2083297 - DNA, 25 bp, Homo sapien
cctgcgtttgaatgccctttgctct

SEQ ID NO: 2083298 - DNA, 25 bp, Homo sapien
cagcacagtaacaggtggactctgt

SEQ ID NO: 2083299 - DNA, 25 bp, Homo sapien
tggagccagactgtccgcgggcgct

SEQ ID NO: 2083300 - DNA, 25 bp, Homo sapien
ggcgttgtaccgaaccccagcatag

SEQ ID NO: 2083301 - DNA, 25 bp, Homo sapien
cccagcatagcgagacgtgtaaggt

SEQ ID NO: 2083302 - DNA, 25 bp, Homo sapien
gaacatagtctctaaggcgttgtac

SEQ ID NO: 2083303 - DNA, 25 bp, Homo sapien
cagcagtttcgttgtgtgatggcag

SEQ ID NO: 2083304 - DNA, 25 bp, Homo sapien
atggcaggaagaatccgcgtgctgc

SEQ ID NO: 2083305 - DNA, 25 bp, Homo sapien
ggcaggaagaatccgcgtgctgccc

SEQ ID NO: 2083306 - DNA, 25 bp, Homo sapien
ggagccagcagtttcgttgtgtgat

SEQ ID NO: 2083307 - DNA, 25 bp, Homo sapien
aaaacaggatttgctcctgcgccaa

SEQ ID NO: 2083308 - DNA, 25 bp, Homo sapien
gtcggtgaccacagacaaaacagga

SEQ ID NO: 2083309 - DNA, 25 bp, Homo sapien
gaagtgtctggtcctgatgtgcgtc

SEQ ID NO: 2083310 - DNA, 25 bp, Homo sapien
caacgttggcttttgagcagcggga

SEQ ID NO: 2083311 - DNA, 25 bp, Homo sapien
tggaatcacgaggaaatgcccgtcc

SEQ ID NO: 2083312 - DNA, 25 bp, Homo sapien
agtgtgtttccagagaccgggccgt

SEQ ID NO: 2083313 - DNA, 25 bp, Homo sapien
ggatgacgtctgctttcgcctggag

SEQ ID NO: 2083314 - DNA, 25 bp, Homo sapien
ggcagacaggtcgagtgtgtttcca

SEQ ID NO: 2083315 - DNA, 25 bp, Homo sapien
catcacagctgagcgcgaagctgga

SEQ ID NO: 2083316 - DNA, 25 bp, Homo sapien
tctggtaagaagctgtcaagcctcc

SEQ ID NO: 2083317 - DNA, 25 bp, Homo sapien
gtgctctgtagctccaggcgtcaga

SEQ ID NO: 2083318 - DNA, 25 bp, Homo sapien
cgaagctggaagcttgggcacgtct

SEQ ID NO: 2083319 - DNA, 25 bp, Homo sapien
ggtctgtgtcctggtcgtactccaa

SEQ ID NO: 2083320 - DNA, 25 bp, Homo sapien
gctgttgtgaggctcacgagataca

SEQ ID NO: 2083321 - DNA, 25 bp, Homo sapien
cagggcctgtgtccaaagctgttgt

SEQ ID NO: 2083322 - DNA, 25 bp, Homo sapien
tccaatcccgtgtggtggagccacg

SEQ ID NO: 2083323 - DNA, 25 bp, Homo sapien
ggaggctgcccatgcacccggctgt

SEQ ID NO: 2083324 - DNA, 25 bp, Homo sapien
gctccctcccatgcggacccgggat

SEQ ID NO: 2083325 - DNA, 25 bp, Homo sapien
cttcccaaaggcggcgtcctgggct

SEQ ID NO: 2083326 - DNA, 25 bp, Homo sapien
ccgcagctgtggcactccctgtctg

SEQ ID NO: 2083327 - DNA, 25 bp, Homo sapien
tacagcccatgaagctgcgtcttgg

SEQ ID NO: 2083328 - DNA, 25 bp, Homo sapien
cagagcggaggtgggtggtgagcct

SEQ ID NO: 2083329 - DNA, 25 bp, Homo sapien
gctgcgtcttggagattcctctgtc

SEQ ID NO: 2083330 - DNA, 25 bp, Homo sapien
gaaacagctctgacagtacagccca

SEQ ID NO: 2083331 - DNA, 25 bp, Homo sapien
tagtacatcctttgacgcggcccct

SEQ ID NO: 2083332 - DNA, 25 bp, Homo sapien
tcagaaacgaggctcatcgcactgg

SEQ ID NO: 2083333 - DNA, 25 bp, Homo sapien
tagaaagctctcagttgccgtggaa

SEQ ID NO: 2083334 - DNA, 25 bp, Homo sapien
tgccgtcgggttattttagtacatc

SEQ ID NO: 2083335 - DNA, 25 bp, Homo sapien
tttgctcctctggataggtgctcgc

SEQ ID NO: 2083336 - DNA, 25 bp, Homo sapien
catggactctgggttaggaaagggt

SEQ ID NO: 2083337 - DNA, 25 bp, Homo sapien
gctcgctcttacttgtgggtgctga

SEQ ID NO: 2083338 - DNA, 25 bp, Homo sapien
ccaggaagcattcggagcatggact

SEQ ID NO: 2083339 - DNA, 25 bp, Homo sapien
caacagggccgtggtttagcctgga

SEQ ID NO: 2083340 - DNA, 25 bp, Homo sapien
aacaccagcatcaaagcaacagggc

SEQ ID NO: 2083341 - DNA, 25 bp, Homo sapien
attacggctgccacggcgctaaaaa

SEQ ID NO: 2083342 - DNA, 25 bp, Homo sapien
ctcggccatggtgatgggtgcgccc

SEQ ID NO: 2083343 - DNA, 25 bp, Homo sapien
ggtagaacaagtgactcagacagag

SEQ ID NO: 2083344 - DNA, 25 bp, Homo sapien
cagggagtgaccagcagcgcagcca

SEQ ID NO: 2083345 - DNA, 25 bp, Homo sapien
caccagttctcggtgggccggtctg

SEQ ID NO: 2083346 - DNA, 25 bp, Homo sapien
ggccggtctggatctgccgatgccg

SEQ ID NO: 2083347 - DNA, 25 bp, Homo sapien
tctaagaggaacgagatgtggtttc

SEQ ID NO: 2083348 - DNA, 25 bp, Homo sapien
tctctgtgtcagtgccggttctaag

SEQ ID NO: 2083349 - DNA, 25 bp, Homo sapien
tgaacagctccggagtgcagggtct

SEQ ID NO: 2083350 - DNA, 25 bp, Homo sapien
aaggagcggccactgtctgcactgt

SEQ ID NO: 2083351 - DNA, 25 bp, Homo sapien
tctctagaaggttgccgtttctccc

SEQ ID NO: 2083352 - DNA, 25 bp, Homo sapien
tcagtggcacggatgtctctagaag

SEQ ID NO: 2083353 - DNA, 25 bp, Homo sapien
tctgacaaatgacaagcgctcctgc

SEQ ID NO: 2083354 - DNA, 25 bp, Homo sapien
tcctgccgcttggtgtcaggcgacg

SEQ ID NO: 2083355 - DNA, 25 bp, Homo sapien
tgagcgtggccgtctcttctctggg

SEQ ID NO: 2083356 - DNA, 25 bp, Homo sapien
tcttcttcagccaaagtgagcgtgg

SEQ ID NO: 2083357 - DNA, 25 bp, Homo sapien
ctcttccggagagacgtggagaccc

SEQ ID NO: 2083358 - DNA, 25 bp, Homo sapien
cattgcctccaggtcgaggtgggaa

SEQ ID NO: 2083359 - DNA, 25 bp, Homo sapien
catcgaatgctgtaagtggacgtcc

SEQ ID NO: 2083360 - DNA, 25 bp, Homo sapien
tcccctagaagtagtggcatccgca

SEQ ID NO: 2083361 - DNA, 25 bp, Homo sapien
tgtagacttgggactgaacggttcc

SEQ ID NO: 2083362 - DNA, 25 bp, Homo sapien
ttcagaacgaggtggagaccatcag

SEQ ID NO: 2083363 - DNA, 25 bp, Homo sapien
gggatgaagccagaccacgttgata

SEQ ID NO: 2083364 - DNA, 25 bp, Homo sapien
caacacgtgctgatgtgcagtgaca

SEQ ID NO: 2083365 - DNA, 25 bp, Homo sapien
tgctcgagagcacgtgaagctgtga

SEQ ID NO: 2083366 - DNA, 25 bp, Homo sapien
taaatgaataggtgctgtgctcgag

SEQ ID NO: 2083367 - DNA, 25 bp, Homo sapien
cactcaaagtgtataattcggtggg

SEQ ID NO: 2083368 - DNA, 25 bp, Homo sapien
tcacataattatgcggccaccacca

SEQ ID NO: 2083369 - DNA, 25 bp, Homo sapien
cagcttctgtggagcgtggcatcct

SEQ ID NO: 2083370 - DNA, 25 bp, Homo sapien
tccatgttccctcgttggtgtgggt

SEQ ID NO: 2083371 - DNA, 25 bp, Homo sapien
gagtttcgtaaacatgctgctggct

SEQ ID NO: 2083372 - DNA, 25 bp, Homo sapien
accccagtcatttagggtcatcagg

SEQ ID NO: 2083373 - DNA, 25 bp, Homo sapien
gaaactttatagatgcgactcccgc

SEQ ID NO: 2083374 - DNA, 25 bp, Homo sapien
cacacgtcccatggcttgtgtttca

SEQ ID NO: 2083375 - DNA, 25 bp, Homo sapien
ataaccagccccgttcacgtcagtt

SEQ ID NO: 2083376 - DNA, 25 bp, Homo sapien
tcgcctgcccggtgctgattgtgcc

SEQ ID NO: 2083377 - DNA, 25 bp, Homo sapien
aattctctggtggttgagatcccgc

SEQ ID NO: 2083378 - DNA, 25 bp, Homo sapien
gagatcccgccatttcggaatcaga

SEQ ID NO: 2083379 - DNA, 25 bp, Homo sapien
gaagccagtaccagcgtttcaccta

SEQ ID NO: 2083380 - DNA, 25 bp, Homo sapien
ctgcaacgggaagagaaagcgaagc

SEQ ID NO: 2083381 - DNA, 25 bp, Homo sapien
gcgaagccagtaccagcgtttcacc

SEQ ID NO: 2083382 - DNA, 25 bp, Homo sapien
aaagcgaagccagtaccagcgtttc

SEQ ID NO: 2083383 - DNA, 25 bp, Homo sapien
taaccgtaagccgtgaacatgagcg

SEQ ID NO: 2083384 - DNA, 25 bp, Homo sapien
taaagacgcagaaacgacgtcgccg

SEQ ID NO: 2083385 - DNA, 25 bp, Homo sapien
ttagtgagaccgagccatcgatgcc

SEQ ID NO: 2083386 - DNA, 25 bp, Homo sapien
cagcgtggcgtgttgcacatttaac

SEQ ID NO: 2083387 - DNA, 25 bp, Homo sapien
taggtatagctattttgcaggcacc

SEQ ID NO: 2083388 - DNA, 25 bp, Homo sapien
atttgcaccctaaagctgcttacgg

SEQ ID NO: 2083389 - DNA, 25 bp, Homo sapien
ggttgcatactcagatagtcacggt

SEQ ID NO: 2083390 - DNA, 25 bp, Homo sapien
gcttcttgcgaatgtataacagcca

SEQ ID NO: 2083391 - DNA, 25 bp, Homo sapien
tgtggtccgagagatagttgccagc

SEQ ID NO: 2083392 - DNA, 25 bp, Homo sapien
catctgtgtcttggggtccagctca

SEQ ID NO: 2083393 - DNA, 25 bp, Homo sapien
tccgagagatagttgccagctctgc

SEQ ID NO: 2083394 - DNA, 25 bp, Homo sapien
ctgccatgtggtccgagagatagtt

SEQ ID NO: 2083395 - DNA, 25 bp, Homo sapien
caggtcgccacaggggtgagaattc

SEQ ID NO: 2083396 - DNA, 25 bp, Homo sapien
cacgctccaggtcgccacaggggtg

SEQ ID NO: 2083397 - DNA, 25 bp, Homo sapien
ctgggagcccagctgccgagtgctt

SEQ ID NO: 2083398 - DNA, 25 bp, Homo sapien
gatttcagacagagcggatgatgct

SEQ ID NO: 2083399 - DNA, 25 bp, Homo sapien
gagggaagtgtattctcacgctgtc

SEQ ID NO: 2083400 - DNA, 25 bp, Homo sapien
tgttctcacgctcactgttgacgta

SEQ ID NO: 2083401 - DNA, 25 bp, Homo sapien
tcacgctgtcgacataaacctgagg

SEQ ID NO: 2083402 - DNA, 25 bp, Homo sapien
tcgacgttgcaagggaagcgtgttc

SEQ ID NO: 2083403 - DNA, 25 bp, Homo sapien
tcacactcactgtcgacattgtgag

SEQ ID NO: 2083404 - DNA, 25 bp, Homo sapien
gctcgctgtcaacgtaaacctgagg

SEQ ID NO: 2083405 - DNA, 25 bp, Homo sapien
ttcacactgtcgacgtaaacctgag

SEQ ID NO: 2083406 - DNA, 25 bp, Homo sapien
cgttgcgagggaagcgttttcacac

SEQ ID NO: 2083407 - DNA, 25 bp, Homo sapien
ttctcacgctcgctgtcaacgtaaa

SEQ ID NO: 2083408 - DNA, 25 bp, Homo sapien
ttgtaaacctgagggaagtgtgttc

SEQ ID NO: 2083409 - DNA, 25 bp, Homo sapien
tgagggaagcgtgttctcacgctca

SEQ ID NO: 2083410 - DNA, 25 bp, Homo sapien
cacgctcactgtcaacgttgtaaac

SEQ ID NO: 2083411 - DNA, 25 bp, Homo sapien
gtgttctcacgctcactgtcaacgt

SEQ ID NO: 2083412 - DNA, 25 bp, Homo sapien
tgtcgacgttgtgagggaagcgtgt

SEQ ID NO: 2083413 - DNA, 25 bp, Homo sapien
ggactgccatggacaccgcagccag

SEQ ID NO: 2083414 - DNA, 25 bp, Homo sapien
gggcagccatcatggacaacgggac

SEQ ID NO: 2083415 - DNA, 25 bp, Homo sapien
gccatcatggacaacgggactgcca

SEQ ID NO: 2083416 - DNA, 25 bp, Homo sapien
tggacaacgggactgccatggacac

SEQ ID NO: 2083417 - DNA, 25 bp, Homo sapien
tacgaggctctgatttacagagcag

SEQ ID NO: 2083418 - DNA, 25 bp, Homo sapien
tttctcactgataggatgcgtctta

SEQ ID NO: 2083419 - DNA, 25 bp, Homo sapien
taggatgcgtcttacgaggctctga

SEQ ID NO: 2083420 - DNA, 25 bp, Homo sapien
tgcgtcttacgaggctctgatttac

SEQ ID NO: 2083421 - DNA, 25 bp, Homo sapien
ttccaagcacggtgaccacgtcgca

SEQ ID NO: 2083422 - DNA, 25 bp, Homo sapien
gcacggtgaccacgtcgcagctcat

SEQ ID NO: 2083423 - DNA, 25 bp, Homo sapien
caccttccaagcacggtgaccacgt

SEQ ID NO: 2083424 - DNA, 25 bp, Homo sapien
aggccaccttccaagcacggtgacc

SEQ ID NO: 2083425 - DNA, 25 bp, Homo sapien
cagcccgtgcgtcccgatgccactg

SEQ ID NO: 2083426 - DNA, 25 bp, Homo sapien
ggtggtggatgcatcagtgctgggc

SEQ ID NO: 2083427 - DNA, 25 bp, Homo sapien
ggtcccagcgaagcgtccactgggc

SEQ ID NO: 2083428 - DNA, 25 bp, Homo sapien
gctgggcctgctccgaacccgcagg

SEQ ID NO: 2083429 - DNA, 25 bp, Homo sapien
acacgccccccatgaacctggtacg

SEQ ID NO: 2083430 - DNA, 25 bp, Homo sapien
cacgccccccatgaacctggtacgg

SEQ ID NO: 2083431 - DNA, 25 bp, Homo sapien
gggaaggcgagagcgggcacatgcc

SEQ ID NO: 2083432 - DNA, 25 bp, Homo sapien
gggggaaggcgagagcgggcacatg

SEQ ID NO: 2083433 - DNA, 25 bp, Homo sapien
tggacgagacccttgggtgatggaa

SEQ ID NO: 2083434 - DNA, 25 bp, Homo sapien
gtgctggaggcccttgggtgagaga

SEQ ID NO: 2083435 - DNA, 25 bp, Homo sapien
caggagactgctgcgtgggaggagg

SEQ ID NO: 2083436 - DNA, 25 bp, Homo sapien
tgagacccttgggtgatggaagagg

SEQ ID NO: 2083437 - DNA, 25 bp, Homo sapien
gaggcaggagactgctgcgtgggag

SEQ ID NO: 2083438 - DNA, 25 bp, Homo sapien
ggagactgctgcgtgggaggaggtg

SEQ ID NO: 2083439 - DNA, 25 bp, Homo sapien
ggaagaggcaggagactgctgcgtg

SEQ ID NO: 2083440 - DNA, 25 bp, Homo sapien
tgctggaggcccttgggtgagggaa

SEQ ID NO: 2083441 - DNA, 25 bp, Homo sapien
tgcgtccaatgacaggcacagtcaa

SEQ ID NO: 2083442 - DNA, 25 bp, Homo sapien
cccatgaaccccagaaacatgaagg

SEQ ID NO: 2083443 - DNA, 25 bp, Homo sapien
cacgcagcctgagggcgtcgttgtc

SEQ ID NO: 2083444 - DNA, 25 bp, Homo sapien
tttcccggtcgacattcatggcagc

SEQ ID NO: 2083445 - DNA, 25 bp, Homo sapien
taaatttttattctcagaacgttga

SEQ ID NO: 2083446 - DNA, 25 bp, Homo sapien
tttattctcagaacgttgaagggac

SEQ ID NO: 2083447 - DNA, 25 bp, Homo sapien
tcagaacgttgaagggacgcactgc

SEQ ID NO: 2083448 - DNA, 25 bp, Homo sapien
gaagggacgcactgcatttcaggat

SEQ ID NO: 2083449 - DNA, 25 bp, Homo sapien
cctccggagggactcggtgtgtctc

SEQ ID NO: 2083450 - DNA, 25 bp, Homo sapien
tgttggagctggagagtcggcagcc

SEQ ID NO: 2083451 - DNA, 25 bp, Homo sapien
ggtgtgtctcggtgttgatttcaga

SEQ ID NO: 2083452 - DNA, 25 bp, Homo sapien
tgacgtgtcccggtggctctcacag

SEQ ID NO: 2083453 - DNA, 25 bp, Homo sapien
gatacgccaagttccgggcactgag

SEQ ID NO: 2083454 - DNA, 25 bp, Homo sapien
tcacctcagatacgccaagttccgg

SEQ ID NO: 2083455 - DNA, 25 bp, Homo sapien
tcagatacgccaagttccgggcact

SEQ ID NO: 2083456 - DNA, 25 bp, Homo sapien
cctcagatacgccaagttccgggca

SEQ ID NO: 2083457 - DNA, 25 bp, Homo sapien
gcatccgttttggaacctgcgtctg

SEQ ID NO: 2083458 - DNA, 25 bp, Homo sapien
tttggaacctgcgtctggggctcca

SEQ ID NO: 2083459 - DNA, 25 bp, Homo sapien
cggcatccgttttggaacctgcgtc

SEQ ID NO: 2083460 - DNA, 25 bp, Homo sapien
atccgttttggaacctgcgtctggg

SEQ ID NO: 2083461 - DNA, 25 bp, Homo sapien
catgatacgcgtggaagatgccgct

SEQ ID NO: 2083462 - DNA, 25 bp, Homo sapien
gaaatgaacctcgtgttgggaaggc

SEQ ID NO: 2083463 - DNA, 25 bp, Homo sapien
cgtaaccgtgaagacgtgtggccgc

SEQ ID NO: 2083464 - DNA, 25 bp, Homo sapien
ggaacctgcctgaattgcacctgcg

SEQ ID NO: 2083465 - DNA, 25 bp, Homo sapien
tggcctctagcacgcggtcctcggt

SEQ ID NO: 2083466 - DNA, 25 bp, Homo sapien
tttgctggcctctagcacgcggtcc

SEQ ID NO: 2083467 - DNA, 25 bp, Homo sapien
cggtcctcggtgaccgaaatcctgg

SEQ ID NO: 2083468 - DNA, 25 bp, Homo sapien
gcacgcggtcctcggtgaccgaaat

SEQ ID NO: 2083469 - DNA, 25 bp, Homo sapien
tgtcctttagaatgtgtttatgtcc

SEQ ID NO: 2083470 - DNA, 25 bp, Homo sapien
gtcctttagaatgtgtttatgtcct

SEQ ID NO: 2083471 - DNA, 25 bp, Homo sapien
tgatccttccattaaccaagaaatt

SEQ ID NO: 2083472 - DNA, 25 bp, Homo sapien
gctgcgctgaaatcccgggagcgtt

SEQ ID NO: 2083473 - DNA, 25 bp, Homo sapien
tgaaggtgctggactaataatacgt

SEQ ID NO: 2083474 - DNA, 25 bp, Homo sapien
ggtcatcatcttgtcccaaagctgt

SEQ ID NO: 2083475 - DNA, 25 bp, Homo sapien
gaggctggaacacagcgctgaggcc

SEQ ID NO: 2083476 - DNA, 25 bp, Homo sapien
cagcgcggcagacgggtggatgctc

SEQ ID NO: 2083477 - DNA, 25 bp, Homo sapien
tgaggcctgatccagcgcggcagac

SEQ ID NO: 2083478 - DNA, 25 bp, Homo sapien
gaacacagcgctgaggcctgatcca

SEQ ID NO: 2083479 - DNA, 25 bp, Homo sapien
cccttgggagcacgaaggcactgag

SEQ ID NO: 2083480 - DNA, 25 bp, Homo sapien
gagcggctccttccagcgtcacagg

SEQ ID NO: 2083481 - DNA, 25 bp, Homo sapien
tggtcggctgctacattcaccctct

SEQ ID NO: 2083482 - DNA, 25 bp, Homo sapien
cctgttggaagcaagagcggctcct

SEQ ID NO: 2083483 - DNA, 25 bp, Homo sapien
ttaggtggaaaagtatcttcagcca

SEQ ID NO: 2083484 - DNA, 25 bp, Homo sapien
ggtggaaaagtatcttcagccatct

SEQ ID NO: 2083485 - DNA, 25 bp, Homo sapien
cttaggtggaaaagtatcttcagcc

SEQ ID NO: 2083486 - DNA, 25 bp, Homo sapien
taggtggaaaagtatcttcagccat

SEQ ID NO: 2083487 - DNA, 25 bp, Homo sapien
acgggaagtgcacgctgtccgccat

SEQ ID NO: 2083488 - DNA, 25 bp, Homo sapien
gtgtagcgatttgcagtgcgttttc

SEQ ID NO: 2083489 - DNA, 25 bp, Homo sapien
acgggaagtgcacgctgtctgccat

SEQ ID NO: 2083490 - DNA, 25 bp, Homo sapien
tgtagcgatttgcagtgcgtttttc

SEQ ID NO: 2083491 - DNA, 25 bp, Homo sapien
cggtccgctgggccctgcgtggcgc

SEQ ID NO: 2083492 - DNA, 25 bp, Homo sapien
gtccgctgggccctgcgtggcgctg

SEQ ID NO: 2083493 - DNA, 25 bp, Homo sapien
ccgctgggccctgcgtggcgctgac

SEQ ID NO: 2083494 - DNA, 25 bp, Homo sapien
tccgctgggccctgcgtggcgctga

SEQ ID NO: 2083495 - DNA, 25 bp, Homo sapien
ggaaactccccgcagtccgaggatg

SEQ ID NO: 2083496 - DNA, 25 bp, Homo sapien
tcagtcttgaatgctgggaaactcc

SEQ ID NO: 2083497 - DNA, 25 bp, Homo sapien
tctgcggatggctgcatttcagtct

SEQ ID NO: 2083498 - DNA, 25 bp, Homo sapien
acacgtatgatcatcccgggaccac

SEQ ID NO: 2083499 - DNA, 25 bp, Homo sapien
ggcactcagtcgacacctctggtta

SEQ ID NO: 2083500 - DNA, 25 bp, Homo sapien
taacttggcaattaatcctcggtgc

SEQ ID NO: 2083501 - DNA, 25 bp, Homo sapien
tcttcatgatggcaagcctggtaac

SEQ ID NO: 2083502 - DNA, 25 bp, Homo sapien
gatgctcctttgtttggctcccggc

SEQ ID NO: 2083503 - DNA, 25 bp, Homo sapien
gaacatgctatttcctgacctaaag

SEQ ID NO: 2083504 - DNA, 25 bp, Homo sapien
tcaacacagaagacgtggtttccct

SEQ ID NO: 2083505 - DNA, 25 bp, Homo sapien
tgatgtcacccacataccgaagtga

SEQ ID NO: 2083506 - DNA, 25 bp, Homo sapien
tggtttccctgagctccggcttctg

SEQ ID NO: 2083507 - DNA, 25 bp, Homo sapien
tacaacaggacacgctctcaccttc

SEQ ID NO: 2083508 - DNA, 25 bp, Homo sapien
gtacaacaggacacgctctcacctt

SEQ ID NO: 2083509 - DNA, 25 bp, Homo sapien
acaacaggacacgctctcaccttca

SEQ ID NO: 2083510 - DNA, 25 bp, Homo sapien
agtacaacaggacacgctctcacct

SEQ ID NO: 2083511 - DNA, 25 bp, Homo sapien
cacacatggacactgttggcccaga

SEQ ID NO: 2083512 - DNA, 25 bp, Homo sapien
tgcacaggacgaacagaagtgaagt

SEQ ID NO: 2083513 - DNA, 25 bp, Homo sapien
ggtggcgggatcacccaaaaatgct

SEQ ID NO: 2083514 - DNA, 25 bp, Homo sapien
cgtgcatgcctagctgggtttacca

SEQ ID NO: 2083515 - DNA, 25 bp, Homo sapien
tcgcaatgggactgcgtgtgccgct

SEQ ID NO: 2083516 - DNA, 25 bp, Homo sapien
ggtacctcccacgagctgcaatggg

SEQ ID NO: 2083517 - DNA, 25 bp, Homo sapien
cattgcgcattctgcgtgtgtccca

SEQ ID NO: 2083518 - DNA, 25 bp, Homo sapien
tgcttctctggtagcaggtgagctc

SEQ ID NO: 2083519 - DNA, 25 bp, Homo sapien
gcccaagctccggtgattaccaggt

SEQ ID NO: 2083520 - DNA, 25 bp, Homo sapien
gacagccgcgccgagtgtcctaaca

SEQ ID NO: 2083521 - DNA, 25 bp, Homo sapien
tgattaccaggtaattcctgtccca

SEQ ID NO: 2083522 - DNA, 25 bp, Homo sapien
acacagttgccacacggctccatgt

SEQ ID NO: 2083523 - DNA, 25 bp, Homo sapien
ccaggcacgcatggccatggagcac

SEQ ID NO: 2083524 - DNA, 25 bp, Homo sapien
tgtggcctgtcgagaacacagtgtc

SEQ ID NO: 2083525 - DNA, 25 bp, Homo sapien
catggagcacgggaacgtgtgcgcc

SEQ ID NO: 2083526 - DNA, 25 bp, Homo sapien
cacgtctgtgatggtggtctcccag

SEQ ID NO: 2083527 - DNA, 25 bp, Homo sapien
ggtaatagggaattgctcctcagca

SEQ ID NO: 2083528 - DNA, 25 bp, Homo sapien
catgagagtcgcgtgtgccgtgatc

SEQ ID NO: 2083529 - DNA, 25 bp, Homo sapien
cacgcaggcctgtaacatgcatgtg

SEQ ID NO: 2083530 - DNA, 25 bp, Homo sapien
tgtcccgattcaggatggacgccca

SEQ ID NO: 2083531 - DNA, 25 bp, Homo sapien
tagacagactttttctagatgtcca

SEQ ID NO: 2083532 - DNA, 25 bp, Homo sapien
cctctggaggggctcatcgccggct

SEQ ID NO: 2083533 - DNA, 25 bp, Homo sapien
gctccacgggaagagcctcaaggtt

SEQ ID NO: 2083534 - DNA, 25 bp, Homo sapien
aggttccattcggtgctgaggccga

SEQ ID NO: 2083535 - DNA, 25 bp, Homo sapien
tttgtcccacgcagaagaacgaggc

SEQ ID NO: 2083536 - DNA, 25 bp, Homo sapien
ggaataaactgtgcggcccacgtag

SEQ ID NO: 2083537 - DNA, 25 bp, Homo sapien
tgctgtgaaatgtcaccggcgcgct

SEQ ID NO: 2083538 - DNA, 25 bp, Homo sapien
tctgagcaagccgagccttcgaagg

SEQ ID NO: 2083539 - DNA, 25 bp, Homo sapien
tgaaggaagtttggccggctgctcc

SEQ ID NO: 2083540 - DNA, 25 bp, Homo sapien
tttgcctgaaggaagtttggccggc

SEQ ID NO: 2083541 - DNA, 25 bp, Homo sapien
agctctgccacgctggtgtctgctg

SEQ ID NO: 2083542 - DNA, 25 bp, Homo sapien
cagtaaagttgggtagagatatttc

SEQ ID NO: 2083543 - DNA, 25 bp, Homo sapien
tccactgtaggacggatcacgttgt

SEQ ID NO: 2083544 - DNA, 25 bp, Homo sapien
ctgggcatgatgtccccaagattca

SEQ ID NO: 2083545 - DNA, 25 bp, Homo sapien
tccttgtccaaagctgaatattcca

SEQ ID NO: 2083546 - DNA, 25 bp, Homo sapien
acgtgattgtctttactgggcatga

SEQ ID NO: 2083547 - DNA, 25 bp, Homo sapien
gcccggagctcccgttctgatttaa

SEQ ID NO: 2083548 - DNA, 25 bp, Homo sapien
gcggacccagccgagaccctgcagg

SEQ ID NO: 2083549 - DNA, 25 bp, Homo sapien
ctgcggacccagccgagaccctgca

SEQ ID NO: 2083550 - DNA, 25 bp, Homo sapien
gaccctgcagggcctccagccccac

SEQ ID NO: 2083551 - DNA, 25 bp, Homo sapien
gagaccctgcagggcctccagcccc

SEQ ID NO: 2083552 - DNA, 25 bp, Homo sapien
gctccttccaagcccggtctcagcc

SEQ ID NO: 2083553 - DNA, 25 bp, Homo sapien
tccttccaagcccggtctcagcccg

SEQ ID NO: 2083554 - DNA, 25 bp, Homo sapien
ccttccaagcccggtctcagcccgg

SEQ ID NO: 2083555 - DNA, 25 bp, Homo sapien
ctccttccaagcccggtctcagccc

SEQ ID NO: 2083556 - DNA, 25 bp, Homo sapien
ttttgccggcattgtctgtcggatg

SEQ ID NO: 2083557 - DNA, 25 bp, Homo sapien
aaaccacggcgcctctcttgccaaa

SEQ ID NO: 2083558 - DNA, 25 bp, Homo sapien
gcccttcggaagtcttccactgtgt

SEQ ID NO: 2083559 - DNA, 25 bp, Homo sapien
ctctccctctttaccaggctgggtt

SEQ ID NO: 2083560 - DNA, 25 bp, Homo sapien
tgaatccgtgtgaccctaggctcgt

SEQ ID NO: 2083561 - DNA, 25 bp, Homo sapien
catttcatggcctcaaacgggtctt

SEQ ID NO: 2083562 - DNA, 25 bp, Homo sapien
tgatttgtgtccagcccgtcttcag

SEQ ID NO: 2083563 - DNA, 25 bp, Homo sapien
aagcggccagggaactctctgaagg

SEQ ID NO: 2083564 - DNA, 25 bp, Homo sapien
tttcactggcgtccttgccattttc

SEQ ID NO: 2083565 - DNA, 25 bp, Homo sapien
tttcccccagcaacgtgcatcccag

SEQ ID NO: 2083566 - DNA, 25 bp, Homo sapien
attttcccccagcaacgtgcatccc

SEQ ID NO: 2083567 - DNA, 25 bp, Homo sapien
ccggtgcttttcactggcgtccttg

SEQ ID NO: 2083568 - DNA, 25 bp, Homo sapien
ggacctgggcgtggccgggagctcc

SEQ ID NO: 2083569 - DNA, 25 bp, Homo sapien
gcatggccaggacagattgtgctcc

SEQ ID NO: 2083570 - DNA, 25 bp, Homo sapien
cagttcggtggacaagcatggccag

SEQ ID NO: 2083571 - DNA, 25 bp, Homo sapien
ctccaggacctgcagagtgtaagct

SEQ ID NO: 2083572 - DNA, 25 bp, Homo sapien
taaactcctgacattccctggctgg

SEQ ID NO: 2083573 - DNA, 25 bp, Homo sapien
tccagcccgagatgataaacagcct

SEQ ID NO: 2083574 - DNA, 25 bp, Homo sapien
gatttgagtctttccccttgatggt

SEQ ID NO: 2083575 - DNA, 25 bp, Homo sapien
gaattgctaactaaaggccatcagg

SEQ ID NO: 2083576 - DNA, 25 bp, Homo sapien
cacataaggtgtcagataagggtct

SEQ ID NO: 2083577 - DNA, 25 bp, Homo sapien
tgtgcaacagttaaagggccccaag

SEQ ID NO: 2083578 - DNA, 25 bp, Homo sapien
caaaacccatcgatagagtgctgac

SEQ ID NO: 2083579 - DNA, 25 bp, Homo sapien
gggccccaagcatagtcacatacgt

SEQ ID NO: 2083580 - DNA, 25 bp, Homo sapien
ggccccaagtggaatatgcacacgt

SEQ ID NO: 2083581 - DNA, 25 bp, Homo sapien
catttggcggaaagtctaacctgat

SEQ ID NO: 2083582 - DNA, 25 bp, Homo sapien
tgatttggcacgagacgacccatga

SEQ ID NO: 2083583 - DNA, 25 bp, Homo sapien
tacatggcatctatccaggttggag

SEQ ID NO: 2083584 - DNA, 25 bp, Homo sapien
gattttctgaaccaaccaggcgctt

SEQ ID NO: 2083585 - DNA, 25 bp, Homo sapien
taatggcgagggctaaaaggcactg

SEQ ID NO: 2083586 - DNA, 25 bp, Homo sapien
gattcaggaatcagggaacccctca

SEQ ID NO: 2083587 - DNA, 25 bp, Homo sapien
taaaggctctctcgtgagcaccgca

SEQ ID NO: 2083588 - DNA, 25 bp, Homo sapien
gtagtcccgcgacgttgcgactcac

SEQ ID NO: 2083589 - DNA, 25 bp, Homo sapien
gacgccgacagcctcacgtctctgg

SEQ ID NO: 2083590 - DNA, 25 bp, Homo sapien
cctgcgcttccgcatcgaaggtgag

SEQ ID NO: 2083591 - DNA, 25 bp, Homo sapien
aggcatgccgggacccgtagtcccg

SEQ ID NO: 2083592 - DNA, 25 bp, Homo sapien
aactcgtagtctcgggatgctgggt

SEQ ID NO: 2083593 - DNA, 25 bp, Homo sapien
tgcacgccgggatacgtagttccga

SEQ ID NO: 2083594 - DNA, 25 bp, Homo sapien
tgcgttgaacgctgggactcgtagt

SEQ ID NO: 2083595 - DNA, 25 bp, Homo sapien
ctcgcggtgcatgccggaactcgta

SEQ ID NO: 2083596 - DNA, 25 bp, Homo sapien
tatttacacgcgcacgtacgcacgt

SEQ ID NO: 2083597 - DNA, 25 bp, Homo sapien
tcaggaacgcagttcttcacggccg

SEQ ID NO: 2083598 - DNA, 25 bp, Homo sapien
aagccggtaccgagaggaactacag

SEQ ID NO: 2083599 - DNA, 25 bp, Homo sapien
tccgaggaaaagtaggtagggctca

SEQ ID NO: 2083600 - DNA, 25 bp, Homo sapien
cacctagggtcaggcgctgagtgct

SEQ ID NO: 2083601 - DNA, 25 bp, Homo sapien
gggctgcggacacctagggtcaggc

SEQ ID NO: 2083602 - DNA, 25 bp, Homo sapien
gagtgctgggcggtctcatgtccac

SEQ ID NO: 2083603 - DNA, 25 bp, Homo sapien
ggtggtctcatgttcgcagggtggg

SEQ ID NO: 2083604 - DNA, 25 bp, Homo sapien
cagtatctccaggataggcctgctg

SEQ ID NO: 2083605 - DNA, 25 bp, Homo sapien
tcctcagtagcagtagtgtgcccca

SEQ ID NO: 2083606 - DNA, 25 bp, Homo sapien
tgctggcccctctgaaagcaatttc

SEQ ID NO: 2083607 - DNA, 25 bp, Homo sapien
ggtctaagcatgaacggtctgtcct

SEQ ID NO: 2083608 - DNA, 25 bp, Homo sapien
cactgtcagcacgtgatgttggtgg

SEQ ID NO: 2083609 - DNA, 25 bp, Homo sapien
aaacactgtcagcacgtgatgttgg

SEQ ID NO: 2083610 - DNA, 25 bp, Homo sapien
aacactgtcagcacgtgatgttggt

SEQ ID NO: 2083611 - DNA, 25 bp, Homo sapien
ctgtcagcacgtgatgttggtggag

SEQ ID NO: 2083612 - DNA, 25 bp, Homo sapien
cacccggcctagagcagtatttctg

SEQ ID NO: 2083613 - DNA, 25 bp, Homo sapien
tttctaacctgtactcccactgtct

SEQ ID NO: 2083614 - DNA, 25 bp, Homo sapien
tctgttagacagcacaattcgatgt

SEQ ID NO: 2083615 - DNA, 25 bp, Homo sapien
tcattgttagcctcagaatacttag

SEQ ID NO: 2083616 - DNA, 25 bp, Homo sapien
ctcccggaggtgactctgcagttgg

SEQ ID NO: 2083617 - DNA, 25 bp, Homo sapien
ggctcccggaggtgactctgcagtt

SEQ ID NO: 2083618 - DNA, 25 bp, Homo sapien
cctgacacgggctcccggaggtgac

SEQ ID NO: 2083619 - DNA, 25 bp, Homo sapien
cacgggctcccggaggtgactctgc

SEQ ID NO: 2083620 - DNA, 25 bp, Homo sapien
atgtccttgtgggagccggtccaga

SEQ ID NO: 2083621 - DNA, 25 bp, Homo sapien
gggctgctgaccaggtgggatgtcc

SEQ ID NO: 2083622 - DNA, 25 bp, Homo sapien
tgcacgggagcctccgtgggctgct

SEQ ID NO: 2083623 - DNA, 25 bp, Homo sapien
tgctgaccaggtgggatgtccttgt

SEQ ID NO: 2083624 - DNA, 25 bp, Homo sapien
tcgggtgttagctgtcctctgggtt

SEQ ID NO: 2083625 - DNA, 25 bp, Homo sapien
gtcctctgggttggatagcctggga

SEQ ID NO: 2083626 - DNA, 25 bp, Homo sapien
tcacattcgggtgttagctgtcctc

SEQ ID NO: 2083627 - DNA, 25 bp, Homo sapien
gcctgggaaaacgatatttaatatg

SEQ ID NO: 2083628 - DNA, 25 bp, Homo sapien
aagcagcgacccctgtgaacatcag

SEQ ID NO: 2083629 - DNA, 25 bp, Homo sapien
ccagaggattgggaaggagcacccc

SEQ ID NO: 2083630 - DNA, 25 bp, Homo sapien
gaagaagcagcgacccctgtgaaca

SEQ ID NO: 2083631 - DNA, 25 bp, Homo sapien
ccgtggcctgagaggactcagctct

SEQ ID NO: 2083632 - DNA, 25 bp, Homo sapien
taaaaatcctaagtcccggccatgc

SEQ ID NO: 2083633 - DNA, 25 bp, Homo sapien
cctccagaggctgccctttaatgct

SEQ ID NO: 2083634 - DNA, 25 bp, Homo sapien
tagtcaggggcttcccggactggga

SEQ ID NO: 2083635 - DNA, 25 bp, Homo sapien
aaaatcctaagtcccggccatgcac

SEQ ID NO: 2083636 - DNA, 25 bp, Homo sapien
gcagtacacttttatcacagaagac

SEQ ID NO: 2083637 - DNA, 25 bp, Homo sapien
tgtcctcctgttattggccatgtag

SEQ ID NO: 2083638 - DNA, 25 bp, Homo sapien
cgtaagattgcaactgtccagaggt

SEQ ID NO: 2083639 - DNA, 25 bp, Homo sapien
ggtgaaggctctcatacatgtttgg

SEQ ID NO: 2083640 - DNA, 25 bp, Homo sapien
cctttgagctggacagacctctgtg

SEQ ID NO: 2083641 - DNA, 25 bp, Homo sapien
cgtcgcgtagtctgatgtttttgca

SEQ ID NO: 2083642 - DNA, 25 bp, Homo sapien
tactcatggatctagggtctgtgtg

SEQ ID NO: 2083643 - DNA, 25 bp, Homo sapien
ctcagggatactgggagctcgtcgc

SEQ ID NO: 2083644 - DNA, 25 bp, Homo sapien
tatgcgtctgcccatggacggcagg

SEQ ID NO: 2083645 - DNA, 25 bp, Homo sapien
cctccgtgggagaagggtcgcttca

SEQ ID NO: 2083646 - DNA, 25 bp, Homo sapien
gctgaaactgtgatctgaggcgcga

SEQ ID NO: 2083647 - DNA, 25 bp, Homo sapien
aacccgggtagtcgagctgaaactg

SEQ ID NO: 2083648 - DNA, 25 bp, Homo sapien
tacatggtgaaagcaagaacaaggt

SEQ ID NO: 2083649 - DNA, 25 bp, Homo sapien
gaacagatctcatttcgacacaaga

SEQ ID NO: 2083650 - DNA, 25 bp, Homo sapien
cgacacaagatttaggtggaggcat

SEQ ID NO: 2083651 - DNA, 25 bp, Homo sapien
tcaagtaagtttgagccctccaact

SEQ ID NO: 2083652 - DNA, 25 bp, Homo sapien
ctacgacgtgagccgcgacgagttc

SEQ ID NO: 2083653 - DNA, 25 bp, Homo sapien
gacgtgagccgcgacgagttcttct

SEQ ID NO: 2083654 - DNA, 25 bp, Homo sapien
tcttcgaccgcagcccgtgcgcctt

SEQ ID NO: 2083655 - DNA, 25 bp, Homo sapien
cgtgagccgcgacgagttcttcttc

SEQ ID NO: 2083656 - DNA, 25 bp, Homo sapien
cacctaatggagaggagtcacctgc

SEQ ID NO: 2083657 - DNA, 25 bp, Homo sapien
tgagccgttgttcgacccagttgaa

SEQ ID NO: 2083658 - DNA, 25 bp, Homo sapien
tggtgccgctgccatcacagtgaag

SEQ ID NO: 2083659 - DNA, 25 bp, Homo sapien
cacagctgggtgaatcatcaacgac

SEQ ID NO: 2083660 - DNA, 25 bp, Homo sapien
catttccttagaccattacactttt

SEQ ID NO: 2083661 - DNA, 25 bp, Homo sapien
tttccttagaccattacacttttgc

SEQ ID NO: 2083662 - DNA, 25 bp, Homo sapien
tcactgtcatttccttagaccatta

SEQ ID NO: 2083663 - DNA, 25 bp, Homo sapien
actgtcatttccttagaccattaca

SEQ ID NO: 2083664 - DNA, 25 bp, Homo sapien
cagttgctgttcaaatccgttaaaa

SEQ ID NO: 2083665 - DNA, 25 bp, Homo sapien
gatgtgctatcccactgccttatgg

SEQ ID NO: 2083666 - DNA, 25 bp, Homo sapien
tgtgaacttcccttgtaagtgatct

SEQ ID NO: 2083667 - DNA, 25 bp, Homo sapien
tgtttctgctggtaagtcagccgtt

SEQ ID NO: 2083668 - DNA, 25 bp, Homo sapien
gaatgagcagagcttgctaccggtc

SEQ ID NO: 2083669 - DNA, 25 bp, Homo sapien
taaaaccatcagaaggcatcacagg

SEQ ID NO: 2083670 - DNA, 25 bp, Homo sapien
gacagccttgggtgtcgctcaggaa

SEQ ID NO: 2083671 - DNA, 25 bp, Homo sapien
actgtccattacacggcagcaggag

SEQ ID NO: 2083672 - DNA, 25 bp, Homo sapien
ggtttattgattccaagtcgccaca

SEQ ID NO: 2083673 - DNA, 25 bp, Homo sapien
ttgattccaagtcgccacacagggt

SEQ ID NO: 2083674 - DNA, 25 bp, Homo sapien
ttattgattccaagtcgccacacag

SEQ ID NO: 2083675 - DNA, 25 bp, Homo sapien
aatggtttattgattccaagtcgcc

SEQ ID NO: 2083676 - DNA, 25 bp, Homo sapien
gacatggtgtgacctcttgcaacgg

SEQ ID NO: 2083677 - DNA, 25 bp, Homo sapien
taatgtgaggcaattaccgctacag

SEQ ID NO: 2083678 - DNA, 25 bp, Homo sapien
gaagacgatgcctgttggagccgca

SEQ ID NO: 2083679 - DNA, 25 bp, Homo sapien
gacatcaaaactgcatccggaggtg

SEQ ID NO: 2083680 - DNA, 25 bp, Homo sapien
tcgagggctccgctcacaggcctta

SEQ ID NO: 2083681 - DNA, 25 bp, Homo sapien
ggagcacggtgaccctgcgtccgca

SEQ ID NO: 2083682 - DNA, 25 bp, Homo sapien
tcagaaaacccggagcacggtgacc

SEQ ID NO: 2083683 - DNA, 25 bp, Homo sapien
acagccgcctttccgtgtgtaccag

SEQ ID NO: 2083684 - DNA, 25 bp, Homo sapien
accccagcttcaaggttcgcggctg

SEQ ID NO: 2083685 - DNA, 25 bp, Homo sapien
gctcagacggtgtttcataagagga

SEQ ID NO: 2083686 - DNA, 25 bp, Homo sapien
ggctgatggagaccccaatgcccat

SEQ ID NO: 2083687 - DNA, 25 bp, Homo sapien
caatgtgtaccttgggctcagacgg

SEQ ID NO: 2083688 - DNA, 25 bp, Homo sapien
gcaggccgcacacggagaactgcag

SEQ ID NO: 2083689 - DNA, 25 bp, Homo sapien
gtggcgggcgaaggcgtaggcctgc

SEQ ID NO: 2083690 - DNA, 25 bp, Homo sapien
cgtcttgaaggcgtcaccactggtc

SEQ ID NO: 2083691 - DNA, 25 bp, Homo sapien
cactggtccacatgagcaccatctt

SEQ ID NO: 2083692 - DNA, 25 bp, Homo sapien
tcttgcagcatctgaaaaatgtgcc

SEQ ID NO: 2083693 - DNA, 25 bp, Homo sapien
gaatttgtccctgactctattcatg

SEQ ID NO: 2083694 - DNA, 25 bp, Homo sapien
tctggtgagaaacccatagtaattt

SEQ ID NO: 2083695 - DNA, 25 bp, Homo sapien
gatgacagaatattagaccctttgg

SEQ ID NO: 2083696 - DNA, 25 bp, Homo sapien
tgagacacgttccaagttccgcagc

SEQ ID NO: 2083697 - DNA, 25 bp, Homo sapien
ttcctgacgaggatgcacagggtct

SEQ ID NO: 2083698 - DNA, 25 bp, Homo sapien
cggtcccgcacttgaagctggctga

SEQ ID NO: 2083699 - DNA, 25 bp, Homo sapien
aaagcagaagttagcccaggtgatc

SEQ ID NO: 2083700 - DNA, 25 bp, Homo sapien
gtgcttctgtagctcttgtcatgac

SEQ ID NO: 2083701 - DNA, 25 bp, Homo sapien
agagagggtcctgccgacatcctgg

SEQ ID NO: 2083702 - DNA, 25 bp, Homo sapien
catgacgttggggtgctttaggcct

SEQ ID NO: 2083703 - DNA, 25 bp, Homo sapien
gtggtgctcccgtacccacagtgct

SEQ ID NO: 2083704 - DNA, 25 bp, Homo sapien
acaggtaggtgatgtagcccgccac

SEQ ID NO: 2083705 - DNA, 25 bp, Homo sapien
acccagcatggcttcggtcagcaca

SEQ ID NO: 2083706 - DNA, 25 bp, Homo sapien
gacgcactgcacgtagtccgagaag

SEQ ID NO: 2083707 - DNA, 25 bp, Homo sapien
acaaacagggcggagtcaatggaca

SEQ ID NO: 2083708 - DNA, 25 bp, Homo sapien
taagttcagtcaggagaagtcggcg

SEQ ID NO: 2083709 - DNA, 25 bp, Homo sapien
ctcagacagcgggaaatgagatctc

SEQ ID NO: 2083710 - DNA, 25 bp, Homo sapien
taaggaaaacgctggctgaggctga

SEQ ID NO: 2083711 - DNA, 25 bp, Homo sapien
gctgggtaaggaaaacgctggctga

SEQ ID NO: 2083712 - DNA, 25 bp, Homo sapien
cgccgtgacttcccgagatgtgttt

SEQ ID NO: 2083713 - DNA, 25 bp, Homo sapien
acgccgtgacttcccgagatgtgtt

SEQ ID NO: 2083714 - DNA, 25 bp, Homo sapien
ctcctgcaagctgcccttcagggca

SEQ ID NO: 2083715 - DNA, 25 bp, Homo sapien
ccagccctacctgctgcgtctgctt

SEQ ID NO: 2083716 - DNA, 25 bp, Homo sapien
agccctacctgctgcgtctgcttct

SEQ ID NO: 2083717 - DNA, 25 bp, Homo sapien
cctacctgctgcgtctgcttctcca

SEQ ID NO: 2083718 - DNA, 25 bp, Homo sapien
catcagaaacaatggagtccagagg

SEQ ID NO: 2083719 - DNA, 25 bp, Homo sapien
gcagtggaataacatattcaaagca

SEQ ID NO: 2083720 - DNA, 25 bp, Homo sapien
tccagagggcagtggaataacatat

SEQ ID NO: 2083721 - DNA, 25 bp, Homo sapien
cagaaacaatggagtccagagggca

SEQ ID NO: 2083722 - DNA, 25 bp, Homo sapien
caatgtagtacatcatcatagtaga

SEQ ID NO: 2083723 - DNA, 25 bp, Homo sapien
gatcatctcaacagacacgaaaagc

SEQ ID NO: 2083724 - DNA, 25 bp, Homo sapien
ccatgaccacatggatttatcccaa

SEQ ID NO: 2083725 - DNA, 25 bp, Homo sapien
aaaagtgttagacaccatgaccaca

SEQ ID NO: 2083726 - DNA, 25 bp, Homo sapien
tagactcggccacgcttggtaaaga

SEQ ID NO: 2083727 - DNA, 25 bp, Homo sapien
tctataaagtagcaatgaagcagca

SEQ ID NO: 2083728 - DNA, 25 bp, Homo sapien
tggtaaagatgacgcacgcacatgc

SEQ ID NO: 2083729 - DNA, 25 bp, Homo sapien
caaaaggaacgtgctgcggacagtg

SEQ ID NO: 2083730 - DNA, 25 bp, Homo sapien
gcaaccttgacttcttcatccttgc

SEQ ID NO: 2083731 - DNA, 25 bp, Homo sapien
tgggggcaaccttgacttcttcatc

SEQ ID NO: 2083732 - DNA, 25 bp, Homo sapien
ggggcaaccttgacttcttcatcct

SEQ ID NO: 2083733 - DNA, 25 bp, Homo sapien
ctgggggcaaccttgacttcttcat

SEQ ID NO: 2083734 - DNA, 25 bp, Homo sapien
gtacacaggcagatacagggattcc

SEQ ID NO: 2083735 - DNA, 25 bp, Homo sapien
gaaggaaggtttgcactgtaccctg

SEQ ID NO: 2083736 - DNA, 25 bp, Homo sapien
cagggattcctaatgtgacgtccaa

SEQ ID NO: 2083737 - DNA, 25 bp, Homo sapien
gagaccactgctgttggcacatgaa

SEQ ID NO: 2083738 - DNA, 25 bp, Homo sapien
tcatgatggcgctctgccacagcag

SEQ ID NO: 2083739 - DNA, 25 bp, Homo sapien
agcagcggggactcaaagcgccttc

SEQ ID NO: 2083740 - DNA, 25 bp, Homo sapien
ctcgttggccacacggacctcggtg

SEQ ID NO: 2083741 - DNA, 25 bp, Homo sapien
ctgtaaaggagcggcgcctggcgtt

SEQ ID NO: 2083742 - DNA, 25 bp, Homo sapien
ggagggaggtccacccatgccactt

SEQ ID NO: 2083743 - DNA, 25 bp, Homo sapien
tgaacctgcagccggagagaccctg

SEQ ID NO: 2083744 - DNA, 25 bp, Homo sapien
ctgcgggagagacactgtgtcagga

SEQ ID NO: 2083745 - DNA, 25 bp, Homo sapien
agcaggaaagatcctgtgtcaggag

SEQ ID NO: 2083746 - DNA, 25 bp, Homo sapien
cgcccatgccgcctctcccaatccc

SEQ ID NO: 2083747 - DNA, 25 bp, Homo sapien
tgcagcaggaaagatcctgtgtcgg

SEQ ID NO: 2083748 - DNA, 25 bp, Homo sapien
ccatgccgcctctcctggtcccgaa

SEQ ID NO: 2083749 - DNA, 25 bp, Homo sapien
tctcctggtcccgaacttgcagcag

SEQ ID NO: 2083750 - DNA, 25 bp, Homo sapien
tttggcgctccccagaaccagtggc

SEQ ID NO: 2083751 - DNA, 25 bp, Homo sapien
agaacccttcggcacatttggcgct

SEQ ID NO: 2083752 - DNA, 25 bp, Homo sapien
tccgggttgccaccaggcaaaaagc

SEQ ID NO: 2083753 - DNA, 25 bp, Homo sapien
tggtacccgggtctagtggccctga

SEQ ID NO: 2083754 - DNA, 25 bp, Homo sapien
cgggaatctcaatcagcctgcagtt

SEQ ID NO: 2083755 - DNA, 25 bp, Homo sapien
ctgtgtgtggcacgcactcatagaa

SEQ ID NO: 2083756 - DNA, 25 bp, Homo sapien
ggcacgcactcatagaaagccccaa

SEQ ID NO: 2083757 - DNA, 25 bp, Homo sapien
aacccctgactgttccagcgcggga

SEQ ID NO: 2083758 - DNA, 25 bp, Homo sapien
agccaggatgcagtcctcagagggt

SEQ ID NO: 2083759 - DNA, 25 bp, Homo sapien
aaaagccacagacgttctcctggga

SEQ ID NO: 2083760 - DNA, 25 bp, Homo sapien
ggaaaaagccacagacgttctcctg

SEQ ID NO: 2083761 - DNA, 25 bp, Homo sapien
gagccaggatgcagtcctcagaggg

SEQ ID NO: 2083762 - DNA, 25 bp, Homo sapien
cctgaatgttggcattccacagagt

SEQ ID NO: 2083763 - DNA, 25 bp, Homo sapien
tgctgaatgctggttttgcaaaatg

SEQ ID NO: 2083764 - DNA, 25 bp, Homo sapien
gcattccacagagtgtgatctgctg

SEQ ID NO: 2083765 - DNA, 25 bp, Homo sapien
gagtgtgatctgctgaatgctggtt

SEQ ID NO: 2083766 - DNA, 25 bp, Homo sapien
gcaggtacgtgattactcagtgacc

SEQ ID NO: 2083767 - DNA, 25 bp, Homo sapien
accttccaatctgcccggacagaga

SEQ ID NO: 2083768 - DNA, 25 bp, Homo sapien
gcagacaccttccaatctgcccgga

SEQ ID NO: 2083769 - DNA, 25 bp, Homo sapien
gcaaagaagcaggtacgtgattact

SEQ ID NO: 2083770 - DNA, 25 bp, Homo sapien
gagtatccgcaaaatgttggccacc

SEQ ID NO: 2083771 - DNA, 25 bp, Homo sapien
ccaggcacacgtaggtggagaagcc

SEQ ID NO: 2083772 - DNA, 25 bp, Homo sapien
gaagccgtcggcgttctgcgtcctg

SEQ ID NO: 2083773 - DNA, 25 bp, Homo sapien
tcctgcgaatgtcccgatactgcgg

SEQ ID NO: 2083774 - DNA, 25 bp, Homo sapien
gccaccggccgcctgctcatcgccg

SEQ ID NO: 2083775 - DNA, 25 bp, Homo sapien
ctggccgaggctgtcacgggctccg

SEQ ID NO: 2083776 - DNA, 25 bp, Homo sapien
tccgcgcgctcctgcggcctcgggg

SEQ ID NO: 2083777 - DNA, 25 bp, Homo sapien
gccgcctgctcatcgccgctccgcg

SEQ ID NO: 2083778 - DNA, 25 bp, Homo sapien
gggagggtcacagggcctagcatgg

SEQ ID NO: 2083779 - DNA, 25 bp, Homo sapien
ggactgaaggccgcgaccaactgcc

SEQ ID NO: 2083780 - DNA, 25 bp, Homo sapien
gggcgcactgttcgggggagggtca

SEQ ID NO: 2083781 - DNA, 25 bp, Homo sapien
cacggctcgcgggaggaggtgccgg

SEQ ID NO: 2083782 - DNA, 25 bp, Homo sapien
cgccgctgacccgcgcgcgtctcgg

SEQ ID NO: 2083783 - DNA, 25 bp, Homo sapien
cccgcgccgctgacccgcgcgcgtc

SEQ ID NO: 2083784 - DNA, 25 bp, Homo sapien
ccgcgccgctgacccgcgcgcgtct

SEQ ID NO: 2083785 - DNA, 25 bp, Homo sapien
cgcgtccccgcgccgctgacccgcg

SEQ ID NO: 2083786 - DNA, 25 bp, Homo sapien
tgcaaacaagagaagccgaccaagc

SEQ ID NO: 2083787 - DNA, 25 bp, Homo sapien
caggtgggccctaaacactgtggct

SEQ ID NO: 2083788 - DNA, 25 bp, Homo sapien
cagagtgagtttgtaccttttcgaa

SEQ ID NO: 2083789 - DNA, 25 bp, Homo sapien
gcgcttgtcacatagcttcctgcaa

SEQ ID NO: 2083790 - DNA, 25 bp, Homo sapien
tatagcaaaagctgtacctccggcc

SEQ ID NO: 2083791 - DNA, 25 bp, Homo sapien
ggcttcctgatgtgttaattacccc

SEQ ID NO: 2083792 - DNA, 25 bp, Homo sapien
gctgtgattctttcggactggtaga

SEQ ID NO: 2083793 - DNA, 25 bp, Homo sapien
gctctgacggcaacattaaacctca

SEQ ID NO: 2083794 - DNA, 25 bp, Homo sapien
ttaactttttgacgacctgcctgcc

SEQ ID NO: 2083795 - DNA, 25 bp, Homo sapien
tgcaaaacgcacaggctcacaggat

SEQ ID NO: 2083796 - DNA, 25 bp, Homo sapien
tacatgccaggtactcgaggtcaca

SEQ ID NO: 2083797 - DNA, 25 bp, Homo sapien
gacatatgcgttcaattctcctggg

SEQ ID NO: 2083798 - DNA, 25 bp, Homo sapien
tttatccgcgcagactgagggcgcc

SEQ ID NO: 2083799 - DNA, 25 bp, Homo sapien
tcaccacgtgcttgtttatttcggt

SEQ ID NO: 2083800 - DNA, 25 bp, Homo sapien
acaaaaagggctccacgacatttat

SEQ ID NO: 2083801 - DNA, 25 bp, Homo sapien
tcggtgagttaagaccatgttatca

SEQ ID NO: 2083802 - DNA, 25 bp, Homo sapien
tggagtagtccttgggggacaccac

SEQ ID NO: 2083803 - DNA, 25 bp, Homo sapien
agcggtacttggtggagtagtcctt

SEQ ID NO: 2083804 - DNA, 25 bp, Homo sapien
gtagcggtacttggtggagtagtcc

SEQ ID NO: 2083805 - DNA, 25 bp, Homo sapien
tcagtagcggtacttggtggagtag

SEQ ID NO: 2083806 - DNA, 25 bp, Homo sapien
ctccatggcccagttaatcttgttg

SEQ ID NO: 2083807 - DNA, 25 bp, Homo sapien
tccatggcccagttaatcttgttgt

SEQ ID NO: 2083808 - DNA, 25 bp, Homo sapien
ctgcaacgagaaacaagggcatcca

SEQ ID NO: 2083809 - DNA, 25 bp, Homo sapien
caagggcatccattctcatagaagt

SEQ ID NO: 2083810 - DNA, 25 bp, Homo sapien
ccactgtgacaagctcttgttaaca

SEQ ID NO: 2083811 - DNA, 25 bp, Homo sapien
aatgccgtatttttcccactgtgac

SEQ ID NO: 2083812 - DNA, 25 bp, Homo sapien
taaaatcgagagtgtatgccatgat

SEQ ID NO: 2083813 - DNA, 25 bp, Homo sapien
tatgccatgatgcaggagaatacag

SEQ ID NO: 2083814 - DNA, 25 bp, Homo sapien
tgaagaacgcataaaatcgagagtg

SEQ ID NO: 2083815 - DNA, 25 bp, Homo sapien
catgatgcaggagaatacaggaagc

SEQ ID NO: 2083816 - DNA, 25 bp, Homo sapien
tagaaagtattccccgtgaagtctc

SEQ ID NO: 2083817 - DNA, 25 bp, Homo sapien
gcaaatctgatcagggtctggagcc

SEQ ID NO: 2083818 - DNA, 25 bp, Homo sapien
tcaggagaggcaaatctgatcaggg

SEQ ID NO: 2083819 - DNA, 25 bp, Homo sapien
cccgtgaagtctctggttcaggaga

SEQ ID NO: 2083820 - DNA, 25 bp, Homo sapien
tccacttttggagaatggtctaatg

SEQ ID NO: 2083821 - DNA, 25 bp, Homo sapien
ttttggagaatggtctaatgctcat

SEQ ID NO: 2083822 - DNA, 25 bp, Homo sapien
cacttttggagaatggtctaatgct

SEQ ID NO: 2083823 - DNA, 25 bp, Homo sapien
cgagtaggaggctccacttttggag

SEQ ID NO: 2083824 - DNA, 25 bp, Homo sapien
gacagtacatggatcgtataactca

SEQ ID NO: 2083825 - DNA, 25 bp, Homo sapien
catgacagtacatggatcgtataac

SEQ ID NO: 2083826 - DNA, 25 bp, Homo sapien
cagtacatggatcgtataactcata

SEQ ID NO: 2083827 - DNA, 25 bp, Homo sapien
aacatgacagtacatggatcgtata

SEQ ID NO: 2083828 - DNA, 25 bp, Homo sapien
aagtcaggcacttctgtaatatcca

SEQ ID NO: 2083829 - DNA, 25 bp, Homo sapien
gttgaagtcaggcacttctgtaata

SEQ ID NO: 2083830 - DNA, 25 bp, Homo sapien
tcaggcacttctgtaatatccacaa

SEQ ID NO: 2083831 - DNA, 25 bp, Homo sapien
tgaagtcaggcacttctgtaatatc

SEQ ID NO: 2083832 - DNA, 25 bp, Homo sapien
actgaaataacagaacactttggct

SEQ ID NO: 2083833 - DNA, 25 bp, Homo sapien
taacagaacactttggctttcattt

SEQ ID NO: 2083834 - DNA, 25 bp, Homo sapien
tttgtgtggatcagggcaatttttg

SEQ ID NO: 2083835 - DNA, 25 bp, Homo sapien
aacaaaaccaagaatttgtgtggat

SEQ ID NO: 2083836 - DNA, 25 bp, Homo sapien
tctcaggttgaaacgtaactcccag

SEQ ID NO: 2083837 - DNA, 25 bp, Homo sapien
agctttcaccgtgcgacgtgcctgt

SEQ ID NO: 2083838 - DNA, 25 bp, Homo sapien
taactcccagcgttgcaggtgaggc

SEQ ID NO: 2083839 - DNA, 25 bp, Homo sapien
caatggttgagcgtcatcctcttgg

SEQ ID NO: 2083840 - DNA, 25 bp, Homo sapien
cacgagaacgtgaacatcctctgat

SEQ ID NO: 2083841 - DNA, 25 bp, Homo sapien
cacataaagctcacgtgccacgaga

SEQ ID NO: 2083842 - DNA, 25 bp, Homo sapien
gcccactgcatctaacccggagaat

SEQ ID NO: 2083843 - DNA, 25 bp, Homo sapien
cttgagaatccaccatgtatgaggc

SEQ ID NO: 2083844 - DNA, 25 bp, Homo sapien
aatccagcatgaagtcaagtgggcc

SEQ ID NO: 2083845 - DNA, 25 bp, Homo sapien
taatccagcatgaagtcaagtgggc

SEQ ID NO: 2083846 - DNA, 25 bp, Homo sapien
ctaatccagcatgaagtcaagtggg

SEQ ID NO: 2083847 - DNA, 25 bp, Homo sapien
tatattataatattcgcattaaaag

SEQ ID NO: 2083848 - DNA, 25 bp, Homo sapien
taataaagctatccaaatttttgga

SEQ ID NO: 2083849 - DNA, 25 bp, Homo sapien
agtttattaataaagctatccaaat

SEQ ID NO: 2083850 - DNA, 25 bp, Homo sapien
tcaagtgatcgcctacgctggcctc

SEQ ID NO: 2083851 - DNA, 25 bp, Homo sapien
gctcggatgtgatgagacaaaggcc

SEQ ID NO: 2083852 - DNA, 25 bp, Homo sapien
tgttttctagctaagagcatcttgc

SEQ ID NO: 2083853 - DNA, 25 bp, Homo sapien
ctagcctcgagctgccggcagcagg

SEQ ID NO: 2083854 - DNA, 25 bp, Homo sapien
gaacaccacccgatgtttatgccac

SEQ ID NO: 2083855 - DNA, 25 bp, Homo sapien
agatgcggaagcacagcccgcagag

SEQ ID NO: 2083856 - DNA, 25 bp, Homo sapien
gaaaaaggcgtgaaacgccggcaca

SEQ ID NO: 2083857 - DNA, 25 bp, Homo sapien
tgaaaaactacaagagctccccgca

SEQ ID NO: 2083858 - DNA, 25 bp, Homo sapien
aggaatcgcctgaacgacggagccg

SEQ ID NO: 2083859 - DNA, 25 bp, Homo sapien
aagcggatgacgaccacgcggtcct

SEQ ID NO: 2083860 - DNA, 25 bp, Homo sapien
gatcccagtcgtggccgaagcggat

SEQ ID NO: 2083861 - DNA, 25 bp, Homo sapien
tcctcctccgagaggatggcctggt

SEQ ID NO: 2083862 - DNA, 25 bp, Homo sapien
ctcgtccatcttcatgcacgtagga

SEQ ID NO: 2083863 - DNA, 25 bp, Homo sapien
gcacacgcaaactccgctgggactg

SEQ ID NO: 2083864 - DNA, 25 bp, Homo sapien
acccggcagaacgtctgggcgcgca

SEQ ID NO: 2083865 - DNA, 25 bp, Homo sapien
ctgggactgccacccggcagaacgt

SEQ ID NO: 2083866 - DNA, 25 bp, Homo sapien
cgaggtgggctcagccggcccctca

SEQ ID NO: 2083867 - DNA, 25 bp, Homo sapien
ttaggtcctcgtgtctaggtgcatg

SEQ ID NO: 2083868 - DNA, 25 bp, Homo sapien
ctcgtgtctaggtgcatgctgatga

SEQ ID NO: 2083869 - DNA, 25 bp, Homo sapien
tcctcgtgtctaggtgcatgctgat

SEQ ID NO: 2083870 - DNA, 25 bp, Homo sapien
ggtcctcgtgtctaggtgcatgctg

SEQ ID NO: 2083871 - DNA, 25 bp, Homo sapien
ctttctctgctgtcttggctcctgg

SEQ ID NO: 2083872 - DNA, 25 bp, Homo sapien
tgactgcggctttctctgctgtctt

SEQ ID NO: 2083873 - DNA, 25 bp, Homo sapien
ctgcggctttctctgctgtcttggc

SEQ ID NO: 2083874 - DNA, 25 bp, Homo sapien
tttctctgctgtcttggctcctggg

SEQ ID NO: 2083875 - DNA, 25 bp, Homo sapien
tagccaactgggacgggagtttgca

SEQ ID NO: 2083876 - DNA, 25 bp, Homo sapien
tggtgcttgttagcccctcgggaaa

SEQ ID NO: 2083877 - DNA, 25 bp, Homo sapien
cattgagtatgcaaaggccaaacac

SEQ ID NO: 2083878 - DNA, 25 bp, Homo sapien
tacctgactggaagtgttgatccag

SEQ ID NO: 2083879 - DNA, 25 bp, Homo sapien
ggacaccgccaaaccaagataggcc

SEQ ID NO: 2083880 - DNA, 25 bp, Homo sapien
ggctactgcatgtcctattcctggt

SEQ ID NO: 2083881 - DNA, 25 bp, Homo sapien
tgacatagagataagtgaccttccg

SEQ ID NO: 2083882 - DNA, 25 bp, Homo sapien
agctaaagagctctggacgcgcctt

SEQ ID NO: 2083883 - DNA, 25 bp, Homo sapien
tgctaaagcattcgtcgacgacctg

SEQ ID NO: 2083884 - DNA, 25 bp, Homo sapien
tggtgctaaagcattcgtcgacgac

SEQ ID NO: 2083885 - DNA, 25 bp, Homo sapien
agcattcgtcgacgacctgcttctg

SEQ ID NO: 2083886 - DNA, 25 bp, Homo sapien
ggaacctggtgctaaagcattcgtc

SEQ ID NO: 2083887 - DNA, 25 bp, Homo sapien
ccacacctggccccattaaatattt

SEQ ID NO: 2083888 - DNA, 25 bp, Homo sapien
cacacctggccccattaaatatttt

SEQ ID NO: 2083889 - DNA, 25 bp, Homo sapien
tctcctacctcatgatccccccgcc

SEQ ID NO: 2083890 - DNA, 25 bp, Homo sapien
aggatgctctcgatctcctacctca

SEQ ID NO: 2083891 - DNA, 25 bp, Homo sapien
ggttattagagaacctgcccaggtc

SEQ ID NO: 2083892 - DNA, 25 bp, Homo sapien
gcaatgagcaggaaacttgagccct

SEQ ID NO: 2083893 - DNA, 25 bp, Homo sapien
ggcaacagtgaagttgggaatttct

SEQ ID NO: 2083894 - DNA, 25 bp, Homo sapien
tagtagcaccattgggcatttcctg

SEQ ID NO: 2083895 - DNA, 25 bp, Homo sapien
tggcgccgtagggttgcaaacgtta

SEQ ID NO: 2083896 - DNA, 25 bp, Homo sapien
ataggatgtccccatagcatgcccc

SEQ ID NO: 2083897 - DNA, 25 bp, Homo sapien
cctgatcactgatagagggacataa

SEQ ID NO: 2083898 - DNA, 25 bp, Homo sapien
caaataggacatgttgcctgatcac

SEQ ID NO: 2083899 - DNA, 25 bp, Homo sapien
tccagtggtgggtatcctccttcca

SEQ ID NO: 2083900 - DNA, 25 bp, Homo sapien
cctccagtggtgggtatcctccttc

SEQ ID NO: 2083901 - DNA, 25 bp, Homo sapien
cagtggtgggtatcctccttccaag

SEQ ID NO: 2083902 - DNA, 25 bp, Homo sapien
agtggtgggtatcctccttccaagg

SEQ ID NO: 2083903 - DNA, 25 bp, Homo sapien
acgccgctcgcttcgctctggtagt

SEQ ID NO: 2083904 - DNA, 25 bp, Homo sapien
accccgcttacacgccgctcgcttc

SEQ ID NO: 2083905 - DNA, 25 bp, Homo sapien
ttcgctctggtagtcgcccacctcg

SEQ ID NO: 2083906 - DNA, 25 bp, Homo sapien
gcttacacgccgctcgcttcgctct

SEQ ID NO: 2083907 - DNA, 25 bp, Homo sapien
cctcgaaaaccaagtaatgcggcgg

SEQ ID NO: 2083908 - DNA, 25 bp, Homo sapien
gatgctgcgctatttccaggctgcg

SEQ ID NO: 2083909 - DNA, 25 bp, Homo sapien
gtcaccagacgtatttttcagaaga

SEQ ID NO: 2083910 - DNA, 25 bp, Homo sapien
tctcctgcaagaactggctcaagaa

SEQ ID NO: 2083911 - DNA, 25 bp, Homo sapien
gacaggctgttagtgcacagaccct

SEQ ID NO: 2083912 - DNA, 25 bp, Homo sapien
ttgtgtcgtgccagggcgtgtccac

SEQ ID NO: 2083913 - DNA, 25 bp, Homo sapien
gctacggcgatgagttcagatcagg

SEQ ID NO: 2083914 - DNA, 25 bp, Homo sapien
tctgtgtctaatatctgggaacctg

SEQ ID NO: 2083915 - DNA, 25 bp, Homo sapien
tcaggttacaaggctctggtacttg

SEQ ID NO: 2083916 - DNA, 25 bp, Homo sapien
catgatgactccatgagaaaacagc

SEQ ID NO: 2083917 - DNA, 25 bp, Homo sapien
tttgcaggtacctccacagcactgc

SEQ ID NO: 2083918 - DNA, 25 bp, Homo sapien
cagcagaacgccagctttgcaggta

SEQ ID NO: 2083919 - DNA, 25 bp, Homo sapien
agggggccacagcagagtaaagaca

SEQ ID NO: 2083920 - DNA, 25 bp, Homo sapien
ggagggggccacagcagagtaaaga

SEQ ID NO: 2083921 - DNA, 25 bp, Homo sapien
gccacagcagagtaaagacagagtc

SEQ ID NO: 2083922 - DNA, 25 bp, Homo sapien
ggggccacagcagagtaaagacaga

SEQ ID NO: 2083923 - DNA, 25 bp, Homo sapien
gcatgtttgcaggggatccaaccag

SEQ ID NO: 2083924 - DNA, 25 bp, Homo sapien
ttgcaggggatccaaccaggcgtcg

SEQ ID NO: 2083925 - DNA, 25 bp, Homo sapien
caggggatccaaccaggcgtcggct

SEQ ID NO: 2083926 - DNA, 25 bp, Homo sapien
tgtttgcaggggatccaaccaggcg

SEQ ID NO: 2083927 - DNA, 25 bp, Homo sapien
tgggagcaggttagggacatggaag

SEQ ID NO: 2083928 - DNA, 25 bp, Homo sapien
aggttagggacatggaagctcacgc

SEQ ID NO: 2083929 - DNA, 25 bp, Homo sapien
tctgaatgggtccactcccggggat

SEQ ID NO: 2083930 - DNA, 25 bp, Homo sapien
gaagctcacgcccttctgaatgggt

SEQ ID NO: 2083931 - DNA, 25 bp, Homo sapien
aacagccagagatgaacgttcatgg

SEQ ID NO: 2083932 - DNA, 25 bp, Homo sapien
gtgtctggtctgcatgaagggtgtc

SEQ ID NO: 2083933 - DNA, 25 bp, Homo sapien
atatgcttctaatgtgcagcttctg

SEQ ID NO: 2083934 - DNA, 25 bp, Homo sapien
taagaatatgcttctaatgtgcagc

SEQ ID NO: 2083935 - DNA, 25 bp, Homo sapien
cctgtttctgcaggcggcttggggc

SEQ ID NO: 2083936 - DNA, 25 bp, Homo sapien
ctgtttctgcaggcggcttggggcc

SEQ ID NO: 2083937 - DNA, 25 bp, Homo sapien
tgagcactggtactcacaaaactct

SEQ ID NO: 2083938 - DNA, 25 bp, Homo sapien
tgatggcggcattactgtgagtttt

SEQ ID NO: 2083939 - DNA, 25 bp, Homo sapien
ttctgagcactggtactcacaaaac

SEQ ID NO: 2083940 - DNA, 25 bp, Homo sapien
ctagaactctgatggcggcattact

SEQ ID NO: 2083941 - DNA, 25 bp, Homo sapien
ctgtgcttttccgagggtgccgcct

SEQ ID NO: 2083942 - DNA, 25 bp, Homo sapien
cttttccgagggtgccgcctggcag

SEQ ID NO: 2083943 - DNA, 25 bp, Homo sapien
gtgcttttccgagggtgccgcctgg

SEQ ID NO: 2083944 - DNA, 25 bp, Homo sapien
gcttttccgagggtgccgcctggca

SEQ ID NO: 2083945 - DNA, 25 bp, Homo sapien
gcagcaggaccccgatgagggcacc

SEQ ID NO: 2083946 - DNA, 25 bp, Homo sapien
aggaccccgatgagggcacccacag

SEQ ID NO: 2083947 - DNA, 25 bp, Homo sapien
gggtgggctccacatgcatctcatg

SEQ ID NO: 2083948 - DNA, 25 bp, Homo sapien
gtgggctccacatgcatctcatggg

SEQ ID NO: 2083949 - DNA, 25 bp, Homo sapien
aaaagcaagaagtctggactgaaag

SEQ ID NO: 2083950 - DNA, 25 bp, Homo sapien
caccactgtaggtggatccagggtt

SEQ ID NO: 2083951 - DNA, 25 bp, Homo sapien
caccaacaacagcaccactgtaggt

SEQ ID NO: 2083952 - DNA, 25 bp, Homo sapien
cagccagtcatggacgaagcctgca

SEQ ID NO: 2083953 - DNA, 25 bp, Homo sapien
ttaactgcgagtggaagcatcgatc

SEQ ID NO: 2083954 - DNA, 25 bp, Homo sapien
gctaagtcatttctccgttcagagg

SEQ ID NO: 2083955 - DNA, 25 bp, Homo sapien
tcagagacgtgggtacaaaccctgt

SEQ ID NO: 2083956 - DNA, 25 bp, Homo sapien
ggatgcactgcattaacttacgctg

SEQ ID NO: 2083957 - DNA, 25 bp, Homo sapien
cttgcatgtaattgctataatgttc

SEQ ID NO: 2083958 - DNA, 25 bp, Homo sapien
tatttgaggcagttgtgaaactggt

SEQ ID NO: 2083959 - DNA, 25 bp, Homo sapien
gaaatatttggaggatgtgacagcc

SEQ ID NO: 2083960 - DNA, 25 bp, Homo sapien
ctggtttatgattgttggtgtactc

SEQ ID NO: 2083961 - DNA, 25 bp, Homo sapien
cacccccgagctcacggccgcagct

SEQ ID NO: 2083962 - DNA, 25 bp, Homo sapien
ttggccacccccgagctcacggccg

SEQ ID NO: 2083963 - DNA, 25 bp, Homo sapien
gccccctggacgtccgccctgggca

SEQ ID NO: 2083964 - DNA, 25 bp, Homo sapien
cccgagctcacggccgcagctcggc

SEQ ID NO: 2083965 - DNA, 25 bp, Homo sapien
agccatgcctgcgttcacaagtaca

SEQ ID NO: 2083966 - DNA, 25 bp, Homo sapien
cgtttgtctccaggcgcagtgtcag

SEQ ID NO: 2083967 - DNA, 25 bp, Homo sapien
gtttacatctctaagcccatccaag

SEQ ID NO: 2083968 - DNA, 25 bp, Homo sapien
agtgtcagtctcgttctttaagcgc

SEQ ID NO: 2083969 - DNA, 25 bp, Homo sapien
gcagttccatgttcacgaagtcagg

SEQ ID NO: 2083970 - DNA, 25 bp, Homo sapien
ggtcacaaaaatagcccctggtctg

SEQ ID NO: 2083971 - DNA, 25 bp, Homo sapien
tctcttgcttaggaacaaagggcca

SEQ ID NO: 2083972 - DNA, 25 bp, Homo sapien
gtagaaaaatacacccaagcagctg

SEQ ID NO: 2083973 - DNA, 25 bp, Homo sapien
tcactttgcaaaggcgccaagacct

SEQ ID NO: 2083974 - DNA, 25 bp, Homo sapien
tccggaagttgaaacaaagagcagc

SEQ ID NO: 2083975 - DNA, 25 bp, Homo sapien
tagagtgtctctacaggcgttcatt

SEQ ID NO: 2083976 - DNA, 25 bp, Homo sapien
aaaaatgagcggatgcagtctgcag

SEQ ID NO: 2083977 - DNA, 25 bp, Homo sapien
tgacgacgtcgttgtcctcatcgct

SEQ ID NO: 2083978 - DNA, 25 bp, Homo sapien
cgctggcgccatcgcggatgtagaa

SEQ ID NO: 2083979 - DNA, 25 bp, Homo sapien
tccagtgtgccctcgatgacgacgt

SEQ ID NO: 2083980 - DNA, 25 bp, Homo sapien
tcatcatgtccgtgacctggtccag

SEQ ID NO: 2083981 - DNA, 25 bp, Homo sapien
tgcaggctgagctgaaatcaggcaa

SEQ ID NO: 2083982 - DNA, 25 bp, Homo sapien
gctgttccatctgcgtgacgccgaa

SEQ ID NO: 2083983 - DNA, 25 bp, Homo sapien
gggtgcacaggagcattccagacct

SEQ ID NO: 2083984 - DNA, 25 bp, Homo sapien
taaaaggtgctagcaggcagctgca

SEQ ID NO: 2083985 - DNA, 25 bp, Homo sapien
gagagccgcttgtcttcaagtccca

SEQ ID NO: 2083986 - DNA, 25 bp, Homo sapien
tgagagccgcttgtcttcaagtccc

SEQ ID NO: 2083987 - DNA, 25 bp, Homo sapien
cgggagccccacccctgttccgcat

SEQ ID NO: 2083988 - DNA, 25 bp, Homo sapien
tctctcggatggagcctgtccaact

SEQ ID NO: 2083989 - DNA, 25 bp, Homo sapien
agggtccttctctcggatggagcct

SEQ ID NO: 2083990 - DNA, 25 bp, Homo sapien
tatcctgactctctggcgaggaagg

SEQ ID NO: 2083991 - DNA, 25 bp, Homo sapien
ctatcctgactctctggcgaggaag

SEQ ID NO: 2083992 - DNA, 25 bp, Homo sapien
agatcaccgtctacccccatctgcc

SEQ ID NO: 2083993 - DNA, 25 bp, Homo sapien
gcaaatctattttccaccaagagca

SEQ ID NO: 2083994 - DNA, 25 bp, Homo sapien
ccagcacagaacagctcaagatcac

SEQ ID NO: 2083995 - DNA, 25 bp, Homo sapien
tcaagatcaccgtctacccccatct

SEQ ID NO: 2083996 - DNA, 25 bp, Homo sapien
acacccaggttgatagttggaggcg

SEQ ID NO: 2083997 - DNA, 25 bp, Homo sapien
gttggaggcgaccagcacattctga

SEQ ID NO: 2083998 - DNA, 25 bp, Homo sapien
ttgatagttggaggcgaccagcaca

SEQ ID NO: 2083999 - DNA, 25 bp, Homo sapien
ccaggttgatagttggaggcgacca

SEQ ID NO: 2084000 - DNA, 25 bp, Homo sapien
ctgtgcacttgcctctggaatgttc

SEQ ID NO: 2084001 - DNA, 25 bp, Homo sapien
tcagtggactcaagtgtagccaggt

SEQ ID NO: 2084002 - DNA, 25 bp, Homo sapien
ggtccaatctgtgcacttgcctctg

SEQ ID NO: 2084003 - DNA, 25 bp, Homo sapien
gtttctggactcagtggactcaagt

SEQ ID NO: 2084004 - DNA, 25 bp, Homo sapien
agtctccggaacagaaagcaggaga

SEQ ID NO: 2084005 - DNA, 25 bp, Homo sapien
aagtctccggaacagaaagcaggag

SEQ ID NO: 2084006 - DNA, 25 bp, Homo sapien
aacaggcacccggttgccggcatca

SEQ ID NO: 2084007 - DNA, 25 bp, Homo sapien
gggcgccacagcagcgcagcaacag

SEQ ID NO: 2084008 - DNA, 25 bp, Homo sapien
accggcccacgctcgttccctgtgc

SEQ ID NO: 2084009 - DNA, 25 bp, Homo sapien
cccgaattcacgggcagccagcagg

SEQ ID NO: 2084010 - DNA, 25 bp, Homo sapien
cactaggttcccaacatcatgagca

SEQ ID NO: 2084011 - DNA, 25 bp, Homo sapien
tgtctggaaccagcatgatgtaaaa

SEQ ID NO: 2084012 - DNA, 25 bp, Homo sapien
gctggataccaacccaacctgcttg

SEQ ID NO: 2084013 - DNA, 25 bp, Homo sapien
tgatgcacactaggaagcacgttgc

SEQ ID NO: 2084014 - DNA, 25 bp, Homo sapien
tccacgaaccaagggctgacgtgga

SEQ ID NO: 2084015 - DNA, 25 bp, Homo sapien
ggtccacgaaccaagggctgacgtg

SEQ ID NO: 2084016 - DNA, 25 bp, Homo sapien
ccaggtccacgaaccaagggctgac

SEQ ID NO: 2084017 - DNA, 25 bp, Homo sapien
agaccttgaggccaatgacgacttc

SEQ ID NO: 2084018 - DNA, 25 bp, Homo sapien
cagtcacattggaggtgagtgcctg

SEQ ID NO: 2084019 - DNA, 25 bp, Homo sapien
tccagtcacattggaggtgagtgcc

SEQ ID NO: 2084020 - DNA, 25 bp, Homo sapien
ctccagtcacattggaggtgagtgc

SEQ ID NO: 2084021 - DNA, 25 bp, Homo sapien
gtcacattggaggtgagtgcctgct

SEQ ID NO: 2084022 - DNA, 25 bp, Homo sapien
cagttaacaagcacagtggcggatg

SEQ ID NO: 2084023 - DNA, 25 bp, Homo sapien
ctcaggtgagcctcggtgaagaagc

SEQ ID NO: 2084024 - DNA, 25 bp, Homo sapien
tgggcccacgttaaatcagctgttc

SEQ ID NO: 2084025 - DNA, 25 bp, Homo sapien
aagaagcctcagacgctcagcaagg

SEQ ID NO: 2084026 - DNA, 25 bp, Homo sapien
tctaccatggcatgccgacaacagg

SEQ ID NO: 2084027 - DNA, 25 bp, Homo sapien
gttcctggtcgcagggctccgtcat

SEQ ID NO: 2084028 - DNA, 25 bp, Homo sapien
tatttcttagttctaggtacagggc

SEQ ID NO: 2084029 - DNA, 25 bp, Homo sapien
cctgacgtggctcccagtggaatga

SEQ ID NO: 2084030 - DNA, 25 bp, Homo sapien
ccccacgttcgtgagggaggtgtgg

SEQ ID NO: 2084031 - DNA, 25 bp, Homo sapien
tccccacgttcgtgagggaggtgtg

SEQ ID NO: 2084032 - DNA, 25 bp, Homo sapien
ttccttgaggtggtcagtgttcacc

SEQ ID NO: 2084033 - DNA, 25 bp, Homo sapien
tccttgaggtggtcagtgttcacca

SEQ ID NO: 2084034 - DNA, 25 bp, Homo sapien
ccttgaggtggtcagtgttcaccac

SEQ ID NO: 2084035 - DNA, 25 bp, Homo sapien
tacaggttagaaaacgaaccacata

SEQ ID NO: 2084036 - DNA, 25 bp, Homo sapien
acaggttagaaaacgaaccacatag

SEQ ID NO: 2084037 - DNA, 25 bp, Homo sapien
ctacaggttagaaaacgaaccacat

SEQ ID NO: 2084038 - DNA, 25 bp, Homo sapien
caggttagaaaacgaaccacatagt

SEQ ID NO: 2084039 - DNA, 25 bp, Homo sapien
gacggtccagagagaaccttcggaa

SEQ ID NO: 2084040 - DNA, 25 bp, Homo sapien
tgggtgtgcacaaccagcttgtaga

SEQ ID NO: 2084041 - DNA, 25 bp, Homo sapien
gatttgcactagaaaccgccttgca

SEQ ID NO: 2084042 - DNA, 25 bp, Homo sapien
aacttcccaggcttatgacggtcca

SEQ ID NO: 2084043 - DNA, 25 bp, Homo sapien
aatgaacttacaacgagttacttgc

SEQ ID NO: 2084044 - DNA, 25 bp, Homo sapien
taatgaacttacaacgagttacttg

SEQ ID NO: 2084045 - DNA, 25 bp, Homo sapien
tgcctgaggaatagttaccattggg

SEQ ID NO: 2084046 - DNA, 25 bp, Homo sapien
gaatccttgtgcacgactggtgata

SEQ ID NO: 2084047 - DNA, 25 bp, Homo sapien
aaagacaatgctgggacgcataccc

SEQ ID NO: 2084048 - DNA, 25 bp, Homo sapien
tggtgataacgtaaagcagtgcagc

SEQ ID NO: 2084049 - DNA, 25 bp, Homo sapien
ggttctctcactgtcggcacaaaca

SEQ ID NO: 2084050 - DNA, 25 bp, Homo sapien
ctcctcatcatgtgaggttctctca

SEQ ID NO: 2084051 - DNA, 25 bp, Homo sapien
cactgtcggcacaaacagggctcat

SEQ ID NO: 2084052 - DNA, 25 bp, Homo sapien
tctcactgtcggcacaaacagggct

SEQ ID NO: 2084053 - DNA, 25 bp, Homo sapien
tgaacccgtattttcctgtgctggg

SEQ ID NO: 2084054 - DNA, 25 bp, Homo sapien
ttgaacccgtattttcctgtgctgg

SEQ ID NO: 2084055 - DNA, 25 bp, Homo sapien
cattgaacccgtattttcctgtgct

SEQ ID NO: 2084056 - DNA, 25 bp, Homo sapien
tcattgaacccgtattttcctgtgc

SEQ ID NO: 2084057 - DNA, 25 bp, Homo sapien
tgatacatggaggaattaggcagtt

SEQ ID NO: 2084058 - DNA, 25 bp, Homo sapien
ccgatgtgagctcatgatacatgga

SEQ ID NO: 2084059 - DNA, 25 bp, Homo sapien
attccgatgtgagctcatgatacat

SEQ ID NO: 2084060 - DNA, 25 bp, Homo sapien
ctccagcccgtggaagaaagtgggg

SEQ ID NO: 2084061 - DNA, 25 bp, Homo sapien
tctccaccagacagactggacacaa

SEQ ID NO: 2084062 - DNA, 25 bp, Homo sapien
cccacaccagcattcatgggcagga

SEQ ID NO: 2084063 - DNA, 25 bp, Homo sapien
gactggacacaaggccaaacacgcc

SEQ ID NO: 2084064 - DNA, 25 bp, Homo sapien
atgggcaggatcagaggctcaggca

SEQ ID NO: 2084065 - DNA, 25 bp, Homo sapien
ttccacatgtcaagttcaggcacgt

SEQ ID NO: 2084066 - DNA, 25 bp, Homo sapien
attccacatgtcaagttcaggcacg

SEQ ID NO: 2084067 - DNA, 25 bp, Homo sapien
cacgttttccaagaaagattgtcca

SEQ ID NO: 2084068 - DNA, 25 bp, Homo sapien
agttcaggcacgttttccaagaaag

SEQ ID NO: 2084069 - DNA, 25 bp, Homo sapien
ggcacagtgtcaggcctgttctcat

SEQ ID NO: 2084070 - DNA, 25 bp, Homo sapien
acagcgatgtcctggacctctggca

SEQ ID NO: 2084071 - DNA, 25 bp, Homo sapien
gacctctggcacagtgtcaggcctg

SEQ ID NO: 2084072 - DNA, 25 bp, Homo sapien
gccccagcacagcgatgtcctggac

SEQ ID NO: 2084073 - DNA, 25 bp, Homo sapien
cctctcagggatgccccggcaatga

SEQ ID NO: 2084074 - DNA, 25 bp, Homo sapien
tcacaggatacagagggcaaggcca

SEQ ID NO: 2084075 - DNA, 25 bp, Homo sapien
caaggccactgacgcctctcaggga

SEQ ID NO: 2084076 - DNA, 25 bp, Homo sapien
cagggatgccccggcaatgagccaa

SEQ ID NO: 2084077 - DNA, 25 bp, Homo sapien
ttatggtgctacattgaggttgtca

SEQ ID NO: 2084078 - DNA, 25 bp, Homo sapien
cattgaggttgtcataaggctttgc

SEQ ID NO: 2084079 - DNA, 25 bp, Homo sapien
aggttgtcataaggctttgctgtta

SEQ ID NO: 2084080 - DNA, 25 bp, Homo sapien
ggtgctacattgaggttgtcataag

SEQ ID NO: 2084081 - DNA, 25 bp, Homo sapien
ggtgtaaggcagcaccccttctttg

SEQ ID NO: 2084082 - DNA, 25 bp, Homo sapien
aatccatgcttggggtgtaaggcag

SEQ ID NO: 2084083 - DNA, 25 bp, Homo sapien
gcaccccttctttgccaagtggagc

SEQ ID NO: 2084084 - DNA, 25 bp, Homo sapien
aaggcagcaccccttctttgccaag

SEQ ID NO: 2084085 - DNA, 25 bp, Homo sapien
tgctcttgacttccactgcgctgca

SEQ ID NO: 2084086 - DNA, 25 bp, Homo sapien
actgcgctgcaatcgtagaatcgca

SEQ ID NO: 2084087 - DNA, 25 bp, Homo sapien
ctgagacttgtgaaaacttcggttc

SEQ ID NO: 2084088 - DNA, 25 bp, Homo sapien
cgtagaatcgcaaggtctgagactt

SEQ ID NO: 2084089 - DNA, 25 bp, Homo sapien
ctcaggggccgcagaaagactcccg

SEQ ID NO: 2084090 - DNA, 25 bp, Homo sapien
ttcggccccggtcagcctcgccgtc

SEQ ID NO: 2084091 - DNA, 25 bp, Homo sapien
ggtgctgcgggcccgagctgggctg

SEQ ID NO: 2084092 - DNA, 25 bp, Homo sapien
cccggcccgcgctcgcttggccggc

SEQ ID NO: 2084093 - DNA, 25 bp, Homo sapien
ctccacagttcttgattggcatgat

SEQ ID NO: 2084094 - DNA, 25 bp, Homo sapien
taatagtgcaggttccagttgggaa

SEQ ID NO: 2084095 - DNA, 25 bp, Homo sapien
agtggtcttcgaactgttccccaga

SEQ ID NO: 2084096 - DNA, 25 bp, Homo sapien
catagagagacgtaatcagcacatc

SEQ ID NO: 2084097 - DNA, 25 bp, Homo sapien
ttattgttaggacaaagctaacctg

SEQ ID NO: 2084098 - DNA, 25 bp, Homo sapien
gagtgtgataggagggtgaccccat

SEQ ID NO: 2084099 - DNA, 25 bp, Homo sapien
gggagtgtgataggagggtgacccc

SEQ ID NO: 2084100 - DNA, 25 bp, Homo sapien
gactggtggagcccacggcatcagt

SEQ ID NO: 2084101 - DNA, 25 bp, Homo sapien
tggtggagcccacggcatcagtagc

SEQ ID NO: 2084102 - DNA, 25 bp, Homo sapien
tggtggaaattggagggtcagagct

SEQ ID NO: 2084103 - DNA, 25 bp, Homo sapien
tgcctgactctgagaacactgtgat

SEQ ID NO: 2084104 - DNA, 25 bp, Homo sapien
gagaacactgtgatcatggtggaaa

SEQ ID NO: 2084105 - DNA, 25 bp, Homo sapien
catatgctgcctgactctgagaaca

SEQ ID NO: 2084106 - DNA, 25 bp, Homo sapien
tctgagcctttgatgcagacctcag

SEQ ID NO: 2084107 - DNA, 25 bp, Homo sapien
taagtctgactgtacctgctgagca

SEQ ID NO: 2084108 - DNA, 25 bp, Homo sapien
gaaaataattcagcgtgctcacccc

SEQ ID NO: 2084109 - DNA, 25 bp, Homo sapien
caagacggccgaagctctgagcctt

SEQ ID NO: 2084110 - DNA, 25 bp, Homo sapien
tccagctgttggaggtactaggcag

SEQ ID NO: 2084111 - DNA, 25 bp, Homo sapien
ttacagaatacgtaggaggccaggt

SEQ ID NO: 2084112 - DNA, 25 bp, Homo sapien
cccctatgattggttccccagcagg

SEQ ID NO: 2084113 - DNA, 25 bp, Homo sapien
gaagcctcctacataaggtgaccag

SEQ ID NO: 2084114 - DNA, 25 bp, Homo sapien
cataagaaacactcgcccaatcacg

SEQ ID NO: 2084115 - DNA, 25 bp, Homo sapien
ccataagaaacactcgcccaatcac

SEQ ID NO: 2084116 - DNA, 25 bp, Homo sapien
ataagaaacactcgcccaatcacgt

SEQ ID NO: 2084117 - DNA, 25 bp, Homo sapien
tcatcgagctgccgtaggaaacatt

SEQ ID NO: 2084118 - DNA, 25 bp, Homo sapien
agctgccgtaggaaacattcgtcca

SEQ ID NO: 2084119 - DNA, 25 bp, Homo sapien
ggaaacattcgtccaatcacgtttc

SEQ ID NO: 2084120 - DNA, 25 bp, Homo sapien
tcgagctgccgtaggaaacattcgt

SEQ ID NO: 2084121 - DNA, 25 bp, Homo sapien
catggagctgccgtaagaaacactc

SEQ ID NO: 2084122 - DNA, 25 bp, Homo sapien
tccccatggagctgccgtaagaaac

SEQ ID NO: 2084123 - DNA, 25 bp, Homo sapien
tttccccatggagctgccgtaagaa

SEQ ID NO: 2084124 - DNA, 25 bp, Homo sapien
tggagctgccgtaagaaacactcac

SEQ ID NO: 2084125 - DNA, 25 bp, Homo sapien
caaacagcgggggccggcatctttc

SEQ ID NO: 2084126 - DNA, 25 bp, Homo sapien
ttcccacatgagaaaacgcctgctt

SEQ ID NO: 2084127 - DNA, 25 bp, Homo sapien
gcatctttcccacatgagaaaacgc

SEQ ID NO: 2084128 - DNA, 25 bp, Homo sapien
ttagaggatttccaccccaaacagc

SEQ ID NO: 2084129 - DNA, 25 bp, Homo sapien
ttggtgatgcccagtagacgaaggt

SEQ ID NO: 2084130 - DNA, 25 bp, Homo sapien
cccagtagacgaaggtgggcgctgc

SEQ ID NO: 2084131 - DNA, 25 bp, Homo sapien
tgcccagtagacgaaggtgggcgct

SEQ ID NO: 2084132 - DNA, 25 bp, Homo sapien
agtttggtgatgcccagtagacgaa

SEQ ID NO: 2084133 - DNA, 25 bp, Homo sapien
tgatcgaagaccacgattgcctgtg

SEQ ID NO: 2084134 - DNA, 25 bp, Homo sapien
gattaaaatttgcaccgagccagtg

SEQ ID NO: 2084135 - DNA, 25 bp, Homo sapien
aactgtggtgcgttgacttgctgga

SEQ ID NO: 2084136 - DNA, 25 bp, Homo sapien
gcctgtgtttctgagatgcgtccat

SEQ ID NO: 2084137 - DNA, 25 bp, Homo sapien
cgtgtggccccttagaggtgagcat

SEQ ID NO: 2084138 - DNA, 25 bp, Homo sapien
gaaaacccttccctgaagagagaga

SEQ ID NO: 2084139 - DNA, 25 bp, Homo sapien
ggtttctttgaatcccctcatggcc

SEQ ID NO: 2084140 - DNA, 25 bp, Homo sapien
tggtggatgctatgaactcacttgc

SEQ ID NO: 2084141 - DNA, 25 bp, Homo sapien
cagagcccggcagccatgtgggtga

SEQ ID NO: 2084142 - DNA, 25 bp, Homo sapien
cagcaacagccagagggtggggtcg

SEQ ID NO: 2084143 - DNA, 25 bp, Homo sapien
agccagagggtggggtcgggccaga

SEQ ID NO: 2084144 - DNA, 25 bp, Homo sapien
ccagagggtggggtcgggccagagc

SEQ ID NO: 2084145 - DNA, 25 bp, Homo sapien
acagccagagggtggggtcgggcca

SEQ ID NO: 2084146 - DNA, 25 bp, Homo sapien
tttcatgttggtgatctgtgactta

SEQ ID NO: 2084147 - DNA, 25 bp, Homo sapien
tgacttagtgaaaagacctgcaggc

SEQ ID NO: 2084148 - DNA, 25 bp, Homo sapien
acctgcaggcccgttcttggaccca

SEQ ID NO: 2084149 - DNA, 25 bp, Homo sapien
tgatctgtgacttagtgaaaagacc

SEQ ID NO: 2084150 - DNA, 25 bp, Homo sapien
gacagtgacagtgactcggatctta

SEQ ID NO: 2084151 - DNA, 25 bp, Homo sapien
gctgtggtctgtctcttccagtggt

SEQ ID NO: 2084152 - DNA, 25 bp, Homo sapien
tgtgctgtggtctgtctcttccagt

SEQ ID NO: 2084153 - DNA, 25 bp, Homo sapien
gacagtgactcggatcttagctcct

SEQ ID NO: 2084154 - DNA, 25 bp, Homo sapien
gcagcagaaatgtgtgtcctcccat

SEQ ID NO: 2084155 - DNA, 25 bp, Homo sapien
tcacatcaggactcccctctttgtg

SEQ ID NO: 2084156 - DNA, 25 bp, Homo sapien
ggctggccaacaggtgaactcttct

SEQ ID NO: 2084157 - DNA, 25 bp, Homo sapien
tcttctctgctggtcagcctgagcc

SEQ ID NO: 2084158 - DNA, 25 bp, Homo sapien
gcatcacggtgataatcagcctccg

SEQ ID NO: 2084159 - DNA, 25 bp, Homo sapien
cagcctccgacacggccagtgggtt

SEQ ID NO: 2084160 - DNA, 25 bp, Homo sapien
gggtctattgtctcaccaagtggag

SEQ ID NO: 2084161 - DNA, 25 bp, Homo sapien
aggcctcagatctgttgtgcctgca

SEQ ID NO: 2084162 - DNA, 25 bp, Homo sapien
agccctcagagctgatgcacttggg

SEQ ID NO: 2084163 - DNA, 25 bp, Homo sapien
gagccctcagagctgatgcacttgg

SEQ ID NO: 2084164 - DNA, 25 bp, Homo sapien
gccctcagagctgatgcacttgggt

SEQ ID NO: 2084165 - DNA, 25 bp, Homo sapien
tctggttgcttgttccaagacctgt

SEQ ID NO: 2084166 - DNA, 25 bp, Homo sapien
gtgcacagggttgagagtcttccag

SEQ ID NO: 2084167 - DNA, 25 bp, Homo sapien
ctggccgctctgctgcgggtgcaca

SEQ ID NO: 2084168 - DNA, 25 bp, Homo sapien
cagcctctggttgcttgttccaaga

SEQ ID NO: 2084169 - DNA, 25 bp, Homo sapien
ggccgctctgttgggggcacgccca

SEQ ID NO: 2084170 - DNA, 25 bp, Homo sapien
tggccgctctgttgggggcacgccc

SEQ ID NO: 2084171 - DNA, 25 bp, Homo sapien
gtgctggccgctctgttgggggcac

SEQ ID NO: 2084172 - DNA, 25 bp, Homo sapien
gctggccgctctgttgggggcacgc

SEQ ID NO: 2084173 - DNA, 25 bp, Homo sapien
ctacgaagagggcacacggaccaca

SEQ ID NO: 2084174 - DNA, 25 bp, Homo sapien
tcaagtactacgaagagggcacacg

SEQ ID NO: 2084175 - DNA, 25 bp, Homo sapien
tccaaggagccggagtagaactctt

SEQ ID NO: 2084176 - DNA, 25 bp, Homo sapien
tcttgctgcggcatcataaaagtcc

SEQ ID NO: 2084177 - DNA, 25 bp, Homo sapien
tccctaaccccagtcctgggacatc

SEQ ID NO: 2084178 - DNA, 25 bp, Homo sapien
gtcctgggacatcccatcccatcgt

SEQ ID NO: 2084179 - DNA, 25 bp, Homo sapien
ggagcctggtactgtgtgacaccac

SEQ ID NO: 2084180 - DNA, 25 bp, Homo sapien
tgtgtgacaccacggagccccgtgc

SEQ ID NO: 2084181 - DNA, 25 bp, Homo sapien
aacaaacgccgtcctcacgacatgg

SEQ ID NO: 2084182 - DNA, 25 bp, Homo sapien
tttggataaaatgcacgactcataa

SEQ ID NO: 2084183 - DNA, 25 bp, Homo sapien
cacggcatggttcacggttgtcttg

SEQ ID NO: 2084184 - DNA, 25 bp, Homo sapien
ggttgtcttgccgttttcgcctgct

SEQ ID NO: 2084185 - DNA, 25 bp, Homo sapien
cacttcttcacggctgtggcccttt

SEQ ID NO: 2084186 - DNA, 25 bp, Homo sapien
ttcttcacggctgtggccctttggg

SEQ ID NO: 2084187 - DNA, 25 bp, Homo sapien
tccccacttcttcacggctgtggcc

SEQ ID NO: 2084188 - DNA, 25 bp, Homo sapien
tcttccccacttcttcacggctgtg

SEQ ID NO: 2084189 - DNA, 25 bp, Homo sapien
ttccatctgaaaaaccaggcgtggg

SEQ ID NO: 2084190 - DNA, 25 bp, Homo sapien
ggcacccgggtgactccatgatact

SEQ ID NO: 2084191 - DNA, 25 bp, Homo sapien
cagaatacagggctcgtcggtgagc

SEQ ID NO: 2084192 - DNA, 25 bp, Homo sapien
tgatacttcttcctccgaaaggctg

SEQ ID NO: 2084193 - DNA, 25 bp, Homo sapien
cagccctctgaggtagtcctgtggc

SEQ ID NO: 2084194 - DNA, 25 bp, Homo sapien
tcaggtggtagccagcaaagggcca

SEQ ID NO: 2084195 - DNA, 25 bp, Homo sapien
agggccagaagcacaccccatatct

SEQ ID NO: 2084196 - DNA, 25 bp, Homo sapien
gaagcacaccccatatctcctggct

SEQ ID NO: 2084197 - DNA, 25 bp, Homo sapien
tttgtcttcgttatctggtgcctcc

SEQ ID NO: 2084198 - DNA, 25 bp, Homo sapien
gctcctcaagcgagtgcagggactg

SEQ ID NO: 2084199 - DNA, 25 bp, Homo sapien
tgtgagatttcgatgctggtgacca

SEQ ID NO: 2084200 - DNA, 25 bp, Homo sapien
gaccacatctctatcgatttgagga

SEQ ID NO: 2084201 - DNA, 25 bp, Homo sapien
tgattggcccaattatttctgttct

SEQ ID NO: 2084202 - DNA, 25 bp, Homo sapien
ggcgtggccagtgtccgatagtcaa

SEQ ID NO: 2084203 - DNA, 25 bp, Homo sapien
gttctgtgtccgatagtcaaacata

SEQ ID NO: 2084204 - DNA, 25 bp, Homo sapien
ggagaaaaagtgattggcccaatta

SEQ ID NO: 2084205 - DNA, 25 bp, Homo sapien
gagggcccaggatcccggcttccaa

SEQ ID NO: 2084206 - DNA, 25 bp, Homo sapien
ttggttgtgaggatcagggaccacc

SEQ ID NO: 2084207 - DNA, 25 bp, Homo sapien
gttctcgacgctcactggctttttc

SEQ ID NO: 2084208 - DNA, 25 bp, Homo sapien
aagccgtgcagcgtcaggctgtcgc

SEQ ID NO: 2084209 - DNA, 25 bp, Homo sapien
gatggatgaggaggggaaggctgac

SEQ ID NO: 2084210 - DNA, 25 bp, Homo sapien
ctgtcgatgatggatgaggagggga

SEQ ID NO: 2084211 - DNA, 25 bp, Homo sapien
atgatggatgaggaggggaaggctg

SEQ ID NO: 2084212 - DNA, 25 bp, Homo sapien
gtcgatgatggatgaggaggggaag

SEQ ID NO: 2084213 - DNA, 25 bp, Homo sapien
ggccgctaacccagctgatgctcag

SEQ ID NO: 2084214 - DNA, 25 bp, Homo sapien
ccagggcagctacagacggtggaat

SEQ ID NO: 2084215 - DNA, 25 bp, Homo sapien
tgagtccctccgagctgtactagcc

SEQ ID NO: 2084216 - DNA, 25 bp, Homo sapien
gtactagccccagcgctctgtgact

SEQ ID NO: 2084217 - DNA, 25 bp, Homo sapien
cagcttcagtgatgtcaggacagat

SEQ ID NO: 2084218 - DNA, 25 bp, Homo sapien
gaaggagccacggcttcggttcagc

SEQ ID NO: 2084219 - DNA, 25 bp, Homo sapien
aggaaggagccacggcttcggttca

SEQ ID NO: 2084220 - DNA, 25 bp, Homo sapien
tcaggacagatgtctttgcaattct

SEQ ID NO: 2084221 - DNA, 25 bp, Homo sapien
taacacctttagagctgggttcatc

SEQ ID NO: 2084222 - DNA, 25 bp, Homo sapien
atggcggcaccggtgctgtgggccc

SEQ ID NO: 2084223 - DNA, 25 bp, Homo sapien
aggtcccctgtggtatatgaggtgt

SEQ ID NO: 2084224 - DNA, 25 bp, Homo sapien
gtgtaacacctttagagctgggttc

SEQ ID NO: 2084225 - DNA, 25 bp, Homo sapien
tgcgtacacctctgctgcctatgag

SEQ ID NO: 2084226 - DNA, 25 bp, Homo sapien
catacgtggacctgccaggtaggtc

SEQ ID NO: 2084227 - DNA, 25 bp, Homo sapien
cctggaactgagtggcccgagattg

SEQ ID NO: 2084228 - DNA, 25 bp, Homo sapien
tggtcctaccggatgctgcgtacac

SEQ ID NO: 2084229 - DNA, 25 bp, Homo sapien
gctgggacttaggaactgctgctcc

SEQ ID NO: 2084230 - DNA, 25 bp, Homo sapien
tgctgggacttaggaactgctgctc

SEQ ID NO: 2084231 - DNA, 25 bp, Homo sapien
ccgccacggcggctgtgggtctttt

SEQ ID NO: 2084232 - DNA, 25 bp, Homo sapien
gcggtaccaggagcgtttactgctg

SEQ ID NO: 2084233 - DNA, 25 bp, Homo sapien
cttatcacagcaaaccacacgtggg

SEQ ID NO: 2084234 - DNA, 25 bp, Homo sapien
ccgagtagggttttgcagagttgct

SEQ ID NO: 2084235 - DNA, 25 bp, Homo sapien
aatctgcagtcagattggccgtgag

SEQ ID NO: 2084236 - DNA, 25 bp, Homo sapien
tcagattggccgtgagctgaaaccg

SEQ ID NO: 2084237 - DNA, 25 bp, Homo sapien
tgttatcatggtaattaaaattccc

SEQ ID NO: 2084238 - DNA, 25 bp, Homo sapien
agcaattgttatcatggtaattaaa

SEQ ID NO: 2084239 - DNA, 25 bp, Homo sapien
cacagtgctccagtccgtgagttca

SEQ ID NO: 2084240 - DNA, 25 bp, Homo sapien
aggcacaccgaaggactcccatcgt

SEQ ID NO: 2084241 - DNA, 25 bp, Homo sapien
ccgtgagttcatcgttcacacacag

SEQ ID NO: 2084242 - DNA, 25 bp, Homo sapien
cccacgtctgtgcactggagaagtt

SEQ ID NO: 2084243 - DNA, 25 bp, Homo sapien
catccctgggggacccggatggtca

SEQ ID NO: 2084244 - DNA, 25 bp, Homo sapien
gggctgctgtcacggcatccctggg

SEQ ID NO: 2084245 - DNA, 25 bp, Homo sapien
tctgggctgctgtcacggcatccct

SEQ ID NO: 2084246 - DNA, 25 bp, Homo sapien
gcatccctgggggacccggatggtc

SEQ ID NO: 2084247 - DNA, 25 bp, Homo sapien
gcaaacagctttgccagagggcccc

SEQ ID NO: 2084248 - DNA, 25 bp, Homo sapien
acagctttgccagagggccccctct

SEQ ID NO: 2084249 - DNA, 25 bp, Homo sapien
ctgcaaacagctttgccagagggcc

SEQ ID NO: 2084250 - DNA, 25 bp, Homo sapien
aaacagctttgccagagggccccct

SEQ ID NO: 2084251 - DNA, 25 bp, Homo sapien
ttctccatgctgtttctctcctggt

SEQ ID NO: 2084252 - DNA, 25 bp, Homo sapien
ctccatgctgtttctctcctggttc

SEQ ID NO: 2084253 - DNA, 25 bp, Homo sapien
cgcaagctgccatctgtttctccat

SEQ ID NO: 2084254 - DNA, 25 bp, Homo sapien
gtttctccatgctgtttctctcctg

SEQ ID NO: 2084255 - DNA, 25 bp, Homo sapien
tctccctgatgtcgcccttgctggg

SEQ ID NO: 2084256 - DNA, 25 bp, Homo sapien
gctgggatctcacgtcgccactggc

SEQ ID NO: 2084257 - DNA, 25 bp, Homo sapien
gctggggtctctccctgatgtcgcc

SEQ ID NO: 2084258 - DNA, 25 bp, Homo sapien
cttgctgggatctcacgtcgccact

SEQ ID NO: 2084259 - DNA, 25 bp, Homo sapien
cacagatgttatctgagggggggtg

SEQ ID NO: 2084260 - DNA, 25 bp, Homo sapien
cagatgttatctgagggggggtggc

SEQ ID NO: 2084261 - DNA, 25 bp, Homo sapien
gacacagatgttatctgaggggggg

SEQ ID NO: 2084262 - DNA, 25 bp, Homo sapien
ggacacagatgttatctgagggggg

SEQ ID NO: 2084263 - DNA, 25 bp, Homo sapien
gaaggctgcccaggcggcttcagct

SEQ ID NO: 2084264 - DNA, 25 bp, Homo sapien
ttgccggactggctagattctggaa

SEQ ID NO: 2084265 - DNA, 25 bp, Homo sapien
ggaagctgtatctcccagggatgac

SEQ ID NO: 2084266 - DNA, 25 bp, Homo sapien
ggcccaggtggtccatggcacgcct

SEQ ID NO: 2084267 - DNA, 25 bp, Homo sapien
tctccatggagagacgtgctccttg

SEQ ID NO: 2084268 - DNA, 25 bp, Homo sapien
gacacgctcgacgtggaagccaagt

SEQ ID NO: 2084269 - DNA, 25 bp, Homo sapien
gacgtgctccttgctgagttggcag

SEQ ID NO: 2084270 - DNA, 25 bp, Homo sapien
ccccgcaggaatgtatcatagcttc

SEQ ID NO: 2084271 - DNA, 25 bp, Homo sapien
ctgagagacacgacgatgctcccat

SEQ ID NO: 2084272 - DNA, 25 bp, Homo sapien
gggaccgagggctctagacgactcc

SEQ ID NO: 2084273 - DNA, 25 bp, Homo sapien
aacaggatctggtgatagcgcagga

SEQ ID NO: 2084274 - DNA, 25 bp, Homo sapien
acgactccagggctgagagacacga

SEQ ID NO: 2084275 - DNA, 25 bp, Homo sapien
gcgccgtgccgtgcggcctctgaag

SEQ ID NO: 2084276 - DNA, 25 bp, Homo sapien
tgcgccgtgccgtgcggcctctgaa

SEQ ID NO: 2084277 - DNA, 25 bp, Homo sapien
gccgtgccgtgcggcctctgaagga

SEQ ID NO: 2084278 - DNA, 25 bp, Homo sapien
ccgtgccgtgcggcctctgaaggag

SEQ ID NO: 2084279 - DNA, 25 bp, Homo sapien
gtgatggtaacgtggattagtgaat

SEQ ID NO: 2084280 - DNA, 25 bp, Homo sapien
ctcagcgggtgatggtaacgtggat

SEQ ID NO: 2084281 - DNA, 25 bp, Homo sapien
taacgtggattagtgaatcgcaggg

SEQ ID NO: 2084282 - DNA, 25 bp, Homo sapien
ggtgctcagcgggtgatggtaacgt

SEQ ID NO: 2084283 - DNA, 25 bp, Homo sapien
cctgtccccagatccgttggctccg

SEQ ID NO: 2084284 - DNA, 25 bp, Homo sapien
ctctggagggcgactggtccacgct

SEQ ID NO: 2084285 - DNA, 25 bp, Homo sapien
gatccgttggctccgcgtcctcgtg

SEQ ID NO: 2084286 - DNA, 25 bp, Homo sapien
cccagatccgttggctccgcgtcct

SEQ ID NO: 2084287 - DNA, 25 bp, Homo sapien
aggtgccgccagcgttggttggtag

SEQ ID NO: 2084288 - DNA, 25 bp, Homo sapien
ggttggtagcgggaaaacaggctgc

SEQ ID NO: 2084289 - DNA, 25 bp, Homo sapien
ccgccagcgttggttggtagcggga

SEQ ID NO: 2084290 - DNA, 25 bp, Homo sapien
gtgccgccagcgttggttggtagcg

SEQ ID NO: 2084291 - DNA, 25 bp, Homo sapien
agtgggagcgtgtcgtctttccgta

SEQ ID NO: 2084292 - DNA, 25 bp, Homo sapien
tttccgtagccctcgcctcttagga

SEQ ID NO: 2084293 - DNA, 25 bp, Homo sapien
ttatttgagtgggagcgtgtcgtct

SEQ ID NO: 2084294 - DNA, 25 bp, Homo sapien
ttccgtagccctcgcctcttaggaa

SEQ ID NO: 2084295 - DNA, 25 bp, Homo sapien
tcgctgtcgcatgggttttcaaaaa

SEQ ID NO: 2084296 - DNA, 25 bp, Homo sapien
tgtagaggctggcttgctcgctgtc

SEQ ID NO: 2084297 - DNA, 25 bp, Homo sapien
gaacaaagaccgagcccattggaag

SEQ ID NO: 2084298 - DNA, 25 bp, Homo sapien
tcgtgaagggctgtgtttgcaccaa

SEQ ID NO: 2084299 - DNA, 25 bp, Homo sapien
cgtgcagcttgtcttcccggcaggt

SEQ ID NO: 2084300 - DNA, 25 bp, Homo sapien
tgagcgagtgccttcacgcctccgt

SEQ ID NO: 2084301 - DNA, 25 bp, Homo sapien
ttcacgcctccgtgcagcttgtctt

SEQ ID NO: 2084302 - DNA, 25 bp, Homo sapien
cctgcctcgtgtcgctgagcgagtg

SEQ ID NO: 2084303 - DNA, 25 bp, Homo sapien
ctttggagtggcccagcagaacctt

SEQ ID NO: 2084304 - DNA, 25 bp, Homo sapien
ctgaactttggagtggcccagcaga

SEQ ID NO: 2084305 - DNA, 25 bp, Homo sapien
ttggagtggcccagcagaaccttct

SEQ ID NO: 2084306 - DNA, 25 bp, Homo sapien
ggcccagcagaaccttctgtcgcat

SEQ ID NO: 2084307 - DNA, 25 bp, Homo sapien
ccttgtacaggacgtttgagcgcag

SEQ ID NO: 2084308 - DNA, 25 bp, Homo sapien
tgtacgcaacgtttgagggcagttt

SEQ ID NO: 2084309 - DNA, 25 bp, Homo sapien
ttgaagctccacacgtttaaaccag

SEQ ID NO: 2084310 - DNA, 25 bp, Homo sapien
acagcacagcgtacgttttccaggc

SEQ ID NO: 2084311 - DNA, 25 bp, Homo sapien
gagtgcagaaatgatccgaagcccc

SEQ ID NO: 2084312 - DNA, 25 bp, Homo sapien
tctgaataccccgatttccctgaga

SEQ ID NO: 2084313 - DNA, 25 bp, Homo sapien
gaataccccgatttccctgagactg

SEQ ID NO: 2084314 - DNA, 25 bp, Homo sapien
gagactgacactcgcagaggcacga

SEQ ID NO: 2084315 - DNA, 25 bp, Homo sapien
tcctgtttcccgtgtcctgccggaa

SEQ ID NO: 2084316 - DNA, 25 bp, Homo sapien
tgcagaggttaaccaggaccgggaa

SEQ ID NO: 2084317 - DNA, 25 bp, Homo sapien
gatgcagaaacctctctgggactga

SEQ ID NO: 2084318 - DNA, 25 bp, Homo sapien
agttctcgatggctcaaacctcctg

SEQ ID NO: 2084319 - DNA, 25 bp, Homo sapien
gagccatcggcggaaacgagctcgt

SEQ ID NO: 2084320 - DNA, 25 bp, Homo sapien
gatgtgcattccctctgcccgttca

SEQ ID NO: 2084321 - DNA, 25 bp, Homo sapien
aacagcccgtctttgggccctgcgg

SEQ ID NO: 2084322 - DNA, 25 bp, Homo sapien
gaatctcattaccaaggtggagctg

SEQ ID NO: 2084323 - DNA, 25 bp, Homo sapien
tgtttgcggaatgcccttggcaaca

SEQ ID NO: 2084324 - DNA, 25 bp, Homo sapien
aagtgtttgcggaatgcccttggca

SEQ ID NO: 2084325 - DNA, 25 bp, Homo sapien
gtttgcggaatgcccttggcaacat

SEQ ID NO: 2084326 - DNA, 25 bp, Homo sapien
agtgtttgcggaatgcccttggcaa

SEQ ID NO: 2084327 - DNA, 25 bp, Homo sapien
ggaggacacggggggcagctcttct

SEQ ID NO: 2084328 - DNA, 25 bp, Homo sapien
ttcgggaggcctgcgattcttcacc

SEQ ID NO: 2084329 - DNA, 25 bp, Homo sapien
ctgcaagctggcacacttcgggagg

SEQ ID NO: 2084330 - DNA, 25 bp, Homo sapien
ggatggacttggcccgtcttgttcc

SEQ ID NO: 2084331 - DNA, 25 bp, Homo sapien
ttgctgttcacggaccttaactggg

SEQ ID NO: 2084332 - DNA, 25 bp, Homo sapien
aagcgcggtaattttgtgcagcctc

SEQ ID NO: 2084333 - DNA, 25 bp, Homo sapien
ttgccaagcgcggtaattttgtgca

SEQ ID NO: 2084334 - DNA, 25 bp, Homo sapien
ctctcgtcctctgttgtggtaaata

SEQ ID NO: 2084335 - DNA, 25 bp, Homo sapien
cgtcctctgttgtggtaaataacag

SEQ ID NO: 2084336 - DNA, 25 bp, Homo sapien
aataaggtggccgatgaaatgaggt

SEQ ID NO: 2084337 - DNA, 25 bp, Homo sapien
ggaaggtgatgtctcgtcccacttt

SEQ ID NO: 2084338 - DNA, 25 bp, Homo sapien
cgacggctacgtgcccacgatgctg

SEQ ID NO: 2084339 - DNA, 25 bp, Homo sapien
atgaaatgaggtggccgacggctac

SEQ ID NO: 2084340 - DNA, 25 bp, Homo sapien
gacttggatgcctcatagacatgac

SEQ ID NO: 2084341 - DNA, 25 bp, Homo sapien
ggtggatgcctatgtacactccttt

SEQ ID NO: 2084342 - DNA, 25 bp, Homo sapien
tgtgtgtgaaatgcgaagctcccgc

SEQ ID NO: 2084343 - DNA, 25 bp, Homo sapien
cacaaatgttcgcagggtggatgcc

SEQ ID NO: 2084344 - DNA, 25 bp, Homo sapien
ctacaggtcaatggaggtggagtca

SEQ ID NO: 2084345 - DNA, 25 bp, Homo sapien
actacaggtcaatggaggtggagtc

SEQ ID NO: 2084346 - DNA, 25 bp, Homo sapien
tacaggtcaatggaggtggagtcac

SEQ ID NO: 2084347 - DNA, 25 bp, Homo sapien
gcacagggactacaggtcaatggag

SEQ ID NO: 2084348 - DNA, 25 bp, Homo sapien
gggactacaggtcaatggaggtggg

SEQ ID NO: 2084349 - DNA, 25 bp, Homo sapien
cacagggactacaggtcaatggagg

SEQ ID NO: 2084350 - DNA, 25 bp, Homo sapien
cagggactacaggtcaatggaggtg

SEQ ID NO: 2084351 - DNA, 25 bp, Homo sapien
gggaggcctccacgccgtctgtgct

SEQ ID NO: 2084352 - DNA, 25 bp, Homo sapien
gggccgtccactgactgttctcggg

SEQ ID NO: 2084353 - DNA, 25 bp, Homo sapien
gtgctgttccctctcgaggctgcag

SEQ ID NO: 2084354 - DNA, 25 bp, Homo sapien
cgcgctcgtcgtcccggcacgcggc

SEQ ID NO: 2084355 - DNA, 25 bp, Homo sapien
tcacaggcacggaatgtctcaggga

SEQ ID NO: 2084356 - DNA, 25 bp, Homo sapien
acccccaccatattgtagttcttca

SEQ ID NO: 2084357 - DNA, 25 bp, Homo sapien
gcagtggcttttcccgtctcgttca

SEQ ID NO: 2084358 - DNA, 25 bp, Homo sapien
tgcacacagcaatgtcacaggcacg

SEQ ID NO: 2084359 - DNA, 25 bp, Homo sapien
taaaatgtgcctcctcgagttgccc

SEQ ID NO: 2084360 - DNA, 25 bp, Homo sapien
tcatgtccgacctttgctcagggcc

SEQ ID NO: 2084361 - DNA, 25 bp, Homo sapien
agaatcgaaactggctccgtgggca

SEQ ID NO: 2084362 - DNA, 25 bp, Homo sapien
catcagtgatgaacctgccctggcg

SEQ ID NO: 2084363 - DNA, 25 bp, Homo sapien
cttttaagagagaagggtcagactt

SEQ ID NO: 2084364 - DNA, 25 bp, Homo sapien
tgagtgctgagtggtggcgagcata

SEQ ID NO: 2084365 - DNA, 25 bp, Homo sapien
gaagggtcagactttctgccctctg

SEQ ID NO: 2084366 - DNA, 25 bp, Homo sapien
gcccaagaggtgagtgctgagtggt

SEQ ID NO: 2084367 - DNA, 25 bp, Homo sapien
tacaagggcgcagtctgtgtttaat

SEQ ID NO: 2084368 - DNA, 25 bp, Homo sapien
agtctgtgtttaatgcacagggcac

SEQ ID NO: 2084369 - DNA, 25 bp, Homo sapien
ctgagtacaagggcgcagtctgtgt

SEQ ID NO: 2084370 - DNA, 25 bp, Homo sapien
gtctgtgtttaatgcacagggcact

SEQ ID NO: 2084371 - DNA, 25 bp, Homo sapien
gtctctagtttacggaggaagtggc

SEQ ID NO: 2084372 - DNA, 25 bp, Homo sapien
gaggtccatcaaccatgtccacaaa

SEQ ID NO: 2084373 - DNA, 25 bp, Homo sapien
cgcagaggtccatcaaccatgtcca

SEQ ID NO: 2084374 - DNA, 25 bp, Homo sapien
gggatcacgtctctagtttacggag

SEQ ID NO: 2084375 - DNA, 25 bp, Homo sapien
gatagaactgaacacttctgggcgg

SEQ ID NO: 2084376 - DNA, 25 bp, Homo sapien
gaatcttgagggacaaacggcctgt

SEQ ID NO: 2084377 - DNA, 25 bp, Homo sapien
taccgatctgtctcaggaagttgcc

SEQ ID NO: 2084378 - DNA, 25 bp, Homo sapien
tgtgagtcagcaagtcgcagagcct

SEQ ID NO: 2084379 - DNA, 25 bp, Homo sapien
ggtgagctctcgactttagagagag

SEQ ID NO: 2084380 - DNA, 25 bp, Homo sapien
cccggggtggtgagctctcgacttt

SEQ ID NO: 2084381 - DNA, 25 bp, Homo sapien
ggtggtgagctctcgactttagaga

SEQ ID NO: 2084382 - DNA, 25 bp, Homo sapien
gagctctcgactttagagagagaat

SEQ ID NO: 2084383 - DNA, 25 bp, Homo sapien
agtgatgtctgcagtgacgaacgcc

SEQ ID NO: 2084384 - DNA, 25 bp, Homo sapien
tctgtgtctgcagtgatgtctgcag

SEQ ID NO: 2084385 - DNA, 25 bp, Homo sapien
aacgcccggggtggtgagctctaat

SEQ ID NO: 2084386 - DNA, 25 bp, Homo sapien
tctgcagtgatgtctgcagtgacga

SEQ ID NO: 2084387 - DNA, 25 bp, Homo sapien
ggaaaagttggaaggtgctacatta

SEQ ID NO: 2084388 - DNA, 25 bp, Homo sapien
tgaggctgcataatggccgtctctg

SEQ ID NO: 2084389 - DNA, 25 bp, Homo sapien
ttaaggtgttaagagtcgccatggg

SEQ ID NO: 2084390 - DNA, 25 bp, Homo sapien
gagtgaccacgtgaggctgcataat

SEQ ID NO: 2084391 - DNA, 25 bp, Homo sapien
tttatttagaaaccagcaagcagcg

SEQ ID NO: 2084392 - DNA, 25 bp, Homo sapien
aattttatttagaaaccagcaagca

SEQ ID NO: 2084393 - DNA, 25 bp, Homo sapien
ttttatttagaaaccagcaagcagc

SEQ ID NO: 2084394 - DNA, 25 bp, Homo sapien
tatttagaaaccagcaagcagcgta

SEQ ID NO: 2084395 - DNA, 25 bp, Homo sapien
tgccctcctcgtgtttcccgtgtca

SEQ ID NO: 2084396 - DNA, 25 bp, Homo sapien
ctgccctcctcgtgtttcccgtgtc

SEQ ID NO: 2084397 - DNA, 25 bp, Homo sapien
gccctcctcgtgtttcccgtgtcat

SEQ ID NO: 2084398 - DNA, 25 bp, Homo sapien
gctgccctcctcgtgtttcccgtgt

SEQ ID NO: 2084399 - DNA, 25 bp, Homo sapien
gccacgatagggaagtcctgcatct

SEQ ID NO: 2084400 - DNA, 25 bp, Homo sapien
tcagtcctgtgccacgatagggaag

SEQ ID NO: 2084401 - DNA, 25 bp, Homo sapien
catgtcacctggtgtgtcgcctgtg

SEQ ID NO: 2084402 - DNA, 25 bp, Homo sapien
gccatgtcacctggtgtgtcgcctg

SEQ ID NO: 2084403 - DNA, 25 bp, Homo sapien
ttagtggcgtggcaagattcttccg

SEQ ID NO: 2084404 - DNA, 25 bp, Homo sapien
ttagcaaacagggatgatgggcgcc

SEQ ID NO: 2084405 - DNA, 25 bp, Homo sapien
gattagtccacacaaaagcattcgg

SEQ ID NO: 2084406 - DNA, 25 bp, Homo sapien
tcgggagggtataacactcaaatgt

SEQ ID NO: 2084407 - DNA, 25 bp, Homo sapien
aattaccctagttctctgagtgagt

SEQ ID NO: 2084408 - DNA, 25 bp, Homo sapien
cctcctgcccaattaccctagttct

SEQ ID NO: 2084409 - DNA, 25 bp, Homo sapien
ctgcccaggcgagtttccctcctgc

SEQ ID NO: 2084410 - DNA, 25 bp, Homo sapien
tgcccaattaccctagttctctgag

SEQ ID NO: 2084411 - DNA, 25 bp, Homo sapien
ggtcggaggtggacaagctgagcct

SEQ ID NO: 2084412 - DNA, 25 bp, Homo sapien
gagagaggtaggtcggaggtggaca

SEQ ID NO: 2084413 - DNA, 25 bp, Homo sapien
ctagagacgttggagagaggtaggt

SEQ ID NO: 2084414 - DNA, 25 bp, Homo sapien
ggtaggtcggaggtggacaagctga

SEQ ID NO: 2084415 - DNA, 25 bp, Homo sapien
aatctattttggttgcagcaggtga

SEQ ID NO: 2084416 - DNA, 25 bp, Homo sapien
catgtgggtacgattcttggtgtaa

SEQ ID NO: 2084417 - DNA, 25 bp, Homo sapien
cgattcttggtgtaatctattttgg

SEQ ID NO: 2084418 - DNA, 25 bp, Homo sapien
aggtccagacatgtgggtacgattc

SEQ ID NO: 2084419 - DNA, 25 bp, Homo sapien
gggcctgtctgggtgaagcccctct

SEQ ID NO: 2084420 - DNA, 25 bp, Homo sapien
tttgctgggagagcgtctggttaat

SEQ ID NO: 2084421 - DNA, 25 bp, Homo sapien
ccaaggacattggaagatgcctctg

SEQ ID NO: 2084422 - DNA, 25 bp, Homo sapien
taatcgttgactggaaacttgcttt

SEQ ID NO: 2084423 - DNA, 25 bp, Homo sapien
gccacttattgacttaagtcccagt

SEQ ID NO: 2084424 - DNA, 25 bp, Homo sapien
cttattgacttaagtcccagtgatt

SEQ ID NO: 2084425 - DNA, 25 bp, Homo sapien
cacttattgacttaagtcccagtga

SEQ ID NO: 2084426 - DNA, 25 bp, Homo sapien
tattgacttaagtcccagtgattca

SEQ ID NO: 2084427 - DNA, 25 bp, Homo sapien
tccgggaagctgttccatttacaca

SEQ ID NO: 2084428 - DNA, 25 bp, Homo sapien
tgtcagggtgtaagtgctccctcgc

SEQ ID NO: 2084429 - DNA, 25 bp, Homo sapien
gcttgtttgcactatgaaaaggtca

SEQ ID NO: 2084430 - DNA, 25 bp, Homo sapien
ggtcaacagagagatccttgtcatc

SEQ ID NO: 2084431 - DNA, 25 bp, Homo sapien
cgtgcttaccgtcccagacagtggg

SEQ ID NO: 2084432 - DNA, 25 bp, Homo sapien
tggacctttgcgcagagctggcctt

SEQ ID NO: 2084433 - DNA, 25 bp, Homo sapien
tactggccatcgtgagctagtgccg

SEQ ID NO: 2084434 - DNA, 25 bp, Homo sapien
aagactgggcgtgactactttgacc

SEQ ID NO: 2084435 - DNA, 25 bp, Homo sapien
tcagcgtcggcacaaacacgggtgc

SEQ ID NO: 2084436 - DNA, 25 bp, Homo sapien
gcagaaagcgcacatcagggctcat

SEQ ID NO: 2084437 - DNA, 25 bp, Homo sapien
tgctgcagacaaccgggagtcagcg

SEQ ID NO: 2084438 - DNA, 25 bp, Homo sapien
ctcgaaagagagcagtgccggcctg

SEQ ID NO: 2084439 - DNA, 25 bp, Homo sapien
cccgtggagaggctccatttcggcc

SEQ ID NO: 2084440 - DNA, 25 bp, Homo sapien
cgtggagaggctccatttcggccac

SEQ ID NO: 2084441 - DNA, 25 bp, Homo sapien
ccgtggagaggctccatttcggcca

SEQ ID NO: 2084442 - DNA, 25 bp, Homo sapien
ccccgtggagaggctccatttcggc

SEQ ID NO: 2084443 - DNA, 25 bp, Homo sapien
tgagcggctgaagactaagggagca

SEQ ID NO: 2084444 - DNA, 25 bp, Homo sapien
ggacagagttagatgcccctgcaga

SEQ ID NO: 2084445 - DNA, 25 bp, Homo sapien
cccctgcagacgtggatgagcggct

SEQ ID NO: 2084446 - DNA, 25 bp, Homo sapien
tctgggataccctgggacagagtta

SEQ ID NO: 2084447 - DNA, 25 bp, Homo sapien
agcaaacccgagatggtctgaggtg

SEQ ID NO: 2084448 - DNA, 25 bp, Homo sapien
agaagaccagcaaacccgagatggt

SEQ ID NO: 2084449 - DNA, 25 bp, Homo sapien
gaagaccagcaaacccgagatggtc

SEQ ID NO: 2084450 - DNA, 25 bp, Homo sapien
accagcaaacccgagatggtctgag

SEQ ID NO: 2084451 - DNA, 25 bp, Homo sapien
ctcgggttagcaccgaaggttcttg

SEQ ID NO: 2084452 - DNA, 25 bp, Homo sapien
aaggttcttgtgtcagacgtgaggc

SEQ ID NO: 2084453 - DNA, 25 bp, Homo sapien
tagcaccgaaggttcttgtgtcaga

SEQ ID NO: 2084454 - DNA, 25 bp, Homo sapien
tgtgtcagacgtgaggcttccttcc

SEQ ID NO: 2084455 - DNA, 25 bp, Homo sapien
tcagaggatggtgccggatgggcag

SEQ ID NO: 2084456 - DNA, 25 bp, Homo sapien
agtccctggatcagaggatggtgcc

SEQ ID NO: 2084457 - DNA, 25 bp, Homo sapien
gatcagaggatggtgccggatgggc

SEQ ID NO: 2084458 - DNA, 25 bp, Homo sapien
cctggatcagaggatggtgccggat

SEQ ID NO: 2084459 - DNA, 25 bp, Homo sapien
ctttcatgggcagactcaactggcg

SEQ ID NO: 2084460 - DNA, 25 bp, Homo sapien
gcagttcagcgcctactttcatggg

SEQ ID NO: 2084461 - DNA, 25 bp, Homo sapien
ttaactggagggtgagagatgtcct

SEQ ID NO: 2084462 - DNA, 25 bp, Homo sapien
tcaactggcgagattttaactggag

SEQ ID NO: 2084463 - DNA, 25 bp, Homo sapien
agccccggccgtgccagctgccctc

SEQ ID NO: 2084464 - DNA, 25 bp, Homo sapien
cagccccggccgtgccagctgccct

SEQ ID NO: 2084465 - DNA, 25 bp, Homo sapien
gcccagctctccagagaggcttcat

SEQ ID NO: 2084466 - DNA, 25 bp, Homo sapien
cactggcctggcccagctctccaga

SEQ ID NO: 2084467 - DNA, 25 bp, Homo sapien
ggtgatgcgtgctgtgctggccttt

SEQ ID NO: 2084468 - DNA, 25 bp, Homo sapien
ttgcgactgatcctggctgggactt

SEQ ID NO: 2084469 - DNA, 25 bp, Homo sapien
cctgagggtttttgcgactgatcct

SEQ ID NO: 2084470 - DNA, 25 bp, Homo sapien
ctggcccacgggtgatgcgtgctgt

SEQ ID NO: 2084471 - DNA, 25 bp, Homo sapien
agcgccccacggtttccagccttgg

SEQ ID NO: 2084472 - DNA, 25 bp, Homo sapien
ggcaagggctgacattttggggagc

SEQ ID NO: 2084473 - DNA, 25 bp, Homo sapien
ctggcaagggctgacattttgggga

SEQ ID NO: 2084474 - DNA, 25 bp, Homo sapien
caagggctgacattttggggagctc

SEQ ID NO: 2084475 - DNA, 25 bp, Homo sapien
aagggctgacattttggggagctca

SEQ ID NO: 2084476 - DNA, 25 bp, Homo sapien
cctcactttgcacagacctggtgtc

SEQ ID NO: 2084477 - DNA, 25 bp, Homo sapien
gtgacctcactttgcacagacctgg

SEQ ID NO: 2084478 - DNA, 25 bp, Homo sapien
caggctcgcctcgtcacttgagtct

SEQ ID NO: 2084479 - DNA, 25 bp, Homo sapien
cttgagtctgggtgtcattgaggca

SEQ ID NO: 2084480 - DNA, 25 bp, Homo sapien
tctcggggtccagtgatgcccatct

SEQ ID NO: 2084481 - DNA, 25 bp, Homo sapien
tatgaccttctacttccgacgtgag

SEQ ID NO: 2084482 - DNA, 25 bp, Homo sapien
ctttctcacaccatctggcttgtta

SEQ ID NO: 2084483 - DNA, 25 bp, Homo sapien
tcatttgcagaaaccacttctcggg

SEQ ID NO: 2084484 - DNA, 25 bp, Homo sapien
ctgacagctcatgtccttgttaatg

SEQ ID NO: 2084485 - DNA, 25 bp, Homo sapien
attctgacagctcatgtccttgtta

SEQ ID NO: 2084486 - DNA, 25 bp, Homo sapien
gacagctcatgtccttgttaatgtc

SEQ ID NO: 2084487 - DNA, 25 bp, Homo sapien
ccttgttaatgtcagggtctgggga

SEQ ID NO: 2084488 - DNA, 25 bp, Homo sapien
cgaccatttgggctgtgctccaagg

SEQ ID NO: 2084489 - DNA, 25 bp, Homo sapien
ttctccaccagtagccggatgggcg

SEQ ID NO: 2084490 - DNA, 25 bp, Homo sapien
tccaaggctgccgatgatgtcggca

SEQ ID NO: 2084491 - DNA, 25 bp, Homo sapien
ccagtagccggatgggcgaccattt

SEQ ID NO: 2084492 - DNA, 25 bp, Homo sapien
tccaaccgcttcctgattttcactt

SEQ ID NO: 2084493 - DNA, 25 bp, Homo sapien
ccaaccgcttcctgattttcacttc

SEQ ID NO: 2084494 - DNA, 25 bp, Homo sapien
gcccgctgggctgcaacccaacccg

SEQ ID NO: 2084495 - DNA, 25 bp, Homo sapien
aggcccgatgccgactagtcggcga

SEQ ID NO: 2084496 - DNA, 25 bp, Homo sapien
gatgccgactagtcggcgactctca

SEQ ID NO: 2084497 - DNA, 25 bp, Homo sapien
agtcggcgactctcagcgcggaccg

SEQ ID NO: 2084498 - DNA, 25 bp, Homo sapien
tcaccttccgtttggccagctcgga

SEQ ID NO: 2084499 - DNA, 25 bp, Homo sapien
ttgccagaccccttggtcttcttct

SEQ ID NO: 2084500 - DNA, 25 bp, Homo sapien
ccagctcggaggcgccgcctgtgat

SEQ ID NO: 2084501 - DNA, 25 bp, Homo sapien
tgatggggggcagtctagacccccg

SEQ ID NO: 2084502 - DNA, 25 bp, Homo sapien
caccagcctcgtgcccacctgcctg

SEQ ID NO: 2084503 - DNA, 25 bp, Homo sapien
gcccaccagcctcgtgcccacctgc

SEQ ID NO: 2084504 - DNA, 25 bp, Homo sapien
gcccacctgcctgtgtgattttgct

SEQ ID NO: 2084505 - DNA, 25 bp, Homo sapien
aagcccaccagcctcgtgcccacct

SEQ ID NO: 2084506 - DNA, 25 bp, Homo sapien
ccaaaatcacccaagatggaagagg

SEQ ID NO: 2084507 - DNA, 25 bp, Homo sapien
caaaatcacccaagatggaagagga

SEQ ID NO: 2084508 - DNA, 25 bp, Homo sapien
gccaaaatcacccaagatggaagag

SEQ ID NO: 2084509 - DNA, 25 bp, Homo sapien
ctgagtagatgagcaggttagtgtt

SEQ ID NO: 2084510 - DNA, 25 bp, Homo sapien
gtttgtggcaatgtctgaccttggc

SEQ ID NO: 2084511 - DNA, 25 bp, Homo sapien
agcaggttagtgtttgtggcaatgt

SEQ ID NO: 2084512 - DNA, 25 bp, Homo sapien
caggttagtgtttgtggcaatgtct

SEQ ID NO: 2084513 - DNA, 25 bp, Homo sapien
ctgtgctctggtttcgggccacgct

SEQ ID NO: 2084514 - DNA, 25 bp, Homo sapien
gacttaagatgtcatgaaaggagga

SEQ ID NO: 2084515 - DNA, 25 bp, Homo sapien
aagaaagcggctggctcttcaggct

SEQ ID NO: 2084516 - DNA, 25 bp, Homo sapien
ctatttcggcaaagtcggggaggct

SEQ ID NO: 2084517 - DNA, 25 bp, Homo sapien
aattccatcccaacgcagactttcg

SEQ ID NO: 2084518 - DNA, 25 bp, Homo sapien
cagactttcgttgatccgattcgca

SEQ ID NO: 2084519 - DNA, 25 bp, Homo sapien
tcagtttatagatgcgaatcctttc

SEQ ID NO: 2084520 - DNA, 25 bp, Homo sapien
tctctgcctccgggtcagcaagaat

SEQ ID NO: 2084521 - DNA, 25 bp, Homo sapien
caggggcctcctcggcattggggtc

SEQ ID NO: 2084522 - DNA, 25 bp, Homo sapien
gcattggggtcagtgtggaagccct

SEQ ID NO: 2084523 - DNA, 25 bp, Homo sapien
tgtccgagaggtagggtaagttctc

SEQ ID NO: 2084524 - DNA, 25 bp, Homo sapien
gtccgagaggtagggtaagttctca

SEQ ID NO: 2084525 - DNA, 25 bp, Homo sapien
gcactcggctttcgacgtgggctgc

SEQ ID NO: 2084526 - DNA, 25 bp, Homo sapien
agcagagtaggagctaagtcagagt

SEQ ID NO: 2084527 - DNA, 25 bp, Homo sapien
gagctaagtcagagtgtagaagctt

SEQ ID NO: 2084528 - DNA, 25 bp, Homo sapien
ttcaaaacagagattggggcactcg

SEQ ID NO: 2084529 - DNA, 25 bp, Homo sapien
ctctcctgggcaaccgagggcagct

SEQ ID NO: 2084530 - DNA, 25 bp, Homo sapien
ggcgtcgtccgtgtaccgaacatct

SEQ ID NO: 2084531 - DNA, 25 bp, Homo sapien
tataagtttgtgagcgtcgtgggta

SEQ ID NO: 2084532 - DNA, 25 bp, Homo sapien
cacataaacttgtggtgaggaggaa

SEQ ID NO: 2084533 - DNA, 25 bp, Homo sapien
gaggttcagggcatcgtcctccggc

SEQ ID NO: 2084534 - DNA, 25 bp, Homo sapien
aacagaagcaggtaccgtgtgagga

SEQ ID NO: 2084535 - DNA, 25 bp, Homo sapien
tcaccatgagattgagacttaagag

SEQ ID NO: 2084536 - DNA, 25 bp, Homo sapien
tatagacatctagctgtggtgagaa

SEQ ID NO: 2084537 - DNA, 25 bp, Homo sapien
cacgccaaccgcataaaggcggcca

SEQ ID NO: 2084538 - DNA, 25 bp, Homo sapien
tcatgtggctggtagcaggactcag

SEQ ID NO: 2084539 - DNA, 25 bp, Homo sapien
tcttggccggatgtctccggcttgg

SEQ ID NO: 2084540 - DNA, 25 bp, Homo sapien
cagagggaggcacctcaaggctcaa

SEQ ID NO: 2084541 - DNA, 25 bp, Homo sapien
ctccaaatgtagtggctttaaacaa

SEQ ID NO: 2084542 - DNA, 25 bp, Homo sapien
tgtgcccatttccttggatgtgatg

SEQ ID NO: 2084543 - DNA, 25 bp, Homo sapien
tgaggtcttagatactgcagtgcag

SEQ ID NO: 2084544 - DNA, 25 bp, Homo sapien
gcctgggtgtgacatcccagcgtct

SEQ ID NO: 2084545 - DNA, 25 bp, Homo sapien
tcttgcacctcaaacattgtcgagg

SEQ ID NO: 2084546 - DNA, 25 bp, Homo sapien
cagcaaagcagtagccagagtgttt

SEQ ID NO: 2084547 - DNA, 25 bp, Homo sapien
tctgagcccgggaaccgagatcttc

SEQ ID NO: 2084548 - DNA, 25 bp, Homo sapien
gaagggcttacgttacagcagcgga

SEQ ID NO: 2084549 - DNA, 25 bp, Homo sapien
caaaggatgtttattagtcacagca

SEQ ID NO: 2084550 - DNA, 25 bp, Homo sapien
tgtatctacacagcggacacaaagt

SEQ ID NO: 2084551 - DNA, 25 bp, Homo sapien
gtcgaagatcctcacattgacccaa

SEQ ID NO: 2084552 - DNA, 25 bp, Homo sapien
gacacaaagtcgaagatcctcacat

SEQ ID NO: 2084553 - DNA, 25 bp, Homo sapien
cacagcggacacaaagtcgaagatc

SEQ ID NO: 2084554 - DNA, 25 bp, Homo sapien
gatgagctcaggaaacagtaccggc

SEQ ID NO: 2084555 - DNA, 25 bp, Homo sapien
gaggacgtggcctttgaacaccgct

SEQ ID NO: 2084556 - DNA, 25 bp, Homo sapien
tatgttagcgggatcctcaaggcct

SEQ ID NO: 2084557 - DNA, 25 bp, Homo sapien
gctttgccccgtggagacgcttgct

SEQ ID NO: 2084558 - DNA, 25 bp, Homo sapien
tttggaagagcaagtgacgcagcat

SEQ ID NO: 2084559 - DNA, 25 bp, Homo sapien
tgtgtttggaagagcaagtgacgca

SEQ ID NO: 2084560 - DNA, 25 bp, Homo sapien
tgtttggaagagcaagtgacgcagc

SEQ ID NO: 2084561 - DNA, 25 bp, Homo sapien
ctgtgtttggaagagcaagtgacgc

SEQ ID NO: 2084562 - DNA, 25 bp, Homo sapien
catctgcgccgaaagctgaactgag

SEQ ID NO: 2084563 - DNA, 25 bp, Homo sapien
caggtgcagcgacaatcgccgtcgt

SEQ ID NO: 2084564 - DNA, 25 bp, Homo sapien
tgtagctccgggtttctgccgatgg

SEQ ID NO: 2084565 - DNA, 25 bp, Homo sapien
tatttccagtgcctgagggttaccg

SEQ ID NO: 2084566 - DNA, 25 bp, Homo sapien
taacctagagatacctccaagcgcg

SEQ ID NO: 2084567 - DNA, 25 bp, Homo sapien
tggattacaactgccgcaagacgct

SEQ ID NO: 2084568 - DNA, 25 bp, Homo sapien
gccacgggtgtcttcactgcacaaa

SEQ ID NO: 2084569 - DNA, 25 bp, Homo sapien
gacctctctgatgaatgctgaccca

SEQ ID NO: 2084570 - DNA, 25 bp, Homo sapien
gtgtcatcatttggacctggccaga

SEQ ID NO: 2084571 - DNA, 25 bp, Homo sapien
agtggagccgtgtttgactggcatc

SEQ ID NO: 2084572 - DNA, 25 bp, Homo sapien
cacactggactgatggatgccagct

SEQ ID NO: 2084573 - DNA, 25 bp, Homo sapien
cgactccagccaaacgggtggtctc

SEQ ID NO: 2084574 - DNA, 25 bp, Homo sapien
tggtctgcaagtcctcgtccagcac

SEQ ID NO: 2084575 - DNA, 25 bp, Homo sapien
tcgtccagcacgaatacgcagaacg

SEQ ID NO: 2084576 - DNA, 25 bp, Homo sapien
cggagcccgaagtgcaagtgtattg

SEQ ID NO: 2084577 - DNA, 25 bp, Homo sapien
tgatgcagctccgaggaggccatgt

SEQ ID NO: 2084578 - DNA, 25 bp, Homo sapien
cacccaatcggaggaccatggtggt

SEQ ID NO: 2084579 - DNA, 25 bp, Homo sapien
ggtacttgtagcaggggcacccaat

SEQ ID NO: 2084580 - DNA, 25 bp, Homo sapien
tggtggtccaccgtcacacacctta

SEQ ID NO: 2084581 - DNA, 25 bp, Homo sapien
gtcacacaccttagcagaaccagag

SEQ ID NO: 2084582 - DNA, 25 bp, Homo sapien
tctcaaaaccgacgacactgatggc

SEQ ID NO: 2084583 - DNA, 25 bp, Homo sapien
ttctcagaaggagctaaagagcctg

SEQ ID NO: 2084584 - DNA, 25 bp, Homo sapien
tctcggtgtgcggagtccactctcc

SEQ ID NO: 2084585 - DNA, 25 bp, Homo sapien
gctccagcgggtctcttctcaaaac

SEQ ID NO: 2084586 - DNA, 25 bp, Homo sapien
tgacagtctaaggaagcaacgcgtg

SEQ ID NO: 2084587 - DNA, 25 bp, Homo sapien
gaaagaagtagcaagtccgtgaccc

SEQ ID NO: 2084588 - DNA, 25 bp, Homo sapien
tgacttggaaccctacttgccctgt

SEQ ID NO: 2084589 - DNA, 25 bp, Homo sapien
tccagtgacggccaagtgatttctc

SEQ ID NO: 2084590 - DNA, 25 bp, Homo sapien
tgcccggagattttgagtcagtaag

SEQ ID NO: 2084591 - DNA, 25 bp, Homo sapien
ttaaacttgtgttgggtcaggcgcg

SEQ ID NO: 2084592 - DNA, 25 bp, Homo sapien
tgcgccgacactacacttgagctgg

SEQ ID NO: 2084593 - DNA, 25 bp, Homo sapien
gactctaagctaaaagtgcgccgac

SEQ ID NO: 2084594 - DNA, 25 bp, Homo sapien
tatggttaagcagcctgagccgtac

SEQ ID NO: 2084595 - DNA, 25 bp, Homo sapien
tgaggagtcgttttccggacggctc

SEQ ID NO: 2084596 - DNA, 25 bp, Homo sapien
gctagctggtttgactctcacgcat

SEQ ID NO: 2084597 - DNA, 25 bp, Homo sapien
cactcctggcgtttgtgtacagatc

SEQ ID NO: 2084598 - DNA, 25 bp, Homo sapien
ttgataaacattccttcagtgcgtg

SEQ ID NO: 2084599 - DNA, 25 bp, Homo sapien
ataaacattccttcagtgcgtagta

SEQ ID NO: 2084600 - DNA, 25 bp, Homo sapien
acattccttcagtgcgtagtaggtg

SEQ ID NO: 2084601 - DNA, 25 bp, Homo sapien
aaacattccttcagtgcgtagtagg

SEQ ID NO: 2084602 - DNA, 25 bp, Homo sapien
gcccggtgcgtggtaggtccttgat

SEQ ID NO: 2084603 - DNA, 25 bp, Homo sapien
gtagtcggtgcttgataaacgttcc

SEQ ID NO: 2084604 - DNA, 25 bp, Homo sapien
agcgcccggtgcgtggtaggtcctt

SEQ ID NO: 2084605 - DNA, 25 bp, Homo sapien
gtgcttgataaacgttccttcagca

SEQ ID NO: 2084606 - DNA, 25 bp, Homo sapien
gaagtggcaagtcctaaaatagctg

SEQ ID NO: 2084607 - DNA, 25 bp, Homo sapien
tccggtgctgatgggtacttccagt

SEQ ID NO: 2084608 - DNA, 25 bp, Homo sapien
tgagcaggcaaagtgaggccagtcc

SEQ ID NO: 2084609 - DNA, 25 bp, Homo sapien
tcatgatcccctcgctgctggtaag

SEQ ID NO: 2084610 - DNA, 25 bp, Homo sapien
tccctactggccactaagaagaagc

SEQ ID NO: 2084611 - DNA, 25 bp, Homo sapien
gacattctcccttggccattgctga

SEQ ID NO: 2084612 - DNA, 25 bp, Homo sapien
tctgttgggtcagaatgagtcccta

SEQ ID NO: 2084613 - DNA, 25 bp, Homo sapien
ggccaggcctaccttcagtgtttta

SEQ ID NO: 2084614 - DNA, 25 bp, Homo sapien
cctgcacacgcttgctcgctgcctg

SEQ ID NO: 2084615 - DNA, 25 bp, Homo sapien
gtatgtaccctgcacacacttactg

SEQ ID NO: 2084616 - DNA, 25 bp, Homo sapien
gatggacacgttcagcacgtatgta

SEQ ID NO: 2084617 - DNA, 25 bp, Homo sapien
atgtaccctgcacacgcttgctcgc

SEQ ID NO: 2084618 - DNA, 25 bp, Homo sapien
cagaacatcatgttacacaaaaagc

SEQ ID NO: 2084619 - DNA, 25 bp, Homo sapien
gggccttatctaatgactgttgtcc

SEQ ID NO: 2084620 - DNA, 25 bp, Homo sapien
gactattagtgtcatctcaagagga

SEQ ID NO: 2084621 - DNA, 25 bp, Homo sapien
acccagggagatatagtgggttgaa

SEQ ID NO: 2084622 - DNA, 25 bp, Homo sapien
tggggagagggagaccgtagggaga

SEQ ID NO: 2084623 - DNA, 25 bp, Homo sapien
cggatctttcggcagaaactctata

SEQ ID NO: 2084624 - DNA, 25 bp, Homo sapien
gagagaaaggtcaggttacccacaa

SEQ ID NO: 2084625 - DNA, 25 bp, Homo sapien
agggaagcccatcagactaacagcg

SEQ ID NO: 2084626 - DNA, 25 bp, Homo sapien
aaaaaaatgttaaaggcagtcagag

SEQ ID NO: 2084627 - DNA, 25 bp, Homo sapien
tcagttgccaagtatgagtgttgtc

SEQ ID NO: 2084628 - DNA, 25 bp, Homo sapien
gagtgttgtcctcgatttccaagta

SEQ ID NO: 2084629 - DNA, 25 bp, Homo sapien
gttgtcctcggttgccaagtatgag

SEQ ID NO: 2084630 - DNA, 25 bp, Homo sapien
tgttgtcctcggttgccaagtatga

SEQ ID NO: 2084631 - DNA, 25 bp, Homo sapien
tcctccagtgtaagatcttcggtgc

SEQ ID NO: 2084632 - DNA, 25 bp, Homo sapien
tgtcctccagtgtaagatcttcggt

SEQ ID NO: 2084633 - DNA, 25 bp, Homo sapien
tccagtgtaagatcttcggtgcctg

SEQ ID NO: 2084634 - DNA, 25 bp, Homo sapien
tctgtcctccagtgtaagatcttcg

SEQ ID NO: 2084635 - DNA, 25 bp, Homo sapien
ctgtgagagtccgacagcctctgct

SEQ ID NO: 2084636 - DNA, 25 bp, Homo sapien
tagggaagcaaagagctgtagacgt

SEQ ID NO: 2084637 - DNA, 25 bp, Homo sapien
ctgtagacgtgcagccatctgtggc

SEQ ID NO: 2084638 - DNA, 25 bp, Homo sapien
gagttctcggacacgtagggaagca

SEQ ID NO: 2084639 - DNA, 25 bp, Homo sapien
tccgtcactcgcagctatttcaggg

SEQ ID NO: 2084640 - DNA, 25 bp, Homo sapien
tgctgaatttgtttccgagcctcgt

SEQ ID NO: 2084641 - DNA, 25 bp, Homo sapien
ggaagctgcatgaacgcatccgtca

SEQ ID NO: 2084642 - DNA, 25 bp, Homo sapien
tatttcagggctagcttgttttaag

SEQ ID NO: 2084643 - DNA, 25 bp, Homo sapien
tgcacacctgtgctgccgaaaatac

SEQ ID NO: 2084644 - DNA, 25 bp, Homo sapien
tcagtatgacgaagaaactggactg

SEQ ID NO: 2084645 - DNA, 25 bp, Homo sapien
cgaaaatacagacaccagtgaggcc

SEQ ID NO: 2084646 - DNA, 25 bp, Homo sapien
catggcctcattagccagcttggtc

SEQ ID NO: 2084647 - DNA, 25 bp, Homo sapien
gagccatctccatataaactggcag

SEQ ID NO: 2084648 - DNA, 25 bp, Homo sapien
taggaaaatactgcgccaagaaaga

SEQ ID NO: 2084649 - DNA, 25 bp, Homo sapien
atagttttaggaaaatactgcgcca

SEQ ID NO: 2084650 - DNA, 25 bp, Homo sapien
gagccatctccatataaattggcag

SEQ ID NO: 2084651 - DNA, 25 bp, Homo sapien
ctgtgctttaaagcaactccaggtt

SEQ ID NO: 2084652 - DNA, 25 bp, Homo sapien
tgtgctttaaagcaactccaggttt

SEQ ID NO: 2084653 - DNA, 25 bp, Homo sapien
gtgctttaaagcaactccaggttta

SEQ ID NO: 2084654 - DNA, 25 bp, Homo sapien
tgctttaaagcaactccaggtttac

SEQ ID NO: 2084655 - DNA, 25 bp, Homo sapien
ctagttccgtgcatccaggtatttg

SEQ ID NO: 2084656 - DNA, 25 bp, Homo sapien
tgcatccaggtatttgtcgagttcc

SEQ ID NO: 2084657 - DNA, 25 bp, Homo sapien
tggcttttccgtcagctccatcagc

SEQ ID NO: 2084658 - DNA, 25 bp, Homo sapien
aggtatttgtcgagttcctgtggct

SEQ ID NO: 2084659 - DNA, 25 bp, Homo sapien
aggagaggatcagccaccgagtttc

SEQ ID NO: 2084660 - DNA, 25 bp, Homo sapien
ggagaggatcagccaccgagtttct

SEQ ID NO: 2084661 - DNA, 25 bp, Homo sapien
ccagacgatgatgctcttataaagt

SEQ ID NO: 2084662 - DNA, 25 bp, Homo sapien
tataaagtttatatggcacggaatc

SEQ ID NO: 2084663 - DNA, 25 bp, Homo sapien
tatggcacggaatcctccccatttt

SEQ ID NO: 2084664 - DNA, 25 bp, Homo sapien
tcttctaaccagacgatgatgctct

SEQ ID NO: 2084665 - DNA, 25 bp, Homo sapien
ggccagatgagaacactggggcttc

SEQ ID NO: 2084666 - DNA, 25 bp, Homo sapien
gattttattagtcctttcagatagc

SEQ ID NO: 2084667 - DNA, 25 bp, Homo sapien
ttatctggcatgttcacgtaaaggc

SEQ ID NO: 2084668 - DNA, 25 bp, Homo sapien
gcatgttcacgtaaaggctccggaa

SEQ ID NO: 2084669 - DNA, 25 bp, Homo sapien
taaaggctccggaactttgtcattc

SEQ ID NO: 2084670 - DNA, 25 bp, Homo sapien
gctcccactacatcggccttctgag

SEQ ID NO: 2084671 - DNA, 25 bp, Homo sapien
tcacagtaactgtgaactcccgaac

SEQ ID NO: 2084672 - DNA, 25 bp, Homo sapien
tctagcgctcccactacatcggcct

SEQ ID NO: 2084673 - DNA, 25 bp, Homo sapien
ctgtgaactcccgaactctagcgct

SEQ ID NO: 2084674 - DNA, 25 bp, Homo sapien
gcttgaatttacatcgcgctgttaa

SEQ ID NO: 2084675 - DNA, 25 bp, Homo sapien
ttgagcaactctgataacaacaaca

SEQ ID NO: 2084676 - DNA, 25 bp, Homo sapien
catactgctcctattttttactttg

SEQ ID NO: 2084677 - DNA, 25 bp, Homo sapien
tggtttcacagggtgatcggtgatc

SEQ ID NO: 2084678 - DNA, 25 bp, Homo sapien
aacccatatgtccttcaaccaggga

SEQ ID NO: 2084679 - DNA, 25 bp, Homo sapien
gcaagaagacatgaaccacagatac

SEQ ID NO: 2084680 - DNA, 25 bp, Homo sapien
ccttcaaccagggactagataaaca

SEQ ID NO: 2084681 - DNA, 25 bp, Homo sapien
tcatctagtggaataccagcaagaa

SEQ ID NO: 2084682 - DNA, 25 bp, Homo sapien
cctatctgttagatgggtatagtaa

SEQ ID NO: 2084683 - DNA, 25 bp, Homo sapien
aacatgcttcgaatggtacctgtca

SEQ ID NO: 2084684 - DNA, 25 bp, Homo sapien
tcatctcctatctgttagatgggta

SEQ ID NO: 2084685 - DNA, 25 bp, Homo sapien
taaaagagacaatgcatgtaacatg

SEQ ID NO: 2084686 - DNA, 25 bp, Homo sapien
cggccgcgcgatttcaaccctccgc

SEQ ID NO: 2084687 - DNA, 25 bp, Homo sapien
gcggcgcggctctgcgcgtgaccag

SEQ ID NO: 2084688 - DNA, 25 bp, Homo sapien
ccggcggctgcgatagggcggggcg

SEQ ID NO: 2084689 - DNA, 25 bp, Homo sapien
gcgtggctgggttcggctcggcgcg

SEQ ID NO: 2084690 - DNA, 25 bp, Homo sapien
atcacgcagtcggtgcggctccatc

SEQ ID NO: 2084691 - DNA, 25 bp, Homo sapien
ggtgctgatcatcacgcagtcggtg

SEQ ID NO: 2084692 - DNA, 25 bp, Homo sapien
tgatcatcacgcagtcggtgcggct

SEQ ID NO: 2084693 - DNA, 25 bp, Homo sapien
gagcggcgcagcgcccaggtgcaga

SEQ ID NO: 2084694 - DNA, 25 bp, Homo sapien
ctagcgcgggcggagagaacagcgc

SEQ ID NO: 2084695 - DNA, 25 bp, Homo sapien
gggctccggaggctcatcggccatt

SEQ ID NO: 2084696 - DNA, 25 bp, Homo sapien
gctcagtccggtccgaggaccgcag

SEQ ID NO: 2084697 - DNA, 25 bp, Homo sapien
ggcccggcccttcggcctgactctc

SEQ ID NO: 2084698 - DNA, 25 bp, Homo sapien
gcacggcgtgcaccgaggaaaccag

SEQ ID NO: 2084699 - DNA, 25 bp, Homo sapien
tgccggtgatcacgtcgtcgcagga

SEQ ID NO: 2084700 - DNA, 25 bp, Homo sapien
aatgatgacgatccccgagccggtg

SEQ ID NO: 2084701 - DNA, 25 bp, Homo sapien
gccagcacggcgtgcaccgaggaaa

SEQ ID NO: 2084702 - DNA, 25 bp, Homo sapien
atcagaaaccacacatattcccggg

SEQ ID NO: 2084703 - DNA, 25 bp, Homo sapien
ggcgtacgagtcatagatcatgtat

SEQ ID NO: 2084704 - DNA, 25 bp, Homo sapien
atagatcatgtatggaatcagaaac

SEQ ID NO: 2084705 - DNA, 25 bp, Homo sapien
gaaaccacacatattcccgggcaag

SEQ ID NO: 2084706 - DNA, 25 bp, Homo sapien
tggtctctggttcggcaccattcac

SEQ ID NO: 2084707 - DNA, 25 bp, Homo sapien
tgtgtgatcatgaggcggtttcgac

SEQ ID NO: 2084708 - DNA, 25 bp, Homo sapien
caaagagaatgaccgcatgatgtgt

SEQ ID NO: 2084709 - DNA, 25 bp, Homo sapien
ctgtgcgactggcacaaggacaaag

SEQ ID NO: 2084710 - DNA, 25 bp, Homo sapien
gagtgctcagttctgccgtgaagat

SEQ ID NO: 2084711 - DNA, 25 bp, Homo sapien
agatgcagccgacaaagaagtcccc

SEQ ID NO: 2084712 - DNA, 25 bp, Homo sapien
aagatgcagccgacaaagaagtccc

SEQ ID NO: 2084713 - DNA, 25 bp, Homo sapien
ggagtgctcagttctgccgtgaaga

SEQ ID NO: 2084714 - DNA, 25 bp, Homo sapien
ctctctgtcatttcattcatacatg

SEQ ID NO: 2084715 - DNA, 25 bp, Homo sapien
tctctgtcatttcattcatacatgc

SEQ ID NO: 2084716 - DNA, 25 bp, Homo sapien
actctctgtcatttcattcatacat

SEQ ID NO: 2084717 - DNA, 25 bp, Homo sapien
tacatgcctgaatcagaaccctcac

SEQ ID NO: 2084718 - DNA, 25 bp, Homo sapien
gtcatttcattcatacatgcctgaa

SEQ ID NO: 2084719 - DNA, 25 bp, Homo sapien
tcattcatacatgcctgaatcagaa

SEQ ID NO: 2084720 - DNA, 25 bp, Homo sapien
tcatacatgcctgaatcagaaccct

SEQ ID NO: 2084721 - DNA, 25 bp, Homo sapien
aaggtggccagcgtgaggattccat

SEQ ID NO: 2084722 - DNA, 25 bp, Homo sapien
ggtacttggagcaggcttagtccct

SEQ ID NO: 2084723 - DNA, 25 bp, Homo sapien
ggcggccataggaccagtacatgaa

SEQ ID NO: 2084724 - DNA, 25 bp, Homo sapien
aaggcattggccacgttgcagtaga

SEQ ID NO: 2084725 - DNA, 25 bp, Homo sapien
aaaaccactttgctgtccgtggagg

SEQ ID NO: 2084726 - DNA, 25 bp, Homo sapien
tacccaaagtctgaggctacccagg

SEQ ID NO: 2084727 - DNA, 25 bp, Homo sapien
gctacccagggcacaatttggtcca

SEQ ID NO: 2084728 - DNA, 25 bp, Homo sapien
gatgtgcagacacttaccaccctgg

SEQ ID NO: 2084729 - DNA, 25 bp, Homo sapien
gacacatttcatggtttggaggaca

SEQ ID NO: 2084730 - DNA, 25 bp, Homo sapien
aaaggttgtgctgatctcttggcca

SEQ ID NO: 2084731 - DNA, 25 bp, Homo sapien
gaattcaactctgacccatggatga

SEQ ID NO: 2084732 - DNA, 25 bp, Homo sapien
tggcatatcgggaggcaaagcactc

SEQ ID NO: 2084733 - DNA, 25 bp, Homo sapien
cacttgagaacacatggtagcacag

SEQ ID NO: 2084734 - DNA, 25 bp, Homo sapien
taaattcatcctagttgatcgggaa

SEQ ID NO: 2084735 - DNA, 25 bp, Homo sapien
tggcacccattaaagactcaacagt

SEQ ID NO: 2084736 - DNA, 25 bp, Homo sapien
gtgcaatttaatcaccgtaagggtg

SEQ ID NO: 2084737 - DNA, 25 bp, Homo sapien
ttacctgtgcgggagcgaaaaagct

SEQ ID NO: 2084738 - DNA, 25 bp, Homo sapien
cacgagcagcgcttcttaaagtcca

SEQ ID NO: 2084739 - DNA, 25 bp, Homo sapien
gccttggaaaccctcacctgctatg

SEQ ID NO: 2084740 - DNA, 25 bp, Homo sapien
caaaccctgttgcagaagatgagca

SEQ ID NO: 2084741 - DNA, 25 bp, Homo sapien
accctgtggccgtgtgattgctctg

SEQ ID NO: 2084742 - DNA, 25 bp, Homo sapien
tgtgcccattatcctgtggccgtgt

SEQ ID NO: 2084743 - DNA, 25 bp, Homo sapien
taccctgtggccgtgtgattgctct

SEQ ID NO: 2084744 - DNA, 25 bp, Homo sapien
tcctgtggccgtgtgattgctctgt

SEQ ID NO: 2084745 - DNA, 25 bp, Homo sapien
caagggcttgactggtatatatcac

SEQ ID NO: 2084746 - DNA, 25 bp, Homo sapien
gtattatccccacatatgcagaagg

SEQ ID NO: 2084747 - DNA, 25 bp, Homo sapien
tgtcaatcgttagttccctgaagga

SEQ ID NO: 2084748 - DNA, 25 bp, Homo sapien
tagcagtgccaacccactagcaagg

SEQ ID NO: 2084749 - DNA, 25 bp, Homo sapien
aagacctacatcctttgatgtttct

SEQ ID NO: 2084750 - DNA, 25 bp, Homo sapien
agacctacatcctttgatgtttctg

SEQ ID NO: 2084751 - DNA, 25 bp, Homo sapien
acctacatcctttgatgtttctgag

SEQ ID NO: 2084752 - DNA, 25 bp, Homo sapien
gacctacatcctttgatgtttctga

SEQ ID NO: 2084753 - DNA, 25 bp, Homo sapien
tgcgcttgaaaacacggagcagacg

SEQ ID NO: 2084754 - DNA, 25 bp, Homo sapien
aacggcagctgcgttcttgagcaag

SEQ ID NO: 2084755 - DNA, 25 bp, Homo sapien
gaagttagagcccttggaagcgccc

SEQ ID NO: 2084756 - DNA, 25 bp, Homo sapien
gacggcctcatttcctgaacggcag

SEQ ID NO: 2084757 - DNA, 25 bp, Homo sapien
gttcgtgaggactgcgcgtgcgcgg

SEQ ID NO: 2084758 - DNA, 25 bp, Homo sapien
aaggcggcgctgtgcgcttggcgcg

SEQ ID NO: 2084759 - DNA, 25 bp, Homo sapien
cgcttggcgcgctcgttcgtgagga

SEQ ID NO: 2084760 - DNA, 25 bp, Homo sapien
gtgggagggctctgccggaaggcgg

SEQ ID NO: 2084761 - DNA, 25 bp, Homo sapien
ggaccagccgtcaaaaagcgtctag

SEQ ID NO: 2084762 - DNA, 25 bp, Homo sapien
tggctgttactactcgatctcaggg

SEQ ID NO: 2084763 - DNA, 25 bp, Homo sapien
tttgggctcacacggcgcattttct

SEQ ID NO: 2084764 - DNA, 25 bp, Homo sapien
gtaaaccccaccatgtttgggctca

SEQ ID NO: 2084765 - DNA, 25 bp, Homo sapien
agggccgcgcagctcgaactccact

SEQ ID NO: 2084766 - DNA, 25 bp, Homo sapien
tgagggccgcgcagctcgaactcca

SEQ ID NO: 2084767 - DNA, 25 bp, Homo sapien
ggccgcgcagctcgaactccacttg

SEQ ID NO: 2084768 - DNA, 25 bp, Homo sapien
cttgagggccgcgcagctcgaactc

SEQ ID NO: 2084769 - DNA, 25 bp, Homo sapien
gggtggcctgtttgtacaagccgta

SEQ ID NO: 2084770 - DNA, 25 bp, Homo sapien
ctgtttgtacaagccgtagaccagc

SEQ ID NO: 2084771 - DNA, 25 bp, Homo sapien
cagcttctcctgatcgctcacggga

SEQ ID NO: 2084772 - DNA, 25 bp, Homo sapien
agggccggggatgtcgcagtcgccc

SEQ ID NO: 2084773 - DNA, 25 bp, Homo sapien
tcatggcgtccatcttggacgcccc

SEQ ID NO: 2084774 - DNA, 25 bp, Homo sapien
atggcgtccatcttggacgcccctt

SEQ ID NO: 2084775 - DNA, 25 bp, Homo sapien
tggcgtccatcttggacgccccttt

SEQ ID NO: 2084776 - DNA, 25 bp, Homo sapien
catggcgtccatcttggacgcccct

SEQ ID NO: 2084777 - DNA, 25 bp, Homo sapien
acgcccctttgttcgcgctccacgc

SEQ ID NO: 2084778 - DNA, 25 bp, Homo sapien
cgcccctttgttcgcgctccacgcc

SEQ ID NO: 2084779 - DNA, 25 bp, Homo sapien
tcctccactttggccgcgtagcccc

SEQ ID NO: 2084780 - DNA, 25 bp, Homo sapien
gtccatcttggacgcccctttgttc

SEQ ID NO: 2084781 - DNA, 25 bp, Homo sapien
tcatggcgtccatcttggacgcccc

SEQ ID NO: 2084782 - DNA, 25 bp, Homo sapien
tcttggacgcccctttgttcgcgct

SEQ ID NO: 2084783 - DNA, 25 bp, Homo sapien
tggcgtccatcttggacgccccttt

SEQ ID NO: 2084784 - DNA, 25 bp, Homo sapien
tcctccactttggccgcgtagcccc

SEQ ID NO: 2084785 - DNA, 25 bp, Homo sapien
ctttggccgcgtagcccctcatggc

SEQ ID NO: 2084786 - DNA, 25 bp, Homo sapien
tttggccgcgtagcccctcatggcg

SEQ ID NO: 2084787 - DNA, 25 bp, Homo sapien
gtagcccctcatggcgtccatcttg

SEQ ID NO: 2084788 - DNA, 25 bp, Homo sapien
ctcatggcgtccatcttggacgccc

SEQ ID NO: 2084789 - DNA, 25 bp, Homo sapien
gtccatcttggacgcccctttgttc

SEQ ID NO: 2084790 - DNA, 25 bp, Homo sapien
tcatggcgtccatcttggacgcccc

SEQ ID NO: 2084791 - DNA, 25 bp, Homo sapien
tcttggacgcccctttgttcgcgct

SEQ ID NO: 2084792 - DNA, 25 bp, Homo sapien
tggcgtccatcttggacgccccttt

SEQ ID NO: 2084793 - DNA, 25 bp, Homo sapien
tagtctgtgtatttggacgcctccc

SEQ ID NO: 2084794 - DNA, 25 bp, Homo sapien
taagcttgcgacagtttcaggacat

SEQ ID NO: 2084795 - DNA, 25 bp, Homo sapien
tcagccatcaaggtctaagaagccc

SEQ ID NO: 2084796 - DNA, 25 bp, Homo sapien
taagtacagaatagtcccgggaaca

SEQ ID NO: 2084797 - DNA, 25 bp, Homo sapien
caccgtagacctgcctttctggata

SEQ ID NO: 2084798 - DNA, 25 bp, Homo sapien
aatcccatatgccaccgtagacctg

SEQ ID NO: 2084799 - DNA, 25 bp, Homo sapien
gaagatagtttctattaaagaagaa

SEQ ID NO: 2084800 - DNA, 25 bp, Homo sapien
agtaccaggaaatcccatatgccac

SEQ ID NO: 2084801 - DNA, 25 bp, Homo sapien
acagagtggtctggctatgtggaca

SEQ ID NO: 2084802 - DNA, 25 bp, Homo sapien
cataacattcgccaaagaagagagg

SEQ ID NO: 2084803 - DNA, 25 bp, Homo sapien
ggaacagttatgcattcagctcagt

SEQ ID NO: 2084804 - DNA, 25 bp, Homo sapien
tacatctatgttttgtctcggctgg

SEQ ID NO: 2084805 - DNA, 25 bp, Homo sapien
taatcactcgaaatggaattatatt

SEQ ID NO: 2084806 - DNA, 25 bp, Homo sapien
caacaaataggttttaatcactcga

SEQ ID NO: 2084807 - DNA, 25 bp, Homo sapien
caaataggttttaatcactcgaaat

SEQ ID NO: 2084808 - DNA, 25 bp, Homo sapien
taggttttaatcactcgaaatggaa

SEQ ID NO: 2084809 - DNA, 25 bp, Homo sapien
ctgtgcgagcttctttctgtgtata

SEQ ID NO: 2084810 - DNA, 25 bp, Homo sapien
tgtgtgacgttgctgcacgcctgac

SEQ ID NO: 2084811 - DNA, 25 bp, Homo sapien
aaatggattaaacgatttcttcagc

SEQ ID NO: 2084812 - DNA, 25 bp, Homo sapien
tttaatcccgacagaacatcatgtg

SEQ ID NO: 2084813 - DNA, 25 bp, Homo sapien
tcattggtgcaatcaagcgatcctt

SEQ ID NO: 2084814 - DNA, 25 bp, Homo sapien
ccacgagaggtccagtaggtctaca

SEQ ID NO: 2084815 - DNA, 25 bp, Homo sapien
gatcggaccatcgtttgtccacgag

SEQ ID NO: 2084816 - DNA, 25 bp, Homo sapien
caaacagtcatcgaaagtgatcgga

SEQ ID NO: 2084817 - DNA, 25 bp, Homo sapien
gctcaacatacatcggcacaaagaa

SEQ ID NO: 2084818 - DNA, 25 bp, Homo sapien
aagtgtgtgcaaggttatctgctgc

SEQ ID NO: 2084819 - DNA, 25 bp, Homo sapien
tgataaccttaccacccagatatta

SEQ ID NO: 2084820 - DNA, 25 bp, Homo sapien
taataacccagcgtttgagcacgat

SEQ ID NO: 2084821 - DNA, 25 bp, Homo sapien
tcaggatggacaggtcggcattgct

SEQ ID NO: 2084822 - DNA, 25 bp, Homo sapien
tgctgcagtaagatgggagctcact

SEQ ID NO: 2084823 - DNA, 25 bp, Homo sapien
gatggcacatgtttgcgaagccgct

SEQ ID NO: 2084824 - DNA, 25 bp, Homo sapien
gccaggattcgagttgacgtctaaa

SEQ ID NO: 2084825 - DNA, 25 bp, Homo sapien
cccttcgtggactgggctgtacggt

SEQ ID NO: 2084826 - DNA, 25 bp, Homo sapien
tgagacccgggctgcgtcacgaaag

SEQ ID NO: 2084827 - DNA, 25 bp, Homo sapien
ctagtgacgtcacggcccgtggcgc

SEQ ID NO: 2084828 - DNA, 25 bp, Homo sapien
cgccgtcggcggctagtgacgtcac

SEQ ID NO: 2084829 - DNA, 25 bp, Homo sapien
tgcagcaacggtcgcacgacaaacc

SEQ ID NO: 2084830 - DNA, 25 bp, Homo sapien
aacggtcgcacgacaaacctcgcgg

SEQ ID NO: 2084831 - DNA, 25 bp, Homo sapien
gtcgcacgacaaacctcgcgggtct

SEQ ID NO: 2084832 - DNA, 25 bp, Homo sapien
acctcgcgggtctcaccagcgccgc

SEQ ID NO: 2084833 - DNA, 25 bp, Homo sapien
cctgtccccgggataagctttatcg

SEQ ID NO: 2084834 - DNA, 25 bp, Homo sapien
gttgtttctctcgttgctcctgggc

SEQ ID NO: 2084835 - DNA, 25 bp, Homo sapien
ttcccaggagcgcgcttctgttcca

SEQ ID NO: 2084836 - DNA, 25 bp, Homo sapien
tttatcgtagcgaagcccagactct

SEQ ID NO: 2084837 - DNA, 25 bp, Homo sapien
gagagcgtctgaaatgagcctgcga

SEQ ID NO: 2084838 - DNA, 25 bp, Homo sapien
tccagccttgagagcgtctgaaatg

SEQ ID NO: 2084839 - DNA, 25 bp, Homo sapien
gcctgcgaccttccagcaggatctt

SEQ ID NO: 2084840 - DNA, 25 bp, Homo sapien
tgagcctgcgaccttccagcaggat

SEQ ID NO: 2084841 - DNA, 25 bp, Homo sapien
cctgggtgacagaacaagacaaaaa

SEQ ID NO: 2084842 - DNA, 25 bp, Homo sapien
tgggtgacagaacaagacaaaaaaa

SEQ ID NO: 2084843 - DNA, 25 bp, Homo sapien
ctgggtgacagaacaagacaaaaaa

SEQ ID NO: 2084844 - DNA, 25 bp, Homo sapien
ggttcttcctagagaccataaagag

SEQ ID NO: 2084845 - DNA, 25 bp, Homo sapien
cacaaatgatagtgaaaaacgggtt

SEQ ID NO: 2084846 - DNA, 25 bp, Homo sapien
taaattgtggcttgtacctcgcttc

SEQ ID NO: 2084847 - DNA, 25 bp, Homo sapien
caccacattggcagaggttttgcaa

SEQ ID NO: 2084848 - DNA, 25 bp, Homo sapien
atcttaacatggtcaggcttggcaa

SEQ ID NO: 2084849 - DNA, 25 bp, Homo sapien
cttaacatggtcaggcttggcaaaa

SEQ ID NO: 2084850 - DNA, 25 bp, Homo sapien
tcttaacatggtcaggcttggcaaa

SEQ ID NO: 2084851 - DNA, 25 bp, Homo sapien
cactatgcctggcctttgatgtcct

SEQ ID NO: 2084852 - DNA, 25 bp, Homo sapien
tatgcctggcctttgatgtccttac

SEQ ID NO: 2084853 - DNA, 25 bp, Homo sapien
ctatgcctggcctttgatgtcctta

SEQ ID NO: 2084854 - DNA, 25 bp, Homo sapien
actatgcctggcctttgatgtcctt

SEQ ID NO: 2084855 - DNA, 25 bp, Homo sapien
taaaggccacagttgtcagccacat

SEQ ID NO: 2084856 - DNA, 25 bp, Homo sapien
gataatgggcatccggaaatgtgcg

SEQ ID NO: 2084857 - DNA, 25 bp, Homo sapien
gaaaagcaggatgcttgccgccatg

SEQ ID NO: 2084858 - DNA, 25 bp, Homo sapien
tcagccacatagacccgagtgtcag

SEQ ID NO: 2084859 - DNA, 25 bp, Homo sapien
cctgtaactgtatgacggcatcaca

SEQ ID NO: 2084860 - DNA, 25 bp, Homo sapien
tagctggtgcttggcgattacaaac

SEQ ID NO: 2084861 - DNA, 25 bp, Homo sapien
tgtggctgtgacctatagctggtgc

SEQ ID NO: 2084862 - DNA, 25 bp, Homo sapien
tcaaaatcagtgacgcgacaggaag

SEQ ID NO: 2084863 - DNA, 25 bp, Homo sapien
tggacacctatgctttgcccagagt

SEQ ID NO: 2084864 - DNA, 25 bp, Homo sapien
ccctgcagtacagctggtgattttc

SEQ ID NO: 2084865 - DNA, 25 bp, Homo sapien
gagtgatttcaacgctctctgcccc

SEQ ID NO: 2084866 - DNA, 25 bp, Homo sapien
ccagagccctggaaccttggatggg

SEQ ID NO: 2084867 - DNA, 25 bp, Homo sapien
tgtggtgagacgagaactgacccat

SEQ ID NO: 2084868 - DNA, 25 bp, Homo sapien
tctcagctgctcgaatgtaacatgg

SEQ ID NO: 2084869 - DNA, 25 bp, Homo sapien
ttcctgaagcttcgggaggacctgg

SEQ ID NO: 2084870 - DNA, 25 bp, Homo sapien
tctcagccgtggagcatcaagcagg

SEQ ID NO: 2084871 - DNA, 25 bp, Homo sapien
gacaggtaagtatgcctactgccat

SEQ ID NO: 2084872 - DNA, 25 bp, Homo sapien
taggtacacctcgtatgtgagcgca

SEQ ID NO: 2084873 - DNA, 25 bp, Homo sapien
aacatgagggcgttctaggtacacc

SEQ ID NO: 2084874 - DNA, 25 bp, Homo sapien
gcggctgcgcaagggaaaattcttt

SEQ ID NO: 2084875 - DNA, 25 bp, Homo sapien
tgacggtgccgttgccctgggcagg

SEQ ID NO: 2084876 - DNA, 25 bp, Homo sapien
gagcgagggcacacgctgttgacgg

SEQ ID NO: 2084877 - DNA, 25 bp, Homo sapien
cgctgttgacggtgccgttgccctg

SEQ ID NO: 2084878 - DNA, 25 bp, Homo sapien
agcgagggcacacgctgttgacggt

SEQ ID NO: 2084879 - DNA, 25 bp, Homo sapien
gtgaaaacgccactctgtggttccc

SEQ ID NO: 2084880 - DNA, 25 bp, Homo sapien
cggctgtgaaaacgccactctgtgg

SEQ ID NO: 2084881 - DNA, 25 bp, Homo sapien
gggcggctgtgaaaacgccactctg

SEQ ID NO: 2084882 - DNA, 25 bp, Homo sapien
ctgtgaaaacgccactctgtggttc

SEQ ID NO: 2084883 - DNA, 25 bp, Homo sapien
cgaagtgggtggcatgataatcccc

SEQ ID NO: 2084884 - DNA, 25 bp, Homo sapien
tcgatagtgagaggtcgtaaaggcc

SEQ ID NO: 2084885 - DNA, 25 bp, Homo sapien
gttgctaattggaagcaggttcagc

SEQ ID NO: 2084886 - DNA, 25 bp, Homo sapien
tccaccttcagattcttgttgctaa

SEQ ID NO: 2084887 - DNA, 25 bp, Homo sapien
tgctgtccttgatcacaaaagttgt

SEQ ID NO: 2084888 - DNA, 25 bp, Homo sapien
tctctcctggtttgacttggccctg

SEQ ID NO: 2084889 - DNA, 25 bp, Homo sapien
gcttgtggtcctgtgctctatcggg

SEQ ID NO: 2084890 - DNA, 25 bp, Homo sapien
gccctggacggagggtgaatcctca

SEQ ID NO: 2084891 - DNA, 25 bp, Homo sapien
ggcctcttacttgggctgacctgac

SEQ ID NO: 2084892 - DNA, 25 bp, Homo sapien
gccttttcctaagcaccagcggaag

SEQ ID NO: 2084893 - DNA, 25 bp, Homo sapien
gatggacggcttcggccaagcgttt

SEQ ID NO: 2084894 - DNA, 25 bp, Homo sapien
tctgccagccaagaccattgatttg

SEQ ID NO: 2084895 - DNA, 25 bp, Homo sapien
gcagcggcagagtccaccgtgtttg

SEQ ID NO: 2084896 - DNA, 25 bp, Homo sapien
tgaggacgtccttttctaagcaaca

SEQ ID NO: 2084897 - DNA, 25 bp, Homo sapien
tcttcctcggtctgagagaaaagca

SEQ ID NO: 2084898 - DNA, 25 bp, Homo sapien
tgagaaagggcctccgcttagagct

SEQ ID NO: 2084899 - DNA, 25 bp, Homo sapien
cgagcctcatggatggacacagcgg

SEQ ID NO: 2084900 - DNA, 25 bp, Homo sapien
cctggcccggattccctttgggctg

SEQ ID NO: 2084901 - DNA, 25 bp, Homo sapien
tactctgaggaaggaccttgccggg

SEQ ID NO: 2084902 - DNA, 25 bp, Homo sapien
aatttcagaaacaccctactctgag

SEQ ID NO: 2084903 - DNA, 25 bp, Homo sapien
cacggtcttgacagtgtctctgctt

SEQ ID NO: 2084904 - DNA, 25 bp, Homo sapien
acggtcttgacagtgtctctgcttt

SEQ ID NO: 2084905 - DNA, 25 bp, Homo sapien
gggcagtggcttgatctgctggtca

SEQ ID NO: 2084906 - DNA, 25 bp, Homo sapien
ggcagtggcttgatctgctggtcat

SEQ ID NO: 2084907 - DNA, 25 bp, Homo sapien
tggggcagtggcttgatctgctggt

SEQ ID NO: 2084908 - DNA, 25 bp, Homo sapien
actggggcagtggcttgatctgctg

SEQ ID NO: 2084909 - DNA, 25 bp, Homo sapien
cacgacagtgttggtccgagtacgt

SEQ ID NO: 2084910 - DNA, 25 bp, Homo sapien
tgacgtcttcacgaacacgacagtg

SEQ ID NO: 2084911 - DNA, 25 bp, Homo sapien
agtacgtgtcatttcgtacgagggc

SEQ ID NO: 2084912 - DNA, 25 bp, Homo sapien
tccgtactgagctccacgggaagtc

SEQ ID NO: 2084913 - DNA, 25 bp, Homo sapien
cactggccctcattgtacggatgga

SEQ ID NO: 2084914 - DNA, 25 bp, Homo sapien
tcgccctcatcgtacggatgggtgt

SEQ ID NO: 2084915 - DNA, 25 bp, Homo sapien
gataacaggccctgcgctttgcaga

SEQ ID NO: 2084916 - DNA, 25 bp, Homo sapien
tggccctcatcatatggatggatgt

SEQ ID NO: 2084917 - DNA, 25 bp, Homo sapien
gcacccggcccatggtggattctaa

SEQ ID NO: 2084918 - DNA, 25 bp, Homo sapien
atatgattgggacacggagcacagc

SEQ ID NO: 2084919 - DNA, 25 bp, Homo sapien
tggccagaatcttatcccaaaggtt

SEQ ID NO: 2084920 - DNA, 25 bp, Homo sapien
gtttcatcactcagagtctttgggc

SEQ ID NO: 2084921 - DNA, 25 bp, Homo sapien
catccagagaggattccgagaggaa

SEQ ID NO: 2084922 - DNA, 25 bp, Homo sapien
ccagagaggattccgagaggaaaga

SEQ ID NO: 2084923 - DNA, 25 bp, Homo sapien
gagaggattccgagaggaaagacat

SEQ ID NO: 2084924 - DNA, 25 bp, Homo sapien
ccatccagagaggattccgagagga

SEQ ID NO: 2084925 - DNA, 25 bp, Homo sapien
taggatagttccaaccacagccttg

SEQ ID NO: 2084926 - DNA, 25 bp, Homo sapien
gatagttccaaccacagccttggag

SEQ ID NO: 2084927 - DNA, 25 bp, Homo sapien
aaccacagccttggagtctttcagc

SEQ ID NO: 2084928 - DNA, 25 bp, Homo sapien
ccttggagtctttcagcagaaccca

SEQ ID NO: 2084929 - DNA, 25 bp, Homo sapien
gttggtcactgtagaagcgtttctg

SEQ ID NO: 2084930 - DNA, 25 bp, Homo sapien
cagtcccgtcccttttgatatgtgt

SEQ ID NO: 2084931 - DNA, 25 bp, Homo sapien
gtagaagcgtttctggcctgcattc

SEQ ID NO: 2084932 - DNA, 25 bp, Homo sapien
tcccagtcccgtcccttttgatatg

SEQ ID NO: 2084933 - DNA, 25 bp, Homo sapien
cagatttgctggactttctcgttgg

SEQ ID NO: 2084934 - DNA, 25 bp, Homo sapien
gtgtttcagatttgctggactttct

SEQ ID NO: 2084935 - DNA, 25 bp, Homo sapien
gatttgctggactttctcgttggca

SEQ ID NO: 2084936 - DNA, 25 bp, Homo sapien
cggtgtttcagatttgctggacttt

SEQ ID NO: 2084937 - DNA, 25 bp, Homo sapien
tgggggctgacgaatcccaccggtg

SEQ ID NO: 2084938 - DNA, 25 bp, Homo sapien
tgtgggggctgacgaatcccaccgg

SEQ ID NO: 2084939 - DNA, 25 bp, Homo sapien
ctgtgggggctgacgaatcccaccg

SEQ ID NO: 2084940 - DNA, 25 bp, Homo sapien
tgatcccacagatttgcagcagctg

SEQ ID NO: 2084941 - DNA, 25 bp, Homo sapien
tgctctcgggaactgggacttctcg

SEQ ID NO: 2084942 - DNA, 25 bp, Homo sapien
ggatgaatcctacatctgcgttggc

SEQ ID NO: 2084943 - DNA, 25 bp, Homo sapien
ggacttctcggaaatcaccaggctg

SEQ ID NO: 2084944 - DNA, 25 bp, Homo sapien
cagatcagtgctagccgggaaaatg

SEQ ID NO: 2084945 - DNA, 25 bp, Homo sapien
agaagggcccacagatcagtgctag

SEQ ID NO: 2084946 - DNA, 25 bp, Homo sapien
tgctagccgggaaaatgtctttctt

SEQ ID NO: 2084947 - DNA, 25 bp, Homo sapien
gcccacagatcagtgctagccggga

SEQ ID NO: 2084948 - DNA, 25 bp, Homo sapien
ctggttggaactagcgactgtttct

SEQ ID NO: 2084949 - DNA, 25 bp, Homo sapien
ggaactagcgactgtttctgtataa

SEQ ID NO: 2084950 - DNA, 25 bp, Homo sapien
actagcgactgtttctgtataaaat

SEQ ID NO: 2084951 - DNA, 25 bp, Homo sapien
gttggaactagcgactgtttctgta

SEQ ID NO: 2084952 - DNA, 25 bp, Homo sapien
tcagcatccccatttattgagtatc

SEQ ID NO: 2084953 - DNA, 25 bp, Homo sapien
ttgagtatctctcacgtgtaaggca

SEQ ID NO: 2084954 - DNA, 25 bp, Homo sapien
agctggtagcacacatcagcatcca

SEQ ID NO: 2084955 - DNA, 25 bp, Homo sapien
aggagctggtagcacacatcagcat

SEQ ID NO: 2084956 - DNA, 25 bp, Homo sapien
tgtgagtttgctcacggccaccttc

SEQ ID NO: 2084957 - DNA, 25 bp, Homo sapien
cttccttggacccacaggtcggagc

SEQ ID NO: 2084958 - DNA, 25 bp, Homo sapien
acccacaggtcggagcagtggactg

SEQ ID NO: 2084959 - DNA, 25 bp, Homo sapien
cggagcagtggactgacttttctca

SEQ ID NO: 2084960 - DNA, 25 bp, Homo sapien
cttgtctgcagaagaaacctcccgc

SEQ ID NO: 2084961 - DNA, 25 bp, Homo sapien
ctaagggacgtgtggccattcatct

SEQ ID NO: 2084962 - DNA, 25 bp, Homo sapien
catcttgtctgcagaagaaacctcc

SEQ ID NO: 2084963 - DNA, 25 bp, Homo sapien
ctcgggagtgtgctctaagggacgt

SEQ ID NO: 2084964 - DNA, 25 bp, Homo sapien
catcgtccgggtctgattcactggg

SEQ ID NO: 2084965 - DNA, 25 bp, Homo sapien
ctcccgacggagaagctgtttgtgt

SEQ ID NO: 2084966 - DNA, 25 bp, Homo sapien
tctttaaagcggtcagcctgtccca

SEQ ID NO: 2084967 - DNA, 25 bp, Homo sapien
tccgaaggcctcagcagttttaagt

SEQ ID NO: 2084968 - DNA, 25 bp, Homo sapien
gaacctttgagcatgatggcccctg

SEQ ID NO: 2084969 - DNA, 25 bp, Homo sapien
tagagccctgtctgttagcccacag

SEQ ID NO: 2084970 - DNA, 25 bp, Homo sapien
cacgatgtcacgaattagagccctg

SEQ ID NO: 2084971 - DNA, 25 bp, Homo sapien
cacgctgtgcaatggtcgctgtgca

SEQ ID NO: 2084972 - DNA, 25 bp, Homo sapien
taaccacatggctccgaggttctgc

SEQ ID NO: 2084973 - DNA, 25 bp, Homo sapien
tcaggatgaattgggctccatgtca

SEQ ID NO: 2084974 - DNA, 25 bp, Homo sapien
gatacatcagaagatttgcttggac

SEQ ID NO: 2084975 - DNA, 25 bp, Homo sapien
gtggcttcaccacagtgggcactgt

SEQ ID NO: 2084976 - DNA, 25 bp, Homo sapien
aaaccttcgtcgctgtggccacttg

SEQ ID NO: 2084977 - DNA, 25 bp, Homo sapien
gaacggcagcttcccaagttggtga

SEQ ID NO: 2084978 - DNA, 25 bp, Homo sapien
tgaatcggacgctgccttgtgactg

SEQ ID NO: 2084979 - DNA, 25 bp, Homo sapien
tttggtgacgagcatatgaacggca

SEQ ID NO: 2084980 - DNA, 25 bp, Homo sapien
ccagggcgtttgagatgcttcctct

SEQ ID NO: 2084981 - DNA, 25 bp, Homo sapien
ttccagggcgtttgagatgcttcct

SEQ ID NO: 2084982 - DNA, 25 bp, Homo sapien
gcttccagggagttgagatgcttcc

SEQ ID NO: 2084983 - DNA, 25 bp, Homo sapien
tccagggcgtttgagatgcttcctc

SEQ ID NO: 2084984 - DNA, 25 bp, Homo sapien
ggggacagggcaggacggcccagtg

SEQ ID NO: 2084985 - DNA, 25 bp, Homo sapien
gacagggcaggacggcccagtgagg

SEQ ID NO: 2084986 - DNA, 25 bp, Homo sapien
ggcaggacggcccagtgaggcagca

SEQ ID NO: 2084987 - DNA, 25 bp, Homo sapien
gcaggacggcccagtgaggcagcat

SEQ ID NO: 2084988 - DNA, 25 bp, Homo sapien
actaccagcagttgcttaagactca

SEQ ID NO: 2084989 - DNA, 25 bp, Homo sapien
ctaccagcagttgcttaagactcat

SEQ ID NO: 2084990 - DNA, 25 bp, Homo sapien
cactaccagcagttgcttaagactc

SEQ ID NO: 2084991 - DNA, 25 bp, Homo sapien
ttttaagacgttgtcctctgtcacg

SEQ ID NO: 2084992 - DNA, 25 bp, Homo sapien
tctgtcacgcgctgttttccgttag

SEQ ID NO: 2084993 - DNA, 25 bp, Homo sapien
ttccgttagtccacttcagaggcat

SEQ ID NO: 2084994 - DNA, 25 bp, Homo sapien
taagacgttgtcctctgtcacgcgc

SEQ ID NO: 2084995 - DNA, 25 bp, Homo sapien
cctttgagaggacacactattggca

SEQ ID NO: 2084996 - DNA, 25 bp, Homo sapien
gaactccccggtgactgcaaattaa

SEQ ID NO: 2084997 - DNA, 25 bp, Homo sapien
caaagccgtatatcaagtgcaaagc

SEQ ID NO: 2084998 - DNA, 25 bp, Homo sapien
gactgggttgaccattccaaggagt

SEQ ID NO: 2084999 - DNA, 25 bp, Homo sapien
ctgttgctctctgtctgtcgtgttg

SEQ ID NO: 2085000 - DNA, 25 bp, Homo sapien
caggggccgacatcttcatctgtga

SEQ ID NO: 2085001 - DNA, 25 bp, Homo sapien
tgctctctgtctgtcgtgttgagga

SEQ ID NO: 2085002 - DNA, 25 bp, Homo sapien
ggcaggggccgacatcttcatctgt

SEQ ID NO: 2085003 - DNA, 25 bp, Homo sapien
tccatttctgttgccgacgtgccag

SEQ ID NO: 2085004 - DNA, 25 bp, Homo sapien
ttcctgtttgatactctgctttctg

SEQ ID NO: 2085005 - DNA, 25 bp, Homo sapien
aaagtgggcctagagttttgctgga

SEQ ID NO: 2085006 - DNA, 25 bp, Homo sapien
ccaggatttctagcaaagtgggcct

SEQ ID NO: 2085007 - DNA, 25 bp, Homo sapien
cgtgttacaataacacgttttctag

SEQ ID NO: 2085008 - DNA, 25 bp, Homo sapien
ctcgtgttacaataacacgttttct

SEQ ID NO: 2085009 - DNA, 25 bp, Homo sapien
gttacaataacacgttttctagcat

SEQ ID NO: 2085010 - DNA, 25 bp, Homo sapien
tgttacaataacacgttttctagca

SEQ ID NO: 2085011 - DNA, 25 bp, Homo sapien
cccacgatacgaggaggtgctgtag

SEQ ID NO: 2085012 - DNA, 25 bp, Homo sapien
ctgtaacccacgatacgaggaggtg

SEQ ID NO: 2085013 - DNA, 25 bp, Homo sapien
gaggtgctgtagaaagccgtttgac

SEQ ID NO: 2085014 - DNA, 25 bp, Homo sapien
aagccgtttgactgcgtcctcccaa

SEQ ID NO: 2085015 - DNA, 25 bp, Homo sapien
agcccgtgtctgagggccgcgtggg

SEQ ID NO: 2085016 - DNA, 25 bp, Homo sapien
gaatgcggggattccgaggacgacg

SEQ ID NO: 2085017 - DNA, 25 bp, Homo sapien
tgagggccgcgtgggacgaatgcgg

SEQ ID NO: 2085018 - DNA, 25 bp, Homo sapien
tgcggggattccgaggacgacgtag

SEQ ID NO: 2085019 - DNA, 25 bp, Homo sapien
tgggtagttgctctggatgggtgat

SEQ ID NO: 2085020 - DNA, 25 bp, Homo sapien
ctggatgggtgatgaaggcaccaag

SEQ ID NO: 2085021 - DNA, 25 bp, Homo sapien
ccgtggaagtgggtagttgctctgg

SEQ ID NO: 2085022 - DNA, 25 bp, Homo sapien
gaagtgggtagttgctctggatggg

SEQ ID NO: 2085023 - DNA, 25 bp, Homo sapien
gccaggagaggtgcgggaagcgttt

SEQ ID NO: 2085024 - DNA, 25 bp, Homo sapien
gagagccggcttgtgagtgcggaga

SEQ ID NO: 2085025 - DNA, 25 bp, Homo sapien
tggaccggaacaagatgacgggttc

SEQ ID NO: 2085026 - DNA, 25 bp, Homo sapien
gaagcgtttcgaggaaaagatggaa

SEQ ID NO: 2085027 - DNA, 25 bp, Homo sapien
tcatgtggttcccggcgtccccgtg

SEQ ID NO: 2085028 - DNA, 25 bp, Homo sapien
cgtccccgtgacagcgtgacctgtt

SEQ ID NO: 2085029 - DNA, 25 bp, Homo sapien
gtgggctgccagctcggatgccttt

SEQ ID NO: 2085030 - DNA, 25 bp, Homo sapien
tgatgtctgtctccaggatacttcc

SEQ ID NO: 2085031 - DNA, 25 bp, Homo sapien
ccccagaggtagctgtccttaaact

SEQ ID NO: 2085032 - DNA, 25 bp, Homo sapien
ccagaggtagctgtccttaaactaa

SEQ ID NO: 2085033 - DNA, 25 bp, Homo sapien
cagaggtagctgtccttaaactaaa

SEQ ID NO: 2085034 - DNA, 25 bp, Homo sapien
tcccccagaggtagctgtccttaaa

SEQ ID NO: 2085035 - DNA, 25 bp, Homo sapien
gctgctctgggctatgtgacttcaa

SEQ ID NO: 2085036 - DNA, 25 bp, Homo sapien
gctgctacgcagaaggccattgcaa

SEQ ID NO: 2085037 - DNA, 25 bp, Homo sapien
tctgggttcttcttcagcgacggcc

SEQ ID NO: 2085038 - DNA, 25 bp, Homo sapien
cctgtccttgtaccaaaagcagaag

SEQ ID NO: 2085039 - DNA, 25 bp, Homo sapien
tgtgatgtgagttcatggctgcgcc

SEQ ID NO: 2085040 - DNA, 25 bp, Homo sapien
tggtgaattcatggctgcgccctgg

SEQ ID NO: 2085041 - DNA, 25 bp, Homo sapien
catggctgcgccctggaatcttgtt

SEQ ID NO: 2085042 - DNA, 25 bp, Homo sapien
gatgtgagttcatggctgcgccctg

SEQ ID NO: 2085043 - DNA, 25 bp, Homo sapien
ggtgtgatgtgagttcatggctgca

SEQ ID NO: 2085044 - DNA, 25 bp, Homo sapien
tggaatcttgttcactgtaaatcca

SEQ ID NO: 2085045 - DNA, 25 bp, Homo sapien
ggaaggtgtgatgtgagttcatggc

SEQ ID NO: 2085046 - DNA, 25 bp, Homo sapien
tgttcactgtaaatccaggaaggtg

SEQ ID NO: 2085047 - DNA, 25 bp, Homo sapien
ggtgtttggtgaattcatggctgca

SEQ ID NO: 2085048 - DNA, 25 bp, Homo sapien
aatccagggaggtgtttggtgaatt

SEQ ID NO: 2085049 - DNA, 25 bp, Homo sapien
cccactgtaaatccagggaggtgtt

SEQ ID NO: 2085050 - DNA, 25 bp, Homo sapien
gtgtttggtgaattcatggctgcac

SEQ ID NO: 2085051 - DNA, 25 bp, Homo sapien
aaacgatgaagtatgttggtgcagg

SEQ ID NO: 2085052 - DNA, 25 bp, Homo sapien
tattttaaaacgatgaagtatgttg

SEQ ID NO: 2085053 - DNA, 25 bp, Homo sapien
tttaaaacgatgaagtatgttggtg

SEQ ID NO: 2085054 - DNA, 25 bp, Homo sapien
taaaacgatgaagtatgttggtgca

SEQ ID NO: 2085055 - DNA, 25 bp, Homo sapien
gcttggtgaacacagcgcagggcct

SEQ ID NO: 2085056 - DNA, 25 bp, Homo sapien
gggagccccacgcttggtgaacaca

SEQ ID NO: 2085057 - DNA, 25 bp, Homo sapien
aaaacagctccagttggaggcagtc

SEQ ID NO: 2085058 - DNA, 25 bp, Homo sapien
agggcctttgcagccgactgggaaa

SEQ ID NO: 2085059 - DNA, 25 bp, Homo sapien
gttgtgctgctgatacgtggctgaa

SEQ ID NO: 2085060 - DNA, 25 bp, Homo sapien
gccgactggctttcccggttgtgct

SEQ ID NO: 2085061 - DNA, 25 bp, Homo sapien
ccgactggctttcccggttgtgctg

SEQ ID NO: 2085062 - DNA, 25 bp, Homo sapien
ctgctgatacgtggctgaaccagga

SEQ ID NO: 2085063 - DNA, 25 bp, Homo sapien
ggcgtgtatcgtctctcctcatgcg

SEQ ID NO: 2085064 - DNA, 25 bp, Homo sapien
gccctgagtgctggcgtgtatcgtc

SEQ ID NO: 2085065 - DNA, 25 bp, Homo sapien
gagtgctggcgtgtatcgtctctcc

SEQ ID NO: 2085066 - DNA, 25 bp, Homo sapien
gtgtatcgtctctcctcatgcggcc

SEQ ID NO: 2085067 - DNA, 25 bp, Homo sapien
ggacgctgccggtgcatgatcatga

SEQ ID NO: 2085068 - DNA, 25 bp, Homo sapien
gacgctgccggtgcatgatcatgac

SEQ ID NO: 2085069 - DNA, 25 bp, Homo sapien
ctgccggtgcatgatcatgacaagc

SEQ ID NO: 2085070 - DNA, 25 bp, Homo sapien
cgctgccggtgcatgatcatgacaa

SEQ ID NO: 2085071 - DNA, 25 bp, Homo sapien
taaaattctagaagcacatgccgag

SEQ ID NO: 2085072 - DNA, 25 bp, Homo sapien
ttcataagcgattgaggattggacc

SEQ ID NO: 2085073 - DNA, 25 bp, Homo sapien
taatgcggagtactagggttctacc

SEQ ID NO: 2085074 - DNA, 25 bp, Homo sapien
caagagttgacagcagtagctccta

SEQ ID NO: 2085075 - DNA, 25 bp, Homo sapien
ccccacagtgtgaccgtccgtggta

SEQ ID NO: 2085076 - DNA, 25 bp, Homo sapien
tgtgaccgtccgtggtacctgccgg

SEQ ID NO: 2085077 - DNA, 25 bp, Homo sapien
cccccccacagtgtgaccgtccgtg

SEQ ID NO: 2085078 - DNA, 25 bp, Homo sapien
ccccccacagtgtgaccgtccgtgg

SEQ ID NO: 2085079 - DNA, 25 bp, Homo sapien
gggcagcaggaacctgtcgtccgtg

SEQ ID NO: 2085080 - DNA, 25 bp, Homo sapien
gcaggaacctgtcgtccgtggtacc

SEQ ID NO: 2085081 - DNA, 25 bp, Homo sapien
cagcaggaacctgtcgtccgtggta

SEQ ID NO: 2085082 - DNA, 25 bp, Homo sapien
aggaacctgtcgtccgtggtacctg

SEQ ID NO: 2085083 - DNA, 25 bp, Homo sapien
gtgttgagggacagctgcgacctga

SEQ ID NO: 2085084 - DNA, 25 bp, Homo sapien
gaggaagtcactggaacctgagcag

SEQ ID NO: 2085085 - DNA, 25 bp, Homo sapien
acagctgcgacctgagcacctggca

SEQ ID NO: 2085086 - DNA, 25 bp, Homo sapien
agcccccttcccgagtggtgttgag

SEQ ID NO: 2085087 - DNA, 25 bp, Homo sapien
tcctggccatacatcaggtcgacgc

SEQ ID NO: 2085088 - DNA, 25 bp, Homo sapien
tacgtggcggggaaccacctctcca

SEQ ID NO: 2085089 - DNA, 25 bp, Homo sapien
tccagccttccgtaggggcgctcgg

SEQ ID NO: 2085090 - DNA, 25 bp, Homo sapien
agccacaccgcccgtgatgaggaac

SEQ ID NO: 2085091 - DNA, 25 bp, Homo sapien
agtcagtgtgcggttgagagtcccc

SEQ ID NO: 2085092 - DNA, 25 bp, Homo sapien
tccagaaggcgcagagcttgtactt

SEQ ID NO: 2085093 - DNA, 25 bp, Homo sapien
ctagatacgcccaatagtcagtgtg

SEQ ID NO: 2085094 - DNA, 25 bp, Homo sapien
catttgtccagaaggcgcagagctt

SEQ ID NO: 2085095 - DNA, 25 bp, Homo sapien
ggagaaccttcgatgtgaacactta

SEQ ID NO: 2085096 - DNA, 25 bp, Homo sapien
cacaaatggagtttggtcggcctca

SEQ ID NO: 2085097 - DNA, 25 bp, Homo sapien
caggaaatatcctccgaagcggcgg

SEQ ID NO: 2085098 - DNA, 25 bp, Homo sapien
tttaaattagctcccgcaaagcgtc

SEQ ID NO: 2085099 - DNA, 25 bp, Homo sapien
catcgggcggtgaggcgttaaatcc

SEQ ID NO: 2085100 - DNA, 25 bp, Homo sapien
tttccacctcgtgctgtcatcgggc

SEQ ID NO: 2085101 - DNA, 25 bp, Homo sapien
tgctgtaaatgcacggaccgggcgc

SEQ ID NO: 2085102 - DNA, 25 bp, Homo sapien
gacgcgcgagcattgtcgctgccct

SEQ ID NO: 2085103 - DNA, 25 bp, Homo sapien
tagccactgtgatgcaacggcagat

SEQ ID NO: 2085104 - DNA, 25 bp, Homo sapien
cagacaaacgagattcagattcacc

SEQ ID NO: 2085105 - DNA, 25 bp, Homo sapien
gcgagaccgctatcatgtttccaaa

SEQ ID NO: 2085106 - DNA, 25 bp, Homo sapien
catttcccaggaagcgttgcgcgtg

SEQ ID NO: 2085107 - DNA, 25 bp, Homo sapien
gcagcagattcgacaagcgtcacgt

SEQ ID NO: 2085108 - DNA, 25 bp, Homo sapien
gtcgctgcccaagcaaccctcgcgt

SEQ ID NO: 2085109 - DNA, 25 bp, Homo sapien
ttcgacaagcgtcacgttgcgggcc

SEQ ID NO: 2085110 - DNA, 25 bp, Homo sapien
ttctccccgcagcagattcgacaag

SEQ ID NO: 2085111 - DNA, 25 bp, Homo sapien
tactgcagcggagcttcggcggaac

SEQ ID NO: 2085112 - DNA, 25 bp, Homo sapien
tgacgcttgtcacccaccaggtact

SEQ ID NO: 2085113 - DNA, 25 bp, Homo sapien
ggccagcgcagccttgaaagcgcag

SEQ ID NO: 2085114 - DNA, 25 bp, Homo sapien
gaaagcgcagctttccatcgccttc

SEQ ID NO: 2085115 - DNA, 25 bp, Homo sapien
tgcagtcggtgtacggtaaggatcc

SEQ ID NO: 2085116 - DNA, 25 bp, Homo sapien
taaggatccttagggtcaaagccca

SEQ ID NO: 2085117 - DNA, 25 bp, Homo sapien
catggctcccacaatggcgaaattt

SEQ ID NO: 2085118 - DNA, 25 bp, Homo sapien
aagcccacgttggtatcgatgccag

SEQ ID NO: 2085119 - DNA, 25 bp, Homo sapien
tagctcctcccgtgatgcagccact

SEQ ID NO: 2085120 - DNA, 25 bp, Homo sapien
ctcctcccgtgatgcagccactgat

SEQ ID NO: 2085121 - DNA, 25 bp, Homo sapien
aaccaatagctcctcccgtgatgca

SEQ ID NO: 2085122 - DNA, 25 bp, Homo sapien
aatagctcctcccgtgatgcagcca

SEQ ID NO: 2085123 - DNA, 25 bp, Homo sapien
cggaggtaataatcaatcgcagcag

SEQ ID NO: 2085124 - DNA, 25 bp, Homo sapien
aaacctccacaaccaatggccccag

SEQ ID NO: 2085125 - DNA, 25 bp, Homo sapien
agcaaaacctccacaaccaatggcc

SEQ ID NO: 2085126 - DNA, 25 bp, Homo sapien
aggtaataatcaatcgcagcagaga

SEQ ID NO: 2085127 - DNA, 25 bp, Homo sapien
taattggttggacggcatcagtccg

SEQ ID NO: 2085128 - DNA, 25 bp, Homo sapien
caggtccagcagtcacgtcgtgaag

SEQ ID NO: 2085129 - DNA, 25 bp, Homo sapien
cctgccctggtattcgagacggata

SEQ ID NO: 2085130 - DNA, 25 bp, Homo sapien
gcagcaaagtgtggctaccccaaag

SEQ ID NO: 2085131 - DNA, 25 bp, Homo sapien
gaaaaaggagactcatcaccactgg

SEQ ID NO: 2085132 - DNA, 25 bp, Homo sapien
tgctgaagcccaactgtagacggat

SEQ ID NO: 2085133 - DNA, 25 bp, Homo sapien
ccacaaggtcaagtcgaaaacacga

SEQ ID NO: 2085134 - DNA, 25 bp, Homo sapien
cacagagcaccagggtaaagcagca

SEQ ID NO: 2085135 - DNA, 25 bp, Homo sapien
ggtaccaggtgggaatgtctgccct

SEQ ID NO: 2085136 - DNA, 25 bp, Homo sapien
tgaaccgatgggtactgacagccct

SEQ ID NO: 2085137 - DNA, 25 bp, Homo sapien
tatttggtcccacgtgctagactga

SEQ ID NO: 2085138 - DNA, 25 bp, Homo sapien
catctctcgagtgaataggcagcgt

SEQ ID NO: 2085139 - DNA, 25 bp, Homo sapien
ggcatgaagttgtccactgaacagg

SEQ ID NO: 2085140 - DNA, 25 bp, Homo sapien
taaattgatgtaaaccacgtgagag

SEQ ID NO: 2085141 - DNA, 25 bp, Homo sapien
ttcacaaaggcctccggatcagcca

SEQ ID NO: 2085142 - DNA, 25 bp, Homo sapien
agtcagtggcgtgaatattggctcc

SEQ ID NO: 2085143 - DNA, 25 bp, Homo sapien
cgcattgcccggtactaggaaggag

SEQ ID NO: 2085144 - DNA, 25 bp, Homo sapien
ttatagccagttacagctccccggc

SEQ ID NO: 2085145 - DNA, 25 bp, Homo sapien
tctgtgtggcagagcgtcgtttccg

SEQ ID NO: 2085146 - DNA, 25 bp, Homo sapien
agggacccgacttgcagacgcattg

SEQ ID NO: 2085147 - DNA, 25 bp, Homo sapien
agcactttctttccgcctgagtcca

SEQ ID NO: 2085148 - DNA, 25 bp, Homo sapien
tattttgcgctgtgtaactgctgcc

SEQ ID NO: 2085149 - DNA, 25 bp, Homo sapien
tcaggcagaaaaggtagtgaccggc

SEQ ID NO: 2085150 - DNA, 25 bp, Homo sapien
tagttgtgtctgatgctccgtgctg

SEQ ID NO: 2085151 - DNA, 25 bp, Homo sapien
ctggcagttcaccatcagttcaggg

SEQ ID NO: 2085152 - DNA, 25 bp, Homo sapien
cagttcaccatcagttcagggggac

SEQ ID NO: 2085153 - DNA, 25 bp, Homo sapien
gctctggcagttcaccatcagttca

SEQ ID NO: 2085154 - DNA, 25 bp, Homo sapien
agttcaccatcagttcagggggacc

SEQ ID NO: 2085155 - DNA, 25 bp, Homo sapien
tagtagcagacctgtccttagagcc

SEQ ID NO: 2085156 - DNA, 25 bp, Homo sapien
tagtcaggtccaaccaagagtggct

SEQ ID NO: 2085157 - DNA, 25 bp, Homo sapien
tagcaaagttcagaggtcctcaggc

SEQ ID NO: 2085158 - DNA, 25 bp, Homo sapien
tgtgggccacagtcaaaaaaggtga

SEQ ID NO: 2085159 - DNA, 25 bp, Homo sapien
gacttcagaaagtgccagggagcgc

SEQ ID NO: 2085160 - DNA, 25 bp, Homo sapien
tcagaattagttcgcaggtgcacag

SEQ ID NO: 2085161 - DNA, 25 bp, Homo sapien
tcccagggaggcaggttctgttgca

SEQ ID NO: 2085162 - DNA, 25 bp, Homo sapien
tacagaaacagaacgtggaacagtc

SEQ ID NO: 2085163 - DNA, 25 bp, Homo sapien
ctgtcctgttctgaggccgtaatat

SEQ ID NO: 2085164 - DNA, 25 bp, Homo sapien
tccccagttgcctccagctggaaat

SEQ ID NO: 2085165 - DNA, 25 bp, Homo sapien
aaattgtatctctcgatgttcgtgg

SEQ ID NO: 2085166 - DNA, 25 bp, Homo sapien
tatgggattttgtgcgggttttgtc

SEQ ID NO: 2085167 - DNA, 25 bp, Homo sapien
ctctggtgctgagagagggagtgtt

SEQ ID NO: 2085168 - DNA, 25 bp, Homo sapien
gtgttcttggcagacctgagccaca

SEQ ID NO: 2085169 - DNA, 25 bp, Homo sapien
gccggtgccctgatcctctggtgct

SEQ ID NO: 2085170 - DNA, 25 bp, Homo sapien
ttcttggcagacctgagccacatcc

SEQ ID NO: 2085171 - DNA, 25 bp, Homo sapien
gcctgggggcgtggacattggtggt

SEQ ID NO: 2085172 - DNA, 25 bp, Homo sapien
ctgggggcgtggacattggtggtgc

SEQ ID NO: 2085173 - DNA, 25 bp, Homo sapien
cctgggggcgtggacattggtggtg

SEQ ID NO: 2085174 - DNA, 25 bp, Homo sapien
aagcttcaagagaaggatgccacag

SEQ ID NO: 2085175 - DNA, 25 bp, Homo sapien
agcttcaagagaaggatgccacaga

SEQ ID NO: 2085176 - DNA, 25 bp, Homo sapien
agaagggttgccagagaatttcttg

SEQ ID NO: 2085177 - DNA, 25 bp, Homo sapien
ggttgccagagaatttcttgagtta

SEQ ID NO: 2085178 - DNA, 25 bp, Homo sapien
ggtgtcttgtccccattcgaccctg

SEQ ID NO: 2085179 - DNA, 25 bp, Homo sapien
ggagcccgccagggcaggagtcaag

SEQ ID NO: 2085180 - DNA, 25 bp, Homo sapien
gaagcttgcagagaacgtggggccg

SEQ ID NO: 2085181 - DNA, 25 bp, Homo sapien
gctccggccccctctcgttcttcat

SEQ ID NO: 2085182 - DNA, 25 bp, Homo sapien
tgccggctggcccgaggtttccctg

SEQ ID NO: 2085183 - DNA, 25 bp, Homo sapien
ctggggccctcaatgccggctggcc

SEQ ID NO: 2085184 - DNA, 25 bp, Homo sapien
ttggcctggtgtggtcggaaacaag

SEQ ID NO: 2085185 - DNA, 25 bp, Homo sapien
caaggggcctttgtcagcggctggg

SEQ ID NO: 2085186 - DNA, 25 bp, Homo sapien
tcggtgctgtgacgtgtgcgtccac

SEQ ID NO: 2085187 - DNA, 25 bp, Homo sapien
gctttcacctgttcactcacttgtt

SEQ ID NO: 2085188 - DNA, 25 bp, Homo sapien
tttctgtttacgatacatcctctga

SEQ ID NO: 2085189 - DNA, 25 bp, Homo sapien
tggaagagccagtcggtgctgtgac

SEQ ID NO: 2085190 - DNA, 25 bp, Homo sapien
ccgcttccgcagaagggagtagggt

SEQ ID NO: 2085191 - DNA, 25 bp, Homo sapien
agcaaggtgcgcaggctccgcttcc

SEQ ID NO: 2085192 - DNA, 25 bp, Homo sapien
cagcaaggtgcgcaggctccgcttc

SEQ ID NO: 2085193 - DNA, 25 bp, Homo sapien
ttccgcagaagggagtagggtggga

SEQ ID NO: 2085194 - DNA, 25 bp, Homo sapien
cctgaagtgtctgcttagccgcgca

SEQ ID NO: 2085195 - DNA, 25 bp, Homo sapien
agtgattccgacaggcagccaagct

SEQ ID NO: 2085196 - DNA, 25 bp, Homo sapien
tcaggctttggagaactatcaggtt

SEQ ID NO: 2085197 - DNA, 25 bp, Homo sapien
gatggcccttgtggtcttgcagaga

SEQ ID NO: 2085198 - DNA, 25 bp, Homo sapien
gagtgggacgcccaccgctcctgtg

SEQ ID NO: 2085199 - DNA, 25 bp, Homo sapien
caggacagtggtggcgccgcgctcc

SEQ ID NO: 2085200 - DNA, 25 bp, Homo sapien
aatgaagatgcgtctgggaagcggc

SEQ ID NO: 2085201 - DNA, 25 bp, Homo sapien
ggtcaggcctgtctgttgcaaagcc

SEQ ID NO: 2085202 - DNA, 25 bp, Homo sapien
gatatcctggcagacttccaagggc

SEQ ID NO: 2085203 - DNA, 25 bp, Homo sapien
cgaggatatcctggcagacttccaa

SEQ ID NO: 2085204 - DNA, 25 bp, Homo sapien
gggacgaggatatcctggcagactt

SEQ ID NO: 2085205 - DNA, 25 bp, Homo sapien
tatcctggcagacttccaagggcac

SEQ ID NO: 2085206 - DNA, 25 bp, Homo sapien
cacaagacttttctcgccaggttta

SEQ ID NO: 2085207 - DNA, 25 bp, Homo sapien
tttctcgccaggtttagagggctgg

SEQ ID NO: 2085208 - DNA, 25 bp, Homo sapien
ccaccagggcccacaagacttttct

SEQ ID NO: 2085209 - DNA, 25 bp, Homo sapien
cttttctcgccaggtttagagggct

SEQ ID NO: 2085210 - DNA, 25 bp, Homo sapien
cgtcgattttccgattcctttggtg

SEQ ID NO: 2085211 - DNA, 25 bp, Homo sapien
tccgtgtccgtcgattttccgattc

SEQ ID NO: 2085212 - DNA, 25 bp, Homo sapien
cgtgtccgtcgattttccgattcct

SEQ ID NO: 2085213 - DNA, 25 bp, Homo sapien
cgattttccgattcctttggtgctg

SEQ ID NO: 2085214 - DNA, 25 bp, Homo sapien
caggaagatgctgcggaatcccggt

SEQ ID NO: 2085215 - DNA, 25 bp, Homo sapien
cccgcgccacctccctctttgctcc

SEQ ID NO: 2085216 - DNA, 25 bp, Homo sapien
cctgtgccctgtccttgtcgcgtga

SEQ ID NO: 2085217 - DNA, 25 bp, Homo sapien
ggccagggtctttgccgctgcctgt

SEQ ID NO: 2085218 - DNA, 25 bp, Homo sapien
tggtcagtgtgttgttgacctgccc

SEQ ID NO: 2085219 - DNA, 25 bp, Homo sapien
ttgacctgccctaagacgggaggcg

SEQ ID NO: 2085220 - DNA, 25 bp, Homo sapien
gacgggaggcgggttagagacaagc

SEQ ID NO: 2085221 - DNA, 25 bp, Homo sapien
tagagacaagcgtctcggacctgcg

SEQ ID NO: 2085222 - DNA, 25 bp, Homo sapien
gcaacaagggccttggcaacgggct

SEQ ID NO: 2085223 - DNA, 25 bp, Homo sapien
cttggcaacgggcttcccacttggg

SEQ ID NO: 2085224 - DNA, 25 bp, Homo sapien
gaggccgaggccgagtttagcggca

SEQ ID NO: 2085225 - DNA, 25 bp, Homo sapien
agtttagcggcagtccaggcgtgca

SEQ ID NO: 2085226 - DNA, 25 bp, Homo sapien
agcagtcgctgagatgccacgggct

SEQ ID NO: 2085227 - DNA, 25 bp, Homo sapien
cattaacgtgttcctggcgacaggg

SEQ ID NO: 2085228 - DNA, 25 bp, Homo sapien
tgggagtgccccatccttgcttggt

SEQ ID NO: 2085229 - DNA, 25 bp, Homo sapien
cagggactgacgctgtctgagcgca

SEQ ID NO: 2085230 - DNA, 25 bp, Homo sapien
actgccacgttctccgttgccagtc

SEQ ID NO: 2085231 - DNA, 25 bp, Homo sapien
ctccgttgccagtcgtggtgggtca

SEQ ID NO: 2085232 - DNA, 25 bp, Homo sapien
gccacgttctccgttgccagtcgtg

SEQ ID NO: 2085233 - DNA, 25 bp, Homo sapien
acgttctccgttgccagtcgtggtg

SEQ ID NO: 2085234 - DNA, 25 bp, Homo sapien
gccggctggaatctaaactgtgggc

SEQ ID NO: 2085235 - DNA, 25 bp, Homo sapien
ggcaaagccgcggtccactattgct

SEQ ID NO: 2085236 - DNA, 25 bp, Homo sapien
ttggtcagtgtacaggagagtctgc

SEQ ID NO: 2085237 - DNA, 25 bp, Homo sapien
tacaggagagtctgcttggccggct

SEQ ID NO: 2085238 - DNA, 25 bp, Homo sapien
cgttcctggtaatgagagaggcaga

SEQ ID NO: 2085239 - DNA, 25 bp, Homo sapien
cagagaaagcgggtatcttgcctgg

SEQ ID NO: 2085240 - DNA, 25 bp, Homo sapien
agaaagcgggtatcttgcctgggac

SEQ ID NO: 2085241 - DNA, 25 bp, Homo sapien
tgtagggcagccgttcctggtaatg

SEQ ID NO: 2085242 - DNA, 25 bp, Homo sapien
gcaaaacgtctctttgtaatcatca

SEQ ID NO: 2085243 - DNA, 25 bp, Homo sapien
caaggcaaaacgtctctttgtaatc

SEQ ID NO: 2085244 - DNA, 25 bp, Homo sapien
ccatgagttcaaggcaaaacgtctc

SEQ ID NO: 2085245 - DNA, 25 bp, Homo sapien
gagttcaaggcaaaacgtctctttg

SEQ ID NO: 2085246 - DNA, 25 bp, Homo sapien
ttagcaatattcagcaatgatgtgg

SEQ ID NO: 2085247 - DNA, 25 bp, Homo sapien
tagcaatattcagcaatgatgtggc

SEQ ID NO: 2085248 - DNA, 25 bp, Homo sapien
ggcttcagtggtaccagtctgttca

SEQ ID NO: 2085249 - DNA, 25 bp, Homo sapien
gttcatcagggccaacctcctgcgt

SEQ ID NO: 2085250 - DNA, 25 bp, Homo sapien
ggctcccagcgtgcgtgaaatctga

SEQ ID NO: 2085251 - DNA, 25 bp, Homo sapien
gactattcaggatagtgttccaggc

SEQ ID NO: 2085252 - DNA, 25 bp, Homo sapien
ggcaaccagagaggccataacaccc

SEQ ID NO: 2085253 - DNA, 25 bp, Homo sapien
gcagagccggagcaaacaactcctg

SEQ ID NO: 2085254 - DNA, 25 bp, Homo sapien
gatgattggatttcatctccatggc

SEQ ID NO: 2085255 - DNA, 25 bp, Homo sapien
gagtctgttcccagcagtggaggca

SEQ ID NO: 2085256 - DNA, 25 bp, Homo sapien
gaatgacacaagacattggaagtgg

SEQ ID NO: 2085257 - DNA, 25 bp, Homo sapien
aagtcacagtcaccggtgctctgga

SEQ ID NO: 2085258 - DNA, 25 bp, Homo sapien
gacacaagacattggaagtggaagt

SEQ ID NO: 2085259 - DNA, 25 bp, Homo sapien
tgacacaagacattggaagtggaag

SEQ ID NO: 2085260 - DNA, 25 bp, Homo sapien
tgctggaagacattccaccttgctt

SEQ ID NO: 2085261 - DNA, 25 bp, Homo sapien
ttgctggaagacattccaccttgct

SEQ ID NO: 2085262 - DNA, 25 bp, Homo sapien
agcagcaagcaggccatccttgaag

SEQ ID NO: 2085263 - DNA, 25 bp, Homo sapien
tcagcagcaagcaggccatccttga

SEQ ID NO: 2085264 - DNA, 25 bp, Homo sapien
cagcaagcaggccatccttgaagct

SEQ ID NO: 2085265 - DNA, 25 bp, Homo sapien
caagcaggccatccttgaagcttac

SEQ ID NO: 2085266 - DNA, 25 bp, Homo sapien
gaatcatacaggacagtgtctaccg

SEQ ID NO: 2085267 - DNA, 25 bp, Homo sapien
tgtgtattgcccacacgtgtgccgc

SEQ ID NO: 2085268 - DNA, 25 bp, Homo sapien
cggcgcttgggcaacctgtgtattg

SEQ ID NO: 2085269 - DNA, 25 bp, Homo sapien
tctgagtgcagacatcgcgctggct

SEQ ID NO: 2085270 - DNA, 25 bp, Homo sapien
catcccttgctggaaaaaccatgac

SEQ ID NO: 2085271 - DNA, 25 bp, Homo sapien
accatgacaatctctccgcagggaa

SEQ ID NO: 2085272 - DNA, 25 bp, Homo sapien
cgcagggaagaacgcggctttgagg

SEQ ID NO: 2085273 - DNA, 25 bp, Homo sapien
tcccttgctggaaaaaccatgacaa

SEQ ID NO: 2085274 - DNA, 25 bp, Homo sapien
gagatttccgtatcgctgaagttcc

SEQ ID NO: 2085275 - DNA, 25 bp, Homo sapien
tggccctggctgagtcatctgcgcc

SEQ ID NO: 2085276 - DNA, 25 bp, Homo sapien
gaataggttctcagatgcgccacgt

SEQ ID NO: 2085277 - DNA, 25 bp, Homo sapien
gcgtggcctctgtgaaaagtgttaa

SEQ ID NO: 2085278 - DNA, 25 bp, Homo sapien
tgtgtgacactttgccagggtccca

SEQ ID NO: 2085279 - DNA, 25 bp, Homo sapien
gaccgaaagcttgtctgttgctcac

SEQ ID NO: 2085280 - DNA, 25 bp, Homo sapien
tgctccgacatccatgttcactggg

SEQ ID NO: 2085281 - DNA, 25 bp, Homo sapien
tgcattttatctgtagaccgaaagc

SEQ ID NO: 2085282 - DNA, 25 bp, Homo sapien
agagacgaagtgctctagggctctg

SEQ ID NO: 2085283 - DNA, 25 bp, Homo sapien
acccagctaggcaccgagcaggtgg

SEQ ID NO: 2085284 - DNA, 25 bp, Homo sapien
gtggctatgaagagacgaagtgctc

SEQ ID NO: 2085285 - DNA, 25 bp, Homo sapien
taggcaccgagcaggtggaaccctg

SEQ ID NO: 2085286 - DNA, 25 bp, Homo sapien
cttggtgtgcctctaggtcacaggt

SEQ ID NO: 2085287 - DNA, 25 bp, Homo sapien
gtgcctctaggtcacaggtggacat

SEQ ID NO: 2085288 - DNA, 25 bp, Homo sapien
tctgatgccttggtgtgcctctagg

SEQ ID NO: 2085289 - DNA, 25 bp, Homo sapien
acctctgatgccttggtgtgcctct

SEQ ID NO: 2085290 - DNA, 25 bp, Homo sapien
agaggccggcacaggacttaggaag

SEQ ID NO: 2085291 - DNA, 25 bp, Homo sapien
ccgcacaggccctccataggtgttg

SEQ ID NO: 2085292 - DNA, 25 bp, Homo sapien
agctctgaggcagcgcctcccacag

SEQ ID NO: 2085293 - DNA, 25 bp, Homo sapien
tcattgcgctcctcatccgggaaag

SEQ ID NO: 2085294 - DNA, 25 bp, Homo sapien
tctacagcagtacgtgtgccgggcg

SEQ ID NO: 2085295 - DNA, 25 bp, Homo sapien
tccctcctttgttgcgcgatgaggg

SEQ ID NO: 2085296 - DNA, 25 bp, Homo sapien
ggtttcggatctgaccgagccgccg

SEQ ID NO: 2085297 - DNA, 25 bp, Homo sapien
tgtcctggatcgacaccctctacag

SEQ ID NO: 2085298 - DNA, 25 bp, Homo sapien
tctgagtgggttactcagctgctca

SEQ ID NO: 2085299 - DNA, 25 bp, Homo sapien
ctgagtgggttactcagctgctcag

SEQ ID NO: 2085300 - DNA, 25 bp, Homo sapien
cacgggaaccctggattcagacttg

SEQ ID NO: 2085301 - DNA, 25 bp, Homo sapien
cactaattgccgctcaatgcagaga

SEQ ID NO: 2085302 - DNA, 25 bp, Homo sapien
gcatcgccatctgctagttagccaa

SEQ ID NO: 2085303 - DNA, 25 bp, Homo sapien
aatgcagagattacacacgggaacc

SEQ ID NO: 2085304 - DNA, 25 bp, Homo sapien
ccttgctgaatggtgagccgctgcc

SEQ ID NO: 2085305 - DNA, 25 bp, Homo sapien
aattctggctgaacgagcgaggagc

SEQ ID NO: 2085306 - DNA, 25 bp, Homo sapien
gctaaggagattggagccactgaac

SEQ ID NO: 2085307 - DNA, 25 bp, Homo sapien
cagagggaacttgccttgaagaggc

SEQ ID NO: 2085308 - DNA, 25 bp, Homo sapien
ctattgaatatgtcagaacaggcca

SEQ ID NO: 2085309 - DNA, 25 bp, Homo sapien
tcgtttctatgttaccctctgttct

SEQ ID NO: 2085310 - DNA, 25 bp, Homo sapien
gctgcctcgtttctatgttaccctc

SEQ ID NO: 2085311 - DNA, 25 bp, Homo sapien
cactattgaatatgtcagaacaggc

SEQ ID NO: 2085312 - DNA, 25 bp, Homo sapien
cacagcgtggggctgcggccagccg

SEQ ID NO: 2085313 - DNA, 25 bp, Homo sapien
ttcctgtctcagctgcctgcagcat

SEQ ID NO: 2085314 - DNA, 25 bp, Homo sapien
acagcgtggggctgcggccagccgg

SEQ ID NO: 2085315 - DNA, 25 bp, Homo sapien
gcagcagcggcagtgttcctgtctc

SEQ ID NO: 2085316 - DNA, 25 bp, Homo sapien
aacgtgccacgtgtaccgacgttgg

SEQ ID NO: 2085317 - DNA, 25 bp, Homo sapien
gcatgtacagcctcatgtgtggcct

SEQ ID NO: 2085318 - DNA, 25 bp, Homo sapien
agcagctcggccttgggcaacgtgc

SEQ ID NO: 2085319 - DNA, 25 bp, Homo sapien
gcctggaaggaaatgtggcctgcct

SEQ ID NO: 2085320 - DNA, 25 bp, Homo sapien
ggaagttgccgtctgttggtgtctc

SEQ ID NO: 2085321 - DNA, 25 bp, Homo sapien
gtgggaagttgccgtctgttggtgt

SEQ ID NO: 2085322 - DNA, 25 bp, Homo sapien
gggaagttgccgtctgttggtgtct

SEQ ID NO: 2085323 - DNA, 25 bp, Homo sapien
gaagttgccgtctgttggtgtctca

SEQ ID NO: 2085324 - DNA, 25 bp, Homo sapien
cattgtgctttgcatccggagcagc

SEQ ID NO: 2085325 - DNA, 25 bp, Homo sapien
gagcagcagcctcgtggacaccggc

SEQ ID NO: 2085326 - DNA, 25 bp, Homo sapien
cggccccgtgaagctattgctgatg

SEQ ID NO: 2085327 - DNA, 25 bp, Homo sapien
gaacagtcttgagtgatgcggctgc

SEQ ID NO: 2085328 - DNA, 25 bp, Homo sapien
ttgccgtcatctcttcggcatcggg

SEQ ID NO: 2085329 - DNA, 25 bp, Homo sapien
tacccgtgttatacacgctcacata

SEQ ID NO: 2085330 - DNA, 25 bp, Homo sapien
gtgtgtgtacccgtgttatacacgc

SEQ ID NO: 2085331 - DNA, 25 bp, Homo sapien
gttatacacgctcacataaaagtca

SEQ ID NO: 2085332 - DNA, 25 bp, Homo sapien
cgatcgagacgcagcacatgctgct

SEQ ID NO: 2085333 - DNA, 25 bp, Homo sapien
gaccgtggcatgcagtgatggtgtg

SEQ ID NO: 2085334 - DNA, 25 bp, Homo sapien
ctcgaatctcattagtagcaaggac

SEQ ID NO: 2085335 - DNA, 25 bp, Homo sapien
tggtgtgggaatcacccgatcgaga

SEQ ID NO: 2085336 - DNA, 25 bp, Homo sapien
acagacgcgtcacggctgcagcctt

SEQ ID NO: 2085337 - DNA, 25 bp, Homo sapien
tgaggcggccgcactgtgctctggg

SEQ ID NO: 2085338 - DNA, 25 bp, Homo sapien
ttacagacgcgtcacggctgcagcc

SEQ ID NO: 2085339 - DNA, 25 bp, Homo sapien
gacggtgaggcggccgcactgtgct

SEQ ID NO: 2085340 - DNA, 25 bp, Homo sapien
cagagaagtctagaagtacactgca

SEQ ID NO: 2085341 - DNA, 25 bp, Homo sapien
gaacagactcatcggccaaagtttg

SEQ ID NO: 2085342 - DNA, 25 bp, Homo sapien
ggatactagaattaagcaccatgca

SEQ ID NO: 2085343 - DNA, 25 bp, Homo sapien
ggtggaaggcctaaagatctgattg

SEQ ID NO: 2085344 - DNA, 25 bp, Homo sapien
cacagtccccagcaagggtccccat

SEQ ID NO: 2085345 - DNA, 25 bp, Homo sapien
tccctccacagtccccagcaagggt

SEQ ID NO: 2085346 - DNA, 25 bp, Homo sapien
ccacagtccccagcaagggtcccca

SEQ ID NO: 2085347 - DNA, 25 bp, Homo sapien
gatcttccctccacagtccccagca

SEQ ID NO: 2085348 - DNA, 25 bp, Homo sapien
gaatggaattccgtctgtcgttcac

SEQ ID NO: 2085349 - DNA, 25 bp, Homo sapien
cgtctgtcgttcacgtgacttttct

SEQ ID NO: 2085350 - DNA, 25 bp, Homo sapien
aagcacataattgctgcagcggcag

SEQ ID NO: 2085351 - DNA, 25 bp, Homo sapien
ttaagcacataattgctgcagcggc

SEQ ID NO: 2085352 - DNA, 25 bp, Homo sapien
cagtggtactgctttgtcaggtttg

SEQ ID NO: 2085353 - DNA, 25 bp, Homo sapien
aatgaaagaccgtgtttttacgctg

SEQ ID NO: 2085354 - DNA, 25 bp, Homo sapien
aactctgtgaatattaactttctct

SEQ ID NO: 2085355 - DNA, 25 bp, Homo sapien
tttttacgctgtcagtacagggcct

SEQ ID NO: 2085356 - DNA, 25 bp, Homo sapien
gctggaccgcagtgtcgcaatcttg

SEQ ID NO: 2085357 - DNA, 25 bp, Homo sapien
ggcacccaccatcgtgcccagctat

SEQ ID NO: 2085358 - DNA, 25 bp, Homo sapien
cacccaccatcgtgcccagctattt

SEQ ID NO: 2085359 - DNA, 25 bp, Homo sapien
ctcccggccttaagtgatccgcccg

SEQ ID NO: 2085360 - DNA, 25 bp, Homo sapien
agctgggctttatggcaccacgcgg

SEQ ID NO: 2085361 - DNA, 25 bp, Homo sapien
ctgctttattatcggcctccaggta

SEQ ID NO: 2085362 - DNA, 25 bp, Homo sapien
tcccagataaggtgctaagtttggc

SEQ ID NO: 2085363 - DNA, 25 bp, Homo sapien
taagtttggcttctagcaggagagc

SEQ ID NO: 2085364 - DNA, 25 bp, Homo sapien
cagcgcgttgaaggcctcgttgtag

SEQ ID NO: 2085365 - DNA, 25 bp, Homo sapien
tgtagtctaggatgcgcttgcgctc

SEQ ID NO: 2085366 - DNA, 25 bp, Homo sapien
atggccctgcgcagcgtggcgatct

SEQ ID NO: 2085367 - DNA, 25 bp, Homo sapien
gcggcgatgcggtggatggccctgc

SEQ ID NO: 2085368 - DNA, 25 bp, Homo sapien
gcgtgcggggggcacgaggcgcagc

SEQ ID NO: 2085369 - DNA, 25 bp, Homo sapien
tgcggggggcacgaggcgcagcggg

SEQ ID NO: 2085370 - DNA, 25 bp, Homo sapien
ggggctggcgcctgtgtccccggtg

SEQ ID NO: 2085371 - DNA, 25 bp, Homo sapien
gctggcgcctgtgtccccggtgtcc

SEQ ID NO: 2085372 - DNA, 25 bp, Homo sapien
gaggcctgtgctaggcccggcccct

SEQ ID NO: 2085373 - DNA, 25 bp, Homo sapien
ggatcgcaggtagccccgcggccag

SEQ ID NO: 2085374 - DNA, 25 bp, Homo sapien
tcaggagcgcggatggcccatcccg

SEQ ID NO: 2085375 - DNA, 25 bp, Homo sapien
agcggcgccagcttcccccggaggc

SEQ ID NO: 2085376 - DNA, 25 bp, Homo sapien
ggttttatagtccagctgccagccc

SEQ ID NO: 2085377 - DNA, 25 bp, Homo sapien
tgctctgtccaagacgcctttgcag

SEQ ID NO: 2085378 - DNA, 25 bp, Homo sapien
caagacgcctttgcagtcccgggtt

SEQ ID NO: 2085379 - DNA, 25 bp, Homo sapien
tgcagtcccgggttttatagtccag

SEQ ID NO: 2085380 - DNA, 25 bp, Homo sapien
tccaagacgagttcgagtccaagat

SEQ ID NO: 2085381 - DNA, 25 bp, Homo sapien
catcgagaacacacagggctcggag

SEQ ID NO: 2085382 - DNA, 25 bp, Homo sapien
tcactctcctaaaagcatcgagaac

SEQ ID NO: 2085383 - DNA, 25 bp, Homo sapien
caggagtgcgaaggcggcattccaa

SEQ ID NO: 2085384 - DNA, 25 bp, Homo sapien
ccagagtcccccttcactgtggctg

SEQ ID NO: 2085385 - DNA, 25 bp, Homo sapien
cccccaatcctagccctgcccttgg

SEQ ID NO: 2085386 - DNA, 25 bp, Homo sapien
ccaatcctagccctgcccttggcct

SEQ ID NO: 2085387 - DNA, 25 bp, Homo sapien
tggccagagtcccccttcactgtgg

SEQ ID NO: 2085388 - DNA, 25 bp, Homo sapien
gaagcaacggaaagctcagagagca

SEQ ID NO: 2085389 - DNA, 25 bp, Homo sapien
gcggagctcccagaaagacgctgga

SEQ ID NO: 2085390 - DNA, 25 bp, Homo sapien
ctggagggacctcagcgcgccattc

SEQ ID NO: 2085391 - DNA, 25 bp, Homo sapien
tccctcaggagacggagggccggct

SEQ ID NO: 2085392 - DNA, 25 bp, Homo sapien
tgggccttgcgcggctgcagctcca

SEQ ID NO: 2085393 - DNA, 25 bp, Homo sapien
gggggcctgggccttgcgcggctgc

SEQ ID NO: 2085394 - DNA, 25 bp, Homo sapien
cctgggccttgcgcggctgcagctc

SEQ ID NO: 2085395 - DNA, 25 bp, Homo sapien
gggcctgggccttgcgcggctgcag

SEQ ID NO: 2085396 - DNA, 25 bp, Homo sapien
aaggaaactcggactgcaccgggtg

SEQ ID NO: 2085397 - DNA, 25 bp, Homo sapien
actcggactgcaccgggtgggccat

SEQ ID NO: 2085398 - DNA, 25 bp, Homo sapien
gaaactcggactgcaccgggtgggc

SEQ ID NO: 2085399 - DNA, 25 bp, Homo sapien
ctgaaggaaactcggactgcaccgg

SEQ ID NO: 2085400 - DNA, 25 bp, Homo sapien
tgcccctcggagatggccttgaagg

SEQ ID NO: 2085401 - DNA, 25 bp, Homo sapien
gaggagtatctccatctccggcagg

SEQ ID NO: 2085402 - DNA, 25 bp, Homo sapien
ccttgaagggtaggccctggctgtt

SEQ ID NO: 2085403 - DNA, 25 bp, Homo sapien
tccagatccagaggccccgagaggg

SEQ ID NO: 2085404 - DNA, 25 bp, Homo sapien
agaggctgggagcatgtccaggtgg

SEQ ID NO: 2085405 - DNA, 25 bp, Homo sapien
gcagaggctgggagcatgtccaggt

SEQ ID NO: 2085406 - DNA, 25 bp, Homo sapien
cttggaaaccggagccggcagaggc

SEQ ID NO: 2085407 - DNA, 25 bp, Homo sapien
cggcagaggctgggagcatgtccag

SEQ ID NO: 2085408 - DNA, 25 bp, Homo sapien
gtacggcagggaagccgctgcgact

SEQ ID NO: 2085409 - DNA, 25 bp, Homo sapien
cagggtacggcagggaagccgctgc

SEQ ID NO: 2085410 - DNA, 25 bp, Homo sapien
gggtacggcagggaagccgctgcga

SEQ ID NO: 2085411 - DNA, 25 bp, Homo sapien
tcagggtacggcagggaagccgctg

SEQ ID NO: 2085412 - DNA, 25 bp, Homo sapien
tcacttgtgacccagacctcccctg

SEQ ID NO: 2085413 - DNA, 25 bp, Homo sapien
ggaaccgggaaggctgtgggtcagc

SEQ ID NO: 2085414 - DNA, 25 bp, Homo sapien
ctgcggagagagcacagagagaccc

SEQ ID NO: 2085415 - DNA, 25 bp, Homo sapien
cgggaaggctgtgggtcagcttcat

SEQ ID NO: 2085416 - DNA, 25 bp, Homo sapien
agcacagagagaccccgggaaccgg

SEQ ID NO: 2085417 - DNA, 25 bp, Homo sapien
ggtcacggccaccatgataatgacg

SEQ ID NO: 2085418 - DNA, 25 bp, Homo sapien
ctgtgaagttgacggtcacggccac

SEQ ID NO: 2085419 - DNA, 25 bp, Homo sapien
gtgaagttgacggtcacggccacca

SEQ ID NO: 2085420 - DNA, 25 bp, Homo sapien
gccaccatgataatgacgatgccca

SEQ ID NO: 2085421 - DNA, 25 bp, Homo sapien
tcctgccagtaagaggactgtggcc

SEQ ID NO: 2085422 - DNA, 25 bp, Homo sapien
aacagatatggcagaacagggctca

SEQ ID NO: 2085423 - DNA, 25 bp, Homo sapien
gaacactggctcttcaagtccctga

SEQ ID NO: 2085424 - DNA, 25 bp, Homo sapien
gaggtgggcatgcaaccctagctga

SEQ ID NO: 2085425 - DNA, 25 bp, Homo sapien
tcccaggacgcgtccgggagagtaa

SEQ ID NO: 2085426 - DNA, 25 bp, Homo sapien
tacccattgggttcgctgtgctttc

SEQ ID NO: 2085427 - DNA, 25 bp, Homo sapien
gcgtgtggcacgaagcatgcaaaca

SEQ ID NO: 2085428 - DNA, 25 bp, Homo sapien
gccaccaccttgcagcggaggatgt

SEQ ID NO: 2085429 - DNA, 25 bp, Homo sapien
cctgggaccagagtcctcgagagat

SEQ ID NO: 2085430 - DNA, 25 bp, Homo sapien
gagtcctcgagagatgcttccgaag

SEQ ID NO: 2085431 - DNA, 25 bp, Homo sapien
gggagacatcctgggaccagagtcc

SEQ ID NO: 2085432 - DNA, 25 bp, Homo sapien
ttggccaggtctggtcccaggctac

SEQ ID NO: 2085433 - DNA, 25 bp, Homo sapien
tcctaagatgagaggccgtggcgtc

SEQ ID NO: 2085434 - DNA, 25 bp, Homo sapien
catgaaggcattgactctggctgtg

SEQ ID NO: 2085435 - DNA, 25 bp, Homo sapien
ggccccaggctctgtacatgcaagt

SEQ ID NO: 2085436 - DNA, 25 bp, Homo sapien
catgcaagtgtattcccaaacctgg

SEQ ID NO: 2085437 - DNA, 25 bp, Homo sapien
cagaacctctgtactgacctgctct

SEQ ID NO: 2085438 - DNA, 25 bp, Homo sapien
tgtaggagtgcacggcagagcctat

SEQ ID NO: 2085439 - DNA, 25 bp, Homo sapien
tccatgctaagacacacagcggcgt

SEQ ID NO: 2085440 - DNA, 25 bp, Homo sapien
tgcaggtggcggctagaaccaagat

SEQ ID NO: 2085441 - DNA, 25 bp, Homo sapien
gggtcttgctactccctgtgggaca

SEQ ID NO: 2085442 - DNA, 25 bp, Homo sapien
aaacttctgaaattggtgtccgaca

SEQ ID NO: 2085443 - DNA, 25 bp, Homo sapien
ccaggccccgatgcctgctgtgaag

SEQ ID NO: 2085444 - DNA, 25 bp, Homo sapien
atgccaggccccgatgcctgctgtg

SEQ ID NO: 2085445 - DNA, 25 bp, Homo sapien
ggtgtccgacaaatgatcccaaaga

SEQ ID NO: 2085446 - DNA, 25 bp, Homo sapien
ggctgggcgtccagccgcaaacatc

SEQ ID NO: 2085447 - DNA, 25 bp, Homo sapien
agcatatgaacctgggccaactccg

SEQ ID NO: 2085448 - DNA, 25 bp, Homo sapien
ccaacaaggcgtagcgggcaggtct

SEQ ID NO: 2085449 - DNA, 25 bp, Homo sapien
tttttgtctgtataggagggcccac

SEQ ID NO: 2085450 - DNA, 25 bp, Homo sapien
ccagtcccatagcgactcccccagc

SEQ ID NO: 2085451 - DNA, 25 bp, Homo sapien
tccagtcccatagcgactcccccag

SEQ ID NO: 2085452 - DNA, 25 bp, Homo sapien
cagtcccatagcgactcccccagcc

SEQ ID NO: 2085453 - DNA, 25 bp, Homo sapien
ttaggaggtcggaaagggcctctga

SEQ ID NO: 2085454 - DNA, 25 bp, Homo sapien
gattttccagcatccgtggtgcctg

SEQ ID NO: 2085455 - DNA, 25 bp, Homo sapien
tgtacagccacgggccccctgagtg

SEQ ID NO: 2085456 - DNA, 25 bp, Homo sapien
cccctgagtggcttaggaggtcgga

SEQ ID NO: 2085457 - DNA, 25 bp, Homo sapien
ctggctcagagtccttccggctgtc

SEQ ID NO: 2085458 - DNA, 25 bp, Homo sapien
tggctcagagtccttccggctgtct

SEQ ID NO: 2085459 - DNA, 25 bp, Homo sapien
agagtccttccagcagtctctgtgg

SEQ ID NO: 2085460 - DNA, 25 bp, Homo sapien
gagtccttccagcagtctctgtggg

SEQ ID NO: 2085461 - DNA, 25 bp, Homo sapien
gagtccttccagcagtctctgtggg

SEQ ID NO: 2085462 - DNA, 25 bp, Homo sapien
tggggtactgggtcagagtccttcc

SEQ ID NO: 2085463 - DNA, 25 bp, Homo sapien
ctgtggggtactgggtcagagtcct

SEQ ID NO: 2085464 - DNA, 25 bp, Homo sapien
ggggtactgggtcagagtccttcca

SEQ ID NO: 2085465 - DNA, 25 bp, Homo sapien
tctctgtggagtaccgagtcagagt

SEQ ID NO: 2085466 - DNA, 25 bp, Homo sapien
tcttccttagaactgtggggtactg

SEQ ID NO: 2085467 - DNA, 25 bp, Homo sapien
tgcagctccgtggactaaccctctt

SEQ ID NO: 2085468 - DNA, 25 bp, Homo sapien
ggagtaccgagtcagagtccttcta

SEQ ID NO: 2085469 - DNA, 25 bp, Homo sapien
tctgcattaagtggttgctgagtga

SEQ ID NO: 2085470 - DNA, 25 bp, Homo sapien
tgtctgcattaagtggttgctgagt

SEQ ID NO: 2085471 - DNA, 25 bp, Homo sapien
cactgtctgcattaagtggttgctg

SEQ ID NO: 2085472 - DNA, 25 bp, Homo sapien
actgtctgcattaagtggttgctga

SEQ ID NO: 2085473 - DNA, 25 bp, Homo sapien
tactactggatatctgactggagcc

SEQ ID NO: 2085474 - DNA, 25 bp, Homo sapien
tggtaacagttcaacaatccgtggc

SEQ ID NO: 2085475 - DNA, 25 bp, Homo sapien
tgtgtcgtctccgtgccagatgtgg

SEQ ID NO: 2085476 - DNA, 25 bp, Homo sapien
ggaaaagcctgcatgcctgttcaat

SEQ ID NO: 2085477 - DNA, 25 bp, Homo sapien
tattatagcatatcagtagcaggct

SEQ ID NO: 2085478 - DNA, 25 bp, Homo sapien
tgaactattgcctagaacttggagg

SEQ ID NO: 2085479 - DNA, 25 bp, Homo sapien
gcatagtaagaagtagtgttccaca

SEQ ID NO: 2085480 - DNA, 25 bp, Homo sapien
agattgctgtctagcatgtcatttc

SEQ ID NO: 2085481 - DNA, 25 bp, Homo sapien
gacctgtctcaacccactagcatag

SEQ ID NO: 2085482 - DNA, 25 bp, Homo sapien
cagcgctcagcgtgaaagttaaggg

SEQ ID NO: 2085483 - DNA, 25 bp, Homo sapien
tcccctgaccgtgcctgcaggtaag

SEQ ID NO: 2085484 - DNA, 25 bp, Homo sapien
tggatagtattaaaacagacctgtc

SEQ ID NO: 2085485 - DNA, 25 bp, Homo sapien
tgaacccgcagtatcttccaaggta

SEQ ID NO: 2085486 - DNA, 25 bp, Homo sapien
tacatgggaattgatggttaatggg

SEQ ID NO: 2085487 - DNA, 25 bp, Homo sapien
attatgatgattgcagaattctgtg

SEQ ID NO: 2085488 - DNA, 25 bp, Homo sapien
cctgaaatgtgcataagagacaagt

SEQ ID NO: 2085489 - DNA, 25 bp, Homo sapien
gaatagaagatcaaacctgccatac

SEQ ID NO: 2085490 - DNA, 25 bp, Homo sapien
taaaaagtacaaggtcggctgagcg

SEQ ID NO: 2085491 - DNA, 25 bp, Homo sapien
tgagacgttgtgacagcactccagc

SEQ ID NO: 2085492 - DNA, 25 bp, Homo sapien
tagaaagctggaacctagcagaggt

SEQ ID NO: 2085493 - DNA, 25 bp, Homo sapien
tatggctctgttcgtaggtacaccc

SEQ ID NO: 2085494 - DNA, 25 bp, Homo sapien
cacctggcctaatgaatggattttt

SEQ ID NO: 2085495 - DNA, 25 bp, Homo sapien
tcacagccgactccatacggtaggt

SEQ ID NO: 2085496 - DNA, 25 bp, Homo sapien
tacactaggcatgaaacttgagacc

SEQ ID NO: 2085497 - DNA, 25 bp, Homo sapien
gactcaatgctacttctgttcctta

SEQ ID NO: 2085498 - DNA, 25 bp, Homo sapien
tgaagcaatagaagtgtctcctgac

SEQ ID NO: 2085499 - DNA, 25 bp, Homo sapien
ttaatctgctaccttaagggatgca

SEQ ID NO: 2085500 - DNA, 25 bp, Homo sapien
tacgcaaaaggctcataagcacatg

SEQ ID NO: 2085501 - DNA, 25 bp, Homo sapien
actgctgtgctaggatcatattaga

SEQ ID NO: 2085502 - DNA, 25 bp, Homo sapien
gattagtgatgtctctcttgcctac

SEQ ID NO: 2085503 - DNA, 25 bp, Homo sapien
tcttgcctactaatttgcagggtgg

SEQ ID NO: 2085504 - DNA, 25 bp, Homo sapien
ggtaaatctgccatcacagaatgca

SEQ ID NO: 2085505 - DNA, 25 bp, Homo sapien
gggctacagaagtataccaccactt

SEQ ID NO: 2085506 - DNA, 25 bp, Homo sapien
tgaactcgagctcaagattcacctg

SEQ ID NO: 2085507 - DNA, 25 bp, Homo sapien
ggctgggatgcagtgtcacatttat

SEQ ID NO: 2085508 - DNA, 25 bp, Homo sapien
atgtgatcttcccaccaggtagctg

SEQ ID NO: 2085509 - DNA, 25 bp, Homo sapien
tctaggagggacaaaggttggcata

SEQ ID NO: 2085510 - DNA, 25 bp, Homo sapien
gcacccggccagatatagacataca

SEQ ID NO: 2085511 - DNA, 25 bp, Homo sapien
tgttccgggtggttggctagatagc

SEQ ID NO: 2085512 - DNA, 25 bp, Homo sapien
gcatatgattcaccagtgttgttcc

SEQ ID NO: 2085513 - DNA, 25 bp, Homo sapien
tacagtggcgcgatccaccactccc

SEQ ID NO: 2085514 - DNA, 25 bp, Homo sapien
gcctctaccttccagtctcaggtga

SEQ ID NO: 2085515 - DNA, 25 bp, Homo sapien
gactcaagcaatctgtcagacttgg

SEQ ID NO: 2085516 - DNA, 25 bp, Homo sapien
gcagcctctaccttccagtctcagg

SEQ ID NO: 2085517 - DNA, 25 bp, Homo sapien
aaaagccccgtagtttatcataatg

SEQ ID NO: 2085518 - DNA, 25 bp, Homo sapien
tcataatgtctgtactgggatatgg

SEQ ID NO: 2085519 - DNA, 25 bp, Homo sapien
gtctgtactgggatatggctgatgc

SEQ ID NO: 2085520 - DNA, 25 bp, Homo sapien
aagccccgtagtttatcataatgtc

SEQ ID NO: 2085521 - DNA, 25 bp, Homo sapien
gaagcaggtagagcgttactcccat

SEQ ID NO: 2085522 - DNA, 25 bp, Homo sapien
cctctgtgaagtaaggtggtgcctt

SEQ ID NO: 2085523 - DNA, 25 bp, Homo sapien
aaatcccatctcaaggcacagcgaa

SEQ ID NO: 2085524 - DNA, 25 bp, Homo sapien
tgagtcactgcttctggcctaaact

SEQ ID NO: 2085525 - DNA, 25 bp, Homo sapien
taaaacaggagatctcgaagttcct

SEQ ID NO: 2085526 - DNA, 25 bp, Homo sapien
caggagatctcgaagttcctgtaac

SEQ ID NO: 2085527 - DNA, 25 bp, Homo sapien
gagatctcgaagttcctgtaacctt

SEQ ID NO: 2085528 - DNA, 25 bp, Homo sapien
acttaaaacaggagatctcgaagtt

SEQ ID NO: 2085529 - DNA, 25 bp, Homo sapien
cgggtgctgtctccgaacgagccac

SEQ ID NO: 2085530 - DNA, 25 bp, Homo sapien
aggagatggcgggtgctgtctccga

SEQ ID NO: 2085531 - DNA, 25 bp, Homo sapien
tggcgggtgctgtctccgaacgagc

SEQ ID NO: 2085532 - DNA, 25 bp, Homo sapien
gagatggcgggtgctgtctccgaac

SEQ ID NO: 2085533 - DNA, 25 bp, Homo sapien
tccttaactgcaaacaactcgcggg

SEQ ID NO: 2085534 - DNA, 25 bp, Homo sapien
gaatgtgaccccttcgccgtcctta

SEQ ID NO: 2085535 - DNA, 25 bp, Homo sapien
aaaatggcggcatcgtctgcgagcc

SEQ ID NO: 2085536 - DNA, 25 bp, Homo sapien
cgatgggaggctctatgccctggaa

SEQ ID NO: 2085537 - DNA, 25 bp, Homo sapien
tgtaccaggcgaagctggccgagca

SEQ ID NO: 2085538 - DNA, 25 bp, Homo sapien
gagccgctgccgctatggatgatcg

SEQ ID NO: 2085539 - DNA, 25 bp, Homo sapien
gatgatcgagaggatctggtgtacc

SEQ ID NO: 2085540 - DNA, 25 bp, Homo sapien
caggctgagcgatacgacggtgagt

SEQ ID NO: 2085541 - DNA, 25 bp, Homo sapien
gtcccggattgaggcgccgccattt

SEQ ID NO: 2085542 - DNA, 25 bp, Homo sapien
tgacagaaaccgttacagcctccgt

SEQ ID NO: 2085543 - DNA, 25 bp, Homo sapien
agaggcgtctcgtgcgctcgttcca

SEQ ID NO: 2085544 - DNA, 25 bp, Homo sapien
cttttttcaggagcagtcccggccg

SEQ ID NO: 2085545 - DNA, 25 bp, Homo sapien
gagacggccgatagcttctttcccc

SEQ ID NO: 2085546 - DNA, 25 bp, Homo sapien
gggagacactgtacagaagcttctt

SEQ ID NO: 2085547 - DNA, 25 bp, Homo sapien
tctttgtgaaagagacggccgatag

SEQ ID NO: 2085548 - DNA, 25 bp, Homo sapien
ggaagaggcacttttggagagactt

SEQ ID NO: 2085549 - DNA, 25 bp, Homo sapien
tcatcatatgtaatatcagtggaac

SEQ ID NO: 2085550 - DNA, 25 bp, Homo sapien
tatcagtggaacaggcagcgctact

SEQ ID NO: 2085551 - DNA, 25 bp, Homo sapien
gaacaggcagcgctactcaagtcct

SEQ ID NO: 2085552 - DNA, 25 bp, Homo sapien
gcgctactcaagtcctaaggattcc

SEQ ID NO: 2085553 - DNA, 25 bp, Homo sapien
tagaacgtagatactgtaaagtcca

SEQ ID NO: 2085554 - DNA, 25 bp, Homo sapien
taatgtattttacctcacactaagg

SEQ ID NO: 2085555 - DNA, 25 bp, Homo sapien
ctaaggtcatgcttgataaagacgt

SEQ ID NO: 2085556 - DNA, 25 bp, Homo sapien
ggccgcaagcagactaacgcgttga

SEQ ID NO: 2085557 - DNA, 25 bp, Homo sapien
aaccggtgacgtggcacagggaagc

SEQ ID NO: 2085558 - DNA, 25 bp, Homo sapien
ctgagaaaccggtgacgtggcacag

SEQ ID NO: 2085559 - DNA, 25 bp, Homo sapien
agaaaccggtgacgtggcacaggga

SEQ ID NO: 2085560 - DNA, 25 bp, Homo sapien
aaaccggtgacgtggcacagggaag

SEQ ID NO: 2085561 - DNA, 25 bp, Homo sapien
gacctaggctatttagacgacagca

SEQ ID NO: 2085562 - DNA, 25 bp, Homo sapien
tataaaggcacttaccggtctctgg

SEQ ID NO: 2085563 - DNA, 25 bp, Homo sapien
tagacctatgagaccaaaaatgacc

SEQ ID NO: 2085564 - DNA, 25 bp, Homo sapien
attgtggtgtccgagtgaccggcac

SEQ ID NO: 2085565 - DNA, 25 bp, Homo sapien
tgaaaagcaggatgtaccgagcact

SEQ ID NO: 2085566 - DNA, 25 bp, Homo sapien
tgaaaaaatgttgaaccggctgggc

SEQ ID NO: 2085567 - DNA, 25 bp, Homo sapien
tcaccctgtggaaaaccgatggaca

SEQ ID NO: 2085568 - DNA, 25 bp, Homo sapien
tatcaaatggcgacagactgttccg

SEQ ID NO: 2085569 - DNA, 25 bp, Homo sapien
tacgaagattaatgtgagtggtcag

SEQ ID NO: 2085570 - DNA, 25 bp, Homo sapien
cattcacacatgtccgtctgctgga

SEQ ID NO: 2085571 - DNA, 25 bp, Homo sapien
caacagaatcccgatgaggacttca

SEQ ID NO: 2085572 - DNA, 25 bp, Homo sapien
tgtaatggcaaacgaggtcacttcc

SEQ ID NO: 2085573 - DNA, 25 bp, Homo sapien
cccgagtagctggttctatgagcag

SEQ ID NO: 2085574 - DNA, 25 bp, Homo sapien
cctgcccagatgtgagaaacgttga

SEQ ID NO: 2085575 - DNA, 25 bp, Homo sapien
tacctgtgtgtaaggataggcatgc

SEQ ID NO: 2085576 - DNA, 25 bp, Homo sapien
caacctgtgaggattgttacctgtg

SEQ ID NO: 2085577 - DNA, 25 bp, Homo sapien
gataggcatgccatcatcccttcct

SEQ ID NO: 2085578 - DNA, 25 bp, Homo sapien
tgcctgctttactggaattctacaa

SEQ ID NO: 2085579 - DNA, 25 bp, Homo sapien
tttactggaattctacaaaatacac

SEQ ID NO: 2085580 - DNA, 25 bp, Homo sapien
gcccctccagactccgaataggaga

SEQ ID NO: 2085581 - DNA, 25 bp, Homo sapien
tcaagagtttgattcattgcctgct

SEQ ID NO: 2085582 - DNA, 25 bp, Homo sapien
accccagcgtttaggcgcggaggca

SEQ ID NO: 2085583 - DNA, 25 bp, Homo sapien
gcgtctcagagaactcgcgcgtctc

SEQ ID NO: 2085584 - DNA, 25 bp, Homo sapien
gggactatgtgctcagcgtctcaga

SEQ ID NO: 2085585 - DNA, 25 bp, Homo sapien
aacttcgactcggaggagcggagta

SEQ ID NO: 2085586 - DNA, 25 bp, Homo sapien
tccagcagggcaaggaatgtagccg

SEQ ID NO: 2085587 - DNA, 25 bp, Homo sapien
tgggatgacagacagcttgcccgca

SEQ ID NO: 2085588 - DNA, 25 bp, Homo sapien
ggttggaagacgctgagagatcatc

SEQ ID NO: 2085589 - DNA, 25 bp, Homo sapien
ggagccccataaaacccacatcatg

SEQ ID NO: 2085590 - DNA, 25 bp, Homo sapien
ggcgggccctccctcgctgacgccg

SEQ ID NO: 2085591 - DNA, 25 bp, Homo sapien
gaaaacctgactcaggcggagcccg

SEQ ID NO: 2085592 - DNA, 25 bp, Homo sapien
ccaccctggtgccaacggcgtccct

SEQ ID NO: 2085593 - DNA, 25 bp, Homo sapien
gccgggcaggatgcgctaccgggcg

SEQ ID NO: 2085594 - DNA, 25 bp, Homo sapien
tctccccaccggatcggaagcgtgg

SEQ ID NO: 2085595 - DNA, 25 bp, Homo sapien
ccgggttgttgcagtgacgagcctt

SEQ ID NO: 2085596 - DNA, 25 bp, Homo sapien
ctaaccccaccagggcgagtctgtg

SEQ ID NO: 2085597 - DNA, 25 bp, Homo sapien
cgagtctgtgtacgccgttgtgttg

SEQ ID NO: 2085598 - DNA, 25 bp, Homo sapien
gcgcagcctggtggagacttagatt

SEQ ID NO: 2085599 - DNA, 25 bp, Homo sapien
caccgtgtgcctcgctgcgtgtagg

SEQ ID NO: 2085600 - DNA, 25 bp, Homo sapien
tccgcctctgggttccggagaagcc

SEQ ID NO: 2085601 - DNA, 25 bp, Homo sapien
cattcattcatccaggggtccggga

SEQ ID NO: 2085602 - DNA, 25 bp, Homo sapien
tccgcgacagctaggcgcgtgagac

SEQ ID NO: 2085603 - DNA, 25 bp, Homo sapien
cagtgttgcgcgtgcgctgatgaca

SEQ ID NO: 2085604 - DNA, 25 bp, Homo sapien
ggaagaaaaacagtccgcgacagct

SEQ ID NO: 2085605 - DNA, 25 bp, Homo sapien
ctttgcgctcgtgggagagtcccgc

SEQ ID NO: 2085606 - DNA, 25 bp, Homo sapien
caggcaggacagtggctaggctgcg

SEQ ID NO: 2085607 - DNA, 25 bp, Homo sapien
gcgaagacagcacaaggacggagcc

SEQ ID NO: 2085608 - DNA, 25 bp, Homo sapien
caggacagtggctaggctgcgtgtc

SEQ ID NO: 2085609 - DNA, 25 bp, Homo sapien
gagccctcggatccctcacgagtgg

SEQ ID NO: 2085610 - DNA, 25 bp, Homo sapien
tgcatataatagtcccgtgtcagtt

SEQ ID NO: 2085611 - DNA, 25 bp, Homo sapien
taaccgccattttaccagggcagga

SEQ ID NO: 2085612 - DNA, 25 bp, Homo sapien
aattcggccgtttcctactgacagg

SEQ ID NO: 2085613 - DNA, 25 bp, Homo sapien
tcaaacttgcactgataaccgccat

SEQ ID NO: 2085614 - DNA, 25 bp, Homo sapien
tgttgccccagttgaaaagcatcca

SEQ ID NO: 2085615 - DNA, 25 bp, Homo sapien
tcagcctggatctggaattgcagcc

SEQ ID NO: 2085616 - DNA, 25 bp, Homo sapien
gattgcacctgtgacatcctgatgg

SEQ ID NO: 2085617 - DNA, 25 bp, Homo sapien
taaacataaaggaggatgtccctgg

SEQ ID NO: 2085618 - DNA, 25 bp, Homo sapien
tagtctctaagccagtacatagtcg

SEQ ID NO: 2085619 - DNA, 25 bp, Homo sapien
tacatagtcgtctagtgcaggcaga

SEQ ID NO: 2085620 - DNA, 25 bp, Homo sapien
tgatgaagggtcactgcaaggccac

SEQ ID NO: 2085621 - DNA, 25 bp, Homo sapien
gatgaactgcacacttggaatagga

SEQ ID NO: 2085622 - DNA, 25 bp, Homo sapien
tgtcactaaggtgtctggtgttttg

SEQ ID NO: 2085623 - DNA, 25 bp, Homo sapien
attttccttgtcactaaggtgtctg

SEQ ID NO: 2085624 - DNA, 25 bp, Homo sapien
cagtgaatggataacattttccttg

SEQ ID NO: 2085625 - DNA, 25 bp, Homo sapien
tttccttgtcactaaggtgtctggt

SEQ ID NO: 2085626 - DNA, 25 bp, Homo sapien
gttttcatgtgtgcctagctgggtg

SEQ ID NO: 2085627 - DNA, 25 bp, Homo sapien
ctgacgggttttcatgtgtgcctag

SEQ ID NO: 2085628 - DNA, 25 bp, Homo sapien
gcacagggacagcttggggctccag

SEQ ID NO: 2085629 - DNA, 25 bp, Homo sapien
gtgcctagctgggtggtggacttgg

SEQ ID NO: 2085630 - DNA, 25 bp, Homo sapien
caggtctgaggaggctagattccca

SEQ ID NO: 2085631 - DNA, 25 bp, Homo sapien
caagagcaaggaacatcatcgcagg

SEQ ID NO: 2085632 - DNA, 25 bp, Homo sapien
gtcggccgggctgcttcacttcttg

SEQ ID NO: 2085633 - DNA, 25 bp, Homo sapien
agagcctttggtctaaccctgagtg

SEQ ID NO: 2085634 - DNA, 25 bp, Homo sapien
agtggtcagcccgttctcagcaaga

SEQ ID NO: 2085635 - DNA, 25 bp, Homo sapien
aagtgagtgctgatcaggattcacc

SEQ ID NO: 2085636 - DNA, 25 bp, Homo sapien
taatcagagcctgaagtctaagcag

SEQ ID NO: 2085637 - DNA, 25 bp, Homo sapien
cagttggcgggtgttcacttgtgat

SEQ ID NO: 2085638 - DNA, 25 bp, Homo sapien
ggagggccagcctgtcctggagcac

SEQ ID NO: 2085639 - DNA, 25 bp, Homo sapien
aggagggccagcctgtcctggagca

SEQ ID NO: 2085640 - DNA, 25 bp, Homo sapien
agtttcttgatggaacgaagggcga

SEQ ID NO: 2085641 - DNA, 25 bp, Homo sapien
tgtccagtgacgtcctctctgctgt

SEQ ID NO: 2085642 - DNA, 25 bp, Homo sapien
ctctgctgtacaggatgatcccacc

SEQ ID NO: 2085643 - DNA, 25 bp, Homo sapien
accccgatcgttaggaagatgtgcc

SEQ ID NO: 2085644 - DNA, 25 bp, Homo sapien
tgaaaatagcaagcgatgattttcc

SEQ ID NO: 2085645 - DNA, 25 bp, Homo sapien
aatagcaagcgatgattttccaaac

SEQ ID NO: 2085646 - DNA, 25 bp, Homo sapien
cccagcgcgtcccttgccctcaaac

SEQ ID NO: 2085647 - DNA, 25 bp, Homo sapien
tttattgaaaatagcaagcgatgat

SEQ ID NO: 2085648 - DNA, 25 bp, Homo sapien
gctgacaggtgttggcttggaaggg

SEQ ID NO: 2085649 - DNA, 25 bp, Homo sapien
ctgacaggtgttggcttggaagggt

SEQ ID NO: 2085650 - DNA, 25 bp, Homo sapien
caggatttgctgtaagaaggttcat

SEQ ID NO: 2085651 - DNA, 25 bp, Homo sapien
atccttgtatgtggggatctggcag

SEQ ID NO: 2085652 - DNA, 25 bp, Homo sapien
ggatttgctgtaagaaggttcatag

SEQ ID NO: 2085653 - DNA, 25 bp, Homo sapien
tccttgtatgtggggatctggcagc

SEQ ID NO: 2085654 - DNA, 25 bp, Homo sapien
cagctcatgcttccctaatgcttca

SEQ ID NO: 2085655 - DNA, 25 bp, Homo sapien
tagctgtttactagcctggagcaag

SEQ ID NO: 2085656 - DNA, 25 bp, Homo sapien
ctggacttgtatgggtaaaaccaag

SEQ ID NO: 2085657 - DNA, 25 bp, Homo sapien
accgaacgtctaagcttggaaactg

SEQ ID NO: 2085658 - DNA, 25 bp, Homo sapien
cttcctctaacaggattctgtttaa

SEQ ID NO: 2085659 - DNA, 25 bp, Homo sapien
aaattctggcctccaagttgggagt

SEQ ID NO: 2085660 - DNA, 25 bp, Homo sapien
aaaatcttggatgtgattttgactg

SEQ ID NO: 2085661 - DNA, 25 bp, Homo sapien
tccaacacttcctctaacaggattc

SEQ ID NO: 2085662 - DNA, 25 bp, Homo sapien
agtgtgcagccgtcacgtcagcagc

SEQ ID NO: 2085663 - DNA, 25 bp, Homo sapien
gcctcagcgcatcccgtcaggaatt

SEQ ID NO: 2085664 - DNA, 25 bp, Homo sapien
atcccgtcaggaattggcccatggc

SEQ ID NO: 2085665 - DNA, 25 bp, Homo sapien
ggcagtgtcagagtgtgcagccgtc

SEQ ID NO: 2085666 - DNA, 25 bp, Homo sapien
ctattgctgccgaagtggttttgtt

SEQ ID NO: 2085667 - DNA, 25 bp, Homo sapien
gtgcgagtgaaggtcacattagagt

SEQ ID NO: 2085668 - DNA, 25 bp, Homo sapien
gagtgaaggtcacattagagtgagt

SEQ ID NO: 2085669 - DNA, 25 bp, Homo sapien
aaagggtgcgagtgaaggtcacatt

SEQ ID NO: 2085670 - DNA, 25 bp, Homo sapien
aagggtgcgagtgaaggtcacatta

SEQ ID NO: 2085671 - DNA, 25 bp, Homo sapien
agggcctgcctggtatctgcgtttc

SEQ ID NO: 2085672 - DNA, 25 bp, Homo sapien
tccaaggtgccggagatgcagggcc

SEQ ID NO: 2085673 - DNA, 25 bp, Homo sapien
gaggtttgaagagaggcactccttc

SEQ ID NO: 2085674 - DNA, 25 bp, Homo sapien
cagggcatccgagacactggctgtg

SEQ ID NO: 2085675 - DNA, 25 bp, Homo sapien
gagacccacatgtcatcccagctaa

SEQ ID NO: 2085676 - DNA, 25 bp, Homo sapien
tggaggtgcttaggacatttaggac

SEQ ID NO: 2085677 - DNA, 25 bp, Homo sapien
tgatgttaattcagccagggctcgg

SEQ ID NO: 2085678 - DNA, 25 bp, Homo sapien
tacgatgccaacaggagaacgtggt

SEQ ID NO: 2085679 - DNA, 25 bp, Homo sapien
tgaggcagccaggcaggtgtgcaga

SEQ ID NO: 2085680 - DNA, 25 bp, Homo sapien
gcagccaggcaggtgtgcagagagc

SEQ ID NO: 2085681 - DNA, 25 bp, Homo sapien
aggcagccaggcaggtgtgcagaga

SEQ ID NO: 2085682 - DNA, 25 bp, Homo sapien
tgtgaggcagccaggcaggtgtgca

SEQ ID NO: 2085683 - DNA, 25 bp, Homo sapien
cagagcacgacgaagacgcacaggc

SEQ ID NO: 2085684 - DNA, 25 bp, Homo sapien
caccgagccgcgaagcgacatggtg

SEQ ID NO: 2085685 - DNA, 25 bp, Homo sapien
ccaccgagccgcgaagcgacatggt

SEQ ID NO: 2085686 - DNA, 25 bp, Homo sapien
acgacgaagacgcacaggcagccgg

SEQ ID NO: 2085687 - DNA, 25 bp, Homo sapien
gtgacggacaccctagtctgctccg

SEQ ID NO: 2085688 - DNA, 25 bp, Homo sapien
ctcggaaccgacagcgccgccgcgg

SEQ ID NO: 2085689 - DNA, 25 bp, Homo sapien
cgaggacggtgacggacaccctagt

SEQ ID NO: 2085690 - DNA, 25 bp, Homo sapien
gtctgctccgccttctgccgggtct

SEQ ID NO: 2085691 - DNA, 25 bp, Homo sapien
ccgcgtgcatccgtggcggttcaca

SEQ ID NO: 2085692 - DNA, 25 bp, Homo sapien
cgcgtgcatccgtggcggttcacac

SEQ ID NO: 2085693 - DNA, 25 bp, Homo sapien
taagacttggccaaatagctgctcg

SEQ ID NO: 2085694 - DNA, 25 bp, Homo sapien
catccgggcatgtcagggtgtgtac

SEQ ID NO: 2085695 - DNA, 25 bp, Homo sapien
tgtgtgccgctctctgaatggagga

SEQ ID NO: 2085696 - DNA, 25 bp, Homo sapien
tctaagtgtgagatgcatccgggca

SEQ ID NO: 2085697 - DNA, 25 bp, Homo sapien
tctgagaagcctccacagaatcagc

SEQ ID NO: 2085698 - DNA, 25 bp, Homo sapien
ctgggaggggttgtgggcctcctgc

SEQ ID NO: 2085699 - DNA, 25 bp, Homo sapien
ctcctgcggtgaggggctcctgcca

SEQ ID NO: 2085700 - DNA, 25 bp, Homo sapien
agcctccacagaatcagccgtcggg

SEQ ID NO: 2085701 - DNA, 25 bp, Homo sapien
ccaagtggagtttccgacgcacttg

SEQ ID NO: 2085702 - DNA, 25 bp, Homo sapien
gcacaatcacgttcagccaagtgga

SEQ ID NO: 2085703 - DNA, 25 bp, Homo sapien
ccgcgtgaatgtgagccgatatgca

SEQ ID NO: 2085704 - DNA, 25 bp, Homo sapien
gcacttgtgtggcagccgcgtgaat

SEQ ID NO: 2085705 - DNA, 25 bp, Homo sapien
ctgaaaatggcgggacatccagtat

SEQ ID NO: 2085706 - DNA, 25 bp, Homo sapien
tgaaaatggcgggacatccagtatt

SEQ ID NO: 2085707 - DNA, 25 bp, Homo sapien
gacgtggttgcaggccctggtggat

SEQ ID NO: 2085708 - DNA, 25 bp, Homo sapien
tgcacccagcatcgtcctggtcaga

SEQ ID NO: 2085709 - DNA, 25 bp, Homo sapien
taaaccttccttgcctgccgtgcac

SEQ ID NO: 2085710 - DNA, 25 bp, Homo sapien
ccgaggggggcgtcactttgccata

SEQ ID NO: 2085711 - DNA, 25 bp, Homo sapien
ctgctgcctggacctatacacaagg

SEQ ID NO: 2085712 - DNA, 25 bp, Homo sapien
ctatacacaaggtcccacccctcac

SEQ ID NO: 2085713 - DNA, 25 bp, Homo sapien
gctgcctggacctatacacaaggtc

SEQ ID NO: 2085714 - DNA, 25 bp, Homo sapien
tgcctggacctatacacaaggtccc

SEQ ID NO: 2085715 - DNA, 25 bp, Homo sapien
ggacattccactcggagcagcagct

SEQ ID NO: 2085716 - DNA, 25 bp, Homo sapien
cggagctctgtggtggaaggacggg

SEQ ID NO: 2085717 - DNA, 25 bp, Homo sapien
tcccgccagtgtctggattctgcct

SEQ ID NO: 2085718 - DNA, 25 bp, Homo sapien
aaaggcttgcactgtctcgcccgcg

SEQ ID NO: 2085719 - DNA, 25 bp, Homo sapien
gcgttttctcctgccgaacgcaggg

SEQ ID NO: 2085720 - DNA, 25 bp, Homo sapien
tgagcttgggaaccgaggcttgtcc

SEQ ID NO: 2085721 - DNA, 25 bp, Homo sapien
ggtagatatggccacggagatgcct

SEQ ID NO: 2085722 - DNA, 25 bp, Homo sapien
tttgaactgcaacctacctgggagg

SEQ ID NO: 2085723 - DNA, 25 bp, Homo sapien
gagatgcctttgctacagtgcagta

SEQ ID NO: 2085724 - DNA, 25 bp, Homo sapien
gaaatccccgcatttggctcgtctg

SEQ ID NO: 2085725 - DNA, 25 bp, Homo sapien
tagacttgtgaaagcctgagcagtg

SEQ ID NO: 2085726 - DNA, 25 bp, Homo sapien
cagtgtccggctgattgagatgcaa

SEQ ID NO: 2085727 - DNA, 25 bp, Homo sapien
tcccagagattgtgccagcgcagtg

SEQ ID NO: 2085728 - DNA, 25 bp, Homo sapien
tgtttgtctccgagtccggccggaa

SEQ ID NO: 2085729 - DNA, 25 bp, Homo sapien
tcagagcgatctgtcttgcgcaagg

SEQ ID NO: 2085730 - DNA, 25 bp, Homo sapien
cagtttacctcggagtgagctgcgg

SEQ ID NO: 2085731 - DNA, 25 bp, Homo sapien
tttgtggacgaagacatcgaggctc

SEQ ID NO: 2085732 - DNA, 25 bp, Homo sapien
ggagcgaggaaccaggacccaaagc

SEQ ID NO: 2085733 - DNA, 25 bp, Homo sapien
ttcccggccgcgctgtgactcgggt

SEQ ID NO: 2085734 - DNA, 25 bp, Homo sapien
gttgaaggctgcaaagccgaggccc

SEQ ID NO: 2085735 - DNA, 25 bp, Homo sapien
ggattcgagagtggaaccaccgtgc

SEQ ID NO: 2085736 - DNA, 25 bp, Homo sapien
tcagcggggggcgccacggctggac

SEQ ID NO: 2085737 - DNA, 25 bp, Homo sapien
caacttccagggaccgggcagacgc

SEQ ID NO: 2085738 - DNA, 25 bp, Homo sapien
gcagatttccaagggccaacttcca

SEQ ID NO: 2085739 - DNA, 25 bp, Homo sapien
cgggcagacgccaccggggagaggg

SEQ ID NO: 2085740 - DNA, 25 bp, Homo sapien
gccccaaatccccttgcagatttcc

SEQ ID NO: 2085741 - DNA, 25 bp, Homo sapien
agcagtgcgtgaacacgggcggaga

SEQ ID NO: 2085742 - DNA, 25 bp, Homo sapien
acccagatgacgatcaagggtggag

SEQ ID NO: 2085743 - DNA, 25 bp, Homo sapien
gcacccagatgacgatcaagggtgg

SEQ ID NO: 2085744 - DNA, 25 bp, Homo sapien
tggagggtccccggaggaccgagca

SEQ ID NO: 2085745 - DNA, 25 bp, Homo sapien
tggcccgtagcatcgccctgcagag

SEQ ID NO: 2085746 - DNA, 25 bp, Homo sapien
tagtgcctcgaatccgggggacgaa

SEQ ID NO: 2085747 - DNA, 25 bp, Homo sapien
tttcggagcccgggcttatcagacg

SEQ ID NO: 2085748 - DNA, 25 bp, Homo sapien
tagcttgtaccagctggcggacgtg

SEQ ID NO: 2085749 - DNA, 25 bp, Homo sapien
agcgagccagggtgaccaaggcgat

SEQ ID NO: 2085750 - DNA, 25 bp, Homo sapien
agccagggtgaccaaggcgattctg

SEQ ID NO: 2085751 - DNA, 25 bp, Homo sapien
cggagcgagccagggtgaccaaggc

SEQ ID NO: 2085752 - DNA, 25 bp, Homo sapien
ccccggagcgagccagggtgaccaa

SEQ ID NO: 2085753 - DNA, 25 bp, Homo sapien
tggcccgggcggattctagacagta

SEQ ID NO: 2085754 - DNA, 25 bp, Homo sapien
ctgacagctccaagcgttgtctggg

SEQ ID NO: 2085755 - DNA, 25 bp, Homo sapien
tgaggaaccgggtaggctaccagct

SEQ ID NO: 2085756 - DNA, 25 bp, Homo sapien
tatttgaggcatgtttgagccctgc

SEQ ID NO: 2085757 - DNA, 25 bp, Homo sapien
ttataaaacaatgccagcagtggac

SEQ ID NO: 2085758 - DNA, 25 bp, Homo sapien
aagttgaataagacaccgtcctgcc

SEQ ID NO: 2085759 - DNA, 25 bp, Homo sapien
caaaatgaggctatgtcgcgagcta

SEQ ID NO: 2085760 - DNA, 25 bp, Homo sapien
gcttctctatcaagggctggtcata

SEQ ID NO: 2085761 - DNA, 25 bp, Homo sapien
cctttcaggtccatctttctcacag

SEQ ID NO: 2085762 - DNA, 25 bp, Homo sapien
catcctatcctttcaggtccatctt

SEQ ID NO: 2085763 - DNA, 25 bp, Homo sapien
tgcaagagtgaatcatctaacacag

SEQ ID NO: 2085764 - DNA, 25 bp, Homo sapien
ctaacacagaaatttgacaaagtct

SEQ ID NO: 2085765 - DNA, 25 bp, Homo sapien
ttcaggtccatctttctcacagctg

SEQ ID NO: 2085766 - DNA, 25 bp, Homo sapien
acagaaatttgacaaagtctgcatc

SEQ ID NO: 2085767 - DNA, 25 bp, Homo sapien
aagatggacctgaaaggataggatg

SEQ ID NO: 2085768 - DNA, 25 bp, Homo sapien
cagctgtgagaaagatggacctgaa

SEQ ID NO: 2085769 - DNA, 25 bp, Homo sapien
agactttgtcaaatttctgtgttag

SEQ ID NO: 2085770 - DNA, 25 bp, Homo sapien
gatgcagactttgtcaaatttctgt

SEQ ID NO: 2085771 - DNA, 25 bp, Homo sapien
gaaagatggacctgaaaggatagga

SEQ ID NO: 2085772 - DNA, 25 bp, Homo sapien
tgtgttagatgattcactcttgcag

SEQ ID NO: 2085773 - DNA, 25 bp, Homo sapien
caatacaagcaaatccatcaccagg

SEQ ID NO: 2085774 - DNA, 25 bp, Homo sapien
cataatactgcacgatgaatgaggc

SEQ ID NO: 2085775 - DNA, 25 bp, Homo sapien
tggcccggtgcaatcccaatacaag

SEQ ID NO: 2085776 - DNA, 25 bp, Homo sapien
taccctgcaaggctaggaatccagg

SEQ ID NO: 2085777 - DNA, 25 bp, Homo sapien
cagcagttaagtcaactcaggtaca

SEQ ID NO: 2085778 - DNA, 25 bp, Homo sapien
aaagcacatgcctcagtaccctgca

SEQ ID NO: 2085779 - DNA, 25 bp, Homo sapien
tcattcatcgtgcagtattatggcc

SEQ ID NO: 2085780 - DNA, 25 bp, Homo sapien
gcttgtattgggattgcaccgggcc

SEQ ID NO: 2085781 - DNA, 25 bp, Homo sapien
gattcctagccttgcagggtactga

SEQ ID NO: 2085782 - DNA, 25 bp, Homo sapien
gcagatacattgatcgcatccatat

SEQ ID NO: 2085783 - DNA, 25 bp, Homo sapien
tattatggcctggtgatggatttgc

SEQ ID NO: 2085784 - DNA, 25 bp, Homo sapien
tgtacctgagttgacttaactgctg

SEQ ID NO: 2085785 - DNA, 25 bp, Homo sapien
gctgctctccaaataggtccctgga

SEQ ID NO: 2085786 - DNA, 25 bp, Homo sapien
gatcgcccatgtgaatttaaaggag

SEQ ID NO: 2085787 - DNA, 25 bp, Homo sapien
tagctgctctccaaataggtccctg

SEQ ID NO: 2085788 - DNA, 25 bp, Homo sapien
gcaaaaaccaggaactaagatcgcc

SEQ ID NO: 2085789 - DNA, 25 bp, Homo sapien
taagatcgcccatgtgaatttaaag

SEQ ID NO: 2085790 - DNA, 25 bp, Homo sapien
ggcaaaaaccaggaactaagatcgc

SEQ ID NO: 2085791 - DNA, 25 bp, Homo sapien
ttaaattcacatgggcgatcttagt

SEQ ID NO: 2085792 - DNA, 25 bp, Homo sapien
ctcctttaaattcacatgggcgatc

SEQ ID NO: 2085793 - DNA, 25 bp, Homo sapien
cctttaaattcacatgggcgatctt

SEQ ID NO: 2085794 - DNA, 25 bp, Homo sapien
tccagggacctatttggagagcagc

SEQ ID NO: 2085795 - DNA, 25 bp, Homo sapien
cagggacctatttggagagcagcta

SEQ ID NO: 2085796 - DNA, 25 bp, Homo sapien
gcgatcttagttcctggtttttgcc

SEQ ID NO: 2085797 - DNA, 25 bp, Homo sapien
cgcactgtgagagagcgaagtctaa

SEQ ID NO: 2085798 - DNA, 25 bp, Homo sapien
gagcggcgggatagaaaaattcact

SEQ ID NO: 2085799 - DNA, 25 bp, Homo sapien
ggcccataggcggaaaggctttgaa

SEQ ID NO: 2085800 - DNA, 25 bp, Homo sapien
caagaagcgcagcagaaaggcgtcc

SEQ ID NO: 2085801 - DNA, 25 bp, Homo sapien
caattagagttgcacactgcgccga

SEQ ID NO: 2085802 - DNA, 25 bp, Homo sapien
taaggaaacactccggccatatccg

SEQ ID NO: 2085803 - DNA, 25 bp, Homo sapien
tcctcggcgcagtgtgcaactctaa

SEQ ID NO: 2085804 - DNA, 25 bp, Homo sapien
cggagtgtttccttatcgagggccg

SEQ ID NO: 2085805 - DNA, 25 bp, Homo sapien
ttcaaagcctttccgcctatgggcc

SEQ ID NO: 2085806 - DNA, 25 bp, Homo sapien
tcaactgctgaactcgggttgcgca

SEQ ID NO: 2085807 - DNA, 25 bp, Homo sapien
taccggactacatgtcggaggagaa

SEQ ID NO: 2085808 - DNA, 25 bp, Homo sapien
ttagacttcgctctctcacagtgcg

SEQ ID NO: 2085809 - DNA, 25 bp, Homo sapien
agctgcagcgcaaaccctaaagaca

SEQ ID NO: 2085810 - DNA, 25 bp, Homo sapien
taaagacaggctgacagtaaccggt

SEQ ID NO: 2085811 - DNA, 25 bp, Homo sapien
agataaggacaagtcagaatcaggg

SEQ ID NO: 2085812 - DNA, 25 bp, Homo sapien
tcggcagagactggtaggaagataa

SEQ ID NO: 2085813 - DNA, 25 bp, Homo sapien
ggagtaccgcgcagacattaaaagt

SEQ ID NO: 2085814 - DNA, 25 bp, Homo sapien
gagtatacatcggtgcaggcttcct

SEQ ID NO: 2085815 - DNA, 25 bp, Homo sapien
gtgtcatgtggcctaaaagcctcca

SEQ ID NO: 2085816 - DNA, 25 bp, Homo sapien
cagataaaaaagacggaaggcatac

SEQ ID NO: 2085817 - DNA, 25 bp, Homo sapien
tccgtactttctccttgcttcactg

SEQ ID NO: 2085818 - DNA, 25 bp, Homo sapien
gcaggatgcgtgtgggacagtggta

SEQ ID NO: 2085819 - DNA, 25 bp, Homo sapien
catcttcacccatcatggagcagag

SEQ ID NO: 2085820 - DNA, 25 bp, Homo sapien
gctgcaacaaaggtgactctgtccc

SEQ ID NO: 2085821 - DNA, 25 bp, Homo sapien
gggagctgtatcttgtcctccgctt

SEQ ID NO: 2085822 - DNA, 25 bp, Homo sapien
tgtatcttgtcctccgcttgtgaaa

SEQ ID NO: 2085823 - DNA, 25 bp, Homo sapien
aagctgtgtctgttcgatttggtgg

SEQ ID NO: 2085824 - DNA, 25 bp, Homo sapien
gctgtatcttgtcctccgcttgtga

SEQ ID NO: 2085825 - DNA, 25 bp, Homo sapien
cccttggtgggattctaactgctgc

SEQ ID NO: 2085826 - DNA, 25 bp, Homo sapien
tagagttagaccaatgcgaggagct

SEQ ID NO: 2085827 - DNA, 25 bp, Homo sapien
tccaaggtggtatgtgatccccagc

SEQ ID NO: 2085828 - DNA, 25 bp, Homo sapien
ggaaattctcccctgcagcaagtag

SEQ ID NO: 2085829 - DNA, 25 bp, Homo sapien
gactctagattcctgggcacttacc

SEQ ID NO: 2085830 - DNA, 25 bp, Homo sapien
tgcatttccttaggctggcccagac

SEQ ID NO: 2085831 - DNA, 25 bp, Homo sapien
tatctgagacccttagacctcctgt

SEQ ID NO: 2085832 - DNA, 25 bp, Homo sapien
agtttctccacctgtgagatgggca

SEQ ID NO: 2085833 - DNA, 25 bp, Homo sapien
ctctcggccaactcttggcccctcc

SEQ ID NO: 2085834 - DNA, 25 bp, Homo sapien
gacgccgtggctttcgcctgctctt

SEQ ID NO: 2085835 - DNA, 25 bp, Homo sapien
ttctgggaacgacggtgtcaggctg

SEQ ID NO: 2085836 - DNA, 25 bp, Homo sapien
tgtcaggctgagaactacacggacc

SEQ ID NO: 2085837 - DNA, 25 bp, Homo sapien
gcatgcattgcaaacgcagacgccg

SEQ ID NO: 2085838 - DNA, 25 bp, Homo sapien
cagctgacgcgggtcacgtgatcgc

SEQ ID NO: 2085839 - DNA, 25 bp, Homo sapien
aaacaagcgcacgtggctccagagg

SEQ ID NO: 2085840 - DNA, 25 bp, Homo sapien
acgtgatcgccccagcacggaaaca

SEQ ID NO: 2085841 - DNA, 25 bp, Homo sapien
ggctccaccgtgacgggtcagctga

SEQ ID NO: 2085842 - DNA, 25 bp, Homo sapien
gcttggcggggaatgccagcccccg

SEQ ID NO: 2085843 - DNA, 25 bp, Homo sapien
gtctgggcttggcggggaatgccag

SEQ ID NO: 2085844 - DNA, 25 bp, Homo sapien
gggcttggcggggaatgccagcccc

SEQ ID NO: 2085845 - DNA, 25 bp, Homo sapien
ttggcggggaatgccagcccccggc

SEQ ID NO: 2085846 - DNA, 25 bp, Homo sapien
ccgtaagtgtggtatgcatggcgcc

SEQ ID NO: 2085847 - DNA, 25 bp, Homo sapien
tgcgataattctgggcggcaacctc

SEQ ID NO: 2085848 - DNA, 25 bp, Homo sapien
tgaccacgtcatgtagggagaactg

SEQ ID NO: 2085849 - DNA, 25 bp, Homo sapien
gatgtgatacaaagacagggcccca

SEQ ID NO: 2085850 - DNA, 25 bp, Homo sapien
tgccaaccgattcagctgcatgagg

SEQ ID NO: 2085851 - DNA, 25 bp, Homo sapien
tcggtgtagaactccggaatgcact

SEQ ID NO: 2085852 - DNA, 25 bp, Homo sapien
aacgtgaggtcgatccaatggtgca

SEQ ID NO: 2085853 - DNA, 25 bp, Homo sapien
catagtacgtgatgtcggagagcac

SEQ ID NO: 2085854 - DNA, 25 bp, Homo sapien
ggacgcttgactggaggagcccagc

SEQ ID NO: 2085855 - DNA, 25 bp, Homo sapien
gaagtccaggggacgcttgactgga

SEQ ID NO: 2085856 - DNA, 25 bp, Homo sapien
tccaggggacgcttgactggaggag

SEQ ID NO: 2085857 - DNA, 25 bp, Homo sapien
ggggacgcttgactggaggagccca

SEQ ID NO: 2085858 - DNA, 25 bp, Homo sapien
cagctgtgtgctcctcggacatgag

SEQ ID NO: 2085859 - DNA, 25 bp, Homo sapien
ggctcaaacagataccaggccgtgt

SEQ ID NO: 2085860 - DNA, 25 bp, Homo sapien
caaagcagtccgtgtacaggtagaa

SEQ ID NO: 2085861 - DNA, 25 bp, Homo sapien
tcgtaggcaccaatgagcggcttca

SEQ ID NO: 2085862 - DNA, 25 bp, Homo sapien
ctgggaggcctctgcgcccgccagc

SEQ ID NO: 2085863 - DNA, 25 bp, Homo sapien
gggaggcctctgcgcccgccagcac

SEQ ID NO: 2085864 - DNA, 25 bp, Homo sapien
cccctgccaggtccttgctctcctc

SEQ ID NO: 2085865 - DNA, 25 bp, Homo sapien
cagcagcccctgccaggtccttgct

SEQ ID NO: 2085866 - DNA, 25 bp, Homo sapien
aagcacaggagccaggcccggcccc

SEQ ID NO: 2085867 - DNA, 25 bp, Homo sapien
gaatctcctccccaaaagcacagga

SEQ ID NO: 2085868 - DNA, 25 bp, Homo sapien
gcccggccccgggcagcccgctctc

SEQ ID NO: 2085869 - DNA, 25 bp, Homo sapien
gggaatctcctccccaaaagcacag

SEQ ID NO: 2085870 - DNA, 25 bp, Homo sapien
gagcccggcttggaagtcctctgtc

SEQ ID NO: 2085871 - DNA, 25 bp, Homo sapien
agcctggtcgtggaagctgacgcca

SEQ ID NO: 2085872 - DNA, 25 bp, Homo sapien
cgccagacgtgtagtctgggagccc

SEQ ID NO: 2085873 - DNA, 25 bp, Homo sapien
gggagactcagtcacatagagcccg

SEQ ID NO: 2085874 - DNA, 25 bp, Homo sapien
gccacaaccgtctccatggacagca

SEQ ID NO: 2085875 - DNA, 25 bp, Homo sapien
cagcaccgtgtcagacagagtgagc

SEQ ID NO: 2085876 - DNA, 25 bp, Homo sapien
tcctctagcaccacgcagctgtcct

SEQ ID NO: 2085877 - DNA, 25 bp, Homo sapien
tcggagccctcgctttgcttcaagt

SEQ ID NO: 2085878 - DNA, 25 bp, Homo sapien
gttccgggccacgtggcgagaggcc

SEQ ID NO: 2085879 - DNA, 25 bp, Homo sapien
cagcggaccatcttgcaggctgtat

SEQ ID NO: 2085880 - DNA, 25 bp, Homo sapien
cgtcagcaggcggagcaggttccgg

SEQ ID NO: 2085881 - DNA, 25 bp, Homo sapien
agcttggcagacagccagcggacca

SEQ ID NO: 2085882 - DNA, 25 bp, Homo sapien
tgagcacaggccctgacacgatgtc

SEQ ID NO: 2085883 - DNA, 25 bp, Homo sapien
tgctcactgtgaactgctgccgagt

SEQ ID NO: 2085884 - DNA, 25 bp, Homo sapien
ttctggtagatgttgccggcgctca

SEQ ID NO: 2085885 - DNA, 25 bp, Homo sapien
gtgggctctcgccactgctcactgt

SEQ ID NO: 2085886 - DNA, 25 bp, Homo sapien
ctccttacggctgttcagtcggctg

SEQ ID NO: 2085887 - DNA, 25 bp, Homo sapien
agaggtacacgatgatcttctgagt

SEQ ID NO: 2085888 - DNA, 25 bp, Homo sapien
acctcatggctgatccggggcagga

SEQ ID NO: 2085889 - DNA, 25 bp, Homo sapien
gagtcagcgtcaccgcggccagcag

SEQ ID NO: 2085890 - DNA, 25 bp, Homo sapien
gaaaaaggtggccacgggctcgctc

SEQ ID NO: 2085891 - DNA, 25 bp, Homo sapien
catctcctgtccaatgcgcaggcag

SEQ ID NO: 2085892 - DNA, 25 bp, Homo sapien
tgttgccgaagctcatgcagctgag

SEQ ID NO: 2085893 - DNA, 25 bp, Homo sapien
gatggttttcacacacaggatggtc

SEQ ID NO: 2085894 - DNA, 25 bp, Homo sapien
tgctgcccatcagagaagaccacct

SEQ ID NO: 2085895 - DNA, 25 bp, Homo sapien
accacggcccgcagggtccagcttc

SEQ ID NO: 2085896 - DNA, 25 bp, Homo sapien
gccgctgctgcccatcagagaagac

SEQ ID NO: 2085897 - DNA, 25 bp, Homo sapien
tggcagctggccctcaccacggccc

SEQ ID NO: 2085898 - DNA, 25 bp, Homo sapien
aagggcacgtagattgtgtatgcca

SEQ ID NO: 2085899 - DNA, 25 bp, Homo sapien
gcacgtagattgtgtatgccatctc

SEQ ID NO: 2085900 - DNA, 25 bp, Homo sapien
gggcacgtagattgtgtatgccatc

SEQ ID NO: 2085901 - DNA, 25 bp, Homo sapien
agaagggcacgtagattgtgtatgc

SEQ ID NO: 2085902 - DNA, 25 bp, Homo sapien
gaagcttcgtaaacaggaggccact

SEQ ID NO: 2085903 - DNA, 25 bp, Homo sapien
tcttctatatgtgccgtgccgtgct

SEQ ID NO: 2085904 - DNA, 25 bp, Homo sapien
tatggaacaagacaggtggtgccct

SEQ ID NO: 2085905 - DNA, 25 bp, Homo sapien
tatcacccatccaaggactcgggag

SEQ ID NO: 2085906 - DNA, 25 bp, Homo sapien
gctgccgctcaggaagaagtcctcg

SEQ ID NO: 2085907 - DNA, 25 bp, Homo sapien
gaggcgcacggtacgatccttgctg

SEQ ID NO: 2085908 - DNA, 25 bp, Homo sapien
ctgagtggccgtcatcctgagggca

SEQ ID NO: 2085909 - DNA, 25 bp, Homo sapien
ccgtagttgtacagcggccagaggc

SEQ ID NO: 2085910 - DNA, 25 bp, Homo sapien
tgccacctgagtttgagagattctc

SEQ ID NO: 2085911 - DNA, 25 bp, Homo sapien
cctctgccacctgagtttgagagat

SEQ ID NO: 2085912 - DNA, 25 bp, Homo sapien
tctgccacctgagtttgagagattc

SEQ ID NO: 2085913 - DNA, 25 bp, Homo sapien
aacctctgccacctgagtttgagag

SEQ ID NO: 2085914 - DNA, 25 bp, Homo sapien
ggcatgacagccaccgcagtcaggg

SEQ ID NO: 2085915 - DNA, 25 bp, Homo sapien
ggcgggcatgacagccaccgcagtc

SEQ ID NO: 2085916 - DNA, 25 bp, Homo sapien
tccacaaagcgcagggtagagtcag

SEQ ID NO: 2085917 - DNA, 25 bp, Homo sapien
ttcctgcagtccacaaagcgcaggg

SEQ ID NO: 2085918 - DNA, 25 bp, Homo sapien
gcaccaaagagaaactaactagggc

SEQ ID NO: 2085919 - DNA, 25 bp, Homo sapien
aactagggccccagaacaacatcct

SEQ ID NO: 2085920 - DNA, 25 bp, Homo sapien
gctgtgggtgatctagcaccaaaga

SEQ ID NO: 2085921 - DNA, 25 bp, Homo sapien
gaaccaggcgagtgctcagggaact

SEQ ID NO: 2085922 - DNA, 25 bp, Homo sapien
agaaccaggcctgtgcgggtgtcca

SEQ ID NO: 2085923 - DNA, 25 bp, Homo sapien
agggttcagcccaccgcccagtcgg

SEQ ID NO: 2085924 - DNA, 25 bp, Homo sapien
agggcacggacaagcccagggttca

SEQ ID NO: 2085925 - DNA, 25 bp, Homo sapien
gagaagccggccacgacactacggc

SEQ ID NO: 2085926 - DNA, 25 bp, Homo sapien
cttgatctgcagaatgtccccctcg

SEQ ID NO: 2085927 - DNA, 25 bp, Homo sapien
ctgcagaatgtccccctcgtgggct

SEQ ID NO: 2085928 - DNA, 25 bp, Homo sapien
tgatctgcagaatgtccccctcgtg

SEQ ID NO: 2085929 - DNA, 25 bp, Homo sapien
gcagaatgtccccctcgtgggctgg

SEQ ID NO: 2085930 - DNA, 25 bp, Homo sapien
tccagacggtcaaggaatggtcaga

SEQ ID NO: 2085931 - DNA, 25 bp, Homo sapien
cgtgccgcggaagttctcagagctg

SEQ ID NO: 2085932 - DNA, 25 bp, Homo sapien
caatcttgttggacacggtgccagt

SEQ ID NO: 2085933 - DNA, 25 bp, Homo sapien
tcagagctgagcttcgtggtggcct

SEQ ID NO: 2085934 - DNA, 25 bp, Homo sapien
cactccatttgcaggccctagttgg

SEQ ID NO: 2085935 - DNA, 25 bp, Homo sapien
tgaatgagacccctctggcaggctt

SEQ ID NO: 2085936 - DNA, 25 bp, Homo sapien
ctgcttgctaggagccctgtgtccc

SEQ ID NO: 2085937 - DNA, 25 bp, Homo sapien
tgaaggtagcaacgcttcctcctgc

SEQ ID NO: 2085938 - DNA, 25 bp, Homo sapien
aacgcatggactcactcctggcagg

SEQ ID NO: 2085939 - DNA, 25 bp, Homo sapien
tggtcctatttacatctattgcaaa

SEQ ID NO: 2085940 - DNA, 25 bp, Homo sapien
tcttccaaaggatttattggtccta

SEQ ID NO: 2085941 - DNA, 25 bp, Homo sapien
catctctgtctagaatgtgaggtcg

SEQ ID NO: 2085942 - DNA, 25 bp, Homo sapien
cccaccctcactgtcctgcgcctca

SEQ ID NO: 2085943 - DNA, 25 bp, Homo sapien
cccaccctcactgtcctgcgcctca

SEQ ID NO: 2085944 - DNA, 25 bp, Homo sapien
tccctgcatcaggccgcctcccacc

SEQ ID NO: 2085945 - DNA, 25 bp, Homo sapien
cccaccctcactgtcctgcgcctca

SEQ ID NO: 2085946 - DNA, 25 bp, Homo sapien
tccctgcatcaggccgcctcccacc

SEQ ID NO: 2085947 - DNA, 25 bp, Homo sapien
cccaccctcactgtcctgcgcctca

SEQ ID NO: 2085948 - DNA, 25 bp, Homo sapien
acacacaacgttcctctggccccac

SEQ ID NO: 2085949 - DNA, 25 bp, Homo sapien
cacacacaacgttcctctggcccca

SEQ ID NO: 2085950 - DNA, 25 bp, Homo sapien
acacaacgttcctctggccccactt

SEQ ID NO: 2085951 - DNA, 25 bp, Homo sapien
acaacgttcctctggccccacttgg

SEQ ID NO: 2085952 - DNA, 25 bp, Homo sapien
tcttcttgccaagaacaggctccag

SEQ ID NO: 2085953 - DNA, 25 bp, Homo sapien
gaacaggctccagtttttcaagtcc

SEQ ID NO: 2085954 - DNA, 25 bp, Homo sapien
ctgggcattagaatcttcttgccaa

SEQ ID NO: 2085955 - DNA, 25 bp, Homo sapien
tagaatcttcttgccaagaacaggc

SEQ ID NO: 2085956 - DNA, 25 bp, Homo sapien
gccttgcaggcaggaccagctgagc

SEQ ID NO: 2085957 - DNA, 25 bp, Homo sapien
aggggccttgcaggcaggaccagct

SEQ ID NO: 2085958 - DNA, 25 bp, Homo sapien
gcaggcaggaccagctgagcaccag

SEQ ID NO: 2085959 - DNA, 25 bp, Homo sapien
agcaggggccttgcaggcaggacca

SEQ ID NO: 2085960 - DNA, 25 bp, Homo sapien
ggctccatggcgctcacaggggaga

SEQ ID NO: 2085961 - DNA, 25 bp, Homo sapien
gctccatggcgctcacaggggagaa

SEQ ID NO: 2085962 - DNA, 25 bp, Homo sapien
acctgctcctggttcggcccgctag

SEQ ID NO: 2085963 - DNA, 25 bp, Homo sapien
ttgcccaacttgaggagggtaagtg

SEQ ID NO: 2085964 - DNA, 25 bp, Homo sapien
gctcctggttcggcccgctagttag

SEQ ID NO: 2085965 - DNA, 25 bp, Homo sapien
ctgctcctggttcggcccgctagtt

SEQ ID NO: 2085966 - DNA, 25 bp, Homo sapien
tctgctgcagactcctgggggactc

SEQ ID NO: 2085967 - DNA, 25 bp, Homo sapien
ctgctgcagactcctgggggactct

SEQ ID NO: 2085968 - DNA, 25 bp, Homo sapien
ggacgtttgagccaccagggagaac

SEQ ID NO: 2085969 - DNA, 25 bp, Homo sapien
tgaaggccatcatggcccgggccag

SEQ ID NO: 2085970 - DNA, 25 bp, Homo sapien
agaacaggtcggcagtgaaggccat

SEQ ID NO: 2085971 - DNA, 25 bp, Homo sapien
gacgtttgagccaccagggagaaca

SEQ ID NO: 2085972 - DNA, 25 bp, Homo sapien
tggcagaggcggctcagcagatggg

SEQ ID NO: 2085973 - DNA, 25 bp, Homo sapien
cagcctctgcaacgtgtggttctga

SEQ ID NO: 2085974 - DNA, 25 bp, Homo sapien
atcctggcagccagtcggaacgcgc

SEQ ID NO: 2085975 - DNA, 25 bp, Homo sapien
cgtgcagcacctgttgcagcctctg

SEQ ID NO: 2085976 - DNA, 25 bp, Homo sapien
gaattcctgaatcttcccctccgtg

SEQ ID NO: 2085977 - DNA, 25 bp, Homo sapien
cgttgaggagaagcaacacggtgtc

SEQ ID NO: 2085978 - DNA, 25 bp, Homo sapien
cacccattggttgatgtttgccagg

SEQ ID NO: 2085979 - DNA, 25 bp, Homo sapien
ccaaatagctgttcggattgttcca

SEQ ID NO: 2085980 - DNA, 25 bp, Homo sapien
tccagcaagaaccagcgcagcgggt

SEQ ID NO: 2085981 - DNA, 25 bp, Homo sapien
tctctctgggtaaggctcgggtcaa

SEQ ID NO: 2085982 - DNA, 25 bp, Homo sapien
gggtacgtgcgggcctgcatcattt

SEQ ID NO: 2085983 - DNA, 25 bp, Homo sapien
cgtgaactgctcgtccaggtggaag

SEQ ID NO: 2085984 - DNA, 25 bp, Homo sapien
tctcacctggccaattgatgtattt

SEQ ID NO: 2085985 - DNA, 25 bp, Homo sapien
tacaggcgctcaccatctcacctgg

SEQ ID NO: 2085986 - DNA, 25 bp, Homo sapien
accatctcacctggccaattgatgt

SEQ ID NO: 2085987 - DNA, 25 bp, Homo sapien
atctcacctggccaattgatgtatt

SEQ ID NO: 2085988 - DNA, 25 bp, Homo sapien
tgtgacccggcgtaaggaatcgcct

SEQ ID NO: 2085989 - DNA, 25 bp, Homo sapien
ttcaccggctaccagctggccgtgt

SEQ ID NO: 2085990 - DNA, 25 bp, Homo sapien
cagacggtgctcaataatacctggt

SEQ ID NO: 2085991 - DNA, 25 bp, Homo sapien
ggaatcgcctgtctttgtctcagct

SEQ ID NO: 2085992 - DNA, 25 bp, Homo sapien
ggtacaaggaccacaaagctcatgt

SEQ ID NO: 2085993 - DNA, 25 bp, Homo sapien
tcagatacagcttaggcagccggac

SEQ ID NO: 2085994 - DNA, 25 bp, Homo sapien
tgcagggtgtcccaactcaggttgg

SEQ ID NO: 2085995 - DNA, 25 bp, Homo sapien
cattcaaagtgggtgggtacaagga

SEQ ID NO: 2085996 - DNA, 25 bp, Homo sapien
cgccctgcccagcctgacctcgggg

SEQ ID NO: 2085997 - DNA, 25 bp, Homo sapien
ccgccctgcccagcctgacctcggg

SEQ ID NO: 2085998 - DNA, 25 bp, Homo sapien
tccagggtggactgatgctgcacgc

SEQ ID NO: 2085999 - DNA, 25 bp, Homo sapien
tgtggtgtcctcgaagatgaagaag

SEQ ID NO: 2086000 - DNA, 25 bp, Homo sapien
acatgcgggacatggcaatgctggt

SEQ ID NO: 2086001 - DNA, 25 bp, Homo sapien
ggctctgctcggagatcccacgcag

SEQ ID NO: 2086002 - DNA, 25 bp, Homo sapien
gttccttgagctcccgcggtgcact

SEQ ID NO: 2086003 - DNA, 25 bp, Homo sapien
tctggaggaagtccttgttgcccgg

SEQ ID NO: 2086004 - DNA, 25 bp, Homo sapien
tcagggccgaaaagcttgtctccgc

SEQ ID NO: 2086005 - DNA, 25 bp, Homo sapien
aactgggggtaatcctcctccatgg

SEQ ID NO: 2086006 - DNA, 25 bp, Homo sapien
tggactctcggcaggttaggccaca

SEQ ID NO: 2086007 - DNA, 25 bp, Homo sapien
cacaaagccggttggaaagagtcac

SEQ ID NO: 2086008 - DNA, 25 bp, Homo sapien
ctggcagaactagaagcacctccct

SEQ ID NO: 2086009 - DNA, 25 bp, Homo sapien
tgtcccgggacaagtccaaaggcag

SEQ ID NO: 2086010 - DNA, 25 bp, Homo sapien
agcagagccaggctggcgtggaggt

SEQ ID NO: 2086011 - DNA, 25 bp, Homo sapien
ccaggctggcgtggaggtgtcccgg

SEQ ID NO: 2086012 - DNA, 25 bp, Homo sapien
gaggcatagagagaagaagaagcca

SEQ ID NO: 2086013 - DNA, 25 bp, Homo sapien
ctgaggcatagagagaagaagaagc

SEQ ID NO: 2086014 - DNA, 25 bp, Homo sapien
agaagctccacaaactccctaattg

SEQ ID NO: 2086015 - DNA, 25 bp, Homo sapien
ccagctggagctgggtactcccggc

SEQ ID NO: 2086016 - DNA, 25 bp, Homo sapien
ggctggtgtgtaattagaagctcca

SEQ ID NO: 2086017 - DNA, 25 bp, Homo sapien
gcgctgttctgagccgccctgttgc

SEQ ID NO: 2086018 - DNA, 25 bp, Homo sapien
ctgtggatacgctgcagctccacac

SEQ ID NO: 2086019 - DNA, 25 bp, Homo sapien
ttgctgccttctaatccagcgtcca

SEQ ID NO: 2086020 - DNA, 25 bp, Homo sapien
gcaggcttcagattacagctactcc

SEQ ID NO: 2086021 - DNA, 25 bp, Homo sapien
tagtccctctaagcctgcacactga

SEQ ID NO: 2086022 - DNA, 25 bp, Homo sapien
ccttttgcccaaattgcaggggctg

SEQ ID NO: 2086023 - DNA, 25 bp, Homo sapien
cttttgcccaaattgcaggggctgc

SEQ ID NO: 2086024 - DNA, 25 bp, Homo sapien
attgcaggggctgctgtctccgcat

SEQ ID NO: 2086025 - DNA, 25 bp, Homo sapien
caaattgcaggggctgctgtctccg

SEQ ID NO: 2086026 - DNA, 25 bp, Homo sapien
ggctggctagaaggacccagctgtc

SEQ ID NO: 2086027 - DNA, 25 bp, Homo sapien
gggctggctagaaggacccagctgt

SEQ ID NO: 2086028 - DNA, 25 bp, Homo sapien
tcccagtggcttggcaggcagcaga

SEQ ID NO: 2086029 - DNA, 25 bp, Homo sapien
ctcccagtggcttggcaggcagcag

SEQ ID NO: 2086030 - DNA, 25 bp, Homo sapien
cccagtggcttggcaggcagcagaa

SEQ ID NO: 2086031 - DNA, 25 bp, Homo sapien
ccctcccagtggcttggcaggcagc

SEQ ID NO: 2086032 - DNA, 25 bp, Homo sapien
ggcagtatccaagccccgctctcgt

SEQ ID NO: 2086033 - DNA, 25 bp, Homo sapien
aaagggcagtatccaagccccgctc

SEQ ID NO: 2086034 - DNA, 25 bp, Homo sapien
cctgtccaaagggcagtatccaagc

SEQ ID NO: 2086035 - DNA, 25 bp, Homo sapien
tccaaagggcagtatccaagccccg

SEQ ID NO: 2086036 - DNA, 25 bp, Homo sapien
ctcatgggctgagcaggcgaccgct

SEQ ID NO: 2086037 - DNA, 25 bp, Homo sapien
gctcatgggctgagcaggcgaccgc

SEQ ID NO: 2086038 - DNA, 25 bp, Homo sapien
ttgctcatgggctgagcaggcgacc

SEQ ID NO: 2086039 - DNA, 25 bp, Homo sapien
tggttgctcatgggctgagcaggcg

SEQ ID NO: 2086040 - DNA, 25 bp, Homo sapien
ccgaggagggctccaatgcagagga

SEQ ID NO: 2086041 - DNA, 25 bp, Homo sapien
tgctgtgcccgaggagggctccaat

SEQ ID NO: 2086042 - DNA, 25 bp, Homo sapien
gcccgaggagggctccaatgcagag

SEQ ID NO: 2086043 - DNA, 25 bp, Homo sapien
tgtgcccgaggagggctccaatgca

SEQ ID NO: 2086044 - DNA, 25 bp, Homo sapien
gagttttactccctgatcacgcatg

SEQ ID NO: 2086045 - DNA, 25 bp, Homo sapien
gggactgtctcctcacggctttgtg

SEQ ID NO: 2086046 - DNA, 25 bp, Homo sapien
tcagggactcgcagagatgcacagg

SEQ ID NO: 2086047 - DNA, 25 bp, Homo sapien
tgtgtttggcctaaaacgggaatga

SEQ ID NO: 2086048 - DNA, 25 bp, Homo sapien
ctccaccagcgcccctgtgctgtcg

SEQ ID NO: 2086049 - DNA, 25 bp, Homo sapien
tccaccagcgcccctgtgctgtcgg

SEQ ID NO: 2086050 - DNA, 25 bp, Homo sapien
ccaccagcgcccctgtgctgtcggg

SEQ ID NO: 2086051 - DNA, 25 bp, Homo sapien
accagcgcccctgtgctgtcggggt

SEQ ID NO: 2086052 - DNA, 25 bp, Homo sapien
gccagcttgttcacggggactttga

SEQ ID NO: 2086053 - DNA, 25 bp, Homo sapien
ggatcgcacccggtacaggtcatag

SEQ ID NO: 2086054 - DNA, 25 bp, Homo sapien
aagttggagacagccgctgccagct

SEQ ID NO: 2086055 - DNA, 25 bp, Homo sapien
ggtacaggtcatagccgaagttgga

SEQ ID NO: 2086056 - DNA, 25 bp, Homo sapien
ccagcgagagggccgagagggccgt

SEQ ID NO: 2086057 - DNA, 25 bp, Homo sapien
gagaggtaccagtccctgtacttct

SEQ ID NO: 2086058 - DNA, 25 bp, Homo sapien
ggagtgagaggtaccagtccctgta

SEQ ID NO: 2086059 - DNA, 25 bp, Homo sapien
gtgagaggtaccagtccctgtactt

SEQ ID NO: 2086060 - DNA, 25 bp, Homo sapien
agtgagggagtgagaggtaccagtc

SEQ ID NO: 2086061 - DNA, 25 bp, Homo sapien
atgtggacgttgataactgcacacc

SEQ ID NO: 2086062 - DNA, 25 bp, Homo sapien
cttagagattttcctgaagtaggtt

SEQ ID NO: 2086063 - DNA, 25 bp, Homo sapien
ccaagtaggctgatcttcaagacaa

SEQ ID NO: 2086064 - DNA, 25 bp, Homo sapien
ctgaagtaggttaaaggcatcaggc

SEQ ID NO: 2086065 - DNA, 25 bp, Homo sapien
tcttctcaaagacgatccgggaggc

SEQ ID NO: 2086066 - DNA, 25 bp, Homo sapien
gatggattctgttcgctgctccgct

SEQ ID NO: 2086067 - DNA, 25 bp, Homo sapien
tgatcaagtcatagtagagagcccg

SEQ ID NO: 2086068 - DNA, 25 bp, Homo sapien
tccgggaggcactcttgaggttctt

SEQ ID NO: 2086069 - DNA, 25 bp, Homo sapien
ttgccaggacttctgctggcatccc

SEQ ID NO: 2086070 - DNA, 25 bp, Homo sapien
tatgagactcgacgacaagcatccc

SEQ ID NO: 2086071 - DNA, 25 bp, Homo sapien
caagcatcccgtctttgagagcctg

SEQ ID NO: 2086072 - DNA, 25 bp, Homo sapien
tcgggttctggtttagcgctcagca

SEQ ID NO: 2086073 - DNA, 25 bp, Homo sapien
cacaccgagaaggagaatgctgatc

SEQ ID NO: 2086074 - DNA, 25 bp, Homo sapien
tctgcgcctgcacccagttgttgat

SEQ ID NO: 2086075 - DNA, 25 bp, Homo sapien
tcttgcaggtccaagcgagggttgc

SEQ ID NO: 2086076 - DNA, 25 bp, Homo sapien
tcctttgtggacctggcgagcttcc

SEQ ID NO: 2086077 - DNA, 25 bp, Homo sapien
taaactggtgtgcactcctacagca

SEQ ID NO: 2086078 - DNA, 25 bp, Homo sapien
gacctataatatcctggacccagag

SEQ ID NO: 2086079 - DNA, 25 bp, Homo sapien
gaagtaactggctgacgctctggaa

SEQ ID NO: 2086080 - DNA, 25 bp, Homo sapien
gccaagcccctttagtttaatgtga

SEQ ID NO: 2086081 - DNA, 25 bp, Homo sapien
ctcttcatccaagtagaaatcctcg

SEQ ID NO: 2086082 - DNA, 25 bp, Homo sapien
tgagatctgaatccaagccatagcg

SEQ ID NO: 2086083 - DNA, 25 bp, Homo sapien
cagccttagggtccgacatcatggg

SEQ ID NO: 2086084 - DNA, 25 bp, Homo sapien
catagcgtaaaacagccttagggtc

SEQ ID NO: 2086085 - DNA, 25 bp, Homo sapien
agagatccgtgtgatagccgtggcc

SEQ ID NO: 2086086 - DNA, 25 bp, Homo sapien
tgccccatcttaagaggaggaaagc

SEQ ID NO: 2086087 - DNA, 25 bp, Homo sapien
cactgaaagccttagaatgccaacg

SEQ ID NO: 2086088 - DNA, 25 bp, Homo sapien
gaactaaaagaagtcaggtacactg

SEQ ID NO: 2086089 - DNA, 25 bp, Homo sapien
tgagaaagcatgtggttagtccttc

SEQ ID NO: 2086090 - DNA, 25 bp, Homo sapien
gcatgtggttagtccttcagagccc

SEQ ID NO: 2086091 - DNA, 25 bp, Homo sapien
gaaagcatgtggttagtccttcaga

SEQ ID NO: 2086092 - DNA, 25 bp, Homo sapien
ggttagtccttcagagcccaaaagc

SEQ ID NO: 2086093 - DNA, 25 bp, Homo sapien
aatgaactcggaggtgaggctctcc

SEQ ID NO: 2086094 - DNA, 25 bp, Homo sapien
ggtgacttcgccttcataactcagc

SEQ ID NO: 2086095 - DNA, 25 bp, Homo sapien
tgatactcatgcttccggtcaaggg

SEQ ID NO: 2086096 - DNA, 25 bp, Homo sapien
ggtcttcagttctcggtctatgtca

SEQ ID NO: 2086097 - DNA, 25 bp, Homo sapien
agagcgaaagggtcttcagacatac

SEQ ID NO: 2086098 - DNA, 25 bp, Homo sapien
aagagcgaaagggtcttcagacata

SEQ ID NO: 2086099 - DNA, 25 bp, Homo sapien
caagagcgaaagggtcttcagacat

SEQ ID NO: 2086100 - DNA, 25 bp, Homo sapien
agcatttagcaagttaggtcaagat

SEQ ID NO: 2086101 - DNA, 25 bp, Homo sapien
ctgggatggcgcagcactgttgact

SEQ ID NO: 2086102 - DNA, 25 bp, Homo sapien
cctgaagaggtctgagctgaccgag

SEQ ID NO: 2086103 - DNA, 25 bp, Homo sapien
caagggatccctttgcaagcaagct

SEQ ID NO: 2086104 - DNA, 25 bp, Homo sapien
ggtgaatcaaacaaggattgcagct

SEQ ID NO: 2086105 - DNA, 25 bp, Homo sapien
ctggtgaatcaaacaaggattgcag

SEQ ID NO: 2086106 - DNA, 25 bp, Homo sapien
tggtgaatcaaacaaggattgcagc

SEQ ID NO: 2086107 - DNA, 25 bp, Homo sapien
taaggtgatagtccagcgggaaggt

SEQ ID NO: 2086108 - DNA, 25 bp, Homo sapien
atcctcgttccactcaaagccagcc

SEQ ID NO: 2086109 - DNA, 25 bp, Homo sapien
ctgtgtccctcagtacgaagatgaa

SEQ ID NO: 2086110 - DNA, 25 bp, Homo sapien
cctgagtcagcttgatgggtttgcc

SEQ ID NO: 2086111 - DNA, 25 bp, Homo sapien
ttcttctagggtattggaatattaa

SEQ ID NO: 2086112 - DNA, 25 bp, Homo sapien
ggtattggaatattaaactgggata

SEQ ID NO: 2086113 - DNA, 25 bp, Homo sapien
cagtgtttagataaaaccaggctag

SEQ ID NO: 2086114 - DNA, 25 bp, Homo sapien
tttcgcatagctcaaaataggagga

SEQ ID NO: 2086115 - DNA, 25 bp, Homo sapien
taggaggaggaacgaagtaacagaa

SEQ ID NO: 2086116 - DNA, 25 bp, Homo sapien
ggaccaccaaattcctcaagagctg

SEQ ID NO: 2086117 - DNA, 25 bp, Homo sapien
gagaaacctccatcgtctgaaaatg

SEQ ID NO: 2086118 - DNA, 25 bp, Homo sapien
gcagctctggccaaaacccttgagg

SEQ ID NO: 2086119 - DNA, 25 bp, Homo sapien
gcacagacacatgggtatccagaaa

SEQ ID NO: 2086120 - DNA, 25 bp, Homo sapien
gatgcaagaaaaggacagtctcaca

SEQ ID NO: 2086121 - DNA, 25 bp, Homo sapien
agttattggcccgagaagttgcgcg

SEQ ID NO: 2086122 - DNA, 25 bp, Homo sapien
ctgcgcagttattggcccgagaagt

SEQ ID NO: 2086123 - DNA, 25 bp, Homo sapien
attggcccgagaagttgcgcgcacc

SEQ ID NO: 2086124 - DNA, 25 bp, Homo sapien
tgcgcagttattggcccgagaagtt

SEQ ID NO: 2086125 - DNA, 25 bp, Homo sapien
ctccaccgccaagacttccccgcgg

SEQ ID NO: 2086126 - DNA, 25 bp, Homo sapien
gcggaccccgcaacagctccagctt

SEQ ID NO: 2086127 - DNA, 25 bp, Homo sapien
ggaccccgcaacagctccagcttcc

SEQ ID NO: 2086128 - DNA, 25 bp, Homo sapien
tccaccgccaagacttccccgcgga

SEQ ID NO: 2086129 - DNA, 25 bp, Homo sapien
cgcaatggccccctcgctcagttgg

SEQ ID NO: 2086130 - DNA, 25 bp, Homo sapien
ccccctcgctcagttggccgaccat

SEQ ID NO: 2086131 - DNA, 25 bp, Homo sapien
caatggccccctcgctcagttggcc

SEQ ID NO: 2086132 - DNA, 25 bp, Homo sapien
tggccccctcgctcagttggccgac

SEQ ID NO: 2086133 - DNA, 25 bp, Homo sapien
ttaaaaccacgtgcatgtatgaggg

SEQ ID NO: 2086134 - DNA, 25 bp, Homo sapien
tggaagaaggatgagatcacttatg

SEQ ID NO: 2086135 - DNA, 25 bp, Homo sapien
gacgatgctccaaagaaatcagctg

SEQ ID NO: 2086136 - DNA, 25 bp, Homo sapien
caagacctagtttgaggtactaaga

SEQ ID NO: 2086137 - DNA, 25 bp, Homo sapien
ttatatgaagtcttaggaaaggcaa

SEQ ID NO: 2086138 - DNA, 25 bp, Homo sapien
gagcaagaggagttgtgcgttgatg

SEQ ID NO: 2086139 - DNA, 25 bp, Homo sapien
caatgtggttacaggggtgcgcaca

SEQ ID NO: 2086140 - DNA, 25 bp, Homo sapien
ggagttgtgcgttgatggaagtatt

SEQ ID NO: 2086141 - DNA, 25 bp, Homo sapien
ggaggatgggctttatgtttgtatc

SEQ ID NO: 2086142 - DNA, 25 bp, Homo sapien
atgacttggaggatgggctttatgt

SEQ ID NO: 2086143 - DNA, 25 bp, Homo sapien
ttgtatcccccttctgcatgatggc

SEQ ID NO: 2086144 - DNA, 25 bp, Homo sapien
ggatgggctttatgtttgtatcccc

SEQ ID NO: 2086145 - DNA, 25 bp, Homo sapien
gagtgttcaatccatcactcatgag

SEQ ID NO: 2086146 - DNA, 25 bp, Homo sapien
cggcggactattccccgtagtaatg

SEQ ID NO: 2086147 - DNA, 25 bp, Homo sapien
gagcagtcgataacgcggcggacta

SEQ ID NO: 2086148 - DNA, 25 bp, Homo sapien
attccccgtagtaatgggacggatg

SEQ ID NO: 2086149 - DNA, 25 bp, Homo sapien
cttccgtctttcagagtgttcacaa

SEQ ID NO: 2086150 - DNA, 25 bp, Homo sapien
tgaatctggcatacacagttgctgg

SEQ ID NO: 2086151 - DNA, 25 bp, Homo sapien
caataaatctgtgaatctggcatac

SEQ ID NO: 2086152 - DNA, 25 bp, Homo sapien
cacagttgctggacaattgttcttc

SEQ ID NO: 2086153 - DNA, 25 bp, Homo sapien
gctacgcaccgtatcttcaaggagc

SEQ ID NO: 2086154 - DNA, 25 bp, Homo sapien
tcaaggagccaaccgacatggtaag

SEQ ID NO: 2086155 - DNA, 25 bp, Homo sapien
tgcagggttttcagttcccaactag

SEQ ID NO: 2086156 - DNA, 25 bp, Homo sapien
taaaatgcagtgttctcgctacgca

SEQ ID NO: 2086157 - DNA, 25 bp, Homo sapien
gacttcaaaacttctaattccatca

SEQ ID NO: 2086158 - DNA, 25 bp, Homo sapien
ttcattatagggcactggattgcca

SEQ ID NO: 2086159 - DNA, 25 bp, Homo sapien
caaaacttctaattccatcaagata

SEQ ID NO: 2086160 - DNA, 25 bp, Homo sapien
taattccatcaagataactactctc

SEQ ID NO: 2086161 - DNA, 25 bp, Homo sapien
ttcgcctttctctagaattgtctga

SEQ ID NO: 2086162 - DNA, 25 bp, Homo sapien
cttttcgcctttctctagaattgtc

SEQ ID NO: 2086163 - DNA, 25 bp, Homo sapien
tttcgcctttctctagaattgtctg

SEQ ID NO: 2086164 - DNA, 25 bp, Homo sapien
ttttcgcctttctctagaattgtct

SEQ ID NO: 2086165 - DNA, 25 bp, Homo sapien
tgtcaatcctatgagttgcaaatat

SEQ ID NO: 2086166 - DNA, 25 bp, Homo sapien
taaccctttgtcaatcctatgagtt

SEQ ID NO: 2086167 - DNA, 25 bp, Homo sapien
cagtggggaatagcggacacttgct

SEQ ID NO: 2086168 - DNA, 25 bp, Homo sapien
atattttatcctagtttacacactt

SEQ ID NO: 2086169 - DNA, 25 bp, Homo sapien
aaatatatagctttggacacgagga

SEQ ID NO: 2086170 - DNA, 25 bp, Homo sapien
gataaagagggctagttagttcttg

SEQ ID NO: 2086171 - DNA, 25 bp, Homo sapien
tatagctttggacacgaggaagatc

SEQ ID NO: 2086172 - DNA, 25 bp, Homo sapien
gctagttagttcttggagcagctgc

SEQ ID NO: 2086173 - DNA, 25 bp, Homo sapien
gatgaggtggctgcaaaaactcccc

SEQ ID NO: 2086174 - DNA, 25 bp, Homo sapien
tctcttcattggtgagagcccaggc

SEQ ID NO: 2086175 - DNA, 25 bp, Homo sapien
ttgctggcttaaaggacaattctct

SEQ ID NO: 2086176 - DNA, 25 bp, Homo sapien
cctactctcggcctagaagcagtta

SEQ ID NO: 2086177 - DNA, 25 bp, Homo sapien
caaacactagaaacctggccagagg

SEQ ID NO: 2086178 - DNA, 25 bp, Homo sapien
caatcattcaattaaatacaacaca

SEQ ID NO: 2086179 - DNA, 25 bp, Homo sapien
gccagaggtgataaagctgggcaca

SEQ ID NO: 2086180 - DNA, 25 bp, Homo sapien
tgtgataacaaattcgctcatttta

SEQ ID NO: 2086181 - DNA, 25 bp, Homo sapien
caatggagaataagggcaacaaaaa

SEQ ID NO: 2086182 - DNA, 25 bp, Homo sapien
catggaacttatatacgcagacaaa

SEQ ID NO: 2086183 - DNA, 25 bp, Homo sapien
caaacaatatgtagaagagtcaatc

SEQ ID NO: 2086184 - DNA, 25 bp, Homo sapien
tagccatagtataggtgcatggaac

SEQ ID NO: 2086185 - DNA, 25 bp, Homo sapien
tccttaactcctgctctggaccaga

SEQ ID NO: 2086186 - DNA, 25 bp, Homo sapien
caaatggacggcaagaatccggtgc

SEQ ID NO: 2086187 - DNA, 25 bp, Homo sapien
tctggcacaagagacgagagacagc

SEQ ID NO: 2086188 - DNA, 25 bp, Homo sapien
agagacagcccggagccaaatggac

SEQ ID NO: 2086189 - DNA, 25 bp, Homo sapien
cagtaaagtcactgggttgaatctg

SEQ ID NO: 2086190 - DNA, 25 bp, Homo sapien
gcagtaaagtcactgggttgaatct

SEQ ID NO: 2086191 - DNA, 25 bp, Homo sapien
agtaaagtcactgggttgaatctgt

SEQ ID NO: 2086192 - DNA, 25 bp, Homo sapien
aggagctacttgcggctgcccgagt

SEQ ID NO: 2086193 - DNA, 25 bp, Homo sapien
ctggaggagctacttgcggctgccc

SEQ ID NO: 2086194 - DNA, 25 bp, Homo sapien
ggagctacttgcggctgcccgagtc

SEQ ID NO: 2086195 - DNA, 25 bp, Homo sapien
ggaggagctacttgcggctgcccga

SEQ ID NO: 2086196 - DNA, 25 bp, Homo sapien
cattcccgagcttccattctgcggc

SEQ ID NO: 2086197 - DNA, 25 bp, Homo sapien
ttcccgagcttccattctgcggctg

SEQ ID NO: 2086198 - DNA, 25 bp, Homo sapien
agcttccattctgcggctggggcct

SEQ ID NO: 2086199 - DNA, 25 bp, Homo sapien
cccgagcttccattctgcggctggg

SEQ ID NO: 2086200 - DNA, 25 bp, Homo sapien
ggcaccactttggactgtgttcccc

SEQ ID NO: 2086201 - DNA, 25 bp, Homo sapien
tgaggctggcaatgggcaccacttt

SEQ ID NO: 2086202 - DNA, 25 bp, Homo sapien
tggactggtaaggagtgaggctggc

SEQ ID NO: 2086203 - DNA, 25 bp, Homo sapien
tttccaaatgtctttgaagcaccat

SEQ ID NO: 2086204 - DNA, 25 bp, Homo sapien
tcaaccagttctagggagaaaagct

SEQ ID NO: 2086205 - DNA, 25 bp, Homo sapien
ggtaacacgagcacaaatggtccac

SEQ ID NO: 2086206 - DNA, 25 bp, Homo sapien
gctccaggtacggatctgacttttg

SEQ ID NO: 2086207 - DNA, 25 bp, Homo sapien
ttcccctcgggagttgctccaggta

SEQ ID NO: 2086208 - DNA, 25 bp, Homo sapien
tcacttcaataagaggaaagaactt

SEQ ID NO: 2086209 - DNA, 25 bp, Homo sapien
gttcacttcaataagaggaaagaac

SEQ ID NO: 2086210 - DNA, 25 bp, Homo sapien
cttgtccacttgctcattgaaagct

SEQ ID NO: 2086211 - DNA, 25 bp, Homo sapien
cacttgctcattgaaagctgtagct

SEQ ID NO: 2086212 - DNA, 25 bp, Homo sapien
gcttgttagcaatcttcagggtgcc

SEQ ID NO: 2086213 - DNA, 25 bp, Homo sapien
cgtgaaatcaaactgaaccgtaggt

SEQ ID NO: 2086214 - DNA, 25 bp, Homo sapien
cagggcatgacggaagtctcgttat

SEQ ID NO: 2086215 - DNA, 25 bp, Homo sapien
tgttctcgaggtcatcaatccccgt

SEQ ID NO: 2086216 - DNA, 25 bp, Homo sapien
ttctctgttgttagacctcactgtg

SEQ ID NO: 2086217 - DNA, 25 bp, Homo sapien
tagctcttgcagatcccgatgatgt

SEQ ID NO: 2086218 - DNA, 25 bp, Homo sapien
caccttcccggatgtgtccatcaag

SEQ ID NO: 2086219 - DNA, 25 bp, Homo sapien
ctgtgattttagtggcgtcttcata

SEQ ID NO: 2086220 - DNA, 25 bp, Homo sapien
aggctccgtccaccgaaatcagaga

SEQ ID NO: 2086221 - DNA, 25 bp, Homo sapien
catccacgaagcttataggcctctg

SEQ ID NO: 2086222 - DNA, 25 bp, Homo sapien
gggctcctttgatagccaacacggg

SEQ ID NO: 2086223 - DNA, 25 bp, Homo sapien
tgtcaggattcgcaatgatagtgct

SEQ ID NO: 2086224 - DNA, 25 bp, Homo sapien
tacatgctaattgcctcctccgact

SEQ ID NO: 2086225 - DNA, 25 bp, Homo sapien
cctttggcaggatcgaggtcagcag

SEQ ID NO: 2086226 - DNA, 25 bp, Homo sapien
ctccgactctctaggtttgtcctgg

SEQ ID NO: 2086227 - DNA, 25 bp, Homo sapien
aaagaaaggcgccttcagcacaccg

SEQ ID NO: 2086228 - DNA, 25 bp, Homo sapien
cagttggtgttactccctccgactc

SEQ ID NO: 2086229 - DNA, 25 bp, Homo sapien
gacctcatacaaggttttccagttg

SEQ ID NO: 2086230 - DNA, 25 bp, Homo sapien
gactccgccgctctttagatcagag

SEQ ID NO: 2086231 - DNA, 25 bp, Homo sapien
ccttggcccaggttctcggatttga

SEQ ID NO: 2086232 - DNA, 25 bp, Homo sapien
ttgtatgtatgctgactgatcctcc

SEQ ID NO: 2086233 - DNA, 25 bp, Homo sapien
gtctagatagaatatcaagcaagcc

SEQ ID NO: 2086234 - DNA, 25 bp, Homo sapien
gagtaagctgtagtggtctagatag

SEQ ID NO: 2086235 - DNA, 25 bp, Homo sapien
cagaggcaacatgattgcctaagcc

SEQ ID NO: 2086236 - DNA, 25 bp, Homo sapien
cgggcaggcttggtacatgcagttc

SEQ ID NO: 2086237 - DNA, 25 bp, Homo sapien
tctttgcgaagatacaccactgtgg

SEQ ID NO: 2086238 - DNA, 25 bp, Homo sapien
gatcatgcggtacttgaaattggga

SEQ ID NO: 2086239 - DNA, 25 bp, Homo sapien
gaaattgggaaattcggtgtcgcac

SEQ ID NO: 2086240 - DNA, 25 bp, Homo sapien
gataagcagcattttgtccaaggat

SEQ ID NO: 2086241 - DNA, 25 bp, Homo sapien
ggatagcttcagcagactcctggaa

SEQ ID NO: 2086242 - DNA, 25 bp, Homo sapien
cagactcctggaaacaagtcaccca

SEQ ID NO: 2086243 - DNA, 25 bp, Homo sapien
aagtcacccactgattctcttgaaa

SEQ ID NO: 2086244 - DNA, 25 bp, Homo sapien
taccttacggaagaaagtcaccgca

SEQ ID NO: 2086245 - DNA, 25 bp, Homo sapien
gacatacgtgcattttaaccaggat

SEQ ID NO: 2086246 - DNA, 25 bp, Homo sapien
cagacccaggaacttgacatacgtg

SEQ ID NO: 2086247 - DNA, 25 bp, Homo sapien
ctaataggaacaggagaaacgggtg

SEQ ID NO: 2086248 - DNA, 25 bp, Homo sapien
aagaaaaacacaccagaacaaatgg

SEQ ID NO: 2086249 - DNA, 25 bp, Homo sapien
aacacaccagaacaaatggcaaagc

SEQ ID NO: 2086250 - DNA, 25 bp, Homo sapien
accagaacaaatggcaaagcctttc

SEQ ID NO: 2086251 - DNA, 25 bp, Homo sapien
acagacagaactggggacaggaaga

SEQ ID NO: 2086252 - DNA, 25 bp, Homo sapien
gaccctgactctgaatatgaaagat

SEQ ID NO: 2086253 - DNA, 25 bp, Homo sapien
gttgtaggtctccactttgaccctg

SEQ ID NO: 2086254 - DNA, 25 bp, Homo sapien
acgggcttcacgtccatcacagtgg

SEQ ID NO: 2086255 - DNA, 25 bp, Homo sapien
tcctgatgctcatgaccagccttcg

SEQ ID NO: 2086256 - DNA, 25 bp, Homo sapien
ccatactctctgtagtccacgggct

SEQ ID NO: 2086257 - DNA, 25 bp, Homo sapien
cagtggccttaattcgagactcgtc

SEQ ID NO: 2086258 - DNA, 25 bp, Homo sapien
taccgatgggttctgagatgcgcac

SEQ ID NO: 2086259 - DNA, 25 bp, Homo sapien
tagctaacatgggatcgtcacacgg

SEQ ID NO: 2086260 - DNA, 25 bp, Homo sapien
gcaagtcaatgcttatcagcggtcc

SEQ ID NO: 2086261 - DNA, 25 bp, Homo sapien
tggtcttgcgctagccactggctga

SEQ ID NO: 2086262 - DNA, 25 bp, Homo sapien
ctttcgaggtaaactgtgggccaga

SEQ ID NO: 2086263 - DNA, 25 bp, Homo sapien
aatctatttaggcaacccgcaggga

SEQ ID NO: 2086264 - DNA, 25 bp, Homo sapien
taggaacacacagagcgagcatgct

SEQ ID NO: 2086265 - DNA, 25 bp, Homo sapien
ttttgctgactgaaaggcccactag

SEQ ID NO: 2086266 - DNA, 25 bp, Homo sapien
cacataagttaaatataggtttggt

SEQ ID NO: 2086267 - DNA, 25 bp, Homo sapien
ttacctggccgttgaaaggaagctg

SEQ ID NO: 2086268 - DNA, 25 bp, Homo sapien
caagcaccgagaatgttatctgagg

SEQ ID NO: 2086269 - DNA, 25 bp, Homo sapien
tgcattttacaagcaccgagaatgt

SEQ ID NO: 2086270 - DNA, 25 bp, Homo sapien
tatatgcaacacaagcctgtctgcc

SEQ ID NO: 2086271 - DNA, 25 bp, Homo sapien
tcacccctgctgtcgtagctgttgg

SEQ ID NO: 2086272 - DNA, 25 bp, Homo sapien
cagcttattgtatatgagggagcca

SEQ ID NO: 2086273 - DNA, 25 bp, Homo sapien
tggcaacgatagtctccaagggacc

SEQ ID NO: 2086274 - DNA, 25 bp, Homo sapien
gctgctgtctggacgtctggaccct

SEQ ID NO: 2086275 - DNA, 25 bp, Homo sapien
gaacaaatgaggctcacccacgagg

SEQ ID NO: 2086276 - DNA, 25 bp, Homo sapien
gaatcccgatcgttccgagaggtct

SEQ ID NO: 2086277 - DNA, 25 bp, Homo sapien
ccaaagtgtacagccctaggcggga

SEQ ID NO: 2086278 - DNA, 25 bp, Homo sapien
aagacccagagagccccacggccct

SEQ ID NO: 2086279 - DNA, 25 bp, Homo sapien
agggggctgcggggataccagccat

SEQ ID NO: 2086280 - DNA, 25 bp, Homo sapien
ccagggggctgcggggataccagcc

SEQ ID NO: 2086281 - DNA, 25 bp, Homo sapien
cggtctccaagacccagagagcccc

SEQ ID NO: 2086282 - DNA, 25 bp, Homo sapien
tgcacccctgagggtcgcccagacc

SEQ ID NO: 2086283 - DNA, 25 bp, Homo sapien
tttgcacccctgagggtcgcccaga

SEQ ID NO: 2086284 - DNA, 25 bp, Homo sapien
tcctttgcacccctgagggtcgccc

SEQ ID NO: 2086285 - DNA, 25 bp, Homo sapien
ctttgcacccctgagggtcgcccag

SEQ ID NO: 2086286 - DNA, 25 bp, Homo sapien
ggaaagtgaactgggagaggcccca

SEQ ID NO: 2086287 - DNA, 25 bp, Homo sapien
aaagtgaactgggagaggccccaga

SEQ ID NO: 2086288 - DNA, 25 bp, Homo sapien
gggagaggccccagaccacctctac

SEQ ID NO: 2086289 - DNA, 25 bp, Homo sapien
tgaactgggagaggccccagaccac

SEQ ID NO: 2086290 - DNA, 25 bp, Homo sapien
tctcccagccgcgggtggttcctgg

SEQ ID NO: 2086291 - DNA, 25 bp, Homo sapien
ggctctcgaccccgctcttgtttgg

SEQ ID NO: 2086292 - DNA, 25 bp, Homo sapien
gagacggatgacattggtttccctc

SEQ ID NO: 2086293 - DNA, 25 bp, Homo sapien
agttgtaacacctcggtgagggccg

SEQ ID NO: 2086294 - DNA, 25 bp, Homo sapien
cctctaaaggcttctgctccacgag

SEQ ID NO: 2086295 - DNA, 25 bp, Homo sapien
gttgcggacggtcggccaagcctct

SEQ ID NO: 2086296 - DNA, 25 bp, Homo sapien
gggcgcttccgcctggatggctgtt

SEQ ID NO: 2086297 - DNA, 25 bp, Homo sapien
tcctctaaaggcttctgctccacga

SEQ ID NO: 2086298 - DNA, 25 bp, Homo sapien
ggagggagcagggttccgatccgga

SEQ ID NO: 2086299 - DNA, 25 bp, Homo sapien
tggaccccgttatgaaaacgagtca

SEQ ID NO: 2086300 - DNA, 25 bp, Homo sapien
gagcagggttccgatccggattggg

SEQ ID NO: 2086301 - DNA, 25 bp, Homo sapien
ccgatccggattgggtggagcctaa

SEQ ID NO: 2086302 - DNA, 25 bp, Homo sapien
caggctcctacagggcacctggtgg

SEQ ID NO: 2086303 - DNA, 25 bp, Homo sapien
agcggccttgactcggcttctcagg

SEQ ID NO: 2086304 - DNA, 25 bp, Homo sapien
acctggtgggcctcaggcatccaca

SEQ ID NO: 2086305 - DNA, 25 bp, Homo sapien
cagagcagagcagcggccttgactc

SEQ ID NO: 2086306 - DNA, 25 bp, Homo sapien
gaattgtttcaagtaatggcagtgc

SEQ ID NO: 2086307 - DNA, 25 bp, Homo sapien
agaattgtttcaagtaatggcagtg

SEQ ID NO: 2086308 - DNA, 25 bp, Homo sapien
gcagtgctttgcaatgggggacttg

SEQ ID NO: 2086309 - DNA, 25 bp, Homo sapien
ggacttgggttcaaagatgaccact

SEQ ID NO: 2086310 - DNA, 25 bp, Homo sapien
tgttctacgccttctggcaggtggg

SEQ ID NO: 2086311 - DNA, 25 bp, Homo sapien
ggtagatcttgcagcgagccatctg

SEQ ID NO: 2086312 - DNA, 25 bp, Homo sapien
ggacttccggcgacagtgagagtca

SEQ ID NO: 2086313 - DNA, 25 bp, Homo sapien
gaaccatgttgttctacgccttctg

SEQ ID NO: 2086314 - DNA, 25 bp, Homo sapien
gccggcctgcccttgtcacctccct

SEQ ID NO: 2086315 - DNA, 25 bp, Homo sapien
cccttctcagagggcgtcagctggg

SEQ ID NO: 2086316 - DNA, 25 bp, Homo sapien
tcccttctcagagggcgtcagctgg

SEQ ID NO: 2086317 - DNA, 25 bp, Homo sapien
tgccggcctgcccttgtcacctccc

SEQ ID NO: 2086318 - DNA, 25 bp, Homo sapien
ggtaaccccgatctctcagcgcggg

SEQ ID NO: 2086319 - DNA, 25 bp, Homo sapien
tcccgcgagagggaacggatcccag

SEQ ID NO: 2086320 - DNA, 25 bp, Homo sapien
ggatccggcagggacctgcgcgctg

SEQ ID NO: 2086321 - DNA, 25 bp, Homo sapien
gggtgcgcagatccccggccggcgg

SEQ ID NO: 2086322 - DNA, 25 bp, Homo sapien
cgcggtggctcatgcctgtaatccc

SEQ ID NO: 2086323 - DNA, 25 bp, Homo sapien
agcactttgggaggccgaggcgggc

SEQ ID NO: 2086324 - DNA, 25 bp, Homo sapien
ttacagaggatcaaataaggccggg

SEQ ID NO: 2086325 - DNA, 25 bp, Homo sapien
ggatcacgaggtcaggaaatcgaga

SEQ ID NO: 2086326 - DNA, 25 bp, Homo sapien
tgccagcctgcaggatcaggtatcg

SEQ ID NO: 2086327 - DNA, 25 bp, Homo sapien
cacagagaaagctggaatcgattcc

SEQ ID NO: 2086328 - DNA, 25 bp, Homo sapien
tatcactgcagccatggacgaggcc

SEQ ID NO: 2086329 - DNA, 25 bp, Homo sapien
tcaggtatcggaggccttcaggact

SEQ ID NO: 2086330 - DNA, 25 bp, Homo sapien
ccctgcccttttactccacagcata

SEQ ID NO: 2086331 - DNA, 25 bp, Homo sapien
accctgcccttttactccacagcat

SEQ ID NO: 2086332 - DNA, 25 bp, Homo sapien
ctgcccttttactccacagcataca

SEQ ID NO: 2086333 - DNA, 25 bp, Homo sapien
cctgcccttttactccacagcatac

SEQ ID NO: 2086334 - DNA, 25 bp, Homo sapien
tcaggctggtgtgccgaaatggtca

SEQ ID NO: 2086335 - DNA, 25 bp, Homo sapien
cctgtgagttcagtaagagctcccc

SEQ ID NO: 2086336 - DNA, 25 bp, Homo sapien
gacattatctcttagggcttccctg

SEQ ID NO: 2086337 - DNA, 25 bp, Homo sapien
tccgctgctagagaaagccctgagg

SEQ ID NO: 2086338 - DNA, 25 bp, Homo sapien
ggtaccagagcttaaccctgctgca

SEQ ID NO: 2086339 - DNA, 25 bp, Homo sapien
tatcaaaccccaagggtgagagagc

SEQ ID NO: 2086340 - DNA, 25 bp, Homo sapien
cagctttgggatgcagtctagaacc

SEQ ID NO: 2086341 - DNA, 25 bp, Homo sapien
tatttatgttccagggtgagagagc

SEQ ID NO: 2086342 - DNA, 25 bp, Homo sapien
gagtcccagagaggtcagttctccc

SEQ ID NO: 2086343 - DNA, 25 bp, Homo sapien
gaggtcagttctccccgtgattctt

SEQ ID NO: 2086344 - DNA, 25 bp, Homo sapien
aacaaggcagagagtctagctgatc

SEQ ID NO: 2086345 - DNA, 25 bp, Homo sapien
cttccagccacggttgagtcccaga

SEQ ID NO: 2086346 - DNA, 25 bp, Homo sapien
gaaggatgtcgagagcagaactgcc

SEQ ID NO: 2086347 - DNA, 25 bp, Homo sapien
tctgtcccagtcaaggcatgtagcc

SEQ ID NO: 2086348 - DNA, 25 bp, Homo sapien
aaagctccgggtccttatgccagaa

SEQ ID NO: 2086349 - DNA, 25 bp, Homo sapien
ttgatggagaccaggtagagacccg

SEQ ID NO: 2086350 - DNA, 25 bp, Homo sapien
ggagtgcgcctaggccgacctcgga

SEQ ID NO: 2086351 - DNA, 25 bp, Homo sapien
cctcgacgcgctcggattagctgca

SEQ ID NO: 2086352 - DNA, 25 bp, Homo sapien
tctggaccccgggagggagtgcgcc

SEQ ID NO: 2086353 - DNA, 25 bp, Homo sapien
agctggcgcccagggatttgaatct

SEQ ID NO: 2086354 - DNA, 25 bp, Homo sapien
tccgcggagcaagccgctcgccccg

SEQ ID NO: 2086355 - DNA, 25 bp, Homo sapien
cggtgcgtgcgagcgcccttttgct

SEQ ID NO: 2086356 - DNA, 25 bp, Homo sapien
cgcgccgggcgctttccccggagct

SEQ ID NO: 2086357 - DNA, 25 bp, Homo sapien
cccctcaaaaccgcctgcgaagtgc

SEQ ID NO: 2086358 - DNA, 25 bp, Homo sapien
cgggcgcagtgaaaacaccttggga

SEQ ID NO: 2086359 - DNA, 25 bp, Homo sapien
gctcggcactgcgagctgagagcac

SEQ ID NO: 2086360 - DNA, 25 bp, Homo sapien
ccgcgcggctgagcgctgctgcctt

SEQ ID NO: 2086361 - DNA, 25 bp, Homo sapien
ctgccttgggaataggacggcgctc

SEQ ID NO: 2086362 - DNA, 25 bp, Homo sapien
gcgctggaagaacgcggagagcgca

SEQ ID NO: 2086363 - DNA, 25 bp, Homo sapien
gtggtactaaaaagacagcgctgga

SEQ ID NO: 2086364 - DNA, 25 bp, Homo sapien
gacagcgctggaagaacgcggagag

SEQ ID NO: 2086365 - DNA, 25 bp, Homo sapien
ggtactaaaaagacagcgctggaag

SEQ ID NO: 2086366 - DNA, 25 bp, Homo sapien
ccccggatacgaccagcgccgccat

SEQ ID NO: 2086367 - DNA, 25 bp, Homo sapien
tccgctgccccggatacgaccagcg

SEQ ID NO: 2086368 - DNA, 25 bp, Homo sapien
ctgctccgctgccccggatacgacc

SEQ ID NO: 2086369 - DNA, 25 bp, Homo sapien
tgccagggccgtctcggccgccctg

SEQ ID NO: 2086370 - DNA, 25 bp, Homo sapien
ccaaggcgactaacagcgggatcta

SEQ ID NO: 2086371 - DNA, 25 bp, Homo sapien
cctgaaagcattccctgagggcgca

SEQ ID NO: 2086372 - DNA, 25 bp, Homo sapien
tgcaaaagactggtacccctgggct

SEQ ID NO: 2086373 - DNA, 25 bp, Homo sapien
gatttgaacgttaccactgctatgg

SEQ ID NO: 2086374 - DNA, 25 bp, Homo sapien
tctcaggggggatctgattggccac

SEQ ID NO: 2086375 - DNA, 25 bp, Homo sapien
gcttgttggatcctccagatggtct

SEQ ID NO: 2086376 - DNA, 25 bp, Homo sapien
ggtcttggggatctcaaagttgtag

SEQ ID NO: 2086377 - DNA, 25 bp, Homo sapien
atctgattggccacgcggccccgag

SEQ ID NO: 2086378 - DNA, 25 bp, Homo sapien
caagatatccacaatggtacaggca

SEQ ID NO: 2086379 - DNA, 25 bp, Homo sapien
tccaagatatccacaatggtacagg

SEQ ID NO: 2086380 - DNA, 25 bp, Homo sapien
cacaatggtacaggcaaagaggagg

SEQ ID NO: 2086381 - DNA, 25 bp, Homo sapien
tatccacaatggtacaggcaaagag

SEQ ID NO: 2086382 - DNA, 25 bp, Homo sapien
tcaccatcacttcggcctccgtgaa

SEQ ID NO: 2086383 - DNA, 25 bp, Homo sapien
acagcaagccccgtaggtcacgtca

SEQ ID NO: 2086384 - DNA, 25 bp, Homo sapien
gccgtagtgcaccaagaagtcagct

SEQ ID NO: 2086385 - DNA, 25 bp, Homo sapien
tgtgaagtcatccacacagcaagcc

SEQ ID NO: 2086386 - DNA, 25 bp, Homo sapien
tccaagcaggacaagaaggcactgc

SEQ ID NO: 2086387 - DNA, 25 bp, Homo sapien
ccccgccaccgtccaggtgtcctgg

SEQ ID NO: 2086388 - DNA, 25 bp, Homo sapien
accaggagggaccttgtgtctccaa

SEQ ID NO: 2086389 - DNA, 25 bp, Homo sapien
tgcagagcgggaaggcagaggccac

SEQ ID NO: 2086390 - DNA, 25 bp, Homo sapien
gttgccaaggcaaccaaatccaaag

SEQ ID NO: 2086391 - DNA, 25 bp, Homo sapien
aaacacctgcatctgggacagagca

SEQ ID NO: 2086392 - DNA, 25 bp, Homo sapien
ggcccagcctgctctacaaccaaca

SEQ ID NO: 2086393 - DNA, 25 bp, Homo sapien
gcctgctctacaaccaacagccttt

SEQ ID NO: 2086394 - DNA, 25 bp, Homo sapien
ttcaaacacctgcatctgggacaga

SEQ ID NO: 2086395 - DNA, 25 bp, Homo sapien
gaggggggtcacagatcccctagaa

SEQ ID NO: 2086396 - DNA, 25 bp, Homo sapien
gtcacagatcccctagaagctcctt

SEQ ID NO: 2086397 - DNA, 25 bp, Homo sapien
agaagaggggggtcacagatcccct

SEQ ID NO: 2086398 - DNA, 25 bp, Homo sapien
gggggtcacagatcccctagaagct

SEQ ID NO: 2086399 - DNA, 25 bp, Homo sapien
gtgtctatccggatgtccacaaaga

SEQ ID NO: 2086400 - DNA, 25 bp, Homo sapien
tccaggaggtgtgtagtgtctatcc

SEQ ID NO: 2086401 - DNA, 25 bp, Homo sapien
caaactgaatggtgctgaccagggc

SEQ ID NO: 2086402 - DNA, 25 bp, Homo sapien
tacagcacccggaagtcttgggccg

SEQ ID NO: 2086403 - DNA, 25 bp, Homo sapien
cacctctttggacagtcggggggat

SEQ ID NO: 2086404 - DNA, 25 bp, Homo sapien
tcacacgatactcggctttcagctc

SEQ ID NO: 2086405 - DNA, 25 bp, Homo sapien
caggggcttgcactgtgggacactc

SEQ ID NO: 2086406 - DNA, 25 bp, Homo sapien
tgtgggacactcacacgatactcgg

SEQ ID NO: 2086407 - DNA, 25 bp, Homo sapien
ctgccattagtacggaacgggactc

SEQ ID NO: 2086408 - DNA, 25 bp, Homo sapien
tacagagcgtggaagataacctgcc

SEQ ID NO: 2086409 - DNA, 25 bp, Homo sapien
cccaagggtagagactgagtgacgt

SEQ ID NO: 2086410 - DNA, 25 bp, Homo sapien
gctcagggatgttaagaaactcgcc

SEQ ID NO: 2086411 - DNA, 25 bp, Homo sapien
gctgtgcctctgtgtaaactgggac

SEQ ID NO: 2086412 - DNA, 25 bp, Homo sapien
tggcttagaagtccacagggctggc

SEQ ID NO: 2086413 - DNA, 25 bp, Homo sapien
cagaggactgagttcacagctggct

SEQ ID NO: 2086414 - DNA, 25 bp, Homo sapien
cagaagaggcactcgctggcttaga

SEQ ID NO: 2086415 - DNA, 25 bp, Homo sapien
gacattggggttggcaatcatgaca

SEQ ID NO: 2086416 - DNA, 25 bp, Homo sapien
tggggttggcaatcatgacagactc

SEQ ID NO: 2086417 - DNA, 25 bp, Homo sapien
tcatgacagactccagatggaagcg

SEQ ID NO: 2086418 - DNA, 25 bp, Homo sapien
tgacagactccagatggaagcggcc

SEQ ID NO: 2086419 - DNA, 25 bp, Homo sapien
cagcccagcccggcccagcccatac

SEQ ID NO: 2086420 - DNA, 25 bp, Homo sapien
tggtcagcccagcccggcccagccc

SEQ ID NO: 2086421 - DNA, 25 bp, Homo sapien
gtcagcccagcccggcccagcccat

SEQ ID NO: 2086422 - DNA, 25 bp, Homo sapien
cagctggtcagcccagcccggccca

SEQ ID NO: 2086423 - DNA, 25 bp, Homo sapien
cagtggctatggcttcttggcgagc

SEQ ID NO: 2086424 - DNA, 25 bp, Homo sapien
cccaggacttagctgagcgggcagt

SEQ ID NO: 2086425 - DNA, 25 bp, Homo sapien
aggatcttaggactgccctggcggc

SEQ ID NO: 2086426 - DNA, 25 bp, Homo sapien
aaagtgcccagaataaggccccagg

SEQ ID NO: 2086427 - DNA, 25 bp, Homo sapien
acctgtggcctactggttttcccag

SEQ ID NO: 2086428 - DNA, 25 bp, Homo sapien
tgaacctgtggcctactggttttcc

SEQ ID NO: 2086429 - DNA, 25 bp, Homo sapien
cacctggtcaagcagccaaagctga

SEQ ID NO: 2086430 - DNA, 25 bp, Homo sapien
aagcagccaaagctgaacctgtggc

SEQ ID NO: 2086431 - DNA, 25 bp, Homo sapien
caaggctcggagtcgagattccagg

SEQ ID NO: 2086432 - DNA, 25 bp, Homo sapien
gcagcctcacaaaggaaaggcccaa

SEQ ID NO: 2086433 - DNA, 25 bp, Homo sapien
cttgctggggaagatctcagagagc

SEQ ID NO: 2086434 - DNA, 25 bp, Homo sapien
ccacctcaggaagtaggctaagctt

SEQ ID NO: 2086435 - DNA, 25 bp, Homo sapien
aagtcccaaagcaggtatgacccag

SEQ ID NO: 2086436 - DNA, 25 bp, Homo sapien
caggtcagaccctaggaagggcctc

SEQ ID NO: 2086437 - DNA, 25 bp, Homo sapien
tctgccgacaatgagctttccaggg

SEQ ID NO: 2086438 - DNA, 25 bp, Homo sapien
tcctaaagtaaagacagtgacccac

SEQ ID NO: 2086439 - DNA, 25 bp, Homo sapien
tgtgccccagtcaatggagagacgt

SEQ ID NO: 2086440 - DNA, 25 bp, Homo sapien
ctcatagggtgtcagcagcggcttg

SEQ ID NO: 2086441 - DNA, 25 bp, Homo sapien
tgccccagtcaatggagagacgtgg

SEQ ID NO: 2086442 - DNA, 25 bp, Homo sapien
cagtcaatggagagacgtggacatg

SEQ ID NO: 2086443 - DNA, 25 bp, Homo sapien
ctttgagaaccacgtccaaagccca

SEQ ID NO: 2086444 - DNA, 25 bp, Homo sapien
gagaaccacgtccaaagcccactct

SEQ ID NO: 2086445 - DNA, 25 bp, Homo sapien
tttgagaaccacgtccaaagcccac

SEQ ID NO: 2086446 - DNA, 25 bp, Homo sapien
ttgagaaccacgtccaaagcccact

SEQ ID NO: 2086447 - DNA, 25 bp, Homo sapien
gactccgctggagaaatcgagacag

SEQ ID NO: 2086448 - DNA, 25 bp, Homo sapien
gacagactccggaatctacgaacat

SEQ ID NO: 2086449 - DNA, 25 bp, Homo sapien
tacgaacataacgaagtgctgccca

SEQ ID NO: 2086450 - DNA, 25 bp, Homo sapien
tgaattcagtcctcacgacggcctg

SEQ ID NO: 2086451 - DNA, 25 bp, Homo sapien
gctgccagcgtagaagtccatcggg

SEQ ID NO: 2086452 - DNA, 25 bp, Homo sapien
gaaatgtccctcagagccacggccg

SEQ ID NO: 2086453 - DNA, 25 bp, Homo sapien
aggaaatgtccctcagagccacggc

SEQ ID NO: 2086454 - DNA, 25 bp, Homo sapien
ccagcgtagaagtccatcgggtagg

SEQ ID NO: 2086455 - DNA, 25 bp, Homo sapien
cgtggggacggcggtcctggccgtg

SEQ ID NO: 2086456 - DNA, 25 bp, Homo sapien
tgtgcgtttcccgtcgcggtcgcag

SEQ ID NO: 2086457 - DNA, 25 bp, Homo sapien
ggccagtgcccaggcgcggtctctc

SEQ ID NO: 2086458 - DNA, 25 bp, Homo sapien
ttggttagggtctcgctcctgcgac

SEQ ID NO: 2086459 - DNA, 25 bp, Homo sapien
gctcctgtgcgtttcccgtcgcggt

SEQ ID NO: 2086460 - DNA, 25 bp, Homo sapien
gtcctcgcaagccacggccgaaggg

SEQ ID NO: 2086461 - DNA, 25 bp, Homo sapien
tgcagtcctcgcaagccacggccga

SEQ ID NO: 2086462 - DNA, 25 bp, Homo sapien
cagctgcagtcctcgcaagccacgg

SEQ ID NO: 2086463 - DNA, 25 bp, Homo sapien
agctgcagtcctcgcaagccacggc

SEQ ID NO: 2086464 - DNA, 25 bp, Homo sapien
tcggagcgccaaggcgttcccatga

SEQ ID NO: 2086465 - DNA, 25 bp, Homo sapien
gaagcacaatgcacggggcggaacc

SEQ ID NO: 2086466 - DNA, 25 bp, Homo sapien
ttcccatgacaacggcaaaaggcgg

SEQ ID NO: 2086467 - DNA, 25 bp, Homo sapien
gggcggaaccgaacgtcagcaccgc

SEQ ID NO: 2086468 - DNA, 25 bp, Homo sapien
gagcgacggaagcaccggaagcggt

SEQ ID NO: 2086469 - DNA, 25 bp, Homo sapien
ggcaaggagcgacggaagcaccgga

SEQ ID NO: 2086470 - DNA, 25 bp, Homo sapien
tgcccggcaaggagcgacggaagca

SEQ ID NO: 2086471 - DNA, 25 bp, Homo sapien
tatgcccggcaaggagcgacggaag

SEQ ID NO: 2086472 - DNA, 25 bp, Homo sapien
agcgccccggtcttctcacggaagc

SEQ ID NO: 2086473 - DNA, 25 bp, Homo sapien
ctgaggcacacgagctcggcgcgac

SEQ ID NO: 2086474 - DNA, 25 bp, Homo sapien
cgcgaccccgcagcgccttcctcag

SEQ ID NO: 2086475 - DNA, 25 bp, Homo sapien
cgaagtctgatctggcgccctcggg

SEQ ID NO: 2086476 - DNA, 25 bp, Homo sapien
aggaaactgagtgcgtttccggagc

SEQ ID NO: 2086477 - DNA, 25 bp, Homo sapien
gacaggctgcagtttgagcaaagag

SEQ ID NO: 2086478 - DNA, 25 bp, Homo sapien
aaagggaatcgaggcaaaagtctgg

SEQ ID NO: 2086479 - DNA, 25 bp, Homo sapien
ggaaatgagtggattggcctgaaca

SEQ ID NO: 2086480 - DNA, 25 bp, Homo sapien
caagggcctttgcaggatggattcc

SEQ ID NO: 2086481 - DNA, 25 bp, Homo sapien
ttccaatgcggagaaaacgtcggcc

SEQ ID NO: 2086482 - DNA, 25 bp, Homo sapien
tcaaaaggccccagcctgttcagtg

SEQ ID NO: 2086483 - DNA, 25 bp, Homo sapien
caccaagaggataaaccgtggcaag

SEQ ID NO: 2086484 - DNA, 25 bp, Homo sapien
gggaaattggctggccagttgcaca

SEQ ID NO: 2086485 - DNA, 25 bp, Homo sapien
aattggctggccagttgcacactct

SEQ ID NO: 2086486 - DNA, 25 bp, Homo sapien
gctccgggaaattggctggccagtt

SEQ ID NO: 2086487 - DNA, 25 bp, Homo sapien
ctggccagttgcacactctcctgag

SEQ ID NO: 2086488 - DNA, 25 bp, Homo sapien
ctctgcaaactggtccaagaacttg

SEQ ID NO: 2086489 - DNA, 25 bp, Homo sapien
tggttctggtgaggcgcactcacag

SEQ ID NO: 2086490 - DNA, 25 bp, Homo sapien
ccccttttcttcagtacagggcagg

SEQ ID NO: 2086491 - DNA, 25 bp, Homo sapien
aatgtccattaaggccttgtgctcc

SEQ ID NO: 2086492 - DNA, 25 bp, Homo sapien
cagggcccttataatttgggtctca

SEQ ID NO: 2086493 - DNA, 25 bp, Homo sapien
tattatgtggcagtcaccatggtgc

SEQ ID NO: 2086494 - DNA, 25 bp, Homo sapien
actttattatgtggcagtcaccatg

SEQ ID NO: 2086495 - DNA, 25 bp, Homo sapien
tatgtggcagtcaccatggtgccag

SEQ ID NO: 2086496 - DNA, 25 bp, Homo sapien
tgtggcagtcaccatggtgccagcc

SEQ ID NO: 2086497 - DNA, 25 bp, Homo sapien
tatgtagatggccaagaaaccgact

SEQ ID NO: 2086498 - DNA, 25 bp, Homo sapien
tcagcgaggttagagcacttaggga

SEQ ID NO: 2086499 - DNA, 25 bp, Homo sapien
tgagtatgtgcacccatgcagcagc

SEQ ID NO: 2086500 - DNA, 25 bp, Homo sapien
ggcgctgcccagaaaactatgtaga

SEQ ID NO: 2086501 - DNA, 25 bp, Homo sapien
tgtagtgaggaacccagaactttcg

SEQ ID NO: 2086502 - DNA, 25 bp, Homo sapien
gcatggtgatttgcgcctgcagccc

SEQ ID NO: 2086503 - DNA, 25 bp, Homo sapien
cagtaactaggtctctgggcggata

SEQ ID NO: 2086504 - DNA, 25 bp, Homo sapien
gctcgcaagttggagaccatccgca

SEQ ID NO: 2086505 - DNA, 25 bp, Homo sapien
cacttgtcgagaactagtggacccc

SEQ ID NO: 2086506 - DNA, 25 bp, Homo sapien
ctgttccacttgtcgagaactagtg

SEQ ID NO: 2086507 - DNA, 25 bp, Homo sapien
cttgtcgagaactagtggaccccat

SEQ ID NO: 2086508 - DNA, 25 bp, Homo sapien
tccacttgtcgagaactagtggacc

SEQ ID NO: 2086509 - DNA, 25 bp, Homo sapien
aggttcctccgctaaagactcctgg

SEQ ID NO: 2086510 - DNA, 25 bp, Homo sapien
tcctgggtggtacctgaatccccgc

SEQ ID NO: 2086511 - DNA, 25 bp, Homo sapien
ctgggctactttgggctcccctact

SEQ ID NO: 2086512 - DNA, 25 bp, Homo sapien
tggtacctgaatccccgctgggcct

SEQ ID NO: 2086513 - DNA, 25 bp, Homo sapien
gtgcacttcactcttcgacctttct

SEQ ID NO: 2086514 - DNA, 25 bp, Homo sapien
ggtgaggaccgccttgccctcctgt

SEQ ID NO: 2086515 - DNA, 25 bp, Homo sapien
gccctcctgtgcacttcactcttcg

SEQ ID NO: 2086516 - DNA, 25 bp, Homo sapien
gtgaggaccgccttgccctcctgtg

SEQ ID NO: 2086517 - DNA, 25 bp, Homo sapien
atccgctccccaagttaacttactg

SEQ ID NO: 2086518 - DNA, 25 bp, Homo sapien
tccgccccatgtatcttgtgcagtg

SEQ ID NO: 2086519 - DNA, 25 bp, Homo sapien
gtatcttgtgcagtggagtctgtgc

SEQ ID NO: 2086520 - DNA, 25 bp, Homo sapien
gagtctgtgcattgctaacctgccc

SEQ ID NO: 2086521 - DNA, 25 bp, Homo sapien
tgtacgtatttctaggcacacagcc

SEQ ID NO: 2086522 - DNA, 25 bp, Homo sapien
gagctgagcgctcccatgtacgtat

SEQ ID NO: 2086523 - DNA, 25 bp, Homo sapien
gcacacagccccagttcggaaaagt

SEQ ID NO: 2086524 - DNA, 25 bp, Homo sapien
gcacactcttatctggagcggcccg

SEQ ID NO: 2086525 - DNA, 25 bp, Homo sapien
agccgcggcccggtggtcctgagtc

SEQ ID NO: 2086526 - DNA, 25 bp, Homo sapien
ggcggtggcagctcttagccgatgc

SEQ ID NO: 2086527 - DNA, 25 bp, Homo sapien
ctgagtccgaaagggacgacacccg

SEQ ID NO: 2086528 - DNA, 25 bp, Homo sapien
cgccagaagatgcacccgaggcggc

SEQ ID NO: 2086529 - DNA, 25 bp, Homo sapien
ttaagtaaaatgtccgcttcaggaa

SEQ ID NO: 2086530 - DNA, 25 bp, Homo sapien
aaaatgtccgcttcaggaaaagtca

SEQ ID NO: 2086531 - DNA, 25 bp, Homo sapien
agtaaaatgtccgcttcaggaaaag

SEQ ID NO: 2086532 - DNA, 25 bp, Homo sapien
taaaatgtccgcttcaggaaaagtc

SEQ ID NO: 2086533 - DNA, 25 bp, Homo sapien
gacacacaccggccgggtgagagcc

SEQ ID NO: 2086534 - DNA, 25 bp, Homo sapien
ctgcggggacacacaccggccgggt

SEQ ID NO: 2086535 - DNA, 25 bp, Homo sapien
acaccggccgggtgagagccgtgcg

SEQ ID NO: 2086536 - DNA, 25 bp, Homo sapien
cacacaccggccgggtgagagccgt

SEQ ID NO: 2086537 - DNA, 25 bp, Homo sapien
cgatgatcacgtcgcacaagaagcc

SEQ ID NO: 2086538 - DNA, 25 bp, Homo sapien
ggaagagggcgttctgcaccacgat

SEQ ID NO: 2086539 - DNA, 25 bp, Homo sapien
caagaagcccttggtgcgctggttg

SEQ ID NO: 2086540 - DNA, 25 bp, Homo sapien
cagcacgttcttgtgcgcgcggaag

SEQ ID NO: 2086541 - DNA, 25 bp, Homo sapien
ggcgcttgaggcgtttcttgcacag

SEQ ID NO: 2086542 - DNA, 25 bp, Homo sapien
ttgccgtggcgcttgaggcgtttct

SEQ ID NO: 2086543 - DNA, 25 bp, Homo sapien
caggcggccggtgtagatgaagtcc

SEQ ID NO: 2086544 - DNA, 25 bp, Homo sapien
gtttcttgcacagcgccacgaggtc

SEQ ID NO: 2086545 - DNA, 25 bp, Homo sapien
gggacgggtagcaggcctggatgac

SEQ ID NO: 2086546 - DNA, 25 bp, Homo sapien
cggccgaccatagggcgcgtagccg

SEQ ID NO: 2086547 - DNA, 25 bp, Homo sapien
ggcccggccgaccatagggcgcgta

SEQ ID NO: 2086548 - DNA, 25 bp, Homo sapien
tggatgaccggcgtggcggcccgca

SEQ ID NO: 2086549 - DNA, 25 bp, Homo sapien
cgagaggcggctccttgtaggcggc

SEQ ID NO: 2086550 - DNA, 25 bp, Homo sapien
cgcgaaatgggtcggaaggcggtgc

SEQ ID NO: 2086551 - DNA, 25 bp, Homo sapien
cagctcggcgcagtgcgtgttgacc

SEQ ID NO: 2086552 - DNA, 25 bp, Homo sapien
ggctcgtgcttcatccagcgataga

SEQ ID NO: 2086553 - DNA, 25 bp, Homo sapien
cgtccaggctgccagggtagcgcgg

SEQ ID NO: 2086554 - DNA, 25 bp, Homo sapien
ccgggcccgtccaggctgccagggt

SEQ ID NO: 2086555 - DNA, 25 bp, Homo sapien
ggcggcgccaggccgagcgggggcc

SEQ ID NO: 2086556 - DNA, 25 bp, Homo sapien
ggcccgtccaggctgccagggtagc

SEQ ID NO: 2086557 - DNA, 25 bp, Homo sapien
ccaggcgggctggggtcctcgctgc

SEQ ID NO: 2086558 - DNA, 25 bp, Homo sapien
ggtcctcgctgctaccggtctcctc

SEQ ID NO: 2086559 - DNA, 25 bp, Homo sapien
gtcctcgctgctaccggtctcctcg

SEQ ID NO: 2086560 - DNA, 25 bp, Homo sapien
tcctcgctgctaccggtctcctcgc

SEQ ID NO: 2086561 - DNA, 25 bp, Homo sapien
ttgccgcacggaatgcacacgtaca

SEQ ID NO: 2086562 - DNA, 25 bp, Homo sapien
cttcttcccgcagatggtgcatggg

SEQ ID NO: 2086563 - DNA, 25 bp, Homo sapien
tacaggttgtcaccgaagctctcgg

SEQ ID NO: 2086564 - DNA, 25 bp, Homo sapien
tgtagctcttgtcgcacgacgcgca

SEQ ID NO: 2086565 - DNA, 25 bp, Homo sapien
ggcgtgcatcttcatgtggctgatg

SEQ ID NO: 2086566 - DNA, 25 bp, Homo sapien
gttgctgtgcgaacttgccgccgca

SEQ ID NO: 2086567 - DNA, 25 bp, Homo sapien
gtgcatcttcatgtggctgatgagg

SEQ ID NO: 2086568 - DNA, 25 bp, Homo sapien
atgaggttgcgttgctgtgcgaact

SEQ ID NO: 2086569 - DNA, 25 bp, Homo sapien
gagcccccccaagcccgccagcgcc

SEQ ID NO: 2086570 - DNA, 25 bp, Homo sapien
cccaagcccgccagcgccccggccg

SEQ ID NO: 2086571 - DNA, 25 bp, Homo sapien
gcccgccagcgccccggccgcgccg

SEQ ID NO: 2086572 - DNA, 25 bp, Homo sapien
ggagcccccccaagcccgccagcgc

SEQ ID NO: 2086573 - DNA, 25 bp, Homo sapien
gcaaagacgccctcggggaagtcga

SEQ ID NO: 2086574 - DNA, 25 bp, Homo sapien
gccgtgaggcgagccacagcaaaga

SEQ ID NO: 2086575 - DNA, 25 bp, Homo sapien
gccaggtgagcgccctggctcagca

SEQ ID NO: 2086576 - DNA, 25 bp, Homo sapien
aggcccagctcggccgtgaacttgg

SEQ ID NO: 2086577 - DNA, 25 bp, Homo sapien
acgctgcggttgtcccgggcacagt

SEQ ID NO: 2086578 - DNA, 25 bp, Homo sapien
gagacctggtggtaggctcttcgcc

SEQ ID NO: 2086579 - DNA, 25 bp, Homo sapien
agagcctgtgtacaaggtaggaaat

SEQ ID NO: 2086580 - DNA, 25 bp, Homo sapien
ggagctaaagagaccgcgttccagc

SEQ ID NO: 2086581 - DNA, 25 bp, Homo sapien
gttatgaaacatacctgacctcttg

SEQ ID NO: 2086582 - DNA, 25 bp, Homo sapien
tagagtctcagaagactgggctctt

SEQ ID NO: 2086583 - DNA, 25 bp, Homo sapien
agctggaaggccgatgactgggtgg

SEQ ID NO: 2086584 - DNA, 25 bp, Homo sapien
tgactgggtggtcgggagggagacc

SEQ ID NO: 2086585 - DNA, 25 bp, Homo sapien
cctggaggatgggtgcgcagctctg

SEQ ID NO: 2086586 - DNA, 25 bp, Homo sapien
tggaggatgggtgcgcagctctgcc

SEQ ID NO: 2086587 - DNA, 25 bp, Homo sapien
ctggaggatgggtgcgcagctctgc

SEQ ID NO: 2086588 - DNA, 25 bp, Homo sapien
tacccatggcaggaacctagtacag

SEQ ID NO: 2086589 - DNA, 25 bp, Homo sapien
cttccttaccaagaatgagttcctg

SEQ ID NO: 2086590 - DNA, 25 bp, Homo sapien
gggcaaatcttaatgggaccagtgg

SEQ ID NO: 2086591 - DNA, 25 bp, Homo sapien
ttcaccgcggttcctcgtcataggg

SEQ ID NO: 2086592 - DNA, 25 bp, Homo sapien
tgaaggcgctcacaaggaatgttcc

SEQ ID NO: 2086593 - DNA, 25 bp, Homo sapien
cccagtgtagcacggaagatgccca

SEQ ID NO: 2086594 - DNA, 25 bp, Homo sapien
tgttgacggatgaccggaacctgcg

SEQ ID NO: 2086595 - DNA, 25 bp, Homo sapien
aatgttcctgtacgggacatcccag

SEQ ID NO: 2086596 - DNA, 25 bp, Homo sapien
tgagactgctcaggtccgacatgga

SEQ ID NO: 2086597 - DNA, 25 bp, Homo sapien
ggacctctgtcaggaaatgcccagc

SEQ ID NO: 2086598 - DNA, 25 bp, Homo sapien
aatgtcgggccttggttagctgacc

SEQ ID NO: 2086599 - DNA, 25 bp, Homo sapien
tgtaaatgtgcctaaagaaacctgg

SEQ ID NO: 2086600 - DNA, 25 bp, Homo sapien
agacctgaccccagcgtggagaagc

SEQ ID NO: 2086601 - DNA, 25 bp, Homo sapien
gccccgcctggtgcagaagcacaaa

SEQ ID NO: 2086602 - DNA, 25 bp, Homo sapien
gcagcaaagggttaagccgccagct

SEQ ID NO: 2086603 - DNA, 25 bp, Homo sapien
tctgtgctccgcagacctgacccca

SEQ ID NO: 2086604 - DNA, 25 bp, Homo sapien
tcagccctggcagataacggcagtg

SEQ ID NO: 2086605 - DNA, 25 bp, Homo sapien
ttcgaggtagcattcttctggccag

SEQ ID NO: 2086606 - DNA, 25 bp, Homo sapien
tgatccatggcttaaactgcttgag

SEQ ID NO: 2086607 - DNA, 25 bp, Homo sapien
cagtgtcaccctaaggctaggccag

SEQ ID NO: 2086608 - DNA, 25 bp, Homo sapien
gtcaggtttcctgagcagttgcaaa

SEQ ID NO: 2086609 - DNA, 25 bp, Homo sapien
ggtttcctgagcagttgcaaacatc

SEQ ID NO: 2086610 - DNA, 25 bp, Homo sapien
gccacatctattgtttccctcagca

SEQ ID NO: 2086611 - DNA, 25 bp, Homo sapien
cctcagcattatggccacagtcttg

SEQ ID NO: 2086612 - DNA, 25 bp, Homo sapien
tctccagggtgttaaccgagaggtg

SEQ ID NO: 2086613 - DNA, 25 bp, Homo sapien
gttcccagcgcctctcacagatgtg

SEQ ID NO: 2086614 - DNA, 25 bp, Homo sapien
aaaacaggaaccacgcatgtttggg

SEQ ID NO: 2086615 - DNA, 25 bp, Homo sapien
tgtaaggcaagtccccgttcccagc

SEQ ID NO: 2086616 - DNA, 25 bp, Homo sapien
ggtacctgggtcacactaatacaat

SEQ ID NO: 2086617 - DNA, 25 bp, Homo sapien
gaggctcctagctggagaggccatt

SEQ ID NO: 2086618 - DNA, 25 bp, Homo sapien
ggcttcagtgctccaaacccatgct

SEQ ID NO: 2086619 - DNA, 25 bp, Homo sapien
gaagaaaggagcatcgagtgaatta

SEQ ID NO: 2086620 - DNA, 25 bp, Homo sapien
tgtctggccatatgcgtgaaccctg

SEQ ID NO: 2086621 - DNA, 25 bp, Homo sapien
tcacagccacaagaggatttctcag

SEQ ID NO: 2086622 - DNA, 25 bp, Homo sapien
tctgtgccgaggtggctgtaaaaca

SEQ ID NO: 2086623 - DNA, 25 bp, Homo sapien
tttccagccttgaacgtaagccaga

SEQ ID NO: 2086624 - DNA, 25 bp, Homo sapien
tctctctctaaggaactgagcctag

SEQ ID NO: 2086625 - DNA, 25 bp, Homo sapien
tctctctaaggaactgagcctagga

SEQ ID NO: 2086626 - DNA, 25 bp, Homo sapien
gagcctaggagagaacagcctccgg

SEQ ID NO: 2086627 - DNA, 25 bp, Homo sapien
ggagagaacagcctccggtatcgcc

SEQ ID NO: 2086628 - DNA, 25 bp, Homo sapien
gaccagtcctggcagcatagcgagg

SEQ ID NO: 2086629 - DNA, 25 bp, Homo sapien
tttctagatcctaaaagtatcatga

SEQ ID NO: 2086630 - DNA, 25 bp, Homo sapien
tgcagaggatttctagatcctaaaa

SEQ ID NO: 2086631 - DNA, 25 bp, Homo sapien
tgtagtaactgcatcaaagagtgca

SEQ ID NO: 2086632 - DNA, 25 bp, Homo sapien
taggccctgcttgtcctagactgtg

SEQ ID NO: 2086633 - DNA, 25 bp, Homo sapien
cattcgctcggtgttcgctgtggct

SEQ ID NO: 2086634 - DNA, 25 bp, Homo sapien
gttattagcatcttgcagacagggc

SEQ ID NO: 2086635 - DNA, 25 bp, Homo sapien
gcacacaagttaggaggccacgaca

SEQ ID NO: 2086636 - DNA, 25 bp, Homo sapien
tgttgctggcagactaatcttgaga

SEQ ID NO: 2086637 - DNA, 25 bp, Homo sapien
gacgacttcttacctctttgcacca

SEQ ID NO: 2086638 - DNA, 25 bp, Homo sapien
aatgtgttgatggtgattctcctgg

SEQ ID NO: 2086639 - DNA, 25 bp, Homo sapien
ctgtgccatcacagaggtgttgctg

SEQ ID NO: 2086640 - DNA, 25 bp, Homo sapien
tgctgccagataaaccacagggaag

SEQ ID NO: 2086641 - DNA, 25 bp, Homo sapien
ttttcccaagagttaggcctaatga

SEQ ID NO: 2086642 - DNA, 25 bp, Homo sapien
gaagactatacctaccagtacggag

SEQ ID NO: 2086643 - DNA, 25 bp, Homo sapien
taacaggcagacatatagagatttg

SEQ ID NO: 2086644 - DNA, 25 bp, Homo sapien
cctgacctcaagcaatctgcccgct

SEQ ID NO: 2086645 - DNA, 25 bp, Homo sapien
tgacctcaagcaatctgcccgcttt

SEQ ID NO: 2086646 - DNA, 25 bp, Homo sapien
gatgggttctcactccatctcccag

SEQ ID NO: 2086647 - DNA, 25 bp, Homo sapien
tatagacggtgttttgccatgttga

SEQ ID NO: 2086648 - DNA, 25 bp, Homo sapien
tcatagttgtttcatgggagataac

SEQ ID NO: 2086649 - DNA, 25 bp, Homo sapien
aatagtccagtgtactctcccaaac

SEQ ID NO: 2086650 - DNA, 25 bp, Homo sapien
tgagcatattcttgactcatagttg

SEQ ID NO: 2086651 - DNA, 25 bp, Homo sapien
cttcctaaaatagtccagtgtactc

SEQ ID NO: 2086652 - DNA, 25 bp, Homo sapien
tgctggcgtgcctgtaagcgaatct

SEQ ID NO: 2086653 - DNA, 25 bp, Homo sapien
gaatgacatggttgacaggcactcc

SEQ ID NO: 2086654 - DNA, 25 bp, Homo sapien
tctcaagacctagtcccatggcgct

SEQ ID NO: 2086655 - DNA, 25 bp, Homo sapien
caaaaccaatcaaggtgggctgact

SEQ ID NO: 2086656 - DNA, 25 bp, Homo sapien
tcaaggagcttaatagggtcttcca

SEQ ID NO: 2086657 - DNA, 25 bp, Homo sapien
cacagctaaagtgctccctgtaggc

SEQ ID NO: 2086658 - DNA, 25 bp, Homo sapien
tgaggtttttagaactcaaggagct

SEQ ID NO: 2086659 - DNA, 25 bp, Homo sapien
tgcgcccaccctacatgaggttttt

SEQ ID NO: 2086660 - DNA, 25 bp, Homo sapien
gctggtgaataagattgagcagaaa

SEQ ID NO: 2086661 - DNA, 25 bp, Homo sapien
gatcaggagcgtgtggattaaaacc

SEQ ID NO: 2086662 - DNA, 25 bp, Homo sapien
ccagacggtggatgattaatacttt

SEQ ID NO: 2086663 - DNA, 25 bp, Homo sapien
cttatagaggtagacatggcagctt

SEQ ID NO: 2086664 - DNA, 25 bp, Homo sapien
tgtgataggggtaccaaaatctgtt

SEQ ID NO: 2086665 - DNA, 25 bp, Homo sapien
aaaatctgtttaccctcatctttgc

SEQ ID NO: 2086666 - DNA, 25 bp, Homo sapien
tagttgggtcagtgtgccagaaaag

SEQ ID NO: 2086667 - DNA, 25 bp, Homo sapien
agtatgtggagttcatagctgcatg

SEQ ID NO: 2086668 - DNA, 25 bp, Homo sapien
tgatgataagctcacatgggtcatt

SEQ ID NO: 2086669 - DNA, 25 bp, Homo sapien
tgcaaaagcagacctagcgtgatgg

SEQ ID NO: 2086670 - DNA, 25 bp, Homo sapien
ttgaatctttaggaactcttgacct

SEQ ID NO: 2086671 - DNA, 25 bp, Homo sapien
tttccatggccaacctaggagttga

SEQ ID NO: 2086672 - DNA, 25 bp, Homo sapien
tattctccatccacggcaggggaaa

SEQ ID NO: 2086673 - DNA, 25 bp, Homo sapien
ttattctccatccacggcaggggaa

SEQ ID NO: 2086674 - DNA, 25 bp, Homo sapien
ctccatccacggcaggggaaaataa

SEQ ID NO: 2086675 - DNA, 25 bp, Homo sapien
attattctccatccacggcagggga

SEQ ID NO: 2086676 - DNA, 25 bp, Homo sapien
cggaaacactctgtactcggctgtg

SEQ ID NO: 2086677 - DNA, 25 bp, Homo sapien
ccaaagttttcacagtggcctacga

SEQ ID NO: 2086678 - DNA, 25 bp, Homo sapien
ggtaggtctccacttcaacgactgt

SEQ ID NO: 2086679 - DNA, 25 bp, Homo sapien
aatgccttctgactggttgctctgg

SEQ ID NO: 2086680 - DNA, 25 bp, Homo sapien
tacaaggacccggatgatgacctca

SEQ ID NO: 2086681 - DNA, 25 bp, Homo sapien
gatgtatggtcgacgctggctgatt

SEQ ID NO: 2086682 - DNA, 25 bp, Homo sapien
tctgaggtgccactgtacaaggacc

SEQ ID NO: 2086683 - DNA, 25 bp, Homo sapien
gatgacctcacccttcttatcctgg

SEQ ID NO: 2086684 - DNA, 25 bp, Homo sapien
tcaccttcggtggcatgtcccttga

SEQ ID NO: 2086685 - DNA, 25 bp, Homo sapien
ccttcggtggcatgtcccttgaatg

SEQ ID NO: 2086686 - DNA, 25 bp, Homo sapien
caccttcggtggcatgtcccttgaa

SEQ ID NO: 2086687 - DNA, 25 bp, Homo sapien
cttcggtggcatgtcccttgaatgc

SEQ ID NO: 2086688 - DNA, 25 bp, Homo sapien
ggagccagtcagggagttcccatac

SEQ ID NO: 2086689 - DNA, 25 bp, Homo sapien
ctggagccagtcagggagttcccat

SEQ ID NO: 2086690 - DNA, 25 bp, Homo sapien
tggagccagtcagggagttcccata

SEQ ID NO: 2086691 - DNA, 25 bp, Homo sapien
ctgagcagccctatcacatccggtg

SEQ ID NO: 2086692 - DNA, 25 bp, Homo sapien
gcagccctatcacatccggtgcttg

SEQ ID NO: 2086693 - DNA, 25 bp, Homo sapien
gccctatcacatccggtgcttgtct

SEQ ID NO: 2086694 - DNA, 25 bp, Homo sapien
gcggccctgagcagccctatcacat

SEQ ID NO: 2086695 - DNA, 25 bp, Homo sapien
ttccttctcactgtcgtctttcctg

SEQ ID NO: 2086696 - DNA, 25 bp, Homo sapien
agctcaccagtgctgtgggatcaga

SEQ ID NO: 2086697 - DNA, 25 bp, Homo sapien
tcaggcagcgggctcaagtggccag

SEQ ID NO: 2086698 - DNA, 25 bp, Homo sapien
tctgcagccgagcagtgcctgttgg

SEQ ID NO: 2086699 - DNA, 25 bp, Homo sapien
catgtctgtggtgttcgatgaaagg

SEQ ID NO: 2086700 - DNA, 25 bp, Homo sapien
cgatgaaaggagataactgatgata

SEQ ID NO: 2086701 - DNA, 25 bp, Homo sapien
tcctgtagagagtcactgtgtcgcc

SEQ ID NO: 2086702 - DNA, 25 bp, Homo sapien
gtctctgggtagttgtgttgtgttc

SEQ ID NO: 2086703 - DNA, 25 bp, Homo sapien
caacttgtttcccatctgtactgct

SEQ ID NO: 2086704 - DNA, 25 bp, Homo sapien
tcaactctttccgggtttgttctgc

SEQ ID NO: 2086705 - DNA, 25 bp, Homo sapien
aatgcacggcttcttctcactcaac

SEQ ID NO: 2086706 - DNA, 25 bp, Homo sapien
tcttccatagctctgaaacacaatg

SEQ ID NO: 2086707 - DNA, 25 bp, Homo sapien
ggctgcccagaccttcgcattctga

SEQ ID NO: 2086708 - DNA, 25 bp, Homo sapien
gaccttcgcattctgatgctatata

SEQ ID NO: 2086709 - DNA, 25 bp, Homo sapien
tatatcttcctaattgtagctcgga

SEQ ID NO: 2086710 - DNA, 25 bp, Homo sapien
tagctcggatgcatttatcacactg

SEQ ID NO: 2086711 - DNA, 25 bp, Homo sapien
ctgcccatgaccagggttacataat

SEQ ID NO: 2086712 - DNA, 25 bp, Homo sapien
ttacataatgggaaacatagctggg

SEQ ID NO: 2086713 - DNA, 25 bp, Homo sapien
gaccagggttacataatgggaaaca

SEQ ID NO: 2086714 - DNA, 25 bp, Homo sapien
catgaccagggttacataatgggaa

SEQ ID NO: 2086715 - DNA, 25 bp, Homo sapien
tttcagctggtacttgaacccaggt

SEQ ID NO: 2086716 - DNA, 25 bp, Homo sapien
gaaaatagaaccagtgccaagccag

SEQ ID NO: 2086717 - DNA, 25 bp, Homo sapien
agctgtatgacactgcgctgacccc

SEQ ID NO: 2086718 - DNA, 25 bp, Homo sapien
cgctgaccccgaatgaggataggaa

SEQ ID NO: 2086719 - DNA, 25 bp, Homo sapien
actctggtgccatcttggtactgtg

SEQ ID NO: 2086720 - DNA, 25 bp, Homo sapien
gaactctggtgccatcttggtactg

SEQ ID NO: 2086721 - DNA, 25 bp, Homo sapien
aagaactctggtgccatcttggtac

SEQ ID NO: 2086722 - DNA, 25 bp, Homo sapien
gcaagaactctggtgccatcttggt

SEQ ID NO: 2086723 - DNA, 25 bp, Homo sapien
taccatatgggcttacgttcgtctt

SEQ ID NO: 2086724 - DNA, 25 bp, Homo sapien
agtttgtgccagttgccctaatttc

SEQ ID NO: 2086725 - DNA, 25 bp, Homo sapien
agaacagtagccagaatagtgcaga

SEQ ID NO: 2086726 - DNA, 25 bp, Homo sapien
caacggttatcaaaatcggaagtca

SEQ ID NO: 2086727 - DNA, 25 bp, Homo sapien
cgtctgcccgccctgcattctgttg

SEQ ID NO: 2086728 - DNA, 25 bp, Homo sapien
aacgtctgcccgccctgcattctgt

SEQ ID NO: 2086729 - DNA, 25 bp, Homo sapien
tgcccgccctgcattctgttgtttg

SEQ ID NO: 2086730 - DNA, 25 bp, Homo sapien
tctgcccgccctgcattctgttgtt

SEQ ID NO: 2086731 - DNA, 25 bp, Homo sapien
gcagtgggcccgttatttcaagttc

SEQ ID NO: 2086732 - DNA, 25 bp, Homo sapien
tgggatccgtggtagactttgttgc

SEQ ID NO: 2086733 - DNA, 25 bp, Homo sapien
tccttgttgttacagtctgtgcagt

SEQ ID NO: 2086734 - DNA, 25 bp, Homo sapien
ctcggctgagccgaaatcagagtgg

SEQ ID NO: 2086735 - DNA, 25 bp, Homo sapien
aggctctctgcggagagtccaggca

SEQ ID NO: 2086736 - DNA, 25 bp, Homo sapien
cagcctaggcctgtgtaactcgtga

SEQ ID NO: 2086737 - DNA, 25 bp, Homo sapien
gtgccatgatggcatggatcctcgt

SEQ ID NO: 2086738 - DNA, 25 bp, Homo sapien
tgtttctttgctggtcagactctcc

SEQ ID NO: 2086739 - DNA, 25 bp, Homo sapien
catgtgagtaacgtctccagctttg

SEQ ID NO: 2086740 - DNA, 25 bp, Homo sapien
actggctcagcatgtgagtaacgtc

SEQ ID NO: 2086741 - DNA, 25 bp, Homo sapien
gcacagccgagaagccgttgccgtc

SEQ ID NO: 2086742 - DNA, 25 bp, Homo sapien
gctcttgtgcaattgcctgctctgt

SEQ ID NO: 2086743 - DNA, 25 bp, Homo sapien
tttattataaatgagtgtgtcagcg

SEQ ID NO: 2086744 - DNA, 25 bp, Homo sapien
ggtttctagtcagacttctcagcac

SEQ ID NO: 2086745 - DNA, 25 bp, Homo sapien
tgtcagcgttgactgccggtttcta

SEQ ID NO: 2086746 - DNA, 25 bp, Homo sapien
aatgagtgtgtcagcgttgactgcc

SEQ ID NO: 2086747 - DNA, 25 bp, Homo sapien
tcgacagcggtatctctgttcatgt

SEQ ID NO: 2086748 - DNA, 25 bp, Homo sapien
gccatagcaggttttcttatcaggt

SEQ ID NO: 2086749 - DNA, 25 bp, Homo sapien
tctttccaagagagctacttcgaca

SEQ ID NO: 2086750 - DNA, 25 bp, Homo sapien
caagagagctacttcgacagcggta

SEQ ID NO: 2086751 - DNA, 25 bp, Homo sapien
gctttggtatcgcagcattggctgc

SEQ ID NO: 2086752 - DNA, 25 bp, Homo sapien
gagttgtggctttggtatcgcagca

SEQ ID NO: 2086753 - DNA, 25 bp, Homo sapien
ttttcctgtcgagagcattcctcag

SEQ ID NO: 2086754 - DNA, 25 bp, Homo sapien
tagctggcagcttagtttgagaggc

SEQ ID NO: 2086755 - DNA, 25 bp, Homo sapien
ctgcggggaacatctgcactcaggg

SEQ ID NO: 2086756 - DNA, 25 bp, Homo sapien
aagtgtagcggaagtgatgctgcgg

SEQ ID NO: 2086757 - DNA, 25 bp, Homo sapien
tgatgctgcggggaacatctgcact

SEQ ID NO: 2086758 - DNA, 25 bp, Homo sapien
tgctgcggggaacatctgcactcag

SEQ ID NO: 2086759 - DNA, 25 bp, Homo sapien
gggtagctgctttaccatcgtggta

SEQ ID NO: 2086760 - DNA, 25 bp, Homo sapien
tgctcttgaccccattccttggata

SEQ ID NO: 2086761 - DNA, 25 bp, Homo sapien
cgtggtacctgccatctgagtttcc

SEQ ID NO: 2086762 - DNA, 25 bp, Homo sapien
tgctttaccatcgtggtacctgcca

SEQ ID NO: 2086763 - DNA, 25 bp, Homo sapien
tgagcagaggaaaatgtttcgtaag

SEQ ID NO: 2086764 - DNA, 25 bp, Homo sapien
tgcctgctagggatacagttgtagg

SEQ ID NO: 2086765 - DNA, 25 bp, Homo sapien
tgatgcccagaactcatgtcagggc

SEQ ID NO: 2086766 - DNA, 25 bp, Homo sapien
attatttttcagatgcctgctaggg

SEQ ID NO: 2086767 - DNA, 25 bp, Homo sapien
tgccccaagtgccaacagcagatgt

SEQ ID NO: 2086768 - DNA, 25 bp, Homo sapien
cagatgtagcagttgacacgctgca

SEQ ID NO: 2086769 - DNA, 25 bp, Homo sapien
ttcagaaaatatgcgcgtgtgatcc

SEQ ID NO: 2086770 - DNA, 25 bp, Homo sapien
cacgctgcagggaatttccaactgc

SEQ ID NO: 2086771 - DNA, 25 bp, Homo sapien
tatatctggtgaaccttgctggccc

SEQ ID NO: 2086772 - DNA, 25 bp, Homo sapien
tgactgggcacctacatccagggtg

SEQ ID NO: 2086773 - DNA, 25 bp, Homo sapien
tacagctcagtcttatggcaaatgg

SEQ ID NO: 2086774 - DNA, 25 bp, Homo sapien
ggcaaatggtgtcattgggctcaca

SEQ ID NO: 2086775 - DNA, 25 bp, Homo sapien
gttcacgggtgttggtggagagacc

SEQ ID NO: 2086776 - DNA, 25 bp, Homo sapien
tcacgggtgttggtggagagacctt

SEQ ID NO: 2086777 - DNA, 25 bp, Homo sapien
acgggtgttggtggagagaccttga

SEQ ID NO: 2086778 - DNA, 25 bp, Homo sapien
gggttcacgggtgttggtggagaga

SEQ ID NO: 2086779 - DNA, 25 bp, Homo sapien
gtttcttgtgtgttcagtgccaccc

SEQ ID NO: 2086780 - DNA, 25 bp, Homo sapien
gcagaagtgatcttgtggcccacca

SEQ ID NO: 2086781 - DNA, 25 bp, Homo sapien
gctggtgcctctaatgctaccgtga

SEQ ID NO: 2086782 - DNA, 25 bp, Homo sapien
gagaaggagcattccagccggaagc

SEQ ID NO: 2086783 - DNA, 25 bp, Homo sapien
tgggtggctgcatatgtcagtttcc

SEQ ID NO: 2086784 - DNA, 25 bp, Homo sapien
cttggacatgtccttctgggtgggt

SEQ ID NO: 2086785 - DNA, 25 bp, Homo sapien
ggctgcatatgtcagtttccggact

SEQ ID NO: 2086786 - DNA, 25 bp, Homo sapien
cttcttggacatgtccttctgggtg

SEQ ID NO: 2086787 - DNA, 25 bp, Homo sapien
ggaagtgataaatcagcgctgtgtg

SEQ ID NO: 2086788 - DNA, 25 bp, Homo sapien
gcattctgtcagagttgccacccac

SEQ ID NO: 2086789 - DNA, 25 bp, Homo sapien
aaatcagcgctgtgtgttcaacccc

SEQ ID NO: 2086790 - DNA, 25 bp, Homo sapien
gggtctgtggtgaattggcagtcac

SEQ ID NO: 2086791 - DNA, 25 bp, Homo sapien
ggacgtgctgccaagtacccagtgt

SEQ ID NO: 2086792 - DNA, 25 bp, Homo sapien
agaccccgctgtgtgggctgccatt

SEQ ID NO: 2086793 - DNA, 25 bp, Homo sapien
gatataacactcagtgaggacagag

SEQ ID NO: 2086794 - DNA, 25 bp, Homo sapien
cacatgagtcatcatctttggtccc

SEQ ID NO: 2086795 - DNA, 25 bp, Homo sapien
tgcggggtgaagcaaagattatttc

SEQ ID NO: 2086796 - DNA, 25 bp, Homo sapien
cgtacgtgtccatcagtaatgcggg

SEQ ID NO: 2086797 - DNA, 25 bp, Homo sapien
tacctacatacttacgtacgtgtcc

SEQ ID NO: 2086798 - DNA, 25 bp, Homo sapien
tcactcatctacctacatacttacg

SEQ ID NO: 2086799 - DNA, 25 bp, Homo sapien
tgtatagacaggttatcttcaatga

SEQ ID NO: 2086800 - DNA, 25 bp, Homo sapien
cttgctgtatagacaggttatcttc

SEQ ID NO: 2086801 - DNA, 25 bp, Homo sapien
tatagacaggttatcttcaatgaaa

SEQ ID NO: 2086802 - DNA, 25 bp, Homo sapien
gctgtatagacaggttatcttcaat

SEQ ID NO: 2086803 - DNA, 25 bp, Homo sapien
ttcagaatcccctcctcttgcgttg

SEQ ID NO: 2086804 - DNA, 25 bp, Homo sapien
ttcacacgactctgtagaagcagga

SEQ ID NO: 2086805 - DNA, 25 bp, Homo sapien
gactctttcggaactgaaattgggc

SEQ ID NO: 2086806 - DNA, 25 bp, Homo sapien
tcagaaattcggtttttcacacgac

SEQ ID NO: 2086807 - DNA, 25 bp, Homo sapien
ggtggtcatattctggttgagaacc

SEQ ID NO: 2086808 - DNA, 25 bp, Homo sapien
ttccaaacagttcctgggatgggtg

SEQ ID NO: 2086809 - DNA, 25 bp, Homo sapien
gagaaccactacttttgaagcttga

SEQ ID NO: 2086810 - DNA, 25 bp, Homo sapien
tgaagcttgacaaggtcaaaaacat

SEQ ID NO: 2086811 - DNA, 25 bp, Homo sapien
cctccccggccgcacctctgcgcac

SEQ ID NO: 2086812 - DNA, 25 bp, Homo sapien
gcgcctccccggccgcacctctgcg

SEQ ID NO: 2086813 - DNA, 25 bp, Homo sapien
cccggccgcacctctgcgcacgcgc

SEQ ID NO: 2086814 - DNA, 25 bp, Homo sapien
tccccggccgcacctctgcgcacgc

SEQ ID NO: 2086815 - DNA, 25 bp, Homo sapien
tctcagcgttccgagtcgccgggat

SEQ ID NO: 2086816 - DNA, 25 bp, Homo sapien
tccttccacacgattccaactatat

SEQ ID NO: 2086817 - DNA, 25 bp, Homo sapien
ccaaatggacttatatgcctcctga

SEQ ID NO: 2086818 - DNA, 25 bp, Homo sapien
tccgcccgtctcagcgttccgagtc

SEQ ID NO: 2086819 - DNA, 25 bp, Homo sapien
ccatgggtggaaagtgtttgttttg

SEQ ID NO: 2086820 - DNA, 25 bp, Homo sapien
tgtccatgggtggaaagtgtttgtt

SEQ ID NO: 2086821 - DNA, 25 bp, Homo sapien
gactctgacttagacttggcggtgt

SEQ ID NO: 2086822 - DNA, 25 bp, Homo sapien
ctgacttagacttggcggtgtccat

SEQ ID NO: 2086823 - DNA, 25 bp, Homo sapien
tcttttccatagttaagtgggcatc

SEQ ID NO: 2086824 - DNA, 25 bp, Homo sapien
ctcctcagtggcatatgtggcaaat

SEQ ID NO: 2086825 - DNA, 25 bp, Homo sapien
tccgcgagtgttccccattgctcag

SEQ ID NO: 2086826 - DNA, 25 bp, Homo sapien
ctcagtggcatatgtggcaaatcca

SEQ ID NO: 2086827 - DNA, 25 bp, Homo sapien
actgaaatttccttcacaaccaaag

SEQ ID NO: 2086828 - DNA, 25 bp, Homo sapien
atttccttcacaaccaaagttgtca

SEQ ID NO: 2086829 - DNA, 25 bp, Homo sapien
agtttccagaagtactttgacctct

SEQ ID NO: 2086830 - DNA, 25 bp, Homo sapien
tgaccactgaaatttccttcacaac

SEQ ID NO: 2086831 - DNA, 25 bp, Homo sapien
tagccatccccactgcacgatatcc

SEQ ID NO: 2086832 - DNA, 25 bp, Homo sapien
agccatccccactgcacgatatcca

SEQ ID NO: 2086833 - DNA, 25 bp, Homo sapien
ctaattaaaatcttccgccactgcc

SEQ ID NO: 2086834 - DNA, 25 bp, Homo sapien
cgccatagccaccttggtttcgtgg

SEQ ID NO: 2086835 - DNA, 25 bp, Homo sapien
cgccactgccatagctactgctgct

SEQ ID NO: 2086836 - DNA, 25 bp, Homo sapien
tactgctgctactggaaccgccata

SEQ ID NO: 2086837 - DNA, 25 bp, Homo sapien
tagcttccctgtcacttcgctggct

SEQ ID NO: 2086838 - DNA, 25 bp, Homo sapien
ctgtagcttccctgtcacttcgctg

SEQ ID NO: 2086839 - DNA, 25 bp, Homo sapien
tgtcacttcgctggctctcctctca

SEQ ID NO: 2086840 - DNA, 25 bp, Homo sapien
tcacttcgctggctctcctctcatg

SEQ ID NO: 2086841 - DNA, 25 bp, Homo sapien
tcagtgtcacgatcagactattaca

SEQ ID NO: 2086842 - DNA, 25 bp, Homo sapien
aacaacctgttatacaactagtcac

SEQ ID NO: 2086843 - DNA, 25 bp, Homo sapien
caatcaacagcttgggtgcaaaaaa

SEQ ID NO: 2086844 - DNA, 25 bp, Homo sapien
gacatttattcagtgtcacgatcag

SEQ ID NO: 2086845 - DNA, 25 bp, Homo sapien
agacatatatcaaacacattagagt

SEQ ID NO: 2086846 - DNA, 25 bp, Homo sapien
atatcaaacacattagagtgaatac

SEQ ID NO: 2086847 - DNA, 25 bp, Homo sapien
caaagatacatgtatattcaaagac

SEQ ID NO: 2086848 - DNA, 25 bp, Homo sapien
catgtatattcaaagacatatatca

SEQ ID NO: 2086849 - DNA, 25 bp, Homo sapien
tcacacaggcgagttggttccatat

SEQ ID NO: 2086850 - DNA, 25 bp, Homo sapien
aattctgggtaaggactctggccca

SEQ ID NO: 2086851 - DNA, 25 bp, Homo sapien
cccaggaccagtggccagggtatga

SEQ ID NO: 2086852 - DNA, 25 bp, Homo sapien
gaaccaactgacacgtggctgctga

SEQ ID NO: 2086853 - DNA, 25 bp, Homo sapien
cctgccaccatgcctggctaatttt

SEQ ID NO: 2086854 - DNA, 25 bp, Homo sapien
caacctccacatcccaggttcaagc

SEQ ID NO: 2086855 - DNA, 25 bp, Homo sapien
ccacatcccaggttcaagcgattct

SEQ ID NO: 2086856 - DNA, 25 bp, Homo sapien
tgcactggtgcagtcctggctcacc

SEQ ID NO: 2086857 - DNA, 25 bp, Homo sapien
aaatggagcttgttagcactggtgt

SEQ ID NO: 2086858 - DNA, 25 bp, Homo sapien
tgaagaaaagattgcgccctgttag

SEQ ID NO: 2086859 - DNA, 25 bp, Homo sapien
tgtgaggtggatagaatctcgaatg

SEQ ID NO: 2086860 - DNA, 25 bp, Homo sapien
ttgatatgagctttttcaacatcag

SEQ ID NO: 2086861 - DNA, 25 bp, Homo sapien
tggaaagcaaggagcttttctagat

SEQ ID NO: 2086862 - DNA, 25 bp, Homo sapien
gatggagtctccgttatcccggctg

SEQ ID NO: 2086863 - DNA, 25 bp, Homo sapien
agattttctatccttaacatgcaca

SEQ ID NO: 2086864 - DNA, 25 bp, Homo sapien
agcttctcgagtagccgggtctgca

SEQ ID NO: 2086865 - DNA, 25 bp, Homo sapien
gagagcctggccatggtttccactg

SEQ ID NO: 2086866 - DNA, 25 bp, Homo sapien
tgagagcctggccatggtttccact

SEQ ID NO: 2086867 - DNA, 25 bp, Homo sapien
tgacggcattgagagcaccacgaat

SEQ ID NO: 2086868 - DNA, 25 bp, Homo sapien
aggaaccaagcttctgacggcattg

SEQ ID NO: 2086869 - DNA, 25 bp, Homo sapien
cactcctttctgaagatctacccag

SEQ ID NO: 2086870 - DNA, 25 bp, Homo sapien
cactctcactgaaattaagggcact

SEQ ID NO: 2086871 - DNA, 25 bp, Homo sapien
atcactctcactgaaattaagggca

SEQ ID NO: 2086872 - DNA, 25 bp, Homo sapien
gatctacccagtaccttgagaaatc

SEQ ID NO: 2086873 - DNA, 25 bp, Homo sapien
tcatcactaggttcacagtatacaa

SEQ ID NO: 2086874 - DNA, 25 bp, Homo sapien
gttttttacagtctggagctgtctg

SEQ ID NO: 2086875 - DNA, 25 bp, Homo sapien
cacagtatacaattgacgctccgta

SEQ ID NO: 2086876 - DNA, 25 bp, Homo sapien
tgacgctccgtaggcttgtattgca

SEQ ID NO: 2086877 - DNA, 25 bp, Homo sapien
ttgtccagctatcactgcaggctcc

SEQ ID NO: 2086878 - DNA, 25 bp, Homo sapien
ttgggatgtaccatgatgccttctg

SEQ ID NO: 2086879 - DNA, 25 bp, Homo sapien
gtcccttgtccagctatcactgcag

SEQ ID NO: 2086880 - DNA, 25 bp, Homo sapien
gcaggctcctggttgggatgtacca

SEQ ID NO: 2086881 - DNA, 25 bp, Homo sapien
attgctattccagcaagcattcctc

SEQ ID NO: 2086882 - DNA, 25 bp, Homo sapien
taactgtaattgctattccagcaag

SEQ ID NO: 2086883 - DNA, 25 bp, Homo sapien
gtaccaccagtgcatccaccaaagg

SEQ ID NO: 2086884 - DNA, 25 bp, Homo sapien
ccacctacaggtaccaccagtgcat

SEQ ID NO: 2086885 - DNA, 25 bp, Homo sapien
acaaaccacaacattgcctgcatgt

SEQ ID NO: 2086886 - DNA, 25 bp, Homo sapien
agaggaatattaagacatcttaaca

SEQ ID NO: 2086887 - DNA, 25 bp, Homo sapien
tgggaagaggaatattaagacatct

SEQ ID NO: 2086888 - DNA, 25 bp, Homo sapien
caaaccacaacattgcctgcatgtc

SEQ ID NO: 2086889 - DNA, 25 bp, Homo sapien
ggtgttcaagccaatgctggatttg

SEQ ID NO: 2086890 - DNA, 25 bp, Homo sapien
acaccatctgctatggtttctggag

SEQ ID NO: 2086891 - DNA, 25 bp, Homo sapien
gcagtcatctgcatttgagggttca

SEQ ID NO: 2086892 - DNA, 25 bp, Homo sapien
cacaaggtccctgataataggccag

SEQ ID NO: 2086893 - DNA, 25 bp, Homo sapien
catgaagttacctagtcaggttccc

SEQ ID NO: 2086894 - DNA, 25 bp, Homo sapien
tctgcctaagaagttacaccatgct

SEQ ID NO: 2086895 - DNA, 25 bp, Homo sapien
gggtcacttgctactcctaagggaa

SEQ ID NO: 2086896 - DNA, 25 bp, Homo sapien
cattaatacatctagggtaccctcc

SEQ ID NO: 2086897 - DNA, 25 bp, Homo sapien
attagtgaaaggggagtctagttgg

SEQ ID NO: 2086898 - DNA, 25 bp, Homo sapien
aggaattagtgaaaggggagtctag

SEQ ID NO: 2086899 - DNA, 25 bp, Homo sapien
gttgatatggaagggagtaggaatt

SEQ ID NO: 2086900 - DNA, 25 bp, Homo sapien
ctgttgatatggaagggagtaggaa

SEQ ID NO: 2086901 - DNA, 25 bp, Homo sapien
gaaacagtttgaaaatgttgagaca

SEQ ID NO: 2086902 - DNA, 25 bp, Homo sapien
aatgagtagtttcatcctctcccac

SEQ ID NO: 2086903 - DNA, 25 bp, Homo sapien
cactccaacaccagctgtaggttca

SEQ ID NO: 2086904 - DNA, 25 bp, Homo sapien
ccagctgtaggttcaatgagtagtt

SEQ ID NO: 2086905 - DNA, 25 bp, Homo sapien
gaggaggttaagtctacatttccac

SEQ ID NO: 2086906 - DNA, 25 bp, Homo sapien
atggaggaggttaagtctacatttc

SEQ ID NO: 2086907 - DNA, 25 bp, Homo sapien
ggaggaggttaagtctacatttcca

SEQ ID NO: 2086908 - DNA, 25 bp, Homo sapien
ggaggttaagtctacatttccacca

SEQ ID NO: 2086909 - DNA, 25 bp, Homo sapien
taaacagaaacagactgataagaag

SEQ ID NO: 2086910 - DNA, 25 bp, Homo sapien
aaacagactgataagaagctggcct

SEQ ID NO: 2086911 - DNA, 25 bp, Homo sapien
cagaaacagactgataagaagctgg

SEQ ID NO: 2086912 - DNA, 25 bp, Homo sapien
agaagctggcctttcagcctgcttc

SEQ ID NO: 2086913 - DNA, 25 bp, Homo sapien
atgaaatagccactctccattaaga

SEQ ID NO: 2086914 - DNA, 25 bp, Homo sapien
tctatgtcagcctgtcagtccactg

SEQ ID NO: 2086915 - DNA, 25 bp, Homo sapien
taagagttgacaatactaggaaaca

SEQ ID NO: 2086916 - DNA, 25 bp, Homo sapien
taaagacactgaattcccaccattt

SEQ ID NO: 2086917 - DNA, 25 bp, Homo sapien
tatgatccatatgtaccagaaccag

SEQ ID NO: 2086918 - DNA, 25 bp, Homo sapien
tgtcctttaggaatgcacagcctca

SEQ ID NO: 2086919 - DNA, 25 bp, Homo sapien
ttaccggtgccagtcagtactccag

SEQ ID NO: 2086920 - DNA, 25 bp, Homo sapien
gaaacagtgtatagccagtcctcaa

SEQ ID NO: 2086921 - DNA, 25 bp, Homo sapien
ggtaagttgagccacagagatgaac

SEQ ID NO: 2086922 - DNA, 25 bp, Homo sapien
cattttttaacccttatggcagcgg

SEQ ID NO: 2086923 - DNA, 25 bp, Homo sapien
catggccctggtggcgacagtctat

SEQ ID NO: 2086924 - DNA, 25 bp, Homo sapien
cttttaggtgcattgaggcagcgaa

SEQ ID NO: 2086925 - DNA, 25 bp, Homo sapien
tggtgttaaacattgcatttatcac

SEQ ID NO: 2086926 - DNA, 25 bp, Homo sapien
tgttttgctctaaactagatctgta

SEQ ID NO: 2086927 - DNA, 25 bp, Homo sapien
tatttgagcttctacgggtgagcac

SEQ ID NO: 2086928 - DNA, 25 bp, Homo sapien
tgatgtactgatacttatttgagct

SEQ ID NO: 2086929 - DNA, 25 bp, Homo sapien
gagcctcgacagtctacatccggcg

SEQ ID NO: 2086930 - DNA, 25 bp, Homo sapien
tacgtgatgcagctttatagcgcaa

SEQ ID NO: 2086931 - DNA, 25 bp, Homo sapien
cacactgcgaagtgggaaaagttcc

SEQ ID NO: 2086932 - DNA, 25 bp, Homo sapien
tacaaacagccctgctagaccaaca

SEQ ID NO: 2086933 - DNA, 25 bp, Homo sapien
aggtgacaggaagggcttaggcctt

SEQ ID NO: 2086934 - DNA, 25 bp, Homo sapien
cactgcccggtgctcggctccgcag

SEQ ID NO: 2086935 - DNA, 25 bp, Homo sapien
gccactgcccggtgctcggctccgc

SEQ ID NO: 2086936 - DNA, 25 bp, Homo sapien
actgcccggtgctcggctccgcagc

SEQ ID NO: 2086937 - DNA, 25 bp, Homo sapien
ccactgcccggtgctcggctccgca

SEQ ID NO: 2086938 - DNA, 25 bp, Homo sapien
aggcggcgccgagcggtcctcagag

SEQ ID NO: 2086939 - DNA, 25 bp, Homo sapien
ggcgccgagcggtcctcagagcccc

SEQ ID NO: 2086940 - DNA, 25 bp, Homo sapien
gcctccgcgcctctcggctcagcgc

SEQ ID NO: 2086941 - DNA, 25 bp, Homo sapien
caggaggcggcgccgagcggtcctc

SEQ ID NO: 2086942 - DNA, 25 bp, Homo sapien
agcagtttctctttgactgcgtcct

SEQ ID NO: 2086943 - DNA, 25 bp, Homo sapien
agtttctctttgactgcgtcctctg

SEQ ID NO: 2086944 - DNA, 25 bp, Homo sapien
ttctctttgactgcgtcctctgcgc

SEQ ID NO: 2086945 - DNA, 25 bp, Homo sapien
tttctctttgactgcgtcctctgcg

SEQ ID NO: 2086946 - DNA, 25 bp, Homo sapien
gtcttcatgcacaaacttcctggtg

SEQ ID NO: 2086947 - DNA, 25 bp, Homo sapien
cacataaagcaatgatgtggctgct

SEQ ID NO: 2086948 - DNA, 25 bp, Homo sapien
taaagcaatgatgtggctgctgtct

SEQ ID NO: 2086949 - DNA, 25 bp, Homo sapien
catgcacaaacttcctggtgacagc

SEQ ID NO: 2086950 - DNA, 25 bp, Homo sapien
acaacaaagctgaattcggacgtgg

SEQ ID NO: 2086951 - DNA, 25 bp, Homo sapien
acacagaacccaagcgaggaagtgc

SEQ ID NO: 2086952 - DNA, 25 bp, Homo sapien
cagaacccaagcgaggaagtgcaag

SEQ ID NO: 2086953 - DNA, 25 bp, Homo sapien
acccaagcgaggaagtgcaagcagg

SEQ ID NO: 2086954 - DNA, 25 bp, Homo sapien
aacccaagcgaggaagtgcaagcag

SEQ ID NO: 2086955 - DNA, 25 bp, Homo sapien
ttcaggacccctgatccagtgggtc

SEQ ID NO: 2086956 - DNA, 25 bp, Homo sapien
agtgggtcccagcaccagctacggc

SEQ ID NO: 2086957 - DNA, 25 bp, Homo sapien
aaggcttcaggacccctgatccagt

SEQ ID NO: 2086958 - DNA, 25 bp, Homo sapien
gtgaaggcttcaggacccctgatcc

SEQ ID NO: 2086959 - DNA, 25 bp, Homo sapien
agctgtctgggccctgggctcccac

SEQ ID NO: 2086960 - DNA, 25 bp, Homo sapien
ctgctgactgagctgtctgggccct

SEQ ID NO: 2086961 - DNA, 25 bp, Homo sapien
ctgcctgctgactgagctgtctggg

SEQ ID NO: 2086962 - DNA, 25 bp, Homo sapien
cctgctgactgagctgtctgggccc

SEQ ID NO: 2086963 - DNA, 25 bp, Homo sapien
ggccacaaagggaaacggcatctga

SEQ ID NO: 2086964 - DNA, 25 bp, Homo sapien
ctaggccacaaagggaaacggcatc

SEQ ID NO: 2086965 - DNA, 25 bp, Homo sapien
aggccacaaagggaaacggcatctg

SEQ ID NO: 2086966 - DNA, 25 bp, Homo sapien
ccacaaagggaaacggcatctgagc

SEQ ID NO: 2086967 - DNA, 25 bp, Homo sapien
ccatcttgtcactgcgcaggaagcc

SEQ ID NO: 2086968 - DNA, 25 bp, Homo sapien
cacggcgtctcagctgatgcaagag

SEQ ID NO: 2086969 - DNA, 25 bp, Homo sapien
gctcctgtaccttgtggcaaatctc

SEQ ID NO: 2086970 - DNA, 25 bp, Homo sapien
ttccccaccttggtgaacagggctg

SEQ ID NO: 2086971 - DNA, 25 bp, Homo sapien
gcgccgtgcgtacccatacgtgttt

SEQ ID NO: 2086972 - DNA, 25 bp, Homo sapien
catacgtgtttcaaggcctgagggc

SEQ ID NO: 2086973 - DNA, 25 bp, Homo sapien
gaactttctcgatgagcgccgtgcg

SEQ ID NO: 2086974 - DNA, 25 bp, Homo sapien
caggtattgcacgaccttgtccaga

SEQ ID NO: 2086975 - DNA, 25 bp, Homo sapien
gagaggccaggatcgggccgaacac

SEQ ID NO: 2086976 - DNA, 25 bp, Homo sapien
gccaggatcgggccgaacacagggt

SEQ ID NO: 2086977 - DNA, 25 bp, Homo sapien
acagggtctgccagcagtgcctcct

SEQ ID NO: 2086978 - DNA, 25 bp, Homo sapien
agagaggccaggatcgggccgaaca

SEQ ID NO: 2086979 - DNA, 25 bp, Homo sapien
ccactgtgcctgtgctctcaggctc

SEQ ID NO: 2086980 - DNA, 25 bp, Homo sapien
cactgtgcctgtgctctcaggctca

SEQ ID NO: 2086981 - DNA, 25 bp, Homo sapien
actgtgcctgtgctctcaggctcac

SEQ ID NO: 2086982 - DNA, 25 bp, Homo sapien
cccagacgatgctccctcagcacct

SEQ ID NO: 2086983 - DNA, 25 bp, Homo sapien
cagcccagacgatgctccctcagca

SEQ ID NO: 2086984 - DNA, 25 bp, Homo sapien
agccagcccagacgatgctccctca

SEQ ID NO: 2086985 - DNA, 25 bp, Homo sapien
gacagccagcccagacgatgctccc

SEQ ID NO: 2086986 - DNA, 25 bp, Homo sapien
gatcggctgtcttgagcttagtgta

SEQ ID NO: 2086987 - DNA, 25 bp, Homo sapien
gagtcctggcgagtaggtggacccc

SEQ ID NO: 2086988 - DNA, 25 bp, Homo sapien
agtgtattccaaggcacagggtccc

SEQ ID NO: 2086989 - DNA, 25 bp, Homo sapien
ggtcagtccagtagtgatcggctgt

SEQ ID NO: 2086990 - DNA, 25 bp, Homo sapien
tgccgcttgagtgccgtttccggat

SEQ ID NO: 2086991 - DNA, 25 bp, Homo sapien
gacgcgctgccgcttgagtgccgtt

SEQ ID NO: 2086992 - DNA, 25 bp, Homo sapien
gcacgtggttcttgccatagagcag

SEQ ID NO: 2086993 - DNA, 25 bp, Homo sapien
agccgcgtccgtgagttctggtgca

SEQ ID NO: 2086994 - DNA, 25 bp, Homo sapien
caagctaggctagtcacggggtcct

SEQ ID NO: 2086995 - DNA, 25 bp, Homo sapien
tatgagaaatgagctcccgctggga

SEQ ID NO: 2086996 - DNA, 25 bp, Homo sapien
accggaagaccgacgatgaagggct

SEQ ID NO: 2086997 - DNA, 25 bp, Homo sapien
ctacagcgggagacaccggaagacc

SEQ ID NO: 2086998 - DNA, 25 bp, Homo sapien
tttccagctcggagtcccccagagt

SEQ ID NO: 2086999 - DNA, 25 bp, Homo sapien
tggttgggggtccacttcagagtca

SEQ ID NO: 2087000 - DNA, 25 bp, Homo sapien
ctcttttccagctcggagtccccca

SEQ ID NO: 2087001 - DNA, 25 bp, Homo sapien
tgggggtccacttcagagtcaggct

SEQ ID NO: 2087002 - DNA, 25 bp, Homo sapien
tcagacaaacctcttcacggccagg

SEQ ID NO: 2087003 - DNA, 25 bp, Homo sapien
tcccctgaagataggatgaccatag

SEQ ID NO: 2087004 - DNA, 25 bp, Homo sapien
gaccatagccaagaggtgcacacag

SEQ ID NO: 2087005 - DNA, 25 bp, Homo sapien
agcttgggaatcactccaggcagcc

SEQ ID NO: 2087006 - DNA, 25 bp, Homo sapien
gcaccacgagggcatagtcccagta

SEQ ID NO: 2087007 - DNA, 25 bp, Homo sapien
tggatgcacacgacctggctgaagg

SEQ ID NO: 2087008 - DNA, 25 bp, Homo sapien
cagtggatgcacacgacctggctga

SEQ ID NO: 2087009 - DNA, 25 bp, Homo sapien
cacgagggcatagtcccagtaaacg

SEQ ID NO: 2087010 - DNA, 25 bp, Homo sapien
tgaggccctctcgtcggctatcaca

SEQ ID NO: 2087011 - DNA, 25 bp, Homo sapien
cctgggagccccattaacaaggatg

SEQ ID NO: 2087012 - DNA, 25 bp, Homo sapien
aggacgaggagtcttacaggcccca

SEQ ID NO: 2087013 - DNA, 25 bp, Homo sapien
ccgagccgaggacaaggcaggctta

SEQ ID NO: 2087014 - DNA, 25 bp, Homo sapien
cctccctgtgggaaatgcagcggcg

SEQ ID NO: 2087015 - DNA, 25 bp, Homo sapien
caggtgtcctccctgtgggaaatgc

SEQ ID NO: 2087016 - DNA, 25 bp, Homo sapien
tcaccagcacaagcgtgccaccgct

SEQ ID NO: 2087017 - DNA, 25 bp, Homo sapien
cagcgggggctctagctgtccccga

SEQ ID NO: 2087018 - DNA, 25 bp, Homo sapien
tgctgcttcgtttccgtagcttggg

SEQ ID NO: 2087019 - DNA, 25 bp, Homo sapien
tctcctccatatccacggagcgaat

SEQ ID NO: 2087020 - DNA, 25 bp, Homo sapien
tagatgatccggaacacatagtcgg

SEQ ID NO: 2087021 - DNA, 25 bp, Homo sapien
tatccacggagcgaatgctgcttcg

SEQ ID NO: 2087022 - DNA, 25 bp, Homo sapien
tgctcaaagagaacagcgagaggca

SEQ ID NO: 2087023 - DNA, 25 bp, Homo sapien
aggccggggtcatcgtgaatctgca

SEQ ID NO: 2087024 - DNA, 25 bp, Homo sapien
tgcagaacctcactcttcggaggca

SEQ ID NO: 2087025 - DNA, 25 bp, Homo sapien
aggatgtgaaagaccgggactgtct

SEQ ID NO: 2087026 - DNA, 25 bp, Homo sapien
gcggctggccgctaggtggtggtag

SEQ ID NO: 2087027 - DNA, 25 bp, Homo sapien
cagatcattgagagcatcgcgtgca

SEQ ID NO: 2087028 - DNA, 25 bp, Homo sapien
gcatcgcgtgcagtttatcctcctc

SEQ ID NO: 2087029 - DNA, 25 bp, Homo sapien
agctgtgaggttccgcgagcagatc

SEQ ID NO: 2087030 - DNA, 25 bp, Homo sapien
aagccctgcatctcgatcatgtcac

SEQ ID NO: 2087031 - DNA, 25 bp, Homo sapien
ggtcggggatgcagctacagtggct

SEQ ID NO: 2087032 - DNA, 25 bp, Homo sapien
aaagccctgcatctcgatcatgtca

SEQ ID NO: 2087033 - DNA, 25 bp, Homo sapien
gctacagtggctgggggttgcatgt

SEQ ID NO: 2087034 - DNA, 25 bp, Homo sapien
gaaggcccgggacacgatctgcctc

SEQ ID NO: 2087035 - DNA, 25 bp, Homo sapien
tctcacacagtagcctgagcggcaa

SEQ ID NO: 2087036 - DNA, 25 bp, Homo sapien
agccgtagaaggcccgggacacgat

SEQ ID NO: 2087037 - DNA, 25 bp, Homo sapien
cgtagaaggcccgggacacgatctg

SEQ ID NO: 2087038 - DNA, 25 bp, Homo sapien
acagcccggcgcgccccacactcac

SEQ ID NO: 2087039 - DNA, 25 bp, Homo sapien
ccacagcccggcgcgccccacactc

SEQ ID NO: 2087040 - DNA, 25 bp, Homo sapien
ctgcggtgggcagcggtgggcagca

SEQ ID NO: 2087041 - DNA, 25 bp, Homo sapien
gcccccagcccgccacagcccggcg

SEQ ID NO: 2087042 - DNA, 25 bp, Homo sapien
ataacgctatggtgcaccagcgccg

SEQ ID NO: 2087043 - DNA, 25 bp, Homo sapien
gggccggtcaggtgggataacgcta

SEQ ID NO: 2087044 - DNA, 25 bp, Homo sapien
tgcaccagcgccgacaggtgggtcc

SEQ ID NO: 2087045 - DNA, 25 bp, Homo sapien
caggtgggtccgcaccgtggacagg

SEQ ID NO: 2087046 - DNA, 25 bp, Homo sapien
ttgtccttctgatacttgctccaca

SEQ ID NO: 2087047 - DNA, 25 bp, Homo sapien
ttttgtccttctgatacttgctcca

SEQ ID NO: 2087048 - DNA, 25 bp, Homo sapien
tttgtccttctgatacttgctccac

SEQ ID NO: 2087049 - DNA, 25 bp, Homo sapien
ctttttgtccttctgatacttgctc

SEQ ID NO: 2087050 - DNA, 25 bp, Homo sapien
tgcaagagattctgccgggaccctg

SEQ ID NO: 2087051 - DNA, 25 bp, Homo sapien
cgggaccctggtcactccgtggcat

SEQ ID NO: 2087052 - DNA, 25 bp, Homo sapien
gctcacagtgggatgagatctcgtt

SEQ ID NO: 2087053 - DNA, 25 bp, Homo sapien
tggcacattttaccctgaagccctc

SEQ ID NO: 2087054 - DNA, 25 bp, Homo sapien
ctcgtgctctatgcctccgtagtaa

SEQ ID NO: 2087055 - DNA, 25 bp, Homo sapien
tccgtagtaaacttgccgcagcagc

SEQ ID NO: 2087056 - DNA, 25 bp, Homo sapien
gccagacgtccttgcggatctcgtg

SEQ ID NO: 2087057 - DNA, 25 bp, Homo sapien
tgctcatgccgaacttgtagtggcc

SEQ ID NO: 2087058 - DNA, 25 bp, Homo sapien
ggtaaggacggtggagctgccctgc

SEQ ID NO: 2087059 - DNA, 25 bp, Homo sapien
gccatgcttctttccggctgggaag

SEQ ID NO: 2087060 - DNA, 25 bp, Homo sapien
tgggcctgcactggaccttgggtcc

SEQ ID NO: 2087061 - DNA, 25 bp, Homo sapien
tcaagacgggcctcagggtaaggac

SEQ ID NO: 2087062 - DNA, 25 bp, Homo sapien
gagtctcggtggatgaggcgctgca

SEQ ID NO: 2087063 - DNA, 25 bp, Homo sapien
tgcctgaggagaacttggtgcgtgt

SEQ ID NO: 2087064 - DNA, 25 bp, Homo sapien
tcgttgctgatggtggagtctcggt

SEQ ID NO: 2087065 - DNA, 25 bp, Homo sapien
tgcacgtggctgtcgatgctgctgc

SEQ ID NO: 2087066 - DNA, 25 bp, Homo sapien
actgtgcataaaacgcgggtggccc

SEQ ID NO: 2087067 - DNA, 25 bp, Homo sapien
tgtacagtgacaggcaacatcgcgg

SEQ ID NO: 2087068 - DNA, 25 bp, Homo sapien
gagtgatgccagaaagagctaccct

SEQ ID NO: 2087069 - DNA, 25 bp, Homo sapien
cccagagacgggaagtgcttgccca

SEQ ID NO: 2087070 - DNA, 25 bp, Homo sapien
ggaacgttctgtagcaagcacctag

SEQ ID NO: 2087071 - DNA, 25 bp, Homo sapien
tctgttttcaccacgtagggaaagc

SEQ ID NO: 2087072 - DNA, 25 bp, Homo sapien
gagtgttcagcaggacaagacagga

SEQ ID NO: 2087073 - DNA, 25 bp, Homo sapien
gttccattagccctcaggcaaggtg

SEQ ID NO: 2087074 - DNA, 25 bp, Homo sapien
tgaactcagtctcattctagaaacg

SEQ ID NO: 2087075 - DNA, 25 bp, Homo sapien
gctcaatggccagtttgaactcagt

SEQ ID NO: 2087076 - DNA, 25 bp, Homo sapien
gtcttcctgtggctactgaagggaa

SEQ ID NO: 2087077 - DNA, 25 bp, Homo sapien
ttctagaaacgcctgaagtcatgag

SEQ ID NO: 2087078 - DNA, 25 bp, Homo sapien
gaactccacggaatgctgctgctcc

SEQ ID NO: 2087079 - DNA, 25 bp, Homo sapien
tgagtctggagagtcgaactccacg

SEQ ID NO: 2087080 - DNA, 25 bp, Homo sapien
cctgctcaggttttggtctggaatc

SEQ ID NO: 2087081 - DNA, 25 bp, Homo sapien
tctaggcttgactggatgcccgagg

SEQ ID NO: 2087082 - DNA, 25 bp, Homo sapien
cgccgtcctcctcttcgaagcccac

SEQ ID NO: 2087083 - DNA, 25 bp, Homo sapien
acacagccgcaagctcctctccggc

SEQ ID NO: 2087084 - DNA, 25 bp, Homo sapien
cggcctccagttctccggcctgagg

SEQ ID NO: 2087085 - DNA, 25 bp, Homo sapien
cctggggctccctcaaagtgtgagc

SEQ ID NO: 2087086 - DNA, 25 bp, Homo sapien
ccctcaaagtgtgagctgcagggcc

SEQ ID NO: 2087087 - DNA, 25 bp, Homo sapien
agggccctcaggcatgagaccgggc

SEQ ID NO: 2087088 - DNA, 25 bp, Homo sapien
gccctcaggcatgagaccgggcagc

SEQ ID NO: 2087089 - DNA, 25 bp, Homo sapien
atgagaccgggcagcccttcccagg

SEQ ID NO: 2087090 - DNA, 25 bp, Homo sapien
tcaggcatgagaccgggcagccctt

SEQ ID NO: 2087091 - DNA, 25 bp, Homo sapien
cgtctctgagcctctcgaggttggg

SEQ ID NO: 2087092 - DNA, 25 bp, Homo sapien
tatgcggtgcaggtttaaggccaca

SEQ ID NO: 2087093 - DNA, 25 bp, Homo sapien
gtgcaggtttaaggccacagtgtcc

SEQ ID NO: 2087094 - DNA, 25 bp, Homo sapien
atccttgtctatgcggtgcaggttt

SEQ ID NO: 2087095 - DNA, 25 bp, Homo sapien
gaccctaaggcatgtactgtgcacc

SEQ ID NO: 2087096 - DNA, 25 bp, Homo sapien
cactccgacttagggagagccaagg

SEQ ID NO: 2087097 - DNA, 25 bp, Homo sapien
taggcccctaagaatgaagaggcgc

SEQ ID NO: 2087098 - DNA, 25 bp, Homo sapien
tgtgcaggaaaaaagcgttccaggc

SEQ ID NO: 2087099 - DNA, 25 bp, Homo sapien
cctgcacatagcccacgtccaggtg

SEQ ID NO: 2087100 - DNA, 25 bp, Homo sapien
cagatcgcacatgccctgcacatag

SEQ ID NO: 2087101 - DNA, 25 bp, Homo sapien
agggtgaccaggagaggcgccagca

SEQ ID NO: 2087102 - DNA, 25 bp, Homo sapien
gagaggcgccagcagatcgcacatg

SEQ ID NO: 2087103 - DNA, 25 bp, Homo sapien
gagggagcgcatgttggcaaagtgg

SEQ ID NO: 2087104 - DNA, 25 bp, Homo sapien
agcgcatgttggcaaagtgggtgtc

SEQ ID NO: 2087105 - DNA, 25 bp, Homo sapien
ggagcgcatgttggcaaagtgggtg

SEQ ID NO: 2087106 - DNA, 25 bp, Homo sapien
ggatgagggagcgcatgttggcaaa

SEQ ID NO: 2087107 - DNA, 25 bp, Homo sapien
aagtagaagtgggtgtagtctccat

SEQ ID NO: 2087108 - DNA, 25 bp, Homo sapien
gtagaagtgggtgtagtctccattc

SEQ ID NO: 2087109 - DNA, 25 bp, Homo sapien
agtagaagtgggtgtagtctccatt

SEQ ID NO: 2087110 - DNA, 25 bp, Homo sapien
cactgtgtctggtcagcgagcattt

SEQ ID NO: 2087111 - DNA, 25 bp, Homo sapien
cagggttctggcaggttttaaagct

SEQ ID NO: 2087112 - DNA, 25 bp, Homo sapien
cagcgagcatttaagaacccatagg

SEQ ID NO: 2087113 - DNA, 25 bp, Homo sapien
gcagccacagttcatgagtctgggc

SEQ ID NO: 2087114 - DNA, 25 bp, Homo sapien
gagagtaagcggctgctgctcaccc

SEQ ID NO: 2087115 - DNA, 25 bp, Homo sapien
ctgcggagagtaagcggctgctgct

SEQ ID NO: 2087116 - DNA, 25 bp, Homo sapien
agtaagcggctgctgctcacccgtc

SEQ ID NO: 2087117 - DNA, 25 bp, Homo sapien
tgcggagagtaagcggctgctgctc

SEQ ID NO: 2087118 - DNA, 25 bp, Homo sapien
ggacaaagtgctccgatgagatgtg

SEQ ID NO: 2087119 - DNA, 25 bp, Homo sapien
cggatgatctctcggtaggcctcca

SEQ ID NO: 2087120 - DNA, 25 bp, Homo sapien
aagtccatgttgttgtcacggatga

SEQ ID NO: 2087121 - DNA, 25 bp, Homo sapien
gctccgatgagatgtgcctggctgc

SEQ ID NO: 2087122 - DNA, 25 bp, Homo sapien
cctggatggctggaccagctcgtac

SEQ ID NO: 2087123 - DNA, 25 bp, Homo sapien
gaggtggctgactaccctgctctgt

SEQ ID NO: 2087124 - DNA, 25 bp, Homo sapien
gctaggaggtggctgactaccctgc

SEQ ID NO: 2087125 - DNA, 25 bp, Homo sapien
ttccatctgctctgctagattcttg

SEQ ID NO: 2087126 - DNA, 25 bp, Homo sapien
gattcttgacatcccggcctttggg

SEQ ID NO: 2087127 - DNA, 25 bp, Homo sapien
cgggcaatccgcaggatctcctggg

SEQ ID NO: 2087128 - DNA, 25 bp, Homo sapien
tgggcatcgtgatgctcagcacgtt

SEQ ID NO: 2087129 - DNA, 25 bp, Homo sapien
cttgtggacgaggtcccgggcaatc

SEQ ID NO: 2087130 - DNA, 25 bp, Homo sapien
tctcctgggcatcgtgatgctcagc

SEQ ID NO: 2087131 - DNA, 25 bp, Homo sapien
cgtgacgtgtgcctaaaccagaagc

SEQ ID NO: 2087132 - DNA, 25 bp, Homo sapien
cagaggtacactgtacaaggccggg

SEQ ID NO: 2087133 - DNA, 25 bp, Homo sapien
ggatccaggctcacaaccgctttgt

SEQ ID NO: 2087134 - DNA, 25 bp, Homo sapien
tggtgcacgcacaatatactgggac

SEQ ID NO: 2087135 - DNA, 25 bp, Homo sapien
tgtctgcgacagataatgggctgcc

SEQ ID NO: 2087136 - DNA, 25 bp, Homo sapien
tgtgaccggattcttccccgacaga

SEQ ID NO: 2087137 - DNA, 25 bp, Homo sapien
gccttgcttctcaccagggacagat

SEQ ID NO: 2087138 - DNA, 25 bp, Homo sapien
caagtgctccggtcgcattccagat

SEQ ID NO: 2087139 - DNA, 25 bp, Homo sapien
aagtctgccagactttggtggctgc

SEQ ID NO: 2087140 - DNA, 25 bp, Homo sapien
cctccatgttccagggcaaggccta

SEQ ID NO: 2087141 - DNA, 25 bp, Homo sapien
tgtttctcaaatgcagaaagtctgc

SEQ ID NO: 2087142 - DNA, 25 bp, Homo sapien
tgcggggccctttgtcatgtttctc

SEQ ID NO: 2087143 - DNA, 25 bp, Homo sapien
gccacacgtgcttggtggaggccaa

SEQ ID NO: 2087144 - DNA, 25 bp, Homo sapien
gtcactaaggcaggcacacaatggc

SEQ ID NO: 2087145 - DNA, 25 bp, Homo sapien
gcaaaaatcatacacactctgctcc

SEQ ID NO: 2087146 - DNA, 25 bp, Homo sapien
gaagagtatagtttctgaggcaaaa

SEQ ID NO: 2087147 - DNA, 25 bp, Homo sapien
ccttttggggctggccgactgtgga

SEQ ID NO: 2087148 - DNA, 25 bp, Homo sapien
cgtcctcgccttttggggctggccg

SEQ ID NO: 2087149 - DNA, 25 bp, Homo sapien
tcctcgccttttggggctggccgac

SEQ ID NO: 2087150 - DNA, 25 bp, Homo sapien
cgccttttggggctggccgactgtg

SEQ ID NO: 2087151 - DNA, 25 bp, Homo sapien
gcggctggagtacctctcttggaaa

SEQ ID NO: 2087152 - DNA, 25 bp, Homo sapien
tggcggctggagtacctctcttgga

SEQ ID NO: 2087153 - DNA, 25 bp, Homo sapien
ggcggctggagtacctctcttggaa

SEQ ID NO: 2087154 - DNA, 25 bp, Homo sapien
gcagtggcatagtcaagctccagct

SEQ ID NO: 2087155 - DNA, 25 bp, Homo sapien
gacagtgctcggggtgagagccaca

SEQ ID NO: 2087156 - DNA, 25 bp, Homo sapien
ggggcagctccgttgccatcagctg

SEQ ID NO: 2087157 - DNA, 25 bp, Homo sapien
cacaggggcagctccgttgccatca

SEQ ID NO: 2087158 - DNA, 25 bp, Homo sapien
taccttttgatgttcagagtggctc

SEQ ID NO: 2087159 - DNA, 25 bp, Homo sapien
actggctgggagtccttacctcggg

SEQ ID NO: 2087160 - DNA, 25 bp, Homo sapien
tgtagcgaccccagactgtagagat

SEQ ID NO: 2087161 - DNA, 25 bp, Homo sapien
cagaggtggcccttgtttacagtga

SEQ ID NO: 2087162 - DNA, 25 bp, Homo sapien
agaccccgtggctctgggagagcca

SEQ ID NO: 2087163 - DNA, 25 bp, Homo sapien
ggagagccagctttgctattcccat

SEQ ID NO: 2087164 - DNA, 25 bp, Homo sapien
agccacctccgccagaccccgtggc

SEQ ID NO: 2087165 - DNA, 25 bp, Homo sapien
ctgggagagccagctttgctattcc

SEQ ID NO: 2087166 - DNA, 25 bp, Homo sapien
ggccggtggcttatttctggaatcg

SEQ ID NO: 2087167 - DNA, 25 bp, Homo sapien
gaaggacggcatggcgagttcctct

SEQ ID NO: 2087168 - DNA, 25 bp, Homo sapien
cagatactacttgcagagggcgcct

SEQ ID NO: 2087169 - DNA, 25 bp, Homo sapien
tggaatcgttttgcagaacctgggc

SEQ ID NO: 2087170 - DNA, 25 bp, Homo sapien
gctccttcccttgttgtgtgtgtcg

SEQ ID NO: 2087171 - DNA, 25 bp, Homo sapien
tcgccatcttgttgcaaagcccttt

SEQ ID NO: 2087172 - DNA, 25 bp, Homo sapien
ctttggctgtggccccggtgtagta

SEQ ID NO: 2087173 - DNA, 25 bp, Homo sapien
ttgtgtgtgtcggtgcctcctcgcc

SEQ ID NO: 2087174 - DNA, 25 bp, Homo sapien
ctttaaaccgaaggctggcggcgcg

SEQ ID NO: 2087175 - DNA, 25 bp, Homo sapien
cggcgcggggtgtccatgtggagct

SEQ ID NO: 2087176 - DNA, 25 bp, Homo sapien
tgcagacactggccctttaaaccga

SEQ ID NO: 2087177 - DNA, 25 bp, Homo sapien
gagctgctccatgccgtgttgtcct

SEQ ID NO: 2087178 - DNA, 25 bp, Homo sapien
ttagttgcctccatgggtgcggacc

SEQ ID NO: 2087179 - DNA, 25 bp, Homo sapien
cacggtggcgaacagcagaactaat

SEQ ID NO: 2087180 - DNA, 25 bp, Homo sapien
gatggtatgtgaaaagctccttagc

SEQ ID NO: 2087181 - DNA, 25 bp, Homo sapien
ttctgaaatgagcatggcggcgccc

SEQ ID NO: 2087182 - DNA, 25 bp, Homo sapien
tctgtcaaaggaattcagagtccca

SEQ ID NO: 2087183 - DNA, 25 bp, Homo sapien
aatcaggctcagttgactggcccag

SEQ ID NO: 2087184 - DNA, 25 bp, Homo sapien
gattgaatgggtccacctctgtcaa

SEQ ID NO: 2087185 - DNA, 25 bp, Homo sapien
gagaggtcctctgacaactcacttg

SEQ ID NO: 2087186 - DNA, 25 bp, Homo sapien
ttcatgccagacaaaagccccagtg

SEQ ID NO: 2087187 - DNA, 25 bp, Homo sapien
tctagctgcagagctcgactgggct

SEQ ID NO: 2087188 - DNA, 25 bp, Homo sapien
ccagtgagtaatggtgacctaccca

SEQ ID NO: 2087189 - DNA, 25 bp, Homo sapien
ggtggctgcctggataaaaatctgc

SEQ ID NO: 2087190 - DNA, 25 bp, Homo sapien
gcagcagtggtgtgtcctttcccag

SEQ ID NO: 2087191 - DNA, 25 bp, Homo sapien
gatctcatagtgcacctggagctga

SEQ ID NO: 2087192 - DNA, 25 bp, Homo sapien
gactaactcatcagagagggcgctg

SEQ ID NO: 2087193 - DNA, 25 bp, Homo sapien
taccagtggttcagcattatttcag

SEQ ID NO: 2087194 - DNA, 25 bp, Homo sapien
cagacttcgacgttcagacctgggt

SEQ ID NO: 2087195 - DNA, 25 bp, Homo sapien
tttagtaaccccgtcagcctgtgtg

SEQ ID NO: 2087196 - DNA, 25 bp, Homo sapien
tacagtcggacttggcagaactggc

SEQ ID NO: 2087197 - DNA, 25 bp, Homo sapien
taaagtaccaccgttgacaaagagc

SEQ ID NO: 2087198 - DNA, 25 bp, Homo sapien
tccccgtgggaatggagacaagtct

SEQ ID NO: 2087199 - DNA, 25 bp, Homo sapien
tgaaatacccagttgctacccagat

SEQ ID NO: 2087200 - DNA, 25 bp, Homo sapien
cctgtgggaaatccgaggccttttg

SEQ ID NO: 2087201 - DNA, 25 bp, Homo sapien
aagggagctgatgacttcacgacca

SEQ ID NO: 2087202 - DNA, 25 bp, Homo sapien
gccgagaatgccactgcactacagc

SEQ ID NO: 2087203 - DNA, 25 bp, Homo sapien
gagccgagaatgccactgcactaca

SEQ ID NO: 2087204 - DNA, 25 bp, Homo sapien
gtgagccgagaatgccactgcacta

SEQ ID NO: 2087205 - DNA, 25 bp, Homo sapien
agtgagccgagaatgccactgcact

SEQ ID NO: 2087206 - DNA, 25 bp, Homo sapien
aaattagccgggcatgatagcacgt

SEQ ID NO: 2087207 - DNA, 25 bp, Homo sapien
aattagccgggcatgatagcacgtg

SEQ ID NO: 2087208 - DNA, 25 bp, Homo sapien
gctggagtgccgtggtgcgatctta

SEQ ID NO: 2087209 - DNA, 25 bp, Homo sapien
gtggagttttactcttgttgtctag

SEQ ID NO: 2087210 - DNA, 25 bp, Homo sapien
ggtggagttttactcttgttgtcta

SEQ ID NO: 2087211 - DNA, 25 bp, Homo sapien
agtgccgtggtgcgatcttagctca

SEQ ID NO: 2087212 - DNA, 25 bp, Homo sapien
ttctgaggccggagtaactgtgtcc

SEQ ID NO: 2087213 - DNA, 25 bp, Homo sapien
cagagacacaggaagcggaactgct

SEQ ID NO: 2087214 - DNA, 25 bp, Homo sapien
caaaatagtatgtgccgtaggtagc

SEQ ID NO: 2087215 - DNA, 25 bp, Homo sapien
cacgtttctaattggaatgccaggg

SEQ ID NO: 2087216 - DNA, 25 bp, Homo sapien
tcccataagcattcagcccatagaa

SEQ ID NO: 2087217 - DNA, 25 bp, Homo sapien
tagagctcccataagcattcagccc

SEQ ID NO: 2087218 - DNA, 25 bp, Homo sapien
ttgcatagagctcccataagcattc

SEQ ID NO: 2087219 - DNA, 25 bp, Homo sapien
cattcagcccatagaacctggacat

SEQ ID NO: 2087220 - DNA, 25 bp, Homo sapien
gatgtcacagtaccagtaagtacag

SEQ ID NO: 2087221 - DNA, 25 bp, Homo sapien
atgtcacagtaccagtaagtacaga

SEQ ID NO: 2087222 - DNA, 25 bp, Homo sapien
agtaagtacagaccttgctccgctt

SEQ ID NO: 2087223 - DNA, 25 bp, Homo sapien
cagtaagtacagaccttgctccgct

SEQ ID NO: 2087224 - DNA, 25 bp, Homo sapien
catgggtcacttaacccgtggatca

SEQ ID NO: 2087225 - DNA, 25 bp, Homo sapien
ggatcacacgggttcctcattcttg

SEQ ID NO: 2087226 - DNA, 25 bp, Homo sapien
gggtcacttatatctctcacgcaga

SEQ ID NO: 2087227 - DNA, 25 bp, Homo sapien
tttgggctagtgaggtgccgacttc

SEQ ID NO: 2087228 - DNA, 25 bp, Homo sapien
tctggcccgacctacaggtaaactg

SEQ ID NO: 2087229 - DNA, 25 bp, Homo sapien
gagccccgagccaacatgtaagaag

SEQ ID NO: 2087230 - DNA, 25 bp, Homo sapien
aaggccaggtttcccagctgcagtg

SEQ ID NO: 2087231 - DNA, 25 bp, Homo sapien
tctgcacctacgctttaagaaggcc

SEQ ID NO: 2087232 - DNA, 25 bp, Homo sapien
cacggcaagtccaaactggacctca

SEQ ID NO: 2087233 - DNA, 25 bp, Homo sapien
cgtgtgtttgacttttccgtgctgt

SEQ ID NO: 2087234 - DNA, 25 bp, Homo sapien
ttacagcgaagcgtacacggcaagt

SEQ ID NO: 2087235 - DNA, 25 bp, Homo sapien
ctggacctcagcatgcgaacacgtg

SEQ ID NO: 2087236 - DNA, 25 bp, Homo sapien
tgccctgcttttgcgctcatgcggc

SEQ ID NO: 2087237 - DNA, 25 bp, Homo sapien
gcttttgcgctcatgcggccgaccg

SEQ ID NO: 2087238 - DNA, 25 bp, Homo sapien
cctgcttttgcgctcatgcggccga

SEQ ID NO: 2087239 - DNA, 25 bp, Homo sapien
tcgctgccctgcttttgcgctcatg

SEQ ID NO: 2087240 - DNA, 25 bp, Homo sapien
tcgtctgacttgcggccccttctga

SEQ ID NO: 2087241 - DNA, 25 bp, Homo sapien
agtctgcgtgcgaggtgctgcttct

SEQ ID NO: 2087242 - DNA, 25 bp, Homo sapien
caagctcggcgctcgcggtttctct

SEQ ID NO: 2087243 - DNA, 25 bp, Homo sapien
cgctccgcacgcttctgttaacctt

SEQ ID NO: 2087244 - DNA, 25 bp, Homo sapien
cgccattttgagagcgaggagagaa

SEQ ID NO: 2087245 - DNA, 25 bp, Homo sapien
gccgccattttgagagcgaggagag

SEQ ID NO: 2087246 - DNA, 25 bp, Homo sapien
agggaggggaccggcgcagccacat

SEQ ID NO: 2087247 - DNA, 25 bp, Homo sapien
ctcaacggccgtcgcggccgccatt

SEQ ID NO: 2087248 - DNA, 25 bp, Homo sapien
atgttaacagcatcaaaaggcaact

SEQ ID NO: 2087249 - DNA, 25 bp, Homo sapien
cagggagcctcgaagctgaatgtta

SEQ ID NO: 2087250 - DNA, 25 bp, Homo sapien
caactcccgaccgaggagccggtgg

SEQ ID NO: 2087251 - DNA, 25 bp, Homo sapien
aaatcctgccagattcggtgggtgg

SEQ ID NO: 2087252 - DNA, 25 bp, Homo sapien
tatgagactggaccccgcagcaatt

SEQ ID NO: 2087253 - DNA, 25 bp, Homo sapien
tcctgattatgagactggaccccgc

SEQ ID NO: 2087254 - DNA, 25 bp, Homo sapien
actggaccccgcagcaattaagccg

SEQ ID NO: 2087255 - DNA, 25 bp, Homo sapien
gacacagtcaacaggaaattttcct

SEQ ID NO: 2087256 - DNA, 25 bp, Homo sapien
gagaaatgacttagttgtagcaacc

SEQ ID NO: 2087257 - DNA, 25 bp, Homo sapien
ttaagacttacgacagagaaatgac

SEQ ID NO: 2087258 - DNA, 25 bp, Homo sapien
cataagcaagagaaagacgctgtga

SEQ ID NO: 2087259 - DNA, 25 bp, Homo sapien
aatgcccatcatgcaaaaaaggtgg

SEQ ID NO: 2087260 - DNA, 25 bp, Homo sapien
tacactgacaagcattcataaggct

SEQ ID NO: 2087261 - DNA, 25 bp, Homo sapien
ggcattaaaatgacctaccctagct

SEQ ID NO: 2087262 - DNA, 25 bp, Homo sapien
gatgtctactcatgtgaatgcttga

SEQ ID NO: 2087263 - DNA, 25 bp, Homo sapien
tggcagtatctcacaaaaaggtccc

SEQ ID NO: 2087264 - DNA, 25 bp, Homo sapien
ttatttagcccaagtcgaagagcca

SEQ ID NO: 2087265 - DNA, 25 bp, Homo sapien
gaagagccagaaagcttgaataatg

SEQ ID NO: 2087266 - DNA, 25 bp, Homo sapien
taagtgactgctgaaccattaaaga

SEQ ID NO: 2087267 - DNA, 25 bp, Homo sapien
gcttgaggcagtttgcttaggctag

SEQ ID NO: 2087268 - DNA, 25 bp, Homo sapien
aatcttcatttccagaaaaatatgc

SEQ ID NO: 2087269 - DNA, 25 bp, Homo sapien
gttgcaggagccgagacagcgccac

SEQ ID NO: 2087270 - DNA, 25 bp, Homo sapien
tctacttttcttgaaaactacagct

SEQ ID NO: 2087271 - DNA, 25 bp, Homo sapien
atatgctcttttctacttttcttga

SEQ ID NO: 2087272 - DNA, 25 bp, Homo sapien
gtgaaagtctgagtcggctagaaat

SEQ ID NO: 2087273 - DNA, 25 bp, Homo sapien
gctagaaatagaacaccaatgatag

SEQ ID NO: 2087274 - DNA, 25 bp, Homo sapien
tagaactgcgttttcaaagttcaat

SEQ ID NO: 2087275 - DNA, 25 bp, Homo sapien
cagagaccaacttgccaggtgaaag

SEQ ID NO: 2087276 - DNA, 25 bp, Homo sapien
caagattgtcgggaagatacggccg

SEQ ID NO: 2087277 - DNA, 25 bp, Homo sapien
tagtggtgcgcatcttgtgatccca

SEQ ID NO: 2087278 - DNA, 25 bp, Homo sapien
tgctagctatagttggcgaaccctc

SEQ ID NO: 2087279 - DNA, 25 bp, Homo sapien
gaagccgtgttcaggccactggact

SEQ ID NO: 2087280 - DNA, 25 bp, Homo sapien
gggtaccctccaagcaaattaatgc

SEQ ID NO: 2087281 - DNA, 25 bp, Homo sapien
ggctaggcccagtatatttgatcaa

SEQ ID NO: 2087282 - DNA, 25 bp, Homo sapien
gggcgggccttattctatcagttga

SEQ ID NO: 2087283 - DNA, 25 bp, Homo sapien
ttatctttataatgtgggcgggcct

SEQ ID NO: 2087284 - DNA, 25 bp, Homo sapien
tatggctagatatttaaatcatgtc

SEQ ID NO: 2087285 - DNA, 25 bp, Homo sapien
tttaatgactgaatgatatttgatc

SEQ ID NO: 2087286 - DNA, 25 bp, Homo sapien
gactgaatgatatttgatcatgtgg

SEQ ID NO: 2087287 - DNA, 25 bp, Homo sapien
gatatttgatcatgtggatgtacta

SEQ ID NO: 2087288 - DNA, 25 bp, Homo sapien
tggcactatactccaggctgggcgc

SEQ ID NO: 2087289 - DNA, 25 bp, Homo sapien
aggctgggcgccagagagaaactct

SEQ ID NO: 2087290 - DNA, 25 bp, Homo sapien
tgaaccatgattgtggcactatact

SEQ ID NO: 2087291 - DNA, 25 bp, Homo sapien
caggctgggcgccagagagaaactc

SEQ ID NO: 2087292 - DNA, 25 bp, Homo sapien
caaatgaatccaactagtaaccaga

SEQ ID NO: 2087293 - DNA, 25 bp, Homo sapien
tgccactaagtgtcttccacacagg

SEQ ID NO: 2087294 - DNA, 25 bp, Homo sapien
tctgatatagtggtatgtccctcct

SEQ ID NO: 2087295 - DNA, 25 bp, Homo sapien
cttggctgtaatgtcaagcttatct

SEQ ID NO: 2087296 - DNA, 25 bp, Homo sapien
agttcatctcgttgtctctgggaca

SEQ ID NO: 2087297 - DNA, 25 bp, Homo sapien
ttcatctcgttgtctctgggacagc

SEQ ID NO: 2087298 - DNA, 25 bp, Homo sapien
gttcatctcgttgtctctgggacag

SEQ ID NO: 2087299 - DNA, 25 bp, Homo sapien
acacacagagtgcaaatgataaagc

SEQ ID NO: 2087300 - DNA, 25 bp, Homo sapien
cacacagagtgcaaatgataaagca

SEQ ID NO: 2087301 - DNA, 25 bp, Homo sapien
tatgcaacttactctaacatggttt

SEQ ID NO: 2087302 - DNA, 25 bp, Homo sapien
tctttgatatatgcaacttactcta

SEQ ID NO: 2087303 - DNA, 25 bp, Homo sapien
aacaataagcttggttccctcaagg

SEQ ID NO: 2087304 - DNA, 25 bp, Homo sapien
cacttctgggtacatgtttttctat

SEQ ID NO: 2087305 - DNA, 25 bp, Homo sapien
gaacatatacagtatgctactttta

SEQ ID NO: 2087306 - DNA, 25 bp, Homo sapien
gggattcagaagagagtaacacttc

SEQ ID NO: 2087307 - DNA, 25 bp, Homo sapien
gcaatgtttttcatatccgactgga

SEQ ID NO: 2087308 - DNA, 25 bp, Homo sapien
cagcatgagagtggatgaatacatt

SEQ ID NO: 2087309 - DNA, 25 bp, Homo sapien
gtatgtttaatctgagttcacagaa

SEQ ID NO: 2087310 - DNA, 25 bp, Homo sapien
cagaaatcattagactgtaatcttc

SEQ ID NO: 2087311 - DNA, 25 bp, Homo sapien
tcaggttaccatactaaacccatta

SEQ ID NO: 2087312 - DNA, 25 bp, Homo sapien
gtttatttttgtatgccatcttgtt

SEQ ID NO: 2087313 - DNA, 25 bp, Homo sapien
cccttaggttggctctgtagatgct

SEQ ID NO: 2087314 - DNA, 25 bp, Homo sapien
taattgttgattcccttaggttggc

SEQ ID NO: 2087315 - DNA, 25 bp, Homo sapien
gcacctggctgccagactatttttt

SEQ ID NO: 2087316 - DNA, 25 bp, Homo sapien
cctggctgccagactattttttaaa

SEQ ID NO: 2087317 - DNA, 25 bp, Homo sapien
tttttgtaaagataaaatcttgcac

SEQ ID NO: 2087318 - DNA, 25 bp, Homo sapien
gccacgtctggctaatgttcgtatt

SEQ ID NO: 2087319 - DNA, 25 bp, Homo sapien
caagtccaaaaaccaatgcaaggtt

SEQ ID NO: 2087320 - DNA, 25 bp, Homo sapien
cagtccctggatttaaacagctcaa

SEQ ID NO: 2087321 - DNA, 25 bp, Homo sapien
tatccaaattcattcgtgtactttg

SEQ ID NO: 2087322 - DNA, 25 bp, Homo sapien
caacagagtataagactcggtttca

SEQ ID NO: 2087323 - DNA, 25 bp, Homo sapien
tcacacaggtaaacagtgcaaacag

SEQ ID NO: 2087324 - DNA, 25 bp, Homo sapien
tacatttcactcttataaacacaca

SEQ ID NO: 2087325 - DNA, 25 bp, Homo sapien
ctttatagatgcctacatttcactc

SEQ ID NO: 2087326 - DNA, 25 bp, Homo sapien
caacaattttgaccttgatcatatc

SEQ ID NO: 2087327 - DNA, 25 bp, Homo sapien
tttgaccttgatcatatcttgatca

SEQ ID NO: 2087328 - DNA, 25 bp, Homo sapien
gctggagggtggtacatcttacaca

SEQ ID NO: 2087329 - DNA, 25 bp, Homo sapien
tgtgacgacattgtaacaaggctgg

SEQ ID NO: 2087330 - DNA, 25 bp, Homo sapien
tcgtcacacgtagcaactacaaaag

SEQ ID NO: 2087331 - DNA, 25 bp, Homo sapien
tgtgtgtgaacaccctgtcgtcaca

SEQ ID NO: 2087332 - DNA, 25 bp, Homo sapien
gaccactgtatagtaagtcaagccc

SEQ ID NO: 2087333 - DNA, 25 bp, Homo sapien
caaactaaacaaaggaagaccactg

SEQ ID NO: 2087334 - DNA, 25 bp, Homo sapien
tggcagaacactagaaacacttgtg

SEQ ID NO: 2087335 - DNA, 25 bp, Homo sapien
cagaaacagactatgtaggacattc

SEQ ID NO: 2087336 - DNA, 25 bp, Homo sapien
gatcttgtaaacctatctgaggagc

SEQ ID NO: 2087337 - DNA, 25 bp, Homo sapien
gttaagttatatatggtcccttgcc

SEQ ID NO: 2087338 - DNA, 25 bp, Homo sapien
ttcaaagacgagagaaatgagactg

SEQ ID NO: 2087339 - DNA, 25 bp, Homo sapien
ctcataaggcaaagtcaggttgtac

SEQ ID NO: 2087340 - DNA, 25 bp, Homo sapien
tttcttttcatcagacggctgggtc

SEQ ID NO: 2087341 - DNA, 25 bp, Homo sapien
tgtacccagtatactagcctgctcg

SEQ ID NO: 2087342 - DNA, 25 bp, Homo sapien
gatgacatcctgatataccctccag

SEQ ID NO: 2087343 - DNA, 25 bp, Homo sapien
caagtacaagttcagcaagaggtta

SEQ ID NO: 2087344 - DNA, 25 bp, Homo sapien
ggccataggtcttatacttctccaa

SEQ ID NO: 2087345 - DNA, 25 bp, Homo sapien
tcctaaacttttatgctacaatacc

SEQ ID NO: 2087346 - DNA, 25 bp, Homo sapien
tatgctacaataccctactgactct

SEQ ID NO: 2087347 - DNA, 25 bp, Homo sapien
gggcagcacagatgtgatgagttcc

SEQ ID NO: 2087348 - DNA, 25 bp, Homo sapien
tcagggcagcaatggagataacatg

SEQ ID NO: 2087349 - DNA, 25 bp, Homo sapien
gctaatgcgtgtggagcttaaaacc

SEQ ID NO: 2087350 - DNA, 25 bp, Homo sapien
catgctctcacgcataactgggagt

SEQ ID NO: 2087351 - DNA, 25 bp, Homo sapien
aaggctaagcttgcatattcagggc

SEQ ID NO: 2087352 - DNA, 25 bp, Homo sapien
tacaaactgtatactctagcattct

SEQ ID NO: 2087353 - DNA, 25 bp, Homo sapien
ttttacaaactgtatactctagcat

SEQ ID NO: 2087354 - DNA, 25 bp, Homo sapien
acaaactgtatactctagcattcta

SEQ ID NO: 2087355 - DNA, 25 bp, Homo sapien
ttacaaactgtatactctagcattc

SEQ ID NO: 2087356 - DNA, 25 bp, Homo sapien
ggctctgtgacagcaaccatcaatt

SEQ ID NO: 2087357 - DNA, 25 bp, Homo sapien
caaatgtgttgcttacctcacaagc

SEQ ID NO: 2087358 - DNA, 25 bp, Homo sapien
ctttatacaaaatgctcgggaccaa

SEQ ID NO: 2087359 - DNA, 25 bp, Homo sapien
ctcacaagctgtaggcactctatag

SEQ ID NO: 2087360 - DNA, 25 bp, Homo sapien
gccatttgaacgaagataatctgct

SEQ ID NO: 2087361 - DNA, 25 bp, Homo sapien
tagccatttgaacgaagataatctg

SEQ ID NO: 2087362 - DNA, 25 bp, Homo sapien
agccatttgaacgaagataatctgc

SEQ ID NO: 2087363 - DNA, 25 bp, Homo sapien
caaaagaccagcatactttttatct

SEQ ID NO: 2087364 - DNA, 25 bp, Homo sapien
aagaccagcatactttttatctaat

SEQ ID NO: 2087365 - DNA, 25 bp, Homo sapien
tgtaatctaataacagatgtccatt

SEQ ID NO: 2087366 - DNA, 25 bp, Homo sapien
tcttttgtaatctaataacagatgt

SEQ ID NO: 2087367 - DNA, 25 bp, Homo sapien
atgtagttacgtacagatagatttc

SEQ ID NO: 2087368 - DNA, 25 bp, Homo sapien
gtagttacgtacagatagatttcaa

SEQ ID NO: 2087369 - DNA, 25 bp, Homo sapien
tagttacgtacagatagatttcaat

SEQ ID NO: 2087370 - DNA, 25 bp, Homo sapien
gttacgtacagatagatttcaataa

SEQ ID NO: 2087371 - DNA, 25 bp, Homo sapien
aatgactcgagtgactggactcctg

SEQ ID NO: 2087372 - DNA, 25 bp, Homo sapien
gactcctgtgaccactcaatgcata

SEQ ID NO: 2087373 - DNA, 25 bp, Homo sapien
caggatggaaaatgactcgagtgac

SEQ ID NO: 2087374 - DNA, 25 bp, Homo sapien
gcatatttttctggcggacggggaa

SEQ ID NO: 2087375 - DNA, 25 bp, Homo sapien
tgcttcagcctcccgttaagtctgc

SEQ ID NO: 2087376 - DNA, 25 bp, Homo sapien
gcttcagcctcccgttaagtctgct

SEQ ID NO: 2087377 - DNA, 25 bp, Homo sapien
aagcttgccgctgtggtcgaatgaa

SEQ ID NO: 2087378 - DNA, 25 bp, Homo sapien
agaagcttgccgctgtggtcgaatg

SEQ ID NO: 2087379 - DNA, 25 bp, Homo sapien
agccagaagcttgccgctgtggtcg

SEQ ID NO: 2087380 - DNA, 25 bp, Homo sapien
gcttgccgctgtggtcgaatgaaat

SEQ ID NO: 2087381 - DNA, 25 bp, Homo sapien
ggttctgatgcattcaaagccctga

SEQ ID NO: 2087382 - DNA, 25 bp, Homo sapien
caaagccctgaaaatcccatagttt

SEQ ID NO: 2087383 - DNA, 25 bp, Homo sapien
gaaaatcccatagtttaatggtcat

SEQ ID NO: 2087384 - DNA, 25 bp, Homo sapien
cgtgcatggttctgatgcattcaaa

SEQ ID NO: 2087385 - DNA, 25 bp, Homo sapien
catgacaactctatgactctggtat

SEQ ID NO: 2087386 - DNA, 25 bp, Homo sapien
gtagacaagtaggaatttgaaccca

SEQ ID NO: 2087387 - DNA, 25 bp, Homo sapien
caagacccgggaaataatgaacgag

SEQ ID NO: 2087388 - DNA, 25 bp, Homo sapien
ggcaggtactacaccaagatgattt

SEQ ID NO: 2087389 - DNA, 25 bp, Homo sapien
gacaaggtctccatattttgctcac

SEQ ID NO: 2087390 - DNA, 25 bp, Homo sapien
accacatctggtaccaccacaccca

SEQ ID NO: 2087391 - DNA, 25 bp, Homo sapien
caccacacccacaactattttattt

SEQ ID NO: 2087392 - DNA, 25 bp, Homo sapien
catattttgctcacactggtctcga

SEQ ID NO: 2087393 - DNA, 25 bp, Homo sapien
agacactatatgatctccattgggc

SEQ ID NO: 2087394 - DNA, 25 bp, Homo sapien
ccattgggcatgatggctactgaag

SEQ ID NO: 2087395 - DNA, 25 bp, Homo sapien
tctccattgggcatgatggctactg

SEQ ID NO: 2087396 - DNA, 25 bp, Homo sapien
tatcccttgaggcagacactatatg

SEQ ID NO: 2087397 - DNA, 25 bp, Homo sapien
gacaatcatcaggacacttcccaga

SEQ ID NO: 2087398 - DNA, 25 bp, Homo sapien
gatcacctaaaagaagaccacagag

SEQ ID NO: 2087399 - DNA, 25 bp, Homo sapien
taccaagttagagatgcaagtcgac

SEQ ID NO: 2087400 - DNA, 25 bp, Homo sapien
tcagcctaacagaggtataccagca

SEQ ID NO: 2087401 - DNA, 25 bp, Homo sapien
ctgtgtcctgtgaatgtcttcacac

SEQ ID NO: 2087402 - DNA, 25 bp, Homo sapien
tctgtgtcctgtgaatgtcttcaca

SEQ ID NO: 2087403 - DNA, 25 bp, Homo sapien
agccttgcattcctttgttgctacg

SEQ ID NO: 2087404 - DNA, 25 bp, Homo sapien
gccatcttgatttggccgtaccata

SEQ ID NO: 2087405 - DNA, 25 bp, Homo sapien
cttgatttggccgtaccatacgtac

SEQ ID NO: 2087406 - DNA, 25 bp, Homo sapien
cctttgttgctacgacccatacacg

SEQ ID NO: 2087407 - DNA, 25 bp, Homo sapien
gtatggactttaaatggcttctatc

SEQ ID NO: 2087408 - DNA, 25 bp, Homo sapien
cacaagaagttaggtatggacttta

SEQ ID NO: 2087409 - DNA, 25 bp, Homo sapien
taaatggcttctatctaataatgat

SEQ ID NO: 2087410 - DNA, 25 bp, Homo sapien
tttcccacacaagaagttaggtatg

SEQ ID NO: 2087411 - DNA, 25 bp, Homo sapien
actgacatcccacatcttaatagtc

SEQ ID NO: 2087412 - DNA, 25 bp, Homo sapien
ctgacatcccacatcttaatagtct

SEQ ID NO: 2087413 - DNA, 25 bp, Homo sapien
tgaacaggtctctaagaatgctgct

SEQ ID NO: 2087414 - DNA, 25 bp, Homo sapien
taaactagatcatgtgagcaaggag

SEQ ID NO: 2087415 - DNA, 25 bp, Homo sapien
ggcacataggaatgtccacaatccc

SEQ ID NO: 2087416 - DNA, 25 bp, Homo sapien
tccccaagttagctcgatctcctga

SEQ ID NO: 2087417 - DNA, 25 bp, Homo sapien
caccgcgcctggccacgcccggcta

SEQ ID NO: 2087418 - DNA, 25 bp, Homo sapien
gtttttagcagcgatggggttcctc

SEQ ID NO: 2087419 - DNA, 25 bp, Homo sapien
accgcgcctggccacgcccggctaa

SEQ ID NO: 2087420 - DNA, 25 bp, Homo sapien
tgtgtttttagcagcgatggggttc

SEQ ID NO: 2087421 - DNA, 25 bp, Homo sapien
ggtggttcatgctaaaatacttggg

SEQ ID NO: 2087422 - DNA, 25 bp, Homo sapien
caagaacaaatctcaatatgtagtc

SEQ ID NO: 2087423 - DNA, 25 bp, Homo sapien
tataacgtacgatccctgactgggt

SEQ ID NO: 2087424 - DNA, 25 bp, Homo sapien
tgttacgatgtctgcaaagaacgct

SEQ ID NO: 2087425 - DNA, 25 bp, Homo sapien
atggaacagaactccacgtacccag

SEQ ID NO: 2087426 - DNA, 25 bp, Homo sapien
tgttcagagacctcgcgaggcgtac

SEQ ID NO: 2087427 - DNA, 25 bp, Homo sapien
ttcagagacctcgcgaggcgtacat

SEQ ID NO: 2087428 - DNA, 25 bp, Homo sapien
tgtaaaacacagtttgtctggcact

SEQ ID NO: 2087429 - DNA, 25 bp, Homo sapien
cagagacctcgcgaggcgtacatac

SEQ ID NO: 2087430 - DNA, 25 bp, Homo sapien
aatccttgaaccaatcctgtgaggc

SEQ ID NO: 2087431 - DNA, 25 bp, Homo sapien
gaggcaggtattagcccaccttacg

SEQ ID NO: 2087432 - DNA, 25 bp, Homo sapien
tactgaacacgatgttccaggcatg

SEQ ID NO: 2087433 - DNA, 25 bp, Homo sapien
taaattccagattcaagtccagatg

SEQ ID NO: 2087434 - DNA, 25 bp, Homo sapien
gtgcaaacatcccatcagcacagca

SEQ ID NO: 2087435 - DNA, 25 bp, Homo sapien
cttagtgcaaacatcccatcagcac

SEQ ID NO: 2087436 - DNA, 25 bp, Homo sapien
tgcacttagtgcaaacatcccatca

SEQ ID NO: 2087437 - DNA, 25 bp, Homo sapien
tagtgcaaacatcccatcagcacag

SEQ ID NO: 2087438 - DNA, 25 bp, Homo sapien
atttaaaactcacacgtaagcctgg

SEQ ID NO: 2087439 - DNA, 25 bp, Homo sapien
gcagaactgtttgagctgggaagtc

SEQ ID NO: 2087440 - DNA, 25 bp, Homo sapien
aactcacacgtaagcctggacaaca

SEQ ID NO: 2087441 - DNA, 25 bp, Homo sapien
ggagactgatgcagaactgtttgag

SEQ ID NO: 2087442 - DNA, 25 bp, Homo sapien
tgtttgatctacgctgccagtgacg

SEQ ID NO: 2087443 - DNA, 25 bp, Homo sapien
gtttgatctacgctgccagtgacga

SEQ ID NO: 2087444 - DNA, 25 bp, Homo sapien
catggtatcatcagagtgcatccag

SEQ ID NO: 2087445 - DNA, 25 bp, Homo sapien
atggtatcatcagagtgcatccaga

SEQ ID NO: 2087446 - DNA, 25 bp, Homo sapien
ccatggtatcatcagagtgcatcca

SEQ ID NO: 2087447 - DNA, 25 bp, Homo sapien
tggtatcatcagagtgcatccagag

SEQ ID NO: 2087448 - DNA, 25 bp, Homo sapien
caaatgaggccatcaagtcaggcac

SEQ ID NO: 2087449 - DNA, 25 bp, Homo sapien
gccttcttaggcctggtgtgaccaa

SEQ ID NO: 2087450 - DNA, 25 bp, Homo sapien
tattcagtttagtgccctagttcaa

SEQ ID NO: 2087451 - DNA, 25 bp, Homo sapien
ccctatggtacttctagacaacgta

SEQ ID NO: 2087452 - DNA, 25 bp, Homo sapien
taaatataccactagcctctgcgtg

SEQ ID NO: 2087453 - DNA, 25 bp, Homo sapien
gagtcagacctagttttcagaagca

SEQ ID NO: 2087454 - DNA, 25 bp, Homo sapien
tttgtaccatgacacactcaatggg

SEQ ID NO: 2087455 - DNA, 25 bp, Homo sapien
gaatagtgctccaaaagtcatggct

SEQ ID NO: 2087456 - DNA, 25 bp, Homo sapien
gctagacataaagctgcttctagtt

SEQ ID NO: 2087457 - DNA, 25 bp, Homo sapien
taatatacggcctagtctctgtgtg

SEQ ID NO: 2087458 - DNA, 25 bp, Homo sapien
tgtgtatctacaggacgctaactct

SEQ ID NO: 2087459 - DNA, 25 bp, Homo sapien
aacaaaaagacacaagctagacata

SEQ ID NO: 2087460 - DNA, 25 bp, Homo sapien
gtatttaaggaattagcttaagatg

SEQ ID NO: 2087461 - DNA, 25 bp, Homo sapien
aaaatagccattagttctcaaaact

SEQ ID NO: 2087462 - DNA, 25 bp, Homo sapien
tcccttccagagacatctctcagga

SEQ ID NO: 2087463 - DNA, 25 bp, Homo sapien
taaggaattagcttaagatgtaatt

SEQ ID NO: 2087464 - DNA, 25 bp, Homo sapien
tcagaagagctaagggaaaaagact

SEQ ID NO: 2087465 - DNA, 25 bp, Homo sapien
caaacaagaacaaagatattttcca

SEQ ID NO: 2087466 - DNA, 25 bp, Homo sapien
aatacaagacatttatacatgtaca

SEQ ID NO: 2087467 - DNA, 25 bp, Homo sapien
atagcagcaaacaagaacaaagata

SEQ ID NO: 2087468 - DNA, 25 bp, Homo sapien
caaggcacagggttagacagcagac

SEQ ID NO: 2087469 - DNA, 25 bp, Homo sapien
tccaggttgtagacggactgctctc

SEQ ID NO: 2087470 - DNA, 25 bp, Homo sapien
tcagaaagggcatcaacaggacagt

SEQ ID NO: 2087471 - DNA, 25 bp, Homo sapien
caacgcaagtcgctgtgtgctgcag

SEQ ID NO: 2087472 - DNA, 25 bp, Homo sapien
gcaattctaccagctctttatttct

SEQ ID NO: 2087473 - DNA, 25 bp, Homo sapien
tcttaagtggccaatttgattgaga

SEQ ID NO: 2087474 - DNA, 25 bp, Homo sapien
tttatttcttaagtggccaatttga

SEQ ID NO: 2087475 - DNA, 25 bp, Homo sapien
tgcaattctaccagctctttatttc

SEQ ID NO: 2087476 - DNA, 25 bp, Homo sapien
ttacatgtcgcttctctaccaggag

SEQ ID NO: 2087477 - DNA, 25 bp, Homo sapien
tgcttaaggatgatcgagccaccga

SEQ ID NO: 2087478 - DNA, 25 bp, Homo sapien
caaagcttccaaagactacggcgaa

SEQ ID NO: 2087479 - DNA, 25 bp, Homo sapien
gcccgggacgacttgctaacactag

SEQ ID NO: 2087480 - DNA, 25 bp, Homo sapien
tttataggcatttaatagtttacca

SEQ ID NO: 2087481 - DNA, 25 bp, Homo sapien
tagggcaccttgaatacaccacaga

SEQ ID NO: 2087482 - DNA, 25 bp, Homo sapien
ccaaactgtcctttgtagggcacct

SEQ ID NO: 2087483 - DNA, 25 bp, Homo sapien
ggcaggctactactcccaataggag

SEQ ID NO: 2087484 - DNA, 25 bp, Homo sapien
gatacagccatgtgtaaagtgcaga

SEQ ID NO: 2087485 - DNA, 25 bp, Homo sapien
tttgttgttgaacgtgagccacatg

SEQ ID NO: 2087486 - DNA, 25 bp, Homo sapien
tgttgttgaacgtgagccacatgtt

SEQ ID NO: 2087487 - DNA, 25 bp, Homo sapien
ttgttgaacgtgagccacatgttca

SEQ ID NO: 2087488 - DNA, 25 bp, Homo sapien
tgtgtcctgaacattctgtcccctc

SEQ ID NO: 2087489 - DNA, 25 bp, Homo sapien
tcagagagccaagacccaggtggac

SEQ ID NO: 2087490 - DNA, 25 bp, Homo sapien
catacgccttttgggatgcttggag

SEQ ID NO: 2087491 - DNA, 25 bp, Homo sapien
ggagagatctgtacgtcttggaaat

SEQ ID NO: 2087492 - DNA, 25 bp, Homo sapien
ccaccaggaacatacgccttttggg

SEQ ID NO: 2087493 - DNA, 25 bp, Homo sapien
ccaggttcgcgggagtgtcgtgcag

SEQ ID NO: 2087494 - DNA, 25 bp, Homo sapien
tgaatgtcacctgtcaccaggtgca

SEQ ID NO: 2087495 - DNA, 25 bp, Homo sapien
ggaattcaccgagctgccagtccgt

SEQ ID NO: 2087496 - DNA, 25 bp, Homo sapien
cctgtgcatgctggacccgtgaggt

SEQ ID NO: 2087497 - DNA, 25 bp, Homo sapien
aggccggcccgggagatgagaccac

SEQ ID NO: 2087498 - DNA, 25 bp, Homo sapien
caggacacgggcttttctgtgaaga

SEQ ID NO: 2087499 - DNA, 25 bp, Homo sapien
attcaggacacgggcttttctgtga

SEQ ID NO: 2087500 - DNA, 25 bp, Homo sapien
cccgggagatgagaccaccggccag

SEQ ID NO: 2087501 - DNA, 25 bp, Homo sapien
tagcccgcgctcagtgggagtgact

SEQ ID NO: 2087502 - DNA, 25 bp, Homo sapien
gagtgggtcagtgggagcgggtcca

SEQ ID NO: 2087503 - DNA, 25 bp, Homo sapien
gtgggctgcgctgagtgggagtggg

SEQ ID NO: 2087504 - DNA, 25 bp, Homo sapien
gcgggtccatgggagcgggtcggcg

SEQ ID NO: 2087505 - DNA, 25 bp, Homo sapien
gcgcccgagcatgggagctctctga

SEQ ID NO: 2087506 - DNA, 25 bp, Homo sapien
cgcagaccgaaagaatcggcggccc

SEQ ID NO: 2087507 - DNA, 25 bp, Homo sapien
gtcgctccgacgtttgcgggacagc

SEQ ID NO: 2087508 - DNA, 25 bp, Homo sapien
cacgtgcgcgcacacgcggtttcgg

SEQ ID NO: 2087509 - DNA, 25 bp, Homo sapien
ttcgcacgtgcggtcccgtggaggg

SEQ ID NO: 2087510 - DNA, 25 bp, Homo sapien
cgtcgggcccggttgtatctcgctg

SEQ ID NO: 2087511 - DNA, 25 bp, Homo sapien
ccgggaacacggctcgcaggccggg

SEQ ID NO: 2087512 - DNA, 25 bp, Homo sapien
tctcgctggggccttcaccgggtcg

SEQ ID NO: 2087513 - DNA, 25 bp, Homo sapien
gccatggcagaaccagaccagtctc

SEQ ID NO: 2087514 - DNA, 25 bp, Homo sapien
ccttgagtcagagtgcgttgccttt

SEQ ID NO: 2087515 - DNA, 25 bp, Homo sapien
ttctggaaagtcaccgcgtccgtgg

SEQ ID NO: 2087516 - DNA, 25 bp, Homo sapien
tcccgccaccatggttatcaagacg

SEQ ID NO: 2087517 - DNA, 25 bp, Homo sapien
tctgactcttgatccccattagcca

SEQ ID NO: 2087518 - DNA, 25 bp, Homo sapien
agggtcacgcgaacaccgcagatga

SEQ ID NO: 2087519 - DNA, 25 bp, Homo sapien
gacccatgggtcgaggacgcgggta

SEQ ID NO: 2087520 - DNA, 25 bp, Homo sapien
aaagtttggcgggtccattctgact

SEQ ID NO: 2087521 - DNA, 25 bp, Homo sapien
aaatacgagttaaagcgtcctggct

SEQ ID NO: 2087522 - DNA, 25 bp, Homo sapien
gatggagtcagacccggctctaccc

SEQ ID NO: 2087523 - DNA, 25 bp, Homo sapien
acgagttaaagcgtcctggctgtgg

SEQ ID NO: 2087524 - DNA, 25 bp, Homo sapien
gagttaaagcgtcctggctgtggat

SEQ ID NO: 2087525 - DNA, 25 bp, Homo sapien
caatctgagccgtcctgagtgatac

SEQ ID NO: 2087526 - DNA, 25 bp, Homo sapien
taaatgctcacatcaagtcgctggc

SEQ ID NO: 2087527 - DNA, 25 bp, Homo sapien
aacgctccgaaggttataggcctcg

SEQ ID NO: 2087528 - DNA, 25 bp, Homo sapien
gcaatttgtgcgaggccctacctaa

SEQ ID NO: 2087529 - DNA, 25 bp, Homo sapien
cactcggctggatgatgctttttat

SEQ ID NO: 2087530 - DNA, 25 bp, Homo sapien
tacgtgtctgtttctctaaccccag

SEQ ID NO: 2087531 - DNA, 25 bp, Homo sapien
ggctggatgatgctttttatacgtg

SEQ ID NO: 2087532 - DNA, 25 bp, Homo sapien
tttatacgtgtctgtttctctaacc

SEQ ID NO: 2087533 - DNA, 25 bp, Homo sapien
cctccaaagcttagggagtccttgg

SEQ ID NO: 2087534 - DNA, 25 bp, Homo sapien
gctgattatcacagaacagagtcat

SEQ ID NO: 2087535 - DNA, 25 bp, Homo sapien
gaaagcaggagctctaagtcctggg

SEQ ID NO: 2087536 - DNA, 25 bp, Homo sapien
tgggctccagtgttcgcggtctgcc

SEQ ID NO: 2087537 - DNA, 25 bp, Homo sapien
tacatttctttattctatctatcta

SEQ ID NO: 2087538 - DNA, 25 bp, Homo sapien
aagcactttacatttctttattcta

SEQ ID NO: 2087539 - DNA, 25 bp, Homo sapien
gctaagcactttacatttctttatt

SEQ ID NO: 2087540 - DNA, 25 bp, Homo sapien
tgagctacgtcctgtgctaagcact

SEQ ID NO: 2087541 - DNA, 25 bp, Homo sapien
tcaccccgtgagatccatgagagca

SEQ ID NO: 2087542 - DNA, 25 bp, Homo sapien
tagtggcccttatcacagattgtaa

SEQ ID NO: 2087543 - DNA, 25 bp, Homo sapien
cagggacttcactgtgttcgttacc

SEQ ID NO: 2087544 - DNA, 25 bp, Homo sapien
acagtgcttggcaatagtagatcac

SEQ ID NO: 2087545 - DNA, 25 bp, Homo sapien
ccaaagctagaagattgctggagac

SEQ ID NO: 2087546 - DNA, 25 bp, Homo sapien
ttaggccgggtgcagcgccgtggct

SEQ ID NO: 2087547 - DNA, 25 bp, Homo sapien
aagctagaagattgctggagactag

SEQ ID NO: 2087548 - DNA, 25 bp, Homo sapien
tagaagattgctggagactagaagt

SEQ ID NO: 2087549 - DNA, 25 bp, Homo sapien
cctctctgctacctcgcttccccgt

SEQ ID NO: 2087550 - DNA, 25 bp, Homo sapien
tccccgtcctccttagtctccacat

SEQ ID NO: 2087551 - DNA, 25 bp, Homo sapien
ttccccgtcctccttagtctccaca

SEQ ID NO: 2087552 - DNA, 25 bp, Homo sapien
tctgctacctcgcttccccgtcctc

SEQ ID NO: 2087553 - DNA, 25 bp, Homo sapien
aaatggagggaatatggatggttca

SEQ ID NO: 2087554 - DNA, 25 bp, Homo sapien
cgatatctcatgaaatggagggaat

SEQ ID NO: 2087555 - DNA, 25 bp, Homo sapien
tctcatgaaatggagggaatatgga

SEQ ID NO: 2087556 - DNA, 25 bp, Homo sapien
gagggaatatggatggttcatcaga

SEQ ID NO: 2087557 - DNA, 25 bp, Homo sapien
gctatgaccactgtggctgccacag

SEQ ID NO: 2087558 - DNA, 25 bp, Homo sapien
taagctatgaccactgtggctgcca

SEQ ID NO: 2087559 - DNA, 25 bp, Homo sapien
tttaagctatgaccactgtggctgc

SEQ ID NO: 2087560 - DNA, 25 bp, Homo sapien
tccctttaagctatgaccactgtgg

SEQ ID NO: 2087561 - DNA, 25 bp, Homo sapien
cggcggcccgccatgcctcgcccgg

SEQ ID NO: 2087562 - DNA, 25 bp, Homo sapien
agctgccagcgcttctcccccggcg

SEQ ID NO: 2087563 - DNA, 25 bp, Homo sapien
cgcccggcggcccgccatgcctcgc

SEQ ID NO: 2087564 - DNA, 25 bp, Homo sapien
caccagctgccagcgcttctccccc

SEQ ID NO: 2087565 - DNA, 25 bp, Homo sapien
gggctaaagcacccctttccacgca

SEQ ID NO: 2087566 - DNA, 25 bp, Homo sapien
gctgtgggtggtgccttctcggggc

SEQ ID NO: 2087567 - DNA, 25 bp, Homo sapien
agaaggaacggagggaggcacaaat

SEQ ID NO: 2087568 - DNA, 25 bp, Homo sapien
ctaaagcacccctttccacgcaggg

SEQ ID NO: 2087569 - DNA, 25 bp, Homo sapien
tgagcttgcagtccggtaacctgac

SEQ ID NO: 2087570 - DNA, 25 bp, Homo sapien
agatcaggtgactcgacagcgctgc

SEQ ID NO: 2087571 - DNA, 25 bp, Homo sapien
tggctgaagccgtcctgaacattgg

SEQ ID NO: 2087572 - DNA, 25 bp, Homo sapien
tgaacattgggacacctggaaccct

SEQ ID NO: 2087573 - DNA, 25 bp, Homo sapien
agctccaagtgccgccaagcagagg

SEQ ID NO: 2087574 - DNA, 25 bp, Homo sapien
taagctccaagtgccgccaagcaga

SEQ ID NO: 2087575 - DNA, 25 bp, Homo sapien
aagctccaagtgccgccaagcagag

SEQ ID NO: 2087576 - DNA, 25 bp, Homo sapien
cactggtggaatacagccccggcca

SEQ ID NO: 2087577 - DNA, 25 bp, Homo sapien
tccactggtggaatacagccccggc

SEQ ID NO: 2087578 - DNA, 25 bp, Homo sapien
ctggtggaatacagccccggccacc

SEQ ID NO: 2087579 - DNA, 25 bp, Homo sapien
ttccactggtggaatacagccccgg

SEQ ID NO: 2087580 - DNA, 25 bp, Homo sapien
cgtcctctcctcgattcggaaccgc

SEQ ID NO: 2087581 - DNA, 25 bp, Homo sapien
gtcagcccggctgaggatgcgatgc

SEQ ID NO: 2087582 - DNA, 25 bp, Homo sapien
gccactggaaggctgtcagcgtcct

SEQ ID NO: 2087583 - DNA, 25 bp, Homo sapien
ctggagggagactcgaggtcagccc

SEQ ID NO: 2087584 - DNA, 25 bp, Homo sapien
gcgccgtccatacgtgccgatgtct

SEQ ID NO: 2087585 - DNA, 25 bp, Homo sapien
gcacagcctgtgacgccggatggct

SEQ ID NO: 2087586 - DNA, 25 bp, Homo sapien
tgtctgcaaacacacgcgttcacac

SEQ ID NO: 2087587 - DNA, 25 bp, Homo sapien
atggctcctccggaacgcagtaccg

SEQ ID NO: 2087588 - DNA, 25 bp, Homo sapien
ccctataggtggacgtgtgtgcagc

SEQ ID NO: 2087589 - DNA, 25 bp, Homo sapien
ggtcagcttctctcgccagatcctg

SEQ ID NO: 2087590 - DNA, 25 bp, Homo sapien
cgcacacacaccctataggtggacg

SEQ ID NO: 2087591 - DNA, 25 bp, Homo sapien
tctgacctccatcccggtcagcttc

SEQ ID NO: 2087592 - DNA, 25 bp, Homo sapien
ttctgcaatgaccaggtccccacag

SEQ ID NO: 2087593 - DNA, 25 bp, Homo sapien
caaacacttctgcaatgaccaggtc

SEQ ID NO: 2087594 - DNA, 25 bp, Homo sapien
tccaaacacttctgcaatgaccagg

SEQ ID NO: 2087595 - DNA, 25 bp, Homo sapien
aacacttctgcaatgaccaggtccc

SEQ ID NO: 2087596 - DNA, 25 bp, Homo sapien
aagaaggaggccagtaatcctggat

SEQ ID NO: 2087597 - DNA, 25 bp, Homo sapien
cagccatctaatcggcagggccctg

SEQ ID NO: 2087598 - DNA, 25 bp, Homo sapien
gagtcccccaagtgcccatgcctgc

SEQ ID NO: 2087599 - DNA, 25 bp, Homo sapien
agccatctaatcggcagggccctga

SEQ ID NO: 2087600 - DNA, 25 bp, Homo sapien
aaggtgggcgtttgcgccctctgca

SEQ ID NO: 2087601 - DNA, 25 bp, Homo sapien
cctgggcttgtttctaggatggcag

SEQ ID NO: 2087602 - DNA, 25 bp, Homo sapien
caagcttgggtggtgcgaggaggaa

SEQ ID NO: 2087603 - DNA, 25 bp, Homo sapien
ccctctgcaggcaagcttgggtggt

SEQ ID NO: 2087604 - DNA, 25 bp, Homo sapien
ctcaaggtccagactaaatttccca

SEQ ID NO: 2087605 - DNA, 25 bp, Homo sapien
ctgcactatctcaaggtccagacta

SEQ ID NO: 2087606 - DNA, 25 bp, Homo sapien
tgcactatctcaaggtccagactaa

SEQ ID NO: 2087607 - DNA, 25 bp, Homo sapien
ggtccagactaaatttcccattgca

SEQ ID NO: 2087608 - DNA, 25 bp, Homo sapien
gggcccacacgtccccagactgagg

SEQ ID NO: 2087609 - DNA, 25 bp, Homo sapien
atccaggggcccacacgtccccaga

SEQ ID NO: 2087610 - DNA, 25 bp, Homo sapien
gaggatccaggggcccacacgtccc

SEQ ID NO: 2087611 - DNA, 25 bp, Homo sapien
caggggcccacacgtccccagactg

SEQ ID NO: 2087612 - DNA, 25 bp, Homo sapien
cagacacccggccaaggagcaggac

SEQ ID NO: 2087613 - DNA, 25 bp, Homo sapien
tgagtcagacacccggccaaggagc

SEQ ID NO: 2087614 - DNA, 25 bp, Homo sapien
gacttcttcgatgccgctgggatcc

SEQ ID NO: 2087615 - DNA, 25 bp, Homo sapien
gcctggacttcttcgatgccgctgg

SEQ ID NO: 2087616 - DNA, 25 bp, Homo sapien
ccacactgaccacatgtgaaagctg

SEQ ID NO: 2087617 - DNA, 25 bp, Homo sapien
tgaccacatgtgaaagctgcccgcc

SEQ ID NO: 2087618 - DNA, 25 bp, Homo sapien
cactgaccacatgtgaaagctgccc

SEQ ID NO: 2087619 - DNA, 25 bp, Homo sapien
acatgtgaaagctgcccgccgcatg

SEQ ID NO: 2087620 - DNA, 25 bp, Homo sapien
tacacatgtgcccgcaggcactcat

SEQ ID NO: 2087621 - DNA, 25 bp, Homo sapien
gcacagacatgaacgcatacacatg

SEQ ID NO: 2087622 - DNA, 25 bp, Homo sapien
gccccattggacacgtgcacagaca

SEQ ID NO: 2087623 - DNA, 25 bp, Homo sapien
tgacaaagccccattggacacgtgc

SEQ ID NO: 2087624 - DNA, 25 bp, Homo sapien
tcggctggcagattgctccacagcc

SEQ ID NO: 2087625 - DNA, 25 bp, Homo sapien
gggctcggctggcagattgctccac

SEQ ID NO: 2087626 - DNA, 25 bp, Homo sapien
ccacagctccggaaggggctcggct

SEQ ID NO: 2087627 - DNA, 25 bp, Homo sapien
gccccagttagcagcccggcccaca

SEQ ID NO: 2087628 - DNA, 25 bp, Homo sapien
ggagcccagcgtggcacctccctct

SEQ ID NO: 2087629 - DNA, 25 bp, Homo sapien
cgcaagagggccgtggtacagcggg

SEQ ID NO: 2087630 - DNA, 25 bp, Homo sapien
tccgcaagagggccgtggtacagcg

SEQ ID NO: 2087631 - DNA, 25 bp, Homo sapien
ctgtccgcaagagggccgtggtaca

SEQ ID NO: 2087632 - DNA, 25 bp, Homo sapien
ggggtcccagcgatgtcccaacgac

SEQ ID NO: 2087633 - DNA, 25 bp, Homo sapien
ccggggtcccagcgatgtcccaacg

SEQ ID NO: 2087634 - DNA, 25 bp, Homo sapien
ggtcccagcgatgtcccaacgacgt

SEQ ID NO: 2087635 - DNA, 25 bp, Homo sapien
agcgatgtcccaacgacgtccccgg

SEQ ID NO: 2087636 - DNA, 25 bp, Homo sapien
aaaggagacactgcgcttccggcca

SEQ ID NO: 2087637 - DNA, 25 bp, Homo sapien
ccaaaggagacactgcgcttccggc

SEQ ID NO: 2087638 - DNA, 25 bp, Homo sapien
catccgaagcccccaaaggagacac

SEQ ID NO: 2087639 - DNA, 25 bp, Homo sapien
agacactgcgcttccggccaaacat

SEQ ID NO: 2087640 - DNA, 25 bp, Homo sapien
aggcggaggtgcattctgcggccac

SEQ ID NO: 2087641 - DNA, 25 bp, Homo sapien
cacggtgtcgtggaggcggaggtgc

SEQ ID NO: 2087642 - DNA, 25 bp, Homo sapien
gccacggattctatatacacagccc

SEQ ID NO: 2087643 - DNA, 25 bp, Homo sapien
aggggcggccttctcacccacggtg

SEQ ID NO: 2087644 - DNA, 25 bp, Homo sapien
gcttctgagtgtccaactcatccag

SEQ ID NO: 2087645 - DNA, 25 bp, Homo sapien
ttaagtaaatccttgcttctgagtg

SEQ ID NO: 2087646 - DNA, 25 bp, Homo sapien
cttgcttctgagtgtccaactcatc

SEQ ID NO: 2087647 - DNA, 25 bp, Homo sapien
ctgagtgtccaactcatccaggcac

SEQ ID NO: 2087648 - DNA, 25 bp, Homo sapien
ctggagacagctcaggcatcaccag

SEQ ID NO: 2087649 - DNA, 25 bp, Homo sapien
gcacccctggagacagctcaggcat

SEQ ID NO: 2087650 - DNA, 25 bp, Homo sapien
acccctggagacagctcaggcatca

SEQ ID NO: 2087651 - DNA, 25 bp, Homo sapien
gtgggcatcgcagcccttgtcccgt

SEQ ID NO: 2087652 - DNA, 25 bp, Homo sapien
cacagggcaggaggtatatggtggg

SEQ ID NO: 2087653 - DNA, 25 bp, Homo sapien
tccacagggcaggaggtatatggtg

SEQ ID NO: 2087654 - DNA, 25 bp, Homo sapien
acagggcaggaggtatatggtgggt

SEQ ID NO: 2087655 - DNA, 25 bp, Homo sapien
cttccacagggcaggaggtatatgg

SEQ ID NO: 2087656 - DNA, 25 bp, Homo sapien
cccccacggccctcaggatgctgct

SEQ ID NO: 2087657 - DNA, 25 bp, Homo sapien
tccacaggaccgtgagtcttcccat

SEQ ID NO: 2087658 - DNA, 25 bp, Homo sapien
tctgcagtgtgtagacaagaagcac

SEQ ID NO: 2087659 - DNA, 25 bp, Homo sapien
cagtgtgtagacaagaagcaccagg

SEQ ID NO: 2087660 - DNA, 25 bp, Homo sapien
ggaggcacgagtctttctccagagc

SEQ ID NO: 2087661 - DNA, 25 bp, Homo sapien
cagccagtgactgcgtccacgcatg

SEQ ID NO: 2087662 - DNA, 25 bp, Homo sapien
cgtccacgcatgtaccacagggatg

SEQ ID NO: 2087663 - DNA, 25 bp, Homo sapien
tgggtcccggtacacaatgctcagt

SEQ ID NO: 2087664 - DNA, 25 bp, Homo sapien
tgctcagtgtgcctgcgtaggtacg

SEQ ID NO: 2087665 - DNA, 25 bp, Homo sapien
catgagtactcagaggtttgcatgt

SEQ ID NO: 2087666 - DNA, 25 bp, Homo sapien
tcatgagtactcagaggtttgcatg

SEQ ID NO: 2087667 - DNA, 25 bp, Homo sapien
tgggcattgctaggaaatcgcagta

SEQ ID NO: 2087668 - DNA, 25 bp, Homo sapien
gcattgctaggaaatcgcagtatta

SEQ ID NO: 2087669 - DNA, 25 bp, Homo sapien
taggaaatcgcagtattatttttgt

SEQ ID NO: 2087670 - DNA, 25 bp, Homo sapien
gtcactgggcattgctaggaaatcg

SEQ ID NO: 2087671 - DNA, 25 bp, Homo sapien
cagcacagttgcgtctctgggatgc

SEQ ID NO: 2087672 - DNA, 25 bp, Homo sapien
cacagttgcgtctctgggatgcccc

SEQ ID NO: 2087673 - DNA, 25 bp, Homo sapien
ttggcaggtacatcagcgccccctg

SEQ ID NO: 2087674 - DNA, 25 bp, Homo sapien
ccacagcacagttgcgtctctggga

SEQ ID NO: 2087675 - DNA, 25 bp, Homo sapien
tatccatgagaaagcgggaatcagc

SEQ ID NO: 2087676 - DNA, 25 bp, Homo sapien
taatcatgaacagagcgcagacagc

SEQ ID NO: 2087677 - DNA, 25 bp, Homo sapien
gaatgactgccaccgttctgggctg

SEQ ID NO: 2087678 - DNA, 25 bp, Homo sapien
cacacaacctttgggacaacgcaag

SEQ ID NO: 2087679 - DNA, 25 bp, Homo sapien
cacaggttagctgatggaccgcttc

SEQ ID NO: 2087680 - DNA, 25 bp, Homo sapien
gaccgcttcagttagatggcaggga

SEQ ID NO: 2087681 - DNA, 25 bp, Homo sapien
tatgaagcagccgttaccactggcc

SEQ ID NO: 2087682 - DNA, 25 bp, Homo sapien
gactgcaaacgaattcgagggcctg

SEQ ID NO: 2087683 - DNA, 25 bp, Homo sapien
tttattctgcctccgggatttgtgc

SEQ ID NO: 2087684 - DNA, 25 bp, Homo sapien
ctttattctgcctccgggatttgtg

SEQ ID NO: 2087685 - DNA, 25 bp, Homo sapien
agtccgatgagcaccacggcggcgc

SEQ ID NO: 2087686 - DNA, 25 bp, Homo sapien
gatttgtgcaggagtccgatgagca

SEQ ID NO: 2087687 - DNA, 25 bp, Homo sapien
catcaaatgtaacgcccagcatgga

SEQ ID NO: 2087688 - DNA, 25 bp, Homo sapien
atgcttaagagaggctggcagctgc

SEQ ID NO: 2087689 - DNA, 25 bp, Homo sapien
ggtggaaggaagagctcatcaaatg

SEQ ID NO: 2087690 - DNA, 25 bp, Homo sapien
tatgggggatgcttaagagaggctg

SEQ ID NO: 2087691 - DNA, 25 bp, Homo sapien
cgtagagcacggtcaagtccaacat

SEQ ID NO: 2087692 - DNA, 25 bp, Homo sapien
gttctgggactatatgggacatctg

SEQ ID NO: 2087693 - DNA, 25 bp, Homo sapien
tgggaactaccaagactagctggga

SEQ ID NO: 2087694 - DNA, 25 bp, Homo sapien
tgtctcatgactaccctggctggca

SEQ ID NO: 2087695 - DNA, 25 bp, Homo sapien
gatttcaccgaacaggcctgacaag

SEQ ID NO: 2087696 - DNA, 25 bp, Homo sapien
gcctgacaagccctctatttggcaa

SEQ ID NO: 2087697 - DNA, 25 bp, Homo sapien
cagaagtgcttttcgttgatttcac

SEQ ID NO: 2087698 - DNA, 25 bp, Homo sapien
tcagcagcccccgtctgaacagaag

SEQ ID NO: 2087699 - DNA, 25 bp, Homo sapien
cttgctccaagggcactgaataaac

SEQ ID NO: 2087700 - DNA, 25 bp, Homo sapien
ctaaccatatgaggagtctgcaggg

SEQ ID NO: 2087701 - DNA, 25 bp, Homo sapien
gatggcatgctgctacgtacgggac

SEQ ID NO: 2087702 - DNA, 25 bp, Homo sapien
actctccgcagtcaggatggcatgc

SEQ ID NO: 2087703 - DNA, 25 bp, Homo sapien
actgcaagctcctaggtggcagggc

SEQ ID NO: 2087704 - DNA, 25 bp, Homo sapien
ttcaacacctaacacgaaatggccc

SEQ ID NO: 2087705 - DNA, 25 bp, Homo sapien
ttcatgtataacactgactgactct

SEQ ID NO: 2087706 - DNA, 25 bp, Homo sapien
ctaactggggtaccaactgccctga

SEQ ID NO: 2087707 - DNA, 25 bp, Homo sapien
gggtattatctactgcctcaccaac

SEQ ID NO: 2087708 - DNA, 25 bp, Homo sapien
gggccgcagtttcgacaccatgtac

SEQ ID NO: 2087709 - DNA, 25 bp, Homo sapien
ggtgcctatctctaagacctctgag

SEQ ID NO: 2087710 - DNA, 25 bp, Homo sapien
gccagggcctcgtaaccaaaagcat

SEQ ID NO: 2087711 - DNA, 25 bp, Homo sapien
tcttagtcgcatttcacacatggga

SEQ ID NO: 2087712 - DNA, 25 bp, Homo sapien
cagatcagcctcctaggagagcgcc

SEQ ID NO: 2087713 - DNA, 25 bp, Homo sapien
ggtgctggctgacggctggccatga

SEQ ID NO: 2087714 - DNA, 25 bp, Homo sapien
tggctgacggctggccatgagccca

SEQ ID NO: 2087715 - DNA, 25 bp, Homo sapien
acagggtgctggctgacggctggcc

SEQ ID NO: 2087716 - DNA, 25 bp, Homo sapien
tcagagcatggacacctcagattgc

SEQ ID NO: 2087717 - DNA, 25 bp, Homo sapien
tcccctcggatgtgcctatggtcca

SEQ ID NO: 2087718 - DNA, 25 bp, Homo sapien
gatgcagttacacagacagcttcac

SEQ ID NO: 2087719 - DNA, 25 bp, Homo sapien
gagaactcgtctttctgtcactcat

SEQ ID NO: 2087720 - DNA, 25 bp, Homo sapien
aggctgttgaccttgatcgggtcct

SEQ ID NO: 2087721 - DNA, 25 bp, Homo sapien
aggctgaggcctctgactggttcag

SEQ ID NO: 2087722 - DNA, 25 bp, Homo sapien
acgtcattcttatgcacatacactg

SEQ ID NO: 2087723 - DNA, 25 bp, Homo sapien
cctttcctctccacgtcattcttat

SEQ ID NO: 2087724 - DNA, 25 bp, Homo sapien
agccaccctgggattctctgccaat

SEQ ID NO: 2087725 - DNA, 25 bp, Homo sapien
caccctgggattctctgccaatcat

SEQ ID NO: 2087726 - DNA, 25 bp, Homo sapien
gcagccaccctgggattctctgcca

SEQ ID NO: 2087727 - DNA, 25 bp, Homo sapien
gaggcagccaccctgggattctctg

SEQ ID NO: 2087728 - DNA, 25 bp, Homo sapien
ctatctgggtcacagccttgaagcc

SEQ ID NO: 2087729 - DNA, 25 bp, Homo sapien
aagccccagctggcgaggccccagg

SEQ ID NO: 2087730 - DNA, 25 bp, Homo sapien
tccctatctgggtcacagccttgaa

SEQ ID NO: 2087731 - DNA, 25 bp, Homo sapien
ctccctatctgggtcacagccttga

SEQ ID NO: 2087732 - DNA, 25 bp, Homo sapien
aagagcctccaggggcatactggaa

SEQ ID NO: 2087733 - DNA, 25 bp, Homo sapien
gcacagaagcaggacgcagaggaac

SEQ ID NO: 2087734 - DNA, 25 bp, Homo sapien
aagcaggacgcagaggaacgtgacc

SEQ ID NO: 2087735 - DNA, 25 bp, Homo sapien
acagaagcaggacgcagaggaacgt

SEQ ID NO: 2087736 - DNA, 25 bp, Homo sapien
ggacgcagaggaacgtgaccagcat

SEQ ID NO: 2087737 - DNA, 25 bp, Homo sapien
gaaagacccgagtgccaaacatgga

SEQ ID NO: 2087738 - DNA, 25 bp, Homo sapien
ttgggagaccagctacgggatcgca

SEQ ID NO: 2087739 - DNA, 25 bp, Homo sapien
gatacagaatcaagtgccatgaggt

SEQ ID NO: 2087740 - DNA, 25 bp, Homo sapien
tcgcacaggaggcaacggctgatct

SEQ ID NO: 2087741 - DNA, 25 bp, Homo sapien
tgccccttctcacatggcactgagg

SEQ ID NO: 2087742 - DNA, 25 bp, Homo sapien
gccccttctcacatggcactgaggt

SEQ ID NO: 2087743 - DNA, 25 bp, Homo sapien
cctgccccttctcacatggcactga

SEQ ID NO: 2087744 - DNA, 25 bp, Homo sapien
ctgccccttctcacatggcactgag

SEQ ID NO: 2087745 - DNA, 25 bp, Homo sapien
gtctgggagggtcgcatccgagctg

SEQ ID NO: 2087746 - DNA, 25 bp, Homo sapien
ggccggtctgggagggtcgcatccg

SEQ ID NO: 2087747 - DNA, 25 bp, Homo sapien
gccggtctgggagggtcgcatccga

SEQ ID NO: 2087748 - DNA, 25 bp, Homo sapien
gggagggtcgcatccgagctgttgg

SEQ ID NO: 2087749 - DNA, 25 bp, Homo sapien
aacactggctgagccaaaagtctcc

SEQ ID NO: 2087750 - DNA, 25 bp, Homo sapien
aagtctcctctgaggaccagctcag

SEQ ID NO: 2087751 - DNA, 25 bp, Homo sapien
ctatgcagaaacactggctgagcca

SEQ ID NO: 2087752 - DNA, 25 bp, Homo sapien
gtctcctctgaggaccagctcaggc

SEQ ID NO: 2087753 - DNA, 25 bp, Homo sapien
ctgcttttccatgctggtgtttgaa

SEQ ID NO: 2087754 - DNA, 25 bp, Homo sapien
gctggtgtttgaaggactcactctg

SEQ ID NO: 2087755 - DNA, 25 bp, Homo sapien
gaagtaccttccaagccccagaatc

SEQ ID NO: 2087756 - DNA, 25 bp, Homo sapien
tccatgctggtgtttgaaggactca

SEQ ID NO: 2087757 - DNA, 25 bp, Homo sapien
ctgctccccgtgttgatgccaaacg

SEQ ID NO: 2087758 - DNA, 25 bp, Homo sapien
tgctccccgtgttgatgccaaacga

SEQ ID NO: 2087759 - DNA, 25 bp, Homo sapien
gctccccgtgttgatgccaaacgat

SEQ ID NO: 2087760 - DNA, 25 bp, Homo sapien
tccccgtgttgatgccaaacgatcc

SEQ ID NO: 2087761 - DNA, 25 bp, Homo sapien
acagtgtacccaggaaaagagccca

SEQ ID NO: 2087762 - DNA, 25 bp, Homo sapien
gggtcttcgctaccaggggcataac

SEQ ID NO: 2087763 - DNA, 25 bp, Homo sapien
tctcctggaactatcaggcagcctg

SEQ ID NO: 2087764 - DNA, 25 bp, Homo sapien
cccactgccttcgtggagcgggcag

SEQ ID NO: 2087765 - DNA, 25 bp, Homo sapien
tgttaaataacacgattgccccacc

SEQ ID NO: 2087766 - DNA, 25 bp, Homo sapien
caggtgttgatcaaatgcgccggac

SEQ ID NO: 2087767 - DNA, 25 bp, Homo sapien
cttaaataagtgcttcggtcccgag

SEQ ID NO: 2087768 - DNA, 25 bp, Homo sapien
ttctgatgtgcctgagagatgccat

SEQ ID NO: 2087769 - DNA, 25 bp, Homo sapien
agctcagggcccagaggcacttggt

SEQ ID NO: 2087770 - DNA, 25 bp, Homo sapien
gctcagggcccagaggcacttggtg

SEQ ID NO: 2087771 - DNA, 25 bp, Homo sapien
catgagctcagggcccagaggcact

SEQ ID NO: 2087772 - DNA, 25 bp, Homo sapien
tgagctcagggcccagaggcacttg

SEQ ID NO: 2087773 - DNA, 25 bp, Homo sapien
tcccaggaaaatcggggggagatgc

SEQ ID NO: 2087774 - DNA, 25 bp, Homo sapien
cccaggaaaatcggggggagatgcg

SEQ ID NO: 2087775 - DNA, 25 bp, Homo sapien
agccagccgctggattttcacagag

SEQ ID NO: 2087776 - DNA, 25 bp, Homo sapien
caatagcagcgtccatgcagctgtc

SEQ ID NO: 2087777 - DNA, 25 bp, Homo sapien
cacagaggcatgtaattgggtctcc

SEQ ID NO: 2087778 - DNA, 25 bp, Homo sapien
gctgtctaatgtattagcagcagca

SEQ ID NO: 2087779 - DNA, 25 bp, Homo sapien
ttgaccagaagtgagccgccaaaca

SEQ ID NO: 2087780 - DNA, 25 bp, Homo sapien
ccaaagccagcgtgtcagaggcaaa

SEQ ID NO: 2087781 - DNA, 25 bp, Homo sapien
tcaggatctggcatctagaaacccc

SEQ ID NO: 2087782 - DNA, 25 bp, Homo sapien
gaaaccccacgtgtgaatgtacagg

SEQ ID NO: 2087783 - DNA, 25 bp, Homo sapien
ttctccagcatctcaaagaactccg

SEQ ID NO: 2087784 - DNA, 25 bp, Homo sapien
ctgcattttctccagcatctcaaag

SEQ ID NO: 2087785 - DNA, 25 bp, Homo sapien
ccagcatctcaaagaactccgacga

SEQ ID NO: 2087786 - DNA, 25 bp, Homo sapien
tccagcatctcaaagaactccgacg

SEQ ID NO: 2087787 - DNA, 25 bp, Homo sapien
cccggcttctgctcttcaagcttga

SEQ ID NO: 2087788 - DNA, 25 bp, Homo sapien
gcttctgctcttcaagcttgatccc

SEQ ID NO: 2087789 - DNA, 25 bp, Homo sapien
cggcttctgctcttcaagcttgatc

SEQ ID NO: 2087790 - DNA, 25 bp, Homo sapien
tcccggcttctgctcttcaagcttg

SEQ ID NO: 2087791 - DNA, 25 bp, Homo sapien
cagggccgtctggccaccccctcac

SEQ ID NO: 2087792 - DNA, 25 bp, Homo sapien
ggccgtctggccaccccctcaccca

SEQ ID NO: 2087793 - DNA, 25 bp, Homo sapien
gccgtctggccaccccctcacccac

SEQ ID NO: 2087794 - DNA, 25 bp, Homo sapien
tgcaagggggatatgttgtgggggg

SEQ ID NO: 2087795 - DNA, 25 bp, Homo sapien
cttgcaagggggatatgttgtgggg

SEQ ID NO: 2087796 - DNA, 25 bp, Homo sapien
tagtcccggcagtgcccgtaaagtc

SEQ ID NO: 2087797 - DNA, 25 bp, Homo sapien
ctgcaagacaaaccagatgatgcca

SEQ ID NO: 2087798 - DNA, 25 bp, Homo sapien
gatgatgccaccgttagtcccggca

SEQ ID NO: 2087799 - DNA, 25 bp, Homo sapien
tgcccgtaaagtctgaccactgttt

SEQ ID NO: 2087800 - DNA, 25 bp, Homo sapien
ctcgtcgatgctggggtatgggata

SEQ ID NO: 2087801 - DNA, 25 bp, Homo sapien
gtcgatgctggggtatgggatatag

SEQ ID NO: 2087802 - DNA, 25 bp, Homo sapien
tgctggggtatgggatatagtcgtc

SEQ ID NO: 2087803 - DNA, 25 bp, Homo sapien
atgctggggtatgggatatagtcgt

SEQ ID NO: 2087804 - DNA, 25 bp, Homo sapien
gatgctgctccccagcgatgttggg

SEQ ID NO: 2087805 - DNA, 25 bp, Homo sapien
tgcactcgagcttgtagccaaatgt

SEQ ID NO: 2087806 - DNA, 25 bp, Homo sapien
cccaaactgtggcaggatgacctga

SEQ ID NO: 2087807 - DNA, 25 bp, Homo sapien
gttctccgggtcctcgatccaatag

SEQ ID NO: 2087808 - DNA, 25 bp, Homo sapien
acttgacggacaggatcaagttccc

SEQ ID NO: 2087809 - DNA, 25 bp, Homo sapien
aggatgacccggaggtactcgatcc

SEQ ID NO: 2087810 - DNA, 25 bp, Homo sapien
tgcttcctcgcacttgacggacagg

SEQ ID NO: 2087811 - DNA, 25 bp, Homo sapien
gctgccggtacagtaaaagtttaga

SEQ ID NO: 2087812 - DNA, 25 bp, Homo sapien
tggaagagaagtggcctcaagcagc

SEQ ID NO: 2087813 - DNA, 25 bp, Homo sapien
ggcctcaagcagcgcaacagcccta

SEQ ID NO: 2087814 - DNA, 25 bp, Homo sapien
agaagtggcctcaagcagcgcaaca

SEQ ID NO: 2087815 - DNA, 25 bp, Homo sapien
agtggcctcaagcagcgcaacagcc

SEQ ID NO: 2087816 - DNA, 25 bp, Homo sapien
taggcaacttcagacacagccccag

SEQ ID NO: 2087817 - DNA, 25 bp, Homo sapien
ccccacaccaccgatgagagccctg

SEQ ID NO: 2087818 - DNA, 25 bp, Homo sapien
ccagaccagactggtcagtctggta

SEQ ID NO: 2087819 - DNA, 25 bp, Homo sapien
aggcctgtccccgtcagccagtgca

SEQ ID NO: 2087820 - DNA, 25 bp, Homo sapien
aagttagttacataggtcgactgat

SEQ ID NO: 2087821 - DNA, 25 bp, Homo sapien
gttagttacataggtcgactgattg

SEQ ID NO: 2087822 - DNA, 25 bp, Homo sapien
cataggtcgactgattgatggattg

SEQ ID NO: 2087823 - DNA, 25 bp, Homo sapien
gttacataggtcgactgattgatgg

SEQ ID NO: 2087824 - DNA, 25 bp, Homo sapien
gctcaggtgagacttaactgcacag

SEQ ID NO: 2087825 - DNA, 25 bp, Homo sapien
ctcaggtgagacttaactgcacagg

SEQ ID NO: 2087826 - DNA, 25 bp, Homo sapien
tgctcaggtgagacttaactgcaca

SEQ ID NO: 2087827 - DNA, 25 bp, Homo sapien
acactgggaagcttgctcagtccag

SEQ ID NO: 2087828 - DNA, 25 bp, Homo sapien
tccagccaaggggatccgctcatgt

SEQ ID NO: 2087829 - DNA, 25 bp, Homo sapien
gctcatgtaccgtcttcagtttgga

SEQ ID NO: 2087830 - DNA, 25 bp, Homo sapien
gggaagcttgctcagtccagccaag

SEQ ID NO: 2087831 - DNA, 25 bp, Homo sapien
gtcagggatgatatctgtagaggac

SEQ ID NO: 2087832 - DNA, 25 bp, Homo sapien
caggtcagggatgatatctgtagag

SEQ ID NO: 2087833 - DNA, 25 bp, Homo sapien
cgcaggtcagggatgatatctgtag

SEQ ID NO: 2087834 - DNA, 25 bp, Homo sapien
gggatgatatctgtagaggacatct

SEQ ID NO: 2087835 - DNA, 25 bp, Homo sapien
tctcagtcccactgcatcatcacag

SEQ ID NO: 2087836 - DNA, 25 bp, Homo sapien
tcagtcccactgcatcatcacagaa

SEQ ID NO: 2087837 - DNA, 25 bp, Homo sapien
ttgaatctcagtcccactgcatcat

SEQ ID NO: 2087838 - DNA, 25 bp, Homo sapien
gaatctcagtcccactgcatcatca

SEQ ID NO: 2087839 - DNA, 25 bp, Homo sapien
gaagacgcagtcgatgcactgggtc

SEQ ID NO: 2087840 - DNA, 25 bp, Homo sapien
tgcagcgtgacccacggcagaagct

SEQ ID NO: 2087841 - DNA, 25 bp, Homo sapien
cagaagctcagaagcacagctctgc

SEQ ID NO: 2087842 - DNA, 25 bp, Homo sapien
ggcccatgaagacgcagtcgatgca

SEQ ID NO: 2087843 - DNA, 25 bp, Homo sapien
ctttttgataaatgactccgaattt

SEQ ID NO: 2087844 - DNA, 25 bp, Homo sapien
gaatttgaatgtgttgttgacttca

SEQ ID NO: 2087845 - DNA, 25 bp, Homo sapien
tgataaatgactccgaatttgaatg

SEQ ID NO: 2087846 - DNA, 25 bp, Homo sapien
tccgaatttgaatgtgttgttgact

SEQ ID NO: 2087847 - DNA, 25 bp, Homo sapien
acccacagtagcaggatgtacaaac

SEQ ID NO: 2087848 - DNA, 25 bp, Homo sapien
tgatcaacaggctctacccacagta

SEQ ID NO: 2087849 - DNA, 25 bp, Homo sapien
gagcggcagatgatacaaagacact

SEQ ID NO: 2087850 - DNA, 25 bp, Homo sapien
cagtagcaagctctgcaaacagtaa

SEQ ID NO: 2087851 - DNA, 25 bp, Homo sapien
tgcagtgtgatcgtgtcccccagca

SEQ ID NO: 2087852 - DNA, 25 bp, Homo sapien
ctgcagtgtgatcgtgtcccccagc

SEQ ID NO: 2087853 - DNA, 25 bp, Homo sapien
aaatcctgcagtgtgatcgtgtccc

SEQ ID NO: 2087854 - DNA, 25 bp, Homo sapien
cctgcagtgtgatcgtgtcccccag

SEQ ID NO: 2087855 - DNA, 25 bp, Homo sapien
gaaacatgatctccctgtcccggaa

SEQ ID NO: 2087856 - DNA, 25 bp, Homo sapien
tgtcccggaatgttgtgtacactga

SEQ ID NO: 2087857 - DNA, 25 bp, Homo sapien
tccgtcggtaaatggcagctttgtg

SEQ ID NO: 2087858 - DNA, 25 bp, Homo sapien
tgtacactgattccacccctgtctg

SEQ ID NO: 2087859 - DNA, 25 bp, Homo sapien
gatgatggccacgatgtcatttcca

SEQ ID NO: 2087860 - DNA, 25 bp, Homo sapien
tgtaggcatgtaagaaattggaggc

SEQ ID NO: 2087861 - DNA, 25 bp, Homo sapien
catgtctgggacaaacggcgtgttt

SEQ ID NO: 2087862 - DNA, 25 bp, Homo sapien
gggtctcgacctgcacgacgatgta

SEQ ID NO: 2087863 - DNA, 25 bp, Homo sapien
tctgacagacccgtgactgcttggg

SEQ ID NO: 2087864 - DNA, 25 bp, Homo sapien
tgtctcgctgtcatctgcaccggtg

SEQ ID NO: 2087865 - DNA, 25 bp, Homo sapien
tgcaccggtgaggatttcgagccat

SEQ ID NO: 2087866 - DNA, 25 bp, Homo sapien
taccaagagactgttgcccaagagg

SEQ ID NO: 2087867 - DNA, 25 bp, Homo sapien
aatactcctgtgagcatcgccagca

SEQ ID NO: 2087868 - DNA, 25 bp, Homo sapien
tcctgtgagcatcgccagcacaggc

SEQ ID NO: 2087869 - DNA, 25 bp, Homo sapien
tgtggggccatccgcagcctctcat

SEQ ID NO: 2087870 - DNA, 25 bp, Homo sapien
aaaatactcctgtgagcatcgccag

SEQ ID NO: 2087871 - DNA, 25 bp, Homo sapien
agggaagagacgagcgctgccccta

SEQ ID NO: 2087872 - DNA, 25 bp, Homo sapien
ctgcccctacgggagccacgctcct

SEQ ID NO: 2087873 - DNA, 25 bp, Homo sapien
agagacgagcgctgcccctacggga

SEQ ID NO: 2087874 - DNA, 25 bp, Homo sapien
ctggagggaagagacgagcgctgcc

SEQ ID NO: 2087875 - DNA, 25 bp, Homo sapien
gagtgaaacagagtcatggtacgga

SEQ ID NO: 2087876 - DNA, 25 bp, Homo sapien
tgagtgaaacagagtcatggtacgg

SEQ ID NO: 2087877 - DNA, 25 bp, Homo sapien
ctgagtgaaacagagtcatggtacg

SEQ ID NO: 2087878 - DNA, 25 bp, Homo sapien
agtgaaacagagtcatggtacggac

SEQ ID NO: 2087879 - DNA, 25 bp, Homo sapien
tgggcacatcttcccgcgcagtgac

SEQ ID NO: 2087880 - DNA, 25 bp, Homo sapien
catcttcccgcgcagtgacagagac

SEQ ID NO: 2087881 - DNA, 25 bp, Homo sapien
cacatcttcccgcgcagtgacagag

SEQ ID NO: 2087882 - DNA, 25 bp, Homo sapien
ggcacatcttcccgcgcagtgacag

SEQ ID NO: 2087883 - DNA, 25 bp, Homo sapien
gctttgcaaacttgtccgacttgca

SEQ ID NO: 2087884 - DNA, 25 bp, Homo sapien
cagcaggcgttctcggcattggtga

SEQ ID NO: 2087885 - DNA, 25 bp, Homo sapien
tggtgagcttggtgagcagaaactc

SEQ ID NO: 2087886 - DNA, 25 bp, Homo sapien
aacttgtccgacttgcagcaggcgt

SEQ ID NO: 2087887 - DNA, 25 bp, Homo sapien
ctgtgtgtgggcgtggagctcatcg

SEQ ID NO: 2087888 - DNA, 25 bp, Homo sapien
ctcatcgtgaaggttgtccaggagg

SEQ ID NO: 2087889 - DNA, 25 bp, Homo sapien
ccgtggcctccattctcaaacttgt

SEQ ID NO: 2087890 - DNA, 25 bp, Homo sapien
tggcctccattctcaaacttgtcct

SEQ ID NO: 2087891 - DNA, 25 bp, Homo sapien
gagatgcccccgctgaggctgccag

SEQ ID NO: 2087892 - DNA, 25 bp, Homo sapien
cactgtgcgacttcttctggccgcc

SEQ ID NO: 2087893 - DNA, 25 bp, Homo sapien
cgcccaccatggtctccatggagtg

SEQ ID NO: 2087894 - DNA, 25 bp, Homo sapien
agtggctgcgtacgcggatggccct

SEQ ID NO: 2087895 - DNA, 25 bp, Homo sapien
cgccccggggcctgccagcactcac

SEQ ID NO: 2087896 - DNA, 25 bp, Homo sapien
ttgccgccccggggcctgccagcac

SEQ ID NO: 2087897 - DNA, 25 bp, Homo sapien
tgccgccccggggcctgccagcact

SEQ ID NO: 2087898 - DNA, 25 bp, Homo sapien
ccgccccggggcctgccagcactca

SEQ ID NO: 2087899 - DNA, 25 bp, Homo sapien
gactggttcttcaccgttgccgcca

SEQ ID NO: 2087900 - DNA, 25 bp, Homo sapien
cggctgtcgccctggccttctgagc

SEQ ID NO: 2087901 - DNA, 25 bp, Homo sapien
gaagagccccgagcgtcgcttgatg

SEQ ID NO: 2087902 - DNA, 25 bp, Homo sapien
gatgggactccgtgactggttcttc

SEQ ID NO: 2087903 - DNA, 25 bp, Homo sapien
ggatgaggtctcagactttatctcc

SEQ ID NO: 2087904 - DNA, 25 bp, Homo sapien
tatctcctgagaggagtgtccacca

SEQ ID NO: 2087905 - DNA, 25 bp, Homo sapien
ggcagatttccggagagctgggatt

SEQ ID NO: 2087906 - DNA, 25 bp, Homo sapien
tttccggagagctgggattggatga

SEQ ID NO: 2087907 - DNA, 25 bp, Homo sapien
ggaggagcgggagatggcacggccg

SEQ ID NO: 2087908 - DNA, 25 bp, Homo sapien
gatggcacggccgttttccttcaac

SEQ ID NO: 2087909 - DNA, 25 bp, Homo sapien
cgggagatggcacggccgttttcct

SEQ ID NO: 2087910 - DNA, 25 bp, Homo sapien
ggagcgggagatggcacggccgttt

SEQ ID NO: 2087911 - DNA, 25 bp, Homo sapien
tgtagacaaacacctcctgcttgaa

SEQ ID NO: 2087912 - DNA, 25 bp, Homo sapien
cttgaagggtgaggtcgtggacggc

SEQ ID NO: 2087913 - DNA, 25 bp, Homo sapien
gtgggactccggctcatgatgatcg

SEQ ID NO: 2087914 - DNA, 25 bp, Homo sapien
gtgaggtcgtggacggctggctgcc

SEQ ID NO: 2087915 - DNA, 25 bp, Homo sapien
gctgagcttgtcaaagcggaatttc

SEQ ID NO: 2087916 - DNA, 25 bp, Homo sapien
tgtcaaagcggaatttcaggttcga

SEQ ID NO: 2087917 - DNA, 25 bp, Homo sapien
caggttcgatctcggggagtttctg

SEQ ID NO: 2087918 - DNA, 25 bp, Homo sapien
caaagcggaatttcaggttcgatct

SEQ ID NO: 2087919 - DNA, 25 bp, Homo sapien
gacctggagctctcgatagtctggt

SEQ ID NO: 2087920 - DNA, 25 bp, Homo sapien
gacctggagctctcgatagtctgga

SEQ ID NO: 2087921 - DNA, 25 bp, Homo sapien
ctctcgatagtctggagagctcagg

SEQ ID NO: 2087922 - DNA, 25 bp, Homo sapien
tctcgatagtctggtgagctcagga

SEQ ID NO: 2087923 - DNA, 25 bp, Homo sapien
ttggacaggcgaaggactccacttt

SEQ ID NO: 2087924 - DNA, 25 bp, Homo sapien
ggacaggcgaaggactccactttca

SEQ ID NO: 2087925 - DNA, 25 bp, Homo sapien
acaggcgaaggactccactttcaca

SEQ ID NO: 2087926 - DNA, 25 bp, Homo sapien
cttggacaggcgaaggactccactt

SEQ ID NO: 2087927 - DNA, 25 bp, Homo sapien
cataaatcaggttgaacacagagtg

SEQ ID NO: 2087928 - DNA, 25 bp, Homo sapien
ggcagtggcgtccagagtgcgtgat

SEQ ID NO: 2087929 - DNA, 25 bp, Homo sapien
gaagctgcgcatagccacggctttg

SEQ ID NO: 2087930 - DNA, 25 bp, Homo sapien
gtgaaggtccatatgcccatttgtc

SEQ ID NO: 2087931 - DNA, 25 bp, Homo sapien
ctacagctcactggatacactcagg

SEQ ID NO: 2087932 - DNA, 25 bp, Homo sapien
gggaacacgcctgcccatggctaca

SEQ ID NO: 2087933 - DNA, 25 bp, Homo sapien
ggcacctgatgtaagggtgccccac

SEQ ID NO: 2087934 - DNA, 25 bp, Homo sapien
gatgagcgaacattccgtacaggaa

SEQ ID NO: 2087935 - DNA, 25 bp, Homo sapien
tttccaggacagaagaggggattcc

SEQ ID NO: 2087936 - DNA, 25 bp, Homo sapien
ccttttccaggacagaagaggggat

SEQ ID NO: 2087937 - DNA, 25 bp, Homo sapien
ttttccaggacagaagaggggattc

SEQ ID NO: 2087938 - DNA, 25 bp, Homo sapien
cttttccaggacagaagaggggatt

SEQ ID NO: 2087939 - DNA, 25 bp, Homo sapien
cagggtcgtggacggcactcccaaa

SEQ ID NO: 2087940 - DNA, 25 bp, Homo sapien
gtcagggtcgtggacggcactccca

SEQ ID NO: 2087941 - DNA, 25 bp, Homo sapien
tcagggtcgtggacggcactcccaa

SEQ ID NO: 2087942 - DNA, 25 bp, Homo sapien
ggtcgtggacggcactcccaaactg

SEQ ID NO: 2087943 - DNA, 25 bp, Homo sapien
gagggcatgtaggtgagggcggagg

SEQ ID NO: 2087944 - DNA, 25 bp, Homo sapien
gcctcgtccagagatgggaggggct

SEQ ID NO: 2087945 - DNA, 25 bp, Homo sapien
ggcatgtaggtgagggcggaggcag

SEQ ID NO: 2087946 - DNA, 25 bp, Homo sapien
aggcctcgtccagagatgggagggg

SEQ ID NO: 2087947 - DNA, 25 bp, Homo sapien
tgtggccaagaccctcaccgaggct

SEQ ID NO: 2087948 - DNA, 25 bp, Homo sapien
ataaaggacccggacatcacactgg

SEQ ID NO: 2087949 - DNA, 25 bp, Homo sapien
aagaccctcaccgaggctctgctcc

SEQ ID NO: 2087950 - DNA, 25 bp, Homo sapien
gaataggatgataaaggacccggac

SEQ ID NO: 2087951 - DNA, 25 bp, Homo sapien
gatggcctcaaggatgctacgaatc

SEQ ID NO: 2087952 - DNA, 25 bp, Homo sapien
tacgaatcttggctcctgggaacat

SEQ ID NO: 2087953 - DNA, 25 bp, Homo sapien
ccgagtgcgttcctggtagtaaagc

SEQ ID NO: 2087954 - DNA, 25 bp, Homo sapien
ggcaatagcgccgaattttatcagg

SEQ ID NO: 2087955 - DNA, 25 bp, Homo sapien
cctgggcctacgtcagcagatggga

SEQ ID NO: 2087956 - DNA, 25 bp, Homo sapien
aagtgtgcagcgcagttctggcccg

SEQ ID NO: 2087957 - DNA, 25 bp, Homo sapien
ttcagcacagaagcagatagacggt

SEQ ID NO: 2087958 - DNA, 25 bp, Homo sapien
gatagacggtttagagctccagagc

SEQ ID NO: 2087959 - DNA, 25 bp, Homo sapien
aacacagcagcatctcagcactggc

SEQ ID NO: 2087960 - DNA, 25 bp, Homo sapien
ctctctcctcgagtaagtggggagg

SEQ ID NO: 2087961 - DNA, 25 bp, Homo sapien
aggttttcctcaaccaacacagcag

SEQ ID NO: 2087962 - DNA, 25 bp, Homo sapien
gggagataacgacgtcttccttgaa

SEQ ID NO: 2087963 - DNA, 25 bp, Homo sapien
cgtaagctgctgagggacactgtgc

SEQ ID NO: 2087964 - DNA, 25 bp, Homo sapien
aggggcctgatcagaacccgcaagt

SEQ ID NO: 2087965 - DNA, 25 bp, Homo sapien
cccaagactccaggggcgtaagctg

SEQ ID NO: 2087966 - DNA, 25 bp, Homo sapien
ggcacagtagctggaaaaggcccca

SEQ ID NO: 2087967 - DNA, 25 bp, Homo sapien
tccaggttgcagaaacccttcagat

SEQ ID NO: 2087968 - DNA, 25 bp, Homo sapien
ggtccaggttgcagaaacccttcag

SEQ ID NO: 2087969 - DNA, 25 bp, Homo sapien
gtccaggttgcagaaacccttcaga

SEQ ID NO: 2087970 - DNA, 25 bp, Homo sapien
gggtccaggttgcagaaacccttca

SEQ ID NO: 2087971 - DNA, 25 bp, Homo sapien
gcatgtgggtcacagggtctgaccc

SEQ ID NO: 2087972 - DNA, 25 bp, Homo sapien
ggtggcatgtgggtcacagggtctg

SEQ ID NO: 2087973 - DNA, 25 bp, Homo sapien
atgtgggtcacagggtctgacccac

SEQ ID NO: 2087974 - DNA, 25 bp, Homo sapien
gtgggtcacagggtctgacccacac

SEQ ID NO: 2087975 - DNA, 25 bp, Homo sapien
catcggcagagaagcccacggcgct

SEQ ID NO: 2087976 - DNA, 25 bp, Homo sapien
tgcagactcggaagggggagaagcc

SEQ ID NO: 2087977 - DNA, 25 bp, Homo sapien
agcccacggcgctgcagactcggaa

SEQ ID NO: 2087978 - DNA, 25 bp, Homo sapien
ccaacccgggcccatcggcagagaa

SEQ ID NO: 2087979 - DNA, 25 bp, Homo sapien
tgcagccccgtctgcactgaaaggg

SEQ ID NO: 2087980 - DNA, 25 bp, Homo sapien
ggaaatccttgtcattggtcgtggg

SEQ ID NO: 2087981 - DNA, 25 bp, Homo sapien
agtgtcactctgcagccccgtctgc

SEQ ID NO: 2087982 - DNA, 25 bp, Homo sapien
tggaaatccttgtcattggtcgtgg

SEQ ID NO: 2087983 - DNA, 25 bp, Homo sapien
cattccaacagcaaaccgggcatgg

SEQ ID NO: 2087984 - DNA, 25 bp, Homo sapien
gaccccagatggcaatgtgacacgg

SEQ ID NO: 2087985 - DNA, 25 bp, Homo sapien
tattcaaccaaccatgtaggcgctg

SEQ ID NO: 2087986 - DNA, 25 bp, Homo sapien
gagccagagatgtgtcccggaaaac

SEQ ID NO: 2087987 - DNA, 25 bp, Homo sapien
aatcaaagacgatggcaattaaatt

SEQ ID NO: 2087988 - DNA, 25 bp, Homo sapien
cttccaagcagaaatgtcacaaaat

SEQ ID NO: 2087989 - DNA, 25 bp, Homo sapien
cccagggctggtaaggcacaggaca

SEQ ID NO: 2087990 - DNA, 25 bp, Homo sapien
ggcaattaaattccagtcttccagc

SEQ ID NO: 2087991 - DNA, 25 bp, Homo sapien
aaagtcgtcgtcacatggagcatca

SEQ ID NO: 2087992 - DNA, 25 bp, Homo sapien
taggcagttgggatctacgaatcac

SEQ ID NO: 2087993 - DNA, 25 bp, Homo sapien
gggaatctgcacattcacacgccag

SEQ ID NO: 2087994 - DNA, 25 bp, Homo sapien
agttcttaggttcgaccacacaggg

SEQ ID NO: 2087995 - DNA, 25 bp, Homo sapien
cacaaaatatgttatttattgtcaa

SEQ ID NO: 2087996 - DNA, 25 bp, Homo sapien
acaaaatatgttatttattgtcaat

SEQ ID NO: 2087997 - DNA, 25 bp, Homo sapien
caaaatatgttatttattgtcaatt

SEQ ID NO: 2087998 - DNA, 25 bp, Homo sapien
tgaaggtccggtacttggtcttcca

SEQ ID NO: 2087999 - DNA, 25 bp, Homo sapien
gtatcctgtttactgtgggatgcgg

SEQ ID NO: 2088000 - DNA, 25 bp, Homo sapien
ggatgcgggtgcaagaaggcccttg

SEQ ID NO: 2088001 - DNA, 25 bp, Homo sapien
tcccactcgcccagcgtggtctcct

SEQ ID NO: 2088002 - DNA, 25 bp, Homo sapien
cctggccgtgatggcgtatgatcgc

SEQ ID NO: 2088003 - DNA, 25 bp, Homo sapien
tttgtcaccaacacaatccccaaga

SEQ ID NO: 2088004 - DNA, 25 bp, Homo sapien
tggacaacctcatcctggccgtgat

SEQ ID NO: 2088005 - DNA, 25 bp, Homo sapien
ttcctggccaacctctccttcactg

SEQ ID NO: 2088006 - DNA, 25 bp, Homo sapien
aaaaagaattccaaggccaggctca

SEQ ID NO: 2088007 - DNA, 25 bp, Homo sapien
ctcatgactataatcaaaccacttt

SEQ ID NO: 2088008 - DNA, 25 bp, Homo sapien
ataatcaaaccactttgggaagaca

SEQ ID NO: 2088009 - DNA, 25 bp, Homo sapien
actgcaccctgctgaagctattttt

SEQ ID NO: 2088010 - DNA, 25 bp, Homo sapien
cacactggtaagtcagcagccgtca

SEQ ID NO: 2088011 - DNA, 25 bp, Homo sapien
tcagcatcaaggtgagatcttccac

SEQ ID NO: 2088012 - DNA, 25 bp, Homo sapien
gagtcaactgatatggccaacttta

SEQ ID NO: 2088013 - DNA, 25 bp, Homo sapien
aatgttgtcaggcagcatcgcatgc

SEQ ID NO: 2088014 - DNA, 25 bp, Homo sapien
agttccctcatctccatttgcttat

SEQ ID NO: 2088015 - DNA, 25 bp, Homo sapien
atctccatttgcttattctgctgtg

SEQ ID NO: 2088016 - DNA, 25 bp, Homo sapien
catttgcttattctgctgtgacttc

SEQ ID NO: 2088017 - DNA, 25 bp, Homo sapien
tctgctgtgacttcaaattaaccat

SEQ ID NO: 2088018 - DNA, 25 bp, Homo sapien
gacatcctggaccattccggacaga

SEQ ID NO: 2088019 - DNA, 25 bp, Homo sapien
tcctggaccattccggacagacaga

SEQ ID NO: 2088020 - DNA, 25 bp, Homo sapien
gaccattccggacagacagagtggg

SEQ ID NO: 2088021 - DNA, 25 bp, Homo sapien
aggagtcccaccctgacatcctgga

SEQ ID NO: 2088022 - DNA, 25 bp, Homo sapien
gctccctgttcatcccgtttcttca

SEQ ID NO: 2088023 - DNA, 25 bp, Homo sapien
tgctccctgttcatcccgtttcttc

SEQ ID NO: 2088024 - DNA, 25 bp, Homo sapien
ctccctgttcatcccgtttcttcat

SEQ ID NO: 2088025 - DNA, 25 bp, Homo sapien
gtgctccctgttcatcccgtttctt

SEQ ID NO: 2088026 - DNA, 25 bp, Homo sapien
aagaagaatataatgcaccttaaca

SEQ ID NO: 2088027 - DNA, 25 bp, Homo sapien
taagaagaatataatgcaccttaac

SEQ ID NO: 2088028 - DNA, 25 bp, Homo sapien
ttaagaagaatataatgcaccttaa

SEQ ID NO: 2088029 - DNA, 25 bp, Homo sapien
agaagaatataatgcaccttaacac

SEQ ID NO: 2088030 - DNA, 25 bp, Homo sapien
ctgctcaggttggatggaaggccca

SEQ ID NO: 2088031 - DNA, 25 bp, Homo sapien
cattgacttgcgtgttggagcaggc

SEQ ID NO: 2088032 - DNA, 25 bp, Homo sapien
cataagcaaggtgtgcaacgtggca

SEQ ID NO: 2088033 - DNA, 25 bp, Homo sapien
gagagtgtcagcagaccaaggcaac

SEQ ID NO: 2088034 - DNA, 25 bp, Homo sapien
ggatggtggagacgattcttgcaca

SEQ ID NO: 2088035 - DNA, 25 bp, Homo sapien
gagacgattcttgcacaggacatga

SEQ ID NO: 2088036 - DNA, 25 bp, Homo sapien
gatgagcccgcccatgaaaaacatc

SEQ ID NO: 2088037 - DNA, 25 bp, Homo sapien
atgagcccgcccatgaaaaacatca

SEQ ID NO: 2088038 - DNA, 25 bp, Homo sapien
cagggttccccctcatgtctctgtt

SEQ ID NO: 2088039 - DNA, 25 bp, Homo sapien
gttatgattcgtcaatgggcacaag

SEQ ID NO: 2088040 - DNA, 25 bp, Homo sapien
catgacagtgtccttcacagtgtta

SEQ ID NO: 2088041 - DNA, 25 bp, Homo sapien
cggtaaaatgccaactattactatt

SEQ ID NO: 2088042 - DNA, 25 bp, Homo sapien
gccactgatttagagtgatatttca

SEQ ID NO: 2088043 - DNA, 25 bp, Homo sapien
tagagtgatatttcattatcaactt

SEQ ID NO: 2088044 - DNA, 25 bp, Homo sapien
taagccactgatttagagtgatatt

SEQ ID NO: 2088045 - DNA, 25 bp, Homo sapien
ttaagccactgatttagagtgatat

SEQ ID NO: 2088046 - DNA, 25 bp, Homo sapien
tcttgcccacacagaacactgacgc

SEQ ID NO: 2088047 - DNA, 25 bp, Homo sapien
ctgctatttgtggaatcttcgtcaa

SEQ ID NO: 2088048 - DNA, 25 bp, Homo sapien
gatgagccttcagccatacggttcc

SEQ ID NO: 2088049 - DNA, 25 bp, Homo sapien
gaacactgacgccttagaaggatga

SEQ ID NO: 2088050 - DNA, 25 bp, Homo sapien
cacctgccatgtttagggatgttca

SEQ ID NO: 2088051 - DNA, 25 bp, Homo sapien
cacatctgccagaatggtgttcagg

SEQ ID NO: 2088052 - DNA, 25 bp, Homo sapien
tggagctgttgatgccacatctgcc

SEQ ID NO: 2088053 - DNA, 25 bp, Homo sapien
taaaaatagggcaagtgagcctgca

SEQ ID NO: 2088054 - DNA, 25 bp, Homo sapien
agggccagtgacttctgctgagaaa

SEQ ID NO: 2088055 - DNA, 25 bp, Homo sapien
gggccagtgacttctgctgagaaac

SEQ ID NO: 2088056 - DNA, 25 bp, Homo sapien
cttgtgctcttagatccttcctggc

SEQ ID NO: 2088057 - DNA, 25 bp, Homo sapien
caggtcaatgagcttgtgctcctct

SEQ ID NO: 2088058 - DNA, 25 bp, Homo sapien
ggcttcttctgtgatttgggaccgc

SEQ ID NO: 2088059 - DNA, 25 bp, Homo sapien
tctgacgcccaggtcaatgagcttg

SEQ ID NO: 2088060 - DNA, 25 bp, Homo sapien
aagtcttctcgccatgactcgcacc

SEQ ID NO: 2088061 - DNA, 25 bp, Homo sapien
gcaccttcctcatattccggctttc

SEQ ID NO: 2088062 - DNA, 25 bp, Homo sapien
gccatgactcgcaccttcctcatat

SEQ ID NO: 2088063 - DNA, 25 bp, Homo sapien
gactcgcaccttcctcatattccgg

SEQ ID NO: 2088064 - DNA, 25 bp, Homo sapien
gccagcttgtcgtgtgcagatatct

SEQ ID NO: 2088065 - DNA, 25 bp, Homo sapien
cgcagggtgtttggcacagctctac

SEQ ID NO: 2088066 - DNA, 25 bp, Homo sapien
tatccagacccagagcaggtccatt

SEQ ID NO: 2088067 - DNA, 25 bp, Homo sapien
caggtccatttcctacgcagggtgt

SEQ ID NO: 2088068 - DNA, 25 bp, Homo sapien
gatgaacttgctccccaagagatgg

SEQ ID NO: 2088069 - DNA, 25 bp, Homo sapien
ttaaagtggacgtcagaacaggaca

SEQ ID NO: 2088070 - DNA, 25 bp, Homo sapien
caagagatggttggccagcacctta

SEQ ID NO: 2088071 - DNA, 25 bp, Homo sapien
tgaaggcgaatgtcagcacagatgg

SEQ ID NO: 2088072 - DNA, 25 bp, Homo sapien
gacaatgatgcatagtaatggcaaa

SEQ ID NO: 2088073 - DNA, 25 bp, Homo sapien
taactggtcagagggcggaaataca

SEQ ID NO: 2088074 - DNA, 25 bp, Homo sapien
aagactgtggaaaagacctgaacat

SEQ ID NO: 2088075 - DNA, 25 bp, Homo sapien
tgaatagactcttggtagatggaac

SEQ ID NO: 2088076 - DNA, 25 bp, Homo sapien
cttgctgaagagtttctgtagggct

SEQ ID NO: 2088077 - DNA, 25 bp, Homo sapien
ttgctgaagagtttctgtagggctg

SEQ ID NO: 2088078 - DNA, 25 bp, Homo sapien
gcggaaatacgtgcccatgactgta

SEQ ID NO: 2088079 - DNA, 25 bp, Homo sapien
tatagctgtctgtgttacccaaggc

SEQ ID NO: 2088080 - DNA, 25 bp, Homo sapien
taatacaaagagacaaccgtgaggt

SEQ ID NO: 2088081 - DNA, 25 bp, Homo sapien
ccaaaagagatggatttgctgccca

SEQ ID NO: 2088082 - DNA, 25 bp, Homo sapien
ttacgaggagattctcttgttgaag

SEQ ID NO: 2088083 - DNA, 25 bp, Homo sapien
tgttgaagagtttccgcagggcagc

SEQ ID NO: 2088084 - DNA, 25 bp, Homo sapien
ttgttgaagagtttccgcagggcag

SEQ ID NO: 2088085 - DNA, 25 bp, Homo sapien
tgctctcagagttcactggttcggc

SEQ ID NO: 2088086 - DNA, 25 bp, Homo sapien
tgtgctgctctcagagttcactggt

SEQ ID NO: 2088087 - DNA, 25 bp, Homo sapien
agagttcactggttcggctgcctcc

SEQ ID NO: 2088088 - DNA, 25 bp, Homo sapien
ctcagagttcactggttcggctgcc

SEQ ID NO: 2088089 - DNA, 25 bp, Homo sapien
ggacacgaagataagcaaaatcaac

SEQ ID NO: 2088090 - DNA, 25 bp, Homo sapien
gccctcatttgaataaggacacgaa

SEQ ID NO: 2088091 - DNA, 25 bp, Homo sapien
tttgaataaggacacgaagataagc

SEQ ID NO: 2088092 - DNA, 25 bp, Homo sapien
tattaagtgccctcatttgaataag

SEQ ID NO: 2088093 - DNA, 25 bp, Homo sapien
ggaggccatagagaacagacagccc

SEQ ID NO: 2088094 - DNA, 25 bp, Homo sapien
gaggccatagagaacagacagcccc

SEQ ID NO: 2088095 - DNA, 25 bp, Homo sapien
aaggatggttctgacaatacgtaca

SEQ ID NO: 2088096 - DNA, 25 bp, Homo sapien
agggttcatcataggtgtcagcaca

SEQ ID NO: 2088097 - DNA, 25 bp, Homo sapien
caatacgtacataggatgtggtcat

SEQ ID NO: 2088098 - DNA, 25 bp, Homo sapien
aatgatgtgggtgttggaacatgcc

SEQ ID NO: 2088099 - DNA, 25 bp, Homo sapien
gtattttaataatcaagtagggctg

SEQ ID NO: 2088100 - DNA, 25 bp, Homo sapien
taataatcaagtagggctgctgcat

SEQ ID NO: 2088101 - DNA, 25 bp, Homo sapien
caggagtattttaataatcaagtag

SEQ ID NO: 2088102 - DNA, 25 bp, Homo sapien
ttttaataatcaagtagggctgctg

SEQ ID NO: 2088103 - DNA, 25 bp, Homo sapien
ttgtaagatgacaagaagataagca

SEQ ID NO: 2088104 - DNA, 25 bp, Homo sapien
taagatgacaagaagataagcaaaa

SEQ ID NO: 2088105 - DNA, 25 bp, Homo sapien
caaatgtttacaaggtgtcctcaat

SEQ ID NO: 2088106 - DNA, 25 bp, Homo sapien
caaggtgtcctcaatttgtaagatg

SEQ ID NO: 2088107 - DNA, 25 bp, Homo sapien
actctgaaccttcactctggttgcc

SEQ ID NO: 2088108 - DNA, 25 bp, Homo sapien
gaaccttcactctggttgcctccat

SEQ ID NO: 2088109 - DNA, 25 bp, Homo sapien
tgaaccttcactctggttgcctcca

SEQ ID NO: 2088110 - DNA, 25 bp, Homo sapien
tctgaaccttcactctggttgcctc

SEQ ID NO: 2088111 - DNA, 25 bp, Homo sapien
agtggaggggacggcagatggccac

SEQ ID NO: 2088112 - DNA, 25 bp, Homo sapien
ctgtgacatagtggaggggacggca

SEQ ID NO: 2088113 - DNA, 25 bp, Homo sapien
tggaggggacggcagatggccacat

SEQ ID NO: 2088114 - DNA, 25 bp, Homo sapien
gtgacatagtggaggggacggcaga

SEQ ID NO: 2088115 - DNA, 25 bp, Homo sapien
ggagaggagcaagatacagagccca

SEQ ID NO: 2088116 - DNA, 25 bp, Homo sapien
caaggagaggagcaagatacagagc

SEQ ID NO: 2088117 - DNA, 25 bp, Homo sapien
cacaaggagaggagcaagatacaga

SEQ ID NO: 2088118 - DNA, 25 bp, Homo sapien
ccaacacaaggagaggagcaagata

SEQ ID NO: 2088119 - DNA, 25 bp, Homo sapien
gtcatgaggaggatatggatgaggc

SEQ ID NO: 2088120 - DNA, 25 bp, Homo sapien
gaggaggatatggatgaggccatag

SEQ ID NO: 2088121 - DNA, 25 bp, Homo sapien
aggatatggatgaggccatagaggg

SEQ ID NO: 2088122 - DNA, 25 bp, Homo sapien
catgaggaggatatggatgaggcca

SEQ ID NO: 2088123 - DNA, 25 bp, Homo sapien
agaggtagtggatcttttgagaccc

SEQ ID NO: 2088124 - DNA, 25 bp, Homo sapien
gcccgtggcaaccagtactgtgtgg

SEQ ID NO: 2088125 - DNA, 25 bp, Homo sapien
gctttgtacttcccagtggctgagg

SEQ ID NO: 2088126 - DNA, 25 bp, Homo sapien
ggatggctctgacaatgcgggcgta

SEQ ID NO: 2088127 - DNA, 25 bp, Homo sapien
ggcgtaggatgtgatcatgaaacct

SEQ ID NO: 2088128 - DNA, 25 bp, Homo sapien
tccttcatggagtaggtttggaggg

SEQ ID NO: 2088129 - DNA, 25 bp, Homo sapien
tgtggctactgagtccttcatggag

SEQ ID NO: 2088130 - DNA, 25 bp, Homo sapien
tgagtccttcatggagtaggtttgg

SEQ ID NO: 2088131 - DNA, 25 bp, Homo sapien
tactgagtccttcatggagtaggtt

SEQ ID NO: 2088132 - DNA, 25 bp, Homo sapien
tttccttggcgaagtcttcccagag

SEQ ID NO: 2088133 - DNA, 25 bp, Homo sapien
ttttccttggcgaagtcttcccaga

SEQ ID NO: 2088134 - DNA, 25 bp, Homo sapien
tcgctccagcgaagtccttgagcct

SEQ ID NO: 2088135 - DNA, 25 bp, Homo sapien
agcggggaaccctcgctccagcgaa

SEQ ID NO: 2088136 - DNA, 25 bp, Homo sapien
cagcgaagtccttgagcctcgtcat

SEQ ID NO: 2088137 - DNA, 25 bp, Homo sapien
cactgcatcaggcagcggggaaccc

SEQ ID NO: 2088138 - DNA, 25 bp, Homo sapien
tccttgtgagaaagtctaaatacca

SEQ ID NO: 2088139 - DNA, 25 bp, Homo sapien
agccagggctagaggcaaagccttc

SEQ ID NO: 2088140 - DNA, 25 bp, Homo sapien
gacatcatctgccgtaacaacctgc

SEQ ID NO: 2088141 - DNA, 25 bp, Homo sapien
catcgttgccatgagtatgaagggc

SEQ ID NO: 2088142 - DNA, 25 bp, Homo sapien
gcaaggtctccatcatggtgggcac

SEQ ID NO: 2088143 - DNA, 25 bp, Homo sapien
cacattcgccgttcattaacctcat

SEQ ID NO: 2088144 - DNA, 25 bp, Homo sapien
tttgaacagggagtaggacattgag

SEQ ID NO: 2088145 - DNA, 25 bp, Homo sapien
agtgtgaagggctggaggttttgca

SEQ ID NO: 2088146 - DNA, 25 bp, Homo sapien
agagctgcttgttccgcacaccaaa

SEQ ID NO: 2088147 - DNA, 25 bp, Homo sapien
tgcttgttccgcacaccaaatgctc

SEQ ID NO: 2088148 - DNA, 25 bp, Homo sapien
aaccaccttcttgagtatccagagc

SEQ ID NO: 2088149 - DNA, 25 bp, Homo sapien
gagtatccagagctgcttgttccgc

SEQ ID NO: 2088150 - DNA, 25 bp, Homo sapien
ggtttccataaggatggccgccagg

SEQ ID NO: 2088151 - DNA, 25 bp, Homo sapien
cctccaatggtagtgacgtaagcaa

SEQ ID NO: 2088152 - DNA, 25 bp, Homo sapien
gatatgaaatggctcagcatggcag

SEQ ID NO: 2088153 - DNA, 25 bp, Homo sapien
ccacatctggcagggacaagttccc

SEQ ID NO: 2088154 - DNA, 25 bp, Homo sapien
gggcaacagtttgggtcagtgcatt

SEQ ID NO: 2088155 - DNA, 25 bp, Homo sapien
caacagtttgggtcagtgcattggt

SEQ ID NO: 2088156 - DNA, 25 bp, Homo sapien
aacagtttgggtcagtgcattggtg

SEQ ID NO: 2088157 - DNA, 25 bp, Homo sapien
gcaacagtttgggtcagtgcattgg

SEQ ID NO: 2088158 - DNA, 25 bp, Homo sapien
tgctgctacaaacagcaactgccca

SEQ ID NO: 2088159 - DNA, 25 bp, Homo sapien
cagcaactgcccattgagatgaaca

SEQ ID NO: 2088160 - DNA, 25 bp, Homo sapien
gtgggaactacacgtggagaaggct

SEQ ID NO: 2088161 - DNA, 25 bp, Homo sapien
aactgcccattgagatgaacactgg

SEQ ID NO: 2088162 - DNA, 25 bp, Homo sapien
ccttgtgtagctgaagacgcccgtc

SEQ ID NO: 2088163 - DNA, 25 bp, Homo sapien
gtgtagctgaagacgcccgtcccat

SEQ ID NO: 2088164 - DNA, 25 bp, Homo sapien
agccttgtgtagctgaagacgcccg

SEQ ID NO: 2088165 - DNA, 25 bp, Homo sapien
ttgtgtagctgaagacgcccgtccc

SEQ ID NO: 2088166 - DNA, 25 bp, Homo sapien
agtgttgaggatgccaatgcccttg

SEQ ID NO: 2088167 - DNA, 25 bp, Homo sapien
gtgttgaggatgccaatgcccttgt

SEQ ID NO: 2088168 - DNA, 25 bp, Homo sapien
tgttgaggatgccaatgcccttgtc

SEQ ID NO: 2088169 - DNA, 25 bp, Homo sapien
ccgacgtccagcagagatgtccagt

SEQ ID NO: 2088170 - DNA, 25 bp, Homo sapien
cagcagagatgtccagtagatgagt

SEQ ID NO: 2088171 - DNA, 25 bp, Homo sapien
cgacgtccagcagagatgtccagta

SEQ ID NO: 2088172 - DNA, 25 bp, Homo sapien
agatgtccagtagatgagtgggttc

SEQ ID NO: 2088173 - DNA, 25 bp, Homo sapien
cagcatcggaggaacagtgactgat

SEQ ID NO: 2088174 - DNA, 25 bp, Homo sapien
gccagcatcggaggaacagtgactg

SEQ ID NO: 2088175 - DNA, 25 bp, Homo sapien
gcatcggaggaacagtgactgatgc

SEQ ID NO: 2088176 - DNA, 25 bp, Homo sapien
atcggaggaacagtgactgatgcac

SEQ ID NO: 2088177 - DNA, 25 bp, Homo sapien
ctattaagaggtgacagtccacccc

SEQ ID NO: 2088178 - DNA, 25 bp, Homo sapien
tattaagaggtgacagtccacccca

SEQ ID NO: 2088179 - DNA, 25 bp, Homo sapien
taagaggtgacagtccaccccagcc

SEQ ID NO: 2088180 - DNA, 25 bp, Homo sapien
gaggtggggaaagaagagctgtgaa

SEQ ID NO: 2088181 - DNA, 25 bp, Homo sapien
ggacttcacagctcatgcgagtgct

SEQ ID NO: 2088182 - DNA, 25 bp, Homo sapien
ctcatgcgagtgctgttggtgagaa

SEQ ID NO: 2088183 - DNA, 25 bp, Homo sapien
ttcacagctcatgcgagtgctgttg

SEQ ID NO: 2088184 - DNA, 25 bp, Homo sapien
gagtgctgttggtgagaagctgaca

SEQ ID NO: 2088185 - DNA, 25 bp, Homo sapien
gaagtcaagcgcagacacagccact

SEQ ID NO: 2088186 - DNA, 25 bp, Homo sapien
ggatcactcctatgaaggtggcccc

SEQ ID NO: 2088187 - DNA, 25 bp, Homo sapien
gatcatggggatcactcctatgaag

SEQ ID NO: 2088188 - DNA, 25 bp, Homo sapien
agaagtcaagcgcagacacagccac

SEQ ID NO: 2088189 - DNA, 25 bp, Homo sapien
agcggatttgtaatattgcagctgt

SEQ ID NO: 2088190 - DNA, 25 bp, Homo sapien
gagcggatttgtaatattgcagctg

SEQ ID NO: 2088191 - DNA, 25 bp, Homo sapien
gctgagcggatttgtaatattgcag

SEQ ID NO: 2088192 - DNA, 25 bp, Homo sapien
ctgagcggatttgtaatattgcagc

SEQ ID NO: 2088193 - DNA, 25 bp, Homo sapien
agggtgccctgcacatcagggttct

SEQ ID NO: 2088194 - DNA, 25 bp, Homo sapien
gttcagcatgggactgaggatagtg

SEQ ID NO: 2088195 - DNA, 25 bp, Homo sapien
cctgtcagcacccttttcagggtgc

SEQ ID NO: 2088196 - DNA, 25 bp, Homo sapien
gaggatcccaatccccttatctttg

SEQ ID NO: 2088197 - DNA, 25 bp, Homo sapien
tggaaagaggtaagaaggtccacca

SEQ ID NO: 2088198 - DNA, 25 bp, Homo sapien
gatggacaagatgactgcctctaaa

SEQ ID NO: 2088199 - DNA, 25 bp, Homo sapien
taaaggtgaggatgacgggacactc

SEQ ID NO: 2088200 - DNA, 25 bp, Homo sapien
ggtccaccagggctattctcttaag

SEQ ID NO: 2088201 - DNA, 25 bp, Homo sapien
gcagcccccgtgctgtacgtagtag

SEQ ID NO: 2088202 - DNA, 25 bp, Homo sapien
cccccgtgctgtacgtagtagtcat

SEQ ID NO: 2088203 - DNA, 25 bp, Homo sapien
tcagcagcccccgtgctgtacgtag

SEQ ID NO: 2088204 - DNA, 25 bp, Homo sapien
agcccccgtgctgtacgtagtagtc

SEQ ID NO: 2088205 - DNA, 25 bp, Homo sapien
gattcctctgctcggggaagagctc

SEQ ID NO: 2088206 - DNA, 25 bp, Homo sapien
taattccactgtgagcagtgaagtg

SEQ ID NO: 2088207 - DNA, 25 bp, Homo sapien
tcctaattccactgtgagcagtgaa

SEQ ID NO: 2088208 - DNA, 25 bp, Homo sapien
gcagtgaagtggagctgcgggtgcc

SEQ ID NO: 2088209 - DNA, 25 bp, Homo sapien
gcaaagggggagttacagcaggtgt

SEQ ID NO: 2088210 - DNA, 25 bp, Homo sapien
caaagggggagttacagcaggtgtg

SEQ ID NO: 2088211 - DNA, 25 bp, Homo sapien
aagggggagttacagcaggtgtgcc

SEQ ID NO: 2088212 - DNA, 25 bp, Homo sapien
aggcaaagggggagttacagcaggt

SEQ ID NO: 2088213 - DNA, 25 bp, Homo sapien
tggtaaagcagacgtccacgaggct

SEQ ID NO: 2088214 - DNA, 25 bp, Homo sapien
cacgcctggaaggatatggcctggc

SEQ ID NO: 2088215 - DNA, 25 bp, Homo sapien
ccatgctcaggttgctcagggcgtt

SEQ ID NO: 2088216 - DNA, 25 bp, Homo sapien
gtacatctcggcaaagcacgcctgg

SEQ ID NO: 2088217 - DNA, 25 bp, Homo sapien
tccgaggtcgccaagctcagcatca

SEQ ID NO: 2088218 - DNA, 25 bp, Homo sapien
ccaggccctcggagaagatggccgt

SEQ ID NO: 2088219 - DNA, 25 bp, Homo sapien
agatggccgtctccgcggcggacgt

SEQ ID NO: 2088220 - DNA, 25 bp, Homo sapien
cggacgtgtccgaggtcgccaagct

SEQ ID NO: 2088221 - DNA, 25 bp, Homo sapien
caggatgcgcgcgtaggaaaaggaa

SEQ ID NO: 2088222 - DNA, 25 bp, Homo sapien
ggatgcgcgcgtaggaaaaggaaca

SEQ ID NO: 2088223 - DNA, 25 bp, Homo sapien
aggatgcgcgcgtaggaaaaggaac

SEQ ID NO: 2088224 - DNA, 25 bp, Homo sapien
ggccccgcaggtggagaaggcgcgg

SEQ ID NO: 2088225 - DNA, 25 bp, Homo sapien
cgccggccgccggcaagccgagcac

SEQ ID NO: 2088226 - DNA, 25 bp, Homo sapien
cggcgccggccgccggcaagccgag

SEQ ID NO: 2088227 - DNA, 25 bp, Homo sapien
gtggagaaggcgcggcgccggccgc

SEQ ID NO: 2088228 - DNA, 25 bp, Homo sapien
ctgagtaggcagacgacggcgggaa

SEQ ID NO: 2088229 - DNA, 25 bp, Homo sapien
acgacggcgggaaatacacggagag

SEQ ID NO: 2088230 - DNA, 25 bp, Homo sapien
gggaaatacacggagaggacagagc

SEQ ID NO: 2088231 - DNA, 25 bp, Homo sapien
aggacagagccaaagaaaagcgcca

SEQ ID NO: 2088232 - DNA, 25 bp, Homo sapien
ctctttgttgcgaaggctgttgatg

SEQ ID NO: 2088233 - DNA, 25 bp, Homo sapien
ttgatgaaagggttcaaggtcggcg

SEQ ID NO: 2088234 - DNA, 25 bp, Homo sapien
tcaaggtcggcgtgatgacagcgta

SEQ ID NO: 2088235 - DNA, 25 bp, Homo sapien
tgacagcgtagaccacgctggccag

SEQ ID NO: 2088236 - DNA, 25 bp, Homo sapien
tgttatcatgaaaatgccagtgagc

SEQ ID NO: 2088237 - DNA, 25 bp, Homo sapien
gtaactgttatcatgaaaatgccag

SEQ ID NO: 2088238 - DNA, 25 bp, Homo sapien
tctgtaactgttatcatgaaaatgc

SEQ ID NO: 2088239 - DNA, 25 bp, Homo sapien
actgttatcatgaaaatgccagtga

SEQ ID NO: 2088240 - DNA, 25 bp, Homo sapien
tgtaattgtgtagatcagtgacttt

SEQ ID NO: 2088241 - DNA, 25 bp, Homo sapien
aaagacaccgtgatttgttcattct

SEQ ID NO: 2088242 - DNA, 25 bp, Homo sapien
tataaagacaccgtgatttgttcat

SEQ ID NO: 2088243 - DNA, 25 bp, Homo sapien
aagcctagtacccatatgtaattgt

SEQ ID NO: 2088244 - DNA, 25 bp, Homo sapien
taatgactctggaaagggtacctca

SEQ ID NO: 2088245 - DNA, 25 bp, Homo sapien
gaaacctcagtactttcacaaaagc

SEQ ID NO: 2088246 - DNA, 25 bp, Homo sapien
caagtttattctcaagttctcttga

SEQ ID NO: 2088247 - DNA, 25 bp, Homo sapien
gcaactctactcaaatacattcaat

SEQ ID NO: 2088248 - DNA, 25 bp, Homo sapien
gctcttggttgagatgccgaatgcc

SEQ ID NO: 2088249 - DNA, 25 bp, Homo sapien
gttgagatgccgaatgccaccacca

SEQ ID NO: 2088250 - DNA, 25 bp, Homo sapien
cttggttgagatgccgaatgccacc

SEQ ID NO: 2088251 - DNA, 25 bp, Homo sapien
ttgagatgccgaatgccaccaccac

SEQ ID NO: 2088252 - DNA, 25 bp, Homo sapien
gagtttgggctccaccaagacggct

SEQ ID NO: 2088253 - DNA, 25 bp, Homo sapien
gaacagtgacagtgatacatccgac

SEQ ID NO: 2088254 - DNA, 25 bp, Homo sapien
taggcccagtagaatgaactcagca

SEQ ID NO: 2088255 - DNA, 25 bp, Homo sapien
gacttgtgggacaagagacgaccca

SEQ ID NO: 2088256 - DNA, 25 bp, Homo sapien
ccaggacgcagccaccaacatcctc

SEQ ID NO: 2088257 - DNA, 25 bp, Homo sapien
gactgtctgactcatgcgggtgctg

SEQ ID NO: 2088258 - DNA, 25 bp, Homo sapien
tggactgtctgactcatgcgggtgc

SEQ ID NO: 2088259 - DNA, 25 bp, Homo sapien
ctctggactgtctgactcatgcggg

SEQ ID NO: 2088260 - DNA, 25 bp, Homo sapien
agcagagcggatttgcagcacagca

SEQ ID NO: 2088261 - DNA, 25 bp, Homo sapien
ggtcagtgatcgcttccccacaagt

SEQ ID NO: 2088262 - DNA, 25 bp, Homo sapien
caagggtgccacagccatgaaggct

SEQ ID NO: 2088263 - DNA, 25 bp, Homo sapien
acaagtagctgacacagagcgccct

SEQ ID NO: 2088264 - DNA, 25 bp, Homo sapien
caattagtaagattagtaaggatga

SEQ ID NO: 2088265 - DNA, 25 bp, Homo sapien
tagtaaggatgagcttctttgccaa

SEQ ID NO: 2088266 - DNA, 25 bp, Homo sapien
aagcccctacaattggctttagact

SEQ ID NO: 2088267 - DNA, 25 bp, Homo sapien
gagcttctttgccaaagcccctaca

SEQ ID NO: 2088268 - DNA, 25 bp, Homo sapien
gtctttctaatagcttctcctatca

SEQ ID NO: 2088269 - DNA, 25 bp, Homo sapien
aaatatttccggaagcacttctgtc

SEQ ID NO: 2088270 - DNA, 25 bp, Homo sapien
aagcacttctgtctttctaatagct

SEQ ID NO: 2088271 - DNA, 25 bp, Homo sapien
aaaaatatttccggaagcacttctg

SEQ ID NO: 2088272 - DNA, 25 bp, Homo sapien
gcgctgcctcgctgacggctctccg

SEQ ID NO: 2088273 - DNA, 25 bp, Homo sapien
ctgcctcgctgacggctctccgcct

SEQ ID NO: 2088274 - DNA, 25 bp, Homo sapien
tcgctgacggctctccgccttccat

SEQ ID NO: 2088275 - DNA, 25 bp, Homo sapien
cctcgctgacggctctccgccttcc

SEQ ID NO: 2088276 - DNA, 25 bp, Homo sapien
ctggagctcaacgcccagggtcgca

SEQ ID NO: 2088277 - DNA, 25 bp, Homo sapien
ttactggtaggtccagagggtgttc

SEQ ID NO: 2088278 - DNA, 25 bp, Homo sapien
gagggtgttcagtaagtaacttgcc

SEQ ID NO: 2088279 - DNA, 25 bp, Homo sapien
ctagtatttttagggcgattgttgt

SEQ ID NO: 2088280 - DNA, 25 bp, Homo sapien
tggctgtccagtagatccctgccag

SEQ ID NO: 2088281 - DNA, 25 bp, Homo sapien
catggctgtccagtagatccctgcc

SEQ ID NO: 2088282 - DNA, 25 bp, Homo sapien
atggctgtccagtagatccctgcca

SEQ ID NO: 2088283 - DNA, 25 bp, Homo sapien
tgatcacttgggactcgaaaagcta

SEQ ID NO: 2088284 - DNA, 25 bp, Homo sapien
gttaacttacttatgaatcttcctc

SEQ ID NO: 2088285 - DNA, 25 bp, Homo sapien
cagaagggccaaatcaatgatcact

SEQ ID NO: 2088286 - DNA, 25 bp, Homo sapien
taaacagccaaaggctgaccctcag

SEQ ID NO: 2088287 - DNA, 25 bp, Homo sapien
tagaaatgtaaatgagactttaccc

SEQ ID NO: 2088288 - DNA, 25 bp, Homo sapien
atgtaaatgagactttacccaaagg

SEQ ID NO: 2088289 - DNA, 25 bp, Homo sapien
agagagatcaaaggaaattcgattt

SEQ ID NO: 2088290 - DNA, 25 bp, Homo sapien
ttcccttgagtggagtatattttaa

SEQ ID NO: 2088291 - DNA, 25 bp, Homo sapien
ttcaccaagtagtttttatctgatt

SEQ ID NO: 2088292 - DNA, 25 bp, Homo sapien
tcaccaagtagtttttatctgattt

SEQ ID NO: 2088293 - DNA, 25 bp, Homo sapien
caatgcttaaccagaaatactccgg

SEQ ID NO: 2088294 - DNA, 25 bp, Homo sapien
gaatctcagcgccattctctagcca

SEQ ID NO: 2088295 - DNA, 25 bp, Homo sapien
ttcaaggtcaaaaatgcgattcagg

SEQ ID NO: 2088296 - DNA, 25 bp, Homo sapien
tactccggttagctcattcccatgg

SEQ ID NO: 2088297 - DNA, 25 bp, Homo sapien
tataactaatgttgcattggcatgc

SEQ ID NO: 2088298 - DNA, 25 bp, Homo sapien
tgttgcattggcatgcttgcgaagt

SEQ ID NO: 2088299 - DNA, 25 bp, Homo sapien
gcatgcttgcgaagtaatacgtgca

SEQ ID NO: 2088300 - DNA, 25 bp, Homo sapien
tcttcatttgattccatataactaa

SEQ ID NO: 2088301 - DNA, 25 bp, Homo sapien
cttcactgtcttttggaccaaataa

SEQ ID NO: 2088302 - DNA, 25 bp, Homo sapien
ctcacttcatatggcaaatcttctg

SEQ ID NO: 2088303 - DNA, 25 bp, Homo sapien
taatgtcataggaatcttcactgtc

SEQ ID NO: 2088304 - DNA, 25 bp, Homo sapien
tcaagaataagagtgcaccccatgt

SEQ ID NO: 2088305 - DNA, 25 bp, Homo sapien
cacaggatacttggctatggaacga

SEQ ID NO: 2088306 - DNA, 25 bp, Homo sapien
acgagtggtcgcatatttgagggaa

SEQ ID NO: 2088307 - DNA, 25 bp, Homo sapien
ggatgctcaatcagataaacgtagc

SEQ ID NO: 2088308 - DNA, 25 bp, Homo sapien
cgtagcagggtagtggagccagaga

SEQ ID NO: 2088309 - DNA, 25 bp, Homo sapien
tgatgtataaaatcaagagcatgtt

SEQ ID NO: 2088310 - DNA, 25 bp, Homo sapien
aatgatgtataaaatcaagagcatg

SEQ ID NO: 2088311 - DNA, 25 bp, Homo sapien
gatgtataaaatcaagagcatgttt

SEQ ID NO: 2088312 - DNA, 25 bp, Homo sapien
ctcatttgatccaagatatcagctc

SEQ ID NO: 2088313 - DNA, 25 bp, Homo sapien
tataattttatagacctcaatggcg

SEQ ID NO: 2088314 - DNA, 25 bp, Homo sapien
ttatagacctcaatggcgcagggag

SEQ ID NO: 2088315 - DNA, 25 bp, Homo sapien
ctgcagattaggatggatgatagca

SEQ ID NO: 2088316 - DNA, 25 bp, Homo sapien
gcagattaggatggatgatagcagc

SEQ ID NO: 2088317 - DNA, 25 bp, Homo sapien
tattctgtcacagggaggtagcaag

SEQ ID NO: 2088318 - DNA, 25 bp, Homo sapien
cattgatagctacatggctgtggga

SEQ ID NO: 2088319 - DNA, 25 bp, Homo sapien
tgcggccaacttgaaagagcactaa

SEQ ID NO: 2088320 - DNA, 25 bp, Homo sapien
cattattgataaaactaggcaagga

SEQ ID NO: 2088321 - DNA, 25 bp, Homo sapien
cagatgatttacagggtggctcggc

SEQ ID NO: 2088322 - DNA, 25 bp, Homo sapien
gaaccggtggtttttcaggcagaga

SEQ ID NO: 2088323 - DNA, 25 bp, Homo sapien
ggagtcatataacccgcaaccatgc

SEQ ID NO: 2088324 - DNA, 25 bp, Homo sapien
tccgacattgtgcagtgctatccag

SEQ ID NO: 2088325 - DNA, 25 bp, Homo sapien
aaatttatgtcagactctagacaac

SEQ ID NO: 2088326 - DNA, 25 bp, Homo sapien
atttatgtcagactctagacaacta

SEQ ID NO: 2088327 - DNA, 25 bp, Homo sapien
tctaaaaatttatgtcagactctag

SEQ ID NO: 2088328 - DNA, 25 bp, Homo sapien
taaaaatttatgtcagactctagac

SEQ ID NO: 2088329 - DNA, 25 bp, Homo sapien
aaaacatgggatccccaggatgcag

SEQ ID NO: 2088330 - DNA, 25 bp, Homo sapien
ttaaaaacatgggatccccaggatg

SEQ ID NO: 2088331 - DNA, 25 bp, Homo sapien
ggatccccaggatgcagtggtttcc

SEQ ID NO: 2088332 - DNA, 25 bp, Homo sapien
tgggatccccaggatgcagtggttt

SEQ ID NO: 2088333 - DNA, 25 bp, Homo sapien
tttcttttcgtaatatgcggcctca

SEQ ID NO: 2088334 - DNA, 25 bp, Homo sapien
ctaatgtaaacagcagcgaatactt

SEQ ID NO: 2088335 - DNA, 25 bp, Homo sapien
tttgcattgagcgttagtttagttg

SEQ ID NO: 2088336 - DNA, 25 bp, Homo sapien
acggtacagtctccgcccagtggga

SEQ ID NO: 2088337 - DNA, 25 bp, Homo sapien
aaggcacaaccctactcttaaggag

SEQ ID NO: 2088338 - DNA, 25 bp, Homo sapien
tccgtgaagtgtagtaaggcaaagc

SEQ ID NO: 2088339 - DNA, 25 bp, Homo sapien
gaaatgtgcttagatgcctaccgaa

SEQ ID NO: 2088340 - DNA, 25 bp, Homo sapien
gactagcagaatttgtaagacaccg

SEQ ID NO: 2088341 - DNA, 25 bp, Homo sapien
agtgtagccatctttgtcaatgatt

SEQ ID NO: 2088342 - DNA, 25 bp, Homo sapien
tgctggttcgctttccacttgtagg

SEQ ID NO: 2088343 - DNA, 25 bp, Homo sapien
agcttccacatcagcaacttgctgg

SEQ ID NO: 2088344 - DNA, 25 bp, Homo sapien
ttagggccttgctgtgggtcatgct

SEQ ID NO: 2088345 - DNA, 25 bp, Homo sapien
tcccacggatcctgaatgttcttaa

SEQ ID NO: 2088346 - DNA, 25 bp, Homo sapien
caggcgcgaaaacaatgctaatctc

SEQ ID NO: 2088347 - DNA, 25 bp, Homo sapien
gatgtgctgccagcgaggctttgtt

SEQ ID NO: 2088348 - DNA, 25 bp, Homo sapien
gcaacaagagttgattgcagccaag

SEQ ID NO: 2088349 - DNA, 25 bp, Homo sapien
gacaaagggccattcagtttcttaa

SEQ ID NO: 2088350 - DNA, 25 bp, Homo sapien
ccagtacgtgtaaaagttatgctca

SEQ ID NO: 2088351 - DNA, 25 bp, Homo sapien
tctcctctggatttcgcaacgaatg

SEQ ID NO: 2088352 - DNA, 25 bp, Homo sapien
tgctgaagtttatagactggacgct

SEQ ID NO: 2088353 - DNA, 25 bp, Homo sapien
gggtcacatttctatgtgtgtccag

SEQ ID NO: 2088354 - DNA, 25 bp, Homo sapien
tgtccagtgccctgttgttgacttt

SEQ ID NO: 2088355 - DNA, 25 bp, Homo sapien
cagctgtgaagaataggcctcttcc

SEQ ID NO: 2088356 - DNA, 25 bp, Homo sapien
tcacaccttgcctgcgaataagggt

SEQ ID NO: 2088357 - DNA, 25 bp, Homo sapien
tttgggcatttaggacatggcagga

SEQ ID NO: 2088358 - DNA, 25 bp, Homo sapien
tcatgggaggcaaggggtttgggca

SEQ ID NO: 2088359 - DNA, 25 bp, Homo sapien
gggtttgggcatttaggacatggca

SEQ ID NO: 2088360 - DNA, 25 bp, Homo sapien
ggcatttaggacatggcaggacttc

SEQ ID NO: 2088361 - DNA, 25 bp, Homo sapien
taaaaacactctttattggctgctg

SEQ ID NO: 2088362 - DNA, 25 bp, Homo sapien
gtaaaactggcatagtggggttcac

SEQ ID NO: 2088363 - DNA, 25 bp, Homo sapien
tgctgtggcctaagaggatggcggg

SEQ ID NO: 2088364 - DNA, 25 bp, Homo sapien
gaaactatgattatggattcattgg

SEQ ID NO: 2088365 - DNA, 25 bp, Homo sapien
aatagcagctgctcgatcgatatca

SEQ ID NO: 2088366 - DNA, 25 bp, Homo sapien
ggatcgtggctttcgctgaagcaga

SEQ ID NO: 2088367 - DNA, 25 bp, Homo sapien
cgtggctttcgctgaagcagaaata

SEQ ID NO: 2088368 - DNA, 25 bp, Homo sapien
atagcagctgctcgatcgatatcat

SEQ ID NO: 2088369 - DNA, 25 bp, Homo sapien
gctggtgtaaacctacagccagcag

SEQ ID NO: 2088370 - DNA, 25 bp, Homo sapien
tgaagtcccgggtgaagcctctggt

SEQ ID NO: 2088371 - DNA, 25 bp, Homo sapien
gttttaccaattgcaggtcggcttg

SEQ ID NO: 2088372 - DNA, 25 bp, Homo sapien
gcaaacagctggtgtaaacctacag

SEQ ID NO: 2088373 - DNA, 25 bp, Homo sapien
ggcactggtgaaatagtaagaatga

SEQ ID NO: 2088374 - DNA, 25 bp, Homo sapien
aatggaagacgcacgtctccttcct

SEQ ID NO: 2088375 - DNA, 25 bp, Homo sapien
gatcaatgaggtgaagtggactgaa

SEQ ID NO: 2088376 - DNA, 25 bp, Homo sapien
gaaatagtaagaatgattatcacat

SEQ ID NO: 2088377 - DNA, 25 bp, Homo sapien
gagggcaccgattccttctatgacg

SEQ ID NO: 2088378 - DNA, 25 bp, Homo sapien
ggctcggagaaatgacctgctaagg

SEQ ID NO: 2088379 - DNA, 25 bp, Homo sapien
catgatgcgtgactgctggtggaca

SEQ ID NO: 2088380 - DNA, 25 bp, Homo sapien
tgttgaagccccacgataaccttgc

SEQ ID NO: 2088381 - DNA, 25 bp, Homo sapien
aagtgaggacgtcacgcagacagca

SEQ ID NO: 2088382 - DNA, 25 bp, Homo sapien
gatgtacatccaaccgtcactgtcc

SEQ ID NO: 2088383 - DNA, 25 bp, Homo sapien
gcccgaggaagtttatctgcgacag

SEQ ID NO: 2088384 - DNA, 25 bp, Homo sapien
caagtgctcgagataggcagtctgc

SEQ ID NO: 2088385 - DNA, 25 bp, Homo sapien
tgtggacccgttgcacagcagggcc

SEQ ID NO: 2088386 - DNA, 25 bp, Homo sapien
tcttctggactgagccatcctcatc

SEQ ID NO: 2088387 - DNA, 25 bp, Homo sapien
caaggccaggatgcttgacagatgt

SEQ ID NO: 2088388 - DNA, 25 bp, Homo sapien
aatccaaaatctcgtataagctcag

SEQ ID NO: 2088389 - DNA, 25 bp, Homo sapien
gaatcggctttctgtggccgggaac

SEQ ID NO: 2088390 - DNA, 25 bp, Homo sapien
ctgttcacagcctgcggagtggtga

SEQ ID NO: 2088391 - DNA, 25 bp, Homo sapien
tgaaagtggatcaacaggcaggcag

SEQ ID NO: 2088392 - DNA, 25 bp, Homo sapien
ccagtacctggtttctgtctcagcg

SEQ ID NO: 2088393 - DNA, 25 bp, Homo sapien
ctgtgggaagactgtgcaatggcac

SEQ ID NO: 2088394 - DNA, 25 bp, Homo sapien
gctgtgggaagactgtgcaatggca

SEQ ID NO: 2088395 - DNA, 25 bp, Homo sapien
aagttagggagtggatgctgcccac

SEQ ID NO: 2088396 - DNA, 25 bp, Homo sapien
tgcagcagtgcctcaactgtgaagt

SEQ ID NO: 2088397 - DNA, 25 bp, Homo sapien
agcagtgcctcaactgtgaagttag

SEQ ID NO: 2088398 - DNA, 25 bp, Homo sapien
gaagttagggagtggatgctgccca

SEQ ID NO: 2088399 - DNA, 25 bp, Homo sapien
gagttgtagtttccgcgcgtcttag

SEQ ID NO: 2088400 - DNA, 25 bp, Homo sapien
gacacagagactcttggagccgcca

SEQ ID NO: 2088401 - DNA, 25 bp, Homo sapien
cgtcttagacggacagagcgcagct

SEQ ID NO: 2088402 - DNA, 25 bp, Homo sapien
tttcgtgagcgaagctcagaccgcc

SEQ ID NO: 2088403 - DNA, 25 bp, Homo sapien
gtcaggaatgcaccgcgttcccctg

SEQ ID NO: 2088404 - DNA, 25 bp, Homo sapien
tcacgggacgcatgagcctcgccag

SEQ ID NO: 2088405 - DNA, 25 bp, Homo sapien
cgccaggtgccggtcaggaatgcac

SEQ ID NO: 2088406 - DNA, 25 bp, Homo sapien
cctgcccggctagactttgggagag

SEQ ID NO: 2088407 - DNA, 25 bp, Homo sapien
ctcaaggggtccgcctgggaaacag

SEQ ID NO: 2088408 - DNA, 25 bp, Homo sapien
cctcaatgttactggaagaggcaga

SEQ ID NO: 2088409 - DNA, 25 bp, Homo sapien
tagcgagctctcacaaaacacagta

SEQ ID NO: 2088410 - DNA, 25 bp, Homo sapien
gtcaaccggcgctctcgcaaaggtt

SEQ ID NO: 2088411 - DNA, 25 bp, Homo sapien
aaaggttctctcagcgtctccaaag

SEQ ID NO: 2088412 - DNA, 25 bp, Homo sapien
catttctctacgagcttcaggggaa

SEQ ID NO: 2088413 - DNA, 25 bp, Homo sapien
aaatagtcagccaattccttatcat

SEQ ID NO: 2088414 - DNA, 25 bp, Homo sapien
aaaaatagtcagccaattccttatc

SEQ ID NO: 2088415 - DNA, 25 bp, Homo sapien
cacatttctctacgagcttcagggg

SEQ ID NO: 2088416 - DNA, 25 bp, Homo sapien
ggcactggtccccttcctggggctg

SEQ ID NO: 2088417 - DNA, 25 bp, Homo sapien
tggtccccttcctggggctgactat

SEQ ID NO: 2088418 - DNA, 25 bp, Homo sapien
ctggtccccttcctggggctgacta

SEQ ID NO: 2088419 - DNA, 25 bp, Homo sapien
cctggcactggtccccttcctgggg

SEQ ID NO: 2088420 - DNA, 25 bp, Homo sapien
ggaaggacccaaatcaatgacatga

SEQ ID NO: 2088421 - DNA, 25 bp, Homo sapien
ctggaaggacccaaatcaatgacat

SEQ ID NO: 2088422 - DNA, 25 bp, Homo sapien
ggacccaaatcaatgacatgaggca

SEQ ID NO: 2088423 - DNA, 25 bp, Homo sapien
aaggacccaaatcaatgacatgagg

SEQ ID NO: 2088424 - DNA, 25 bp, Homo sapien
acgttggtcgagctgccgttctcca

SEQ ID NO: 2088425 - DNA, 25 bp, Homo sapien
agctttacgacaggaggaacagtga

SEQ ID NO: 2088426 - DNA, 25 bp, Homo sapien
tgccgttctccagctttacgacagg

SEQ ID NO: 2088427 - DNA, 25 bp, Homo sapien
gctgacgttggtcgagctgccgttc

SEQ ID NO: 2088428 - DNA, 25 bp, Homo sapien
ctgcggggcctgagcggagctgagc

SEQ ID NO: 2088429 - DNA, 25 bp, Homo sapien
gggcctgagcggagctgagcacagc

SEQ ID NO: 2088430 - DNA, 25 bp, Homo sapien
ctgagcggagctgagcacagcgcca

SEQ ID NO: 2088431 - DNA, 25 bp, Homo sapien
tgcggggcctgagcggagctgagca

SEQ ID NO: 2088432 - DNA, 25 bp, Homo sapien
gggagctcaaggatagtaatatttt

SEQ ID NO: 2088433 - DNA, 25 bp, Homo sapien
ttcaaaagtgatcaccagggttgca

SEQ ID NO: 2088434 - DNA, 25 bp, Homo sapien
tatttttggaacgaaatgtgatttc

SEQ ID NO: 2088435 - DNA, 25 bp, Homo sapien
caccagggttgcatttaatggtggc

SEQ ID NO: 2088436 - DNA, 25 bp, Homo sapien
ggtgtctcagaatgaggcttcacaa

SEQ ID NO: 2088437 - DNA, 25 bp, Homo sapien
ttgaatgccctttgagcagccaggc

SEQ ID NO: 2088438 - DNA, 25 bp, Homo sapien
gcataaagctatgggtaatgatcgc

SEQ ID NO: 2088439 - DNA, 25 bp, Homo sapien
tgttcctaaggaagcccaattctct

SEQ ID NO: 2088440 - DNA, 25 bp, Homo sapien
ctgggcctggtggtgggcgcctata

SEQ ID NO: 2088441 - DNA, 25 bp, Homo sapien
tgggcctggtggtgggcgcctataa

SEQ ID NO: 2088442 - DNA, 25 bp, Homo sapien
agctgggcctggtggtgggcgccta

SEQ ID NO: 2088443 - DNA, 25 bp, Homo sapien
ttagctgggcctggtggtgggcgcc

SEQ ID NO: 2088444 - DNA, 25 bp, Homo sapien
ccttgcaacgttgcttgcatatttg

SEQ ID NO: 2088445 - DNA, 25 bp, Homo sapien
gatattccttgcaacgttgcttgca

SEQ ID NO: 2088446 - DNA, 25 bp, Homo sapien
taacagatattccttgcaacgttgc

SEQ ID NO: 2088447 - DNA, 25 bp, Homo sapien
tgcaacgttgcttgcatatttgtta

SEQ ID NO: 2088448 - DNA, 25 bp, Homo sapien
acttgaaaagaggagtttgtcactc

SEQ ID NO: 2088449 - DNA, 25 bp, Homo sapien
tagataaacagtaagttgtccaaca

SEQ ID NO: 2088450 - DNA, 25 bp, Homo sapien
gagtttgtcactccaggaggcacca

SEQ ID NO: 2088451 - DNA, 25 bp, Homo sapien
ccggtctgattggagtgatttccat

SEQ ID NO: 2088452 - DNA, 25 bp, Homo sapien
cggatcacaagaaagcgtatcctcg

SEQ ID NO: 2088453 - DNA, 25 bp, Homo sapien
ctgcggatcacaagaaagcgtatcc

SEQ ID NO: 2088454 - DNA, 25 bp, Homo sapien
tgcggatcacaagaaagcgtatcct

SEQ ID NO: 2088455 - DNA, 25 bp, Homo sapien
gatcacaagaaagcgtatcctcggg

SEQ ID NO: 2088456 - DNA, 25 bp, Homo sapien
caatcacctggtttatgatgctaat

SEQ ID NO: 2088457 - DNA, 25 bp, Homo sapien
gccacaaagtagatccagccaatca

SEQ ID NO: 2088458 - DNA, 25 bp, Homo sapien
ctgagggtagaaggagatggaccag

SEQ ID NO: 2088459 - DNA, 25 bp, Homo sapien
atggaccaggccacaaagtagatcc

SEQ ID NO: 2088460 - DNA, 25 bp, Homo sapien
ttttccgcctccaattcatgatcac

SEQ ID NO: 2088461 - DNA, 25 bp, Homo sapien
cttttccgcctccaattcatgatca

SEQ ID NO: 2088462 - DNA, 25 bp, Homo sapien
cgaagtcgaagctcagaccaatgac

SEQ ID NO: 2088463 - DNA, 25 bp, Homo sapien
aagcccgtcaggttcagagccacga

SEQ ID NO: 2088464 - DNA, 25 bp, Homo sapien
gttgaatacactgtaggccacgaag

SEQ ID NO: 2088465 - DNA, 25 bp, Homo sapien
ttgatgtagggcacccagaggaggc

SEQ ID NO: 2088466 - DNA, 25 bp, Homo sapien
ggacaaccgcgtgcaggctgaagaa

SEQ ID NO: 2088467 - DNA, 25 bp, Homo sapien
agaagacgtcgttgctgttcacggg

SEQ ID NO: 2088468 - DNA, 25 bp, Homo sapien
caggcagcactgcacgatgatgatc

SEQ ID NO: 2088469 - DNA, 25 bp, Homo sapien
tgatgatcagcgtgaggacaaccgc

SEQ ID NO: 2088470 - DNA, 25 bp, Homo sapien
gccgtgtcttctgtcaaaggtgagg

SEQ ID NO: 2088471 - DNA, 25 bp, Homo sapien
aggtggggtggcgggtgttggctgg

SEQ ID NO: 2088472 - DNA, 25 bp, Homo sapien
cgtgtcttctgtcaaaggtgaggtg

SEQ ID NO: 2088473 - DNA, 25 bp, Homo sapien
ctgccgtgtcttctgtcaaaggtga

SEQ ID NO: 2088474 - DNA, 25 bp, Homo sapien
agaaactgcagccacgtggtcactc

SEQ ID NO: 2088475 - DNA, 25 bp, Homo sapien
gaaaatacttgaccagcgtgactgc

SEQ ID NO: 2088476 - DNA, 25 bp, Homo sapien
catggtgacaaatgcgaagagccac

SEQ ID NO: 2088477 - DNA, 25 bp, Homo sapien
gaagagccacgcgagcaccaggaag

SEQ ID NO: 2088478 - DNA, 25 bp, Homo sapien
acctttgggctatgacaggcctcag

SEQ ID NO: 2088479 - DNA, 25 bp, Homo sapien
acaggcctcagccaaggaacagttt

SEQ ID NO: 2088480 - DNA, 25 bp, Homo sapien
acaaaagcggttctcattcctccca

SEQ ID NO: 2088481 - DNA, 25 bp, Homo sapien
ggcggctgcctcatgcgcctcgtga

SEQ ID NO: 2088482 - DNA, 25 bp, Homo sapien
gtccaggagcacgttgccaatgctc

SEQ ID NO: 2088483 - DNA, 25 bp, Homo sapien
tccaggagcacgttgccaatgctcc

SEQ ID NO: 2088484 - DNA, 25 bp, Homo sapien
caggagcacgttgccaatgctccag

SEQ ID NO: 2088485 - DNA, 25 bp, Homo sapien
agtccaggagcacgttgccaatgct

SEQ ID NO: 2088486 - DNA, 25 bp, Homo sapien
tctccgaagatcagcgtccactggt

SEQ ID NO: 2088487 - DNA, 25 bp, Homo sapien
aacagaagtgctggatgaagaagac

SEQ ID NO: 2088488 - DNA, 25 bp, Homo sapien
tgaagaagacgacgtcgaagacgat

SEQ ID NO: 2088489 - DNA, 25 bp, Homo sapien
ttggttgggtctccgaagatcagcg

SEQ ID NO: 2088490 - DNA, 25 bp, Homo sapien
tggtctcctctgtccgcacactgag

SEQ ID NO: 2088491 - DNA, 25 bp, Homo sapien
cccggacgaaggcaggctattgaat

SEQ ID NO: 2088492 - DNA, 25 bp, Homo sapien
gcttctccggccttcgctgggtgag

SEQ ID NO: 2088493 - DNA, 25 bp, Homo sapien
gtcaaggcgacggtgccacgtgcct

SEQ ID NO: 2088494 - DNA, 25 bp, Homo sapien
cttgcagaaacgctggtagtttggg

SEQ ID NO: 2088495 - DNA, 25 bp, Homo sapien
aaggccttcggctgcaagcttggtg

SEQ ID NO: 2088496 - DNA, 25 bp, Homo sapien
gtcctgcctgagacggctgccagag

SEQ ID NO: 2088497 - DNA, 25 bp, Homo sapien
agctgcttgcagaaacgctggtagt

SEQ ID NO: 2088498 - DNA, 25 bp, Homo sapien
tgttactgcagtcacggacgctgag

SEQ ID NO: 2088499 - DNA, 25 bp, Homo sapien
ttaattcaagatacaggcccctcgc

SEQ ID NO: 2088500 - DNA, 25 bp, Homo sapien
cagagagtacgtcaggaaagtggcc

SEQ ID NO: 2088501 - DNA, 25 bp, Homo sapien
catgtatgaggcacgtcctgggacc

SEQ ID NO: 2088502 - DNA, 25 bp, Homo sapien
tcacatccagattgagtggcgtgcc

SEQ ID NO: 2088503 - DNA, 25 bp, Homo sapien
ccttatgcgcttccttacacgaggg

SEQ ID NO: 2088504 - DNA, 25 bp, Homo sapien
tggcgtgccctggtaaccgtgaaga

SEQ ID NO: 2088505 - DNA, 25 bp, Homo sapien
cagtgctggtgtgcccttcagaacc

SEQ ID NO: 2088506 - DNA, 25 bp, Homo sapien
ggttcgaggctcacctatcagggca

SEQ ID NO: 2088507 - DNA, 25 bp, Homo sapien
gcgctacgaagctttgcccagatga

SEQ ID NO: 2088508 - DNA, 25 bp, Homo sapien
tataagactccctgcctataagggc

SEQ ID NO: 2088509 - DNA, 25 bp, Homo sapien
gggagagacccctgcctataagact

SEQ ID NO: 2088510 - DNA, 25 bp, Homo sapien
tcacgcgttccaggaagctatctcg

SEQ ID NO: 2088511 - DNA, 25 bp, Homo sapien
ccttcacgcgttccaggaagctatc

SEQ ID NO: 2088512 - DNA, 25 bp, Homo sapien
gcagctcaggcgccttcccgttggt

SEQ ID NO: 2088513 - DNA, 25 bp, Homo sapien
agctcaggcgccttcccgttggttc

SEQ ID NO: 2088514 - DNA, 25 bp, Homo sapien
catgagtggtccctaagtctgtaga

SEQ ID NO: 2088515 - DNA, 25 bp, Homo sapien
tgaggacccaggcacagtaggcctc

SEQ ID NO: 2088516 - DNA, 25 bp, Homo sapien
gacatggtgtgtatggtctggcctc

SEQ ID NO: 2088517 - DNA, 25 bp, Homo sapien
tctggcctctccctcgagtcttgga

SEQ ID NO: 2088518 - DNA, 25 bp, Homo sapien
aacacggcgccggacacactactta

SEQ ID NO: 2088519 - DNA, 25 bp, Homo sapien
gcggcgccatcttgctcggaagact

SEQ ID NO: 2088520 - DNA, 25 bp, Homo sapien
agtggaagaaatgcccgcggcgcca

SEQ ID NO: 2088521 - DNA, 25 bp, Homo sapien
cttagcgttccctcagacgggcagt

SEQ ID NO: 2088522 - DNA, 25 bp, Homo sapien
tcggatcttccaaagacgccgagga

SEQ ID NO: 2088523 - DNA, 25 bp, Homo sapien
tccaaagacgccgaggagattgagg

SEQ ID NO: 2088524 - DNA, 25 bp, Homo sapien
agtcctgggcctcggatcttccaaa

SEQ ID NO: 2088525 - DNA, 25 bp, Homo sapien
cgaggagattgagggtccgggccgg

SEQ ID NO: 2088526 - DNA, 25 bp, Homo sapien
ctgcggagaaaaccaagttacaagt

SEQ ID NO: 2088527 - DNA, 25 bp, Homo sapien
cccggagctcggtgagttgggttca

SEQ ID NO: 2088528 - DNA, 25 bp, Homo sapien
caagttacaagtggcgcccggagct

SEQ ID NO: 2088529 - DNA, 25 bp, Homo sapien
tcggtgagttgggttcacgccgccc

SEQ ID NO: 2088530 - DNA, 25 bp, Homo sapien
ggcctctcgctttctcgcggaacaa

SEQ ID NO: 2088531 - DNA, 25 bp, Homo sapien
tcgctttctcgcggaacaacgcgga

SEQ ID NO: 2088532 - DNA, 25 bp, Homo sapien
ctctcgctttctcgcggaacaacgc

SEQ ID NO: 2088533 - DNA, 25 bp, Homo sapien
cgctttctcgcggaacaacgcggag

SEQ ID NO: 2088534 - DNA, 25 bp, Homo sapien
catgccgtagaggaacgtccagaac

SEQ ID NO: 2088535 - DNA, 25 bp, Homo sapien
gcaataatccaggacggcggcgttg

SEQ ID NO: 2088536 - DNA, 25 bp, Homo sapien
ccgatgaggcctcctgtaaagagag

SEQ ID NO: 2088537 - DNA, 25 bp, Homo sapien
ttcccgccttgagaatgaggagcag

SEQ ID NO: 2088538 - DNA, 25 bp, Homo sapien
taagaactaaggaagtctacatggt

SEQ ID NO: 2088539 - DNA, 25 bp, Homo sapien
ggccacagtcctcccgatctggttt

SEQ ID NO: 2088540 - DNA, 25 bp, Homo sapien
ttataacgttacagaacaagcagcg

SEQ ID NO: 2088541 - DNA, 25 bp, Homo sapien
tctacatggtgttaattgctggcca

SEQ ID NO: 2088542 - DNA, 25 bp, Homo sapien
ctgaagaatattacaggctctccgt

SEQ ID NO: 2088543 - DNA, 25 bp, Homo sapien
tgaagaatattacaggctctccgtc

SEQ ID NO: 2088544 - DNA, 25 bp, Homo sapien
cagtggcagcctaagcgttacagca

SEQ ID NO: 2088545 - DNA, 25 bp, Homo sapien
tcggcgattttgcatcagtggcagc

SEQ ID NO: 2088546 - DNA, 25 bp, Homo sapien
ggacttaacacaaggctatggccca

SEQ ID NO: 2088547 - DNA, 25 bp, Homo sapien
tctgaatggcctatgtgtaaataca

SEQ ID NO: 2088548 - DNA, 25 bp, Homo sapien
ggagctaacaataacatctaccctg

SEQ ID NO: 2088549 - DNA, 25 bp, Homo sapien
caggttccttacgagggagctaaca

SEQ ID NO: 2088550 - DNA, 25 bp, Homo sapien
tctaccctgtaaggttattgctaaa

SEQ ID NO: 2088551 - DNA, 25 bp, Homo sapien
gcctgtgaaaggtacacccagcaaa

SEQ ID NO: 2088552 - DNA, 25 bp, Homo sapien
cacatggaggtgtttacaccctaaa

SEQ ID NO: 2088553 - DNA, 25 bp, Homo sapien
aataaccctcctgacaagaaaggat

SEQ ID NO: 2088554 - DNA, 25 bp, Homo sapien
gatcatggattaacacatggaggtg

SEQ ID NO: 2088555 - DNA, 25 bp, Homo sapien
acaagaaaggatcatggattaacac

SEQ ID NO: 2088556 - DNA, 25 bp, Homo sapien
ccttggcgtcgtgtgcatgtgttcc

SEQ ID NO: 2088557 - DNA, 25 bp, Homo sapien
gaaatggttaagtacatcagctcgc

SEQ ID NO: 2088558 - DNA, 25 bp, Homo sapien
gaggtgggcaaaccactgaggatct

SEQ ID NO: 2088559 - DNA, 25 bp, Homo sapien
tactgcccaacaatagggaaatggt

SEQ ID NO: 2088560 - DNA, 25 bp, Homo sapien
ggttatagccgtgcgccctgaccct

SEQ ID NO: 2088561 - DNA, 25 bp, Homo sapien
aggctgaaccccaaccacagtcctg

SEQ ID NO: 2088562 - DNA, 25 bp, Homo sapien
cccagccctgggttatagccgtgcg

SEQ ID NO: 2088563 - DNA, 25 bp, Homo sapien
agccctgggttatagccgtgcgccc

SEQ ID NO: 2088564 - DNA, 25 bp, Homo sapien
cagctgtcctcaggtagcagtgaca

SEQ ID NO: 2088565 - DNA, 25 bp, Homo sapien
gcaagatcagaataggcgtgggaaa

SEQ ID NO: 2088566 - DNA, 25 bp, Homo sapien
ggctttctgggatttcacgctctgc

SEQ ID NO: 2088567 - DNA, 25 bp, Homo sapien
tctctacttctgctaaaagagggca

SEQ ID NO: 2088568 - DNA, 25 bp, Homo sapien
ggccggcacccgccaagaggttcaa

SEQ ID NO: 2088569 - DNA, 25 bp, Homo sapien
atatgtgcggaaaagccggctccca

SEQ ID NO: 2088570 - DNA, 25 bp, Homo sapien
gatcgtcaggatcgtcggactgcga

SEQ ID NO: 2088571 - DNA, 25 bp, Homo sapien
gctgctgttgaagaaacgcctccgg

SEQ ID NO: 2088572 - DNA, 25 bp, Homo sapien
tcgccgatgctggcgtcgctgctgc

SEQ ID NO: 2088573 - DNA, 25 bp, Homo sapien
ggtgccgatcgagatgacactgtcc

SEQ ID NO: 2088574 - DNA, 25 bp, Homo sapien
gcgggccgcagggtgtgctgcactt

SEQ ID NO: 2088575 - DNA, 25 bp, Homo sapien
gtttggtggaccatcctggtgtcct

SEQ ID NO: 2088576 - DNA, 25 bp, Homo sapien
gagctcgcagcttccagcgctttgg

SEQ ID NO: 2088577 - DNA, 25 bp, Homo sapien
ctcttgcctgtgcttgacagacctg

SEQ ID NO: 2088578 - DNA, 25 bp, Homo sapien
gccctctctcttgacaagagtcctg

SEQ ID NO: 2088579 - DNA, 25 bp, Homo sapien
gggttcctgagttcataaggccaaa

SEQ ID NO: 2088580 - DNA, 25 bp, Homo sapien
cttttacagcaggactctctcatat

SEQ ID NO: 2088581 - DNA, 25 bp, Homo sapien
cctgatgtttgctcttccggcttga

SEQ ID NO: 2088582 - DNA, 25 bp, Homo sapien
catgacaggccggtttgaacattct

SEQ ID NO: 2088583 - DNA, 25 bp, Homo sapien
tctattccccttggcacaatgcggc

SEQ ID NO: 2088584 - DNA, 25 bp, Homo sapien
gaggacggagcaccacttgttctgt

SEQ ID NO: 2088585 - DNA, 25 bp, Homo sapien
cgataaagccttctgtgcggttgca

SEQ ID NO: 2088586 - DNA, 25 bp, Homo sapien
tcggtgctcaaagcgcagtgatgcc

SEQ ID NO: 2088587 - DNA, 25 bp, Homo sapien
aaatcaggccggtcatttgcagagc

SEQ ID NO: 2088588 - DNA, 25 bp, Homo sapien
ggttgcacacttcaccggataagag

SEQ ID NO: 2088589 - DNA, 25 bp, Homo sapien
ggtaaacaggtcctcatccatggaa

SEQ ID NO: 2088590 - DNA, 25 bp, Homo sapien
cgttccaagcgcgacagggtgtagt

SEQ ID NO: 2088591 - DNA, 25 bp, Homo sapien
tcaaactggtagtcaccgtcaccgg

SEQ ID NO: 2088592 - DNA, 25 bp, Homo sapien
tgtcaggtaatgtaaccagagcaca

SEQ ID NO: 2088593 - DNA, 25 bp, Homo sapien
ggatggaggttgaaacagcaccaga

SEQ ID NO: 2088594 - DNA, 25 bp, Homo sapien
tgactggaaacctgtgagaatggga

SEQ ID NO: 2088595 - DNA, 25 bp, Homo sapien
aagaccagtctcctctcatttcggg

SEQ ID NO: 2088596 - DNA, 25 bp, Homo sapien
aggctagatatgaactcttgggctc

SEQ ID NO: 2088597 - DNA, 25 bp, Homo sapien
gactctgtctcaataaaattaaaaa

SEQ ID NO: 2088598 - DNA, 25 bp, Homo sapien
aaagctagccttgatacctgaagca

SEQ ID NO: 2088599 - DNA, 25 bp, Homo sapien
gagtgaagacaagttaaccatggga

SEQ ID NO: 2088600 - DNA, 25 bp, Homo sapien
tccacagtgactacagagtctcaag

SEQ ID NO: 2088601 - DNA, 25 bp, Homo sapien
tgtagtctggttcccaaagctagcc

SEQ ID NO: 2088602 - DNA, 25 bp, Homo sapien
actcctcaagggctgacgcatgtcc

SEQ ID NO: 2088603 - DNA, 25 bp, Homo sapien
tcctgtcaattgcagaccatccata

SEQ ID NO: 2088604 - DNA, 25 bp, Homo sapien
gacgcatgtcctgtcaattgcagac

SEQ ID NO: 2088605 - DNA, 25 bp, Homo sapien
tccataatgtacgtgaacacaggcc

SEQ ID NO: 2088606 - DNA, 25 bp, Homo sapien
gaaagacggtctttggccaacgaga

SEQ ID NO: 2088607 - DNA, 25 bp, Homo sapien
tccaagtgagtactcccaagaggcc

SEQ ID NO: 2088608 - DNA, 25 bp, Homo sapien
caactagtcgtgctacaaaagggaa

SEQ ID NO: 2088609 - DNA, 25 bp, Homo sapien
tgaaccagcccaacgatacagaatt

SEQ ID NO: 2088610 - DNA, 25 bp, Homo sapien
gcttatctctgaaagccttttattt

SEQ ID NO: 2088611 - DNA, 25 bp, Homo sapien
tgcaagacactcatagcaggccaga

SEQ ID NO: 2088612 - DNA, 25 bp, Homo sapien
gatccagaagttccacggttagaca

SEQ ID NO: 2088613 - DNA, 25 bp, Homo sapien
catatgcccaacaggaatgtgttca

SEQ ID NO: 2088614 - DNA, 25 bp, Homo sapien
cttaaggccggtgtatgaaatcagc

SEQ ID NO: 2088615 - DNA, 25 bp, Homo sapien
ttttgatactgagaatcgcacactg

SEQ ID NO: 2088616 - DNA, 25 bp, Homo sapien
gctgagccagttcttaagcctgtgg

SEQ ID NO: 2088617 - DNA, 25 bp, Homo sapien
ggtgagatgctaacacacgctttag

SEQ ID NO: 2088618 - DNA, 25 bp, Homo sapien
gaccctaaagaaggactgctgagcc

SEQ ID NO: 2088619 - DNA, 25 bp, Homo sapien
gcccagagtaagtagtgcttcgaaa

SEQ ID NO: 2088620 - DNA, 25 bp, Homo sapien
gatgagtttgtaaaccctccagcct

SEQ ID NO: 2088621 - DNA, 25 bp, Homo sapien
gaatgaattatggtaacccagccca

SEQ ID NO: 2088622 - DNA, 25 bp, Homo sapien
gatgaaagccccagattcgaaaaag

SEQ ID NO: 2088623 - DNA, 25 bp, Homo sapien
gattcagttctaaggtcagtgccta

SEQ ID NO: 2088624 - DNA, 25 bp, Homo sapien
tccagagccagggtataggctactt

SEQ ID NO: 2088625 - DNA, 25 bp, Homo sapien
gaaggtgccctattgaagaccaaca

SEQ ID NO: 2088626 - DNA, 25 bp, Homo sapien
taggctacttctatgtgtcccatgg

SEQ ID NO: 2088627 - DNA, 25 bp, Homo sapien
tgctcctagttgtatagtctgtctg

SEQ ID NO: 2088628 - DNA, 25 bp, Homo sapien
tgtccccacgttgtggcacctgaag

SEQ ID NO: 2088629 - DNA, 25 bp, Homo sapien
gaggaggtagattgtttcgtcttcc

SEQ ID NO: 2088630 - DNA, 25 bp, Homo sapien
gaagctcaagtggtgtcgtcttttg

SEQ ID NO: 2088631 - DNA, 25 bp, Homo sapien
taagagctgcagcattgactgtgct

SEQ ID NO: 2088632 - DNA, 25 bp, Homo sapien
cagtgccgcccaggtagataagagc

SEQ ID NO: 2088633 - DNA, 25 bp, Homo sapien
tgaacttctcactattgccttggcc

SEQ ID NO: 2088634 - DNA, 25 bp, Homo sapien
catgggcctcttacgtgctgtcagc

SEQ ID NO: 2088635 - DNA, 25 bp, Homo sapien
taattgcttgccacctgagttggaa

SEQ ID NO: 2088636 - DNA, 25 bp, Homo sapien
tgaacattgccagtgtaccattcgg

SEQ ID NO: 2088637 - DNA, 25 bp, Homo sapien
ggttctaattcccttctcataagat

SEQ ID NO: 2088638 - DNA, 25 bp, Homo sapien
tctgttgaaactggtttgcctcata

SEQ ID NO: 2088639 - DNA, 25 bp, Homo sapien
tctttctagcaatccccaaggtgag

SEQ ID NO: 2088640 - DNA, 25 bp, Homo sapien
atagtgtcccacgtcagctgagagg

SEQ ID NO: 2088641 - DNA, 25 bp, Homo sapien
aaattgtcgagcagtgaaacgcagc

SEQ ID NO: 2088642 - DNA, 25 bp, Homo sapien
gaattgtctccactactgcgcgttt

SEQ ID NO: 2088643 - DNA, 25 bp, Homo sapien
tccatttgccctccgcagtgacgat

SEQ ID NO: 2088644 - DNA, 25 bp, Homo sapien
gccttagcaaacatcttcgtgtgag

SEQ ID NO: 2088645 - DNA, 25 bp, Homo sapien
cctaggtccgtagggcacgtgcaaa

SEQ ID NO: 2088646 - DNA, 25 bp, Homo sapien
tgagctacttcgtgagcccacatgt

SEQ ID NO: 2088647 - DNA, 25 bp, Homo sapien
ctgaatgactgatgggcgtgcgcat

SEQ ID NO: 2088648 - DNA, 25 bp, Homo sapien
tcctgaatgactgatgggcgtgcgc

SEQ ID NO: 2088649 - DNA, 25 bp, Homo sapien
cctgaatgactgatgggcgtgcgca

SEQ ID NO: 2088650 - DNA, 25 bp, Homo sapien
gaaacatggatggacaagggctttt

SEQ ID NO: 2088651 - DNA, 25 bp, Homo sapien
acatggatggacaagggcttttggc

SEQ ID NO: 2088652 - DNA, 25 bp, Homo sapien
catggatggacaagggcttttggcc

SEQ ID NO: 2088653 - DNA, 25 bp, Homo sapien
tggaaacatggatggacaagggctt

SEQ ID NO: 2088654 - DNA, 25 bp, Homo sapien
tgtggccctgcgcatgctgaaataa

SEQ ID NO: 2088655 - DNA, 25 bp, Homo sapien
caaactgtccaggtcggagggatca

SEQ ID NO: 2088656 - DNA, 25 bp, Homo sapien
ctgactttgaccgagggccatggac

SEQ ID NO: 2088657 - DNA, 25 bp, Homo sapien
ttgatgatgcccctagagctgaggc

SEQ ID NO: 2088658 - DNA, 25 bp, Homo sapien
aacatgcagagtccagcgcaagcag

SEQ ID NO: 2088659 - DNA, 25 bp, Homo sapien
catgcagagtccagcgcaagcaggg

SEQ ID NO: 2088660 - DNA, 25 bp, Homo sapien
gagaacatgcagagtccagcgcaag

SEQ ID NO: 2088661 - DNA, 25 bp, Homo sapien
agaacatgcagagtccagcgcaagc

SEQ ID NO: 2088662 - DNA, 25 bp, Homo sapien
aaaccgggtaacagggctcaggctg

SEQ ID NO: 2088663 - DNA, 25 bp, Homo sapien
catcttgcgggcgaggaaaacccaa

SEQ ID NO: 2088664 - DNA, 25 bp, Homo sapien
tacgcaaattttatgggcccgggca

SEQ ID NO: 2088665 - DNA, 25 bp, Homo sapien
ttcaagggtaaaggaggatggcctc

SEQ ID NO: 2088666 - DNA, 25 bp, Homo sapien
gggttggaccttgcacatcaaggct

SEQ ID NO: 2088667 - DNA, 25 bp, Homo sapien
ggcacaaactactcctgtgtccaca

SEQ ID NO: 2088668 - DNA, 25 bp, Homo sapien
tcttggacgcttctagacacagcca

SEQ ID NO: 2088669 - DNA, 25 bp, Homo sapien
catcgccctgggagttggcaggaca

SEQ ID NO: 2088670 - DNA, 25 bp, Homo sapien
gcttctgtctgcggaccgcatccat

SEQ ID NO: 2088671 - DNA, 25 bp, Homo sapien
acgtgcggttctccgcggagcgctc

SEQ ID NO: 2088672 - DNA, 25 bp, Homo sapien
tgcctcgcggagtctgctcgggtct

SEQ ID NO: 2088673 - DNA, 25 bp, Homo sapien
tggtggaggccacgtctgtgcggag

SEQ ID NO: 2088674 - DNA, 25 bp, Homo sapien
gacaagatggtggtagcctgagcta

SEQ ID NO: 2088675 - DNA, 25 bp, Homo sapien
ttgaattgaaccctgaaagacgagt

SEQ ID NO: 2088676 - DNA, 25 bp, Homo sapien
gaaccatgaggtcaaaagccacact

SEQ ID NO: 2088677 - DNA, 25 bp, Homo sapien
tagaaaatgcctctcggtggacttg

SEQ ID NO: 2088678 - DNA, 25 bp, Homo sapien
ctgggcctgcaggagaacatgagga

SEQ ID NO: 2088679 - DNA, 25 bp, Homo sapien
tgggcctgcaggagaacatgaggac

SEQ ID NO: 2088680 - DNA, 25 bp, Homo sapien
ttaaaaacacaaatggttggcctga

SEQ ID NO: 2088681 - DNA, 25 bp, Homo sapien
tgtcttggccactcctagagcgtgt

SEQ ID NO: 2088682 - DNA, 25 bp, Homo sapien
gaaacctgcaccaaggattgtccct

SEQ ID NO: 2088683 - DNA, 25 bp, Homo sapien
ccatgagccgaaaggatgtcactaa

SEQ ID NO: 2088684 - DNA, 25 bp, Homo sapien
tccctgctggaggaacacgtcatat

SEQ ID NO: 2088685 - DNA, 25 bp, Homo sapien
acaagtcgggaaagcctggctggac

SEQ ID NO: 2088686 - DNA, 25 bp, Homo sapien
cgaggatgtcctttcccgggagaca

SEQ ID NO: 2088687 - DNA, 25 bp, Homo sapien
ccgtcctgagctcgggagatgttca

SEQ ID NO: 2088688 - DNA, 25 bp, Homo sapien
tcagagagacggacacaaggagccg

SEQ ID NO: 2088689 - DNA, 25 bp, Homo sapien
gggggtgtcgcccaccctgaacagc

SEQ ID NO: 2088690 - DNA, 25 bp, Homo sapien
cagatgacatcagataagacgaaca

SEQ ID NO: 2088691 - DNA, 25 bp, Homo sapien
aacagcagacccgatgctcagatga

SEQ ID NO: 2088692 - DNA, 25 bp, Homo sapien
gacccgatgctcagatgacatcaga

SEQ ID NO: 2088693 - DNA, 25 bp, Homo sapien
gccgggcctaggctctgggccacag

SEQ ID NO: 2088694 - DNA, 25 bp, Homo sapien
gggccacagtgacaggatatcccca

SEQ ID NO: 2088695 - DNA, 25 bp, Homo sapien
gccacagtgacaggatatccccagg

SEQ ID NO: 2088696 - DNA, 25 bp, Homo sapien
ggaacaccagggcggagacctggca

SEQ ID NO: 2088697 - DNA, 25 bp, Homo sapien
cccaggcgtcaggtggtttggacat

SEQ ID NO: 2088698 - DNA, 25 bp, Homo sapien
atctgggtgccgctgccaacttcct

SEQ ID NO: 2088699 - DNA, 25 bp, Homo sapien
caggtggtttggacatagtgcccag

SEQ ID NO: 2088700 - DNA, 25 bp, Homo sapien
ggctgcagcccaggcgtcaggtggt

SEQ ID NO: 2088701 - DNA, 25 bp, Homo sapien
cctgcgctgggtgtgccgtaagtta

SEQ ID NO: 2088702 - DNA, 25 bp, Homo sapien
tgcgctgggtgtgccgtaagttatg

SEQ ID NO: 2088703 - DNA, 25 bp, Homo sapien
ctgcgctgggtgtgccgtaagttat

SEQ ID NO: 2088704 - DNA, 25 bp, Homo sapien
gcgctgggtgtgccgtaagttatgg

SEQ ID NO: 2088705 - DNA, 25 bp, Homo sapien
atctgggtgggtattgcctttggct

SEQ ID NO: 2088706 - DNA, 25 bp, Homo sapien
acagtctgatcagagcgggagtgtc

SEQ ID NO: 2088707 - DNA, 25 bp, Homo sapien
tttgttcccgcctgttggcctcttg

SEQ ID NO: 2088708 - DNA, 25 bp, Homo sapien
tcctgctcaggtcacagacagtctg

SEQ ID NO: 2088709 - DNA, 25 bp, Homo sapien
tcacataggccttcagtaaacacaa

SEQ ID NO: 2088710 - DNA, 25 bp, Homo sapien
ccctcacataggccttcagtaaaca

SEQ ID NO: 2088711 - DNA, 25 bp, Homo sapien
tggcgttcccggcagcccttgagga

SEQ ID NO: 2088712 - DNA, 25 bp, Homo sapien
ctggcgttcccggcagcccttgagg

SEQ ID NO: 2088713 - DNA, 25 bp, Homo sapien
gggaagctggcattgtgttctcgat

SEQ ID NO: 2088714 - DNA, 25 bp, Homo sapien
ggaccacgggagtctgagatgcctg

SEQ ID NO: 2088715 - DNA, 25 bp, Homo sapien
cgatggccggttatggaaaaatcac

SEQ ID NO: 2088716 - DNA, 25 bp, Homo sapien
tgtctgccccggctggaaagtcaca

SEQ ID NO: 2088717 - DNA, 25 bp, Homo sapien
tttataacccaatctcagaggtcac

SEQ ID NO: 2088718 - DNA, 25 bp, Homo sapien
tgctttagtgtctgtgatcatcaag

SEQ ID NO: 2088719 - DNA, 25 bp, Homo sapien
gatcatcaagtcaatgagtcctacc

SEQ ID NO: 2088720 - DNA, 25 bp, Homo sapien
cgaaataagggcttgaattccagga

SEQ ID NO: 2088721 - DNA, 25 bp, Homo sapien
ggatcttcgctgcagttcacgggaa

SEQ ID NO: 2088722 - DNA, 25 bp, Homo sapien
tgtaaataaacgctgggctccccag

SEQ ID NO: 2088723 - DNA, 25 bp, Homo sapien
cagactccgagtaaagcgggcggta

SEQ ID NO: 2088724 - DNA, 25 bp, Homo sapien
cctggaaggtagacgagatagcgcc

SEQ ID NO: 2088725 - DNA, 25 bp, Homo sapien
ttttagagcagaaccacactgtctc

SEQ ID NO: 2088726 - DNA, 25 bp, Homo sapien
cgcgtgagcttatgtaccgtgaaga

SEQ ID NO: 2088727 - DNA, 25 bp, Homo sapien
gacatatttcagtttccacctcacg

SEQ ID NO: 2088728 - DNA, 25 bp, Homo sapien
caaaccaaaactggcgagagcccct

SEQ ID NO: 2088729 - DNA, 25 bp, Homo sapien
gtcagtcagatcacacgtcaggctc

SEQ ID NO: 2088730 - DNA, 25 bp, Homo sapien
gaatatcatcgcgtgtgtggcccaa

SEQ ID NO: 2088731 - DNA, 25 bp, Homo sapien
gtctggcctcgtagaagacagctgg

SEQ ID NO: 2088732 - DNA, 25 bp, Homo sapien
tgctctgggacaaataggtgaccaa

SEQ ID NO: 2088733 - DNA, 25 bp, Homo sapien
tagcgtccgcccatgagaggcttct

SEQ ID NO: 2088734 - DNA, 25 bp, Homo sapien
gcttattttgtcaggcctagagcca

SEQ ID NO: 2088735 - DNA, 25 bp, Homo sapien
tgggaaaccctcaggtcagctctga

SEQ ID NO: 2088736 - DNA, 25 bp, Homo sapien
gggatcagcccttgacaacagtgag

SEQ ID NO: 2088737 - DNA, 25 bp, Homo sapien
tgaccttggcatggctctcagtaaa

SEQ ID NO: 2088738 - DNA, 25 bp, Homo sapien
tataatcatttgtaccagctgtggg

SEQ ID NO: 2088739 - DNA, 25 bp, Homo sapien
gatgcacagtaatccccgtgagcac

SEQ ID NO: 2088740 - DNA, 25 bp, Homo sapien
tctcagtaaactgaccacctccggg

SEQ ID NO: 2088741 - DNA, 25 bp, Homo sapien
tggtctgaccggcaagagagacaac

SEQ ID NO: 2088742 - DNA, 25 bp, Homo sapien
tggagccagaaagaaggtccctgct

SEQ ID NO: 2088743 - DNA, 25 bp, Homo sapien
aactgagtatgtagtgttggagcca

SEQ ID NO: 2088744 - DNA, 25 bp, Homo sapien
ctccctaagggcagcaataatttct

SEQ ID NO: 2088745 - DNA, 25 bp, Homo sapien
aaatccagtgatggttcagcagtag

SEQ ID NO: 2088746 - DNA, 25 bp, Homo sapien
ataagattaaattctgatgattaaa

SEQ ID NO: 2088747 - DNA, 25 bp, Homo sapien
gaatgccagcgatcttcaggaagtc

SEQ ID NO: 2088748 - DNA, 25 bp, Homo sapien
acagtagctgtagggaggaatgcca

SEQ ID NO: 2088749 - DNA, 25 bp, Homo sapien
ccagagctacatgccacagcaggtg

SEQ ID NO: 2088750 - DNA, 25 bp, Homo sapien
tcaggaagtccgagatgtgcacatc

SEQ ID NO: 2088751 - DNA, 25 bp, Homo sapien
ggataaactcaagtcagtagcaaag

SEQ ID NO: 2088752 - DNA, 25 bp, Homo sapien
ggagaaacctcatcctactggcagt

SEQ ID NO: 2088753 - DNA, 25 bp, Homo sapien
aaagccctggagatctaactagaag

SEQ ID NO: 2088754 - DNA, 25 bp, Homo sapien
tactggcagtcagatggcagtgcct

SEQ ID NO: 2088755 - DNA, 25 bp, Homo sapien
ggcatatttgacacatgtgcgtgaa

SEQ ID NO: 2088756 - DNA, 25 bp, Homo sapien
taatatgccaatgacgtaacagttt

SEQ ID NO: 2088757 - DNA, 25 bp, Homo sapien
gccaatgacgtaacagtttgaggga

SEQ ID NO: 2088758 - DNA, 25 bp, Homo sapien
tgacgtaacagtttgagggaggcat

SEQ ID NO: 2088759 - DNA, 25 bp, Homo sapien
tctctggatcagctggtacaaaagg

SEQ ID NO: 2088760 - DNA, 25 bp, Homo sapien
ggagggccttgatattcactcgtca

SEQ ID NO: 2088761 - DNA, 25 bp, Homo sapien
gcaccatgcggtcttccgtcctgaa

SEQ ID NO: 2088762 - DNA, 25 bp, Homo sapien
tattttcagagtcgaaggagggcct

SEQ ID NO: 2088763 - DNA, 25 bp, Homo sapien
tttgcccagtttgatgctgagggtg

SEQ ID NO: 2088764 - DNA, 25 bp, Homo sapien
ttggaggccctcaagaattccagtg

SEQ ID NO: 2088765 - DNA, 25 bp, Homo sapien
gggacagttgatgccgagaacatgt

SEQ ID NO: 2088766 - DNA, 25 bp, Homo sapien
tcatcagacaactacaggcctgctc

SEQ ID NO: 2088767 - DNA, 25 bp, Homo sapien
tgcgagtcgctggtgtcgaggcatc

SEQ ID NO: 2088768 - DNA, 25 bp, Homo sapien
gcgaagagtctgtcactctggagca

SEQ ID NO: 2088769 - DNA, 25 bp, Homo sapien
catcgcggcgcgttgtttcgctggc

SEQ ID NO: 2088770 - DNA, 25 bp, Homo sapien
gctgctctagcgagcagttcgagga

SEQ ID NO: 2088771 - DNA, 25 bp, Homo sapien
gtcgtcgcttgacggccaggaagcc

SEQ ID NO: 2088772 - DNA, 25 bp, Homo sapien
cttgacggccaggaagccggaagcc

SEQ ID NO: 2088773 - DNA, 25 bp, Homo sapien
gcgcctttgcgacagcggtcgtcgc

SEQ ID NO: 2088774 - DNA, 25 bp, Homo sapien
gacagcggtcgtcgcttgacggcca

SEQ ID NO: 2088775 - DNA, 25 bp, Homo sapien
cttgcaggttgtcagccccaacaaa

SEQ ID NO: 2088776 - DNA, 25 bp, Homo sapien
tgcaggttgtcagccccaacaaaga

SEQ ID NO: 2088777 - DNA, 25 bp, Homo sapien
ttgcaggttgtcagccccaacaaag

SEQ ID NO: 2088778 - DNA, 25 bp, Homo sapien
gcaggttgtcagccccaacaaagat

SEQ ID NO: 2088779 - DNA, 25 bp, Homo sapien
gcacttccgaggttgccgcctctat

SEQ ID NO: 2088780 - DNA, 25 bp, Homo sapien
gccgagacgccgagcgtgacgtcat

SEQ ID NO: 2088781 - DNA, 25 bp, Homo sapien
tggcactggcgaaaagctcgctgtc

SEQ ID NO: 2088782 - DNA, 25 bp, Homo sapien
tctacagctaagatggccgagacgc

SEQ ID NO: 2088783 - DNA, 25 bp, Homo sapien
tgcgaagccgctatagtgggaccca

SEQ ID NO: 2088784 - DNA, 25 bp, Homo sapien
tatgaaaaggcgaaagccagcgcgg

SEQ ID NO: 2088785 - DNA, 25 bp, Homo sapien
aggacacatcgtagacacggccgag

SEQ ID NO: 2088786 - DNA, 25 bp, Homo sapien
ataagccgtgctgccattaccgctg

SEQ ID NO: 2088787 - DNA, 25 bp, Homo sapien
aaggcgtgagcagcctcgctgatac

SEQ ID NO: 2088788 - DNA, 25 bp, Homo sapien
actggctcgcgccagcggagagaaa

SEQ ID NO: 2088789 - DNA, 25 bp, Homo sapien
ataatgaaccaacgaacgacgcgca

SEQ ID NO: 2088790 - DNA, 25 bp, Homo sapien
cgcaggtggctactggctcgcgcca

SEQ ID NO: 2088791 - DNA, 25 bp, Homo sapien
cctacagcaaacctcaaggaagccc

SEQ ID NO: 2088792 - DNA, 25 bp, Homo sapien
tgaactcctacagcaaacctcaagg

SEQ ID NO: 2088793 - DNA, 25 bp, Homo sapien
gcaaacctcaaggaagccctccctg

SEQ ID NO: 2088794 - DNA, 25 bp, Homo sapien
tacagcaaacctcaaggaagccctc

SEQ ID NO: 2088795 - DNA, 25 bp, Homo sapien
gatacgtcatccacgaggcctgctt

SEQ ID NO: 2088796 - DNA, 25 bp, Homo sapien
gaagtgtcagcatctcagcggctga

SEQ ID NO: 2088797 - DNA, 25 bp, Homo sapien
cccggtcacgaaagctctggatgcg

SEQ ID NO: 2088798 - DNA, 25 bp, Homo sapien
cagcggctgacaggtcggatacgtc

SEQ ID NO: 2088799 - DNA, 25 bp, Homo sapien
gaagccagatgcatcgaacacagtg

SEQ ID NO: 2088800 - DNA, 25 bp, Homo sapien
gattagcataactaccacctgggag

SEQ ID NO: 2088801 - DNA, 25 bp, Homo sapien
tagaagaaagggctacggccatccc

SEQ ID NO: 2088802 - DNA, 25 bp, Homo sapien
tgcgccgggcctagtgtttagagtc

SEQ ID NO: 2088803 - DNA, 25 bp, Homo sapien
cagtcatgtccaagtaggactccag

SEQ ID NO: 2088804 - DNA, 25 bp, Homo sapien
cgatggtgaagtgatactggtgttc

SEQ ID NO: 2088805 - DNA, 25 bp, Homo sapien
ctgtttcgatggtgaagtgatactg

SEQ ID NO: 2088806 - DNA, 25 bp, Homo sapien
caagtaggactccagtgagacgtgg

SEQ ID NO: 2088807 - DNA, 25 bp, Homo sapien
gacagggttatggtctcaagactga

SEQ ID NO: 2088808 - DNA, 25 bp, Homo sapien
tcagtgccttcgatggtagacaggg

SEQ ID NO: 2088809 - DNA, 25 bp, Homo sapien
cttggtttggcaacttcattgggaa

SEQ ID NO: 2088810 - DNA, 25 bp, Homo sapien
cagccctctgaagcgcaggtgagta

SEQ ID NO: 2088811 - DNA, 25 bp, Homo sapien
tgcagctgtagtttgttggcctcca

SEQ ID NO: 2088812 - DNA, 25 bp, Homo sapien
cactccgcgttgcacggcgggaatg

SEQ ID NO: 2088813 - DNA, 25 bp, Homo sapien
gcctccaagcctctggtgatcgcag

SEQ ID NO: 2088814 - DNA, 25 bp, Homo sapien
cagcttctacctgggtcagtgccgg

SEQ ID NO: 2088815 - DNA, 25 bp, Homo sapien
gatagacggaaagaggacttcttaa

SEQ ID NO: 2088816 - DNA, 25 bp, Homo sapien
ttctgaaaagtagaagcctaccaga

SEQ ID NO: 2088817 - DNA, 25 bp, Homo sapien
aagcctaccagagtgtttcccaagg

SEQ ID NO: 2088818 - DNA, 25 bp, Homo sapien
aaggatagacggaaagaggacttct

SEQ ID NO: 2088819 - DNA, 25 bp, Homo sapien
tctgtgtggagggttgtccggcatc

SEQ ID NO: 2088820 - DNA, 25 bp, Homo sapien
gcggggctccttagcacctggctta

SEQ ID NO: 2088821 - DNA, 25 bp, Homo sapien
ggttgtccggcatctggccactagg

SEQ ID NO: 2088822 - DNA, 25 bp, Homo sapien
cacctggcttatacagcttcctggg

SEQ ID NO: 2088823 - DNA, 25 bp, Homo sapien
gtgatggctagcggtgggcagcctg

SEQ ID NO: 2088824 - DNA, 25 bp, Homo sapien
catgtgatggctagcggtgggcagc

SEQ ID NO: 2088825 - DNA, 25 bp, Homo sapien
tgtgatggctagcggtgggcagcct

SEQ ID NO: 2088826 - DNA, 25 bp, Homo sapien
atgtgatggctagcggtgggcagcc

SEQ ID NO: 2088827 - DNA, 25 bp, Homo sapien
tattgcctcgtactgtattggccca

SEQ ID NO: 2088828 - DNA, 25 bp, Homo sapien
cacacaagtgtcaagggcctactca

SEQ ID NO: 2088829 - DNA, 25 bp, Homo sapien
ttaccttgttagagctgggaagcca

SEQ ID NO: 2088830 - DNA, 25 bp, Homo sapien
tatttgtgcccgttgatatctgagg

SEQ ID NO: 2088831 - DNA, 25 bp, Homo sapien
tggagtgcagctgcaaaggctttgc

SEQ ID NO: 2088832 - DNA, 25 bp, Homo sapien
ggcctggcccagcatagttgcccaa

SEQ ID NO: 2088833 - DNA, 25 bp, Homo sapien
gcaagtctaactgcatgctcagcct

SEQ ID NO: 2088834 - DNA, 25 bp, Homo sapien
tcacccgacggttgatgtaactatt

SEQ ID NO: 2088835 - DNA, 25 bp, Homo sapien
tactagctgcctgaacttactgtgc

SEQ ID NO: 2088836 - DNA, 25 bp, Homo sapien
catggcttagctcccgaaaagtagt

SEQ ID NO: 2088837 - DNA, 25 bp, Homo sapien
caccgagcgtgatcactgaggcagt

SEQ ID NO: 2088838 - DNA, 25 bp, Homo sapien
tcaagaggatccactcatgaggagc

SEQ ID NO: 2088839 - DNA, 25 bp, Homo sapien
aggcacacatttgggtggatcacct

SEQ ID NO: 2088840 - DNA, 25 bp, Homo sapien
cttccagccccttcggggtggtgct

SEQ ID NO: 2088841 - DNA, 25 bp, Homo sapien
gttggctgttacgacatccctgtgt

SEQ ID NO: 2088842 - DNA, 25 bp, Homo sapien
gttacgacatccctgtgtgatccca

SEQ ID NO: 2088843 - DNA, 25 bp, Homo sapien
cagagccccgagtcatttctgacca

SEQ ID NO: 2088844 - DNA, 25 bp, Homo sapien
tgccacgttctctccaaggagtggg

SEQ ID NO: 2088845 - DNA, 25 bp, Homo sapien
taaaacaaaggtacggaccatgtgc

SEQ ID NO: 2088846 - DNA, 25 bp, Homo sapien
tgctatgatcctctaacaccgaaat

SEQ ID NO: 2088847 - DNA, 25 bp, Homo sapien
tgagctgataaactggagtactact

SEQ ID NO: 2088848 - DNA, 25 bp, Homo sapien
ttaaagagaagcatctaccacggct

SEQ ID NO: 2088849 - DNA, 25 bp, Homo sapien
caactctgagatgaacaatatgtgt

SEQ ID NO: 2088850 - DNA, 25 bp, Homo sapien
tagtgtgtcctctgtattgcggtag

SEQ ID NO: 2088851 - DNA, 25 bp, Homo sapien
cagtgttcatgctactgaggtgtca

SEQ ID NO: 2088852 - DNA, 25 bp, Homo sapien
gagctgaaaaatcgtggccttaaca

SEQ ID NO: 2088853 - DNA, 25 bp, Homo sapien
ttaacagggttcaaagatgagagct

SEQ ID NO: 2088854 - DNA, 25 bp, Homo sapien
tagagctgcattgtcggtgattcca

SEQ ID NO: 2088855 - DNA, 25 bp, Homo sapien
tgctagcaacatacagggacacttg

SEQ ID NO: 2088856 - DNA, 25 bp, Homo sapien
tcatgaagtcttcccgcctgggctg

SEQ ID NO: 2088857 - DNA, 25 bp, Homo sapien
taaggaccatggtgtgatagatccc

SEQ ID NO: 2088858 - DNA, 25 bp, Homo sapien
cctgcggcaatagactggaacgatt

SEQ ID NO: 2088859 - DNA, 25 bp, Homo sapien
ttgtgccgcgccatcgtccggtcgg

SEQ ID NO: 2088860 - DNA, 25 bp, Homo sapien
tacatgaaagggaacgccaacttgt

SEQ ID NO: 2088861 - DNA, 25 bp, Homo sapien
tgctcctggcatacatgaaagggaa

SEQ ID NO: 2088862 - DNA, 25 bp, Homo sapien
gctcgcctcggggtgaataacaacc

SEQ ID NO: 2088863 - DNA, 25 bp, Homo sapien
caagtgcatgtagcgctctgaaacc

SEQ ID NO: 2088864 - DNA, 25 bp, Homo sapien
gaagcagtgcatagttgtatccccg

SEQ ID NO: 2088865 - DNA, 25 bp, Homo sapien
ttcttatgcagagggctacaggcct

SEQ ID NO: 2088866 - DNA, 25 bp, Homo sapien
tcacggcagcctcataagggaagca

SEQ ID NO: 2088867 - DNA, 25 bp, Homo sapien
cagtggacgccgaagcctttaatct

SEQ ID NO: 2088868 - DNA, 25 bp, Homo sapien
ccgggtcccatttacagagaggtct

SEQ ID NO: 2088869 - DNA, 25 bp, Homo sapien
tcctgacagagtgcacagtggacgc

SEQ ID NO: 2088870 - DNA, 25 bp, Homo sapien
catttgtgatgcatccttgagggcg

SEQ ID NO: 2088871 - DNA, 25 bp, Homo sapien
gagttcagttgctcagtagcctcgg

SEQ ID NO: 2088872 - DNA, 25 bp, Homo sapien
gacagtgcccggcttcgatggaagc

SEQ ID NO: 2088873 - DNA, 25 bp, Homo sapien
tcgcggaacctggagactagacaga

SEQ ID NO: 2088874 - DNA, 25 bp, Homo sapien
tttaccagctgctacatcgggatgg

SEQ ID NO: 2088875 - DNA, 25 bp, Homo sapien
cagtagccggcttgactttcacagt

SEQ ID NO: 2088876 - DNA, 25 bp, Homo sapien
tcttattcgcaggtctgagagtccc

SEQ ID NO: 2088877 - DNA, 25 bp, Homo sapien
tatagtcttggcatgccagtagccg

SEQ ID NO: 2088878 - DNA, 25 bp, Homo sapien
cattgatgaaaacaacgagcccacc

SEQ ID NO: 2088879 - DNA, 25 bp, Homo sapien
ggagcaccaggcagatataaatgtc

SEQ ID NO: 2088880 - DNA, 25 bp, Homo sapien
gatgggcagacgctactgcacatgg

SEQ ID NO: 2088881 - DNA, 25 bp, Homo sapien
tcaatgacaccatgtcggatgggca

SEQ ID NO: 2088882 - DNA, 25 bp, Homo sapien
tgcacatggccatacagcggcagga

SEQ ID NO: 2088883 - DNA, 25 bp, Homo sapien
tgctttaggaaagtatttccctgaa

SEQ ID NO: 2088884 - DNA, 25 bp, Homo sapien
cattattgctttaggaaagtatttc

SEQ ID NO: 2088885 - DNA, 25 bp, Homo sapien
acacatataaaaagtagttctccat

SEQ ID NO: 2088886 - DNA, 25 bp, Homo sapien
cacatataaaaagtagttctccatt

SEQ ID NO: 2088887 - DNA, 25 bp, Homo sapien
acactcagtctaggctttggttagc

SEQ ID NO: 2088888 - DNA, 25 bp, Homo sapien
tcactccctacatgacagtcagctc

SEQ ID NO: 2088889 - DNA, 25 bp, Homo sapien
gttgtcaaggatggtgtcgacctct

SEQ ID NO: 2088890 - DNA, 25 bp, Homo sapien
aaaaccgaactgtatctctgctggg

SEQ ID NO: 2088891 - DNA, 25 bp, Homo sapien
gatcctgctataatgtgagaaccca

SEQ ID NO: 2088892 - DNA, 25 bp, Homo sapien
caatggcagttgtttcaccgtaacc

SEQ ID NO: 2088893 - DNA, 25 bp, Homo sapien
caccagaggctaggaatagtgatcc

SEQ ID NO: 2088894 - DNA, 25 bp, Homo sapien
ttataaaataggacgctgggagcag

SEQ ID NO: 2088895 - DNA, 25 bp, Homo sapien
caccgtgcccaaccatgaaatattt

SEQ ID NO: 2088896 - DNA, 25 bp, Homo sapien
accgtgcccaaccatgaaatatttt

SEQ ID NO: 2088897 - DNA, 25 bp, Homo sapien
cttaaaaattgggaataagctcgct

SEQ ID NO: 2088898 - DNA, 25 bp, Homo sapien
cagtattcctagtcagaggtagtaa

SEQ ID NO: 2088899 - DNA, 25 bp, Homo sapien
taaaagattaccacacaagaatagc

SEQ ID NO: 2088900 - DNA, 25 bp, Homo sapien
gccaaagggccatagagattaatcc

SEQ ID NO: 2088901 - DNA, 25 bp, Homo sapien
tatgatacactaatttgagaagctg

SEQ ID NO: 2088902 - DNA, 25 bp, Homo sapien
tctcgacctcgtagatgagaacatg

SEQ ID NO: 2088903 - DNA, 25 bp, Homo sapien
gacgaccatcgtcatctgaaccagt

SEQ ID NO: 2088904 - DNA, 25 bp, Homo sapien
gagaacatgtggctatcgaacaaca

SEQ ID NO: 2088905 - DNA, 25 bp, Homo sapien
gagtttatctggaccctatcaaggg

SEQ ID NO: 2088906 - DNA, 25 bp, Homo sapien
cagatcttttataagtctcatgaca

SEQ ID NO: 2088907 - DNA, 25 bp, Homo sapien
tgccatatgcaaatgttaatctgtg

SEQ ID NO: 2088908 - DNA, 25 bp, Homo sapien
tgaaatgtcagcattctcgatgcca

SEQ ID NO: 2088909 - DNA, 25 bp, Homo sapien
caaatgttaatctgtggttgctcac

SEQ ID NO: 2088910 - DNA, 25 bp, Homo sapien
gacccagacactagggactgaaggc

SEQ ID NO: 2088911 - DNA, 25 bp, Homo sapien
aggacccaggcacgactcaaaggcg

SEQ ID NO: 2088912 - DNA, 25 bp, Homo sapien
gttctgaggcaagggcgaggaccca

SEQ ID NO: 2088913 - DNA, 25 bp, Homo sapien
ggcagcgaggcaggaccgcctcaca

SEQ ID NO: 2088914 - DNA, 25 bp, Homo sapien
cttgactcaacacatcagccacggt

SEQ ID NO: 2088915 - DNA, 25 bp, Homo sapien
gactcaacacatcagccacggtaaa

SEQ ID NO: 2088916 - DNA, 25 bp, Homo sapien
tcaacacatcagccacggtaaacat

SEQ ID NO: 2088917 - DNA, 25 bp, Homo sapien
ttgactcaacacatcagccacggta

SEQ ID NO: 2088918 - DNA, 25 bp, Homo sapien
ctggtatagctttttgcgcagttca

SEQ ID NO: 2088919 - DNA, 25 bp, Homo sapien
gtctggtatagctttttgcgcagtt

SEQ ID NO: 2088920 - DNA, 25 bp, Homo sapien
tggtatagctttttgcgcagttcat

SEQ ID NO: 2088921 - DNA, 25 bp, Homo sapien
tctggtatagctttttgcgcagttc

SEQ ID NO: 2088922 - DNA, 25 bp, Homo sapien
acacagatacgcctaaatccgatac

SEQ ID NO: 2088923 - DNA, 25 bp, Homo sapien
ttacacttgtaaaagctgacacaga

SEQ ID NO: 2088924 - DNA, 25 bp, Homo sapien
ggttacacttgtaaaagctgacaca

SEQ ID NO: 2088925 - DNA, 25 bp, Homo sapien
aaagctgacacagatacgcctaaat

SEQ ID NO: 2088926 - DNA, 25 bp, Homo sapien
ctaaaccttgattgaatttgaacta

SEQ ID NO: 2088927 - DNA, 25 bp, Homo sapien
cctaaaccttgattgaatttgaact

SEQ ID NO: 2088928 - DNA, 25 bp, Homo sapien
taaaccttgattgaatttgaactac

SEQ ID NO: 2088929 - DNA, 25 bp, Homo sapien
gccagatccacttgcagactcataa

SEQ ID NO: 2088930 - DNA, 25 bp, Homo sapien
ccgtgagacaagcagtccagtgggt

SEQ ID NO: 2088931 - DNA, 25 bp, Homo sapien
tgaaacgggtggttagccagatcca

SEQ ID NO: 2088932 - DNA, 25 bp, Homo sapien
catttcagcagcttacgattgggat

SEQ ID NO: 2088933 - DNA, 25 bp, Homo sapien
tcccttctactgaaatggaccgagg

SEQ ID NO: 2088934 - DNA, 25 bp, Homo sapien
ctcccttctactgaaatggaccgag

SEQ ID NO: 2088935 - DNA, 25 bp, Homo sapien
cccttctactgaaatggaccgaggc

SEQ ID NO: 2088936 - DNA, 25 bp, Homo sapien
ataaattcctaatgctgacaaataa

SEQ ID NO: 2088937 - DNA, 25 bp, Homo sapien
aaatttggttgcttatgaagaaatg

SEQ ID NO: 2088938 - DNA, 25 bp, Homo sapien
gaaagtaaaaacatatgaacaccac

SEQ ID NO: 2088939 - DNA, 25 bp, Homo sapien
gtaaaaacatatgaacaccaccaag

SEQ ID NO: 2088940 - DNA, 25 bp, Homo sapien
taacttctaagtacttcacatcaaa

SEQ ID NO: 2088941 - DNA, 25 bp, Homo sapien
aataagattataactatgctaataa

SEQ ID NO: 2088942 - DNA, 25 bp, Homo sapien
aaaataggttactaagtagacatat

SEQ ID NO: 2088943 - DNA, 25 bp, Homo sapien
actataaacatatcaaggtcaaaag

SEQ ID NO: 2088944 - DNA, 25 bp, Homo sapien
gtaatagatcctgcatagtaaatac

SEQ ID NO: 2088945 - DNA, 25 bp, Homo sapien
ctggaagtagggttgattttaatga

SEQ ID NO: 2088946 - DNA, 25 bp, Homo sapien
gagttgtaatagatcctgcatagta

SEQ ID NO: 2088947 - DNA, 25 bp, Homo sapien
tttaatgagttgtaatagatcctgc

SEQ ID NO: 2088948 - DNA, 25 bp, Homo sapien
accaaagtagattacagaaactaag

SEQ ID NO: 2088949 - DNA, 25 bp, Homo sapien
tattcagctattcagttataattaa

SEQ ID NO: 2088950 - DNA, 25 bp, Homo sapien
ccaaagtagattacagaaactaagc

SEQ ID NO: 2088951 - DNA, 25 bp, Homo sapien
ttttgattttctttatcagatcctg

SEQ ID NO: 2088952 - DNA, 25 bp, Homo sapien
gattttctttatcagatcctgaaac

SEQ ID NO: 2088953 - DNA, 25 bp, Homo sapien
ctttttgattttctttatcagatcc

SEQ ID NO: 2088954 - DNA, 25 bp, Homo sapien
ttgattttctttatcagatcctgaa

SEQ ID NO: 2088955 - DNA, 25 bp, Homo sapien
agaaatattcccaacagtgggtatt

SEQ ID NO: 2088956 - DNA, 25 bp, Homo sapien
tgttctctacaaagatgacggctcc

SEQ ID NO: 2088957 - DNA, 25 bp, Homo sapien
tctgtagggcctttgatactgtcta

SEQ ID NO: 2088958 - DNA, 25 bp, Homo sapien
caacagtgggtatttttacaaacag

SEQ ID NO: 2088959 - DNA, 25 bp, Homo sapien
tctaaatgaattggcgaatgaatgg

SEQ ID NO: 2088960 - DNA, 25 bp, Homo sapien
actatgcatcaaagccaagttgcca

SEQ ID NO: 2088961 - DNA, 25 bp, Homo sapien
tcatcaagtctaaccaatggcctga

SEQ ID NO: 2088962 - DNA, 25 bp, Homo sapien
ccacagtagttatggactctatgaa

SEQ ID NO: 2088963 - DNA, 25 bp, Homo sapien
agatggtctagtttgcgggcagtcc

SEQ ID NO: 2088964 - DNA, 25 bp, Homo sapien
gacttggcgattaagtcacagactt

SEQ ID NO: 2088965 - DNA, 25 bp, Homo sapien
ttatttatattctgctaacattact

SEQ ID NO: 2088966 - DNA, 25 bp, Homo sapien
tgcgggcagtccagaatatcttgtg

SEQ ID NO: 2088967 - DNA, 25 bp, Homo sapien
caggctagtctcaaactcatggcct

SEQ ID NO: 2088968 - DNA, 25 bp, Homo sapien
gttgcccaggctagtctcaaactca

SEQ ID NO: 2088969 - DNA, 25 bp, Homo sapien
ggtgcacaccaccacccaccacgcc

SEQ ID NO: 2088970 - DNA, 25 bp, Homo sapien
ttttgtataaacagggtcttgctat

SEQ ID NO: 2088971 - DNA, 25 bp, Homo sapien
ttgtctgagtttccatattacaact

SEQ ID NO: 2088972 - DNA, 25 bp, Homo sapien
cagactgagtgtttccaagttgctc

SEQ ID NO: 2088973 - DNA, 25 bp, Homo sapien
cagacaggatggtactgcagaccag

SEQ ID NO: 2088974 - DNA, 25 bp, Homo sapien
caaaaagctccagatcatggatggg

SEQ ID NO: 2088975 - DNA, 25 bp, Homo sapien
tctctactgagcacgaaactgacag

SEQ ID NO: 2088976 - DNA, 25 bp, Homo sapien
aacttgatacgctgagggtaagcat

SEQ ID NO: 2088977 - DNA, 25 bp, Homo sapien
acttgatacgctgagggtaagcatc

SEQ ID NO: 2088978 - DNA, 25 bp, Homo sapien
actcttttcccgaagaacgagagct

SEQ ID NO: 2088979 - DNA, 25 bp, Homo sapien
tactcttttcccgaagaacgagagc

SEQ ID NO: 2088980 - DNA, 25 bp, Homo sapien
ctcttttcccgaagaacgagagctt

SEQ ID NO: 2088981 - DNA, 25 bp, Homo sapien
aagagagccccagaatcttcgatta

SEQ ID NO: 2088982 - DNA, 25 bp, Homo sapien
cccagaatcttcgattaagtaggct

SEQ ID NO: 2088983 - DNA, 25 bp, Homo sapien
tcttcgattaagtaggctgcctttc

SEQ ID NO: 2088984 - DNA, 25 bp, Homo sapien
gagactgccactcaacccttccttt

SEQ ID NO: 2088985 - DNA, 25 bp, Homo sapien
ctctctgtctcctgtccagttactt

SEQ ID NO: 2088986 - DNA, 25 bp, Homo sapien
tctctgtctcctgtccagttacttt

SEQ ID NO: 2088987 - DNA, 25 bp, Homo sapien
cctctctgtctcctgtccagttact

SEQ ID NO: 2088988 - DNA, 25 bp, Homo sapien
aattgaatccccatggtttttagtg

SEQ ID NO: 2088989 - DNA, 25 bp, Homo sapien
gcagtaaaactccaaaagaattgaa

SEQ ID NO: 2088990 - DNA, 25 bp, Homo sapien
tctgactcagagttagcaagctcat

SEQ ID NO: 2088991 - DNA, 25 bp, Homo sapien
ttcagttcacgggtcattctgactc

SEQ ID NO: 2088992 - DNA, 25 bp, Homo sapien
ttagtaaaagttgcctttgagcata

SEQ ID NO: 2088993 - DNA, 25 bp, Homo sapien
gtaaaagttgcctttgagcataaat

SEQ ID NO: 2088994 - DNA, 25 bp, Homo sapien
tttagtaaaagttgcctttgagcat

SEQ ID NO: 2088995 - DNA, 25 bp, Homo sapien
agtaaaagttgcctttgagcataaa

SEQ ID NO: 2088996 - DNA, 25 bp, Homo sapien
cttgagctttcggtcataggtctcc

SEQ ID NO: 2088997 - DNA, 25 bp, Homo sapien
ttagaagttcattcttgagctttcg

SEQ ID NO: 2088998 - DNA, 25 bp, Homo sapien
agctttcggtcataggtctcctcaa

SEQ ID NO: 2088999 - DNA, 25 bp, Homo sapien
ctttcggtcataggtctcctcaaaa

SEQ ID NO: 2089000 - DNA, 25 bp, Homo sapien
gaaatagaagcactcctgtggcgaa

SEQ ID NO: 2089001 - DNA, 25 bp, Homo sapien
tatccggattagcaataccaaaagg

SEQ ID NO: 2089002 - DNA, 25 bp, Homo sapien
gcttatctatggcacaggagcacct

SEQ ID NO: 2089003 - DNA, 25 bp, Homo sapien
cacctgagggtgctaaacatgacaa

SEQ ID NO: 2089004 - DNA, 25 bp, Homo sapien
catcttcaatcagtcgattagttct

SEQ ID NO: 2089005 - DNA, 25 bp, Homo sapien
atgatgtagtcatccttcagttcaa

SEQ ID NO: 2089006 - DNA, 25 bp, Homo sapien
tttcatcttcaatcagtcgattagt

SEQ ID NO: 2089007 - DNA, 25 bp, Homo sapien
agtcatccttcagttcaagttgata

SEQ ID NO: 2089008 - DNA, 25 bp, Homo sapien
taggagtaatacgtacttgacagca

SEQ ID NO: 2089009 - DNA, 25 bp, Homo sapien
ccatgataaatcactggcctttgtg

SEQ ID NO: 2089010 - DNA, 25 bp, Homo sapien
caacttgggaagctaataacctaca

SEQ ID NO: 2089011 - DNA, 25 bp, Homo sapien
taagttgctgctacgttcctgacaa

SEQ ID NO: 2089012 - DNA, 25 bp, Homo sapien
tcttgttacagcaatttcctagaaa

SEQ ID NO: 2089013 - DNA, 25 bp, Homo sapien
tcaacttcttgttacagcaatttcc

SEQ ID NO: 2089014 - DNA, 25 bp, Homo sapien
gaaatacattgaaatgggtcgggcg

SEQ ID NO: 2089015 - DNA, 25 bp, Homo sapien
gggtatctggtcaacatcaactatc

SEQ ID NO: 2089016 - DNA, 25 bp, Homo sapien
ctcaagttctttcacacgatttaca

SEQ ID NO: 2089017 - DNA, 25 bp, Homo sapien
tcaagttctttcacacgatttacag

SEQ ID NO: 2089018 - DNA, 25 bp, Homo sapien
caagttctttcacacgatttacaga

SEQ ID NO: 2089019 - DNA, 25 bp, Homo sapien
ttattgccaaagactgggctttgac

SEQ ID NO: 2089020 - DNA, 25 bp, Homo sapien
gggctttgacagactctaattcaag

SEQ ID NO: 2089021 - DNA, 25 bp, Homo sapien
gactgggctttgacagactctaatt

SEQ ID NO: 2089022 - DNA, 25 bp, Homo sapien
ccaaagactgggctttgacagactc

SEQ ID NO: 2089023 - DNA, 25 bp, Homo sapien
ttcggctttccgtagttctttctga

SEQ ID NO: 2089024 - DNA, 25 bp, Homo sapien
tcggctttccgtagttctttctgaa

SEQ ID NO: 2089025 - DNA, 25 bp, Homo sapien
tcaaccactatagccttttcggctt

SEQ ID NO: 2089026 - DNA, 25 bp, Homo sapien
ctatagccttttcggctttccgtag

SEQ ID NO: 2089027 - DNA, 25 bp, Homo sapien
tgtctgagtttgcttcagttgcaat

SEQ ID NO: 2089028 - DNA, 25 bp, Homo sapien
aacctagaatctgggccttcagctg

SEQ ID NO: 2089029 - DNA, 25 bp, Homo sapien
cctgagtagttaaactctttacaga

SEQ ID NO: 2089030 - DNA, 25 bp, Homo sapien
gcaattttaaatcggcaacctgagt

SEQ ID NO: 2089031 - DNA, 25 bp, Homo sapien
tccccgtgatgctacaagaaagaag

SEQ ID NO: 2089032 - DNA, 25 bp, Homo sapien
gaactcccagggctattgcgaaatc

SEQ ID NO: 2089033 - DNA, 25 bp, Homo sapien
ggtggcaaagcccaaccagacttga

SEQ ID NO: 2089034 - DNA, 25 bp, Homo sapien
gaaatccacagcatatggcccgagt

SEQ ID NO: 2089035 - DNA, 25 bp, Homo sapien
tgatgcaaccatacgtgctagaacg

SEQ ID NO: 2089036 - DNA, 25 bp, Homo sapien
gacagaacgatcgatcacagactgc

SEQ ID NO: 2089037 - DNA, 25 bp, Homo sapien
ccacccatgcagttggataatttgt

SEQ ID NO: 2089038 - DNA, 25 bp, Homo sapien
tatctcaccattgcaaggcaccaca

SEQ ID NO: 2089039 - DNA, 25 bp, Homo sapien
tgcttccacgacgtcattcctttct

SEQ ID NO: 2089040 - DNA, 25 bp, Homo sapien
gcggagcctcgaggctgcactgcct

SEQ ID NO: 2089041 - DNA, 25 bp, Homo sapien
actgcctgtcagtgcttccacgacg

SEQ ID NO: 2089042 - DNA, 25 bp, Homo sapien
tcagtgcttccacgacgtcattcct

SEQ ID NO: 2089043 - DNA, 25 bp, Homo sapien
ggaagcaatgtgtgatctgcccaga

SEQ ID NO: 2089044 - DNA, 25 bp, Homo sapien
tgcctagactcagtgggtgatggta

SEQ ID NO: 2089045 - DNA, 25 bp, Homo sapien
cccactttctgctccggagggctgg

SEQ ID NO: 2089046 - DNA, 25 bp, Homo sapien
tggtaggggcattctgtcaggacaa

SEQ ID NO: 2089047 - DNA, 25 bp, Homo sapien
aattcacttttgtcttgaagttcag

SEQ ID NO: 2089048 - DNA, 25 bp, Homo sapien
attcaaaagatgattcaaactcctc

SEQ ID NO: 2089049 - DNA, 25 bp, Homo sapien
aagttcagtttgtcttcgataaaga

SEQ ID NO: 2089050 - DNA, 25 bp, Homo sapien
actcctcattatccttaaaagctag

SEQ ID NO: 2089051 - DNA, 25 bp, Homo sapien
tggagcacgggaactgaagccaaag

SEQ ID NO: 2089052 - DNA, 25 bp, Homo sapien
cagagtgttctcgtagttgaaagaa

SEQ ID NO: 2089053 - DNA, 25 bp, Homo sapien
tgggtgcgccctttcctaacaggat

SEQ ID NO: 2089054 - DNA, 25 bp, Homo sapien
caattgtcccatgagtccttaataa

SEQ ID NO: 2089055 - DNA, 25 bp, Homo sapien
ccacatgagacatatccccggcagg

SEQ ID NO: 2089056 - DNA, 25 bp, Homo sapien
aaagcccgcccatttccaactgcct

SEQ ID NO: 2089057 - DNA, 25 bp, Homo sapien
cggcaggagaaagcccgcccatttc

SEQ ID NO: 2089058 - DNA, 25 bp, Homo sapien
ccccggcaggagaaagcccgcccat

SEQ ID NO: 2089059 - DNA, 25 bp, Homo sapien
gcacaaagctcccacggctctcttc

SEQ ID NO: 2089060 - DNA, 25 bp, Homo sapien
ccctccacccgcagggagggaagtg

SEQ ID NO: 2089061 - DNA, 25 bp, Homo sapien
gctgttggctgagccctggaacaaa

SEQ ID NO: 2089062 - DNA, 25 bp, Homo sapien
tgagccctggaacaaagcacaaagc

SEQ ID NO: 2089063 - DNA, 25 bp, Homo sapien
tatgttcctgggtaccatgactaaa

SEQ ID NO: 2089064 - DNA, 25 bp, Homo sapien
gaggattaaacacttggtccaagaa

SEQ ID NO: 2089065 - DNA, 25 bp, Homo sapien
gacaaggctctagatcatgtctcac

SEQ ID NO: 2089066 - DNA, 25 bp, Homo sapien
tctggaatcagcaacatcaaccctc

SEQ ID NO: 2089067 - DNA, 25 bp, Homo sapien
tgtagacactccctcttgtggccac

SEQ ID NO: 2089068 - DNA, 25 bp, Homo sapien
tctcagcagcagaacacctagttac

SEQ ID NO: 2089069 - DNA, 25 bp, Homo sapien
cacctagttactcagttgatttccc

SEQ ID NO: 2089070 - DNA, 25 bp, Homo sapien
tcgctcaggtctgtgccaaatgagt

SEQ ID NO: 2089071 - DNA, 25 bp, Homo sapien
tagttccttgccatccgcatgtgga

SEQ ID NO: 2089072 - DNA, 25 bp, Homo sapien
tggaaaccccacagcactagcttcg

SEQ ID NO: 2089073 - DNA, 25 bp, Homo sapien
aggcatgatcatcccggtccttcga

SEQ ID NO: 2089074 - DNA, 25 bp, Homo sapien
agcctcgcgtccacatttctgatag

SEQ ID NO: 2089075 - DNA, 25 bp, Homo sapien
ttcttgtaggttactctgccttctt

SEQ ID NO: 2089076 - DNA, 25 bp, Homo sapien
tcttgtaggttactctgccttcttt

SEQ ID NO: 2089077 - DNA, 25 bp, Homo sapien
tactacaaaactcctaagcttcaca

SEQ ID NO: 2089078 - DNA, 25 bp, Homo sapien
actacaaaactcctaagcttcacat

SEQ ID NO: 2089079 - DNA, 25 bp, Homo sapien
ttactacaaaactcctaagcttcac

SEQ ID NO: 2089080 - DNA, 25 bp, Homo sapien
aagtacagcctgtatgccagaggac

SEQ ID NO: 2089081 - DNA, 25 bp, Homo sapien
gaagcaactgtgaactggcagccac

SEQ ID NO: 2089082 - DNA, 25 bp, Homo sapien
caagcaagacttagcaggtgtgtta

SEQ ID NO: 2089083 - DNA, 25 bp, Homo sapien
taatcccgatccttcaagtacagcc

SEQ ID NO: 2089084 - DNA, 25 bp, Homo sapien
gtcttgctcctgctggatgattttc

SEQ ID NO: 2089085 - DNA, 25 bp, Homo sapien
tcttcaatggagaagacggattccc

SEQ ID NO: 2089086 - DNA, 25 bp, Homo sapien
tcccaagaagttaagccacggaagc

SEQ ID NO: 2089087 - DNA, 25 bp, Homo sapien
ttaagccacggaagccctggatgtc

SEQ ID NO: 2089088 - DNA, 25 bp, Homo sapien
ccacagattgccctgcccatggcac

SEQ ID NO: 2089089 - DNA, 25 bp, Homo sapien
agactcaaggttccatttgaacttt

SEQ ID NO: 2089090 - DNA, 25 bp, Homo sapien
gcatttaacacccataatacttcag

SEQ ID NO: 2089091 - DNA, 25 bp, Homo sapien
ttagatatgcattaatttcatgaaa

SEQ ID NO: 2089092 - DNA, 25 bp, Homo sapien
taaactatagggtatgcatttaaca

SEQ ID NO: 2089093 - DNA, 25 bp, Homo sapien
ctgattacatggagagggtggaaaa

SEQ ID NO: 2089094 - DNA, 25 bp, Homo sapien
tcgactttgtcactagattgcagcg

SEQ ID NO: 2089095 - DNA, 25 bp, Homo sapien
gtgtccactagggagccttcttgga

SEQ ID NO: 2089096 - DNA, 25 bp, Homo sapien
tagattgcagcgtgtccactaggga

SEQ ID NO: 2089097 - DNA, 25 bp, Homo sapien
ccttcttggaccatcttttttgagc

SEQ ID NO: 2089098 - DNA, 25 bp, Homo sapien
agtcactaattttgactgattcaat

SEQ ID NO: 2089099 - DNA, 25 bp, Homo sapien
caattaacagtttgtgtatgaaagt

SEQ ID NO: 2089100 - DNA, 25 bp, Homo sapien
gcaattaacagtttgtgtatgaaag

SEQ ID NO: 2089101 - DNA, 25 bp, Homo sapien
ttgactgattcaataacttcttaca

SEQ ID NO: 2089102 - DNA, 25 bp, Homo sapien
ttgtgtcaagtttatttgctatctt

SEQ ID NO: 2089103 - DNA, 25 bp, Homo sapien
tttgtgtcaagtttatttgctatct

SEQ ID NO: 2089104 - DNA, 25 bp, Homo sapien
atttgtgtcaagtttatttgctatc

SEQ ID NO: 2089105 - DNA, 25 bp, Homo sapien
aatttgtgtcaagtttatttgctat

SEQ ID NO: 2089106 - DNA, 25 bp, Homo sapien
gtcgtctagttcttcatgagaaaag

SEQ ID NO: 2089107 - DNA, 25 bp, Homo sapien
aagagtcgtctagttcttcatgaga

SEQ ID NO: 2089108 - DNA, 25 bp, Homo sapien
gagtcgtctagttcttcatgagaaa

SEQ ID NO: 2089109 - DNA, 25 bp, Homo sapien
ttcttcatgagaaaagcctgttaaa

SEQ ID NO: 2089110 - DNA, 25 bp, Homo sapien
tacgtaacttctcacggtatgtaag

SEQ ID NO: 2089111 - DNA, 25 bp, Homo sapien
tgtctgatgatagggaaacatttac

SEQ ID NO: 2089112 - DNA, 25 bp, Homo sapien
tttgtctgatgatagggaaacattt

SEQ ID NO: 2089113 - DNA, 25 bp, Homo sapien
agtaaatgttacgtaacttctcacg

SEQ ID NO: 2089114 - DNA, 25 bp, Homo sapien
atactatgactggagaagaggtttc

SEQ ID NO: 2089115 - DNA, 25 bp, Homo sapien
atgagaaatactatgactggagaag

SEQ ID NO: 2089116 - DNA, 25 bp, Homo sapien
ttcttggttcacacactatggtatc

SEQ ID NO: 2089117 - DNA, 25 bp, Homo sapien
aagaggtttcacgtgactagattat

SEQ ID NO: 2089118 - DNA, 25 bp, Homo sapien
gcagtaagataggttatactcattt

SEQ ID NO: 2089119 - DNA, 25 bp, Homo sapien
cagttgagcagtaagataggttata

SEQ ID NO: 2089120 - DNA, 25 bp, Homo sapien
tgagcagtaagataggttatactca

SEQ ID NO: 2089121 - DNA, 25 bp, Homo sapien
ctgcagttgagcagtaagataggtt

SEQ ID NO: 2089122 - DNA, 25 bp, Homo sapien
gaaagaacacagcttatacttccaa

SEQ ID NO: 2089123 - DNA, 25 bp, Homo sapien
gaacacagcttatacttccaaaatg

SEQ ID NO: 2089124 - DNA, 25 bp, Homo sapien
cagcttatacttccaaaatgtaggc

SEQ ID NO: 2089125 - DNA, 25 bp, Homo sapien
aggaaagaacacagcttatacttcc

SEQ ID NO: 2089126 - DNA, 25 bp, Homo sapien
gacctttcttagtgaggcccagcct

SEQ ID NO: 2089127 - DNA, 25 bp, Homo sapien
tagtgatcctgccacgaaacctagg

SEQ ID NO: 2089128 - DNA, 25 bp, Homo sapien
cagtgtcttcaaatggtgcaagggc

SEQ ID NO: 2089129 - DNA, 25 bp, Homo sapien
gtcgaagatcaaggaaggcactggc

SEQ ID NO: 2089130 - DNA, 25 bp, Homo sapien
aaagtgccactagcacgtctgtagt

SEQ ID NO: 2089131 - DNA, 25 bp, Homo sapien
gctgtattgggcataaaagtgccac

SEQ ID NO: 2089132 - DNA, 25 bp, Homo sapien
gcagagtcaagatttcacattggta

SEQ ID NO: 2089133 - DNA, 25 bp, Homo sapien
caacaaagcttaaacgtgggcaaag

SEQ ID NO: 2089134 - DNA, 25 bp, Homo sapien
tatttgtagataatagtcaatactt

SEQ ID NO: 2089135 - DNA, 25 bp, Homo sapien
gataatagtcaatacttgtgtatgc

SEQ ID NO: 2089136 - DNA, 25 bp, Homo sapien
taaagatctatttaggtggaaatag

SEQ ID NO: 2089137 - DNA, 25 bp, Homo sapien
ttaaagatctatttaggtggaaata

SEQ ID NO: 2089138 - DNA, 25 bp, Homo sapien
gaagaggcagtgtctaaagcctaat

SEQ ID NO: 2089139 - DNA, 25 bp, Homo sapien
cagagtccagtgttctagaagaggc

SEQ ID NO: 2089140 - DNA, 25 bp, Homo sapien
tccatataactgttgggtgcatcag

SEQ ID NO: 2089141 - DNA, 25 bp, Homo sapien
gggctgcttactatagggttaacta

SEQ ID NO: 2089142 - DNA, 25 bp, Homo sapien
cagtggtctggatacgaagtttaca

SEQ ID NO: 2089143 - DNA, 25 bp, Homo sapien
aaattagctacaattctgctgaccc

SEQ ID NO: 2089144 - DNA, 25 bp, Homo sapien
acctaattgcaaattgaccacagac

SEQ ID NO: 2089145 - DNA, 25 bp, Homo sapien
tgaccctactattaaagaatctgga

SEQ ID NO: 2089146 - DNA, 25 bp, Homo sapien
taggaaagaagtgtttgccgcatca

SEQ ID NO: 2089147 - DNA, 25 bp, Homo sapien
tcctcatagctagttctcaagctgc

SEQ ID NO: 2089148 - DNA, 25 bp, Homo sapien
caagctgcatgtaagattttaacgg

SEQ ID NO: 2089149 - DNA, 25 bp, Homo sapien
aatcattctgttagagcccacaaaa

SEQ ID NO: 2089150 - DNA, 25 bp, Homo sapien
taataactgcgaaagaagtgcctca

SEQ ID NO: 2089151 - DNA, 25 bp, Homo sapien
tatagtcactcatacagggtagctg

SEQ ID NO: 2089152 - DNA, 25 bp, Homo sapien
tgggaatgtgcataccgggcaactc

SEQ ID NO: 2089153 - DNA, 25 bp, Homo sapien
cttagggactctagacagcactgca

SEQ ID NO: 2089154 - DNA, 25 bp, Homo sapien
gcagaccagtaacagagcttggaca

SEQ ID NO: 2089155 - DNA, 25 bp, Homo sapien
tctcttatggactagttggctttgc

SEQ ID NO: 2089156 - DNA, 25 bp, Homo sapien
tcctgcagtaactatagggaaagcc

SEQ ID NO: 2089157 - DNA, 25 bp, Homo sapien
actgtaactggcatccgaagtggtg

SEQ ID NO: 2089158 - DNA, 25 bp, Homo sapien
taaagatgtactcttggcccgtgtc

SEQ ID NO: 2089159 - DNA, 25 bp, Homo sapien
aagcagcagcccactggacaactgt

SEQ ID NO: 2089160 - DNA, 25 bp, Homo sapien
ggcccgtgtcaaggatgaaaggaat

SEQ ID NO: 2089161 - DNA, 25 bp, Homo sapien
aaaatttccggccacgcacgatggc

SEQ ID NO: 2089162 - DNA, 25 bp, Homo sapien
cagctgagtaagagggcagcatcct

SEQ ID NO: 2089163 - DNA, 25 bp, Homo sapien
cctgagggaggagtctaattactgc

SEQ ID NO: 2089164 - DNA, 25 bp, Homo sapien
cattgtgacaaaccccagaagagac

SEQ ID NO: 2089165 - DNA, 25 bp, Homo sapien
taatttgggacttgacttcgctgct

SEQ ID NO: 2089166 - DNA, 25 bp, Homo sapien
tcacatgggtcctgctgtccttcct

SEQ ID NO: 2089167 - DNA, 25 bp, Homo sapien
ccctggtgtccttgatgaactcggc

SEQ ID NO: 2089168 - DNA, 25 bp, Homo sapien
atgaactcggctacaccctgaacgc

SEQ ID NO: 2089169 - DNA, 25 bp, Homo sapien
catcacatgggtcctgctgtccttc

SEQ ID NO: 2089170 - DNA, 25 bp, Homo sapien
tccatggaccaggcaatggggggac

SEQ ID NO: 2089171 - DNA, 25 bp, Homo sapien
agtgaagcacagaggcttgaggctg

SEQ ID NO: 2089172 - DNA, 25 bp, Homo sapien
tgaagcacagaggcttgaggctggc

SEQ ID NO: 2089173 - DNA, 25 bp, Homo sapien
catggaccaggcaatggggggacct

SEQ ID NO: 2089174 - DNA, 25 bp, Homo sapien
tctcttaaaagcacatcctgagtca

SEQ ID NO: 2089175 - DNA, 25 bp, Homo sapien
acacaccagtgccagattcatctct

SEQ ID NO: 2089176 - DNA, 25 bp, Homo sapien
tgagtcacgcctcgcctgctcacaa

SEQ ID NO: 2089177 - DNA, 25 bp, Homo sapien
cactgaagagttgagcttgcaccca

SEQ ID NO: 2089178 - DNA, 25 bp, Homo sapien
cccccatgaataaacctcagaagac

SEQ ID NO: 2089179 - DNA, 25 bp, Homo sapien
ctcagaagacccattctgccaccgc

SEQ ID NO: 2089180 - DNA, 25 bp, Homo sapien
ccccatgaataaacctcagaagacc

SEQ ID NO: 2089181 - DNA, 25 bp, Homo sapien
attccacctctggccatagttgggt

SEQ ID NO: 2089182 - DNA, 25 bp, Homo sapien
taactgacagtctggtcgtgccgtg

SEQ ID NO: 2089183 - DNA, 25 bp, Homo sapien
tggtcgtgccgtgtgggttctgctg

SEQ ID NO: 2089184 - DNA, 25 bp, Homo sapien
ggccatagttgggtgtcgaccataa

SEQ ID NO: 2089185 - DNA, 25 bp, Homo sapien
tgctcgtgaggaacattggccattc

SEQ ID NO: 2089186 - DNA, 25 bp, Homo sapien
ttggccattcagaaccgctaggtgc

SEQ ID NO: 2089187 - DNA, 25 bp, Homo sapien
cagaaccgctaggtgctggatctgg

SEQ ID NO: 2089188 - DNA, 25 bp, Homo sapien
ctggatctgggtgaggtgtgcgaca

SEQ ID NO: 2089189 - DNA, 25 bp, Homo sapien
gaggttttacttgcctcacactgtg

SEQ ID NO: 2089190 - DNA, 25 bp, Homo sapien
tcacactgtggctttagtaggttct

SEQ ID NO: 2089191 - DNA, 25 bp, Homo sapien
tgggattttataaaggctttgtgag

SEQ ID NO: 2089192 - DNA, 25 bp, Homo sapien
gagacctgagctgccagatggtgca

SEQ ID NO: 2089193 - DNA, 25 bp, Homo sapien
tgagtatgtagagacaaatttttta

SEQ ID NO: 2089194 - DNA, 25 bp, Homo sapien
gagtatgtagagacaaattttttaa

SEQ ID NO: 2089195 - DNA, 25 bp, Homo sapien
ctgagtatgtagagacaaatttttt

SEQ ID NO: 2089196 - DNA, 25 bp, Homo sapien
tagaggtccatttctggtccacagg

SEQ ID NO: 2089197 - DNA, 25 bp, Homo sapien
cagagataccctgaattgcatggcc

SEQ ID NO: 2089198 - DNA, 25 bp, Homo sapien
tccatatgaggagatgagcacagag

SEQ ID NO: 2089199 - DNA, 25 bp, Homo sapien
tattcagccagcgtttattgggcac

SEQ ID NO: 2089200 - DNA, 25 bp, Homo sapien
tagcagcctatgcttgcttgcctga

SEQ ID NO: 2089201 - DNA, 25 bp, Homo sapien
aaacacgttaacattgagcagtcca

SEQ ID NO: 2089202 - DNA, 25 bp, Homo sapien
ttcattgtcattgcctagcagccta

SEQ ID NO: 2089203 - DNA, 25 bp, Homo sapien
attaagggtcttaggcatggctgcc

SEQ ID NO: 2089204 - DNA, 25 bp, Homo sapien
aattgacgctgacaagacttttgca

SEQ ID NO: 2089205 - DNA, 25 bp, Homo sapien
ttggcagctgtctttatggaccagt

SEQ ID NO: 2089206 - DNA, 25 bp, Homo sapien
ccagtaggcagagcgaaattgacgc

SEQ ID NO: 2089207 - DNA, 25 bp, Homo sapien
gatcctcggtgacgtatggctgcct

SEQ ID NO: 2089208 - DNA, 25 bp, Homo sapien
tgcgtccttcgagggtggttctccc

SEQ ID NO: 2089209 - DNA, 25 bp, Homo sapien
taagacatgtttgggcctctcttcc

SEQ ID NO: 2089210 - DNA, 25 bp, Homo sapien
tgctggcaaggacatcggaattttc

SEQ ID NO: 2089211 - DNA, 25 bp, Homo sapien
gaaacctgtctttcagtggccgtca

SEQ ID NO: 2089212 - DNA, 25 bp, Homo sapien
tcttgctggcagagttaagcttgac

SEQ ID NO: 2089213 - DNA, 25 bp, Homo sapien
gaaactcagggatgcactagcccct

SEQ ID NO: 2089214 - DNA, 25 bp, Homo sapien
tttggcatgcggctaagctgtcact

SEQ ID NO: 2089215 - DNA, 25 bp, Homo sapien
gagagccacgtgttctgaagaccat

SEQ ID NO: 2089216 - DNA, 25 bp, Homo sapien
tgatagcttttgtggttttctctgg

SEQ ID NO: 2089217 - DNA, 25 bp, Homo sapien
ttttctctggggctgaatccctgct

SEQ ID NO: 2089218 - DNA, 25 bp, Homo sapien
ctgtgcgtgtggcattgtcatctac

SEQ ID NO: 2089219 - DNA, 25 bp, Homo sapien
gtcttcaagcatagttttcactgag

SEQ ID NO: 2089220 - DNA, 25 bp, Homo sapien
ttcctcaaggctcttgcagatttcc

SEQ ID NO: 2089221 - DNA, 25 bp, Homo sapien
cctcaaggctcttgcagatttccca

SEQ ID NO: 2089222 - DNA, 25 bp, Homo sapien
cagcatcgattctttcagattcctc

SEQ ID NO: 2089223 - DNA, 25 bp, Homo sapien
ttaagggacagcatcgattctttca

SEQ ID NO: 2089224 - DNA, 25 bp, Homo sapien
tcttcatcaaatttcccgaccccat

SEQ ID NO: 2089225 - DNA, 25 bp, Homo sapien
ttcttcatcaaatttcccgacccca

SEQ ID NO: 2089226 - DNA, 25 bp, Homo sapien
gctattctccatgggaatcaggcca

SEQ ID NO: 2089227 - DNA, 25 bp, Homo sapien
ttctccatgggaatcaggccaaagc

SEQ ID NO: 2089228 - DNA, 25 bp, Homo sapien
catgctgccagccaatctgttctta

SEQ ID NO: 2089229 - DNA, 25 bp, Homo sapien
ctgatagaaagttcccactgaaaac

SEQ ID NO: 2089230 - DNA, 25 bp, Homo sapien
tctaaattggaagaagcctctggct

SEQ ID NO: 2089231 - DNA, 25 bp, Homo sapien
cactgaaaacaaccagcagcattgt

SEQ ID NO: 2089232 - DNA, 25 bp, Homo sapien
ggagagagacgaccactactatctg

SEQ ID NO: 2089233 - DNA, 25 bp, Homo sapien
tagagagacctttacgctaacgtgg

SEQ ID NO: 2089234 - DNA, 25 bp, Homo sapien
gaagaatccgtgtgttagcaaaagg

SEQ ID NO: 2089235 - DNA, 25 bp, Homo sapien
cgtggcctgccatttcagactatga

SEQ ID NO: 2089236 - DNA, 25 bp, Homo sapien
tttgcttctccgctcattcttgcgg

SEQ ID NO: 2089237 - DNA, 25 bp, Homo sapien
ctttgcttctccgctcattcttgcg

SEQ ID NO: 2089238 - DNA, 25 bp, Homo sapien
ttgcttctccgctcattcttgcggt

SEQ ID NO: 2089239 - DNA, 25 bp, Homo sapien
tgtcagcagaagaacgactgcttag

SEQ ID NO: 2089240 - DNA, 25 bp, Homo sapien
cagcagaagaacgactgcttagggt

SEQ ID NO: 2089241 - DNA, 25 bp, Homo sapien
ggaagtgaccatgtcagcagaagaa

SEQ ID NO: 2089242 - DNA, 25 bp, Homo sapien
cagaagaacgactgcttagggtttt

SEQ ID NO: 2089243 - DNA, 25 bp, Homo sapien
gggactgcaagctcagacaaatgtc

SEQ ID NO: 2089244 - DNA, 25 bp, Homo sapien
agcagtgcgtcggttccccttttgg

SEQ ID NO: 2089245 - DNA, 25 bp, Homo sapien
tccacaatggcgaacatgccacatt

SEQ ID NO: 2089246 - DNA, 25 bp, Homo sapien
taaacacccacggacacatagcagt

SEQ ID NO: 2089247 - DNA, 25 bp, Homo sapien
ccatacttgcgtgtttctgtcttct

SEQ ID NO: 2089248 - DNA, 25 bp, Homo sapien
ctttcccattccatacttgcgtgtt

SEQ ID NO: 2089249 - DNA, 25 bp, Homo sapien
acaaatagactactagtgggttcct

SEQ ID NO: 2089250 - DNA, 25 bp, Homo sapien
tagactactagtgggttcctgtggg

SEQ ID NO: 2089251 - DNA, 25 bp, Homo sapien
gactgttcttggtccttgttgttca

SEQ ID NO: 2089252 - DNA, 25 bp, Homo sapien
caacatgggctccagactgttcttg

SEQ ID NO: 2089253 - DNA, 25 bp, Homo sapien
ggtatgatcacagcaacatgggctc

SEQ ID NO: 2089254 - DNA, 25 bp, Homo sapien
gcagcccatctggaggtatgatcac

SEQ ID NO: 2089255 - DNA, 25 bp, Homo sapien
ctggtgttatgactgtccctccaat

SEQ ID NO: 2089256 - DNA, 25 bp, Homo sapien
cttcccagtaactcaccaaccgcag

SEQ ID NO: 2089257 - DNA, 25 bp, Homo sapien
tgactgtccctccaatttcgggtaa

SEQ ID NO: 2089258 - DNA, 25 bp, Homo sapien
ttatgactgtccctccaatttcggg

SEQ ID NO: 2089259 - DNA, 25 bp, Homo sapien
cccagtacaaggaagcacatatttt

SEQ ID NO: 2089260 - DNA, 25 bp, Homo sapien
tgcatccttcaggtacaagtgtgtg

SEQ ID NO: 2089261 - DNA, 25 bp, Homo sapien
tatttttggattttgccgtgtgacc

SEQ ID NO: 2089262 - DNA, 25 bp, Homo sapien
cacagccaggttcttatgatctgca

SEQ ID NO: 2089263 - DNA, 25 bp, Homo sapien
tatgctgtcctgaccatgcctggag

SEQ ID NO: 2089264 - DNA, 25 bp, Homo sapien
cattggtgttggatgacggtgttca

SEQ ID NO: 2089265 - DNA, 25 bp, Homo sapien
gaaggaaccacttctcttgcgctga

SEQ ID NO: 2089266 - DNA, 25 bp, Homo sapien
tcatgatgacgaacttatgctgtcc

SEQ ID NO: 2089267 - DNA, 25 bp, Homo sapien
caaaatacttaagagccagaggatg

SEQ ID NO: 2089268 - DNA, 25 bp, Homo sapien
aaaatacttaagagccagaggatgc

SEQ ID NO: 2089269 - DNA, 25 bp, Homo sapien
aaatacttaagagccagaggatgct

SEQ ID NO: 2089270 - DNA, 25 bp, Homo sapien
cctgctgagtagcaaacgtatggga

SEQ ID NO: 2089271 - DNA, 25 bp, Homo sapien
tgactatgtcccagaacctgctgag

SEQ ID NO: 2089272 - DNA, 25 bp, Homo sapien
catgggctacatcctttgaatagaa

SEQ ID NO: 2089273 - DNA, 25 bp, Homo sapien
cctggtcataagagctgtatatggt

SEQ ID NO: 2089274 - DNA, 25 bp, Homo sapien
tagtcacatccttagttaccttgat

SEQ ID NO: 2089275 - DNA, 25 bp, Homo sapien
catgaaggatctagtcacatcctta

SEQ ID NO: 2089276 - DNA, 25 bp, Homo sapien
ctgtgaagatccttttgcttactaa

SEQ ID NO: 2089277 - DNA, 25 bp, Homo sapien
actgaatctgtgaagatccttttgc

SEQ ID NO: 2089278 - DNA, 25 bp, Homo sapien
atgggtaagcgagcgcgctggctgc

SEQ ID NO: 2089279 - DNA, 25 bp, Homo sapien
ccatgggtaagcgagcgcgctggct

SEQ ID NO: 2089280 - DNA, 25 bp, Homo sapien
ggtaagcgagcgcgctggctgcgcg

SEQ ID NO: 2089281 - DNA, 25 bp, Homo sapien
aagcgagcgcgctggctgcgcgcca

SEQ ID NO: 2089282 - DNA, 25 bp, Homo sapien
cgggcgcacaaagcccccggcgctg

SEQ ID NO: 2089283 - DNA, 25 bp, Homo sapien
gggccctagctccgggcgcacaaag

SEQ ID NO: 2089284 - DNA, 25 bp, Homo sapien
ccagtgcaggcggagccgcgccgcg

SEQ ID NO: 2089285 - DNA, 25 bp, Homo sapien
ccaatcgggccctagctccgggcgc

SEQ ID NO: 2089286 - DNA, 25 bp, Homo sapien
cagcatccattgtggctagctccaa

SEQ ID NO: 2089287 - DNA, 25 bp, Homo sapien
gaaaccctcaagatgtaggaaccga

SEQ ID NO: 2089288 - DNA, 25 bp, Homo sapien
ttagagttcctcgttccagagaggc

SEQ ID NO: 2089289 - DNA, 25 bp, Homo sapien
cagagaggctcattaaggtcatgtc

SEQ ID NO: 2089290 - DNA, 25 bp, Homo sapien
gaagttgatcgggtgctttatgtca

SEQ ID NO: 2089291 - DNA, 25 bp, Homo sapien
gccccttaaacatcttgtagtcaga

SEQ ID NO: 2089292 - DNA, 25 bp, Homo sapien
tcttccgtccccaagttgaacatag

SEQ ID NO: 2089293 - DNA, 25 bp, Homo sapien
catcttgtagtcagaaattgcattt

SEQ ID NO: 2089294 - DNA, 25 bp, Homo sapien
gtgagacacgaccacacaacaggca

SEQ ID NO: 2089295 - DNA, 25 bp, Homo sapien
cccttcttgctaggatttgataatt

SEQ ID NO: 2089296 - DNA, 25 bp, Homo sapien
ggtgcagaagccctgtgcacagctg

SEQ ID NO: 2089297 - DNA, 25 bp, Homo sapien
gaactgtccccaaaggacctggctc

SEQ ID NO: 2089298 - DNA, 25 bp, Homo sapien
taacctatgacggaggacatcatcc

SEQ ID NO: 2089299 - DNA, 25 bp, Homo sapien
accaggccgagttgttcaggaggca

SEQ ID NO: 2089300 - DNA, 25 bp, Homo sapien
tccttggttgggagcaggtcatccc

SEQ ID NO: 2089301 - DNA, 25 bp, Homo sapien
ttttcacaggctgaaaccaggccga

SEQ ID NO: 2089302 - DNA, 25 bp, Homo sapien
cacctctgttgcagaaaacgcacag

SEQ ID NO: 2089303 - DNA, 25 bp, Homo sapien
gatttgataaaggaatacatttctg

SEQ ID NO: 2089304 - DNA, 25 bp, Homo sapien
ggtcatttataaaagccagctgcct

SEQ ID NO: 2089305 - DNA, 25 bp, Homo sapien
aatctaaaagctgatggagcaggtc

SEQ ID NO: 2089306 - DNA, 25 bp, Homo sapien
ggctctcagaaaattattcagattt

SEQ ID NO: 2089307 - DNA, 25 bp, Homo sapien
cctatggttgagataaacaggagcg

SEQ ID NO: 2089308 - DNA, 25 bp, Homo sapien
cgaaattctccaaagtgtaaaccag

SEQ ID NO: 2089309 - DNA, 25 bp, Homo sapien
aaagaaactacatcctgtagccacg

SEQ ID NO: 2089310 - DNA, 25 bp, Homo sapien
tgctgcatctggtgccgttttctcc

SEQ ID NO: 2089311 - DNA, 25 bp, Homo sapien
tactgtttgcaggtggtttagcacc

SEQ ID NO: 2089312 - DNA, 25 bp, Homo sapien
gcaccatttacttgatccaggtaag

SEQ ID NO: 2089313 - DNA, 25 bp, Homo sapien
gactggttcccaagctgtttcttca

SEQ ID NO: 2089314 - DNA, 25 bp, Homo sapien
acacttaggtggcagatgggtccca

SEQ ID NO: 2089315 - DNA, 25 bp, Homo sapien
ttgtctcaagacctttgctggagag

SEQ ID NO: 2089316 - DNA, 25 bp, Homo sapien
aatttgtctcaagacctttgctgga

SEQ ID NO: 2089317 - DNA, 25 bp, Homo sapien
caaatttgtctcaagacctttgctg

SEQ ID NO: 2089318 - DNA, 25 bp, Homo sapien
tcttcacaaatttgtctcaagacct

SEQ ID NO: 2089319 - DNA, 25 bp, Homo sapien
agaagatgtggatgtcactttctgc

SEQ ID NO: 2089320 - DNA, 25 bp, Homo sapien
tgtggatgtcactttctgcactatc

SEQ ID NO: 2089321 - DNA, 25 bp, Homo sapien
aagatgtggatgtcactttctgcac

SEQ ID NO: 2089322 - DNA, 25 bp, Homo sapien
gatgtcactttctgcactatccacc

SEQ ID NO: 2089323 - DNA, 25 bp, Homo sapien
ttaattcacaggtgtcaacaaggag

SEQ ID NO: 2089324 - DNA, 25 bp, Homo sapien
gatgattcttaattcacaggtgtca

SEQ ID NO: 2089325 - DNA, 25 bp, Homo sapien
ctttgcttgtgatgattcttaattc

SEQ ID NO: 2089326 - DNA, 25 bp, Homo sapien
gcttgtgatgattcttaattcacag

SEQ ID NO: 2089327 - DNA, 25 bp, Homo sapien
agtggagataaaatattggctgaca

SEQ ID NO: 2089328 - DNA, 25 bp, Homo sapien
ctattctgagcttgtagtgcattca

SEQ ID NO: 2089329 - DNA, 25 bp, Homo sapien
tattctgagcttgtagtgcattcag

SEQ ID NO: 2089330 - DNA, 25 bp, Homo sapien
ggagataaaatattggctgacaagt

SEQ ID NO: 2089331 - DNA, 25 bp, Homo sapien
caagttgtctcggccaccctcagag

SEQ ID NO: 2089332 - DNA, 25 bp, Homo sapien
tgcaaaactgggtctggggccaagt

SEQ ID NO: 2089333 - DNA, 25 bp, Homo sapien
aagtcttgcaaaactgggtctgggg

SEQ ID NO: 2089334 - DNA, 25 bp, Homo sapien
tggggccaagttgtctcggccaccc

SEQ ID NO: 2089335 - DNA, 25 bp, Homo sapien
tgagccataaattgagagacacttt

SEQ ID NO: 2089336 - DNA, 25 bp, Homo sapien
taacgatgttctcagtcttatactg

SEQ ID NO: 2089337 - DNA, 25 bp, Homo sapien
gagaatagcaacagaccaaatgata

SEQ ID NO: 2089338 - DNA, 25 bp, Homo sapien
gagccaagacatgtataggcctttg

SEQ ID NO: 2089339 - DNA, 25 bp, Homo sapien
cagccaagcaatgcggattcatgac

SEQ ID NO: 2089340 - DNA, 25 bp, Homo sapien
tgcggattcatgacccacgggtaaa

SEQ ID NO: 2089341 - DNA, 25 bp, Homo sapien
tagaaaacagccaagcaatgcggat

SEQ ID NO: 2089342 - DNA, 25 bp, Homo sapien
ggcaatagaaaacagccaagcaatg

SEQ ID NO: 2089343 - DNA, 25 bp, Homo sapien
tctaattgtgcgagtaagtttacat

SEQ ID NO: 2089344 - DNA, 25 bp, Homo sapien
tatttgagtgtaaaacagatgtctt

SEQ ID NO: 2089345 - DNA, 25 bp, Homo sapien
cttctgttgagttcaaacggtacca

SEQ ID NO: 2089346 - DNA, 25 bp, Homo sapien
aacggtaccatctgttatttgagtg

SEQ ID NO: 2089347 - DNA, 25 bp, Homo sapien
agggaaccttctgtggagatatcta

SEQ ID NO: 2089348 - DNA, 25 bp, Homo sapien
agcagctctatgtcaagcacatttt

SEQ ID NO: 2089349 - DNA, 25 bp, Homo sapien
aaaagcagctctatgtcaagcacat

SEQ ID NO: 2089350 - DNA, 25 bp, Homo sapien
atatctagagttgccagaaatggtc

SEQ ID NO: 2089351 - DNA, 25 bp, Homo sapien
gctcgcgcgccgctacggtgtgagg

SEQ ID NO: 2089352 - DNA, 25 bp, Homo sapien
ggtgaagctaactcttggaaaactc

SEQ ID NO: 2089353 - DNA, 25 bp, Homo sapien
gcgccgctacggtgtgagggaggga

SEQ ID NO: 2089354 - DNA, 25 bp, Homo sapien
tgaagctaactcttggaaaactcgg

SEQ ID NO: 2089355 - DNA, 25 bp, Homo sapien
acagggttgcagtccattaaaaggg

SEQ ID NO: 2089356 - DNA, 25 bp, Homo sapien
ggttgcagtccattaaaagggaaca

SEQ ID NO: 2089357 - DNA, 25 bp, Homo sapien
ggatccacagggttgcagtccatta

SEQ ID NO: 2089358 - DNA, 25 bp, Homo sapien
tccacagggttgcagtccattaaaa

SEQ ID NO: 2089359 - DNA, 25 bp, Homo sapien
ctataaagatttgcagcacagtgag

SEQ ID NO: 2089360 - DNA, 25 bp, Homo sapien
tatacacagaagtccgtattgtaaa

SEQ ID NO: 2089361 - DNA, 25 bp, Homo sapien
tctcccaggctccaaaggataaaag

SEQ ID NO: 2089362 - DNA, 25 bp, Homo sapien
aagcagagtagaatcagtataacat

SEQ ID NO: 2089363 - DNA, 25 bp, Homo sapien
gctctctgagctacaaagggtaaaa

SEQ ID NO: 2089364 - DNA, 25 bp, Homo sapien
taatctacagctacaaagttctact

SEQ ID NO: 2089365 - DNA, 25 bp, Homo sapien
gaagcaagacttgcaagtaggcgtt

SEQ ID NO: 2089366 - DNA, 25 bp, Homo sapien
gacttcaggaccagtatccttagta

SEQ ID NO: 2089367 - DNA, 25 bp, Homo sapien
taatcatcctgcgtactccttcccc

SEQ ID NO: 2089368 - DNA, 25 bp, Homo sapien
ctttggggctactagagctctttgc

SEQ ID NO: 2089369 - DNA, 25 bp, Homo sapien
ggatgtcatctttggggctactaga

SEQ ID NO: 2089370 - DNA, 25 bp, Homo sapien
gctttgtctctaatggtccatacct

SEQ ID NO: 2089371 - DNA, 25 bp, Homo sapien
tccaaagccataaacttccctttgc

SEQ ID NO: 2089372 - DNA, 25 bp, Homo sapien
acagtccacactttcaccaaatgga

SEQ ID NO: 2089373 - DNA, 25 bp, Homo sapien
ctaagcctgagtcttgatcaggctt

SEQ ID NO: 2089374 - DNA, 25 bp, Homo sapien
cctgagtcttgatcaggcttcctgc

SEQ ID NO: 2089375 - DNA, 25 bp, Homo sapien
gtccacactttcaccaaatggacac

SEQ ID NO: 2089376 - DNA, 25 bp, Homo sapien
gaagtttcaagcctaaagccatcag

SEQ ID NO: 2089377 - DNA, 25 bp, Homo sapien
gcagtcctgatattggctgcacagg

SEQ ID NO: 2089378 - DNA, 25 bp, Homo sapien
gattcatggccccaaaacccttgct

SEQ ID NO: 2089379 - DNA, 25 bp, Homo sapien
gagcagtccatatcatgttctggca

SEQ ID NO: 2089380 - DNA, 25 bp, Homo sapien
gctttgttccagcaaaagtgaagtt

SEQ ID NO: 2089381 - DNA, 25 bp, Homo sapien
cagcagatcgactggtttcaggctt

SEQ ID NO: 2089382 - DNA, 25 bp, Homo sapien
cgtgccctcatttccctcttcaagc

SEQ ID NO: 2089383 - DNA, 25 bp, Homo sapien
ctcttcaagcagcagatcgactggt

SEQ ID NO: 2089384 - DNA, 25 bp, Homo sapien
taaagatgtaccgaggcaatgtagc

SEQ ID NO: 2089385 - DNA, 25 bp, Homo sapien
taccgaggcaatgtagcatttgagg

SEQ ID NO: 2089386 - DNA, 25 bp, Homo sapien
gcaatgtagcatttgaggtaatgaa

SEQ ID NO: 2089387 - DNA, 25 bp, Homo sapien
gatgtaccgaggcaatgtagcattt

SEQ ID NO: 2089388 - DNA, 25 bp, Homo sapien
cattgcctttcaaaagggtgatcgg

SEQ ID NO: 2089389 - DNA, 25 bp, Homo sapien
caaaagggtgatcggccgaatgagc

SEQ ID NO: 2089390 - DNA, 25 bp, Homo sapien
gttgtgttaagtagggcaaattcca

SEQ ID NO: 2089391 - DNA, 25 bp, Homo sapien
tgttaagtagggcaaattccattgc

SEQ ID NO: 2089392 - DNA, 25 bp, Homo sapien
gtcacaaagtttccagcgtccttga

SEQ ID NO: 2089393 - DNA, 25 bp, Homo sapien
caaaaccttgaagacaccagcaggc

SEQ ID NO: 2089394 - DNA, 25 bp, Homo sapien
caggtccccatatccattcacaaag

SEQ ID NO: 2089395 - DNA, 25 bp, Homo sapien
tcactatgagcaaacccctccaggt

SEQ ID NO: 2089396 - DNA, 25 bp, Homo sapien
tctctttcccaagaagctcataaag

SEQ ID NO: 2089397 - DNA, 25 bp, Homo sapien
taaagcaccttagctgacccttctc

SEQ ID NO: 2089398 - DNA, 25 bp, Homo sapien
ctcataaagcaccttagctgaccct

SEQ ID NO: 2089399 - DNA, 25 bp, Homo sapien
tctttcccaagaagctcataaagca

SEQ ID NO: 2089400 - DNA, 25 bp, Homo sapien
acaaggtgtgggttcaaggtcatga

SEQ ID NO: 2089401 - DNA, 25 bp, Homo sapien
gcttttctgattgacgatgaaatcc

SEQ ID NO: 2089402 - DNA, 25 bp, Homo sapien
tccataatgggaatacacttgagaa

SEQ ID NO: 2089403 - DNA, 25 bp, Homo sapien
gattgacgatgaaatccataatggg

SEQ ID NO: 2089404 - DNA, 25 bp, Homo sapien
ggaagatagcaagctgctgagatcc

SEQ ID NO: 2089405 - DNA, 25 bp, Homo sapien
catctttcactggtgatagccccaa

SEQ ID NO: 2089406 - DNA, 25 bp, Homo sapien
tgatagccccaaagacaagggaaga

SEQ ID NO: 2089407 - DNA, 25 bp, Homo sapien
cagaataagtataggtgaacagacc

SEQ ID NO: 2089408 - DNA, 25 bp, Homo sapien
tggggaagagaatatgcggctggct

SEQ ID NO: 2089409 - DNA, 25 bp, Homo sapien
gagaatatgcggctggctcattcct

SEQ ID NO: 2089410 - DNA, 25 bp, Homo sapien
gaatatgcggctggctcattccttg

SEQ ID NO: 2089411 - DNA, 25 bp, Homo sapien
gaagagaatatgcggctggctcatt

SEQ ID NO: 2089412 - DNA, 25 bp, Homo sapien
ctgtctaagatgtctctgttgttta

SEQ ID NO: 2089413 - DNA, 25 bp, Homo sapien
gtctaagatgtctctgttgtttaac

SEQ ID NO: 2089414 - DNA, 25 bp, Homo sapien
gctgtctaagatgtctctgttgttt

SEQ ID NO: 2089415 - DNA, 25 bp, Homo sapien
agctgtctaagatgtctctgttgtt

SEQ ID NO: 2089416 - DNA, 25 bp, Homo sapien
ggctggcacggtcatggaaagttcc

SEQ ID NO: 2089417 - DNA, 25 bp, Homo sapien
acagcaaatctctagcttagcaaca

SEQ ID NO: 2089418 - DNA, 25 bp, Homo sapien
ggcacggtcatggaaagttccagag

SEQ ID NO: 2089419 - DNA, 25 bp, Homo sapien
gacagcaaatctctagcttagcaac

SEQ ID NO: 2089420 - DNA, 25 bp, Homo sapien
ccacaggtatgagcctttggaagca

SEQ ID NO: 2089421 - DNA, 25 bp, Homo sapien
gctgcaaatctgtctcatgagagca

SEQ ID NO: 2089422 - DNA, 25 bp, Homo sapien
ttagatactgacattaagtgttcca

SEQ ID NO: 2089423 - DNA, 25 bp, Homo sapien
caaatctgtctcatgagagcagcaa

SEQ ID NO: 2089424 - DNA, 25 bp, Homo sapien
catccacacttgtagtatgatgaac

SEQ ID NO: 2089425 - DNA, 25 bp, Homo sapien
tcatccacacttgtagtatgatgaa

SEQ ID NO: 2089426 - DNA, 25 bp, Homo sapien
ggatgaactctagaacaaacagcca

SEQ ID NO: 2089427 - DNA, 25 bp, Homo sapien
taaggatgaactctagaacaaacag

SEQ ID NO: 2089428 - DNA, 25 bp, Homo sapien
gaagataaggatgaactctagaaca

SEQ ID NO: 2089429 - DNA, 25 bp, Homo sapien
tgaactctagaacaaacagccagat

SEQ ID NO: 2089430 - DNA, 25 bp, Homo sapien
gcacttgctcttggatgaaatagaa

SEQ ID NO: 2089431 - DNA, 25 bp, Homo sapien
tgtctttcgtagctccaagatgtgt

SEQ ID NO: 2089432 - DNA, 25 bp, Homo sapien
tgtgtccctttgttggcatgctggc

SEQ ID NO: 2089433 - DNA, 25 bp, Homo sapien
tctgctgcccagagtgtcaccttgc

SEQ ID NO: 2089434 - DNA, 25 bp, Homo sapien
ataaaatgatttgtattccggaatt

SEQ ID NO: 2089435 - DNA, 25 bp, Homo sapien
ctcagctcctttctcagacatttga

SEQ ID NO: 2089436 - DNA, 25 bp, Homo sapien
agctcctttctcagacatttgataa

SEQ ID NO: 2089437 - DNA, 25 bp, Homo sapien
taaaatgatttgtattccggaattc

SEQ ID NO: 2089438 - DNA, 25 bp, Homo sapien
tattttggtggtgaaaacacggctg

SEQ ID NO: 2089439 - DNA, 25 bp, Homo sapien
tttggtggtgaaaacacggctggca

SEQ ID NO: 2089440 - DNA, 25 bp, Homo sapien
ttttggtggtgaaaacacggctggc

SEQ ID NO: 2089441 - DNA, 25 bp, Homo sapien
ttggtggtgaaaacacggctggcaa

SEQ ID NO: 2089442 - DNA, 25 bp, Homo sapien
gcactaagttctaccattgccttgg

SEQ ID NO: 2089443 - DNA, 25 bp, Homo sapien
cagtcacatgtcctccatgggtaca

SEQ ID NO: 2089444 - DNA, 25 bp, Homo sapien
tgcctttatgcaacaggaactgttc

SEQ ID NO: 2089445 - DNA, 25 bp, Homo sapien
tctctaccttcctgttagcactaag

SEQ ID NO: 2089446 - DNA, 25 bp, Homo sapien
cacttctctctcatctgtctcttca

SEQ ID NO: 2089447 - DNA, 25 bp, Homo sapien
tcccacttctctctcatctgtctct

SEQ ID NO: 2089448 - DNA, 25 bp, Homo sapien
tctctcccacttctctctcatctgt

SEQ ID NO: 2089449 - DNA, 25 bp, Homo sapien
acttctctctcatctgtctcttcat

SEQ ID NO: 2089450 - DNA, 25 bp, Homo sapien
tagctgtcactcattcttagagggc

SEQ ID NO: 2089451 - DNA, 25 bp, Homo sapien
tccttcaatatctcttgcagcttat

SEQ ID NO: 2089452 - DNA, 25 bp, Homo sapien
ctcttgcagcttattccttatatag

SEQ ID NO: 2089453 - DNA, 25 bp, Homo sapien
ttttcaaattggttggactccttca

SEQ ID NO: 2089454 - DNA, 25 bp, Homo sapien
atgtttcaccccttccccatcaaag

SEQ ID NO: 2089455 - DNA, 25 bp, Homo sapien
tgtttcaccccttccccatcaaagc

SEQ ID NO: 2089456 - DNA, 25 bp, Homo sapien
ttttcatcttcttctaatcctttgc

SEQ ID NO: 2089457 - DNA, 25 bp, Homo sapien
catcttcttctaatcctttgccatc

SEQ ID NO: 2089458 - DNA, 25 bp, Homo sapien
cttcttctaatcctttgccatcact

SEQ ID NO: 2089459 - DNA, 25 bp, Homo sapien
ctaatcctttgccatcactgcaggg

SEQ ID NO: 2089460 - DNA, 25 bp, Homo sapien
cagttttgatcttgttagttcttcc

SEQ ID NO: 2089461 - DNA, 25 bp, Homo sapien
cagcatgttctcgttgcttgtgcag

SEQ ID NO: 2089462 - DNA, 25 bp, Homo sapien
gcattccactgtagcatcctcaaca

SEQ ID NO: 2089463 - DNA, 25 bp, Homo sapien
ctggttcacactctcatgtagcagc

SEQ ID NO: 2089464 - DNA, 25 bp, Homo sapien
cctaattggaattgctaagatttcc

SEQ ID NO: 2089465 - DNA, 25 bp, Homo sapien
cattggcattcaaaacacgctgggc

SEQ ID NO: 2089466 - DNA, 25 bp, Homo sapien
aacacgctgggcatatataatatct

SEQ ID NO: 2089467 - DNA, 25 bp, Homo sapien
ggcattcaaaacacgctgggcatat

SEQ ID NO: 2089468 - DNA, 25 bp, Homo sapien
cacaattagcatttgctgcactaca

SEQ ID NO: 2089469 - DNA, 25 bp, Homo sapien
tcattataggtatctgagtctgcct

SEQ ID NO: 2089470 - DNA, 25 bp, Homo sapien
gctaccttcccagtattgatttgca

SEQ ID NO: 2089471 - DNA, 25 bp, Homo sapien
tcatgcttcaaagacctaggcaacg

SEQ ID NO: 2089472 - DNA, 25 bp, Homo sapien
tgttgttagttctaaactgtggacc

SEQ ID NO: 2089473 - DNA, 25 bp, Homo sapien
ctgttgttagttctaaactgtggac

SEQ ID NO: 2089474 - DNA, 25 bp, Homo sapien
cttctgttgttagttctaaactgtg

SEQ ID NO: 2089475 - DNA, 25 bp, Homo sapien
tctgttgttagttctaaactgtgga

SEQ ID NO: 2089476 - DNA, 25 bp, Homo sapien
gaatgtcccaaacttcttagtccaa

SEQ ID NO: 2089477 - DNA, 25 bp, Homo sapien
cttcttagtccaaagttcataaggg

SEQ ID NO: 2089478 - DNA, 25 bp, Homo sapien
ccaaagttcataagggtcaaactat

SEQ ID NO: 2089479 - DNA, 25 bp, Homo sapien
taagaatgtcccaaacttcttagtc

SEQ ID NO: 2089480 - DNA, 25 bp, Homo sapien
tcttcacattttttttggtagggca

SEQ ID NO: 2089481 - DNA, 25 bp, Homo sapien
cttcacattttttttggtagggcat

SEQ ID NO: 2089482 - DNA, 25 bp, Homo sapien
acaaccacagctcataaaatcccat

SEQ ID NO: 2089483 - DNA, 25 bp, Homo sapien
cagtgtgcgtctgacatggattcag

SEQ ID NO: 2089484 - DNA, 25 bp, Homo sapien
gcgtctgacatggattcagctctcc

SEQ ID NO: 2089485 - DNA, 25 bp, Homo sapien
tctgacatggattcagctctccttg

SEQ ID NO: 2089486 - DNA, 25 bp, Homo sapien
tgtgcgtctgacatggattcagctc

SEQ ID NO: 2089487 - DNA, 25 bp, Homo sapien
agatgaaccacagcaaggcagatac

SEQ ID NO: 2089488 - DNA, 25 bp, Homo sapien
gtaaagatgaaccacagcaaggcag

SEQ ID NO: 2089489 - DNA, 25 bp, Homo sapien
ctgtaaagatgaaccacagcaaggc

SEQ ID NO: 2089490 - DNA, 25 bp, Homo sapien
aaagatgaaccacagcaaggcagat

SEQ ID NO: 2089491 - DNA, 25 bp, Homo sapien
catttgacttgatatttgaaactct

SEQ ID NO: 2089492 - DNA, 25 bp, Homo sapien
ggccttttgctattgctggcatgac

SEQ ID NO: 2089493 - DNA, 25 bp, Homo sapien
gcaggtacttcaactaggcttttca

SEQ ID NO: 2089494 - DNA, 25 bp, Homo sapien
caagaagtctgccattggcaggtac

SEQ ID NO: 2089495 - DNA, 25 bp, Homo sapien
ttacacactaatgcctcttgaaggc

SEQ ID NO: 2089496 - DNA, 25 bp, Homo sapien
tgctcctctctgcaataaacttgaa

SEQ ID NO: 2089497 - DNA, 25 bp, Homo sapien
ctttgctattcccattttggctaat

SEQ ID NO: 2089498 - DNA, 25 bp, Homo sapien
catttatatcacacttcaggaggtt

SEQ ID NO: 2089499 - DNA, 25 bp, Homo sapien
caatgggcatgcagtaataaggatg

SEQ ID NO: 2089500 - DNA, 25 bp, Homo sapien
ggcaatgggcatgcagtaataagga

SEQ ID NO: 2089501 - DNA, 25 bp, Homo sapien
ttgggcaatgggcatgcagtaataa

SEQ ID NO: 2089502 - DNA, 25 bp, Homo sapien
ggcatgcagtaataaggatgcccat

SEQ ID NO: 2089503 - DNA, 25 bp, Homo sapien
agggttttaaacatccaagtgcatg

SEQ ID NO: 2089504 - DNA, 25 bp, Homo sapien
gaaaagacaccagagtccaaggcca

SEQ ID NO: 2089505 - DNA, 25 bp, Homo sapien
tgagggcagggttttaaacatccaa

SEQ ID NO: 2089506 - DNA, 25 bp, Homo sapien
gctgcattaggaacatgagggcagg

SEQ ID NO: 2089507 - DNA, 25 bp, Homo sapien
tctgcaaaacccatttaggtgcttc

SEQ ID NO: 2089508 - DNA, 25 bp, Homo sapien
catttaggtgcttctacgggagtca

SEQ ID NO: 2089509 - DNA, 25 bp, Homo sapien
gagtcaggtgattcccagagtccaa

SEQ ID NO: 2089510 - DNA, 25 bp, Homo sapien
tccaatgacatgagacttcggagat

SEQ ID NO: 2089511 - DNA, 25 bp, Homo sapien
aagggggtacgatgacagcaagagg

SEQ ID NO: 2089512 - DNA, 25 bp, Homo sapien
aggagaagagaggtcgggagacgga

SEQ ID NO: 2089513 - DNA, 25 bp, Homo sapien
ggagaagagaggtcgggagacggag

SEQ ID NO: 2089514 - DNA, 25 bp, Homo sapien
ctgaagggggtacgatgacagcaag

SEQ ID NO: 2089515 - DNA, 25 bp, Homo sapien
aaagagtgactggccgttcagcgag

SEQ ID NO: 2089516 - DNA, 25 bp, Homo sapien
caagctctgaagtgcgcatgtttcc

SEQ ID NO: 2089517 - DNA, 25 bp, Homo sapien
cctataaatttcagcactcggacag

SEQ ID NO: 2089518 - DNA, 25 bp, Homo sapien
gacgtgcctgctgttcgaaggcaaa

SEQ ID NO: 2089519 - DNA, 25 bp, Homo sapien
taatcgcatcaccatgcaaagggag

SEQ ID NO: 2089520 - DNA, 25 bp, Homo sapien
tatagaatgagacggagacgtgatc

SEQ ID NO: 2089521 - DNA, 25 bp, Homo sapien
aagaaaggactctgcgcgctggagt

SEQ ID NO: 2089522 - DNA, 25 bp, Homo sapien
gacaatgccatgctagatagctgtg

SEQ ID NO: 2089523 - DNA, 25 bp, Homo sapien
gggcatcatggtcaggtcaaaccga

SEQ ID NO: 2089524 - DNA, 25 bp, Homo sapien
gtcaaaccgaggcttgggaccatca

SEQ ID NO: 2089525 - DNA, 25 bp, Homo sapien
accatcagttaacccagaaagacaa

SEQ ID NO: 2089526 - DNA, 25 bp, Homo sapien
gcctcagaactgatgaatcccccag

SEQ ID NO: 2089527 - DNA, 25 bp, Homo sapien
gtttattgtccagattcaaaatttg

SEQ ID NO: 2089528 - DNA, 25 bp, Homo sapien
tattgtccagattcaaaatttggca

SEQ ID NO: 2089529 - DNA, 25 bp, Homo sapien
ctgtttattgtccagattcaaaatt

SEQ ID NO: 2089530 - DNA, 25 bp, Homo sapien
ttattgtccagattcaaaatttggc

SEQ ID NO: 2089531 - DNA, 25 bp, Homo sapien
gattccagaaagatgctaggacaaa

SEQ ID NO: 2089532 - DNA, 25 bp, Homo sapien
ggaaaatatcccgaaatgattccag

SEQ ID NO: 2089533 - DNA, 25 bp, Homo sapien
ccagaaagatgctaggacaaagtgt

SEQ ID NO: 2089534 - DNA, 25 bp, Homo sapien
gttgcttgtggaaaatatcccgaaa

SEQ ID NO: 2089535 - DNA, 25 bp, Homo sapien
gctgtcaaaatgttcactagctgcc

SEQ ID NO: 2089536 - DNA, 25 bp, Homo sapien
aaaatgttcactagctgccggttca

SEQ ID NO: 2089537 - DNA, 25 bp, Homo sapien
tgtcaaaatgttcactagctgccgg

SEQ ID NO: 2089538 - DNA, 25 bp, Homo sapien
acaaggctgtcaaaatgttcactag

SEQ ID NO: 2089539 - DNA, 25 bp, Homo sapien
tatcaacatgcaaagtcgtttcacc

SEQ ID NO: 2089540 - DNA, 25 bp, Homo sapien
gttgttttccagacctggagtcatg

SEQ ID NO: 2089541 - DNA, 25 bp, Homo sapien
aacttgtccaagaaatctgaaggag

SEQ ID NO: 2089542 - DNA, 25 bp, Homo sapien
taacttgtccaagaaatctgaagga

SEQ ID NO: 2089543 - DNA, 25 bp, Homo sapien
tgtccttcccattaacttgtccaag

SEQ ID NO: 2089544 - DNA, 25 bp, Homo sapien
ctcgcacacacgtatactccaatcc

SEQ ID NO: 2089545 - DNA, 25 bp, Homo sapien
cgcacacacgtatactccaatccat

SEQ ID NO: 2089546 - DNA, 25 bp, Homo sapien
tcgcacacacgtatactccaatcca

SEQ ID NO: 2089547 - DNA, 25 bp, Homo sapien
gcacacacgtatactccaatccatt

SEQ ID NO: 2089548 - DNA, 25 bp, Homo sapien
taaaatcaggcctcatgagtctcga

SEQ ID NO: 2089549 - DNA, 25 bp, Homo sapien
tacaggacctgaaaccatgctaggc

SEQ ID NO: 2089550 - DNA, 25 bp, Homo sapien
tgaatgggccctcttgtagccaagg

SEQ ID NO: 2089551 - DNA, 25 bp, Homo sapien
aaattgagttcccagccacaatggg

SEQ ID NO: 2089552 - DNA, 25 bp, Homo sapien
actgagttctcctgtaccacgggcc

SEQ ID NO: 2089553 - DNA, 25 bp, Homo sapien
tcaagtacctcctcttttataaagc

SEQ ID NO: 2089554 - DNA, 25 bp, Homo sapien
tcaataccaaattcaagtacctcct

SEQ ID NO: 2089555 - DNA, 25 bp, Homo sapien
tgagttctcctgtaccacgggccct

SEQ ID NO: 2089556 - DNA, 25 bp, Homo sapien
ggtcactacagtactgttaggaaac

SEQ ID NO: 2089557 - DNA, 25 bp, Homo sapien
ctacagtactgttaggaaacaggtt

SEQ ID NO: 2089558 - DNA, 25 bp, Homo sapien
ggaaggtcactacagtactgttagg

SEQ ID NO: 2089559 - DNA, 25 bp, Homo sapien
cactacagtactgttaggaaacagg

SEQ ID NO: 2089560 - DNA, 25 bp, Homo sapien
cattgtagacatcaacagcggttcc

SEQ ID NO: 2089561 - DNA, 25 bp, Homo sapien
aaactattgaactggattcactgtc

SEQ ID NO: 2089562 - DNA, 25 bp, Homo sapien
gttccctcgtagtgatgaaatagcc

SEQ ID NO: 2089563 - DNA, 25 bp, Homo sapien
gaccttaggatcatcaacattgtag

SEQ ID NO: 2089564 - DNA, 25 bp, Homo sapien
agctccattaacatctgtgcaattg

SEQ ID NO: 2089565 - DNA, 25 bp, Homo sapien
gctccattaacatctgtgcaattgg

SEQ ID NO: 2089566 - DNA, 25 bp, Homo sapien
tgcaatgagaatattgcaatagaca

SEQ ID NO: 2089567 - DNA, 25 bp, Homo sapien
aatattgcaatagacattgaagcaa

SEQ ID NO: 2089568 - DNA, 25 bp, Homo sapien
catggtcgtttctgtgactgatcca

SEQ ID NO: 2089569 - DNA, 25 bp, Homo sapien
aatattgcaagtaacgtttactgga

SEQ ID NO: 2089570 - DNA, 25 bp, Homo sapien
ctgtgactgatccaaaactgttgat

SEQ ID NO: 2089571 - DNA, 25 bp, Homo sapien
tattgcaagtaacgtttactggagg

SEQ ID NO: 2089572 - DNA, 25 bp, Homo sapien
ttgcaggtaacatttacaggaggcc

SEQ ID NO: 2089573 - DNA, 25 bp, Homo sapien
ctccacatatttggcaactggattt

SEQ ID NO: 2089574 - DNA, 25 bp, Homo sapien
tctccacatatttggcaactggatt

SEQ ID NO: 2089575 - DNA, 25 bp, Homo sapien
tgtacgccagccgtgaatcattcca

SEQ ID NO: 2089576 - DNA, 25 bp, Homo sapien
ctgatactgtagagcactttgccat

SEQ ID NO: 2089577 - DNA, 25 bp, Homo sapien
tgacatcgtggaagttggcaccctt

SEQ ID NO: 2089578 - DNA, 25 bp, Homo sapien
tcatctgggtactcactgtacgcca

SEQ ID NO: 2089579 - DNA, 25 bp, Homo sapien
gctttggtgcccatatagagttaat

SEQ ID NO: 2089580 - DNA, 25 bp, Homo sapien
aagtattaggaaaggtgatcgtgct

SEQ ID NO: 2089581 - DNA, 25 bp, Homo sapien
tgacaatcaaaaccttgggctttgg

SEQ ID NO: 2089582 - DNA, 25 bp, Homo sapien
gcttgttatgaaatcagtggactgt

SEQ ID NO: 2089583 - DNA, 25 bp, Homo sapien
gacaggcaccttgaaattctgaatc

SEQ ID NO: 2089584 - DNA, 25 bp, Homo sapien
aaagatccaagtagtttaagacagg

SEQ ID NO: 2089585 - DNA, 25 bp, Homo sapien
agtagtttaagacaggcaccttgaa

SEQ ID NO: 2089586 - DNA, 25 bp, Homo sapien
ttaagacaggcaccttgaaattctg

SEQ ID NO: 2089587 - DNA, 25 bp, Homo sapien
acccctgctcctgtttgcacaaggg

SEQ ID NO: 2089588 - DNA, 25 bp, Homo sapien
cctgtttgcacaagggaagaagtaa

SEQ ID NO: 2089589 - DNA, 25 bp, Homo sapien
tgcacaagggaagaagtaaagttcc

SEQ ID NO: 2089590 - DNA, 25 bp, Homo sapien
gaagaagtaaagttccttcacagag

SEQ ID NO: 2089591 - DNA, 25 bp, Homo sapien
tttcctgaagcattattgtccgttc

SEQ ID NO: 2089592 - DNA, 25 bp, Homo sapien
ttcctgaagcattattgtccgttcc

SEQ ID NO: 2089593 - DNA, 25 bp, Homo sapien
cacatgaaggcattgagctgaggct

SEQ ID NO: 2089594 - DNA, 25 bp, Homo sapien
acatgaaggcattgagctgaggctg

SEQ ID NO: 2089595 - DNA, 25 bp, Homo sapien
tcttccccgataatctgaaatatta

SEQ ID NO: 2089596 - DNA, 25 bp, Homo sapien
tcagatttgtcctcttccccgataa

SEQ ID NO: 2089597 - DNA, 25 bp, Homo sapien
atttgtcctcttccccgataatctg

SEQ ID NO: 2089598 - DNA, 25 bp, Homo sapien
gtcctcttccccgataatctgaaat

SEQ ID NO: 2089599 - DNA, 25 bp, Homo sapien
gggacaggataaggtcaaggtgagt

SEQ ID NO: 2089600 - DNA, 25 bp, Homo sapien
tgcattgtacaggtctggacatcca

SEQ ID NO: 2089601 - DNA, 25 bp, Homo sapien
catccatcggaaagttcttcaagtc

SEQ ID NO: 2089602 - DNA, 25 bp, Homo sapien
ctggacatccatcggaaagttcttc

SEQ ID NO: 2089603 - DNA, 25 bp, Homo sapien
tacaggtctggacatccatcggaaa

SEQ ID NO: 2089604 - DNA, 25 bp, Homo sapien
cagtgttgtagtgctttgtacagta

SEQ ID NO: 2089605 - DNA, 25 bp, Homo sapien
cagcaacttgcactggaccatcact

SEQ ID NO: 2089606 - DNA, 25 bp, Homo sapien
gggcagggtcaatccttcagcaact

SEQ ID NO: 2089607 - DNA, 25 bp, Homo sapien
atcacttaaccactcaaatatcagg

SEQ ID NO: 2089608 - DNA, 25 bp, Homo sapien
aactctgggtggtcatcgttaagac

SEQ ID NO: 2089609 - DNA, 25 bp, Homo sapien
caaaattactataagcaggcttggg

SEQ ID NO: 2089610 - DNA, 25 bp, Homo sapien
caggcttgggatgtacatctggatc

SEQ ID NO: 2089611 - DNA, 25 bp, Homo sapien
gactgtggtgatgcccagtgcgacc

SEQ ID NO: 2089612 - DNA, 25 bp, Homo sapien
agagaataagcctgcatcctaaaaa

SEQ ID NO: 2089613 - DNA, 25 bp, Homo sapien
gagaataagcctgcatcctaaaaaa

SEQ ID NO: 2089614 - DNA, 25 bp, Homo sapien
cagagaataagcctgcatcctaaaa

SEQ ID NO: 2089615 - DNA, 25 bp, Homo sapien
atcccagttatcctctttcaagtcc

SEQ ID NO: 2089616 - DNA, 25 bp, Homo sapien
ccactggactggtatgagactgaga

SEQ ID NO: 2089617 - DNA, 25 bp, Homo sapien
ggtatgagactgagactggctcctc

SEQ ID NO: 2089618 - DNA, 25 bp, Homo sapien
tcaaattaagtttactttgctgact

SEQ ID NO: 2089619 - DNA, 25 bp, Homo sapien
cccaaggtggttgtcactgtctttt

SEQ ID NO: 2089620 - DNA, 25 bp, Homo sapien
ggttgtcactgtcttttacaaggtc

SEQ ID NO: 2089621 - DNA, 25 bp, Homo sapien
agttgtaaagccctgccccaaggtg

SEQ ID NO: 2089622 - DNA, 25 bp, Homo sapien
tcaggttttgcagttgtaaagccct

SEQ ID NO: 2089623 - DNA, 25 bp, Homo sapien
tgaagaagcttaagacacagtagat

SEQ ID NO: 2089624 - DNA, 25 bp, Homo sapien
tcactttgggtaagagataaccgtc

SEQ ID NO: 2089625 - DNA, 25 bp, Homo sapien
aataactagtctggctaaactcagg

SEQ ID NO: 2089626 - DNA, 25 bp, Homo sapien
tattcatttaccctatcactttggg

SEQ ID NO: 2089627 - DNA, 25 bp, Homo sapien
cagatcatcaaggatgtctcgatag

SEQ ID NO: 2089628 - DNA, 25 bp, Homo sapien
tgtctcgataggagccaacttgcca

SEQ ID NO: 2089629 - DNA, 25 bp, Homo sapien
taggagccaacttgccagacacctt

SEQ ID NO: 2089630 - DNA, 25 bp, Homo sapien
caaggatgtctcgataggagccaac

SEQ ID NO: 2089631 - DNA, 25 bp, Homo sapien
tgcacctgaaccctctgagcactgt

SEQ ID NO: 2089632 - DNA, 25 bp, Homo sapien
tgtgataactccaggatacaaagag

SEQ ID NO: 2089633 - DNA, 25 bp, Homo sapien
aacttctccaccaatgcacctgaac

SEQ ID NO: 2089634 - DNA, 25 bp, Homo sapien
aggatacaaagaggccccttctggt

SEQ ID NO: 2089635 - DNA, 25 bp, Homo sapien
gcaccatagggacactctgcagaaa

SEQ ID NO: 2089636 - DNA, 25 bp, Homo sapien
caccatagggacactctgcagaaag

SEQ ID NO: 2089637 - DNA, 25 bp, Homo sapien
tgcagaaaggcacctctaagtctca

SEQ ID NO: 2089638 - DNA, 25 bp, Homo sapien
gaaaggcacctctaagtctcagcct

SEQ ID NO: 2089639 - DNA, 25 bp, Homo sapien
acaagcaacaccaggtgatatccat

SEQ ID NO: 2089640 - DNA, 25 bp, Homo sapien
cacaagcaacaccaggtgatatcca

SEQ ID NO: 2089641 - DNA, 25 bp, Homo sapien
tttcatgagtggagaggtacaagaa

SEQ ID NO: 2089642 - DNA, 25 bp, Homo sapien
ttcatgagtggagaggtacaagaag

SEQ ID NO: 2089643 - DNA, 25 bp, Homo sapien
gtttcatgagtggagaggtacaaga

SEQ ID NO: 2089644 - DNA, 25 bp, Homo sapien
agtttcatgagtggagaggtacaag

SEQ ID NO: 2089645 - DNA, 25 bp, Homo sapien
ccagtgaccgggatatgctgggcac

SEQ ID NO: 2089646 - DNA, 25 bp, Homo sapien
gctttattcctaggtggtgtagcac

SEQ ID NO: 2089647 - DNA, 25 bp, Homo sapien
ccacatgacaaagtaaaggaaggac

SEQ ID NO: 2089648 - DNA, 25 bp, Homo sapien
tatggtggtcttgcgaataatgagc

SEQ ID NO: 2089649 - DNA, 25 bp, Homo sapien
gatgtcaatcgcttttacataggag

SEQ ID NO: 2089650 - DNA, 25 bp, Homo sapien
agatgtcaatcgcttttacatagga

SEQ ID NO: 2089651 - DNA, 25 bp, Homo sapien
cagatgtcaatcgcttttacatagg

SEQ ID NO: 2089652 - DNA, 25 bp, Homo sapien
tgtcaatcgcttttacataggagac

SEQ ID NO: 2089653 - DNA, 25 bp, Homo sapien
cgcaggaactccttgtgttgcctgg

SEQ ID NO: 2089654 - DNA, 25 bp, Homo sapien
tgtcttcttcggaggcgcaggaact

SEQ ID NO: 2089655 - DNA, 25 bp, Homo sapien
gtattccagtaaggcagcaaacaca

SEQ ID NO: 2089656 - DNA, 25 bp, Homo sapien
gagacgaagttcaccgctgcgtatt

SEQ ID NO: 2089657 - DNA, 25 bp, Homo sapien
tgtgttgaaataccatcgtaatgta

SEQ ID NO: 2089658 - DNA, 25 bp, Homo sapien
gaccaatagacagttgcagcatgaa

SEQ ID NO: 2089659 - DNA, 25 bp, Homo sapien
gaaggacttaaaccatccactgacc

SEQ ID NO: 2089660 - DNA, 25 bp, Homo sapien
gaatattttctaggtggcacaagtg

SEQ ID NO: 2089661 - DNA, 25 bp, Homo sapien
gagggtgcccccagttacactgacc

SEQ ID NO: 2089662 - DNA, 25 bp, Homo sapien
cagttacactgacctcatctgtcaa

SEQ ID NO: 2089663 - DNA, 25 bp, Homo sapien
cttctctctgtacccaggccctcca

SEQ ID NO: 2089664 - DNA, 25 bp, Homo sapien
tgtacccaggccctccacttggagg

SEQ ID NO: 2089665 - DNA, 25 bp, Homo sapien
taaactggctagtggctctctgtgc

SEQ ID NO: 2089666 - DNA, 25 bp, Homo sapien
tgagatacagcatcactgcctaagg

SEQ ID NO: 2089667 - DNA, 25 bp, Homo sapien
aaactgctctgtaagtcatgctagg

SEQ ID NO: 2089668 - DNA, 25 bp, Homo sapien
gaatgtgttcctgattgaccactgg

SEQ ID NO: 2089669 - DNA, 25 bp, Homo sapien
ccttgaggcttttgatttatcgaca

SEQ ID NO: 2089670 - DNA, 25 bp, Homo sapien
gcttttgatttatcgacattgccca

SEQ ID NO: 2089671 - DNA, 25 bp, Homo sapien
cctttgtgggagatacatgcagcct

SEQ ID NO: 2089672 - DNA, 25 bp, Homo sapien
agaagagttcaacgcagtccttgag

SEQ ID NO: 2089673 - DNA, 25 bp, Homo sapien
ttctccaaatcccagtgttacactg

SEQ ID NO: 2089674 - DNA, 25 bp, Homo sapien
cactgtaagtctatgaagaggacca

SEQ ID NO: 2089675 - DNA, 25 bp, Homo sapien
gaggcttttggaatagcgagttctc

SEQ ID NO: 2089676 - DNA, 25 bp, Homo sapien
cctggccctaaggaacctatagtat

SEQ ID NO: 2089677 - DNA, 25 bp, Homo sapien
aagcacagattggttgtcagtcaag

SEQ ID NO: 2089678 - DNA, 25 bp, Homo sapien
cacagattggttgtcagtcaagtta

SEQ ID NO: 2089679 - DNA, 25 bp, Homo sapien
gattggttgtcagtcaagttagatg

SEQ ID NO: 2089680 - DNA, 25 bp, Homo sapien
tgtcagtcaagttagatggaagatg

SEQ ID NO: 2089681 - DNA, 25 bp, Homo sapien
caggtgtggccttgacagctgttcc

SEQ ID NO: 2089682 - DNA, 25 bp, Homo sapien
ttggaggcagtgacccatcccataa

SEQ ID NO: 2089683 - DNA, 25 bp, Homo sapien
gaaggcagctcgagatatcgtgtca

SEQ ID NO: 2089684 - DNA, 25 bp, Homo sapien
gactttcacgagtaacgtcttcttc

SEQ ID NO: 2089685 - DNA, 25 bp, Homo sapien
taaaatgcacacctatatggacagt

SEQ ID NO: 2089686 - DNA, 25 bp, Homo sapien
gaattcaaaccacgtagctctggta

SEQ ID NO: 2089687 - DNA, 25 bp, Homo sapien
tgaaaaagtttggtcctcgactcac

SEQ ID NO: 2089688 - DNA, 25 bp, Homo sapien
tcacagttgggcgattaaagtcacg

SEQ ID NO: 2089689 - DNA, 25 bp, Homo sapien
ctttggcaggcattgcggataacca

SEQ ID NO: 2089690 - DNA, 25 bp, Homo sapien
cggataaccagtggaaacatagcca

SEQ ID NO: 2089691 - DNA, 25 bp, Homo sapien
caccaatgtttttctagcgatagta

SEQ ID NO: 2089692 - DNA, 25 bp, Homo sapien
tgactttttcagtaggcacagcata

SEQ ID NO: 2089693 - DNA, 25 bp, Homo sapien
gtaccatttcgctccaaggcctctt

SEQ ID NO: 2089694 - DNA, 25 bp, Homo sapien
tccttgtaggtaccatttcgctcca

SEQ ID NO: 2089695 - DNA, 25 bp, Homo sapien
taggtaccatttcgctccaaggcct

SEQ ID NO: 2089696 - DNA, 25 bp, Homo sapien
ttgtaggtaccatttcgctccaagg

SEQ ID NO: 2089697 - DNA, 25 bp, Homo sapien
ccaattcagattaaggacttcaggt

SEQ ID NO: 2089698 - DNA, 25 bp, Homo sapien
gatggttagatctagagactgggtc

SEQ ID NO: 2089699 - DNA, 25 bp, Homo sapien
ggtaagtccatgctgatacgtccaa

SEQ ID NO: 2089700 - DNA, 25 bp, Homo sapien
tagttagaccctcaagtatagtttg

SEQ ID NO: 2089701 - DNA, 25 bp, Homo sapien
cccttgtccccgcattgcgggagag

SEQ ID NO: 2089702 - DNA, 25 bp, Homo sapien
ttgccgctgcgttgaggtaggatgg

SEQ ID NO: 2089703 - DNA, 25 bp, Homo sapien
tggggcctccggtatgttgccgctg

SEQ ID NO: 2089704 - DNA, 25 bp, Homo sapien
ccttcccaggacttcgcagaggggg

SEQ ID NO: 2089705 - DNA, 25 bp, Homo sapien
gcccaatccaatgcggacgcctggg

SEQ ID NO: 2089706 - DNA, 25 bp, Homo sapien
gaccgagtatctcatcacccggcag

SEQ ID NO: 2089707 - DNA, 25 bp, Homo sapien
tgtgattgcggttgtcgccgtcgcc

SEQ ID NO: 2089708 - DNA, 25 bp, Homo sapien
gatcaccgtcgtggatgtgattgcg

SEQ ID NO: 2089709 - DNA, 25 bp, Homo sapien
ccccgggcctcagaggcggcttccg

SEQ ID NO: 2089710 - DNA, 25 bp, Homo sapien
gggccagcggcggtgcaataggctc

SEQ ID NO: 2089711 - DNA, 25 bp, Homo sapien
agcggcggtgcaataggctcctcac

SEQ ID NO: 2089712 - DNA, 25 bp, Homo sapien
ctgcacacgggcgctcggtccccgg

SEQ ID NO: 2089713 - DNA, 25 bp, Homo sapien
tcctccgggtctcagagatgagctt

SEQ ID NO: 2089714 - DNA, 25 bp, Homo sapien
cacatactcagcttcgaacctcctc

SEQ ID NO: 2089715 - DNA, 25 bp, Homo sapien
tcagcttcgaacctcctccgggtct

SEQ ID NO: 2089716 - DNA, 25 bp, Homo sapien
ctcagagatgagcttggctttattc

SEQ ID NO: 2089717 - DNA, 25 bp, Homo sapien
gaaccgtggactggacaatgtcacc

SEQ ID NO: 2089718 - DNA, 25 bp, Homo sapien
tgaccatttgaagcagtgcacacgg

SEQ ID NO: 2089719 - DNA, 25 bp, Homo sapien
gcaagttccataaacacgagggcat

SEQ ID NO: 2089720 - DNA, 25 bp, Homo sapien
ggaaaacctttgagacgtgcccagc

SEQ ID NO: 2089721 - DNA, 25 bp, Homo sapien
aatgaggaggttgccccaagatgac

SEQ ID NO: 2089722 - DNA, 25 bp, Homo sapien
gaacggtggtcaaatctgcactaag

SEQ ID NO: 2089723 - DNA, 25 bp, Homo sapien
taagcaagcagagtagtaacagatg

SEQ ID NO: 2089724 - DNA, 25 bp, Homo sapien
ggcctagccaataacatcagggatt

SEQ ID NO: 2089725 - DNA, 25 bp, Homo sapien
tgactcatatctcttgaatctcccg

SEQ ID NO: 2089726 - DNA, 25 bp, Homo sapien
cccaaattgctacaaatgataggct

SEQ ID NO: 2089727 - DNA, 25 bp, Homo sapien
gacattctattcactacttgcgtga

SEQ ID NO: 2089728 - DNA, 25 bp, Homo sapien
gctaactgacatgcattacttcaca

SEQ ID NO: 2089729 - DNA, 25 bp, Homo sapien
ccattgctgagaagttggtaatcca

SEQ ID NO: 2089730 - DNA, 25 bp, Homo sapien
ttagaggtgtgttattctagtttcc

SEQ ID NO: 2089731 - DNA, 25 bp, Homo sapien
taagtactctggaatttccaatgtg

SEQ ID NO: 2089732 - DNA, 25 bp, Homo sapien
cccacgggttatttagcagaagaat

SEQ ID NO: 2089733 - DNA, 25 bp, Homo sapien
ggtatttgtaaccagttcctacata

SEQ ID NO: 2089734 - DNA, 25 bp, Homo sapien
agttcctacatactgctgatgctgc

SEQ ID NO: 2089735 - DNA, 25 bp, Homo sapien
tttgtaaccagttcctacatactgc

SEQ ID NO: 2089736 - DNA, 25 bp, Homo sapien
aaccagttcctacatactgctgatg

SEQ ID NO: 2089737 - DNA, 25 bp, Homo sapien
aaatacagttactagcacggaagac

SEQ ID NO: 2089738 - DNA, 25 bp, Homo sapien
atacagttactagcacggaagacat

SEQ ID NO: 2089739 - DNA, 25 bp, Homo sapien
gaaatacagttactagcacggaaga

SEQ ID NO: 2089740 - DNA, 25 bp, Homo sapien
aatacagttactagcacggaagaca

SEQ ID NO: 2089741 - DNA, 25 bp, Homo sapien
aactttcaacccagttatcatcttg

SEQ ID NO: 2089742 - DNA, 25 bp, Homo sapien
tctcatcgagcatcttcagtgtttc

SEQ ID NO: 2089743 - DNA, 25 bp, Homo sapien
ttgtagcctttcaacatcacgtgca

SEQ ID NO: 2089744 - DNA, 25 bp, Homo sapien
tacaatattatgtctccaagataag

SEQ ID NO: 2089745 - DNA, 25 bp, Homo sapien
gaaaggcataggcaacaactgagaa

SEQ ID NO: 2089746 - DNA, 25 bp, Homo sapien
tctatatggcgtacctattaaccta

SEQ ID NO: 2089747 - DNA, 25 bp, Homo sapien
taggcctagtagcaaagatactgtc

SEQ ID NO: 2089748 - DNA, 25 bp, Homo sapien
gaagactgtgataggcttccttggg

SEQ ID NO: 2089749 - DNA, 25 bp, Homo sapien
ttttggtggagagaactaacaggtc

SEQ ID NO: 2089750 - DNA, 25 bp, Homo sapien
gaagttaaggctgcatgtaccccaa

SEQ ID NO: 2089751 - DNA, 25 bp, Homo sapien
tctgctttatgcctaactgaaaaca

SEQ ID NO: 2089752 - DNA, 25 bp, Homo sapien
gaggttataatcctcaaggacagaa

SEQ ID NO: 2089753 - DNA, 25 bp, Homo sapien
aaagtaactgtggtatttgcagtta

SEQ ID NO: 2089754 - DNA, 25 bp, Homo sapien
gttaaacataatggcaaatgctgca

SEQ ID NO: 2089755 - DNA, 25 bp, Homo sapien
gttatctagtagactttaatgcatt

SEQ ID NO: 2089756 - DNA, 25 bp, Homo sapien
gcaccaatctaatattaagtttgtt

SEQ ID NO: 2089757 - DNA, 25 bp, Homo sapien
tctgggaatggaggattcattaagg

SEQ ID NO: 2089758 - DNA, 25 bp, Homo sapien
cataaccatggagataaataacacc

SEQ ID NO: 2089759 - DNA, 25 bp, Homo sapien
tctttgtcataaccatggagataaa

SEQ ID NO: 2089760 - DNA, 25 bp, Homo sapien
accaatttccaataaccatctggga

SEQ ID NO: 2089761 - DNA, 25 bp, Homo sapien
tttccctcttagcataacgttccaa

SEQ ID NO: 2089762 - DNA, 25 bp, Homo sapien
tacatgatacttcaccctgatccag

SEQ ID NO: 2089763 - DNA, 25 bp, Homo sapien
ttctgacaggtcaaacatcactgtt

SEQ ID NO: 2089764 - DNA, 25 bp, Homo sapien
cgttccaaccagaatgctatgagct

SEQ ID NO: 2089765 - DNA, 25 bp, Homo sapien
gtaataaaccttaaagcagttgatg

SEQ ID NO: 2089766 - DNA, 25 bp, Homo sapien
aaagcagttgatgataaagcgtaca

SEQ ID NO: 2089767 - DNA, 25 bp, Homo sapien
tgatgataaagcgtacaaagtccat

SEQ ID NO: 2089768 - DNA, 25 bp, Homo sapien
gcagttgatgataaagcgtacaaag

SEQ ID NO: 2089769 - DNA, 25 bp, Homo sapien
cgctcaggcagatctgtaaattccc

SEQ ID NO: 2089770 - DNA, 25 bp, Homo sapien
aatatacttgactgtttatgtgagt

SEQ ID NO: 2089771 - DNA, 25 bp, Homo sapien
tgagtcacgagtcccaaaagaccca

SEQ ID NO: 2089772 - DNA, 25 bp, Homo sapien
ctgttttctaggagtacgctcaggc

SEQ ID NO: 2089773 - DNA, 25 bp, Homo sapien
ttaaccaaggcatatcaaagatcac

SEQ ID NO: 2089774 - DNA, 25 bp, Homo sapien
taaccaaggcatatcaaagatcact

SEQ ID NO: 2089775 - DNA, 25 bp, Homo sapien
tgactgtcaaaagggtcatgtcact

SEQ ID NO: 2089776 - DNA, 25 bp, Homo sapien
tgagaaacctagacaaggcctgtgt

SEQ ID NO: 2089777 - DNA, 25 bp, Homo sapien
tcaagacagtttatcaatcaatggc

SEQ ID NO: 2089778 - DNA, 25 bp, Homo sapien
gacataccttatctgtgcatgacaa

SEQ ID NO: 2089779 - DNA, 25 bp, Homo sapien
tttgcttgtaaacttcaacaagctc

SEQ ID NO: 2089780 - DNA, 25 bp, Homo sapien
gggaggcaggtattctacactgaca

SEQ ID NO: 2089781 - DNA, 25 bp, Homo sapien
ttgtaaacttcaacaagctcactgc

SEQ ID NO: 2089782 - DNA, 25 bp, Homo sapien
tacactgacatagtcctggacttca

SEQ ID NO: 2089783 - DNA, 25 bp, Homo sapien
aaataatttcacatgagcctactaa

SEQ ID NO: 2089784 - DNA, 25 bp, Homo sapien
tacaagaaaataatttcacatgagc

SEQ ID NO: 2089785 - DNA, 25 bp, Homo sapien
gaaaataatttcacatgagcctact

SEQ ID NO: 2089786 - DNA, 25 bp, Homo sapien
aagaaaataatttcacatgagccta

SEQ ID NO: 2089787 - DNA, 25 bp, Homo sapien
cacagtggggtctggaagtcatcat

SEQ ID NO: 2089788 - DNA, 25 bp, Homo sapien
gtggatagctatacttgaaaggatc

SEQ ID NO: 2089789 - DNA, 25 bp, Homo sapien
tcatcatctactagtggtggatagc

SEQ ID NO: 2089790 - DNA, 25 bp, Homo sapien
gtaataggcccattctcacacagtg

SEQ ID NO: 2089791 - DNA, 25 bp, Homo sapien
agaggtgtttgttcttcattagaaa

SEQ ID NO: 2089792 - DNA, 25 bp, Homo sapien
cattagaaattgtttccaatgtttc

SEQ ID NO: 2089793 - DNA, 25 bp, Homo sapien
tttaagaagaggtgtttgttcttca

SEQ ID NO: 2089794 - DNA, 25 bp, Homo sapien
ttgttcttcattagaaattgtttcc

SEQ ID NO: 2089795 - DNA, 25 bp, Homo sapien
taaaaagtgacaactactaagtgct

SEQ ID NO: 2089796 - DNA, 25 bp, Homo sapien
tacaatatggtccttcccttaagag

SEQ ID NO: 2089797 - DNA, 25 bp, Homo sapien
cataggttactctagaaaatacaat

SEQ ID NO: 2089798 - DNA, 25 bp, Homo sapien
tccatctatcaagttcctgattact

SEQ ID NO: 2089799 - DNA, 25 bp, Homo sapien
tgatgtgtagtaaggggcctttaaa

SEQ ID NO: 2089800 - DNA, 25 bp, Homo sapien
aaggggcctttaaatacactcaatg

SEQ ID NO: 2089801 - DNA, 25 bp, Homo sapien
ctcaatggtttcttgaaagctttca

SEQ ID NO: 2089802 - DNA, 25 bp, Homo sapien
gcctttaaatacactcaatggtttc

SEQ ID NO: 2089803 - DNA, 25 bp, Homo sapien
acatttgtcaacactattaaggttt

SEQ ID NO: 2089804 - DNA, 25 bp, Homo sapien
tcttctctccggattctgtacttcc

SEQ ID NO: 2089805 - DNA, 25 bp, Homo sapien
tctgtacttccaaagtacagttctt

SEQ ID NO: 2089806 - DNA, 25 bp, Homo sapien
caacactattaaggttttcttctct

SEQ ID NO: 2089807 - DNA, 25 bp, Homo sapien
cgacctatctaaaaacatactcata

SEQ ID NO: 2089808 - DNA, 25 bp, Homo sapien
ggaaaaaagcatctcgacctatcta

SEQ ID NO: 2089809 - DNA, 25 bp, Homo sapien
cattgacgattatgcatagaaggta

SEQ ID NO: 2089810 - DNA, 25 bp, Homo sapien
catactcatatataagtcaaattgt

SEQ ID NO: 2089811 - DNA, 25 bp, Homo sapien
ggagacacaactatatccactgatg

SEQ ID NO: 2089812 - DNA, 25 bp, Homo sapien
gctgctattgcttggcttgactctg

SEQ ID NO: 2089813 - DNA, 25 bp, Homo sapien
atatccactgatgcacccgggtcac

SEQ ID NO: 2089814 - DNA, 25 bp, Homo sapien
tcacagctgctattgcttggcttga

SEQ ID NO: 2089815 - DNA, 25 bp, Homo sapien
ctgcattccaaaagggtaattcagc

SEQ ID NO: 2089816 - DNA, 25 bp, Homo sapien
tgcattccaaaagggtaattcagca

SEQ ID NO: 2089817 - DNA, 25 bp, Homo sapien
ttccaaaactgagttaattctgctg

SEQ ID NO: 2089818 - DNA, 25 bp, Homo sapien
atttctgcagccattatcagaaaac

SEQ ID NO: 2089819 - DNA, 25 bp, Homo sapien
cattatcagaaaacggtcttgggca

SEQ ID NO: 2089820 - DNA, 25 bp, Homo sapien
cagaaaacggtcttgggcagagact

SEQ ID NO: 2089821 - DNA, 25 bp, Homo sapien
tgcaacaccttttataccagcgttt

SEQ ID NO: 2089822 - DNA, 25 bp, Homo sapien
tcctccggactaaggctaatctccc

SEQ ID NO: 2089823 - DNA, 25 bp, Homo sapien
taatctattttcatgatctatcagc

SEQ ID NO: 2089824 - DNA, 25 bp, Homo sapien
gtaggccctcctgtaatacaatttg

SEQ ID NO: 2089825 - DNA, 25 bp, Homo sapien
tttatctgacatattgaaagcattg

SEQ ID NO: 2089826 - DNA, 25 bp, Homo sapien
tctgacatattgaaagcattgtctt

SEQ ID NO: 2089827 - DNA, 25 bp, Homo sapien
tcactggttttatctgacatattga

SEQ ID NO: 2089828 - DNA, 25 bp, Homo sapien
ggttttatctgacatattgaaagca

SEQ ID NO: 2089829 - DNA, 25 bp, Homo sapien
tattgctttctagtaaacgactgag

SEQ ID NO: 2089830 - DNA, 25 bp, Homo sapien
ctggaaccagatacaacgctgaact

SEQ ID NO: 2089831 - DNA, 25 bp, Homo sapien
caaaagcaagcaagagcattgttaa

SEQ ID NO: 2089832 - DNA, 25 bp, Homo sapien
aagagcattgttaaggaaagcagca

SEQ ID NO: 2089833 - DNA, 25 bp, Homo sapien
caactaatggacgaaggaaccgtgg

SEQ ID NO: 2089834 - DNA, 25 bp, Homo sapien
tagtagcttggtagagttttaggtc

SEQ ID NO: 2089835 - DNA, 25 bp, Homo sapien
catttctttattctagcagtttatt

SEQ ID NO: 2089836 - DNA, 25 bp, Homo sapien
caagacatgtatgtgttcccctcca

SEQ ID NO: 2089837 - DNA, 25 bp, Homo sapien
catgggctgacttttacagggaaca

SEQ ID NO: 2089838 - DNA, 25 bp, Homo sapien
tttaaacggagagctgacacctggg

SEQ ID NO: 2089839 - DNA, 25 bp, Homo sapien
tactgaccatcactgggaggaattc

SEQ ID NO: 2089840 - DNA, 25 bp, Homo sapien
ggtgggtactaccatatcaaaggca

SEQ ID NO: 2089841 - DNA, 25 bp, Homo sapien
aattaagacaaagtagcacaccagt

SEQ ID NO: 2089842 - DNA, 25 bp, Homo sapien
ctgaaacagaaaagcccaaattaag

SEQ ID NO: 2089843 - DNA, 25 bp, Homo sapien
cagaaaagcccaaattaagacaaag

SEQ ID NO: 2089844 - DNA, 25 bp, Homo sapien
ttaagacaaagtagcacaccagtgt

SEQ ID NO: 2089845 - DNA, 25 bp, Homo sapien
aatttgaggccaggtttaccagcaa

SEQ ID NO: 2089846 - DNA, 25 bp, Homo sapien
aagggacaccgttaggacaatacat

SEQ ID NO: 2089847 - DNA, 25 bp, Homo sapien
cacacacagggagatactgtgcaca

SEQ ID NO: 2089848 - DNA, 25 bp, Homo sapien
ggactgcagtccatttcacagctgg

SEQ ID NO: 2089849 - DNA, 25 bp, Homo sapien
gatttcagaatgatcagtgccacac

SEQ ID NO: 2089850 - DNA, 25 bp, Homo sapien
tggcagttgggcagacttcttgtta

SEQ ID NO: 2089851 - DNA, 25 bp, Homo sapien
cctgagcatgttgtctgatttcaga

SEQ ID NO: 2089852 - DNA, 25 bp, Homo sapien
gtgtctggcagttgggcagacttct

SEQ ID NO: 2089853 - DNA, 25 bp, Homo sapien
ctaccccaacattctgcttctccat

SEQ ID NO: 2089854 - DNA, 25 bp, Homo sapien
taggagatacggaagatcttcagga

SEQ ID NO: 2089855 - DNA, 25 bp, Homo sapien
taaaactaggatcctgaagagcttc

SEQ ID NO: 2089856 - DNA, 25 bp, Homo sapien
gcagggttaggatgaacaagaaata

SEQ ID NO: 2089857 - DNA, 25 bp, Homo sapien
ctaaggtgaagagcttaataggaga

SEQ ID NO: 2089858 - DNA, 25 bp, Homo sapien
aatgatgggaagctatcttgggtag

SEQ ID NO: 2089859 - DNA, 25 bp, Homo sapien
ggaatgatgggaagctatcttgggt

SEQ ID NO: 2089860 - DNA, 25 bp, Homo sapien
tgatgggaagctatcttgggtagca

SEQ ID NO: 2089861 - DNA, 25 bp, Homo sapien
gatgggaagctatcttgggtagcat

SEQ ID NO: 2089862 - DNA, 25 bp, Homo sapien
tatggccgccatccaaatgagccaa

SEQ ID NO: 2089863 - DNA, 25 bp, Homo sapien
tagtgttgctggctaacactgtctc

SEQ ID NO: 2089864 - DNA, 25 bp, Homo sapien
tcattgttgatacccatatggccgc

SEQ ID NO: 2089865 - DNA, 25 bp, Homo sapien
cctcagctgctagagttttttgttc

SEQ ID NO: 2089866 - DNA, 25 bp, Homo sapien
ctatgctggattctttgtaggcccc

SEQ ID NO: 2089867 - DNA, 25 bp, Homo sapien
ggttagttgaaaacatactatgctg

SEQ ID NO: 2089868 - DNA, 25 bp, Homo sapien
tagcctcatcaatacataaatccag

SEQ ID NO: 2089869 - DNA, 25 bp, Homo sapien
gcccaatcctttgaatggctacatg

SEQ ID NO: 2089870 - DNA, 25 bp, Homo sapien
gtctggaggagtatcttcctcccca

SEQ ID NO: 2089871 - DNA, 25 bp, Homo sapien
ggtctggaggagtatcttcctcccc

SEQ ID NO: 2089872 - DNA, 25 bp, Homo sapien
tggaggagtatcttcctccccaagg

SEQ ID NO: 2089873 - DNA, 25 bp, Homo sapien
tctggaggagtatcttcctccccaa

SEQ ID NO: 2089874 - DNA, 25 bp, Homo sapien
ttttggcctcttatgccttgctgat

SEQ ID NO: 2089875 - DNA, 25 bp, Homo sapien
tacctcagtctcattcacagtaagg

SEQ ID NO: 2089876 - DNA, 25 bp, Homo sapien
tgaagtgcttcattgagaggcccac

SEQ ID NO: 2089877 - DNA, 25 bp, Homo sapien
ttatgccttgctgatccttggtgaa

SEQ ID NO: 2089878 - DNA, 25 bp, Homo sapien
cacttcagcatctgagctccagtgt

SEQ ID NO: 2089879 - DNA, 25 bp, Homo sapien
cagagtgcacttcagcatctgagct

SEQ ID NO: 2089880 - DNA, 25 bp, Homo sapien
cagtgtttccctgtgcagtacaggc

SEQ ID NO: 2089881 - DNA, 25 bp, Homo sapien
tgaaatgtggttggctccagagtgc

SEQ ID NO: 2089882 - DNA, 25 bp, Homo sapien
actgagtatgaataaaggcttggac

SEQ ID NO: 2089883 - DNA, 25 bp, Homo sapien
ctgagtatgaataaaggcttggacc

SEQ ID NO: 2089884 - DNA, 25 bp, Homo sapien
tgagtatgaataaaggcttggacca

SEQ ID NO: 2089885 - DNA, 25 bp, Homo sapien
aaactgagtatgaataaaggcttgg

SEQ ID NO: 2089886 - DNA, 25 bp, Homo sapien
tcccaggagggaacattggcagttg

SEQ ID NO: 2089887 - DNA, 25 bp, Homo sapien
caaactgcactgaaggattgctata

SEQ ID NO: 2089888 - DNA, 25 bp, Homo sapien
tgctccatgcacacgttggcagttt

SEQ ID NO: 2089889 - DNA, 25 bp, Homo sapien
ccatgcacacgttggcagtttcaaa

SEQ ID NO: 2089890 - DNA, 25 bp, Homo sapien
tgcaaggcagataccacaaaaggag

SEQ ID NO: 2089891 - DNA, 25 bp, Homo sapien
atgcaaggcagataccacaaaagga

SEQ ID NO: 2089892 - DNA, 25 bp, Homo sapien
catgcaaggcagataccacaaaagg

SEQ ID NO: 2089893 - DNA, 25 bp, Homo sapien
cacatgcaaggcagataccacaaaa

SEQ ID NO: 2089894 - DNA, 25 bp, Homo sapien
tctgtctttgagtatatggagtgtc

SEQ ID NO: 2089895 - DNA, 25 bp, Homo sapien
caggaatctgctgggcatacatacc

SEQ ID NO: 2089896 - DNA, 25 bp, Homo sapien
atggagtgtcagtaaagtttcaact

SEQ ID NO: 2089897 - DNA, 25 bp, Homo sapien
gagtaccatggcactaatgttcaat

SEQ ID NO: 2089898 - DNA, 25 bp, Homo sapien
gctcaagaagacttgggtcacactg

SEQ ID NO: 2089899 - DNA, 25 bp, Homo sapien
taacccgttaagatagcaattgctc

SEQ ID NO: 2089900 - DNA, 25 bp, Homo sapien
tacagtcacatctcagtaatgccaa

SEQ ID NO: 2089901 - DNA, 25 bp, Homo sapien
ggtcacactgaagatcctacagtca

SEQ ID NO: 2089902 - DNA, 25 bp, Homo sapien
acaaaatccgtgtgatgctgtatcc

SEQ ID NO: 2089903 - DNA, 25 bp, Homo sapien
catggtttgttccaaattccaaagc

SEQ ID NO: 2089904 - DNA, 25 bp, Homo sapien
caaggtcattttgccgtctgtaagt

SEQ ID NO: 2089905 - DNA, 25 bp, Homo sapien
gaaccaaagggagcatacatttctt

SEQ ID NO: 2089906 - DNA, 25 bp, Homo sapien
ttggatttactacgaggttcagtgc

SEQ ID NO: 2089907 - DNA, 25 bp, Homo sapien
tactacgaggttcagtgccaccagg

SEQ ID NO: 2089908 - DNA, 25 bp, Homo sapien
tctttggatttactacgaggttcag

SEQ ID NO: 2089909 - DNA, 25 bp, Homo sapien
gatttactacgaggttcagtgccac

SEQ ID NO: 2089910 - DNA, 25 bp, Homo sapien
gcctcagctttatacaaaatttcta

SEQ ID NO: 2089911 - DNA, 25 bp, Homo sapien
ctagttgcatccgtaaccaccagac

SEQ ID NO: 2089912 - DNA, 25 bp, Homo sapien
aggcagctgttcaaagtacaagaat

SEQ ID NO: 2089913 - DNA, 25 bp, Homo sapien
ggggatataactctgtccctgaggt

SEQ ID NO: 2089914 - DNA, 25 bp, Homo sapien
caggctctttggcctgcaagagaaa

SEQ ID NO: 2089915 - DNA, 25 bp, Homo sapien
acaggctctttggcctgcaagagaa

SEQ ID NO: 2089916 - DNA, 25 bp, Homo sapien
tggcctgcaagagaaagtagatttt

SEQ ID NO: 2089917 - DNA, 25 bp, Homo sapien
gctgtactcagtggaaaccagttgg

SEQ ID NO: 2089918 - DNA, 25 bp, Homo sapien
tgtactcagtggaaaccagttggca

SEQ ID NO: 2089919 - DNA, 25 bp, Homo sapien
ggctgtactcagtggaaaccagttg

SEQ ID NO: 2089920 - DNA, 25 bp, Homo sapien
ttggctgtactcagtggaaaccagt

SEQ ID NO: 2089921 - DNA, 25 bp, Homo sapien
acatcctggactagctggaacttca

SEQ ID NO: 2089922 - DNA, 25 bp, Homo sapien
cactacatgctctgtattggaattt

SEQ ID NO: 2089923 - DNA, 25 bp, Homo sapien
cagccacatcctggactagctggaa

SEQ ID NO: 2089924 - DNA, 25 bp, Homo sapien
tagctggaacttcactacatgctct

SEQ ID NO: 2089925 - DNA, 25 bp, Homo sapien
tagtgaagcagttcagggtttccat

SEQ ID NO: 2089926 - DNA, 25 bp, Homo sapien
tttctgtgtctatttggaaaccaga

SEQ ID NO: 2089927 - DNA, 25 bp, Homo sapien
gtgaagcagttcagggtttccatat

SEQ ID NO: 2089928 - DNA, 25 bp, Homo sapien
ttctgtgtctatttggaaaccagaa

SEQ ID NO: 2089929 - DNA, 25 bp, Homo sapien
taagtcttgggatagctccttccag

SEQ ID NO: 2089930 - DNA, 25 bp, Homo sapien
tcagcagttgcaacccattttagtg

SEQ ID NO: 2089931 - DNA, 25 bp, Homo sapien
ggcttatggtcactatcagctggtg

SEQ ID NO: 2089932 - DNA, 25 bp, Homo sapien
tgggatagctccttccagtttgcag

SEQ ID NO: 2089933 - DNA, 25 bp, Homo sapien
aacttgtttatggagtttgactaat

SEQ ID NO: 2089934 - DNA, 25 bp, Homo sapien
ggtcaagatgtccaattttccagag

SEQ ID NO: 2089935 - DNA, 25 bp, Homo sapien
gccctcacagccactgggtcaagat

SEQ ID NO: 2089936 - DNA, 25 bp, Homo sapien
tgacttgatcgaggcaggcttttcc

SEQ ID NO: 2089937 - DNA, 25 bp, Homo sapien
tgcatctagggaatggattcacaaa

SEQ ID NO: 2089938 - DNA, 25 bp, Homo sapien
aatgcatctagggaatggattcaca

SEQ ID NO: 2089939 - DNA, 25 bp, Homo sapien
aatggattcacaaacgatgtgaaaa

SEQ ID NO: 2089940 - DNA, 25 bp, Homo sapien
ggattcacaaacgatgtgaaaacat

SEQ ID NO: 2089941 - DNA, 25 bp, Homo sapien
taaacagtgccagtattcataggaa

SEQ ID NO: 2089942 - DNA, 25 bp, Homo sapien
tgcactggtcggtatatggaaacac

SEQ ID NO: 2089943 - DNA, 25 bp, Homo sapien
caacaggttttagaggcatgccacc

SEQ ID NO: 2089944 - DNA, 25 bp, Homo sapien
tgcctttgcctgtaaaacatgtgat

SEQ ID NO: 2089945 - DNA, 25 bp, Homo sapien
gaggtgtgccatcccaaaaccagct

SEQ ID NO: 2089946 - DNA, 25 bp, Homo sapien
tctgagcagaatgtacgaggtgtgc

SEQ ID NO: 2089947 - DNA, 25 bp, Homo sapien
actgtggcctcgctgatgtctgata

SEQ ID NO: 2089948 - DNA, 25 bp, Homo sapien
gttgatagtgcagagaaaccctcca

SEQ ID NO: 2089949 - DNA, 25 bp, Homo sapien
ttgggaatccctgccacgctcagtc

SEQ ID NO: 2089950 - DNA, 25 bp, Homo sapien
agagaagagttagatagtttctgca

SEQ ID NO: 2089951 - DNA, 25 bp, Homo sapien
ttaacagtgtgaacccctgctttaa

SEQ ID NO: 2089952 - DNA, 25 bp, Homo sapien
ctcaaagtgcagtcagccaatcaac

SEQ ID NO: 2089953 - DNA, 25 bp, Homo sapien
ccacaatgggttcatgaaaaacctc

SEQ ID NO: 2089954 - DNA, 25 bp, Homo sapien
aatagatggagaacgcataaccact

SEQ ID NO: 2089955 - DNA, 25 bp, Homo sapien
cacaatgggttcatgaaaaacctca

SEQ ID NO: 2089956 - DNA, 25 bp, Homo sapien
gagaacgcataaccactttggctca

SEQ ID NO: 2089957 - DNA, 25 bp, Homo sapien
gacagacactgtttgacccacaaaa

SEQ ID NO: 2089958 - DNA, 25 bp, Homo sapien
tagcccttcctagcaaacatttgcc

SEQ ID NO: 2089959 - DNA, 25 bp, Homo sapien
gccttatatgctgcttagacaccaa

SEQ ID NO: 2089960 - DNA, 25 bp, Homo sapien
cctatactgaatgggtgagatgcca

SEQ ID NO: 2089961 - DNA, 25 bp, Homo sapien
tcatgattccatttcgactgtgcct

SEQ ID NO: 2089962 - DNA, 25 bp, Homo sapien
tgagccatgggtacaatatataaac

SEQ ID NO: 2089963 - DNA, 25 bp, Homo sapien
tctgtccttccagcattgaactgtg

SEQ ID NO: 2089964 - DNA, 25 bp, Homo sapien
cactgaaggcacatggagggatatc

SEQ ID NO: 2089965 - DNA, 25 bp, Homo sapien
tccgcagtcgaagagactaattggc

SEQ ID NO: 2089966 - DNA, 25 bp, Homo sapien
tcttgatgaggacgttttgggagac

SEQ ID NO: 2089967 - DNA, 25 bp, Homo sapien
ttttgggaaatgatgaccctgctga

SEQ ID NO: 2089968 - DNA, 25 bp, Homo sapien
tgggagacgtcgcaaaaatgtagac

SEQ ID NO: 2089969 - DNA, 25 bp, Homo sapien
ctatctggagatgaccactgttcac

SEQ ID NO: 2089970 - DNA, 25 bp, Homo sapien
actatctggagatgaccactgttca

SEQ ID NO: 2089971 - DNA, 25 bp, Homo sapien
tatctggagatgaccactgttcaca

SEQ ID NO: 2089972 - DNA, 25 bp, Homo sapien
tctggagatgaccactgttcacatt

SEQ ID NO: 2089973 - DNA, 25 bp, Homo sapien
tccactgattagcggcagcatcttt

SEQ ID NO: 2089974 - DNA, 25 bp, Homo sapien
ttcatccactgattagcggcagcat

SEQ ID NO: 2089975 - DNA, 25 bp, Homo sapien
tcatccactgattagcggcagcatc

SEQ ID NO: 2089976 - DNA, 25 bp, Homo sapien
catccactgattagcggcagcatct

SEQ ID NO: 2089977 - DNA, 25 bp, Homo sapien
cctgttcctggaagatgtctccact

SEQ ID NO: 2089978 - DNA, 25 bp, Homo sapien
cctgctcgagctacttcttgtgtgc

SEQ ID NO: 2089979 - DNA, 25 bp, Homo sapien
gttcctggaagatgtctccactctg

SEQ ID NO: 2089980 - DNA, 25 bp, Homo sapien
tcctggaagatgtctccactctgtg

SEQ ID NO: 2089981 - DNA, 25 bp, Homo sapien
tggcagacccgaggtatgctagttg

SEQ ID NO: 2089982 - DNA, 25 bp, Homo sapien
tgattggttgagcatagatcaggcc

SEQ ID NO: 2089983 - DNA, 25 bp, Homo sapien
tgctgggacccaactctgtagacgt

SEQ ID NO: 2089984 - DNA, 25 bp, Homo sapien
gccgttgccaaggatttagattcac

SEQ ID NO: 2089985 - DNA, 25 bp, Homo sapien
cgctaccgcagcgtgagtacctggg

SEQ ID NO: 2089986 - DNA, 25 bp, Homo sapien
tgagtcacggtgaggctactggacc

SEQ ID NO: 2089987 - DNA, 25 bp, Homo sapien
tgagcatctcttcccggcacgagag

SEQ ID NO: 2089988 - DNA, 25 bp, Homo sapien
agcgagagtggagtgacattcccga

SEQ ID NO: 2089989 - DNA, 25 bp, Homo sapien
gaggagaaacgttcactcctagtac

SEQ ID NO: 2089990 - DNA, 25 bp, Homo sapien
ttcactcctagtacacctattacag

SEQ ID NO: 2089991 - DNA, 25 bp, Homo sapien
gaaacgttcactcctagtacaccta

SEQ ID NO: 2089992 - DNA, 25 bp, Homo sapien
caaagaggagaaacgttcactccta

SEQ ID NO: 2089993 - DNA, 25 bp, Homo sapien
attttctctggtgcataccggctgg

SEQ ID NO: 2089994 - DNA, 25 bp, Homo sapien
tctctggtgcataccggctggccat

SEQ ID NO: 2089995 - DNA, 25 bp, Homo sapien
ttctctggtgcataccggctggcca

SEQ ID NO: 2089996 - DNA, 25 bp, Homo sapien
tttctctggtgcataccggctggcc

SEQ ID NO: 2089997 - DNA, 25 bp, Homo sapien
ggaaaccacgctcaacacttagcca

SEQ ID NO: 2089998 - DNA, 25 bp, Homo sapien
catgtgataaccctgcctttgtttg

SEQ ID NO: 2089999 - DNA, 25 bp, Homo sapien
tgattgaacgcaacaaaaacggaga

SEQ ID NO: 2090000 - DNA, 25 bp, Homo sapien
ggcagctctcgggtacatgtgataa

SEQ ID NO: 2090001 - DNA, 25 bp, Homo sapien
tcagtgcccccaacacgtttattgt

SEQ ID NO: 2090002 - DNA, 25 bp, Homo sapien
tgcccccaacacgtttattgtccta

SEQ ID NO: 2090003 - DNA, 25 bp, Homo sapien
cagtgcccccaacacgtttattgtc

SEQ ID NO: 2090004 - DNA, 25 bp, Homo sapien
cgtctcagcttgttccgtgcttgcc

SEQ ID NO: 2090005 - DNA, 25 bp, Homo sapien
ttgttccgtgcttgcctgggtccgc

SEQ ID NO: 2090006 - DNA, 25 bp, Homo sapien
tctgctgttgcaggaacacggcccc

SEQ ID NO: 2090007 - DNA, 25 bp, Homo sapien
ggtccgccgcggtgcttggtctgct

SEQ ID NO: 2090008 - DNA, 25 bp, Homo sapien
tcaaaattatatggatatgagtaca

SEQ ID NO: 2090009 - DNA, 25 bp, Homo sapien
aatccaatgaaatcattgtggccca

SEQ ID NO: 2090010 - DNA, 25 bp, Homo sapien
aatgaaatcattgtggcccacaaaa

SEQ ID NO: 2090011 - DNA, 25 bp, Homo sapien
ggatatgagtacaactgcatggttc

SEQ ID NO: 2090012 - DNA, 25 bp, Homo sapien
taggtgtgagattaatcttcagtgc

SEQ ID NO: 2090013 - DNA, 25 bp, Homo sapien
taatgctagtctttttggagctaag

SEQ ID NO: 2090014 - DNA, 25 bp, Homo sapien
cagtgccccatagagcttttctaag

SEQ ID NO: 2090015 - DNA, 25 bp, Homo sapien
ctgcttagggcactctctctgggca

SEQ ID NO: 2090016 - DNA, 25 bp, Homo sapien
tacatgtgggtccttaactttgact

SEQ ID NO: 2090017 - DNA, 25 bp, Homo sapien
cgctagagccgaagtatacatgtgg

SEQ ID NO: 2090018 - DNA, 25 bp, Homo sapien
tctcaagctctaagcaaaaagttac

SEQ ID NO: 2090019 - DNA, 25 bp, Homo sapien
cttagactcgctagagccgaagtat

SEQ ID NO: 2090020 - DNA, 25 bp, Homo sapien
tttgtcatattcatagtaggaaagg

SEQ ID NO: 2090021 - DNA, 25 bp, Homo sapien
tgtgatcttttgagaagaagttctt

SEQ ID NO: 2090022 - DNA, 25 bp, Homo sapien
ctgtgatcttttgagaagaagttct

SEQ ID NO: 2090023 - DNA, 25 bp, Homo sapien
tgtcatattcatagtaggaaaggtt

SEQ ID NO: 2090024 - DNA, 25 bp, Homo sapien
ggtactgtctctctacaggcgtctg

SEQ ID NO: 2090025 - DNA, 25 bp, Homo sapien
atttcaatggatccttttctgctgc

SEQ ID NO: 2090026 - DNA, 25 bp, Homo sapien
tctgctcctcgagatttactttctc

SEQ ID NO: 2090027 - DNA, 25 bp, Homo sapien
ttcttaatttcaatggatccttttc

SEQ ID NO: 2090028 - DNA, 25 bp, Homo sapien
tgcatagacatagagaagcccatct

SEQ ID NO: 2090029 - DNA, 25 bp, Homo sapien
gggctgctttacagctctgctggca

SEQ ID NO: 2090030 - DNA, 25 bp, Homo sapien
atgcttcccagagggtacatcctgg

SEQ ID NO: 2090031 - DNA, 25 bp, Homo sapien
ccgtccacgaagaacccactatggt

SEQ ID NO: 2090032 - DNA, 25 bp, Homo sapien
aacccactatggtacttgaccagca

SEQ ID NO: 2090033 - DNA, 25 bp, Homo sapien
tgtttctcttcattgactgcagtat

SEQ ID NO: 2090034 - DNA, 25 bp, Homo sapien
cattgactgcagtatgcagattagc

SEQ ID NO: 2090035 - DNA, 25 bp, Homo sapien
ggaaggtgggaactctgtgtttctc

SEQ ID NO: 2090036 - DNA, 25 bp, Homo sapien
aggtgggaactctgtgtttctcttc

SEQ ID NO: 2090037 - DNA, 25 bp, Homo sapien
catagatccaatagatgggcggaga

SEQ ID NO: 2090038 - DNA, 25 bp, Homo sapien
gagatgtccccttgctttcaggtga

SEQ ID NO: 2090039 - DNA, 25 bp, Homo sapien
taagtacccaagacaccatagatcc

SEQ ID NO: 2090040 - DNA, 25 bp, Homo sapien
tgtgtagctgaaaataagtacccaa

SEQ ID NO: 2090041 - DNA, 25 bp, Homo sapien
acaggaactgcccgaggtatcttca

SEQ ID NO: 2090042 - DNA, 25 bp, Homo sapien
aacaggaactgcccgaggtatcttc

SEQ ID NO: 2090043 - DNA, 25 bp, Homo sapien
caggaactgcccgaggtatcttcag

SEQ ID NO: 2090044 - DNA, 25 bp, Homo sapien
gaacaggaactgcccgaggtatctt

SEQ ID NO: 2090045 - DNA, 25 bp, Homo sapien
tgagttgctgtcatattgcgctaga

SEQ ID NO: 2090046 - DNA, 25 bp, Homo sapien
gaagtcttcccttggaatatactgc

SEQ ID NO: 2090047 - DNA, 25 bp, Homo sapien
aatatactgcatgttgaagtttggc

SEQ ID NO: 2090048 - DNA, 25 bp, Homo sapien
cgttgtcatattgggctagagtggt

SEQ ID NO: 2090049 - DNA, 25 bp, Homo sapien
ttcaaaaccacagttcatagaaaca

SEQ ID NO: 2090050 - DNA, 25 bp, Homo sapien
ttatctggaatgtggaacctatttc

SEQ ID NO: 2090051 - DNA, 25 bp, Homo sapien
accacagttcatagaaacaagtttc

SEQ ID NO: 2090052 - DNA, 25 bp, Homo sapien
tgtggaacctatttcctgtttgcct

SEQ ID NO: 2090053 - DNA, 25 bp, Homo sapien
atgaaatctttgaggtggtgtgatt

SEQ ID NO: 2090054 - DNA, 25 bp, Homo sapien
catgaaatctttgaggtggtgtgat

SEQ ID NO: 2090055 - DNA, 25 bp, Homo sapien
tcttcagatgaacttgactcaggga

SEQ ID NO: 2090056 - DNA, 25 bp, Homo sapien
cttcagatgaacttgactcagggaa

SEQ ID NO: 2090057 - DNA, 25 bp, Homo sapien
ttcttcagatgaacttgactcaggg

SEQ ID NO: 2090058 - DNA, 25 bp, Homo sapien
tcagatgaacttgactcagggaatt

SEQ ID NO: 2090059 - DNA, 25 bp, Homo sapien
gatctggagatgttaccagcaaacc

SEQ ID NO: 2090060 - DNA, 25 bp, Homo sapien
ctgagtaactgttcagattgtgatc

SEQ ID NO: 2090061 - DNA, 25 bp, Homo sapien
cagattgtgatctggagatgttacc

SEQ ID NO: 2090062 - DNA, 25 bp, Homo sapien
taactgttcagattgtgatctggag

SEQ ID NO: 2090063 - DNA, 25 bp, Homo sapien
tcccacttggctcgaatttctaacc

SEQ ID NO: 2090064 - DNA, 25 bp, Homo sapien
ttcacagccttactaaataaggaca

SEQ ID NO: 2090065 - DNA, 25 bp, Homo sapien
ggacactgtgtacattcccacttgg

SEQ ID NO: 2090066 - DNA, 25 bp, Homo sapien
taaccataaatgctccttcttttcc

SEQ ID NO: 2090067 - DNA, 25 bp, Homo sapien
ctgctgaattgtgttgatgataatg

SEQ ID NO: 2090068 - DNA, 25 bp, Homo sapien
gaataagctttggaatggaatcaaa

SEQ ID NO: 2090069 - DNA, 25 bp, Homo sapien
gtatgcacgtggtaatgtttgacag

SEQ ID NO: 2090070 - DNA, 25 bp, Homo sapien
tcaaaacagtagttttctgccaggt

SEQ ID NO: 2090071 - DNA, 25 bp, Homo sapien
gggtggcggagccgtgtgatcatgc

SEQ ID NO: 2090072 - DNA, 25 bp, Homo sapien
tcccagggacacagagtcggggacc

SEQ ID NO: 2090073 - DNA, 25 bp, Homo sapien
cagagtcggggaccttgttggcctt

SEQ ID NO: 2090074 - DNA, 25 bp, Homo sapien
ccagggacacagagtcggggacctt

SEQ ID NO: 2090075 - DNA, 25 bp, Homo sapien
tccttgatcatcttaacagcaacat

SEQ ID NO: 2090076 - DNA, 25 bp, Homo sapien
cacttgcccagctggaccactccaa

SEQ ID NO: 2090077 - DNA, 25 bp, Homo sapien
agcaacatcatactgccccttccac

SEQ ID NO: 2090078 - DNA, 25 bp, Homo sapien
ccttgatcatcttaacagcaacatc

SEQ ID NO: 2090079 - DNA, 25 bp, Homo sapien
ggccatgccttcacagacatcgtag

SEQ ID NO: 2090080 - DNA, 25 bp, Homo sapien
gaattggtgactctccaagaaggcc

SEQ ID NO: 2090081 - DNA, 25 bp, Homo sapien
cgtgactcctcaggtaattcagcaa

SEQ ID NO: 2090082 - DNA, 25 bp, Homo sapien
tctaagagctgggaaggttcaagtc

SEQ ID NO: 2090083 - DNA, 25 bp, Homo sapien
tgggagccgtggactgctttctttt

SEQ ID NO: 2090084 - DNA, 25 bp, Homo sapien
ccagaagtgggagccgtggactgct

SEQ ID NO: 2090085 - DNA, 25 bp, Homo sapien
gaagtgggagccgtggactgctttc

SEQ ID NO: 2090086 - DNA, 25 bp, Homo sapien
agtgggagccgtggactgctttctt

SEQ ID NO: 2090087 - DNA, 25 bp, Homo sapien
ttcacacagagatctctgtccacca

SEQ ID NO: 2090088 - DNA, 25 bp, Homo sapien
tggaaactttgttccgactgaactg

SEQ ID NO: 2090089 - DNA, 25 bp, Homo sapien
ttgttccgactgaactgacatactg

SEQ ID NO: 2090090 - DNA, 25 bp, Homo sapien
caaatgcccatacgtctgacttgct

SEQ ID NO: 2090091 - DNA, 25 bp, Homo sapien
aagtaatgaaacacctctggagctg

SEQ ID NO: 2090092 - DNA, 25 bp, Homo sapien
tgtaacttcgtaagtgttcaagggc

SEQ ID NO: 2090093 - DNA, 25 bp, Homo sapien
gcttatgaaacagggccaggtcgta

SEQ ID NO: 2090094 - DNA, 25 bp, Homo sapien
ctctcaggctatatgtgtaacttcg

SEQ ID NO: 2090095 - DNA, 25 bp, Homo sapien
caggtcgtatgtggccacatcctta

SEQ ID NO: 2090096 - DNA, 25 bp, Homo sapien
ctgtacatgatctggtagatggtgt

SEQ ID NO: 2090097 - DNA, 25 bp, Homo sapien
gtcatacaagtcatagggctgcttc

SEQ ID NO: 2090098 - DNA, 25 bp, Homo sapien
atctggtagatggtgtccgatgcca

SEQ ID NO: 2090099 - DNA, 25 bp, Homo sapien
gttgtcatacaagtcatagggctgc

SEQ ID NO: 2090100 - DNA, 25 bp, Homo sapien
catagttcccatagtcaacatttgg

SEQ ID NO: 2090101 - DNA, 25 bp, Homo sapien
taattgttttggtgattgccacccc

SEQ ID NO: 2090102 - DNA, 25 bp, Homo sapien
ccctcgagatgccttgccataagtg

SEQ ID NO: 2090103 - DNA, 25 bp, Homo sapien
ctcgagatgccttgccataagtgct

SEQ ID NO: 2090104 - DNA, 25 bp, Homo sapien
tagtatggctggtaattgttttggt

SEQ ID NO: 2090105 - DNA, 25 bp, Homo sapien
cttgtacactagaaagtcttttaca

SEQ ID NO: 2090106 - DNA, 25 bp, Homo sapien
aataatcatcttagatcaacagaag

SEQ ID NO: 2090107 - DNA, 25 bp, Homo sapien
taatcatcttagatcaacagaagac

SEQ ID NO: 2090108 - DNA, 25 bp, Homo sapien
aaaataatcatcttagatcaacaga

SEQ ID NO: 2090109 - DNA, 25 bp, Homo sapien
tcttaaaccatagctcctaccagtt

SEQ ID NO: 2090110 - DNA, 25 bp, Homo sapien
atgctcttaaaccatagctcctacc

SEQ ID NO: 2090111 - DNA, 25 bp, Homo sapien
tgctcttaaaccatagctcctacca

SEQ ID NO: 2090112 - DNA, 25 bp, Homo sapien
gctcttaaaccatagctcctaccag

SEQ ID NO: 2090113 - DNA, 25 bp, Homo sapien
tttcccgaagtggttcaatggaaga

SEQ ID NO: 2090114 - DNA, 25 bp, Homo sapien
ttcccgaagtggttcaatggaagac

SEQ ID NO: 2090115 - DNA, 25 bp, Homo sapien
cccgaagtggttcaatggaagacag

SEQ ID NO: 2090116 - DNA, 25 bp, Homo sapien
tcccgaagtggttcaatggaagaca

SEQ ID NO: 2090117 - DNA, 25 bp, Homo sapien
cacagtctctatattgcagtctgaa

SEQ ID NO: 2090118 - DNA, 25 bp, Homo sapien
aaaactagctaaattacattatgcc

SEQ ID NO: 2090119 - DNA, 25 bp, Homo sapien
ggaaagtgttatatcaggagcagca

SEQ ID NO: 2090120 - DNA, 25 bp, Homo sapien
cagagaacactattaaaaactagct

SEQ ID NO: 2090121 - DNA, 25 bp, Homo sapien
ctacaaagagggaccggtgcctggg

SEQ ID NO: 2090122 - DNA, 25 bp, Homo sapien
tacaaagagggaccggtgcctgggc

SEQ ID NO: 2090123 - DNA, 25 bp, Homo sapien
cttggttcagcacagtgcaagaata

SEQ ID NO: 2090124 - DNA, 25 bp, Homo sapien
ccatgtgcatgtgacatagtgtcca

SEQ ID NO: 2090125 - DNA, 25 bp, Homo sapien
tagtgtccaactgtaacacagaaag

SEQ ID NO: 2090126 - DNA, 25 bp, Homo sapien
tcactgtgcccaccaggtaacgctt

SEQ ID NO: 2090127 - DNA, 25 bp, Homo sapien
tcagatactcgtgtgctgtcctctt

SEQ ID NO: 2090128 - DNA, 25 bp, Homo sapien
cagatactcgtgtgctgtcctcttt

SEQ ID NO: 2090129 - DNA, 25 bp, Homo sapien
gatactcgtgtgctgtcctctttct

SEQ ID NO: 2090130 - DNA, 25 bp, Homo sapien
ttcagatactcgtgtgctgtcctct

SEQ ID NO: 2090131 - DNA, 25 bp, Homo sapien
gccttgacctggattgcgtctaagc

SEQ ID NO: 2090132 - DNA, 25 bp, Homo sapien
gattgcgtctaagcccttgactttg

SEQ ID NO: 2090133 - DNA, 25 bp, Homo sapien
agagctggttccacaataagtcttc

SEQ ID NO: 2090134 - DNA, 25 bp, Homo sapien
agctggttccacaataagtcttcta

SEQ ID NO: 2090135 - DNA, 25 bp, Homo sapien
tttctggttgtcaaggtcacagctt

SEQ ID NO: 2090136 - DNA, 25 bp, Homo sapien
tgtcaccctcttcgacagaatctgc

SEQ ID NO: 2090137 - DNA, 25 bp, Homo sapien
aggaaacttacaggcattctgaaga

SEQ ID NO: 2090138 - DNA, 25 bp, Homo sapien
aagcattttacagtgtagggcaccc

SEQ ID NO: 2090139 - DNA, 25 bp, Homo sapien
tagtccagtgcatgcaggctaccat

SEQ ID NO: 2090140 - DNA, 25 bp, Homo sapien
tcttagtccagtgcatgcaggctac

SEQ ID NO: 2090141 - DNA, 25 bp, Homo sapien
cttcttagtccagtgcatgcaggct

SEQ ID NO: 2090142 - DNA, 25 bp, Homo sapien
ttagtccagtgcatgcaggctacca

SEQ ID NO: 2090143 - DNA, 25 bp, Homo sapien
tgcagaaggggcaagtggcgcccca

SEQ ID NO: 2090144 - DNA, 25 bp, Homo sapien
gcagaaggggcaagtggcgccccat

SEQ ID NO: 2090145 - DNA, 25 bp, Homo sapien
tcagggccagagatagtgtccgggc

SEQ ID NO: 2090146 - DNA, 25 bp, Homo sapien
tgcggtcagggccagagatagtgtc

SEQ ID NO: 2090147 - DNA, 25 bp, Homo sapien
cagagatagtgtccgggctcagtga

SEQ ID NO: 2090148 - DNA, 25 bp, Homo sapien
gtgtccgggctcagtgaccagcgac

SEQ ID NO: 2090149 - DNA, 25 bp, Homo sapien
tccggatgcggatgcgggcgtagtc

SEQ ID NO: 2090150 - DNA, 25 bp, Homo sapien
agacccagcgcttcccgtggaagta

SEQ ID NO: 2090151 - DNA, 25 bp, Homo sapien
ggtgcgcggttttctggcccagagc

SEQ ID NO: 2090152 - DNA, 25 bp, Homo sapien
gccaggcgagcctcagagaaatcag

SEQ ID NO: 2090153 - DNA, 25 bp, Homo sapien
tagaaccgcggtcagtagggtgaag

SEQ ID NO: 2090154 - DNA, 25 bp, Homo sapien
gcaggagcgaatgggcaagggcaag

SEQ ID NO: 2090155 - DNA, 25 bp, Homo sapien
cctggcgaagctccttccaggtgca

SEQ ID NO: 2090156 - DNA, 25 bp, Homo sapien
gggcctgactcttggagccgggcag

SEQ ID NO: 2090157 - DNA, 25 bp, Homo sapien
attctctcggaacaggcaagacccc

SEQ ID NO: 2090158 - DNA, 25 bp, Homo sapien
ttgggctcacgtccctactccgcct

SEQ ID NO: 2090159 - DNA, 25 bp, Homo sapien
acttttccacccttcgcccagtgat

SEQ ID NO: 2090160 - DNA, 25 bp, Homo sapien
catccagtcacaactagtctgccta

SEQ ID NO: 2090161 - DNA, 25 bp, Homo sapien
ctgaggccgaccgtcccgcgaattc

SEQ ID NO: 2090162 - DNA, 25 bp, Homo sapien
ctgtcgctgccacgcgcctgcacgc

SEQ ID NO: 2090163 - DNA, 25 bp, Homo sapien
gctgccacgcgcctgcacgctaact

SEQ ID NO: 2090164 - DNA, 25 bp, Homo sapien
tctggctacacatctcctgtcgctg

SEQ ID NO: 2090165 - DNA, 25 bp, Homo sapien
tcctgtcgctgccacgcgcctgcac

SEQ ID NO: 2090166 - DNA, 25 bp, Homo sapien
ctacgcagcaaacgtcatttcgtca

SEQ ID NO: 2090167 - DNA, 25 bp, Homo sapien
aggctgaaatctcgccctggccacg

SEQ ID NO: 2090168 - DNA, 25 bp, Homo sapien
cattccaggttacgcccctatcagt

SEQ ID NO: 2090169 - DNA, 25 bp, Homo sapien
gacccaggctgaaatctcgccctgg

SEQ ID NO: 2090170 - DNA, 25 bp, Homo sapien
gctcccggtacccgaggatcccgca

SEQ ID NO: 2090171 - DNA, 25 bp, Homo sapien
ctgagccagaacctcctcgttcgct

SEQ ID NO: 2090172 - DNA, 25 bp, Homo sapien
gaggatcccgcacgcggccatcttg

SEQ ID NO: 2090173 - DNA, 25 bp, Homo sapien
cacgccccctcacgtttagccacgt

SEQ ID NO: 2090174 - DNA, 25 bp, Homo sapien
ttaacgctgaatatcacacagaatc

SEQ ID NO: 2090175 - DNA, 25 bp, Homo sapien
gcatttaacgctgaatatcacacag

SEQ ID NO: 2090176 - DNA, 25 bp, Homo sapien
agagcagcagcatttaacgctgaat

SEQ ID NO: 2090177 - DNA, 25 bp, Homo sapien
cagcagcatttaacgctgaatatca

SEQ ID NO: 2090178 - DNA, 25 bp, Homo sapien
ggctatgaatagtgactcctctgag

SEQ ID NO: 2090179 - DNA, 25 bp, Homo sapien
aagactttcaaagtgcatagtggaa

SEQ ID NO: 2090180 - DNA, 25 bp, Homo sapien
caaattaaggtttacgcatcttcgt

SEQ ID NO: 2090181 - DNA, 25 bp, Homo sapien
tcagtggctaataaggagcatataa

SEQ ID NO: 2090182 - DNA, 25 bp, Homo sapien
cgagtaggctcccttggtgacaaag

SEQ ID NO: 2090183 - DNA, 25 bp, Homo sapien
taggctcccttggtgacaaagatgt

SEQ ID NO: 2090184 - DNA, 25 bp, Homo sapien
gttggtccgcatttcaagaactaag

SEQ ID NO: 2090185 - DNA, 25 bp, Homo sapien
tgacaaagatgttggtccgcatttc

SEQ ID NO: 2090186 - DNA, 25 bp, Homo sapien
ccagataacttgcaggaacccaata

SEQ ID NO: 2090187 - DNA, 25 bp, Homo sapien
agataacttgcaggaacccaataac

SEQ ID NO: 2090188 - DNA, 25 bp, Homo sapien
cccagataacttgcaggaacccaat

SEQ ID NO: 2090189 - DNA, 25 bp, Homo sapien
ttcccagataacttgcaggaaccca

SEQ ID NO: 2090190 - DNA, 25 bp, Homo sapien
gctacaaacgcttaacacgcgtgat

SEQ ID NO: 2090191 - DNA, 25 bp, Homo sapien
aaggcatataatctcacactggaat

SEQ ID NO: 2090192 - DNA, 25 bp, Homo sapien
attctcacagtccataaggcatata

SEQ ID NO: 2090193 - DNA, 25 bp, Homo sapien
cactggaatgcccatgacatcacag

SEQ ID NO: 2090194 - DNA, 25 bp, Homo sapien
tgtggatcaaccttagtaaaaagac

SEQ ID NO: 2090195 - DNA, 25 bp, Homo sapien
aaaaagacaactgctaaccagaaat

SEQ ID NO: 2090196 - DNA, 25 bp, Homo sapien
taaagaacaggttccagaatatctg

SEQ ID NO: 2090197 - DNA, 25 bp, Homo sapien
cagcaatttaagattcacagaaata

SEQ ID NO: 2090198 - DNA, 25 bp, Homo sapien
tccagaatataggaataggacctgc

SEQ ID NO: 2090199 - DNA, 25 bp, Homo sapien
gtttacaattgagcagatgagggtc

SEQ ID NO: 2090200 - DNA, 25 bp, Homo sapien
gcccggcctcataactgagcttcta

SEQ ID NO: 2090201 - DNA, 25 bp, Homo sapien
tcttggttacaagcgtacactagcc

SEQ ID NO: 2090202 - DNA, 25 bp, Homo sapien
tcattctttccaaacgctggtgttt

SEQ ID NO: 2090203 - DNA, 25 bp, Homo sapien
cattctttccaaacgctggtgtttc

SEQ ID NO: 2090204 - DNA, 25 bp, Homo sapien
ctcattctttccaaacgctggtgtt

SEQ ID NO: 2090205 - DNA, 25 bp, Homo sapien
gctagaccatccaacccactgtggg

SEQ ID NO: 2090206 - DNA, 25 bp, Homo sapien
ttttaaacaaagaccatctaggcta

SEQ ID NO: 2090207 - DNA, 25 bp, Homo sapien
caaagaccatctaggctagaccatc

SEQ ID NO: 2090208 - DNA, 25 bp, Homo sapien
gaccatctaggctagaccatccaac

SEQ ID NO: 2090209 - DNA, 25 bp, Homo sapien
cataatacccaacaggttgaaccca

SEQ ID NO: 2090210 - DNA, 25 bp, Homo sapien
ggtatatggagtgacactgaggctt

SEQ ID NO: 2090211 - DNA, 25 bp, Homo sapien
gcttggggtcccaacagtcctatca

SEQ ID NO: 2090212 - DNA, 25 bp, Homo sapien
gattggaatgcagattccttctaga

SEQ ID NO: 2090213 - DNA, 25 bp, Homo sapien
tctctgtagcaagtccctggtaagt

SEQ ID NO: 2090214 - DNA, 25 bp, Homo sapien
ggtctctgtagcaagtccctggtaa

SEQ ID NO: 2090215 - DNA, 25 bp, Homo sapien
caggtctctgtagcaagtccctggt

SEQ ID NO: 2090216 - DNA, 25 bp, Homo sapien
tctgtagcaagtccctggtaagtat

SEQ ID NO: 2090217 - DNA, 25 bp, Homo sapien
aaaccaagtgcaatcagtcctgtga

SEQ ID NO: 2090218 - DNA, 25 bp, Homo sapien
acagtaaaatgcatggagattagcg

SEQ ID NO: 2090219 - DNA, 25 bp, Homo sapien
ctaaaccaagtgcaatcagtcctgt

SEQ ID NO: 2090220 - DNA, 25 bp, Homo sapien
taaaatgcatggagattagcgccat

SEQ ID NO: 2090221 - DNA, 25 bp, Homo sapien
tgtagaatcttcaaattccacgagg

SEQ ID NO: 2090222 - DNA, 25 bp, Homo sapien
gaaagagtacccattattccagacg

SEQ ID NO: 2090223 - DNA, 25 bp, Homo sapien
taagccgggatcataaacactgtcc

SEQ ID NO: 2090224 - DNA, 25 bp, Homo sapien
tgtccctccaccgaatgttgatggg

SEQ ID NO: 2090225 - DNA, 25 bp, Homo sapien
gttaacatgacactgtttctttaac

SEQ ID NO: 2090226 - DNA, 25 bp, Homo sapien
tcatggagagagtttgatgtgtcct

SEQ ID NO: 2090227 - DNA, 25 bp, Homo sapien
agtttgatgtgtcctctgttaacat

SEQ ID NO: 2090228 - DNA, 25 bp, Homo sapien
tggagagagtttgatgtgtcctctg

SEQ ID NO: 2090229 - DNA, 25 bp, Homo sapien
gattaatcgcaacttgtggccctgc

SEQ ID NO: 2090230 - DNA, 25 bp, Homo sapien
tatcacttggattaatcgcaacttg

SEQ ID NO: 2090231 - DNA, 25 bp, Homo sapien
ctggaagaggatctcacctcctagt

SEQ ID NO: 2090232 - DNA, 25 bp, Homo sapien
ctctcaccatctatcacttggatta

SEQ ID NO: 2090233 - DNA, 25 bp, Homo sapien
aaatggattaagataacttctctac

SEQ ID NO: 2090234 - DNA, 25 bp, Homo sapien
gccatcacattcagccacagaactg

SEQ ID NO: 2090235 - DNA, 25 bp, Homo sapien
tctgcacgttggctccccttggcct

SEQ ID NO: 2090236 - DNA, 25 bp, Homo sapien
tccttgtccaccactcatgaactta

SEQ ID NO: 2090237 - DNA, 25 bp, Homo sapien
aaatactcctatcacagccaaacca

SEQ ID NO: 2090238 - DNA, 25 bp, Homo sapien
tccagtgctgcatcctcaaagtttt

SEQ ID NO: 2090239 - DNA, 25 bp, Homo sapien
agttttcaaatttgactgcgttcca

SEQ ID NO: 2090240 - DNA, 25 bp, Homo sapien
tcaaatttgactgcgttccaatgca

SEQ ID NO: 2090241 - DNA, 25 bp, Homo sapien
atagctctttatgatgtttgcctag

SEQ ID NO: 2090242 - DNA, 25 bp, Homo sapien
tatagctctttatgatgtttgccta

SEQ ID NO: 2090243 - DNA, 25 bp, Homo sapien
ctatagctctttatgatgtttgcct

SEQ ID NO: 2090244 - DNA, 25 bp, Homo sapien
caggaagtgccaaacgacccaaatt

SEQ ID NO: 2090245 - DNA, 25 bp, Homo sapien
ccagtgcataaagaaggaggcttca

SEQ ID NO: 2090246 - DNA, 25 bp, Homo sapien
tccataacagcgtcctggccaagag

SEQ ID NO: 2090247 - DNA, 25 bp, Homo sapien
gaaaaccactcaggaattggacgcc

SEQ ID NO: 2090248 - DNA, 25 bp, Homo sapien
actggacctacttgggtccagtaat

SEQ ID NO: 2090249 - DNA, 25 bp, Homo sapien
ctggaccagggagatactggaccta

SEQ ID NO: 2090250 - DNA, 25 bp, Homo sapien
cagggagatactggacctacttggg

SEQ ID NO: 2090251 - DNA, 25 bp, Homo sapien
gatactggacctacttgggtccagt

SEQ ID NO: 2090252 - DNA, 25 bp, Homo sapien
acctctactggctgcttcttaatga

SEQ ID NO: 2090253 - DNA, 25 bp, Homo sapien
atcatcaacctctactggctgcttc

SEQ ID NO: 2090254 - DNA, 25 bp, Homo sapien
ctgcttcttaatgataaaggtgatg

SEQ ID NO: 2090255 - DNA, 25 bp, Homo sapien
tgcttcttaatgataaaggtgatgg

SEQ ID NO: 2090256 - DNA, 25 bp, Homo sapien
gagataagacgttggtacacttcaa

SEQ ID NO: 2090257 - DNA, 25 bp, Homo sapien
gattctatagcaaaactcccttaag

SEQ ID NO: 2090258 - DNA, 25 bp, Homo sapien
gatgtagtaaccaccacttagactt

SEQ ID NO: 2090259 - DNA, 25 bp, Homo sapien
tatcactgttatcctggctgcatga

SEQ ID NO: 2090260 - DNA, 25 bp, Homo sapien
tttagtatgctaataaccatggagt

SEQ ID NO: 2090261 - DNA, 25 bp, Homo sapien
ctcctgccagaggttaattcaatta

SEQ ID NO: 2090262 - DNA, 25 bp, Homo sapien
taactgtgagttatatatgccaacg

SEQ ID NO: 2090263 - DNA, 25 bp, Homo sapien
catggtactccactaattgctgaat

SEQ ID NO: 2090264 - DNA, 25 bp, Homo sapien
gatgtctcaaacacctagaagagta

SEQ ID NO: 2090265 - DNA, 25 bp, Homo sapien
tgaactccagactttagattgccca

SEQ ID NO: 2090266 - DNA, 25 bp, Homo sapien
caggcagtcataagcgaatcatcac

SEQ ID NO: 2090267 - DNA, 25 bp, Homo sapien
ttttgtcccggtgaggtacaggcag

SEQ ID NO: 2090268 - DNA, 25 bp, Homo sapien
tgctcttaagaaaacggtgaaagcc

SEQ ID NO: 2090269 - DNA, 25 bp, Homo sapien
tggaatgccagaatcgggaagagac

SEQ ID NO: 2090270 - DNA, 25 bp, Homo sapien
tccaaaggctgcttagtaactgtag

SEQ ID NO: 2090271 - DNA, 25 bp, Homo sapien
cacgtggagaaggaacctattgacc

SEQ ID NO: 2090272 - DNA, 25 bp, Homo sapien
tgttggaaagtgcacaaggcgccgt

SEQ ID NO: 2090273 - DNA, 25 bp, Homo sapien
tcagggctcagtgactagcgacggt

SEQ ID NO: 2090274 - DNA, 25 bp, Homo sapien
tcaaggccagagatcaaatgtcagg

SEQ ID NO: 2090275 - DNA, 25 bp, Homo sapien
caggtacggtctgtccaccaactgt

SEQ ID NO: 2090276 - DNA, 25 bp, Homo sapien
acccagtgcttttgggcggggcgca

SEQ ID NO: 2090277 - DNA, 25 bp, Homo sapien
cagctttctggcaagcggcttgggc

SEQ ID NO: 2090278 - DNA, 25 bp, Homo sapien
tgggcggggcgcagctttctggcaa

SEQ ID NO: 2090279 - DNA, 25 bp, Homo sapien
gctttctggcaagcggcttgggcct

SEQ ID NO: 2090280 - DNA, 25 bp, Homo sapien
ggaggagtggtgcggaggggccgga

SEQ ID NO: 2090281 - DNA, 25 bp, Homo sapien
aggagtggtgcggaggggccggatg

SEQ ID NO: 2090282 - DNA, 25 bp, Homo sapien
gagtggtgcggaggggccggatgcg

SEQ ID NO: 2090283 - DNA, 25 bp, Homo sapien
tggtgcggaggggccggatgcggac

SEQ ID NO: 2090284 - DNA, 25 bp, Homo sapien
tctctctggatgcagatgcgggtgt

SEQ ID NO: 2090285 - DNA, 25 bp, Homo sapien
tctggatgcagatgcgggtgtagtc

SEQ ID NO: 2090286 - DNA, 25 bp, Homo sapien
tctctggatgcagatgcgggtgtag

SEQ ID NO: 2090287 - DNA, 25 bp, Homo sapien
ctggatgcagatgcgggtgtagtcc

SEQ ID NO: 2090288 - DNA, 25 bp, Homo sapien
acctgggcacaacggaacaggccac

SEQ ID NO: 2090289 - DNA, 25 bp, Homo sapien
aggcaagcctgaggcgtcagggcag

SEQ ID NO: 2090290 - DNA, 25 bp, Homo sapien
ctgctcagcggcctagacctgggca

SEQ ID NO: 2090291 - DNA, 25 bp, Homo sapien
gcacaacggaacaggccactccgtt

SEQ ID NO: 2090292 - DNA, 25 bp, Homo sapien
gcagaatactatccacttccagatg

SEQ ID NO: 2090293 - DNA, 25 bp, Homo sapien
gctggcagaatactatccacttcca

SEQ ID NO: 2090294 - DNA, 25 bp, Homo sapien
gaatactatccacttccagatgcca

SEQ ID NO: 2090295 - DNA, 25 bp, Homo sapien
gaatgaaatgggtacctctgccaga

SEQ ID NO: 2090296 - DNA, 25 bp, Homo sapien
ttaacccaaatgatgggtgttaatc

SEQ ID NO: 2090297 - DNA, 25 bp, Homo sapien
aacccaaatgatgggtgttaatcat

SEQ ID NO: 2090298 - DNA, 25 bp, Homo sapien
cccaaatgatgggtgttaatcatta

SEQ ID NO: 2090299 - DNA, 25 bp, Homo sapien
caaatgatgggtgttaatcattaaa

SEQ ID NO: 2090300 - DNA, 25 bp, Homo sapien
tatgtcactctgttgtgatagtgcc

SEQ ID NO: 2090301 - DNA, 25 bp, Homo sapien
gacaagtgtccatgttatcccacca

SEQ ID NO: 2090302 - DNA, 25 bp, Homo sapien
cagattatgtggagtagaaatagtc

SEQ ID NO: 2090303 - DNA, 25 bp, Homo sapien
tgtggagtagaaatagtcccattac

SEQ ID NO: 2090304 - DNA, 25 bp, Homo sapien
tacgctttgtataccaaccaggagg

SEQ ID NO: 2090305 - DNA, 25 bp, Homo sapien
aaagtggcacgtgatctaatgcccc

SEQ ID NO: 2090306 - DNA, 25 bp, Homo sapien
tgagagcatctaaacaaagtggcac

SEQ ID NO: 2090307 - DNA, 25 bp, Homo sapien
aaaacctaagggcagaaatgttgag

SEQ ID NO: 2090308 - DNA, 25 bp, Homo sapien
cttgaagacagtgggaacattcaca

SEQ ID NO: 2090309 - DNA, 25 bp, Homo sapien
gaagacagtgggaacattcacaaag

SEQ ID NO: 2090310 - DNA, 25 bp, Homo sapien
tgccttgaagacagtgggaacattc

SEQ ID NO: 2090311 - DNA, 25 bp, Homo sapien
tctgccttgaagacagtgggaacat

SEQ ID NO: 2090312 - DNA, 25 bp, Homo sapien
cctttttacttgtgtatagagctac

SEQ ID NO: 2090313 - DNA, 25 bp, Homo sapien
tccctctcatagcagcaagatttgc

SEQ ID NO: 2090314 - DNA, 25 bp, Homo sapien
ggccaggatgccatattttttcata

SEQ ID NO: 2090315 - DNA, 25 bp, Homo sapien
tatttctgggcagcaaacacaggaa

SEQ ID NO: 2090316 - DNA, 25 bp, Homo sapien
agatcacgaacctagccgctcgctc

SEQ ID NO: 2090317 - DNA, 25 bp, Homo sapien
tagccgctcgctcgcctacggggat

SEQ ID NO: 2090318 - DNA, 25 bp, Homo sapien
aacctagccgctcgctcgcctacgg

SEQ ID NO: 2090319 - DNA, 25 bp, Homo sapien
tctctccagatcacgaacctagccg

SEQ ID NO: 2090320 - DNA, 25 bp, Homo sapien
tgagtgattatctcatgtcgagcac

SEQ ID NO: 2090321 - DNA, 25 bp, Homo sapien
agtgattatctcatgtcgagcactg

SEQ ID NO: 2090322 - DNA, 25 bp, Homo sapien
cagtgagtgattatctcatgtcgag

SEQ ID NO: 2090323 - DNA, 25 bp, Homo sapien
acagtgagtgattatctcatgtcga

SEQ ID NO: 2090324 - DNA, 25 bp, Homo sapien
agagggatgagggcagaggagggaa

SEQ ID NO: 2090325 - DNA, 25 bp, Homo sapien
ggatgagggcagaggagggaaagct

SEQ ID NO: 2090326 - DNA, 25 bp, Homo sapien
agggatgagggcagaggagggaaag

SEQ ID NO: 2090327 - DNA, 25 bp, Homo sapien
ctagagggatgagggcagaggaggg

SEQ ID NO: 2090328 - DNA, 25 bp, Homo sapien
gcttgaaatcttgatcagttcccag

SEQ ID NO: 2090329 - DNA, 25 bp, Homo sapien
tgaaatcttgatcagttcccagtta

SEQ ID NO: 2090330 - DNA, 25 bp, Homo sapien
tcttgatcagttcccagttaagttg

SEQ ID NO: 2090331 - DNA, 25 bp, Homo sapien
aatcttgatcagttcccagttaagt

SEQ ID NO: 2090332 - DNA, 25 bp, Homo sapien
tgaatctcggaatctggaactttct

SEQ ID NO: 2090333 - DNA, 25 bp, Homo sapien
ctccacagcaatttgcctggagagg

SEQ ID NO: 2090334 - DNA, 25 bp, Homo sapien
gggcctcgctggcatgaatctcgga

SEQ ID NO: 2090335 - DNA, 25 bp, Homo sapien
tggagaggcttgaagaatgaccctc

SEQ ID NO: 2090336 - DNA, 25 bp, Homo sapien
tgcctctggtccgtttatttgaaaa

SEQ ID NO: 2090337 - DNA, 25 bp, Homo sapien
gggagaaacctagacctcagtgcag

SEQ ID NO: 2090338 - DNA, 25 bp, Homo sapien
tgtagagcagtttcaagcccttgga

SEQ ID NO: 2090339 - DNA, 25 bp, Homo sapien
gcccttggatgtagctagattagca

SEQ ID NO: 2090340 - DNA, 25 bp, Homo sapien
gccaaaccaagtgttgtcgaaaaga

SEQ ID NO: 2090341 - DNA, 25 bp, Homo sapien
aaccaagtgttgtcgaaaagagtcg

SEQ ID NO: 2090342 - DNA, 25 bp, Homo sapien
caagtgttgtcgaaaagagtcgaac

SEQ ID NO: 2090343 - DNA, 25 bp, Homo sapien
ttctaggccaaaccaagtgttgtcg

SEQ ID NO: 2090344 - DNA, 25 bp, Homo sapien
ggatgctgagtccattagccacagg

SEQ ID NO: 2090345 - DNA, 25 bp, Homo sapien
gttatcagcacaggagactacagcc

SEQ ID NO: 2090346 - DNA, 25 bp, Homo sapien
cagggctatttgtcagtcccaggca

SEQ ID NO: 2090347 - DNA, 25 bp, Homo sapien
cacagggaccctccatatgacttgg

SEQ ID NO: 2090348 - DNA, 25 bp, Homo sapien
tttttctatagtctccagggcttta

SEQ ID NO: 2090349 - DNA, 25 bp, Homo sapien
accattcctcaggtaatctgtgttt

SEQ ID NO: 2090350 - DNA, 25 bp, Homo sapien
aaagggcctgtgtcaactccaagcc

SEQ ID NO: 2090351 - DNA, 25 bp, Homo sapien
gtttgctttatctgcccaaagggcc

SEQ ID NO: 2090352 - DNA, 25 bp, Homo sapien
atctgtgtttgctttatctgcccaa

SEQ ID NO: 2090353 - DNA, 25 bp, Homo sapien
ggtctctgtagcaagtccctgataa

SEQ ID NO: 2090354 - DNA, 25 bp, Homo sapien
catcggcattgctaaggtccctgga

SEQ ID NO: 2090355 - DNA, 25 bp, Homo sapien
aaaacctgggtagaacatcggcatt

SEQ ID NO: 2090356 - DNA, 25 bp, Homo sapien
gatgctcgccccacataactgtgcg

SEQ ID NO: 2090357 - DNA, 25 bp, Homo sapien
atataatgcatggagtttggtgcca

SEQ ID NO: 2090358 - DNA, 25 bp, Homo sapien
ctaaaccaagtgcaatcagtgctgt

SEQ ID NO: 2090359 - DNA, 25 bp, Homo sapien
aaaccaagtgcaatcagtgctgtga

SEQ ID NO: 2090360 - DNA, 25 bp, Homo sapien
agtgctgtgatcacaatataatgca

SEQ ID NO: 2090361 - DNA, 25 bp, Homo sapien
tgtagaatcttcaaattccacgagg

SEQ ID NO: 2090362 - DNA, 25 bp, Homo sapien
gaaagagtacccattattccagacg

SEQ ID NO: 2090363 - DNA, 25 bp, Homo sapien
taagccgggatcataaacactgtcc

SEQ ID NO: 2090364 - DNA, 25 bp, Homo sapien
tgtccctccaccgaatgttgatggg

SEQ ID NO: 2090365 - DNA, 25 bp, Homo sapien
gctcacaaagaggtcaatactatca

SEQ ID NO: 2090366 - DNA, 25 bp, Homo sapien
ccattgctcacaaagaggtcaatac

SEQ ID NO: 2090367 - DNA, 25 bp, Homo sapien
caaagaggtcaatactatcatggag

SEQ ID NO: 2090368 - DNA, 25 bp, Homo sapien
ggtcaatactatcatggagagagtt

SEQ ID NO: 2090369 - DNA, 25 bp, Homo sapien
gctgcgtcataccatggaggagaaa

SEQ ID NO: 2090370 - DNA, 25 bp, Homo sapien
gacagagattaagcccactggagga

SEQ ID NO: 2090371 - DNA, 25 bp, Homo sapien
tggcagagacacatatcagaaggga

SEQ ID NO: 2090372 - DNA, 25 bp, Homo sapien
gagcagtctgtttgtagttaggcca

SEQ ID NO: 2090373 - DNA, 25 bp, Homo sapien
taaacaaggtaatattatggacttc

SEQ ID NO: 2090374 - DNA, 25 bp, Homo sapien
gaagatttctggaatccgtataaac

SEQ ID NO: 2090375 - DNA, 25 bp, Homo sapien
attatggacttccagttgagaaggg

SEQ ID NO: 2090376 - DNA, 25 bp, Homo sapien
tccagaacacaggaatttagcttgt

SEQ ID NO: 2090377 - DNA, 25 bp, Homo sapien
ggcattttcatctatacatttccct

SEQ ID NO: 2090378 - DNA, 25 bp, Homo sapien
gctgcatcccaaaaggactggtatg

SEQ ID NO: 2090379 - DNA, 25 bp, Homo sapien
gtttttgtcacataccttccccagc

SEQ ID NO: 2090380 - DNA, 25 bp, Homo sapien
ttccaatcctcacaaagcacactgt

SEQ ID NO: 2090381 - DNA, 25 bp, Homo sapien
gtgaaaatggaactgcttcaatcgg

SEQ ID NO: 2090382 - DNA, 25 bp, Homo sapien
acggtgtgctcagaaccccaggcat

SEQ ID NO: 2090383 - DNA, 25 bp, Homo sapien
tgctcagaaccccaggcatcgatgg

SEQ ID NO: 2090384 - DNA, 25 bp, Homo sapien
cttcaatcggtagttgtgttccagg

SEQ ID NO: 2090385 - DNA, 25 bp, Homo sapien
acaggagaatggtgtgaacccggga

SEQ ID NO: 2090386 - DNA, 25 bp, Homo sapien
ggcagagcttgcagtgagccaagat

SEQ ID NO: 2090387 - DNA, 25 bp, Homo sapien
agtcccagctacttggggggctgag

SEQ ID NO: 2090388 - DNA, 25 bp, Homo sapien
tagctgggcgcagtggtgggcgctt

SEQ ID NO: 2090389 - DNA, 25 bp, Homo sapien
aaatactcctatcacagccaaacca

SEQ ID NO: 2090390 - DNA, 25 bp, Homo sapien
tccagtgctgcatcctcaaagtttt

SEQ ID NO: 2090391 - DNA, 25 bp, Homo sapien
tctgactgcgttccaatgcactaag

SEQ ID NO: 2090392 - DNA, 25 bp, Homo sapien
ttcaaatctgactgcgttccaatgc

SEQ ID NO: 2090393 - DNA, 25 bp, Homo sapien
ccaatgtatggatcccaacattctt

SEQ ID NO: 2090394 - DNA, 25 bp, Homo sapien
accaatgtatggatcccaacattct

SEQ ID NO: 2090395 - DNA, 25 bp, Homo sapien
taccaatgtatggatcccaacattc

SEQ ID NO: 2090396 - DNA, 25 bp, Homo sapien
ctgtacttcaagcactatttatctt

SEQ ID NO: 2090397 - DNA, 25 bp, Homo sapien
cttaattgacggcaaagtatccact

SEQ ID NO: 2090398 - DNA, 25 bp, Homo sapien
cttatgcttaattgacggcaaagta

SEQ ID NO: 2090399 - DNA, 25 bp, Homo sapien
gacggcaaagtatccactaatttct

SEQ ID NO: 2090400 - DNA, 25 bp, Homo sapien
taattgacggcaaagtatccactaa

SEQ ID NO: 2090401 - DNA, 25 bp, Homo sapien
gcaatatgttcctgagtccccaagt

SEQ ID NO: 2090402 - DNA, 25 bp, Homo sapien
tgtcccctggaatcataaatggcaa

SEQ ID NO: 2090403 - DNA, 25 bp, Homo sapien
tcacaaggacttagaaggagccggt

SEQ ID NO: 2090404 - DNA, 25 bp, Homo sapien
taatgtctccgctctgagattgaaa

SEQ ID NO: 2090405 - DNA, 25 bp, Homo sapien
atgacccaaattccacaagggcgtc

SEQ ID NO: 2090406 - DNA, 25 bp, Homo sapien
gtccagtaatctgggcaggtaggca

SEQ ID NO: 2090407 - DNA, 25 bp, Homo sapien
taggtccagtaatctgggcaggtag

SEQ ID NO: 2090408 - DNA, 25 bp, Homo sapien
ctgagtaggtccagtaatctgggca

SEQ ID NO: 2090409 - DNA, 25 bp, Homo sapien
aaggatttccttagattgaaattat

SEQ ID NO: 2090410 - DNA, 25 bp, Homo sapien
tatttatctttatagggttatagag

SEQ ID NO: 2090411 - DNA, 25 bp, Homo sapien
tatctggtgtggtttggccctgtgt

SEQ ID NO: 2090412 - DNA, 25 bp, Homo sapien
ttatctttatctatatctggtgtgg

SEQ ID NO: 2090413 - DNA, 25 bp, Homo sapien
tagccaataccttatgatacaactt

SEQ ID NO: 2090414 - DNA, 25 bp, Homo sapien
cctgcctactgagttgagatgctat

SEQ ID NO: 2090415 - DNA, 25 bp, Homo sapien
agactaaatgtataggccacaaagc

SEQ ID NO: 2090416 - DNA, 25 bp, Homo sapien
tatgcttatcctagtactttcatgg

SEQ ID NO: 2090417 - DNA, 25 bp, Homo sapien
gccacaaagcctatacatttgcagg

SEQ ID NO: 2090418 - DNA, 25 bp, Homo sapien
gacaagagaccagaaggatttcccc

SEQ ID NO: 2090419 - DNA, 25 bp, Homo sapien
caggcaacagctagagaccgtctta

SEQ ID NO: 2090420 - DNA, 25 bp, Homo sapien
aaatgttccaggcatcactgagtga

SEQ ID NO: 2090421 - DNA, 25 bp, Homo sapien
taatattatagatgacaggtagcac

SEQ ID NO: 2090422 - DNA, 25 bp, Homo sapien
tgccggaaggatgaacgaacagtgc

SEQ ID NO: 2090423 - DNA, 25 bp, Homo sapien
gaaaagcagggtccgaaattgctca

SEQ ID NO: 2090424 - DNA, 25 bp, Homo sapien
gccggcttgggtttcgcttgtacat

SEQ ID NO: 2090425 - DNA, 25 bp, Homo sapien
cgaacagtgcgattcatcagtggct

SEQ ID NO: 2090426 - DNA, 25 bp, Homo sapien
gcaaatatactgactgataagccct

SEQ ID NO: 2090427 - DNA, 25 bp, Homo sapien
tgtgtctcttgctggtaccgaatag

SEQ ID NO: 2090428 - DNA, 25 bp, Homo sapien
tctgggcccataggctgtttctgca

SEQ ID NO: 2090429 - DNA, 25 bp, Homo sapien
gaatagccttcctcaaagactgatg

SEQ ID NO: 2090430 - DNA, 25 bp, Homo sapien
tgatcttggttcactacaaccacca

SEQ ID NO: 2090431 - DNA, 25 bp, Homo sapien
accacctcctgggttcaagcgattc

SEQ ID NO: 2090432 - DNA, 25 bp, Homo sapien
attttttatttgtagtagtgacagg

SEQ ID NO: 2090433 - DNA, 25 bp, Homo sapien
tgacagggtttcatcatgttggcca

SEQ ID NO: 2090434 - DNA, 25 bp, Homo sapien
tatatactatgtaacagcgtgcaaa

SEQ ID NO: 2090435 - DNA, 25 bp, Homo sapien
taagttaatcacctgccttgcaaag

SEQ ID NO: 2090436 - DNA, 25 bp, Homo sapien
ttgtaaagggaagacgggatagctc

SEQ ID NO: 2090437 - DNA, 25 bp, Homo sapien
gagccacaggagcatgaattcctca

SEQ ID NO: 2090438 - DNA, 25 bp, Homo sapien
tgagggtcatctaactaaggcatgg

SEQ ID NO: 2090439 - DNA, 25 bp, Homo sapien
cagtttctatcacctctgcagggaa

SEQ ID NO: 2090440 - DNA, 25 bp, Homo sapien
tataagatgtaagggcaagtcaggc

SEQ ID NO: 2090441 - DNA, 25 bp, Homo sapien
ttcacaagacagctaggaaggccag

SEQ ID NO: 2090442 - DNA, 25 bp, Homo sapien
gaaggaagtctttcaccaaccacta

SEQ ID NO: 2090443 - DNA, 25 bp, Homo sapien
cactgaggaggatcggctgcttctt

SEQ ID NO: 2090444 - DNA, 25 bp, Homo sapien
gaaaggcggtcacagcttgccctat

SEQ ID NO: 2090445 - DNA, 25 bp, Homo sapien
tgcttggcaccatgtagccctggga

SEQ ID NO: 2090446 - DNA, 25 bp, Homo sapien
aatatcctgatatggaggaactgcc

SEQ ID NO: 2090447 - DNA, 25 bp, Homo sapien
ggaactgcctgaaacaggttggcct

SEQ ID NO: 2090448 - DNA, 25 bp, Homo sapien
tccctcctagggaatgtaacatctt

SEQ ID NO: 2090449 - DNA, 25 bp, Homo sapien
ggtatataacccaaggcaggctgtg

SEQ ID NO: 2090450 - DNA, 25 bp, Homo sapien
tcacttcagaacaataagtaacaat

SEQ ID NO: 2090451 - DNA, 25 bp, Homo sapien
actttcacttcagaacaataagtaa

SEQ ID NO: 2090452 - DNA, 25 bp, Homo sapien
ttcacttcagaacaataagtaacaa

SEQ ID NO: 2090453 - DNA, 25 bp, Homo sapien
ctttcacttcagaacaataagtaac

SEQ ID NO: 2090454 - DNA, 25 bp, Homo sapien
caattttgctggtccctgtgatcag

SEQ ID NO: 2090455 - DNA, 25 bp, Homo sapien
cctgtgatcagaatttacgctgaga

SEQ ID NO: 2090456 - DNA, 25 bp, Homo sapien
gaatttacgctgagaattgctgccc

SEQ ID NO: 2090457 - DNA, 25 bp, Homo sapien
gaattgctgcccgttctgaaagcat

SEQ ID NO: 2090458 - DNA, 25 bp, Homo sapien
gatgaggcgctgtatgcatttccag

SEQ ID NO: 2090459 - DNA, 25 bp, Homo sapien
ggcacagaatgttgtagctatgcaa

SEQ ID NO: 2090460 - DNA, 25 bp, Homo sapien
gcatttccagtacaagtattccacc

SEQ ID NO: 2090461 - DNA, 25 bp, Homo sapien
cccaaactagagtgccctggatggc

SEQ ID NO: 2090462 - DNA, 25 bp, Homo sapien
cctggtgtgccatgttaagacgctc

SEQ ID NO: 2090463 - DNA, 25 bp, Homo sapien
aaagtgcaattcgagaatatcaagg

SEQ ID NO: 2090464 - DNA, 25 bp, Homo sapien
tttaggtaaatcactctgctttgca

SEQ ID NO: 2090465 - DNA, 25 bp, Homo sapien
gacaacagtgaaccgttgaaagctt

SEQ ID NO: 2090466 - DNA, 25 bp, Homo sapien
agtatcacatgcgactcaactgcag

SEQ ID NO: 2090467 - DNA, 25 bp, Homo sapien
gaaagtggaatatgctgggaacagc

SEQ ID NO: 2090468 - DNA, 25 bp, Homo sapien
tcagatcagcataagcaaaggcgct

SEQ ID NO: 2090469 - DNA, 25 bp, Homo sapien
gaagtttacctaacatagtccacca

SEQ ID NO: 2090470 - DNA, 25 bp, Homo sapien
cctcgccctagcaggacgtgttgtg

SEQ ID NO: 2090471 - DNA, 25 bp, Homo sapien
ttgtcgcttcagcacttgcccagtg

SEQ ID NO: 2090472 - DNA, 25 bp, Homo sapien
cccgccctagaagtaattgtcgctt

SEQ ID NO: 2090473 - DNA, 25 bp, Homo sapien
tgtggctaggcggttaaagtcgtac

SEQ ID NO: 2090474 - DNA, 25 bp, Homo sapien
tgccggcaccgccccgcccctccag

SEQ ID NO: 2090475 - DNA, 25 bp, Homo sapien
ttgccggcaccgccccgcccctcca

SEQ ID NO: 2090476 - DNA, 25 bp, Homo sapien
aaacgtcatcttctcgggcgcagcc

SEQ ID NO: 2090477 - DNA, 25 bp, Homo sapien
aacgtcatcttctcgggcgcagcca

SEQ ID NO: 2090478 - DNA, 25 bp, Homo sapien
ctccatgcccacgatcggcccgctc

SEQ ID NO: 2090479 - DNA, 25 bp, Homo sapien
gctcatctccccgtacggcgcttac

SEQ ID NO: 2090480 - DNA, 25 bp, Homo sapien
tgctcatctccccgtacggcgctta

SEQ ID NO: 2090481 - DNA, 25 bp, Homo sapien
catgcccacgatcggcccgctcgcc

SEQ ID NO: 2090482 - DNA, 25 bp, Homo sapien
cgagcaagttcctgccgacgtttct

SEQ ID NO: 2090483 - DNA, 25 bp, Homo sapien
tctcagtcgagcaagttcctgccga

SEQ ID NO: 2090484 - DNA, 25 bp, Homo sapien
tctctcagtcgagcaagttcctgcc

SEQ ID NO: 2090485 - DNA, 25 bp, Homo sapien
agtcgagcaagttcctgccgacgtt

SEQ ID NO: 2090486 - DNA, 25 bp, Homo sapien
tagttacataatcttgacagaccag

SEQ ID NO: 2090487 - DNA, 25 bp, Homo sapien
ggagtgttccatagtctacagtatt

SEQ ID NO: 2090488 - DNA, 25 bp, Homo sapien
caggtgcttagtcttggatatgcca

SEQ ID NO: 2090489 - DNA, 25 bp, Homo sapien
gaagtaccactaggcaaagaattgt

SEQ ID NO: 2090490 - DNA, 25 bp, Homo sapien
cacagaatcatgctatagttttgca

SEQ ID NO: 2090491 - DNA, 25 bp, Homo sapien
gctgaactggtaaatacaacgcaag

SEQ ID NO: 2090492 - DNA, 25 bp, Homo sapien
gagtgacaacaatgctcaaaggaaa

SEQ ID NO: 2090493 - DNA, 25 bp, Homo sapien
aaggcttagagtcaacagcaggcac

SEQ ID NO: 2090494 - DNA, 25 bp, Homo sapien
tctctctttccaatagcttctcttc

SEQ ID NO: 2090495 - DNA, 25 bp, Homo sapien
tcaataaaagtgtcctcctcttcct

SEQ ID NO: 2090496 - DNA, 25 bp, Homo sapien
ttcttctagttgttgttcttcaata

SEQ ID NO: 2090497 - DNA, 25 bp, Homo sapien
tttccaatagcttctcttcttctag

SEQ ID NO: 2090498 - DNA, 25 bp, Homo sapien
aggcggatcacttgatcacaagaga

SEQ ID NO: 2090499 - DNA, 25 bp, Homo sapien
ggatcacttgatcacaagagatcaa

SEQ ID NO: 2090500 - DNA, 25 bp, Homo sapien
cacttgatcacaagagatcaagacc

SEQ ID NO: 2090501 - DNA, 25 bp, Homo sapien
gcggatcacttgatcacaagagatc

SEQ ID NO: 2090502 - DNA, 25 bp, Homo sapien
gatctaaggagcacaaagatacatg

SEQ ID NO: 2090503 - DNA, 25 bp, Homo sapien
gaactagagctatcacagcacctct

SEQ ID NO: 2090504 - DNA, 25 bp, Homo sapien
tctcatctgctgacactgtgttaaa

SEQ ID NO: 2090505 - DNA, 25 bp, Homo sapien
cattaagaaatttcggctgagcgcg

SEQ ID NO: 2090506 - DNA, 25 bp, Homo sapien
ttctgaattcttcttgtgccttctg

SEQ ID NO: 2090507 - DNA, 25 bp, Homo sapien
ttctgctctcttagcaaccactcct

SEQ ID NO: 2090508 - DNA, 25 bp, Homo sapien
tcttgtgccttctgctctcttagca

SEQ ID NO: 2090509 - DNA, 25 bp, Homo sapien
tagcaaccactcctcatgtaatctt

SEQ ID NO: 2090510 - DNA, 25 bp, Homo sapien
ctttcttctcctgtcgtttctgctc

SEQ ID NO: 2090511 - DNA, 25 bp, Homo sapien
tcctctgctgttcttcccattgttc

SEQ ID NO: 2090512 - DNA, 25 bp, Homo sapien
ttcttctcctgtcgtttctgctcct

SEQ ID NO: 2090513 - DNA, 25 bp, Homo sapien
tttcctctgctgttcttcccattgt

SEQ ID NO: 2090514 - DNA, 25 bp, Homo sapien
aaatcctctaattcttgctgacatg

SEQ ID NO: 2090515 - DNA, 25 bp, Homo sapien
tgccacagagaccaaaccataaagc

SEQ ID NO: 2090516 - DNA, 25 bp, Homo sapien
gctgacatgtcataagcagttctct

SEQ ID NO: 2090517 - DNA, 25 bp, Homo sapien
cttcatagcctaagtggaagaggaa

SEQ ID NO: 2090518 - DNA, 25 bp, Homo sapien
gccctacatgatctgactctgctta

SEQ ID NO: 2090519 - DNA, 25 bp, Homo sapien
ttgctgagatctctccactcaggtg

SEQ ID NO: 2090520 - DNA, 25 bp, Homo sapien
ccttttttcagccttcaagcttcag

SEQ ID NO: 2090521 - DNA, 25 bp, Homo sapien
gactctagatttcaggttccctggc

SEQ ID NO: 2090522 - DNA, 25 bp, Homo sapien
cattttcagcctgatccagcatctt

SEQ ID NO: 2090523 - DNA, 25 bp, Homo sapien
aaactaacattactggaactattat

SEQ ID NO: 2090524 - DNA, 25 bp, Homo sapien
ttactggaactattatttctaagga

SEQ ID NO: 2090525 - DNA, 25 bp, Homo sapien
ctaacattactggaactattatttc

SEQ ID NO: 2090526 - DNA, 25 bp, Homo sapien
cattactggaactattatttctaag

SEQ ID NO: 2090527 - DNA, 25 bp, Homo sapien
taagttggaacaggcaatcaagact

SEQ ID NO: 2090528 - DNA, 25 bp, Homo sapien
gaacttattagggaaccaccacaga

SEQ ID NO: 2090529 - DNA, 25 bp, Homo sapien
caacggtactgagacatgagctcca

SEQ ID NO: 2090530 - DNA, 25 bp, Homo sapien
tcaaggtaaaccgtccactggaggc

SEQ ID NO: 2090531 - DNA, 25 bp, Homo sapien
ctctgaaatccacgggtggttctgg

SEQ ID NO: 2090532 - DNA, 25 bp, Homo sapien
acaattagctcgatccttctccatt

SEQ ID NO: 2090533 - DNA, 25 bp, Homo sapien
cattactctgaaatccacgggtggt

SEQ ID NO: 2090534 - DNA, 25 bp, Homo sapien
aattagctcgatccttctccattac

SEQ ID NO: 2090535 - DNA, 25 bp, Homo sapien
tgaatcacttcattctgacatgata

SEQ ID NO: 2090536 - DNA, 25 bp, Homo sapien
gaatcacttcattctgacatgataa

SEQ ID NO: 2090537 - DNA, 25 bp, Homo sapien
cccacccagggaacaaggatagagg

SEQ ID NO: 2090538 - DNA, 25 bp, Homo sapien
gcaaagtggcttcctaaagatgcag

SEQ ID NO: 2090539 - DNA, 25 bp, Homo sapien
cctcagagaactaggctaagcccac

SEQ ID NO: 2090540 - DNA, 25 bp, Homo sapien
catggactaatgcaagctcaggaag

SEQ ID NO: 2090541 - DNA, 25 bp, Homo sapien
ggaagtgctcctggtacgcattacc

SEQ ID NO: 2090542 - DNA, 25 bp, Homo sapien
ggtatagctaactgactactcctct

SEQ ID NO: 2090543 - DNA, 25 bp, Homo sapien
caaatgccccctcgggtatagctaa

SEQ ID NO: 2090544 - DNA, 25 bp, Homo sapien
taaatggtgtgggtatccaaatgcc

SEQ ID NO: 2090545 - DNA, 25 bp, Homo sapien
gaacttggccctagttcccaggatg

SEQ ID NO: 2090546 - DNA, 25 bp, Homo sapien
gagcaaagactcaacctgactggca

SEQ ID NO: 2090547 - DNA, 25 bp, Homo sapien
gcacctactgagataatgcttacag

SEQ ID NO: 2090548 - DNA, 25 bp, Homo sapien
tacagaatgcccagcatacaccatg

SEQ ID NO: 2090549 - DNA, 25 bp, Homo sapien
taagaagggtaggactggatgttgg

SEQ ID NO: 2090550 - DNA, 25 bp, Homo sapien
tggatgttgggaaattatgtttacg

SEQ ID NO: 2090551 - DNA, 25 bp, Homo sapien
tgggaaattatgtttacgtgaacat

SEQ ID NO: 2090552 - DNA, 25 bp, Homo sapien
cttaataagaagggtaggactggat

SEQ ID NO: 2090553 - DNA, 25 bp, Homo sapien
gcttgcgtcagggtcatagtcatcc

SEQ ID NO: 2090554 - DNA, 25 bp, Homo sapien
ttgcgtcagggtcatagtcatccct

SEQ ID NO: 2090555 - DNA, 25 bp, Homo sapien
caggcttgcgtcagggtcatagtca

SEQ ID NO: 2090556 - DNA, 25 bp, Homo sapien
tccaggcttgcgtcagggtcatagt

SEQ ID NO: 2090557 - DNA, 25 bp, Homo sapien
tgcccctcaggtgaggttccaaatt

SEQ ID NO: 2090558 - DNA, 25 bp, Homo sapien
ggtgaggttccaaattgcagctgac

SEQ ID NO: 2090559 - DNA, 25 bp, Homo sapien
gaacatatacattgcccctcaggtg

SEQ ID NO: 2090560 - DNA, 25 bp, Homo sapien
tactgaacatatacattgcccctca

SEQ ID NO: 2090561 - DNA, 25 bp, Homo sapien
taccatcgtccgttaaacagagaaa

SEQ ID NO: 2090562 - DNA, 25 bp, Homo sapien
cataccatcgtccgttaaacagaga

SEQ ID NO: 2090563 - DNA, 25 bp, Homo sapien
ataccatcgtccgttaaacagagaa

SEQ ID NO: 2090564 - DNA, 25 bp, Homo sapien
accatcgtccgttaaacagagaaag

SEQ ID NO: 2090565 - DNA, 25 bp, Homo sapien
gaagatgctactttatccttttccg

SEQ ID NO: 2090566 - DNA, 25 bp, Homo sapien
cagtgatgaaacagcacttatcact

SEQ ID NO: 2090567 - DNA, 25 bp, Homo sapien
cttttccgaaggtacatttctgata

SEQ ID NO: 2090568 - DNA, 25 bp, Homo sapien
tattctgaagatgctactttatcct

SEQ ID NO: 2090569 - DNA, 25 bp, Homo sapien
ttcattgttgggatttctgaacaca

SEQ ID NO: 2090570 - DNA, 25 bp, Homo sapien
ccagaattcattgttgggatttctg

SEQ ID NO: 2090571 - DNA, 25 bp, Homo sapien
ttgttgggatttctgaacacatgaa

SEQ ID NO: 2090572 - DNA, 25 bp, Homo sapien
caagtagatgtctctattagcttcc

SEQ ID NO: 2090573 - DNA, 25 bp, Homo sapien
tagtagtcgtcgtggtggcccatcc

SEQ ID NO: 2090574 - DNA, 25 bp, Homo sapien
cagcctgctgtagtagtcgtcgtgg

SEQ ID NO: 2090575 - DNA, 25 bp, Homo sapien
cccgcagcctgctgtagtagtcgtc

SEQ ID NO: 2090576 - DNA, 25 bp, Homo sapien
tgtagtagtcgtcgtggtggcccat

SEQ ID NO: 2090577 - DNA, 25 bp, Homo sapien
cccatttcttttgtaggagtggtct

SEQ ID NO: 2090578 - DNA, 25 bp, Homo sapien
atttcttttgtaggagtggtctgga

SEQ ID NO: 2090579 - DNA, 25 bp, Homo sapien
attccccatttcttttgtaggagtg

SEQ ID NO: 2090580 - DNA, 25 bp, Homo sapien
tctcggattccccatttcttttgta

SEQ ID NO: 2090581 - DNA, 25 bp, Homo sapien
gtgaattgtgcctctcccgactctt

SEQ ID NO: 2090582 - DNA, 25 bp, Homo sapien
ccgactctttgatgtgcgtttgtga

SEQ ID NO: 2090583 - DNA, 25 bp, Homo sapien
tagaggaactttggctccggctgcg

SEQ ID NO: 2090584 - DNA, 25 bp, Homo sapien
gatgtgcgtttgtgagatttcttcc

SEQ ID NO: 2090585 - DNA, 25 bp, Homo sapien
tgtcttatcacatcgccaattagtt

SEQ ID NO: 2090586 - DNA, 25 bp, Homo sapien
tttcacttatatatgctgggctgga

SEQ ID NO: 2090587 - DNA, 25 bp, Homo sapien
aattgttcagcgtcacttttctaag

SEQ ID NO: 2090588 - DNA, 25 bp, Homo sapien
tgtgattgtgaccaacattcaggcc

SEQ ID NO: 2090589 - DNA, 25 bp, Homo sapien
tgcttccctccacttagaagtgctg

SEQ ID NO: 2090590 - DNA, 25 bp, Homo sapien
tacaaaaaacgtgttgctctcttca

SEQ ID NO: 2090591 - DNA, 25 bp, Homo sapien
ttaaagcacgaatgttccctctggg

SEQ ID NO: 2090592 - DNA, 25 bp, Homo sapien
gaagtgctgcacactttacagcagc

SEQ ID NO: 2090593 - DNA, 25 bp, Homo sapien
ttaggcattctgaatctgggatgag

SEQ ID NO: 2090594 - DNA, 25 bp, Homo sapien
cacatttgactcctgagatgaattt

SEQ ID NO: 2090595 - DNA, 25 bp, Homo sapien
aatgactaaattggagtgatacttc

SEQ ID NO: 2090596 - DNA, 25 bp, Homo sapien
tttcttaggcattctgaatctggga

SEQ ID NO: 2090597 - DNA, 25 bp, Homo sapien
cacacactgtagatggtcactccct

SEQ ID NO: 2090598 - DNA, 25 bp, Homo sapien
cagtattactgttttgctaagccgc

SEQ ID NO: 2090599 - DNA, 25 bp, Homo sapien
taagccgcttcattcatgcctacac

SEQ ID NO: 2090600 - DNA, 25 bp, Homo sapien
gaaattggactgacataactctcct

SEQ ID NO: 2090601 - DNA, 25 bp, Homo sapien
tagtgatgccattggttgcactggg

SEQ ID NO: 2090602 - DNA, 25 bp, Homo sapien
tctagtgatgccattggttgcactg

SEQ ID NO: 2090603 - DNA, 25 bp, Homo sapien
gcctctagtgatgccattggttgca

SEQ ID NO: 2090604 - DNA, 25 bp, Homo sapien
ggcctctagtgatgccattggttgc

SEQ ID NO: 2090605 - DNA, 25 bp, Homo sapien
taatgcacgacatttgaagcacctg

SEQ ID NO: 2090606 - DNA, 25 bp, Homo sapien
tggatgtgctatcaatcaggtggga

SEQ ID NO: 2090607 - DNA, 25 bp, Homo sapien
tcaaatcgatttatcactgaaagaa

SEQ ID NO: 2090608 - DNA, 25 bp, Homo sapien
gaccaaacttagtattaggcaggta

SEQ ID NO: 2090609 - DNA, 25 bp, Homo sapien
aagatttcctgggattgaaagcccg

SEQ ID NO: 2090610 - DNA, 25 bp, Homo sapien
tctaaaggagaatcgttgggactgg

SEQ ID NO: 2090611 - DNA, 25 bp, Homo sapien
tatgtgactatttcctacgggtgcc

SEQ ID NO: 2090612 - DNA, 25 bp, Homo sapien
tccagagaacctgtactaaggacaa

SEQ ID NO: 2090613 - DNA, 25 bp, Homo sapien
tctggagcaaccatgtaactcttgc

SEQ ID NO: 2090614 - DNA, 25 bp, Homo sapien
cacaaatgcttgtaagactgacacc

SEQ ID NO: 2090615 - DNA, 25 bp, Homo sapien
gagtatacatcgtgttgctccagat

SEQ ID NO: 2090616 - DNA, 25 bp, Homo sapien
ttttagacactaaccatctggagca

SEQ ID NO: 2090617 - DNA, 25 bp, Homo sapien
gacccattagttacacttcaaagaa

SEQ ID NO: 2090618 - DNA, 25 bp, Homo sapien
gccattgaagcttacccaaatattc

SEQ ID NO: 2090619 - DNA, 25 bp, Homo sapien
gtaatagaaatagatcaacagcaca

SEQ ID NO: 2090620 - DNA, 25 bp, Homo sapien
cttggattggcaaagaggagcactt

SEQ ID NO: 2090621 - DNA, 25 bp, Homo sapien
tccccagatgtgtaactcccttttc

SEQ ID NO: 2090622 - DNA, 25 bp, Homo sapien
cttttctttctaattaccatagtca

SEQ ID NO: 2090623 - DNA, 25 bp, Homo sapien
ctccatatccccagatgtgtaactc

SEQ ID NO: 2090624 - DNA, 25 bp, Homo sapien
catatccccagatgtgtaactccct

SEQ ID NO: 2090625 - DNA, 25 bp, Homo sapien
gaaaaatgtccttaaagcaattgag

SEQ ID NO: 2090626 - DNA, 25 bp, Homo sapien
aaaaatgtccttaaagcaattgagc

SEQ ID NO: 2090627 - DNA, 25 bp, Homo sapien
tattgaggatcaggacaatgaacta

SEQ ID NO: 2090628 - DNA, 25 bp, Homo sapien
ggaaataattcatcgttatgtggaa

SEQ ID NO: 2090629 - DNA, 25 bp, Homo sapien
ttttgctgtgctattgaggatcagg

SEQ ID NO: 2090630 - DNA, 25 bp, Homo sapien
attacttgacaagtatttcggcagt

SEQ ID NO: 2090631 - DNA, 25 bp, Homo sapien
tttcattaagagaagcctgattttc

SEQ ID NO: 2090632 - DNA, 25 bp, Homo sapien
gactttcattaagagaagcctgatt

SEQ ID NO: 2090633 - DNA, 25 bp, Homo sapien
atgtgactttcattaagagaagcct

SEQ ID NO: 2090634 - DNA, 25 bp, Homo sapien
ctagataactcggcttattttgggg

SEQ ID NO: 2090635 - DNA, 25 bp, Homo sapien
gagaacttgttcagaccgttttagc

SEQ ID NO: 2090636 - DNA, 25 bp, Homo sapien
agcacggaaacctaaaatgtgcagc

SEQ ID NO: 2090637 - DNA, 25 bp, Homo sapien
tgcaaaaatggtatgtcccactatc

SEQ ID NO: 2090638 - DNA, 25 bp, Homo sapien
gtgcagcttccttgagtggcgagat

SEQ ID NO: 2090639 - DNA, 25 bp, Homo sapien
gacccgaggaacgctggccccgagc

SEQ ID NO: 2090640 - DNA, 25 bp, Homo sapien
cgacggccggacccgaggaacgctg

SEQ ID NO: 2090641 - DNA, 25 bp, Homo sapien
ggcttggtcagtgatggagtgtggc

SEQ ID NO: 2090642 - DNA, 25 bp, Homo sapien
tgtttttccagagttgcagcactcc

SEQ ID NO: 2090643 - DNA, 25 bp, Homo sapien
ccgtgaatgcgtgacgagctccaca

SEQ ID NO: 2090644 - DNA, 25 bp, Homo sapien
gcgtgacgagctccacagaagagct

SEQ ID NO: 2090645 - DNA, 25 bp, Homo sapien
ttccagagttgcagcactccctcgt

SEQ ID NO: 2090646 - DNA, 25 bp, Homo sapien
caatgggaaggagagggcggattcc

SEQ ID NO: 2090647 - DNA, 25 bp, Homo sapien
cagtgcaatgggaaggagagggcgg

SEQ ID NO: 2090648 - DNA, 25 bp, Homo sapien
tggagcagtgcaatgggaaggagag

SEQ ID NO: 2090649 - DNA, 25 bp, Homo sapien
gtgcaatgggaaggagagggcggat

SEQ ID NO: 2090650 - DNA, 25 bp, Homo sapien
tcagccgaacggacggtaactcatc

SEQ ID NO: 2090651 - DNA, 25 bp, Homo sapien
atccagtccgcagcaccgaggatgg

SEQ ID NO: 2090652 - DNA, 25 bp, Homo sapien
ggaacagactcccgcgaagctcggg

SEQ ID NO: 2090653 - DNA, 25 bp, Homo sapien
atgggcgaggcgagcccagggaaca

SEQ ID NO: 2090654 - DNA, 25 bp, Homo sapien
gggcatggcccaacaaaagcaattt

SEQ ID NO: 2090655 - DNA, 25 bp, Homo sapien
tgacatttgggagcaaggacatgcc

SEQ ID NO: 2090656 - DNA, 25 bp, Homo sapien
tgggaaacccgtggctcttcaagga

SEQ ID NO: 2090657 - DNA, 25 bp, Homo sapien
tatgaacatccattatgcccaggca

SEQ ID NO: 2090658 - DNA, 25 bp, Homo sapien
gctagtagtttctgggcaatagaca

SEQ ID NO: 2090659 - DNA, 25 bp, Homo sapien
ttttgcctaaagataatgggctagt

SEQ ID NO: 2090660 - DNA, 25 bp, Homo sapien
cactaactggtatgatcttgaacaa

SEQ ID NO: 2090661 - DNA, 25 bp, Homo sapien
tcctgtggtggcaagaacattgcct

SEQ ID NO: 2090662 - DNA, 25 bp, Homo sapien
ttcacagtcactgaggtgtaagaaa

SEQ ID NO: 2090663 - DNA, 25 bp, Homo sapien
ggttgaaaaggactgagatgtttct

SEQ ID NO: 2090664 - DNA, 25 bp, Homo sapien
aaggaagggctccacaggcattcac

SEQ ID NO: 2090665 - DNA, 25 bp, Homo sapien
tcactgaagggttgaaaaggactga

SEQ ID NO: 2090666 - DNA, 25 bp, Homo sapien
caggagggctacatgtctgggacca

SEQ ID NO: 2090667 - DNA, 25 bp, Homo sapien
tactgtgctgtgtactgaagagggc

SEQ ID NO: 2090668 - DNA, 25 bp, Homo sapien
aaaagacactcccacgggtaccatg

SEQ ID NO: 2090669 - DNA, 25 bp, Homo sapien
gaggtatctgttgcaagtgagcagc

SEQ ID NO: 2090670 - DNA, 25 bp, Homo sapien
tttggtaacttatcaaacaccaaca

SEQ ID NO: 2090671 - DNA, 25 bp, Homo sapien
ttggtaacttatcaaacaccaacat

SEQ ID NO: 2090672 - DNA, 25 bp, Homo sapien
tcaggatggatgcaatgggctttaa

SEQ ID NO: 2090673 - DNA, 25 bp, Homo sapien
aaacactatcattttgataactaat

SEQ ID NO: 2090674 - DNA, 25 bp, Homo sapien
attacaagggggtttcaggatggat

SEQ ID NO: 2090675 - DNA, 25 bp, Homo sapien
gggtttcaggatggatgcaatgggc

SEQ ID NO: 2090676 - DNA, 25 bp, Homo sapien
aacaatcctatcctgccctcctcca

SEQ ID NO: 2090677 - DNA, 25 bp, Homo sapien
cagagtaacaatcctatcctgccct

SEQ ID NO: 2090678 - DNA, 25 bp, Homo sapien
agtaacaatcctatcctgccctcct

SEQ ID NO: 2090679 - DNA, 25 bp, Homo sapien
agagtaacaatcctatcctgccctc

SEQ ID NO: 2090680 - DNA, 25 bp, Homo sapien
tgtgaggctgttgggtacagttaaa

SEQ ID NO: 2090681 - DNA, 25 bp, Homo sapien
gctgttgggtacagttaaatttctg

SEQ ID NO: 2090682 - DNA, 25 bp, Homo sapien
tgaataatccaggatgcaagctgca

SEQ ID NO: 2090683 - DNA, 25 bp, Homo sapien
aataatccaggatgcaagctgcatc

SEQ ID NO: 2090684 - DNA, 25 bp, Homo sapien
gaggagagatctgaggttcctgtcc

SEQ ID NO: 2090685 - DNA, 25 bp, Homo sapien
actcagggccctttgaatagtactg

SEQ ID NO: 2090686 - DNA, 25 bp, Homo sapien
ctgggagcatacactgagcagagag

SEQ ID NO: 2090687 - DNA, 25 bp, Homo sapien
tgaggttcctgtccgctcatccctg

SEQ ID NO: 2090688 - DNA, 25 bp, Homo sapien
cagtacatcagctggcaccgcactg

SEQ ID NO: 2090689 - DNA, 25 bp, Homo sapien
tctaagcacttggtactctttggat

SEQ ID NO: 2090690 - DNA, 25 bp, Homo sapien
tttggatatggtggaccatagcccc

SEQ ID NO: 2090691 - DNA, 25 bp, Homo sapien
taaaccacaacagacagtacatcag

SEQ ID NO: 2090692 - DNA, 25 bp, Homo sapien
ttcagtgaaatgcgtggatgcagat

SEQ ID NO: 2090693 - DNA, 25 bp, Homo sapien
cagtgaaatgcgtggatgcagataa

SEQ ID NO: 2090694 - DNA, 25 bp, Homo sapien
cacattttgtgcacctgggggccca

SEQ ID NO: 2090695 - DNA, 25 bp, Homo sapien
tgctattaaaggcttgggcacattt

SEQ ID NO: 2090696 - DNA, 25 bp, Homo sapien
ccagtggaatcacccgtagtaccca

SEQ ID NO: 2090697 - DNA, 25 bp, Homo sapien
tgttgggaagaattccgcacgccca

SEQ ID NO: 2090698 - DNA, 25 bp, Homo sapien
tatttgcaagccagtgtgatgagaa

SEQ ID NO: 2090699 - DNA, 25 bp, Homo sapien
gtacccaaagggagtgcagtgattc

SEQ ID NO: 2090700 - DNA, 25 bp, Homo sapien
atgagtggagaaaggcatatgggag

SEQ ID NO: 2090701 - DNA, 25 bp, Homo sapien
catgagtggagaaaggcatatggga

SEQ ID NO: 2090702 - DNA, 25 bp, Homo sapien
ctagttcattaaatctatttcattt

SEQ ID NO: 2090703 - DNA, 25 bp, Homo sapien
aacagatattctgtagatgatgttc

SEQ ID NO: 2090704 - DNA, 25 bp, Homo sapien
tcaaacagatattctgtagatgatg

SEQ ID NO: 2090705 - DNA, 25 bp, Homo sapien
caaacagatattctgtagatgatgt

SEQ ID NO: 2090706 - DNA, 25 bp, Homo sapien
cagatattctgtagatgatgttcag

SEQ ID NO: 2090707 - DNA, 25 bp, Homo sapien
gctcatcctccttaattaccagact

SEQ ID NO: 2090708 - DNA, 25 bp, Homo sapien
tattgctttgcccaaagcatgatcc

SEQ ID NO: 2090709 - DNA, 25 bp, Homo sapien
caaagcatgatcctgctcatcctcc

SEQ ID NO: 2090710 - DNA, 25 bp, Homo sapien
cccttgtattgctttgcccaaagca

SEQ ID NO: 2090711 - DNA, 25 bp, Homo sapien
tactcccacaatctgccttggttgt

SEQ ID NO: 2090712 - DNA, 25 bp, Homo sapien
ccaggctttgttgtgaatcctcttc

SEQ ID NO: 2090713 - DNA, 25 bp, Homo sapien
gtgaatcctcttcacaaacaaaggg

SEQ ID NO: 2090714 - DNA, 25 bp, Homo sapien
acttcctccgggactcactttgcat

SEQ ID NO: 2090715 - DNA, 25 bp, Homo sapien
agaagaaagccgtgcccgtggatag

SEQ ID NO: 2090716 - DNA, 25 bp, Homo sapien
cgtggataggcacagccatgtcaca

SEQ ID NO: 2090717 - DNA, 25 bp, Homo sapien
gcccttgtcaaatcatccagaagaa

SEQ ID NO: 2090718 - DNA, 25 bp, Homo sapien
catgtcacatagctcctgtactctc

SEQ ID NO: 2090719 - DNA, 25 bp, Homo sapien
gaacttcggtttgcctcagagagac

SEQ ID NO: 2090720 - DNA, 25 bp, Homo sapien
catttttaagactaagagccacggg

SEQ ID NO: 2090721 - DNA, 25 bp, Homo sapien
ggagaaccaagacgatgaacttcgg

SEQ ID NO: 2090722 - DNA, 25 bp, Homo sapien
tgctgagatctactgtcggagaacc

SEQ ID NO: 2090723 - DNA, 25 bp, Homo sapien
tgtatgggaatctcctgtgtcctga

SEQ ID NO: 2090724 - DNA, 25 bp, Homo sapien
tagacttcatccacctctgtatggg

SEQ ID NO: 2090725 - DNA, 25 bp, Homo sapien
tgatttctccccacttaggactagg

SEQ ID NO: 2090726 - DNA, 25 bp, Homo sapien
ggttctggtcctctatgttcataga

SEQ ID NO: 2090727 - DNA, 25 bp, Homo sapien
gggtctctggaaggtcatacattca

SEQ ID NO: 2090728 - DNA, 25 bp, Homo sapien
cctgtaagtaagctcatgtggctca

SEQ ID NO: 2090729 - DNA, 25 bp, Homo sapien
tgtggctcagaaacgcttcatggag

SEQ ID NO: 2090730 - DNA, 25 bp, Homo sapien
ggaggacaccatacttgacttggtc

SEQ ID NO: 2090731 - DNA, 25 bp, Homo sapien
tgctaagcgcttatagtcatgactg

SEQ ID NO: 2090732 - DNA, 25 bp, Homo sapien
cattcctgctcctatgcctatttac

SEQ ID NO: 2090733 - DNA, 25 bp, Homo sapien
ggtaaaatcaggacgccattcctgc

SEQ ID NO: 2090734 - DNA, 25 bp, Homo sapien
ccaaagtcgaaaactgtattgactc

SEQ ID NO: 2090735 - DNA, 25 bp, Homo sapien
ggcttagaattaaacccactctgca

SEQ ID NO: 2090736 - DNA, 25 bp, Homo sapien
gtctccctggctgcagtttactaag

SEQ ID NO: 2090737 - DNA, 25 bp, Homo sapien
catgaccagtgcaatacaactctaa

SEQ ID NO: 2090738 - DNA, 25 bp, Homo sapien
gattttgcaaccgagtgaagatgaa

SEQ ID NO: 2090739 - DNA, 25 bp, Homo sapien
gaatgataaccccataaactgcagg

SEQ ID NO: 2090740 - DNA, 25 bp, Homo sapien
gaacgtttcgcatggacttgactgt

SEQ ID NO: 2090741 - DNA, 25 bp, Homo sapien
cacacgttattaggaggagcaggtc

SEQ ID NO: 2090742 - DNA, 25 bp, Homo sapien
tgcatgaaatggtccacctccaagt

SEQ ID NO: 2090743 - DNA, 25 bp, Homo sapien
gccctcggccattggtaacaagcca

SEQ ID NO: 2090744 - DNA, 25 bp, Homo sapien
aaattaccctcatcctgaagagccc

SEQ ID NO: 2090745 - DNA, 25 bp, Homo sapien
gccagccctgaatcaatacatgaaa

SEQ ID NO: 2090746 - DNA, 25 bp, Homo sapien
tgcactcaccaacccggaaaccaaa

SEQ ID NO: 2090747 - DNA, 25 bp, Homo sapien
tgcagctgcatctttacagttcatg

SEQ ID NO: 2090748 - DNA, 25 bp, Homo sapien
tgcaacctggcttttgaaagagctt

SEQ ID NO: 2090749 - DNA, 25 bp, Homo sapien
gccgcgaaggagtgcaacctggctt

SEQ ID NO: 2090750 - DNA, 25 bp, Homo sapien
tgggaacacactggagccgcgaagg

SEQ ID NO: 2090751 - DNA, 25 bp, Homo sapien
tattgacaaagactcgaattcaccc

SEQ ID NO: 2090752 - DNA, 25 bp, Homo sapien
aaagactcgaattcacccggtgaag

SEQ ID NO: 2090753 - DNA, 25 bp, Homo sapien
ccggtgatgccagtgtaaacttttc

SEQ ID NO: 2090754 - DNA, 25 bp, Homo sapien
gtctcccttttacccggtgatgcca

SEQ ID NO: 2090755 - DNA, 25 bp, Homo sapien
acttcaacagcacctgtcctctcat

SEQ ID NO: 2090756 - DNA, 25 bp, Homo sapien
cacttcaacagcacctgtcctctca

SEQ ID NO: 2090757 - DNA, 25 bp, Homo sapien
tcacttcaacagcacctgtcctctc

SEQ ID NO: 2090758 - DNA, 25 bp, Homo sapien
tcctctcctgatccgcttgaaagag

SEQ ID NO: 2090759 - DNA, 25 bp, Homo sapien
ctgatccgcttgaaagagccttgct

SEQ ID NO: 2090760 - DNA, 25 bp, Homo sapien
tctcctgatccgcttgaaagagcct

SEQ ID NO: 2090761 - DNA, 25 bp, Homo sapien
ttctcctctcctgatccgcttgaaa

SEQ ID NO: 2090762 - DNA, 25 bp, Homo sapien
atccattggccggacaatggctttg

SEQ ID NO: 2090763 - DNA, 25 bp, Homo sapien
tggatatccattggccggacaatgg

SEQ ID NO: 2090764 - DNA, 25 bp, Homo sapien
cctggatatccattggccggacaat

SEQ ID NO: 2090765 - DNA, 25 bp, Homo sapien
gatatccattggccggacaatggct

SEQ ID NO: 2090766 - DNA, 25 bp, Homo sapien
gatgatccagataaaggcggctttg

SEQ ID NO: 2090767 - DNA, 25 bp, Homo sapien
ttccacgggaagattgtaagcactc

SEQ ID NO: 2090768 - DNA, 25 bp, Homo sapien
cgacagtggaatgacgtagaagacc

SEQ ID NO: 2090769 - DNA, 25 bp, Homo sapien
gaaaacacggcctctggaatggcca

SEQ ID NO: 2090770 - DNA, 25 bp, Homo sapien
cgggcacagatgctggtgacaaagt

SEQ ID NO: 2090771 - DNA, 25 bp, Homo sapien
tgtcttggcaagtcgcttccgggat

SEQ ID NO: 2090772 - DNA, 25 bp, Homo sapien
ccattgatgaggctaaaggtggcca

SEQ ID NO: 2090773 - DNA, 25 bp, Homo sapien
gctgtgagaccggatgatcaggcca

SEQ ID NO: 2090774 - DNA, 25 bp, Homo sapien
tgagatatcacgcacagccacgcgt

SEQ ID NO: 2090775 - DNA, 25 bp, Homo sapien
gcaagggttcctgtctagccataaa

SEQ ID NO: 2090776 - DNA, 25 bp, Homo sapien
cacgaccatttaacagggcttgagg

SEQ ID NO: 2090777 - DNA, 25 bp, Homo sapien
ggagagtgtccctcatacatggagc

SEQ ID NO: 2090778 - DNA, 25 bp, Homo sapien
tatagaatagcggttgatttccaaa

SEQ ID NO: 2090779 - DNA, 25 bp, Homo sapien
ggctactgtgaccaaatgggctaca

SEQ ID NO: 2090780 - DNA, 25 bp, Homo sapien
ttgcaagcgtagcagaagtgaggct

SEQ ID NO: 2090781 - DNA, 25 bp, Homo sapien
cactaacgtgaacacaaatatagaa

SEQ ID NO: 2090782 - DNA, 25 bp, Homo sapien
gagacatgaagatgagctctactcc

SEQ ID NO: 2090783 - DNA, 25 bp, Homo sapien
tatgccatgatgttaactgaaggag

SEQ ID NO: 2090784 - DNA, 25 bp, Homo sapien
ctatgccatgatgttaactgaagga

SEQ ID NO: 2090785 - DNA, 25 bp, Homo sapien
gatgagctctactcccaaaatgtct

SEQ ID NO: 2090786 - DNA, 25 bp, Homo sapien
gaagccaggcgtgaaatgtctcagc

SEQ ID NO: 2090787 - DNA, 25 bp, Homo sapien
aaatccagagcttgttaatgaggcg

SEQ ID NO: 2090788 - DNA, 25 bp, Homo sapien
gaatatcactcccaatagcagctgc

SEQ ID NO: 2090789 - DNA, 25 bp, Homo sapien
tgcagcagcccctaaacagtttatt

SEQ ID NO: 2090790 - DNA, 25 bp, Homo sapien
tcagctggacttaatgcttggccgc

SEQ ID NO: 2090791 - DNA, 25 bp, Homo sapien
ttggccgcctgcaatataacaaagg

SEQ ID NO: 2090792 - DNA, 25 bp, Homo sapien
aacagtgtgcacaaagcctaggccc

SEQ ID NO: 2090793 - DNA, 25 bp, Homo sapien
taagccttggtttcatcgaacagtg

SEQ ID NO: 2090794 - DNA, 25 bp, Homo sapien
tgtctgggagttaatgaggccttga

SEQ ID NO: 2090795 - DNA, 25 bp, Homo sapien
gaacatccagcttactatacacggg

SEQ ID NO: 2090796 - DNA, 25 bp, Homo sapien
caggcaaagccaagccgtgacatta

SEQ ID NO: 2090797 - DNA, 25 bp, Homo sapien
tatttacactaagtaccacacctgg

SEQ ID NO: 2090798 - DNA, 25 bp, Homo sapien
catggcattcaccagcatgtttcat

SEQ ID NO: 2090799 - DNA, 25 bp, Homo sapien
gcctctgctgtaactttggttctaa

SEQ ID NO: 2090800 - DNA, 25 bp, Homo sapien
tttgcctctgctgtaactttggttc

SEQ ID NO: 2090801 - DNA, 25 bp, Homo sapien
attggctttctccaaggaagggtag

SEQ ID NO: 2090802 - DNA, 25 bp, Homo sapien
ctgctgtaactttggttctaataga

SEQ ID NO: 2090803 - DNA, 25 bp, Homo sapien
gcctgtggccctctaagtctgagag

SEQ ID NO: 2090804 - DNA, 25 bp, Homo sapien
ggtatcctcagtcctcctacatggg

SEQ ID NO: 2090805 - DNA, 25 bp, Homo sapien
gacctccaatattctgggatgacgg

SEQ ID NO: 2090806 - DNA, 25 bp, Homo sapien
cgcaaactttgcagagaatggctcc

SEQ ID NO: 2090807 - DNA, 25 bp, Homo sapien
catccaatcaagtccctgctgggtc

SEQ ID NO: 2090808 - DNA, 25 bp, Homo sapien
cggatgtcggagtgagccacatcca

SEQ ID NO: 2090809 - DNA, 25 bp, Homo sapien
gacgaagatcctcacttccggcagc

SEQ ID NO: 2090810 - DNA, 25 bp, Homo sapien
ttctggtagcctgaggtggcgtccc

SEQ ID NO: 2090811 - DNA, 25 bp, Homo sapien
ctgtgcttaggggcagcaggcaaga

SEQ ID NO: 2090812 - DNA, 25 bp, Homo sapien
gatgactgtgcttaggggcagcagg

SEQ ID NO: 2090813 - DNA, 25 bp, Homo sapien
gactgtgcttaggggcagcaggcaa

SEQ ID NO: 2090814 - DNA, 25 bp, Homo sapien
tgactgtgcttaggggcagcaggca

SEQ ID NO: 2090815 - DNA, 25 bp, Homo sapien
acggcgcttactcgcctgaccgcga

SEQ ID NO: 2090816 - DNA, 25 bp, Homo sapien
gcttactcgcctgaccgcgaggcat

SEQ ID NO: 2090817 - DNA, 25 bp, Homo sapien
gggcacggcgcttactcgcctgacc

SEQ ID NO: 2090818 - DNA, 25 bp, Homo sapien
ggcgcttactcgcctgaccgcgagg

SEQ ID NO: 2090819 - DNA, 25 bp, Homo sapien
caattcgcccgtcttcgtgttcaga

SEQ ID NO: 2090820 - DNA, 25 bp, Homo sapien
gagacattggtcttcacctcgagcc

SEQ ID NO: 2090821 - DNA, 25 bp, Homo sapien
tatacttgttgaggaggaactgcac

SEQ ID NO: 2090822 - DNA, 25 bp, Homo sapien
tcagaacttgtgagtgaaacagctg

SEQ ID NO: 2090823 - DNA, 25 bp, Homo sapien
aacggtatcattgagcttggccaca

SEQ ID NO: 2090824 - DNA, 25 bp, Homo sapien
tttgctggtttcagcacgggccctg

SEQ ID NO: 2090825 - DNA, 25 bp, Homo sapien
tgccaacaagcacataggactgacg

SEQ ID NO: 2090826 - DNA, 25 bp, Homo sapien
aactcgtagcgtggaggatcgctgc

SEQ ID NO: 2090827 - DNA, 25 bp, Homo sapien
tctggctctggcttgctcttcctcc

SEQ ID NO: 2090828 - DNA, 25 bp, Homo sapien
ctcctctctcagagcctcctcatac

SEQ ID NO: 2090829 - DNA, 25 bp, Homo sapien
ttcctcctctctcagagcctcctca

SEQ ID NO: 2090830 - DNA, 25 bp, Homo sapien
cgctctggctctggcttgctcttcc

SEQ ID NO: 2090831 - DNA, 25 bp, Homo sapien
gaaaggacctgctagccctggccct

SEQ ID NO: 2090832 - DNA, 25 bp, Homo sapien
ctagggctgaaaggacctgctagcc

SEQ ID NO: 2090833 - DNA, 25 bp, Homo sapien
tagggctgaaaggacctgctagccc

SEQ ID NO: 2090834 - DNA, 25 bp, Homo sapien
ggctgaaaggacctgctagccctgg

SEQ ID NO: 2090835 - DNA, 25 bp, Homo sapien
tattcccgatctgctatgtgttgca

SEQ ID NO: 2090836 - DNA, 25 bp, Homo sapien
ttcccgatctgctatgtgttgcaga

SEQ ID NO: 2090837 - DNA, 25 bp, Homo sapien
atattcccgatctgctatgtgttgc

SEQ ID NO: 2090838 - DNA, 25 bp, Homo sapien
ccgatctgctatgtgttgcagaaag

SEQ ID NO: 2090839 - DNA, 25 bp, Homo sapien
tggcagggtggtacacagcccttga

SEQ ID NO: 2090840 - DNA, 25 bp, Homo sapien
cagggtggtacacagcccttgatac

SEQ ID NO: 2090841 - DNA, 25 bp, Homo sapien
gggtggtacacagcccttgatacat

SEQ ID NO: 2090842 - DNA, 25 bp, Homo sapien
gcagggtggtacacagcccttgata

SEQ ID NO: 2090843 - DNA, 25 bp, Homo sapien
tgttccttggggactcttctctgga

SEQ ID NO: 2090844 - DNA, 25 bp, Homo sapien
ttctctggagaaaacactttacaaa

SEQ ID NO: 2090845 - DNA, 25 bp, Homo sapien
aaaacactttacaaatggagagcat

SEQ ID NO: 2090846 - DNA, 25 bp, Homo sapien
ccttggggactcttctctggagaaa

SEQ ID NO: 2090847 - DNA, 25 bp, Homo sapien
ctatttacacactgggtaaacactc

SEQ ID NO: 2090848 - DNA, 25 bp, Homo sapien
ccccacttctaacagtgtgtactgg

SEQ ID NO: 2090849 - DNA, 25 bp, Homo sapien
ggtgttccctgcattccaggttctg

SEQ ID NO: 2090850 - DNA, 25 bp, Homo sapien
acagtgtgtactggtgttccctgca

SEQ ID NO: 2090851 - DNA, 25 bp, Homo sapien
cattggtatagccacggtcatggga

SEQ ID NO: 2090852 - DNA, 25 bp, Homo sapien
ttggtatagccacggtcatgggaag

SEQ ID NO: 2090853 - DNA, 25 bp, Homo sapien
ggtatagccacggtcatgggaagac

SEQ ID NO: 2090854 - DNA, 25 bp, Homo sapien
gtatagccacggtcatgggaagacc

SEQ ID NO: 2090855 - DNA, 25 bp, Homo sapien
gagtgaaaaaatagctgcgttaggg

SEQ ID NO: 2090856 - DNA, 25 bp, Homo sapien
ccaaaagcaaccatcctcagggtag

SEQ ID NO: 2090857 - DNA, 25 bp, Homo sapien
ggtggcagttgatatttggcaatcc

SEQ ID NO: 2090858 - DNA, 25 bp, Homo sapien
gtagagttgtagtgctcagtttttc

SEQ ID NO: 2090859 - DNA, 25 bp, Homo sapien
ttccatttccaagctttattctgca

SEQ ID NO: 2090860 - DNA, 25 bp, Homo sapien
tattctgcaatgagaaatagccttt

SEQ ID NO: 2090861 - DNA, 25 bp, Homo sapien
tccatttccaagctttattctgcaa

SEQ ID NO: 2090862 - DNA, 25 bp, Homo sapien
ctgcaatgagaaatagccttttcca

SEQ ID NO: 2090863 - DNA, 25 bp, Homo sapien
agctttcttagtttgaactgcttgg

SEQ ID NO: 2090864 - DNA, 25 bp, Homo sapien
tctccagcacagttttcagtagctt

SEQ ID NO: 2090865 - DNA, 25 bp, Homo sapien
tttgaactgcttggactatgactag

SEQ ID NO: 2090866 - DNA, 25 bp, Homo sapien
cttggactatgactagatgcctgta

SEQ ID NO: 2090867 - DNA, 25 bp, Homo sapien
ccatgtgatgatgcattcagcagcc

SEQ ID NO: 2090868 - DNA, 25 bp, Homo sapien
cagggtctcttaacttttggccact

SEQ ID NO: 2090869 - DNA, 25 bp, Homo sapien
ggacaacaaggtgaccacaggcatt

SEQ ID NO: 2090870 - DNA, 25 bp, Homo sapien
gaatccagtggtaaagctttctgac

SEQ ID NO: 2090871 - DNA, 25 bp, Homo sapien
accccaatccaagcccacactgtct

SEQ ID NO: 2090872 - DNA, 25 bp, Homo sapien
ccaatccaagcccacactgtctttt

SEQ ID NO: 2090873 - DNA, 25 bp, Homo sapien
cccaatccaagcccacactgtcttt

SEQ ID NO: 2090874 - DNA, 25 bp, Homo sapien
ccccaatccaagcccacactgtctt

SEQ ID NO: 2090875 - DNA, 25 bp, Homo sapien
catgtttgtccacgggcagatggaa

SEQ ID NO: 2090876 - DNA, 25 bp, Homo sapien
tttgtccacgggcagatggaaatgt

SEQ ID NO: 2090877 - DNA, 25 bp, Homo sapien
gaggcatgtttgtccacgggcagat

SEQ ID NO: 2090878 - DNA, 25 bp, Homo sapien
ttgtccacgggcagatggaaatgtg

SEQ ID NO: 2090879 - DNA, 25 bp, Homo sapien
taggagtgcgagatgtgtaaaggaa

SEQ ID NO: 2090880 - DNA, 25 bp, Homo sapien
gtaccctggtttagggctgctgagt

SEQ ID NO: 2090881 - DNA, 25 bp, Homo sapien
gctgctgagtaggagtgcgagatgt

SEQ ID NO: 2090882 - DNA, 25 bp, Homo sapien
gatgctgaataatggaaggaaacac

SEQ ID NO: 2090883 - DNA, 25 bp, Homo sapien
aaaagatggcagctgcagctccaga

SEQ ID NO: 2090884 - DNA, 25 bp, Homo sapien
aagatggcagctgcagctccagaca

SEQ ID NO: 2090885 - DNA, 25 bp, Homo sapien
ctaaaagatggcagctgcagctcca

SEQ ID NO: 2090886 - DNA, 25 bp, Homo sapien
taaaagatggcagctgcagctccag

SEQ ID NO: 2090887 - DNA, 25 bp, Homo sapien
gcagttcaactatatcaaggcaaga

SEQ ID NO: 2090888 - DNA, 25 bp, Homo sapien
caactatatcaaggcaagagtctct

SEQ ID NO: 2090889 - DNA, 25 bp, Homo sapien
gttcaactatatcaaggcaagagtc

SEQ ID NO: 2090890 - DNA, 25 bp, Homo sapien
ctatatcaaggcaagagtctcttaa

SEQ ID NO: 2090891 - DNA, 25 bp, Homo sapien
agcccagggaacagtccaccgtagc

SEQ ID NO: 2090892 - DNA, 25 bp, Homo sapien
taatctgagggtgttaaatctgagc

SEQ ID NO: 2090893 - DNA, 25 bp, Homo sapien
cttcttggtgcacaagctctctcga

SEQ ID NO: 2090894 - DNA, 25 bp, Homo sapien
gcacaagctctctcgaaggcagagg

SEQ ID NO: 2090895 - DNA, 25 bp, Homo sapien
taagcaccaattcctagaagtacat

SEQ ID NO: 2090896 - DNA, 25 bp, Homo sapien
cacagtgatgagtatccttgcctat

SEQ ID NO: 2090897 - DNA, 25 bp, Homo sapien
catttttgccaaatgctccttgatg

SEQ ID NO: 2090898 - DNA, 25 bp, Homo sapien
aaaaatccatgtgatagacatacca

SEQ ID NO: 2090899 - DNA, 25 bp, Homo sapien
cacgccatgcctggggtttctgcca

SEQ ID NO: 2090900 - DNA, 25 bp, Homo sapien
ggtccagcaagggtgaagtgaagaa

SEQ ID NO: 2090901 - DNA, 25 bp, Homo sapien
tcaggatctggtaagaagaggagaa

SEQ ID NO: 2090902 - DNA, 25 bp, Homo sapien
gcagcaggagccacgaacgcttcat

SEQ ID NO: 2090903 - DNA, 25 bp, Homo sapien
tgacagatagtttcagtgtcactgt

SEQ ID NO: 2090904 - DNA, 25 bp, Homo sapien
tgtttgttcgttgatgtttacccag

SEQ ID NO: 2090905 - DNA, 25 bp, Homo sapien
tcacctagaatattgagctaaagca

SEQ ID NO: 2090906 - DNA, 25 bp, Homo sapien
tcgttgatgtttacccagaacctcc

SEQ ID NO: 2090907 - DNA, 25 bp, Homo sapien
gcctttcctgtattcatacgggcac

SEQ ID NO: 2090908 - DNA, 25 bp, Homo sapien
gcccccaccgtcactgcctttcctg

SEQ ID NO: 2090909 - DNA, 25 bp, Homo sapien
ctttcctgtattcatacgggcacat

SEQ ID NO: 2090910 - DNA, 25 bp, Homo sapien
ctgcctttcctgtattcatacgggc

SEQ ID NO: 2090911 - DNA, 25 bp, Homo sapien
taatgcggcaaaacaaagcatcctt

SEQ ID NO: 2090912 - DNA, 25 bp, Homo sapien
gggaatgttatcagcacgtgcaaat

SEQ ID NO: 2090913 - DNA, 25 bp, Homo sapien
tcaagacacttcgataatgcggcaa

SEQ ID NO: 2090914 - DNA, 25 bp, Homo sapien
cgtgcaaatgtgcagaagtgatttg

SEQ ID NO: 2090915 - DNA, 25 bp, Homo sapien
gaaaggagctgccacaattgacacc

SEQ ID NO: 2090916 - DNA, 25 bp, Homo sapien
gtcctaggaaggcacaatctccctt

SEQ ID NO: 2090917 - DNA, 25 bp, Homo sapien
cacctggcatttcagctctcatgtg

SEQ ID NO: 2090918 - DNA, 25 bp, Homo sapien
gggcactgatgcctgtcctaggaag

SEQ ID NO: 2090919 - DNA, 25 bp, Homo sapien
caatcagtatgtgttaagatgtaca

SEQ ID NO: 2090920 - DNA, 25 bp, Homo sapien
tgtgaatcccgaaaatctgagacac

SEQ ID NO: 2090921 - DNA, 25 bp, Homo sapien
tgaggacgtgcacccataatatggc

SEQ ID NO: 2090922 - DNA, 25 bp, Homo sapien
gagatcctgatgacaagtgcctaag

SEQ ID NO: 2090923 - DNA, 25 bp, Homo sapien
tacagccttgttgccgctggccaga

SEQ ID NO: 2090924 - DNA, 25 bp, Homo sapien
ggtggcccattactcgagatgatca

SEQ ID NO: 2090925 - DNA, 25 bp, Homo sapien
gattgcagagtgtcccatcttggga

SEQ ID NO: 2090926 - DNA, 25 bp, Homo sapien
tgacaccatacctgctaacctcgag

SEQ ID NO: 2090927 - DNA, 25 bp, Homo sapien
ctgggatctgcgttttgagggctag

SEQ ID NO: 2090928 - DNA, 25 bp, Homo sapien
ggctagtgctgtaggaagagtctct

SEQ ID NO: 2090929 - DNA, 25 bp, Homo sapien
atctgcgttttgagggctagtgctg

SEQ ID NO: 2090930 - DNA, 25 bp, Homo sapien
ctagtgctgtaggaagagtctctgg

SEQ ID NO: 2090931 - DNA, 25 bp, Homo sapien
aaggtatagaatgggagtggacagc

SEQ ID NO: 2090932 - DNA, 25 bp, Homo sapien
aaaagagggtacagtcttgggcagg

SEQ ID NO: 2090933 - DNA, 25 bp, Homo sapien
gggaaagataaggatcagaaggtat

SEQ ID NO: 2090934 - DNA, 25 bp, Homo sapien
cagctatgtgggtgatagcttccag

SEQ ID NO: 2090935 - DNA, 25 bp, Homo sapien
tgcctttagccccctggaaatagga

SEQ ID NO: 2090936 - DNA, 25 bp, Homo sapien
gctatgggtgattgcctttagcccc

SEQ ID NO: 2090937 - DNA, 25 bp, Homo sapien
ctatgggtgattgcctttagccccc

SEQ ID NO: 2090938 - DNA, 25 bp, Homo sapien
ctggcaggtggaaatggaatgcttt

SEQ ID NO: 2090939 - DNA, 25 bp, Homo sapien
aatgctttaagaaaaggcttcattc

SEQ ID NO: 2090940 - DNA, 25 bp, Homo sapien
gcaggtggaaatggaatgctttaag

SEQ ID NO: 2090941 - DNA, 25 bp, Homo sapien
ttaagaaaaggcttcattcctttca

SEQ ID NO: 2090942 - DNA, 25 bp, Homo sapien
gatttccggagttctgtgaagctgg

SEQ ID NO: 2090943 - DNA, 25 bp, Homo sapien
tgccggcaggagcatgacatgactc

SEQ ID NO: 2090944 - DNA, 25 bp, Homo sapien
gagctcctcaggttgatgccggcag

SEQ ID NO: 2090945 - DNA, 25 bp, Homo sapien
caagacacgagtgaagccttctgga

SEQ ID NO: 2090946 - DNA, 25 bp, Homo sapien
tgagcacggggttgtactgtgggct

SEQ ID NO: 2090947 - DNA, 25 bp, Homo sapien
aagaggtgggccttgagcacggggt

SEQ ID NO: 2090948 - DNA, 25 bp, Homo sapien
aggtggaagggtgcagagaagaccc

SEQ ID NO: 2090949 - DNA, 25 bp, Homo sapien
gggaatgccacaaggtggaagggtg

SEQ ID NO: 2090950 - DNA, 25 bp, Homo sapien
tagacgatttttgaaaagcagggag

SEQ ID NO: 2090951 - DNA, 25 bp, Homo sapien
aaaagtaagaaatgtagaatgagga

SEQ ID NO: 2090952 - DNA, 25 bp, Homo sapien
taagtcttaagtggggtgctttgaa

SEQ ID NO: 2090953 - DNA, 25 bp, Homo sapien
ggcacagtgtgggtaagtcttaagt

SEQ ID NO: 2090954 - DNA, 25 bp, Homo sapien
gccagacacaaactgagagaaaggc

SEQ ID NO: 2090955 - DNA, 25 bp, Homo sapien
actcgccagacacaaactgagagaa

SEQ ID NO: 2090956 - DNA, 25 bp, Homo sapien
tcgccagacacaaactgagagaaag

SEQ ID NO: 2090957 - DNA, 25 bp, Homo sapien
cgccagacacaaactgagagaaagg

SEQ ID NO: 2090958 - DNA, 25 bp, Homo sapien
gatgagatctcctaagctaggccca

SEQ ID NO: 2090959 - DNA, 25 bp, Homo sapien
tcctttcactgatgttcagggcaac

SEQ ID NO: 2090960 - DNA, 25 bp, Homo sapien
tggtgcctggcagcgttctttgcct

SEQ ID NO: 2090961 - DNA, 25 bp, Homo sapien
gacttgcctgtcaattctctccctg

SEQ ID NO: 2090962 - DNA, 25 bp, Homo sapien
tcaggcttgggcaccatagtctctg

SEQ ID NO: 2090963 - DNA, 25 bp, Homo sapien
aagagggtacagtgttagtacctgg

SEQ ID NO: 2090964 - DNA, 25 bp, Homo sapien
agagggtacagtgttagtacctggt

SEQ ID NO: 2090965 - DNA, 25 bp, Homo sapien
gagggtacagtgttagtacctggtc

SEQ ID NO: 2090966 - DNA, 25 bp, Homo sapien
gaagagggtacagtgttagtacctg

SEQ ID NO: 2090967 - DNA, 25 bp, Homo sapien
tgcccaatagtgaaacagctagaag

SEQ ID NO: 2090968 - DNA, 25 bp, Homo sapien
gcccaatagtgaaacagctagaaga

SEQ ID NO: 2090969 - DNA, 25 bp, Homo sapien
tagaagaatcaaagaggagtttgaa

SEQ ID NO: 2090970 - DNA, 25 bp, Homo sapien
cctgaatcaatagcttcagttcatc

SEQ ID NO: 2090971 - DNA, 25 bp, Homo sapien
ttgacaactggtctggatcaccttc

SEQ ID NO: 2090972 - DNA, 25 bp, Homo sapien
tcagttcatcctttgacaactggtc

SEQ ID NO: 2090973 - DNA, 25 bp, Homo sapien
aattcagcctgaatcaatagcttca

SEQ ID NO: 2090974 - DNA, 25 bp, Homo sapien
tgtccagttcttgaaagagatcatc

SEQ ID NO: 2090975 - DNA, 25 bp, Homo sapien
cactgggatatcttttttactaata

SEQ ID NO: 2090976 - DNA, 25 bp, Homo sapien
tcactgggatatcttttttactaat

SEQ ID NO: 2090977 - DNA, 25 bp, Homo sapien
cagccaggttattataattgcaaag

SEQ ID NO: 2090978 - DNA, 25 bp, Homo sapien
taacaaagtaaggtatgtctaataa

SEQ ID NO: 2090979 - DNA, 25 bp, Homo sapien
ataggataagaccacagcacaggcg

SEQ ID NO: 2090980 - DNA, 25 bp, Homo sapien
gggattccacataggataagaccac

SEQ ID NO: 2090981 - DNA, 25 bp, Homo sapien
cgaggccacccggtcagtgatgagt

SEQ ID NO: 2090982 - DNA, 25 bp, Homo sapien
tgggagatagcatgacgtcaactgt

SEQ ID NO: 2090983 - DNA, 25 bp, Homo sapien
ttcattaagaaagcacagcgagtgc

SEQ ID NO: 2090984 - DNA, 25 bp, Homo sapien
ccccgtcgagggtcattcattaaga

SEQ ID NO: 2090985 - DNA, 25 bp, Homo sapien
tgaacgttaacatttgaactcttat

SEQ ID NO: 2090986 - DNA, 25 bp, Homo sapien
gaacgttaacatttgaactcttatc

SEQ ID NO: 2090987 - DNA, 25 bp, Homo sapien
atctggtaaggggtagcagaaagtt

SEQ ID NO: 2090988 - DNA, 25 bp, Homo sapien
tctggtaaggggtagcagaaagttc

SEQ ID NO: 2090989 - DNA, 25 bp, Homo sapien
cagctttcaagcttaatgtttagga

SEQ ID NO: 2090990 - DNA, 25 bp, Homo sapien
tctaaaacaaaagcgacagtgattc

SEQ ID NO: 2090991 - DNA, 25 bp, Homo sapien
actggtggtcatctgtctttctaaa

SEQ ID NO: 2090992 - DNA, 25 bp, Homo sapien
ggattaaatcggctgtgacaacaat

SEQ ID NO: 2090993 - DNA, 25 bp, Homo sapien
ccctgtcagttttgacttcttagct

SEQ ID NO: 2090994 - DNA, 25 bp, Homo sapien
tgacttcttagcttcttgtgcatta

SEQ ID NO: 2090995 - DNA, 25 bp, Homo sapien
tcttagcttcttgtgcattattccc

SEQ ID NO: 2090996 - DNA, 25 bp, Homo sapien
gcttcttgtgcattattcccacaca

SEQ ID NO: 2090997 - DNA, 25 bp, Homo sapien
acctgtgatactgaccccagtgctg

SEQ ID NO: 2090998 - DNA, 25 bp, Homo sapien
gaagaccagctgtgagtgagccgta

SEQ ID NO: 2090999 - DNA, 25 bp, Homo sapien
taggagtaacctgtgatactgaccc

SEQ ID NO: 2091000 - DNA, 25 bp, Homo sapien
tgtgagtgagccgtaggagtaacct

SEQ ID NO: 2091001 - DNA, 25 bp, Homo sapien
tctgcatcacattggtggtgacatt

SEQ ID NO: 2091002 - DNA, 25 bp, Homo sapien
cattctttagctttggtcctctcag

SEQ ID NO: 2091003 - DNA, 25 bp, Homo sapien
cattgttaattgatgcgaagtgtcc

SEQ ID NO: 2091004 - DNA, 25 bp, Homo sapien
tattgtgcatgggtgcctctgcagc

SEQ ID NO: 2091005 - DNA, 25 bp, Homo sapien
aagtgatctgcctgcattggctgcc

SEQ ID NO: 2091006 - DNA, 25 bp, Homo sapien
gccactgtgcctggtgactttattt

SEQ ID NO: 2091007 - DNA, 25 bp, Homo sapien
tctcgtgcttcagccccgcaagtag

SEQ ID NO: 2091008 - DNA, 25 bp, Homo sapien
actgtgcctggtgactttatttctt

SEQ ID NO: 2091009 - DNA, 25 bp, Homo sapien
tgatcagcgccggtaacatggcctt

SEQ ID NO: 2091010 - DNA, 25 bp, Homo sapien
ccagtgcggttggagcctgtcccgc

SEQ ID NO: 2091011 - DNA, 25 bp, Homo sapien
cccgtactagatggttagggcgcat

SEQ ID NO: 2091012 - DNA, 25 bp, Homo sapien
tggcgttggcggaagtgaagccccg

SEQ ID NO: 2091013 - DNA, 25 bp, Homo sapien
ctgagggaatacatgaggaattgat

SEQ ID NO: 2091014 - DNA, 25 bp, Homo sapien
cagttttccagcctgacttatattt

SEQ ID NO: 2091015 - DNA, 25 bp, Homo sapien
tttccagcctgacttatatttatat

SEQ ID NO: 2091016 - DNA, 25 bp, Homo sapien
gaggaattgattacaactctgattt

SEQ ID NO: 2091017 - DNA, 25 bp, Homo sapien
ttgtggaaggacatccatgattcct

SEQ ID NO: 2091018 - DNA, 25 bp, Homo sapien
ttccttgctccccaactattttgag

SEQ ID NO: 2091019 - DNA, 25 bp, Homo sapien
ttgctccccaactattttgagaaga

SEQ ID NO: 2091020 - DNA, 25 bp, Homo sapien
atttcccaagcacagtcttcagtca

SEQ ID NO: 2091021 - DNA, 25 bp, Homo sapien
gatgccacgtctggaatttgcttca

SEQ ID NO: 2091022 - DNA, 25 bp, Homo sapien
gaagctgggtagttaaacatttgtc

SEQ ID NO: 2091023 - DNA, 25 bp, Homo sapien
aaaagaaatgatgccacgtctggaa

SEQ ID NO: 2091024 - DNA, 25 bp, Homo sapien
aactagtgatgtgcataactacccc

SEQ ID NO: 2091025 - DNA, 25 bp, Homo sapien
actctgcgcgactcccagggagatg

SEQ ID NO: 2091026 - DNA, 25 bp, Homo sapien
gatgtccggaagtcggaggaacacc

SEQ ID NO: 2091027 - DNA, 25 bp, Homo sapien
gcagcgagcactggttgcctttgac

SEQ ID NO: 2091028 - DNA, 25 bp, Homo sapien
tgcctttgactccactctgcgcgac

SEQ ID NO: 2091029 - DNA, 25 bp, Homo sapien
tctcggacggctgctcgggtggagc

SEQ ID NO: 2091030 - DNA, 25 bp, Homo sapien
tcctccgcagactcagccaccgtct

SEQ ID NO: 2091031 - DNA, 25 bp, Homo sapien
cctggtctcccgcttgctgcagctc

SEQ ID NO: 2091032 - DNA, 25 bp, Homo sapien
accaactgctcaagccccggaacat

SEQ ID NO: 2091033 - DNA, 25 bp, Homo sapien
tttgtagacttgtcaccaggaactt

SEQ ID NO: 2091034 - DNA, 25 bp, Homo sapien
ccaatgtctgcaaactttgtagact

SEQ ID NO: 2091035 - DNA, 25 bp, Homo sapien
tgactgctagatgaagctctggcct

SEQ ID NO: 2091036 - DNA, 25 bp, Homo sapien
ctgactgctagatgaagctctggcc

SEQ ID NO: 2091037 - DNA, 25 bp, Homo sapien
aggccaggactcactaacataggct

SEQ ID NO: 2091038 - DNA, 25 bp, Homo sapien
aatattaaaagccagtgaccttata

SEQ ID NO: 2091039 - DNA, 25 bp, Homo sapien
caggactcactaacataggcttcca

SEQ ID NO: 2091040 - DNA, 25 bp, Homo sapien
ggcaggccaggactcactaacatag

SEQ ID NO: 2091041 - DNA, 25 bp, Homo sapien
taaaaataggaaactagagagagaa

SEQ ID NO: 2091042 - DNA, 25 bp, Homo sapien
ataagtagaacaagattaaaagtgg

SEQ ID NO: 2091043 - DNA, 25 bp, Homo sapien
aataagtagaacaagattaaaagtg

SEQ ID NO: 2091044 - DNA, 25 bp, Homo sapien
caaataagtagaacaagattaaaag

SEQ ID NO: 2091045 - DNA, 25 bp, Homo sapien
taagtagaacaagattaaaagtgga

SEQ ID NO: 2091046 - DNA, 25 bp, Homo sapien
cttttttgtggcagcagatgcaaag

SEQ ID NO: 2091047 - DNA, 25 bp, Homo sapien
ggcagcagatgcaaagttaaataaa

SEQ ID NO: 2091048 - DNA, 25 bp, Homo sapien
cagcagatgcaaagttaaataaata

SEQ ID NO: 2091049 - DNA, 25 bp, Homo sapien
gcagatgcaaagttaaataaatagt

SEQ ID NO: 2091050 - DNA, 25 bp, Homo sapien
ccttcttctacggatttctttattg

SEQ ID NO: 2091051 - DNA, 25 bp, Homo sapien
attgtttgtgctgtttcagcaactg

SEQ ID NO: 2091052 - DNA, 25 bp, Homo sapien
gctgtttcagcaactgattcagtta

SEQ ID NO: 2091053 - DNA, 25 bp, Homo sapien
tctttattgtttgtgctgtttcagc

SEQ ID NO: 2091054 - DNA, 25 bp, Homo sapien
gttgctcttcaacaaattttttctg

SEQ ID NO: 2091055 - DNA, 25 bp, Homo sapien
gctcttcaacaaattttttctgttc

SEQ ID NO: 2091056 - DNA, 25 bp, Homo sapien
caacaaattttttctgttccttctg

SEQ ID NO: 2091057 - DNA, 25 bp, Homo sapien
tttttctgttccttctgaaaatctc

SEQ ID NO: 2091058 - DNA, 25 bp, Homo sapien
gtctttgtgctacccaaaggatggg

SEQ ID NO: 2091059 - DNA, 25 bp, Homo sapien
tgttctcagaccctcagtgtggtat

SEQ ID NO: 2091060 - DNA, 25 bp, Homo sapien
catggaagtttatgggtttgtctcc

SEQ ID NO: 2091061 - DNA, 25 bp, Homo sapien
cagaactgaaagcttacttgcccct

SEQ ID NO: 2091062 - DNA, 25 bp, Homo sapien
tcatgataaaaggtgatgttgtaag

SEQ ID NO: 2091063 - DNA, 25 bp, Homo sapien
taaaaggtgatgttgtaagacaggt

SEQ ID NO: 2091064 - DNA, 25 bp, Homo sapien
taagacaggtgattaggaataagaa

SEQ ID NO: 2091065 - DNA, 25 bp, Homo sapien
gatgttgtaagacaggtgattagga

SEQ ID NO: 2091066 - DNA, 25 bp, Homo sapien
aattgtttcttcatcgttagtgtca

SEQ ID NO: 2091067 - DNA, 25 bp, Homo sapien
gctgataaggccaaaatttgttgtt

SEQ ID NO: 2091068 - DNA, 25 bp, Homo sapien
tgttgaattgtttcttcatcgttag

SEQ ID NO: 2091069 - DNA, 25 bp, Homo sapien
cttcatcgttagtgtcaacccatgg

SEQ ID NO: 2091070 - DNA, 25 bp, Homo sapien
taatcccagcactttgggaggctga

SEQ ID NO: 2091071 - DNA, 25 bp, Homo sapien
gctgaggtgagggtggatcacgaga

SEQ ID NO: 2091072 - DNA, 25 bp, Homo sapien
aggtgagggtggatcacgagatcag

SEQ ID NO: 2091073 - DNA, 25 bp, Homo sapien
ggctgagtgtggtagctcacgccta

SEQ ID NO: 2091074 - DNA, 25 bp, Homo sapien
aattaaattgcacgccagccggagg

SEQ ID NO: 2091075 - DNA, 25 bp, Homo sapien
gcaaatctcatcttgcttagcagct

SEQ ID NO: 2091076 - DNA, 25 bp, Homo sapien
gtttaggaacgagggcaaatctcat

SEQ ID NO: 2091077 - DNA, 25 bp, Homo sapien
gggtacatctgatcaaagtcgaaat

SEQ ID NO: 2091078 - DNA, 25 bp, Homo sapien
gcagtggcaccccaatggcaatgag

SEQ ID NO: 2091079 - DNA, 25 bp, Homo sapien
gaacacatttgagaacgcacacaga

SEQ ID NO: 2091080 - DNA, 25 bp, Homo sapien
tcaccatcagagaggagagctacaa

SEQ ID NO: 2091081 - DNA, 25 bp, Homo sapien
cccaagtgggtgaggtaagtgtcca

SEQ ID NO: 2091082 - DNA, 25 bp, Homo sapien
gcttaatcagggagacgcggtaaaa

SEQ ID NO: 2091083 - DNA, 25 bp, Homo sapien
tgactgcttaatcagggagacgcgg

SEQ ID NO: 2091084 - DNA, 25 bp, Homo sapien
taatcagggagacgcggtaaaagta

SEQ ID NO: 2091085 - DNA, 25 bp, Homo sapien
gctgggctgactgcttaatcaggga

SEQ ID NO: 2091086 - DNA, 25 bp, Homo sapien
tgccagcggcaaatcttgctctctg

SEQ ID NO: 2091087 - DNA, 25 bp, Homo sapien
ccagcggcaaatcttgctctctgcc

SEQ ID NO: 2091088 - DNA, 25 bp, Homo sapien
ctgccagcggcaaatcttgctctct

SEQ ID NO: 2091089 - DNA, 25 bp, Homo sapien
gccagcggcaaatcttgctctctgc

SEQ ID NO: 2091090 - DNA, 25 bp, Homo sapien
agatttgattacaacgggtggcgtt

SEQ ID NO: 2091091 - DNA, 25 bp, Homo sapien
gctgagatttgattacaacgggtgg

SEQ ID NO: 2091092 - DNA, 25 bp, Homo sapien
tgagatttgattacaacgggtggcg

SEQ ID NO: 2091093 - DNA, 25 bp, Homo sapien
taagctgagatttgattacaacggg

SEQ ID NO: 2091094 - DNA, 25 bp, Homo sapien
acaaatgagctcttgaaatggtttg

SEQ ID NO: 2091095 - DNA, 25 bp, Homo sapien
ctgaaatgcaacaaatgagctcttg

SEQ ID NO: 2091096 - DNA, 25 bp, Homo sapien
aaatgcaacaaatgagctcttgaaa

SEQ ID NO: 2091097 - DNA, 25 bp, Homo sapien
caacaaatgagctcttgaaatggtt

SEQ ID NO: 2091098 - DNA, 25 bp, Homo sapien
ggctagtagaaatttcttcctcatc

SEQ ID NO: 2091099 - DNA, 25 bp, Homo sapien
tgggctagtagaaatttcttcctca

SEQ ID NO: 2091100 - DNA, 25 bp, Homo sapien
ctgggctagtagaaatttcttcctc

SEQ ID NO: 2091101 - DNA, 25 bp, Homo sapien
gggctagtagaaatttcttcctcat

SEQ ID NO: 2091102 - DNA, 25 bp, Homo sapien
tacaggcatcgaaggcatcactgac

SEQ ID NO: 2091103 - DNA, 25 bp, Homo sapien
gctttttgtcaagcactagttgctc

SEQ ID NO: 2091104 - DNA, 25 bp, Homo sapien
ttctttccttagatcttcctgattt

SEQ ID NO: 2091105 - DNA, 25 bp, Homo sapien
tcctgatttaggttacaggcatcga

SEQ ID NO: 2091106 - DNA, 25 bp, Homo sapien
attctgtcaccacttcatattcttg

SEQ ID NO: 2091107 - DNA, 25 bp, Homo sapien
gattctgtcaccacttcatattctt

SEQ ID NO: 2091108 - DNA, 25 bp, Homo sapien
tcatctcgtttttcagattctgtca

SEQ ID NO: 2091109 - DNA, 25 bp, Homo sapien
gttttcatctcgtttttcagattct

SEQ ID NO: 2091110 - DNA, 25 bp, Homo sapien
tttcctcttgaagcattttctctat

SEQ ID NO: 2091111 - DNA, 25 bp, Homo sapien
cctcttgaagcattttctctatttc

SEQ ID NO: 2091112 - DNA, 25 bp, Homo sapien
ctaattttcctcttgaagcattttc

SEQ ID NO: 2091113 - DNA, 25 bp, Homo sapien
tcttgaagcattttctctatttcct

SEQ ID NO: 2091114 - DNA, 25 bp, Homo sapien
gatagtaatcaacccattaagtagg

SEQ ID NO: 2091115 - DNA, 25 bp, Homo sapien
gatatttagaaaaccatgactgagg

SEQ ID NO: 2091116 - DNA, 25 bp, Homo sapien
aatacctggcaagtgaatagttctg

SEQ ID NO: 2091117 - DNA, 25 bp, Homo sapien
gatagccatactgcctatgaagaca

SEQ ID NO: 2091118 - DNA, 25 bp, Homo sapien
tatggaaggtcccactttgtataaa

SEQ ID NO: 2091119 - DNA, 25 bp, Homo sapien
tctgacattaaaccaccttgttcgt

SEQ ID NO: 2091120 - DNA, 25 bp, Homo sapien
cctagaaggtgaactcggaggaaca

SEQ ID NO: 2091121 - DNA, 25 bp, Homo sapien
gattaatcaataaagtcctagaagg

SEQ ID NO: 2091122 - DNA, 25 bp, Homo sapien
tataacccaagagactccagttgag

SEQ ID NO: 2091123 - DNA, 25 bp, Homo sapien
gcattcactaagagccaagcaccga

SEQ ID NO: 2091124 - DNA, 25 bp, Homo sapien
tggaaaccttttgatgatgggccca

SEQ ID NO: 2091125 - DNA, 25 bp, Homo sapien
taataagcaactgtggcaccacaag

SEQ ID NO: 2091126 - DNA, 25 bp, Homo sapien
gaaattttccaccaaacatggtgat

SEQ ID NO: 2091127 - DNA, 25 bp, Homo sapien
cacttcagttacctatataatttac

SEQ ID NO: 2091128 - DNA, 25 bp, Homo sapien
ttggtatatcttgttggctaacccc

SEQ ID NO: 2091129 - DNA, 25 bp, Homo sapien
tggctaacccctaggcatgtaataa

SEQ ID NO: 2091130 - DNA, 25 bp, Homo sapien
gactcggtagtttagccaatagaaa

SEQ ID NO: 2091131 - DNA, 25 bp, Homo sapien
gaaatcatcgatggcttatctaagt

SEQ ID NO: 2091132 - DNA, 25 bp, Homo sapien
taactgcatgtgattaaagcttcat

SEQ ID NO: 2091133 - DNA, 25 bp, Homo sapien
tatttgtcatgtcgtgactcggtag

SEQ ID NO: 2091134 - DNA, 25 bp, Homo sapien
tcaagggctacatccccagccaaat

SEQ ID NO: 2091135 - DNA, 25 bp, Homo sapien
cattgtactgataaagaagcttgag

SEQ ID NO: 2091136 - DNA, 25 bp, Homo sapien
tgggccccgtggttctcaatcttag

SEQ ID NO: 2091137 - DNA, 25 bp, Homo sapien
tagctgctgttacaaagtcttggag

SEQ ID NO: 2091138 - DNA, 25 bp, Homo sapien
ccgagcccccacgaccaatcgccgc

SEQ ID NO: 2091139 - DNA, 25 bp, Homo sapien
cgagcccccacgaccaatcgccgca

SEQ ID NO: 2091140 - DNA, 25 bp, Homo sapien
cccgagcccccacgaccaatcgccg

SEQ ID NO: 2091141 - DNA, 25 bp, Homo sapien
gagcccccacgaccaatcgccgcat

SEQ ID NO: 2091142 - DNA, 25 bp, Homo sapien
aacaagcggcccgacaaggggcaca

SEQ ID NO: 2091143 - DNA, 25 bp, Homo sapien
caagcggcccgacaaggggcacaga

SEQ ID NO: 2091144 - DNA, 25 bp, Homo sapien
cggcagcagccaaacaagcggcccg

SEQ ID NO: 2091145 - DNA, 25 bp, Homo sapien
gcagccaaacaagcggcccgacaag

SEQ ID NO: 2091146 - DNA, 25 bp, Homo sapien
tcagtcgcctcttcggcgccgccgc

SEQ ID NO: 2091147 - DNA, 25 bp, Homo sapien
ttctgccgcgggctgcgtcgccgtc

SEQ ID NO: 2091148 - DNA, 25 bp, Homo sapien
cgtccgccccgtccggcctcagtcg

SEQ ID NO: 2091149 - DNA, 25 bp, Homo sapien
ctgcctcctctacccgcgtcgccat

SEQ ID NO: 2091150 - DNA, 25 bp, Homo sapien
tcagtcctgcaagcactggatcttt

SEQ ID NO: 2091151 - DNA, 25 bp, Homo sapien
ttttcagtcctgcaagcactggatc

SEQ ID NO: 2091152 - DNA, 25 bp, Homo sapien
gcttctttttcagtcctgcaagcac

SEQ ID NO: 2091153 - DNA, 25 bp, Homo sapien
ggacattggtccacagcttcttttt

SEQ ID NO: 2091154 - DNA, 25 bp, Homo sapien
gaagttaagctggaattaagaaata

SEQ ID NO: 2091155 - DNA, 25 bp, Homo sapien
taagggacacaatgaagtaatgtaa

SEQ ID NO: 2091156 - DNA, 25 bp, Homo sapien
agaagttaagctggaattaagaaat

SEQ ID NO: 2091157 - DNA, 25 bp, Homo sapien
aattaagggacacaatgaagtaatg

SEQ ID NO: 2091158 - DNA, 25 bp, Homo sapien
tctttcaatattttcaaaaaactca

SEQ ID NO: 2091159 - DNA, 25 bp, Homo sapien
atattttcaaaaaactcaattcatt

SEQ ID NO: 2091160 - DNA, 25 bp, Homo sapien
tcaattcattaaacatttctgcttc

SEQ ID NO: 2091161 - DNA, 25 bp, Homo sapien
tcaaaaaactcaattcattaaacat

SEQ ID NO: 2091162 - DNA, 25 bp, Homo sapien
aggcagatggttaaagcaaccagga

SEQ ID NO: 2091163 - DNA, 25 bp, Homo sapien
cacttcaggtcccataatgtaacta

SEQ ID NO: 2091164 - DNA, 25 bp, Homo sapien
tcccataatgtaactagataatgac

SEQ ID NO: 2091165 - DNA, 25 bp, Homo sapien
gcagatggttaaagcaaccaggaac

SEQ ID NO: 2091166 - DNA, 25 bp, Homo sapien
agttaacatcgttgagcagcttgtc

SEQ ID NO: 2091167 - DNA, 25 bp, Homo sapien
gagttaacatcgttgagcagcttgt

SEQ ID NO: 2091168 - DNA, 25 bp, Homo sapien
gaccagaaaggggtccacatcttgg

SEQ ID NO: 2091169 - DNA, 25 bp, Homo sapien
aggcagatccacctctagggaatac

SEQ ID NO: 2091170 - DNA, 25 bp, Homo sapien
cagatccacctctagggaatacgcc

SEQ ID NO: 2091171 - DNA, 25 bp, Homo sapien
tggcagcaataagcaggcagatcca

SEQ ID NO: 2091172 - DNA, 25 bp, Homo sapien
taagagttgttaacttcaaccagga

SEQ ID NO: 2091173 - DNA, 25 bp, Homo sapien
tcaaccaggagtgtacggacaacag

SEQ ID NO: 2091174 - DNA, 25 bp, Homo sapien
tgttaacttcaaccaggagtgtacg

SEQ ID NO: 2091175 - DNA, 25 bp, Homo sapien
tacggacaacagtgtatgtgcaacc

SEQ ID NO: 2091176 - DNA, 25 bp, Homo sapien
gactgcacaatgcaagcttactgca

SEQ ID NO: 2091177 - DNA, 25 bp, Homo sapien
cgcagctcactggtaccatttaaaa

SEQ ID NO: 2091178 - DNA, 25 bp, Homo sapien
taaaattcccactagaagtgtatgg

SEQ ID NO: 2091179 - DNA, 25 bp, Homo sapien
gttgcccagactgcacaatgcaagc

SEQ ID NO: 2091180 - DNA, 25 bp, Homo sapien
ctctcttgattcttgcgtgcagtat

SEQ ID NO: 2091181 - DNA, 25 bp, Homo sapien
cagtatgctgggctcaccaaattcc

SEQ ID NO: 2091182 - DNA, 25 bp, Homo sapien
tgaatgcttgttacttgtgccacca

SEQ ID NO: 2091183 - DNA, 25 bp, Homo sapien
catcagggggatctgttcgagcttc

SEQ ID NO: 2091184 - DNA, 25 bp, Homo sapien
catatttcttacagagagctgccag

SEQ ID NO: 2091185 - DNA, 25 bp, Homo sapien
tcctgattgtaagcaatcctgcttc

SEQ ID NO: 2091186 - DNA, 25 bp, Homo sapien
gatgctacagggctgagctaccata

SEQ ID NO: 2091187 - DNA, 25 bp, Homo sapien
gttgccatgtggcacgaactcactg

SEQ ID NO: 2091188 - DNA, 25 bp, Homo sapien
tctggccaggataaccattttttaa

SEQ ID NO: 2091189 - DNA, 25 bp, Homo sapien
tcttgatactaaatcgcctgctggt

SEQ ID NO: 2091190 - DNA, 25 bp, Homo sapien
tatataagagaccacgtagatccac

SEQ ID NO: 2091191 - DNA, 25 bp, Homo sapien
tcttgcatcaacaggcatctgggct

SEQ ID NO: 2091192 - DNA, 25 bp, Homo sapien
gtatacacgtgtcaggaatttctcc

SEQ ID NO: 2091193 - DNA, 25 bp, Homo sapien
acagacttcggatgcatttggccca

SEQ ID NO: 2091194 - DNA, 25 bp, Homo sapien
tggctgatggctactgtcttggaca

SEQ ID NO: 2091195 - DNA, 25 bp, Homo sapien
cacattgttggcgtgtagctgcaga

SEQ ID NO: 2091196 - DNA, 25 bp, Homo sapien
tcttggacagcgcaactcgattaca

SEQ ID NO: 2091197 - DNA, 25 bp, Homo sapien
ttgcttctgaacactcctgctctcc

SEQ ID NO: 2091198 - DNA, 25 bp, Homo sapien
ctttaacgtcttattgtgacgctga

SEQ ID NO: 2091199 - DNA, 25 bp, Homo sapien
ccaagatagccttgctatgttcact

SEQ ID NO: 2091200 - DNA, 25 bp, Homo sapien
ccttgctatgttcactctgcaagtg

SEQ ID NO: 2091201 - DNA, 25 bp, Homo sapien
gatagccttgctatgttcactctgc

SEQ ID NO: 2091202 - DNA, 25 bp, Homo sapien
tacacaggccatcatcttagatggg

SEQ ID NO: 2091203 - DNA, 25 bp, Homo sapien
ggtcacacttactccctaaagggca

SEQ ID NO: 2091204 - DNA, 25 bp, Homo sapien
ccttgcagcttactttctgggtcac

SEQ ID NO: 2091205 - DNA, 25 bp, Homo sapien
ttagatgggtcggaagagatcctgc

SEQ ID NO: 2091206 - DNA, 25 bp, Homo sapien
gcgttgtggatgtcatgctgctcca

SEQ ID NO: 2091207 - DNA, 25 bp, Homo sapien
tcttccctcagtgcgtactgttcga

SEQ ID NO: 2091208 - DNA, 25 bp, Homo sapien
caatgttttcctgtcggagtttggc

SEQ ID NO: 2091209 - DNA, 25 bp, Homo sapien
aatgtgcagttgcttctttacgtcg

SEQ ID NO: 2091210 - DNA, 25 bp, Homo sapien
gctgttgcagttccttatgtttgaa

SEQ ID NO: 2091211 - DNA, 25 bp, Homo sapien
cttttatcagttgtgtcgtttgctg

SEQ ID NO: 2091212 - DNA, 25 bp, Homo sapien
tatgtttgaacaccttatcaatgtg

SEQ ID NO: 2091213 - DNA, 25 bp, Homo sapien
gctgcagtttggcatccacgagctg

SEQ ID NO: 2091214 - DNA, 25 bp, Homo sapien
ctgctgttttagttgtacttcttgc

SEQ ID NO: 2091215 - DNA, 25 bp, Homo sapien
gctgttttagttgtacttcttgctg

SEQ ID NO: 2091216 - DNA, 25 bp, Homo sapien
tgctgttttagttgtacttcttgct

SEQ ID NO: 2091217 - DNA, 25 bp, Homo sapien
gatcatgccagtctcaaggtctcag

SEQ ID NO: 2091218 - DNA, 25 bp, Homo sapien
taagttaggctagctttataggacc

SEQ ID NO: 2091219 - DNA, 25 bp, Homo sapien
catggacaactgactgtatagggct

SEQ ID NO: 2091220 - DNA, 25 bp, Homo sapien
tcacagcaggacacacttacagggt

SEQ ID NO: 2091221 - DNA, 25 bp, Homo sapien
caaacttatccatataaagagaaag

SEQ ID NO: 2091222 - DNA, 25 bp, Homo sapien
ttcctgtctgaaggttgtaaacagt

SEQ ID NO: 2091223 - DNA, 25 bp, Homo sapien
gctttttgccatggtagtctggaat

SEQ ID NO: 2091224 - DNA, 25 bp, Homo sapien
aaacagttcattgctttttgccatg

SEQ ID NO: 2091225 - DNA, 25 bp, Homo sapien
tcccatttggtacgccaaattattg

SEQ ID NO: 2091226 - DNA, 25 bp, Homo sapien
ccatttggtacgccaaattattgtt

SEQ ID NO: 2091227 - DNA, 25 bp, Homo sapien
catttggtacgccaaattattgttt

SEQ ID NO: 2091228 - DNA, 25 bp, Homo sapien
cccatttggtacgccaaattattgt

SEQ ID NO: 2091229 - DNA, 25 bp, Homo sapien
accttagtcgcaggaaaccatctca

SEQ ID NO: 2091230 - DNA, 25 bp, Homo sapien
gactaagactacaccttagtcgcag

SEQ ID NO: 2091231 - DNA, 25 bp, Homo sapien
caaggagtccccatgactaagacta

SEQ ID NO: 2091232 - DNA, 25 bp, Homo sapien
gaactcaaggagtccccatgactaa

SEQ ID NO: 2091233 - DNA, 25 bp, Homo sapien
tgtactctttatcacggactgtttt

SEQ ID NO: 2091234 - DNA, 25 bp, Homo sapien
ctttctgtctgaagagccctgcaca

SEQ ID NO: 2091235 - DNA, 25 bp, Homo sapien
tctcattgagctcattcctttctgt

SEQ ID NO: 2091236 - DNA, 25 bp, Homo sapien
aggacttccaccttctcattgagct

SEQ ID NO: 2091237 - DNA, 25 bp, Homo sapien
ggtgttgctaaatccctgttcgccg

SEQ ID NO: 2091238 - DNA, 25 bp, Homo sapien
cctgttcgccgctttgatggccgct

SEQ ID NO: 2091239 - DNA, 25 bp, Homo sapien
atcacaggtgttgctaaatccctgt

SEQ ID NO: 2091240 - DNA, 25 bp, Homo sapien
ctttgatggccgctttgatggatac

SEQ ID NO: 2091241 - DNA, 25 bp, Homo sapien
agtcaaccgactcgatggccggagc

SEQ ID NO: 2091242 - DNA, 25 bp, Homo sapien
tgtggacgggggcttttgcacagcg

SEQ ID NO: 2091243 - DNA, 25 bp, Homo sapien
ttagtcaaccgactcgatggccgga

SEQ ID NO: 2091244 - DNA, 25 bp, Homo sapien
aaccgactcgatggccggagcagag

SEQ ID NO: 2091245 - DNA, 25 bp, Homo sapien
tcaaggaaccatcgtcagaacaaag

SEQ ID NO: 2091246 - DNA, 25 bp, Homo sapien
ttcccttgtaatggtcggccctgtc

SEQ ID NO: 2091247 - DNA, 25 bp, Homo sapien
ccacataagtccagtagttctaaga

SEQ ID NO: 2091248 - DNA, 25 bp, Homo sapien
tagacaaaactaatcgccttggtat

SEQ ID NO: 2091249 - DNA, 25 bp, Homo sapien
agtggagaatatgtactgaaatccc

SEQ ID NO: 2091250 - DNA, 25 bp, Homo sapien
catgtggccatctcaatttgtcccg

SEQ ID NO: 2091251 - DNA, 25 bp, Homo sapien
catattctgccgaaacttaggattc

SEQ ID NO: 2091252 - DNA, 25 bp, Homo sapien
ccaaagcaggatgactgttcagtca

SEQ ID NO: 2091253 - DNA, 25 bp, Homo sapien
gaaagtgacacgtgaattgaccgtc

SEQ ID NO: 2091254 - DNA, 25 bp, Homo sapien
caagggacttcattgaacggcaaac

SEQ ID NO: 2091255 - DNA, 25 bp, Homo sapien
tggagaaacttctgcctagtgaaag

SEQ ID NO: 2091256 - DNA, 25 bp, Homo sapien
agatcatgactaacactctgccaag

SEQ ID NO: 2091257 - DNA, 25 bp, Homo sapien
aagtcaaaacttccatcagtgcagc

SEQ ID NO: 2091258 - DNA, 25 bp, Homo sapien
gagaccttgataatactgtggcttt

SEQ ID NO: 2091259 - DNA, 25 bp, Homo sapien
tcaatgcaaattataccagggacaa

SEQ ID NO: 2091260 - DNA, 25 bp, Homo sapien
cccagtccaagtgtagagaccttga

SEQ ID NO: 2091261 - DNA, 25 bp, Homo sapien
gatagtggaggcttagatacaaccc

SEQ ID NO: 2091262 - DNA, 25 bp, Homo sapien
cacaaagaaacgtggtgggctacac

SEQ ID NO: 2091263 - DNA, 25 bp, Homo sapien
caacactgggctggtgaggtgatca

SEQ ID NO: 2091264 - DNA, 25 bp, Homo sapien
tctgggccagcctagtagcattaca

SEQ ID NO: 2091265 - DNA, 25 bp, Homo sapien
agactgcctcttaacaattcgtatc

SEQ ID NO: 2091266 - DNA, 25 bp, Homo sapien
catatttacttaatctatacagaat

SEQ ID NO: 2091267 - DNA, 25 bp, Homo sapien
tttacttaatctatacagaatcaag

SEQ ID NO: 2091268 - DNA, 25 bp, Homo sapien
actgcctcttaacaattcgtatcct

SEQ ID NO: 2091269 - DNA, 25 bp, Homo sapien
gactagttgcataggcacatcctgc

SEQ ID NO: 2091270 - DNA, 25 bp, Homo sapien
acaggatgtgtcttccggcagcaaa

SEQ ID NO: 2091271 - DNA, 25 bp, Homo sapien
tacatcggcaagttcagggaggtct

SEQ ID NO: 2091272 - DNA, 25 bp, Homo sapien
ccaagtttggtgattttgctaggac

SEQ ID NO: 2091273 - DNA, 25 bp, Homo sapien
cgaaaggcgcgaattggcgtgcgga

SEQ ID NO: 2091274 - DNA, 25 bp, Homo sapien
gcgccggcgaaaggcgcgaattggc

SEQ ID NO: 2091275 - DNA, 25 bp, Homo sapien
ggcgaaaggcgcgaattggcgtgcg

SEQ ID NO: 2091276 - DNA, 25 bp, Homo sapien
aaggcgcgaattggcgtgcggagca

SEQ ID NO: 2091277 - DNA, 25 bp, Homo sapien
gcccgccgcgcgtcattggtctcgg

SEQ ID NO: 2091278 - DNA, 25 bp, Homo sapien
cgtcattggtctcggcgccggagcc

SEQ ID NO: 2091279 - DNA, 25 bp, Homo sapien
tcctctcacttttcccagggcggat

SEQ ID NO: 2091280 - DNA, 25 bp, Homo sapien
ttcccagggcggatgcgcctgcgct

SEQ ID NO: 2091281 - DNA, 25 bp, Homo sapien
gactgggaggactagactgagactc

SEQ ID NO: 2091282 - DNA, 25 bp, Homo sapien
tattcgatgaatgatcccaggcgct

SEQ ID NO: 2091283 - DNA, 25 bp, Homo sapien
gtggcacctggcaacaaacaagctg

SEQ ID NO: 2091284 - DNA, 25 bp, Homo sapien
cccttgtgggataaagacgttctct

SEQ ID NO: 2091285 - DNA, 25 bp, Homo sapien
ttggcttccaggattccatcgacag

SEQ ID NO: 2091286 - DNA, 25 bp, Homo sapien
cacccggacattcctgcagaaggct

SEQ ID NO: 2091287 - DNA, 25 bp, Homo sapien
tgaaagtcgccatttgtccatgtgt

SEQ ID NO: 2091288 - DNA, 25 bp, Homo sapien
ctgtatgtgaaagtcgccatttgtc

SEQ ID NO: 2091289 - DNA, 25 bp, Homo sapien
ggaccttgctcattggtggcattcg

SEQ ID NO: 2091290 - DNA, 25 bp, Homo sapien
cacacagcccaatgtggagggcttt

SEQ ID NO: 2091291 - DNA, 25 bp, Homo sapien
ctggggaccttgctcattggtggca

SEQ ID NO: 2091292 - DNA, 25 bp, Homo sapien
cagcccaatgtggagggctttgcct

SEQ ID NO: 2091293 - DNA, 25 bp, Homo sapien
gctgcaatgacactggtccttgtga

SEQ ID NO: 2091294 - DNA, 25 bp, Homo sapien
tgtgatcctcctcatcgccgggggt

SEQ ID NO: 2091295 - DNA, 25 bp, Homo sapien
tgcaatgacactggtccttgtgatc

SEQ ID NO: 2091296 - DNA, 25 bp, Homo sapien
gagctgcaatgacactggtccttgt

SEQ ID NO: 2091297 - DNA, 25 bp, Homo sapien
ccccgcagctgccgcgcggccgctt

SEQ ID NO: 2091298 - DNA, 25 bp, Homo sapien
cccacgccccgcagctgccgcgcgg

SEQ ID NO: 2091299 - DNA, 25 bp, Homo sapien
acgccccgcagctgccgcgcggccg

SEQ ID NO: 2091300 - DNA, 25 bp, Homo sapien
acccccacgccccgcagctgccgcg

SEQ ID NO: 2091301 - DNA, 25 bp, Homo sapien
tccctagctggggtgctgctgcgtc

SEQ ID NO: 2091302 - DNA, 25 bp, Homo sapien
ccctagctggggtgctgctgcgtcc

SEQ ID NO: 2091303 - DNA, 25 bp, Homo sapien
ctagctggggtgctgctgcgtccgc

SEQ ID NO: 2091304 - DNA, 25 bp, Homo sapien
tgtccctagctggggtgctgctgcg

SEQ ID NO: 2091305 - DNA, 25 bp, Homo sapien
cacagcgcgcgaagagctcggagta

SEQ ID NO: 2091306 - DNA, 25 bp, Homo sapien
gaagagctcggagtagcactgctgc

SEQ ID NO: 2091307 - DNA, 25 bp, Homo sapien
gctgcgatgcccgaaacaggtcagc

SEQ ID NO: 2091308 - DNA, 25 bp, Homo sapien
ctggtgcagcgtctcggcgggcagc

SEQ ID NO: 2091309 - DNA, 25 bp, Homo sapien
ataagccttaataggtacccagctg

SEQ ID NO: 2091310 - DNA, 25 bp, Homo sapien
tcttatccgatgcattactgacaac

SEQ ID NO: 2091311 - DNA, 25 bp, Homo sapien
ctcctcttatccgatgcattactga

SEQ ID NO: 2091312 - DNA, 25 bp, Homo sapien
ggtacccagctgtcacttacttgct

SEQ ID NO: 2091313 - DNA, 25 bp, Homo sapien
aagtctctgaagtagagatagcagt

SEQ ID NO: 2091314 - DNA, 25 bp, Homo sapien
ctagcccaagtctctgaagtagaga

SEQ ID NO: 2091315 - DNA, 25 bp, Homo sapien
ccaagtctctgaagtagagatagca

SEQ ID NO: 2091316 - DNA, 25 bp, Homo sapien
gtaaataaaacaggccccacaagca

SEQ ID NO: 2091317 - DNA, 25 bp, Homo sapien
ctttaacatgtatgacatgatgttt

SEQ ID NO: 2091318 - DNA, 25 bp, Homo sapien
ttttatggcataactttaacatgta

SEQ ID NO: 2091319 - DNA, 25 bp, Homo sapien
cactaccacacgcagataactttta

SEQ ID NO: 2091320 - DNA, 25 bp, Homo sapien
cctggcccacatatagctattttta

SEQ ID NO: 2091321 - DNA, 25 bp, Homo sapien
attgagtaaaaggtcttctgtgctc

SEQ ID NO: 2091322 - DNA, 25 bp, Homo sapien
tattgagtaaaaggtcttctgtgct

SEQ ID NO: 2091323 - DNA, 25 bp, Homo sapien
tgagtaaaaggtcttctgtgctcat

SEQ ID NO: 2091324 - DNA, 25 bp, Homo sapien
tttattgagtaaaaggtcttctgtg

SEQ ID NO: 2091325 - DNA, 25 bp, Homo sapien
agtaaaaatctcctgtggctatgaa

SEQ ID NO: 2091326 - DNA, 25 bp, Homo sapien
tcctacacttcttgagattgttctc

SEQ ID NO: 2091327 - DNA, 25 bp, Homo sapien
aatcttggcatgcttaatagtatcc

SEQ ID NO: 2091328 - DNA, 25 bp, Homo sapien
caatattgaagtaagtaaaaatctc

SEQ ID NO: 2091329 - DNA, 25 bp, Homo sapien
taaggcaaagcatggggttacaatt

SEQ ID NO: 2091330 - DNA, 25 bp, Homo sapien
gttcccacatctgctccatggagta

SEQ ID NO: 2091331 - DNA, 25 bp, Homo sapien
tggggttacaattcccatcaggcat

SEQ ID NO: 2091332 - DNA, 25 bp, Homo sapien
tcaggcatccaagttcccacatctg

SEQ ID NO: 2091333 - DNA, 25 bp, Homo sapien
ggataaacctcagatcagtccccac

SEQ ID NO: 2091334 - DNA, 25 bp, Homo sapien
atggataaacctcagatcagtcccc

SEQ ID NO: 2091335 - DNA, 25 bp, Homo sapien
aatggataaacctcagatcagtccc

SEQ ID NO: 2091336 - DNA, 25 bp, Homo sapien
tggataaacctcagatcagtcccca

SEQ ID NO: 2091337 - DNA, 25 bp, Homo sapien
cattttggcactattaagagtggag

SEQ ID NO: 2091338 - DNA, 25 bp, Homo sapien
aacacatcctcttaggaagtttagg

SEQ ID NO: 2091339 - DNA, 25 bp, Homo sapien
tctatgagaaagatacaggtaaaca

SEQ ID NO: 2091340 - DNA, 25 bp, Homo sapien
taagtggagttaaaggtctttgcat

SEQ ID NO: 2091341 - DNA, 25 bp, Homo sapien
taccggttaggatcaaggcataagg

SEQ ID NO: 2091342 - DNA, 25 bp, Homo sapien
tcagctaagagggtaccggttagga

SEQ ID NO: 2091343 - DNA, 25 bp, Homo sapien
ggcataaggaaaggcatccaccatt

SEQ ID NO: 2091344 - DNA, 25 bp, Homo sapien
gaaaggcatccaccattctttatcc

SEQ ID NO: 2091345 - DNA, 25 bp, Homo sapien
tattacttttacaagtagctgctaa

SEQ ID NO: 2091346 - DNA, 25 bp, Homo sapien
tacttttacaagtagctgctaaatt

SEQ ID NO: 2091347 - DNA, 25 bp, Homo sapien
aaatgttgaattagtcttcacagcc

SEQ ID NO: 2091348 - DNA, 25 bp, Homo sapien
cagcctgttgcatcagaatctttct

SEQ ID NO: 2091349 - DNA, 25 bp, Homo sapien
ttatctttgaaactgtagtcaattc

SEQ ID NO: 2091350 - DNA, 25 bp, Homo sapien
aactgtagtcaattccacatggcat

SEQ ID NO: 2091351 - DNA, 25 bp, Homo sapien
tgaaactgtagtcaattccacatgg

SEQ ID NO: 2091352 - DNA, 25 bp, Homo sapien
tctttgaaactgtagtcaattccac

SEQ ID NO: 2091353 - DNA, 25 bp, Homo sapien
ttggtcccatatcaccactagaatc

SEQ ID NO: 2091354 - DNA, 25 bp, Homo sapien
ggtcccatatcaccactagaatcat

SEQ ID NO: 2091355 - DNA, 25 bp, Homo sapien
ccttggtcccatatcaccactagaa

SEQ ID NO: 2091356 - DNA, 25 bp, Homo sapien
gtcccttggtcccatatcaccacta

SEQ ID NO: 2091357 - DNA, 25 bp, Homo sapien
ataaccaacccgctttgcaccacac

SEQ ID NO: 2091358 - DNA, 25 bp, Homo sapien
gcaatgtaaaactgtgttggaccaa

SEQ ID NO: 2091359 - DNA, 25 bp, Homo sapien
gtgctgcagcaattaatttcagggc

SEQ ID NO: 2091360 - DNA, 25 bp, Homo sapien
taatttcagggcaatgtaaaactgt

SEQ ID NO: 2091361 - DNA, 25 bp, Homo sapien
cacatttaatactctctatccgtac

SEQ ID NO: 2091362 - DNA, 25 bp, Homo sapien
gtcctcacacgtgctcaacttcaga

SEQ ID NO: 2091363 - DNA, 25 bp, Homo sapien
agtcctcacacgtgctcaacttcag

SEQ ID NO: 2091364 - DNA, 25 bp, Homo sapien
cctcacacgtgctcaacttcagacc

SEQ ID NO: 2091365 - DNA, 25 bp, Homo sapien
tcagtcctcacacgtgctcaacttc

SEQ ID NO: 2091366 - DNA, 25 bp, Homo sapien
gaactcaatggccaaacgatgaatc

SEQ ID NO: 2091367 - DNA, 25 bp, Homo sapien
actcaatggccaaacgatgaatcat

SEQ ID NO: 2091368 - DNA, 25 bp, Homo sapien
aaggggaactcaatggccaaacgat

SEQ ID NO: 2091369 - DNA, 25 bp, Homo sapien
gggaactcaatggccaaacgatgaa

SEQ ID NO: 2091370 - DNA, 25 bp, Homo sapien
agctctagtcagacttaatttaaaa

SEQ ID NO: 2091371 - DNA, 25 bp, Homo sapien
gaaatcagagaagctctagtcagac

SEQ ID NO: 2091372 - DNA, 25 bp, Homo sapien
ctttgggaccagaaatcagagaagc

SEQ ID NO: 2091373 - DNA, 25 bp, Homo sapien
ccagaaatcagagaagctctagtca

SEQ ID NO: 2091374 - DNA, 25 bp, Homo sapien
gctgggttcccaaatcgtatctcac

SEQ ID NO: 2091375 - DNA, 25 bp, Homo sapien
cgtatctcaccatcattctttgaca

SEQ ID NO: 2091376 - DNA, 25 bp, Homo sapien
gaaccttagttccatgcagctcagc

SEQ ID NO: 2091377 - DNA, 25 bp, Homo sapien
tttctgtagttaaatatggaatctg

SEQ ID NO: 2091378 - DNA, 25 bp, Homo sapien
gatacgaggccctgctacatgcggt

SEQ ID NO: 2091379 - DNA, 25 bp, Homo sapien
tacatgcggtttcatggtcagaatc

SEQ ID NO: 2091380 - DNA, 25 bp, Homo sapien
gctgaacagtagatacgaggccctg

SEQ ID NO: 2091381 - DNA, 25 bp, Homo sapien
ggtcagaatcaaatgaacacatctg

SEQ ID NO: 2091382 - DNA, 25 bp, Homo sapien
cattcacacaatcagggactgggcc

SEQ ID NO: 2091383 - DNA, 25 bp, Homo sapien
tttaacaggatgtgctacacctccc

SEQ ID NO: 2091384 - DNA, 25 bp, Homo sapien
catcacagggtaagtcacagaagtt

SEQ ID NO: 2091385 - DNA, 25 bp, Homo sapien
gcatgcataaactcagcctgaagtg

SEQ ID NO: 2091386 - DNA, 25 bp, Homo sapien
tggtaatgaggcggggaagaaggag

SEQ ID NO: 2091387 - DNA, 25 bp, Homo sapien
ctggtaatgaggcggggaagaagga

SEQ ID NO: 2091388 - DNA, 25 bp, Homo sapien
ctgtagccatggctcaagggcaccc

SEQ ID NO: 2091389 - DNA, 25 bp, Homo sapien
tgcgctgctccgcagtttgctgtag

SEQ ID NO: 2091390 - DNA, 25 bp, Homo sapien
gcgctgctccgcagtttgctgtagc

SEQ ID NO: 2091391 - DNA, 25 bp, Homo sapien
tgctgtagccatggctcaagggcac

SEQ ID NO: 2091392 - DNA, 25 bp, Homo sapien
caaggggctgcctagcttcataagg

SEQ ID NO: 2091393 - DNA, 25 bp, Homo sapien
cccctgatgaggatccctcgggctg

SEQ ID NO: 2091394 - DNA, 25 bp, Homo sapien
cctgatgccgaaggggcttggttcc

SEQ ID NO: 2091395 - DNA, 25 bp, Homo sapien
atgaggatccctcgggctggacaag

SEQ ID NO: 2091396 - DNA, 25 bp, Homo sapien
gaagcccaaagcttgactctactgt

SEQ ID NO: 2091397 - DNA, 25 bp, Homo sapien
agcttgactctactgtcccattggc

SEQ ID NO: 2091398 - DNA, 25 bp, Homo sapien
atcaaaaagccatgtccccgaagcc

SEQ ID NO: 2091399 - DNA, 25 bp, Homo sapien
tcttccttgcaatgaaaaagggtcc

SEQ ID NO: 2091400 - DNA, 25 bp, Homo sapien
cttctggccgtaagtacctgcagtt

SEQ ID NO: 2091401 - DNA, 25 bp, Homo sapien
gcttctggccgtaagtacctgcagt

SEQ ID NO: 2091402 - DNA, 25 bp, Homo sapien
agaggacccaaggagtggagatcac

SEQ ID NO: 2091403 - DNA, 25 bp, Homo sapien
acagacggcactgctcgttcccatg

SEQ ID NO: 2091404 - DNA, 25 bp, Homo sapien
gtacccacggccatgacagacggca

SEQ ID NO: 2091405 - DNA, 25 bp, Homo sapien
gctcgttcccatgctctgctgcaaa

SEQ ID NO: 2091406 - DNA, 25 bp, Homo sapien
gcctggcagccttgtgtgggcacca

SEQ ID NO: 2091407 - DNA, 25 bp, Homo sapien
tgcggtcaaaaaggagcccagagtc

SEQ ID NO: 2091408 - DNA, 25 bp, Homo sapien
aaaggagcccagagtcagtttcctt

SEQ ID NO: 2091409 - DNA, 25 bp, Homo sapien
caaaaaggagcccagagtcagtttc

SEQ ID NO: 2091410 - DNA, 25 bp, Homo sapien
agcccagagtcagtttccttgacca

SEQ ID NO: 2091411 - DNA, 25 bp, Homo sapien
caaagatgattcgtgaagaaggtgg

SEQ ID NO: 2091412 - DNA, 25 bp, Homo sapien
gatgtgggtcggaagctctgtccct

SEQ ID NO: 2091413 - DNA, 25 bp, Homo sapien
aagacacagaaatatccatgctggg

SEQ ID NO: 2091414 - DNA, 25 bp, Homo sapien
tgctgggcggcccttatcacagctg

SEQ ID NO: 2091415 - DNA, 25 bp, Homo sapien
tccaggtcagccctgacagaaagag

SEQ ID NO: 2091416 - DNA, 25 bp, Homo sapien
gccctccaggtcagccctgacagaa

SEQ ID NO: 2091417 - DNA, 25 bp, Homo sapien
cctccaggtcagccctgacagaaag

SEQ ID NO: 2091418 - DNA, 25 bp, Homo sapien
aggagcactgccctccaggtcagcc

SEQ ID NO: 2091419 - DNA, 25 bp, Homo sapien
aaaagtaaatgctcagagaacctgt

SEQ ID NO: 2091420 - DNA, 25 bp, Homo sapien
ggatcggaactgattgacatagtac

SEQ ID NO: 2091421 - DNA, 25 bp, Homo sapien
tctggctgaagggatcggaactgat

SEQ ID NO: 2091422 - DNA, 25 bp, Homo sapien
tagtactcgcgctgttcttctgtta

SEQ ID NO: 2091423 - DNA, 25 bp, Homo sapien
gctgttatcctgtagttccctctcc

SEQ ID NO: 2091424 - DNA, 25 bp, Homo sapien
tttgatttggtgaagaagttcttgg

SEQ ID NO: 2091425 - DNA, 25 bp, Homo sapien
gctttgatttggtgaagaagttctt

SEQ ID NO: 2091426 - DNA, 25 bp, Homo sapien
aagctttgatttggtgaagaagttc

SEQ ID NO: 2091427 - DNA, 25 bp, Homo sapien
agctttgatttggtgaagaagttct

SEQ ID NO: 2091428 - DNA, 25 bp, Homo sapien
aggcaatgggtagccgttcttccga

SEQ ID NO: 2091429 - DNA, 25 bp, Homo sapien
gagatgaaacgcagcacagaactca

SEQ ID NO: 2091430 - DNA, 25 bp, Homo sapien
tcttccgagccacaatgagatgaaa

SEQ ID NO: 2091431 - DNA, 25 bp, Homo sapien
ctcaggcaatgggtagccgttcttc

SEQ ID NO: 2091432 - DNA, 25 bp, Homo sapien
cattttataccagctgggaggttca

SEQ ID NO: 2091433 - DNA, 25 bp, Homo sapien
gacactcgggtgtgcctaaaaatgc

SEQ ID NO: 2091434 - DNA, 25 bp, Homo sapien
taggtataagagttccattccactc

SEQ ID NO: 2091435 - DNA, 25 bp, Homo sapien
taagtgactttggttcaaatccatc

SEQ ID NO: 2091436 - DNA, 25 bp, Homo sapien
gacttatcaaataaggagtcatggc

SEQ ID NO: 2091437 - DNA, 25 bp, Homo sapien
ctgtgaaacacttggacacctacaa

SEQ ID NO: 2091438 - DNA, 25 bp, Homo sapien
gagtcatggcatgtcccacaggttc

SEQ ID NO: 2091439 - DNA, 25 bp, Homo sapien
cacacccagccgttatgtcagtgac

SEQ ID NO: 2091440 - DNA, 25 bp, Homo sapien
gacagtcccatttgggcttaggaaa

SEQ ID NO: 2091441 - DNA, 25 bp, Homo sapien
ctccatccgattcaagtcacgaggt

SEQ ID NO: 2091442 - DNA, 25 bp, Homo sapien
cacgaggttgttgatttgccggcag

SEQ ID NO: 2091443 - DNA, 25 bp, Homo sapien
tttgccggcagtgactcagaataag

SEQ ID NO: 2091444 - DNA, 25 bp, Homo sapien
gacaggaaggtcagccatgtcttta

SEQ ID NO: 2091445 - DNA, 25 bp, Homo sapien
cttgtttgtcatcactagttacatc

SEQ ID NO: 2091446 - DNA, 25 bp, Homo sapien
ggtcagccatgtctttaacagatgt

SEQ ID NO: 2091447 - DNA, 25 bp, Homo sapien
catcactagttacatcctggttagg

SEQ ID NO: 2091448 - DNA, 25 bp, Homo sapien
taaagaagaaaactcattcttctcc

SEQ ID NO: 2091449 - DNA, 25 bp, Homo sapien
agaagaaaactcattcttctcctac

SEQ ID NO: 2091450 - DNA, 25 bp, Homo sapien
ttaaagaagaaaactcattcttctc

SEQ ID NO: 2091451 - DNA, 25 bp, Homo sapien
aaagaagaaaactcattcttctcct

SEQ ID NO: 2091452 - DNA, 25 bp, Homo sapien
tggatcctcagacacgtcctttggt

SEQ ID NO: 2091453 - DNA, 25 bp, Homo sapien
agacacgtcctttggtaaggcttca

SEQ ID NO: 2091454 - DNA, 25 bp, Homo sapien
ggcttcattgatagtacttttcaaa

SEQ ID NO: 2091455 - DNA, 25 bp, Homo sapien
tggtaaggcttcattgatagtactt

SEQ ID NO: 2091456 - DNA, 25 bp, Homo sapien
caggtaaatgtgaggtaaaagtgcc

SEQ ID NO: 2091457 - DNA, 25 bp, Homo sapien
tatgcagcacctgggctagtacaga

SEQ ID NO: 2091458 - DNA, 25 bp, Homo sapien
atttctgcagttaaacaagtttata

SEQ ID NO: 2091459 - DNA, 25 bp, Homo sapien
gtaaaagtgcccatgtggagaactg

SEQ ID NO: 2091460 - DNA, 25 bp, Homo sapien
ctggatcttggtcttgctttgagac

SEQ ID NO: 2091461 - DNA, 25 bp, Homo sapien
cttggtcttgctttgagactgttgg

SEQ ID NO: 2091462 - DNA, 25 bp, Homo sapien
gctttgagactgttggaatccttgg

SEQ ID NO: 2091463 - DNA, 25 bp, Homo sapien
tggtcttgctttgagactgttggaa

SEQ ID NO: 2091464 - DNA, 25 bp, Homo sapien
ccacttcacgttgaggggccgtagg

SEQ ID NO: 2091465 - DNA, 25 bp, Homo sapien
acaatccacttcacgttgaggggcc

SEQ ID NO: 2091466 - DNA, 25 bp, Homo sapien
cgttgaggggccgtagggcattcat

SEQ ID NO: 2091467 - DNA, 25 bp, Homo sapien
aatccacttcacgttgaggggccgt

SEQ ID NO: 2091468 - DNA, 25 bp, Homo sapien
tactgtagattttattacccagact

SEQ ID NO: 2091469 - DNA, 25 bp, Homo sapien
ctgtagattttattacccagacttt

SEQ ID NO: 2091470 - DNA, 25 bp, Homo sapien
actgtagattttattacccagactt

SEQ ID NO: 2091471 - DNA, 25 bp, Homo sapien
gcagaaaacgacctctgagtcagag

SEQ ID NO: 2091472 - DNA, 25 bp, Homo sapien
cgatgatcacgaaaaggccctaaga

SEQ ID NO: 2091473 - DNA, 25 bp, Homo sapien
ggccctaagatgtagatgtatacat

SEQ ID NO: 2091474 - DNA, 25 bp, Homo sapien
tctcaactagcttcatgtcaaagca

SEQ ID NO: 2091475 - DNA, 25 bp, Homo sapien
aagactttattcagatccaaggagg

SEQ ID NO: 2091476 - DNA, 25 bp, Homo sapien
agactttattcagatccaaggagga

SEQ ID NO: 2091477 - DNA, 25 bp, Homo sapien
gagggtcctcgccccttttcatggc

SEQ ID NO: 2091478 - DNA, 25 bp, Homo sapien
gcattaaatcctacaggacacagga

SEQ ID NO: 2091479 - DNA, 25 bp, Homo sapien
ggatcttctccataagtgtaaaatg

SEQ ID NO: 2091480 - DNA, 25 bp, Homo sapien
aaccacccaaccatcagtcagattc

SEQ ID NO: 2091481 - DNA, 25 bp, Homo sapien
tggctaggccttaatctccaagatc

SEQ ID NO: 2091482 - DNA, 25 bp, Homo sapien
atttcagctgcattccaggaggtgg

SEQ ID NO: 2091483 - DNA, 25 bp, Homo sapien
ccaggaggtggtagcagatggtcat

SEQ ID NO: 2091484 - DNA, 25 bp, Homo sapien
aggtggtagcagatggtcataaaga

SEQ ID NO: 2091485 - DNA, 25 bp, Homo sapien
ggtagcagatggtcataaagatacc

SEQ ID NO: 2091486 - DNA, 25 bp, Homo sapien
taatctttgggaggtcctccagaac

SEQ ID NO: 2091487 - DNA, 25 bp, Homo sapien
gacagagcccttaccatgacgtttt

SEQ ID NO: 2091488 - DNA, 25 bp, Homo sapien
gtagcactcacaggaaaaatacagt

SEQ ID NO: 2091489 - DNA, 25 bp, Homo sapien
gaactactcctcagtgttggaaagg

SEQ ID NO: 2091490 - DNA, 25 bp, Homo sapien
tctagagattaggagaatgtgttcc

SEQ ID NO: 2091491 - DNA, 25 bp, Homo sapien
gaaacagactagacctttactagga

SEQ ID NO: 2091492 - DNA, 25 bp, Homo sapien
gccaatagctggcaacttccatcaa

SEQ ID NO: 2091493 - DNA, 25 bp, Homo sapien
cagaaaatgttctaacctaaggtag

SEQ ID NO: 2091494 - DNA, 25 bp, Homo sapien
acaaggtcttggagggagcgcaggt

SEQ ID NO: 2091495 - DNA, 25 bp, Homo sapien
gtcttggagggagcgcaggtggtgg

SEQ ID NO: 2091496 - DNA, 25 bp, Homo sapien
tggacaaggtcttggagggagcgca

SEQ ID NO: 2091497 - DNA, 25 bp, Homo sapien
ctgtgatggacaaggtcttggaggg

SEQ ID NO: 2091498 - DNA, 25 bp, Homo sapien
ccaggcttgaactagcagctagcaa

SEQ ID NO: 2091499 - DNA, 25 bp, Homo sapien
gacaggtcttccatgcattcaacca

SEQ ID NO: 2091500 - DNA, 25 bp, Homo sapien
tcattttgttgtgaccaagtccagg

SEQ ID NO: 2091501 - DNA, 25 bp, Homo sapien
tacaaaagtcaattcagacaggtct

SEQ ID NO: 2091502 - DNA, 25 bp, Homo sapien
gcgggcaacaatactgctctctaac

SEQ ID NO: 2091503 - DNA, 25 bp, Homo sapien
gcaacaatactgctctctaacgcat

SEQ ID NO: 2091504 - DNA, 25 bp, Homo sapien
aacaatactgctctctaacgcattg

SEQ ID NO: 2091505 - DNA, 25 bp, Homo sapien
gggcaacaatactgctctctaacgc

SEQ ID NO: 2091506 - DNA, 25 bp, Homo sapien
cattcttttgatctatggcaggatt

SEQ ID NO: 2091507 - DNA, 25 bp, Homo sapien
tgccattcttttgatctatggcagg

SEQ ID NO: 2091508 - DNA, 25 bp, Homo sapien
tcttttgatctatggcaggattctc

SEQ ID NO: 2091509 - DNA, 25 bp, Homo sapien
ttgatctatggcaggattctcaaga

SEQ ID NO: 2091510 - DNA, 25 bp, Homo sapien
cttttctatatgcaattatacttca

SEQ ID NO: 2091511 - DNA, 25 bp, Homo sapien
tgcttttctatatgcaattatactt

SEQ ID NO: 2091512 - DNA, 25 bp, Homo sapien
gcttgcttttctatatgcaattata

SEQ ID NO: 2091513 - DNA, 25 bp, Homo sapien
tttctatatgcaattatacttcaat

SEQ ID NO: 2091514 - DNA, 25 bp, Homo sapien
gcagagcgtctttgttattgcctcc

SEQ ID NO: 2091515 - DNA, 25 bp, Homo sapien
aagtctccttgtggaaatatccaag

SEQ ID NO: 2091516 - DNA, 25 bp, Homo sapien
tttttcaacataaatgaggattcca

SEQ ID NO: 2091517 - DNA, 25 bp, Homo sapien
caaagcacagcagagcgtctttgtt

SEQ ID NO: 2091518 - DNA, 25 bp, Homo sapien
tccatcatcaggtggacagagaagt

SEQ ID NO: 2091519 - DNA, 25 bp, Homo sapien
tcagttagttggttctcctccatca

SEQ ID NO: 2091520 - DNA, 25 bp, Homo sapien
gtggacagagaagtgtttgctctac

SEQ ID NO: 2091521 - DNA, 25 bp, Homo sapien
gttagttggttctcctccatcatca

SEQ ID NO: 2091522 - DNA, 25 bp, Homo sapien
tccctcttcagggtaccaaatgaag

SEQ ID NO: 2091523 - DNA, 25 bp, Homo sapien
cctcttcagggtaccaaatgaagac

SEQ ID NO: 2091524 - DNA, 25 bp, Homo sapien
tcagggtaccaaatgaagacttcat

SEQ ID NO: 2091525 - DNA, 25 bp, Homo sapien
tcttcagggtaccaaatgaagactt

SEQ ID NO: 2091526 - DNA, 25 bp, Homo sapien
cctccgaagcccaagcctaaagagg

SEQ ID NO: 2091527 - DNA, 25 bp, Homo sapien
tgccaaacctgctcctccgaagccc

SEQ ID NO: 2091528 - DNA, 25 bp, Homo sapien
accaaagtaaggacaaaccacagag

SEQ ID NO: 2091529 - DNA, 25 bp, Homo sapien
gaagatctgcaaggttgtctgccaa

SEQ ID NO: 2091530 - DNA, 25 bp, Homo sapien
gagagaggacagaaatgcaaaacca

SEQ ID NO: 2091531 - DNA, 25 bp, Homo sapien
agagaggacagaaatgcaaaaccac

SEQ ID NO: 2091532 - DNA, 25 bp, Homo sapien
tgtgggagtaactcggcctccgaca

SEQ ID NO: 2091533 - DNA, 25 bp, Homo sapien
actcggcctccgacacttgttcaga

SEQ ID NO: 2091534 - DNA, 25 bp, Homo sapien
gctcagctgtgggagtaactcggcc

SEQ ID NO: 2091535 - DNA, 25 bp, Homo sapien
tttgctggactactttctgcagcct

SEQ ID NO: 2091536 - DNA, 25 bp, Homo sapien
ctgggagaaggacaagaagagggtg

SEQ ID NO: 2091537 - DNA, 25 bp, Homo sapien
tgggagaaggacaagaagagggtga

SEQ ID NO: 2091538 - DNA, 25 bp, Homo sapien
gggtgaggagatgaatggagagcat

SEQ ID NO: 2091539 - DNA, 25 bp, Homo sapien
gacaagaagagggtgaggagatgaa

SEQ ID NO: 2091540 - DNA, 25 bp, Homo sapien
cccaaggcccactctctctgaaaga

SEQ ID NO: 2091541 - DNA, 25 bp, Homo sapien
ctgtgctcctgagcccaaggcccac

SEQ ID NO: 2091542 - DNA, 25 bp, Homo sapien
gagcccaaggcccactctctctgaa

SEQ ID NO: 2091543 - DNA, 25 bp, Homo sapien
ccaaggcccactctctctgaaagaa

SEQ ID NO: 2091544 - DNA, 25 bp, Homo sapien
gttgccgcagaagctggcccacttg

SEQ ID NO: 2091545 - DNA, 25 bp, Homo sapien
cttgcagcagtggaaggctcttggt

SEQ ID NO: 2091546 - DNA, 25 bp, Homo sapien
tggtctgaatttcctacgaatgggc

SEQ ID NO: 2091547 - DNA, 25 bp, Homo sapien
ttttggactgttggatgcggtttca

SEQ ID NO: 2091548 - DNA, 25 bp, Homo sapien
ggagctagccatttgccctgaagga

SEQ ID NO: 2091549 - DNA, 25 bp, Homo sapien
acacaggcagagaggcaaaattgcc

SEQ ID NO: 2091550 - DNA, 25 bp, Homo sapien
cattctgtgctgaggcgaccaacaa

SEQ ID NO: 2091551 - DNA, 25 bp, Homo sapien
tacctgttccagctggttagataaa

SEQ ID NO: 2091552 - DNA, 25 bp, Homo sapien
gtcctcaacacctccctcaatttca

SEQ ID NO: 2091553 - DNA, 25 bp, Homo sapien
ttgcagtcaagtgacaggagcaggt

SEQ ID NO: 2091554 - DNA, 25 bp, Homo sapien
cagtcaagtgacaggagcaggtttc

SEQ ID NO: 2091555 - DNA, 25 bp, Homo sapien
aggagcaggtttctgtcctcaacac

SEQ ID NO: 2091556 - DNA, 25 bp, Homo sapien
taatagcacttagaagacctgcagg

SEQ ID NO: 2091557 - DNA, 25 bp, Homo sapien
cacaggcggtcaggaagatagacac

SEQ ID NO: 2091558 - DNA, 25 bp, Homo sapien
tatggactgataccaccagggacct

SEQ ID NO: 2091559 - DNA, 25 bp, Homo sapien
catttatgttagtgaccggtcaggc

SEQ ID NO: 2091560 - DNA, 25 bp, Homo sapien
gccagcactgcgtttgcctctttat

SEQ ID NO: 2091561 - DNA, 25 bp, Homo sapien
cgagccagcactgcgtttgcctctt

SEQ ID NO: 2091562 - DNA, 25 bp, Homo sapien
tgcggatagcagtttgaatggcctt

SEQ ID NO: 2091563 - DNA, 25 bp, Homo sapien
cctctttatttttgcggatagcagt

SEQ ID NO: 2091564 - DNA, 25 bp, Homo sapien
cagtgaccggacgaagttgttccaa

SEQ ID NO: 2091565 - DNA, 25 bp, Homo sapien
caatgcaattcgttcttgatgaacc

SEQ ID NO: 2091566 - DNA, 25 bp, Homo sapien
tcacaacacagtgaccggacgaagt

SEQ ID NO: 2091567 - DNA, 25 bp, Homo sapien
tgttccaattggttttccaatgcaa

SEQ ID NO: 2091568 - DNA, 25 bp, Homo sapien
gtcacccactgtcacttgaaccatg

SEQ ID NO: 2091569 - DNA, 25 bp, Homo sapien
gatcttggcagacaaggtcacccac

SEQ ID NO: 2091570 - DNA, 25 bp, Homo sapien
cagtaaaacatacaagtgaagtgca

SEQ ID NO: 2091571 - DNA, 25 bp, Homo sapien
gatttttggtaaggagcagcatcta

SEQ ID NO: 2091572 - DNA, 25 bp, Homo sapien
tatcaaaatggcactagagaagcaa

SEQ ID NO: 2091573 - DNA, 25 bp, Homo sapien
tggttacaagcatcctgaaggttct

SEQ ID NO: 2091574 - DNA, 25 bp, Homo sapien
gggcacagcgccagtctaaatctga

SEQ ID NO: 2091575 - DNA, 25 bp, Homo sapien
cagaggtgtaaagacccagtaagtc

SEQ ID NO: 2091576 - DNA, 25 bp, Homo sapien
cataaaatcaggttggcgccccaaa

SEQ ID NO: 2091577 - DNA, 25 bp, Homo sapien
ttacaaacaagcgaagcagggtggc

SEQ ID NO: 2091578 - DNA, 25 bp, Homo sapien
tgccgagggaccaaataagccagct

SEQ ID NO: 2091579 - DNA, 25 bp, Homo sapien
tatgccacatacgagagatgccgag

SEQ ID NO: 2091580 - DNA, 25 bp, Homo sapien
tctggcggctgtaacagaagtctat

SEQ ID NO: 2091581 - DNA, 25 bp, Homo sapien
caacaagtaagcatgtctaaggcag

SEQ ID NO: 2091582 - DNA, 25 bp, Homo sapien
caacagttaagtagggaaggttcag

SEQ ID NO: 2091583 - DNA, 25 bp, Homo sapien
gagggaactgagtggacaacagtta

SEQ ID NO: 2091584 - DNA, 25 bp, Homo sapien
tcttggcccctaatgcaaagctctg

SEQ ID NO: 2091585 - DNA, 25 bp, Homo sapien
taagtgcctacaatgggtaatacca

SEQ ID NO: 2091586 - DNA, 25 bp, Homo sapien
gaaactcctagatccaagacattga

SEQ ID NO: 2091587 - DNA, 25 bp, Homo sapien
tgtgtataatctcccctgctgaact

SEQ ID NO: 2091588 - DNA, 25 bp, Homo sapien
gatctagggagcaatttagcaacac

SEQ ID NO: 2091589 - DNA, 25 bp, Homo sapien
tatgacctttcagtgtgcccaggat

SEQ ID NO: 2091590 - DNA, 25 bp, Homo sapien
gcaacactatcaattgcctctaaaa

SEQ ID NO: 2091591 - DNA, 25 bp, Homo sapien
gcccaggattattcaagcactttac

SEQ ID NO: 2091592 - DNA, 25 bp, Homo sapien
ctctacgttcactgaaatctatttc

SEQ ID NO: 2091593 - DNA, 25 bp, Homo sapien
tactctacgttcactgaaatctatt

SEQ ID NO: 2091594 - DNA, 25 bp, Homo sapien
actctacgttcactgaaatctattt

SEQ ID NO: 2091595 - DNA, 25 bp, Homo sapien
gagaggcccatggtctttagccaaa

SEQ ID NO: 2091596 - DNA, 25 bp, Homo sapien
gcagagccatgactgggtacccttg

SEQ ID NO: 2091597 - DNA, 25 bp, Homo sapien
tagtcaaacgaagagataagccaag

SEQ ID NO: 2091598 - DNA, 25 bp, Homo sapien
ggtggccccatagagaccttcagca

SEQ ID NO: 2091599 - DNA, 25 bp, Homo sapien
gtccatcactgtgaaactcatcatt

SEQ ID NO: 2091600 - DNA, 25 bp, Homo sapien
ctcatcatttccctggggtctgaag

SEQ ID NO: 2091601 - DNA, 25 bp, Homo sapien
catttccctggggtctgaagccagc

SEQ ID NO: 2091602 - DNA, 25 bp, Homo sapien
cgtccatcactgtgaaactcatcat

SEQ ID NO: 2091603 - DNA, 25 bp, Homo sapien
tcaggagcttctaaggagggcccat

SEQ ID NO: 2091604 - DNA, 25 bp, Homo sapien
aggctgctgcattccgggcacattc

SEQ ID NO: 2091605 - DNA, 25 bp, Homo sapien
gtgtcagccgctctagatctctttt

SEQ ID NO: 2091606 - DNA, 25 bp, Homo sapien
gggcccattcggcagcctggatttg

SEQ ID NO: 2091607 - DNA, 25 bp, Homo sapien
ctcatgggacactggaccaggccac

SEQ ID NO: 2091608 - DNA, 25 bp, Homo sapien
tcatgggacactggaccaggccacc

SEQ ID NO: 2091609 - DNA, 25 bp, Homo sapien
ttttcctgtcctccttctcatctgt

SEQ ID NO: 2091610 - DNA, 25 bp, Homo sapien
cctgtcctccttctcatctgtggat

SEQ ID NO: 2091611 - DNA, 25 bp, Homo sapien
gacgaaccaaataaataggtgacag

SEQ ID NO: 2091612 - DNA, 25 bp, Homo sapien
cattgacgaaccaaataaataggtg

SEQ ID NO: 2091613 - DNA, 25 bp, Homo sapien
gtacttagagggtcattgacgaacc

SEQ ID NO: 2091614 - DNA, 25 bp, Homo sapien
tagaggttcctgtacttagagggtc

SEQ ID NO: 2091615 - DNA, 25 bp, Homo sapien
gcaagtttctctgaaatgcttgtat

SEQ ID NO: 2091616 - DNA, 25 bp, Homo sapien
gaaggaggcacaatgttgttgcaag

SEQ ID NO: 2091617 - DNA, 25 bp, Homo sapien
aggaggcacaatgttgttgcaagtt

SEQ ID NO: 2091618 - DNA, 25 bp, Homo sapien
tgcaagtttctctgaaatgcttgta

SEQ ID NO: 2091619 - DNA, 25 bp, Homo sapien
ctgaagtatgcgagactgtgaggct

SEQ ID NO: 2091620 - DNA, 25 bp, Homo sapien
gtgaggctatggaggtacctctctc

SEQ ID NO: 2091621 - DNA, 25 bp, Homo sapien
ctgctgttacttggcttcttcccca

SEQ ID NO: 2091622 - DNA, 25 bp, Homo sapien
gctatggaggtacctctctccactg

SEQ ID NO: 2091623 - DNA, 25 bp, Homo sapien
tatggctagtttctggacattgtgc

SEQ ID NO: 2091624 - DNA, 25 bp, Homo sapien
ttgatcatagaccttgccattgcct

SEQ ID NO: 2091625 - DNA, 25 bp, Homo sapien
tgtgaggtccccaaactctacagct

SEQ ID NO: 2091626 - DNA, 25 bp, Homo sapien
tggtctccactgagttatggctagt

SEQ ID NO: 2091627 - DNA, 25 bp, Homo sapien
gaacaaatgtcttaatgtttctctt

SEQ ID NO: 2091628 - DNA, 25 bp, Homo sapien
agaacaaatgtcttaatgtttctct

SEQ ID NO: 2091629 - DNA, 25 bp, Homo sapien
cctggctatgccatgtgggagacac

SEQ ID NO: 2091630 - DNA, 25 bp, Homo sapien
tttaactgatgcaaacctggctatg

SEQ ID NO: 2091631 - DNA, 25 bp, Homo sapien
aaataatattgactttgtaatgacc

SEQ ID NO: 2091632 - DNA, 25 bp, Homo sapien
atgacctgatgggttcgtcctgcct

SEQ ID NO: 2091633 - DNA, 25 bp, Homo sapien
gtcatcatagaagggcctgtgttcc

SEQ ID NO: 2091634 - DNA, 25 bp, Homo sapien
agttgggatactgccttttgagtca

SEQ ID NO: 2091635 - DNA, 25 bp, Homo sapien
ttgggatactgccttttgagtcatc

SEQ ID NO: 2091636 - DNA, 25 bp, Homo sapien
agagttgggatactgccttttgagt

SEQ ID NO: 2091637 - DNA, 25 bp, Homo sapien
cagaatggggtatgccaagttggat

SEQ ID NO: 2091638 - DNA, 25 bp, Homo sapien
gaatggcaccgagaaattgtcacag

SEQ ID NO: 2091639 - DNA, 25 bp, Homo sapien
tgaggtatgcttcatagccatgaag

SEQ ID NO: 2091640 - DNA, 25 bp, Homo sapien
acaggagtcttcaccaagtctggca

SEQ ID NO: 2091641 - DNA, 25 bp, Homo sapien
tctgcagccatgtatatgagtccat

SEQ ID NO: 2091642 - DNA, 25 bp, Homo sapien
cttctgcagccatgtatatgagtcc

SEQ ID NO: 2091643 - DNA, 25 bp, Homo sapien
ttctgcagccatgtatatgagtcca

SEQ ID NO: 2091644 - DNA, 25 bp, Homo sapien
cacttgcctctttctgatctatctg

SEQ ID NO: 2091645 - DNA, 25 bp, Homo sapien
gcctctttctgatctatctgtctca

SEQ ID NO: 2091646 - DNA, 25 bp, Homo sapien
accagttacagtcaacaatgttctc

SEQ ID NO: 2091647 - DNA, 25 bp, Homo sapien
tctttaccagttacagtcaacaatg

SEQ ID NO: 2091648 - DNA, 25 bp, Homo sapien
ctgaggtaggaatgcccacatcagc

SEQ ID NO: 2091649 - DNA, 25 bp, Homo sapien
attgccctcctgaggtaggaatgcc

SEQ ID NO: 2091650 - DNA, 25 bp, Homo sapien
ctcaggagaagtaattcttgccatc

SEQ ID NO: 2091651 - DNA, 25 bp, Homo sapien
ggtgctcaggagaagtaattcttgc

SEQ ID NO: 2091652 - DNA, 25 bp, Homo sapien
cagtgtttccaagcattggtatgtc

SEQ ID NO: 2091653 - DNA, 25 bp, Homo sapien
agatttcagcggcatgagtgatgga

SEQ ID NO: 2091654 - DNA, 25 bp, Homo sapien
cttttgatcctttataggatagcag

SEQ ID NO: 2091655 - DNA, 25 bp, Homo sapien
cccattgatgtcagtgatttaaatc

SEQ ID NO: 2091656 - DNA, 25 bp, Homo sapien
gaaaccccattctgatcaggaaaaa

SEQ ID NO: 2091657 - DNA, 25 bp, Homo sapien
ctgaaaccccattctgatcaggaaa

SEQ ID NO: 2091658 - DNA, 25 bp, Homo sapien
tgaaaccccattctgatcaggaaaa

SEQ ID NO: 2091659 - DNA, 25 bp, Homo sapien
ctagggggcacacaatgcaacatgc

SEQ ID NO: 2091660 - DNA, 25 bp, Homo sapien
tgcaacatgcttggtccacatcctc

SEQ ID NO: 2091661 - DNA, 25 bp, Homo sapien
gggcacacaatgcaacatgcttggt

SEQ ID NO: 2091662 - DNA, 25 bp, Homo sapien
atcctccaagaacgggtcaagagcc

SEQ ID NO: 2091663 - DNA, 25 bp, Homo sapien
tgtctccacgtccagtgatctaggg

SEQ ID NO: 2091664 - DNA, 25 bp, Homo sapien
tccacgtccagtgatctagggagct

SEQ ID NO: 2091665 - DNA, 25 bp, Homo sapien
tggtcactggtagtggtgaaagcca

SEQ ID NO: 2091666 - DNA, 25 bp, Homo sapien
tccagtgatctagggagctggactt

SEQ ID NO: 2091667 - DNA, 25 bp, Homo sapien
gaaattgcctccagatactgttgtg

SEQ ID NO: 2091668 - DNA, 25 bp, Homo sapien
cctgagagaaattgcctccagatac

SEQ ID NO: 2091669 - DNA, 25 bp, Homo sapien
catttcctgagagaaattgcctcca

SEQ ID NO: 2091670 - DNA, 25 bp, Homo sapien
cagatactgttgtgacttggagatg

SEQ ID NO: 2091671 - DNA, 25 bp, Homo sapien
tgatcccttgaggagtagtgaggca

SEQ ID NO: 2091672 - DNA, 25 bp, Homo sapien
tatgtccccttggagccctttacca

SEQ ID NO: 2091673 - DNA, 25 bp, Homo sapien
tagaggagaccttcacaaatgatcc

SEQ ID NO: 2091674 - DNA, 25 bp, Homo sapien
tatccgatgtctgcatatgtcccct

SEQ ID NO: 2091675 - DNA, 25 bp, Homo sapien
cacggatgggctgtactctaagaag

SEQ ID NO: 2091676 - DNA, 25 bp, Homo sapien
tgccagtgggtcagccctactggga

SEQ ID NO: 2091677 - DNA, 25 bp, Homo sapien
tctaagaagctttggtctatattgc

SEQ ID NO: 2091678 - DNA, 25 bp, Homo sapien
caaaggctgcattgttcattaaagg

SEQ ID NO: 2091679 - DNA, 25 bp, Homo sapien
tcttatagaataccccatgtctgat

SEQ ID NO: 2091680 - DNA, 25 bp, Homo sapien
aaagatgctcccctatataaccaca

SEQ ID NO: 2091681 - DNA, 25 bp, Homo sapien
gttaatgctgtatgcttcccactgc

SEQ ID NO: 2091682 - DNA, 25 bp, Homo sapien
tattcaggaccaattaaagatcatg

SEQ ID NO: 2091683 - DNA, 25 bp, Homo sapien
gcacatctcacacataagcatgaaa

SEQ ID NO: 2091684 - DNA, 25 bp, Homo sapien
gatgggtaatgtgccaatgtcgtaa

SEQ ID NO: 2091685 - DNA, 25 bp, Homo sapien
tgggtaatgtgccaatgtcgtaaca

SEQ ID NO: 2091686 - DNA, 25 bp, Homo sapien
tcatcatgcttatgaaccacagaaa

SEQ ID NO: 2091687 - DNA, 25 bp, Homo sapien
gaagattggcattgagagcaccgtg

SEQ ID NO: 2091688 - DNA, 25 bp, Homo sapien
gagcaccgtgaagcgccactgtcct

SEQ ID NO: 2091689 - DNA, 25 bp, Homo sapien
agaagggctttgctgaacttgaaga

SEQ ID NO: 2091690 - DNA, 25 bp, Homo sapien
ggaagaagggctttgctgaacttga

SEQ ID NO: 2091691 - DNA, 25 bp, Homo sapien
gagacaactggggagggcaaagggc

SEQ ID NO: 2091692 - DNA, 25 bp, Homo sapien
cgcaaggagacaactggggagggca

SEQ ID NO: 2091693 - DNA, 25 bp, Homo sapien
aaggagacaactggggagggcaaag

SEQ ID NO: 2091694 - DNA, 25 bp, Homo sapien
aacgcaaggagacaactggggaggg

SEQ ID NO: 2091695 - DNA, 25 bp, Homo sapien
cgtgttggagcaagtttttcgccga

SEQ ID NO: 2091696 - DNA, 25 bp, Homo sapien
gctctgtacaagacctttgggttct

SEQ ID NO: 2091697 - DNA, 25 bp, Homo sapien
gtttttcgccgaattccagctctgt

SEQ ID NO: 2091698 - DNA, 25 bp, Homo sapien
cagatttggcgtgttggagcaagtt

SEQ ID NO: 2091699 - DNA, 25 bp, Homo sapien
gtggcctcgccgtgctgggcgcgtt

SEQ ID NO: 2091700 - DNA, 25 bp, Homo sapien
ttggaattgagactgtcagcgtggt

SEQ ID NO: 2091701 - DNA, 25 bp, Homo sapien
ccaaggggttggaattgagactgtc

SEQ ID NO: 2091702 - DNA, 25 bp, Homo sapien
tcaggcgcaaagacacttcctcaca

SEQ ID NO: 2091703 - DNA, 25 bp, Homo sapien
gcgccctgtgcggccgctgggagtc

SEQ ID NO: 2091704 - DNA, 25 bp, Homo sapien
cgccctgtgcggccgctgggagtca

SEQ ID NO: 2091705 - DNA, 25 bp, Homo sapien
gcgaggggggcgcagcgccctgtgc

SEQ ID NO: 2091706 - DNA, 25 bp, Homo sapien
agcgccctgtgcggccgctgggagt

SEQ ID NO: 2091707 - DNA, 25 bp, Homo sapien
ggaggtttcggaaaggcgctctgaa

SEQ ID NO: 2091708 - DNA, 25 bp, Homo sapien
tcagtttgaaagtaccccggcgcag

SEQ ID NO: 2091709 - DNA, 25 bp, Homo sapien
aaaacccggagagaggaatctgcct

SEQ ID NO: 2091710 - DNA, 25 bp, Homo sapien
ttgcgcccgggatctctctccctgg

SEQ ID NO: 2091711 - DNA, 25 bp, Homo sapien
tccatcgtttctgtgctcgccgtcg

SEQ ID NO: 2091712 - DNA, 25 bp, Homo sapien
atcgtttctgtgctcgccgtcgcca

SEQ ID NO: 2091713 - DNA, 25 bp, Homo sapien
cgccaccccggccactgccgtcgcc

SEQ ID NO: 2091714 - DNA, 25 bp, Homo sapien
tcaactccatcgtttctgtgctcgc

SEQ ID NO: 2091715 - DNA, 25 bp, Homo sapien
tccctagcaaatcagtccagccagt

SEQ ID NO: 2091716 - DNA, 25 bp, Homo sapien
cgatctggcagtccggatacgcagg

SEQ ID NO: 2091717 - DNA, 25 bp, Homo sapien
agtccggcaaaagcgcgatctggca

SEQ ID NO: 2091718 - DNA, 25 bp, Homo sapien
aagcgctccgcacagaaatttaggg

SEQ ID NO: 2091719 - DNA, 25 bp, Homo sapien
cgcgcagccaggcggcgactttctg

SEQ ID NO: 2091720 - DNA, 25 bp, Homo sapien
cgcagccaggcggcgactttctggt

SEQ ID NO: 2091721 - DNA, 25 bp, Homo sapien
cccgcgcagccaggcggcgactttc

SEQ ID NO: 2091722 - DNA, 25 bp, Homo sapien
agccaggcggcgactttctggtctc

SEQ ID NO: 2091723 - DNA, 25 bp, Homo sapien
tccgctcgcgtccactgctgggccg

SEQ ID NO: 2091724 - DNA, 25 bp, Homo sapien
cattgcggctccacgatccgcttgg

SEQ ID NO: 2091725 - DNA, 25 bp, Homo sapien
ccacgatccgcttggcgaaaggcat

SEQ ID NO: 2091726 - DNA, 25 bp, Homo sapien
cggcccggcggctgcaagggcggcg

SEQ ID NO: 2091727 - DNA, 25 bp, Homo sapien
ctgccggaggacacgggccagagcg

SEQ ID NO: 2091728 - DNA, 25 bp, Homo sapien
acgcctctccgtgcggcggctgagt

SEQ ID NO: 2091729 - DNA, 25 bp, Homo sapien
gcggctgagtctggtcggccggcgc

SEQ ID NO: 2091730 - DNA, 25 bp, Homo sapien
agagcggcgttgctgaccgcgcata

SEQ ID NO: 2091731 - DNA, 25 bp, Homo sapien
tgcctcctgcttagggtcaagcgtg

SEQ ID NO: 2091732 - DNA, 25 bp, Homo sapien
tgtcgctctcgagctcctggaagag

SEQ ID NO: 2091733 - DNA, 25 bp, Homo sapien
tcaagcgtgctgaggacgcgctgca

SEQ ID NO: 2091734 - DNA, 25 bp, Homo sapien
tggaagaggctgcaagcgtgccggg

SEQ ID NO: 2091735 - DNA, 25 bp, Homo sapien
tgtgctccccataaacgctcccttt

SEQ ID NO: 2091736 - DNA, 25 bp, Homo sapien
cacgctgcctgcgacttcagaggtc

SEQ ID NO: 2091737 - DNA, 25 bp, Homo sapien
tccacgtctgcatcactgaatcggg

SEQ ID NO: 2091738 - DNA, 25 bp, Homo sapien
gaaggcgagagtagtaaggtgcaag

SEQ ID NO: 2091739 - DNA, 25 bp, Homo sapien
tcaaaagaacactcactactcctgg

SEQ ID NO: 2091740 - DNA, 25 bp, Homo sapien
agtgacgaaacagccgcggtgctgc

SEQ ID NO: 2091741 - DNA, 25 bp, Homo sapien
ggaaaccacaggagttgcaaccctc

SEQ ID NO: 2091742 - DNA, 25 bp, Homo sapien
ctacgccccgtgaaggacgtgaaag

SEQ ID NO: 2091743 - DNA, 25 bp, Homo sapien
gggtcgttcctaaatgattctgccg

SEQ ID NO: 2091744 - DNA, 25 bp, Homo sapien
ccagatttggacgatccggagccaa

SEQ ID NO: 2091745 - DNA, 25 bp, Homo sapien
ctgactaggcgccaaaggaccgtcg

SEQ ID NO: 2091746 - DNA, 25 bp, Homo sapien
tgtctacctcctgggtcgttcctaa

SEQ ID NO: 2091747 - DNA, 25 bp, Homo sapien
gctgcggcagcaacctaggaagctt

SEQ ID NO: 2091748 - DNA, 25 bp, Homo sapien
taggaagcttcttacgtaagtcaga

SEQ ID NO: 2091749 - DNA, 25 bp, Homo sapien
taggccactgcgcaccggcgcagct

SEQ ID NO: 2091750 - DNA, 25 bp, Homo sapien
cttacgtaagtcagagccgctgaca

SEQ ID NO: 2091751 - DNA, 25 bp, Homo sapien
gaactctgacacgttccaggtacat

SEQ ID NO: 2091752 - DNA, 25 bp, Homo sapien
aagaactctgacacgttccaggtac

SEQ ID NO: 2091753 - DNA, 25 bp, Homo sapien
actctgacacgttccaggtacataa

SEQ ID NO: 2091754 - DNA, 25 bp, Homo sapien
tctgacacgttccaggtacataact

SEQ ID NO: 2091755 - DNA, 25 bp, Homo sapien
tatcgtagaaaaggctcctactggc

SEQ ID NO: 2091756 - DNA, 25 bp, Homo sapien
ctttatcgtagaaaaggctcctact

SEQ ID NO: 2091757 - DNA, 25 bp, Homo sapien
aaaaggctcctactggccaggtgcg

SEQ ID NO: 2091758 - DNA, 25 bp, Homo sapien
tagaaaaggctcctactggccaggt

SEQ ID NO: 2091759 - DNA, 25 bp, Homo sapien
gatccagctgaccaaaacgtttaca

SEQ ID NO: 2091760 - DNA, 25 bp, Homo sapien
catggatccagctgaccaaaacgtt

SEQ ID NO: 2091761 - DNA, 25 bp, Homo sapien
ttcaccatggatccagctgaccaaa

SEQ ID NO: 2091762 - DNA, 25 bp, Homo sapien
tcaccatggatccagctgaccaaaa

SEQ ID NO: 2091763 - DNA, 25 bp, Homo sapien
tgcagtgcttcacaacatgagttag

SEQ ID NO: 2091764 - DNA, 25 bp, Homo sapien
catggcagccagatgctaaattgtt

SEQ ID NO: 2091765 - DNA, 25 bp, Homo sapien
catgagttagacgagccaagtcaga

SEQ ID NO: 2091766 - DNA, 25 bp, Homo sapien
caagaatgagagtgtcatggcagcc

SEQ ID NO: 2091767 - DNA, 25 bp, Homo sapien
aagcttttgcttggtgtagatcaga

SEQ ID NO: 2091768 - DNA, 25 bp, Homo sapien
tcaaagcttttgcttggtgtagatc

SEQ ID NO: 2091769 - DNA, 25 bp, Homo sapien
cttttgcttggtgtagatcagaaag

SEQ ID NO: 2091770 - DNA, 25 bp, Homo sapien
agcttttgcttggtgtagatcagaa

SEQ ID NO: 2091771 - DNA, 25 bp, Homo sapien
tggctgcaccagaagtacctcttga

SEQ ID NO: 2091772 - DNA, 25 bp, Homo sapien
gagtattcaaagttgcacctggata

SEQ ID NO: 2091773 - DNA, 25 bp, Homo sapien
tataacccagttgtatgcctgctct

SEQ ID NO: 2091774 - DNA, 25 bp, Homo sapien
atacacgtgttaacttataacccag

SEQ ID NO: 2091775 - DNA, 25 bp, Homo sapien
tagggaagtgtactggctctagcca

SEQ ID NO: 2091776 - DNA, 25 bp, Homo sapien
acatgccacccggttggttgtgtgg

SEQ ID NO: 2091777 - DNA, 25 bp, Homo sapien
tagctttaaaagaggctaacttcaa

SEQ ID NO: 2091778 - DNA, 25 bp, Homo sapien
gcttttgcttcctgatctaagtttt

SEQ ID NO: 2091779 - DNA, 25 bp, Homo sapien
gctctggctagaatctgcagcataa

SEQ ID NO: 2091780 - DNA, 25 bp, Homo sapien
gatgtacttcatcagattgaggaaa

SEQ ID NO: 2091781 - DNA, 25 bp, Homo sapien
aattggcaagaatggacagcctgtc

SEQ ID NO: 2091782 - DNA, 25 bp, Homo sapien
catttgggtgatcatacaaccacac

SEQ ID NO: 2091783 - DNA, 25 bp, Homo sapien
gagagagtctgaccaagatagagtc

SEQ ID NO: 2091784 - DNA, 25 bp, Homo sapien
agtcttagaaacagtcagtgctcac

SEQ ID NO: 2091785 - DNA, 25 bp, Homo sapien
cagctccaccatgtaaattgcttgg

SEQ ID NO: 2091786 - DNA, 25 bp, Homo sapien
tctggctgacttaccctgggagacc

SEQ ID NO: 2091787 - DNA, 25 bp, Homo sapien
ccctttccagacagcgatactgttg

SEQ ID NO: 2091788 - DNA, 25 bp, Homo sapien
ctgttgctaacatgagggtggtatc

SEQ ID NO: 2091789 - DNA, 25 bp, Homo sapien
atgacaaggagaccaccctcagaca

SEQ ID NO: 2091790 - DNA, 25 bp, Homo sapien
gaggagaaagctttatcatgacaag

SEQ ID NO: 2091791 - DNA, 25 bp, Homo sapien
tctgtcctccattcttgaacccttg

SEQ ID NO: 2091792 - DNA, 25 bp, Homo sapien
gaacccttgctgctctgcctctaat

SEQ ID NO: 2091793 - DNA, 25 bp, Homo sapien
ttcttgaacccttgctgctctgcct

SEQ ID NO: 2091794 - DNA, 25 bp, Homo sapien
ccattcttgaacccttgctgctctg

SEQ ID NO: 2091795 - DNA, 25 bp, Homo sapien
gtttgtgccatactctcccttcaga

SEQ ID NO: 2091796 - DNA, 25 bp, Homo sapien
gacatctccaacttgtggaatgttt

SEQ ID NO: 2091797 - DNA, 25 bp, Homo sapien
ggaccactgtgcttctgctactttc

SEQ ID NO: 2091798 - DNA, 25 bp, Homo sapien
tatcccaatctcagtccagacatct

SEQ ID NO: 2091799 - DNA, 25 bp, Homo sapien
ctgcagtgaaaatatcaggcttcat

SEQ ID NO: 2091800 - DNA, 25 bp, Homo sapien
tgcagtgaaaatatcaggcttcatg

SEQ ID NO: 2091801 - DNA, 25 bp, Homo sapien
ttgcattaatgtcttgctacttggt

SEQ ID NO: 2091802 - DNA, 25 bp, Homo sapien
cttctctttttgcattaatgtcttg

SEQ ID NO: 2091803 - DNA, 25 bp, Homo sapien
tctctttttgcattaatgtcttgct

SEQ ID NO: 2091804 - DNA, 25 bp, Homo sapien
gcattaatgtcttgctacttggttt

SEQ ID NO: 2091805 - DNA, 25 bp, Homo sapien
gtaagcaatagtaaaacgtctccaa

SEQ ID NO: 2091806 - DNA, 25 bp, Homo sapien
gaatgcaccatcttgctctctcata

SEQ ID NO: 2091807 - DNA, 25 bp, Homo sapien
catacatttgccatctagctcattg

SEQ ID NO: 2091808 - DNA, 25 bp, Homo sapien
ttaaggcattcacacatacatttgc

SEQ ID NO: 2091809 - DNA, 25 bp, Homo sapien
gaggtcatgccaactgataagccaa

SEQ ID NO: 2091810 - DNA, 25 bp, Homo sapien
tgtagggacctgcacagaatctctc

SEQ ID NO: 2091811 - DNA, 25 bp, Homo sapien
gattagctgcaatctgtaggcccaa

SEQ ID NO: 2091812 - DNA, 25 bp, Homo sapien
taggatcaccttggataaccaccag

SEQ ID NO: 2091813 - DNA, 25 bp, Homo sapien
aaggcccgagagagaatgaagccac

SEQ ID NO: 2091814 - DNA, 25 bp, Homo sapien
tcttgagtgaccatatgtagcctag

SEQ ID NO: 2091815 - DNA, 25 bp, Homo sapien
tgctggctgaattcgacatccagtg

SEQ ID NO: 2091816 - DNA, 25 bp, Homo sapien
aaactccctgtgactaggtgtggcc

SEQ ID NO: 2091817 - DNA, 25 bp, Homo sapien
tttgggatgccttcagcaacctgga

SEQ ID NO: 2091818 - DNA, 25 bp, Homo sapien
gaaaaaggatccctgtctccacaca

SEQ ID NO: 2091819 - DNA, 25 bp, Homo sapien
taatgactcttgaccctggttgcac

SEQ ID NO: 2091820 - DNA, 25 bp, Homo sapien
taattggcccagtctacctcatgtg

SEQ ID NO: 2091821 - DNA, 25 bp, Homo sapien
gagacaagtttaatgaaacagtaac

SEQ ID NO: 2091822 - DNA, 25 bp, Homo sapien
tttaatgaaacagtaactactctta

SEQ ID NO: 2091823 - DNA, 25 bp, Homo sapien
tgtcattgagacaagtttaatgaaa

SEQ ID NO: 2091824 - DNA, 25 bp, Homo sapien
cctggcctcgtttccattttaactg

SEQ ID NO: 2091825 - DNA, 25 bp, Homo sapien
tttgagcaggattggggcggcgtgg

SEQ ID NO: 2091826 - DNA, 25 bp, Homo sapien
ttgagcaggattggggcggcgtggg

SEQ ID NO: 2091827 - DNA, 25 bp, Homo sapien
aagccaggtgcagtcaaatgcgcca

SEQ ID NO: 2091828 - DNA, 25 bp, Homo sapien
gatcctaatgcctagcagacacaat

SEQ ID NO: 2091829 - DNA, 25 bp, Homo sapien
catgtacagaacaaaacccgaagga

SEQ ID NO: 2091830 - DNA, 25 bp, Homo sapien
ccaattggcacccacaagccaggtg

SEQ ID NO: 2091831 - DNA, 25 bp, Homo sapien
ggatcaagaaaagacaggcccctct

SEQ ID NO: 2091832 - DNA, 25 bp, Homo sapien
cttgtcgcccttttggaaaccagtg

SEQ ID NO: 2091833 - DNA, 25 bp, Homo sapien
gagaaggtcttaacgcggcgctcat

SEQ ID NO: 2091834 - DNA, 25 bp, Homo sapien
ccaggcccaagctggcaggatcaag

SEQ ID NO: 2091835 - DNA, 25 bp, Homo sapien
gactttcgatacctggcgtgtgcat

SEQ ID NO: 2091836 - DNA, 25 bp, Homo sapien
tgtcttgttgactttcgatacctgg

SEQ ID NO: 2091837 - DNA, 25 bp, Homo sapien
ttggctcttctcactaccatcattg

SEQ ID NO: 2091838 - DNA, 25 bp, Homo sapien
ggctcttctcactaccatcattgtc

SEQ ID NO: 2091839 - DNA, 25 bp, Homo sapien
ctagttcttcggaaatttccttcat

SEQ ID NO: 2091840 - DNA, 25 bp, Homo sapien
tttgagttgttgtgctttttggtaa

SEQ ID NO: 2091841 - DNA, 25 bp, Homo sapien
tgagttgttgtgctttttggtaaac

SEQ ID NO: 2091842 - DNA, 25 bp, Homo sapien
ttgagttgttgtgctttttggtaaa

SEQ ID NO: 2091843 - DNA, 25 bp, Homo sapien
cctttacagatgcaccgctaccatg

SEQ ID NO: 2091844 - DNA, 25 bp, Homo sapien
cccgccttggtttggcaggctggta

SEQ ID NO: 2091845 - DNA, 25 bp, Homo sapien
cagatgcaccgctaccatgacatgg

SEQ ID NO: 2091846 - DNA, 25 bp, Homo sapien
gcaggctggtatttccatgcagctg

SEQ ID NO: 2091847 - DNA, 25 bp, Homo sapien
cagtgtccatgtattgccagctaga

SEQ ID NO: 2091848 - DNA, 25 bp, Homo sapien
ggctctcataagctggctgcaagtt

SEQ ID NO: 2091849 - DNA, 25 bp, Homo sapien
gctggccatggtaatggctctcata

SEQ ID NO: 2091850 - DNA, 25 bp, Homo sapien
ttaaagcactttgccgatataccag

SEQ ID NO: 2091851 - DNA, 25 bp, Homo sapien
tccgttatataacgaaggtaggcca

SEQ ID NO: 2091852 - DNA, 25 bp, Homo sapien
tataacgaaggtaggccatagagga

SEQ ID NO: 2091853 - DNA, 25 bp, Homo sapien
ccatatgctagacattcaaattccg

SEQ ID NO: 2091854 - DNA, 25 bp, Homo sapien
gacattcaaattccgttatataacg

SEQ ID NO: 2091855 - DNA, 25 bp, Homo sapien
catcacgggatcaaacacatcaaac

SEQ ID NO: 2091856 - DNA, 25 bp, Homo sapien
tcacatcacgggatcaaacacatca

SEQ ID NO: 2091857 - DNA, 25 bp, Homo sapien
acacatcaaacaagcttctatcacc

SEQ ID NO: 2091858 - DNA, 25 bp, Homo sapien
cacatcaaacaagcttctatcacct

SEQ ID NO: 2091859 - DNA, 25 bp, Homo sapien
gaagatgcctgaactccttagagga

SEQ ID NO: 2091860 - DNA, 25 bp, Homo sapien
ccttagaggatattgaggcagaatc

SEQ ID NO: 2091861 - DNA, 25 bp, Homo sapien
cactgtctatgaatcagatgaaggg

SEQ ID NO: 2091862 - DNA, 25 bp, Homo sapien
gctctggttgaagcagagccccaga

SEQ ID NO: 2091863 - DNA, 25 bp, Homo sapien
ttgactcctacaggaactggccaca

SEQ ID NO: 2091864 - DNA, 25 bp, Homo sapien
acagcaccggatgcaattcccaact

SEQ ID NO: 2091865 - DNA, 25 bp, Homo sapien
ccagacaaggctctccaatccatga

SEQ ID NO: 2091866 - DNA, 25 bp, Homo sapien
tcctgagttactttcatgctttgac

SEQ ID NO: 2091867 - DNA, 25 bp, Homo sapien
catgtgtctgctcaacaggaaggct

SEQ ID NO: 2091868 - DNA, 25 bp, Homo sapien
accaaagtctttagccagccatgtg

SEQ ID NO: 2091869 - DNA, 25 bp, Homo sapien
aagcaatcctggtctgtaacagccg

SEQ ID NO: 2091870 - DNA, 25 bp, Homo sapien
caaacctacgatcggaaaggcagta

SEQ ID NO: 2091871 - DNA, 25 bp, Homo sapien
aactcctgaatgacagttgtgtagc

SEQ ID NO: 2091872 - DNA, 25 bp, Homo sapien
gaaactcctgaatgacagttgtgta

SEQ ID NO: 2091873 - DNA, 25 bp, Homo sapien
aaactcctgaatgacagttgtgtag

SEQ ID NO: 2091874 - DNA, 25 bp, Homo sapien
agaaatatctatggaaagcgggatc

SEQ ID NO: 2091875 - DNA, 25 bp, Homo sapien
gagaaatatctatggaaagcgggat

SEQ ID NO: 2091876 - DNA, 25 bp, Homo sapien
taacagagaaatatctatggaaagc

SEQ ID NO: 2091877 - DNA, 25 bp, Homo sapien
cagagaaatatctatggaaagcggg

SEQ ID NO: 2091878 - DNA, 25 bp, Homo sapien
cttctctgtacccacacttccacat

SEQ ID NO: 2091879 - DNA, 25 bp, Homo sapien
tcaatggcagtaagtggtttataga

SEQ ID NO: 2091880 - DNA, 25 bp, Homo sapien
tcttcaatggcagtaagtggtttat

SEQ ID NO: 2091881 - DNA, 25 bp, Homo sapien
atggcagtaagtggtttatagagag

SEQ ID NO: 2091882 - DNA, 25 bp, Homo sapien
ttaatcttcaatggcagtaagtggt

SEQ ID NO: 2091883 - DNA, 25 bp, Homo sapien
aataggcagccaagattctcaagac

SEQ ID NO: 2091884 - DNA, 25 bp, Homo sapien
cccctaatgaagaaaccgagcattt

SEQ ID NO: 2091885 - DNA, 25 bp, Homo sapien
agaattctgcttcagctcgtaataa

SEQ ID NO: 2091886 - DNA, 25 bp, Homo sapien
gaaaccgagcatttacagaattctg

SEQ ID NO: 2091887 - DNA, 25 bp, Homo sapien
tgctgttacagtatgtcccaagggc

SEQ ID NO: 2091888 - DNA, 25 bp, Homo sapien
tgaactctggtagatcaactggagg

SEQ ID NO: 2091889 - DNA, 25 bp, Homo sapien
gccatgcgttcactccttgtgtaga

SEQ ID NO: 2091890 - DNA, 25 bp, Homo sapien
gctaacttgggttgtggccatgcgt

SEQ ID NO: 2091891 - DNA, 25 bp, Homo sapien
gaaagtcaagttatgaacccaggtc

SEQ ID NO: 2091892 - DNA, 25 bp, Homo sapien
tcaacggccaatctagtagaacagc

SEQ ID NO: 2091893 - DNA, 25 bp, Homo sapien
ttagaatcatccaagcccaagctgc

SEQ ID NO: 2091894 - DNA, 25 bp, Homo sapien
caggaagctgcagcatgatgacagt

SEQ ID NO: 2091895 - DNA, 25 bp, Homo sapien
tccatgagcacacatgctagactca

SEQ ID NO: 2091896 - DNA, 25 bp, Homo sapien
cagctccatgagcacacatgctaga

SEQ ID NO: 2091897 - DNA, 25 bp, Homo sapien
tgctagactcatgatacttagcgac

SEQ ID NO: 2091898 - DNA, 25 bp, Homo sapien
gatacttagcgacagaactgccttg

SEQ ID NO: 2091899 - DNA, 25 bp, Homo sapien
tatttactggatgccgccctatctg

SEQ ID NO: 2091900 - DNA, 25 bp, Homo sapien
ttccctcttctgtgtagagatccat

SEQ ID NO: 2091901 - DNA, 25 bp, Homo sapien
ggatgccgccctatctgttttccct

SEQ ID NO: 2091902 - DNA, 25 bp, Homo sapien
tttggggtatttactggatgccgcc

SEQ ID NO: 2091903 - DNA, 25 bp, Homo sapien
cacttcgggccatggttcaactctt

SEQ ID NO: 2091904 - DNA, 25 bp, Homo sapien
tgtccagagtattccccagaatgga

SEQ ID NO: 2091905 - DNA, 25 bp, Homo sapien
tttgagatgaagcttttgtgaccac

SEQ ID NO: 2091906 - DNA, 25 bp, Homo sapien
cgggccatggttcaactctttatga

SEQ ID NO: 2091907 - DNA, 25 bp, Homo sapien
tagacgataagaggacactgccagg

SEQ ID NO: 2091908 - DNA, 25 bp, Homo sapien
gatgaggccaatctagatcagctag

SEQ ID NO: 2091909 - DNA, 25 bp, Homo sapien
tgctcgcatgctcagaattccgtga

SEQ ID NO: 2091910 - DNA, 25 bp, Homo sapien
aaaggccttgcgcacttctgctcgc

SEQ ID NO: 2091911 - DNA, 25 bp, Homo sapien
gcagccatatcctgaagccacacag

SEQ ID NO: 2091912 - DNA, 25 bp, Homo sapien
ttaatgctgacatgcacgacccagt

SEQ ID NO: 2091913 - DNA, 25 bp, Homo sapien
cccagagcaaaccagaatcaggagt

SEQ ID NO: 2091914 - DNA, 25 bp, Homo sapien
gccagcactcccagagagatttggt

SEQ ID NO: 2091915 - DNA, 25 bp, Homo sapien
aatcatcgactggatctgacacctc

SEQ ID NO: 2091916 - DNA, 25 bp, Homo sapien
ctgagcaggaaccaaatcatcgact

SEQ ID NO: 2091917 - DNA, 25 bp, Homo sapien
tcttcattttccaaccccttcgcat

SEQ ID NO: 2091918 - DNA, 25 bp, Homo sapien
gaaccaaatcatcgactggatctga

SEQ ID NO: 2091919 - DNA, 25 bp, Homo sapien
ggtcggtagcactcaacataagcca

SEQ ID NO: 2091920 - DNA, 25 bp, Homo sapien
tggcagatagaaataagccattccc

SEQ ID NO: 2091921 - DNA, 25 bp, Homo sapien
gaaatgtcatgctccttaactgaat

SEQ ID NO: 2091922 - DNA, 25 bp, Homo sapien
acattaaagtccagcactggcgtct

SEQ ID NO: 2091923 - DNA, 25 bp, Homo sapien
gggccatgctcaggattgtaggcta

SEQ ID NO: 2091924 - DNA, 25 bp, Homo sapien
ctacgaccaatggtgtcacagaaag

SEQ ID NO: 2091925 - DNA, 25 bp, Homo sapien
gattgtaggctacgaccaatggtgt

SEQ ID NO: 2091926 - DNA, 25 bp, Homo sapien
gctcaggattgtaggctacgaccaa

SEQ ID NO: 2091927 - DNA, 25 bp, Homo sapien
tttcctggcctcagaaaggttggct

SEQ ID NO: 2091928 - DNA, 25 bp, Homo sapien
gaagaagagaagtgtacgccccact

SEQ ID NO: 2091929 - DNA, 25 bp, Homo sapien
tgggcacccagagaaatgctttcct

SEQ ID NO: 2091930 - DNA, 25 bp, Homo sapien
tggacatctaatgcgctcccaggaa

SEQ ID NO: 2091931 - DNA, 25 bp, Homo sapien
ccaatgcaagaaaaagtttagctct

SEQ ID NO: 2091932 - DNA, 25 bp, Homo sapien
agggcccttcttctccactcacaca

SEQ ID NO: 2091933 - DNA, 25 bp, Homo sapien
ggcccttcttctccactcacacaga

SEQ ID NO: 2091934 - DNA, 25 bp, Homo sapien
caatgcaagaaaaagtttagctctg

SEQ ID NO: 2091935 - DNA, 25 bp, Homo sapien
tggagagaggaccaacaatgcagct

SEQ ID NO: 2091936 - DNA, 25 bp, Homo sapien
ggaaggcacaagaccacatggagag

SEQ ID NO: 2091937 - DNA, 25 bp, Homo sapien
caaaaactgtgtgcagaatggccct

SEQ ID NO: 2091938 - DNA, 25 bp, Homo sapien
gctgacccacaggatcatgagaaag

SEQ ID NO: 2091939 - DNA, 25 bp, Homo sapien
ggtttcctggctcttaatggcctca

SEQ ID NO: 2091940 - DNA, 25 bp, Homo sapien
tggtttcctggctcttaatggcctc

SEQ ID NO: 2091941 - DNA, 25 bp, Homo sapien
gtttcctggctcttaatggcctcac

SEQ ID NO: 2091942 - DNA, 25 bp, Homo sapien
ctggtttcctggctcttaatggcct

SEQ ID NO: 2091943 - DNA, 25 bp, Homo sapien
cagggctaaaggcttccccaattct

SEQ ID NO: 2091944 - DNA, 25 bp, Homo sapien
tctgagaagatcatcctgagcttcc

SEQ ID NO: 2091945 - DNA, 25 bp, Homo sapien
tctggtgctgatatcagctgccctt

SEQ ID NO: 2091946 - DNA, 25 bp, Homo sapien
cttggagaataaatggtgcccattt

SEQ ID NO: 2091947 - DNA, 25 bp, Homo sapien
caccagtgctactcatgacaaatgc

SEQ ID NO: 2091948 - DNA, 25 bp, Homo sapien
ggctcaggccttgttcaattccata

SEQ ID NO: 2091949 - DNA, 25 bp, Homo sapien
taatccaaaacccattcatgctggc

SEQ ID NO: 2091950 - DNA, 25 bp, Homo sapien
gatcactcgagttcattcctgttgc

SEQ ID NO: 2091951 - DNA, 25 bp, Homo sapien
ctgcccagggcgtgaataaggaaag

SEQ ID NO: 2091952 - DNA, 25 bp, Homo sapien
aggagtttccaggtagccacatggg

SEQ ID NO: 2091953 - DNA, 25 bp, Homo sapien
ggagtttccaggtagccacatgggc

SEQ ID NO: 2091954 - DNA, 25 bp, Homo sapien
gcccagggcgtgaataaggaaagaa

SEQ ID NO: 2091955 - DNA, 25 bp, Homo sapien
tatggagtgtctaaaaggtctctgc

SEQ ID NO: 2091956 - DNA, 25 bp, Homo sapien
gagtgtctaaaaggtctctgcacag

SEQ ID NO: 2091957 - DNA, 25 bp, Homo sapien
gataatatggagtgtctaaaaggtc

SEQ ID NO: 2091958 - DNA, 25 bp, Homo sapien
gtgtatgataatatggagtgtctaa

SEQ ID NO: 2091959 - DNA, 25 bp, Homo sapien
gctttgacagtccagagctgagacc

SEQ ID NO: 2091960 - DNA, 25 bp, Homo sapien
gcagggactgcccttatttgcctgt

SEQ ID NO: 2091961 - DNA, 25 bp, Homo sapien
gagctgacttaaacctggctggccc

SEQ ID NO: 2091962 - DNA, 25 bp, Homo sapien
ggcaaacggtgcctaacgtgaacat

SEQ ID NO: 2091963 - DNA, 25 bp, Homo sapien
ggctcctactagaatggtcctgttg

SEQ ID NO: 2091964 - DNA, 25 bp, Homo sapien
aaccacgacacagttccttgttctg

SEQ ID NO: 2091965 - DNA, 25 bp, Homo sapien
gcataacatgctgttgtttaaactc

SEQ ID NO: 2091966 - DNA, 25 bp, Homo sapien
ttgttctgcataacatgctgttgtt

SEQ ID NO: 2091967 - DNA, 25 bp, Homo sapien
taactccagatgcaagccgcctgct

SEQ ID NO: 2091968 - DNA, 25 bp, Homo sapien
cctttgaagggtgtaactccagatg

SEQ ID NO: 2091969 - DNA, 25 bp, Homo sapien
agtgccagcaggaattcctaggccc

SEQ ID NO: 2091970 - DNA, 25 bp, Homo sapien
tcctccagagacctttgaagggtgt

SEQ ID NO: 2091971 - DNA, 25 bp, Homo sapien
gatagggtccataagtcgcctttcc

SEQ ID NO: 2091972 - DNA, 25 bp, Homo sapien
gcatcaaggctggataagtgcccat

SEQ ID NO: 2091973 - DNA, 25 bp, Homo sapien
tcttaatggcacctgcgacacgttt

SEQ ID NO: 2091974 - DNA, 25 bp, Homo sapien
tatcctcttgggtgcttagagcctg

SEQ ID NO: 2091975 - DNA, 25 bp, Homo sapien
tgatgaaggatatacctcttgggcc

SEQ ID NO: 2091976 - DNA, 25 bp, Homo sapien
taaccacaggattgttcagagaagc

SEQ ID NO: 2091977 - DNA, 25 bp, Homo sapien
cagaactatagtactggaggagtcc

SEQ ID NO: 2091978 - DNA, 25 bp, Homo sapien
tacccacatgtaaccttgatgaagg

SEQ ID NO: 2091979 - DNA, 25 bp, Homo sapien
tcaggttgtatcctagcaggcccag

SEQ ID NO: 2091980 - DNA, 25 bp, Homo sapien
tctgtgcagagtcaggttgtatcct

SEQ ID NO: 2091981 - DNA, 25 bp, Homo sapien
gttgtatcctagcaggcccagggag

SEQ ID NO: 2091982 - DNA, 25 bp, Homo sapien
cagagtcaggttgtatcctagcagg

SEQ ID NO: 2091983 - DNA, 25 bp, Homo sapien
tggtcccgccttttgccagatgact

SEQ ID NO: 2091984 - DNA, 25 bp, Homo sapien
tgcagtatacaaaggacagacactc

SEQ ID NO: 2091985 - DNA, 25 bp, Homo sapien
accaagacaaggagatgggtgctct

SEQ ID NO: 2091986 - DNA, 25 bp, Homo sapien
gggtgctctgactctaccactggac

SEQ ID NO: 2091987 - DNA, 25 bp, Homo sapien
ctttagggcggtggcttgttttctg

SEQ ID NO: 2091988 - DNA, 25 bp, Homo sapien
caagaaagttttttcagggctgctc

SEQ ID NO: 2091989 - DNA, 25 bp, Homo sapien
gccacagagaaggagcatccatgct

SEQ ID NO: 2091990 - DNA, 25 bp, Homo sapien
taacaagcctgtgtaaagcctacag

SEQ ID NO: 2091991 - DNA, 25 bp, Homo sapien
tgtttgctcacagaaggtggccaag

SEQ ID NO: 2091992 - DNA, 25 bp, Homo sapien
gcatggaggactggcttctagttca

SEQ ID NO: 2091993 - DNA, 25 bp, Homo sapien
ttcagcccgaaaggcactgcatgga

SEQ ID NO: 2091994 - DNA, 25 bp, Homo sapien
tagtggacaactggcttcagcccga

SEQ ID NO: 2091995 - DNA, 25 bp, Homo sapien
agaacgcatcttcgctggactgaaa

SEQ ID NO: 2091996 - DNA, 25 bp, Homo sapien
tcccagcttggcagtgtcaaaaatc

SEQ ID NO: 2091997 - DNA, 25 bp, Homo sapien
tccttgctttgtcctagcactgggc

SEQ ID NO: 2091998 - DNA, 25 bp, Homo sapien
ctcagatttccatttgccaggcaaa

SEQ ID NO: 2091999 - DNA, 25 bp, Homo sapien
atagagaacatttcagggcttatcc

SEQ ID NO: 2092000 - DNA, 25 bp, Homo sapien
aaagagtccgcccaagaaggcctgt

SEQ ID NO: 2092001 - DNA, 25 bp, Homo sapien
cagaggcttgacaacgagccacatc

SEQ ID NO: 2092002 - DNA, 25 bp, Homo sapien
gggcattggtccagaggcttgacaa

SEQ ID NO: 2092003 - DNA, 25 bp, Homo sapien
tgccaggaactgccacaaaagagtc

SEQ ID NO: 2092004 - DNA, 25 bp, Homo sapien
cactgactcacaagaccactgtagg

SEQ ID NO: 2092005 - DNA, 25 bp, Homo sapien
gggagtctactcacaaacaaactgc

SEQ ID NO: 2092006 - DNA, 25 bp, Homo sapien
agctcaggtgcaaacagacaagaag

SEQ ID NO: 2092007 - DNA, 25 bp, Homo sapien
gcacttcagagagtatagggtccat

SEQ ID NO: 2092008 - DNA, 25 bp, Homo sapien
gaaacttggcgggaagacaacatgt

SEQ ID NO: 2092009 - DNA, 25 bp, Homo sapien
gaagagtcagaccagcatgtgtgag

SEQ ID NO: 2092010 - DNA, 25 bp, Homo sapien
gtcggccccagcaagtatggagagc

SEQ ID NO: 2092011 - DNA, 25 bp, Homo sapien
gaaacaactccctgcaaacttatgt

SEQ ID NO: 2092012 - DNA, 25 bp, Homo sapien
ctttgagatgtgattatttgttctg

SEQ ID NO: 2092013 - DNA, 25 bp, Homo sapien
gctgaccatgtgaggagcttcaaag

SEQ ID NO: 2092014 - DNA, 25 bp, Homo sapien
tggtttcagattggttttggcttca

SEQ ID NO: 2092015 - DNA, 25 bp, Homo sapien
tggttgagccttgcggcctcttgtc

SEQ ID NO: 2092016 - DNA, 25 bp, Homo sapien
tataatgaaacctggtggtaataaa

SEQ ID NO: 2092017 - DNA, 25 bp, Homo sapien
tttgcgttaaggtaaaagcagtcat

SEQ ID NO: 2092018 - DNA, 25 bp, Homo sapien
catttttataatgaaacctggtggt

SEQ ID NO: 2092019 - DNA, 25 bp, Homo sapien
atttgcgttaaggtaaaagcagtca

SEQ ID NO: 2092020 - DNA, 25 bp, Homo sapien
ggcagaaaatggagtgacttttagc

SEQ ID NO: 2092021 - DNA, 25 bp, Homo sapien
aatggagtgacttttagcttatctg

SEQ ID NO: 2092022 - DNA, 25 bp, Homo sapien
tagcttatctgttgtcaccttgtta

SEQ ID NO: 2092023 - DNA, 25 bp, Homo sapien
caccttgttaatgtggtcattgttc

SEQ ID NO: 2092024 - DNA, 25 bp, Homo sapien
gcacttgttaatccatcacctttta

SEQ ID NO: 2092025 - DNA, 25 bp, Homo sapien
tctgcattgtaacttcttgacctac

SEQ ID NO: 2092026 - DNA, 25 bp, Homo sapien
tgacctaccacaactaccagcactt

SEQ ID NO: 2092027 - DNA, 25 bp, Homo sapien
caaacaacagtatgggaaattctgc

SEQ ID NO: 2092028 - DNA, 25 bp, Homo sapien
ggatccggatttcttgtacctctgt

SEQ ID NO: 2092029 - DNA, 25 bp, Homo sapien
ccttctcccgtagcgcgaccgctgg

SEQ ID NO: 2092030 - DNA, 25 bp, Homo sapien
cggaggatcccggatccggatttct

SEQ ID NO: 2092031 - DNA, 25 bp, Homo sapien
ccggaggctgcggaggatcccggat

SEQ ID NO: 2092032 - DNA, 25 bp, Homo sapien
tgaccactgggaaatcaggtgccgg

SEQ ID NO: 2092033 - DNA, 25 bp, Homo sapien
gccacgctgggatcgagagccttgt

SEQ ID NO: 2092034 - DNA, 25 bp, Homo sapien
gctgagacacctaattgaccactgg

SEQ ID NO: 2092035 - DNA, 25 bp, Homo sapien
cattgttgcgttaggactgcattcc

SEQ ID NO: 2092036 - DNA, 25 bp, Homo sapien
cccagaggtgcgagaaattagttta

SEQ ID NO: 2092037 - DNA, 25 bp, Homo sapien
ttaaagtgcaaaggaggaagcccca

SEQ ID NO: 2092038 - DNA, 25 bp, Homo sapien
aattgctctgaaggatgtgtggacc

SEQ ID NO: 2092039 - DNA, 25 bp, Homo sapien
gaggaggcggcaaacttaaaagctg

SEQ ID NO: 2092040 - DNA, 25 bp, Homo sapien
tcagacaggctggcgccaccctcct

SEQ ID NO: 2092041 - DNA, 25 bp, Homo sapien
ctcctcacccaactgtccaggggtt

SEQ ID NO: 2092042 - DNA, 25 bp, Homo sapien
tcacccaactgtccaggggtttcca

SEQ ID NO: 2092043 - DNA, 25 bp, Homo sapien
cttcagacaggctggcgccaccctc

SEQ ID NO: 2092044 - DNA, 25 bp, Homo sapien
ttcaagctggactttaccaccatca

SEQ ID NO: 2092045 - DNA, 25 bp, Homo sapien
tcacagaatctaggacccacagaag

SEQ ID NO: 2092046 - DNA, 25 bp, Homo sapien
acatttttcagcaattgctaatgca

SEQ ID NO: 2092047 - DNA, 25 bp, Homo sapien
tgcaatcactgcaaagtcctcagtc

SEQ ID NO: 2092048 - DNA, 25 bp, Homo sapien
ttccaaagccacagagccctcgccg

SEQ ID NO: 2092049 - DNA, 25 bp, Homo sapien
gagacacctcggcagcattttccaa

SEQ ID NO: 2092050 - DNA, 25 bp, Homo sapien
caaagccacagagccctcgccgtgc

SEQ ID NO: 2092051 - DNA, 25 bp, Homo sapien
ctgagacacctcggcagcattttcc

SEQ ID NO: 2092052 - DNA, 25 bp, Homo sapien
ctcctgagaactcgccttaggccaa

SEQ ID NO: 2092053 - DNA, 25 bp, Homo sapien
tgagaactcgccttaggccaagctt

SEQ ID NO: 2092054 - DNA, 25 bp, Homo sapien
cttctcctgagaactcgccttaggc

SEQ ID NO: 2092055 - DNA, 25 bp, Homo sapien
gaactcgccttaggccaagcttcat

SEQ ID NO: 2092056 - DNA, 25 bp, Homo sapien
ctgatgtggaaccactgattggtgc

SEQ ID NO: 2092057 - DNA, 25 bp, Homo sapien
aaaagtctgatgtggaaccactgat

SEQ ID NO: 2092058 - DNA, 25 bp, Homo sapien
atgcctggcccttaactgtaccttt

SEQ ID NO: 2092059 - DNA, 25 bp, Homo sapien
gaggcagaaaagtctgatgtggaac

SEQ ID NO: 2092060 - DNA, 25 bp, Homo sapien
gggtgaattcaagccaggggcctgg

SEQ ID NO: 2092061 - DNA, 25 bp, Homo sapien
cagggcctgaactatgggactaaca

SEQ ID NO: 2092062 - DNA, 25 bp, Homo sapien
cattcagggcctgaactatgggact

SEQ ID NO: 2092063 - DNA, 25 bp, Homo sapien
ctggagcagagcattcagggcctga

SEQ ID NO: 2092064 - DNA, 25 bp, Homo sapien
aattggaatagaggtgaaattgcag

SEQ ID NO: 2092065 - DNA, 25 bp, Homo sapien
tgcagcaattggaatagaggtgaaa

SEQ ID NO: 2092066 - DNA, 25 bp, Homo sapien
cagcaattggaatagaggtgaaatt

SEQ ID NO: 2092067 - DNA, 25 bp, Homo sapien
catgcagcaattggaatagaggtga

SEQ ID NO: 2092068 - DNA, 25 bp, Homo sapien
gtgatgaggagagcctttgatctcc

SEQ ID NO: 2092069 - DNA, 25 bp, Homo sapien
tcccagagatcaaacacatatgttg

SEQ ID NO: 2092070 - DNA, 25 bp, Homo sapien
aaaactcaagtctggaggtcttggc

SEQ ID NO: 2092071 - DNA, 25 bp, Homo sapien
ccacacagtgatgaggagagccttt

SEQ ID NO: 2092072 - DNA, 25 bp, Homo sapien
cactggctttctcccctgctactcc

SEQ ID NO: 2092073 - DNA, 25 bp, Homo sapien
tggctttctcccctgctactccttc

SEQ ID NO: 2092074 - DNA, 25 bp, Homo sapien
ccacactggctttctcccctgctac

SEQ ID NO: 2092075 - DNA, 25 bp, Homo sapien
atccccaccccacactggctttctc

SEQ ID NO: 2092076 - DNA, 25 bp, Homo sapien
tcctaagtaacagttcaaccacagt

SEQ ID NO: 2092077 - DNA, 25 bp, Homo sapien
aggcaggcagacagccactaatgga

SEQ ID NO: 2092078 - DNA, 25 bp, Homo sapien
cacagttgaatccattcattcgtga

SEQ ID NO: 2092079 - DNA, 25 bp, Homo sapien
cactgccattgtaaggctgccctgc

SEQ ID NO: 2092080 - DNA, 25 bp, Homo sapien
tctgtcccttgtggtcccgtcccca

SEQ ID NO: 2092081 - DNA, 25 bp, Homo sapien
gtatccttatcatgccctacaccta

SEQ ID NO: 2092082 - DNA, 25 bp, Homo sapien
ccgtccccaaggtatccttatcatg

SEQ ID NO: 2092083 - DNA, 25 bp, Homo sapien
caaggtatccttatcatgccctaca

SEQ ID NO: 2092084 - DNA, 25 bp, Homo sapien
tggcacagtcgctcatcaacactga

SEQ ID NO: 2092085 - DNA, 25 bp, Homo sapien
actgacaagcccctggctagcctgc

SEQ ID NO: 2092086 - DNA, 25 bp, Homo sapien
ccttggcacagtcgctcatcaacac

SEQ ID NO: 2092087 - DNA, 25 bp, Homo sapien
agtcgctcatcaacactgacaagcc

SEQ ID NO: 2092088 - DNA, 25 bp, Homo sapien
aagaaacagggcgttgtccatcagt

SEQ ID NO: 2092089 - DNA, 25 bp, Homo sapien
aaacagggcgttgtccatcagtggc

SEQ ID NO: 2092090 - DNA, 25 bp, Homo sapien
gtggctttaagttgtgcttttggcc

SEQ ID NO: 2092091 - DNA, 25 bp, Homo sapien
ccatcagtggctttaagttgtgctt

SEQ ID NO: 2092092 - DNA, 25 bp, Homo sapien
gaagatgttgcgctgctggtgccac

SEQ ID NO: 2092093 - DNA, 25 bp, Homo sapien
gggcgcggtagtacacactcagctt

SEQ ID NO: 2092094 - DNA, 25 bp, Homo sapien
ctctctatgtccaggttggagacgg

SEQ ID NO: 2092095 - DNA, 25 bp, Homo sapien
ctctgcgcagggcttgcaggctctg

SEQ ID NO: 2092096 - DNA, 25 bp, Homo sapien
caacctccgagttgtctcccgcaaa

SEQ ID NO: 2092097 - DNA, 25 bp, Homo sapien
gatgggacaacctccgagttgtctc

SEQ ID NO: 2092098 - DNA, 25 bp, Homo sapien
ctggatgggacaacctccgagttgt

SEQ ID NO: 2092099 - DNA, 25 bp, Homo sapien
acctccgagttgtctcccgcaaaag

SEQ ID NO: 2092100 - DNA, 25 bp, Homo sapien
ctgctctttgctctcggcgatcgct

SEQ ID NO: 2092101 - DNA, 25 bp, Homo sapien
gaggagctgcaatggaaaggggggc

SEQ ID NO: 2092102 - DNA, 25 bp, Homo sapien
gagctgcaatggaaaggggggcagc

SEQ ID NO: 2092103 - DNA, 25 bp, Homo sapien
tttgctctcggcgatcgctccggct

SEQ ID NO: 2092104 - DNA, 25 bp, Homo sapien
gccccagaaggcacatctgcggtga

SEQ ID NO: 2092105 - DNA, 25 bp, Homo sapien
gcaggtgttttgagatgggctcagc

SEQ ID NO: 2092106 - DNA, 25 bp, Homo sapien
cagaaggcacatctgcggtgatgtg

SEQ ID NO: 2092107 - DNA, 25 bp, Homo sapien
tgctgatagtatttgcaggtgtttt

SEQ ID NO: 2092108 - DNA, 25 bp, Homo sapien
ccttgaattttcagctaacaaaggg

SEQ ID NO: 2092109 - DNA, 25 bp, Homo sapien
gtaaggactcttagatgggctttaa

SEQ ID NO: 2092110 - DNA, 25 bp, Homo sapien
tgctaaattggcttgtcctgtttcc

SEQ ID NO: 2092111 - DNA, 25 bp, Homo sapien
aattaaatgtcaagaaaccaagcat

SEQ ID NO: 2092112 - DNA, 25 bp, Homo sapien
gcctagacagtgatcaattagctta

SEQ ID NO: 2092113 - DNA, 25 bp, Homo sapien
taacagccacttattgcctagacag

SEQ ID NO: 2092114 - DNA, 25 bp, Homo sapien
tcttattggtatcctttaacagcca

SEQ ID NO: 2092115 - DNA, 25 bp, Homo sapien
tattcaagcctttactatctggtta

SEQ ID NO: 2092116 - DNA, 25 bp, Homo sapien
tgtacagctaacatgctcacgtgcc

SEQ ID NO: 2092117 - DNA, 25 bp, Homo sapien
tgatgtggatcaaaattggccccag

SEQ ID NO: 2092118 - DNA, 25 bp, Homo sapien
tgcaagagaactgctacctcagggc

SEQ ID NO: 2092119 - DNA, 25 bp, Homo sapien
tataatcagcaactaccagccatgc

SEQ ID NO: 2092120 - DNA, 25 bp, Homo sapien
tattgatagtagctccaacctccag

SEQ ID NO: 2092121 - DNA, 25 bp, Homo sapien
caagctctagagtccctgcagatgg

SEQ ID NO: 2092122 - DNA, 25 bp, Homo sapien
ggttgaaactaggtactctggagct

SEQ ID NO: 2092123 - DNA, 25 bp, Homo sapien
cattaaataagcatgaggtcacacc

SEQ ID NO: 2092124 - DNA, 25 bp, Homo sapien
tccttccctctctccctccttgcct

SEQ ID NO: 2092125 - DNA, 25 bp, Homo sapien
tctctccctccttgcctccctccct

SEQ ID NO: 2092126 - DNA, 25 bp, Homo sapien
tccctctctccctccttgcctccct

SEQ ID NO: 2092127 - DNA, 25 bp, Homo sapien
ccttccctctctccctccttgcctc

SEQ ID NO: 2092128 - DNA, 25 bp, Homo sapien
taatggtgacaggacgattggctgc

SEQ ID NO: 2092129 - DNA, 25 bp, Homo sapien
gatagtgacctgactacaagctctg

SEQ ID NO: 2092130 - DNA, 25 bp, Homo sapien
gcaaagtgtcgacaggatagtgacc

SEQ ID NO: 2092131 - DNA, 25 bp, Homo sapien
gattggctgccagagaatccttttg

SEQ ID NO: 2092132 - DNA, 25 bp, Homo sapien
ggcctctgccctaacatgacatctg

SEQ ID NO: 2092133 - DNA, 25 bp, Homo sapien
tcgggagaggtagtgctttgctcca

SEQ ID NO: 2092134 - DNA, 25 bp, Homo sapien
atcttctcctctggcgtcgggagag

SEQ ID NO: 2092135 - DNA, 25 bp, Homo sapien
tgtattgggtttttcggcctctgcc

SEQ ID NO: 2092136 - DNA, 25 bp, Homo sapien
ttccctccatctcttatggtccaaa

SEQ ID NO: 2092137 - DNA, 25 bp, Homo sapien
gataacctgaattagctcagctaac

SEQ ID NO: 2092138 - DNA, 25 bp, Homo sapien
gctaacatatcctgacccatttctt

SEQ ID NO: 2092139 - DNA, 25 bp, Homo sapien
gccaggatgataacctgaattagct

SEQ ID NO: 2092140 - DNA, 25 bp, Homo sapien
cagtgatatttttgacgggaagtaa

SEQ ID NO: 2092141 - DNA, 25 bp, Homo sapien
agtgatatttttgacgggaagtaag

SEQ ID NO: 2092142 - DNA, 25 bp, Homo sapien
tgcaacccacaaataggtctcatta

SEQ ID NO: 2092143 - DNA, 25 bp, Homo sapien
gcaacccacaaataggtctcattag

SEQ ID NO: 2092144 - DNA, 25 bp, Homo sapien
ctgcaacccacaaataggtctcatt

SEQ ID NO: 2092145 - DNA, 25 bp, Homo sapien
taccgattgtgaatgaaccagagag

SEQ ID NO: 2092146 - DNA, 25 bp, Homo sapien
gtatactagcctctctgtcaaagcc

SEQ ID NO: 2092147 - DNA, 25 bp, Homo sapien
aaccagagagcagcgtatactagcc

SEQ ID NO: 2092148 - DNA, 25 bp, Homo sapien
tcctcaattttcgtctccgctgtag

SEQ ID NO: 2092149 - DNA, 25 bp, Homo sapien
gaatatcctcggtttggcactcaga

SEQ ID NO: 2092150 - DNA, 25 bp, Homo sapien
caatgactgtggtacccgtagcggt

SEQ ID NO: 2092151 - DNA, 25 bp, Homo sapien
tacctccgggagacaatggacctga

SEQ ID NO: 2092152 - DNA, 25 bp, Homo sapien
gaatatccgaagcatctaactgagg

SEQ ID NO: 2092153 - DNA, 25 bp, Homo sapien
ttgtttggagacacgaacacaccct

SEQ ID NO: 2092154 - DNA, 25 bp, Homo sapien
aaatgatggagtcatcactcggtga

SEQ ID NO: 2092155 - DNA, 25 bp, Homo sapien
taaatcctcagttgttcgaggtttg

SEQ ID NO: 2092156 - DNA, 25 bp, Homo sapien
cttgggagtcttcactaagtggtga

SEQ ID NO: 2092157 - DNA, 25 bp, Homo sapien
caaaagtctctcaatcgaggtctat

SEQ ID NO: 2092158 - DNA, 25 bp, Homo sapien
tatttgcatttgtgagaagtacctg

SEQ ID NO: 2092159 - DNA, 25 bp, Homo sapien
ggtgcatccatggtgaatcaacttc

SEQ ID NO: 2092160 - DNA, 25 bp, Homo sapien
caaaagtcagagattacactagagt

SEQ ID NO: 2092161 - DNA, 25 bp, Homo sapien
aactctgggaggaacggtcgtcatg

SEQ ID NO: 2092162 - DNA, 25 bp, Homo sapien
gacatgcggtaactagaatctgagc

SEQ ID NO: 2092163 - DNA, 25 bp, Homo sapien
tatatgagaccaggagacctctggc

SEQ ID NO: 2092164 - DNA, 25 bp, Homo sapien
tgtgggctcccgtcagaattttccg

SEQ ID NO: 2092165 - DNA, 25 bp, Homo sapien
ttggcaagagcaaacagcatgttct

SEQ ID NO: 2092166 - DNA, 25 bp, Homo sapien
gaaagatcgcctactgtgactggaa

SEQ ID NO: 2092167 - DNA, 25 bp, Homo sapien
tcaatagctctgtggcatgcttagg

SEQ ID NO: 2092168 - DNA, 25 bp, Homo sapien
taaaccattgtcgtttcggccagca

SEQ ID NO: 2092169 - DNA, 25 bp, Homo sapien
tacttatatcgaggctgctcatctt

SEQ ID NO: 2092170 - DNA, 25 bp, Homo sapien
agacacagtctgagtaattatcaga

SEQ ID NO: 2092171 - DNA, 25 bp, Homo sapien
atacttatatcgaggctgctcatct

SEQ ID NO: 2092172 - DNA, 25 bp, Homo sapien
acagtctgagtaattatcagaagca

SEQ ID NO: 2092173 - DNA, 25 bp, Homo sapien
gactcgcgcgctgagtggtttctgc

SEQ ID NO: 2092174 - DNA, 25 bp, Homo sapien
cccgcaggattgaaaatggacgtta

SEQ ID NO: 2092175 - DNA, 25 bp, Homo sapien
gttaggcctttcagagactcgcgcg

SEQ ID NO: 2092176 - DNA, 25 bp, Homo sapien
tcaggttttccttcgcaagacccgc

SEQ ID NO: 2092177 - DNA, 25 bp, Homo sapien
gaggtcgcggtaaaactgctcgcag

SEQ ID NO: 2092178 - DNA, 25 bp, Homo sapien
gttaggccactcgacgcttcggaaa

SEQ ID NO: 2092179 - DNA, 25 bp, Homo sapien
cgatgggcgacagctgtgaccgtta

SEQ ID NO: 2092180 - DNA, 25 bp, Homo sapien
ctgacccctgagtggatcagagagc

SEQ ID NO: 2092181 - DNA, 25 bp, Homo sapien
cgctttagaaaacaccgcgcggcaa

SEQ ID NO: 2092182 - DNA, 25 bp, Homo sapien
taaatattcgctccggaggcgcaag

SEQ ID NO: 2092183 - DNA, 25 bp, Homo sapien
gactctatgtctcaaccgcaaaagg

SEQ ID NO: 2092184 - DNA, 25 bp, Homo sapien
taacataagaacaagaggccgtctg

SEQ ID NO: 2092185 - DNA, 25 bp, Homo sapien
ggagcacatagacaacaagcctggg

SEQ ID NO: 2092186 - DNA, 25 bp, Homo sapien
taccagggtatgatgcaaggagctg

SEQ ID NO: 2092187 - DNA, 25 bp, Homo sapien
taatagcacatacctcacggaatcg

SEQ ID NO: 2092188 - DNA, 25 bp, Homo sapien
tagttagcgtaacaggcttgcacca

SEQ ID NO: 2092189 - DNA, 25 bp, Homo sapien
gggtccagctgattataaacaacaa

SEQ ID NO: 2092190 - DNA, 25 bp, Homo sapien
taaggtagtatcctgctggtcctgc

SEQ ID NO: 2092191 - DNA, 25 bp, Homo sapien
tctaaaaagtttacatcgcacgaca

SEQ ID NO: 2092192 - DNA, 25 bp, Homo sapien
cacgacaatttttgtgctcaaaggg

SEQ ID NO: 2092193 - DNA, 25 bp, Homo sapien
tgaacaagagaacgcaagggctaac

SEQ ID NO: 2092194 - DNA, 25 bp, Homo sapien
caccaggtttcgaacaccagttgag

SEQ ID NO: 2092195 - DNA, 25 bp, Homo sapien
tccaaaaggctcttgactaaggaga

SEQ ID NO: 2092196 - DNA, 25 bp, Homo sapien
ggagtctattctggattgggtcccc

SEQ ID NO: 2092197 - DNA, 25 bp, Homo sapien
tcactggagctgttagacatcattt

SEQ ID NO: 2092198 - DNA, 25 bp, Homo sapien
acttgctggagggtttatttgtgat

SEQ ID NO: 2092199 - DNA, 25 bp, Homo sapien
cctctgagttggacctaattatttt

SEQ ID NO: 2092200 - DNA, 25 bp, Homo sapien
ggtttatttgtgatactgcttagtc

SEQ ID NO: 2092201 - DNA, 25 bp, Homo sapien
aagactagtcctttagcaccagaaa

SEQ ID NO: 2092202 - DNA, 25 bp, Homo sapien
ctttcaagaggctgttacaaaggcc

SEQ ID NO: 2092203 - DNA, 25 bp, Homo sapien
gaaaaactgtatggcagattctcac

SEQ ID NO: 2092204 - DNA, 25 bp, Homo sapien
gagaattgcctagactacttaggta

SEQ ID NO: 2092205 - DNA, 25 bp, Homo sapien
ttaaaagggaagatgaaagacagaa

SEQ ID NO: 2092206 - DNA, 25 bp, Homo sapien
attaaaagggaagatgaaagacaga

SEQ ID NO: 2092207 - DNA, 25 bp, Homo sapien
aattaaaagggaagatgaaagacag

SEQ ID NO: 2092208 - DNA, 25 bp, Homo sapien
cgcataaagaatagtgttgtcatct

SEQ ID NO: 2092209 - DNA, 25 bp, Homo sapien
caggttttgtttcatacgcataaag

SEQ ID NO: 2092210 - DNA, 25 bp, Homo sapien
tcttcatcgtaagtaggtattcttg

SEQ ID NO: 2092211 - DNA, 25 bp, Homo sapien
tcatcttcatcgtaagtaggtattc

SEQ ID NO: 2092212 - DNA, 25 bp, Homo sapien
tgaaaaactgacaattgaggaaggg

SEQ ID NO: 2092213 - DNA, 25 bp, Homo sapien
tatatcagaagaatccaggtttaga

SEQ ID NO: 2092214 - DNA, 25 bp, Homo sapien
taaattggttaagtgctcattctct

SEQ ID NO: 2092215 - DNA, 25 bp, Homo sapien
ttgagtgtgagtttacgggaactcc

SEQ ID NO: 2092216 - DNA, 25 bp, Homo sapien
cagtattacaggatgcgtcagatac

SEQ ID NO: 2092217 - DNA, 25 bp, Homo sapien
ttacaggatgcgtcagatacaatat

SEQ ID NO: 2092218 - DNA, 25 bp, Homo sapien
caggatgcgtcagatacaatattcg

SEQ ID NO: 2092219 - DNA, 25 bp, Homo sapien
gatgcgtcagatacaatattcggtt

SEQ ID NO: 2092220 - DNA, 25 bp, Homo sapien
tacgaatcacatcaatcttcttatc

SEQ ID NO: 2092221 - DNA, 25 bp, Homo sapien
cgcatggaaacgttggatttttgaa

SEQ ID NO: 2092222 - DNA, 25 bp, Homo sapien
tccacagggatctcgcatggaaacg

SEQ ID NO: 2092223 - DNA, 25 bp, Homo sapien
ttttgaaacctttctacgaatcaca

SEQ ID NO: 2092224 - DNA, 25 bp, Homo sapien
aatgctttttatatccatatcgctt

SEQ ID NO: 2092225 - DNA, 25 bp, Homo sapien
gaatgctttttatatccatatcgct

SEQ ID NO: 2092226 - DNA, 25 bp, Homo sapien
cttccatgcaaaaggatggccttgg

SEQ ID NO: 2092227 - DNA, 25 bp, Homo sapien
tgctgtcagcccgagggttgccaag

SEQ ID NO: 2092228 - DNA, 25 bp, Homo sapien
gaattattctcacgccttgacactg

SEQ ID NO: 2092229 - DNA, 25 bp, Homo sapien
gaagaaccatacgttgcaccatcag

SEQ ID NO: 2092230 - DNA, 25 bp, Homo sapien
tctcaggggcatgtaccaaattggg

SEQ ID NO: 2092231 - DNA, 25 bp, Homo sapien
gcagagagatgatccagtataccta

SEQ ID NO: 2092232 - DNA, 25 bp, Homo sapien
catgtaccaaattgggctctccctg

SEQ ID NO: 2092233 - DNA, 25 bp, Homo sapien
gatgatccagtatacctattctcca

SEQ ID NO: 2092234 - DNA, 25 bp, Homo sapien
ggatgcctacacaagagtgtcccat

SEQ ID NO: 2092235 - DNA, 25 bp, Homo sapien
tatggcaaaagatctgtcacttggg

SEQ ID NO: 2092236 - DNA, 25 bp, Homo sapien
tcccctaaatagcaaaagctggttc

SEQ ID NO: 2092237 - DNA, 25 bp, Homo sapien
tctcgtggcttaagtgctaatgtgc

SEQ ID NO: 2092238 - DNA, 25 bp, Homo sapien
aaaaaagacaaatcacactcgacct

SEQ ID NO: 2092239 - DNA, 25 bp, Homo sapien
aatcacactcgacctgatcattatc

SEQ ID NO: 2092240 - DNA, 25 bp, Homo sapien
aaaagacaaatcacactcgacctga

SEQ ID NO: 2092241 - DNA, 25 bp, Homo sapien
gacaaatcacactcgacctgatcat

SEQ ID NO: 2092242 - DNA, 25 bp, Homo sapien
tgaagggtgcttagtgatgcttcct

SEQ ID NO: 2092243 - DNA, 25 bp, Homo sapien
gaggtcgacaagagggcataatgca

SEQ ID NO: 2092244 - DNA, 25 bp, Homo sapien
taaccgtcattttcaactggtgacc

SEQ ID NO: 2092245 - DNA, 25 bp, Homo sapien
gcttccttcctctatgtaaccgtca

SEQ ID NO: 2092246 - DNA, 25 bp, Homo sapien
tattctctgaatatgcgtctacttt

SEQ ID NO: 2092247 - DNA, 25 bp, Homo sapien
taaagcaaactagagagcagctcat

SEQ ID NO: 2092248 - DNA, 25 bp, Homo sapien
tataacttgtacagtgaagcaccgt

SEQ ID NO: 2092249 - DNA, 25 bp, Homo sapien
caccgtttggtaatgtataaactca

SEQ ID NO: 2092250 - DNA, 25 bp, Homo sapien
ccaagtgcttcagcaacacgtcact

SEQ ID NO: 2092251 - DNA, 25 bp, Homo sapien
caacacgtcactcgtgagtaggagc

SEQ ID NO: 2092252 - DNA, 25 bp, Homo sapien
gtgcttcagcaacacgtcactcgtg

SEQ ID NO: 2092253 - DNA, 25 bp, Homo sapien
gtcactcgtgagtaggagcagagcc

SEQ ID NO: 2092254 - DNA, 25 bp, Homo sapien
ttccttgtttaagtcggtcaatgta

SEQ ID NO: 2092255 - DNA, 25 bp, Homo sapien
tagtagcatagcttcacagccgttc

SEQ ID NO: 2092256 - DNA, 25 bp, Homo sapien
agcatagcttcacagccgttcccag

SEQ ID NO: 2092257 - DNA, 25 bp, Homo sapien
aagtcggtcaatgtagtagcatagc

SEQ ID NO: 2092258 - DNA, 25 bp, Homo sapien
aaaaggtacattcttgcatctggtg

SEQ ID NO: 2092259 - DNA, 25 bp, Homo sapien
gaagttggcccaatctaaatttgca

SEQ ID NO: 2092260 - DNA, 25 bp, Homo sapien
tggacagacgtatcttcatagagag

SEQ ID NO: 2092261 - DNA, 25 bp, Homo sapien
tcgagatgaaccagaatcaaagggt

SEQ ID NO: 2092262 - DNA, 25 bp, Homo sapien
ggtagaccgtctgcgtgcactggaa

SEQ ID NO: 2092263 - DNA, 25 bp, Homo sapien
cctgcaaaatgacgccaactgctgt

SEQ ID NO: 2092264 - DNA, 25 bp, Homo sapien
aaacagactcggattgcctgagccc

SEQ ID NO: 2092265 - DNA, 25 bp, Homo sapien
gggtgatcctcgttggaccaagcag

SEQ ID NO: 2092266 - DNA, 25 bp, Homo sapien
ctccaacacccaagctcaaaagaat

SEQ ID NO: 2092267 - DNA, 25 bp, Homo sapien
gacacccagaacccatagctagtga

SEQ ID NO: 2092268 - DNA, 25 bp, Homo sapien
acccagaacccatagctagtgactc

SEQ ID NO: 2092269 - DNA, 25 bp, Homo sapien
ctgcagtttcactgcgtgtggtggg

SEQ ID NO: 2092270 - DNA, 25 bp, Homo sapien
gaatcaggcagttcacttatgatga

SEQ ID NO: 2092271 - DNA, 25 bp, Homo sapien
tttagcaggtaatacacacatttga

SEQ ID NO: 2092272 - DNA, 25 bp, Homo sapien
tatctggagtggaactcaatgctga

SEQ ID NO: 2092273 - DNA, 25 bp, Homo sapien
gaaaatcctttgcactatcgtcata

SEQ ID NO: 2092274 - DNA, 25 bp, Homo sapien
ggtgcatcagtggacagctcaggtc

SEQ ID NO: 2092275 - DNA, 25 bp, Homo sapien
tgtcgaagatgctgtgcctaccata

SEQ ID NO: 2092276 - DNA, 25 bp, Homo sapien
aacattgagatggtgggcgagtccc

SEQ ID NO: 2092277 - DNA, 25 bp, Homo sapien
ccaggcggccaaggtcattgtctct

SEQ ID NO: 2092278 - DNA, 25 bp, Homo sapien
gcctctgcaggcacatgcactcggt

SEQ ID NO: 2092279 - DNA, 25 bp, Homo sapien
cacatgcactcggtgttgaaggaga

SEQ ID NO: 2092280 - DNA, 25 bp, Homo sapien
acatgcactcggtgttgaaggagag

SEQ ID NO: 2092281 - DNA, 25 bp, Homo sapien
ctgcatgcctctgcaggcacatgca

SEQ ID NO: 2092282 - DNA, 25 bp, Homo sapien
ggcctcagcgtttttcccagagact

SEQ ID NO: 2092283 - DNA, 25 bp, Homo sapien
tctgtagctcattggtgctgagatg

SEQ ID NO: 2092284 - DNA, 25 bp, Homo sapien
ctgagatgccctccaacccatgtga

SEQ ID NO: 2092285 - DNA, 25 bp, Homo sapien
ggatgcaagggcctctctgtagctc

SEQ ID NO: 2092286 - DNA, 25 bp, Homo sapien
gctgagtagtcaggcagatctggag

SEQ ID NO: 2092287 - DNA, 25 bp, Homo sapien
tggagctgtcctgttgaaggaggtg

SEQ ID NO: 2092288 - DNA, 25 bp, Homo sapien
agtagtcaggcagatctggagctgt

SEQ ID NO: 2092289 - DNA, 25 bp, Homo sapien
tctggagctgtcctgttgaaggagg

SEQ ID NO: 2092290 - DNA, 25 bp, Homo sapien
tgtagtgagaaagaccgaacgaggc

SEQ ID NO: 2092291 - DNA, 25 bp, Homo sapien
cagagtggggtgcttgctggcaggt

SEQ ID NO: 2092292 - DNA, 25 bp, Homo sapien
tagtgagaaagaccgaacgaggctt

SEQ ID NO: 2092293 - DNA, 25 bp, Homo sapien
aggagatgtagtgagaaagaccgaa

SEQ ID NO: 2092294 - DNA, 25 bp, Homo sapien
cattttgttggttgaataaagccat

SEQ ID NO: 2092295 - DNA, 25 bp, Homo sapien
ttgacattttgttggttgaataaag

SEQ ID NO: 2092296 - DNA, 25 bp, Homo sapien
ctgtcaaactttttgacattttgtt

SEQ ID NO: 2092297 - DNA, 25 bp, Homo sapien
gacattttgttggttgaataaagcc

SEQ ID NO: 2092298 - DNA, 25 bp, Homo sapien
ccaagacctgaggaaggcagttcat

SEQ ID NO: 2092299 - DNA, 25 bp, Homo sapien
agtcccctgtccaggtgagtgttcc

SEQ ID NO: 2092300 - DNA, 25 bp, Homo sapien
gttctgggtgtccaaccgaactgta

SEQ ID NO: 2092301 - DNA, 25 bp, Homo sapien
tccaaccgaactgtagggcattggc

SEQ ID NO: 2092302 - DNA, 25 bp, Homo sapien
cattggcccaatgcagggatgggca

SEQ ID NO: 2092303 - DNA, 25 bp, Homo sapien
gggtgtccaaccgaactgtagggca

SEQ ID NO: 2092304 - DNA, 25 bp, Homo sapien
taagctctcgtgcaaaggagaagga

SEQ ID NO: 2092305 - DNA, 25 bp, Homo sapien
gagaggagagctacttaagctctcg

SEQ ID NO: 2092306 - DNA, 25 bp, Homo sapien
gagctacttaagctctcgtgcaaag

SEQ ID NO: 2092307 - DNA, 25 bp, Homo sapien
tacttaagctctcgtgcaaaggaga

SEQ ID NO: 2092308 - DNA, 25 bp, Homo sapien
cacttcttccatgtttttgtgagtg

SEQ ID NO: 2092309 - DNA, 25 bp, Homo sapien
tcatcctctccgcttccacttcttc

SEQ ID NO: 2092310 - DNA, 25 bp, Homo sapien
agtgagaaaatgagcttcatcgcca

SEQ ID NO: 2092311 - DNA, 25 bp, Homo sapien
cctcatcctctccgcttccacttct

SEQ ID NO: 2092312 - DNA, 25 bp, Homo sapien
ctttctctctccctcttatccttac

SEQ ID NO: 2092313 - DNA, 25 bp, Homo sapien
ttgctttctctctccctcttatcct

SEQ ID NO: 2092314 - DNA, 25 bp, Homo sapien
tcaaaaaggctctttgctttctctc

SEQ ID NO: 2092315 - DNA, 25 bp, Homo sapien
ctcaaaaaggctctttgctttctct

SEQ ID NO: 2092316 - DNA, 25 bp, Homo sapien
atgaacttttgaatcttctctcctt

SEQ ID NO: 2092317 - DNA, 25 bp, Homo sapien
cttctctccttcgactcttgcctag

SEQ ID NO: 2092318 - DNA, 25 bp, Homo sapien
aatcttctctccttcgactcttgcc

SEQ ID NO: 2092319 - DNA, 25 bp, Homo sapien
tctccttcgactcttgcctagttac

SEQ ID NO: 2092320 - DNA, 25 bp, Homo sapien
gtggctgtagcgctgcagtagggtg

SEQ ID NO: 2092321 - DNA, 25 bp, Homo sapien
attgtggctgtagcgctgcagtagg

SEQ ID NO: 2092322 - DNA, 25 bp, Homo sapien
tgtgcatgggagtgcagtcctttga

SEQ ID NO: 2092323 - DNA, 25 bp, Homo sapien
gttgtgcatgggagtgcagtccttt

SEQ ID NO: 2092324 - DNA, 25 bp, Homo sapien
aaccattcccggggattcacagctc

SEQ ID NO: 2092325 - DNA, 25 bp, Homo sapien
aacaaccattcccggggattcacag

SEQ ID NO: 2092326 - DNA, 25 bp, Homo sapien
cctccctcccatcaaaacaaccatt

SEQ ID NO: 2092327 - DNA, 25 bp, Homo sapien
tccctcccatcaaaacaaccattcc

SEQ ID NO: 2092328 - DNA, 25 bp, Homo sapien
ctgcacgcaaccaggaacctttgct

SEQ ID NO: 2092329 - DNA, 25 bp, Homo sapien
tctgcacgcaaccaggaacctttgc

SEQ ID NO: 2092330 - DNA, 25 bp, Homo sapien
tgcacgcaaccaggaacctttgctc

SEQ ID NO: 2092331 - DNA, 25 bp, Homo sapien
gaaatcctaggttctggtcagagac

SEQ ID NO: 2092332 - DNA, 25 bp, Homo sapien
gagaccgaagacatctctacttctt

SEQ ID NO: 2092333 - DNA, 25 bp, Homo sapien
taggttctggtcagagaccgaagac

SEQ ID NO: 2092334 - DNA, 25 bp, Homo sapien
tggtcagagaccgaagacatctcta

SEQ ID NO: 2092335 - DNA, 25 bp, Homo sapien
ctctcggaagtcagtaattgtgatc

SEQ ID NO: 2092336 - DNA, 25 bp, Homo sapien
cttgagtcataatttctgcagttgt

SEQ ID NO: 2092337 - DNA, 25 bp, Homo sapien
cagttgtatcagagcctaatgtggg

SEQ ID NO: 2092338 - DNA, 25 bp, Homo sapien
tcggaagtcagtaattgtgatctct

SEQ ID NO: 2092339 - DNA, 25 bp, Homo sapien
tggagaaagcccttcatcacctgca

SEQ ID NO: 2092340 - DNA, 25 bp, Homo sapien
tgtaatgccttcaagatggactcaa

SEQ ID NO: 2092341 - DNA, 25 bp, Homo sapien
tcctctcttgaggagcaagccctga

SEQ ID NO: 2092342 - DNA, 25 bp, Homo sapien
aaatccatcccatttgcagaaaggg

SEQ ID NO: 2092343 - DNA, 25 bp, Homo sapien
cttaagtaccaagaagtacatacac

SEQ ID NO: 2092344 - DNA, 25 bp, Homo sapien
ctattttctcttaagtaccaagaag

SEQ ID NO: 2092345 - DNA, 25 bp, Homo sapien
tttctcttaagtaccaagaagtaca

SEQ ID NO: 2092346 - DNA, 25 bp, Homo sapien
ctcttaagtaccaagaagtacatac

SEQ ID NO: 2092347 - DNA, 25 bp, Homo sapien
agtccttactggctggtgcaaaaca

SEQ ID NO: 2092348 - DNA, 25 bp, Homo sapien
gagtccttggcattgtccgtgccca

SEQ ID NO: 2092349 - DNA, 25 bp, Homo sapien
ttcagtgtgtagtgaacaggagtcc

SEQ ID NO: 2092350 - DNA, 25 bp, Homo sapien
ggctggtgcaaaacattcagtgtgt

SEQ ID NO: 2092351 - DNA, 25 bp, Homo sapien
taggctgagagatacagctgctaga

SEQ ID NO: 2092352 - DNA, 25 bp, Homo sapien
taacatatacacgacctttgaaatg

SEQ ID NO: 2092353 - DNA, 25 bp, Homo sapien
ctgggtgcctgcctttgactaatag

SEQ ID NO: 2092354 - DNA, 25 bp, Homo sapien
cagctgctagaaagatatttgagag

SEQ ID NO: 2092355 - DNA, 25 bp, Homo sapien
ccactgtctggtaaaagtaggtcag

SEQ ID NO: 2092356 - DNA, 25 bp, Homo sapien
tgtatttgcctcgtctgatcccgca

SEQ ID NO: 2092357 - DNA, 25 bp, Homo sapien
tttctgaatggtagcgtatgggcgc

SEQ ID NO: 2092358 - DNA, 25 bp, Homo sapien
cactgattgcagaattagaagcatc

SEQ ID NO: 2092359 - DNA, 25 bp, Homo sapien
aattgcagatacagatcttggttga

SEQ ID NO: 2092360 - DNA, 25 bp, Homo sapien
taaagagggcaagatgtcaaattgc

SEQ ID NO: 2092361 - DNA, 25 bp, Homo sapien
ttggttgatctgtgtggagggcaca

SEQ ID NO: 2092362 - DNA, 25 bp, Homo sapien
aaggcctacagcatttaaagagggc

SEQ ID NO: 2092363 - DNA, 25 bp, Homo sapien
cattcccctggcaacgaagtcagca

SEQ ID NO: 2092364 - DNA, 25 bp, Homo sapien
gagctgaaggttgcaggacactcac

SEQ ID NO: 2092365 - DNA, 25 bp, Homo sapien
cagcattatctggaaggtcagggct

SEQ ID NO: 2092366 - DNA, 25 bp, Homo sapien
gaagcaagtctccttactgcgaagg

SEQ ID NO: 2092367 - DNA, 25 bp, Homo sapien
agggccagtgatggacacttagaaa

SEQ ID NO: 2092368 - DNA, 25 bp, Homo sapien
ctgcctctgagtattggtaatccaa

SEQ ID NO: 2092369 - DNA, 25 bp, Homo sapien
ggccagtgatggacacttagaaaaa

SEQ ID NO: 2092370 - DNA, 25 bp, Homo sapien
cctctgagtattggtaatccaagat

SEQ ID NO: 2092371 - DNA, 25 bp, Homo sapien
cacagctcacgagctcagtttctct

SEQ ID NO: 2092372 - DNA, 25 bp, Homo sapien
cagtttctctgccactcgttggagt

SEQ ID NO: 2092373 - DNA, 25 bp, Homo sapien
accaggagcactgtcgcaacacagc

SEQ ID NO: 2092374 - DNA, 25 bp, Homo sapien
tggaaatgcattacaaacaaaaccc

SEQ ID NO: 2092375 - DNA, 25 bp, Homo sapien
ctaaccctcttggcccagagctttg

SEQ ID NO: 2092376 - DNA, 25 bp, Homo sapien
atcgtaatgtgtctggagcggcatc

SEQ ID NO: 2092377 - DNA, 25 bp, Homo sapien
gagcggcatcagcaaaggacttatt

SEQ ID NO: 2092378 - DNA, 25 bp, Homo sapien
tgattgaatactcgccaagctgtca

SEQ ID NO: 2092379 - DNA, 25 bp, Homo sapien
ccaacttccaaatgagagtatgatt

SEQ ID NO: 2092380 - DNA, 25 bp, Homo sapien
aggccaggcacagcgactaaaacag

SEQ ID NO: 2092381 - DNA, 25 bp, Homo sapien
tgaatttctcttcttcgtaggtttc

SEQ ID NO: 2092382 - DNA, 25 bp, Homo sapien
catatccaacgaggacatttttctc

SEQ ID NO: 2092383 - DNA, 25 bp, Homo sapien
tttgctgaggataagtgacatcaac

SEQ ID NO: 2092384 - DNA, 25 bp, Homo sapien
cccctatgtcgtgggctgttcagaa

SEQ ID NO: 2092385 - DNA, 25 bp, Homo sapien
aatgatattccgcagagcccgggtg

SEQ ID NO: 2092386 - DNA, 25 bp, Homo sapien
cccgggtgtgcagcgatgataaata

SEQ ID NO: 2092387 - DNA, 25 bp, Homo sapien
ggctcctctttgtgacgcgcggcca

SEQ ID NO: 2092388 - DNA, 25 bp, Homo sapien
gttttgccagattgcgccgggctcc

SEQ ID NO: 2092389 - DNA, 25 bp, Homo sapien
tctgttgacgtatctggcggccctg

SEQ ID NO: 2092390 - DNA, 25 bp, Homo sapien
ccttccaggcccttcgaaagatgga

SEQ ID NO: 2092391 - DNA, 25 bp, Homo sapien
gaggccagaccggagagttccagca

SEQ ID NO: 2092392 - DNA, 25 bp, Homo sapien
acactcgccaggacacaggcgcaca

SEQ ID NO: 2092393 - DNA, 25 bp, Homo sapien
acagcgactcggtgacagcggcgac

SEQ ID NO: 2092394 - DNA, 25 bp, Homo sapien
gctcacgcacaaccagcagcggcgg

SEQ ID NO: 2092395 - DNA, 25 bp, Homo sapien
tgcaagaaggatacgtcgttccaaa

SEQ ID NO: 2092396 - DNA, 25 bp, Homo sapien
tccaaaatttgtcctctagctctca

SEQ ID NO: 2092397 - DNA, 25 bp, Homo sapien
caagaaggatacgtcgttccaaaat

SEQ ID NO: 2092398 - DNA, 25 bp, Homo sapien
ccaaaatttgtcctctagctctcat

SEQ ID NO: 2092399 - DNA, 25 bp, Homo sapien
gaccaacttgctgcctgaaaatctg

SEQ ID NO: 2092400 - DNA, 25 bp, Homo sapien
ttgaaggccatcacggaccaacttg

SEQ ID NO: 2092401 - DNA, 25 bp, Homo sapien
gattctcccatcaaattggcacagg

SEQ ID NO: 2092402 - DNA, 25 bp, Homo sapien
tagtgatgcacttccagggcgggtt

SEQ ID NO: 2092403 - DNA, 25 bp, Homo sapien
tgactaatgttcacatgatacatct

SEQ ID NO: 2092404 - DNA, 25 bp, Homo sapien
taagattgctatggagggttgacct

SEQ ID NO: 2092405 - DNA, 25 bp, Homo sapien
gcagctttgtcatttgatgtacaga

SEQ ID NO: 2092406 - DNA, 25 bp, Homo sapien
tgatgtgttaaagctatgtcttcca

SEQ ID NO: 2092407 - DNA, 25 bp, Homo sapien
gatttctagtttgaggcctttgggc

SEQ ID NO: 2092408 - DNA, 25 bp, Homo sapien
tgcaattgtttggatacttgcctgt

SEQ ID NO: 2092409 - DNA, 25 bp, Homo sapien
gattttctctttgacacatgaatga

SEQ ID NO: 2092410 - DNA, 25 bp, Homo sapien
tgttttatggtcagggcatcgtctg

SEQ ID NO: 2092411 - DNA, 25 bp, Homo sapien
gagatttatgtctgctgcaatagag

SEQ ID NO: 2092412 - DNA, 25 bp, Homo sapien
ctgagtttgtggattgagatttatg

SEQ ID NO: 2092413 - DNA, 25 bp, Homo sapien
ctgctgcaatagaggaagtcaagtt

SEQ ID NO: 2092414 - DNA, 25 bp, Homo sapien
ttctcaagcaagatgagtgctttct

SEQ ID NO: 2092415 - DNA, 25 bp, Homo sapien
ttgtgaggtacagcagtgataacag

SEQ ID NO: 2092416 - DNA, 25 bp, Homo sapien
ttccttgttttgtgaggtacagcag

SEQ ID NO: 2092417 - DNA, 25 bp, Homo sapien
ttttgtgaggtacagcagtgataac

SEQ ID NO: 2092418 - DNA, 25 bp, Homo sapien
cttgttttgtgaggtacagcagtga

SEQ ID NO: 2092419 - DNA, 25 bp, Homo sapien
atctgattgttgtcctgagcttgag

SEQ ID NO: 2092420 - DNA, 25 bp, Homo sapien
tggaactgtaatggttctttggtga

SEQ ID NO: 2092421 - DNA, 25 bp, Homo sapien
cttccttagcatatagatctttggc

SEQ ID NO: 2092422 - DNA, 25 bp, Homo sapien
gccagtcctgcatgcattctgtatc

SEQ ID NO: 2092423 - DNA, 25 bp, Homo sapien
tccactttgggttttatgcttcaga

SEQ ID NO: 2092424 - DNA, 25 bp, Homo sapien
ttctaaatcatagccatattctggc

SEQ ID NO: 2092425 - DNA, 25 bp, Homo sapien
catattctggcattaatacgatcac

SEQ ID NO: 2092426 - DNA, 25 bp, Homo sapien
ctggcattaatacgatcacatttcc

SEQ ID NO: 2092427 - DNA, 25 bp, Homo sapien
caatttagcatcgatcccttctaaa

SEQ ID NO: 2092428 - DNA, 25 bp, Homo sapien
ttatctagctcatcattgggaacag

SEQ ID NO: 2092429 - DNA, 25 bp, Homo sapien
tctttcagtactggctgcattcacc

SEQ ID NO: 2092430 - DNA, 25 bp, Homo sapien
ttctttcagtactggctgcattcac

SEQ ID NO: 2092431 - DNA, 25 bp, Homo sapien
tatagttatctagctcatcattggg

SEQ ID NO: 2092432 - DNA, 25 bp, Homo sapien
cctggtatgagccttttatagaccc

SEQ ID NO: 2092433 - DNA, 25 bp, Homo sapien
tatcgttctattgtggcttcccaag

SEQ ID NO: 2092434 - DNA, 25 bp, Homo sapien
tcctcctaaacagccttaatatcgt

SEQ ID NO: 2092435 - DNA, 25 bp, Homo sapien
tgaccctttggtggatagttgttcc

SEQ ID NO: 2092436 - DNA, 25 bp, Homo sapien
tttctgagtttgcaaaattctctcg

SEQ ID NO: 2092437 - DNA, 25 bp, Homo sapien
gagtttgcaaaattctctcgctcat

SEQ ID NO: 2092438 - DNA, 25 bp, Homo sapien
tctgagtttgcaaaattctctcgct

SEQ ID NO: 2092439 - DNA, 25 bp, Homo sapien
tctttctgagtttgcaaaattctct

SEQ ID NO: 2092440 - DNA, 25 bp, Homo sapien
gatacccaagcttttgactccctgc

SEQ ID NO: 2092441 - DNA, 25 bp, Homo sapien
aacagatttggctccgtggttcagc

SEQ ID NO: 2092442 - DNA, 25 bp, Homo sapien
taagtgtctcatccaaggcacaata

SEQ ID NO: 2092443 - DNA, 25 bp, Homo sapien
cgtatctacgcggtacaagctgcag

SEQ ID NO: 2092444 - DNA, 25 bp, Homo sapien
cctatgagggcttgcaatgtgatca

SEQ ID NO: 2092445 - DNA, 25 bp, Homo sapien
tgaccatcagcattgaagactccct

SEQ ID NO: 2092446 - DNA, 25 bp, Homo sapien
agactccctgtgaatacctatgagg

SEQ ID NO: 2092447 - DNA, 25 bp, Homo sapien
cttctctgggtataaggcaccttga

SEQ ID NO: 2092448 - DNA, 25 bp, Homo sapien
agatggccagagtcacggaaacagg

SEQ ID NO: 2092449 - DNA, 25 bp, Homo sapien
ccagagtcacggaaacaggggtgcg

SEQ ID NO: 2092450 - DNA, 25 bp, Homo sapien
gccagagtcacggaaacaggggtgc

SEQ ID NO: 2092451 - DNA, 25 bp, Homo sapien
ctgagatggccagagtcacggaaac

SEQ ID NO: 2092452 - DNA, 25 bp, Homo sapien
cataaataaacttgctgctaggatg

SEQ ID NO: 2092453 - DNA, 25 bp, Homo sapien
agagctgagatgaggtgcagatgag

SEQ ID NO: 2092454 - DNA, 25 bp, Homo sapien
tgtcctctcagaatccttccactgg

SEQ ID NO: 2092455 - DNA, 25 bp, Homo sapien
ggatttaatagtcccatctctgtcc

SEQ ID NO: 2092456 - DNA, 25 bp, Homo sapien
ttttgttgcaccaagtgattactga

SEQ ID NO: 2092457 - DNA, 25 bp, Homo sapien
gttgcaccaagtgattactgagttt

SEQ ID NO: 2092458 - DNA, 25 bp, Homo sapien
tttactattttgttgcaccaagtga

SEQ ID NO: 2092459 - DNA, 25 bp, Homo sapien
ctattttgttgcaccaagtgattac

SEQ ID NO: 2092460 - DNA, 25 bp, Homo sapien
aacccctttgcgtcaaaagccatct

SEQ ID NO: 2092461 - DNA, 25 bp, Homo sapien
cccctttgcgtcaaaagccatctag

SEQ ID NO: 2092462 - DNA, 25 bp, Homo sapien
cctttgcgtcaaaagccatctagaa

SEQ ID NO: 2092463 - DNA, 25 bp, Homo sapien
ctttcgaggacactgaaagatagaa

SEQ ID NO: 2092464 - DNA, 25 bp, Homo sapien
tttatagtagatgctgtaaaccagc

SEQ ID NO: 2092465 - DNA, 25 bp, Homo sapien
taacttgtcttgatccaattcatgg

SEQ ID NO: 2092466 - DNA, 25 bp, Homo sapien
gatgctgtaaaccagccagccgtga

SEQ ID NO: 2092467 - DNA, 25 bp, Homo sapien
aaccagccagccgtgatatttttta

SEQ ID NO: 2092468 - DNA, 25 bp, Homo sapien
tcctcttcactataagttaactttg

SEQ ID NO: 2092469 - DNA, 25 bp, Homo sapien
tcactgttgtttaacttgtttgatg

SEQ ID NO: 2092470 - DNA, 25 bp, Homo sapien
cactataagttaactttggccgtgt

SEQ ID NO: 2092471 - DNA, 25 bp, Homo sapien
tcttcactataagttaactttggcc

SEQ ID NO: 2092472 - DNA, 25 bp, Homo sapien
gaattttggtgagtctctctgtagc

SEQ ID NO: 2092473 - DNA, 25 bp, Homo sapien
tggaattttggtgagtctctctgta

SEQ ID NO: 2092474 - DNA, 25 bp, Homo sapien
ggaattttggtgagtctctctgtag

SEQ ID NO: 2092475 - DNA, 25 bp, Homo sapien
ccctgaggtctgatggctagccctt

SEQ ID NO: 2092476 - DNA, 25 bp, Homo sapien
ggtctgatggctagcccttccagaa

SEQ ID NO: 2092477 - DNA, 25 bp, Homo sapien
tggccagtggcatattctagcaata

SEQ ID NO: 2092478 - DNA, 25 bp, Homo sapien
gaaatctggccaactcaggcgtagg

SEQ ID NO: 2092479 - DNA, 25 bp, Homo sapien
caaagtggccagcaggaaaaggatc

SEQ ID NO: 2092480 - DNA, 25 bp, Homo sapien
ctcaaagtggccagcaggaaaagga

SEQ ID NO: 2092481 - DNA, 25 bp, Homo sapien
ggccagcaggaaaaggatcctgcat

SEQ ID NO: 2092482 - DNA, 25 bp, Homo sapien
agtggccagcaggaaaaggatcctg

SEQ ID NO: 2092483 - DNA, 25 bp, Homo sapien
ctgcatcaaaggtcctacaccctta

SEQ ID NO: 2092484 - DNA, 25 bp, Homo sapien
tgcatcaaaggtcctacacccttaa

SEQ ID NO: 2092485 - DNA, 25 bp, Homo sapien
catcaaaggtcctacacccttaaag

SEQ ID NO: 2092486 - DNA, 25 bp, Homo sapien
gcatcaaaggtcctacacccttaaa

SEQ ID NO: 2092487 - DNA, 25 bp, Homo sapien
ggcaggaagaaatactgcctgcatc

SEQ ID NO: 2092488 - DNA, 25 bp, Homo sapien
agaaatctgcttgccatcactgggt

SEQ ID NO: 2092489 - DNA, 25 bp, Homo sapien
gaaccccagtctagcgtgagcaggg

SEQ ID NO: 2092490 - DNA, 25 bp, Homo sapien
ttcaggaaacccagtgtcggagaca

SEQ ID NO: 2092491 - DNA, 25 bp, Homo sapien
cagttgctggtactgtgcagttgtc

SEQ ID NO: 2092492 - DNA, 25 bp, Homo sapien
tgtaagtaaatgaagtggcgttgcc

SEQ ID NO: 2092493 - DNA, 25 bp, Homo sapien
gtcaatactgagaaaggagtcatgg

SEQ ID NO: 2092494 - DNA, 25 bp, Homo sapien
cagttgtcccttcgtgggccttgtt

SEQ ID NO: 2092495 - DNA, 25 bp, Homo sapien
ccttattgctatggccacagcccaa

SEQ ID NO: 2092496 - DNA, 25 bp, Homo sapien
caagaaaacccatttgttgggcctg

SEQ ID NO: 2092497 - DNA, 25 bp, Homo sapien
tgtcaagaaaacccatttgttgggc

SEQ ID NO: 2092498 - DNA, 25 bp, Homo sapien
tggtggccgcgggaacagtgtggga

SEQ ID NO: 2092499 - DNA, 25 bp, Homo sapien
tgctgtcccggcaatgaacagcggc

SEQ ID NO: 2092500 - DNA, 25 bp, Homo sapien
gctgctgtcccggcaatgaacagcg

SEQ ID NO: 2092501 - DNA, 25 bp, Homo sapien
tgtcccggcaatgaacagcggcccg

SEQ ID NO: 2092502 - DNA, 25 bp, Homo sapien
ggcattagcaattccaaagagtcgt

SEQ ID NO: 2092503 - DNA, 25 bp, Homo sapien
caattttgcctgtggcagactctga

SEQ ID NO: 2092504 - DNA, 25 bp, Homo sapien
tctgaactccgtctctctgtgaagt

SEQ ID NO: 2092505 - DNA, 25 bp, Homo sapien
ctgtgaagtgaaaagtttggcatta

SEQ ID NO: 2092506 - DNA, 25 bp, Homo sapien
gctggccccacatggaggctgagga

SEQ ID NO: 2092507 - DNA, 25 bp, Homo sapien
tccagggctggccccacatggaggc

SEQ ID NO: 2092508 - DNA, 25 bp, Homo sapien
cagggctggccccacatggaggctg

SEQ ID NO: 2092509 - DNA, 25 bp, Homo sapien
tggaggctgaggaggtagccttctt

SEQ ID NO: 2092510 - DNA, 25 bp, Homo sapien
ctggcagtatgatttgccccacgtg

SEQ ID NO: 2092511 - DNA, 25 bp, Homo sapien
tggcagtatgatttgccccacgtgg

SEQ ID NO: 2092512 - DNA, 25 bp, Homo sapien
agaagggggtccctggcagtatgat

SEQ ID NO: 2092513 - DNA, 25 bp, Homo sapien
aagatcagcttgggcggagaagggg

SEQ ID NO: 2092514 - DNA, 25 bp, Homo sapien
gggaaccctgcagtatagagttttg

SEQ ID NO: 2092515 - DNA, 25 bp, Homo sapien
tatagagttttgtcaagtgcatgct

SEQ ID NO: 2092516 - DNA, 25 bp, Homo sapien
tgcagaaagggaaccctgcagtata

SEQ ID NO: 2092517 - DNA, 25 bp, Homo sapien
ccctgcagtatagagttttgtcaag

SEQ ID NO: 2092518 - DNA, 25 bp, Homo sapien
ttgctgcttgctaggtgactctcga

SEQ ID NO: 2092519 - DNA, 25 bp, Homo sapien
aaacttgctgcttgctaggtgactc

SEQ ID NO: 2092520 - DNA, 25 bp, Homo sapien
gctgcttgctaggtgactctcgacc

SEQ ID NO: 2092521 - DNA, 25 bp, Homo sapien
ttaaacttgctgcttgctaggtgac

SEQ ID NO: 2092522 - DNA, 25 bp, Homo sapien
ttcgcattttgcctccaacgatcct

SEQ ID NO: 2092523 - DNA, 25 bp, Homo sapien
ctccaacgatcctcaaggccatgtg

SEQ ID NO: 2092524 - DNA, 25 bp, Homo sapien
ttcctgtgggcttcaagatcttaat

SEQ ID NO: 2092525 - DNA, 25 bp, Homo sapien
aaattggaatatcctctcttcgcat

SEQ ID NO: 2092526 - DNA, 25 bp, Homo sapien
cttcttcactgagtacgcagctgcc

SEQ ID NO: 2092527 - DNA, 25 bp, Homo sapien
gtattgaaatgttgtacttggaaca

SEQ ID NO: 2092528 - DNA, 25 bp, Homo sapien
caattaagccgggttgaaagtgaag

SEQ ID NO: 2092529 - DNA, 25 bp, Homo sapien
caaaatttactccttgacaagataa

SEQ ID NO: 2092530 - DNA, 25 bp, Homo sapien
ttggaacaaaatttactccttgaca

SEQ ID NO: 2092531 - DNA, 25 bp, Homo sapien
tggctgacagcttgcattagtgaat

SEQ ID NO: 2092532 - DNA, 25 bp, Homo sapien
acatgctgaaaacgctggagtcctc

SEQ ID NO: 2092533 - DNA, 25 bp, Homo sapien
gagtccaccacgtattggctgacag

SEQ ID NO: 2092534 - DNA, 25 bp, Homo sapien
tgcattagtgaatatcctcttctca

SEQ ID NO: 2092535 - DNA, 25 bp, Homo sapien
tgggacacagcaccagaaaattcaa

SEQ ID NO: 2092536 - DNA, 25 bp, Homo sapien
catgggacacagcaccagaaaattc

SEQ ID NO: 2092537 - DNA, 25 bp, Homo sapien
ggacacagcaccagaaaattcaaga

SEQ ID NO: 2092538 - DNA, 25 bp, Homo sapien
ccagcatgggacacagcaccagaaa

SEQ ID NO: 2092539 - DNA, 25 bp, Homo sapien
aaagcctgctattttaaaggtcata

SEQ ID NO: 2092540 - DNA, 25 bp, Homo sapien
tgatgggtctataattagtaagtgc

SEQ ID NO: 2092541 - DNA, 25 bp, Homo sapien
ttcagctgacttttgaaagcctgct

SEQ ID NO: 2092542 - DNA, 25 bp, Homo sapien
tgtcctgtggcacttgcaccttcag

SEQ ID NO: 2092543 - DNA, 25 bp, Homo sapien
agaggctgcatggtggacagatatc

SEQ ID NO: 2092544 - DNA, 25 bp, Homo sapien
gctgtagaacaatggaataggggca

SEQ ID NO: 2092545 - DNA, 25 bp, Homo sapien
tttggctgtagaacaatggaatagg

SEQ ID NO: 2092546 - DNA, 25 bp, Homo sapien
ttggctgtagaacaatggaataggg

SEQ ID NO: 2092547 - DNA, 25 bp, Homo sapien
gcggtctggctgttgtaattggccc

SEQ ID NO: 2092548 - DNA, 25 bp, Homo sapien
taattggccccgttttgctgtgtgt

SEQ ID NO: 2092549 - DNA, 25 bp, Homo sapien
tcaaagtggtcccggcgtgaaaagc

SEQ ID NO: 2092550 - DNA, 25 bp, Homo sapien
taaaacaaacggagcggtctggctg

SEQ ID NO: 2092551 - DNA, 25 bp, Homo sapien
agtggctgggaaacaatctcggcgc

SEQ ID NO: 2092552 - DNA, 25 bp, Homo sapien
tgggtattggccatctgccgccgat

SEQ ID NO: 2092553 - DNA, 25 bp, Homo sapien
atggcccagggttcaggtcgtctca

SEQ ID NO: 2092554 - DNA, 25 bp, Homo sapien
gcaggattggctagtcattgaccgg

SEQ ID NO: 2092555 - DNA, 25 bp, Homo sapien
gtggtccagcttgcacctgggaaca

SEQ ID NO: 2092556 - DNA, 25 bp, Homo sapien
ctctgtagctgccgtggtccagctt

SEQ ID NO: 2092557 - DNA, 25 bp, Homo sapien
ccgtggtccagcttgcacctgggaa

SEQ ID NO: 2092558 - DNA, 25 bp, Homo sapien
tgctctgtagctgccgtggtccagc

SEQ ID NO: 2092559 - DNA, 25 bp, Homo sapien
gaaggcccgtgtcccccagtataga

SEQ ID NO: 2092560 - DNA, 25 bp, Homo sapien
gcccgtgtcccccagtatagatgtt

SEQ ID NO: 2092561 - DNA, 25 bp, Homo sapien
cagaaggcccgtgtcccccagtata

SEQ ID NO: 2092562 - DNA, 25 bp, Homo sapien
tgtcccccagtatagatgtttccat

SEQ ID NO: 2092563 - DNA, 25 bp, Homo sapien
ccccgggatgtcccaagaggctcac

SEQ ID NO: 2092564 - DNA, 25 bp, Homo sapien
tgcagtgcgctgtgtccccagcttt

SEQ ID NO: 2092565 - DNA, 25 bp, Homo sapien
aggactgagatggctaggccagcgc

SEQ ID NO: 2092566 - DNA, 25 bp, Homo sapien
gagctagcttccttcagaggactga

SEQ ID NO: 2092567 - DNA, 25 bp, Homo sapien
tctcggcatgaaaacgtcaaggtac

SEQ ID NO: 2092568 - DNA, 25 bp, Homo sapien
taatgaccgcgagtgaagcacaact

SEQ ID NO: 2092569 - DNA, 25 bp, Homo sapien
tgactacagcgttcaaaaggcgtct

SEQ ID NO: 2092570 - DNA, 25 bp, Homo sapien
tgtagcctggccctctgtgatctgg

SEQ ID NO: 2092571 - DNA, 25 bp, Homo sapien
cttgggtcggctttgaatgggatcc

SEQ ID NO: 2092572 - DNA, 25 bp, Homo sapien
aaggaccttgggtcggctttgaatg

SEQ ID NO: 2092573 - DNA, 25 bp, Homo sapien
accttgggtcggctttgaatgggat

SEQ ID NO: 2092574 - DNA, 25 bp, Homo sapien
tgggtcggctttgaatgggatccca

SEQ ID NO: 2092575 - DNA, 25 bp, Homo sapien
tccaaattcttttgagcttgggttc

SEQ ID NO: 2092576 - DNA, 25 bp, Homo sapien
agcttgggttctggacagctgagca

SEQ ID NO: 2092577 - DNA, 25 bp, Homo sapien
cttgggttctggacagctgagcagg

SEQ ID NO: 2092578 - DNA, 25 bp, Homo sapien
caaattcttttgagcttgggttctg

SEQ ID NO: 2092579 - DNA, 25 bp, Homo sapien
gcctgcggagggcccatgggcgccg

SEQ ID NO: 2092580 - DNA, 25 bp, Homo sapien
agggcccatgggcgccgcctgttct

SEQ ID NO: 2092581 - DNA, 25 bp, Homo sapien
tgcggagggcccatgggcgccgcct

SEQ ID NO: 2092582 - DNA, 25 bp, Homo sapien
cgctggcttggccctgtccacggag

SEQ ID NO: 2092583 - DNA, 25 bp, Homo sapien
cagaaattccagtgcacgcagacgg

SEQ ID NO: 2092584 - DNA, 25 bp, Homo sapien
gtcagaaattccagtgcacgcagac

SEQ ID NO: 2092585 - DNA, 25 bp, Homo sapien
gaaattccagtgcacgcagacggtc

SEQ ID NO: 2092586 - DNA, 25 bp, Homo sapien
aattccagtgcacgcagacggtcta

SEQ ID NO: 2092587 - DNA, 25 bp, Homo sapien
acacgtgcgcgggtcaccaaaccca

SEQ ID NO: 2092588 - DNA, 25 bp, Homo sapien
cgtgcgcgggtcaccaaacccacac

SEQ ID NO: 2092589 - DNA, 25 bp, Homo sapien
caacacgtgcgcgggtcaccaaacc

SEQ ID NO: 2092590 - DNA, 25 bp, Homo sapien
acgtgcgcgggtcaccaaacccaca

SEQ ID NO: 2092591 - DNA, 25 bp, Homo sapien
gcagaggcttctcaagccatccacg

SEQ ID NO: 2092592 - DNA, 25 bp, Homo sapien
gtgcagaggcttctcaagccatcca

SEQ ID NO: 2092593 - DNA, 25 bp, Homo sapien
agaggcttctcaagccatccacggg

SEQ ID NO: 2092594 - DNA, 25 bp, Homo sapien
ttctcaagccatccacggggggtgc

SEQ ID NO: 2092595 - DNA, 25 bp, Homo sapien
agagggagttattggaggacggtgt

SEQ ID NO: 2092596 - DNA, 25 bp, Homo sapien
gagggagttattggaggacggtgtg

SEQ ID NO: 2092597 - DNA, 25 bp, Homo sapien
agaaagagggagttattggaggacg

SEQ ID NO: 2092598 - DNA, 25 bp, Homo sapien
aagagggagttattggaggacggtg

SEQ ID NO: 2092599 - DNA, 25 bp, Homo sapien
catacagagccattccacaagtgtc

SEQ ID NO: 2092600 - DNA, 25 bp, Homo sapien
tttacatacagccagtcaagcactg

SEQ ID NO: 2092601 - DNA, 25 bp, Homo sapien
gccatttggccttcggattattttc

SEQ ID NO: 2092602 - DNA, 25 bp, Homo sapien
ttccacaagtgtcagtgaatgactg

SEQ ID NO: 2092603 - DNA, 25 bp, Homo sapien
tccaggagccatataagcttctgat

SEQ ID NO: 2092604 - DNA, 25 bp, Homo sapien
ccttccaggagccatataagcttct

SEQ ID NO: 2092605 - DNA, 25 bp, Homo sapien
cttccaggagccatataagcttctg

SEQ ID NO: 2092606 - DNA, 25 bp, Homo sapien
caggagccatataagcttctgattc

SEQ ID NO: 2092607 - DNA, 25 bp, Homo sapien
tacgcttggacatttaactaggcat

SEQ ID NO: 2092608 - DNA, 25 bp, Homo sapien
gccacagaggtgacgatgaactatg

SEQ ID NO: 2092609 - DNA, 25 bp, Homo sapien
tatgtccatcgtttgctatcaccag

SEQ ID NO: 2092610 - DNA, 25 bp, Homo sapien
tctatatgaagatacctgtgtccaa

SEQ ID NO: 2092611 - DNA, 25 bp, Homo sapien
cactggtatctaccccttgtggttt

SEQ ID NO: 2092612 - DNA, 25 bp, Homo sapien
tctagagttttcctcagcctttgag

SEQ ID NO: 2092613 - DNA, 25 bp, Homo sapien
tagtgttcagctggcttctgacttc

SEQ ID NO: 2092614 - DNA, 25 bp, Homo sapien
cagatgcctgttgtgataagtacca

SEQ ID NO: 2092615 - DNA, 25 bp, Homo sapien
aatcagttgcagcaaggcactcagg

SEQ ID NO: 2092616 - DNA, 25 bp, Homo sapien
ggttgctaggaaagtaatcagttgc

SEQ ID NO: 2092617 - DNA, 25 bp, Homo sapien
tgcacagtagctaggcattgggcct

SEQ ID NO: 2092618 - DNA, 25 bp, Homo sapien
tatactccctagttgcaggctgcag

SEQ ID NO: 2092619 - DNA, 25 bp, Homo sapien
gaattcttgaggtcactgcagcatc

SEQ ID NO: 2092620 - DNA, 25 bp, Homo sapien
ccccaggaactagtggtaagataat

SEQ ID NO: 2092621 - DNA, 25 bp, Homo sapien
cagaacaaagcgctgtccaggctag

SEQ ID NO: 2092622 - DNA, 25 bp, Homo sapien
gtaccaggtggtacatgccccaact

SEQ ID NO: 2092623 - DNA, 25 bp, Homo sapien
tgctcaatggcctctttggtcagca

SEQ ID NO: 2092624 - DNA, 25 bp, Homo sapien
gcgatttcccctatgtctggtttgt

SEQ ID NO: 2092625 - DNA, 25 bp, Homo sapien
cttggccttattgaagctggcgatt

SEQ ID NO: 2092626 - DNA, 25 bp, Homo sapien
ttggtcagcagggtgttctcctgca

SEQ ID NO: 2092627 - DNA, 25 bp, Homo sapien
acaggggtagggaatcctccaggct

SEQ ID NO: 2092628 - DNA, 25 bp, Homo sapien
atgacaggggtagggaatcctccag

SEQ ID NO: 2092629 - DNA, 25 bp, Homo sapien
tctcgaagatgacaggggtagggaa

SEQ ID NO: 2092630 - DNA, 25 bp, Homo sapien
aagatgacaggggtagggaatcctc

SEQ ID NO: 2092631 - DNA, 25 bp, Homo sapien
taatggtaactcatacggagcctga

SEQ ID NO: 2092632 - DNA, 25 bp, Homo sapien
gacaatcacttaaggccgggaggtc

SEQ ID NO: 2092633 - DNA, 25 bp, Homo sapien
aaaggccaatcaacttctgggaaag

SEQ ID NO: 2092634 - DNA, 25 bp, Homo sapien
tccttggcccattgacttagacttg

SEQ ID NO: 2092635 - DNA, 25 bp, Homo sapien
tcttctctggaaagttaatggatcg

SEQ ID NO: 2092636 - DNA, 25 bp, Homo sapien
tctggaaagttaatggatcgattag

SEQ ID NO: 2092637 - DNA, 25 bp, Homo sapien
tctctggaaagttaatggatcgatt

SEQ ID NO: 2092638 - DNA, 25 bp, Homo sapien
gaaagttaatggatcgattagtggg

SEQ ID NO: 2092639 - DNA, 25 bp, Homo sapien
gtttgggcgcccggccgatagcttc

SEQ ID NO: 2092640 - DNA, 25 bp, Homo sapien
tccacccgtcccctcgcctgcagcg

SEQ ID NO: 2092641 - DNA, 25 bp, Homo sapien
cgatagcttccacccgtcccctcgc

SEQ ID NO: 2092642 - DNA, 25 bp, Homo sapien
gcccggccgatagcttccacccgtc

SEQ ID NO: 2092643 - DNA, 25 bp, Homo sapien
gagtcagtaagcaagtgatttcccc

SEQ ID NO: 2092644 - DNA, 25 bp, Homo sapien
tgagtcagtaagcaagtgatttccc

SEQ ID NO: 2092645 - DNA, 25 bp, Homo sapien
ctgagtcagtaagcaagtgatttcc

SEQ ID NO: 2092646 - DNA, 25 bp, Homo sapien
gacagatgtttttctccggcgttct

SEQ ID NO: 2092647 - DNA, 25 bp, Homo sapien
tgtgcgacctccacttgcgctatgg

SEQ ID NO: 2092648 - DNA, 25 bp, Homo sapien
tacctaacctgagaacgagggacag

SEQ ID NO: 2092649 - DNA, 25 bp, Homo sapien
tttgtgctgagagattcactggtcg

SEQ ID NO: 2092650 - DNA, 25 bp, Homo sapien
tgtttacaccgaccaaaactcagag

SEQ ID NO: 2092651 - DNA, 25 bp, Homo sapien
ccactaatgacataatgatggcacc

SEQ ID NO: 2092652 - DNA, 25 bp, Homo sapien
tgcaaaaatagaagtggattctacc

SEQ ID NO: 2092653 - DNA, 25 bp, Homo sapien
tcagagggtagagccacagaaacag

SEQ ID NO: 2092654 - DNA, 25 bp, Homo sapien
cagcggcagagacaactaatcgaaa

SEQ ID NO: 2092655 - DNA, 25 bp, Homo sapien
ccccagcggcagagacaactaatcg

SEQ ID NO: 2092656 - DNA, 25 bp, Homo sapien
agagacaactaatcgaaacctccgg

SEQ ID NO: 2092657 - DNA, 25 bp, Homo sapien
cggcagagacaactaatcgaaacct

SEQ ID NO: 2092658 - DNA, 25 bp, Homo sapien
ttgctttatggtggtggtctaaaac

SEQ ID NO: 2092659 - DNA, 25 bp, Homo sapien
gtatgcctgtattgtacaatgtaga

SEQ ID NO: 2092660 - DNA, 25 bp, Homo sapien
cctgtattgtacaatgtagatacac

SEQ ID NO: 2092661 - DNA, 25 bp, Homo sapien
aagtatgcctgtattgtacaatgta

SEQ ID NO: 2092662 - DNA, 25 bp, Homo sapien
ctccaactcccccaccccactcact

SEQ ID NO: 2092663 - DNA, 25 bp, Homo sapien
ctcaacttcctgtagggtcttcctc

SEQ ID NO: 2092664 - DNA, 25 bp, Homo sapien
ttcctgtagggtcttcctcctccaa

SEQ ID NO: 2092665 - DNA, 25 bp, Homo sapien
tcctccaactcccccaccccactca

SEQ ID NO: 2092666 - DNA, 25 bp, Homo sapien
gacgaccatgtgctcgcctgttgga

SEQ ID NO: 2092667 - DNA, 25 bp, Homo sapien
ccatgtgctcgcctgttggagagta

SEQ ID NO: 2092668 - DNA, 25 bp, Homo sapien
agggagagaggagacgaccatgtgc

SEQ ID NO: 2092669 - DNA, 25 bp, Homo sapien
aggagacgaccatgtgctcgcctgt

SEQ ID NO: 2092670 - DNA, 25 bp, Homo sapien
gactgttgacttgtcattagcaaat

SEQ ID NO: 2092671 - DNA, 25 bp, Homo sapien
actaaactgactgttgacttgtcat

SEQ ID NO: 2092672 - DNA, 25 bp, Homo sapien
ctacaacgaaattacaactaaactg

SEQ ID NO: 2092673 - DNA, 25 bp, Homo sapien
tacaacgaaattacaactaaactga

SEQ ID NO: 2092674 - DNA, 25 bp, Homo sapien
tctagtcttttgagaatactgacac

SEQ ID NO: 2092675 - DNA, 25 bp, Homo sapien
gatgatgaacaagcagtccatgcac

SEQ ID NO: 2092676 - DNA, 25 bp, Homo sapien
gagcaagttatgtagtcccttcaag

SEQ ID NO: 2092677 - DNA, 25 bp, Homo sapien
gaagaactgataccacctacttata

SEQ ID NO: 2092678 - DNA, 25 bp, Homo sapien
aaaataatattacatgactgacaac

SEQ ID NO: 2092679 - DNA, 25 bp, Homo sapien
actatgaggtcttagttgttattta

SEQ ID NO: 2092680 - DNA, 25 bp, Homo sapien
gttatttattatgggcaacatggcg

SEQ ID NO: 2092681 - DNA, 25 bp, Homo sapien
gaatagagatggagcaaatggaaaa

SEQ ID NO: 2092682 - DNA, 25 bp, Homo sapien
gcagtctcttgaagctttggtacgt

SEQ ID NO: 2092683 - DNA, 25 bp, Homo sapien
tcttgaagctttggtacgtttccat

SEQ ID NO: 2092684 - DNA, 25 bp, Homo sapien
gtttccatttgtaagctgaagattc

SEQ ID NO: 2092685 - DNA, 25 bp, Homo sapien
gctcagcagtctcttgaagctttgg

SEQ ID NO: 2092686 - DNA, 25 bp, Homo sapien
taggtgatcacagctgcggtgagcc

SEQ ID NO: 2092687 - DNA, 25 bp, Homo sapien
gagccgtgattgtgcactgtgcact

SEQ ID NO: 2092688 - DNA, 25 bp, Homo sapien
gggcactatttctatgtcttgagtg

SEQ ID NO: 2092689 - DNA, 25 bp, Homo sapien
agggaaaggctagacaagacaacac

SEQ ID NO: 2092690 - DNA, 25 bp, Homo sapien
taaatacactcccaaaataatccat

SEQ ID NO: 2092691 - DNA, 25 bp, Homo sapien
tttccacaactaaagttgatcaatc

SEQ ID NO: 2092692 - DNA, 25 bp, Homo sapien
tcaaactcaagaggctaaacaaaag

SEQ ID NO: 2092693 - DNA, 25 bp, Homo sapien
acatgaactaagcatcaaactcaag

SEQ ID NO: 2092694 - DNA, 25 bp, Homo sapien
taatcatgaagtattaaatgactcc

SEQ ID NO: 2092695 - DNA, 25 bp, Homo sapien
tcacatatttgttctaatcatgaag

SEQ ID NO: 2092696 - DNA, 25 bp, Homo sapien
tggttggtgggaactttcacatatt

SEQ ID NO: 2092697 - DNA, 25 bp, Homo sapien
gaaggaagaaattctcactggttgg

SEQ ID NO: 2092698 - DNA, 25 bp, Homo sapien
aaagctgtgcagtaagatccaaaac

SEQ ID NO: 2092699 - DNA, 25 bp, Homo sapien
tgcaagccacaaaacatggcaccaa

SEQ ID NO: 2092700 - DNA, 25 bp, Homo sapien
caagccacaaaacatggcaccaaaa

SEQ ID NO: 2092701 - DNA, 25 bp, Homo sapien
gctgtgcagtaagatccaaaaccgt

SEQ ID NO: 2092702 - DNA, 25 bp, Homo sapien
ctacaaccccaaggatctcaaattt

SEQ ID NO: 2092703 - DNA, 25 bp, Homo sapien
ttcatcacattaccaatgttaggaa

SEQ ID NO: 2092704 - DNA, 25 bp, Homo sapien
acctacaaccccaaggatctcaaat

SEQ ID NO: 2092705 - DNA, 25 bp, Homo sapien
cattaccaatgttaggaatcttcat

SEQ ID NO: 2092706 - DNA, 25 bp, Homo sapien
cttgtgtctgcatttaagtacaact

SEQ ID NO: 2092707 - DNA, 25 bp, Homo sapien
catttaagtacaactccataggctc

SEQ ID NO: 2092708 - DNA, 25 bp, Homo sapien
tgcatttaagtacaactccataggc

SEQ ID NO: 2092709 - DNA, 25 bp, Homo sapien
gtctgcatttaagtacaactccata

SEQ ID NO: 2092710 - DNA, 25 bp, Homo sapien
aatgtcattatgaggtgcacggcat

SEQ ID NO: 2092711 - DNA, 25 bp, Homo sapien
tgcacggcataggtcagttgaaaaa

SEQ ID NO: 2092712 - DNA, 25 bp, Homo sapien
ttaaacaacatcctcataaccagag

SEQ ID NO: 2092713 - DNA, 25 bp, Homo sapien
caaccatgatcaagcttatctaaaa

SEQ ID NO: 2092714 - DNA, 25 bp, Homo sapien
gactcaactgcagtactcaggagca

SEQ ID NO: 2092715 - DNA, 25 bp, Homo sapien
gaaccttctctaggaggtgcctgag

SEQ ID NO: 2092716 - DNA, 25 bp, Homo sapien
cagaagcatacatgggagattggca

SEQ ID NO: 2092717 - DNA, 25 bp, Homo sapien
catcacgtagaacatgtgtgtcagg

SEQ ID NO: 2092718 - DNA, 25 bp, Homo sapien
gggcaacttcgagttctcccaattg

SEQ ID NO: 2092719 - DNA, 25 bp, Homo sapien
gacatcatcaatttgggcaacttcg

SEQ ID NO: 2092720 - DNA, 25 bp, Homo sapien
caacttcgagttctcccaattgcct

SEQ ID NO: 2092721 - DNA, 25 bp, Homo sapien
caatttgggcaacttcgagttctcc

SEQ ID NO: 2092722 - DNA, 25 bp, Homo sapien
ttatttcaattccctgcaagtgcat

SEQ ID NO: 2092723 - DNA, 25 bp, Homo sapien
tttctcaaggccacacttgaacttc

SEQ ID NO: 2092724 - DNA, 25 bp, Homo sapien
cttccatgtttctcaaggccacact

SEQ ID NO: 2092725 - DNA, 25 bp, Homo sapien
catgtttctcaaggccacacttgaa

SEQ ID NO: 2092726 - DNA, 25 bp, Homo sapien
caatggtacacgttcgcagcaagct

SEQ ID NO: 2092727 - DNA, 25 bp, Homo sapien
gcctgaagatgacaccaatggtaca

SEQ ID NO: 2092728 - DNA, 25 bp, Homo sapien
tatggagccattggagggactctgc

SEQ ID NO: 2092729 - DNA, 25 bp, Homo sapien
tgttcaaggcaagagacaccaagga

SEQ ID NO: 2092730 - DNA, 25 bp, Homo sapien
aggcaataaggcaggtgcaaatctg

SEQ ID NO: 2092731 - DNA, 25 bp, Homo sapien
gcaggtgcaaatctgagatccgatt

SEQ ID NO: 2092732 - DNA, 25 bp, Homo sapien
ccggccagggtagcgtctgcaagat

SEQ ID NO: 2092733 - DNA, 25 bp, Homo sapien
caaatctgagatccgatttcactgg

SEQ ID NO: 2092734 - DNA, 25 bp, Homo sapien
tgacaactccgtcgcagctgctcca

SEQ ID NO: 2092735 - DNA, 25 bp, Homo sapien
ctgacaactccgtcgcagctgctcc

SEQ ID NO: 2092736 - DNA, 25 bp, Homo sapien
gaaactactactttatagaccagta

SEQ ID NO: 2092737 - DNA, 25 bp, Homo sapien
actactttatagaccagtatggtcc

SEQ ID NO: 2092738 - DNA, 25 bp, Homo sapien
ggctgggaaactactactttataga

SEQ ID NO: 2092739 - DNA, 25 bp, Homo sapien
ccaggctgggaaactactactttat

SEQ ID NO: 2092740 - DNA, 25 bp, Homo sapien
ctgactgtctaaagctctgggtcat

SEQ ID NO: 2092741 - DNA, 25 bp, Homo sapien
gctgactgtctaaagctctgggtca

SEQ ID NO: 2092742 - DNA, 25 bp, Homo sapien
cagctgtagttagcaagataggcat

SEQ ID NO: 2092743 - DNA, 25 bp, Homo sapien
ccccacaacgtctgcaacagaatgt

SEQ ID NO: 2092744 - DNA, 25 bp, Homo sapien
acgtctgcaacagaatgtcaccagc

SEQ ID NO: 2092745 - DNA, 25 bp, Homo sapien
tcaccagctgtagttagcaagatag

SEQ ID NO: 2092746 - DNA, 25 bp, Homo sapien
cacggggactccgaatcctaggatg

SEQ ID NO: 2092747 - DNA, 25 bp, Homo sapien
ttcaccacactttgccacggggact

SEQ ID NO: 2092748 - DNA, 25 bp, Homo sapien
tgcttcttcccttactatatttagg

SEQ ID NO: 2092749 - DNA, 25 bp, Homo sapien
tcctaggatggtacatgctttttcc

SEQ ID NO: 2092750 - DNA, 25 bp, Homo sapien
cctgagcatggttaatattcatctg

SEQ ID NO: 2092751 - DNA, 25 bp, Homo sapien
gcctgagcatggttaatattcatct

SEQ ID NO: 2092752 - DNA, 25 bp, Homo sapien
tagcctgagcatggttaatattcat

SEQ ID NO: 2092753 - DNA, 25 bp, Homo sapien
ttagcctgagcatggttaatattca

SEQ ID NO: 2092754 - DNA, 25 bp, Homo sapien
attctccagtgtttttccgactggg

SEQ ID NO: 2092755 - DNA, 25 bp, Homo sapien
ctccagtgtttttccgactggggat

SEQ ID NO: 2092756 - DNA, 25 bp, Homo sapien
ttttccgactggggattccagttgc

SEQ ID NO: 2092757 - DNA, 25 bp, Homo sapien
gtcattctccagtgtttttccgact

SEQ ID NO: 2092758 - DNA, 25 bp, Homo sapien
ccttgaatttcttgatcgccacaat

SEQ ID NO: 2092759 - DNA, 25 bp, Homo sapien
gaatttcttgatcgccacaatttca

SEQ ID NO: 2092760 - DNA, 25 bp, Homo sapien
tttcttgatcgccacaatttcatgt

SEQ ID NO: 2092761 - DNA, 25 bp, Homo sapien
tgtccttgaatttcttgatcgccac

SEQ ID NO: 2092762 - DNA, 25 bp, Homo sapien
gcattttaagctctcgtaaagtcgt

SEQ ID NO: 2092763 - DNA, 25 bp, Homo sapien
gagtccgaagcattttaagctctcg

SEQ ID NO: 2092764 - DNA, 25 bp, Homo sapien
ttttcctgcttgagagtccgaagca

SEQ ID NO: 2092765 - DNA, 25 bp, Homo sapien
gctctcgtaaagtcgtttctttgac

SEQ ID NO: 2092766 - DNA, 25 bp, Homo sapien
cattcttatggcaccagtgaatagc

SEQ ID NO: 2092767 - DNA, 25 bp, Homo sapien
caggtggaactccatttggcatttc

SEQ ID NO: 2092768 - DNA, 25 bp, Homo sapien
tgaatagccttgattagctgataga

SEQ ID NO: 2092769 - DNA, 25 bp, Homo sapien
ggcatttcttccagcaattcgagca

SEQ ID NO: 2092770 - DNA, 25 bp, Homo sapien
ttgtggctgattaagagattttctg

SEQ ID NO: 2092771 - DNA, 25 bp, Homo sapien
cattgtggctgattaagagattttc

SEQ ID NO: 2092772 - DNA, 25 bp, Homo sapien
catcattgtggctgattaagagatt

SEQ ID NO: 2092773 - DNA, 25 bp, Homo sapien
cacacagttttaggacatcattgtg

SEQ ID NO: 2092774 - DNA, 25 bp, Homo sapien
ccttctgacagattacgagcaaaac

SEQ ID NO: 2092775 - DNA, 25 bp, Homo sapien
tctggggaccgataccatctggtgg

SEQ ID NO: 2092776 - DNA, 25 bp, Homo sapien
actctgtgtaattagcattattgcc

SEQ ID NO: 2092777 - DNA, 25 bp, Homo sapien
catctggtggcaacgtactctgtgt

SEQ ID NO: 2092778 - DNA, 25 bp, Homo sapien
tatttactctatgtgcctggcaaag

SEQ ID NO: 2092779 - DNA, 25 bp, Homo sapien
aatatttactctatgtgcctggcaa

SEQ ID NO: 2092780 - DNA, 25 bp, Homo sapien
atatttactctatgtgcctggcaaa

SEQ ID NO: 2092781 - DNA, 25 bp, Homo sapien
tgtccacggactttccatagggagc

SEQ ID NO: 2092782 - DNA, 25 bp, Homo sapien
gaaataaaggctgtccatcgctaag

SEQ ID NO: 2092783 - DNA, 25 bp, Homo sapien
catcgctaagctccccaagaataca

SEQ ID NO: 2092784 - DNA, 25 bp, Homo sapien
ctcagatggaagtggtcctagcacc

SEQ ID NO: 2092785 - DNA, 25 bp, Homo sapien
ggtcaagtagaacactattcaaaat

SEQ ID NO: 2092786 - DNA, 25 bp, Homo sapien
caaggactgaggatggttaacagct

SEQ ID NO: 2092787 - DNA, 25 bp, Homo sapien
tttccaaggactgaggatggttaac

SEQ ID NO: 2092788 - DNA, 25 bp, Homo sapien
cttcattaggtcaagtagaacacta

SEQ ID NO: 2092789 - DNA, 25 bp, Homo sapien
tctctgggtttgaaatgtagggtga

SEQ ID NO: 2092790 - DNA, 25 bp, Homo sapien
ttgaaggagaacgatccagaagtct

SEQ ID NO: 2092791 - DNA, 25 bp, Homo sapien
tctgtcaagtatctgtcagctgggt

SEQ ID NO: 2092792 - DNA, 25 bp, Homo sapien
tgtagggtgattcaaacactgttct

SEQ ID NO: 2092793 - DNA, 25 bp, Homo sapien
tgctttccacatggtaaggttttct

SEQ ID NO: 2092794 - DNA, 25 bp, Homo sapien
tattagacaatgtgctgctttccac

SEQ ID NO: 2092795 - DNA, 25 bp, Homo sapien
gtgctgctttccacatggtaaggtt

SEQ ID NO: 2092796 - DNA, 25 bp, Homo sapien
ctattagacaatgtgctgctttcca

SEQ ID NO: 2092797 - DNA, 25 bp, Homo sapien
agcagtacttttgccggcttggttt

SEQ ID NO: 2092798 - DNA, 25 bp, Homo sapien
aaagcagtacttttgccggcttggt

SEQ ID NO: 2092799 - DNA, 25 bp, Homo sapien
tgcaaagcagtacttttgccggctt

SEQ ID NO: 2092800 - DNA, 25 bp, Homo sapien
caaagcagtacttttgccggcttgg

SEQ ID NO: 2092801 - DNA, 25 bp, Homo sapien
ctaagcagctagatgggaagtacct

SEQ ID NO: 2092802 - DNA, 25 bp, Homo sapien
tggtactgggctccgcaatttgggc

SEQ ID NO: 2092803 - DNA, 25 bp, Homo sapien
ttggcagggagaccttcgtcagccc

SEQ ID NO: 2092804 - DNA, 25 bp, Homo sapien
gactaagactagctccagcaaggtt

SEQ ID NO: 2092805 - DNA, 25 bp, Homo sapien
aagggccaccagattcagtcaaggt

SEQ ID NO: 2092806 - DNA, 25 bp, Homo sapien
ctgaagggccaccagattcagtcaa

SEQ ID NO: 2092807 - DNA, 25 bp, Homo sapien
tgaagggccaccagattcagtcaag

SEQ ID NO: 2092808 - DNA, 25 bp, Homo sapien
gaagggccaccagattcagtcaagg

SEQ ID NO: 2092809 - DNA, 25 bp, Homo sapien
gtagtagggaaaatagtagatggac

SEQ ID NO: 2092810 - DNA, 25 bp, Homo sapien
ctaaatgcatcctatcaagaaaagc

SEQ ID NO: 2092811 - DNA, 25 bp, Homo sapien
aatgcatcctatcaagaaaagcaca

SEQ ID NO: 2092812 - DNA, 25 bp, Homo sapien
tcctgtagtagggaaaatagtagat

SEQ ID NO: 2092813 - DNA, 25 bp, Homo sapien
aaaggatttataagagcatcctgtt

SEQ ID NO: 2092814 - DNA, 25 bp, Homo sapien
aaaaggatttataagagcatcctgt

SEQ ID NO: 2092815 - DNA, 25 bp, Homo sapien
aaggatttataagagcatcctgttc

SEQ ID NO: 2092816 - DNA, 25 bp, Homo sapien
taaaaggatttataagagcatcctg

SEQ ID NO: 2092817 - DNA, 25 bp, Homo sapien
ctctttgaccgaagatcttgccaca

SEQ ID NO: 2092818 - DNA, 25 bp, Homo sapien
ctggaggtctctttgaccgaagatc

SEQ ID NO: 2092819 - DNA, 25 bp, Homo sapien
cagacttctggcgtgtatggaagga

SEQ ID NO: 2092820 - DNA, 25 bp, Homo sapien
acttctggcgtgtatggaaggaaga

SEQ ID NO: 2092821 - DNA, 25 bp, Homo sapien
catcatcagagtgtgggtcatgata

SEQ ID NO: 2092822 - DNA, 25 bp, Homo sapien
taaaagctaccaactctccttggca

SEQ ID NO: 2092823 - DNA, 25 bp, Homo sapien
tgtataggtgtctattttctttggg

SEQ ID NO: 2092824 - DNA, 25 bp, Homo sapien
agtgtgggtcatgatacactccacc

SEQ ID NO: 2092825 - DNA, 25 bp, Homo sapien
gacacttgggaggtagtatcactcg

SEQ ID NO: 2092826 - DNA, 25 bp, Homo sapien
tcacttgactcttgaccaataggaa

SEQ ID NO: 2092827 - DNA, 25 bp, Homo sapien
ccggccagggtattttcaagtgtga

SEQ ID NO: 2092828 - DNA, 25 bp, Homo sapien
tcaagtgtgaatcttgtagccccta

SEQ ID NO: 2092829 - DNA, 25 bp, Homo sapien
caaagcagttttcacgttatcctac

SEQ ID NO: 2092830 - DNA, 25 bp, Homo sapien
tgcaagggttagttaacaccaagta

SEQ ID NO: 2092831 - DNA, 25 bp, Homo sapien
tgaaccaccacagacggctgatgtt

SEQ ID NO: 2092832 - DNA, 25 bp, Homo sapien
gcttatgacactaatttgcaagggt

SEQ ID NO: 2092833 - DNA, 25 bp, Homo sapien
gaattgtctggacgtggagatggca

SEQ ID NO: 2092834 - DNA, 25 bp, Homo sapien
ggaaagaattgtctggacgtggaga

SEQ ID NO: 2092835 - DNA, 25 bp, Homo sapien
atggaaagaattgtctggacgtgga

SEQ ID NO: 2092836 - DNA, 25 bp, Homo sapien
aaagaattgtctggacgtggagatg

SEQ ID NO: 2092837 - DNA, 25 bp, Homo sapien
atggatcgaatgctggttgtctttt

SEQ ID NO: 2092838 - DNA, 25 bp, Homo sapien
agaactgctctctgatggtagagaa

SEQ ID NO: 2092839 - DNA, 25 bp, Homo sapien
gaatgctggttgtctttttgagtgg

SEQ ID NO: 2092840 - DNA, 25 bp, Homo sapien
gaagaaactctagttgacacattat

SEQ ID NO: 2092841 - DNA, 25 bp, Homo sapien
cttgagttgctctgaatgactaata

SEQ ID NO: 2092842 - DNA, 25 bp, Homo sapien
tccttgagttgctctgaatgactaa

SEQ ID NO: 2092843 - DNA, 25 bp, Homo sapien
ttcattgacctgaaaaatccttgct

SEQ ID NO: 2092844 - DNA, 25 bp, Homo sapien
tctttttcattgacctgaaaaatcc

SEQ ID NO: 2092845 - DNA, 25 bp, Homo sapien
tgcttggattctccccgttggtgga

SEQ ID NO: 2092846 - DNA, 25 bp, Homo sapien
gatgcttggattctccccgttggtg

SEQ ID NO: 2092847 - DNA, 25 bp, Homo sapien
gattctccccgttggtggaatctgt

SEQ ID NO: 2092848 - DNA, 25 bp, Homo sapien
tcttgatgcttggattctccccgtt

SEQ ID NO: 2092849 - DNA, 25 bp, Homo sapien
tgcttggagtgctagcagaatgaat

SEQ ID NO: 2092850 - DNA, 25 bp, Homo sapien
gaatggatttctgcaacgtcagaag

SEQ ID NO: 2092851 - DNA, 25 bp, Homo sapien
caacgtcagaagatcagggctgtcg

SEQ ID NO: 2092852 - DNA, 25 bp, Homo sapien
gggcgccactcctttggtctgctgc

SEQ ID NO: 2092853 - DNA, 25 bp, Homo sapien
tttctctagcatgccctccccgctc

SEQ ID NO: 2092854 - DNA, 25 bp, Homo sapien
tggagagttggagagtctagcagtg

SEQ ID NO: 2092855 - DNA, 25 bp, Homo sapien
tccccgctcctcaggacagttactg

SEQ ID NO: 2092856 - DNA, 25 bp, Homo sapien
tggagagtctagcagtggtgcagga

SEQ ID NO: 2092857 - DNA, 25 bp, Homo sapien
cacttggaaattcacagccaatcat

SEQ ID NO: 2092858 - DNA, 25 bp, Homo sapien
gctcctgaacgatgaaagatggctc

SEQ ID NO: 2092859 - DNA, 25 bp, Homo sapien
ggacaattcctgagcctcatgctcc

SEQ ID NO: 2092860 - DNA, 25 bp, Homo sapien
aacgatgaaagatggctcaatctcc

SEQ ID NO: 2092861 - DNA, 25 bp, Homo sapien
ctcatgctcctgaacgatgaaagat

SEQ ID NO: 2092862 - DNA, 25 bp, Homo sapien
gaggagcctcagagccgtctgctca

SEQ ID NO: 2092863 - DNA, 25 bp, Homo sapien
aggagcctcagagccgtctgctcac

SEQ ID NO: 2092864 - DNA, 25 bp, Homo sapien
atttgaggccgaagagagatgtaac

SEQ ID NO: 2092865 - DNA, 25 bp, Homo sapien
gagagatgtaacaacttgcgcagtg

SEQ ID NO: 2092866 - DNA, 25 bp, Homo sapien
tgcgcagtgattttaatggctggct

SEQ ID NO: 2092867 - DNA, 25 bp, Homo sapien
tgaggaagccgggtgatttgaggcc

SEQ ID NO: 2092868 - DNA, 25 bp, Homo sapien
tttggtttgttgagctgttaagggc

SEQ ID NO: 2092869 - DNA, 25 bp, Homo sapien
gcctgcccttcggtgcgggttcctg

SEQ ID NO: 2092870 - DNA, 25 bp, Homo sapien
ggttcctgccggatgttgctgctcc

SEQ ID NO: 2092871 - DNA, 25 bp, Homo sapien
gctcagggggtgaatccgaatttct

SEQ ID NO: 2092872 - DNA, 25 bp, Homo sapien
gttcagagtaggaagggccctctgt

SEQ ID NO: 2092873 - DNA, 25 bp, Homo sapien
tcagatttggcattcgtgagcgatt

SEQ ID NO: 2092874 - DNA, 25 bp, Homo sapien
acagaggacacatgccaaccaggat

SEQ ID NO: 2092875 - DNA, 25 bp, Homo sapien
tggcccacttttggcacccagctgt

SEQ ID NO: 2092876 - DNA, 25 bp, Homo sapien
gatccctgactagcatttgtggccg

SEQ ID NO: 2092877 - DNA, 25 bp, Homo sapien
tggcgatccctaaggaactcctgtg

SEQ ID NO: 2092878 - DNA, 25 bp, Homo sapien
tcaacagagattgcactaaagctgg

SEQ ID NO: 2092879 - DNA, 25 bp, Homo sapien
tagtaagggcatcggtcaacacgac

SEQ ID NO: 2092880 - DNA, 25 bp, Homo sapien
taaagagctacctcgaaaacactgg

SEQ ID NO: 2092881 - DNA, 25 bp, Homo sapien
tatcatgcaggaggtaacgaacttc

SEQ ID NO: 2092882 - DNA, 25 bp, Homo sapien
tatgcaccttttagcaggcccaaga

SEQ ID NO: 2092883 - DNA, 25 bp, Homo sapien
tacatggcgtgactagagactgaca

SEQ ID NO: 2092884 - DNA, 25 bp, Homo sapien
tgtttttccatgaaactctacagag

SEQ ID NO: 2092885 - DNA, 25 bp, Homo sapien
tctccgggacgataagcatcttttt

SEQ ID NO: 2092886 - DNA, 25 bp, Homo sapien
tctacagagtttgaaccggagcttt

SEQ ID NO: 2092887 - DNA, 25 bp, Homo sapien
ccggagcttttgacaattctggcaa

SEQ ID NO: 2092888 - DNA, 25 bp, Homo sapien
gaatcattgtgtgtctctagagaaa

SEQ ID NO: 2092889 - DNA, 25 bp, Homo sapien
tttggaaaacctaagccgtgctgga

SEQ ID NO: 2092890 - DNA, 25 bp, Homo sapien
gcctgactcgatcggtgaccaaaga

SEQ ID NO: 2092891 - DNA, 25 bp, Homo sapien
taagtttagaatggaattacatgcc

SEQ ID NO: 2092892 - DNA, 25 bp, Homo sapien
gaactaaaatggagctgttcgcagt

SEQ ID NO: 2092893 - DNA, 25 bp, Homo sapien
ctcaagattgggacggcctggcagt

SEQ ID NO: 2092894 - DNA, 25 bp, Homo sapien
tgttcgcagttcaaacacgaaggac

SEQ ID NO: 2092895 - DNA, 25 bp, Homo sapien
cacgaaggaccacagtgctcaagat

SEQ ID NO: 2092896 - DNA, 25 bp, Homo sapien
tctgcacctagagtaaacttcaggc

SEQ ID NO: 2092897 - DNA, 25 bp, Homo sapien
tattccatcagtgtagatagccatt

SEQ ID NO: 2092898 - DNA, 25 bp, Homo sapien
taccatacgtggacgtgcagtgact

SEQ ID NO: 2092899 - DNA, 25 bp, Homo sapien
tcaattaccatctgctgggaaaggg

SEQ ID NO: 2092900 - DNA, 25 bp, Homo sapien
ccaagagtacttccatgctgggtca

SEQ ID NO: 2092901 - DNA, 25 bp, Homo sapien
taggctacgtgcatctaaagggctg

SEQ ID NO: 2092902 - DNA, 25 bp, Homo sapien
cctactgagctctgtgtaactggca

SEQ ID NO: 2092903 - DNA, 25 bp, Homo sapien
gcaagcggactctatatcctaggga

SEQ ID NO: 2092904 - DNA, 25 bp, Homo sapien
tatacatagtgtaggaaaaactcac

SEQ ID NO: 2092905 - DNA, 25 bp, Homo sapien
gctgggatttcacattggaaactgc

SEQ ID NO: 2092906 - DNA, 25 bp, Homo sapien
tgaaataggagtccaacgtcattct

SEQ ID NO: 2092907 - DNA, 25 bp, Homo sapien
tctgaagcctaatagaatcttgctg

SEQ ID NO: 2092908 - DNA, 25 bp, Homo sapien
tgtagattggccttctggacgttct

SEQ ID NO: 2092909 - DNA, 25 bp, Homo sapien
ccacgaatcgactgtctctgtagat

SEQ ID NO: 2092910 - DNA, 25 bp, Homo sapien
tagaaagtttatcaccccaaagaga

SEQ ID NO: 2092911 - DNA, 25 bp, Homo sapien
tagtatgtggtatttcgtgactggc

SEQ ID NO: 2092912 - DNA, 25 bp, Homo sapien
gaagcgtctatcttggggtccagaa

SEQ ID NO: 2092913 - DNA, 25 bp, Homo sapien
tcgtccttaacatgaagcgtctatc

SEQ ID NO: 2092914 - DNA, 25 bp, Homo sapien
ccttaacatgaagcgtctatcttgg

SEQ ID NO: 2092915 - DNA, 25 bp, Homo sapien
ctgtcgtccttaacatgaagcgtct

SEQ ID NO: 2092916 - DNA, 25 bp, Homo sapien
tgggtcaccacagcagaagtattct

SEQ ID NO: 2092917 - DNA, 25 bp, Homo sapien
tgaaagcatcagtgcctcggacctg

SEQ ID NO: 2092918 - DNA, 25 bp, Homo sapien
ggaagtgcctcggacctggagtact

SEQ ID NO: 2092919 - DNA, 25 bp, Homo sapien
ctcggacctggagtgtcgggcacat

SEQ ID NO: 2092920 - DNA, 25 bp, Homo sapien
cattctcatggtatgtcaggagcgc

SEQ ID NO: 2092921 - DNA, 25 bp, Homo sapien
ttgcccgtcagtgccgcattctcat

SEQ ID NO: 2092922 - DNA, 25 bp, Homo sapien
gcagcttggtttacctgggccctgt

SEQ ID NO: 2092923 - DNA, 25 bp, Homo sapien
tcagggcttccctcataacgtgtct

SEQ ID NO: 2092924 - DNA, 25 bp, Homo sapien
tcattggtgttaattggttcttcca

SEQ ID NO: 2092925 - DNA, 25 bp, Homo sapien
tggttgattcattggtgttaattgg

SEQ ID NO: 2092926 - DNA, 25 bp, Homo sapien
tgttaattggttcttccatgagaga

SEQ ID NO: 2092927 - DNA, 25 bp, Homo sapien
tcttccatgagagaggtgattcagg

SEQ ID NO: 2092928 - DNA, 25 bp, Homo sapien
aggtcactgccgccatagtccgaca

SEQ ID NO: 2092929 - DNA, 25 bp, Homo sapien
ggtcactgccgccatagtccgacat

SEQ ID NO: 2092930 - DNA, 25 bp, Homo sapien
aaggtcactgccgccatagtccgac

SEQ ID NO: 2092931 - DNA, 25 bp, Homo sapien
tctggactgcagaaagggttcactt

SEQ ID NO: 2092932 - DNA, 25 bp, Homo sapien
catgaaaccgtccttagaagtggac

SEQ ID NO: 2092933 - DNA, 25 bp, Homo sapien
tacaggaggtttacggagataagac

SEQ ID NO: 2092934 - DNA, 25 bp, Homo sapien
gaagtggacacgtattctggactgc

SEQ ID NO: 2092935 - DNA, 25 bp, Homo sapien
actttcaggcatccgagccagggca

SEQ ID NO: 2092936 - DNA, 25 bp, Homo sapien
aaaactttcaggcatccgagccagg

SEQ ID NO: 2092937 - DNA, 25 bp, Homo sapien
aaactttcaggcatccgagccaggg

SEQ ID NO: 2092938 - DNA, 25 bp, Homo sapien
accaaaactttcaggcatccgagcc

SEQ ID NO: 2092939 - DNA, 25 bp, Homo sapien
cacactcacgttccaggcagaaaga

SEQ ID NO: 2092940 - DNA, 25 bp, Homo sapien
tagtgcagaggctaagcacagccca

SEQ ID NO: 2092941 - DNA, 25 bp, Homo sapien
gaaatgaagctgttttagccagaca

SEQ ID NO: 2092942 - DNA, 25 bp, Homo sapien
gaatagtccctaatacacagcaagc

SEQ ID NO: 2092943 - DNA, 25 bp, Homo sapien
tttgggtcggatcttctgccacagg

SEQ ID NO: 2092944 - DNA, 25 bp, Homo sapien
ctggttttgctcagtttgggtcgga

SEQ ID NO: 2092945 - DNA, 25 bp, Homo sapien
tcaaaccagattcgtttgaaactgg

SEQ ID NO: 2092946 - DNA, 25 bp, Homo sapien
caggcaactacaagattctttctga

SEQ ID NO: 2092947 - DNA, 25 bp, Homo sapien
cctagagaagaaatgtggtctggcc

SEQ ID NO: 2092948 - DNA, 25 bp, Homo sapien
gcttcaactataaaacgaggctaca

SEQ ID NO: 2092949 - DNA, 25 bp, Homo sapien
taacacacattgtagcagccactga

SEQ ID NO: 2092950 - DNA, 25 bp, Homo sapien
caatcacactgggttgacgtaacga

SEQ ID NO: 2092951 - DNA, 25 bp, Homo sapien
tgatgtggcacattcctcctggtgg

SEQ ID NO: 2092952 - DNA, 25 bp, Homo sapien
ttctgtcacagttcccactgatgtg

SEQ ID NO: 2092953 - DNA, 25 bp, Homo sapien
ccactgatgtggcacattcctcctg

SEQ ID NO: 2092954 - DNA, 25 bp, Homo sapien
ttcccactgatgtggcacattcctc

SEQ ID NO: 2092955 - DNA, 25 bp, Homo sapien
gactcctagatcttcactttgctgg

SEQ ID NO: 2092956 - DNA, 25 bp, Homo sapien
tttcagcctgacctgcgggctcagg

SEQ ID NO: 2092957 - DNA, 25 bp, Homo sapien
gatcaggtccacacaggttcaaggg

SEQ ID NO: 2092958 - DNA, 25 bp, Homo sapien
gggctcaggacacaatctatcatca

SEQ ID NO: 2092959 - DNA, 25 bp, Homo sapien
ggctttcctacagctgaccagggat

SEQ ID NO: 2092960 - DNA, 25 bp, Homo sapien
ctgaccagggatgtgttctcccagc

SEQ ID NO: 2092961 - DNA, 25 bp, Homo sapien
gctgaccagggatgtgttctcccag

SEQ ID NO: 2092962 - DNA, 25 bp, Homo sapien
tctctggctttcctacagctgacca

SEQ ID NO: 2092963 - DNA, 25 bp, Homo sapien
tgtgtttgcaaaattcaagcttcag

SEQ ID NO: 2092964 - DNA, 25 bp, Homo sapien
gtttgcaaaattcaagcttcagcct

SEQ ID NO: 2092965 - DNA, 25 bp, Homo sapien
tgtgtgtttgcaaaattcaagcttc

SEQ ID NO: 2092966 - DNA, 25 bp, Homo sapien
cttgtgtgtttgcaaaattcaagct

SEQ ID NO: 2092967 - DNA, 25 bp, Homo sapien
ttcttctgcttggccaatgtagagg

SEQ ID NO: 2092968 - DNA, 25 bp, Homo sapien
tgcttggccaatgtagaggtttttc

SEQ ID NO: 2092969 - DNA, 25 bp, Homo sapien
cttggccaatgtagaggtttttcct

SEQ ID NO: 2092970 - DNA, 25 bp, Homo sapien
cttctgcttggccaatgtagaggtt

SEQ ID NO: 2092971 - DNA, 25 bp, Homo sapien
ccaagtgactgtggagattttccaa

SEQ ID NO: 2092972 - DNA, 25 bp, Homo sapien
cattttctggctctcaatccaagtg

SEQ ID NO: 2092973 - DNA, 25 bp, Homo sapien
tctgtacgtcttcttcaactgatgg

SEQ ID NO: 2092974 - DNA, 25 bp, Homo sapien
tgaaataggccacaatccttcagat

SEQ ID NO: 2092975 - DNA, 25 bp, Homo sapien
tgaaaagtgcctccctttaagctgc

SEQ ID NO: 2092976 - DNA, 25 bp, Homo sapien
tccctttaagctgcgaggaaccact

SEQ ID NO: 2092977 - DNA, 25 bp, Homo sapien
tcttagccgatcctcttcagtcata

SEQ ID NO: 2092978 - DNA, 25 bp, Homo sapien
tgcgaggaaccactcttagccgatc

SEQ ID NO: 2092979 - DNA, 25 bp, Homo sapien
tgtgttcatgaattcaacttctgat

SEQ ID NO: 2092980 - DNA, 25 bp, Homo sapien
gacttctatctaaatcatatgtgtt

SEQ ID NO: 2092981 - DNA, 25 bp, Homo sapien
cttctatctaaatcatatgtgttca

SEQ ID NO: 2092982 - DNA, 25 bp, Homo sapien
tatgtgttcatgaattcaacttctg

SEQ ID NO: 2092983 - DNA, 25 bp, Homo sapien
gatctcctggttttcgttgaagaac

SEQ ID NO: 2092984 - DNA, 25 bp, Homo sapien
tcctggttttcgttgaagaactgct

SEQ ID NO: 2092985 - DNA, 25 bp, Homo sapien
cctggttttcgttgaagaactgctg

SEQ ID NO: 2092986 - DNA, 25 bp, Homo sapien
tctcctggttttcgttgaagaactg

SEQ ID NO: 2092987 - DNA, 25 bp, Homo sapien
gagagtaaagtgtgaagtccagtct

SEQ ID NO: 2092988 - DNA, 25 bp, Homo sapien
gtgaagtccagtctccaaacaatgt

SEQ ID NO: 2092989 - DNA, 25 bp, Homo sapien
tgaaagaagagagtaaagtgtgaag

SEQ ID NO: 2092990 - DNA, 25 bp, Homo sapien
cagtctccaaacaatgtcaggcatt

SEQ ID NO: 2092991 - DNA, 25 bp, Homo sapien
ttcctaggcacttacaaaggaccat

SEQ ID NO: 2092992 - DNA, 25 bp, Homo sapien
tgccacttcctaggcacttacaaag

SEQ ID NO: 2092993 - DNA, 25 bp, Homo sapien
cacttcctaggcacttacaaaggac

SEQ ID NO: 2092994 - DNA, 25 bp, Homo sapien
cagtgccacttcctaggcacttaca

SEQ ID NO: 2092995 - DNA, 25 bp, Homo sapien
agaaagaaatcaggtaagaggtaat

SEQ ID NO: 2092996 - DNA, 25 bp, Homo sapien
gaaagaaatcaggtaagaggtaatg

SEQ ID NO: 2092997 - DNA, 25 bp, Homo sapien
agtgaagagcaatcaacaccagctg

SEQ ID NO: 2092998 - DNA, 25 bp, Homo sapien
aagtcaaagaaaaacagttactatg

SEQ ID NO: 2092999 - DNA, 25 bp, Homo sapien
ctgcagacccacagaatatgaaagt

SEQ ID NO: 2093000 - DNA, 25 bp, Homo sapien
tcaaagaaaaacagttactatgcac

SEQ ID NO: 2093001 - DNA, 25 bp, Homo sapien
acccacagaatatgaaagtcaaaga

SEQ ID NO: 2093002 - DNA, 25 bp, Homo sapien
taccagttctggatgatcaacgcag

SEQ ID NO: 2093003 - DNA, 25 bp, Homo sapien
tcagcatattcgatggactggaaga

SEQ ID NO: 2093004 - DNA, 25 bp, Homo sapien
gcatagtgttgtctggccttcagtc

SEQ ID NO: 2093005 - DNA, 25 bp, Homo sapien
cagtcgagctttgtaacctcggtac

SEQ ID NO: 2093006 - DNA, 25 bp, Homo sapien
aagccctgcctctcatgaaaagtaa

SEQ ID NO: 2093007 - DNA, 25 bp, Homo sapien
agctttccagccacaatcagggtac

SEQ ID NO: 2093008 - DNA, 25 bp, Homo sapien
gcaaagacctgcatttgtacagcac

SEQ ID NO: 2093009 - DNA, 25 bp, Homo sapien
cagggtactggctctatggccacca

SEQ ID NO: 2093010 - DNA, 25 bp, Homo sapien
ctagctcttccttatgtatatgtgt

SEQ ID NO: 2093011 - DNA, 25 bp, Homo sapien
tgtatatgtgtgtagttttccaaca

SEQ ID NO: 2093012 - DNA, 25 bp, Homo sapien
tgtgtgtagttttccaacatgaagg

SEQ ID NO: 2093013 - DNA, 25 bp, Homo sapien
caacatgaaggaaaagaaggtggat

SEQ ID NO: 2093014 - DNA, 25 bp, Homo sapien
gtaaagcctaaatacttcactgtct

SEQ ID NO: 2093015 - DNA, 25 bp, Homo sapien
gtaggcagtaaagcctaaatacttc

SEQ ID NO: 2093016 - DNA, 25 bp, Homo sapien
aatttggtagtcgttcttggatata

SEQ ID NO: 2093017 - DNA, 25 bp, Homo sapien
cttttcaatttggtagtcgttcttg

SEQ ID NO: 2093018 - DNA, 25 bp, Homo sapien
tgtcctgttcgctttcaagagactg

SEQ ID NO: 2093019 - DNA, 25 bp, Homo sapien
cctgttcgctttcaagagactgatt

SEQ ID NO: 2093020 - DNA, 25 bp, Homo sapien
tcctgttcgctttcaagagactgat

SEQ ID NO: 2093021 - DNA, 25 bp, Homo sapien
catgtcctgttcgctttcaagagac

SEQ ID NO: 2093022 - DNA, 25 bp, Homo sapien
aagtaaatcaatatccgtacaagtg

SEQ ID NO: 2093023 - DNA, 25 bp, Homo sapien
agaggaaattgtagccgaggaccat

SEQ ID NO: 2093024 - DNA, 25 bp, Homo sapien
ggaccattataggagtctgggacat

SEQ ID NO: 2093025 - DNA, 25 bp, Homo sapien
aatcaatatccgtacaagtgagagg

SEQ ID NO: 2093026 - DNA, 25 bp, Homo sapien
tttcttggtttcaaatagcacctct

SEQ ID NO: 2093027 - DNA, 25 bp, Homo sapien
ttggtttcaaatagcacctctaaga

SEQ ID NO: 2093028 - DNA, 25 bp, Homo sapien
gcacctctaagacataatgggcatg

SEQ ID NO: 2093029 - DNA, 25 bp, Homo sapien
ctaagacataatgggcatgaagtat

SEQ ID NO: 2093030 - DNA, 25 bp, Homo sapien
gaagtttgtatgtgagtgaaattcg

SEQ ID NO: 2093031 - DNA, 25 bp, Homo sapien
gagaagtttgtatgtgagtgaaatt

SEQ ID NO: 2093032 - DNA, 25 bp, Homo sapien
agtttgtatgtgagtgaaattcggc

SEQ ID NO: 2093033 - DNA, 25 bp, Homo sapien
tttgtatgtgagtgaaattcggcat

SEQ ID NO: 2093034 - DNA, 25 bp, Homo sapien
tcccagcacaagtggcatgcagagg

SEQ ID NO: 2093035 - DNA, 25 bp, Homo sapien
tcttcccagcacaagtggcatgcag

SEQ ID NO: 2093036 - DNA, 25 bp, Homo sapien
ttcccagcacaagtggcatgcagag

SEQ ID NO: 2093037 - DNA, 25 bp, Homo sapien
cttcccagcacaagtggcatgcaga

SEQ ID NO: 2093038 - DNA, 25 bp, Homo sapien
aaacagcagccaagggcagagaaga

SEQ ID NO: 2093039 - DNA, 25 bp, Homo sapien
gccaagggcagagaagaatttaatc

SEQ ID NO: 2093040 - DNA, 25 bp, Homo sapien
cagttggaaaaatctaaaacagcag

SEQ ID NO: 2093041 - DNA, 25 bp, Homo sapien
gcagccaagggcagagaagaattta

SEQ ID NO: 2093042 - DNA, 25 bp, Homo sapien
cactgtcaaacggttgcaagcatgc

SEQ ID NO: 2093043 - DNA, 25 bp, Homo sapien
accccactgtcaaacggttgcaagc

SEQ ID NO: 2093044 - DNA, 25 bp, Homo sapien
aacggttgcaagcatgctgagcacc

SEQ ID NO: 2093045 - DNA, 25 bp, Homo sapien
tgtcaaacggttgcaagcatgctga

SEQ ID NO: 2093046 - DNA, 25 bp, Homo sapien
cactatcagacgctagaaatgcaaa

SEQ ID NO: 2093047 - DNA, 25 bp, Homo sapien
tgccaccactatcagacgctagaaa

SEQ ID NO: 2093048 - DNA, 25 bp, Homo sapien
attagattgtcaaattcacttctac

SEQ ID NO: 2093049 - DNA, 25 bp, Homo sapien
ttaattagattgtcaaattcacttc

SEQ ID NO: 2093050 - DNA, 25 bp, Homo sapien
tcatccagtttcccatgcaaatcac

SEQ ID NO: 2093051 - DNA, 25 bp, Homo sapien
aatatttagcaaaatcatcatttac

SEQ ID NO: 2093052 - DNA, 25 bp, Homo sapien
taatatttagcaaaatcatcattta

SEQ ID NO: 2093053 - DNA, 25 bp, Homo sapien
ttaatatttagcaaaatcatcattt

SEQ ID NO: 2093054 - DNA, 25 bp, Homo sapien
tcgccaatactctctttcgatggct

SEQ ID NO: 2093055 - DNA, 25 bp, Homo sapien
ctcatcgccaatactctctttcgat

SEQ ID NO: 2093056 - DNA, 25 bp, Homo sapien
gccaatactctctttcgatggcttg

SEQ ID NO: 2093057 - DNA, 25 bp, Homo sapien
aggtccttgcccacctcatcgccaa

SEQ ID NO: 2093058 - DNA, 25 bp, Homo sapien
tatcgcactttcatacgaaataaag

SEQ ID NO: 2093059 - DNA, 25 bp, Homo sapien
tatgttccatatagttttgcagaca

SEQ ID NO: 2093060 - DNA, 25 bp, Homo sapien
tcatctgtctactccagagtcctat

SEQ ID NO: 2093061 - DNA, 25 bp, Homo sapien
caatctttacattagcaccttccag

SEQ ID NO: 2093062 - DNA, 25 bp, Homo sapien
tctgttgggatgtccaggtctgaag

SEQ ID NO: 2093063 - DNA, 25 bp, Homo sapien
ctagaggaacctgaggactgttgaa

SEQ ID NO: 2093064 - DNA, 25 bp, Homo sapien
cagctgtctagggtgagtaagctag

SEQ ID NO: 2093065 - DNA, 25 bp, Homo sapien
gaaggctatagactctgttgggatg

SEQ ID NO: 2093066 - DNA, 25 bp, Homo sapien
tattctcagtgatcactgaccgggc

SEQ ID NO: 2093067 - DNA, 25 bp, Homo sapien
gatgtactgccagcgagcaactaca

SEQ ID NO: 2093068 - DNA, 25 bp, Homo sapien
tgactgagcagctcggatgtactgc

SEQ ID NO: 2093069 - DNA, 25 bp, Homo sapien
tgcagagcccgggtatattctcagt

SEQ ID NO: 2093070 - DNA, 25 bp, Homo sapien
tcctcgatctacaaagtcaccatta

SEQ ID NO: 2093071 - DNA, 25 bp, Homo sapien
ggaattctttcctcgatctacaaag

SEQ ID NO: 2093072 - DNA, 25 bp, Homo sapien
gatcattaggatctctatggaattc

SEQ ID NO: 2093073 - DNA, 25 bp, Homo sapien
ggatctctatggaattctttcctcg

SEQ ID NO: 2093074 - DNA, 25 bp, Homo sapien
tggttccctctgttcaagtgcaggt

SEQ ID NO: 2093075 - DNA, 25 bp, Homo sapien
ccctctgttcaagtgcaggtcattg

SEQ ID NO: 2093076 - DNA, 25 bp, Homo sapien
catcataaaatcttcgtggttccct

SEQ ID NO: 2093077 - DNA, 25 bp, Homo sapien
cattggggtagacaagaaaactcac

SEQ ID NO: 2093078 - DNA, 25 bp, Homo sapien
gtgaaggtcgggcatgggagcaaga

SEQ ID NO: 2093079 - DNA, 25 bp, Homo sapien
taatagaagggagaagaacggacag

SEQ ID NO: 2093080 - DNA, 25 bp, Homo sapien
aaagaacataatagaagggagaaga

SEQ ID NO: 2093081 - DNA, 25 bp, Homo sapien
gaacataatagaagggagaagaacg

SEQ ID NO: 2093082 - DNA, 25 bp, Homo sapien
caaaatttctttcgtgaagccatac

SEQ ID NO: 2093083 - DNA, 25 bp, Homo sapien
tgcaaaatttctttcgtgaagccat

SEQ ID NO: 2093084 - DNA, 25 bp, Homo sapien
gcaaaatttctttcgtgaagccata

SEQ ID NO: 2093085 - DNA, 25 bp, Homo sapien
cgattgtaccgattgggagccaggc

SEQ ID NO: 2093086 - DNA, 25 bp, Homo sapien
cacggtggagtaaattcaagtctgt

SEQ ID NO: 2093087 - DNA, 25 bp, Homo sapien
ggagccaggcatagaattcttccaa

SEQ ID NO: 2093088 - DNA, 25 bp, Homo sapien
gatatcccaccatggatgaccagga

SEQ ID NO: 2093089 - DNA, 25 bp, Homo sapien
caatgataccattacgaccgcaggt

SEQ ID NO: 2093090 - DNA, 25 bp, Homo sapien
gataccattacgaccgcaggtgtaa

SEQ ID NO: 2093091 - DNA, 25 bp, Homo sapien
tccctcctgccacagagggttggag

SEQ ID NO: 2093092 - DNA, 25 bp, Homo sapien
tcccaacccctgttaacaatgatac

SEQ ID NO: 2093093 - DNA, 25 bp, Homo sapien
tgtttccgttggtggtatcagcaca

SEQ ID NO: 2093094 - DNA, 25 bp, Homo sapien
tattgtgcttcgagtcagtgtcatg

SEQ ID NO: 2093095 - DNA, 25 bp, Homo sapien
attgtgcttcgagtcagtgtcatgg

SEQ ID NO: 2093096 - DNA, 25 bp, Homo sapien
cagtaggagatccatttgttttgat

SEQ ID NO: 2093097 - DNA, 25 bp, Homo sapien
tcagtaggagatccatttgttttga

SEQ ID NO: 2093098 - DNA, 25 bp, Homo sapien
aagtgttcagtaggagatccatttg

SEQ ID NO: 2093099 - DNA, 25 bp, Homo sapien
agtgttcagtaggagatccatttgt

SEQ ID NO: 2093100 - DNA, 25 bp, Homo sapien
cccttcgggcttacattcatgagac

SEQ ID NO: 2093101 - DNA, 25 bp, Homo sapien
gaatcttggaagtaacatctggtcc

SEQ ID NO: 2093102 - DNA, 25 bp, Homo sapien
acctgatgagcatcttcaactggta

SEQ ID NO: 2093103 - DNA, 25 bp, Homo sapien
cctcggcacgtatttggaaaacagc

SEQ ID NO: 2093104 - DNA, 25 bp, Homo sapien
gatgtaagctcctcgattgctgcct

SEQ ID NO: 2093105 - DNA, 25 bp, Homo sapien
gaacatagtttgatgtaagctcctc

SEQ ID NO: 2093106 - DNA, 25 bp, Homo sapien
gagttgtaccagaacatagtttgat

SEQ ID NO: 2093107 - DNA, 25 bp, Homo sapien
gctgccttcttcataataattagaa

SEQ ID NO: 2093108 - DNA, 25 bp, Homo sapien
gctgaaagcacgttgctttagttac

SEQ ID NO: 2093109 - DNA, 25 bp, Homo sapien
gaggctgaaagcacgttgctttagt

SEQ ID NO: 2093110 - DNA, 25 bp, Homo sapien
ctttggcgaagaggctgaaagcacg

SEQ ID NO: 2093111 - DNA, 25 bp, Homo sapien
cgaagaggctgaaagcacgttgctt

SEQ ID NO: 2093112 - DNA, 25 bp, Homo sapien
tcactttttcgtgaaatcactctct

SEQ ID NO: 2093113 - DNA, 25 bp, Homo sapien
ctttttcgtgaaatcactctctctc

SEQ ID NO: 2093114 - DNA, 25 bp, Homo sapien
cactttttcgtgaaatcactctctc

SEQ ID NO: 2093115 - DNA, 25 bp, Homo sapien
gtggtcttgaagttggaaagcacga

SEQ ID NO: 2093116 - DNA, 25 bp, Homo sapien
tgtggtcttgaagttggaaagcacg

SEQ ID NO: 2093117 - DNA, 25 bp, Homo sapien
ctgtggtcttgaagttggaaagcac

SEQ ID NO: 2093118 - DNA, 25 bp, Homo sapien
tgaacttctgccctatccagtggac

SEQ ID NO: 2093119 - DNA, 25 bp, Homo sapien
ttcttgtttctacagcaccgcacgg

SEQ ID NO: 2093120 - DNA, 25 bp, Homo sapien
tcaccattagtgtgtgggagacgcg

SEQ ID NO: 2093121 - DNA, 25 bp, Homo sapien
caccgcacggttagcatgtgtggaa

SEQ ID NO: 2093122 - DNA, 25 bp, Homo sapien
tccattttggtctatgtttaccaga

SEQ ID NO: 2093123 - DNA, 25 bp, Homo sapien
tccatggtaagttcagccccaaaat

SEQ ID NO: 2093124 - DNA, 25 bp, Homo sapien
tcaatgcggatattctggaagctgg

SEQ ID NO: 2093125 - DNA, 25 bp, Homo sapien
tcgaactgagggatctccatggtaa

SEQ ID NO: 2093126 - DNA, 25 bp, Homo sapien
ctgagtgatcagtgtcaatggcatt

SEQ ID NO: 2093127 - DNA, 25 bp, Homo sapien
tcagtgtcaatggcattaaatatga

SEQ ID NO: 2093128 - DNA, 25 bp, Homo sapien
tatgatttccaggtcagatctgtat

SEQ ID NO: 2093129 - DNA, 25 bp, Homo sapien
attaaatatgatttccaggtcagat

SEQ ID NO: 2093130 - DNA, 25 bp, Homo sapien
gacttgggaatcatcaatgtgaaca

SEQ ID NO: 2093131 - DNA, 25 bp, Homo sapien
cacatggcacgaaattcttccacgg

SEQ ID NO: 2093132 - DNA, 25 bp, Homo sapien
gaacattgtagtgagaactaaaaag

SEQ ID NO: 2093133 - DNA, 25 bp, Homo sapien
caagtccattatgttggcaagctta

SEQ ID NO: 2093134 - DNA, 25 bp, Homo sapien
ggtttcatcaagtcttcatatctat

SEQ ID NO: 2093135 - DNA, 25 bp, Homo sapien
ttcatcaagtcttcatatctatgca

SEQ ID NO: 2093136 - DNA, 25 bp, Homo sapien
tcaagtcttcatatctatgcactac

SEQ ID NO: 2093137 - DNA, 25 bp, Homo sapien
catcaagtcttcatatctatgcact

SEQ ID NO: 2093138 - DNA, 25 bp, Homo sapien
gatgttttcaaaccgctctggcctc

SEQ ID NO: 2093139 - DNA, 25 bp, Homo sapien
taacagcttgctagggacttccaaa

SEQ ID NO: 2093140 - DNA, 25 bp, Homo sapien
tcctggttaggtggcactcacgaca

SEQ ID NO: 2093141 - DNA, 25 bp, Homo sapien
actgtacttgtgatttgggcctagc

SEQ ID NO: 2093142 - DNA, 25 bp, Homo sapien
catccctgaagggtggatcccttaa

SEQ ID NO: 2093143 - DNA, 25 bp, Homo sapien
cctgaagggtggatcccttaattga

SEQ ID NO: 2093144 - DNA, 25 bp, Homo sapien
tttcaaacaatacactcccacagat

SEQ ID NO: 2093145 - DNA, 25 bp, Homo sapien
gattccccccaagaatccaatatgg

SEQ ID NO: 2093146 - DNA, 25 bp, Homo sapien
ccaagattgggtggctgcatccagt

SEQ ID NO: 2093147 - DNA, 25 bp, Homo sapien
gcagagtctggcacaaaaggaactt

SEQ ID NO: 2093148 - DNA, 25 bp, Homo sapien
tacaacacctaggactctgtgagga

SEQ ID NO: 2093149 - DNA, 25 bp, Homo sapien
gagagagcactcacacaccagagaa

SEQ ID NO: 2093150 - DNA, 25 bp, Homo sapien
tgaactccttcgtgggcggaaactg

SEQ ID NO: 2093151 - DNA, 25 bp, Homo sapien
gttcattaagcaaagctagccatca

SEQ ID NO: 2093152 - DNA, 25 bp, Homo sapien
ggagtagctcattccactcagcccg

SEQ ID NO: 2093153 - DNA, 25 bp, Homo sapien
ccgcactggctactcttggcaggag

SEQ ID NO: 2093154 - DNA, 25 bp, Homo sapien
taaggccacccaacagcctggaatc

SEQ ID NO: 2093155 - DNA, 25 bp, Homo sapien
gggccctgataaggccacccaacag

SEQ ID NO: 2093156 - DNA, 25 bp, Homo sapien
cacgctgggtttaagtgacacttct

SEQ ID NO: 2093157 - DNA, 25 bp, Homo sapien
gacacttctctagatgaagggttaa

SEQ ID NO: 2093158 - DNA, 25 bp, Homo sapien
tttctaaccacacagcaatgtttct

SEQ ID NO: 2093159 - DNA, 25 bp, Homo sapien
ttttttctaaccacacagcaatgtt

SEQ ID NO: 2093160 - DNA, 25 bp, Homo sapien
tattttttctaaccacacagcaatg

SEQ ID NO: 2093161 - DNA, 25 bp, Homo sapien
ttttctaaccacacagcaatgtttc

SEQ ID NO: 2093162 - DNA, 25 bp, Homo sapien
ctgtggaatgggatgatctccatat

SEQ ID NO: 2093163 - DNA, 25 bp, Homo sapien
ttggcttctgactggtattcacttg

SEQ ID NO: 2093164 - DNA, 25 bp, Homo sapien
aatcattcactacagggataaaact

SEQ ID NO: 2093165 - DNA, 25 bp, Homo sapien
ttagtgaggcatccttcgtttcaag

SEQ ID NO: 2093166 - DNA, 25 bp, Homo sapien
aaaactagttagtgaggcatccttc

SEQ ID NO: 2093167 - DNA, 25 bp, Homo sapien
tcactacagggataaaactagttag

SEQ ID NO: 2093168 - DNA, 25 bp, Homo sapien
caaggatggattcggcattaaatct

SEQ ID NO: 2093169 - DNA, 25 bp, Homo sapien
ggattcggcattaaatctaactagg

SEQ ID NO: 2093170 - DNA, 25 bp, Homo sapien
tttcacttgagcaaggatggattcg

SEQ ID NO: 2093171 - DNA, 25 bp, Homo sapien
tcggcattaaatctaactaggactc

SEQ ID NO: 2093172 - DNA, 25 bp, Homo sapien
gatattctgtaatctaagaacacag

SEQ ID NO: 2093173 - DNA, 25 bp, Homo sapien
tcttgtaagttcagcttcaatgcta

SEQ ID NO: 2093174 - DNA, 25 bp, Homo sapien
tgaaatacagttagaaaccatattc

SEQ ID NO: 2093175 - DNA, 25 bp, Homo sapien
gtgaagtcctattcaatttactttg

SEQ ID NO: 2093176 - DNA, 25 bp, Homo sapien
cagggccatggggacaagcggcagg

SEQ ID NO: 2093177 - DNA, 25 bp, Homo sapien
ccatggggacaagcggcaggggaaa

SEQ ID NO: 2093178 - DNA, 25 bp, Homo sapien
agggccatggggacaagcggcaggg

SEQ ID NO: 2093179 - DNA, 25 bp, Homo sapien
gggacaagcggcaggggaaacagaa

SEQ ID NO: 2093180 - DNA, 25 bp, Homo sapien
catcaccacgtttgaaattatcccc

SEQ ID NO: 2093181 - DNA, 25 bp, Homo sapien
ccacatcaccacgtttgaaattatc

SEQ ID NO: 2093182 - DNA, 25 bp, Homo sapien
agtttttgtctgataacgaggatat

SEQ ID NO: 2093183 - DNA, 25 bp, Homo sapien
gtctgataacgaggatataattgtg

SEQ ID NO: 2093184 - DNA, 25 bp, Homo sapien
accttgggattatgcctcgaccctc

SEQ ID NO: 2093185 - DNA, 25 bp, Homo sapien
cccgcagcaccttgggattatgcct

SEQ ID NO: 2093186 - DNA, 25 bp, Homo sapien
gcagcaccttgggattatgcctcga

SEQ ID NO: 2093187 - DNA, 25 bp, Homo sapien
gggaccccgcagcaccttgggatta

SEQ ID NO: 2093188 - DNA, 25 bp, Homo sapien
cccaagggcatccccgcggttggtg

SEQ ID NO: 2093189 - DNA, 25 bp, Homo sapien
ccaagggcatccccgcggttggtgc

SEQ ID NO: 2093190 - DNA, 25 bp, Homo sapien
ccgcggttggtgcctctcctgcgtg

SEQ ID NO: 2093191 - DNA, 25 bp, Homo sapien
gctgtgggcatgaggcttagaggct

SEQ ID NO: 2093192 - DNA, 25 bp, Homo sapien
gtgccacttcgctggaggtgtcact

SEQ ID NO: 2093193 - DNA, 25 bp, Homo sapien
ccagggagctggcaataagtggtgc

SEQ ID NO: 2093194 - DNA, 25 bp, Homo sapien
gctggcactggtctgtctgggccac

SEQ ID NO: 2093195 - DNA, 25 bp, Homo sapien
gctgggtggttcagagcgtggcact

SEQ ID NO: 2093196 - DNA, 25 bp, Homo sapien
gagcccagttcaacgtcaagggtgt

SEQ ID NO: 2093197 - DNA, 25 bp, Homo sapien
agggtgttgaaatcagcgccgcccc

SEQ ID NO: 2093198 - DNA, 25 bp, Homo sapien
caacgtcaagggtgttgaaatcagc

SEQ ID NO: 2093199 - DNA, 25 bp, Homo sapien
ggaggagcccagttcaacgtcaagg

SEQ ID NO: 2093200 - DNA, 25 bp, Homo sapien
ggtcttctacctgtaaacctcaggc

SEQ ID NO: 2093201 - DNA, 25 bp, Homo sapien
ctgtaaacctcaggcgtcttggaaa

SEQ ID NO: 2093202 - DNA, 25 bp, Homo sapien
gctccaaggaatccctggaatcagc

SEQ ID NO: 2093203 - DNA, 25 bp, Homo sapien
tggctccaaggaatccctggaatca

SEQ ID NO: 2093204 - DNA, 25 bp, Homo sapien
tgacgtccctaagcgtccactgccc

SEQ ID NO: 2093205 - DNA, 25 bp, Homo sapien
ctctcccctgacgtccctaagcgtc

SEQ ID NO: 2093206 - DNA, 25 bp, Homo sapien
ccctgacgtccctaagcgtccactg

SEQ ID NO: 2093207 - DNA, 25 bp, Homo sapien
tccctaagcgtccactgcccttcat

SEQ ID NO: 2093208 - DNA, 25 bp, Homo sapien
tttccatcgcctaaagcagagagct

SEQ ID NO: 2093209 - DNA, 25 bp, Homo sapien
tgccgcctgaatctcaccagaaagg

SEQ ID NO: 2093210 - DNA, 25 bp, Homo sapien
gagactgtgcatcgacggtgctgtc

SEQ ID NO: 2093211 - DNA, 25 bp, Homo sapien
gatgtgtacctttgtcccagcttgg

SEQ ID NO: 2093212 - DNA, 25 bp, Homo sapien
tggcatagccaaggtgccaggctct

SEQ ID NO: 2093213 - DNA, 25 bp, Homo sapien
cgaatcctgtgcagcattggcccaa

SEQ ID NO: 2093214 - DNA, 25 bp, Homo sapien
gatgcaaacccaggatggacttgcc

SEQ ID NO: 2093215 - DNA, 25 bp, Homo sapien
ccaggctctgcaaagggtaagctgc

SEQ ID NO: 2093216 - DNA, 25 bp, Homo sapien
agaggctgctctgcagtcgagtgct

SEQ ID NO: 2093217 - DNA, 25 bp, Homo sapien
tgagaaatgagagtggaaactgtga

SEQ ID NO: 2093218 - DNA, 25 bp, Homo sapien
aaatgagagtggaaactgtgagaga

SEQ ID NO: 2093219 - DNA, 25 bp, Homo sapien
tcgagtgctgggcacgtctgacgat

SEQ ID NO: 2093220 - DNA, 25 bp, Homo sapien
cacggccttgaggtaccaagagagt

SEQ ID NO: 2093221 - DNA, 25 bp, Homo sapien
ggaaaagaaagctgcgctgtggccc

SEQ ID NO: 2093222 - DNA, 25 bp, Homo sapien
caaaaagccacttaggaaagccacg

SEQ ID NO: 2093223 - DNA, 25 bp, Homo sapien
ctcaaaaagccacttaggaaagcca

SEQ ID NO: 2093224 - DNA, 25 bp, Homo sapien
gaggcttggccacccttgatggaaa

SEQ ID NO: 2093225 - DNA, 25 bp, Homo sapien
tattctgttgattcccgcaccaggc

SEQ ID NO: 2093226 - DNA, 25 bp, Homo sapien
tgcaggatgtgagagcaccgcgttc

SEQ ID NO: 2093227 - DNA, 25 bp, Homo sapien
ggttgatgccacttacttctggaca

SEQ ID NO: 2093228 - DNA, 25 bp, Homo sapien
acacgttctgccttggagggcaagc

SEQ ID NO: 2093229 - DNA, 25 bp, Homo sapien
gaagtcaatttgaacctttgctggg

SEQ ID NO: 2093230 - DNA, 25 bp, Homo sapien
gggctcggtattaacacgttctgcc

SEQ ID NO: 2093231 - DNA, 25 bp, Homo sapien
tttgctggggctcggtattaacacg

SEQ ID NO: 2093232 - DNA, 25 bp, Homo sapien
caggtctggggggtcgcattttcat

SEQ ID NO: 2093233 - DNA, 25 bp, Homo sapien
ttccctcacaagccagtttgctccc

SEQ ID NO: 2093234 - DNA, 25 bp, Homo sapien
tggggggtcgcattttcatagcctt

SEQ ID NO: 2093235 - DNA, 25 bp, Homo sapien
tccctcacaagccagtttgctccct

SEQ ID NO: 2093236 - DNA, 25 bp, Homo sapien
cagagccaagatgcagtactgatgg

SEQ ID NO: 2093237 - DNA, 25 bp, Homo sapien
tatggagatgcagagatcaacgtgc

SEQ ID NO: 2093238 - DNA, 25 bp, Homo sapien
catttcctcggacatctgtatggag

SEQ ID NO: 2093239 - DNA, 25 bp, Homo sapien
tagctgcttcgagtgggcatcgtga

SEQ ID NO: 2093240 - DNA, 25 bp, Homo sapien
tggctgtctatgaactagggttttc

SEQ ID NO: 2093241 - DNA, 25 bp, Homo sapien
aatagtttcgatgagctagtgacac

SEQ ID NO: 2093242 - DNA, 25 bp, Homo sapien
gcagagagttacagaaatagtttcg

SEQ ID NO: 2093243 - DNA, 25 bp, Homo sapien
gaactgagacgccagcttaaattgg

SEQ ID NO: 2093244 - DNA, 25 bp, Homo sapien
catcctaaagatgcaaagatcctcc

SEQ ID NO: 2093245 - DNA, 25 bp, Homo sapien
agctgaggagtcctgtgttcccccg

SEQ ID NO: 2093246 - DNA, 25 bp, Homo sapien
actgatgtatgttaaagccacagag

SEQ ID NO: 2093247 - DNA, 25 bp, Homo sapien
gagtcctgtgttcccccgcaaggag

SEQ ID NO: 2093248 - DNA, 25 bp, Homo sapien
tgaggagtcctgtgttcccccgcaa

SEQ ID NO: 2093249 - DNA, 25 bp, Homo sapien
aacactctcggggggcaatggtagc

SEQ ID NO: 2093250 - DNA, 25 bp, Homo sapien
cactctcggggggcaatggtagcac

SEQ ID NO: 2093251 - DNA, 25 bp, Homo sapien
agaaacactctcggggggcaatggt

SEQ ID NO: 2093252 - DNA, 25 bp, Homo sapien
gaaacactctcggggggcaatggta

SEQ ID NO: 2093253 - DNA, 25 bp, Homo sapien
tagatgaccccgcatgagatcaagt

SEQ ID NO: 2093254 - DNA, 25 bp, Homo sapien
gatcaagtttgctgtccatgtcgaa

SEQ ID NO: 2093255 - DNA, 25 bp, Homo sapien
tcgaatcggtgctgaaccgcgtgcc

SEQ ID NO: 2093256 - DNA, 25 bp, Homo sapien
cagatcgtgcagatggccagtcagc

SEQ ID NO: 2093257 - DNA, 25 bp, Homo sapien
taagggcttcattgcatggactctg

SEQ ID NO: 2093258 - DNA, 25 bp, Homo sapien
ataaatcaggcgaggacaggctggc

SEQ ID NO: 2093259 - DNA, 25 bp, Homo sapien
ttgccaagtacaatgcggagcctcc

SEQ ID NO: 2093260 - DNA, 25 bp, Homo sapien
tctggaatctgactgaaatgcgctc

SEQ ID NO: 2093261 - DNA, 25 bp, Homo sapien
aaagccatggcaccacttgctcaag

SEQ ID NO: 2093262 - DNA, 25 bp, Homo sapien
ttcctcacggccaccgcagagggat

SEQ ID NO: 2093263 - DNA, 25 bp, Homo sapien
ttcatgggccccaaggtattcctca

SEQ ID NO: 2093264 - DNA, 25 bp, Homo sapien
agtgacagcatacaacagccccctt

SEQ ID NO: 2093265 - DNA, 25 bp, Homo sapien
gcagagcagaggctgaatcttcctc

SEQ ID NO: 2093266 - DNA, 25 bp, Homo sapien
agcagaggctgaatcttcctcctga

SEQ ID NO: 2093267 - DNA, 25 bp, Homo sapien
tggagggcccggatcagctgagtca

SEQ ID NO: 2093268 - DNA, 25 bp, Homo sapien
cctcctgaaactggagggcccggat

SEQ ID NO: 2093269 - DNA, 25 bp, Homo sapien
ctcatgcccaacttctgaggattcg

SEQ ID NO: 2093270 - DNA, 25 bp, Homo sapien
gttttcagcgggatgctcacaggct

SEQ ID NO: 2093271 - DNA, 25 bp, Homo sapien
gaagtgttttcagcgggatgctcac

SEQ ID NO: 2093272 - DNA, 25 bp, Homo sapien
ttctgaggattcgagcagggctgaa

SEQ ID NO: 2093273 - DNA, 25 bp, Homo sapien
tgcctcgggattattgtgtccgtcc

SEQ ID NO: 2093274 - DNA, 25 bp, Homo sapien
tgcggtaacagtgcctcgggattat

SEQ ID NO: 2093275 - DNA, 25 bp, Homo sapien
ggattattgtgtccgtccccgctcc

SEQ ID NO: 2093276 - DNA, 25 bp, Homo sapien
ctgcggtaacagtgcctcgggatta

SEQ ID NO: 2093277 - DNA, 25 bp, Homo sapien
aggccgcgtccagcagtgcgcattc

SEQ ID NO: 2093278 - DNA, 25 bp, Homo sapien
tccagcagtgcgcattcctccaagt

SEQ ID NO: 2093279 - DNA, 25 bp, Homo sapien
caggccgcgtccagcagtgcgcatt

SEQ ID NO: 2093280 - DNA, 25 bp, Homo sapien
cgcgtccagcagtgcgcattcctcc

SEQ ID NO: 2093281 - DNA, 25 bp, Homo sapien
cattgctgtcaactgagtggattct

SEQ ID NO: 2093282 - DNA, 25 bp, Homo sapien
gtggcaccttctctgcgcccgcatt

SEQ ID NO: 2093283 - DNA, 25 bp, Homo sapien
ctatgtgcgttgctgtggcaccttc

SEQ ID NO: 2093284 - DNA, 25 bp, Homo sapien
tgggtgtttcggatgctgctccatg

SEQ ID NO: 2093285 - DNA, 25 bp, Homo sapien
agtaagtttcacgtggagtcgaagc

SEQ ID NO: 2093286 - DNA, 25 bp, Homo sapien
tcgaagcccagagcggtgcttgcag

SEQ ID NO: 2093287 - DNA, 25 bp, Homo sapien
tttcacgtggagtcgaagcccagag

SEQ ID NO: 2093288 - DNA, 25 bp, Homo sapien
agtcgaagcccagagcggtgcttgc

SEQ ID NO: 2093289 - DNA, 25 bp, Homo sapien
tattcctgtcctcagatcgcctggg

SEQ ID NO: 2093290 - DNA, 25 bp, Homo sapien
cttttgaactgaccgcacagggcca

SEQ ID NO: 2093291 - DNA, 25 bp, Homo sapien
gaagcacgcgttcttggctcaaagc

SEQ ID NO: 2093292 - DNA, 25 bp, Homo sapien
tatgtggccaaaggtatcagcccga

SEQ ID NO: 2093293 - DNA, 25 bp, Homo sapien
tctcccaggttcaagcaattctcct

SEQ ID NO: 2093294 - DNA, 25 bp, Homo sapien
tttttgagacggagtttggctcttg

SEQ ID NO: 2093295 - DNA, 25 bp, Homo sapien
tgtttgtttgtgtattttttgagac

SEQ ID NO: 2093296 - DNA, 25 bp, Homo sapien
atctcccaggttcaagcaattctcc

SEQ ID NO: 2093297 - DNA, 25 bp, Homo sapien
tcacgatacaagtacaaaaaggcag

SEQ ID NO: 2093298 - DNA, 25 bp, Homo sapien
tcagttttctacaaggaaggtgtgc

SEQ ID NO: 2093299 - DNA, 25 bp, Homo sapien
gccagggagagacattcacgataca

SEQ ID NO: 2093300 - DNA, 25 bp, Homo sapien
tagcttctgtagttcagtggtctca

SEQ ID NO: 2093301 - DNA, 25 bp, Homo sapien
cacctgagcatcctgccctttggtt

SEQ ID NO: 2093302 - DNA, 25 bp, Homo sapien
gccagggtgaaagggctgtcctttc

SEQ ID NO: 2093303 - DNA, 25 bp, Homo sapien
tagaagtgtgggggaccccgaatgc

SEQ ID NO: 2093304 - DNA, 25 bp, Homo sapien
tgggggaccccgaatgccagggtga

SEQ ID NO: 2093305 - DNA, 25 bp, Homo sapien
tgatgtccccaaagttaagtccctg

SEQ ID NO: 2093306 - DNA, 25 bp, Homo sapien
tcagccctggtgtagcctttccagg

SEQ ID NO: 2093307 - DNA, 25 bp, Homo sapien
ccagttgctaaaacttttggagttg

SEQ ID NO: 2093308 - DNA, 25 bp, Homo sapien
ttgcaacaagtaaaactgtacaccc

SEQ ID NO: 2093309 - DNA, 25 bp, Homo sapien
caaaagcggtcactgacattacccc

SEQ ID NO: 2093310 - DNA, 25 bp, Homo sapien
tggaagacaaaagcggtcactgaca

SEQ ID NO: 2093311 - DNA, 25 bp, Homo sapien
acattacccccaaccaatgatgtga

SEQ ID NO: 2093312 - DNA, 25 bp, Homo sapien
tacccccaaccaatgatgtgatgac

SEQ ID NO: 2093313 - DNA, 25 bp, Homo sapien
ccgaattggtaatgagaggtaattt

SEQ ID NO: 2093314 - DNA, 25 bp, Homo sapien
tgaggcattcgggaaaaccgaattg

SEQ ID NO: 2093315 - DNA, 25 bp, Homo sapien
tacatgttcatatcccgcttcaggt

SEQ ID NO: 2093316 - DNA, 25 bp, Homo sapien
tttcccagtactgaggcattcggga

SEQ ID NO: 2093317 - DNA, 25 bp, Homo sapien
aaccgactaaggctgtgagtgtccg

SEQ ID NO: 2093318 - DNA, 25 bp, Homo sapien
ggtacgcgcggctggtgcagcaaac

SEQ ID NO: 2093319 - DNA, 25 bp, Homo sapien
agtgtccgggaaccagacccgcttg

SEQ ID NO: 2093320 - DNA, 25 bp, Homo sapien
gagatgcggagcaggagcaattccg

SEQ ID NO: 2093321 - DNA, 25 bp, Homo sapien
ttgctgatttcgcagcggctctccc

SEQ ID NO: 2093322 - DNA, 25 bp, Homo sapien
ctcaggccgcgacttggagggttcc

SEQ ID NO: 2093323 - DNA, 25 bp, Homo sapien
gttccaaacgttccactccgcggca

SEQ ID NO: 2093324 - DNA, 25 bp, Homo sapien
tgggctggcgtcttcttcgcgcccg

SEQ ID NO: 2093325 - DNA, 25 bp, Homo sapien
gacttgtgaccagtattggtgacca

SEQ ID NO: 2093326 - DNA, 25 bp, Homo sapien
tccttccatggagaatttgcctgta

SEQ ID NO: 2093327 - DNA, 25 bp, Homo sapien
taagctctgctggtatagtttctcc

SEQ ID NO: 2093328 - DNA, 25 bp, Homo sapien
aacagattattgctgccatgcctcc

SEQ ID NO: 2093329 - DNA, 25 bp, Homo sapien
tttgcagtatctgggcgacacggga

SEQ ID NO: 2093330 - DNA, 25 bp, Homo sapien
gaacaattagtcattacaacacaga

SEQ ID NO: 2093331 - DNA, 25 bp, Homo sapien
cagtgtgaggctctgaatcactacc

SEQ ID NO: 2093332 - DNA, 25 bp, Homo sapien
ttcagaaaatggcagtacacatagt

SEQ ID NO: 2093333 - DNA, 25 bp, Homo sapien
ggaggaaaggtgcttactaaattca

SEQ ID NO: 2093334 - DNA, 25 bp, Homo sapien
aatggccttgagagacttgctggac

SEQ ID NO: 2093335 - DNA, 25 bp, Homo sapien
tacagagacacaaggtgagtacatg

SEQ ID NO: 2093336 - DNA, 25 bp, Homo sapien
gaaaccccatgaggtatgcttgtat

SEQ ID NO: 2093337 - DNA, 25 bp, Homo sapien
gggaccagttaacgtgaccttcatg

SEQ ID NO: 2093338 - DNA, 25 bp, Homo sapien
ggagcccagcgaaaaaccagtattc

SEQ ID NO: 2093339 - DNA, 25 bp, Homo sapien
tcaagacctcaggagtatcgctggc

SEQ ID NO: 2093340 - DNA, 25 bp, Homo sapien
aagaagaagcaactgggagcccagc

SEQ ID NO: 2093341 - DNA, 25 bp, Homo sapien
cacttaataattgaccagggcaggt

SEQ ID NO: 2093342 - DNA, 25 bp, Homo sapien
ctatgcttgtaaggcatggccggca

SEQ ID NO: 2093343 - DNA, 25 bp, Homo sapien
gagtgttgcaaacctgaccgtcagg

SEQ ID NO: 2093344 - DNA, 25 bp, Homo sapien
gaaagaaccttcagctcagctggag

SEQ ID NO: 2093345 - DNA, 25 bp, Homo sapien
caaccagaggaatagaagtagaagc

SEQ ID NO: 2093346 - DNA, 25 bp, Homo sapien
ttttgcatagagatgccgcaggtca

SEQ ID NO: 2093347 - DNA, 25 bp, Homo sapien
catgacatggagctagcttccaggg

SEQ ID NO: 2093348 - DNA, 25 bp, Homo sapien
gcaggtcaggtccttacagaaccct

SEQ ID NO: 2093349 - DNA, 25 bp, Homo sapien
gaagagactcacttagtatgtggcc

SEQ ID NO: 2093350 - DNA, 25 bp, Homo sapien
cactactcccaaagttcccttgtgt

SEQ ID NO: 2093351 - DNA, 25 bp, Homo sapien
gatacataagtttcccactactccc

SEQ ID NO: 2093352 - DNA, 25 bp, Homo sapien
tattggaaaactggagatccaccca

SEQ ID NO: 2093353 - DNA, 25 bp, Homo sapien
ggacttgtcatttgtaaccagatga

SEQ ID NO: 2093354 - DNA, 25 bp, Homo sapien
ttgtaaccagatgatgccctcttca

SEQ ID NO: 2093355 - DNA, 25 bp, Homo sapien
tctctgagactgtgaggtccgggca

SEQ ID NO: 2093356 - DNA, 25 bp, Homo sapien
gtccattccaactccgacatgtcag

SEQ ID NO: 2093357 - DNA, 25 bp, Homo sapien
gttactttttagaagccagcctgtg

SEQ ID NO: 2093358 - DNA, 25 bp, Homo sapien
ccatgttctcaaagtgatcccaagg

SEQ ID NO: 2093359 - DNA, 25 bp, Homo sapien
gaaactggagtggaagtcttgcacg

SEQ ID NO: 2093360 - DNA, 25 bp, Homo sapien
ggagaccatgcatcccacttaaggg

SEQ ID NO: 2093361 - DNA, 25 bp, Homo sapien
catctatcggacaggcagttgggaa

SEQ ID NO: 2093362 - DNA, 25 bp, Homo sapien
gggatttgtcctaatacaactgtgg

SEQ ID NO: 2093363 - DNA, 25 bp, Homo sapien
agaaccactaaggtgcgtgcacgcg

SEQ ID NO: 2093364 - DNA, 25 bp, Homo sapien
cacacaaagggatttgctacaggga

SEQ ID NO: 2093365 - DNA, 25 bp, Homo sapien
cattaaaaatctcccacctggccag

SEQ ID NO: 2093366 - DNA, 25 bp, Homo sapien
gccaatggatgtgggtataagtgat

SEQ ID NO: 2093367 - DNA, 25 bp, Homo sapien
ggtcattaaaaatctcccacctggc

SEQ ID NO: 2093368 - DNA, 25 bp, Homo sapien
tataagtgatgtgtgccacctccag

SEQ ID NO: 2093369 - DNA, 25 bp, Homo sapien
tcaagggtcccggagaaccacgata

SEQ ID NO: 2093370 - DNA, 25 bp, Homo sapien
cggagaaccacgatatgaacattcg

SEQ ID NO: 2093371 - DNA, 25 bp, Homo sapien
cccggagaaccacgatatgaacatt

SEQ ID NO: 2093372 - DNA, 25 bp, Homo sapien
gggtcccggagaaccacgatatgaa

SEQ ID NO: 2093373 - DNA, 25 bp, Homo sapien
aatcacatttaaggcttggctcagc

SEQ ID NO: 2093374 - DNA, 25 bp, Homo sapien
aaacttactcaaggcagagccagga

SEQ ID NO: 2093375 - DNA, 25 bp, Homo sapien
taatggtaaactttatccaagggca

SEQ ID NO: 2093376 - DNA, 25 bp, Homo sapien
ccaagggcacagaatcatatagtct

SEQ ID NO: 2093377 - DNA, 25 bp, Homo sapien
tattatgtgaggcaatttcaaaggc

SEQ ID NO: 2093378 - DNA, 25 bp, Homo sapien
catagtgcctttagtaccagtactg

SEQ ID NO: 2093379 - DNA, 25 bp, Homo sapien
tggataaaagctctagaagtggctc

SEQ ID NO: 2093380 - DNA, 25 bp, Homo sapien
gaatcccagtgtctcttcatagtat

SEQ ID NO: 2093381 - DNA, 25 bp, Homo sapien
tcctgcctcaaagtgaccgtataga

SEQ ID NO: 2093382 - DNA, 25 bp, Homo sapien
acttcactctcgtgcatgtgggtat

SEQ ID NO: 2093383 - DNA, 25 bp, Homo sapien
cactttgttataccagtggagggtg

SEQ ID NO: 2093384 - DNA, 25 bp, Homo sapien
gatgaagcagcctggtattttcgga

SEQ ID NO: 2093385 - DNA, 25 bp, Homo sapien
ggtaacatccctggaaggtaatgtg

SEQ ID NO: 2093386 - DNA, 25 bp, Homo sapien
tggtaacatccctggaaggtaatgt

SEQ ID NO: 2093387 - DNA, 25 bp, Homo sapien
tgtcttcatgtcgttctggtaacat

SEQ ID NO: 2093388 - DNA, 25 bp, Homo sapien
aggatggttttctctgtcaggcagt

SEQ ID NO: 2093389 - DNA, 25 bp, Homo sapien
tttattccaggatggttttctctgt

SEQ ID NO: 2093390 - DNA, 25 bp, Homo sapien
tttctctgtcaggcagtgtggccat

SEQ ID NO: 2093391 - DNA, 25 bp, Homo sapien
ggttttctctgtcaggcagtgtggc

SEQ ID NO: 2093392 - DNA, 25 bp, Homo sapien
gaatattctcggtacctcagaagcc

SEQ ID NO: 2093393 - DNA, 25 bp, Homo sapien
tccagagagacatcgatacatcttt

SEQ ID NO: 2093394 - DNA, 25 bp, Homo sapien
tgaatttcgtgaactgaacacaccc

SEQ ID NO: 2093395 - DNA, 25 bp, Homo sapien
gactcctttgggaagatcaataaca

SEQ ID NO: 2093396 - DNA, 25 bp, Homo sapien
gagtacacgaatttgcctttgatca

SEQ ID NO: 2093397 - DNA, 25 bp, Homo sapien
gcctttgatcatatcttgtacacca

SEQ ID NO: 2093398 - DNA, 25 bp, Homo sapien
tgtatgtacactgagtcactgagta

SEQ ID NO: 2093399 - DNA, 25 bp, Homo sapien
tcttgtacaccacttaggtcctgcc

SEQ ID NO: 2093400 - DNA, 25 bp, Homo sapien
gtgaaaaggcatagtttattttgat

SEQ ID NO: 2093401 - DNA, 25 bp, Homo sapien
ctgtagtgaaaaggcatagtttatt

SEQ ID NO: 2093402 - DNA, 25 bp, Homo sapien
tgtagtgaaaaggcatagtttattt

SEQ ID NO: 2093403 - DNA, 25 bp, Homo sapien
tagtgaaaaggcatagtttattttg

SEQ ID NO: 2093404 - DNA, 25 bp, Homo sapien
gcatttggaagttgagtagatcctg

SEQ ID NO: 2093405 - DNA, 25 bp, Homo sapien
ctgcatttggaagttgagtagatcc

SEQ ID NO: 2093406 - DNA, 25 bp, Homo sapien
tgcatttggaagttgagtagatcct

SEQ ID NO: 2093407 - DNA, 25 bp, Homo sapien
catttggaagttgagtagatcctgc

SEQ ID NO: 2093408 - DNA, 25 bp, Homo sapien
aataggacattctcggtttatgcag

SEQ ID NO: 2093409 - DNA, 25 bp, Homo sapien
gttcagccttgaggaaacgtattcc

SEQ ID NO: 2093410 - DNA, 25 bp, Homo sapien
cccagattgcaccagaagatgaata

SEQ ID NO: 2093411 - DNA, 25 bp, Homo sapien
gccctttgattagtgatcctagaga

SEQ ID NO: 2093412 - DNA, 25 bp, Homo sapien
agcaagtgatggctttccgtcccat

SEQ ID NO: 2093413 - DNA, 25 bp, Homo sapien
tagagcaggcgaaggggagatgacg

SEQ ID NO: 2093414 - DNA, 25 bp, Homo sapien
tgagcaagtgatggctttccgtccc

SEQ ID NO: 2093415 - DNA, 25 bp, Homo sapien
ttgagctgagcaagtgatggctttc

SEQ ID NO: 2093416 - DNA, 25 bp, Homo sapien
ttccgcttctctaggagataaaggc

SEQ ID NO: 2093417 - DNA, 25 bp, Homo sapien
tctttaatgaagttgaggccttggt

SEQ ID NO: 2093418 - DNA, 25 bp, Homo sapien
taagaaccccaaacattggtagtca

SEQ ID NO: 2093419 - DNA, 25 bp, Homo sapien
gcgctggtgctcatcagatcctcat

SEQ ID NO: 2093420 - DNA, 25 bp, Homo sapien
tgttccgtgccatgtcttacataag

SEQ ID NO: 2093421 - DNA, 25 bp, Homo sapien
catgaatcctagcaagtggtgagtt

SEQ ID NO: 2093422 - DNA, 25 bp, Homo sapien
caactgtgggaggtttcatgaatcc

SEQ ID NO: 2093423 - DNA, 25 bp, Homo sapien
tttagccagcttgataaatagagga

SEQ ID NO: 2093424 - DNA, 25 bp, Homo sapien
caggcccctggtgtagaggaaaatc

SEQ ID NO: 2093425 - DNA, 25 bp, Homo sapien
tccatggctctcaaagcaagggtgc

SEQ ID NO: 2093426 - DNA, 25 bp, Homo sapien
tgaattagaatcagcccaggccagc

SEQ ID NO: 2093427 - DNA, 25 bp, Homo sapien
tacttcctcgttggtagagagcagg

SEQ ID NO: 2093428 - DNA, 25 bp, Homo sapien
ggttcaggatgggtttgtgcagttg

SEQ ID NO: 2093429 - DNA, 25 bp, Homo sapien
ctcgccagacaactcctggactagg

SEQ ID NO: 2093430 - DNA, 25 bp, Homo sapien
tcctggttcaggatgggtttgtgca

SEQ ID NO: 2093431 - DNA, 25 bp, Homo sapien
actcctggactaggtcctggttcag

SEQ ID NO: 2093432 - DNA, 25 bp, Homo sapien
tgttagccttcacagaacaagtgca

SEQ ID NO: 2093433 - DNA, 25 bp, Homo sapien
gaaggctctaagacacaagtcaacg

SEQ ID NO: 2093434 - DNA, 25 bp, Homo sapien
cttggttgttaattgcctgttagcc

SEQ ID NO: 2093435 - DNA, 25 bp, Homo sapien
caaagtgccgttttgtcatctgtgg

SEQ ID NO: 2093436 - DNA, 25 bp, Homo sapien
tgaaatcagttcaggagacgctggg

SEQ ID NO: 2093437 - DNA, 25 bp, Homo sapien
taacctgagatctgagaattgtgcc

SEQ ID NO: 2093438 - DNA, 25 bp, Homo sapien
gcatgttttattgggtgcaagccct

SEQ ID NO: 2093439 - DNA, 25 bp, Homo sapien
tgtgggatctaccattcaagactgc

SEQ ID NO: 2093440 - DNA, 25 bp, Homo sapien
tgcgtgcgttgtccatgcctgacct

SEQ ID NO: 2093441 - DNA, 25 bp, Homo sapien
ccatcccaatgtgcgtgcgttgtcc

SEQ ID NO: 2093442 - DNA, 25 bp, Homo sapien
aggccttcccatcccaatgtgcgtg

SEQ ID NO: 2093443 - DNA, 25 bp, Homo sapien
tcccagttaacagcaggccttccca

SEQ ID NO: 2093444 - DNA, 25 bp, Homo sapien
ttccagtttctgaggcgcagcccag

SEQ ID NO: 2093445 - DNA, 25 bp, Homo sapien
agcaaacccatcaaggtaggcaaag

SEQ ID NO: 2093446 - DNA, 25 bp, Homo sapien
taggcaaagcccttccttgggagtc

SEQ ID NO: 2093447 - DNA, 25 bp, Homo sapien
gcaagactttcctggcagtaggaac

SEQ ID NO: 2093448 - DNA, 25 bp, Homo sapien
gagtcactggaatgcgtggtaagca

SEQ ID NO: 2093449 - DNA, 25 bp, Homo sapien
cttccggtggaaccgggcagagtca

SEQ ID NO: 2093450 - DNA, 25 bp, Homo sapien
aaccgggcagagtcactggaatgcg

SEQ ID NO: 2093451 - DNA, 25 bp, Homo sapien
tccgcttccggtggaaccgggcaga

SEQ ID NO: 2093452 - DNA, 25 bp, Homo sapien
caatgggaaccgttgaacctgtcaa

SEQ ID NO: 2093453 - DNA, 25 bp, Homo sapien
tccctggtgatagaggagtttccac

SEQ ID NO: 2093454 - DNA, 25 bp, Homo sapien
tcaagttgctgtttgccgggtctct

SEQ ID NO: 2093455 - DNA, 25 bp, Homo sapien
taaagtttgcagagcactcatcgag

SEQ ID NO: 2093456 - DNA, 25 bp, Homo sapien
ttccgaagctttgcatcgatggtca

SEQ ID NO: 2093457 - DNA, 25 bp, Homo sapien
cgtttccgaagctttgcatcgatgg

SEQ ID NO: 2093458 - DNA, 25 bp, Homo sapien
ctacatccgtttccgaagctttgca

SEQ ID NO: 2093459 - DNA, 25 bp, Homo sapien
catccgtttccgaagctttgcatcg

SEQ ID NO: 2093460 - DNA, 25 bp, Homo sapien
gcatagcctcttgggatgaggagtc

SEQ ID NO: 2093461 - DNA, 25 bp, Homo sapien
tgtggtgggttctctgcatagcctc

SEQ ID NO: 2093462 - DNA, 25 bp, Homo sapien
tgagttctgcctcagaagcttgatc

SEQ ID NO: 2093463 - DNA, 25 bp, Homo sapien
ctttttgacctgtacccagagggtg

SEQ ID NO: 2093464 - DNA, 25 bp, Homo sapien
caaagaacaccccatgcccttaatc

SEQ ID NO: 2093465 - DNA, 25 bp, Homo sapien
ttcacaataatcaatagctggggct

SEQ ID NO: 2093466 - DNA, 25 bp, Homo sapien
tacctaagtgaaatagaggtttata

SEQ ID NO: 2093467 - DNA, 25 bp, Homo sapien
gctaccagtttttgataaagctaaa

SEQ ID NO: 2093468 - DNA, 25 bp, Homo sapien
ccatatgacatagcactcttacttc

SEQ ID NO: 2093469 - DNA, 25 bp, Homo sapien
cagatagtacccgtgtagaaggcat

SEQ ID NO: 2093470 - DNA, 25 bp, Homo sapien
caaatcctgagcagccatagccttc

SEQ ID NO: 2093471 - DNA, 25 bp, Homo sapien
ttcatatctccagatagtacccgtg

SEQ ID NO: 2093472 - DNA, 25 bp, Homo sapien
tgcaaatcctgagcagccatagcct

SEQ ID NO: 2093473 - DNA, 25 bp, Homo sapien
tcctcatcttggttgaggccaaggt

SEQ ID NO: 2093474 - DNA, 25 bp, Homo sapien
catcttggttgaggccaaggtctgg

SEQ ID NO: 2093475 - DNA, 25 bp, Homo sapien
cttggttgaggccaaggtctggttt

SEQ ID NO: 2093476 - DNA, 25 bp, Homo sapien
cctcatcttggttgaggccaaggtc

SEQ ID NO: 2093477 - DNA, 25 bp, Homo sapien
gagagaggtatcttgtcctgcctca

SEQ ID NO: 2093478 - DNA, 25 bp, Homo sapien
agagaggtatcttgtcctgcctcag

SEQ ID NO: 2093479 - DNA, 25 bp, Homo sapien
tagagagaggtatcttgtcctgcct

SEQ ID NO: 2093480 - DNA, 25 bp, Homo sapien
ggatttgattgttcttgccagggca

SEQ ID NO: 2093481 - DNA, 25 bp, Homo sapien
gagcctcgcctctccaattgcaaga

SEQ ID NO: 2093482 - DNA, 25 bp, Homo sapien
ggaaactgggcacctaacctggtga

SEQ ID NO: 2093483 - DNA, 25 bp, Homo sapien
tggaaactcgatttagtaggctgct

SEQ ID NO: 2093484 - DNA, 25 bp, Homo sapien
gcagctggctgcaatactttgagtc

SEQ ID NO: 2093485 - DNA, 25 bp, Homo sapien
gagtcacgccctttttaattcaaca

SEQ ID NO: 2093486 - DNA, 25 bp, Homo sapien
tttggatggcacacatgaaattgac

SEQ ID NO: 2093487 - DNA, 25 bp, Homo sapien
actatacctgttatggattttgacc

SEQ ID NO: 2093488 - DNA, 25 bp, Homo sapien
tcagagtgcatttcatggcgggaac

SEQ ID NO: 2093489 - DNA, 25 bp, Homo sapien
cattccgtggccaagtaccttagca

SEQ ID NO: 2093490 - DNA, 25 bp, Homo sapien
taccttagcaatgggtccaactgcc

SEQ ID NO: 2093491 - DNA, 25 bp, Homo sapien
gaatccagtcatggtccgaggctac

SEQ ID NO: 2093492 - DNA, 25 bp, Homo sapien
ccagataagatgaaagccaagtctc

SEQ ID NO: 2093493 - DNA, 25 bp, Homo sapien
gccaagtctcttctaagcaagctgt

SEQ ID NO: 2093494 - DNA, 25 bp, Homo sapien
ttccaaattcagtagactgtgaccg

SEQ ID NO: 2093495 - DNA, 25 bp, Homo sapien
taggcgttgcggtgattttgatctt

SEQ ID NO: 2093496 - DNA, 25 bp, Homo sapien
ccatctttcgggacatttttaattg

SEQ ID NO: 2093497 - DNA, 25 bp, Homo sapien
catctttcgggacatttttaattgc

SEQ ID NO: 2093498 - DNA, 25 bp, Homo sapien
ggtatgttctcatgaagggccacag

SEQ ID NO: 2093499 - DNA, 25 bp, Homo sapien
gctatggtttcgctgggcttggctt

SEQ ID NO: 2093500 - DNA, 25 bp, Homo sapien
gcctttggattgtagactgagtcac

SEQ ID NO: 2093501 - DNA, 25 bp, Homo sapien
ccacagaagtacaagggcacaagcc

SEQ ID NO: 2093502 - DNA, 25 bp, Homo sapien
ggaaatctgatctcaaccaagtaaa

SEQ ID NO: 2093503 - DNA, 25 bp, Homo sapien
agagccgcaattactcttgagtaac

SEQ ID NO: 2093504 - DNA, 25 bp, Homo sapien
tgactcaagaggtatatgttcagcc

SEQ ID NO: 2093505 - DNA, 25 bp, Homo sapien
tatgatcatgagttgcttccccttg

SEQ ID NO: 2093506 - DNA, 25 bp, Homo sapien
tcccaaacacccatctcaccttcct

SEQ ID NO: 2093507 - DNA, 25 bp, Homo sapien
tcctcactacccatcggaattagga

SEQ ID NO: 2093508 - DNA, 25 bp, Homo sapien
ttcctcactacccatcggaattagg

SEQ ID NO: 2093509 - DNA, 25 bp, Homo sapien
ccttcctcactacccatcggaatta

SEQ ID NO: 2093510 - DNA, 25 bp, Homo sapien
gccaccgcaggaaatattcacattg

SEQ ID NO: 2093511 - DNA, 25 bp, Homo sapien
ttttgactggcggaagactcttggc

SEQ ID NO: 2093512 - DNA, 25 bp, Homo sapien
tcttggctagccaccgcaggaaata

SEQ ID NO: 2093513 - DNA, 25 bp, Homo sapien
atcttgcgcttcattttgactggcg

SEQ ID NO: 2093514 - DNA, 25 bp, Homo sapien
ttgtgtcctggtaattgggcttttg

SEQ ID NO: 2093515 - DNA, 25 bp, Homo sapien
ttgctgcaagtttagcctcaacttt

SEQ ID NO: 2093516 - DNA, 25 bp, Homo sapien
caagtttagcctcaactttgtgtcc

SEQ ID NO: 2093517 - DNA, 25 bp, Homo sapien
tgtcctggtaattgggcttttgcct

SEQ ID NO: 2093518 - DNA, 25 bp, Homo sapien
tgtgggctatcatcaagagacattt

SEQ ID NO: 2093519 - DNA, 25 bp, Homo sapien
aaaggttatagtaatatcttcaact

SEQ ID NO: 2093520 - DNA, 25 bp, Homo sapien
aatgtgggctatcatcaagagacat

SEQ ID NO: 2093521 - DNA, 25 bp, Homo sapien
tcaaatgtgggctatcatcaagaga

SEQ ID NO: 2093522 - DNA, 25 bp, Homo sapien
gtctcacacagagcctgttatacag

SEQ ID NO: 2093523 - DNA, 25 bp, Homo sapien
gcaggacccaaatattaattcccac

SEQ ID NO: 2093524 - DNA, 25 bp, Homo sapien
taattcttctatgttaagtctcaca

SEQ ID NO: 2093525 - DNA, 25 bp, Homo sapien
tttcctagtattatggaaaagtcta

SEQ ID NO: 2093526 - DNA, 25 bp, Homo sapien
ggatttctgctcaaacactggatct

SEQ ID NO: 2093527 - DNA, 25 bp, Homo sapien
agcaatctcagaaccatcccaggat

SEQ ID NO: 2093528 - DNA, 25 bp, Homo sapien
caaccacgtcttttgaactcaggaa

SEQ ID NO: 2093529 - DNA, 25 bp, Homo sapien
gggtaggtttgggatcatcaacagc

SEQ ID NO: 2093530 - DNA, 25 bp, Homo sapien
taatggccaacggaggcctctgaga

SEQ ID NO: 2093531 - DNA, 25 bp, Homo sapien
gagatggcttctctgttggccaaaa

SEQ ID NO: 2093532 - DNA, 25 bp, Homo sapien
tcaaggaactgatctatatagtggg

SEQ ID NO: 2093533 - DNA, 25 bp, Homo sapien
aatttgttctgaggatagcatcaag

SEQ ID NO: 2093534 - DNA, 25 bp, Homo sapien
acggaggaatgtattccattacatg

SEQ ID NO: 2093535 - DNA, 25 bp, Homo sapien
tttatgtagaacccgtgggttgcca

SEQ ID NO: 2093536 - DNA, 25 bp, Homo sapien
gctggcttcaggctttatgtagaac

SEQ ID NO: 2093537 - DNA, 25 bp, Homo sapien
tccattacatgtctgctggcttcag

SEQ ID NO: 2093538 - DNA, 25 bp, Homo sapien
ctgcaggcatctaaccaggttgtgc

SEQ ID NO: 2093539 - DNA, 25 bp, Homo sapien
caacgtggcttttgtggaccatcca

SEQ ID NO: 2093540 - DNA, 25 bp, Homo sapien
catcagggagtgtatggctgtcacc

SEQ ID NO: 2093541 - DNA, 25 bp, Homo sapien
ataaataatggatgaaacttgctgc

SEQ ID NO: 2093542 - DNA, 25 bp, Homo sapien
gatctgctgaaagggtaggctcccc

SEQ ID NO: 2093543 - DNA, 25 bp, Homo sapien
aggcggaaggatcctcgctgccaag

SEQ ID NO: 2093544 - DNA, 25 bp, Homo sapien
caaagccccattcatgtatgtgagc

SEQ ID NO: 2093545 - DNA, 25 bp, Homo sapien
ggaaacccatgctctatctgagtga

SEQ ID NO: 2093546 - DNA, 25 bp, Homo sapien
ccagctaaagacctaaactccaaag

SEQ ID NO: 2093547 - DNA, 25 bp, Homo sapien
aagctgtttctaaatcggaaatccg

SEQ ID NO: 2093548 - DNA, 25 bp, Homo sapien
tgccctcaagttcacggtcacactg

SEQ ID NO: 2093549 - DNA, 25 bp, Homo sapien
ttccagttccacagcccgaaagctg

SEQ ID NO: 2093550 - DNA, 25 bp, Homo sapien
ggcgtgacagagtcgtaataacgtc

SEQ ID NO: 2093551 - DNA, 25 bp, Homo sapien
gcggcgtgacagagtcgtaataacg

SEQ ID NO: 2093552 - DNA, 25 bp, Homo sapien
cgtgacagagtcgtaataacgtcat

SEQ ID NO: 2093553 - DNA, 25 bp, Homo sapien
cgcggcgtgacagagtcgtaataac

SEQ ID NO: 2093554 - DNA, 25 bp, Homo sapien
cacaacccaggaggcacgacgcggg

SEQ ID NO: 2093555 - DNA, 25 bp, Homo sapien
gcacgacgcgggtgcccccaagtct

SEQ ID NO: 2093556 - DNA, 25 bp, Homo sapien
ggcagcggcgactcctcacaaccca

SEQ ID NO: 2093557 - DNA, 25 bp, Homo sapien
cagcagacgccacgcctcagtcgca

SEQ ID NO: 2093558 - DNA, 25 bp, Homo sapien
cggcttctgagaagcgccagacagc

SEQ ID NO: 2093559 - DNA, 25 bp, Homo sapien
ggagacggcggcgagcatcttcctc

SEQ ID NO: 2093560 - DNA, 25 bp, Homo sapien
aagcgccagacagcacgcgggagac

SEQ ID NO: 2093561 - DNA, 25 bp, Homo sapien
agacggcggcgagcatcttcctcat

SEQ ID NO: 2093562 - DNA, 25 bp, Homo sapien
cgacttcgcctggcgcacagctggg

SEQ ID NO: 2093563 - DNA, 25 bp, Homo sapien
ggcgtgatcccggtccgtgccgctt

SEQ ID NO: 2093564 - DNA, 25 bp, Homo sapien
gaagttcacacggaccttggcgtga

SEQ ID NO: 2093565 - DNA, 25 bp, Homo sapien
cccgaggccaggaacggaatgcagg

SEQ ID NO: 2093566 - DNA, 25 bp, Homo sapien
ttcaaaggtgacttcatatctggaa

SEQ ID NO: 2093567 - DNA, 25 bp, Homo sapien
gacttcatatctggaactcaatttt

SEQ ID NO: 2093568 - DNA, 25 bp, Homo sapien
caaaggtgacttcatatctggaact

SEQ ID NO: 2093569 - DNA, 25 bp, Homo sapien
ggtgacttcatatctggaactcaat

SEQ ID NO: 2093570 - DNA, 25 bp, Homo sapien
tgagcctggagatggagaccagact

SEQ ID NO: 2093571 - DNA, 25 bp, Homo sapien
aagagagtgagagtaatcccagcac

SEQ ID NO: 2093572 - DNA, 25 bp, Homo sapien
ctgcctggttttaagagagtgagag

SEQ ID NO: 2093573 - DNA, 25 bp, Homo sapien
gttttaagagagtgagagtaatccc

SEQ ID NO: 2093574 - DNA, 25 bp, Homo sapien
aaattacgggatgctaccagcactc

SEQ ID NO: 2093575 - DNA, 25 bp, Homo sapien
tagcatcatttgcaaaattacggga

SEQ ID NO: 2093576 - DNA, 25 bp, Homo sapien
gcaaaattacgggatgctaccagca

SEQ ID NO: 2093577 - DNA, 25 bp, Homo sapien
catttgcaaaattacgggatgctac

SEQ ID NO: 2093578 - DNA, 25 bp, Homo sapien
tcttccagccggtgaaggtcacatt

SEQ ID NO: 2093579 - DNA, 25 bp, Homo sapien
tgctttcaactccattcggcgtaca

SEQ ID NO: 2093580 - DNA, 25 bp, Homo sapien
caagtgacagaaaccacgaataatt

SEQ ID NO: 2093581 - DNA, 25 bp, Homo sapien
ccatcacacaagtgacagaaaccac

SEQ ID NO: 2093582 - DNA, 25 bp, Homo sapien
gtgagcccggtaggctgtgatgaga

SEQ ID NO: 2093583 - DNA, 25 bp, Homo sapien
tgaaagtaaagccgtgagcccggta

SEQ ID NO: 2093584 - DNA, 25 bp, Homo sapien
gcgagaatttctcggacggaaaggc

SEQ ID NO: 2093585 - DNA, 25 bp, Homo sapien
tgtaagctctgcgagaatttctcgg

SEQ ID NO: 2093586 - DNA, 25 bp, Homo sapien
gactgctagacttcttctggcatgc

SEQ ID NO: 2093587 - DNA, 25 bp, Homo sapien
gcttgaatgataaccaaacctactg

SEQ ID NO: 2093588 - DNA, 25 bp, Homo sapien
taccatggagtgcttcaaccgaact

SEQ ID NO: 2093589 - DNA, 25 bp, Homo sapien
gaagtaccagagcaccaaaggagag

SEQ ID NO: 2093590 - DNA, 25 bp, Homo sapien
gaacaaaccaactctacaaagcaaa

SEQ ID NO: 2093591 - DNA, 25 bp, Homo sapien
cgcaccccaaatatgtactctgagg

SEQ ID NO: 2093592 - DNA, 25 bp, Homo sapien
ggccagttcagtcgtctaagtacct

SEQ ID NO: 2093593 - DNA, 25 bp, Homo sapien
ggctcaaccattagaacacagaggc

SEQ ID NO: 2093594 - DNA, 25 bp, Homo sapien
tacatgtgcatcgatcctcctttcc

SEQ ID NO: 2093595 - DNA, 25 bp, Homo sapien
cccgtagaagttcttggcatacatg

SEQ ID NO: 2093596 - DNA, 25 bp, Homo sapien
ctgcgctcccacgatgccattgccc

SEQ ID NO: 2093597 - DNA, 25 bp, Homo sapien
gccattgcccccgtagaagttcttg

SEQ ID NO: 2093598 - DNA, 25 bp, Homo sapien
cagggccaaatctaaagcagcacac

SEQ ID NO: 2093599 - DNA, 25 bp, Homo sapien
tatgcgacattgaccaaagcgtcac

SEQ ID NO: 2093600 - DNA, 25 bp, Homo sapien
gcacatggctgtactacttcaggaa

SEQ ID NO: 2093601 - DNA, 25 bp, Homo sapien
ccaacatcatatatgcgacattgac

SEQ ID NO: 2093602 - DNA, 25 bp, Homo sapien
aatactatgttctattttaaccagt

SEQ ID NO: 2093603 - DNA, 25 bp, Homo sapien
cacagaaatccatgaggggagatac

SEQ ID NO: 2093604 - DNA, 25 bp, Homo sapien
cacagaaattacactgctgctacaa

SEQ ID NO: 2093605 - DNA, 25 bp, Homo sapien
tgctgctacaaactctccttccaac

SEQ ID NO: 2093606 - DNA, 25 bp, Homo sapien
ttttccattatacttacaggctaga

SEQ ID NO: 2093607 - DNA, 25 bp, Homo sapien
tatacttacaggctagagcaatccc

SEQ ID NO: 2093608 - DNA, 25 bp, Homo sapien
cttacaggctagagcaatcccagcg

SEQ ID NO: 2093609 - DNA, 25 bp, Homo sapien
ccattatacttacaggctagagcaa

SEQ ID NO: 2093610 - DNA, 25 bp, Homo sapien
aataagcaatatgctacttctttag

SEQ ID NO: 2093611 - DNA, 25 bp, Homo sapien
cctaataagcaatatgctacttctt

SEQ ID NO: 2093612 - DNA, 25 bp, Homo sapien
taataagcaatatgctacttcttta

SEQ ID NO: 2093613 - DNA, 25 bp, Homo sapien
ctaataagcaatatgctacttcttt

SEQ ID NO: 2093614 - DNA, 25 bp, Homo sapien
tctaaaaccgagctttgggtggtga

SEQ ID NO: 2093615 - DNA, 25 bp, Homo sapien
gggccatgctagcagtaaggaacac

SEQ ID NO: 2093616 - DNA, 25 bp, Homo sapien
tactcttgcaactaaggaaggtgac

SEQ ID NO: 2093617 - DNA, 25 bp, Homo sapien
tatgaaatctatcaggcccactgga

SEQ ID NO: 2093618 - DNA, 25 bp, Homo sapien
gcttcatcatctctaacagctgctg

SEQ ID NO: 2093619 - DNA, 25 bp, Homo sapien
tcatcatctctaacagctgctgctc

SEQ ID NO: 2093620 - DNA, 25 bp, Homo sapien
tctttctccaggcttcatcatctct

SEQ ID NO: 2093621 - DNA, 25 bp, Homo sapien
ccaggcttcatcatctctaacagct

SEQ ID NO: 2093622 - DNA, 25 bp, Homo sapien
ggctgccgctctctcaacagacgtt

SEQ ID NO: 2093623 - DNA, 25 bp, Homo sapien
aacagacgttcccattccatagcga

SEQ ID NO: 2093624 - DNA, 25 bp, Homo sapien
tgttgtaagcttcgaatatctggcc

SEQ ID NO: 2093625 - DNA, 25 bp, Homo sapien
tcagcccaggaatgaaatcgcctct

SEQ ID NO: 2093626 - DNA, 25 bp, Homo sapien
cccaaaccattttactttcacatga

SEQ ID NO: 2093627 - DNA, 25 bp, Homo sapien
ctccaatgtttctaagatcgtcaag

SEQ ID NO: 2093628 - DNA, 25 bp, Homo sapien
gaaactctccaatgtttctaagatc

SEQ ID NO: 2093629 - DNA, 25 bp, Homo sapien
caaaccattttactttcacatgacc

SEQ ID NO: 2093630 - DNA, 25 bp, Homo sapien
ttcccagatctacaataggcagcag

SEQ ID NO: 2093631 - DNA, 25 bp, Homo sapien
aataggcagcagcaaaccttgttgc

SEQ ID NO: 2093632 - DNA, 25 bp, Homo sapien
cctctcggacgcacaggatatccat

SEQ ID NO: 2093633 - DNA, 25 bp, Homo sapien
aaaccttgttgcctctcggacgcac

SEQ ID NO: 2093634 - DNA, 25 bp, Homo sapien
cgatgactggaagaacaggccggca

SEQ ID NO: 2093635 - DNA, 25 bp, Homo sapien
gccctttattaagcgtccagtgtag

SEQ ID NO: 2093636 - DNA, 25 bp, Homo sapien
tccagtgtagtcttatcagatcttc

SEQ ID NO: 2093637 - DNA, 25 bp, Homo sapien
cagttagttagttaggaacgatgac

SEQ ID NO: 2093638 - DNA, 25 bp, Homo sapien
tgtccgtggtaacggtaagtctgca

SEQ ID NO: 2093639 - DNA, 25 bp, Homo sapien
atactgtgtccgtggtaacggtaag

SEQ ID NO: 2093640 - DNA, 25 bp, Homo sapien
ggtaacggtaagtctgcagctccat

SEQ ID NO: 2093641 - DNA, 25 bp, Homo sapien
cgtggtaacggtaagtctgcagctc

SEQ ID NO: 2093642 - DNA, 25 bp, Homo sapien
tcactataggcgtggcagagttgtt

SEQ ID NO: 2093643 - DNA, 25 bp, Homo sapien
gaacgcagcctaacattctgtaata

SEQ ID NO: 2093644 - DNA, 25 bp, Homo sapien
ggattgtcccaatgaggtgaaatac

SEQ ID NO: 2093645 - DNA, 25 bp, Homo sapien
tagaaaaccgtacactggtgagtca

SEQ ID NO: 2093646 - DNA, 25 bp, Homo sapien
ctttagttcttccacactggcaaga

SEQ ID NO: 2093647 - DNA, 25 bp, Homo sapien
tgtccttgagaagcataatagggtc

SEQ ID NO: 2093648 - DNA, 25 bp, Homo sapien
ggcaagattgctgttcaccatcctg

SEQ ID NO: 2093649 - DNA, 25 bp, Homo sapien
gagaagcataatagggtcactctta

SEQ ID NO: 2093650 - DNA, 25 bp, Homo sapien
caaaccaccatgaacaagtgactgt

SEQ ID NO: 2093651 - DNA, 25 bp, Homo sapien
cttcaaaccaccatgaacaagtgac

SEQ ID NO: 2093652 - DNA, 25 bp, Homo sapien
aaccaccatgaacaagtgactgtac

SEQ ID NO: 2093653 - DNA, 25 bp, Homo sapien
tcaaaccaccatgaacaagtgactg

SEQ ID NO: 2093654 - DNA, 25 bp, Homo sapien
gaacttcaaaaggtgggtcgctgga

SEQ ID NO: 2093655 - DNA, 25 bp, Homo sapien
tccaaaggtggctcaggatcggccg

SEQ ID NO: 2093656 - DNA, 25 bp, Homo sapien
gtagatgtggtagcccagctcttcc

SEQ ID NO: 2093657 - DNA, 25 bp, Homo sapien
tcaggatcggccgtggcaaactggg

SEQ ID NO: 2093658 - DNA, 25 bp, Homo sapien
tgcatgcaattactacctgctcaat

SEQ ID NO: 2093659 - DNA, 25 bp, Homo sapien
cctgctcaatctacacacttaatgg

SEQ ID NO: 2093660 - DNA, 25 bp, Homo sapien
gcactaatgtacaaactgcatgcaa

SEQ ID NO: 2093661 - DNA, 25 bp, Homo sapien
gttgagaacactgtctggtagcccc

SEQ ID NO: 2093662 - DNA, 25 bp, Homo sapien
gcttatagactggttgcggctgcaa

SEQ ID NO: 2093663 - DNA, 25 bp, Homo sapien
tcctactactgctgggacacgagcg

SEQ ID NO: 2093664 - DNA, 25 bp, Homo sapien
tagtgtatacacgaattccgctgtg

SEQ ID NO: 2093665 - DNA, 25 bp, Homo sapien
tcttgtagagaaatggtcagcgcga

SEQ ID NO: 2093666 - DNA, 25 bp, Homo sapien
ccagtgcagttagggatgtgattcc

SEQ ID NO: 2093667 - DNA, 25 bp, Homo sapien
gacgggactgattgtaaagggcaca

SEQ ID NO: 2093668 - DNA, 25 bp, Homo sapien
ggccacttagaaacgagctccagag

SEQ ID NO: 2093669 - DNA, 25 bp, Homo sapien
cagagctacctcttggaatgtggac

SEQ ID NO: 2093670 - DNA, 25 bp, Homo sapien
tgttgaatgctctctggataatggc

SEQ ID NO: 2093671 - DNA, 25 bp, Homo sapien
ccaggactccagtagattctagact

SEQ ID NO: 2093672 - DNA, 25 bp, Homo sapien
tagattcaacaacatggctgcattg

SEQ ID NO: 2093673 - DNA, 25 bp, Homo sapien
tcttctgcggcaaactctagaacag

SEQ ID NO: 2093674 - DNA, 25 bp, Homo sapien
gacacctcttagacaggatgatgtg

SEQ ID NO: 2093675 - DNA, 25 bp, Homo sapien
tggatacaggcacaagcttgagttg

SEQ ID NO: 2093676 - DNA, 25 bp, Homo sapien
gagagtccttcccactggatacagg

SEQ ID NO: 2093677 - DNA, 25 bp, Homo sapien
tactagagagaccaggatgaaggca

SEQ ID NO: 2093678 - DNA, 25 bp, Homo sapien
catttagctcccacggcacgtggta

SEQ ID NO: 2093679 - DNA, 25 bp, Homo sapien
gctcccacggcacgtggtatttggt

SEQ ID NO: 2093680 - DNA, 25 bp, Homo sapien
atttagctcccacggcacgtggtat

SEQ ID NO: 2093681 - DNA, 25 bp, Homo sapien
tagctcccacggcacgtggtatttg

SEQ ID NO: 2093682 - DNA, 25 bp, Homo sapien
tgaggaaccacttaattaggcccca

SEQ ID NO: 2093683 - DNA, 25 bp, Homo sapien
ccactggatgttcgcgatggacaac

SEQ ID NO: 2093684 - DNA, 25 bp, Homo sapien
tgcaggccgcggtcaccattctcat

SEQ ID NO: 2093685 - DNA, 25 bp, Homo sapien
acatcatccgccgagcggtgcaggc

SEQ ID NO: 2093686 - DNA, 25 bp, Homo sapien
ggttgtcatcaactagctgcaaaca

SEQ ID NO: 2093687 - DNA, 25 bp, Homo sapien
ctggttgtcatcaactagctgcaaa

SEQ ID NO: 2093688 - DNA, 25 bp, Homo sapien
gttgtcatcaactagctgcaaacac

SEQ ID NO: 2093689 - DNA, 25 bp, Homo sapien
tggttgtcatcaactagctgcaaac

SEQ ID NO: 2093690 - DNA, 25 bp, Homo sapien
gtggatataagtagcattctttatg

SEQ ID NO: 2093691 - DNA, 25 bp, Homo sapien
gcattctttatgacatgtttgtcaa

SEQ ID NO: 2093692 - DNA, 25 bp, Homo sapien
tggatataagtagcattctttatga

SEQ ID NO: 2093693 - DNA, 25 bp, Homo sapien
cttcccagccgagagggcagagtga

SEQ ID NO: 2093694 - DNA, 25 bp, Homo sapien
gagctcgtcatctctacagtagcca

SEQ ID NO: 2093695 - DNA, 25 bp, Homo sapien
tgtgtgacgcactgactggaatgtc

SEQ ID NO: 2093696 - DNA, 25 bp, Homo sapien
tgagatgaacgtgactgaatccagc

SEQ ID NO: 2093697 - DNA, 25 bp, Homo sapien
tactattggagcatgaattttacaa

SEQ ID NO: 2093698 - DNA, 25 bp, Homo sapien
taaggcatccggtggttttagattc

SEQ ID NO: 2093699 - DNA, 25 bp, Homo sapien
acaagcaggcctgtaagataaggca

SEQ ID NO: 2093700 - DNA, 25 bp, Homo sapien
aacagagcacgtggtatagtgcacg

SEQ ID NO: 2093701 - DNA, 25 bp, Homo sapien
cctttcttgctatcgccgacattct

SEQ ID NO: 2093702 - DNA, 25 bp, Homo sapien
gatccggggatagcacggtgccttc

SEQ ID NO: 2093703 - DNA, 25 bp, Homo sapien
cttctgtaggaaggctgactgtggt

SEQ ID NO: 2093704 - DNA, 25 bp, Homo sapien
tggccttcacattgattgattcagg

SEQ ID NO: 2093705 - DNA, 25 bp, Homo sapien
gcaaagacagtgttcgccaaacatc

SEQ ID NO: 2093706 - DNA, 25 bp, Homo sapien
cttgggccctcgtgactagtactgg

SEQ ID NO: 2093707 - DNA, 25 bp, Homo sapien
tattagcttgatgcattgtgtggca

SEQ ID NO: 2093708 - DNA, 25 bp, Homo sapien
cctttcacgtgagttatgtctggct

SEQ ID NO: 2093709 - DNA, 25 bp, Homo sapien
caggcagtttagtccatagtggtac

SEQ ID NO: 2093710 - DNA, 25 bp, Homo sapien
tactacacgtagtcagaagcgagtg

SEQ ID NO: 2093711 - DNA, 25 bp, Homo sapien
tctcaatgcgaaatgaaaactcagg

SEQ ID NO: 2093712 - DNA, 25 bp, Homo sapien
gggctggcactcgttgtgacttaca

SEQ ID NO: 2093713 - DNA, 25 bp, Homo sapien
atgaagagaagaaaatccggcttcg

SEQ ID NO: 2093714 - DNA, 25 bp, Homo sapien
gtctgagttggatgaagagaagaaa

SEQ ID NO: 2093715 - DNA, 25 bp, Homo sapien
tggatgaagagaagaaaatccggct

SEQ ID NO: 2093716 - DNA, 25 bp, Homo sapien
tgagttggatgaagagaagaaaatc

SEQ ID NO: 2093717 - DNA, 25 bp, Homo sapien
cataacctatagtgacactctcttc

SEQ ID NO: 2093718 - DNA, 25 bp, Homo sapien
cttcatctccccacgccttagccat

SEQ ID NO: 2093719 - DNA, 25 bp, Homo sapien
tgcataacctatagtgacactctct

SEQ ID NO: 2093720 - DNA, 25 bp, Homo sapien
tttgcataacctatagtgacactct

SEQ ID NO: 2093721 - DNA, 25 bp, Homo sapien
tgcccatgtgtggacgtgtgcagct

SEQ ID NO: 2093722 - DNA, 25 bp, Homo sapien
gagatacggttgctactggtctaca

SEQ ID NO: 2093723 - DNA, 25 bp, Homo sapien
ctactggtctacagtcaagtctgca

SEQ ID NO: 2093724 - DNA, 25 bp, Homo sapien
catatgacgggctgcggtgcccatg

SEQ ID NO: 2093725 - DNA, 25 bp, Homo sapien
ccttactggcaaccttcagacacag

SEQ ID NO: 2093726 - DNA, 25 bp, Homo sapien
cggctggctcctacagacactgtct

SEQ ID NO: 2093727 - DNA, 25 bp, Homo sapien
gtgtgtgtgaacaacagccgcgcct

SEQ ID NO: 2093728 - DNA, 25 bp, Homo sapien
gctctctcgggattagttgctcaga

SEQ ID NO: 2093729 - DNA, 25 bp, Homo sapien
tgaatgacacttggagtgttccaga

SEQ ID NO: 2093730 - DNA, 25 bp, Homo sapien
atgaatgacacttggagtgttccag

SEQ ID NO: 2093731 - DNA, 25 bp, Homo sapien
aatgacacttggagtgttccagatt

SEQ ID NO: 2093732 - DNA, 25 bp, Homo sapien
gaatgacacttggagtgttccagat

SEQ ID NO: 2093733 - DNA, 25 bp, Homo sapien
ttggggctaggatgtgtgactgtga

SEQ ID NO: 2093734 - DNA, 25 bp, Homo sapien
cttggggctaggatgtgtgactgtg

SEQ ID NO: 2093735 - DNA, 25 bp, Homo sapien
tggcaggccttgtaagagcactaga

SEQ ID NO: 2093736 - DNA, 25 bp, Homo sapien
catctttgcaactgctgacctgcag

SEQ ID NO: 2093737 - DNA, 25 bp, Homo sapien
gagcactagagctctcaacatgagc

SEQ ID NO: 2093738 - DNA, 25 bp, Homo sapien
tagaaacagatgtgcgatggttggc

SEQ ID NO: 2093739 - DNA, 25 bp, Homo sapien
tcgtcatcttggaggcctgttccca

SEQ ID NO: 2093740 - DNA, 25 bp, Homo sapien
ggaaccttctgtttgtgcatgagaa

SEQ ID NO: 2093741 - DNA, 25 bp, Homo sapien
gtcttgtggagtaatttggaggaac

SEQ ID NO: 2093742 - DNA, 25 bp, Homo sapien
gataaactcgtttgtgactcatccc

SEQ ID NO: 2093743 - DNA, 25 bp, Homo sapien
cctggtggggcccaagcttgggtag

SEQ ID NO: 2093744 - DNA, 25 bp, Homo sapien
tcagtctgaggcaatggccctggtg

SEQ ID NO: 2093745 - DNA, 25 bp, Homo sapien
tggggcccaagcttgggtagccagg

SEQ ID NO: 2093746 - DNA, 25 bp, Homo sapien
cccaagcttgggtagccaggggacg

SEQ ID NO: 2093747 - DNA, 25 bp, Homo sapien
aatggtacccacatgctgggcagac

SEQ ID NO: 2093748 - DNA, 25 bp, Homo sapien
tgccaaatggtacccacatgctggg

SEQ ID NO: 2093749 - DNA, 25 bp, Homo sapien
tcattgggtgtcagccactccagac

SEQ ID NO: 2093750 - DNA, 25 bp, Homo sapien
gggctgcatcctcattgggtgtcag

SEQ ID NO: 2093751 - DNA, 25 bp, Homo sapien
caggcgacgtctatggatgtcatca

SEQ ID NO: 2093752 - DNA, 25 bp, Homo sapien
gagagaggcctgcttccagatatat

SEQ ID NO: 2093753 - DNA, 25 bp, Homo sapien
gcacgatgcaaagggagagctgcca

SEQ ID NO: 2093754 - DNA, 25 bp, Homo sapien
ttatccagacaaggacgcacgatgc

SEQ ID NO: 2093755 - DNA, 25 bp, Homo sapien
tggatagatggacgattgcatgcat

SEQ ID NO: 2093756 - DNA, 25 bp, Homo sapien
gatggatagatggacgattgcatgc

SEQ ID NO: 2093757 - DNA, 25 bp, Homo sapien
atggatagatggacgattgcatgca

SEQ ID NO: 2093758 - DNA, 25 bp, Homo sapien
ccgttagctctataacaatttccaa

SEQ ID NO: 2093759 - DNA, 25 bp, Homo sapien
gggctacaaacatttccgttagctc

SEQ ID NO: 2093760 - DNA, 25 bp, Homo sapien
gcaactctctggttataggataggt

SEQ ID NO: 2093761 - DNA, 25 bp, Homo sapien
tgctgctttgccttctagagttgct

SEQ ID NO: 2093762 - DNA, 25 bp, Homo sapien
actgcccccgagaaggccggagaga

SEQ ID NO: 2093763 - DNA, 25 bp, Homo sapien
agagaccggtgggtccgctgacaca

SEQ ID NO: 2093764 - DNA, 25 bp, Homo sapien
attctctcagcagacctggcgcact

SEQ ID NO: 2093765 - DNA, 25 bp, Homo sapien
tgccataccgccaaaaaagcctcgg

SEQ ID NO: 2093766 - DNA, 25 bp, Homo sapien
tctgagcttgggagccccacaagga

SEQ ID NO: 2093767 - DNA, 25 bp, Homo sapien
tggattcatctcctgtcctgcacat

SEQ ID NO: 2093768 - DNA, 25 bp, Homo sapien
caggctgcccagcttgtcttggtcc

SEQ ID NO: 2093769 - DNA, 25 bp, Homo sapien
ttgtaaatccattctagcacttctg

SEQ ID NO: 2093770 - DNA, 25 bp, Homo sapien
aacagactgaggcccgatactgaag

SEQ ID NO: 2093771 - DNA, 25 bp, Homo sapien
actgaggcccgatactgaagtctgg

SEQ ID NO: 2093772 - DNA, 25 bp, Homo sapien
gctggcaagattgaacagactgagg

SEQ ID NO: 2093773 - DNA, 25 bp, Homo sapien
ctggcaagattgaacagactgaggc

SEQ ID NO: 2093774 - DNA, 25 bp, Homo sapien
gagcacttcggccaggttacacggg

SEQ ID NO: 2093775 - DNA, 25 bp, Homo sapien
ggttgtatgtcagggagtcgctctc

SEQ ID NO: 2093776 - DNA, 25 bp, Homo sapien
tctgtgcccacaggttgtatgtcag

SEQ ID NO: 2093777 - DNA, 25 bp, Homo sapien
ctgtgtggagcacttcggccaggtt

SEQ ID NO: 2093778 - DNA, 25 bp, Homo sapien
ctcttagaattggtgcaggagctaa

SEQ ID NO: 2093779 - DNA, 25 bp, Homo sapien
tagaattggtgcaggagctaagaaa

SEQ ID NO: 2093780 - DNA, 25 bp, Homo sapien
tttgtatctcttagaattggtgcag

SEQ ID NO: 2093781 - DNA, 25 bp, Homo sapien
tatctcttagaattggtgcaggagc

SEQ ID NO: 2093782 - DNA, 25 bp, Homo sapien
gatcatgtctatgcccttcacctcc

SEQ ID NO: 2093783 - DNA, 25 bp, Homo sapien
atgatcatgtctatgcccttcacct

SEQ ID NO: 2093784 - DNA, 25 bp, Homo sapien
tgatcatgtctatgcccttcacctc

SEQ ID NO: 2093785 - DNA, 25 bp, Homo sapien
gttgaggtgaaagacctgaactgct

SEQ ID NO: 2093786 - DNA, 25 bp, Homo sapien
gatagaccccgaattcctctgacat

SEQ ID NO: 2093787 - DNA, 25 bp, Homo sapien
gccgtagaggttcctgatagacccc

SEQ ID NO: 2093788 - DNA, 25 bp, Homo sapien
ctaaattctgtgttcgccgtagagg

SEQ ID NO: 2093789 - DNA, 25 bp, Homo sapien
cttgacttcccactggtatcttcaa

SEQ ID NO: 2093790 - DNA, 25 bp, Homo sapien
aacacatctctgcttgaatatctcc

SEQ ID NO: 2093791 - DNA, 25 bp, Homo sapien
actggtatcttcaacacatctctgc

SEQ ID NO: 2093792 - DNA, 25 bp, Homo sapien
tcaacacatctctgcttgaatatct

SEQ ID NO: 2093793 - DNA, 25 bp, Homo sapien
cacccctgtcgctgggatccatgca

SEQ ID NO: 2093794 - DNA, 25 bp, Homo sapien
caccatcacccctgtcgctgggatc

SEQ ID NO: 2093795 - DNA, 25 bp, Homo sapien
gagaagggaagatttaaggccagca

SEQ ID NO: 2093796 - DNA, 25 bp, Homo sapien
ttaactatggcccatgaaggagaag

SEQ ID NO: 2093797 - DNA, 25 bp, Homo sapien
catcatctgtttgcccggtgaggct

SEQ ID NO: 2093798 - DNA, 25 bp, Homo sapien
catcctagcatagctcgcagttgca

SEQ ID NO: 2093799 - DNA, 25 bp, Homo sapien
tctgaatgtgggtgagccatcccag

SEQ ID NO: 2093800 - DNA, 25 bp, Homo sapien
tgcaggccgctgaatgtgtcgtgaa

SEQ ID NO: 2093801 - DNA, 25 bp, Homo sapien
gccccattgatgttgatcccagaaa

SEQ ID NO: 2093802 - DNA, 25 bp, Homo sapien
attccgaccacctgccccattgatg

SEQ ID NO: 2093803 - DNA, 25 bp, Homo sapien
ccattgatgttgatcccagaaaaca

SEQ ID NO: 2093804 - DNA, 25 bp, Homo sapien
acctgccccattgatgttgatccca

SEQ ID NO: 2093805 - DNA, 25 bp, Homo sapien
ttggcaataatttaaatgacttttc

SEQ ID NO: 2093806 - DNA, 25 bp, Homo sapien
tttcctcttccacttgagcaaatgt

SEQ ID NO: 2093807 - DNA, 25 bp, Homo sapien
cctcttccacttgagcaaatgtcat

SEQ ID NO: 2093808 - DNA, 25 bp, Homo sapien
cattggcaataatttaaatgacttt

SEQ ID NO: 2093809 - DNA, 25 bp, Homo sapien
ccctaacagcgctcccagaagatga

SEQ ID NO: 2093810 - DNA, 25 bp, Homo sapien
cagtggatttcccctaacagcgctc

SEQ ID NO: 2093811 - DNA, 25 bp, Homo sapien
tttcccctaacagcgctcccagaag

SEQ ID NO: 2093812 - DNA, 25 bp, Homo sapien
ctcccagaagatgaacagactctct

SEQ ID NO: 2093813 - DNA, 25 bp, Homo sapien
gagcacactggcctgggtcaatgcc

SEQ ID NO: 2093814 - DNA, 25 bp, Homo sapien
gaaacacttgccagatggagcacac

SEQ ID NO: 2093815 - DNA, 25 bp, Homo sapien
tctcccactcgctgtaaacgggcta

SEQ ID NO: 2093816 - DNA, 25 bp, Homo sapien
tagcaaaaatgggtgtgccccaaag

SEQ ID NO: 2093817 - DNA, 25 bp, Homo sapien
cctggaggagtaggatatgaaggaa

SEQ ID NO: 2093818 - DNA, 25 bp, Homo sapien
tttccactgctatagtgtttcctga

SEQ ID NO: 2093819 - DNA, 25 bp, Homo sapien
ggagtaggatatgaaggaatccctg

SEQ ID NO: 2093820 - DNA, 25 bp, Homo sapien
gctatagtgtttcctgatgagaagg

SEQ ID NO: 2093821 - DNA, 25 bp, Homo sapien
tctgtgaaccctggtgggtacggca

SEQ ID NO: 2093822 - DNA, 25 bp, Homo sapien
gatgattctgtgaaccctggtgggt

SEQ ID NO: 2093823 - DNA, 25 bp, Homo sapien
tgattctgtgaaccctggtgggtac

SEQ ID NO: 2093824 - DNA, 25 bp, Homo sapien
cttttatatgatttggtatctgaag

SEQ ID NO: 2093825 - DNA, 25 bp, Homo sapien
cggtgctcataaaggactctgtcat

SEQ ID NO: 2093826 - DNA, 25 bp, Homo sapien
tcttctgatttcatggggtccctgt

SEQ ID NO: 2093827 - DNA, 25 bp, Homo sapien
tgtaggcccccagaacggtgctcat

SEQ ID NO: 2093828 - DNA, 25 bp, Homo sapien
ggtaaaggagggctctctcctggac

SEQ ID NO: 2093829 - DNA, 25 bp, Homo sapien
cttggggttgtacttttcctggctg

SEQ ID NO: 2093830 - DNA, 25 bp, Homo sapien
tttcctggctgtcaaacgaagccat

SEQ ID NO: 2093831 - DNA, 25 bp, Homo sapien
gttgccagtaaaggttgtgaagttg

SEQ ID NO: 2093832 - DNA, 25 bp, Homo sapien
tgccagtaaaggttgtgaagttggt

SEQ ID NO: 2093833 - DNA, 25 bp, Homo sapien
ttttcttctagggaggccacaactc

SEQ ID NO: 2093834 - DNA, 25 bp, Homo sapien
ggaggccctggtgactatgtcctct

SEQ ID NO: 2093835 - DNA, 25 bp, Homo sapien
gactatgtcctctttacactgaagt

SEQ ID NO: 2093836 - DNA, 25 bp, Homo sapien
ttcttctagggaggccacaactcac

SEQ ID NO: 2093837 - DNA, 25 bp, Homo sapien
tgtttagcagtttggtactgtagga

SEQ ID NO: 2093838 - DNA, 25 bp, Homo sapien
cagtttggtactgtaggattcggat

SEQ ID NO: 2093839 - DNA, 25 bp, Homo sapien
tactgtaggattcggatgctgagat

SEQ ID NO: 2093840 - DNA, 25 bp, Homo sapien
tgagatggagttaggagtagaggag

SEQ ID NO: 2093841 - DNA, 25 bp, Homo sapien
catagtggagtttgactaccaggcc

SEQ ID NO: 2093842 - DNA, 25 bp, Homo sapien
aggccatagtggagtttgactacca

SEQ ID NO: 2093843 - DNA, 25 bp, Homo sapien
tggagtttgactaccaggcccagca

SEQ ID NO: 2093844 - DNA, 25 bp, Homo sapien
tagtggagtttgactaccaggccca

SEQ ID NO: 2093845 - DNA, 25 bp, Homo sapien
tccttgaggttttgttccagggaca

SEQ ID NO: 2093846 - DNA, 25 bp, Homo sapien
ggcctggactagtggcgtatacttg

SEQ ID NO: 2093847 - DNA, 25 bp, Homo sapien
caggccctgcatttcattctgatct

SEQ ID NO: 2093848 - DNA, 25 bp, Homo sapien
gattgaatgcccctctgctatatag

SEQ ID NO: 2093849 - DNA, 25 bp, Homo sapien
ggcacctgggccctgcttgtctctg

SEQ ID NO: 2093850 - DNA, 25 bp, Homo sapien
acctgggccctgcttgtctctggcc

SEQ ID NO: 2093851 - DNA, 25 bp, Homo sapien
ttgtctctggccctgcagtggtcct

SEQ ID NO: 2093852 - DNA, 25 bp, Homo sapien
tggggcacctgggccctgcttgtct

SEQ ID NO: 2093853 - DNA, 25 bp, Homo sapien
tactggtgttaaatagcttgtggaa

SEQ ID NO: 2093854 - DNA, 25 bp, Homo sapien
tatctgcagaaaccctaagttcctt

SEQ ID NO: 2093855 - DNA, 25 bp, Homo sapien
ttctatctgcagaaaccctaagttc

SEQ ID NO: 2093856 - DNA, 25 bp, Homo sapien
tgcagaaaccctaagttccttctac

SEQ ID NO: 2093857 - DNA, 25 bp, Homo sapien
gcgatgggggagacactgaacaccc

SEQ ID NO: 2093858 - DNA, 25 bp, Homo sapien
cccatgatgcgatgggggagacact

SEQ ID NO: 2093859 - DNA, 25 bp, Homo sapien
gagacactgaacacccaaatgggca

SEQ ID NO: 2093860 - DNA, 25 bp, Homo sapien
gggagacactgaacacccaaatggg

SEQ ID NO: 2093861 - DNA, 25 bp, Homo sapien
tgtgcaaacctctcagtctccccat

SEQ ID NO: 2093862 - DNA, 25 bp, Homo sapien
ctgtgcaaacctctcagtctcccca

SEQ ID NO: 2093863 - DNA, 25 bp, Homo sapien
atgcccagaaggtgcaaacaagccc

SEQ ID NO: 2093864 - DNA, 25 bp, Homo sapien
gccactaggggaatgcccagaaggt

SEQ ID NO: 2093865 - DNA, 25 bp, Homo sapien
gtgctgccactaggggaatgcccag

SEQ ID NO: 2093866 - DNA, 25 bp, Homo sapien
tgcccagaaggtgcaaacaagccca

SEQ ID NO: 2093867 - DNA, 25 bp, Homo sapien
tgttgtgaacttaaactggtttgga

SEQ ID NO: 2093868 - DNA, 25 bp, Homo sapien
tgtaaaccggtctggtacaggctca

SEQ ID NO: 2093869 - DNA, 25 bp, Homo sapien
tagtacgtgggagctttgtgcatcc

SEQ ID NO: 2093870 - DNA, 25 bp, Homo sapien
ggctcacagagccttaaatgtgttc

SEQ ID NO: 2093871 - DNA, 25 bp, Homo sapien
gccactaaaagcctcaggggttcat

SEQ ID NO: 2093872 - DNA, 25 bp, Homo sapien
tcaggggttcattgtggccacttgg

SEQ ID NO: 2093873 - DNA, 25 bp, Homo sapien
tggccacttggtgtcccgagggagg

SEQ ID NO: 2093874 - DNA, 25 bp, Homo sapien
tttttggacatccagtgcactcttg

SEQ ID NO: 2093875 - DNA, 25 bp, Homo sapien
ctggccagcgagcgaggaatgagga

SEQ ID NO: 2093876 - DNA, 25 bp, Homo sapien
gccagcgagcgaggaatgaggaagc

SEQ ID NO: 2093877 - DNA, 25 bp, Homo sapien
caggaaatgatagacgagtctgccc

SEQ ID NO: 2093878 - DNA, 25 bp, Homo sapien
tggccagcgagcgaggaatgaggaa

SEQ ID NO: 2093879 - DNA, 25 bp, Homo sapien
aaggggagcagggagttaggatgac

SEQ ID NO: 2093880 - DNA, 25 bp, Homo sapien
gcagggagttaggatgactggtagc

SEQ ID NO: 2093881 - DNA, 25 bp, Homo sapien
ggagcagggagttaggatgactggt

SEQ ID NO: 2093882 - DNA, 25 bp, Homo sapien
cagggagttaggatgactggtagca

SEQ ID NO: 2093883 - DNA, 25 bp, Homo sapien
gaatcactgagcaagacctttgtca

SEQ ID NO: 2093884 - DNA, 25 bp, Homo sapien
tgaacactgttaaggtttgaacctc

SEQ ID NO: 2093885 - DNA, 25 bp, Homo sapien
tgtgtgatccgtagctactttcaag

SEQ ID NO: 2093886 - DNA, 25 bp, Homo sapien
gttctggcattggaaatcgttgctt

SEQ ID NO: 2093887 - DNA, 25 bp, Homo sapien
ctagggagtaattgcttagaaaatg

SEQ ID NO: 2093888 - DNA, 25 bp, Homo sapien
gggagtaattgcttagaaaatgccc

SEQ ID NO: 2093889 - DNA, 25 bp, Homo sapien
gagtaattgcttagaaaatgccctc

SEQ ID NO: 2093890 - DNA, 25 bp, Homo sapien
tagggagtaattgcttagaaaatgc

SEQ ID NO: 2093891 - DNA, 25 bp, Homo sapien
ctcctgggtgagtaaagaggcacat

SEQ ID NO: 2093892 - DNA, 25 bp, Homo sapien
tatgttagcttgaaccagtccctgg

SEQ ID NO: 2093893 - DNA, 25 bp, Homo sapien
ggtaagggagccagagtgctcattt

SEQ ID NO: 2093894 - DNA, 25 bp, Homo sapien
cagtccctggtgttttgcttcagga

SEQ ID NO: 2093895 - DNA, 25 bp, Homo sapien
gtctatgccggtatcactatgcctg

SEQ ID NO: 2093896 - DNA, 25 bp, Homo sapien
ccacttgaggagaaggcacatgctg

SEQ ID NO: 2093897 - DNA, 25 bp, Homo sapien
catgtgactttaaagccagagcctc

SEQ ID NO: 2093898 - DNA, 25 bp, Homo sapien
ggcacagtgtctcaccaacaggcag

SEQ ID NO: 2093899 - DNA, 25 bp, Homo sapien
gacaaattcttgcttaggaggtgga

SEQ ID NO: 2093900 - DNA, 25 bp, Homo sapien
catgttgtcctaggccctgtcttga

SEQ ID NO: 2093901 - DNA, 25 bp, Homo sapien
ggaagagaatcgcatgtctgactaa

SEQ ID NO: 2093902 - DNA, 25 bp, Homo sapien
actaagactgtgcttggacccttcc

SEQ ID NO: 2093903 - DNA, 25 bp, Homo sapien
acctccaccctccatatacacaggt

SEQ ID NO: 2093904 - DNA, 25 bp, Homo sapien
cctccatatacacaggtggctgctc

SEQ ID NO: 2093905 - DNA, 25 bp, Homo sapien
gtggctgctccatgcccacatccat

SEQ ID NO: 2093906 - DNA, 25 bp, Homo sapien
caccctccatatacacaggtggctg

SEQ ID NO: 2093907 - DNA, 25 bp, Homo sapien
ttctggactgttctagacttagaag

SEQ ID NO: 2093908 - DNA, 25 bp, Homo sapien
ctgttctagacttagaagacttggg

SEQ ID NO: 2093909 - DNA, 25 bp, Homo sapien
gccatgttctaggtctggtcctctg

SEQ ID NO: 2093910 - DNA, 25 bp, Homo sapien
gggccatgttctaggtctggtcctc

SEQ ID NO: 2093911 - DNA, 25 bp, Homo sapien
tctcttccgttgatacctaggtagt

SEQ ID NO: 2093912 - DNA, 25 bp, Homo sapien
tatgcacgaacctacaagtcactag

SEQ ID NO: 2093913 - DNA, 25 bp, Homo sapien
gctttgtatgtaaccacagtcttcg

SEQ ID NO: 2093914 - DNA, 25 bp, Homo sapien
ctttgaatggagagtgtcttaacac

SEQ ID NO: 2093915 - DNA, 25 bp, Homo sapien
ggcctgataatgagttttctcttga

SEQ ID NO: 2093916 - DNA, 25 bp, Homo sapien
tggcctgataatgagttttctcttg

SEQ ID NO: 2093917 - DNA, 25 bp, Homo sapien
ctggcctgataatgagttttctctt

SEQ ID NO: 2093918 - DNA, 25 bp, Homo sapien
gcccagagaagctgccactttattg

SEQ ID NO: 2093919 - DNA, 25 bp, Homo sapien
cactttattggcaaggcacttatga

SEQ ID NO: 2093920 - DNA, 25 bp, Homo sapien
tatttttggatgttcctaggccagg

SEQ ID NO: 2093921 - DNA, 25 bp, Homo sapien
tttagaccccggagcattggaacca

SEQ ID NO: 2093922 - DNA, 25 bp, Homo sapien
ctgtctcgggggaagctggaacctc

SEQ ID NO: 2093923 - DNA, 25 bp, Homo sapien
ctgcggacacgggcacccggacctg

SEQ ID NO: 2093924 - DNA, 25 bp, Homo sapien
tggccatttttgcacccgagcgcgc

SEQ ID NO: 2093925 - DNA, 25 bp, Homo sapien
gggggcctgagcagacgatcacggg

SEQ ID NO: 2093926 - DNA, 25 bp, Homo sapien
attcactcccacttgcgcccgtgtg

SEQ ID NO: 2093927 - DNA, 25 bp, Homo sapien
ccattcactcccacttgcgcccgtg

SEQ ID NO: 2093928 - DNA, 25 bp, Homo sapien
actcccacttgcgcccgtgtgcccg

SEQ ID NO: 2093929 - DNA, 25 bp, Homo sapien
tcactcccacttgcgcccgtgtgcc

SEQ ID NO: 2093930 - DNA, 25 bp, Homo sapien
gcattgggccgcgatgcaacagcag

SEQ ID NO: 2093931 - DNA, 25 bp, Homo sapien
gcgtccggaccctcgcgcctggatc

SEQ ID NO: 2093932 - DNA, 25 bp, Homo sapien
gggagcaggaaacccggcgcagccg

SEQ ID NO: 2093933 - DNA, 25 bp, Homo sapien
gcccggcccggctcgacgccaatgg

SEQ ID NO: 2093934 - DNA, 25 bp, Homo sapien
tctgtgcggaactcgcacctggcct

SEQ ID NO: 2093935 - DNA, 25 bp, Homo sapien
attccagattgcctcgatgccccag

SEQ ID NO: 2093936 - DNA, 25 bp, Homo sapien
atcaccctggtcaggcgtttggccc

SEQ ID NO: 2093937 - DNA, 25 bp, Homo sapien
gaacgtcagagctcgggaacattcc

SEQ ID NO: 2093938 - DNA, 25 bp, Homo sapien
tgtggcgtttcaccgtcagctcagg

SEQ ID NO: 2093939 - DNA, 25 bp, Homo sapien
ttaagtcccatagcctcgggcttga

SEQ ID NO: 2093940 - DNA, 25 bp, Homo sapien
tcagctcaggccactggtcttggtt

SEQ ID NO: 2093941 - DNA, 25 bp, Homo sapien
gcctcgggcttgaggatgcatctga

SEQ ID NO: 2093942 - DNA, 25 bp, Homo sapien
tcatgcactgctgaagaagagattc

SEQ ID NO: 2093943 - DNA, 25 bp, Homo sapien
ggtttcaccaacctcagaaggcact

SEQ ID NO: 2093944 - DNA, 25 bp, Homo sapien
gcccttcgctggtactgggaagaca

SEQ ID NO: 2093945 - DNA, 25 bp, Homo sapien
tctgattcagcatcccctcgtcatg

SEQ ID NO: 2093946 - DNA, 25 bp, Homo sapien
tactactacagcattacacattttg

SEQ ID NO: 2093947 - DNA, 25 bp, Homo sapien
tgcttaacagtacatatacattccc

SEQ ID NO: 2093948 - DNA, 25 bp, Homo sapien
tttgcaagcacatcttatagagtgt

SEQ ID NO: 2093949 - DNA, 25 bp, Homo sapien
cctcagggcaagcttgtgcatatca

SEQ ID NO: 2093950 - DNA, 25 bp, Homo sapien
ctgctgccgcgaccctgatcctccg

SEQ ID NO: 2093951 - DNA, 25 bp, Homo sapien
acggtgcccttgtcctcgaggcggc

SEQ ID NO: 2093952 - DNA, 25 bp, Homo sapien
gctttgtcctggtgaggcgctcctg

SEQ ID NO: 2093953 - DNA, 25 bp, Homo sapien
gaggcggccctggacgcgtcgcctg

SEQ ID NO: 2093954 - DNA, 25 bp, Homo sapien
atcttctgctgagggcgtttcatcc

SEQ ID NO: 2093955 - DNA, 25 bp, Homo sapien
aatcttctgctgagggcgtttcatc

SEQ ID NO: 2093956 - DNA, 25 bp, Homo sapien
cttctgctgagggcgtttcatccat

SEQ ID NO: 2093957 - DNA, 25 bp, Homo sapien
tcaatctcctcaaccagcttccctc

SEQ ID NO: 2093958 - DNA, 25 bp, Homo sapien
actggaattagagacccctgtggta

SEQ ID NO: 2093959 - DNA, 25 bp, Homo sapien
gctgagggcccggtcattgctgcct

SEQ ID NO: 2093960 - DNA, 25 bp, Homo sapien
tggagacagtaccaggccagaccag

SEQ ID NO: 2093961 - DNA, 25 bp, Homo sapien
ccagttctgttgacaaagcctctgg

SEQ ID NO: 2093962 - DNA, 25 bp, Homo sapien
gtacatgcctccacataatgcggtg

SEQ ID NO: 2093963 - DNA, 25 bp, Homo sapien
tctcggcaaatactggccaagtccc

SEQ ID NO: 2093964 - DNA, 25 bp, Homo sapien
taatgcggtgctgtccatctcggca

SEQ ID NO: 2093965 - DNA, 25 bp, Homo sapien
caagtccctttatgacaggcacaca

SEQ ID NO: 2093966 - DNA, 25 bp, Homo sapien
cggattgcttgatgtcagtagttcg

SEQ ID NO: 2093967 - DNA, 25 bp, Homo sapien
aggcggattgcttgatgtcagtagt

SEQ ID NO: 2093968 - DNA, 25 bp, Homo sapien
ggcaggcggattgcttgatgtcagt

SEQ ID NO: 2093969 - DNA, 25 bp, Homo sapien
cagtgagatcgtaccagtgccctcc

SEQ ID NO: 2093970 - DNA, 25 bp, Homo sapien
tgggattaacgtccttttcagctcc

SEQ ID NO: 2093971 - DNA, 25 bp, Homo sapien
gtttagcaactcaaccagtgtggta

SEQ ID NO: 2093972 - DNA, 25 bp, Homo sapien
cagagttgactcttggtttagcaac

SEQ ID NO: 2093973 - DNA, 25 bp, Homo sapien
gttggtctgtcttcaccgttggtca

SEQ ID NO: 2093974 - DNA, 25 bp, Homo sapien
ggtgaagggagtgcaccaaggctgt

SEQ ID NO: 2093975 - DNA, 25 bp, Homo sapien
tgtgactagtgggtcctcacacaga

SEQ ID NO: 2093976 - DNA, 25 bp, Homo sapien
cacacagattattgtcttggggacc

SEQ ID NO: 2093977 - DNA, 25 bp, Homo sapien
ggagtgcaccaaggctgtgactagt

SEQ ID NO: 2093978 - DNA, 25 bp, Homo sapien
tcaggcaaagcaggcccggattccc

SEQ ID NO: 2093979 - DNA, 25 bp, Homo sapien
ggcttttgaagggatatcctgattt

SEQ ID NO: 2093980 - DNA, 25 bp, Homo sapien
ccaggcttttgaagggatatcctga

SEQ ID NO: 2093981 - DNA, 25 bp, Homo sapien
ttgaagggatatcctgattttgctt

SEQ ID NO: 2093982 - DNA, 25 bp, Homo sapien
gtgaaaccaggtccctcacaatcct

SEQ ID NO: 2093983 - DNA, 25 bp, Homo sapien
ccaaggatgagcattccttctgtct

SEQ ID NO: 2093984 - DNA, 25 bp, Homo sapien
tgtgtgaaaccaggtccctcacaat

SEQ ID NO: 2093985 - DNA, 25 bp, Homo sapien
gaaaccaggtccctcacaatcctct

SEQ ID NO: 2093986 - DNA, 25 bp, Homo sapien
aaccaatattctgcatactctgtcc

SEQ ID NO: 2093987 - DNA, 25 bp, Homo sapien
tgcaaagcgctcagaacctgaatgt

SEQ ID NO: 2093988 - DNA, 25 bp, Homo sapien
gcgcttttaccctgaagccttgcct

SEQ ID NO: 2093989 - DNA, 25 bp, Homo sapien
tctgtccttcaggtctaagacgcgc

SEQ ID NO: 2093990 - DNA, 25 bp, Homo sapien
tgtatacagacttaacaacaaccgg

SEQ ID NO: 2093991 - DNA, 25 bp, Homo sapien
caacaaccggtattgactggattga

SEQ ID NO: 2093992 - DNA, 25 bp, Homo sapien
tcttccataggtataaactgctgtc

SEQ ID NO: 2093993 - DNA, 25 bp, Homo sapien
tttggactcccatgaacttttgcac

SEQ ID NO: 2093994 - DNA, 25 bp, Homo sapien
tgcatctgagactaagggctggttt

SEQ ID NO: 2093995 - DNA, 25 bp, Homo sapien
gagatccatcatgtagcttgtgaca

SEQ ID NO: 2093996 - DNA, 25 bp, Homo sapien
tatggagttcgtgaacacatctagg

SEQ ID NO: 2093997 - DNA, 25 bp, Homo sapien
cacatctaggtggaatgcatctgag

SEQ ID NO: 2093998 - DNA, 25 bp, Homo sapien
gcagaaattgaacactaggtggcac

SEQ ID NO: 2093999 - DNA, 25 bp, Homo sapien
gaagaggaaggaataacaactcagt

SEQ ID NO: 2094000 - DNA, 25 bp, Homo sapien
taggtggcactcagttatcttaaca

SEQ ID NO: 2094001 - DNA, 25 bp, Homo sapien
cagaacctgggttttaatagcagta

SEQ ID NO: 2094002 - DNA, 25 bp, Homo sapien
tgggtgtgtactgttggcaaactct

SEQ ID NO: 2094003 - DNA, 25 bp, Homo sapien
gaaaaggtcagtgtttgcattggca

SEQ ID NO: 2094004 - DNA, 25 bp, Homo sapien
tggcaatattaacgccagccactct

SEQ ID NO: 2094005 - DNA, 25 bp, Homo sapien
gccttgtcaaaatggaagcctattg

SEQ ID NO: 2094006 - DNA, 25 bp, Homo sapien
gactccacccttagtgaataatagg

SEQ ID NO: 2094007 - DNA, 25 bp, Homo sapien
gggataggacttctacactaaatca

SEQ ID NO: 2094008 - DNA, 25 bp, Homo sapien
tgttgtacactcagacctagtctca

SEQ ID NO: 2094009 - DNA, 25 bp, Homo sapien
aaagagcctctctgggaatttctcc

SEQ ID NO: 2094010 - DNA, 25 bp, Homo sapien
caattcttccaccaggctgtaagct

SEQ ID NO: 2094011 - DNA, 25 bp, Homo sapien
aggtggtaaggggatcacttccatc

SEQ ID NO: 2094012 - DNA, 25 bp, Homo sapien
ggtaaggggatcacttccatcttat

SEQ ID NO: 2094013 - DNA, 25 bp, Homo sapien
tctctgaggtggtaaggggatcact

SEQ ID NO: 2094014 - DNA, 25 bp, Homo sapien
tgcttgtattcctgtcatagaacag

SEQ ID NO: 2094015 - DNA, 25 bp, Homo sapien
taatgtgtaatctaagctcttcaga

SEQ ID NO: 2094016 - DNA, 25 bp, Homo sapien
ttacttaagagtctaatctgggaag

SEQ ID NO: 2094017 - DNA, 25 bp, Homo sapien
cagatgtatccatgaataatcctgg

SEQ ID NO: 2094018 - DNA, 25 bp, Homo sapien
ggccactgggcctgcttagattgca

SEQ ID NO: 2094019 - DNA, 25 bp, Homo sapien
ttacctgtgtctttgccaagctgcc

SEQ ID NO: 2094020 - DNA, 25 bp, Homo sapien
ccaagctgcctagcatacatcagta

SEQ ID NO: 2094021 - DNA, 25 bp, Homo sapien
cctaaaattataggtagggcaggct

SEQ ID NO: 2094022 - DNA, 25 bp, Homo sapien
taagcacttagcttaaacaatccgt

SEQ ID NO: 2094023 - DNA, 25 bp, Homo sapien
ggatggacagtttatgttaagcact

SEQ ID NO: 2094024 - DNA, 25 bp, Homo sapien
tatattagcactgtatcccttgtgc

SEQ ID NO: 2094025 - DNA, 25 bp, Homo sapien
tctttgttagttatagggatggaca

SEQ ID NO: 2094026 - DNA, 25 bp, Homo sapien
catggtgtaagctgatagcacaagt

SEQ ID NO: 2094027 - DNA, 25 bp, Homo sapien
gctggtacccataatgctgctgttc

SEQ ID NO: 2094028 - DNA, 25 bp, Homo sapien
tggcgacaggtagcacgtatctgag

SEQ ID NO: 2094029 - DNA, 25 bp, Homo sapien
cgtatctgagagacacctgcaagca

SEQ ID NO: 2094030 - DNA, 25 bp, Homo sapien
ttttaagccacctcacacagtacag

SEQ ID NO: 2094031 - DNA, 25 bp, Homo sapien
tctctactctacctgaggcagtgtt

SEQ ID NO: 2094032 - DNA, 25 bp, Homo sapien
gcaaatatggcttacagggactttc

SEQ ID NO: 2094033 - DNA, 25 bp, Homo sapien
cacggtaaatttatgctgtagccgc

SEQ ID NO: 2094034 - DNA, 25 bp, Homo sapien
tttctcatacacctgatgctctgtg

SEQ ID NO: 2094035 - DNA, 25 bp, Homo sapien
tatgtaaatttcttgcgcatgcctc

SEQ ID NO: 2094036 - DNA, 25 bp, Homo sapien
gtctaaagtccccagccgcttaaga

SEQ ID NO: 2094037 - DNA, 25 bp, Homo sapien
tactagaaaagagatctaacactca

SEQ ID NO: 2094038 - DNA, 25 bp, Homo sapien
ctgattaaacaatctggccaggtag

SEQ ID NO: 2094039 - DNA, 25 bp, Homo sapien
tgaggtaatacccaaggtctgtagc

SEQ ID NO: 2094040 - DNA, 25 bp, Homo sapien
tcttcttcgttatggacagcatcca

SEQ ID NO: 2094041 - DNA, 25 bp, Homo sapien
caaacttagattggagaggcatggt

SEQ ID NO: 2094042 - DNA, 25 bp, Homo sapien
ctcccaaaggtaaggagaaaatgtg

SEQ ID NO: 2094043 - DNA, 25 bp, Homo sapien
ccctccagaaactgtatagaagaga

SEQ ID NO: 2094044 - DNA, 25 bp, Homo sapien
catttaaacctgcaacgggcaggcc

SEQ ID NO: 2094045 - DNA, 25 bp, Homo sapien
tggaatgtaagtatagaatgaaaac

SEQ ID NO: 2094046 - DNA, 25 bp, Homo sapien
gctatggtaaggctagagtctcccc

SEQ ID NO: 2094047 - DNA, 25 bp, Homo sapien
cagttactcatctttgcaggtgttc

SEQ ID NO: 2094048 - DNA, 25 bp, Homo sapien
tgttgttgatcagtgggcattcagg

SEQ ID NO: 2094049 - DNA, 25 bp, Homo sapien
aataatgcttaggtatcatcagtcc

SEQ ID NO: 2094050 - DNA, 25 bp, Homo sapien
ctcgagactcaagaaaacccaggga

SEQ ID NO: 2094051 - DNA, 25 bp, Homo sapien
ttaacaaggtgacgtgagccagggc

SEQ ID NO: 2094052 - DNA, 25 bp, Homo sapien
tcatacatgttagcggtcactcccc

SEQ ID NO: 2094053 - DNA, 25 bp, Homo sapien
tctagtagcagattgagcctccacc

SEQ ID NO: 2094054 - DNA, 25 bp, Homo sapien
tacgtcagtaaaaccgaggctcagt

SEQ ID NO: 2094055 - DNA, 25 bp, Homo sapien
cctctccggagtggaaaatcaattc

SEQ ID NO: 2094056 - DNA, 25 bp, Homo sapien
gccggcctccgcagtgtgagaagta

SEQ ID NO: 2094057 - DNA, 25 bp, Homo sapien
aatcaattcctgatggtggcgcgtc

SEQ ID NO: 2094058 - DNA, 25 bp, Homo sapien
ccagatctgttgggctcgcccttcc

SEQ ID NO: 2094059 - DNA, 25 bp, Homo sapien
agatctgttgggctcgcccttcctg

SEQ ID NO: 2094060 - DNA, 25 bp, Homo sapien
atctgttgggctcgcccttcctgaa

SEQ ID NO: 2094061 - DNA, 25 bp, Homo sapien
ttcctgaaagtaggcgaggcccaga

SEQ ID NO: 2094062 - DNA, 25 bp, Homo sapien
ccccaaagctctcgccgtcctgtgg

SEQ ID NO: 2094063 - DNA, 25 bp, Homo sapien
tccccccaaagctctcgccgtcctg

SEQ ID NO: 2094064 - DNA, 25 bp, Homo sapien
ccaaagctctcgccgtcctgtgggg

SEQ ID NO: 2094065 - DNA, 25 bp, Homo sapien
cccccaaagctctcgccgtcctgtg

SEQ ID NO: 2094066 - DNA, 25 bp, Homo sapien
tcagccctgcgacttttacacattt

SEQ ID NO: 2094067 - DNA, 25 bp, Homo sapien
cagggtcgagtcctcttgggacgca

SEQ ID NO: 2094068 - DNA, 25 bp, Homo sapien
tgagggtttgaagggacaggccggc

SEQ ID NO: 2094069 - DNA, 25 bp, Homo sapien
ggccggctcggagatctccctttgc

SEQ ID NO: 2094070 - DNA, 25 bp, Homo sapien
tgacaaaggcaagagccaagtggcc

SEQ ID NO: 2094071 - DNA, 25 bp, Homo sapien
caaattagctgagtttgggcccagg

SEQ ID NO: 2094072 - DNA, 25 bp, Homo sapien
tctgcaagcacgttttaccgtcggg

SEQ ID NO: 2094073 - DNA, 25 bp, Homo sapien
taccgtcgggaattacacagagaag

SEQ ID NO: 2094074 - DNA, 25 bp, Homo sapien
ccagcaaggaattgcctgtccctac

SEQ ID NO: 2094075 - DNA, 25 bp, Homo sapien
tggttaacactattgattgtccacc

SEQ ID NO: 2094076 - DNA, 25 bp, Homo sapien
ctgatctgtgttcagcataggtgct

SEQ ID NO: 2094077 - DNA, 25 bp, Homo sapien
tgctcttattggcatctcctcctgt

SEQ ID NO: 2094078 - DNA, 25 bp, Homo sapien
agcacagaggctctattacagccac

SEQ ID NO: 2094079 - DNA, 25 bp, Homo sapien
cagcacagaggctctattacagcca

SEQ ID NO: 2094080 - DNA, 25 bp, Homo sapien
tcacttccccaaagctgcagttgaa

SEQ ID NO: 2094081 - DNA, 25 bp, Homo sapien
gttaggctgattcacatttgattcc

SEQ ID NO: 2094082 - DNA, 25 bp, Homo sapien
aatcagccgtgtatttcttgttagg

SEQ ID NO: 2094083 - DNA, 25 bp, Homo sapien
tatttcctggttcagaacaactctc

SEQ ID NO: 2094084 - DNA, 25 bp, Homo sapien
taagaccattagaggcagctctaga

SEQ ID NO: 2094085 - DNA, 25 bp, Homo sapien
tgcctgctggcgtgtgcgggtgtgc

SEQ ID NO: 2094086 - DNA, 25 bp, Homo sapien
cgggtgtgctccacggccagtttaa

SEQ ID NO: 2094087 - DNA, 25 bp, Homo sapien
tcatttggatatgtgactgctgcct

SEQ ID NO: 2094088 - DNA, 25 bp, Homo sapien
gggctacccaccagacaaagggctc

SEQ ID NO: 2094089 - DNA, 25 bp, Homo sapien
gcttggagcataccccaatggtagt

SEQ ID NO: 2094090 - DNA, 25 bp, Homo sapien
cacagcagcaagaggcttggagcat

SEQ ID NO: 2094091 - DNA, 25 bp, Homo sapien
tgtgctggcattccgctcaaaaggg

SEQ ID NO: 2094092 - DNA, 25 bp, Homo sapien
gcctcgtaagtaacaactgatgttc

SEQ ID NO: 2094093 - DNA, 25 bp, Homo sapien
gctttctatagcctcgtaagtaaca

SEQ ID NO: 2094094 - DNA, 25 bp, Homo sapien
tagcctcgtaagtaacaactgatgt

SEQ ID NO: 2094095 - DNA, 25 bp, Homo sapien
tctatagcctcgtaagtaacaactg

SEQ ID NO: 2094096 - DNA, 25 bp, Homo sapien
tcctccggctttagaatgtttacag

SEQ ID NO: 2094097 - DNA, 25 bp, Homo sapien
tagaatgtttacagggcctattccg

SEQ ID NO: 2094098 - DNA, 25 bp, Homo sapien
tcatttccggtgtgtttcctccggc

SEQ ID NO: 2094099 - DNA, 25 bp, Homo sapien
gctttagaatgtttacagggcctat

SEQ ID NO: 2094100 - DNA, 25 bp, Homo sapien
cattcagccaatattggcacaaccg

SEQ ID NO: 2094101 - DNA, 25 bp, Homo sapien
gcacatggataaaacatgacatgct

SEQ ID NO: 2094102 - DNA, 25 bp, Homo sapien
gttcacaaaagtctgtgagtcttca

SEQ ID NO: 2094103 - DNA, 25 bp, Homo sapien
cgggctgttgtgcaacattcagcca

SEQ ID NO: 2094104 - DNA, 25 bp, Homo sapien
ctgccacattccttaaacgacagct

SEQ ID NO: 2094105 - DNA, 25 bp, Homo sapien
taagtctagcaaatctgccacattc

SEQ ID NO: 2094106 - DNA, 25 bp, Homo sapien
cattccttaaacgacagctgcggta

SEQ ID NO: 2094107 - DNA, 25 bp, Homo sapien
ttaagtctagcaaatctgccacatt

SEQ ID NO: 2094108 - DNA, 25 bp, Homo sapien
ttttcagagttccacaccgggtcaa

SEQ ID NO: 2094109 - DNA, 25 bp, Homo sapien
attttcagagttccacaccgggtca

SEQ ID NO: 2094110 - DNA, 25 bp, Homo sapien
agattttcagagttccacaccgggt

SEQ ID NO: 2094111 - DNA, 25 bp, Homo sapien
gattttcagagttccacaccgggtc

SEQ ID NO: 2094112 - DNA, 25 bp, Homo sapien
cgtgaatagagaacacaggaaccat

SEQ ID NO: 2094113 - DNA, 25 bp, Homo sapien
ctgacgtgaatagagaacacaggaa

SEQ ID NO: 2094114 - DNA, 25 bp, Homo sapien
tgacgtgaatagagaacacaggaac

SEQ ID NO: 2094115 - DNA, 25 bp, Homo sapien
gacgtgaatagagaacacaggaacc

SEQ ID NO: 2094116 - DNA, 25 bp, Homo sapien
gtatttctcaacaaggaccctattg

SEQ ID NO: 2094117 - DNA, 25 bp, Homo sapien
ataggacaactctccttcatactag

SEQ ID NO: 2094118 - DNA, 25 bp, Homo sapien
tggcatttaggataggacaactctc

SEQ ID NO: 2094119 - DNA, 25 bp, Homo sapien
caaggaccctattggcatttaggat

SEQ ID NO: 2094120 - DNA, 25 bp, Homo sapien
cttcctcgcccacatttgaaatttc

SEQ ID NO: 2094121 - DNA, 25 bp, Homo sapien
aaggaagactccattgcacccgtag

SEQ ID NO: 2094122 - DNA, 25 bp, Homo sapien
tttgaggttccagcaagcaagcatc

SEQ ID NO: 2094123 - DNA, 25 bp, Homo sapien
aggactcagataaccttgcccaaag

SEQ ID NO: 2094124 - DNA, 25 bp, Homo sapien
tcagtggaaacaatcctggcaacca

SEQ ID NO: 2094125 - DNA, 25 bp, Homo sapien
cactgttaaatcggtccctaggtca

SEQ ID NO: 2094126 - DNA, 25 bp, Homo sapien
ctgttaaatcggtccctaggtcagg

SEQ ID NO: 2094127 - DNA, 25 bp, Homo sapien
atccactgttaaatcggtccctagg

SEQ ID NO: 2094128 - DNA, 25 bp, Homo sapien
acatccactgttaaatcggtcccta

SEQ ID NO: 2094129 - DNA, 25 bp, Homo sapien
gccttcatcattaccatgaggtaca

SEQ ID NO: 2094130 - DNA, 25 bp, Homo sapien
tgattattagctgcctgcaccagct

SEQ ID NO: 2094131 - DNA, 25 bp, Homo sapien
cagaaagctcggctgaaaatgcacc

SEQ ID NO: 2094132 - DNA, 25 bp, Homo sapien
ggtgaaaaatgcctgagttaaatga

SEQ ID NO: 2094133 - DNA, 25 bp, Homo sapien
tcaagcataagagtcacagtcatag

SEQ ID NO: 2094134 - DNA, 25 bp, Homo sapien
tggaaggaaatccactcatcaggaa

SEQ ID NO: 2094135 - DNA, 25 bp, Homo sapien
gacgtttgtttgtcaaacattcacc

SEQ ID NO: 2094136 - DNA, 25 bp, Homo sapien
agcataagagtcacagtcatagtca

SEQ ID NO: 2094137 - DNA, 25 bp, Homo sapien
catagcaagcagaccatttaaagta

SEQ ID NO: 2094138 - DNA, 25 bp, Homo sapien
gcaagcagaccatttaaagtaacaa

SEQ ID NO: 2094139 - DNA, 25 bp, Homo sapien
catcttgtagctaaacatagcaagc

SEQ ID NO: 2094140 - DNA, 25 bp, Homo sapien
gtttatcaagcatgtgcactgttct

SEQ ID NO: 2094141 - DNA, 25 bp, Homo sapien
ctgtgcatatcaggccacattcctc

SEQ ID NO: 2094142 - DNA, 25 bp, Homo sapien
tcttctgtgcatatcaggccacatt

SEQ ID NO: 2094143 - DNA, 25 bp, Homo sapien
tgaagtcttctgtgcatatcaggcc

SEQ ID NO: 2094144 - DNA, 25 bp, Homo sapien
tccttcatgaagtcttctgtgcata

SEQ ID NO: 2094145 - DNA, 25 bp, Homo sapien
aaatttgagctgtagtggataggca

SEQ ID NO: 2094146 - DNA, 25 bp, Homo sapien
tcttcttggtaagcaactactcttg

SEQ ID NO: 2094147 - DNA, 25 bp, Homo sapien
caaactattatgtgacaatgtccac

SEQ ID NO: 2094148 - DNA, 25 bp, Homo sapien
ctcttgagttcaggtggagtattcc

SEQ ID NO: 2094149 - DNA, 25 bp, Homo sapien
gtctttgtccttctcgcctacattt

SEQ ID NO: 2094150 - DNA, 25 bp, Homo sapien
catttccccgaaccctatcctccat

SEQ ID NO: 2094151 - DNA, 25 bp, Homo sapien
acacattgatggaggacagcacggc

SEQ ID NO: 2094152 - DNA, 25 bp, Homo sapien
acagcacggcttcgagcagaggcca

SEQ ID NO: 2094153 - DNA, 25 bp, Homo sapien
agcagggattcagggcccggtctct

SEQ ID NO: 2094154 - DNA, 25 bp, Homo sapien
gactgtggaggctcaagcatgacac

SEQ ID NO: 2094155 - DNA, 25 bp, Homo sapien
acttgctgattaatgggatctgagc

SEQ ID NO: 2094156 - DNA, 25 bp, Homo sapien
tcttcagcttcaggtatgaggctct

SEQ ID NO: 2094157 - DNA, 25 bp, Homo sapien
cttaaatgcagccaaggaagacctg

SEQ ID NO: 2094158 - DNA, 25 bp, Homo sapien
gattaatgggatctgagcttgtcat

SEQ ID NO: 2094159 - DNA, 25 bp, Homo sapien
ttgggaattccttgagtattgcaca

SEQ ID NO: 2094160 - DNA, 25 bp, Homo sapien
gaattccttgagtattgcacaccta

SEQ ID NO: 2094161 - DNA, 25 bp, Homo sapien
ccttgagtattgcacacctatggta

SEQ ID NO: 2094162 - DNA, 25 bp, Homo sapien
gagtattgcacacctatggtatctt

SEQ ID NO: 2094163 - DNA, 25 bp, Homo sapien
tccctggcaactgccgcagccaagg

SEQ ID NO: 2094164 - DNA, 25 bp, Homo sapien
agagaaggccaattctcttggaagt

SEQ ID NO: 2094165 - DNA, 25 bp, Homo sapien
gcaactgccgcagccaaggctgccc

SEQ ID NO: 2094166 - DNA, 25 bp, Homo sapien
ttggaagtgacagcatggaacatcc

SEQ ID NO: 2094167 - DNA, 25 bp, Homo sapien
tcatagtctctcaacgttaaacatg

SEQ ID NO: 2094168 - DNA, 25 bp, Homo sapien
cctctccaccagagacggcataagt

SEQ ID NO: 2094169 - DNA, 25 bp, Homo sapien
caacgttaaacatgagatcaggagg

SEQ ID NO: 2094170 - DNA, 25 bp, Homo sapien
acggcataagtgctagatcaagggc

SEQ ID NO: 2094171 - DNA, 25 bp, Homo sapien
tcttgattggttcgccttagaagtc

SEQ ID NO: 2094172 - DNA, 25 bp, Homo sapien
aaccagcagctgacaggactgtttc

SEQ ID NO: 2094173 - DNA, 25 bp, Homo sapien
cttagaagtctgagtgagagttgac

SEQ ID NO: 2094174 - DNA, 25 bp, Homo sapien
caaaatcacaattggtcccagcttg

SEQ ID NO: 2094175 - DNA, 25 bp, Homo sapien
tgggcttccgaagtgatttccaaac

SEQ ID NO: 2094176 - DNA, 25 bp, Homo sapien
gattggatggattaaatgggcttcc

SEQ ID NO: 2094177 - DNA, 25 bp, Homo sapien
ttaagactcaaccaagcatttagac

SEQ ID NO: 2094178 - DNA, 25 bp, Homo sapien
tttagacagtgttcccactctggag

SEQ ID NO: 2094179 - DNA, 25 bp, Homo sapien
tcttcgtgatcatgaatgattaata

SEQ ID NO: 2094180 - DNA, 25 bp, Homo sapien
tgatcatgaatgattaatatggcct

SEQ ID NO: 2094181 - DNA, 25 bp, Homo sapien
tcgtgatcatgaatgattaatatgg

SEQ ID NO: 2094182 - DNA, 25 bp, Homo sapien
atcttcgtgatcatgaatgattaat

SEQ ID NO: 2094183 - DNA, 25 bp, Homo sapien
tctgtcagattctctgctttcccaa

SEQ ID NO: 2094184 - DNA, 25 bp, Homo sapien
tcagacaatccatctgtcagattct

SEQ ID NO: 2094185 - DNA, 25 bp, Homo sapien
catctgtcagattctctgctttccc

SEQ ID NO: 2094186 - DNA, 25 bp, Homo sapien
tccatctgtcagattctctgctttc

SEQ ID NO: 2094187 - DNA, 25 bp, Homo sapien
atgactcccaatctgtgtaactgct

SEQ ID NO: 2094188 - DNA, 25 bp, Homo sapien
gtagatctttacatgactcccaatc

SEQ ID NO: 2094189 - DNA, 25 bp, Homo sapien
caatctgtgtaactgctcctggcag

SEQ ID NO: 2094190 - DNA, 25 bp, Homo sapien
ctgtagatctttacatgactcccaa

SEQ ID NO: 2094191 - DNA, 25 bp, Homo sapien
cccaaggcaggtattggaggataag

SEQ ID NO: 2094192 - DNA, 25 bp, Homo sapien
tgatacacggcatacacagaatttt

SEQ ID NO: 2094193 - DNA, 25 bp, Homo sapien
gagctctcatactgaatgatacacg

SEQ ID NO: 2094194 - DNA, 25 bp, Homo sapien
agatttgtgagcaggctcccactcc

SEQ ID NO: 2094195 - DNA, 25 bp, Homo sapien
taagagaggaaagtcagatccacaa

SEQ ID NO: 2094196 - DNA, 25 bp, Homo sapien
tcattgtcaaaatatgtccagtgtg

SEQ ID NO: 2094197 - DNA, 25 bp, Homo sapien
ggaacacagagaagtagttactcct

SEQ ID NO: 2094198 - DNA, 25 bp, Homo sapien
cgagtgaatctgtaaaagcaggagt

SEQ ID NO: 2094199 - DNA, 25 bp, Homo sapien
aacactcaggagggccaattagaac

SEQ ID NO: 2094200 - DNA, 25 bp, Homo sapien
actcaggagggccaattagaaccat

SEQ ID NO: 2094201 - DNA, 25 bp, Homo sapien
cactcaggagggccaattagaacca

SEQ ID NO: 2094202 - DNA, 25 bp, Homo sapien
agaacactcaggagggccaattaga

SEQ ID NO: 2094203 - DNA, 25 bp, Homo sapien
aagaaataatcaatggaagtgcagc

SEQ ID NO: 2094204 - DNA, 25 bp, Homo sapien
atgccctggatgggactgtccccag

SEQ ID NO: 2094205 - DNA, 25 bp, Homo sapien
tgccctggatgggactgtccccagc

SEQ ID NO: 2094206 - DNA, 25 bp, Homo sapien
gaaataatcaatggaagtgcagcct

SEQ ID NO: 2094207 - DNA, 25 bp, Homo sapien
aaaagccatcactctagtcttatga

SEQ ID NO: 2094208 - DNA, 25 bp, Homo sapien
ctggatatcaatataagcacaaggg

SEQ ID NO: 2094209 - DNA, 25 bp, Homo sapien
tatcaatataagcacaagggaaacg

SEQ ID NO: 2094210 - DNA, 25 bp, Homo sapien
aagccatcactctagtcttatgaat

SEQ ID NO: 2094211 - DNA, 25 bp, Homo sapien
tgctcagtagtatatcccttgtgga

SEQ ID NO: 2094212 - DNA, 25 bp, Homo sapien
gaagatatgcactctgaccaagaac

SEQ ID NO: 2094213 - DNA, 25 bp, Homo sapien
tgtgtcctggaccaatgtactggag

SEQ ID NO: 2094214 - DNA, 25 bp, Homo sapien
tactggagttttcgtgggagctgct

SEQ ID NO: 2094215 - DNA, 25 bp, Homo sapien
ggcagttgttgagacctgggaattc

SEQ ID NO: 2094216 - DNA, 25 bp, Homo sapien
ttcaaattggtagaaccaggctggt

SEQ ID NO: 2094217 - DNA, 25 bp, Homo sapien
cagctgttactacctggcagttgtt

SEQ ID NO: 2094218 - DNA, 25 bp, Homo sapien
ccaggctggtatcatgtggaaaata

SEQ ID NO: 2094219 - DNA, 25 bp, Homo sapien
tctctgaacaattctatccatttct

SEQ ID NO: 2094220 - DNA, 25 bp, Homo sapien
gaacaattctatccatttcttgaga

SEQ ID NO: 2094221 - DNA, 25 bp, Homo sapien
tccccttagcctcagctgctgaaaa

SEQ ID NO: 2094222 - DNA, 25 bp, Homo sapien
cccttagcctcagctgctgaaaaat

SEQ ID NO: 2094223 - DNA, 25 bp, Homo sapien
gttctgtaggttctgttgcctgctt

SEQ ID NO: 2094224 - DNA, 25 bp, Homo sapien
ttctgtaggttctgttgcctgcttc

SEQ ID NO: 2094225 - DNA, 25 bp, Homo sapien
gagtgattaagggtggtttataatc

SEQ ID NO: 2094226 - DNA, 25 bp, Homo sapien
tgattaagggtggtttataatccat

SEQ ID NO: 2094227 - DNA, 25 bp, Homo sapien
gtgattaagggtggtttataatcca

SEQ ID NO: 2094228 - DNA, 25 bp, Homo sapien
taagctctctagcagagagatgcat

SEQ ID NO: 2094229 - DNA, 25 bp, Homo sapien
tcttctaagctctctagcagagaga

SEQ ID NO: 2094230 - DNA, 25 bp, Homo sapien
atagacagtttacttcaagcttttc

SEQ ID NO: 2094231 - DNA, 25 bp, Homo sapien
tagacagtttacttcaagcttttcc

SEQ ID NO: 2094232 - DNA, 25 bp, Homo sapien
aaccaggtacatagcgcagttctga

SEQ ID NO: 2094233 - DNA, 25 bp, Homo sapien
tagcgcagttctgaggcggtactca

SEQ ID NO: 2094234 - DNA, 25 bp, Homo sapien
gcggtactcagtgttttttcgtgtc

SEQ ID NO: 2094235 - DNA, 25 bp, Homo sapien
ttagcaaccaggtacatagcgcagt

SEQ ID NO: 2094236 - DNA, 25 bp, Homo sapien
gtcacaagcagcagttgaaggcctt

SEQ ID NO: 2094237 - DNA, 25 bp, Homo sapien
ccagagctggtcttaatatccaatt

SEQ ID NO: 2094238 - DNA, 25 bp, Homo sapien
ttagagttcgtcacaagcagcagtt

SEQ ID NO: 2094239 - DNA, 25 bp, Homo sapien
cagagctggtcttaatatccaattc

SEQ ID NO: 2094240 - DNA, 25 bp, Homo sapien
gcaaaggataagctctgcaagagca

SEQ ID NO: 2094241 - DNA, 25 bp, Homo sapien
ccctagcctgggttagcaataaata

SEQ ID NO: 2094242 - DNA, 25 bp, Homo sapien
tagaaagcagaactaacatgttggg

SEQ ID NO: 2094243 - DNA, 25 bp, Homo sapien
aagagagacattattaccagctggg

SEQ ID NO: 2094244 - DNA, 25 bp, Homo sapien
ttaggtgtctcaatatctgaggatg

SEQ ID NO: 2094245 - DNA, 25 bp, Homo sapien
tgtgatcatataaggagataacttt

SEQ ID NO: 2094246 - DNA, 25 bp, Homo sapien
ttaaacaatgggatcaaccaactca

SEQ ID NO: 2094247 - DNA, 25 bp, Homo sapien
tcttcttgctattaggtgtctcaat

SEQ ID NO: 2094248 - DNA, 25 bp, Homo sapien
tccttctgtattctaaaagaaatcc

SEQ ID NO: 2094249 - DNA, 25 bp, Homo sapien
gtgttccttctgtattctaaaagaa

SEQ ID NO: 2094250 - DNA, 25 bp, Homo sapien
tgtccctttatttctgtgttccttc

SEQ ID NO: 2094251 - DNA, 25 bp, Homo sapien
tccctttatttctgtgttccttctg

SEQ ID NO: 2094252 - DNA, 25 bp, Homo sapien
tctttgaatcagtcttcaagagata

SEQ ID NO: 2094253 - DNA, 25 bp, Homo sapien
agttcggagatgctctattaacttc

SEQ ID NO: 2094254 - DNA, 25 bp, Homo sapien
ttcaagagataagatttcaagttca

SEQ ID NO: 2094255 - DNA, 25 bp, Homo sapien
caagagtattagttcggagatgctc

SEQ ID NO: 2094256 - DNA, 25 bp, Homo sapien
tctgcaaatagccttgcctgagtcc

SEQ ID NO: 2094257 - DNA, 25 bp, Homo sapien
tgcacatcctgagccatttactctg

SEQ ID NO: 2094258 - DNA, 25 bp, Homo sapien
ctctgtaaattaccatgagttgcaa

SEQ ID NO: 2094259 - DNA, 25 bp, Homo sapien
tataggctgttgttcccttttgcac

SEQ ID NO: 2094260 - DNA, 25 bp, Homo sapien
cagagcctcattcggcaaacagctt

SEQ ID NO: 2094261 - DNA, 25 bp, Homo sapien
gagcctcattcggcaaacagctttt

SEQ ID NO: 2094262 - DNA, 25 bp, Homo sapien
aaccagagcctcattcggcaaacag

SEQ ID NO: 2094263 - DNA, 25 bp, Homo sapien
ccagagcctcattcggcaaacagct

SEQ ID NO: 2094264 - DNA, 25 bp, Homo sapien
tgaatggtaaccctgtgtatgttgg

SEQ ID NO: 2094265 - DNA, 25 bp, Homo sapien
actgctggggacaaatgccttgttt

SEQ ID NO: 2094266 - DNA, 25 bp, Homo sapien
gaatgcctagggaattagtttcaag

SEQ ID NO: 2094267 - DNA, 25 bp, Homo sapien
tagtttcaagaatcctgggttgctg

SEQ ID NO: 2094268 - DNA, 25 bp, Homo sapien
atagcgcaacaatgctcctcaattt

SEQ ID NO: 2094269 - DNA, 25 bp, Homo sapien
gatagcgcaacaatgctcctcaatt

SEQ ID NO: 2094270 - DNA, 25 bp, Homo sapien
tagatagcgcaacaatgctcctcaa

SEQ ID NO: 2094271 - DNA, 25 bp, Homo sapien
ctagatagcgcaacaatgctcctca

SEQ ID NO: 2094272 - DNA, 25 bp, Homo sapien
cattctagctctaccctgaagaaaa

SEQ ID NO: 2094273 - DNA, 25 bp, Homo sapien
ccaagcattctagctctaccctgaa

SEQ ID NO: 2094274 - DNA, 25 bp, Homo sapien
gaaaatgcacatcttcacaaggttc

SEQ ID NO: 2094275 - DNA, 25 bp, Homo sapien
ttcttcccaagcattctagctctac

SEQ ID NO: 2094276 - DNA, 25 bp, Homo sapien
tggatgaactgcttgttcacaggaa

SEQ ID NO: 2094277 - DNA, 25 bp, Homo sapien
ttctccaccatcagacacatctgga

SEQ ID NO: 2094278 - DNA, 25 bp, Homo sapien
gacacatctggatcactgggagaga

SEQ ID NO: 2094279 - DNA, 25 bp, Homo sapien
agagagagtgttgaggatgctagtg

SEQ ID NO: 2094280 - DNA, 25 bp, Homo sapien
gcaaccgggagtatgccaaatcttt

SEQ ID NO: 2094281 - DNA, 25 bp, Homo sapien
ggatgtgacaggatatttccctccc

SEQ ID NO: 2094282 - DNA, 25 bp, Homo sapien
gtagtgacactcttagcaaccggga

SEQ ID NO: 2094283 - DNA, 25 bp, Homo sapien
cctgaatctgtagagaagccgcctt

SEQ ID NO: 2094284 - DNA, 25 bp, Homo sapien
tacggatcagcaaagtcaaactcgg

SEQ ID NO: 2094285 - DNA, 25 bp, Homo sapien
tcaaactcgggtaggaggccacatg

SEQ ID NO: 2094286 - DNA, 25 bp, Homo sapien
tagggctgccttaagagaactctgg

SEQ ID NO: 2094287 - DNA, 25 bp, Homo sapien
catggtaaccaaggaatgtcagaaa

SEQ ID NO: 2094288 - DNA, 25 bp, Homo sapien
ctgctctatgaattactgttgcttt

SEQ ID NO: 2094289 - DNA, 25 bp, Homo sapien
ctattgctactgtctgaggcttggc

SEQ ID NO: 2094290 - DNA, 25 bp, Homo sapien
gtctattgatcctaccatggtccca

SEQ ID NO: 2094291 - DNA, 25 bp, Homo sapien
gcttggcttcattgctgacttctgc

SEQ ID NO: 2094292 - DNA, 25 bp, Homo sapien
tctgctttttgttcagtcctccgac

SEQ ID NO: 2094293 - DNA, 25 bp, Homo sapien
caccttcatgtctgtcaaaccacca

SEQ ID NO: 2094294 - DNA, 25 bp, Homo sapien
aaaccaccaacacataaattccaca

SEQ ID NO: 2094295 - DNA, 25 bp, Homo sapien
ccaccaacacataaattccacaagc

SEQ ID NO: 2094296 - DNA, 25 bp, Homo sapien
accttcatgtctgtcaaaccaccaa

SEQ ID NO: 2094297 - DNA, 25 bp, Homo sapien
tatagccttgtacgacagagcctcg

SEQ ID NO: 2094298 - DNA, 25 bp, Homo sapien
cagtcagcagaatatagccttgtac

SEQ ID NO: 2094299 - DNA, 25 bp, Homo sapien
ttgttaaccacctcgtcagcacact

SEQ ID NO: 2094300 - DNA, 25 bp, Homo sapien
gagcacttgttaaccacctcgtcag

SEQ ID NO: 2094301 - DNA, 25 bp, Homo sapien
ccaaagaacttctcagagggctgat

SEQ ID NO: 2094302 - DNA, 25 bp, Homo sapien
gatctttgtttagtgttaggcttgt

SEQ ID NO: 2094303 - DNA, 25 bp, Homo sapien
ttctcagagggctgatatagctcat

SEQ ID NO: 2094304 - DNA, 25 bp, Homo sapien
caccaagatctttgtttagtgttag

SEQ ID NO: 2094305 - DNA, 25 bp, Homo sapien
ggaccattttggatattgacttgga

SEQ ID NO: 2094306 - DNA, 25 bp, Homo sapien
tgataacccaaacatgccaacctgg

SEQ ID NO: 2094307 - DNA, 25 bp, Homo sapien
cctggccccttgtgaacctgctgaa

SEQ ID NO: 2094308 - DNA, 25 bp, Homo sapien
tctgacatcgatcacaacaagtctg

SEQ ID NO: 2094309 - DNA, 25 bp, Homo sapien
tgctgcactcggatggaatgaagaa

SEQ ID NO: 2094310 - DNA, 25 bp, Homo sapien
gaggcctattgtgctttttcaacac

SEQ ID NO: 2094311 - DNA, 25 bp, Homo sapien
tcttaaatgaaccatcagtaacagc

SEQ ID NO: 2094312 - DNA, 25 bp, Homo sapien
gcagtgacaactggctactgaaggg

SEQ ID NO: 2094313 - DNA, 25 bp, Homo sapien
cctgtgggtcaactccattatgcat

SEQ ID NO: 2094314 - DNA, 25 bp, Homo sapien
acttgatcagcctggatgatctcca

SEQ ID NO: 2094315 - DNA, 25 bp, Homo sapien
atcacttgatcagcctggatgatct

SEQ ID NO: 2094316 - DNA, 25 bp, Homo sapien
ccatcacttgatcagcctggatgat

SEQ ID NO: 2094317 - DNA, 25 bp, Homo sapien
ttctttgctttcggtctacaaccat

SEQ ID NO: 2094318 - DNA, 25 bp, Homo sapien
gttctttgctttcggtctacaacca

SEQ ID NO: 2094319 - DNA, 25 bp, Homo sapien
cttagctgatgaatccaaagcactg

SEQ ID NO: 2094320 - DNA, 25 bp, Homo sapien
tcatttgcttcctcaaggacactac

SEQ ID NO: 2094321 - DNA, 25 bp, Homo sapien
ctcaaggactttaagggcaaggtgg

SEQ ID NO: 2094322 - DNA, 25 bp, Homo sapien
caaagcactgaatcagaactcaagg

SEQ ID NO: 2094323 - DNA, 25 bp, Homo sapien
tgctgtggactgaaattaccatcta

SEQ ID NO: 2094324 - DNA, 25 bp, Homo sapien
gaaattaccatctaagttcttgcta

SEQ ID NO: 2094325 - DNA, 25 bp, Homo sapien
taagttcttgctatctgaggatctg

SEQ ID NO: 2094326 - DNA, 25 bp, Homo sapien
ttatgtgccagcagttcccatctgc

SEQ ID NO: 2094327 - DNA, 25 bp, Homo sapien
taagcttaagtttccattgcagttt

SEQ ID NO: 2094328 - DNA, 25 bp, Homo sapien
gactaagcttaagtttccattgcag

SEQ ID NO: 2094329 - DNA, 25 bp, Homo sapien
atgactaagcttaagtttccattgc

SEQ ID NO: 2094330 - DNA, 25 bp, Homo sapien
taaaatgactaagcttaagtttcca

SEQ ID NO: 2094331 - DNA, 25 bp, Homo sapien
tagaagttcttgtttagaaagcaga

SEQ ID NO: 2094332 - DNA, 25 bp, Homo sapien
ctagaagttcttgtttagaaagcag

SEQ ID NO: 2094333 - DNA, 25 bp, Homo sapien
gaagttcttgtttagaaagcagatc

SEQ ID NO: 2094334 - DNA, 25 bp, Homo sapien
cctagaagttcttgtttagaaagca

SEQ ID NO: 2094335 - DNA, 25 bp, Homo sapien
atcttcaagcttgtgtcggatctgg

SEQ ID NO: 2094336 - DNA, 25 bp, Homo sapien
agcttgtgtcggatctggttgaggg

SEQ ID NO: 2094337 - DNA, 25 bp, Homo sapien
cttcaagcttgtgtcggatctggtt

SEQ ID NO: 2094338 - DNA, 25 bp, Homo sapien
tcaagcttgtgtcggatctggttga

SEQ ID NO: 2094339 - DNA, 25 bp, Homo sapien
ggacatggcaatcttctgtatatcc

SEQ ID NO: 2094340 - DNA, 25 bp, Homo sapien
gacatggcaatcttctgtatatcct

SEQ ID NO: 2094341 - DNA, 25 bp, Homo sapien
ggccatttgatgaagccctccaggt

SEQ ID NO: 2094342 - DNA, 25 bp, Homo sapien
cttggaagctgtgggatgtcagcac

SEQ ID NO: 2094343 - DNA, 25 bp, Homo sapien
gtctctttcccaccttacagcttgg

SEQ ID NO: 2094344 - DNA, 25 bp, Homo sapien
ttactgcatgtccaattccaagtct

SEQ ID NO: 2094345 - DNA, 25 bp, Homo sapien
atcattagctttaaacaatgtatcc

SEQ ID NO: 2094346 - DNA, 25 bp, Homo sapien
tcattagctttaaacaatgtatcca

SEQ ID NO: 2094347 - DNA, 25 bp, Homo sapien
cattagctttaaacaatgtatccat

SEQ ID NO: 2094348 - DNA, 25 bp, Homo sapien
tgacttggcactgaacaggacagaa

SEQ ID NO: 2094349 - DNA, 25 bp, Homo sapien
tctgtgtcttatgacctttctcaaa

SEQ ID NO: 2094350 - DNA, 25 bp, Homo sapien
gacagaatctgtagcacattttgag

SEQ ID NO: 2094351 - DNA, 25 bp, Homo sapien
cacattttgagactgtactgttttc

SEQ ID NO: 2094352 - DNA, 25 bp, Homo sapien
cacaatctcatatccgtatttagct

SEQ ID NO: 2094353 - DNA, 25 bp, Homo sapien
aacacaatctcatatccgtatttag

SEQ ID NO: 2094354 - DNA, 25 bp, Homo sapien
tcaaaacacaatctcatatccgtat

SEQ ID NO: 2094355 - DNA, 25 bp, Homo sapien
caaaacacaatctcatatccgtatt

SEQ ID NO: 2094356 - DNA, 25 bp, Homo sapien
gaaccatggtatgataccagttgga

SEQ ID NO: 2094357 - DNA, 25 bp, Homo sapien
catgcttatccatagtgtggggaac

SEQ ID NO: 2094358 - DNA, 25 bp, Homo sapien
tggtatgataccagttggaagacaa

SEQ ID NO: 2094359 - DNA, 25 bp, Homo sapien
tgtggggaaccatggtatgatacca

SEQ ID NO: 2094360 - DNA, 25 bp, Homo sapien
tgctgtcggatcttccccgggtgat

SEQ ID NO: 2094361 - DNA, 25 bp, Homo sapien
gaagcgcagcgatgatgaggcagga

SEQ ID NO: 2094362 - DNA, 25 bp, Homo sapien
ggctccggaggtgattcccgagacc

SEQ ID NO: 2094363 - DNA, 25 bp, Homo sapien
acccgcgtacgcctgcagagacgga

SEQ ID NO: 2094364 - DNA, 25 bp, Homo sapien
taaacgtgcaggagtcgtggctccg

SEQ ID NO: 2094365 - DNA, 25 bp, Homo sapien
ggtctccgtccctagggagcttcag

SEQ ID NO: 2094366 - DNA, 25 bp, Homo sapien
ggtctcgcggctgtaacgtctttta

SEQ ID NO: 2094367 - DNA, 25 bp, Homo sapien
gtcttttagccaaccgccggcagga

SEQ ID NO: 2094368 - DNA, 25 bp, Homo sapien
tccagtccactacttgactcggaga

SEQ ID NO: 2094369 - DNA, 25 bp, Homo sapien
ctacttgactcggagaccatttgct

SEQ ID NO: 2094370 - DNA, 25 bp, Homo sapien
tcaccggttccattatcagagccat

SEQ ID NO: 2094371 - DNA, 25 bp, Homo sapien
ctcaccggttccattatcagagcca

SEQ ID NO: 2094372 - DNA, 25 bp, Homo sapien
ggtgccccgcgccccagtgccgcct

SEQ ID NO: 2094373 - DNA, 25 bp, Homo sapien
tgccccgcgccccagtgccgcctca

SEQ ID NO: 2094374 - DNA, 25 bp, Homo sapien
tggtgccccgcgccccagtgccgcc

SEQ ID NO: 2094375 - DNA, 25 bp, Homo sapien
gccccgcgccccagtgccgcctcac

SEQ ID NO: 2094376 - DNA, 25 bp, Homo sapien
ctgggagataagggtcgccacgtcc

SEQ ID NO: 2094377 - DNA, 25 bp, Homo sapien
gggagataagggtcgccacgtcctc

SEQ ID NO: 2094378 - DNA, 25 bp, Homo sapien
cgccgagggggcgtcagctttccca

SEQ ID NO: 2094379 - DNA, 25 bp, Homo sapien
ccaggaaagggcgaccaggggagca

SEQ ID NO: 2094380 - DNA, 25 bp, Homo sapien
gggcggccgcgtcctgaccccatta

SEQ ID NO: 2094381 - DNA, 25 bp, Homo sapien
ctaaaagttgcttgggagagttggc

SEQ ID NO: 2094382 - DNA, 25 bp, Homo sapien
accccattatgtgggctaaaagttg

SEQ ID NO: 2094383 - DNA, 25 bp, Homo sapien
tgccaggctccgaatgggggcggcc

SEQ ID NO: 2094384 - DNA, 25 bp, Homo sapien
caaaacctcgactggcttgaaaggg

SEQ ID NO: 2094385 - DNA, 25 bp, Homo sapien
tgagcccttaataaaaagccgtgag

SEQ ID NO: 2094386 - DNA, 25 bp, Homo sapien
agccgtgaggtccaaaacctcgact

SEQ ID NO: 2094387 - DNA, 25 bp, Homo sapien
atctggcgttgagcccttaataaaa

SEQ ID NO: 2094388 - DNA, 25 bp, Homo sapien
gcaaagcgctaacatttcccaagtg

SEQ ID NO: 2094389 - DNA, 25 bp, Homo sapien
ggctccttcatcgtaggaacgggca

SEQ ID NO: 2094390 - DNA, 25 bp, Homo sapien
taataagcctttggtccctgactga

SEQ ID NO: 2094391 - DNA, 25 bp, Homo sapien
caggtatgacctcgagcaaagcgct

SEQ ID NO: 2094392 - DNA, 25 bp, Homo sapien
ttaatcctgttgcactggactgcgt

SEQ ID NO: 2094393 - DNA, 25 bp, Homo sapien
accacttattcagctctaaacggac

SEQ ID NO: 2094394 - DNA, 25 bp, Homo sapien
cactggactgcgttaacaatctgca

SEQ ID NO: 2094395 - DNA, 25 bp, Homo sapien
cagctctaaacggacctcaaaaagt

SEQ ID NO: 2094396 - DNA, 25 bp, Homo sapien
ggaccagtatcaagaggatgcatcc

SEQ ID NO: 2094397 - DNA, 25 bp, Homo sapien
tgcagaaattgagagtcagattgac

SEQ ID NO: 2094398 - DNA, 25 bp, Homo sapien
gctgaaccagtcctgaaagctcacc

SEQ ID NO: 2094399 - DNA, 25 bp, Homo sapien
ttagagacttgcaacaggaaaacag

SEQ ID NO: 2094400 - DNA, 25 bp, Homo sapien
tgcatccgatatgaaggacatgtcc

SEQ ID NO: 2094401 - DNA, 25 bp, Homo sapien
atggttgctaaaaaagcggtggatg

SEQ ID NO: 2094402 - DNA, 25 bp, Homo sapien
atcatgagcaaatatcggaaacaga

SEQ ID NO: 2094403 - DNA, 25 bp, Homo sapien
gagaagatcctgacagacgccaaga

SEQ ID NO: 2094404 - DNA, 25 bp, Homo sapien
aggaaaacagagagctatggatttc

SEQ ID NO: 2094405 - DNA, 25 bp, Homo sapien
gagaacacacagattagagacttgc

SEQ ID NO: 2094406 - DNA, 25 bp, Homo sapien
gctatgagctgcaccatcgagaaga

SEQ ID NO: 2094407 - DNA, 25 bp, Homo sapien
acttggttcgctattttagctatgc

SEQ ID NO: 2094408 - DNA, 25 bp, Homo sapien
tattttagctatgcaagttgaagct

SEQ ID NO: 2094409 - DNA, 25 bp, Homo sapien
ctccacttggttcgctattttagct

SEQ ID NO: 2094410 - DNA, 25 bp, Homo sapien
tgcaagttgaagcttttctacacat

SEQ ID NO: 2094411 - DNA, 25 bp, Homo sapien
ggtttcaacgtgtagaacagtgact

SEQ ID NO: 2094412 - DNA, 25 bp, Homo sapien
ttggttgtaatcttcgtgcttggca

SEQ ID NO: 2094413 - DNA, 25 bp, Homo sapien
ttgtggccagtttgccttttgccgc

SEQ ID NO: 2094414 - DNA, 25 bp, Homo sapien
ccttttgccgcagaaaggatcatct

SEQ ID NO: 2094415 - DNA, 25 bp, Homo sapien
aatgcacacagaaggtcaactgctt

SEQ ID NO: 2094416 - DNA, 25 bp, Homo sapien
caaagttcttaatatactgctgcaa

SEQ ID NO: 2094417 - DNA, 25 bp, Homo sapien
cagatcttctagctcctgatgtgta

SEQ ID NO: 2094418 - DNA, 25 bp, Homo sapien
cctgatggccaatgcggctgacccc

SEQ ID NO: 2094419 - DNA, 25 bp, Homo sapien
tgaggtcagaaagtcgtttggcaat

SEQ ID NO: 2094420 - DNA, 25 bp, Homo sapien
accaggcaagcagactcttggctgc

SEQ ID NO: 2094421 - DNA, 25 bp, Homo sapien
tcggctggtcctcccatcataatgg

SEQ ID NO: 2094422 - DNA, 25 bp, Homo sapien
tggctgctccaatcagatccacaac

SEQ ID NO: 2094423 - DNA, 25 bp, Homo sapien
ctgaatagtctgtcacagcagcaaa

SEQ ID NO: 2094424 - DNA, 25 bp, Homo sapien
tgcacaattgttgttaactccaggc

SEQ ID NO: 2094425 - DNA, 25 bp, Homo sapien
cacaattgttgttaactccaggcag

SEQ ID NO: 2094426 - DNA, 25 bp, Homo sapien
gcacaattgttgttaactccaggca

SEQ ID NO: 2094427 - DNA, 25 bp, Homo sapien
agaaggaaagtttgtcagctaatac

SEQ ID NO: 2094428 - DNA, 25 bp, Homo sapien
aacagaaggaaagtttgtcagctaa

SEQ ID NO: 2094429 - DNA, 25 bp, Homo sapien
ttaacagaaggaaagtttgtcagct

SEQ ID NO: 2094430 - DNA, 25 bp, Homo sapien
cagaaggaaagtttgtcagctaata

SEQ ID NO: 2094431 - DNA, 25 bp, Homo sapien
gacatctgtgatcctagatttaaga

SEQ ID NO: 2094432 - DNA, 25 bp, Homo sapien
taccagctgtgggttagtgacagaa

SEQ ID NO: 2094433 - DNA, 25 bp, Homo sapien
taaaatattggtgcacactcaacta

SEQ ID NO: 2094434 - DNA, 25 bp, Homo sapien
acttttcaaaaacttctaccagctg

SEQ ID NO: 2094435 - DNA, 25 bp, Homo sapien
ttctctgtttcatatacagtacaat

SEQ ID NO: 2094436 - DNA, 25 bp, Homo sapien
tattctctgtttcatatacagtaca

SEQ ID NO: 2094437 - DNA, 25 bp, Homo sapien
tttattctctgtttcatatacagta

SEQ ID NO: 2094438 - DNA, 25 bp, Homo sapien
cacgtgaagaattttattctctgtt

SEQ ID NO: 2094439 - DNA, 25 bp, Homo sapien
acaaggaaatatcctctaataaaga

SEQ ID NO: 2094440 - DNA, 25 bp, Homo sapien
tggtcacagactccagaaagagttt

SEQ ID NO: 2094441 - DNA, 25 bp, Homo sapien
tatgatgtggtcacagactccagaa

SEQ ID NO: 2094442 - DNA, 25 bp, Homo sapien
ctgacgacagggatatgatgtggtc

SEQ ID NO: 2094443 - DNA, 25 bp, Homo sapien
acagggatatgatgtggtcacagac

SEQ ID NO: 2094444 - DNA, 25 bp, Homo sapien
cgcttggtttaatgtttgccagttg

SEQ ID NO: 2094445 - DNA, 25 bp, Homo sapien
taatgtttgccagttgaatcacttc

SEQ ID NO: 2094446 - DNA, 25 bp, Homo sapien
tccaggtgagcagactgtgaaacca

SEQ ID NO: 2094447 - DNA, 25 bp, Homo sapien
ttgaatcacttccaggtgagcagac

SEQ ID NO: 2094448 - DNA, 25 bp, Homo sapien
tgactacgaattaaaggtgtttgac

SEQ ID NO: 2094449 - DNA, 25 bp, Homo sapien
aaatcatggaaacagcatagctatg

SEQ ID NO: 2094450 - DNA, 25 bp, Homo sapien
caattgtaagccaaagacagtatct

SEQ ID NO: 2094451 - DNA, 25 bp, Homo sapien
ggaagaggatctcatcatgacaaca

SEQ ID NO: 2094452 - DNA, 25 bp, Homo sapien
aattacatggaggccatcatatgta

SEQ ID NO: 2094453 - DNA, 25 bp, Homo sapien
tgattaacttgaatcacttcatcgc

SEQ ID NO: 2094454 - DNA, 25 bp, Homo sapien
ctgatgattaacttgaatcacttca

SEQ ID NO: 2094455 - DNA, 25 bp, Homo sapien
ttaacttgaatcacttcatcgccag

SEQ ID NO: 2094456 - DNA, 25 bp, Homo sapien
aacttgaatcacttcatcgccagca

SEQ ID NO: 2094457 - DNA, 25 bp, Homo sapien
ctactgaagcagctgctttatccca

SEQ ID NO: 2094458 - DNA, 25 bp, Homo sapien
tgaagcagctgctttatcccactgc

SEQ ID NO: 2094459 - DNA, 25 bp, Homo sapien
tgctttatcccactgcccaaatcct

SEQ ID NO: 2094460 - DNA, 25 bp, Homo sapien
ttatcccactgcccaaatcctcatc

SEQ ID NO: 2094461 - DNA, 25 bp, Homo sapien
cagtacccatcataaagcctcttct

SEQ ID NO: 2094462 - DNA, 25 bp, Homo sapien
cataaagcctcttcttaaaggtgac

SEQ ID NO: 2094463 - DNA, 25 bp, Homo sapien
ccatcataaagcctcttcttaaagg

SEQ ID NO: 2094464 - DNA, 25 bp, Homo sapien
atgcagtacccatcataaagcctct

SEQ ID NO: 2094465 - DNA, 25 bp, Homo sapien
tagatcaataccaagagatgtttca

SEQ ID NO: 2094466 - DNA, 25 bp, Homo sapien
actttcagtcacaatacattccaac

SEQ ID NO: 2094467 - DNA, 25 bp, Homo sapien
aattaggtaactttcagtcacaata

SEQ ID NO: 2094468 - DNA, 25 bp, Homo sapien
tcttgcataggtcaaataattaggt

SEQ ID NO: 2094469 - DNA, 25 bp, Homo sapien
catgaacctagtgtatgaatagcaa

SEQ ID NO: 2094470 - DNA, 25 bp, Homo sapien
ccagaaaggcaacactactatttaa

SEQ ID NO: 2094471 - DNA, 25 bp, Homo sapien
tcaggactgtttgttatggatggaa

SEQ ID NO: 2094472 - DNA, 25 bp, Homo sapien
taaagggagtaaggacttgcaatac

SEQ ID NO: 2094473 - DNA, 25 bp, Homo sapien
ggtaaccagcaaaatcattacaata

SEQ ID NO: 2094474 - DNA, 25 bp, Homo sapien
tgaggtacagtattcaaagatttaa

SEQ ID NO: 2094475 - DNA, 25 bp, Homo sapien
taaaattgaggtacagtattcaaag

SEQ ID NO: 2094476 - DNA, 25 bp, Homo sapien
ctggtaaccagcaaaatcattacaa

SEQ ID NO: 2094477 - DNA, 25 bp, Homo sapien
tggtgctgaggtaagcatgctctga

SEQ ID NO: 2094478 - DNA, 25 bp, Homo sapien
tctgaggtcgctttttcaaagttaa

SEQ ID NO: 2094479 - DNA, 25 bp, Homo sapien
ggtcctctcgtagtgcattcaccaa

SEQ ID NO: 2094480 - DNA, 25 bp, Homo sapien
taagataacaccactcgggtcctct

SEQ ID NO: 2094481 - DNA, 25 bp, Homo sapien
gatggtgtatgacttatgattaagc

SEQ ID NO: 2094482 - DNA, 25 bp, Homo sapien
ggtgtatgacttatgattaagcttc

SEQ ID NO: 2094483 - DNA, 25 bp, Homo sapien
agcattactgagataatctatggct

SEQ ID NO: 2094484 - DNA, 25 bp, Homo sapien
actgagataatctatggctaaaatg

SEQ ID NO: 2094485 - DNA, 25 bp, Homo sapien
aggatctttagggaagacatggcaa

SEQ ID NO: 2094486 - DNA, 25 bp, Homo sapien
ggatctttagggaagacatggcaat

SEQ ID NO: 2094487 - DNA, 25 bp, Homo sapien
aaggatctttagggaagacatggca

SEQ ID NO: 2094488 - DNA, 25 bp, Homo sapien
tatttggatgagctgatgggcattt

SEQ ID NO: 2094489 - DNA, 25 bp, Homo sapien
aagatttgtatttggatgagctgat

SEQ ID NO: 2094490 - DNA, 25 bp, Homo sapien
ttttcaagtttgaatgctgaagatt

SEQ ID NO: 2094491 - DNA, 25 bp, Homo sapien
ttgtatttggatgagctgatgggca

SEQ ID NO: 2094492 - DNA, 25 bp, Homo sapien
gatcctggagggcagaactgtctct

SEQ ID NO: 2094493 - DNA, 25 bp, Homo sapien
ttgtgggacttctaggtataagagg

SEQ ID NO: 2094494 - DNA, 25 bp, Homo sapien
ctcttttggtgggtgtactgatggt

SEQ ID NO: 2094495 - DNA, 25 bp, Homo sapien
tgatggtgctggaaggcgtggcaac

SEQ ID NO: 2094496 - DNA, 25 bp, Homo sapien
tatgcactggcttgcccaccatatg

SEQ ID NO: 2094497 - DNA, 25 bp, Homo sapien
ttcatagcaatataagacagtatct

SEQ ID NO: 2094498 - DNA, 25 bp, Homo sapien
ctctttcgatattcctgatccagaa

SEQ ID NO: 2094499 - DNA, 25 bp, Homo sapien
ggtgattcagatcccttatgcactg

SEQ ID NO: 2094500 - DNA, 25 bp, Homo sapien
tctgtggttagttcttctttggaaa

SEQ ID NO: 2094501 - DNA, 25 bp, Homo sapien
tttgtgaggctaaccaacatgtagt

SEQ ID NO: 2094502 - DNA, 25 bp, Homo sapien
gaatatagtgcacatcccacatttc

SEQ ID NO: 2094503 - DNA, 25 bp, Homo sapien
gtctaaaggaataagaattcccatg

SEQ ID NO: 2094504 - DNA, 25 bp, Homo sapien
gatttcttatctacatacattccca

SEQ ID NO: 2094505 - DNA, 25 bp, Homo sapien
agaactgtttgccaatcaagtcaga

SEQ ID NO: 2094506 - DNA, 25 bp, Homo sapien
agtcagaactagttctgtctcttga

SEQ ID NO: 2094507 - DNA, 25 bp, Homo sapien
tgacaaactgagctttacagaactg

SEQ ID NO: 2094508 - DNA, 25 bp, Homo sapien
gacttcaatattcaccctctgagag

SEQ ID NO: 2094509 - DNA, 25 bp, Homo sapien
tgccatataccacatactaagagtt

SEQ ID NO: 2094510 - DNA, 25 bp, Homo sapien
tcctgtcgtcatatgcttagtctca

SEQ ID NO: 2094511 - DNA, 25 bp, Homo sapien
gcccaaggacatatacctggtaagt

SEQ ID NO: 2094512 - DNA, 25 bp, Homo sapien
tcagcaaggagaactcatggcaaag

SEQ ID NO: 2094513 - DNA, 25 bp, Homo sapien
tgtttcaagttggaacaccacaagg

SEQ ID NO: 2094514 - DNA, 25 bp, Homo sapien
tgacagccaacctccaaaatggtag

SEQ ID NO: 2094515 - DNA, 25 bp, Homo sapien
tttcatgtcctacagctgagtctgc

SEQ ID NO: 2094516 - DNA, 25 bp, Homo sapien
ggcatagatataggtcgtagcttgc

SEQ ID NO: 2094517 - DNA, 25 bp, Homo sapien
tcatcttatttggatcttcatagtc

SEQ ID NO: 2094518 - DNA, 25 bp, Homo sapien
ttcatagtcccccacccaattatat

SEQ ID NO: 2094519 - DNA, 25 bp, Homo sapien
tattccactggcatagatataggtc

SEQ ID NO: 2094520 - DNA, 25 bp, Homo sapien
gagttgggctattactcttatcacc

SEQ ID NO: 2094521 - DNA, 25 bp, Homo sapien
gctcatataccgaagtagagagttt

SEQ ID NO: 2094522 - DNA, 25 bp, Homo sapien
agtgcccatgatgtcttgtctcagt

SEQ ID NO: 2094523 - DNA, 25 bp, Homo sapien
atggtatagtgtggtctctggcaca

SEQ ID NO: 2094524 - DNA, 25 bp, Homo sapien
agctcttctgaatagtggtaataac

SEQ ID NO: 2094525 - DNA, 25 bp, Homo sapien
aacgactaagagtactgatttcagg

SEQ ID NO: 2094526 - DNA, 25 bp, Homo sapien
ttcaaacgactaagagtactgattt

SEQ ID NO: 2094527 - DNA, 25 bp, Homo sapien
tcagtgctcatacagctcttctgaa

SEQ ID NO: 2094528 - DNA, 25 bp, Homo sapien
cccacatacggtgggagggacccag

SEQ ID NO: 2094529 - DNA, 25 bp, Homo sapien
ccataattcccacatacggtgggag

SEQ ID NO: 2094530 - DNA, 25 bp, Homo sapien
gggggcagttacctccatgatgttc

SEQ ID NO: 2094531 - DNA, 25 bp, Homo sapien
gcagttacctccatgatgttcttgt

SEQ ID NO: 2094532 - DNA, 25 bp, Homo sapien
ggcaatgggttgcagttccatccat

SEQ ID NO: 2094533 - DNA, 25 bp, Homo sapien
gtggcaatgggttgcagttccatcc

SEQ ID NO: 2094534 - DNA, 25 bp, Homo sapien
tggcaatgggttgcagttccatcca

SEQ ID NO: 2094535 - DNA, 25 bp, Homo sapien
ttgatttgtgctgcagtgaggactg

SEQ ID NO: 2094536 - DNA, 25 bp, Homo sapien
ctttgatttgtgctgcagtgaggac

SEQ ID NO: 2094537 - DNA, 25 bp, Homo sapien
tgatttgtgctgcagtgaggactgc

SEQ ID NO: 2094538 - DNA, 25 bp, Homo sapien
tttgatttgtgctgcagtgaggact

SEQ ID NO: 2094539 - DNA, 25 bp, Homo sapien
gggatgcatcctttaggacaaacca

SEQ ID NO: 2094540 - DNA, 25 bp, Homo sapien
ttaatataccaataaagggatgcat

SEQ ID NO: 2094541 - DNA, 25 bp, Homo sapien
gaaaagtaactcttcgcatctttct

SEQ ID NO: 2094542 - DNA, 25 bp, Homo sapien
tcacagtcaccacggccaagatctt

SEQ ID NO: 2094543 - DNA, 25 bp, Homo sapien
tttgcggcattcactggctctatca

SEQ ID NO: 2094544 - DNA, 25 bp, Homo sapien
tattttttgcggcattcactggctc

SEQ ID NO: 2094545 - DNA, 25 bp, Homo sapien
gcattcactggctctatcaatttta

SEQ ID NO: 2094546 - DNA, 25 bp, Homo sapien
caattttaaattcaggcaggctaat

SEQ ID NO: 2094547 - DNA, 25 bp, Homo sapien
ttcatatcatcaagatgttcagcag

SEQ ID NO: 2094548 - DNA, 25 bp, Homo sapien
cttttgattttaggatgacaggctt

SEQ ID NO: 2094549 - DNA, 25 bp, Homo sapien
agcttttgattttaggatgacaggc

SEQ ID NO: 2094550 - DNA, 25 bp, Homo sapien
catatcatcaagatgttcagcagca

SEQ ID NO: 2094551 - DNA, 25 bp, Homo sapien
gcatatcctgcagtcagcatattaa

SEQ ID NO: 2094552 - DNA, 25 bp, Homo sapien
tctgcatatcctgcagtcagcatat

SEQ ID NO: 2094553 - DNA, 25 bp, Homo sapien
tgcatatcctgcagtcagcatatta

SEQ ID NO: 2094554 - DNA, 25 bp, Homo sapien
ttctgcatatcctgcagtcagcata

SEQ ID NO: 2094555 - DNA, 25 bp, Homo sapien
cttgttttggtgttgatggagtatc

SEQ ID NO: 2094556 - DNA, 25 bp, Homo sapien
ttggtgttgatggagtatctgcttc

SEQ ID NO: 2094557 - DNA, 25 bp, Homo sapien
tggagggctatcttgttttggtgtt

SEQ ID NO: 2094558 - DNA, 25 bp, Homo sapien
cgagggaggtcgtgggtatgtatca

SEQ ID NO: 2094559 - DNA, 25 bp, Homo sapien
tctgtgccaaaataacagaccactt

SEQ ID NO: 2094560 - DNA, 25 bp, Homo sapien
ttagtctgtgccaaaataacagacc

SEQ ID NO: 2094561 - DNA, 25 bp, Homo sapien
ctgtagaaaggagcccctgattagt

SEQ ID NO: 2094562 - DNA, 25 bp, Homo sapien
acagaccacttccattccaaggaac

SEQ ID NO: 2094563 - DNA, 25 bp, Homo sapien
gaaagtcggctatgttttgcttcca

SEQ ID NO: 2094564 - DNA, 25 bp, Homo sapien
tggcgaaactcctcatgagaagact

SEQ ID NO: 2094565 - DNA, 25 bp, Homo sapien
ttaaatcctgccaggagcggcgctg

SEQ ID NO: 2094566 - DNA, 25 bp, Homo sapien
tcttgcgaatgggagacactgcact

SEQ ID NO: 2094567 - DNA, 25 bp, Homo sapien
tatctcgaggcagagtaaaacttcg

SEQ ID NO: 2094568 - DNA, 25 bp, Homo sapien
gacagcaatggttgaacccgctatc

SEQ ID NO: 2094569 - DNA, 25 bp, Homo sapien
cagagtaaaacttcgaggcttgccc

SEQ ID NO: 2094570 - DNA, 25 bp, Homo sapien
tggttgaacccgctatctcgaggca

SEQ ID NO: 2094571 - DNA, 25 bp, Homo sapien
gtcatcctgtgggtcacaggcacta

SEQ ID NO: 2094572 - DNA, 25 bp, Homo sapien
catcctgtgggtcacaggcactaac

SEQ ID NO: 2094573 - DNA, 25 bp, Homo sapien
tcatcctgtgggtcacaggcactaa

SEQ ID NO: 2094574 - DNA, 25 bp, Homo sapien
cctcttcctccacctctgggggttg

SEQ ID NO: 2094575 - DNA, 25 bp, Homo sapien
ctcctcttcctccacctctgggggt

SEQ ID NO: 2094576 - DNA, 25 bp, Homo sapien
tcttcctccacctctgggggttgca

SEQ ID NO: 2094577 - DNA, 25 bp, Homo sapien
cttcctccacctctgggggttgcac

SEQ ID NO: 2094578 - DNA, 25 bp, Homo sapien
taaacagaggcttggtatggcatgt

SEQ ID NO: 2094579 - DNA, 25 bp, Homo sapien
aaggctctgctaacaacctgcttga

SEQ ID NO: 2094580 - DNA, 25 bp, Homo sapien
caaggcagaggattacttcattgac

SEQ ID NO: 2094581 - DNA, 25 bp, Homo sapien
gggagacctaacttactatatagca

SEQ ID NO: 2094582 - DNA, 25 bp, Homo sapien
tgaactgtgtggcagcacagtaagc

SEQ ID NO: 2094583 - DNA, 25 bp, Homo sapien
actgtgtggcagcacagtaagcgct

SEQ ID NO: 2094584 - DNA, 25 bp, Homo sapien
caggttgcctgctgaactgtgtggc

SEQ ID NO: 2094585 - DNA, 25 bp, Homo sapien
acaggttgcctgctgaactgtgtgg

SEQ ID NO: 2094586 - DNA, 25 bp, Homo sapien
taaaacagccataatgtgaggagca

SEQ ID NO: 2094587 - DNA, 25 bp, Homo sapien
tatgctgaacacatgtagtcctggc

SEQ ID NO: 2094588 - DNA, 25 bp, Homo sapien
tagtgcctgggctactatgggccat

SEQ ID NO: 2094589 - DNA, 25 bp, Homo sapien
tgtggtctccagcataaagagggta

SEQ ID NO: 2094590 - DNA, 25 bp, Homo sapien
tgccgaattctattgcaagagactg

SEQ ID NO: 2094591 - DNA, 25 bp, Homo sapien
tggtaatcgagtcacaattgccgaa

SEQ ID NO: 2094592 - DNA, 25 bp, Homo sapien
actagagccctggtaatcgagtcac

SEQ ID NO: 2094593 - DNA, 25 bp, Homo sapien
cacaattgccgaattctattgcaag

SEQ ID NO: 2094594 - DNA, 25 bp, Homo sapien
tgagtccaatgggttgagtgccaac

SEQ ID NO: 2094595 - DNA, 25 bp, Homo sapien
cattagcttatcaatctgtgagtcc

SEQ ID NO: 2094596 - DNA, 25 bp, Homo sapien
gaggttctaccaactctcgcagtgt

SEQ ID NO: 2094597 - DNA, 25 bp, Homo sapien
gagtgccaacagaagtggatccgat

SEQ ID NO: 2094598 - DNA, 25 bp, Homo sapien
ggttgatgttgagtctgcgccgtac

SEQ ID NO: 2094599 - DNA, 25 bp, Homo sapien
ttagttgcttgcaagaggttgatgt

SEQ ID NO: 2094600 - DNA, 25 bp, Homo sapien
aggttgatgttgagtctgcgccgta

SEQ ID NO: 2094601 - DNA, 25 bp, Homo sapien
gttgcttgcaagaggttgatgttga

SEQ ID NO: 2094602 - DNA, 25 bp, Homo sapien
gttataaacagcaaggacgaggcca

SEQ ID NO: 2094603 - DNA, 25 bp, Homo sapien
tataaacagcaaggacgaggccatt

SEQ ID NO: 2094604 - DNA, 25 bp, Homo sapien
tgttataaacagcaaggacgaggcc

SEQ ID NO: 2094605 - DNA, 25 bp, Homo sapien
ctgttataaacagcaaggacgaggc

SEQ ID NO: 2094606 - DNA, 25 bp, Homo sapien
ccccaatccaaaacacttgatgatc

SEQ ID NO: 2094607 - DNA, 25 bp, Homo sapien
tccaaaacacttgatgatctaagct

SEQ ID NO: 2094608 - DNA, 25 bp, Homo sapien
tgatcttatgctagtcccaatgtag

SEQ ID NO: 2094609 - DNA, 25 bp, Homo sapien
agaaagctcgcattcttcttaagag

SEQ ID NO: 2094610 - DNA, 25 bp, Homo sapien
gattctataataaagcctggcatga

SEQ ID NO: 2094611 - DNA, 25 bp, Homo sapien
caataccacacactgcggtgacagg

SEQ ID NO: 2094612 - DNA, 25 bp, Homo sapien
gccctaagaggcaacaccacttgta

SEQ ID NO: 2094613 - DNA, 25 bp, Homo sapien
tcattaatgtcaccgaaagcagtct

SEQ ID NO: 2094614 - DNA, 25 bp, Homo sapien
tgccctgtataaatcttgcaatgag

SEQ ID NO: 2094615 - DNA, 25 bp, Homo sapien
cttggttgaaatacgatgttctcct

SEQ ID NO: 2094616 - DNA, 25 bp, Homo sapien
aatacgatgttctcctagtggtgac

SEQ ID NO: 2094617 - DNA, 25 bp, Homo sapien
caatgagtctcctaacttttcttct

SEQ ID NO: 2094618 - DNA, 25 bp, Homo sapien
ttataaatgatagcttgtattccat

SEQ ID NO: 2094619 - DNA, 25 bp, Homo sapien
aattctcagccggtgtagtttttca

SEQ ID NO: 2094620 - DNA, 25 bp, Homo sapien
ctcagccggtgtagtttttcattca

SEQ ID NO: 2094621 - DNA, 25 bp, Homo sapien
gcttttgagaattctcagccggtgt

SEQ ID NO: 2094622 - DNA, 25 bp, Homo sapien
tgagaattctcagccggtgtagttt

SEQ ID NO: 2094623 - DNA, 25 bp, Homo sapien
gaaatactcagtgggtcatttgagg

SEQ ID NO: 2094624 - DNA, 25 bp, Homo sapien
aaaaggtcgaggtacatctgcttcc

SEQ ID NO: 2094625 - DNA, 25 bp, Homo sapien
ctttagatgtcaagtctggattgtc

SEQ ID NO: 2094626 - DNA, 25 bp, Homo sapien
tatcgataatggctacttccccttc

SEQ ID NO: 2094627 - DNA, 25 bp, Homo sapien
tatacttgttcagagtaccagcagg

SEQ ID NO: 2094628 - DNA, 25 bp, Homo sapien
aaggtctctttcatgctaggctagc

SEQ ID NO: 2094629 - DNA, 25 bp, Homo sapien
gcaaagaaaaagatccccgctgtgg

SEQ ID NO: 2094630 - DNA, 25 bp, Homo sapien
taggctagccacgagtcttgtcaaa

SEQ ID NO: 2094631 - DNA, 25 bp, Homo sapien
aaagtcgcgcttggttagtcttaca

SEQ ID NO: 2094632 - DNA, 25 bp, Homo sapien
tcgacctggaccgttgggaggacat

SEQ ID NO: 2094633 - DNA, 25 bp, Homo sapien
cagtccggtttccttccgcaatgga

SEQ ID NO: 2094634 - DNA, 25 bp, Homo sapien
tagtcttacagagcaacggatgggc

SEQ ID NO: 2094635 - DNA, 25 bp, Homo sapien
gcgcaaagtcgcagcttaatcctcg

SEQ ID NO: 2094636 - DNA, 25 bp, Homo sapien
gagtaggcccagaatctctcaaggg

SEQ ID NO: 2094637 - DNA, 25 bp, Homo sapien
cgctggattaattagggcctcttca

SEQ ID NO: 2094638 - DNA, 25 bp, Homo sapien
gtgagggacacgttacctagcgccg

SEQ ID NO: 2094639 - DNA, 25 bp, Homo sapien
catagagccgttttcatgcttcaag

SEQ ID NO: 2094640 - DNA, 25 bp, Homo sapien
catgtgattagattgccaccccatc

SEQ ID NO: 2094641 - DNA, 25 bp, Homo sapien
tcccgaccccagataatctaggcta

SEQ ID NO: 2094642 - DNA, 25 bp, Homo sapien
tcttcgttctggtgatggtgcatag

SEQ ID NO: 2094643 - DNA, 25 bp, Homo sapien
cgtttctcgggctgagtgactttga

SEQ ID NO: 2094644 - DNA, 25 bp, Homo sapien
tgcagagacctcacatcgtttctcg

SEQ ID NO: 2094645 - DNA, 25 bp, Homo sapien
gacctcacatcgtttctcgggctga

SEQ ID NO: 2094646 - DNA, 25 bp, Homo sapien
cacatcgtttctcgggctgagtgac

SEQ ID NO: 2094647 - DNA, 25 bp, Homo sapien
ccataaattcaacacctggagggtg

SEQ ID NO: 2094648 - DNA, 25 bp, Homo sapien
ttggcacctcacagaacaaattagc

SEQ ID NO: 2094649 - DNA, 25 bp, Homo sapien
tggaatgcgttttagttcttcacct

SEQ ID NO: 2094650 - DNA, 25 bp, Homo sapien
tggagaatgatatggcaatgtgcct

SEQ ID NO: 2094651 - DNA, 25 bp, Homo sapien
catcattctcacaaatgtccccata

SEQ ID NO: 2094652 - DNA, 25 bp, Homo sapien
aaagcagcgtggccctggagacagc

SEQ ID NO: 2094653 - DNA, 25 bp, Homo sapien
ggagacagcccaatacacttgcatt

SEQ ID NO: 2094654 - DNA, 25 bp, Homo sapien
agcccaatacacttgcattccaaca

SEQ ID NO: 2094655 - DNA, 25 bp, Homo sapien
ctggttaaaggacaaaatgcagaca

SEQ ID NO: 2094656 - DNA, 25 bp, Homo sapien
aagtgttgagtggactccatttccc

SEQ ID NO: 2094657 - DNA, 25 bp, Homo sapien
aggacaaaatgcagacaagtgttga

SEQ ID NO: 2094658 - DNA, 25 bp, Homo sapien
ccatttcccacatgatgtaagtggg

SEQ ID NO: 2094659 - DNA, 25 bp, Homo sapien
taggaggaagtaatcattgcactgc

SEQ ID NO: 2094660 - DNA, 25 bp, Homo sapien
gcaccacataggaggaagtaatcat

SEQ ID NO: 2094661 - DNA, 25 bp, Homo sapien
gctctatgatttagcaccacatagg

SEQ ID NO: 2094662 - DNA, 25 bp, Homo sapien
tgtttatggctctatgatttagcac

SEQ ID NO: 2094663 - DNA, 25 bp, Homo sapien
tccaggctgtctaatcagggttggc

SEQ ID NO: 2094664 - DNA, 25 bp, Homo sapien
cagggttggctgcatcgtgacaatg

SEQ ID NO: 2094665 - DNA, 25 bp, Homo sapien
cattttaactccctgcacatgctgt

SEQ ID NO: 2094666 - DNA, 25 bp, Homo sapien
gagaaggaatcacgaggagcaaatc

SEQ ID NO: 2094667 - DNA, 25 bp, Homo sapien
gcaggatgtagagcaacctctggaa

SEQ ID NO: 2094668 - DNA, 25 bp, Homo sapien
caaggaagggcctatgaatttggca

SEQ ID NO: 2094669 - DNA, 25 bp, Homo sapien
ctgtcacgactaatacagatcctta

SEQ ID NO: 2094670 - DNA, 25 bp, Homo sapien
catgtcattgaacaaaccaccaagg

SEQ ID NO: 2094671 - DNA, 25 bp, Homo sapien
tctagtgttccctcacccgaggcat

SEQ ID NO: 2094672 - DNA, 25 bp, Homo sapien
tcacccgaggcattaggaaggagag

SEQ ID NO: 2094673 - DNA, 25 bp, Homo sapien
gaatgatttatcctggtgctctagt

SEQ ID NO: 2094674 - DNA, 25 bp, Homo sapien
gtgtcttcgtaactttggaaactga

SEQ ID NO: 2094675 - DNA, 25 bp, Homo sapien
tctttggacgaaaagcagtggccct

SEQ ID NO: 2094676 - DNA, 25 bp, Homo sapien
tggagtgtgtatctaaggtgtagtt

SEQ ID NO: 2094677 - DNA, 25 bp, Homo sapien
ttggtcccgggatgaagcattcaga

SEQ ID NO: 2094678 - DNA, 25 bp, Homo sapien
aggaaggtgtgttccgcactctaca

SEQ ID NO: 2094679 - DNA, 25 bp, Homo sapien
catctggaatgcattcagctacagg

SEQ ID NO: 2094680 - DNA, 25 bp, Homo sapien
taacaagaagactggtaagcgatgg

SEQ ID NO: 2094681 - DNA, 25 bp, Homo sapien
gatgtctagggctcctacaaattgg

SEQ ID NO: 2094682 - DNA, 25 bp, Homo sapien
cgatggttgctggtaatatagttca

SEQ ID NO: 2094683 - DNA, 25 bp, Homo sapien
ctgtggcagaaagtgtggtctaact

SEQ ID NO: 2094684 - DNA, 25 bp, Homo sapien
tgttggtccatggagtgatgccatc

SEQ ID NO: 2094685 - DNA, 25 bp, Homo sapien
cacactcatattgggccagccctgt

SEQ ID NO: 2094686 - DNA, 25 bp, Homo sapien
ggagcagtttcctcaacatatacac

SEQ ID NO: 2094687 - DNA, 25 bp, Homo sapien
gggaaggagggatgtcatcatgcag

SEQ ID NO: 2094688 - DNA, 25 bp, Homo sapien
gggacaaaccttgtcacctgctgtc

SEQ ID NO: 2094689 - DNA, 25 bp, Homo sapien
tgcatcccaggggacaaaccttgtc

SEQ ID NO: 2094690 - DNA, 25 bp, Homo sapien
gagggatgtcatcatgcagcatgca

SEQ ID NO: 2094691 - DNA, 25 bp, Homo sapien
ctgttctttgggctgctccttccat

SEQ ID NO: 2094692 - DNA, 25 bp, Homo sapien
gatgtcgagtggcaatactctgggc

SEQ ID NO: 2094693 - DNA, 25 bp, Homo sapien
cagaggaggatgtcgagtggcaata

SEQ ID NO: 2094694 - DNA, 25 bp, Homo sapien
gtggcaatactctgggcgcccttac

SEQ ID NO: 2094695 - DNA, 25 bp, Homo sapien
tcgagtggcaatactctgggcgccc

SEQ ID NO: 2094696 - DNA, 25 bp, Homo sapien
tcatgccatttttgggttctggggt

SEQ ID NO: 2094697 - DNA, 25 bp, Homo sapien
catgccatttttgggttctggggtt

SEQ ID NO: 2094698 - DNA, 25 bp, Homo sapien
tccacaggtgtattgagagtcaaag

SEQ ID NO: 2094699 - DNA, 25 bp, Homo sapien
gagcatatctatgtgccaactactg

SEQ ID NO: 2094700 - DNA, 25 bp, Homo sapien
ggtgaggcgtataggcacttctatc

SEQ ID NO: 2094701 - DNA, 25 bp, Homo sapien
taaactctgcttgacatggtgaggc

SEQ ID NO: 2094702 - DNA, 25 bp, Homo sapien
tgtgtgaccaggctttgatagccat

SEQ ID NO: 2094703 - DNA, 25 bp, Homo sapien
gtgtgtctagcttgtgtagctgaac

SEQ ID NO: 2094704 - DNA, 25 bp, Homo sapien
gcttgtgtagctgaactgctgtttt

SEQ ID NO: 2094705 - DNA, 25 bp, Homo sapien
tgaccaggctttgatagccatccca

SEQ ID NO: 2094706 - DNA, 25 bp, Homo sapien
ggcaagagagggtttatctggttta

SEQ ID NO: 2094707 - DNA, 25 bp, Homo sapien
cttggcaagagagggtttatctggt

SEQ ID NO: 2094708 - DNA, 25 bp, Homo sapien
acttggcaagagagggtttatctgg

SEQ ID NO: 2094709 - DNA, 25 bp, Homo sapien
caagagagggtttatctggtttatc

SEQ ID NO: 2094710 - DNA, 25 bp, Homo sapien
attgttcaatatccagagggaggag

SEQ ID NO: 2094711 - DNA, 25 bp, Homo sapien
gctgtcaccaccgtcagcatggtta

SEQ ID NO: 2094712 - DNA, 25 bp, Homo sapien
tctggagtactagaggacaatgaac

SEQ ID NO: 2094713 - DNA, 25 bp, Homo sapien
tgtgagtgaacctaatcctgtgtgg

SEQ ID NO: 2094714 - DNA, 25 bp, Homo sapien
agcatccgctcaggaaccaagctac

SEQ ID NO: 2094715 - DNA, 25 bp, Homo sapien
caccggactcttccagtggggacat

SEQ ID NO: 2094716 - DNA, 25 bp, Homo sapien
tccttccttgcggtggcacggtttc

SEQ ID NO: 2094717 - DNA, 25 bp, Homo sapien
tgcaccgccaacagctgaccgcgcg

SEQ ID NO: 2094718 - DNA, 25 bp, Homo sapien
cggcagcggcggcagaggagggaag

SEQ ID NO: 2094719 - DNA, 25 bp, Homo sapien
cagcggcggcagaggagggaaggcg

SEQ ID NO: 2094720 - DNA, 25 bp, Homo sapien
gcagaggagggaaggcgagccccgg

SEQ ID NO: 2094721 - DNA, 25 bp, Homo sapien
gcggcagaggagggaaggcgagccc

SEQ ID NO: 2094722 - DNA, 25 bp, Homo sapien
aggtagacgacagtccagccaccca

SEQ ID NO: 2094723 - DNA, 25 bp, Homo sapien
ccaccaccagcgacaccggaatcat

SEQ ID NO: 2094724 - DNA, 25 bp, Homo sapien
ggtcaggtagacgacagtccagcca

SEQ ID NO: 2094725 - DNA, 25 bp, Homo sapien
aagtcggtcaggtagacgacagtcc

SEQ ID NO: 2094726 - DNA, 25 bp, Homo sapien
taaagcatccttgctttccgccgtc

SEQ ID NO: 2094727 - DNA, 25 bp, Homo sapien
tcagtccgttgttttccagccagtc

SEQ ID NO: 2094728 - DNA, 25 bp, Homo sapien
tccccaactgtaaaaggcacgattg

SEQ ID NO: 2094729 - DNA, 25 bp, Homo sapien
gtaaaaggcacgattgaaaacagca

SEQ ID NO: 2094730 - DNA, 25 bp, Homo sapien
ttaacaagctgtctgtcgtgatcac

SEQ ID NO: 2094731 - DNA, 25 bp, Homo sapien
gctgtctgtcgtgatcacttaatga

SEQ ID NO: 2094732 - DNA, 25 bp, Homo sapien
tcacttaatgattaacctaaaccaa

SEQ ID NO: 2094733 - DNA, 25 bp, Homo sapien
agaaaactgcaaagtaatggaaata

SEQ ID NO: 2094734 - DNA, 25 bp, Homo sapien
gccaaacaccattccaaaattgaac

SEQ ID NO: 2094735 - DNA, 25 bp, Homo sapien
gagtcagccatcatttgtgccaaag

SEQ ID NO: 2094736 - DNA, 25 bp, Homo sapien
gtctgcatcagcgtttttccaagga

SEQ ID NO: 2094737 - DNA, 25 bp, Homo sapien
cacaacttgtaacacctgttcattg

SEQ ID NO: 2094738 - DNA, 25 bp, Homo sapien
cctgttcattgtgaagcgaggaaga

SEQ ID NO: 2094739 - DNA, 25 bp, Homo sapien
ggtccttctgcgagttgcctactga

SEQ ID NO: 2094740 - DNA, 25 bp, Homo sapien
aagcagaccctttcataaccttggg

SEQ ID NO: 2094741 - DNA, 25 bp, Homo sapien
caatgtttaatgttatgcctcacag

SEQ ID NO: 2094742 - DNA, 25 bp, Homo sapien
tgggcaagctcgttttattcaaatc

SEQ ID NO: 2094743 - DNA, 25 bp, Homo sapien
agaactgccgtgaagaaataggtca

SEQ ID NO: 2094744 - DNA, 25 bp, Homo sapien
gaaataggtcagttgattgacgggt

SEQ ID NO: 2094745 - DNA, 25 bp, Homo sapien
tcatgtacaacaccactaatgagaa

SEQ ID NO: 2094746 - DNA, 25 bp, Homo sapien
tgattgacgggtaaatttataccag

SEQ ID NO: 2094747 - DNA, 25 bp, Homo sapien
gatataagttgcaaatgagtggtga

SEQ ID NO: 2094748 - DNA, 25 bp, Homo sapien
tcccaaagccattaaatcgaacttg

SEQ ID NO: 2094749 - DNA, 25 bp, Homo sapien
caaagccattaaatcgaacttgttc

SEQ ID NO: 2094750 - DNA, 25 bp, Homo sapien
aaaatatccttagctgctggactgg

SEQ ID NO: 2094751 - DNA, 25 bp, Homo sapien
agtgatatactcaagcctctatttc

SEQ ID NO: 2094752 - DNA, 25 bp, Homo sapien
aagggcatctttctttcagtaggtg

SEQ ID NO: 2094753 - DNA, 25 bp, Homo sapien
tcaggttcaggcagatgtcctctcc

SEQ ID NO: 2094754 - DNA, 25 bp, Homo sapien
ttcactgtgataacttgaaaagttt

SEQ ID NO: 2094755 - DNA, 25 bp, Homo sapien
gtatttgcatgactgcctaaggcag

SEQ ID NO: 2094756 - DNA, 25 bp, Homo sapien
aattgtctttagatgctttttctca

SEQ ID NO: 2094757 - DNA, 25 bp, Homo sapien
ttctcacttaagtttaatactcaac

SEQ ID NO: 2094758 - DNA, 25 bp, Homo sapien
gagctcttggatttagcagatctag

SEQ ID NO: 2094759 - DNA, 25 bp, Homo sapien
tgcagagaaaggcgcgagactgagg

SEQ ID NO: 2094760 - DNA, 25 bp, Homo sapien
agagaaaggcgcgagactgaggaaa

SEQ ID NO: 2094761 - DNA, 25 bp, Homo sapien
tgcagagaaaggcgcgagctgcaga

SEQ ID NO: 2094762 - DNA, 25 bp, Homo sapien
gagaaaggcgcgagctgcagagaaa

SEQ ID NO: 2094763 - DNA, 25 bp, Homo sapien
ctgagagttagttaggttagcggca

SEQ ID NO: 2094764 - DNA, 25 bp, Homo sapien
agagttagttaggttagcggcaacg

SEQ ID NO: 2094765 - DNA, 25 bp, Homo sapien
ggctgagagttagttaggttagcgg

SEQ ID NO: 2094766 - DNA, 25 bp, Homo sapien
tagcggcaacgggaagaccgtggga

SEQ ID NO: 2094767 - DNA, 25 bp, Homo sapien
ccatagcccgtgttcgtgaagagcg

SEQ ID NO: 2094768 - DNA, 25 bp, Homo sapien
tcaatggcggatggttgtggccacc

SEQ ID NO: 2094769 - DNA, 25 bp, Homo sapien
tgtggccaccgtagatccaattgcc

SEQ ID NO: 2094770 - DNA, 25 bp, Homo sapien
gtggagctccacaatatctgccggg

SEQ ID NO: 2094771 - DNA, 25 bp, Homo sapien
ggttgtctgagtcgcaatagcccac

SEQ ID NO: 2094772 - DNA, 25 bp, Homo sapien
tcttcaatgctatccgggagggcca

SEQ ID NO: 2094773 - DNA, 25 bp, Homo sapien
tcctccaagtcgttgcctagctggt

SEQ ID NO: 2094774 - DNA, 25 bp, Homo sapien
tctggaagtgctcgtcttcaatgct

SEQ ID NO: 2094775 - DNA, 25 bp, Homo sapien
gctttttgctgcggctctgggttga

SEQ ID NO: 2094776 - DNA, 25 bp, Homo sapien
tgttgatgttgatgccgccgaggcc

SEQ ID NO: 2094777 - DNA, 25 bp, Homo sapien
tttgctgcggctctgggttgatgtt

SEQ ID NO: 2094778 - DNA, 25 bp, Homo sapien
tttttgctgcggctctgggttgatg

SEQ ID NO: 2094779 - DNA, 25 bp, Homo sapien
ctgccgggttggcctcagtgctggt

SEQ ID NO: 2094780 - DNA, 25 bp, Homo sapien
tgccgggttggcctcagtgctggtg

SEQ ID NO: 2094781 - DNA, 25 bp, Homo sapien
ccgggttggcctcagtgctggtggc

SEQ ID NO: 2094782 - DNA, 25 bp, Homo sapien
gggttggcctcagtgctggtggcac

SEQ ID NO: 2094783 - DNA, 25 bp, Homo sapien
tcattgttatcgttaggggaccaca

SEQ ID NO: 2094784 - DNA, 25 bp, Homo sapien
gaaaactcaccctccagcgttttga

SEQ ID NO: 2094785 - DNA, 25 bp, Homo sapien
gggaccacatagtcacggaaaactc

SEQ ID NO: 2094786 - DNA, 25 bp, Homo sapien
tccagcgttttgacctgcatttgct

SEQ ID NO: 2094787 - DNA, 25 bp, Homo sapien
tgagagatcaatgcctggtaacccc

SEQ ID NO: 2094788 - DNA, 25 bp, Homo sapien
tctcatggcggcgtaatcccggaac

SEQ ID NO: 2094789 - DNA, 25 bp, Homo sapien
cgcagccttcgaatgtgcactgaaa

SEQ ID NO: 2094790 - DNA, 25 bp, Homo sapien
ttcgcagccgctataagagcaaggg

SEQ ID NO: 2094791 - DNA, 25 bp, Homo sapien
ctgttgcaaacatcgaaggggcaca

SEQ ID NO: 2094792 - DNA, 25 bp, Homo sapien
tgcgttaatatgtgggttttcaggt

SEQ ID NO: 2094793 - DNA, 25 bp, Homo sapien
atgcgttaatatgtgggttttcagg

SEQ ID NO: 2094794 - DNA, 25 bp, Homo sapien
ttttcaggttggttgactgagcgaa

SEQ ID NO: 2094795 - DNA, 25 bp, Homo sapien
gggttttcaggttggttgactgagc

SEQ ID NO: 2094796 - DNA, 25 bp, Homo sapien
ttcccaagtctgagaggggtcttct

SEQ ID NO: 2094797 - DNA, 25 bp, Homo sapien
aagataattcccaagtctgagaggg

SEQ ID NO: 2094798 - DNA, 25 bp, Homo sapien
taattcccaagtctgagaggggtct

SEQ ID NO: 2094799 - DNA, 25 bp, Homo sapien
cgcagtcctggaagataattcccaa

SEQ ID NO: 2094800 - DNA, 25 bp, Homo sapien
gagcccctgcacctgacactattgg

SEQ ID NO: 2094801 - DNA, 25 bp, Homo sapien
ggcattttagccaaataattatgtg

SEQ ID NO: 2094802 - DNA, 25 bp, Homo sapien
taattatgtgtttcgtggggctgtc

SEQ ID NO: 2094803 - DNA, 25 bp, Homo sapien
tgacactattggcattttagccaaa

SEQ ID NO: 2094804 - DNA, 25 bp, Homo sapien
caacagcatctggtagtattttggg

SEQ ID NO: 2094805 - DNA, 25 bp, Homo sapien
taatacagctaaaatgcaagatgtg

SEQ ID NO: 2094806 - DNA, 25 bp, Homo sapien
caagcactactttaactgaacaggc

SEQ ID NO: 2094807 - DNA, 25 bp, Homo sapien
tcaatactacatgacctaatacagc

SEQ ID NO: 2094808 - DNA, 25 bp, Homo sapien
gagtgcaaggacaaaattatgccag

SEQ ID NO: 2094809 - DNA, 25 bp, Homo sapien
ttcagtgatgagcaccccaactcca

SEQ ID NO: 2094810 - DNA, 25 bp, Homo sapien
ggagaacaagagctaaaatacccaa

SEQ ID NO: 2094811 - DNA, 25 bp, Homo sapien
aaatggcaagagaattactgggagg

SEQ ID NO: 2094812 - DNA, 25 bp, Homo sapien
agagggtaaaaccaaatcagataat

SEQ ID NO: 2094813 - DNA, 25 bp, Homo sapien
ggtaaaaccaaatcagataatgcat

SEQ ID NO: 2094814 - DNA, 25 bp, Homo sapien
agggtaaaaccaaatcagataatgc

SEQ ID NO: 2094815 - DNA, 25 bp, Homo sapien
gaagagggtaaaaccaaatcagata

SEQ ID NO: 2094816 - DNA, 25 bp, Homo sapien
gacaatcctgtagatgggtgacaag

SEQ ID NO: 2094817 - DNA, 25 bp, Homo sapien
gcacattagtaacaggacaatcctg

SEQ ID NO: 2094818 - DNA, 25 bp, Homo sapien
gtgacaaggtctcccacaaaaaggc

SEQ ID NO: 2094819 - DNA, 25 bp, Homo sapien
ggctcataggcgatggtatctaaac

SEQ ID NO: 2094820 - DNA, 25 bp, Homo sapien
ggatccgagaagaaacttgcctcag

SEQ ID NO: 2094821 - DNA, 25 bp, Homo sapien
tgcgcccggctatgatttaatacaa

SEQ ID NO: 2094822 - DNA, 25 bp, Homo sapien
tctaaataagtttggcaggatccga

SEQ ID NO: 2094823 - DNA, 25 bp, Homo sapien
gcttatgcaaagtagaaccggttct

SEQ ID NO: 2094824 - DNA, 25 bp, Homo sapien
gagtcatcatccgttaaaggcaggc

SEQ ID NO: 2094825 - DNA, 25 bp, Homo sapien
tgtagcacatgatccacaacagtga

SEQ ID NO: 2094826 - DNA, 25 bp, Homo sapien
aatgttaataactgccgaagctggc

SEQ ID NO: 2094827 - DNA, 25 bp, Homo sapien
gaatctaatcaacgccatggaccta

SEQ ID NO: 2094828 - DNA, 25 bp, Homo sapien
ttaattgtaagcacaactgcatttg

SEQ ID NO: 2094829 - DNA, 25 bp, Homo sapien
attaattgtaagcacaactgcattt

SEQ ID NO: 2094830 - DNA, 25 bp, Homo sapien
tacaatgaaggataacgaagttacc

SEQ ID NO: 2094831 - DNA, 25 bp, Homo sapien
tggatcattggacactctgtaatag

SEQ ID NO: 2094832 - DNA, 25 bp, Homo sapien
ctttcttaaatgtccacagacccag

SEQ ID NO: 2094833 - DNA, 25 bp, Homo sapien
taccatcaatccatagctttcttaa

SEQ ID NO: 2094834 - DNA, 25 bp, Homo sapien
tccaggtacaaagggctctaagccc

SEQ ID NO: 2094835 - DNA, 25 bp, Homo sapien
aaagggctctaagccctcactcagt

SEQ ID NO: 2094836 - DNA, 25 bp, Homo sapien
cagataagaccagagatctattcca

SEQ ID NO: 2094837 - DNA, 25 bp, Homo sapien
agatctattccaggtacaaagggct

SEQ ID NO: 2094838 - DNA, 25 bp, Homo sapien
gttctatttaaatcactgagtggtg

SEQ ID NO: 2094839 - DNA, 25 bp, Homo sapien
gtatggacagccagcaaccctaaaa

SEQ ID NO: 2094840 - DNA, 25 bp, Homo sapien
actgagtggtgtatggacagccagc

SEQ ID NO: 2094841 - DNA, 25 bp, Homo sapien
ttcaatatgaatgggggaagagtgt

SEQ ID NO: 2094842 - DNA, 25 bp, Homo sapien
gttgacggccagttcaagggctgat

SEQ ID NO: 2094843 - DNA, 25 bp, Homo sapien
gctgatgctgtgaaacctgccttca

SEQ ID NO: 2094844 - DNA, 25 bp, Homo sapien
tgttgacggccagttcaagggctga

SEQ ID NO: 2094845 - DNA, 25 bp, Homo sapien
agcattcagttgaaccatctagtcg

SEQ ID NO: 2094846 - DNA, 25 bp, Homo sapien
cattcagttgaaccatctagtcgtt

SEQ ID NO: 2094847 - DNA, 25 bp, Homo sapien
gttacagcattcagttgaaccatct

SEQ ID NO: 2094848 - DNA, 25 bp, Homo sapien
gttgaaccatctagtcgtttgtatg

SEQ ID NO: 2094849 - DNA, 25 bp, Homo sapien
tataacatatcaatctgaggtgggt

SEQ ID NO: 2094850 - DNA, 25 bp, Homo sapien
tattaagcgagtgtgagtttccaaa

SEQ ID NO: 2094851 - DNA, 25 bp, Homo sapien
cagaggatgtcctacgtataacata

SEQ ID NO: 2094852 - DNA, 25 bp, Homo sapien
ttcaactgctttccgggcaggaaga

SEQ ID NO: 2094853 - DNA, 25 bp, Homo sapien
aaaacgtgggataaaactggtgatg

SEQ ID NO: 2094854 - DNA, 25 bp, Homo sapien
cacaaccactggcagatctatgctt

SEQ ID NO: 2094855 - DNA, 25 bp, Homo sapien
cgtgggataaaactggtgatgctca

SEQ ID NO: 2094856 - DNA, 25 bp, Homo sapien
aaccactggcagatctatgcttaga

SEQ ID NO: 2094857 - DNA, 25 bp, Homo sapien
ggccctctgaattgctatcttagta

SEQ ID NO: 2094858 - DNA, 25 bp, Homo sapien
gaaagaccacaataagatttggccc

SEQ ID NO: 2094859 - DNA, 25 bp, Homo sapien
aaaccagctcgatctttcttgtgca

SEQ ID NO: 2094860 - DNA, 25 bp, Homo sapien
ggtcagaactaacaatctcggatgg

SEQ ID NO: 2094861 - DNA, 25 bp, Homo sapien
tcccagggtcacattggcagccaaa

SEQ ID NO: 2094862 - DNA, 25 bp, Homo sapien
ctccaatcactgaggtaagggtggc

SEQ ID NO: 2094863 - DNA, 25 bp, Homo sapien
ccatccaaagcaaagcagggtactg

SEQ ID NO: 2094864 - DNA, 25 bp, Homo sapien
cagggtactgcattaacaatagcca

SEQ ID NO: 2094865 - DNA, 25 bp, Homo sapien
ccgtggatgtcaaagctagtgctgc

SEQ ID NO: 2094866 - DNA, 25 bp, Homo sapien
caaaagacctcaaagcaggcgtggc

SEQ ID NO: 2094867 - DNA, 25 bp, Homo sapien
tgccggcaattacgataccttcaag

SEQ ID NO: 2094868 - DNA, 25 bp, Homo sapien
tcttgtgatctgtcaggagacccgg

SEQ ID NO: 2094869 - DNA, 25 bp, Homo sapien
caatctagcagtgctaagggaaacc

SEQ ID NO: 2094870 - DNA, 25 bp, Homo sapien
ggaagccttataacattacacaaac

SEQ ID NO: 2094871 - DNA, 25 bp, Homo sapien
ccttgccagtaagagggtcagttac

SEQ ID NO: 2094872 - DNA, 25 bp, Homo sapien
gacatttttggagggcaatctagca

SEQ ID NO: 2094873 - DNA, 25 bp, Homo sapien
caaagaagtttaagctgagtgcgcc

SEQ ID NO: 2094874 - DNA, 25 bp, Homo sapien
gctacctcccattatagatttctgg

SEQ ID NO: 2094875 - DNA, 25 bp, Homo sapien
gaataaagtatgaaagccaaggaac

SEQ ID NO: 2094876 - DNA, 25 bp, Homo sapien
ttctggtaatacataaaggctagga

SEQ ID NO: 2094877 - DNA, 25 bp, Homo sapien
cagagatagatagaagagttaaagc

SEQ ID NO: 2094878 - DNA, 25 bp, Homo sapien
caatgttccatgcttaatcgttata

SEQ ID NO: 2094879 - DNA, 25 bp, Homo sapien
gatatatgttaagggtaatctccag

SEQ ID NO: 2094880 - DNA, 25 bp, Homo sapien
taagcactctattctaatgaaacac

SEQ ID NO: 2094881 - DNA, 25 bp, Homo sapien
tcttgcagctatgcgaggaatctgt

SEQ ID NO: 2094882 - DNA, 25 bp, Homo sapien
tgtttgatggacagccacatgaggt

SEQ ID NO: 2094883 - DNA, 25 bp, Homo sapien
tatctcgggtcctttccattagcac

SEQ ID NO: 2094884 - DNA, 25 bp, Homo sapien
taatgaaggctctatcgtgccctgg

SEQ ID NO: 2094885 - DNA, 25 bp, Homo sapien
cactgggcagagagctaattctact

SEQ ID NO: 2094886 - DNA, 25 bp, Homo sapien
tgaacgaggcactatgagcgtggca

SEQ ID NO: 2094887 - DNA, 25 bp, Homo sapien
gcatatacgtttttacactgggcag

SEQ ID NO: 2094888 - DNA, 25 bp, Homo sapien
cattgggcactgttatgaacgaggc

SEQ ID NO: 2094889 - DNA, 25 bp, Homo sapien
gtcaccagcgggcagcacagctaaa

SEQ ID NO: 2094890 - DNA, 25 bp, Homo sapien
agcgggcagcacagctaaaacctgg

SEQ ID NO: 2094891 - DNA, 25 bp, Homo sapien
taaaacctggatcccacatatttct

SEQ ID NO: 2094892 - DNA, 25 bp, Homo sapien
gcacagctaaaacctggatcccaca

SEQ ID NO: 2094893 - DNA, 25 bp, Homo sapien
gggtggtccctgatgtggccatatt

SEQ ID NO: 2094894 - DNA, 25 bp, Homo sapien
ctattgcttcatagaggtggaggca

SEQ ID NO: 2094895 - DNA, 25 bp, Homo sapien
ggaggcatgggtgtgctagggagaa

SEQ ID NO: 2094896 - DNA, 25 bp, Homo sapien
tgtggccatattcccctctgggctc

SEQ ID NO: 2094897 - DNA, 25 bp, Homo sapien
gttaggttgaatccctcaaggtcca

SEQ ID NO: 2094898 - DNA, 25 bp, Homo sapien
gaagcatagccgtttttcttggaaa

SEQ ID NO: 2094899 - DNA, 25 bp, Homo sapien
caaggtccatctcttatgggtgccc

SEQ ID NO: 2094900 - DNA, 25 bp, Homo sapien
tgcttcaagaatgggactggtgtca

SEQ ID NO: 2094901 - DNA, 25 bp, Homo sapien
tctaccaaggatgccagtggcactg

SEQ ID NO: 2094902 - DNA, 25 bp, Homo sapien
gatggtcccaagctaaacagtgtca

SEQ ID NO: 2094903 - DNA, 25 bp, Homo sapien
tttgttgccatcctcagcacgttcg

SEQ ID NO: 2094904 - DNA, 25 bp, Homo sapien
gaactaatctttccgaccctgtgac

SEQ ID NO: 2094905 - DNA, 25 bp, Homo sapien
tcacatctatggtccacgtcttggg

SEQ ID NO: 2094906 - DNA, 25 bp, Homo sapien
gactacaggcattgggcatgaacat

SEQ ID NO: 2094907 - DNA, 25 bp, Homo sapien
tgtgttccaggtcagcttttcaaag

SEQ ID NO: 2094908 - DNA, 25 bp, Homo sapien
cattatctctacaagcaaggcaggc

SEQ ID NO: 2094909 - DNA, 25 bp, Homo sapien
ccaaagtctctgtgaatagcatgca

SEQ ID NO: 2094910 - DNA, 25 bp, Homo sapien
cctcaagacactccagattctgata

SEQ ID NO: 2094911 - DNA, 25 bp, Homo sapien
gaatagcatgcaaatctgcattcca

SEQ ID NO: 2094912 - DNA, 25 bp, Homo sapien
cagcctgcctgccaaagtctctgtg

SEQ ID NO: 2094913 - DNA, 25 bp, Homo sapien
ctctcagttgtctcttcaggatctg

SEQ ID NO: 2094914 - DNA, 25 bp, Homo sapien
tcaccctctcagttgtctcttcagg

SEQ ID NO: 2094915 - DNA, 25 bp, Homo sapien
ccctctcagttgtctcttcaggatc

SEQ ID NO: 2094916 - DNA, 25 bp, Homo sapien
caccctctcagttgtctcttcagga

SEQ ID NO: 2094917 - DNA, 25 bp, Homo sapien
gacagaatattcagggcaaccagct

SEQ ID NO: 2094918 - DNA, 25 bp, Homo sapien
tgccatactcaggatccgtcttggg

SEQ ID NO: 2094919 - DNA, 25 bp, Homo sapien
catgatgacatataggaacctaggc

SEQ ID NO: 2094920 - DNA, 25 bp, Homo sapien
taacagtccagggtctacaaggcag

SEQ ID NO: 2094921 - DNA, 25 bp, Homo sapien
gagccacattgtcctacacagtgag

SEQ ID NO: 2094922 - DNA, 25 bp, Homo sapien
aagagccacattgtcctacacagtg

SEQ ID NO: 2094923 - DNA, 25 bp, Homo sapien
tgtcctacacagtgagcaagtgtgt

SEQ ID NO: 2094924 - DNA, 25 bp, Homo sapien
cacattgtcctacacagtgagcaag

SEQ ID NO: 2094925 - DNA, 25 bp, Homo sapien
cttctctgtgtcctagattctcaat

SEQ ID NO: 2094926 - DNA, 25 bp, Homo sapien
tctgtgtcctagattctcaattttg

SEQ ID NO: 2094927 - DNA, 25 bp, Homo sapien
tcctagattctcaattttgttagct

SEQ ID NO: 2094928 - DNA, 25 bp, Homo sapien
ttttgttagctattgcaattctcat

SEQ ID NO: 2094929 - DNA, 25 bp, Homo sapien
ctttttctagtacctgcattaattt

SEQ ID NO: 2094930 - DNA, 25 bp, Homo sapien
tttctagtacctgcattaatttttg

SEQ ID NO: 2094931 - DNA, 25 bp, Homo sapien
ttgaattaggaaactgcagactccg

SEQ ID NO: 2094932 - DNA, 25 bp, Homo sapien
ggactgaatagaaagcgcttgggca

SEQ ID NO: 2094933 - DNA, 25 bp, Homo sapien
gctgcagttaaacccattcggatta

SEQ ID NO: 2094934 - DNA, 25 bp, Homo sapien
gactccggagttgcttgtctagcag

SEQ ID NO: 2094935 - DNA, 25 bp, Homo sapien
taggtttaaacagcgcagcaggatt

SEQ ID NO: 2094936 - DNA, 25 bp, Homo sapien
tcctggcggagtcgggaaaatcaaa

SEQ ID NO: 2094937 - DNA, 25 bp, Homo sapien
tgtagtctaagagtactgcctgcct

SEQ ID NO: 2094938 - DNA, 25 bp, Homo sapien
aatcaaatgatgagatccacccctg

SEQ ID NO: 2094939 - DNA, 25 bp, Homo sapien
cggcgtgcgtcaccaatggccgcgc

SEQ ID NO: 2094940 - DNA, 25 bp, Homo sapien
ggaggaagccgggacgcctccagcc

SEQ ID NO: 2094941 - DNA, 25 bp, Homo sapien
cccgaacttggagcgccgggtgtga

SEQ ID NO: 2094942 - DNA, 25 bp, Homo sapien
cctcgctaatggtggaaacgtgggc

SEQ ID NO: 2094943 - DNA, 25 bp, Homo sapien
ctgcggccggctgggagtgtgctgc

SEQ ID NO: 2094944 - DNA, 25 bp, Homo sapien
gctgggagtgtgctgcgcccgggga

SEQ ID NO: 2094945 - DNA, 25 bp, Homo sapien
ggctgggagtgtgctgcgcccgggg

SEQ ID NO: 2094946 - DNA, 25 bp, Homo sapien
cggccggctgggagtgtgctgcgcc

SEQ ID NO: 2094947 - DNA, 25 bp, Homo sapien
gggggagcagccgcgggagactggg

SEQ ID NO: 2094948 - DNA, 25 bp, Homo sapien
actggggggccgcgcggcgtgtcag

SEQ ID NO: 2094949 - DNA, 25 bp, Homo sapien
ctggggggccgcgcggcgtgtcagg

SEQ ID NO: 2094950 - DNA, 25 bp, Homo sapien
gagcagccgcgggagactggggggc

SEQ ID NO: 2094951 - DNA, 25 bp, Homo sapien
agtgaggcgaggccctgtgccatgc

SEQ ID NO: 2094952 - DNA, 25 bp, Homo sapien
cgagcgtgctgtgccgtgctgctgc

SEQ ID NO: 2094953 - DNA, 25 bp, Homo sapien
tttggcgccgagcatgaagtcgagc

SEQ ID NO: 2094954 - DNA, 25 bp, Homo sapien
agcatgaagtcgagcgtgctgtgcc

SEQ ID NO: 2094955 - DNA, 25 bp, Homo sapien
ctttggcgccgagcatgaagtcgag

SEQ ID NO: 2094956 - DNA, 25 bp, Homo sapien
agaattctgcaagcgctgcgcgtcc

SEQ ID NO: 2094957 - DNA, 25 bp, Homo sapien
ctacgcagtcggctgagaattctgc

SEQ ID NO: 2094958 - DNA, 25 bp, Homo sapien
ggatccgtctcctacgcagtcggct

SEQ ID NO: 2094959 - DNA, 25 bp, Homo sapien
aagcgctgcgcgtccgcagaccttt

SEQ ID NO: 2094960 - DNA, 25 bp, Homo sapien
ctaaatctaaatttggccaaggagg

SEQ ID NO: 2094961 - DNA, 25 bp, Homo sapien
ctgagatcaccctccttaaagcata

SEQ ID NO: 2094962 - DNA, 25 bp, Homo sapien
cacgatacatccatggttctcctgg

SEQ ID NO: 2094963 - DNA, 25 bp, Homo sapien
aaaacatcctattgtgaaccagcac

SEQ ID NO: 2094964 - DNA, 25 bp, Homo sapien
ctagaatgttcgccttgccatcaaa

SEQ ID NO: 2094965 - DNA, 25 bp, Homo sapien
agaatgttcgccttgccatcaaagc

SEQ ID NO: 2094966 - DNA, 25 bp, Homo sapien
tagaatgttcgccttgccatcaaag

SEQ ID NO: 2094967 - DNA, 25 bp, Homo sapien
ccccacacacacgtaatagttcttt

SEQ ID NO: 2094968 - DNA, 25 bp, Homo sapien
tagcctcaggctaagtcacaaaatg

SEQ ID NO: 2094969 - DNA, 25 bp, Homo sapien
tattcacatgccaagagtaatgcct

SEQ ID NO: 2094970 - DNA, 25 bp, Homo sapien
ttcacttacaagatgaccacagatg

SEQ ID NO: 2094971 - DNA, 25 bp, Homo sapien
tgcctaaactatctgaacatgggac

SEQ ID NO: 2094972 - DNA, 25 bp, Homo sapien
tggagtcatgcaacacaagtaattg

SEQ ID NO: 2094973 - DNA, 25 bp, Homo sapien
tcacctctgcactgtaaggccagca

SEQ ID NO: 2094974 - DNA, 25 bp, Homo sapien
tgcccacaggcacataagtcttgtt

SEQ ID NO: 2094975 - DNA, 25 bp, Homo sapien
gctcaacctgtactctaagaaaaag

SEQ ID NO: 2094976 - DNA, 25 bp, Homo sapien
caaagtatagccagcacagtaaggc

SEQ ID NO: 2094977 - DNA, 25 bp, Homo sapien
cacagctgctattcaagggtaacca

SEQ ID NO: 2094978 - DNA, 25 bp, Homo sapien
tccaggtatacaaggctagttcaac

SEQ ID NO: 2094979 - DNA, 25 bp, Homo sapien
ccataaggtccaaaaacaaggcaag

SEQ ID NO: 2094980 - DNA, 25 bp, Homo sapien
tagccagtgatgatggtgcgtacct

SEQ ID NO: 2094981 - DNA, 25 bp, Homo sapien
tctctctgatgccttaccaatccgg

SEQ ID NO: 2094982 - DNA, 25 bp, Homo sapien
caaggtgcgtcaactgcttgaggtc

SEQ ID NO: 2094983 - DNA, 25 bp, Homo sapien
cctataactgttaaggaaactgaat

SEQ ID NO: 2094984 - DNA, 25 bp, Homo sapien
caggcttatacccggccccttcttg

SEQ ID NO: 2094985 - DNA, 25 bp, Homo sapien
tccacgggaagatggtgtgcgagct

SEQ ID NO: 2094986 - DNA, 25 bp, Homo sapien
agccagtctgcaactcccccgcaag

SEQ ID NO: 2094987 - DNA, 25 bp, Homo sapien
gcctgctcctttcagggatctgcac

SEQ ID NO: 2094988 - DNA, 25 bp, Homo sapien
cacttgccacctaagtccaagggcc

SEQ ID NO: 2094989 - DNA, 25 bp, Homo sapien
gatctgaaatgagccttctgctgta

SEQ ID NO: 2094990 - DNA, 25 bp, Homo sapien
tttagctctctcatggtcaaggtca

SEQ ID NO: 2094991 - DNA, 25 bp, Homo sapien
tttcagctctctcatggtcaaggag

SEQ ID NO: 2094992 - DNA, 25 bp, Homo sapien
gcggttggaacagaagatttagctc

SEQ ID NO: 2094993 - DNA, 25 bp, Homo sapien
agtgtaaatcagttgccatttaaaa

SEQ ID NO: 2094994 - DNA, 25 bp, Homo sapien
taaaagtgtaaatcagttgccattt

SEQ ID NO: 2094995 - DNA, 25 bp, Homo sapien
ttaaaagtgtaaatcagttgccatt

SEQ ID NO: 2094996 - DNA, 25 bp, Homo sapien
aaagtgtaaatcagttgccatttaa

SEQ ID NO: 2094997 - DNA, 25 bp, Homo sapien
aatatcaaaatgaaacatctctgtg

SEQ ID NO: 2094998 - DNA, 25 bp, Homo sapien
ctgtgaggggaaaaatatcaaaatg

SEQ ID NO: 2094999 - DNA, 25 bp, Homo sapien
aaaatatcaaaatgaaacatctctg

SEQ ID NO: 2095000 - DNA, 25 bp, Homo sapien
tatcaaaatgaaacatctctgtgac

SEQ ID NO: 2095001 - DNA, 25 bp, Homo sapien
atgagtaatataaatgacaagcttt

SEQ ID NO: 2095002 - DNA, 25 bp, Homo sapien
tgagtaatataaatgacaagctttt

SEQ ID NO: 2095003 - DNA, 25 bp, Homo sapien
gatgagtaatataaatgacaagctt

SEQ ID NO: 2095004 - DNA, 25 bp, Homo sapien
ccgttcttgtttgtgtaggttgcta

SEQ ID NO: 2095005 - DNA, 25 bp, Homo sapien
gccaggtgtgcaccgactccgccat

SEQ ID NO: 2095006 - DNA, 25 bp, Homo sapien
aatagccatggtcctgccaggtgtg

SEQ ID NO: 2095007 - DNA, 25 bp, Homo sapien
tgtaggttgctaaatagccatggtc

SEQ ID NO: 2095008 - DNA, 25 bp, Homo sapien
ctgcttgaggctctgttcgggctgc

SEQ ID NO: 2095009 - DNA, 25 bp, Homo sapien
atcaccatcataactctgaaggtcc

SEQ ID NO: 2095010 - DNA, 25 bp, Homo sapien
aggtccagcaacaccaatccatgtg

SEQ ID NO: 2095011 - DNA, 25 bp, Homo sapien
cataactctgaaggtccagcaacac

SEQ ID NO: 2095012 - DNA, 25 bp, Homo sapien
tctgaaggtccagcaacaccaatcc

SEQ ID NO: 2095013 - DNA, 25 bp, Homo sapien
attaaaagaaaaatcaatgggcttg

SEQ ID NO: 2095014 - DNA, 25 bp, Homo sapien
agaaaaatcaatgggcttgtagaat

SEQ ID NO: 2095015 - DNA, 25 bp, Homo sapien
aaagaaaaatcaatgggcttgtaga

SEQ ID NO: 2095016 - DNA, 25 bp, Homo sapien
taaaagaaaaatcaatgggcttgta

SEQ ID NO: 2095017 - DNA, 25 bp, Homo sapien
ttcattctttcctctactttgttca

SEQ ID NO: 2095018 - DNA, 25 bp, Homo sapien
tttcacccgcccagtactgtcctga

SEQ ID NO: 2095019 - DNA, 25 bp, Homo sapien
cgtttcacccgcccagtactgtcct

SEQ ID NO: 2095020 - DNA, 25 bp, Homo sapien
cattctttcctctactttgttcaaa

SEQ ID NO: 2095021 - DNA, 25 bp, Homo sapien
ctttcttgtgggctgatcaaactta

SEQ ID NO: 2095022 - DNA, 25 bp, Homo sapien
taacacttgccaataaggattcctt

SEQ ID NO: 2095023 - DNA, 25 bp, Homo sapien
tcttgtgggctgatcaaacttagca

SEQ ID NO: 2095024 - DNA, 25 bp, Homo sapien
tgagtaattaagtacttaaacatcc

SEQ ID NO: 2095025 - DNA, 25 bp, Homo sapien
aaggtgaatcttcgtcatataccac

SEQ ID NO: 2095026 - DNA, 25 bp, Homo sapien
tcgatggctcctcctcgcactatgg

SEQ ID NO: 2095027 - DNA, 25 bp, Homo sapien
ctcctcctcgcactatgggtggtaa

SEQ ID NO: 2095028 - DNA, 25 bp, Homo sapien
gtcatattcaaccaggcgcccgtcg

SEQ ID NO: 2095029 - DNA, 25 bp, Homo sapien
gcccagacaatccacaggttaatat

SEQ ID NO: 2095030 - DNA, 25 bp, Homo sapien
ccaaatactcatcactaaggaagca

SEQ ID NO: 2095031 - DNA, 25 bp, Homo sapien
cagtagtaattgtcaggaaaacacc

SEQ ID NO: 2095032 - DNA, 25 bp, Homo sapien
atcaccactttgttacgtgatcggg

SEQ ID NO: 2095033 - DNA, 25 bp, Homo sapien
actgcccatgatggcccgggtatat

SEQ ID NO: 2095034 - DNA, 25 bp, Homo sapien
ttcacacaatatgcctccgtctcca

SEQ ID NO: 2095035 - DNA, 25 bp, Homo sapien
atttcacacaatatgcctccgtctc

SEQ ID NO: 2095036 - DNA, 25 bp, Homo sapien
gactatttcacacaatatgcctccg

SEQ ID NO: 2095037 - DNA, 25 bp, Homo sapien
catagtgaccatctttggttttagt

SEQ ID NO: 2095038 - DNA, 25 bp, Homo sapien
tttaagattgtctaagacatcgcca

SEQ ID NO: 2095039 - DNA, 25 bp, Homo sapien
ctttaagattgtctaagacatcgcc

SEQ ID NO: 2095040 - DNA, 25 bp, Homo sapien
gtagaagacagcgtagcgattcctc

SEQ ID NO: 2095041 - DNA, 25 bp, Homo sapien
cattgtagaagacagcgtagcgatt

SEQ ID NO: 2095042 - DNA, 25 bp, Homo sapien
ttgtagaagacagcgtagcgattcc

SEQ ID NO: 2095043 - DNA, 25 bp, Homo sapien
tagaagacagcgtagcgattcctca

SEQ ID NO: 2095044 - DNA, 25 bp, Homo sapien
gtgtaggaatacatactcagacctg

SEQ ID NO: 2095045 - DNA, 25 bp, Homo sapien
tataccggcatcacacactaactca

SEQ ID NO: 2095046 - DNA, 25 bp, Homo sapien
cagatggataacttcttataccggc

SEQ ID NO: 2095047 - DNA, 25 bp, Homo sapien
caagttcctttgacattcctaggtc

SEQ ID NO: 2095048 - DNA, 25 bp, Homo sapien
gacacatctggatctaagcaacatc

SEQ ID NO: 2095049 - DNA, 25 bp, Homo sapien
tatataacagctcccaccatcagag

SEQ ID NO: 2095050 - DNA, 25 bp, Homo sapien
ttttctctaacgcttgggctactgc

SEQ ID NO: 2095051 - DNA, 25 bp, Homo sapien
tacagatcatatatagttaacacag

SEQ ID NO: 2095052 - DNA, 25 bp, Homo sapien
gtggagattggaacagctgtcaaat

SEQ ID NO: 2095053 - DNA, 25 bp, Homo sapien
tggagattggaacagctgtcaaatc

SEQ ID NO: 2095054 - DNA, 25 bp, Homo sapien
tgagaggtcaagaatcagtctgaga

SEQ ID NO: 2095055 - DNA, 25 bp, Homo sapien
cactttcattgagaggtcaagaatc

SEQ ID NO: 2095056 - DNA, 25 bp, Homo sapien
ttcccatcctgtttcaacactttca

SEQ ID NO: 2095057 - DNA, 25 bp, Homo sapien
aatcagtctgagaaactcccatgtg

SEQ ID NO: 2095058 - DNA, 25 bp, Homo sapien
tcagtctgtgtctccatctggtggc

SEQ ID NO: 2095059 - DNA, 25 bp, Homo sapien
tctccatctggtggcagcagctcat

SEQ ID NO: 2095060 - DNA, 25 bp, Homo sapien
tgtctccatctggtggcagcagctc

SEQ ID NO: 2095061 - DNA, 25 bp, Homo sapien
agtctgtgtctccatctggtggcag

SEQ ID NO: 2095062 - DNA, 25 bp, Homo sapien
cccagagcctcacatttttccttga

SEQ ID NO: 2095063 - DNA, 25 bp, Homo sapien
tcaagatcccagagcctcacatttt

SEQ ID NO: 2095064 - DNA, 25 bp, Homo sapien
gctgcttgagatttccttttatgta

SEQ ID NO: 2095065 - DNA, 25 bp, Homo sapien
taatttaagctgcttgagatttcct

SEQ ID NO: 2095066 - DNA, 25 bp, Homo sapien
tgtgacagtgtcaatcaccaaatgt

SEQ ID NO: 2095067 - DNA, 25 bp, Homo sapien
tgaatgaaccccaggtgttacataa

SEQ ID NO: 2095068 - DNA, 25 bp, Homo sapien
cagtgtcaatcaccaaatgtactga

SEQ ID NO: 2095069 - DNA, 25 bp, Homo sapien
gaaccccaggtgttacataatgaga

SEQ ID NO: 2095070 - DNA, 25 bp, Homo sapien
caaagggtagatctggaaaatcctc

SEQ ID NO: 2095071 - DNA, 25 bp, Homo sapien
cccatgttaggtgtggacaggtgac

SEQ ID NO: 2095072 - DNA, 25 bp, Homo sapien
gaggcttcactatgggattaaatcc

SEQ ID NO: 2095073 - DNA, 25 bp, Homo sapien
gaccaaagatgggttgcttctagaa

SEQ ID NO: 2095074 - DNA, 25 bp, Homo sapien
acaggacaatacaggcgccccagct

SEQ ID NO: 2095075 - DNA, 25 bp, Homo sapien
attccacaggacaatacaggcgccc

SEQ ID NO: 2095076 - DNA, 25 bp, Homo sapien
acaatacaggcgccccagctgttct

SEQ ID NO: 2095077 - DNA, 25 bp, Homo sapien
ggacaatacaggcgccccagctgtt

SEQ ID NO: 2095078 - DNA, 25 bp, Homo sapien
ttacttgggtgctttgatctggcaa

SEQ ID NO: 2095079 - DNA, 25 bp, Homo sapien
gcaacagaatgtcacggtcaaagga

SEQ ID NO: 2095080 - DNA, 25 bp, Homo sapien
aacagaatgtcacggtcaaaggata

SEQ ID NO: 2095081 - DNA, 25 bp, Homo sapien
cttgggtgctttgatctggcaacag

SEQ ID NO: 2095082 - DNA, 25 bp, Homo sapien
ttactaagcggaactaacagagaac

SEQ ID NO: 2095083 - DNA, 25 bp, Homo sapien
tgttgcaaattagcatcaagtgtag

SEQ ID NO: 2095084 - DNA, 25 bp, Homo sapien
aatgttaaccgtgcagtccccaaca

SEQ ID NO: 2095085 - DNA, 25 bp, Homo sapien
gtctttagacattttacctgccaca

SEQ ID NO: 2095086 - DNA, 25 bp, Homo sapien
gaaaagcttcatggcttagagcact

SEQ ID NO: 2095087 - DNA, 25 bp, Homo sapien
cacttgtaattcgtttgctggccta

SEQ ID NO: 2095088 - DNA, 25 bp, Homo sapien
gacagggagtcaaggaataaaagca

SEQ ID NO: 2095089 - DNA, 25 bp, Homo sapien
tgctggcctacaaattgaaagatgg

SEQ ID NO: 2095090 - DNA, 25 bp, Homo sapien
tcttccaaacagtgtaaaataccca

SEQ ID NO: 2095091 - DNA, 25 bp, Homo sapien
gctttcttccaaacagtgtaaaata

SEQ ID NO: 2095092 - DNA, 25 bp, Homo sapien
ttagctttcttccaaacagtgtaaa

SEQ ID NO: 2095093 - DNA, 25 bp, Homo sapien
tcagggtttagctttcttccaaaca

SEQ ID NO: 2095094 - DNA, 25 bp, Homo sapien
tgtgctgtctaaccatccttcagct

SEQ ID NO: 2095095 - DNA, 25 bp, Homo sapien
agcagtcttcgctgtgctgtctaac

SEQ ID NO: 2095096 - DNA, 25 bp, Homo sapien
tcttcgctgtgctgtctaaccatcc

SEQ ID NO: 2095097 - DNA, 25 bp, Homo sapien
ttcacaatcaattgcctgactcatt

SEQ ID NO: 2095098 - DNA, 25 bp, Homo sapien
aacgatgttcactcctccaaatatc

SEQ ID NO: 2095099 - DNA, 25 bp, Homo sapien
caaaatctcttgctagcctcaggtc

SEQ ID NO: 2095100 - DNA, 25 bp, Homo sapien
gggactgggctgaaataaaacgaca

SEQ ID NO: 2095101 - DNA, 25 bp, Homo sapien
aatacactgctaagagtgggaccag

SEQ ID NO: 2095102 - DNA, 25 bp, Homo sapien
tgctctatgagatcacaagtcagaa

SEQ ID NO: 2095103 - DNA, 25 bp, Homo sapien
gtgcagccaagaatctgctcagaaa

SEQ ID NO: 2095104 - DNA, 25 bp, Homo sapien
agccaagaatctgctcagaaagttt

SEQ ID NO: 2095105 - DNA, 25 bp, Homo sapien
gcagccaagaatctgctcagaaagt

SEQ ID NO: 2095106 - DNA, 25 bp, Homo sapien
cggtgcagccaagaatctgctcaga

SEQ ID NO: 2095107 - DNA, 25 bp, Homo sapien
tccttaggagttttcaagttgctca

SEQ ID NO: 2095108 - DNA, 25 bp, Homo sapien
ttcaagttgctcatattgccatagg

SEQ ID NO: 2095109 - DNA, 25 bp, Homo sapien
gccataggcctctccataaattctg

SEQ ID NO: 2095110 - DNA, 25 bp, Homo sapien
gctcatattgccataggcctctcca

SEQ ID NO: 2095111 - DNA, 25 bp, Homo sapien
caatccaagtcaatgtaaagctcac

SEQ ID NO: 2095112 - DNA, 25 bp, Homo sapien
gaataacccactgatgtctaacaat

SEQ ID NO: 2095113 - DNA, 25 bp, Homo sapien
gaagaacgttctgtgttgacaccaa

SEQ ID NO: 2095114 - DNA, 25 bp, Homo sapien
tattgattcctacaccttgagagga

SEQ ID NO: 2095115 - DNA, 25 bp, Homo sapien
gctggatcaccattagtcaagtctc

SEQ ID NO: 2095116 - DNA, 25 bp, Homo sapien
caagtacaaagtcatgcccagttat

SEQ ID NO: 2095117 - DNA, 25 bp, Homo sapien
taaaaacacgatatccagacagcag

SEQ ID NO: 2095118 - DNA, 25 bp, Homo sapien
gatttatcagtggatctgctgcccc

SEQ ID NO: 2095119 - DNA, 25 bp, Homo sapien
taatgcggcccaactggcttctgga

SEQ ID NO: 2095120 - DNA, 25 bp, Homo sapien
gatttagtacaaagacacgcggcaa

SEQ ID NO: 2095121 - DNA, 25 bp, Homo sapien
gaagtgcagcgcttagaaaacaaag

SEQ ID NO: 2095122 - DNA, 25 bp, Homo sapien
gaactaggtattcaataatgcggcc

SEQ ID NO: 2095123 - DNA, 25 bp, Homo sapien
ccaagaggattcaaatagctttcca

SEQ ID NO: 2095124 - DNA, 25 bp, Homo sapien
tccaaaagcactgggctatttcttg

SEQ ID NO: 2095125 - DNA, 25 bp, Homo sapien
ccaaaagcactgggctatttcttgc

SEQ ID NO: 2095126 - DNA, 25 bp, Homo sapien
ttccaaaagcactgggctatttctt

SEQ ID NO: 2095127 - DNA, 25 bp, Homo sapien
caaggttggaaatactgactaagtg

SEQ ID NO: 2095128 - DNA, 25 bp, Homo sapien
tttacggtacgcttcaatctcccaa

SEQ ID NO: 2095129 - DNA, 25 bp, Homo sapien
ttttacggtacgcttcaatctccca

SEQ ID NO: 2095130 - DNA, 25 bp, Homo sapien
aaggttggaaatactgactaagtgc

SEQ ID NO: 2095131 - DNA, 25 bp, Homo sapien
gcccagctatgggtaacttcttcca

SEQ ID NO: 2095132 - DNA, 25 bp, Homo sapien
ggacttctccctttatcatcacaga

SEQ ID NO: 2095133 - DNA, 25 bp, Homo sapien
ggactgcacctttgctagtgtcaag

SEQ ID NO: 2095134 - DNA, 25 bp, Homo sapien
tttgaggacccctttcgccaacaca

SEQ ID NO: 2095135 - DNA, 25 bp, Homo sapien
attttccagtctgaccactgtacat

SEQ ID NO: 2095136 - DNA, 25 bp, Homo sapien
ttttccagtctgaccactgtacatc

SEQ ID NO: 2095137 - DNA, 25 bp, Homo sapien
tttccagtctgaccactgtacatct

SEQ ID NO: 2095138 - DNA, 25 bp, Homo sapien
ttccagtctgaccactgtacatctt

SEQ ID NO: 2095139 - DNA, 25 bp, Homo sapien
gcagctcgggctcaggaagtcttta

SEQ ID NO: 2095140 - DNA, 25 bp, Homo sapien
tgcagacatcatgggcagaccctgc

SEQ ID NO: 2095141 - DNA, 25 bp, Homo sapien
ctggcttccgtagtctctggtggga

SEQ ID NO: 2095142 - DNA, 25 bp, Homo sapien
tgcggctgtacagccagctgccaca

SEQ ID NO: 2095143 - DNA, 25 bp, Homo sapien
aacacctattgctttcacggccact

SEQ ID NO: 2095144 - DNA, 25 bp, Homo sapien
aattagactgtgagaaatgctgcct

SEQ ID NO: 2095145 - DNA, 25 bp, Homo sapien
ttaagcagtggttcatgcaacagct

SEQ ID NO: 2095146 - DNA, 25 bp, Homo sapien
gattttcacgtgcactcaagtttca

SEQ ID NO: 2095147 - DNA, 25 bp, Homo sapien
caagagcgaggcgttgacatccaag

SEQ ID NO: 2095148 - DNA, 25 bp, Homo sapien
caaatcatgataagttaggtggcca

SEQ ID NO: 2095149 - DNA, 25 bp, Homo sapien
ggattcaccggacccacttcaagat

SEQ ID NO: 2095150 - DNA, 25 bp, Homo sapien
gaaactgccgtcaggaaatctcccc

SEQ ID NO: 2095151 - DNA, 25 bp, Homo sapien
ctagaaagaggatcgtgcccagaac

SEQ ID NO: 2095152 - DNA, 25 bp, Homo sapien
gacaaacacgaccagggcaattcga

SEQ ID NO: 2095153 - DNA, 25 bp, Homo sapien
actagggtgccaccgacaaacacga

SEQ ID NO: 2095154 - DNA, 25 bp, Homo sapien
agggcaattcgagtgcctctgttgg

SEQ ID NO: 2095155 - DNA, 25 bp, Homo sapien
ttagcttggagacttaagagacctt

SEQ ID NO: 2095156 - DNA, 25 bp, Homo sapien
tggcttcaggcagtactcctgttta

SEQ ID NO: 2095157 - DNA, 25 bp, Homo sapien
ccgcttcgatgcattctggcttcag

SEQ ID NO: 2095158 - DNA, 25 bp, Homo sapien
gcagtactcctgtttagcttggaga

SEQ ID NO: 2095159 - DNA, 25 bp, Homo sapien
ttataacttgacacaggatggaaaa

SEQ ID NO: 2095160 - DNA, 25 bp, Homo sapien
ccaaggtaccataattataacttga

SEQ ID NO: 2095161 - DNA, 25 bp, Homo sapien
taattataacttgacacaggatgga

SEQ ID NO: 2095162 - DNA, 25 bp, Homo sapien
cataattataacttgacacaggatg

SEQ ID NO: 2095163 - DNA, 25 bp, Homo sapien
agcttggcatatcttcgggaattgg

SEQ ID NO: 2095164 - DNA, 25 bp, Homo sapien
caagcgaaccggaagaaattatcac

SEQ ID NO: 2095165 - DNA, 25 bp, Homo sapien
tatgtctcagccaaggataaacccc

SEQ ID NO: 2095166 - DNA, 25 bp, Homo sapien
cacaaggatccacagacagatttac

SEQ ID NO: 2095167 - DNA, 25 bp, Homo sapien
catctgagtctcttgataaatggca

SEQ ID NO: 2095168 - DNA, 25 bp, Homo sapien
gctttttgcaaactaggaacaacag

SEQ ID NO: 2095169 - DNA, 25 bp, Homo sapien
ttaaaagagatactccatctgagtc

SEQ ID NO: 2095170 - DNA, 25 bp, Homo sapien
agcagcagctttttgcaaactagga

SEQ ID NO: 2095171 - DNA, 25 bp, Homo sapien
ggtgtatacgtctttctcaggatgc

SEQ ID NO: 2095172 - DNA, 25 bp, Homo sapien
gggcaggtggaaaagtgtcattgtg

SEQ ID NO: 2095173 - DNA, 25 bp, Homo sapien
aagtgtcattgtgggtgtatacgtc

SEQ ID NO: 2095174 - DNA, 25 bp, Homo sapien
ggatgcacatatcctgtgttattag

SEQ ID NO: 2095175 - DNA, 25 bp, Homo sapien
tgctatagccaccttgcaaagcccc

SEQ ID NO: 2095176 - DNA, 25 bp, Homo sapien
ctgctatagccaccttgcaaagccc

SEQ ID NO: 2095177 - DNA, 25 bp, Homo sapien
gctatagccaccttgcaaagcccca

SEQ ID NO: 2095178 - DNA, 25 bp, Homo sapien
ctatagccaccttgcaaagccccat

SEQ ID NO: 2095179 - DNA, 25 bp, Homo sapien
tggcttcggtgtcccgccttctact

SEQ ID NO: 2095180 - DNA, 25 bp, Homo sapien
ggtgtcccgccttctactgattgat

SEQ ID NO: 2095181 - DNA, 25 bp, Homo sapien
aaggattttggctttctgtatggct

SEQ ID NO: 2095182 - DNA, 25 bp, Homo sapien
ggctttctgtatggcttcggtgtcc

SEQ ID NO: 2095183 - DNA, 25 bp, Homo sapien
ttagattcaagcacgggccagcgga

SEQ ID NO: 2095184 - DNA, 25 bp, Homo sapien
tgctgtattgaccacgaaacgttgc

SEQ ID NO: 2095185 - DNA, 25 bp, Homo sapien
gacacatacaaacggatgaacacag

SEQ ID NO: 2095186 - DNA, 25 bp, Homo sapien
aacgttgcaagtgtctgcagaaggc

SEQ ID NO: 2095187 - DNA, 25 bp, Homo sapien
catgttaacaagagtgatgaaatcg

SEQ ID NO: 2095188 - DNA, 25 bp, Homo sapien
taacaagagtgatgaaatcgtctgc

SEQ ID NO: 2095189 - DNA, 25 bp, Homo sapien
caagagtgatgaaatcgtctgcatc

SEQ ID NO: 2095190 - DNA, 25 bp, Homo sapien
agtgatgaaatcgtctgcatcccag

SEQ ID NO: 2095191 - DNA, 25 bp, Homo sapien
gcttctgtactgttatcaaggtagt

SEQ ID NO: 2095192 - DNA, 25 bp, Homo sapien
tggcttctgtactgttatcaaggta

SEQ ID NO: 2095193 - DNA, 25 bp, Homo sapien
gtcttccctcacggccagggagagt

SEQ ID NO: 2095194 - DNA, 25 bp, Homo sapien
ccagggagagtgttgcttggtccag

SEQ ID NO: 2095195 - DNA, 25 bp, Homo sapien
ccatgaacttgtaaagggcatcccg

SEQ ID NO: 2095196 - DNA, 25 bp, Homo sapien
cttaatttccaatctgagcactgac

SEQ ID NO: 2095197 - DNA, 25 bp, Homo sapien
tctgctctggaactgttagctccta

SEQ ID NO: 2095198 - DNA, 25 bp, Homo sapien
tgagcactgacttcatgtcatgctc

SEQ ID NO: 2095199 - DNA, 25 bp, Homo sapien
tatggatttagtcaccgcctggaca

SEQ ID NO: 2095200 - DNA, 25 bp, Homo sapien
tctggatgccactgttccccgtgat

SEQ ID NO: 2095201 - DNA, 25 bp, Homo sapien
tagccctggctctatactctttcaa

SEQ ID NO: 2095202 - DNA, 25 bp, Homo sapien
tggccaacaccaaatctgagcttct

SEQ ID NO: 2095203 - DNA, 25 bp, Homo sapien
ttttgttgtacatggcctcgctggt

SEQ ID NO: 2095204 - DNA, 25 bp, Homo sapien
gctggttcggttttcatgtggaatc

SEQ ID NO: 2095205 - DNA, 25 bp, Homo sapien
aatgttcattttgttgtacatggcc

SEQ ID NO: 2095206 - DNA, 25 bp, Homo sapien
tgtacatggcctcgctggttcggtt

SEQ ID NO: 2095207 - DNA, 25 bp, Homo sapien
aatctttaaagtactgcgggacgcg

SEQ ID NO: 2095208 - DNA, 25 bp, Homo sapien
gggacgcggaccaccacattctcgg

SEQ ID NO: 2095209 - DNA, 25 bp, Homo sapien
gggtagagtctggtgtcaatgacct

SEQ ID NO: 2095210 - DNA, 25 bp, Homo sapien
tctcagaccctaatatcctaaacaa

SEQ ID NO: 2095211 - DNA, 25 bp, Homo sapien
gggattttccctatgactcttttga

SEQ ID NO: 2095212 - DNA, 25 bp, Homo sapien
caccgggattttccctatgactctt

SEQ ID NO: 2095213 - DNA, 25 bp, Homo sapien
gcagcaagtaaattacaccagacag

SEQ ID NO: 2095214 - DNA, 25 bp, Homo sapien
cattgcagcaagtaaattacaccag

SEQ ID NO: 2095215 - DNA, 25 bp, Homo sapien
aaaaaagatactagctcatgcatgt

SEQ ID NO: 2095216 - DNA, 25 bp, Homo sapien
caaaaaagatactagctcatgcatg

SEQ ID NO: 2095217 - DNA, 25 bp, Homo sapien
acaaaaaagatactagctcatgcat

SEQ ID NO: 2095218 - DNA, 25 bp, Homo sapien
accattctccacaccaaatagttgg

SEQ ID NO: 2095219 - DNA, 25 bp, Homo sapien
ccacaccaaatagttggcaatggtc

SEQ ID NO: 2095220 - DNA, 25 bp, Homo sapien
tgaaagcgcctgctaaggtttggaa

SEQ ID NO: 2095221 - DNA, 25 bp, Homo sapien
ttccagccatctatactgaaagcgc

SEQ ID NO: 2095222 - DNA, 25 bp, Homo sapien
tcttcctggaagtacacatctacaa

SEQ ID NO: 2095223 - DNA, 25 bp, Homo sapien
acatctttccaacaacataagggag

SEQ ID NO: 2095224 - DNA, 25 bp, Homo sapien
ccattgaggcagcaaagttgtggtc

SEQ ID NO: 2095225 - DNA, 25 bp, Homo sapien
aacaacataagggagggcactttca

SEQ ID NO: 2095226 - DNA, 25 bp, Homo sapien
tctgtactttgcataaatgagtcat

SEQ ID NO: 2095227 - DNA, 25 bp, Homo sapien
cacatagacataagaattctgtact

SEQ ID NO: 2095228 - DNA, 25 bp, Homo sapien
ccatcacatagacataagaattctg

SEQ ID NO: 2095229 - DNA, 25 bp, Homo sapien
cttcctcccatcacatagacataag

SEQ ID NO: 2095230 - DNA, 25 bp, Homo sapien
tacctatgggcaactgtgttctgaa

SEQ ID NO: 2095231 - DNA, 25 bp, Homo sapien
gagagagtcctagtataaacgtggg

SEQ ID NO: 2095232 - DNA, 25 bp, Homo sapien
tgtctggcccgggatgtgaatcacc

SEQ ID NO: 2095233 - DNA, 25 bp, Homo sapien
catggctatgtgcatcctggcagca

SEQ ID NO: 2095234 - DNA, 25 bp, Homo sapien
cgaacgccctcaaccaattcctcca

SEQ ID NO: 2095235 - DNA, 25 bp, Homo sapien
ctctagcatgtcaataaaggcccag

SEQ ID NO: 2095236 - DNA, 25 bp, Homo sapien
catgtcaataaaggcccagcgaacg

SEQ ID NO: 2095237 - DNA, 25 bp, Homo sapien
tcaataaaggcccagcgaacgccct

SEQ ID NO: 2095238 - DNA, 25 bp, Homo sapien
tatccagtgatggtttatgacacaa

SEQ ID NO: 2095239 - DNA, 25 bp, Homo sapien
gcattctgccatatccagtgatggt

SEQ ID NO: 2095240 - DNA, 25 bp, Homo sapien
tgacacaattcaccaggcagcaagc

SEQ ID NO: 2095241 - DNA, 25 bp, Homo sapien
cgttttggtgtcttaggggctcttg

SEQ ID NO: 2095242 - DNA, 25 bp, Homo sapien
tcggtcactatggaatgctgaggtt

SEQ ID NO: 2095243 - DNA, 25 bp, Homo sapien
ttcaggaggtcggtcactatggaat

SEQ ID NO: 2095244 - DNA, 25 bp, Homo sapien
gaggttaacacttcttaggaggctc

SEQ ID NO: 2095245 - DNA, 25 bp, Homo sapien
ggaatgctgaggttaacacttctta

SEQ ID NO: 2095246 - DNA, 25 bp, Homo sapien
tatacctagaatattgtgcacagcc

SEQ ID NO: 2095247 - DNA, 25 bp, Homo sapien
tgaccttgggtaagtgtgctcacac

SEQ ID NO: 2095248 - DNA, 25 bp, Homo sapien
ttaaagtacagatgcctagggcctc

SEQ ID NO: 2095249 - DNA, 25 bp, Homo sapien
ctgtgaaaccagacctctagggagg

SEQ ID NO: 2095250 - DNA, 25 bp, Homo sapien
tttttgttcaatagataaatctgga

SEQ ID NO: 2095251 - DNA, 25 bp, Homo sapien
caaaggatgaacaaattggctgatt

SEQ ID NO: 2095252 - DNA, 25 bp, Homo sapien
ttttttgagcatgtccattcataat

SEQ ID NO: 2095253 - DNA, 25 bp, Homo sapien
gataaatctggaagggcattgccaa

SEQ ID NO: 2095254 - DNA, 25 bp, Homo sapien
gacattcctgtacaactgactgagc

SEQ ID NO: 2095255 - DNA, 25 bp, Homo sapien
tattaatggaaatgacattcctgta

SEQ ID NO: 2095256 - DNA, 25 bp, Homo sapien
cattttccactatctgcctgtccgg

SEQ ID NO: 2095257 - DNA, 25 bp, Homo sapien
ggaccagcagccagataacaagggt

SEQ ID NO: 2095258 - DNA, 25 bp, Homo sapien
ctcagaacactgggttaaatacaat

SEQ ID NO: 2095259 - DNA, 25 bp, Homo sapien
tcagaacactgggttaaatacaatt

SEQ ID NO: 2095260 - DNA, 25 bp, Homo sapien
cagaacactgggttaaatacaattt

SEQ ID NO: 2095261 - DNA, 25 bp, Homo sapien
gctttatagcttaacatcagagttg

SEQ ID NO: 2095262 - DNA, 25 bp, Homo sapien
tctgccctggaacaggtctattcca

SEQ ID NO: 2095263 - DNA, 25 bp, Homo sapien
cactgttgtcctcggcttcactctg

SEQ ID NO: 2095264 - DNA, 25 bp, Homo sapien
tccactcagttctaatccttacaaa

SEQ ID NO: 2095265 - DNA, 25 bp, Homo sapien
aagtacactgtcagggctctgacca

SEQ ID NO: 2095266 - DNA, 25 bp, Homo sapien
ttcattaacatgagtatcattcatt

SEQ ID NO: 2095267 - DNA, 25 bp, Homo sapien
tggatagccaacttttgccaaaaca

SEQ ID NO: 2095268 - DNA, 25 bp, Homo sapien
atagccaacttttgccaaaacagct

SEQ ID NO: 2095269 - DNA, 25 bp, Homo sapien
tcattaacatgagtatcattcatta

SEQ ID NO: 2095270 - DNA, 25 bp, Homo sapien
caggagtacacagctgcgactcctg

SEQ ID NO: 2095271 - DNA, 25 bp, Homo sapien
gcacactagcactggaaccagatgt

SEQ ID NO: 2095272 - DNA, 25 bp, Homo sapien
ttggtctgctctgaccagtggaaca

SEQ ID NO: 2095273 - DNA, 25 bp, Homo sapien
ggtcttggtctgctctgaccagtgg

SEQ ID NO: 2095274 - DNA, 25 bp, Homo sapien
gggagttccagccagcacactagca

SEQ ID NO: 2095275 - DNA, 25 bp, Homo sapien
ctgaataaaacaaaccacaacatca

SEQ ID NO: 2095276 - DNA, 25 bp, Homo sapien
taaaacaaaccacaacatcattgtt

SEQ ID NO: 2095277 - DNA, 25 bp, Homo sapien
gaataaaacaaaccacaacatcatt

SEQ ID NO: 2095278 - DNA, 25 bp, Homo sapien
aataaaacaaaccacaacatcattg

SEQ ID NO: 2095279 - DNA, 25 bp, Homo sapien
agtagtcggcttctgaaaacttgat

SEQ ID NO: 2095280 - DNA, 25 bp, Homo sapien
taggacgttgccaaagtagtcggct

SEQ ID NO: 2095281 - DNA, 25 bp, Homo sapien
gaagaaatcagactgtgctaaatac

SEQ ID NO: 2095282 - DNA, 25 bp, Homo sapien
acttgcgagtttgtaggacgttgcc

SEQ ID NO: 2095283 - DNA, 25 bp, Homo sapien
gataaagggtctttatctcctacac

SEQ ID NO: 2095284 - DNA, 25 bp, Homo sapien
tcttaatgcacattagtgcagctaa

SEQ ID NO: 2095285 - DNA, 25 bp, Homo sapien
agaagcaaaacgttatttcagggct

SEQ ID NO: 2095286 - DNA, 25 bp, Homo sapien
tttatctcctacacccacaaagaag

SEQ ID NO: 2095287 - DNA, 25 bp, Homo sapien
gggatgaccacccaattaatttcat

SEQ ID NO: 2095288 - DNA, 25 bp, Homo sapien
cagggatgaccacccaattaatttc

SEQ ID NO: 2095289 - DNA, 25 bp, Homo sapien
ggatgaccacccaattaatttcatt

SEQ ID NO: 2095290 - DNA, 25 bp, Homo sapien
agggatgaccacccaattaatttca

SEQ ID NO: 2095291 - DNA, 25 bp, Homo sapien
tgttcagggcccatgccaaaccagc

SEQ ID NO: 2095292 - DNA, 25 bp, Homo sapien
gggcccatgccaaaccagctgttaa

SEQ ID NO: 2095293 - DNA, 25 bp, Homo sapien
ttcagggcccatgccaaaccagctg

SEQ ID NO: 2095294 - DNA, 25 bp, Homo sapien
cagggcccatgccaaaccagctgtt

SEQ ID NO: 2095295 - DNA, 25 bp, Homo sapien
tggtggatgcactgtagaaggcatt

SEQ ID NO: 2095296 - DNA, 25 bp, Homo sapien
gacagtcgtcggatttgtaaaccac

SEQ ID NO: 2095297 - DNA, 25 bp, Homo sapien
tctggttggtggatgcactgtagaa

SEQ ID NO: 2095298 - DNA, 25 bp, Homo sapien
tgtagaaggcattgacagtcgtcgg

SEQ ID NO: 2095299 - DNA, 25 bp, Homo sapien
caaggagacaaggaacccgtactca

SEQ ID NO: 2095300 - DNA, 25 bp, Homo sapien
ctacaatctgctcagttacctgctg

SEQ ID NO: 2095301 - DNA, 25 bp, Homo sapien
ttctacaatctgctcagttacctgc

SEQ ID NO: 2095302 - DNA, 25 bp, Homo sapien
tctacaatctgctcagttacctgct

SEQ ID NO: 2095303 - DNA, 25 bp, Homo sapien
ctgtaggaacaacggccagtatgga

SEQ ID NO: 2095304 - DNA, 25 bp, Homo sapien
tatggaggacccacggcagactggc

SEQ ID NO: 2095305 - DNA, 25 bp, Homo sapien
cagtatggaggacccacggcagact

SEQ ID NO: 2095306 - DNA, 25 bp, Homo sapien
aacaacggccagtatggaggaccca

SEQ ID NO: 2095307 - DNA, 25 bp, Homo sapien
tcagaccgaagtcgggcagaaactg

SEQ ID NO: 2095308 - DNA, 25 bp, Homo sapien
tttctctctcagaccgaagtcgggc

SEQ ID NO: 2095309 - DNA, 25 bp, Homo sapien
aaaaaatcccgccatctgcttgtct

SEQ ID NO: 2095310 - DNA, 25 bp, Homo sapien
acacgagggcggctctaagaagatg

SEQ ID NO: 2095311 - DNA, 25 bp, Homo sapien
gaacagcatcgttagaagaggcaat

SEQ ID NO: 2095312 - DNA, 25 bp, Homo sapien
tggccaaaaagcttgcagagaacag

SEQ ID NO: 2095313 - DNA, 25 bp, Homo sapien
cataagctaaagacccaaggagatc

SEQ ID NO: 2095314 - DNA, 25 bp, Homo sapien
caaggagatcacaggcttggccaaa

SEQ ID NO: 2095315 - DNA, 25 bp, Homo sapien
tttgtaagtgtagtaacacaatgca

SEQ ID NO: 2095316 - DNA, 25 bp, Homo sapien
cctttctctatagcaaacttttgta

SEQ ID NO: 2095317 - DNA, 25 bp, Homo sapien
catctaccttcaggagcatttcatt

SEQ ID NO: 2095318 - DNA, 25 bp, Homo sapien
caatgcaagacaacttgaactcatc

SEQ ID NO: 2095319 - DNA, 25 bp, Homo sapien
caaaagaaaggcttctggagctctc

SEQ ID NO: 2095320 - DNA, 25 bp, Homo sapien
gaaaggcttctggagctctcctgct

SEQ ID NO: 2095321 - DNA, 25 bp, Homo sapien
gcttctggagctctcctgctggaaa

SEQ ID NO: 2095322 - DNA, 25 bp, Homo sapien
cgaggatattctgttccccaaaaga

SEQ ID NO: 2095323 - DNA, 25 bp, Homo sapien
tcatgtccgacaattactcctatag

SEQ ID NO: 2095324 - DNA, 25 bp, Homo sapien
cgacaattactcctatagcaccata

SEQ ID NO: 2095325 - DNA, 25 bp, Homo sapien
atccatgtgtaaattcatgtccgac

SEQ ID NO: 2095326 - DNA, 25 bp, Homo sapien
tcctatagcaccataactcagagat

SEQ ID NO: 2095327 - DNA, 25 bp, Homo sapien
tgatttgacccaaagtgttcactgg

SEQ ID NO: 2095328 - DNA, 25 bp, Homo sapien
tgacccaaagtgttcactggattat

SEQ ID NO: 2095329 - DNA, 25 bp, Homo sapien
gatttgacccaaagtgttcactgga

SEQ ID NO: 2095330 - DNA, 25 bp, Homo sapien
tttgacccaaagtgttcactggatt

SEQ ID NO: 2095331 - DNA, 25 bp, Homo sapien
aaaaagcagtcataacagcagggaa

SEQ ID NO: 2095332 - DNA, 25 bp, Homo sapien
gataaagacaattgaggaagttctt

SEQ ID NO: 2095333 - DNA, 25 bp, Homo sapien
tcacaggttaattgtaaaaagggca

SEQ ID NO: 2095334 - DNA, 25 bp, Homo sapien
gggaacactcttcctgagatcagct

SEQ ID NO: 2095335 - DNA, 25 bp, Homo sapien
cttccaataatagttgctatactgg

SEQ ID NO: 2095336 - DNA, 25 bp, Homo sapien
gattcagtagaccaccaaggatcca

SEQ ID NO: 2095337 - DNA, 25 bp, Homo sapien
ttctgattcagtagaccaccaagga

SEQ ID NO: 2095338 - DNA, 25 bp, Homo sapien
cagctttcttccaataatagttgct

SEQ ID NO: 2095339 - DNA, 25 bp, Homo sapien
cttgaactctggtctgcctcagtag

SEQ ID NO: 2095340 - DNA, 25 bp, Homo sapien
tgcctcagtagaccacgtggcccta

SEQ ID NO: 2095341 - DNA, 25 bp, Homo sapien
agtagaccacgtggccctaggtttg

SEQ ID NO: 2095342 - DNA, 25 bp, Homo sapien
ctccttgaactctggtctgcctcag

SEQ ID NO: 2095343 - DNA, 25 bp, Homo sapien
cagcaatttccatggaaaattaaaa

SEQ ID NO: 2095344 - DNA, 25 bp, Homo sapien
cttcagcaatttccatggaaaatta

SEQ ID NO: 2095345 - DNA, 25 bp, Homo sapien
agcaatttccatggaaaattaaaag

SEQ ID NO: 2095346 - DNA, 25 bp, Homo sapien
tcagcaatttccatggaaaattaaa

SEQ ID NO: 2095347 - DNA, 25 bp, Homo sapien
ttcccgcaggcctccattatcagca

SEQ ID NO: 2095348 - DNA, 25 bp, Homo sapien
ttatggcttgatttttagaaccacg

SEQ ID NO: 2095349 - DNA, 25 bp, Homo sapien
tatggcttgatttttagaaccacgg

SEQ ID NO: 2095350 - DNA, 25 bp, Homo sapien
ccacggtaaatgtagcagcgcatac

SEQ ID NO: 2095351 - DNA, 25 bp, Homo sapien
tttagaaccacggtaaatgtagcag

SEQ ID NO: 2095352 - DNA, 25 bp, Homo sapien
agagctggttgttggtgaatgtgat

SEQ ID NO: 2095353 - DNA, 25 bp, Homo sapien
gtagaagaggctcctcaagtccctg

SEQ ID NO: 2095354 - DNA, 25 bp, Homo sapien
aagaggctcctcaagtccctgcctt

SEQ ID NO: 2095355 - DNA, 25 bp, Homo sapien
ttgttggtgaatgtgatgcctggta

SEQ ID NO: 2095356 - DNA, 25 bp, Homo sapien
gttgtcacccgccttctgaagccta

SEQ ID NO: 2095357 - DNA, 25 bp, Homo sapien
aggagtctgttgtcacccgccttct

SEQ ID NO: 2095358 - DNA, 25 bp, Homo sapien
cctttacctcggaggagtctgttgt

SEQ ID NO: 2095359 - DNA, 25 bp, Homo sapien
tcctttacctcggaggagtctgttg

SEQ ID NO: 2095360 - DNA, 25 bp, Homo sapien
ttctggtctgtaggaattgcacctc

SEQ ID NO: 2095361 - DNA, 25 bp, Homo sapien
accaatttggacttgttctcgggca

SEQ ID NO: 2095362 - DNA, 25 bp, Homo sapien
aatttggacttgttctcgggcagct

SEQ ID NO: 2095363 - DNA, 25 bp, Homo sapien
ctggtctgtaggaattgcacctcac

SEQ ID NO: 2095364 - DNA, 25 bp, Homo sapien
catcgtggaattgggtggacagtta

SEQ ID NO: 2095365 - DNA, 25 bp, Homo sapien
gtccatgcctctgttcatcgtggaa

SEQ ID NO: 2095366 - DNA, 25 bp, Homo sapien
cagagtcggcaggagtccatgcctc

SEQ ID NO: 2095367 - DNA, 25 bp, Homo sapien
ggaattcttcaaagttactaattgc

SEQ ID NO: 2095368 - DNA, 25 bp, Homo sapien
aactgtggccaacaccctaaaatgg

SEQ ID NO: 2095369 - DNA, 25 bp, Homo sapien
gaacagatgctgtctagatccaagc

SEQ ID NO: 2095370 - DNA, 25 bp, Homo sapien
tcaggatgccataaaccagcgtccc

SEQ ID NO: 2095371 - DNA, 25 bp, Homo sapien
tgaaagtctccaggcctaaagcaat

SEQ ID NO: 2095372 - DNA, 25 bp, Homo sapien
gagattttcctattggcccacttaa

SEQ ID NO: 2095373 - DNA, 25 bp, Homo sapien
tcatgctgacttgaacagggcaatc

SEQ ID NO: 2095374 - DNA, 25 bp, Homo sapien
tctgctacatcagatgcaagctgtg

SEQ ID NO: 2095375 - DNA, 25 bp, Homo sapien
cgttacctagtagcctttctgcgag

SEQ ID NO: 2095376 - DNA, 25 bp, Homo sapien
caagcataatctgtctggcaagcca

SEQ ID NO: 2095377 - DNA, 25 bp, Homo sapien
cagacaacagttcgctggcagaaca

SEQ ID NO: 2095378 - DNA, 25 bp, Homo sapien
tatagcagccctagtctgagatcca

SEQ ID NO: 2095379 - DNA, 25 bp, Homo sapien
tacactttgggcaatggtcatgagc

SEQ ID NO: 2095380 - DNA, 25 bp, Homo sapien
attccttggagttcagacacatatt

SEQ ID NO: 2095381 - DNA, 25 bp, Homo sapien
ttccttggagttcagacacatattt

SEQ ID NO: 2095382 - DNA, 25 bp, Homo sapien
gttcagacacatatttaggtttgtc

SEQ ID NO: 2095383 - DNA, 25 bp, Homo sapien
tggagttcagacacatatttaggtt

SEQ ID NO: 2095384 - DNA, 25 bp, Homo sapien
cgaactttttcaagcgaagcgctgg

SEQ ID NO: 2095385 - DNA, 25 bp, Homo sapien
ggagaattcatatcaggtggcacct

SEQ ID NO: 2095386 - DNA, 25 bp, Homo sapien
gtgacagtcgtttccatgcaggcca

SEQ ID NO: 2095387 - DNA, 25 bp, Homo sapien
ttctcagcacaggataacgacagcg

SEQ ID NO: 2095388 - DNA, 25 bp, Homo sapien
tgagccgcttatccacagtacagta

SEQ ID NO: 2095389 - DNA, 25 bp, Homo sapien
tttcaggaaatcgtcagaggtcacc

SEQ ID NO: 2095390 - DNA, 25 bp, Homo sapien
ttttcccatcaggtcttcagttcca

SEQ ID NO: 2095391 - DNA, 25 bp, Homo sapien
taggtcaatttaccacaccagagga

SEQ ID NO: 2095392 - DNA, 25 bp, Homo sapien
gagcttacatcaatctcttgcttca

SEQ ID NO: 2095393 - DNA, 25 bp, Homo sapien
gtcaccattatcatctgagcttaca

SEQ ID NO: 2095394 - DNA, 25 bp, Homo sapien
tatcatctgagcttacatcaatctc

SEQ ID NO: 2095395 - DNA, 25 bp, Homo sapien
tctgagcttacatcaatctcttgct

SEQ ID NO: 2095396 - DNA, 25 bp, Homo sapien
catgacatgtagatgtagaaactgt

SEQ ID NO: 2095397 - DNA, 25 bp, Homo sapien
tcatgacatgtagatgtagaaactg

SEQ ID NO: 2095398 - DNA, 25 bp, Homo sapien
gacatgtagatgtagaaactgtcaa

SEQ ID NO: 2095399 - DNA, 25 bp, Homo sapien
atgtagatgtagaaactgtcaaaac

SEQ ID NO: 2095400 - DNA, 25 bp, Homo sapien
gcagcaccctctgacatgccaggtt

SEQ ID NO: 2095401 - DNA, 25 bp, Homo sapien
tcggcttctttaagctaagtgccat

SEQ ID NO: 2095402 - DNA, 25 bp, Homo sapien
gcaccctctgacatgccaggttggg

SEQ ID NO: 2095403 - DNA, 25 bp, Homo sapien
atagcactttcaatcggcttcttta

SEQ ID NO: 2095404 - DNA, 25 bp, Homo sapien
acagttaactgttacgccaccccag

SEQ ID NO: 2095405 - DNA, 25 bp, Homo sapien
tattgtggccacagttaactgttac

SEQ ID NO: 2095406 - DNA, 25 bp, Homo sapien
tgtggccacagttaactgttacgcc

SEQ ID NO: 2095407 - DNA, 25 bp, Homo sapien
ggccacagttaactgttacgccacc

SEQ ID NO: 2095408 - DNA, 25 bp, Homo sapien
tgtttgctgatacgttttttgccgt

SEQ ID NO: 2095409 - DNA, 25 bp, Homo sapien
atgctgtggttgtttgttatacaca

SEQ ID NO: 2095410 - DNA, 25 bp, Homo sapien
tgttgtttgctgatacgttttttgc

SEQ ID NO: 2095411 - DNA, 25 bp, Homo sapien
gatgctgtggttgtttgttatacac

SEQ ID NO: 2095412 - DNA, 25 bp, Homo sapien
tgttttaaacatcttaattgccagg

SEQ ID NO: 2095413 - DNA, 25 bp, Homo sapien
ttaaacatcttaattgccaggaaaa

SEQ ID NO: 2095414 - DNA, 25 bp, Homo sapien
tttaaacatcttaattgccaggaaa

SEQ ID NO: 2095415 - DNA, 25 bp, Homo sapien
gttttaaacatcttaattgccagga

SEQ ID NO: 2095416 - DNA, 25 bp, Homo sapien
cagccgtcccataactctgtacttg

SEQ ID NO: 2095417 - DNA, 25 bp, Homo sapien
gaggaagttaaccagccgtcccata

SEQ ID NO: 2095418 - DNA, 25 bp, Homo sapien
gttaaccagccgtcccataactctg

SEQ ID NO: 2095419 - DNA, 25 bp, Homo sapien
gtcccataactctgtacttgcgctc

SEQ ID NO: 2095420 - DNA, 25 bp, Homo sapien
ctcttcaacatccatacccagtgcc

SEQ ID NO: 2095421 - DNA, 25 bp, Homo sapien
gacttgggcttgtgtagacctgact

SEQ ID NO: 2095422 - DNA, 25 bp, Homo sapien
ttttagagcttgtgaggagttctgt

SEQ ID NO: 2095423 - DNA, 25 bp, Homo sapien
gcgctgcatcccctgcaatagaaga

SEQ ID NO: 2095424 - DNA, 25 bp, Homo sapien
ccaggactttgataagtgctgcttc

SEQ ID NO: 2095425 - DNA, 25 bp, Homo sapien
aggactttgataagtgctgcttcta

SEQ ID NO: 2095426 - DNA, 25 bp, Homo sapien
tgctgcttctaatgtcagaaggaaa

SEQ ID NO: 2095427 - DNA, 25 bp, Homo sapien
gtgctgcttctaatgtcagaaggaa

SEQ ID NO: 2095428 - DNA, 25 bp, Homo sapien
tctctatactggctcatattggcct

SEQ ID NO: 2095429 - DNA, 25 bp, Homo sapien
tttttctgagcaacctggtaagtag

SEQ ID NO: 2095430 - DNA, 25 bp, Homo sapien
cccttgggtattcatgaattctcta

SEQ ID NO: 2095431 - DNA, 25 bp, Homo sapien
gagcaacctggtaagtaggaccact

SEQ ID NO: 2095432 - DNA, 25 bp, Homo sapien
taagtaggaatagaatagtccttac

SEQ ID NO: 2095433 - DNA, 25 bp, Homo sapien
cctcataagtaggaatagaatagtc

SEQ ID NO: 2095434 - DNA, 25 bp, Homo sapien
tcaaggtcctcataagtaggaatag

SEQ ID NO: 2095435 - DNA, 25 bp, Homo sapien
caacttcaaggtcctcataagtagg

SEQ ID NO: 2095436 - DNA, 25 bp, Homo sapien
cataaagaacttcaagccgtttaca

SEQ ID NO: 2095437 - DNA, 25 bp, Homo sapien
ttcataaagaacttcaagccgttta

SEQ ID NO: 2095438 - DNA, 25 bp, Homo sapien
gattcataaagaacttcaagccgtt

SEQ ID NO: 2095439 - DNA, 25 bp, Homo sapien
ttgattcataaagaacttcaagccg

SEQ ID NO: 2095440 - DNA, 25 bp, Homo sapien
agtctgacttcacaagtggccttct

SEQ ID NO: 2095441 - DNA, 25 bp, Homo sapien
tcttgagaggttactaagacttgac

SEQ ID NO: 2095442 - DNA, 25 bp, Homo sapien
gaatttctccgaagacagatgcatt

SEQ ID NO: 2095443 - DNA, 25 bp, Homo sapien
tctgtgactgatgacagtctgactt

SEQ ID NO: 2095444 - DNA, 25 bp, Homo sapien
gctggatttcaatctagcaccagaa

SEQ ID NO: 2095445 - DNA, 25 bp, Homo sapien
tagcaccagaacaacttagatcttc

SEQ ID NO: 2095446 - DNA, 25 bp, Homo sapien
cagcactacggacagataaaagtga

SEQ ID NO: 2095447 - DNA, 25 bp, Homo sapien
agataaaagtgagctggatttcaat

SEQ ID NO: 2095448 - DNA, 25 bp, Homo sapien
cagcaactaaggatgtgactccggc

SEQ ID NO: 2095449 - DNA, 25 bp, Homo sapien
tatatgactcaagcacaccccttgg

SEQ ID NO: 2095450 - DNA, 25 bp, Homo sapien
gagatttgtcactatgaacagcaac

SEQ ID NO: 2095451 - DNA, 25 bp, Homo sapien
tggttctttgctaactttacactga

SEQ ID NO: 2095452 - DNA, 25 bp, Homo sapien
aaaaaagagttggacatacagatgt

SEQ ID NO: 2095453 - DNA, 25 bp, Homo sapien
caaggcctaatgaagagtccagtct

SEQ ID NO: 2095454 - DNA, 25 bp, Homo sapien
gatgttcagataagaagtgttgaca

SEQ ID NO: 2095455 - DNA, 25 bp, Homo sapien
agtgttgacaccattccctatgcaa

SEQ ID NO: 2095456 - DNA, 25 bp, Homo sapien
gtagacacttaactcagggaaacca

SEQ ID NO: 2095457 - DNA, 25 bp, Homo sapien
tataatagttgacagcaatgcaggc

SEQ ID NO: 2095458 - DNA, 25 bp, Homo sapien
tagtcctccatgcttgggaaccaac

SEQ ID NO: 2095459 - DNA, 25 bp, Homo sapien
cgtgggtggtagaaacatagctagc

SEQ ID NO: 2095460 - DNA, 25 bp, Homo sapien
gctgtcttgtaagattggattcatc

SEQ ID NO: 2095461 - DNA, 25 bp, Homo sapien
tgaagacaaaagaacttggctgtct

SEQ ID NO: 2095462 - DNA, 25 bp, Homo sapien
agacaaaagaacttggctgtcttgt

SEQ ID NO: 2095463 - DNA, 25 bp, Homo sapien
tggctgtcttgtaagattggattca

SEQ ID NO: 2095464 - DNA, 25 bp, Homo sapien
tgccgggttctaggcctataggctc

SEQ ID NO: 2095465 - DNA, 25 bp, Homo sapien
cgggttctaggcctataggctcctt

SEQ ID NO: 2095466 - DNA, 25 bp, Homo sapien
aaaatgaccacatctgccgggttct

SEQ ID NO: 2095467 - DNA, 25 bp, Homo sapien
cacatctgccgggttctaggcctat

SEQ ID NO: 2095468 - DNA, 25 bp, Homo sapien
taagaatcaacctgctaggacagag

SEQ ID NO: 2095469 - DNA, 25 bp, Homo sapien
caagctttggcaggacaagcccagt

SEQ ID NO: 2095470 - DNA, 25 bp, Homo sapien
cagggaacccataggagcagacaat

SEQ ID NO: 2095471 - DNA, 25 bp, Homo sapien
cacgggtctgccctcatgagagtaa

SEQ ID NO: 2095472 - DNA, 25 bp, Homo sapien
attgaagcattctgtaggtcaacaa

SEQ ID NO: 2095473 - DNA, 25 bp, Homo sapien
tattgaagcattctgtaggtcaaca

SEQ ID NO: 2095474 - DNA, 25 bp, Homo sapien
ttgaagcattctgtaggtcaacaaa

SEQ ID NO: 2095475 - DNA, 25 bp, Homo sapien
aagaactccgtcagtagtccctggc

SEQ ID NO: 2095476 - DNA, 25 bp, Homo sapien
ctccgtcagtagtccctggctgcac

SEQ ID NO: 2095477 - DNA, 25 bp, Homo sapien
aactccgtcagtagtccctggctgc
